United States Patent Application Publication US 2005/0228172 A9 - sequence listing, part 83

SEQ ID NO: 372027 - DNA, 581 bp, Homo sapiens
aaacttagctggataatctgcaaataattawccttgatttttctaatgtaaaatatttgtattaattatagtaatatcactcattatctgcttaccatttgccaggcaatgttgcatgcattttgtacattttgtctcacttaatgctcaatgtgtaggtatgtactattattaaaattatttcacaggcagaggaactaatgcatagggaagttcaatttcttgcccaagaaatgaagtttaagatgctaagttcaacattctgagtccagagcctgtgctccaggcctctatgaggtaatgttcctcaaaagaaagccatccaggatgggtgggtggctcacagctgtaatcccagcagtttgggaggccaacgtgagtgaattgcttgagtgcagaatatcaaaaacagcctaggaaacatagggagaccttgtctttacaaacataaaaatattatccagccgtggtagcatgtgcttgtgttcccagctacttgggaggcagagctgagaggatcatctgagcctagggaggtggaggctgctgtgagccctgttagtgccactgcactccagcct

SEQ ID NO: 372028 - DNA, 581 bp, Homo sapiens
aaacttagctggataatctgcaaataattatccttgatttttctaatgtaaaatatttgtattaattatagtaatatcactcattatctgcttaccatttgccaggcaatgttgcatgcattttgtacattttgtctcacttaatgctcaatgtgtaggtatgtactattattaaaattatttcacaggcagaggaactaatgcatagggaagttcaatttcttgcccaagaaatgaagtttaagatgctaagttcaacattctgagtccagagcctgtgctccaggcctctatgaggtaatgttcctcaaaagaaagccatccaggatgggtgggtggctcacagctgtaatcccagcagtttgggaggccaacgtgrgtgaattgcttgagtgcagaatatcaaaaacagcctaggaaacatagggagaccttgtctttacaaacataaaaatattatccagccgtggtagcatgtgcttgtgttcccagctacttgggaggcagagctgagaggatcatctgagcctagggaggtggaggctgctgtgagccctgttagtgccactgcactccagcct

SEQ ID NO: 372029 - DNA, 507 bp, Homo sapiens
ggatggtgttgtactggtgatgaaataaaagctgcaaggattttttcacataaactctgtgaaaacatttcctcatatgtctgtgcagtcaatgttaagtgctataaatccatctagtgtgcacttwgattttagcatttatcattctagttcatatatttaataatctccttcttccatatgtatacatagtaggaagagatcctgaaggacaggccaaagttcattaaaaaagtattcctagtgcttactaccatgtctattcagtaaataaataaagagataaacatatttcttaaagatttttggtagattttgttaagacctcctcccattaaattttattctatggttcaaatcttttgaaataaatttatgttctattttatctcacacatttgattgttttctgagcattttttcatgcatggccttgaaaagcttcctttctacatttttatctaaaatacttgtaaaaatactgatcctgaaatatgaaaggagatc

SEQ ID NO: 372030 - DNA, 507 bp, Homo sapiens
ggatggtgttgtactggtgatgaaataaaagctgcaaggattttttcacataaactctgtgaaaacatttcctcatatgtctgtgcagtcaatgttaagtgctataaatccatctagtgtgcactttgattttagcatttatcattctagttcatatatttaataatctccttcttccatatgtatacatagtaggaagagatcctgaaggacaggccaaagttcattaaaaaagtattcctagtgcttactaccatgtctattcagtaaataaataaagagataaacatatttcttaaagatttttggtagattttgttaagacctcctcccattaaattttattctatggttcaaatcttttgaaataaatttatgttctattttatctcacacattkgattgttttctgagcattttttcatgcatggccttgaaaagcttcctttctacatttttatctaaaatacttgtaaaaatactgatcctgaaatatgaaaggagatc

SEQ ID NO: 372031 - DNA, 620 bp, Homo sapiens
ttttcatgcatggccttgaaaagcttcctttctacatttttatctaaaatacttgtaaaaatactgatcctgaaatatgaaaggagatccctgtattgcacacctggaaatctctggctggaaatgtactccattagcagtgaaattattcagcggtgaaagatcaggattgtcttcctaagaatgcatttccacttttgtggcttcatccttaggtgaggctgtaagaaacacaaagcggaacaaagagggatgccaatrttcatgatattctttgactcttgcgactcctcaggctgtggcagtgtgggacagccctgctatgcctacatcctcaggctcaggaggaagcatcaagctttgctccctagacgaagctaaaaggatatggaaagaaaagttgacagaggtgccatgctcagaacacaaggttagagtggggtgaaagatacatttgaggcaattctgaaatgcagtggctttttcttagagctgttctcaacggagaatcttacttctgcttcctttacctaaaaaaaaaaaaaaaatcctgcatcctaggatcccaggtttatagaaacagttcctaattgcacccaattcctggataaataacatca

SEQ ID NO: 372032 - DNA, 616 bp, Homo sapiens
tgcagatcttcaaaaggcaataaatgcctgcaggatatttaagactgagctattcagcagtgaggaagggggtagtgatcacactttttaaatatgattacagattactgtgatatgttataaggtttagaatccactgatctagtccaatttctcccttttcctatgaggagaatgaagccaaagaagtgttatgacctgctggaatactggctgcctaagtaactcatgactatcccttaggctttttcagcgtcgttatgtaagacaggagacccgaaagttgtgtgcagaatggatcggagagttaagtcctggagagagggagaccacttaaaaacaacaacagcaacaaccacacaaatgtgatagttacctatgaaatattgcattaaagtagtcagtaccgcgaccagagaaaggggtaaaaatggaatcactttaaacagaccaaggatataattcacaataagagatgrcaaagaggttaacaattcagaggctctcaggtctgattcggggaggaatgtttatgatctgggcaattaatttggaatcaagagaaagatttcagagtgcattttgcaacttctagacttgtctcacacaaataact

SEQ ID NO: 372033 - DNA, 621 bp, Homo sapiens
caatctttgctgttctgcagcctccatcgatgatacccaggtgaacagtatctgtagtggacccccagcgaattgcagcagacctgcagaagaggggactgactgctagaagaaaaacaaaaaacgaaagcaacaataacaacagcatcaacaaaaaagaccctacaaaaatcccatccaaaggtcaacagcttcaaagattaaaggtagataaatccacaaagatgatgaaaaaccagtgcaagaccgctgaaaattccaaaagctggaatgccttttcttctcaaatgatttcagcatttcttcagcaagagcacacaacagggctgaagctgagatggatgaagacagaagtaggtatcagaaactgagtaatgacaaactttgctgagctaaaggattatgttctaacccaatgcaaagaagccaaaaaccatgataaaagattacaggaaatgttaattagaataaccagtttagagaggaatacaaatgacctgttggagctgagaaacacagcatgagagcttcatgatgcaaacacaagtattwatagctgaatcaaccaggcagaagaaagaatatcagagcttgaatactacttttctgaaataaggcagg

SEQ ID NO: 372034 - DNA, 620 bp, Homo sapiens
aagtaactagtgtctccttaggtataccctgaaataagcaaccccactcccttaaccctcctcatatgcacagggtcacatggtgtgtaacaggtggaaaccaaatcagacagaacagtcatctggctcctaacccagtgctctttctatgatctcacagcatctctgaaggaacttccagcatcctgcctctattttacctcagggatttactagcataataaagagagccagatttaaaaggattcccttgttaaagccaccattatttgtcctgagaaagtcatagctggaggtagttcattaggacctctttcttgattgggatcctgagggcagaaaagtgctggaagaactggttcttgacatggtagaacctcagctcttggtggygacattcaggttgtgacagctacatgttgtgctcacttcaaattaaactctgtgctatagattaaacgccatactcaatgaggaaacaggacttaaatcattcaaatgtgaattgtgaataacgagaaataattatttatttatttatgtacattctaaaaacctagagcacagttcagaaaatgattagaagacagcagtctctaagcaagtacatttcatggtgg

SEQ ID NO: 372035 - DNA, 620 bp, Homo sapiens
aagtaactagtgtctccttaggtataccctgaaataagcaaccccactcccttaaccctcctcatatgcacagggtcacatggtgtgtaacaggtggaaaccaaatcagacagaacagtcatctggctcctaacccagtgctctttctatgatctcacagcatctctgaaggaacttccagcatcctgcctctattttacctcagggatttactagcataataaagagagccagatttaaaaggattcccttgttaaagccaccattatttgtcctgagaaagtcatagctggaggtagttcattaggacctctttcttgattgggatcctgagggcagaaaagtgctggaagaactggttcttgacatggtagaacctcagctcttggtggcgacattcaggttgtgacagctacatgttgtgctcacttcaaattaaactctgtgmtatagattaaacgccatactcaatgaggaaacaggacttaaatcattcaaatgtgaattgtgaataacgagaaataattatttatttatttatgtacattctaaaaacctagagcacagttcagaaaatgattagaagacagcagtctctaagcaagtacatttcatggtgg

SEQ ID NO: 372036 - DNA, 477 bp, Homo sapiens
tgaacaaaatggaattttatttttctctcaactaatagtctgagcattctacacataagtgttccaggcttgttacattggagatttggggatccagccttactccattttgtcatggtgtaagatgattcctttagcttatgtcaacttccattcattcaagctggaagaaatgaagcaagggaaagaagaggctatatttcatgacgtttgaatcaacracaagacatagtacccataaatttcactaattccctgttggacaaaacctggtcatatggccaaagctagcttcaagtcaagtgataggaaaaacaaacaaaaactttagctggactgacaggtacccaactgaaagttctgttactgtagaaaaacgggagatggatattggggtgatcaccacagtctctgtcacagtcttggaaagtgcctgacagatttatctctggcaacttgaagtggtagtagactgtt

SEQ ID NO: 372037 - DNA, 625 bp, Homo sapiens
aagttaatcaagactttacattaatatgggcatagaatgaatactacgcttggattttgccattgctgtcctgaataacacctatctaccagtttcttaaagtaatagttttaagatttgacctgcaaatytgtactcctttatcacatagaaagacatcttacaaggaggtagagctatcacagaagctaaagatatcatcacttatatcctggggcattaggatttatacaggccttcatgcatgtgttcctaaatccaaatcagattctctacattccagtttcaggattcaagttggccttcctttttacctagagtgattgcaagaaatttctaacaattaggcaacaatcattgtctagagaaatcactgttacttagcaaacaggacatcttctatcatcaggtctcctttagctcttttgttttataatgaatcagtttgtcacagttacttgtcatatctgaagatacatactatggcccagggagagcaaaagtatatttatatgatgaagtgaatgtgtgacaagacaattaaaaaaaaaccttggaagtataggaaaagagcagaccccagttgattgtaaacatcaaaataaggaattggcggtcaaggcaa

SEQ ID NO: 372038 - DNA, 537 bp, Homo sapiens
gattgtaaacatcaaaataaggaattggcggtcaaggcaaatacctgggcaagatgaattatctactagacagctctgcagaaacaaataacttcaaaacctcataatcgtttacttcttactatactcttgtgtctaaggtagtttgtgatggctaccatgacatccttactctggaacctgggctgaaggagtagcctctttctggaatactctttgtcattatgaaaaagaaaaawatatatattttactaattatgcacaggcacttaaagcttttttgaagtgatatccataatttcaactcacattttactgatcaaagcatgaaggctcccaagttcaacattatctggatatgcaatccactggaaggaggaacaaggcagaggaaccactgactaggaatgaaccatggggacaagggaaatttagaggacttcacaattattagttagagcacttcacaattattctccatgagaattgctacctaatagtatttgagctcacattatatgacagaccttatgctaa

SEQ ID NO: 372039 - DNA, 631 bp, Homo sapiens
ttttctttatccaagccactgttgatgaacacttaggttatatatatatggatatatatatccatatatataaaaaatatatgtataaagtatattttttgtatatatgtatatatatccatatatatagatatatatctcccccacatggaatactacacagccaaaaaaaaagaatgaaatcatatccttccccaaaacacggatgtagctggaggccatcctcctaagtgaaataactcaaacagaaaaccagtaagtgagcatattctcatttataagtgggagctaaccaatggatatgtrtgtacactaaggtggaaacaataaacactggggattccaaaagtggggaaggtgggatgggacaagggttgtaaaaccatccattgggttctgtgttactatttgggtgatgagttcacttgaagaccaaacccaagcattatataatatgtccatgtaacaaacctgcacctatactttctgaatctataataagaagaaagtaaaataaacaaatattacaggatccaaagggagagatagattgcaatacagtgaagtaatgaactccaatatcccacttttaacaaaggacaggtcatccagataaaaaagtaataagaaa

SEQ ID NO: 372040 - DNA, 631 bp, Homo sapiens
ttttctttatccaagccactgttgatgaacacttaggttatatatatatggatatatatatccatatatataaaaaatatatgtataaagtatattttttgtatatatgtatatatatccatatatatagatatatatctcccccacatggaatactacacagccaaaaaaaaagaatgaaatcatatccttccccaaaacacggatgtagctggaggccatcctcctaagtgaaataactcaaacagaaaaccagtaagtgagcatattctcatttataagtgggagctaaccaatggatatgtatgtacactaaggtggaaacaataaacactggggattccaaaagtggggaaggtgggatgggacaagggttgtaaaaccatccattgggttctgtgttactatttgggtgatgagttcacttgaagaccaaacccaagcattatataatatgtccatgtaacaaacctgcacctatactttctgaatctataataagaagaaagtaaaataaacaaatattacaggatccaaagggagagayagattgcaatacagtgaagtaatgaactccaatatcccacttttaacaaaggacaggtcatccagataaaaaagtaataagaaa

SEQ ID NO: 372041 - DNA, 631 bp, Homo sapiens
ttttctttatccaagccactgttgatgaacacttaggttatatatatatggatatatatatccatatatataaaaaatatatgtataaagtatattttttgtatatatgtatatatatccatatatatagatatatatctcccccacatggaatactacacagccaaaaaaaaagaatgaaatcatatccttccccaaaacacggatgtagctggaggccatcctcctaagtgaaataactcaaacagaaaaccagtaagtgagcatattctcatttataagtgggagctaaccaatggatatgtatgtacactaaggtggaaacaataaacactggggattccaaaagtggggaaggtgggatgggacaagggttgtaaaaccatccattgggttctgtgttactatttgggtgatgagttcacttgaagaccaaacccaagcattatataatatgtccatgtaacaaacctgcacctatactttctgaatctataataagaagaaagtaaaataaacaaatattacaggatccaaagggagagatagattgcaatacagtraagtaatgaactccaatatcccacttttaacaaaggacaggtcatccagataaaaaagtaataagaaa

SEQ ID NO: 372042 - DNA, 563 bp, Homo sapiens
ctctctttgttttctgaagttggtagatttctgcccacactctttctgctctgtctctgagttcattcatttatttaaatcactgaatattgaaagctcagtcaggcaccaagactatcaacctgaataagtatcagcataccctacttgtcttttgcygcacttcagaaaggttttgaaccaagaaaccagatcttaagctggtttgaaagactggtaaatttcttcatttgattgcaggaatttaacttttaattgacttggtacattactgaggaggtatgaaaagcaagtaagctcacattgatggttaccgtgtccttaggatttgaaagagtaatctgaactatgaaatagttgtgcaactttgccttattaaggcttcgttctgtgatggaagctacttcaactagctggagagagctagtcagctctgtctggaagtcaaagctgatgaccttctcatttgtgtccacctggaccaaacatctgtgccaacacctggaggaattctacttgggatattacaagggacatagagggattgatttaaattagttgga

SEQ ID NO: 372043 - DNA, 563 bp, Homo sapiens
ctctctttgttttctgaagttggtagatttctgcccacactctttctgctctgtctctgagttcattcatttatttaaatcactgaatattgaaagctcagtcaggcaccaagactatcaacctgaataagtatcagcataccctacttgtcttttgctgcacttcagaaaggttttgaaccaagaaaccagatcttaagctggtttgaaagactggtaamtttcttcatttgattgcaggaatttaacttttaattgacttggtacattactgaggaggtatgaaaagcaagtaagctcacattgatggttaccgtgtccttaggatttgaaagagtaatctgaactatgaaatagttgtgcaactttgccttattaaggcttcgttctgtgatggaagctacttcaactagctggagagagctagtcagctctgtctggaagtcaaagctgatgaccttctcatttgtgtccacctggaccaaacatctgtgccaacacctggaggaattctacttgggatattacaagggacatagagggattgatttaaattagttgga

SEQ ID NO: 372044 - DNA, 530 bp, Homo sapiens
agtagaggtgaattgggctgaagtgacttttgcttggcattacaactaaacctgccacaaagcaatgcaaaggtgtacctagaacaatagtaacttacagttgatgaatgtaggctatgttccaggtatacaatacttcacatattactattattttttagttcttatttcagccttatgagattaggtagtgtagtaatgaagagagttgatgttgggacgtggttgcttgggttaaatcctggcttcaccacttactaatttccccagttgttgcatcctgaatccaaccacagcttttttactgagaccacatttcctatgagcttctcccagctcattagtgagggttgcaggaattccactgcaggtgcattcctgcaagaggcgccactcctccgatgggtartgctggctggagagcatgtgttgcctggcctaatttttcttataactgtgctgcagtatgaacctcttcctgcctcagctacagtaatggaagacaaactggcccttgtgctttttttttt

SEQ ID NO: 372045 - DNA, 598 bp, Homo sapiens
acaaattcaagaaatctagtttgacaattaatacaaaaaaaaaaccttccagtcttgtaaccaagaaagttattttagtaatatttagtagcagatcaaaaaataaaaaaagaatcaaaggagaaaatactaaaagaataaaaggatcaaccaacaaaagaataaattatcacactcaggaccttgtttacacctatgtgcacaaaacatggcctcgaattataggcaattgatacaaattaaagaaaaaatggacaaatctacaattatgtttattttaacgtaaaagattagaacagaagtaatacaactgaacaaagcaacacacatacacacattcttcctctcacaaatctcatagaaatgtttcagtgattggaaggtttttcccaatcttttgccatatagtaattaaattagaaaccaatgtaaaaaagamgtaaaacagaacagaaaaaaaaatgtgcacttcaaaatcacagagaaaaaaaaacaagaatgagtaaatataaatgagttcagtgtttgcaaattagaaaaaaaaaagagtaaaggaatggagtaaagaatagaagtttattgaaaattcacagtccac

SEQ ID NO: 372046 - DNA, 539 bp, Homo sapiens
tacttgttacacatacattcaaaattatcttaagttcattaaaattgtgagactaayaactaaacagtgtgcctatgtgcatgtgtttgtaatgcttaatcgaggctatacattccaggacgagatgaattgtgttttattcactaccacatcctcattccatataaaagtgcctggcatctaggagagtgataagtatttattgaatattgtagttgcatatatgatgtcaactgagtcagaagttaaccctcagagaatttttcagagtaaaacagaactggattatgatcctggttctggaacactatggctgaaatctgggaaggtttattgtctctcagctactattttctatgacacaaaatgaaaatgacagaagctacttttcaaggatcttacaggaaagatccatctattaactgttaaattattgtgcatttaatagttgatgaccatctatcaactattaaattattgtgtatttgttctgcacccacccttctctactctgttctgtgatactaaggctaggacca

SEQ ID NO: 372047 - DNA, 539 bp, Homo sapiens
tacttgttacacatacattcaaaattatcttaagttcattaaaattgtgagactaataactaaacagtgtgcctatgtgcatgtgtttgtaatgcttaatcgaggctatacattccaggacgagatgaattgtgwtttattcactaccacatcctcattccatataaaagtgcctggcatctaggagagtgataagtatttattgaatattgtagttgcatatatgatgtcaactgagtcagaagttaaccctcagagaatttttcagagtaaaacagaactggattatgatcctggttctggaacactatggctgaaatctgggaaggtttattgtctctcagctactattttctatgacacaaaatgaaaatgacagaagctacttttcaaggatcttacaggaaagatccatctattaactgttaaattattgtgcatttaatagttgatgaccatctatcaactattaaattattgtgtatttgttctgcacccacccttctctactctgttctgtgatactaaggctaggacca

SEQ ID NO: 372048 - DNA, 539 bp, Homo sapiens
tacttgttacacatacattcaaaattatcttaagttcattaaaattgtgagactaataactaaacagtgtgcctatgtgcatgtgtttgtaatgcttaatcgaggctatacattccaggacgagatgaattgtgttttattcactaccacatcctcattccatataaaagtgcctggcatctaggagagtgataagtatttattgaatattgtagttgcatatatgatgtcaactgagtcagaagttaaccctcagagaatttttcagagtaaaacagaactggattatgatcctggttctggaacactatggctgaaatctgggaaggtttattgtctctcagctactattttctatgacacaaaatgaaaatgacagaagctacttttcaaggatcttacaggaaagatccatctattaactgttaaattattgtgyatttaatagttgatgaccatctatcaactattaaattattgtgtatttgttctgcacccacccttctctactctgttctgtgatactaaggctaggacca

SEQ ID NO: 372049 - DNA, 546 bp, Homo sapiens
acaaaaaggccttgcacagagtcttggctagatgtttcatgccacagatggaagcactggaacccagagaaggaagcttaagacactcacrgaggcattaagttcccatgagagtgctgtaatacccacctgggccatctggttttggtattaaactgggcaagcttggagtctacagaatatagctttacttacataatgaagtgcaagcggcccttgttctatacttcttttactgttttaagaatgttttattcttgtcaatacaaattaatatatgttcattctataaaatcaagaatgaaggcctgtatagaaacaaaggcaaaagctcccttttacagcttattctgcaaaatcaatttcccaatccaaaggcaagtgctctttattatactgtgaactttccccaatctgcgttatgtatttacaaacacactcacatattttacaaacacaaatgctcacacatgtggacattccatacatgtgatgttgatatctgcatgggctgaattgtaacccctgaaattcgtatgttgaagt

SEQ ID NO: 372050 - DNA, 544 bp, Homo sapiens
tccccattgtgcatggcatcgccaaaaccagaaccgtcctcccttcatctctccctctttcccacccacaaccacagtcccctaaacctgtcttctgtatttcctacatttctttcttctgtttttcacctcccctgatttaaataaagcccaacctctaatagttcactggccttacccagtactctcttcatgtttccagtagtactcaaacttgtgtaagcatgagaggtacyaagagggctctttaagacacagatctctggccctcaccccagagcttctgattcagtaggctggggtgggacccaggaatatgcatctctagcaagttcccagtggaggctgtggctgtgagtctgagaatttctgtccttcattaagactgccaagatgatcacttctcctctgcatatataaactctccatggctcctcagtgtctaaggcgtacggacacccagcattttgtagcctttagtccacgtgagcccagggtggagtaatagaagatctgctatggatcagagaaacaccactcacac

SEQ ID NO: 372051 - DNA, 563 bp, Homo sapiens
tgcactgcaaagcaagactcagtctcaaaaaaaaaagaaaaaaaaggagtgaagtactgatccatgcracaacacagatacatcttgaaaaattatgctaagtgaaagaatccagttggaaaagaccacatattatatgctttcatttatataaatgaccagaatcggtcaatatgttgagtggttgccaggggttagaggcagggggaaatgaaaagtgattgctaatgggtatgggatagcttttgggagtgacgaaaatcttctaacattaaataatggtgatggttgcacaactctgaatatactaaaacccactaaattatacactttggaaggataaattttatagaatgtaaattacatttcaataagcctgttatttgaaaaattaagcgtgctatctgcttcctgctaggaccctgactgacaaaggttgaaataatacgtatcccagcctattttattttaaaatctggtttcacccacactggtcagtcctgaacccaacaccatacatcatgaatgtcatgaaagtaaaaaaggttatctaaacggcaaaa

SEQ ID NO: 372052 - DNA, 515 bp, Homo sapiens
gaggatccgtaggactcagaatttactagtactcatggctaagcttgattatggtgaaataacacaaagcaaaatcagcaaaggaaaagtcagagggggcaatgtccagaagaaaccagatgcaagcttccaggagccttttcccagtggagtctcatgggatgcacctaattcctgcagcaatgaattgtgaaacacgtgggaaatgtgtcttccagggcagctcactaaggactsaatgcccaaggcttttattagtggctggtcttgcaggcagttttcttgacacacaccaaactccagattcccagaaggaaagcaggagctcagcatagaccacacagtttgtaccaacagtttacacacagtgagccactctcatcagttctgggatggtgagaaccctctctgaaacccaggttttccatcttccctccatgaaggctgtgtttaggatagcagtctcaggcctgctatgctaaatctcctcttcacatgagaaagtactcaattat

SEQ ID NO: 372053 - DNA, 515 bp, Homo sapiens
gaggatccgtaggactcagaatttactagtactcatggctaagcttgattatggtgaaataacacaaagcaaaatcagcaaaggaaaagtcagagggggcaatgtccagaagaaaccagatgcaagcttccaggagccttttcccagtggagtctcatgggatgcacctaattcctgcagcaatgaattgtgaaacacgtgggaaatgtgtcttccagggcagctcactaaggactgaatgcccaaggcttttattagtggctggtcttgcaggcagttttcttgacacacaccaaactccagattcccagaaggaaagcaggagctcagcatagaccacacagtttgtacmaacagtttacacacagtgagccactctcatcagttctgggatggtgagaaccctctctgaaacccaggttttccatcttccctccatgaaggctgtgtttaggatagcagtctcaggcctgctatgctaaatctcctcttcacatgagaaagtactcaattat

SEQ ID NO: 372054 - DNA, 520 bp, Homo sapiens
ccagaattttagttgaatttttcctttgtggtttcctcttatctcactcccaaaccagtattcatttatttttgttttcttttataattttaaaaatttgggttgcaattgcatctctagcagtttttttcttagtatctttctttctatggagtcttttaagtccccagtttaaaactatgttcaacattgtcagctggggwttctcatctcacaaggatgctcctgatctggtccttgagtcaagatgtgtttttcccagttcttgacttgggctgcctctgcttatttctgttcctttggaagagcagaacagtgcagccacagtcttgaaccttgacacaatgtttatctgcctccttttagagggcaagttcacccccataaagtgatcaggatcacctattatcgtgctcagagcttgagtccctcttattcttggcccctgcagggtctgaacactgagctgcacaggtgtgctcctggcccagcgtccagtaggtttgcatagcaagtggtg

SEQ ID NO: 372055 - DNA, 362 bp, Homo sapiens
caatattatcccctatattgctctataattatgatgaattaaattgtagaaatatgtaagcaaatttagctaaagagataaaacaaacaatgcacacgctatagatgtatacagtttttcaactttctgaataagcattcccagaaaaacgaaactgcttaatgattcaatcaagtttaatcctaacacttaccyatgtgccactttggatgtaaacaaaaaatatcaatttcagatataattatatatagctcagaagtatatccttctggtttgagttgaatacagcactgagaaatcacacaaaggactaaactgttacaggtatacaattctatttttgtagatgaataattggtcat

SEQ ID NO: 372056 - DNA, 647 bp, Homo sapiens
ctgtgcaattgccctactctggagagatagttgggggtgatgaggcggtcatgtgctgccaggtatataaatggaaagaaagggttctttaygagtagactcaacttccaggtaaaagagagctccggggataggtcagggcttctcatcactgtccctgcctcagcgtcaggtgctgggacacacaaaagagcagaggctgttaaattagccagacctgagctgaaactcagtctactgcttgtgagagctttaactctggcaagttacttcgcctcactgagccttagtttccttgctggcaaaatgggaatatttacccacagaaccaatgaaaggaataagggggaacaggggtttatcggattttatattgttcctggcacttactggctgctcagtaaatcttacttcttccttcttcttcactgattttacagacagctacttgcaaactttggttatttccctatgactcagccctgtgacaaatgcacgctgaagatatcctcagaagaccagacctaggctagttcctccgctcatcactaaggatttactaattccttattataaatttacttctgtatgcttttccattgagaaaatccagaaaacaatccttcccttcaaggaacttacaaact

SEQ ID NO: 372057 - DNA, 647 bp, Homo sapiens
ctgtgcaattgccctactctggagagatagttgggggtgatgaggcggtcatgtgctgccaggtatataaatggaaagaaagggttctttatgagtagactcaacttccaggtaaaagagagcyccggggataggtcagggcttctcatcactgtccctgcctcagcgtcaggtgctgggacacacaaaagagcagaggctgttaaattagccagacctgagctgaaactcagtctactgcttgtgagagctttaactctggcaagttacttcgcctcactgagccttagtttccttgctggcaaaatgggaatatttacccacagaaccaatgaaaggaataagggggaacaggggtttatcggattttatattgttcctggcacttactggctgctcagtaaatcttacttcttccttcttcttcactgattttacagacagctacttgcaaactttggttatttccctatgactcagccctgtgacaaatgcacgctgaagatatcctcagaagaccagacctaggctagttcctccgctcatcactaaggatttactaattccttattataaatttacttctgtatgcttttccattgagaaaatccagaaaacaatccttcccttcaaggaacttacaaact

SEQ ID NO: 372058 - DNA, 647 bp, Homo sapiens
ctgtgcaattgccctactctggagagatagttgggggtgatgaggcggtcatgtgctgccaggtatataaatggaaagaaagggttctttatgagtagactcaacttccaggtaaaagagagctccggggataggtcagggcttctcatcactgtccctgcctcagcgtcaggtgctgggacacacaaaagagcagaggctgttaaattagccagacctgagctgaaactcagtctactgcttgtgagagctttaactctggcaagttacttcgcctcactgagccttagtttccttgctggcaaaatgggaatatttacccacagaaccaatgaaaggaataagggggaacakgggtttatcggattttatattgttcctggcacttactggctgctcagtaaatcttacttcttccttcttcttcactgattttacagacagctacttgcaaactttggttatttccctatgactcagccctgtgacaaatgcacgctgaagatatcctcagaagaccagacctaggctagttcctccgctcatcactaaggatttactaattccttattataaatttacttctgtatgcttttccattgagaaaatccagaaaacaatccttcccttcaaggaacttacaaact

SEQ ID NO: 372059 - DNA, 605 bp, Homo sapiens
catcttagcctcccaatgtgctgggattataggcatgagccactgcgcccaccctcacagaaagaataggtgatgcaagcaagtaaacaggtaattacaatgatggaagatgtatgctgtggaacaggagtacattaagaactcaacccaggctttggaggtccagaaaggggttcggaaatactttacgtgwgtgagacttgggctaagcttgggttggttgcaggaaagagaaaatggaagagatggtgttctaaaaatggaaacaatatgctggatagcccagcagaaagaaagagtatttgcatctcaaaaactgaaataatttcgttatctcaatagtggagtaaaaaggtgtggacgttgaaagatgaagtaaagggaaaagaagggaccagagcataaatcaccgttctttcacatgtgaaggtagacatgcattaaaagatgcttttttacaaaaatgggtccgtgccattcataaggttttgtgatctacatgttatcacttaatgttaacgtctttttctttcaatgaatacacttctaaaatagcacttttaaaaataaacagtatttattggttccatgttactttatttatt

SEQ ID NO: 372060 - DNA, 605 bp, Homo sapiens
catcttagcctcccaatgtgctgggattataggcatgagccactgcgcccaccctcacagaaagaataggtgatgcaagcaagtaaacaggtaattacaatgatggaagatgtatgctgtggaacaggagtacattaagaactcaacccaggctttggaggtccagaaaggggttcggaaatactttacgtgtgtgagacttgggctaagcttgggttggttgcaggaaagagaaaatggaagagatggtgttctaaaaatggaaacaatatgctggatagcccagcagaaagaaagagtatttgcatctcaaaaactgaaataatttcgttatctcaatagtggagtraaaaggtgtggacgttgaaagatgaagtaaagggaaaagaagggaccagagcataaatcaccgttctttcacatgtgaaggtagacatgcattaaaagatgcttttttacaaaaatgggtccgtgccattcataaggttttgtgatctacatgttatcacttaatgttaacgtctttttctttcaatgaatacacttctaaaatagcacttttaaaaataaacagtatttattggttccatgttactttatttatt

SEQ ID NO: 372061 - DNA, 635 bp, Homo sapiens
atatttctggaaatagatttggaaaaatgtacctataagcttaagaatattcataccttagtgattcctcttctattactayatatccagaaaaaaatctgaaacacaaagtcttctcttaataaaaatactcatgtacaaataatttataataaaggaaaattgggtccagtctaaatgaccagtacaaggtaatggtgtagtaaattagggtctatccatatgatggaacagtatgtagttaactaaaaaaattttttttcacaatttttaatgacatggaaaatgtctttgatgttctattaagtgaaaagtgtcattaagttacatgttaaaatttaatcttgaaaattgcataccccataaaaatagaacaaaatacttcaatattgtattattattattttcttctttaaactttttgtagtttccaagttttccaaattgagcatctgctacttttaaaatcaggggaaaaaaatccatagaaataaaaaattaatatgaaaagacttcttgtattttgagatctggagttgccagaatacgcagaggaaggaaatgttttggtggatttactgttgtgacaagaaagattaattagcaatccctttctaaagctctttgctgaaaat

SEQ ID NO: 372062 - DNA, 511 bp, Homo sapiens
ctttaaaaaacaaataaactcagcaaagcagtttaagtaataaaatatagaatgagtacagtgaaattggcactcatccattaatgaaaatatatataattggtataatatttctggaaatagatttggaaaaatgtacctataagcttaagaatattcataccttagtgattcctcttctattactatatatccagaaaaaaatctgaaacacaaagtcttctcttaataaaaatactcatgtacaaataatttataataaaggaaaattgggtccagtctaaatgaccagtacaaggtaatggtgtagtaaattagggtctatccatatgatggaacagtatgtagttaactaaaaaaattttttttcacaatttttaatgacatggaaaatgtctttgatgttctattaagtgaaaartgtcattaagttacatgttaaaatttaatcttgaaaattgcataccccataaaaatagaacaaaatacttcaatattgtattattattat

SEQ ID NO: 372063 - DNA, 538 bp, Homo sapiens
gaggatgtgctggatcccaggcaaaagtggcatgaggggattatgaggcgtatttgagttggttagagcaaggtggtagcatgaccaaattcagaacttcaatcttctgttcattcatccacagacgaaaaagcagttaactatcacaatttgctggatgaaggaagctatacaatcccatccaatcatcccacttgtacacagtktgggtcagagggtcatgtcattcagaacaaggagcagatggctcagtccaaacactacaatgcgtaacatgcttggagagcatgtcagagcccatagcactattcagtccctttccctctcccaaatgtggttcaccattggcccgccattgcctcgcactgtgtcagagacatgtcccatctgcatctttgctcaagctctctctcttgcccctttggctttccatttctctcatggttcaaactgtctcctttcaccaggactcaaattttagttgctgcctccactgcagggccattcttgatgccacagtccccagagtgttcccgtt

SEQ ID NO: 372064 - DNA, 543 bp, Homo sapiens
aaacatcaaccaacaggattgctgtaagggttaaaagagatcaaagcacctagtacaatgtctggtaccggtctgctctcaagaaacgggaaccatttttttttcttcagaatagtcaggaaagagttgagccataascagaagagatatatatactagtggaagtaggaaatagctgtaaggctggagctgagaaaaaatttttggcctggttttaatatctttcctgtcacctccaagataattctttccagttctatttgtgtcactgaggtcactacagaaaacgccccctaacaccctccgcaaacaagcctaataccaagctcagtagattcttgtgctgagctactttggggggttttctgttctttttatttttttccctctctcttttcacgctagaattaagaaacctgtaacttgctgcttatctcattatctcctgccttgcattttaatgcgtcgcctctaaaaagacctcattgatattcaagttatgtatgtgtttgtttgtgtctctcgggaaaatttgctaccaat

SEQ ID NO: 372065 - DNA, 543 bp, Homo sapiens
aaacatcaaccaacaggattgctgtaagggttaaaagagatcaaagcacctagtacaatgtctggtaccggtctgctctcaagaaacgggaaccatttttttttcttcagaatagtcaggaaagagttgagccataaccagaagagatatatatactagtggaagtaggaaatagctgtaaggmtggagctgagaaaaaatttttggcctggttttaatatctttcctgtcacctccaagataattctttccagttctatttgtgtcactgaggtcactacagaaaacgccccctaacaccctccgcaaacaagcctaataccaagctcagtagattcttgtgctgagctactttggggggttttctgttctttttatttttttccctctctcttttcacgctagaattaagaaacctgtaacttgctgcttatctcattatctcctgccttgcattttaatgcgtcgcctctaaaaagacctcattgatattcaagttatgtatgtgtttgtttgtgtctctcgggaaaatttgctaccaat

SEQ ID NO: 372066 - DNA, 540 bp, Homo sapiens
taagggggctgtgcatgggaaagaaagggtcttggtattggatgcccacagggcaagaggctttaaatctaaagagaatctatcatgtcccctccacccaagaaaagttacygagaatcaagacttgtaggaagaggattttattagagctaatcgagcttgtccttcccagcctcagcccggcggggaagcaaagctaaaacattttagatgtggaaggcaatgcttgttatttttctcactttccctacctgccctccctctctttcatgagccctctctgagctgataactggaaaaatgtaagagtggtaactggatcagctctccagcccttcgaaaggctggaaaaataaaaataaaaacttgtgagagatatccaaattctctggtactttgaatgggggtagtaagatctctttatcaatacaggctccatccccacattgaaaacacaacatcagggcactgggaaaatacagaagcctagtattagaaaaatagaatattggacagtagcatgtggcaccttccagtatc

SEQ ID NO: 372067 - DNA, 540 bp, Homo sapiens
taagggggctgtgcatgggaaagaaagggtcttggtattggatgcccacagggcaagaggctttaaatctaaagagaatctatcatgtcccctccacccaagaaaagttactgagaatcaagacttgtaggaagaggattttattagagctaatcgagcttgtccttcccagcctcagcccggcrgggaagcaaagctaaaacattttagatgtggaaggcaatgcttgttatttttctcactttccctacctgccctccctctctttcatgagccctctctgagctgataactggaaaaatgtaagagtggtaactggatcagctctccagcccttcgaaaggctggaaaaataaaaataaaaacttgtgagagatatccaaattctctggtactttgaatgggggtagtaagatctctttatcaatacaggctccatccccacattgaaaacacaacatcagggcactgggaaaatacagaagcctagtattagaaaaatagaatattggacagtagcatgtggcaccttccagtatc

SEQ ID NO: 372068 - DNA, 597 bp, Homo sapiens
ttcaattacaacaaaccacagtatcattagcagtacctatgactttgtctccaatagaaatcataaatatgttcatatgttacagttggttcatatatcttgaaataccaattatatttatcacttcttttaatttatgatagctattagacctgcaagtagaccttgttatttaatatgttaatagagacacacacatttctgtatcacaaatagggtttttaaaaatatgtttgacttattctcttttttctacatccaagtatccattatttaaaaaaattgataactrtatttcaatataattggtttttctttgtaatcctatgtaatttattttgcttattaaaaaaaagtattcaggcttggcatggtggctcacgcctgtaatctcagcattttgggagaccaaggcaggtagatcatctgaggtcaggcgttgaagactagcctggccaacatggtgaaaccccacctctactaaaaattcaaaaattagctgggtgtggtggcggcacgtctgtaatcccagctactcaggaggctgaggcacaagaaacatttgaacccaggaggcagaggttgcagtgagctgag

SEQ ID NO: 372069 - DNA, 560 bp, Homo sapiens
ttttttctacatccaagtatccattatttaaaaaaattgataactgtatttcaatataattggtttttctttgtaatcctatgtaatttattttgcttattaaaaaaaagtattcaggcttggcatggtggctcacgcctgtaatctcagcattttgggagaccaaggcaggtagatcatctgaggtcaggcgttgaagactagcctggccaacatggtgaaaccccacctctactaaaaattcaaaaattagctgggtgtggtggcggcacgtctgtaatcccagctactcaggasgctgaggcacaagaaacatttgaacccaggaggcagaggttgcagtgagctgagattgcaccactgcgctccagcctgggcgacagagcaagactccatctcaaaaaacaaaaaacaagacaaacaaacaaacaaacaaaaaactagtattttgagaaggagtccatggccaaaataatggttaagaaccttggtccagagcaatgaattattaatttagatcaattatacttataaaatatttcttacaaaaagaaaacaca

SEQ ID NO: 372070 - DNA, 574 bp, Homo sapiens
tacaaaacaacctaagcaaacaaatgaaaaaagcaattattaacttcaggatattgtgcatattctatagttttcaytggattttcaaaggggctttccctatatctcagaaccactctgcagaaacacaaggtacatggagacaggtgataaaaaataaaaagggggagaatgccaggccaaggcaaatcatgccctggacaataagggaggcatcagagggctccaatactggggaggacatgagcattcatcagtatgggccttatcagaagaaaaactgaaagggggagaaatatgaggttaataagccagttagaagacttctacactaaacaaagaagatccacgagctacagataacaatgagtttaaatttgtcccagcactgcgcacaaaaaagaaagtacaaaagctgaacaggatatataaacagagatctgatcactggattagtcagaatttgctagagtctattaatgtcctggtcagagtttcaataagcaaaaacaacttgaagaggataatcaagttattcaataaatatgtaggccttgaggagaaaggacagaca

SEQ ID NO: 372071 - DNA, 574 bp, Homo sapiens
tacaaaacaacctaagcaaacaaatgaaaaaagcaattattaacttcaggatattgtgcatattctatagttttcattggattttcaaaggggctttccctatatctcagaaccactctgcagaaacacaaggtacatggagacaggtgataaaaaataaaaaggsggagaatgccaggccaaggcaaatcatgccctggacaataagggaggcatcagagggctccaatactggggaggacatgagcattcatcagtatgggccttatcagaagaaaaactgaaagggggagaaatatgaggttaataagccagttagaagacttctacactaaacaaagaagatccacgagctacagataacaatgagtttaaatttgtcccagcactgcgcacaaaaaagaaagtacaaaagctgaacaggatatataaacagagatctgatcactggattagtcagaatttgctagagtctattaatgtcctggtcagagtttcaataagcaaaaacaacttgaagaggataatcaagttattcaataaatatgtaggccttgaggagaaaggacagaca

SEQ ID NO: 372072 - DNA, 574 bp, Homo sapiens
tacaaaacaacctaagcaaacaaatgaaaaaagcaattattaacttcaggatattgtgcatattctatagttttcattggattttcaaaggggctttccctatatctcagaaccactctgcagaaacacaaggtacatggagacaggtgataaaaaataaaaagggggagaatgccaggccaaggcaaatcatgccctggacaataagggaggcatcagagggctccaatactggggaggacatgagcattcatcagtatgggccttatcagaagaaaaactgaaagggggagaaatatgaggttaataagccagttagaagacttctacactaaacaaagaagatccacgagctacagataacaatgagtttaaatttgtcccagcactgcgcacaaaaaagaaagtacaaaagctgaacaggatatataaacagagatctgmtcactggattagtcagaatttgctagagtctattaatgtcctggtcagagtttcaataagcaaaaacaacttgaagaggataatcaagttattcaataaatatgtaggccttgaggagaaaggacagaca

SEQ ID NO: 372073 - DNA, 330 bp, Homo sapiens
gtttttccatttgtttgtatcatctccgatttctttgagcagttttgtagttctacttagatagagatctttcacctccctagttagctgtattcctaggtactttatcctttttgccaattgtgaacgggactgtgttcctgatttggctctctgcttgcctgttgttggtgtataggaatgttagttacttttttcacattgatttttgtgtactgagactttggtgaagttgtttatcakcttaagaagctttgggcttacactgtgggactgtctacatatagaatcatgtcatctgcaaacagtgatagtttgacttcctctctt

SEQ ID NO: 372074 - DNA, 622 bp, Homo sapiens
gacaaaaatgattaatggggacacaacctcttattcaataaatgatgctgggataactggctacccatatgcagaaacttgaatctataaattatatcctattattactattcccaatacagagaagttaagtgaattgttcaaggttaaacagctagtaaattttgaagctgattttcatctgaaaataggtaaaaccatatataagtaatctggttgccatatacgttgtatggtgcttgtatacaattatattactrtggagccagcaacggaaagaggctctgccctgatgaagaacttcataactgttttgctgagaaccactgcattttctctactagtgacatgccaggtgccatgtgctttctgttcttggctgttggttacttttacactcactgcagctaccaacatcatgtaaggggggaacatcttaactgttgaaatttgtttccagacaatagctaattcctgttagacttaatttcttactcatcaaatgtaaatctgtcatactttatatccttttttacctccagctgacaggtgatgtgaagagaaaaatgtctcatttctccaaactaacacactaccttcttgaaaataaaaatggatatgc

SEQ ID NO: 372075 - DNA, 610 bp, Homo sapiens
aagggcctagcgtggtggctcgtgcctgtaatccagcactttgagaggctaaggcaggtggatcacttgaggacaggagtttgagaccagcctggccaatgtggtgaaaccccatctctactaaaaatacaaaaattagccaggtgtggtggtgcatgcctgtagtcccagctacttcggaggttgaggcatgagagtcacttgaacctgggaagcagaggttgcagtgagctgagattgcaccactgcactccagcctgggtgacasagcaagactctgtctcaaaaaaaaaaaaaaaagcaaagatattgaactattgatattagtacaggtaatttaaggcacagagagtgatttatgaaatcatttgttaagtttattaagccaccaatggagtttatttacacatttcttgattaccattgatataaaaatttttaaaagctttaaaattaatgcattgtagaatcatcctccgtaaaattatttaactagtattaatatttatgtactgttccctgtgagaagaatgatagcatctgtcttatttacttgtgtatctccagtaactagcactatgctttgtacaggtaggcatgaaaaagtatg

SEQ ID NO: 372076 - DNA, 565 bp, Homo sapiens
caaattgtcaagtaaaagacaaaagagagaattctagaaatagcaacagaaaagcatcaaatcacgtatkaaggaaccctcattagactgacagcagatttctcagcagaaaccatacataccaggagacaatggataatatgttcaaagtgctgaaagaaaaatactgacagccaagaatagtgtacccagcaatgctatccttcagaaactaaggagaaatagtcttttccagacaagaaaaaacagggaatttgtcaccactaggccagccttacaagaaatacttaagaaactcttagatctggaagcaaaaggacaataactaccatcatgaaaacacatgagaatataaaattcactggtagaacagacatacaactgagaaagaaaagaatcaaatcgtgtcactacagaaagtcacaaaactgcaaagataagcaataagaaaaaaagctatgcaaaacaaactaaaaataattaatgaaattatacaagtcttaacctatcaataagaaccttacaagtaaacattaaattccccgtgcatcaacaaattggtaaa

SEQ ID NO: 372077 - DNA, 565 bp, Homo sapiens
caaattgtcaagtaaaagacaaaagagagaattctagaaatagcaacagaaaagcatcaaatcacgtatgaaggaaccctcattagactgacagcagatttctcagcagaaaccatacataccaggagacaatggataatatgttcaaagtgctgaaagaaaaatactgacagccaagaatagtgtacccagcaatgctatccttcagaaactaaggagaaatagtcttttccagacaagaaaaaacagggaatttgtcaccactaggccagccttacaagaaatacttaagaaactcttagatctggaagcaaaaggacaataactaccatcatgaaaacacatgagaatataaaattcactggtagaacagacatacaactgagaaagaaaagaatcaaatcgtgtcactacagaaagtcacaaaactgcaaagataagcaataagaaaaaaagctatgcaaaacaaactaaaaataattaatgaaattatacaagycttaacctatcaataagaaccttacaagtaaacattaaattccccgtgcatcaacaaattggtaaa

SEQ ID NO: 372078 - DNA, 564 bp, Homo sapiens
cacaactcttctctcctcattgcccacactgtggcaagcagcagggtgtgtttcagccctgtttgtgttacagctctttcagttctgccattcagtgggtcccaaattcttgtcctgcttcaaggaagagtgaggtacatggacaactggagagtgaacaaggcaaaggaatgctttattgagcaatattacagctctcaggctacctggagtgggtagctcctatctgcaggcagtcatcctgatgacatctctccacccctcagcagagyggagacctggagtgggtagcttctacctgtagtcaggtcatcccaacatctgtgcagccctcagtggagaggagacccagagtgggtagctcctatccatgggcaggtcatcttgtcatctttccaaatctggctaagtccagggtttttatgggcttcagaagggaggaagtgcatgctgactggtccatgagcagccatgggtgggcctggaaaaagcaccataagttttcatgcctggctatggaacaggcagcccaggctccaggcttcagaccatccctggcttgaa

SEQ ID NO: 372079 - DNA, 489 bp, Homo sapiens
ttaagtccttaatccatcttgaatgatttttatataaggtgagagatgaggatccagttgcattctcctacatgtggctagccagttatcccagcatcattttttgaaaagggtgtcctttctccactttatgtttttgtttgctttgtcaaagatcagttggctgtaagcatttgagtttatttgtgttctctgttctgttccattggtctatgtgcctatttttataccagtaccacgctgttttggtgactacagccttacaatatagtttaaaatcaggtaatgtgatgcctccagatttgtactttttgcttagtattcctttggctatgygggccctttgttggttccatatgaattttagaattgtttttttctaattctgtgaagaatgatggtggtattctgatggagactgcattgaatttgtagattgcttttatcaatatggtcattttcacaatattgattctactcatccatgag

SEQ ID NO: 372080 - DNA, 564 bp, Homo sapiens
cacaactcttctctcctcattgcccacactgtggcaagcagcagggtgtgtttcagccctgtttgtgttacagctctttcagttctgccattcagtgggtcccaaattcttgtcctgcttcaaggaagagtgaggtacatggacaactggagagtgaacaaggcaaaggaatgctttattgagcaatattacagctctcaggctacctggagtgggtagctcctatctgcaggcagtcatcctgatgacatctctccacccctcagcagagcggagacctggagtgggtagcttctacctgtagtcaggtcatcccaacatctgtgcagccctcagtggagaggagacccagagtgggtagctcctatccatgggcaggtcatcttgtcatctttccaaatctggctaagtccagggtttttatgggcttcagaagggaggaagtgcatgctgactggtccatgagcagccatgggtgggcctggaaaaagcaccataagttttcaygcctggctatggaacaggcagcccaggctccaggcttcagaccatccctggcttgaa

SEQ ID NO: 372081 - DNA, 477 bp, Homo sapiens
ttcctttatcttaactttagataacctgatgacagtgtggctaggtgataatatttttgcgatgagttttccaggtgttctgtgtgcttcttgtatttggatttctaggtctctagcatggctggggaagttttccttgattagttccccaaatatgttttccaaacttttagatttctcttcttcctcaggaacaccaattattcttaggtttgattgtttaacataatcccagacttcttggaggctttgytcatattttctcattcttttttctttgtctttgttggattggtttaattcaaaggccttgtctttaagctctgaatttcttttacttgttcaattctattggtcttccgattttccagagcattttgcatttctgtaagtgtgtccaatgtttcctgaagcttttattgtttttttctttatgctgtctatttctttgaatatttctcccttcacttcttgtat

SEQ ID NO: 372082 - DNA, 646 bp, Homo sapiens
catagaatcaataacaaaagaaacattgtaaaatacacaagtatgtggaaattaaaaaacatactcttgaacaaccaataagtcaaagaaaaaaatcgctaagaaagttaaatgctattttgagacaaatgaaatggagaactcaacatgccaaagttatgtatgaagcaaaaacaatactaaaagaaaagtttgtagtggtaaacacctacattaaataaaaagaaagctctcaaatcaacaacctgacttattttctatgcaagcttcttgttactatgcaagtaagaagaaaataagaacaaactaaactcacagttaactgaagaaagtaaataatagaaattaaagcagaaaaaggtgaaacagaatagaaaaartgatacaaaataaacagaactaagagttggattcttgaaaagatcaatatatttggcaaacccttaacttgtctaactaaaagagactaaataacaaaaaccgaataataaaaataaaatacaataaatttaaaaaatgaaagaggagacactacagctaatgccacagaaataaaaaagatcataagagactactatgaacaattacattgccaacaaattggatagcctagaagaaatggataaagtcctagaaatatacaacc

SEQ ID NO: 372083 - DNA, 563 bp, Homo sapiens
tatgaagcaaaaacaatactaaaagaaaagtttgtagtggtaaacacctacattaaataaaaagaaagctctcaaatcaacaacctgacttattttctatgcaagcttcttgttactatgcaagtaagaagaaaataagaacaaactaaactcacagttaactgaagaaagtaaataatagaaattaaagcagaaaaaggtgaaacagaatagaaaaaatgatacaaaataaacagaactaagagttggattcttgaaaagatcaatatatttggcaaacccttaacttgtctaactaaaagagactaartaacaaaaaccgaataataaaaataaaatacaataaatttaaaaaatgaaagaggagacactacagctaatgccacagaaataaaaaagatcataagagactactatgaacaattacattgccaacaaattggatagcctagaagaaatggataaagtcctagaaatatacaacctatcaagattgaatcatgaataaatagaaaatttgaatagacctatgattattaagattaaatcagtaatcaaaaacc

SEQ ID NO: 372084 - DNA, 540 bp, Homo sapiens
atgtatgaagcaaaaacaatactaaaagaaaagtttgtagtggtaaacacctacattaaataaaaagaaagctctcaaatcaacaacctgacttattttctatgcaagcttcttgttactatgcaagtaagaagaaaataagaacaaactaaactcacagttaactgaagaaagtaaataatagaaattaaagcagaaaaaggtgaaacagaatagaaaaaatgatacaaaataaacagaactaagagttggattcttgaaaagatcaatatatttggcaaacccttaacttgtctaactaaaagagactaaataacaaaaaccgaataataaaaataaaatacaataaatttaaaaaatgaaagaggagacactacagctaatgycacagaaataaaaaagatcataagagactactatgaacaattacattgccaacaaattggatagcctagaagaaatggataaagtcctagaaatatacaacctatcaagattgaatcatgaataaatagaaaatttgaatagacctatgattat

SEQ ID NO: 372085 - DNA, 627 bp, Homo sapiens
caaaaaaaaaaaaaaaaagggcaagactcaaatagacatttctcctaagtaatacaaataaccaataagcatataaaaagatgctcaacatcattagtcaccagtgaaatgcaaatcaaaacacagtgaaatattgcttcacatttatacgtccactacttaaaaaaacacataaaataacaagtgttgggaaggatgtgkagaattggagactttgtgtgctgatcatgggcgtataaaacagtgtaactgctctggaaagcagtatgaacattcctcaaaaaattaaaaatagaattaccacatgatccagcaataccacttctgggtatatatctccaaaataattgaaaacaggatcttgaagagctgttcccacacctatgatcattgcagcattattcacaatagctaggaagtggaagtaacctaaatgtccattgatggacaaagaaaatgtgaaaatgaaaagaaaatgtggtatattcatacaagggaatattattcagtcttaaaaaagaaagacatcttgtcacatagtaaaaacacagatgaatcttgaagacgttatacttcattataggtgaaataagccaatcacaaaatgacaaatgctaaatgaaataa

SEQ ID NO: 372086 - DNA, 576 bp, Homo sapiens
tgatcttaggatttcaatggaaagtttagaaccctgtgttgtgtacttgtgtacccagatatataccttgtatgtacccaggtaatataaggtaaatgtatataatacctatgcagtgtgcttcttttaaagaaccgtgtcatccaaatccacaagctgcatgtcattgatgaagggtttgctctttgtgtcatctgaagggagcaaaaataattcaaaatgatattcagtgcattaacacactgaaatacaagttactcttatttttgcatatatatgtttgtacttaatctcagcaatatacctgagggaatataatcacttgcaacttttgcagcttttataaaatttttatctctattatgggtcctcagagcaatcctttgcggagtgaagcatgagtaatgttagagattaaggttctaagaggtttagtaaacaattgcaaaacaagaaacaaatattttattccagaagaattctgaacaatgtatgtaartaactatcctctccagaaggtgaaatttagctcctgatgcctttttttttttttttttgagtatgggctagatttag

SEQ ID NO: 372087 - DNA, 553 bp, Homo sapiens
tacttcgttgtttctctcactgaactctttttcatgaaggaatgtccacaaaatcagctctttcagtgtccaattagtcattatgtcttgtatgtcacattctttatcccattcattcagacataattatttccgtgaatttttcaacttcattaactttataatcaycactgtaattagtctctgactactgtacaatgccaggagtgggagaaacacagatgacttaaggcaagctcatgttcctgttgagctgccaactcaagacacattttcacccttccacatagtagtatcttctcttcttccctggatcttgcagaaacctaaaggggaaaaatcaaactcacatgagtgttttaacaccatctttggtatcagcccctttatttctttttagaacctatcaatagctctgtgacttctgttcttattattggggataaagtgtatcactggtgtaattttatttaatttagataataagccaaagatttgtaatcagggaaatattgttatgatacaataaaggcatagataaaattttgaaagc

SEQ ID NO: 372088 - DNA, 574 bp, Homo sapiens
tttggaaactcaaacctatcaactataattaaacaaaataagtaaatttctgaatagccaaaattgttggtatcaaccccaagcattaattctagtacatgtatgagtctgttcacattgtttatcattcctaaaaatgattccacctacagttatgtgcttaatttacaatgctaaattgagcaatatattaattaattttttaaaaaagtcaaagaatcctaatacatccttagattccacaattttgcagattattattagaaatatcaatccattgactcatctatttgatactttatttcaacataccaaattaaaagactgctagaggtaggcacaatgtcaacagyagcaagtggctggccagaatgcctgaccacgaagaagaagtgtttaagcgcaatggcctgggactatttaatgctagtgcaaataaccttatccatgccaatggctcttgacagcatctttgctttgcaatccatgacaataactagtgttctttcataagactcttcctaagtcctctcagaaagttatgctcagcattcttctctaagaagacaaagca

SEQ ID NO: 372089 - DNA, 574 bp, Homo sapiens
tttggaaactcaaacctatcaactataattaaacaaaataagtaaatttctgaatagccaaaattgttggtatcaaccccaagcattaattctagtacatgtatgagtctgttcacattgtttatcattcctaaaaatgattccacctacagttatgtgcttaatttacaatgctaaattgagcaatatattaattaattttttaaaaaagtcaaagaatcctaatacatccttagattccacaattttgcagattattattagaaatatcaatccattgactcatctatttgatactttatttcaacataccaaattaaaagactgctagaggtaggcacaatgtcaacagcagcaagtggctggccagaatgcctgaccacgaagaagaagtgtttaagcgcaatggcctgggactatttaatgctagtgcaaataaccttatccatgccaatggctcttgacagcatctttgctttgcaatccatgacaataactrgtgttctttcataagactcttcctaagtcctctcagaaagttatgctcagcattcttctctaagaagacaaagca

SEQ ID NO: 372090 - DNA, 483 bp, Homo sapiens
ttagtacctaatgcagtctctcttgctatcagatatttttaggaaaatatttttattgaaatttaaaatatattattaaaaatgcacagataacaagtgtaccacttgatgaatttttctcaagataaacagaccatagtagccagcawccagatcaggaaatagaatattatcagtgccaccgacaatcaccttatgccatctcccagtcaccataaaccctcttccctaaagctaataattatcttgactgttaccatcactacttaattttcctcattctagaactatatataaatacacaataaatatgaattttttgtgtgtctagtttctttctcccagcattgtatttgtgagaatcataaaaattgtttgtatgtagcaatggcttattcatttaactttattcattttaacactactcccatttctcccaagtgtataatattctctagtataaaaaattataatttatttatc

SEQ ID NO: 372091 - DNA, 618 bp, Homo sapiens
cttactaacttacatctgtcctatgaagattttacattaacttaatagcacccactatggcatataaaacccttcatgatctgatgacacccatttctccagcctaaattcttatgacctccctctttcctgcctctccttgaaagcacacatgtggactttcccagaagcaaccattttgttttatccacttttcatgttctttcacactcctgcatacgtcatttgttcacttccatcctrtcttcccacagtgtcctgaaattcttcccagtacctcctgtaggaaatttttcttatctatctccaaccaactttgggatgcatataattttatgcaacctgtttattatacttatctcactatgttataattggattatatacatgtctcccaacagtgtaagcctggcacagattcagtgatcaataattagttgatgaatgaacaagcagatgaatagatcaaaggatggatgatgagtggattgttaggtgaatgaataggtggatgaaaaatagatgcatgtacaactagatggatagttggatgggtgtaggtaagacagagtggaaatccccttacagtattaccaaggaacaagatgggctaaaaat

SEQ ID NO: 372092 - DNA, 620 bp, Homo sapiens
tgcctgtaatcccagctactcgggaggctgaggcaggagaatcgcttgaaccagagatggaggttgcagtgagccaagattgcgccactgcactccagcctgggtggcagagcgagattctgtctcaaaacaaacaaacaaacaaaaatcgcagtctatcattttatgtgtggggaatgcatcaatgagtcaaataaataaaaattactatctacataggctctacacatgtgtgcagaaaggcagatataaaccaaaataattaagttcattttatagtattttcaatgggataagtagtattaatataaagaaaaggaagtaaggaggcatgtgtgcagaaaggcagatataaaccaaaataattaagttcattttatagtattttcaatgggataagtagtattaatataaagaaaaggaagtaagraggcaagggagtagaataatgttataattttaaacaacacagtcagataaagtcgcgtggatgggatgccatttaaacaaagacctgaagggggcaatagaaagatatattgggatatattggaatgaacttttaaggcggcagaatcaaaaagtgcactctgtctctgttcagagaatagcaaggaggc

SEQ ID NO: 372093 - DNA, 620 bp, Homo sapiens
tgcctgtaatcccagctactcgggaggctgaggcaggagaatcgcttgaaccagagatggaggttgcagtgagccaagattgcgccactgcactccagcctgggtggcagagcgagattctgtctcaaaacaaacaaacaaacaaaaatcgcagtctatcattttatgtgtggggaatgcatcaatgagtcaaataaataaaaattactatctacataggctctacacatgtgtgcagaaaggcagatataaaccaaaataattaagttcattttatagtattttcaatgggataagtagtattaatataaagaaaaggaagtaaggaggcatgtgtgcagaaaggcagatataaaccaaaataattaagttcattttatagtattttcaatgggataagtagtattaatataaagaaaaggaagtaagaaggcaagggagtagaataatgttataattttaaacaacacagtcagataaagtcgcgtggatgggatgccatttaaacaaagacytgaagggggcaatagaaagatatattgggatatattggaatgaacttttaaggcggcagaatcaaaaagtgcactctgtctctgttcagagaatagcaaggaggc

SEQ ID NO: 372094 - DNA, 427 bp, Homo sapiens
aaaaggttaccatactccttgacaaggatggaagaggccctcgggcatgacaagacacatatggttaagacattgccacctattttgtggcatctaaccatcatttttttcagacttgaaaccaacaaagatcaaaaaagacaattacataacagtaamgggttcaattcaacaaggaaacctaactatcgtaaatatgtatgcacccaacacagaagcacccagattcctaaagcaagttcttagagatctacaaagagacttagagtcccgcacaataatactgggagaattcaacactccactgacagtattagacagatcactgaggcagaaaattaacagagatatttaggatctaaactcaacattggaccaaatggatcttatagacctctacagaactctgcacccaaaaacaacagaa

SEQ ID NO: 372095 - DNA, 647 bp, Homo sapiens
gtatatgagttaatgtacttaagaaattttccatgccctgacaaaggggttatcttttatcttatgagtcttaagaagtatgtaaaataatgtaattaatcagcaagtatttaattcttagatcactaatgaagatgaaaaaaatcacttgaattgagtcatcaacttaaaatttaactaatatatcattttctgcctaatattaattgtcataaaacgaggttaagaaatcacaatgcaaagagtgtccatgtgacagaccattatttttctatcaaaggtgaagtttaacatgcaacagacataagacatcacatttagccatcaattttcttctttggatagaaaaagctcacaaaaatgggaaagactgatccagaagttagttatgtaacagttctgatatctttctgccacggtgtgaattgtttatgtctacccaaatttatacattaaaatccttactcycaaggttatggtattaggaggggaggtctttgggaggtgattaggtcatgggggcaaagccctcgtgaatgggattagtgtctttataaaagaggcttgagaaaggtccttggcttcttccactacctgaggttagagtgagaagacggctgtctatgaggaacatagacaccaaatct

SEQ ID NO: 372096 - DNA, 647 bp, Homo sapiens
acatacacctactctgcaaacatttatttagttccagcattatagttggcactctggatataaaaatgaatatgccataaaacattttctcaaatagctcactattacatataggaatcactgcaatatgatgagataaacgcattctggtagtcattttttaaaaaaagattgccaggcatctaaaccttttttttcttatactagtagagatacwagcagccatatttgttgataaaaatatagaaatgcttctataccagctggtaaataaaatattaagactataacaagcagtaaatttaataacatgcactcggaaatagactcattagtacgagccagtcaaaacaactatggaaaaattgttctcttactttaacgtgcattgataatagaaatactgaatatggaaaaatcttggcggattttaaaatattctgctgagatatcagcagaagctgagggaggattcagcatgatgaataatatagttgttgttaagacattttctctacttgaggccacaaattctgcaaagatgttgcccgttggcaacaatgaggtgggtaataggatctgggcatggcttctgcatggaaattagtttccctggttgcctgctgagcagacgaggtttcagcagt

SEQ ID NO: 372097 - DNA, 618 bp, Homo sapiens
aagtagccaggatactgatgaaactttctactttaaatctctaatttaacattttcatctcaaaatttaaaacctctcccacactttttggcttcctcctttgattagagttggctcggaatggggtctcttccaatgacaaggaggagcatatcaaattaattttcttgcttttgactagtcatcaataatatcattcrttagtattctcaatctatgctctttggacttggactactataattgttgattggtgcttgtagtggggaagggtggtcaaataaaattgggaaatcctgggtaaaaaggcatctcaactgaagaacttccctgaaacttcagtattttactttccactggacatctctcataggggaaccccagtatactgcttttccctactttatttgacatcagaaagtttgtgtgtatgtgtgtgtgtgtgtgtgtgcgcaccataccaagtacactttttgcgacattcagagttttagaaaacacagttaggaaattctaaagagagttccagctacttttcatctgatttccaggtcacaggtggcttaaagagtaaagtagcatgatagtcattagtaagcagtctaccaccatataagt

SEQ ID NO: 372098 - DNA, 618 bp, Homo sapiens
aagtagccaggatactgatgaaactttctactttaaatctctaatttaacattttcatctcaaaatttaaaacctctcccacactttttggcttcctcctttgattagagttggctcggaatggggtctcttccaatgacaaggaggagcatatcaaattaattttcttgcttttgactagtcatcaataatatcattcattagtattctcaatctatgctctttggacttggactactataattgttgattggtgcttgtagtggggaagggtggtcaaataaaattgggaaatcctgggtaaaaaggcatctcaactgaagaacttccctgaaacttcagtattttactttccactggacatctctcataggggaaccccagtatactgcttttccctactttatttgacatcagaaagtttgtgtgtatgtgtgtgtgtgtgtgtgtgygcaccataccaagtacactttttgcgacattcagagttttagaaaacacagttaggaaattctaaagagagttccagctacttttcatctgatttccaggtcacaggtggcttaaagagtaaagtagcatgatagtcattagtaagcagtctaccaccatataagt

SEQ ID NO: 372099 - DNA, 552 bp, Homo sapiens
attttctattctgttctactttgggtaccagtactaaatttaatttttagtaactgcttgggttaacagtactaaatttaatttttctcttcagacattcactgaaggcaagtgctgttaagcaaattgagtggcagaagaaatttgaatacctttctggtatttgaatacctgaaaaagagtgattgtctattgtgtatttgagaagtagttgcctttctgttttttttttttatgtcaacatttagccagttataaagggcaactaaggcaactcctggtaaagaatggaggctaaagtcttagaaactctaaaaaagtggttcttgaatttggagtgcctcagaatcacttggatggcttgttaaagcagattgctgtgtcccaccctctcgagctggtgactcagcaagtctggtgagcttggggctctaaaatctacattcctagcaagttcccgggtgatactgatgctgttggtccagggagttaggkttctgggcataatcaacaggctgtttctcatctgtctaattttttttcaatgctgcc

SEQ ID NO: 372100 - DNA, 562 bp, Homo sapiens
gataggaagagtgaacaaaatgttcttagtgagtaaatttaattcctagtaaaacaagtggaatcaccatctcaactttttrccgatgaacaaaatccaaaattgcatactttcttagatataattgtttcctatttgataataatattttattatattttttgagatggggtctcactctgtggcccaggctggactgcagtggtgcgatcttggctcacagcaaactctgcttctcgggttcaagcaattctcatgcctcagcttcccgtgtagctgggactacaggcacctgccaccatgcctggcttatttttgtattattagtagagatggtgttttgccatgttggccaggctagtctcggactcatggcctcaagtgacctgcccgcctcatttcccaaggtgctgggattacaggcatgagccactgcacctggcctgttgttaatattttatatgtaagtcaaagtaagtcactttggcattctcttttgcagttatttatttgacttctcacttactaacaatgagtctaaggatttctgaacacaaaattt

SEQ ID NO: 372101 - DNA, 564 bp, Homo sapiens
actggccactttacatttgtagtgaaaattaaatgctcatgtttctgcctttttgttattattgttttttatttttgttttggagtctattggatttctaataagatatcawtttaggtcaaggcatcaatattcatgattttgatctctggatgaaaatgcagagtgaaatatctactttttttccccagctttattgaggactagacttgcaacctgaaaggagactgaacttgcctcagttatgatttggaatttattggctttcatcaagacatggcctaggctgaatgaattaagttaaaacttagtggtgtatgccttgtgaatgcagcaagagggaggctgagccactgtggagagcacacaggctctgcctcggaaacctcatgcttctcatgtgcttgccacaccagatgttgcaccttcagcagctttttaagttcattgagcattgctgaatcacaagcagtatgccgggctgctccaaggacacataggtaatataagttcacttcctgaaatgattacaattttgttaatatgctttcattgtgtgatcgt

SEQ ID NO: 372102 - DNA, 564 bp, Homo sapiens
actggccactttacatttgtagtgaaaattaaatgctcatgtttctgcctttttgttattattgttttttatttttgttttggagtctattggatttctaataagatatcaatttaggtcaaggcatcaatattcatgattttgatctctggatgaaaatgcagagtgaaatatctactttttttccccagctttattgaggactagacttgcaacctgaaaggagactgaacttgcctcagttatgatttggaatttattggctttcatcaagacatggcctaggctgaatgaattaagttaaaacttagtggtgtatgccttgtgaatgcagcaagagggaggctgagccactgtggagagcacacaggctctgcctmggaaacctcatgcttctcatgtgcttgccacaccagatgttgcaccttcagcagctttttaagttcattgagcattgctgaatcacaagcagtatgccgggctgctccaaggacacataggtaatataagttcacttcctgaaatgattacaattttgttaatatgctttcattgtgtgatcgt

SEQ ID NO: 372103 - DNA, 213 bp, Homo sapiens
agggaacagagtagggtctttcctgcttcatgcaggtggtttgactgaataacgagagacagccctttcaacctcatcttcaaacaaatgatgcaagtaggattcattataktaaagttggctttatggaaagcaaccctttccaaattaaagaaggtaggtctcaaggtgtgcagacacaatcctgggttcctcctcccaaagtaatatgct

SEQ ID NO: 372104 - DNA, 592 bp, Homo sapiens
tgcaccctccctcacaccatgctagatttatgataggctagaagagacagtatacatactgagatctttaatgatgccactggtggcccaagtcattcacaaagttatgacacaaagcgtaaccacattttctcccttgsggcttaaaggaaagaacctactcccaaagtacagatagtactgcgtatccacagtatgaagcaaaaggaagaaagagaatagcccagtgaagtgcaagatttatctcagataactttcccaggaattataaatcaccttggaagactgctctcaatctcaccctcagcttagacacatcacaaaataaaatgcatgatttacaaattctaggagcttatcaccacaacagtgtgaatcaaaatggcgcaatggctaaaatttccaaaggactaaacaccaatattagcataaagagaaactgttatctggcaccttgaggtttgtatatatacaaataatacatgtacattataaaagtaactttcctaaaaagcattaaatctaatacagtagggaaagtcttcacttatcatcagtgggttcttggaaactgaaactttatataaaacaa

SEQ ID NO: 372105 - DNA, 547 bp, Homo sapiens
cttgtctattggccacgaaataattcttcaattgactagcactcccattatgttttgcaaattatagcagacaacagaggcatagcaaaaagakcattgaacacaataaaactgcaataaactataggtctctagtctgtttctctccaatatctagatttattaaaatttcagattaaagagggaaaagatcagcctagccaacatagtaaaaccccatctctacaaaaaattcaaatgttggctaggcatggtggcacacacctgtagtcccagctactcagaaggctgaggcatgtgaatcatttgtgcccaggaggtcaaggctgcagtgagccgcaatctcaccactgcactccagcctaagtgaaagggtgagaccctgtctcaaaaatcataataataataaaagaattaaaaaatgtcttttcaacaaatggtgcttggaaaactgtatatctacctatttaaaaaatgaagtttaacccttatcttatgcttatttttaaaattaattgaaaatgaatcaaaaacaaaagctaaatct

SEQ ID NO: 372106 - DNA, 547 bp, Homo sapiens
cttgtctattggccacgaaataattcttcaattgactagcactcccattatgttttgcaaattatagcagacaacagaggcatagcaaaaagatcattgaacacaataaaactgcaataaactataggtctctagtctgtttctctccaatatctagatttattaaaatttcagattaaagagggaaaagatcagcctagccaacatagtaaaaccccatctctacaaaaaattcaaatgttggctaggcatggtggcacacacctgtagtcccagctactcagaaggctgaggcatgtgaatcatttgtgcccaggaggtcaaggctgcagtgagccgcaatctcaccactgcactccagcytaagtgaaagggtgagaccctgtctcaaaaatcataataataataaaagaattaaaaaatgtcttttcaacaaatggtgcttggaaaactgtatatctacctatttaaaaaatgaagtttaacccttatcttatgcttatttttaaaattaattgaaaatgaatcaaaaacaaaagctaaatct

SEQ ID NO: 372107 - DNA, 547 bp, Homo sapiens
cttgtctattggccacgaaataattcttcaattgactagcactcccattatgttttgcaaattatagcagacaacagaggcatagcaaaaagatcattgaacacaataaaactgcaataaactataggtctctagtctgtttctctccaatatctagatttattaaaatttcagattaaagagggaaaagatcagcctagccaacatagtaaaaccccatctctacaaaaaattcaaatgttggctaggcatggtggcacacacctgtagtcccagctactcagaaggctgaggcatgtgaatcatttgtgcccaggaggtcaaggctgcagtgagccgcaatctcaccactgcactccagcctaagtgaaagggygagaccctgtctcaaaaatcataataataataaaagaattaaaaaatgtcttttcaacaaatggtgcttggaaaactgtatatctacctatttaaaaaatgaagtttaacccttatcttatgcttatttttaaaattaattgaaaatgaatcaaaaacaaaagctaaatct

SEQ ID NO: 372108 - DNA, 554 bp, Homo sapiens
tcacattagttagtgcgaactatgttcagaacttgccatgctcatacatatgatataaccatttttttcgcaaaggtaatttcatggtatgtagatatatttaggaagaaaaaatagtgagaaggaaaattggcattgtacagaatgttattcctaatagtgtgttagtatatgaatacatatacwtctataagcaacagtgcacaaaaataaaatttcatcgtaaaactgtggttacggcaaaactatctcaactttttgtttctaacatattttcatccttcacaggcagaatgacaaccacaaaggacaattcacgatatgcagttctatatgtctacaaaatgtaaagcagtaaattctagacacatgcctaaaagagagatgtgtcagcagtcaatccaagcaaacgggtccttcttcagtttctgtcccactgtttcagatgccctgtcttacctcactcttcctttcacactttgttttgttccattggtctaacttccttcttggggttactctttcactactaaataaacttaaactcctacaat

SEQ ID NO: 372109 - DNA, 663 bp, Homo sapiens
taccattaaattaaaaagtagattataatataatataaatatttgataccatatgatctcatttttgtttaaatatacatatatgcatattagatagataggcacagacataaaatcttcaatacaaaaagtgtatataccttaatataaagtgaaaaggtttttttctttatttttatatgtattgcctaaatttcttctatataatatctgttacttttatagtaaacaaaaagttcattttaaaaagaaaaggtaggtaggagaagagaatctgatgccatagggaaatgctcacatgttaactttttaagagtagcttgcaaaacagcatgtgcaataagatcccatctttcctttaaaaaatatgtgtatctaaacagaaaaacgtcaaggatataatcagtataaacattctgaggtatccctaaatgtcatyacagagcttttataatttctttttcatattttctgactttttccaataaccatagtttggttttttaatcagaaaaaaaagtaataagaaagaccatatttactcttttatctaaatccattctaccaaccaattgtttaacaagtccataattatggctaaatgcaaaaaaaacaacataataacttcttactgccaaaacaggcacaaataagtatgatagt

SEQ ID NO: 372110 - DNA, 583 bp, Homo sapiens
gaggaaatctctcaacttgggggaaaattatctaaaggtaaagagatgctatatttaattcctcacttgaagcttgtgtctattctgaataaaatactccaattttaggtgtttytgtgcttagatctaagaaatggacctaaaatgaagttagagagttcaatgtggaatcattgtcaactccagggtagttgtactagttgtactagtaatggcagagtcaggattttaacctaggcagactagctaaagaccaagctcttaaccgcaacttaatctcttaagcaccattaaaaacaaaacaaacaaaaaaaaaactaattaaaactttttgctcccttttcatggataatttgaagtatacattgagattaaatcctgttttcctgagaaatgtagctatacaatggtgtattagcttctgtgtaagtatcttttgatataggaaatttagcaaagaatgcactcacgattccatgagtcatgaaatagagacttctgtaacaataataagaattgctctttccttcataaaatgtttaaagttcattcttttaggattaattcagcataaatattgagt

SEQ ID NO: 372111 - DNA, 532 bp, Homo sapiens
ttggtactcaatggatttaggagattctctcattatccaaatattcattatgtgagtcactaaaattatacaaaaggtaaaaggcrttcattaataaacttaccatttgtaaaattagtcttcacgtaaacatccctcacagattaacttaacatgtatctcacacatgtgggttaatgtcctcgtatctttgatcatcattgctcagtggtttcaaacttgtcagcacattgaagtcacatggagacctgtaaaaactattgatgcctgggtcccacttcaaaagactgatttaactgattgaagtgtaacctaagcaaaagaatactttttaaaatgccatatacctgtaatttttttttcagtcaagtttgagcatcaggctagtcaattaccagatattgcattgtggcattgaaaccactattcaaaataaaaatgtaaggtgactgcaaagcaaaatcacaaatcttgcaaaagatgcaagatttcatgaagcaaagaaatatagtgtcagtgaacagctcaaacc

SEQ ID NO: 372112 - DNA, 532 bp, Homo sapiens
ttggtactcaatggatttaggagattctctcattatccaaatattcattatgtgagtcactaaaattatacaaaaggtaaaaggcattcattaataaacttaccatttgtaaaattagtcttcacrtaaacatccctcacagattaacttaacatgtatctcacacatgtgggttaatgtcctcgtatctttgatcatcattgctcagtggtttcaaacttgtcagcacattgaagtcacatggagacctgtaaaaactattgatgcctgggtcccacttcaaaagactgatttaactgattgaagtgtaacctaagcaaaagaatactttttaaaatgccatatacctgtaatttttttttcagtcaagtttgagcatcaggctagtcaattaccagatattgcattgtggcattgaaaccactattcaaaataaaaatgtaaggtgactgcaaagcaaaatcacaaatcttgcaaaagatgcaagatttcatgaagcaaagaaatatagtgtcagtgaacagctcaaacc

SEQ ID NO: 372113 - DNA, 411 bp, Homo sapiens
tcttaaaaaaaaaaaaaaaaaaaaaaaaaaagaagcttacttgctgagactcgaactgcatattttgtcttacctgcagtaagcagtagctcaaacatctatttagctcttttaaccttacttgggctacttgagatcaatcctgttcgtggatggtttggggatcagtcagagatttgtaatatagaagttggggttccctttctgkggctttttccttcccaagattacctcctcacctcttagcagttgtggttgcccaaagtctgttgccttgattctccaggtcagaaaaaaatgctgctttttttgcagccggccctcatactagaaagcttgaaaatgacaaacttacccagtttctttccctgcattcttccaaagctcattctcctctcaagatttagtctg

SEQ ID NO: 372114 - DNA, 557 bp, Homo sapiens
ttgcgagtttgaccttgaccttttgtcttcattccaatagctaagattccaccttgtttttctgtagctgagtgcagtagtccatctaaaaccataaccattccctggccttttagctagttatacatttcatattcctggatgtgaataagcaagtcctattcatcgtaccgggtgtggggcagagtagtaagggtctactaggataggaacagtcttgggagaaagttaacatagcagacacaatgtattagctaaacggttggacaattgacatcaataactatactccattatagaaaaaaaactagaatctgttctttaactccacttgttgtctatgggtcttattgaggtctagctgcctatgcctctaagtaccacttaccctagatttttttttcctttctctgctttatgaaactctttaatatcctgttttatgtatttcttctataaggtcaaaaggcagacatggcagccagtggtttcacaaattgcyacaaaaggccatgttcataaccagaattaaggaaaagataaaggctatggaaaaa

SEQ ID NO: 372115 - DNA, 598 bp, Homo sapiens
caagactattaacataaaaaaatcaataaagtgagtttttagatacaaaaatgtatacataatatgatccaatcttgcagaaaatttttttcatttgctcaacaactattttttgagtaccttctatgagccaggcactattctgggccccagagagagggcagtaaacaagctagacatgttctttcttctcatacatacgtagataaaagacttgtatgaaatataccagaatattactaggaagtaaatttcattatgaaataataaggtaaaattataagttattttatttcctcctttatgattaaacatagtcccaaatttctaaatactttctgaatggtgccaaaaacaaaccatggcctttatattgatctaaacattatagtccatatttgttttgtgatatctgtgtttgcataaagcacaaatttkcagtcttacaatattctgccaaatgtgtattgcatttttcaattatataccaatttttatgtctcataacacctaatgaaattgaataacattggatccctttctacaaatacaaaaactaggaaaaagaacagttaactaacttactacactagaaata

SEQ ID NO: 372116 - DNA, 595 bp, Homo sapiens
tatttgttccatcacctgacttaggggctggctagaaatattaggaaaaaaaacaatctactattgttacatgagacaacaacctttcatgtccttgaagctcaccatgacctttcatctttcctatccccaatggtctctcctaacaactaaaactacactcagttgggctgaattccagattgtcataaaaagaaccctgtcctttcaaaacaaaaccaatttttacaccaaggtgggggagaaacacaagtccattgttccctcacagatggaagttggagttactaaggcaactgctctaatcctcctttttaccacctttttcacatcactggcctatcaagtatgctaccttttaactcataagctcaaaagctggtagtctaactsgctgccctaattagctacgattttcacactacagacaacatgatgagctaatcgaaatttgcaaaataatgacgtacctccagcaaatattcctcctcctgaggcccagtcttagaataacaataatgagaccattattagagaagggcattaaaatgctgcactgctgctaaacagagaacttaattgttctggtcttgtc

SEQ ID NO: 372117 - DNA, 547 bp, Homo sapiens
agataattattcttatggtcatccccagtctatattgagaataacaaaatactgaagttaaaggttaactagtgtaggattcttagctgtagaaaagcactgtttacacactgtaaaagtgtcttccatatggggccacagtacatgttttctgtaaagtcaaaccaagattttagtgttgaattgtggggaagggacgtacttttgctgttagtgggtatttggggtgagggtctgtttgttttttaccaagtgaaatctgcattatataaaaatgtattaaattgtaaataagacctctygcttcattcaaactgtgctttgcttcatttatcttcatcttgttaggctaaattaattaacaatctcactgttgcacactttctcttttcattacatcaaataatggccggtatattaagaaagccctcaccacgggaattctgcaacactactgctaagaagagtttctgtgtatcaatgtaacaatattcatttcataagcatttattaaatatacttttattgttaacaaccaattaagcac

SEQ ID NO: 372118 - DNA, 661 bp, Homo sapiens
ctccacccactgctacttctccttagtcaaaattgctctcgacaaagggtatattgtcctttgcatttcctactgtatgaacttacctcaattacttgcctacttgtaggtattttytgctctatctttctttatggactaaatcgttctgtgccccataaggctactactatactttaggttaatatatggactagatagaaaatatctctagaattccgcacagaggaaacataatccactttaagtctcacacaaatactcctgagtagcttgctctagaaatttcttgaaaccaacaggaaatattgtcattggaacaagaaatcactgaggatcatcagtgccatctgtcctgtggacttgtttgaaaaggaggattatttgaggttgtatcaactatatacagccacaagaatgctacaggtttaaccaccccaaaacttagtggcttaaaacaataagcatgtatttagcttatgcatctgtaggtcagctggacatttctctggttttagttgagttcactaacatatcttgtggttggccttggctgggacaactggtataattcaactctgctccatatgtctcatcctccaacaggctagtccaggattgttcttctatagtgacagaaaacagcaagagtgtgaacaga

SEQ ID NO: 372119 - DNA, 594 bp, Homo sapiens
tctatagtatttcccagctgtgtacttatatggtgtaataaaaggatttaacaaatgggaaatagcagctgcatttggaaattccctttgtgcttctttttcactggatagattcaatattttgtaacaactgtaatatcagacctgtaatgacttatactgtaagtaccataacacttacaggaaaaaaaacaatagaaggattttaagtttctgggcagacctgcaaacctacatatattgtgtgtgtgtatgtgtgagtgtgtgttggagtgggaggactctgctaatataaaatttaataaacattttacctcattctactttaaaataaatatgaagtcaaaaacatgtttatgaaatcaagtaaaacttgtagttttttaatggatcatattctgtacttagagtcgcaaaaaatagttgtgaaaaaataaaacttaaaagaaaatctaaaaaataacaataattttttcagcacttatacagtttccattgttatttactttctgtaatggccctcatggccytcattcatgaactgttagaaacaagccctaaaagtttcttatctcttgggtacaggaagggttt

SEQ ID NO: 372120 - DNA, 370 bp, Homo sapiens
aattccatctcctctcttctgtgtatctcctctgcaataacaaatgyaatttaattagcattttccttctttgagccatgcattggttcacttagacactagcgacacaaataaaaggaataagagagtttaataattatgtctagactctaaggttcttgagggcagggactttgtataatacatttgcgtttgtttccaatgcagcatctaatgctgtgctttgaaaaaagtcagtaattagtatatacttgtggagctgaattagtttccaacaggtacaaagcattattcttggaagaaaacatttgctaccaaaaaaggatttgtcttaactgggaaaacagataaccacatctttaaatagctt

SEQ ID NO: 372121 - DNA, 593 bp, Homo sapiens
atgacaccaaacagcataatatattgttaagacgagcatctaatctggtgactgaaatttctatacatttggcattttcacagaagacagaaatgcaggcagcagtccaacaatccagtcacaaagaaagcctcagtgcattggatttgaaataagcacaacagtttgtctgagtgactgagaaaatacccattgatagaactggctcctaaactctggcctgatttctaatatgctggttaattaacatctaatttttttttactatgttgatcaagaatgttgtttttgtggttggtggggtttacattatagatattaaaattgtttacatggtgsaatgactgataaaaccctgaagttctaagccctctagaagaggaaatttatttatgataataataattactattttataccatacaagatacatacacacacacgtgcatgcacacacacaaacacacacacacacacacacagtacttccctgtttatctgatggggatgtgtttcaagaccctcagtggatgactgaaaccacagatagtactgaaccctatccgtactctgtttttctcctatacacacaa

SEQ ID NO: 372122 - DNA, 628 bp, Homo sapiens
cttcccagtaattactgcatattttctctcttacaatccattaatgatttttttacagagtaagttttcataatggacagggtgtgtatgtgtatatttttcctcctagttttcttaactagattataagcttcttgaaagtatttagggtgatagttagcaatggaaaaaaatgaatcaatgaactggcaaatgagtcagtttgcaagatgatttgaaagcacaattatccaactttctcctatggtttatgtaggagcaaaagaagggggatatgtaggaaaatataatcaggagagtaaataattcataatyaaagtcctaaacaaatctgatcctgacttctttgtttacactttgcattattagggctgggcctaacactacttagtgccatctaaagctttttaaaagacctttgaaatgagtcaattgttgtaacttaacttttaagtgacatattgattgagtggctgatactgttagattagttttagggcaattttgtagcatttgaattaagtatctgaaatagctatacctctattttatattaggaagtatatacaagattcgaagcatttaccatgaaaatagtaaaatgcctactgtgcataatatttaaaac

SEQ ID NO: 372123 - DNA, 549 bp, Homo sapiens
ttcaagaccctcagtggatgactgaaaccacagatagtactgaaccctatccgtactctgtttttctcctatacacacaaacctgtggtaaagtttaatttataaattaggtacagtaagagatgaacaacaacaataaaatggaacaatataacaatatactataataaaaattatgtgaacgtgtctcttaagttatcttattgtgctatactcacctatttttggactttggttgactctgggtaacagaaactgcagaaagcaaaactgtggataatggccgagataaaagtatgtgttacttgttctttataatagttccacagtagtacaatcccagttttacagatgggaaaattgaggcttaaataatttgaacagcttgtcaaaatcgtgggatctgaattcatatctatagttatctgactccaaagttttgatattcctgctatgtcacactgcctctgcccttttctaactggatttacaagatagcttcctggcctctgaaatacatagtcattstgagtgataatactagcaatt

SEQ ID NO: 372124 - DNA, 661 bp, Homo sapiens
atcaataatattattcagccacattatatagtaaatgggtttcagtaggttgcccaaggaaccaaatcaccatctacaacctggtttctatgagactatctattccagacagctaacttataactttcagaaccttacttattagtaagttggaaactgcctacaaatagacccctgcgcaaacttcagagaaatctttttgtgatgtaaaaaaatactaaaaatccaggtaactgactatcagctgttaagtaagtcatatgcyttaaaaaaggagaagcacaattttttaaagtagcaagaattcaacataaaagttataaattactccatcacttaccatatatgaagtctgagattttcaaatacagaacttggaagcatgcattaacaaatgattattagtggctattgcacattgttgatacgttaacaacaaagagtgaaaaccatattgccaataatatgtattatggataatggggaaaatatagacagcttctaaatctgttaccattttcttctgaatataagtgatttggatgctgcctttaaaaactacacagatcaaactttctaacctgggcactagaaaagttaatacaactacaagtcggtccattctcatgcaaattccagagaaataactcaatgcacattt

SEQ ID NO: 372125 - DNA, 619 bp, Homo sapiens
ccagacatggtggtatgcacctggagtctcagctactcaagccatggtcatgccactgcactccagtttgggtgacagagcaagaccctatctaaaaataaataaataaataaataaataaataaaataaaattttaaaaagcacgtttaagtgatatggccttgtttgtgatgaggcaaagtatgtgtgtgttgagtacagctggataaagttgtagtgggatatatctgcataaatacatattgctgcatggaactaaatttatcattttcctcttgaagtatgtcacagaacaaaaagctacagttaacatgtggtattttatcaaataaatccatgtctgtgtgaagggacttaataggacaacagggcagcctctcacatatgagttgggcttaggggaggcagcctttgttctttctttgcacccacagcaagaaattagaaaataaacatatttggaaaaattattttaggttttccaaggaaaggggagttaagaaagcttgaggattcatgttcaaaaaaactaacagtaagtcttcatattaaactatatgaatttattcacaaagactatrcaagaatgagaagaatattcttatcaggaaagttaag

SEQ ID NO: 372126 - DNA, 645 bp, Homo sapiens
gaatttgaatacttcaaggacttttactttatataaatactttttctttatataaaattactttttctttatataatagtttaaattcttcatttctactcttcaacgcagaaaatctgacagcaaagtggtcatatcaacccgaaaggggctgggctagagaaagcttgaaaataactcctttgcaattgtaaaatgtttttggtatgtatcagaaggacacagattattcagacagctcaacaaatcaaattttaaggagcaggatctttccactccagccattgccacattatttttaggcacccccaaattatgaggtgtgtcctggagctattaataatttaataggaattgtgtcattccattggcattttaatacaagaagatacatttatttcccccatgaaagtaatttttataaaataactttaagtcctaagtactgaatatacttaactattatatgtatttattactattaacatgtgttattttttctaataaattctttatatagtttacctgcatagagtacataaattactggttgcttaaagaaaaaagttacatgtttgcctraaatgtcaaaataggtacttcacctgaactttttaatgaatgggcaactaaaaataccccaaa

SEQ ID NO: 372127 - DNA, 553 bp, Homo sapiens
gccatcacagacagaaacaatgtctttcctcggtttaaaaaaaaaagcttcaggctaattttcaatagaataactcaaggccaagaggaagactatctaaaataaggcccaaatatatagaaaaccaaaaaccacatgttctcccttatatgtgsaatctaaaacaactgaactcaatagaagcggagagcagtaggtggttaccagaggttgggtggggatggggaggaatagggagatgttggttaaagggtacaaagttgcaattaggcaggaggaacacatggtaagtatttaaggtgatggatatgttagtttgattctaccattccacatgtatacatttcacatgcatacatatatcatatcccagtgtatcccataaatacatataattataatttacccaaaaactaaataaagaaattttaaaagtttctaaatcttaaatgagtttttaaaaataaaataataaaataaagtaatgtccaaatagcagttctgacccaaaagacataagacacaccagggcttccctaagtgtttgtgtagg

SEQ ID NO: 372128 - DNA, 441 bp, Homo sapiens
agtggcaaagatgactatcagaagctcaaggttagaaacctcagtagaaagacagtgtttccttcccagtaattccaggaaatatcccaggattgagtctcactggcctggcttggatagcatgtttatttctgaaccaatcactgttgccaggagtatgaaatgcccactccctatgacgtgggaggaaaaaggcagttccacctcaaccacaggtaccaaaagtgaaagaagggttgttccccaaaagaaaaccagaacaaatgctgcatagtgaaaacagtaaacagcaaaagagtttcttttgacagtaattattacmgtgaggtaacttcagaggaaaaatataaaaacaattgcaaacttcatttaatagcagttgcacagcaaaaacttctttgcattgtttctagtagtcccaaaagggggacaaaaaacacg

SEQ ID NO: 372129 - DNA, 441 bp, Homo sapiens
agtggcaaagatgactatcagaagctcaaggttagaaacctcagtagaaagacagtgtttccttcccagtaattccaggaaatatcccaggattgagtctcactggcctggcttggatagcatgtttatttctgaaccaatcactgttgccaggagtatgaaatgcccactccctatgacgtgggaggaaaaaggcagttccacctcaaccacaggtaccaaaagtgaaagaagggttgttccccaaaagaaaaccagaacaaatgctgcatagtgaaaacagtaaacagcaaaagagtttcttttgacagtaattattacagtgaggtaacttcagaggaaaaatataaaaacaattgcaaacttcatttaatagcmgttgcacagcaaaaacttctttgcattgtttctagtagtcccaaaagggggacaaaaaacacg

SEQ ID NO: 372130 - DNA, 474 bp, Homo sapiens
tttgcattcttacatgcaacccttataataatctccattgtaatcttcattcttttattagaaagatgattcttgaatcatctaggtaaggtaggtgctactggaccttgttttggctcattaaaaagataatctagaaaaataacgtctattctgcctttttgcatctctgtctttctcccatatcccaaacacacactttcagaaaggaatctattgtcctatttctggaaaatgttgaaatgttgccctctactttgttaccttctcargagtaagattggtctgtagatattgtatgaccattagagaaaaaccaaagattccaaactaaaatttggcattaatccaggtacttctgccacattaactataaataaacctttgtgggcatacttttatacaaggagatagacttgttcaatatgtaatagctatgtgatgctaccccagaggagaattgaaaacaggcaa

SEQ ID NO: 372131 - DNA, 515 bp, Homo sapiens
tcttctgttctacacacatttgggcttcatgaatagttaaaaatccagtgcttttagggtggctgaaccatacccttagtagtttcactccaatttgacaggcagtatgaaaaagtcatttttcatttaatatgaaaaacaaattttccattggagaaatttktctctcagccctgaatgggtagatgtattttcaggatggagcaggaaacttgtattctggacagacactgtgtttgcagatttcacttatcctggtaactcttctgttttacttcttacatttttctttttaatccaagaaaattgcccaaagtgaagacaaatagagaaacagtattattaaaaataagtttatctttgttaaacttgctgcagggcaaaaagaaatggacttgaaagggaagtaaatttatactaatttttgcattgtaggaaatgtactattttagacactgactgactgcttctgttttctaaaattaaggagcctataatctcagcaccattaacaa

SEQ ID NO: 372132 - DNA, 603 bp, Homo sapiens
ttaattatttgatgctcagtccaagtagggaatagtcagcattaatttattaactagtttaagcaaactgaccttcttcaagtctcctgagtttgagggatgggttaaatagcacataacaaaaaccccaaaatttgaaaaagaagaataaaataattaaattggaagctgttatttataggactgatatattaataaccaaaatataactataagtggcaagtggatgatccattggttgataattgaaagctgattgcatttttataggtcatattccaaatctagctgacctaataaggtcttttaatagaccacatgttctagagttcatctgcctaccaaaaccttcttgcacaacgtcttacatatcatatactcacaattgtatttgttactaaatgctatatttcatatttctrttgataaagtcagtgttcactctgtctttaaaaatctctggaagggcttcgtcatttttttcttcaaaagggagaagagaatggaaaaataacgaatggatgtgttttgttatgagaaaactatttgctattgttaacattttcagggtagaaaaggacaagaatattacctctctttata

SEQ ID NO: 372133 - DNA, 475 bp, Homo sapiens
acagtaaggaggccacaatagctgtgtgatgtgatcaatgaggacaggcataatttaaaccattgtaaaggctttggcttttaccctgaggaagataggaaacctgaagaagatgggttctcagcagaaaggtgacatgagttctcagcagaaaagtgacatggtctgacttccgtgttaaaaggtttgctctggcaactgtgttgagtatagactatagcagggagactagttaggaggtgtctcagtcaacttgggctgctgaagcaaaatgccataaactgggtggcttataaacaacagaaatttatttttcacagttctggaggctgggaagttcaaaattaaggcactggctgatctgttgtctggtgagcgcccacttcctcacagatagccaatttctcactctgacctcacaargaggaaagggcaaggggtgtctcttgggagtttttatgagagcactaatccc

SEQ ID NO: 372134 - DNA, 662 bp, Homo sapiens
tgtatttaaacacaccattttattagttgcctttttttttaccccgcacttactctgtttactttttttcttttttgacctctattgtggtcacatakgttacttctctaagtttctctgacctcctattgtggctatacattttagttttctatatttttcaaaccgtacaattcactgttactaattttgctttatatagtcagttatctttttaagtgattaaaatcagcagaaaatgccttttatatttactctcattttgattattttcaatatccttcatttatttgtgtaaattcaaatttctttctggtattataccccttccttgcttgaaggacttcctttaatattacttattttagcagatctgtaggcagtgcattctctcagcttttgtttgccaaaaaagtctttatttcactttcattttttttctttgcaggttttattatacacaaagtggggtgggggctcagaccttcttggcagctgctttcctcatggcagtcaggatattgcctcagctcctcttgcttcctgttggtgcatatgtgtgttttcatccttttcttaatgaacttgagggcccgcttgtccttggagactttgagcagcttcatggcatgccactttcagggggaagccacacacctccc

SEQ ID NO: 372135 - DNA, 590 bp, Homo sapiens
ctaaaatgtaaaatttgcatggttttccaagctcaagtatttaggagttaaggatcacaatgtatgtaacttacccttaaatggtccaggggaaaaatattttgtgtgtgatagagagcaaataataaatacataaaatgttaacaggtgaatctgaataaaggttacaaagattttctttgtmttattcttattcttgccatttgtctgtaagcttgaaattatttccaaataaagttaaaatttaaaaattacacagcattttatttgaaattaacaatacatacttggattacacagcaacattcttacaaatacaaaacactggtttttatggggaaaaatgcagtaatttgtgagcaagtatgtaccatatcctaccaacttatcatcacttaggaataaatttcagactagcctaccatataataaaatatggcaatagtgacttgacttgaaaccatagcaggaaaacacaaacacaccagatagtttggcataactgcttcgcaaatttaatacaggcctgctgcaaaatgcagcaatctacaattaaagtgttatgtgatatctcttgtttgcagtaagat

SEQ ID NO: 372136 - DNA, 522 bp, Homo sapiens
caggtaattgaatcataggggcgggtttttccccacactgtactcctgataatgaataagtctcgcgagatctgatggttttataaaagggtagttaccctgcacacgttcttttgcctgccaccatgtaagagatgcctttcctcctccttcgctttctgccatgattgtgaggcctccccagccatgtgaaactgtgagtccattaaacctctttttctttataaattacccaatctcrggtatgtagttattagcagcatgagaatggacaaatacacctacttaataggagtatttaagaaaatcctggaaagataagtttctgttctgacagtctcagtcagccataggacagttttacaaatacaagatgactgggagaacttagggtaaatttttcgcttagggacaagggtgtttttatttaataaatgcttactaatgacctgcttctgttaacaatgggcagccttacacttagcttgacttttagtgactggtaaagaacagatatttaca

SEQ ID NO: 372137 - DNA, 497 bp, Homo sapiens
aaaagtgaagtgaatattgttgatctctggacactcaactttaaccaaccttttcctatagaaacaatcgtaataataagaaacttattttaatgaagaaggttttcattaaacaaatatatattctgttatttttttgttctcttaaccaattccatgtttaatttcaaatacactcaggctacacctaagatttttgaattgtttagtgagaaatctaaatgttttgcatatcactcttcatctgcacatatttctcaaactgcctacattataattacttaaagagaaccccatcagaaaatttctgaaccaggatcwctaaggatgtggtttgagaacctgcaatttaacagatgtccattggatcttgtgcacacgatattttgagaaacactacattagattgtgcttgtcctaagaatgcataattgccactatcgtttttaaatgtccaaaagtatacacctatcaaagactcaattattcattagttt

SEQ ID NO: 372138 - DNA, 523 bp, Homo sapiens
acactcaactttgattatttttcttacaagtaaaactaarctttatcatttatctttatcactttactcagtttagttattgaatcaaccatttctatataaggttggatcatcatttttaatacctagattatggtcaggggcagtggctcacacctgtaatcccagcactttgggaggcctagtgggcagatcatgaggtcaggagttcgagaccatcctggccaagatggtgaaaccccatctctactaaaaatacaaaaattatcagggcgtggtggtgggtgcctgtaatcccagctactcgagaggctgaggcagaagaagctcttgaaatggaaggcggaggttgcagtaagccaagatcatgccaccacactccagcctgggcaacaacagtgaaactccatcaaaaaaaaaaccaaaaaactggattatgttatattcctatttgatggcactgttaaggagatatttttcaaactgagtgttttagaagccaaggtatagaaaccagtgagag

SEQ ID NO: 372139 - DNA, 364 bp, Homo sapiens
ttcggggggagggggtagggatagcattaggagatatacctaatgctaaatgacgagttaatgggtgcagcacaccagcatggcacacgtatacatatgtaactaacctgcacattgtgcacatgtaccctaaaacttaaagtataataattaaaaagaaaaaaaagaaaaaaaaaactagcttcacactcaggaaatcatgaacatcagattatttaaaaaaattacttaatgtctcaactgcagtgctaacttaggtaggttatgtgttatttaaagccttactcatttcaraaatgaacaaaggaaagatactatgaaagctactagagtttttttcttactctaattttgggtgatactc

SEQ ID NO: 372140 - DNA, 592 bp, Homo sapiens
aatacatgatggacaaaggatacaacatttcaactagagagtgaaataagtttgatttactgtacaacatggtgaagatagtaataatatgctgtattcttgaaaatgaaaaagagtatattttaagtagtctcaccagaaaaaaagtatatgaaataatttgtatattaattagcttgctttaaccatttcataatgtatacatatttcaaaacaacatgaatgcattttattttctaaaatatataattttttaatttgtcaattaaaaaataaataaataagaaataaagctgggcatggtggcatgtgtctgtaatctcatctacttgttaggctgaggtgggaggactgcttgagcccaagagtttgaatccagcctgggtaacaaagtgaaaccctgtttccaaaaacaaaacaaaagaaaaagaacaaaatggagaccaacataatactcaggtttgrcctacaactttggagttcacgggtaagaacagtaaattcagaggtactaaattttaattgtaataaggtagcacttgttgaattcttacaatgtgctggcaaaatgctacgtgtttatttggattgc

SEQ ID NO: 372141 - DNA, 380 bp, Homo sapiens
tacttagaaagtgctcaataaatgtgagtttaatcaaattgaatgagaacatctctaagcctcaaaaatctgaaagctgcagcatggcagtcaaatttcaggagattaaccaaggattttatgtaaattttaattcgatttattgaatggaaagagttaaacaatgttcatagccacttgattatgatgttttcaaagttcattattcatggttatataagtaaaaaccatacaatacttttcagttaaaatgtatgtcaatttacttgatggtcatattagcccaatcagatagaaagttctctcttctggacagatgatgaactgaagctcatcttggctaaggaacttctctaaaacraaagctaataaataacaga

SEQ ID NO: 372142 - DNA, 627 bp, Homo sapiens
agttatctagaatggggtaaaatattaatttatattagaacagattatgccaaggaaacatgttgcaatctttaagataacatctaaaaaaaacttatgtaatcctaacaaggcatttgagaggaacaatgaaataacaagaacaataaataatacctctgtcaattcaaaacaaggtgagaaagaagagaataaggaatgcaatacatgtgaarcaaatagaaaataaatagatagaaagtcaatacccagtatttcataaatacattgaaagtgaagtgatgagctactgtgattaagagaaaagattgtcaggcatgattgaaaaaacatgatatgttccttacaagggtcacatttatagggtaatagaaaggttaagagtcaacaaattaatgaaaaatcgaaaagaaaataagaatgccaaaggaattggagtcagagtcagtcaagtggcaatgcctttactatattgtcttggggtccgggggacatcccaacatgggctactcctcaatcctggggagtggcctaggaacttatcttagattccttctagataggaaggagcatcaattgggaagaacgcgtccggcctccaaggatctctggctcactcttcttctt

SEQ ID NO: 372143 - DNA, 614 bp, Homo sapiens
gaaagttatatacatctctcccattaaagaaattatttaaaaagctgcaccaattcaaaattggaaagaattcacatatttgtcagagcttgagtggttctaagagtagtaaaaaggaattttccgtagtaacacttacaattttgttatccacatagaattttagaatgtgatggaaacattaagattgtgtgattaaatgtgcatattttaacaatgaagaaactgagagcaagggaggttacctaggtaatttttagcaagattcagtggcagatctcagatcagaagctattaaacctctgggacattttttaatcacacyaaattattttctatcattttatagaaatcacactttttcttttcaaattaaccacataaaaatgtttatcagagtctagtctgaagactgtataaataagaattaccccagtcagcttatcaaaaaggcagaaattgcattttcttaggctttaacctgtgatgtaccgaatcggaaattcaggatgtgttatcataataagtatttttataatcttttaggagataaagtttgagaaatattgctttttgaaatctagattatttacttatttactcattgcagtaca

SEQ ID NO: 372144 - DNA, 565 bp, Homo sapiens
gactttctccccaaaactcataacctaggtttgatcatgagactaattcaagcaatttccagttgagggacattytaaaacaacaacaaaacaaaacaaaaacatcctgatcagcaatcctcaaaactgtccaggtaaccaagagaaaagtcaagtctgtgtaagtatcacagccaagaggagcctggagacacaatgactaaatgcaatgtgatatccctgatgctattttggaacagaaaatggaaattaggggaacattaagaaactgtgaattaaagtaatagttttctttctcttccgtcctttccctattcccactattaacagttgtatatcttttcagtattttcatagaaggactcatatttatgccttttaaaaaatttgaacttataagattgtagtatacacattgttctgcaactttccttaatttattctacaagtaaaaacaattctgttcatttttttctatttcactagttattaaatcgttacaggataaagaatatgtcttcatttttgtaaagttcactcttgcaacggtgtttgacatttgtta

SEQ ID NO: 372145 - DNA, 565 bp, Homo sapiens
gactttctccccaaaactcataacctaggtttgatcatgagactaattcaagcaatttccagttgagggacattttaaaacaacaacaaaacaaaacaaaaacatcctgatcagcaatcctcaaaactgtccaggtaaccaagagaaaagtcaagtctgtgtaagtatcacagccaagaggagcctggagacacaatgactaaatgcaatgtgatatccctgatgctattttggaacagaaaatggaaattaggggaacattaagaaactgtgaattaaagtaatagttttctttctcttccgtcctttccctattcccactattaacagttgtatatcttttcagtattttcatagaaggactcatatttatgccttttaaaaaatttgaacttataagattgtagtatrcacattgttctgcaactttccttaatttattctacaagtaaaaacaattctgttcatttttttctatttcactagttattaaatcgttacaggataaagaatatgtcttcatttttgtaaagttcactcttgcaacggtgtttgacatttgtta

SEQ ID NO: 372146 - DNA, 481 bp, Homo sapiens
ggggtgtggaaatgatggagtggaaacgttgcaraaggccaaaaaatgttccaaaaattggggttcacagaaacactgggagaattctccctttaccatgaaaataagaaacacatagataaggttgcatcagaatcactaaagggatcagtagtttcgatttaacttgtaaggggaggggaagcctaaaagaggtgttaaaaggtattaaaataaaattctacttaaaaattttaccacaaaactccatatttaaggtcaattcaagcaaatggatctactgatatctaaaactaaaatataatcttggagaaacaaaaacaaaaccaaataaacctcaaaaacaatggttctcttctataaaccagggctaaaagctagggtttgagctaggagaggctattacataactaggcttgatgatagtaataacacaattgacaatcagtagtattaatattgatattaatttatttatgta

SEQ ID NO: 372147 - DNA, 481 bp, Homo sapiens
ggggtgtggaaatgatggagtggaaacgttgcaaaaggccaaaaratgttccaaaaattggggttcacagaaacactgggagaattctccctttaccatgaaaataagaaacacatagataaggttgcatcagaatcactaaagggatcagtagtttcgatttaacttgtaaggggaggggaagcctaaaagaggtgttaaaaggtattaaaataaaattctacttaaaaattttaccacaaaactccatatttaaggtcaattcaagcaaatggatctactgatatctaaaactaaaatataatcttggagaaacaaaaacaaaaccaaataaacctcaaaaacaatggttctcttctataaaccagggctaaaagctagggtttgagctaggagaggctattacataactaggcttgatgatagtaataacacaattgacaatcagtagtattaatattgatattaatttatttatgta

SEQ ID NO: 372148 - DNA, 481 bp, Homo sapiens
ggggtgtggaaatgatggagtggaaacgttgcaaaaggccaaaaaatgttccaaaaattgkggttcacagaaacactgggagaattctccctttaccatgaaaataagaaacacatagataaggttgcatcagaatcactaaagggatcagtagtttcgatttaacttgtaaggggaggggaagcctaaaagaggtgttaaaaggtattaaaataaaattctacttaaaaattttaccacaaaactccatatttaaggtcaattcaagcaaatggatctactgatatctaaaactaaaatataatcttggagaaacaaaaacaaaaccaaataaacctcaaaaacaatggttctcttctataaaccagggctaaaagctagggtttgagctaggagaggctattacataactaggcttgatgatagtaataacacaattgacaatcagtagtattaatattgatattaatttatttatgta

SEQ ID NO: 372149 - DNA, 481 bp, Homo sapiens
ggggtgtggaaatgatggagtggaaacgttgcaaaaggccaaaaaatgttccaaaaattggggttcacagaaacactgggagaattctccmtttaccatgaaaataagaaacacatagataaggttgcatcagaatcactaaagggatcagtagtttcgatttaacttgtaaggggaggggaagcctaaaagaggtgttaaaaggtattaaaataaaattctacttaaaaattttaccacaaaactccatatttaaggtcaattcaagcaaatggatctactgatatctaaaactaaaatataatcttggagaaacaaaaacaaaaccaaataaacctcaaaaacaatggttctcttctataaaccagggctaaaagctagggtttgagctaggagaggctattacataactaggcttgatgatagtaataacacaattgacaatcagtagtattaatattgatattaatttatttatgta

SEQ ID NO: 372150 - DNA, 477 bp, Homo sapiens
aagctttatttcctttacatatataagacgcatgtatttgccactacctgacataagatgttagaagttgagagacagatactaggaggtggaatccagccacctaaattccagaggagctgaaagaaagcaaggatctgcaatttggtgggtgcagatctaaacataccaacagagataccctctgcagttgatgaatatgaaactgaggatgcaatgatattattcaaatatacaggtaatctatattaattattcaaagtatacataaaatcrtatatttttttttagagacagggtctcactctgttgcccaggcaggagtgcagtgccatcatgacagctcactgcatccttgaactcttaggcttgagggatgctcctacatcagcctcctgagcagctaggactataggtgcacaccaccacatccagctaggtttttaaaaaaattttggtagagacgtggtctcgcca

SEQ ID NO: 372151 - DNA, 491 bp, Homo sapiens
tggcagggatgtgtgttgtgttttctagaataaatttctgactattcatatgcacctgatacccacacacaggcctctaccacccatctccaccactgccwcacacacacacaggcttgccaaggctgagggtcaaaaggattagttttgcttagccaggtgtgcttgtgtggggtagggatgaaagttggaattaattctttttcatagtctctgaatatttaagtttgaacatcagcaagagagagctttgagctaacagtgaattcttaaactcagtaaggagaaattcattccttaatttgagagatgcaatgccaacctcagtgccaagaaaagaagtagagatggcaaacaggaatgtaatacagagttgttacaaaggcttactactgtgatccaatacgctttcccttccatatttttatggtaattttaagcatacaaattgaaacagttttgcaataaacattcacacataaaactaacca

SEQ ID NO: 372152 - DNA, 605 bp, Homo sapiens
tatattctttggatgatgggtggagtattctgtagatgcccattagatccaattggttgagtgtcaaatttaagttcagaatttatttgttacttttctgcctcagtgatccatctaacgttgtcagtgggttgttgaaatcccccacttttattatgtggctaagtcttttcataagtcgagaagaacttgttttatgtatctgagtactccaatgttgaatgcatatgtatttaggatagttaagtcttcttgctgaattgcaccctttatcattatataatgtcatctttttccttttttactattgctggttaaaaatctgtttcatctgacataagaatagtsactcttgatctttttttttgttttccatttgcatgatagatctttcttccaccctttactttgagcctatgggtgtcattatgtgtgagatgcatctcttgaagacagcagacagatggatcctgcttttatatccaacttgccattctgtgccttttgagtgaggtgtttagaccatttacattcaaggttaatattggtatgtgacgttttggatctattatgaagttgttagtagtctgcttcgtagtttctat

SEQ ID NO: 372153 - DNA, 587 bp, Homo sapiens
ttctcaatataaaattagctttcttccagtaaatcttttatttactcatattatatcacatcaaatttagacaatagaataaytttttaaggaaaaatatgctgttttttacattgtttgcatcataggctatacatgggaaactatatgaagtatgtttaaagtttaggatgtaatctcatcttttaggcttgacaagaaatagaaaaatgcttctcatttctaacccaaatgtgcaataaagaagacatctctttattctacctttaaaagacaagccatcctttagtacagttacccataatgatttttctggaattctgacttcagaatgactccatctgcttcctagaaagaagcttggtgacatggcattgatctctgggaaaatgtcaatttgtggttccttctactgttctgttccagactaggggaaatagcttgaaagaaactgaaggaatattattcagcctttaaaaagaaagaaatcctgtcttttgtaacaatatggatgaacctaaaagacattatgctaagtggcgtaccccaaagacagaaagacaaataccacatgacctcacttatat

SEQ ID NO: 372154 - DNA, 587 bp, Homo sapiens
ttctcaatataaaattagctttcttccagtaaatcttttatttactcatattatatcacatcaaatttagacaatagaataactttttaaggaaaaatrtgctgttttttacattgtttgcatcataggctatacatgggaaactatatgaagtatgtttaaagtttaggatgtaatctcatcttttaggcttgacaagaaatagaaaaatgcttctcatttctaacccaaatgtgcaataaagaagacatctctttattctacctttaaaagacaagccatcctttagtacagttacccataatgatttttctggaattctgacttcagaatgactccatctgcttcctagaaagaagcttggtgacatggcattgatctctgggaaaatgtcaatttgtggttccttctactgttctgttccagactaggggaaatagcttgaaagaaactgaaggaatattattcagcctttaaaaagaaagaaatcctgtcttttgtaacaatatggatgaacctaaaagacattatgctaagtggcgtaccccaaagacagaaagacaaataccacatgacctcacttatat

SEQ ID NO: 372155 - DNA, 587 bp, Homo sapiens
ttctcaatataaaattagctttcttccagtaaatcttttatttactcatattatatcacatcaaatttagacaatagaataactttttaaggaaaaatatgctgttttttacattrtttgcatcataggctatacatgggaaactatatgaagtatgtttaaagtttaggatgtaatctcatcttttaggcttgacaagaaatagaaaaatgcttctcatttctaacccaaatgtgcaataaagaagacatctctttattctacctttaaaagacaagccatcctttagtacagttacccataatgatttttctggaattctgacttcagaatgactccatctgcttcctagaaagaagcttggtgacatggcattgatctctgggaaaatgtcaatttgtggttccttctactgttctgttccagactaggggaaatagcttgaaagaaactgaaggaatattattcagcctttaaaaagaaagaaatcctgtcttttgtaacaatatggatgaacctaaaagacattatgctaagtggcgtaccccaaagacagaaagacaaataccacatgacctcacttatat

SEQ ID NO: 372156 - DNA, 611 bp, Homo sapiens
  misc_feature (1)...(611): n = A,T,C or G
nnnnnnnnnnnnnnnnnnnnnnnnnnnnnnnnnnttatgttaggtggccatatgatcagctaaactttctaatagtataaaaaagaagagagggcatatacaaattgggagataaacagtagtttctctcatagacctgataaacatattatgtttgcttttagttgcggaagaaacttgctaaaatattctgccacttattttgccattaatatatagagatagtgacaaacttaagatgaaatgcaacatagaacatgaagtcaattggaaatacatattatttattcctaagtgcatcttagacatctgtaagttggatttgtaattgatgtctgatgttagatcacaaagaaatgaaggtatgttatctaagaaattttttttgccagtggtcctatctccaacactccttccttgaatggacattaaaatacctatgcataaaccttcaccatattaatagaaattaaaaatgcaaaaatcatgcagaagcacatggagtattttgttcacrggttgaaattttgtcagctgtgtatgaatagaatgactttgacctataaaataaaagattttgttaaagctactagactctctttcctctgttt

SEQ ID NO: 372157 - DNA, 596 bp, Homo sapiens
tttttttcttaacttgcaatctaaagacttccctcttatcgttgtatgatttctctcctctattaccaattttctcctcctgtcagaatacagacaagcttcattctttttttattaaaaagtaaggtccttgatccctcccatctctttccagtcactgacccaaagttgctgactacacttgcattccctacctcccacccttgcattctgtcttcraccctttttatttacactattttatctataagtctctagtttcccctttaatgatttcatcttacttacattcttcttcagattcatatttaaatacatgccttccgctcctgctactttggattctatttctgtatggatcaatgttcacattacaggaattcacactataacagactaacttgccacgtactaaaattacagtacaattctcctcaagtggatacaagctattgtttcattttcctttcacagtaacactacttacagtgatatgatatctttagagggcctagaaggcggaactcagcttgcccttacactaattgccctcttcagctgtagtatttttatgtacatgcagacttacctgaaat

SEQ ID NO: 372158 - DNA, 606 bp, Homo sapiens
gctggctaacatggcaaaaccccctctctagtgaaaatacaaaaattagctgggtatggtggcacacgcctgtaatcccagctgtgcatgcctgtaatcccagctactcaaaaggctgaggcaggagaatcgcttgaggcctaagacagaggttgcagtgaggccagatcgtgccactgcactccagcctgggtgacagagggagacttcatctcaaaaaataaaaaattcaggataatatttagatactggctcaattaaaatgttttaaagaagaggaattgagaaatagtgtaggctgtaaaattaaaagttacaatgtttgaattaattgattaatgttttatctttttagcttttcccacaaaaggaagcgtaatttcttaaaacacagatgttatatcrgattagttgtgtttttcttttttgcttcggtgaaagaactaaattagtactaaaatttaagattcttttttcattaccaacataaaacattagattaagaaaatatatttaactaaaaacactggccttgccaatggagttatcactgttgaaaattttctttttctgttttctattctttatatcaaaaattcatcaatt

SEQ ID NO: 372159 - DNA, 573 bp, Homo sapiens
tttgggagttaggtgatagtgtcccaatttaatataaggtgatactaaggctcggcrtcctttaacctgtcattagtcaaggctgtacaacctaagtgaatgagccaaggttcaaagtgaagtttttctgattttaatccgtcaggtttccatgttctataatcgcctctcatatattctttcattatgtttcctgaaatgtctgtacagtatgatgattgtagcatccccaaattttttgattctcagagtgtgcaggacattttaaaaccctacaatgtattatcacagagctttttcagagtaactattttaatttgtgaggtttttttctgaagaactgggtttttaatgtttaaatccctgaagccatctctagataatgcagattgaagtagagtccaattaccttctattctagaaattttttattggccaattccaaaaattcagatcatcatattcactatggcattctgacacttacagaatgaccattaaccttgcttaaattctatcaaaagtcactgttagcaaagtactgggaacataataagcgctcaataaattcat

SEQ ID NO: 372160 - DNA, 573 bp, Homo sapiens
tttgggagttaggtgatagtgtcccaatttaatataaggtgatactaaggctcggcatcctttaacctgtcattagtcaaggctgtacaacctaagtgaatgagccaaggttcaaagtgaagtttttctgattttaatcygtcaggtttccatgttctataatcgcctctcatatattctttcattatgtttcctgaaatgtctgtacagtatgatgattgtagcatccccaaattttttgattctcagagtgtgcaggacattttaaaaccctacaatgtattatcacagagctttttcagagtaactattttaatttgtgaggtttttttctgaagaactgggtttttaatgtttaaatccctgaagccatctctagataatgcagattgaagtagagtccaattaccttctattctagaaattttttattggccaattccaaaaattcagatcatcatattcactatggcattctgacacttacagaatgaccattaaccttgcttaaattctatcaaaagtcactgttagcaaagtactgggaacataataagcgctcaataaattcat

SEQ ID NO: 372161 - DNA, 491 bp, Homo sapiens
tgtgatatgtctaataatatttatgtatgcaatgcaacaaaaggaaaataaatatacactgttttgccacactaaagagaagtgaaggttataataactaacattagtgttgatgcccatatatttctctaaggcttttcatacaaattgagatgagccacataatagaatcaaagtaaataaaagctctgtggttgcttgttgcctgtgagatggggcagttctggtggagaaaaagcactgcattcrgtaaatattctatttaaataatggaggacacctggtgtgagtgagcataagccaattttgctgatgtttctttattttttttcatttttagtaaactgagaaaactaaatgtgattttatctgacagttgcctctcccaggaggataaaactgttttatatttttaagaacattattaaagtatgtagtttttaatcactgatgtcattatggataatttatatctagaataatattatgaa

SEQ ID NO: 372162 - DNA, 491 bp, Homo sapiens
tgtgatatgtctaataatatttatgtatgcaatgcaacaaaaggaaaataaatatacactgttttgccacactaaagagaagtgaaggttataataactaacattagtgttgatgcccatatatttctctaaggcttttcatacaaattgagatgagccacataatagaatcaaagtaaataaaagctctgtggttgcttgttgcctgtgagatggggcagttctggtggagaaaaagcactgcattcggtaaatattctatttaaataatggaggacacctggtgtgagtgagcayaagccaattttgctgatgtttctttattttttttcatttttagtaaactgagaaaactaaatgtgattttatctgacagttgcctctcccaggaggataaaactgttttatatttttaagaacattattaaagtatgtagtttttaatcactgatgtcattatggataatttatatctagaataatattatgaa

SEQ ID NO: 372163 - DNA, 512 bp, Homo sapiens
attaactaatttggtaattccacaaaaatatactggatgacttctttgttcaaagtattgtgatccagataaatgagaaagttgatagaatayaaacaaaaatgtaaaggaaatcacagagttgccatagaaatgtatagagaagaggcattcacttctcttgttgaaagtgttcttctggtacagtacaaatgttaatttggagctactgtatcatgttattaaaagttctagtgtgataatacaatctctcctttctgcctcaagtggctaagtgtatttgttctaagatttgtgtttgtttaattttaaaatttcattcgctatgctagtcactctggaatgcttgatttcccaatcagcctagtccctagacctccctgaccccagctctgccatttaaggtgcaagtttctccctctttctttcccataactcatggtattcccctaatgtagaatttctaggtatggctatttttctagaggatcaacttcttgcaagttacagcc

SEQ ID NO: 372164 - DNA, 583 bp, Homo sapiens
gggatggaatgttttttcatttgtttgcatcatcaatgattttttttcagcagtgttttggagttctttgtggctatcataagtgggattatgttcttgatttgtttctcaccttgaatgttatttgtgtatagaattgctactgatttttgtatattgattttgtatcctgaaactttactgaggttgtttattggtaccaggagccttttggcagcgtctttagggtttcctaggtatagaatcatatcttcagtagagacatacagtttgatttcttctttttctatttggatacatttttatttctttctctcgcctgattgctcttgctaggactcccagtactatgttgaacaggggtggagggagtgggcatccttctcttgttccagttctcaaaggtaatggttccagcttttacctgttcactctaaagttggctgtgggtttgtcatagatagctcttattattttgaggtatgttcctttgatgcctagtttgctgagggtttttatcatgaagggatgttgaattttkttgaaagctttttctgcatctattgagatgatcgtatggttt

SEQ ID NO: 372165 - DNA, 421 bp, Homo sapiens
attaattactgtcagtaggagattttttcagcattagaagaaatgtgggttattttcccagaaataccacattytttcatccttacctcagccccatgagcaatgacagctttttataattagtgatccccagataatattgcttttttctaatttacttctgcctaggggatagtaataactatttgctcttattatactctgagtaacattgcccttctttttattcatttttgttcctgaagtccttctactttctaacacttccataataaatttcctatattaaatccctttctgaatgaaatacctagagtagattgacatcaaaaaaaaaaaaaaaaaaaaagaagtttggagtgtctgctccatgttggataaaaaaactaaataaaatcctgggaaatgtgaagaatgccaa

SEQ ID NO: 372166 - DNA, 421 bp, Homo sapiens
attaattactgtcagtaggagattttttcagcattagaagaaatgtgggttattttcccagaaataccacattttytcatccttacctcagccccatgagcaatgacagctttttataattagtgatccccagataatattgcttttttctaatttacttctgcctaggggatagtaataactatttgctcttattatactctgagtaacattgcccttctttttattcatttttgttcctgaagtccttctactttctaacacttccataataaatttcctatattaaatccctttctgaatgaaatacctagagtagattgacatcaaaaaaaaaaaaaaaaaaaaagaagtttggagtgtctgctccatgttggataaaaaaactaaataaaatcctgggaaatgtgaagaatgccaa

SEQ ID NO: 372167 - DNA, 421 bp, Homo sapiens
attaattactgtcagtaggagattttttcagcattagaagaaatgtgggttattttcccagaaataccacattttttcatccttacctcagccccatgagcaatgacagctttttataattagtgatccmcagataatattgcttttttctaatttacttctgcctaggggatagtaataactatttgctcttattatactctgagtaacattgcccttctttttattcatttttgttcctgaagtccttctactttctaacacttccataataaatttcctatattaaatccctttctgaatgaaatacctagagtagattgacatcaaaaaaaaaaaaaaaaaaaaagaagtttggagtgtctgctccatgttggataaaaaaactaaataaaatcctgggaaatgtgaagaatgccaa

SEQ ID NO: 372168 - DNA, 421 bp, Homo sapiens
attaattactgtcagtaggagattttttcagcattagaagaaatgtgggttattttcccagaaataccacattttttcatccttacctcagccccatgagcaatgacagctttttataattagtgatccccagataatattgcttttttctmatttacttctgcctaggggatagtaataactatttgctcttattatactctgagtaacattgcccttctttttattcatttttgttcctgaagtccttctactttctaacacttccataataaatttcctatattaaatccctttctgaatgaaatacctagagtagattgacatcaaaaaaaaaaaaaaaaaaaaagaagtttggagtgtctgctccatgttggataaaaaaactaaataaaatcctgggaaatgtgaagaatgccaa

SEQ ID NO: 372169 - DNA, 621 bp, Homo sapiens
catatatacaggctttcattaatgaaaacagaatcagagtgtcaatttgatgagttatctgtgtccamtttggatccttagggaagagttcacccttgaaccacactgatttaattaaaatgttttaaaatattagctaaataagcccccatttaaagtccttcaaattcacttttaagtcaattcagccctttagacatgctcttaatgtttagcttcctgcatctctgctgtagttgctgttttattttattttttctttttcctccagttgtcctcaatataaattgatgggaacagcacacatacaatattgtaaaatgctcattcctgtttttggactgctggccaagcaactctttcccattgaacattggcagcacagtgtgatttcttttatgattttccatttctatgagttttctttgcaatttggcctagaaaatgggatcctgggaagttctaagggtctaataaccaggggcctttggaatttatcagaggcagaaacgatgccagctcaaatgcaagcatttgtattattgtcctcttcaaaaataatggcaaattctggggtttattgttttttaccaggcagagtaagtaaatatttcaaataga

SEQ ID NO: 372170 - DNA, 575 bp, Homo sapiens
tataataaaagtggcagattatcttgttyggtatgatatgatataccctgattatcataaatagaatatataaaatgatatatgtcatatcatatattataataatatatatgtcatatgtgatacaggtggcagattatcttgttaggtatgatataatataaatgactatatatcgtagcccccatcacaaccacactgaagtagggcattaccatgactcattagccagctaagtggtctctgcttcttctcttggttgttaacaaactgcgttctgtaaagctacctgagtgattcccctcgcatagtaataacactacccctttttgtagattatttcaccccttcctatgccagtaagaataaattccaaaattcttataacagcttacatgcttttactctaccagatcaggcatgcttctgaacccaaagcattctttgtttttgccactgcctttacactcttccttgcaatatattaatgttttgctcccatacctccattaggaagttattaaattctgccttctcagttaatccttcaatgatgaccatatttaaaattggcc

SEQ ID NO: 372171 - DNA, 649 bp, Homo sapiens
gttttagaaagaggagtgacacatgtggaacagaatatcagagctgggttcaaggctcaacaccactaatttcttggctcgaaacctgcataagtcactgagccttagttccttagtcactgggtaaaactagctgcccctccaccacctcctttgactagaggctcccaggagacacacagccagctttacaaactgtatagccctcagaatgaaagaagctgccattaagatgcaaatgtcttctaagagagctgagcctctgggcagagaggagaggccagtggaattggygctggagtcttcaagatttcaatcagggctcccaggatcttagcaagttccataatctctctgggcttcagtttcttttgtaaaatgagaacaccacccaggtggttatgaggattcaatgagttgacaaatggaaagtgcctattacatagtaagtattcaaaaatgatagttacaactattactcttactaccactatggccactactactttcccacaactagccctctcctactgcagagaacttacaccagtaacacagttagagcaacaccccccaagagggtgctcctgaaatggctggatttcctgccaaggggaagaggaggagtccactttggagagggtaagca

SEQ ID NO: 372172 - DNA, 519 bp, Homo sapiens
tccaatcactggagttggcatggtttgaataaattgcagtgttggtataaatattagctggttttgctggactagctaaggcaaccaccaaaaagttgtatttgtctaatgaaaattgcaaggtaagggtcttattttcttgctaattgtgggtatgagcattaagcccttttaggatagcaaatacttgttctacaggtgaacaattatctacctcagtgatctcttaagtttctaaatgactgrgtagttgaagaaaacttaataaatatttagtgaaggcaaatgatacactcttaaccctactttcaaatttaatttgaagcctatctgttctgtgtttcaaatatcctgtttctagtcttgattcttccataaccagctatgtgatcctggaagtaccttaactcttcatctgagaaataaatgtggtgtctaaatgtttcaacaatgtcagcgacatgaaagacaaagaagaggtaagcaactgttccagatgaatgacagctaaatgcaata

SEQ ID NO: 372173 - DNA, 519 bp, Homo sapiens
tccaatcactggagttggcatggtttgaataaattgcagtgttggtataaatattagctggttttgctggactagctaaggcaaccaccaaaaagttgtatttgtctaatgaaaattgcaaggtaagggtcttattttcttgctaattgtgggtatgagcattaagcccttttaggatagcaaatacttgttctacaggtgaacaattatctacctcagtgatctcttaagtttctaaatgactgggtagttgaagaaaacttaataaatatttagtgaaggcaaatgatacactcttaaccctastttcaaatttaatttgaagcctatctgttctgtgtttcaaatatcctgtttctagtcttgattcttccataaccagctatgtgatcctggaagtaccttaactcttcatctgagaaataaatgtggtgtctaaatgtttcaacaatgtcagcgacatgaaagacaaagaagaggtaagcaactgttccagatgaatgacagctaaatgcaata

SEQ ID NO: 372174 - DNA, 612 bp, Homo sapiens
gtatttttttccattctgtgggtcatcattgatggtatccatttgtctattctttcttttgttgtttgtgctttttggttgttgattgtttgtttgtttgtttgttttgaaacagggtctctcagacccgatggctcacaaagacaccccataggctcacagaggagctggctaccaaattctgtcactcaggctggagtgcagtggccccattttggctcactgaaacctctgcctctgggctcaagcaatcctcccacctcagtatcctgagtaactgagattacaggcgcatgccaccatgccccatgcctagctaattcttgtatttttkgtagagatgggatctcactatgttgtccaagctggtcttgaattcctgggctcaggcgatccgcccaccccagcatcccagggtcctggatgtataggtgtgagccatcacaccccagcctgcttgtgcttttgatatataacaaggctttgcctaactcgaggtcacaaagatttactcctatattttcttctaagagttttacaattttagccattatatttagatctgtgctttgttttcatttttgagtatgatgtgaagaatgggttcttaat

SEQ ID NO: 372175 - DNA, 561 bp, Homo sapiens
taatttgatctccttgtaatatgaagtgaaacgtgcctgccccttatttcctggggaattttttagggtactagtgatgatttgtacctacctggagccttcaggacattgacttttggcatgttaaagttgtaaagcytattgttatttttttataccatagaatcatacacaaagaaaatacacgtgcataatattcacatatgttttgccaaaagtgtgaatagtgatgtgttaaacttgagtttttccataaacaaaattgtcctgagggtatggaagagtaattcctgtttaatgcaatgaaggatcatataatccattaaataatagtattccattcttgccttattttctttctttctttctttctttttttttttttttttttctttttttgaggtggagtcttgctctgtcgccaggctggagtacagtggcgtgatcttggctcactgcaaactccgcctcctgggatcaagctattctcctgccacagcctcccaagttgctgggactacaggtgtgcaccaccacacctgaccaatttttgtattttta

SEQ ID NO: 372176 - DNA, 632 bp, Homo sapiens
ctactttttactcacgtatttggatatgtcaagaatgcataaataaagtagaagaattactatcctgaaatactaggtgtttttgcattgtatccggtgatctttgaatttggcatccaggtccattacttatttccattgcagatttcctactttttggtggacagctccatttttcacagtttggccaggactgtgagccagaaacatctttaggttgccaaagaagcacagctgtggaggaccagcttgttacgtccctgtcttggcctctccaacaacaatcaggaaggaatcsaaccctctcttaattcctaggaccattgttgcttcttctcaagggattaagtatagtctatattctctattctatctccttataacttcagctcccaataactcactctcagccttttccattgtgacgctgcagaaaactatgtgttgcttcactaatgccatatctcttttaatgccatagaaggaaggaaaatttaacagggagagaggtcatactttttgaagtataagtttatgtttttttccagggcttctatatcattagtgggagattgaaccacttatatcataaataaaatatcacttataccttatatttgaataggagttta

SEQ ID NO: 372177 - DNA, 644 bp, Homo sapiens
tctttccttgaaagttatagtttgtgtcttatgttttgttttttgtttttgtgtgtgtgtgtggctaatgttttgatttttattttgtccagactactagtttctaattagtttatcttctgtgcattcttttatgtgtctgaagtgtgatttaaaagaaacctaacctgctcaaatgtcaacactcatggaataaacacattgtctcagagtaaatcatggtcccagaagagtccaaggcaggggtgcaggtggtaaaatcagaaggacacatttttattattgttgttacttaattatacacgagtagattctccaccccagcaacataaggtcatgatggggcagtatgtccatcgttctttaaagaagggtagggtagctggagtaacctatctgtagcgacttacataaattgaagaagtattgttactaactgtcccaaatggaaatagtcttaaaatatgcacattagactttttcatctgagatctactttgctcgcaatattttgttcacacataaaaacaaaaaayacaacaaagcaaaacctctggaaagctctgctcacagagcctctgaatccttaggaactgggaatcaatcttatgccaataggctagtgtatctatttaggagaagta

SEQ ID NO: 372178 - DNA, 597 bp, Homo sapiens
agtggttgcctggggcaggtgcaagaagaaacagagattaacaatagacatgaatgatggaaatgttctaaggctgattcatagtaatggttgtacaacttagtaaatgtactaagaagtcattttatatattaaaaattgtatacttgaaaatattgaattatatgatatgcaaaataccttactagttatctttttaggaaacattactgtaaataaaataaaaaggcaagccacagactgggagaaattatatgtaaaacrtatatctgataaaggacttaaattcagaatatataaataactcagaactcaataataaaaagaaataacttggttttaaaaataggcaaaagatttgagcaaatacttcatcaaataagatatacaaatagaaaacaagcacatggaaagatgctcaacattattagtcattaggaaaatataaattaaaaccacaatgcactggattagcaaaaatgtcagagtaagaacctctgaaaattctttcttccataaaagcaaccagaaaactagcaaaaattgtcacagtcagtttttttcagaattgagaatcagccaaaggcttacagggat

SEQ ID NO: 372179 - DNA, 625 bp, Homo sapiens
gacctgtgtaagggttaatgcatgttcatggctatctgcatgctcaggaaagacctgggaaggccataagctctcacctctgaatgacctttaggctctgtgcaaacattaagtgaaggctaaggcagagttgcttactgcctagctaaatgttgaaggtgtgctccaacatatgcacagagctcctcaggaaagactgagagacttaytggttctaagcatttaaggaaatctctgtctaatcattagctgaccactaagctaacctaataaagccttcagtgctcacacatcacaaagaagactttacagattaattcaaaaaaggtgactaagcctcacgtctgtaatcccagcactttgggaggccaaggcgggtggatcatgaggtcaggagatcgagaccatcctggctaacatggtgaaaccccatctctactaaaaataaaaaaaattagctgggcgtggtggtaggcacctgtagtcccagctactcaggaggctgaggcaggagaatggcatgaacctgggaggtggagcttgcagtgagctgagatcatgccactgcactccagcctgggcgacagtgcaagactccatctcaaaacaaatatatatatatata

SEQ ID NO: 372180 - DNA, 659 bp, Homo sapiens
cagtaaaagtaactacataagaaaataaaatgatagtataagcatattttttgtttttaacactttctcctatctgatttaaaaggcaattgtataaaacaataatctaaatctgtgttgatcagaacacaatttataaagatgtaatttgtgagacaagagcacaaagaaggggacggggaatggagttttttaaccctattgaaattaatttgatattaatctgaagtaagatgttataaattaatatgtcarttataatccccaagtgaatcactaagcaaataacttttaaaatagtaaaaaaccaaaaagacaagaaaattaaaatggtccatcagaaaatatctatttaacacaaaataaggtagtgatggacaaataaacaaaagggcataagatgtatagaaaacaaatagcaaaatggcagacataaatcctattttatcaggaattactttaaatgtaaatggattaaataattaaaggcatagataaaatagttaggaaaacacgatccaactatatgttgtccacaaaagacacctgtttgtttaaagacacaaataggttgaatgtaaaaggatggaaaaagatataccatgcaaacagtaactaaaagaggactggagtagctgtactaatatcagacaaaatgt

SEQ ID NO: 372181 - DNA, 607 bp, Homo sapiens
ataaaatagttaggaaaacacgatccaactatatgttgtccacaaaagacacctgtttgtttaaagacacaaatagkttgaatgtaaaaggatggaaaaagatataccatgcaaacagtaactaaaagaggactggagtagctgtactaatatcagacaaaatgtaatttaatagatttcagaattgttactgcagacaaaggacattttataataataaaagggtaaatctgtccagatgatataacaattgtaaacatatacacacttagcaacagagttccaaaatacgtggagtaaaaactgacagaattaaagggcaatcaggcaagtcaacaataatagttgtaaacttcaatactcactttcaataattgatagaacagctaggcagaagattatcaacagggaaatagaagacttgaacaatattgtaaaccagctagtcgtaacaaacatctatagaacactctactcaacaacaccagaatacacattcttctcacatgcacaaaaaacattctccagcatgattacatattaggctacaaaacaagtctcaataaatgtgaaaggatttagatagaaagtatgttttccaaccaca

SEQ ID NO: 372182 - DNA, 607 bp, Homo sapiens
ataaaatagttaggaaaacacgatccaactatatgttgtccacaaaagacacctgtttgtttaaagacacaaataggttgaatgtaaaaggatggaaaaagatataccatgcaaacagtaactaaaagaggactggagtagctgtactaatatcagacaaaatgtaatttaatagatttcagaattgttactgcagacaaaggacattttataataataaaagggtaaatctgtccagatgatataacaattgtaaacatatacacacttagcaacagagttccaaaatacgtggagtaaaaactgacagaattaaagggcaatcaggcaagtcaacaataatagttgtaaacttcaatactcactttcaataattgatagaacagctaggcagaagattatcaacagggaaatagaagacttgaacaatattgtaaaccagctagwcgtaacaaacatctatagaacactctactcaacaacaccagaatacacattcttctcacatgcacaaaaaacattctccagcatgattacatattaggctacaaaacaagtctcaataaatgtgaaaggatttagatagaaagtatgttttccaaccaca

SEQ ID NO: 372183 - DNA, 521 bp, Homo sapiens
acccgtcaatcctattattacgtatttgccctagagttgtgccattttttcrtatgttagaacttgaaatgggaatgtagtaatttctttaagataataacaccaaataaaacattttctaacaaaattcctatttattttaatccccgggagtctttaaaattctaagtagaacagcttattctaattcctaaatcttatctataaatatgtttggattaacataaaatgcattttagaattgtgcaagtgttttttttttaatcattgcttttttgtatggactgaaacttttctgttttgagagacagattttggctgtacgtagccccagtgtcaacataaacaaatgactgatttcattagaaacctgaagttacagctttaattttctggtgtcatcgtggatttattcttagattttgaactttttttcttttcatatttttgtagatttgttgcttcacctctagcaaaatcatttggcattaaagagacagttcgaaaggttacaccaaata

SEQ ID NO: 372184 - DNA, 521 bp, Homo sapiens
acccgtcaatcctattattacgtatttgccctagagttgtgccattttttcgtatgttagaacttgaaatgggaatgtagtaatttctttaagataataacaccaaataaaacattttctaacaaaattcctatttattttaatcccygggagtctttaaaattctaagtagaacagcttattctaattcctaaatcttatctataaatatgtttggattaacataaaatgcattttagaattgtgcaagtgttttttttttaatcattgcttttttgtatggactgaaacttttctgttttgagagacagattttggctgtacgtagccccagtgtcaacataaacaaatgactgatttcattagaaacctgaagttacagctttaattttctggtgtcatcgtggatttattcttagattttgaactttttttcttttcatatttttgtagatttgttgcttcacctctagcaaaatcatttggcattaaagagacagttcgaaaggttacaccaaata

SEQ ID NO: 372185 - DNA, 521 bp, Homo sapiens
acccgtcaatcctattattacgtatttgccctagagttgtgccattttttcgtatgttagaacttgaaatgggaatgtagtaatttctttaagataataacaccaaataaaacattttctaacaaaattcctatttattttaatccccgggagtctttaaaattctaagtagaacagcttattctaattcctaaatcttatctataaatatgtttggattaacataaaatgcattttagaattgtgcaagtgttttttttttaatcattgcttttttgtatggactgaaacttttctgttttgagagacagattttggctgtacgtagccccagtgtcaacataaacaaatgactgatttcattagaaacctraagttacagctttaattttctggtgtcatcgtggatttattcttagattttgaactttttttcttttcatatttttgtagatttgttgcttcacctctagcaaaatcatttggcattaaagagacagttcgaaaggttacaccaaata

SEQ ID NO: 372186 - DNA, 594 bp, Homo sapiens
tttatgacaacattggtactacaggaaaggacagacatttgaatgtccatgtacaaataaatgagtcttgattctcatcttaaaattcatacagctctaagtattaatctagatgtgacaggtaaaacaatataacttctagatcttcactgtccaatatggcagctgctagccacatgtggctattgagtacctgaaatactagaaaatttaaaattacatatgttactcccagttttcttcctactgaacagcattgttctagatgacaaaacagaatatatgtatgaccttgggtagacagtgatttcttttttttttttttttttttgagatggagtcttgctctgttgcccatgctggagtgcagtggtgcaatctccgctcactgcaagctccgcctcctaggttcmtgccattctcctgcctcagcctcccaaggagctgggactacaggcgcccaccaccatgcctggctaattttttgtatttttagtagagacagggtttcaccgtgttagccaggatggtcgcaatctcctgaccttgtgatctgcttgcctcagcctcccaaagtgctgggattacaggtgt

SEQ ID NO: 372187 - DNA, 588 bp, Homo sapiens
ctgggctaataataatctacatttactaagtccttgctgtgtgtacgtgcattttcccctttagggctcatgatacgccactttcagacgaggaattgaggcttagtgagatttacagtggtacagtagggatgtgagaaagccacagctttattgcatttctgcacactaagatatatgatttcagctcattctatattcccattctattccattaaccccctacagggtccttgtgtggagggattcctgaagctatgataatattcaaatactcgaatttggtgtcttataacaaaaggccaaaatcaatcaatcaatctatcacctgcttctgctgttggaggaaggcttggtgtggtggacagaacattgactagaaagacagatcaaaattcaaattcctgcatcctgcttactaactrtgaccctggcaagtcactgaaattccttttttatttttttgagatggagtcttgctctgtcactgaggctgcagtgcagtggcatgatcttggctctctgaaacctctgcctcctgggttcaagcgattctcgtgcctcagcctcccaagtagctgggagtat

SEQ ID NO: 372188 - DNA, 460 bp, Homo sapiens
ggatgtttttctgcactcctgcaccatttccctgcctctcctgtaaacgctcacacccactgcaccccaccctcstccaagaactaggatctttgtcatcttgttcttttccaaggggtgctttatcttgcgggggctgtaggctgtacaacaggaaaccctgcctgcaaacattacataagaaacacattttaaaatattaaaatttggagcttgcttcatcagtgtaccttagtaaccccaaatcctttcctaaaagtgacccagcttcctctttatctgtgggcaacagagagatgttccaaattccttcttgatcaaggtcctactctttttcataaaatgattcctttggtggcactgcccaagcaagtttcatgaggtaagaaatcctgctgtcactgaggaaatcaccccgcaaaagacactatccctcagaaaagccactcccccaccaaca

SEQ ID NO: 372189 - DNA, 579 bp, Homo sapiens
actggcccttaaactgggtttcctgactgcagagccactgttctctcgaaagtttttaggcaagacttacagctgcttgtggtatatgaagtgctgcattcactcattttggtttgttatttttattgtgtccatcaattgccagcttgcaatctgtataatggccttacccacccctttctaaccggatgagttgatgggaagccagtgcagcacccttgagtggcacacaggaggtctttgcagacactaaggcaatcctttagtctctcaaatgggaaaactgagacagaaccaggtgactaaccttaggccctttgtgacttactggcagcaggttcccaactcctttgctctgccctggaccagtcacttgtgcccgacactaataacagggtaatttgtgagaaatgatgtgtgactcaccaggcgagggaggagagttcrcgaagatggccagtgaagaggagcaagatgtttatcagcaattggaaaggaaatgctgacagatgctccttggattaacatttctcagttttgcaacaccattgcctacttacccagccaccagcttacatt

SEQ ID NO: 372190 - DNA, 458 bp, Homo sapiens
ggacttttccatcaaggcacactgcatccagtcaggattagagtaatgggagattggctagtaacaactctgacgaatataggactagcaggtataagaagcagtcacacctctgggatattgagcacscaaggaagaggctccccacaggctgacatgcagaccctcttgaaaggagtctttatggtaccagcggaacttgctggaaaccagccctctggaacttgccataaatctgccctgtagggttctgggagagctgctcattagcaggtatctccctggaggcacgctgccacaacacccccaagggaggtgctgaaatctgctggcagctgggggttgctggagcccttcactgtgtgccccagatctcaaaagcaaaaccctttcctcccaccatgttgctacatgaccctcttctgacaaagcttcctgaccagctggcaaagggaaaa

SEQ ID NO: 372191 - DNA, 551 bp, Homo sapiens
gggatttttgcctgaattgtttactgcagtattaccagggcctaaaagattacctggcacatccccacatgaatgaatgaatgaatgaatgaggtaaatccttataagaatctgaccatgttggtattaatagtccctttttatagatgaggaaagtgaagctcatggagatgaagttccttgtgtaaattcaaacagccagtaaatgtcaggggcaagatttgaacccagatcttgctgattccatccttctctttggcctccctccattgcataataacaatagctcattgtaacagctcccaccattagaacggtcgtccttatatcgaggcgaagtactcctcgcagctttaaaacaaacgaacatctaacattcatcgaggccttactgcgtgccaggcacccccgcgcattatctcattgaattcccacatgacaacccagtgagggaggaactctggtgatccccattgcacagatgaagaaattgaggctcagggaggttaagaaacttgtccraggcctcacagctggaaaattgaaaacag

SEQ ID NO: 372192 - DNA, 591 bp, Homo sapiens
gctttcttgtctgtaaagtgggaataatgaaaccaacactgctacctcctagggtggctgggagaatcaagtgagatacaggctggacacagggtttgaagccagcgcagggggatggtcatgaatgagttaagcgtgtgtacattattaatagtatcatttcatcctttctaccatctcatgggctgttgggaaactttaacgtygattcagatcaggccatggctacactaagtcaacatctctcactttgatttagtggctaaaaagcctgggctctggaattgttcagaactgggtagcactcctagctcggcgctgtgagatgctgtttccagaggagacagcttaaaaaccacagacattcccctccagtccgcagcaagaccagcttcacagggtgggaattttctcttgcccatgttcagcagatctacatccccaggggtaggcctggccctgcctctgtgccttggtcagcctgtccccatcccctgggagcacctaaattgggactgtgggctgctgttcctcctgagaactcgggtttactgtccctgttctcgggcctcccttgtctctctcactccc

SEQ ID NO: 372193 - DNA, 613 bp, Homo sapiens
cccggcagccagggtctagcaggatgcaggaaagaggctggtaggggcatctggggctgggccacccttggctgtggccctggaggcagcacaaacccctaccctggagatctctcctctccacacccmcacctgcccacagcccataccccacagttaccaagggaaacaggcgccagaggggaaaggctgcatttccctccttccttgtgggctttccagaaaccaacccatctagaagagctctccacgtggagcaggggaagatgagcggctgaagtagggcagatctgcaaacttcgggggctttcaggaagattccatgaggcaaggactgggaaccagtgcctgcctgagaggctgaggggcagaagatctgggtcccagccttggttctgctctggcagggctatgtgcctggggccccgttccttccctttccttctggacctcagcttccacatctgtacagtgggtgtggtagctcccatgatcttcaggggccacaccactcagatgtctcaaaaatgctcccgttgagtgtgtttctagttatgagaggtcgcttcaacatccccactagggaaggtattgtgtattcattcatccagca

SEQ ID NO: 372194 - DNA, 613 bp, Homo sapiens
cccggcagccagggtctagcaggatgcaggaaagaggctggtaggggcatctggggctgggccacccttggctgtggccctggaggcagcacaaacccctaccctggagatctctcctctccacacccccacctgcccacagcccataccccacagttaccaagggaaacaggcgccagaggggaaaggctgcatttccctccttccttgtgggctttccagaaaccaacccatctagaagagctctccacgtggagcaggggaagatgagcggctgaagtagggcagatctgcaaacttcgggggctttcaggaagattccatgaggcaaggactgggaaccagtgcctgcctgagaggctgaggggcagaagatctgggtcccagccttggttctgctctggcagggctatgtgcctggggccccgttccttccctttccttctggacctcagcttccacatctgtacagtgggtgtggtagctcccatgatcttcaggggccacaccactcagatgtctcraaaatgctcccgttgagtgtgtttctagttatgagaggtcgcttcaacatccccactagggaaggtattgtgtattcattcatccagca

SEQ ID NO: 372195 - DNA, 485 bp, Homo sapiens
agtgggagggtccctgtctcccttgcctcagctttgcatctgtctctccccgctgccagacggaggaagactaggtcttacttgctttcgcagaccctctctgtgctgacccagggctgatcatcttttagccttgccataaatttaaaatttattcatttttatttgcctatgatgtatatgaaatatacagcccttcactcattcaatcagtgactaaaacacaccaggcactgcgctaagcacggcagatatagcaataaatgcagcaagcacratccccgcactggagcgcccagcttggttggggagatgggcattacagctaattctacaaatagctgaagctagttcgcaggacccagaagagggtggaagagtgaggtgcccaggatgcaaaattgaaggaggagctcgctctcagggtggtgcatgtgcactttggttctgataagtgccgcaaagaaaaaaagtgcagacgctct

SEQ ID NO: 372196 - DNA, 644 bp, Homo sapiens
tggggacccttgttcaaaaactatggatttcatgacagtgacagcagagcctctaacaaagtgtggggcccttctgagagkggcgtctggtactactgcactggttgcacacccgtgacaaagcctgttgttagcttgcagctgggaggacgggtgtggcagtggccggggaggggacagcagtgatgatgatgctgtttgatttcccccaactccaccttcacctagtacagtgcctggcatgttgtaggtgcctaagaagttctagttcattctctcattcccctaacacagggcccaccatggcagatgaggcctgtccccaccagggtggaagctggatcactgggcccggcttggcacctggtaacgatccctctccagggggctgtgccctggatcctctctctcctccctcctccaccttcccccagaaagagtgatcctttattttactcctggcctatggtttttgtgttggcagaagtggaggtgcttatggccagcatagcctccaaactaaacactgcagaagtattgagtattattattatttttattatctaaatttgcaaactctgccccctcctattactcagctccttccttttcttctttacttttcttcactgcccttgtcccct

SEQ ID NO: 372197 - DNA, 562 bp, Homo sapiens
tttccatcatccaggaagttctctcgggttcccttccagtcaatacctccaaaagcaatcactgttctgatttctcttgttatagttgaattttgcttgttcttgagcctcatataaatggaatcatatggtgtgtccttcttggcaatgcctattgtggatgctcagatgtgtgcacagccactcacacttacacacatgtgcatggatactcagtcagactcattcagaaatggggatttctgagctgtaaatcccttggcctcagcttgcagttcagctaagcctctctgggttcagaggactaaaggagatggggagagcccctgatgctgrgtccagccaccgtggggggctccttccacattttcttcagcttcccttactgagtgacctcagacaagaactgaaaatctgttttctcctgtgaaatgaaatgaataataataacatacagctcataactcccctgtattgagcacttattatgcagtaggcactgttctaaggactgcgcaagttcgagtccactctgtcctcccagcaaccctataatccaggt

SEQ ID NO: 372198 - DNA, 638 bp, Homo sapiens
ccccaggggtggctctcagtgggaacagtcaggctggactgcagggccctccatgagttcttgggtagggtctgagtttggaatggggctttgccttcctttgccctgatcccccttctcatcttgtgaatgagttcagaagctctgaactccactgggcttctcagtcttctttctgctcctctccctgtgtgaatcagtcaggactttgtatgcaggtgataggagacccaacttaacctgaactgagcaaaactgtgtggctcctgtaactaaaattccaggggctgcattcaggcatggctggatccaggagctcaagcaatgttgccaggaatctctctccatgtctcagctctgttttcctctcagttggcctcattctcaggcaggcttttccctgtaatggtctttgacagcttcaggcttccctctaaccagcctaacagctgaagagaaggcctctttccccatagttccagcaaatatcctaggatatttgtggtggtgmgcacacccgaagtcccagctgctcgggaagctgacgcaggaggatcacttgagcccagaagtttgaggttgtagtgaactgattgcactacaagaccctgtctctagagatcaatcaatcagtcaat

SEQ ID NO: 372199 - DNA, 612 bp, Homo sapiens
tccactttctctccctccacctgcagcaccagagttcacaccttgggcccgccctcctagcattattttgagaaaagggccttctgtcctgtaaataggctgagtcatccctgcctcagggcctttgcacacgctgcacttgcttcctagaatacttcttttcccatcgctttgcttggccatcttctccttttggtctagctcaaatggtacttcctcagggaggcttttcctgatcgcctaagaaaagtagccctgttttctttcccctgtcatacacattcgcctatattattttcttcccagaactggtttgttgtgtatctyccagaggaccaggtctgccttggtcactgtgatatccctagcacttaggcctggcacatggtagatgtttgataattatttattgaatgaatgaaggaaggaagaaaagaattcatcaactcctcatgaccaccctgtaaagcagggacaagagacctgagtcatggagaagagaagggactcctcaaggtcgcacagcccagaaggggcagaaagggtgatgaggacctaggttttctgcttctacaccccctgtcccctcaaccccccaggtgggaagcagca

SEQ ID NO: 372200 - DNA, 612 bp, Homo sapiens
tccactttctctccctccacctgcagcaccagagttcacaccttgggcccgccctcctagcattattttgagaaaagggccttctgtcctgtaaataggctgagtcatccctgcctcagggcctttgcacacgctgcacttgcttcctagaatacttcttttcccatcgctttgcttggccatcttctccttttggtctagctcaaatggtacttcctcagggaggcttttcctgatcgcctaagaaaagtagccctgttttctttcccctgtcatacacattcgcctatattattttcttcccagaactggtttgttgtgtatctcccagaggaccaggtctgccttggtcactgtgatatccctagcacttaggcctggcacatggtagatgtttgataattatttattgaatgaatgaaggaaggaagaaaagaattcatcaactcctcatgaccaccctgtaaagcagggacaagagacctgagtcatggagaagagaagggactcctcaaggtygcacagcccagaaggggcagaaagggtgatgaggacctaggttttctgcttctacaccccctgtcccctcaaccccccaggtgggaagcagca

SEQ ID NO: 372201 - DNA, 529 bp, Homo sapiens
ttggcgggaaggatggttacagaacaggtgactcgggatgattaagaacagagcaggtgacccaggatgactaagaacagaccaggtggccaaagatgactaaggtcagagcaggtgatagaggctaggagaagattggttgctgaaactaggggcaaggagacgtaaagaacgagaaagttaaactttaaaatgaagaacaaagaacaggggagctgaacatactgatacattggttctttgaagaggatctcagaactcattgtacttaacaatttacaggctaaaacctttgaagacgaatttattatattctacagtagctgggaccacaggtgtgtgccaccacayccggctacgtttttaatttttagtagtgacaggatctcactatgttccccagactggtctcaaactcctgggctcaagcaatcctcctgccttggcctcccaaagtgctgggattacaggggtgagtcactgctctggcctggttgagttttcaatcccaaactggcagtagagggga

SEQ ID NO: 372202 - DNA, 529 bp, Homo sapiens
ttggcgggaaggatggttacagaacaggtgactcgggatgattaagaacagagcaggtgacccaggatgactaagaacagaccaggtggccaaagatgactaaggtcagagcaggtgatagaggctaggagaagattggttgctgaaactaggggcaaggagacgtaaagaacgagaaagttaaactttaaaatgaagaacaaagaacaggggagctgaacatactgatacattggttctttgaagaggatctcagaactcattgtacttaacaatttacaggctaaaacctttgaagacgaatttattatattctacagtagctgggaccacaggtgtgtgccaccacatccggctacgtttttaatttttagtagtgacrggatctcactatgttccccagactggtctcaaactcctgggctcaagcaatcctcctgccttggcctcccaaagtgctgggattacaggggtgagtcactgctctggcctggttgagttttcaatcccaaactggcagtagagggga

SEQ ID NO: 372203 - DNA, 605 bp, Homo sapiens
caacaatcttgtcttgtttttgttttttttttaattgagacagagtctcactgtgttgcctaggctggagtgcagtggcacgatctcggctcactgtaaccttcacctcccaggttcaagcaattcttgtgcctcagcctcctcagtagctgggattacaggcacatgccaccacacctggctaatttttgcatccttagtagagacagggtttcaccatgttggccaggctggtctcaaactcctgacctcaagtgatccacccgccttggcctcccaaattgctgsgattacaggcgtgagccaccgtgccctgcctcttgtctttttcttagctgtgttcccagcacccagaatagagcctggcaccaggaaggcactcagaaagggtttgctgaatgagtgcaggcattcattccacaaatatttattaaggtgcttaagaaatctgtctctctgagccagatcctagggggacaaagctgaaggagacacgtagtctgtgctctaatggggtttatactctcatgggaaagacagccaataaataaataggcaaataagtaaacaagaaaatacaaactattgctcagtgtgatggagaa

SEQ ID NO: 372204 - DNA, 582 bp, Homo sapiens
tctgaaaggagtaaggtctctacccccgaacagcctgctaacatatgggacccaccagaccacttgcctctgccaaaccccatgcatcargccggtacacaggatccccccactcatcagtccctcccccatataatcctgaatcaataccccatgttccccctagccacacacttaagccctacagcatgaaatagaacaatgtaaaaaggatactcagaacttccctttcccctttccacctccaaagaattgcccccaactctcttccccttgaagaagtgccccttgggagaggaggcatcagcttcgtaaatgcccccttaaccagctcagaagtacaaaatctaaaaaaaaagaaaaactcaagcccttgttagatgacccttatggggtagcagatcaaatcattttttaggaccccagttgtatgggccgagcttatgtccattttaggcattcccttcttgggagaagaaccatgatccatagggctgctttggtagtctgggaacattaacaccctaccggtcaaaatgttccatcagtatcccgaactgagagtatttcccaagcattcaa

SEQ ID NO: 372205 - DNA, 616 bp, Homo sapiens
tattctttcaactgatatttactgrgtacctatcatgagccaggcactgtcctggaaatttgacctcagctccgcgatcccacaacacgctgatctgtcgccagtccccacaatccatccttcacaaggtacgacgaaaccaccctggtccaaaccaccttcttccctcgcctggaccactgcaattgcctcctcattggtctcccgagttacccccttgcttctcctctatccattgtccaagtaggatcccaaggaatcctgtgaagacttaagtcagatcatgtcactcctctgctaaaaaccctaccatgactcccacctcatgagagaaagtgcgcaactcctcaacacagcctacaggccccacaggatctacctcctaccttgttatcttttcaacctcatttcctactctctccctgcactcaaactatacccgccttcttgctgatccttgaacacactaggcatgccctgccccagaacttttgcacttgctgtttccctcttccaggcacactcttcccccagatctcctcctccagatcttagttcaaatgtcaccttctcagggcacccctacccccttccctgctttatcttctccatggca

SEQ ID NO: 372206 - DNA, 634 bp, Homo sapiens
taatcatcttgcccacttagctccagtcactctgttcttcttgctggtctttgagcatcccaagcattctcttgcccataacttccacattatcaaaaaccaacaaaattgttttgaaacatcaattaccttgccttccacaaaacagtcatcttcctgatttcctcctaactattggattattctgtttctccttgtaggctcattctcctggatgtggctaataactgttgtagttctccacctctcatcaatgctcattcccgartttgtgaatctagatttctcttctagagtccagatccaactgccttttcacatttcttttacatgagtcacaggaatggcaaatacatgttcaaaaccaaataggtgatccatgctcctaatcaagcacttatttagaaaaatgatcaaattcataaaactcaggtctttgagcattccgtatctccataaacggcacccccatccattttattatatgatgcagagttctatgtcaccttaaacatctttctcttcctcacctcctcacatcttcatatcaatgaattctattaattctgcccatcgtccccaaactctctatctctctccatctctaccacaaacatccatctaagctaccact

SEQ ID NO: 372207 - DNA, 578 bp, Homo sapiens
gatgcaaaatttgcaaagatacggtgttccagcctcctccaacaaaggttaacaaccacccgagaaccccagtgccacttacctaccacctcttacctttrgaagcagattgcccagtgacggataagtgtggaaactgttcaaagattgggaaagaaaattgttagaaaaggcacatagagaagagtgggattgggggcaaaaggagaaggaggatagtcttctgtgtttttttgattggttaacttaaaatctcagctatttgtttacacaaaggctatgttgatgtccatattcaacagatacaggtatttggctcagaaaagcacatggttcccagaccatttgccaaatgtcctatccttgttcagctttggttattatgaatatccttctggaagcaactgacacctaacatgtctgaatcctctggacctgtagagttcttaccccggagtgattacaatttctgaaaagaacatccctgcaaaattagctttcaaaatacgtgcagataagcccatagaactgggaattcctccagggaattatatcctaagtagcctactacaatgctt

SEQ ID NO: 372208 - DNA, 578 bp, Homo sapiens
gatgcaaaatttgcaaagatacggtgttccagcctcctccaacaaaggttaacaaccacccgagaaccccagtgccacttacctaccacctcttacctttggaagcagattgcccagtgacggataagtgtggaaactgttcaaagattgggaaagaaaattgttagaaaaggcacatagagaagagtgggattgggggcaaaaggagaaggaggatagtcttctgtgtttttttgattggttaacttaaaatctcagctatttgtttacacaaaggctatgttgatgtccatattcaacagatacaggtatttggctcagaaaagcacatggttcccagaccatttgccaaatgtcctatccttgttcagctttggttattatgaatatccttctggaagcaactgacacctaacatgtctgaatcctctggacctgtagagttcttaccccggagtgattacaatttctgaaaagaacatccctgcaaaattagctttcaaaatacgtgcagataagcccrtagaactgggaattcctccagggaattatatcctaagtagcctactacaatgctt

SEQ ID NO: 372209 - DNA, 594 bp, Homo sapiens
tgctagcagtctatcaattttgttgatcctttcaaaaaaccaggtcctggattcattgatttttttgaagggttttttgtgtctctatttccttccgttctgctctgatcttagttatttcttgccttctgctagcttttgaatgtgttttcatctaaatatttgttatattttttgatgaagggcaaaacattttggttacagtttctttgaatatttcattccacttacgcttttcaaccaaatacaataaaaaaagcaagaaggggttgtcattcttttttttttttcatttgttcttcaatttagcattgaaatattaaatccaaaagacaactacctttagtatgagattgtatattttgaaaatgtgcagaggtttaggtattttataatagtgacaatttacatatttataggaaatatwgtttcaaatagattttaaggaggcagctgttaaaatttgacatattactgaaacttaattagtaatatcgaaatatttcagataacacagggatgactgagctaacctgattcaacacatcagttcacaatgttgtgaagaacacattgaacattttcatggcacaa

SEQ ID NO: 372210 - DNA, 553 bp, Homo sapiens
ttttaaggcacctgttaaaatggatctttggcctttgatgtgatactcttcaatttagcaaaaggcagagtctggttagccctcaatacctttttttctgcttcaaacacaggaatgaagactaaatacttctgtcatgcagcctttcattattccttcatcacttttttctttttcagattctaggtcataactttccaacatagtttggtgtactattgaaacaatgcagtcgtaaaattgtcttaagaagtagttttcctcagcaatgaccccaaaacaggcttacatgttacatgtagaagagaaagaacctgcctgaagctccttccaagtgacatagttatatcatcatttgcttttgtgaatatcaccacatagtgaactctaaatgttctccattcctagttcttttacaaaccccaaaattcgaacatcttttttcagttataaatgttcatcttcaygattaatgcttataaacaagacttgccatctactcattagtgtctaaattttgagtaagaatgagagatacctttccagtagaaaa

SEQ ID NO: 372211 - DNA, 614 bp, Homo sapiens
tagatgcaaataacaagtccttaacattttgttgtatactgccttcaagccttttttccccatatacwtgggtacaattacatgaaaattacattacctttctttctttctgtttatctatatcagaatctgtcagactattaaaattttaaatattgtctgaattttcacttagcataattttagcattttctctaaacattttttggaaatgtatttttgaatgactgaatggtactgcattttatagaataacaatgatctgcataacaatattcttactattcggtaggtagattagccagaacttgacaccaatttaaataacattgaaataaagtagtattcagatttttataagtatttaagatgtgaataaagttaatcaatgctacaaaaagtgtggaatatttatctctaaaaatgctgtccaaaagtgttatatatttttataagtcacatgttaaataaactattctttacagaccacaagtcagctattaatattagcctttaaaagacattgaccactttaatcatagaacatattattttattttccttcaaaatttgcttatttataattttccatttgatgaattatctacatatac

SEQ ID NO: 372212 - DNA, 293 bp, Homo sapiens
ttttcaattagcaaaggttcctgccattttaactttaaatttcttagttcccctttttcctccaagtggttaatgatctgtgaacaaatattggagcaaatcagagatgcttcagtgtacagtcaccctatagatatttctggtgtgcaagggagtgagctacctgggagatgaggaaccttggtyctagtgttttctctgccccacagaggtatgcatctttgaataagtctttttgcctgtttcaggcaccattctctcatttgtaaattatgagctccattgatcctatc

SEQ ID NO: 372213 - DNA, 613 bp, Homo sapiens
ctgcattcccatttcatggaaacgtggattttccacgtgtggctctgtagcatggcaaaatagcttggtgtgcaaaaataccctagggtaaagataaatgtaattgtttttgaaatcaaccacttgtccctaatgctcaatctgtgcttctgagaatttgccgagtttcaatgctttaatgtgtgtattgaacagggctttctgttgcaaatagcagaatttgcacacgctagttgaatcagaaaacaataaygtaacaacagatactaataaacacgtagaatctcggagagtgccaaagagcagggttctggggctacacagccacaccttaggacttctctctaatcatatgacttctcagcacctgtgatgccaggacttggcctcccaaagctgaggaaccaaatgcctcaccaactgctcctgccagaaaactggttctccctggtttggtgcccatactctttgaattttctggctttaaaaattggactcatggtgtgagaaaattccaaaatgtaggaagatcttcaaagatgttgagcagtcaccacgaggaagcttccaatgttgtgtatttcagatcagtgttgtggagtatctttccctt

SEQ ID NO: 372214 - DNA, 548 bp, Homo sapiens
gatactagaggctgccatgacaatattagccaaaaaatgataaaccacaacgtgatagaaggaagaatcctcactttatagttgagccccgagtaagtgaggaaagttgtgcaagtttgtaacttcagtgtgatggttgaggatggaattaaagtctcctgactgcttatgaaacctcccacctatatgtktttacgcaaaatgtcatggcccttacatccttttgtttccattgctatgatggttctggattgtaatcctataagaatatgatcacttaatgaatttatgttcattatatttcatatgcagcctgaaatgcctctggtttctttattagcaaatcaacagaaaacacttgataaccagattcaagattagacagcaaagatctacagaaacagattaatatcattttatggcatactatgatctttttttagggaattaactaattactgctcaaggaagcatatccaataatatgcgggtaaaaggatataagcaaaaaggtagcagtaaatagctgtgttttggattccacaagg

SEQ ID NO: 372215 - DNA, 560 bp, Homo sapiens
aatacacatttcaggcattataaattgggaaacttgcaaatgcaaataagaaaggatgggtaaaatcaatatgcttagtgaagaagggatcttaagaaatttttttagaaaggatatgggaccctaaaactattgaagtaacaagaaattaggacaagaaactaatatgggaccctaaaactattgaagtaacaagaaattaggacaagaaactaacagtgatagaggaagggtactggcttgttagatttgggctcaccgtttggcaatccatctctaaacccyatcacaacttatttataataataatcttggtgctgatcatcataatctgggtatgcagatttacctacataattttaggcaaattggttaacccctctggacatttaattcctcatctgtgaaggagttacacaagaatacatttattggtttaaataactactgttcaatagagaatttttaaattagcatctgtagctctgttaggagggaaaaatgatgatgttttatgatttcaacacatgacttcatttctttgagctatgtgacagtca

SEQ ID NO: 372216 - DNA, 554 bp, Homo sapiens
tgttcaaatgtaatacagttttatgttcaaactaaatgaatgcctatttattcctggaagtaaattttgttattttctagtccaggctctttgttttacacatgacaaaatagaagcccagtacacaggagggttgaatgacttgtttaatggcacatggccaaagaaacagaacagaaaaaaagaaatcagaatttgtcagttttctgtctagtgcattccaaatcacatgacacaaccattattggttttagaattggaaaagtttggtttattttttaactgactactcagattttaaaaaaattgtttyattaatagattagtaaaaatttaatactgctgttcattgtagggcttagtaagccattactatgatagatctttatttttgttttctttaagtctgtactggacattgaagtctctctatggtctctggacttacgtcttggccttacagactgtcctgtttcacctttgcctcagtctttgcagtaatctccctcactgagaagtctggaacatgccacatgttcacagtgaggctgtta

SEQ ID NO: 372217 - DNA, 554 bp, Homo sapiens
tgttcaaatgtaatacagttttatgttcaaactaaatgaatgcctatttattcctggaagtaaattttgttattttctagtccaggctctttgttttacacatgacaaaatagaagcccagtacacaggagggttgaatgacttgtttaatggcacatggccaaagaaacagaacagaaaaaaagaaatcagaatttgtcagttttctgtctagtgcattccaaatcacatgacacaaccattattggttttagaattggaaaagtttggtttattttttaactgactactcagattttaaaaaaattgtttcrttaatagattagtaaaaatttaatactgctgttcattgtagggcttagtaagccattactatgatagatctttatttttgttttctttaagtctgtactggacattgaagtctctctatggtctctggacttacgtcttggccttacagactgtcctgtttcacctttgcctcagtctttgcagtaatctccctcactgagaagtctggaacatgccacatgttcacagtgaggctgtta

SEQ ID NO: 372218 - DNA, 658 bp, Homo sapiens
ttgtcagttttctgtctagtgcattccaaatcacatgacacaaccattattggttttagaattggaaaagtttggtttattttttaactgactactcagattttaaaaaaattgtttcattaatagattagtaaaaatttaatactgctgttcattgtagggcttagtaagccattactatgatagatctttatttttgttttctttaagtctgtactggacattgaagtctctctatggtctctggacttacgtcttggccttacagactgtcctgtttcacctttgcctcagtctttgcagtaatctccctcactgagaagtctggaacatgccamatgttcacagtgaggctgttaaaacttccagccccatccaaaacctagacttggaaaccattgtcgcattgctttctgagtccacagatagcaaatgtgacaagtcaaaaatgatgcctaatgttgagcaaggagtctttaaaaagccctactcatgtttctaattctcacacccatgtaattcacaggcatctgtccacaggtagtttgagaacctaactatattaaatttcaatattcagcaaatagctcataaccaatcatatctgaattagaaaagcatgtgtaaagaacaatagcaccaactagcactcatagca

SEQ ID NO: 372219 - DNA, 475 bp, Homo sapiens
  misc_feature (1)...(475): n = A,T,C or G
ctttgcaaagataataaaaaagctgaagtgaaatcatctctatgttttgtcattggtctgtttatctatcattaagaaaattgctacatttccgtatctttggcaaaatcattatacgtttaaaactattcaatgtttttgtatatccttagtccacaaggaaatgcctaagttattcttcagcttttacatctcaaataacctttgcatatttatgatctaaatgctttgctctatatgtggcagtacacccatgtgaatgaagtttgtagtttacgttagyaccaatatcaaagtgtgccaagtggctacaacaattaaatagctagaactatcgtagggtgcatctatggacataagtgaaagtcaggggaagcttcttctcacatgctgtacttggcatgtgtcagacaattatgcacgtcatacattaaaatacattggcaaacnnnnnnnnnnnnnnnnnnnnnnnnnn

SEQ ID NO: 372220 - DNA, 595 bp, Homo sapiens
cctcactaaggaaaaaaaaaggcccattttctcccagtgactgtggaacaccatatggaaagtcttactcaaatggccattgctcttctaagacaaataccttgcataattgtagcagttagaactaagactgctcaaatattggcagaaactatctgacacttcttcacttactttcaggtacaatatccatgacattaaaaacactrtatctgctgtacagtggtgctttattagcaagattgttaattagaaaagcaatcagtttcatgaaaaatatagcttcccaccttctgttacggtaccctgaaccagaaaaaaacaaaatataattctagcaaagagccagcaaacccacaagccaaggactttcatgggcccttaaagctcagtttttcctagttttaaggtcactgcctgccaaagcccaatgaacaatcttccttccaggggtttataaaattatcttatgaaggaggtatatcaattagaattggatttagcatcatacaactaaaacaaaaacaaaacaaaattaacaaacctaatataactgcatttatctctcaaacaaagtaacaaacttcatgtaact

SEQ ID NO: 372221 - DNA, 605 bp, Homo sapiens
tgcttaaacatgtcatcaggaacccatctccctccctccttcagctgttttccttggctttggttttgttttctggcaatctcacacctactgttgaacatggtgactatcgctcacagcttcttcacataggctctttgcgaaaaatttattgtaatgtatgcacgctgcttcctgtaaggctgttgcaggaataaagtcaccattaaaaccacttggctcttagtcctgcatatgatactcctactactgattcctagttcctgaaatggaaccagtttccagcctctcttgatacctaaccgtgggaaacaggtgacacttgccaaagtcctgtgtccccttggatgagagaaaaaaagtcattgactgtttgccccacaaacttatcatctaaactttrtagctcccttttaaaagatgcctgaggctaaagtgaggataacttgagcccagaaacaacatagcaagacctcatttctctaaaaaatctatatctttatatacacatacatattatttatatatatatctgtatacatatacatgtgagaattaaaatttatgtgtatatatttatataatatatatgtgtatatacatat

SEQ ID NO: 372222 - DNA, 612 bp, Homo sapiens
gtctatagtcatgcctcctcaaacagggtattatgttcaatgttatggattgatacaacaatgttaaaggcctcattcatgtttgaaaggacagtatgagcttacagtgaaattagacattcacaaataatgacagcagaaatcagcaagtgatgagcccaactcaagtggtgccacatgttaatggatttcacagacatgaataagatttttgcagctggtaacatttatgtggtcttttgtgaatgtataagatgttgataacccaatatgataaaagggagtttattccaggtagtgacatgagmaaagactggcaagaaatgatctcagaaattcaagaaaaacatttcttttattgctcaatagtagaaaaggtagggttttttagctgcttcaacagccccatcctctgtagttgtaggctgtaagcttcatgagggcagaagctatgtctgctgaattcatcactatgtaacccatagctcatccgaacaccctgaaagtaaatatttattgaatgaatggaagtgtagattaaggagaatatcaacatggaagtagagaaactctgtttttggctctgatggcttaatgtcttttaaagtctta

SEQ ID NO: 372223 - DNA, 592 bp, Homo sapiens
agtcttgtatagcttgttcagtttgctagtttgagagcttatttcagtcactgctcttgttttrtgtaccaggggcactgagtggtgtgaatgtgcttacaagcagattgatagttggagaatcagtcaggaaatgggaagagccaatgatttctggatacctatgtttaagctctgcaacctctacccctaccttcacccatatggctggagctaatggcagctacttgggttgctaacacatgattcatagaaagaatcaaaggaggaactgtgcagatataatagacaacactacaaccaatatggctcgggaggatgcctgtgcccatggagtattccctgctccccacagtgcctgcaaattaaggggacaaagttgactttcagtggactttttctgtttttcccttgcctcaaggccacattcaagctcttgttatcggaattgccatttgtagctagagcacagcaattttcacatcttcataaaggctgcatatttgaagtcattctcttagcatatttagctactacacaaacaaaaaacaagcaaaattactttaaatgctgatattatttttaaagggca

SEQ ID NO: 372224 - DNA, 548 bp, Homo sapiens
aatgacagaatttcattccttttggtggctgaatagtaagccattctgtatacatacattttctttattcattcatgcttgcacacctaggtggattctatatcttggctattgtgaatagtgctgccataaatagtgttaacaataaataaatagtgctgcaataaataaatatacagtgctgcaataaataaataaataatagtgytgtaataaataggagacatctcttcaatatcctgaatttgtttcctttggataaatacccaatagtgcaattgttggatcatatggtagttctatttttagccttttgagaagcctctctactattttccataatggctgcactaatttacattcccatcaacaggctataagagctcacttttctttgtattctcaccaggaaacatttagatcttaaactttggggctggataatgagtagaaaaacaaggtattgctgggtctttattgagaccacatattctcacaacttatggtgactaaacaagcatctatcactgccttaaggaacaagagaa

SEQ ID NO: 372225 - DNA, 548 bp, Homo sapiens
aatgacagaatttcattccttttggtggctgaatagtaagccattctgtatacatacattttctttattcattcatgcttgcacacctaggtggattctatatcttggctattgtgaatagtgctgccataaatagtgttaacaataaataaatagtgctgcaataaataaatatacagtgctgcaataaataaataaataatagtgctgtaataaataggagacatctcttcaatatcctgaatttgtttcctttggataaatacccaatagtgcaattgttggatcatatggtagttctatttttagccttttgagaagcctctctactattttccataatggctgcactaatttacattcccrtcaacaggctataagagctcacttttctttgtattctcaccaggaaacatttagatcttaaactttggggctggataatgagtagaaaaacaaggtattgctgggtctttattgagaccacatattctcacaacttatggtgactaaacaagcatctatcactgccttaaggaacaagagaa

SEQ ID NO: 372226 - DNA, 490 bp, Homo sapiens
agcttaactactcatggaaaccaaaccaaggaggtaggagcacagctggggctcacgtgctgcacttttgttttcatggctgacaacttggatggatcttcaaattcctcctggtgcaatgaagtaaagtaagacaaatcggawtgtcagaaatcagtgaagaaagtacttcacactccttgaaagatgcactaattatgaggctggtcctgttgtaaaacctgccttctttgtattgacttctcagcagcattcaaatcaaacactcctttcttctcaagagatcctcttctctttgacaactccacactcttgctcttcccttcacattgctgactttccttcacagttttatctttttattccatatcttatcttaaaaattcgaatttctcaaggtttgatcctatcccctattcttaatctgtattcctgtttacatatcacatatatgttcaaaactctgaaatatctatctctgacccagact

SEQ ID NO: 372227 - DNA, 490 bp, Homo sapiens
agcttaactactcatggaaaccaaaccaaggaggtaggagcacagctggggctcacgtgctgcacttttgttttcatggctgacaacttggatggatcttcaaattcctcctggtgcaatgaagtaaagtaagacaaatcggattgtcagaaatcagtgaagaaagtacttcacactccttgaaagatgcactaattatgaggctggtcctgttgtaaaacctgccttctttgtattgacttctcagcagcattcaaatcaaacactcctttcttctcaagagatcctcttctctttgacaactccacactcttgctcttcccttcacattgctgactttccttcacagttttatctttttattccatatcttatcttaaaaattcgaatttctcaaggtttgatcctatcccctattcttaatctgtattcctgtttacrtatcacatatatgttcaaaactctgaaatatctatctctgacccagact

SEQ ID NO: 372228 - DNA, 584 bp, Homo sapiens
ctggtcccaaccttcctgctaaaggacccagtatccaggacagtcttcctctttgctacctcacagcacctgccttgccttccacaccacctcacctggggccctcagtcactgggtcattgggacttagtttagcaatggcttccatctttggcttctgaagtcaatggagctgtgtggccctggctgtcctctggatctagacatctccaagctgacgaaggaaaggatcctcctctggctgtttcagaccacgttgcaaggccagaaatagggtggtagcttcgtgatcccttcctttagccagcaaatatgttctgaacatccacccttctgcacccagctagtgtgctggggaaagaatggtgagtaggtaggcagagtcctgtctttcaggaactcacagaccagctgagaagactgctggctcctcatccaacccgagtgaagcttctcagactccacagtgacatcctctatccactcattggaacaagaatgatkggaacttagtaagagtaccctagctccttggtggaggggagttgggagtgaaggagaggagtggccccataatgagctac

SEQ ID NO: 372229 - DNA, 592 bp, Homo sapiens
ctctggtagaagagagaacggatccttgcaatgaaaggccacatgattagagtacaacatgctccactgacactgctaaacaaaacaggattatatgcttcaaggctttgtaggtcacaatgagaatttttgcttttaccccaagagcaacaggaacccaagggaggttattcagcaggaaggtgccatgcccaggggtgtataaatactatactaaagttgaattagcatttcctgtagaacaagggaaattagtaattacagtcatatcagtctaatattttgagggtactaagtaaagttgtaattaatatttaagactttctatgttctattttctaagtaagatgaaaaaccaaattaaatcttgcttactggtattaatcataatctcaactcattcctggaattgtgaactaatttgtgtcctaygtacatcttaatttaagactctagaagtgttaagtgtcagaaaccaagtctcaactacaaaaaaaaattttttattaagtgtgaaagcaaaacaggtacatctatttaaatattttttacatatttatagatacaacaaagacaaataacttagcaaaaa

SEQ ID NO: 372230 - DNA, 487 bp, Homo sapiens
ctgactgatggccgcaacagtaaccctggcagtcagaacatggatcttcaatgtgctggaagaaagaaactatcaccctacaatgccatgcctggaaaaaccatctttagaagacgagggtgaaacaatgacattttcagatagataaaaggaggcatttaccatgcagagactctcacaraaggaactcctgaagaatgtgttttgagaaatggaagatatgagatgtaaaatgggaggatgagcaaaagcattggtgattatgtggataaatctgaataaacactgactatttaaaacaataataagtgtttcatttgttggagggaaacagaatcaaaatcaaataatagagcacagtaggttagacagtaacagaagttaaagctttctaaggtcctgctgctgctcatgaggaaagcagatttctggggacaaatgcatggtttacccactgcaccaaagtataatacaagaaaatgctgag

SEQ ID NO: 372231 - DNA, 514 bp, Homo sapiens
tcagtcatcaggtttcactccagatcctgcaggcatctccccatcctcagctgtttgccagtcccaggaaagcacttctcaactcaccaactccagtagaaagaagggtgttaaggtaagagtttgttcaagaaccatcttctttcaaaggcagttttggtttttaccttagtccacatcctgatgaattcattaggaaaagaagacaggaagctcctttgaggaagctttggatgctggcagcttagatgstgggagatccgaatggggtcaagcaggttcgtcccacttctcttctatctaccaatattctccccttctcttcgaccattcaaatctgaaactatggagagaaagattttgctgattttaatttaggggcaggctagaatgaagtcattacttccctaagctaaattgttatttaaaacctcaggttgcactgattttcttgttattcaaaaggtttttccttcatatctgtcattgtcccagcagaaaacacacatcacac

SEQ ID NO: 372232 - DNA, 585 bp, Homo sapiens
caaaatcatctgggggaagtaatgggtccaccttagatgtattcataccacaacaccctctagttacctctagacamtagacactctcaattgctgcctctctctccttttcccaaattgcccccttttcctccaagatgcagagaaattcagataaaccctgaatcctctccataaactggaagtttaaactcttttgggtgctgagcaaaagccatatactagcccttcctggattgaagatatgacagtggccattattcactatctgtgtaggcagaagcaatcccttcaaatacaccagagctttcccagaaggaaacatgaagaatgatgttttcttcatttctttacatgtgtgttttttagtgactaatttcattttaaaatgttggtgttccacttagcccaaattttcaactactcttggctccccatgcatgcatgcatgcattcattcattcatttatatgtggtacaaacttcttgaccctccactatgccctcacattgagctaggcactgaggacacagaaatggataagagaaaaactctttctgttttcataaagctgacccactgag

SEQ ID NO: 372233 - DNA, 565 bp, Homo sapiens
ttactctgtctttccagagcacagaaattgtattaattcattcctgcactgctataaataactacctgagggaggtaatttataaagaaaagaggtttaattggtttatggttcctcaggctgtacaggaagcatgactgaggaagcttcaggacattttcaataatggtggaaggtgaagcrggcacttctttcatggccggagcaggaggaagagaggagggctaggtgctacacacttttaaataaccagatcttgtgataacttgctcactatcaagagaacagctccaaagggaaaatctgctcccatgatctaatcactagccaccaggtcccacctccaacactggggattacaatttgacatgagatttgagcagggacacacacccaatccatatcagaagtgtatcaaatacaaggtcaaagtcttcctaaatcctgttctctagaagcaacaacttgttagtttttgttgttaaatctttcattagttatgaatatagctttgaacagtaaattttattactctgtttaacatttatctgtgttaacagttgga

SEQ ID NO: 372234 - DNA, 573 bp, Homo sapiens
acatattaattttaaagatctagcaatacagaagtgaatacagggttaacaatcyggactctttcctcttcaatactgtaccaccagagataaccattattaacaattgggtgcatcttccctcattatgtatatatattttaacatatataatattgtgctatatacatacatacatccacatttttaatcattttcttcttatacttattgaacaaagaatagtatcacattatatacattattcttcaacttgcttttctcatgtaacaatatatcatgtacagtcctgcagttcagtaatatttcactattgttccattgtatatagatctagtataattcattcaacactcccctttggttagagacacaggttgatttcagcctttcatatctatacacaatcaacaccctgggcattctaattctataggattgattcctcaaagtaggactgttgagtcaaaaaacgtgcattttaaacataaatagattctgaccaaatactctccccaattcacagtcccaatagcaaagtatatacgtgttctttctccctacaaaccttcc

SEQ ID NO: 372235 - DNA, 573 bp, Homo sapiens
acatattaattttaaagatctagcaatacagaagtgaatacagggttaacaatccggactctttcctcttcaatactgtaccaccagagataaccattattaacaattgggtgcatcttccctcattatgtatatatattttaacatatataatattgtgctatatacatacatacatccayatttttaatcattttcttcttatacttattgaacaaagaatagtatcacattatatacattattcttcaacttgcttttctcatgtaacaatatatcatgtacagtcctgcagttcagtaatatttcactattgttccattgtatatagatctagtataattcattcaacactcccctttggttagagacacaggttgatttcagcctttcatatctatacacaatcaacaccctgggcattctaattctataggattgattcctcaaagtaggactgttgagtcaaaaaacgtgcattttaaacataaatagattctgaccaaatactctccccaattcacagtcccaatagcaaagtatatacgtgttctttctccctacaaaccttcc

SEQ ID NO: 372236 - DNA, 567 bp, Homo sapiens
ggcccaggtcacgtgtaggtgtctctactgaaagttaactgccagatgtaagtgaagacactcatagatactggccccagctctcaattcatctccagcttatgagtctttgcagctgaggctctagacatggtggaacagaaacaaaccaaccctgctgcagtctctccaagtccctgacacacagagtccatgagcatgacaaagccatgttttataccactakgttttgaggtggtttcttacacaataaataactagggcatctttaagctctgagggatcatgtaatacttctcacacagagatgtcatgaatgagattatttttctaaattgtatataagaattgttaaagttacagtgggcattaatttaagccaaaatcaagatttagaaaaccacacttaaactccaatgacaggcattatcctgccagattatcgaataaaaagagagtgagagagaaggagcgagtgagagagaaatatgtgacactcattaaaagttctcatgtcattaaagttctcattaacagaagtaccagagtttagtttccaagttcatt

SEQ ID NO: 372237 - DNA, 563 bp, Homo sapiens
ctctgcagctttcatagtcattaggggtgcagtgagtgtgtccgcaagcagtaagaaagtcagtctttgagttcccatggttgtcaatatttcttttgaatctgtttgtctagctacttttcaagcctttgggaaatgcttgaaaagtagtgtttcatgtcagagatcaacttcttaactgtagctgaaattgcccctgccactctgtagatattggcaggaattcagacgaccattgctgaaaacgaactggtatcttctctctcaccatttgtgtggtacatgagtttagtcccctttctatgactggctaaattaaaaacttcaagattttttctctcaacattctatgcaacaaatcatttgaagactaggagtcagtgaacactggttctaatccaggctctgctactaatggtctttatagccatgaaagcttttcattaaaacttttcgattctgcaatctaacacaacaaaccacagaytttggaatcaaaaagcttttgacaaattgaggaaatgaaccaaaataaacataacatttacaactgtaagttgaaa

SEQ ID NO: 372238 - DNA, 516 bp, Homo sapiens
acttcagttggtaggagaggagatgaggtgtgtttgacagttgactttggaattgcatggagaggctttgacggcytttcctttatatatcatccaatgcataataacttaacttgggaattttagtttcttcttctctgacattaaactcttgaatcacacaacatccaaataaatgaccattgtagttctgtcatcagtgcagacatgctctgggagccatttaaaggattagagccacatcagaacctcgtttaagcacaatttactttctaaagccgtatcaccctgattagctaaattagtagttcctaaagaggtctcctgattttaaatgagtcactttacttgtaatgttttgcaataagccttaatttactgacaccttcttctacaattctgattcacgggtattttctaaagtccgatagaataattggttctcaagaaaataatactactttgaaaatagactagaacacagcttgtctttctatgctccatctgctcaacctc

SEQ ID NO: 372239 - DNA, 528 bp, Homo sapiens
tgttttctgaatatcttgctcagcttgctactggtacgttttagaacaagatgtggatctgctgcttatctgaaatgggaacctgaacttcagggtcagggtctatctcacgagcatttatccattaagccctaagattttattctacaacaatgcagattattatctgatattgaaccattttcatgaccaacagaattctccatgacccatcacaattcaaaatttttacttgtggaattatctaggggaaatagagaatttaaagagatttggaattattgctctagctatcttgaatgtacttttttgaatttctgattaaatatgtacaaaatgggtcaggtttcttaaaaatgatatatcaaacaagagttagggaaacaataargaggagatattagtctggaggatgattctgggaatattttgcatatagaaagaataatggttgtaataaactaatacttttcacattacaaaagtaaattttaattcaccctcagatatttaaaggcataatatgtt

SEQ ID NO: 372240 - DNA, 528 bp, Homo sapiens
tgttttctgaatatcttgctcagcttgctactggtacgttttagaacaagatgtggatctgctgcttatctgaaatgggaacctgaacttcagggtcagggtctatctcacgagcatttatccattaagccctaagattttattctacaacaatgcagattattatctgatattgaaccattttcatgaccaacagaattctccatgacccatcacaattcaaaatttttacttgtggaattatctaggggaaatagagaatttaaagagatttggaattattgctctagctatcttgaatgtacttttttgaatttctgattaaatatgtacaaaatgggtcaggtttcttaaaaatgatatatcaaacaagagttagggaaacaataaggaggagatattagtctggaggatgattctgggaataytttgcatatagaaagaataatggttgtaataaactaatacttttcacattacaaaagtaaattttaattcaccctcagatatttaaaggcataatatgtt

SEQ ID NO: 372241 - DNA, 497 bp, Homo sapiens
aaggaagctgaaacgttgactgtgagacagcctatcatgatctatgtgactcgccaggtgctagtgttactagaacaaaagggaggctattggtggacactagggcaggctgggcaaataccaggccacactcttagataatcccacagtgaaattgcagactgctagcgtcttaaacccagctacattacttctctctaccaaagagccaaaagaacctataactgtttagaaattattgaccaggtattttccagtcgccctcacttaaaggacacagcccttccacaggcakactggatattgtggatgggagcagcctggtaaccaatgaaagaaggaatgctgcatatgctgtggtaaccttttcagaggtaatagaagtaaggacttcaccaatatgaacctctgcacagaaagcagaactgattatctttactacagccctgcagctagctgtcccaagtaaacaaggctcttggagtaaattggaaact

SEQ ID NO: 372242 - DNA, 563 bp, Homo sapiens
cataataacttaacttgggaattttagtttcttcttctctgacattaaactcttgaatcacacaacatccaaataaatgaccattgtagttctgtcatcagtgcagacatgctctgggagccatttaaaggattagagccacatcagaacctcgtttaagcacaatttactttctaaagccgtatcaccctgattagctaaattagtagttcctaaagaggtctcctgattttaaatgagtcactttacttgtaatgtttwgcaataagccttaatttactgacaccttcttctacaattctgattcacgggtattttctaaagtccgatagaataattggttctcaagaaaataatactactttgaaaatagactagaacacagcttgtctttctatgctccatctgctcaacctcatcttattaaattctaggaaatctacacactgagttttaaaatgccatgttggactcctgagtttttttaatgtgttatttctttgattgcatttgttgacattttagtgtcaaaatatgaaggtctaagttctaattagagaagc

SEQ ID NO: 372243 - DNA, 563 bp, Homo sapiens
cataataacttaacttgggaattttagtttcttcttctctgacattaaactcttgaatcacacaacatccaaataaatgaccattgtagttctgtcatcagtgcagacatgctctgggagccatttaaaggattagagccacatcagaacctcgtttaagcacaatttactttctaaagccgtatcaccctgattagctaaattagtagttcctaaagaggtctcctgattttaaatgagtcactttacttgtaatgttttgcaataagccttaatttactgacaccttcttctacaattctgattcacgggtrttttctaaagtccgatagaataattggttctcaagaaaataatactactttgaaaatagactagaacacagcttgtctttctatgctccatctgctcaacctcatcttattaaattctaggaaatctacacactgagttttaaaatgccatgttggactcctgagtttttttaatgtgttatttctttgattgcatttgttgacattttagtgtcaaaatatgaaggtctaagttctaattagagaagc

SEQ ID NO: 372244 - DNA, 544 bp, Homo sapiens
gccactgtagaaagagcttaaaaatcctttgggattccattgaagatggaaaaccaaagagcaggagaagagaggagagggaaacaggaagagttagggtgaaagggagagagagaattatcttttttagaggaatcctgatttctttgagcaatgggctgaacctgagaacagtttttacatttaatatttttctcttttcattttccactgtacagacatcaggctttaccctggtttcaatatatagatggagggaaatattcacagaacagactagtaatttaagacacaaataaattagttggagccagttagagaaaggacaagatattatcacatagctcatggcaggtggaaagaataacaagtccctgttttgtcaaatccgtattgacttcartagggatggtaccatgtttgaaaggctgaagaagagacttggtgccagtgaaaacacattgggtttattgagggcacttacatacagagcagttcagtggcagcgggctggacaggagaaccagaacggcttgtaaaaaca

SEQ ID NO: 372245 - DNA, 582 bp, Homo sapiens
tcaaatttcataatctacttttcaggttttgtttgcaaaaaactacaaatgcttatgcttttattaactcagcatcactaaagataatcaaattcaaatttttcttttcaccaaggggaacaatgtgattttcagatacactaaatttccagcctaagtagatgttgcttcatatattgtaaatgagtgtttgtttattcatatactcatagacatagatagatgacagataggtagatagatagatagcgtactagtctgttctcacactgctataaagaactatctgagactgggcactttataaagaaaagaggtttaattgacttatagttccacaggctatgcaggaggcatggctggggaggcctcaggaaatttacaatcataatagaagagtgaaggggaagcaagcctgtcttcatggtagtcagagagaaaaagggcaaagggtgaagtgctacatacttgcaaacaactagatctcaygagaactcagtatcacaagaacagcaagggagaaaaccgccccatgatccaatcacctcctgccatgtccctcccccaacactggggactgtg

SEQ ID NO: 372246 - DNA, 527 bp, Homo sapiens
gtggctttttcttagtggtggcatgctgataaatgtttaactactggattttcttgggggaaaagaaaactaatttgtagcagttgctaatttttacgtgtaaattacttctaacaatgtcaaattccaagctgtcaacatcaactgacttgtaaaattcttcaaaatttaccaataggctctcccaagcatgtattcaccagctccagcacccactgattatctcacttattaaaaagtatatatatatayacacacacacacacacacacacacacacacacatgtctatagaaatggggaagccaaattataattacaaattgattttgtaagcacggaattatgaaatcaaactatggtttggtgaaactgaactatgaaaccaaatctttgccctaaggcagcctctttcttatacgatgctggacaaattttgcccttgggaaatacattattctaggctacatacatactattgactgccctgcacctatacacagttcatgctagagcagaaaacctcc

SEQ ID NO: 372247 - DNA, 527 bp, Homo sapiens
gtggctttttcttagtggtggcatgctgataaatgtttaactactggattttcttgggggaaaagaaaactaatttgtagcagttgctaatttttacgtgtaaattacttctaacaatgtcaaattccaagctgtcaacatcaactgacttgtaaaattcttcaaaatttaccaataggctctcccaagcatgtattcaccagctccagcacccactgattatctcacttattaaaaagtatatatatatatacacacacacacacacacacacacacacacacatgtctatagaaatggggaagccaaattataattacaaattgattttgtaagcacggaattatgaaatcaaactatggtttggtgaaactgaactatgaaaccaaatctttgccctaaggcagcctctttcttatacgatgctggacaaattttgcccttgggaaatacatyattctaggctacatacatactattgactgccctgcacctatacacagttcatgctagagcagaaaacctcc

SEQ ID NO: 372248 - DNA, 614 bp, Homo sapiens
agtcttaagaatgcaagggtaattcaattcatgaaaatgattaatttagtatatgacattacagagtaaaagtaaagaaaaaaaagatgtagaaaaagcattggtgaaattcaataccctttcataatacaaaatacttaataaactargaatagaagtgaactttctaaacataagaaaggccataaatgaaaaacccatagaaaacataatattcagtggtgagagactgaaagctttttcccttagagattaggatgcttatgtttgccacttctagtcaacgtagtactggaagttctaaccaaaacaattagtcaagaaaaataagtaaaaagcatcaaaaataaaaagatgtaattcatttgtgttttcagatggtatgatcttttatgtagcaaaccttaaagcatgcacacacacatacaaaacggttagagttaagacataaatttagcaaagttgcaggctacagaatttacacaccaaaatcagctgtatttctatatattagcaatgaacattccagaaaaaaaattaaggcaaacaattcattgacaatagcctaataaaatacttggaaataaattcaatcaagaaggtacaaaatgtgt

SEQ ID NO: 372249 - DNA, 550 bp, Homo sapiens
ggccccctaaaatcttccagaaatgaagttagtcaacaaaacccaccttatactacaatcaaacctccaaggacatcaaagaagataaaagcaaaaaacctaattcaaaggacagcagcttcaaagactgaaggaacatcagcccacacagataagaaaaaaaccagtgcaagaactctgacaacccaaaaagccagagtgtcttcttacctaaaaaataaacatgttagttctccaccagtggttcttaaccaggctgaaatggctgaaataacagacatagacttcagaatatggataggaacaaagatcattgacattaaggagaatgttgaaacccaatccagggaatctagggaatacargatgatacaggagctgaaagacaaaatggccattttaagaaagaagcaagctgatctgatggagatgaaaaactcacttcagtaatttcataatacaattgcaatattaacagaagaagggaccaacctgaggaaagaatctgagggttggaagactgctgtccaaattaacccagtaagatgaa

SEQ ID NO: 372250 - DNA, 522 bp, Homo sapiens
tgaaaaactcacttcagtaatttcataatacaattgcaatattaacagaagaagggaccaacctgaggaaagaatctgagggttggaagactgctgtccaaattaacccagtaagatgaaaatctttttaaaaaataaatgaagaagaataaacaaaacctccaagaaataggggattgtgtaaagagaccagatctatgactcattgccatccctgaaagacagggagagaaaacaacttakaaaacatgcttgaggatatcatccacaagcttttccccaactttgctagggaggttgacattcaaatttagcaaattcagagaacccttgtattatactatacaagatggcaatcctcaaaacacatagtcatcagattctccaaggtcaacatgaaagaaaaaatgttaaagtcagctaaagagaaggggaaggtcacctaaaaagggaaccccatcaggttaacagcagaactttcatcagaaatcgtataagccagaagacattggggacctatat

SEQ ID NO: 372251 - DNA, 434 bp, Homo sapiens
acaagtcaccacaaaaacacctatgatgcattcaagtctgcatcatagccagctaacaacagaatgacaggatcaaatctgcacatatcaatattaaccttgaaggtaacaaaaacaggtgaaatgccccagttgaaaggctcagagtgttaagttggataaaaaagcaagacccaactgtatgcccaactgtatgcastcttcaagagacccatctcgcaagcaatgacaccatatgcctaaagtcaaggaatggagaaaaatctaccaagcaaactgaaaacagaaaaagcagaggttgcaaatccaatttgagacaaaacagactttaaaccaacaataataaaaaaatgcctaagaatcctaaatatatatgcacccaacacaggagcactcagattcataaagcatgttcttagaggcctttgaaaaga

SEQ ID NO: 372252 - DNA, 501 bp, Homo sapiens
actctgtcagtgtgttccaagacctttgyctcctctgcgttttccccaatgtctctattctcagtgtgttttttatagagtaaaaaagaactgattgcagagcacatcttggagactttcccctggaatctgaagggccttacagagattccatggggtgatgcactccccattccattctccagaactctcgtgtgttgctgcttctcccatctctgtatccttcacagacctcagcatctaaactcaaataaagagaattaaagatgtgagtgcattgtaagttgcatttgaagcctactttccttcccaagaaagacagctacctaatcataaataccaacaggtaatattccccctagacctcgatctttgaaactcatttgaaattctcagcaaagatgggcgatttgattgatcagtgggtgggtaccaatagggcccaagtgtagccttcagtttgatatcggcttttgacaattatgttataggagaataatc

SEQ ID NO: 372253 - DNA, 581 bp, Homo sapiens
ctttctgttgattgattctcccagacaccccccactcgcctcattatggatcacattttgctgcttctttgcttgctagataagtttttattacatgtcagagattggacatcttatgatgtttacacatttaaatattgtaaatatttttaggaatttgttctgggaaacagataagttacttgaaaacaatttgaactttttgaactggtgtttaagctttgtcagactgatacagaacaccctttattttagggctaayctggtttcactcttgaggcaatactctgctaagaactttgacggcatgtatgttaagaggtctttccatttttgtttgtgaactattcttggttctgtatgatccttaaacattgttctacctgttgctttatgttgattcttctcccagcaatggttatttacccctgaacacatgaatttatcagtactttgctgttgactcaaggggagtcccctgtacatctgctcagtgctactacccctcctagcccccgatccccacttacttttctctttttctcatgcattgtttaggcagaaggtaaattaggtccctg

SEQ ID NO: 372254 - DNA, 581 bp, Homo sapiens
ctttctgttgattgattctcccagacaccccccactcgcctcattatggatcacattttgctgcttctttgcttgctagataagtttttattacatgtcagagattggacatcttatgatgtttacacatttaaatattgtaaatatttttaggaatttgttctgggaaacagataagttacttgaaaacaatttgaactttttgaactggtgtttaagctttgtcagactgatacagaacaccctttattttagggctaatctggtttcactcttgaggcaatactctgctaagaactttgacrgcatgtatgttaagaggtctttccatttttgtttgtgaactattcttggttctgtatgatccttaaacattgttctacctgttgctttatgttgattcttctcccagcaatggttatttacccctgaacacatgaatttatcagtactttgctgttgactcaaggggagtcccctgtacatctgctcagtgctactacccctcctagcccccgatccccacttacttttctctttttctcatgcattgtttaggcagaaggtaaattaggtccctg

SEQ ID NO: 372255 - DNA, 581 bp, Homo sapiens
ctttctgttgattgattctcccagacaccccccactcgcctcattatggatcacattttgctgcttctttgcttgctagataagtttttattacatgtcagagattggacatcttatgatgtttacacatttaaatattgtaaatatttttaggaatttgttctgggaaacagataagttacttgaaaacaatttgaactttttgaactggtgtttaagctttgtcagactgatacagaacaccctttattttagggctaatctggtttcactcttgaggcaatactctgctaagaactttgacggcatgtatgttaagaggtctttccatttttgtttgtgaactattcttggttctgtatgatccttaaacattgttctacctgttgctttatgttgattcttctcccagcaatggttatttacccctgaacacatgaatttatcagtactttgctgttgactcaaggggagtcccctgtacatctgctcagtgctactacccctcctagcccccratccccacttacttttctctttttctcatgcattgtttaggcagaaggtaaattaggtccctg

SEQ ID NO: 372256 - DNA, 627 bp, Homo sapiens
atatcctcgatgaagaaagaagaactttgtagcagatgtgtatacgtcccctttcctttatatgcctgcaatgctgaagaactttataagcaattttcttttcctgtgatgaagaggttaatacaaagcattgttgacccatttattaatacattatttggaagaaagtggggaatcttggatccttcttgaacaatgctatgaaaatcacatatgagaactatagaaactggatgccattcaaaagaccaagatgatgaaaagaacraagttgtgaaacaaaaagtgactggtctgacaagaaacattggagatgtttgcttacctatctcaatgtaaaaactacataaagaacgttacaaagattcttaggtaagaatttttttaattctcaaagattgagaaagttttccattcagttttcatgaactgaaagacaagtttgtaatgtctgaagagtagaattaaaaggatcttaaagggattgcatctaaaaatatgcccactcaagactctgagtcatgcataatatgttctcattgttactttaatttgcattttctcatgacccaggatattaagcatcttttcatatcaatattgatacatacacatgtacattaaagc

SEQ ID NO: 372257 - DNA, 627 bp, Homo sapiens
atatcctcgatgaagaaagaagaactttgtagcagatgtgtatacgtcccctttcctttatatgcctgcaatgctgaagaactttataagcaattttcttttcctgtgatgaagaggttaatacaaagcattgttgacccatttattaatacattatttggaagaaagtggggaatcttggatccttcttgaacaatgctatgaaaatcacatatgagaactatagaaactggatgccattcaaaagaccaagatgatgaaaagaacgaagttgtgaaacaaaaagtgactggtctgacaagaaacattggagatgtttgcttacctatctcaatgtaaaaactacataragaacgttacaaagattcttaggtaagaatttttttaattctcaaagattgagaaagttttccattcagttttcatgaactgaaagacaagtttgtaatgtctgaagagtagaattaaaaggatcttaaagggattgcatctaaaaatatgcccactcaagactctgagtcatgcataatatgttctcattgttactttaatttgcattttctcatgacccaggatattaagcatcttttcatatcaatattgatacatacacatgtacattaaagc

SEQ ID NO: 372258 - DNA, 587 bp, Homo sapiens
gggtgcagcacaccaacatagcacatatatacatatgtaacaaacctgcatgttgtgcacatgtaccctaaaacttaaagtataataataataaaatttttttwaaaaagtaaaaaaaaaagcagtcaaacagttgtcagtgaggttgataatttttgtctcttgtgtcttgattatcttcttaaagctctttctagatgtctctgtaattatcatctgagttaacattttaacgaatgtctatcagtgtccttttctcacttttgctagttttccccttcctttgaaaaaggcattccttgcattttgttaagataattagacaatgtaattaggaagctttctccaatagcagctagacataacaaatgacaattggaacatttgtgaagtgactggtagatatggaagaggtcaaacattgtgattagaacattataccctgttgtgtaagctcataccttaaagctcagagaaaaatcaaaataattgcactcagagtgccagggacaatacagctttcaccatgttgtagatgccaatgatgtctaataaattccatagtctctgggtgacctgagtgcatc

SEQ ID NO: 372259 - DNA, 475 bp, Homo sapiens
aaacaaaagaaacagaaataataatcacataacatagataataattttcctaagtggaagaaagcaaaacactttatttaaagtgttgtaactttagctcacattctggtgagcttttactctcaagattgaaaaaaaaaatcttacaagcatttaggcagaaggaaaaacaattacccacaatagcaattggtagcactgaaggaatgcttagaggagtttaacttcccccactccaatagtctccagtcagttgmtcaagacactctaaatgaaaacaaaatataaataaaaatatattcttgcagtgtaaccatggttttgactcccaaaacatccttcctgtcagccgtcgccaacccctttagattgctatacctaatgcttcctgtatagtcattctgaaggcaccattcttgaagacatatttaaccaaatgagaaataaaaccaaaagtaaatgaaaaatgggaact

SEQ ID NO: 372260 - DNA, 469 bp, Homo sapiens
ctatggcatggttgtagtccccactttgccaccccaacaattaaattctaggcaacatsctgtgtcctttagaagtttctgtatttctgatatcaaatggaaacttctaaggataaatgtattttcctccttaaaaaaaaaagaaaaaaaaaacacctaaatgtttaagatcctagtgtctgaaaaaaaagcatggctgtagtttaatcttgtttcactaaaataagaaaagtaattaaattgaccttatttagggccaagaaatgcaatcactttgatgctgttttaagaagatgatttgctttggaatagacaagaggtttgattgagataatttgtttctgttttaaaatgttttatttcagacatggatgaatgaagactttgtagttattccatctatttcaacgtggacactgacattatattttccatatttactgtggtaagcatacatttttaaaaggat

SEQ ID NO: 372261 - DNA, 469 bp, Homo sapiens
ctatggcatggttgtagtccccactttgccaccccaacaattaaattctaggcaacatgctgtgtcctttagaagtttctgtatttctgatatcaaatggaaacttctaaggataaatgtattttcctccttaaaaaaaaaagaaaaaaaaaacacctaaatgtttaagatcctagtgtctgaaaaaaaagcatggctgtagtttaatcttgtttcactaaaataagaaaartaattaaattgaccttatttagggccaagaaatgcaatcactttgatgctgttttaagaagatgatttgctttggaatagacaagaggtttgattgagataatttgtttctgttttaaaatgttttatttcagacatggatgaatgaagactttgtagttattccatctatttcaacgtggacactgacattatattttccatatttactgtggtaagcatacatttttaaaaggat

SEQ ID NO: 372262 - DNA, 469 bp, Homo sapiens
ctatggcatggttgtagtccccactttgccaccccaacaattaaattctaggcaacatgctgtgtcctttagaagtttctgtatttctgatatcaaatggaaacttctaaggataaatgtattttcctccttaaaaaaaaaagaaaaaaaaaacacctaaatgtttaagatcctagtgtctgaaaaaaaagcatggctgtagtttaatcttgtttcactaaaataagaaaagtaattaaattgaccttatttagggccaagaaatgcaatcactttgatgctgttttaagaagatgatttgctttggaatagacaagaggtttgattgagataatttgtttctgttttaaaatgttttatttcagacatggatgaatgaagactttgtagttattccatctrtttcaacgtggacactgacattatattttccatatttactgtggtaagcatacatttttaaaaggat

SEQ ID NO: 372263 - DNA, 611 bp, Homo sapiens
agagaaactcacttcttatgaaataatgctttaacctatctcagaaaatattgttaattttgctttcaaattatggcttttacactgttacttgagttttaagtttaaatttatatatgaataagagcttaatatactcctattcagtagaactaaaaagggacatttggataaaaaatcgaataccttggctccataatagtctgcattgagaaagaagccaatttagaatggtctctgcttaaatgctggttaattttatcatttcgaggaaacttgtagtctgtttctagaagggaggataaaaacgtaggagaaaaggagatcmctgttttagcgagtctcatcattttacattaaatgttttacatatatttgacatagctttaaaacattattagatagaatgctttacacgtaataagaatgttcacattttttcttatttgattctgatcaaaattttgtgatatgactgcagatgtagaaactgagtctgaaagggagaaactgattgctgcagtctattttactagaaggagaaaatttagcattgcacctgagtcttaatacataattacaaaataatccatagcaagaatgcttcaaac

SEQ ID NO: 372264 - DNA, 523 bp, Homo sapiens
tggtctgttaagtgtgcaatagcattatgtttaaaaacatatacyttaattttaaaatattttattgctaagaaatgctgatgatcatctcagccttcagagagttgtaatctatttgcttgtatagggtcttgcctcaatgttgatggccgctgactgatcagtgtagtggttgctgaagtttggggtggctgtggcaatttttaaaaataaggcaacaatgaagtttgtcacatcaattgaatcttccttttacaaaagatttttctgtagcattcaatgttgtttgatagcattttacccacagaactttcaaaatcgggtcaaaaacttgcaaactctgctgctgtttgatcaactaagtttaggtaatattctaaaccctttgtgatgatttcaacaatgttaacagcatcttctccaggagtagattctgcctcaagaaaccactttctttgctcatccataagaagtaactcctcatctattcaagttttatcgtgagatttcagcaattcagtca

SEQ ID NO: 372265 - DNA, 579 bp, Homo sapiens
tccaagtaattcttctgtaaacacatctttttttwaaaaaaaaaaaaaaaaggcaggtctactgtggccgacatctagtctgggcagttggtatggtttgcctgtgtccccacggaaatctcatcttgaattgtagcaatcataattcccacatgttgtgggatggacctggtgagagataattgaatcgtggcggtggtttccccatactgttctcatggtactgagtaagtctcatgagatccgatggttttataagaggaatctcctttcacttggttctcattctctcttgcctgctgccatgtaagatgtgaccttcaccttccaccatgatcatgagacctccccagccacatggaactgtgagtccattaaacctctttttctttataaattacccagtcttgggtatgtctttatcagcagcatgtaaatggactaatacagcagtaccagggtgacttttgttacattagcaaatcaacatatgggctttgattgtacttgaaatcaaatcacattgctatgacaaatgttagcagatagcctaaggattattgttgcacgccagtataa

SEQ ID NO: 372266 - DNA, 509 bp, Homo sapiens
atctcatcttgaattgtagcaatcataattcccacatgttgtgggatggacctggtgagagataattgaatcgtggcggtggtttccccatactgttctcatggtactgagtaagtctcatgagatccgatggttttataagaggaatctcctttcacttggttctcattctctcttgcctgctgccatgtaagatgtgaccttcaccttccaccatgatcatgagacctccccagccacatggaactgtgagtccattaaacctctttttctttataaattacccagtcttgggtatgtctttatcagcagcatgtaaatggactaatacagcagtaccagggtgacttttrttacattagcaaatcaacatatgggctttgattgtacttgaaatcaaatcacattgctatgacaaatgttagcagatagcctaaggattattgttgcacgccagtataaaatctcagaggctataacaatcaataaagctcaaaggaagacaaaga

SEQ ID NO: 372267 - DNA, 604 bp, Homo sapiens
cactgtttttttctattttttaaaacaatagctatcctaaaggtgtgagatgatatatcattgtggtttgaatttgcatttccctgattagtgacattgagcatctttttacacaccttatggctatttatatgtctccttggagaaatgtctattcaagtctttagcccactttagtcagattactagttatttagttagttttgctgctgattcataggctagctaarttggtagagcatgagagtctatgtataacattttaatccaagcatatacacatatccatgctgtatcgctgcatgaccttcacacattgcaaaagctcacttggtcatcgccattgcttttgtgtattcaaactctttatagtatttgtgaatagtcaaagatactgcttatttaaaatgaagagagtattcaatgtatatccagggcaagtcaatgttttttctagttaatacatgggttattgaagtaactactgataccagtaaattagtatgagacaatgctaaattctgctgtagaatcgggactcattcattcaaaaatgatttattcagcatctactctgtgccatgaaatgttcttgtcctaggta

SEQ ID NO: 372268 - DNA, 604 bp, Homo sapiens
cactgtttttttctattttttaaaacaatagctatcctaaaggtgtgagatgatatatcattgtggtttgaatttgcatttccctgattagtgacattgagcatctttttacacaccttatggctatttatatgtctccttggagaaatgtctattcaagtctttagcccactttagtcagattactagttatttagttagttttgctgctgattcataggctagctaaattggtagagcatgagagtctatgtataacattttaatccaagcatatacacatatccatgctgtatcgctgcatgaccttcacacattgcaaaagctcacttggtcatcgccattgcttttgtgtattcaaactctttayagtatttgtgaatagtcaaagatactgcttatttaaaatgaagagagtattcaatgtatatccagggcaagtcaatgttttttctagttaatacatgggttattgaagtaactactgataccagtaaattagtatgagacaatgctaaattctgctgtagaatcgggactcattcattcaaaaatgatttattcagcatctactctgtgccatgaaatgttcttgtcctaggta

SEQ ID NO: 372269 - DNA, 604 bp, Homo sapiens
cactgtttttttctattttttaaaacaatagctatcctaaaggtgtgagatgatatatcattgtggtttgaatttgcatttccctgattagtgacattgagcatctttttacacaccttatggctatttatatgtctccttggagaaatgtctattcaagtctttagcccactttagtcagattactagttatttagttagttttgctgctgattcataggctagctaaattggtagagcatgagagtctatgtataacattttaatccaagcatatacacatatccatgctgtatcgctgcatgaccttcacacattgcaaaagctcacttggtcatcgccattgcttttgtgtattcaaactctttatagtatttgtgaatagtcaaagataytgcttatttaaaatgaagagagtattcaatgtatatccagggcaagtcaatgttttttctagttaatacatgggttattgaagtaactactgataccagtaaattagtatgagacaatgctaaattctgctgtagaatcgggactcattcattcaaaaatgatttattcagcatctactctgtgccatgaaatgttcttgtcctaggta

SEQ ID NO: 372270 - DNA, 421 bp, Homo sapiens
cgatgacttgtaaagcatctttgcttactgagaggctagagacattcatctcatgtactcgcttctgatcttattgaagtggaaaatcaaagcctcacatttttttgtcagaggttgctgaaaatgattacttactaacatattttcaccaacatgaaatattagtagccaaaaaggatgcctaagccacccttatgaaccaaagttcatatatatatatatatatatayatatatatatatatatttgagatttttaaacccctgtttactgaaaaggtgtaaatttttaggatgcttccattgatccattcattgttcaaaaatttgtgtcaaagtcctattatgtatccagaccttatggatactaggaactatcttttcagaccctggtcctcacttaaatgcctcatacagaattg

SEQ ID NO: 372271 - DNA, 574 bp, Homo sapiens
ttcaaaatgctaatctaggtgctgcaggagtttcaaaaaacaaacaaacataagacaggatctctaacttcaaaaggcctagggttagtatgggaaataaaggtaaagtaaatgccatgagatatttcaaaawttgataaatgaaacagtatacctgatgaaaagaaagaaatagtatatcttggaaaacaaatcacagagggctctatggaggaggtaacatctgagctcatcgttgatgggtagaatttggaactctgagatagaggaaagattatctcaaggagagaaaattaagagacttctgttgggaagatttcttgactcagcagaaatgagtgcctcattgactaatgataacggccatgggatagaagaggcatgctggcacacattaattgctaaatctgaaagataaataaactcttacagaaactagattaaagagaagttattggagataaagatgggctaagcagcaaatcctttctctctgatttttcttctgcctgatccagtttggcaattagatcaaaaatcgttttgatgataatgtccacagatacatattaat

SEQ ID NO: 372272 - DNA, 549 bp, Homo sapiens
taaagtaaatgccatgagatatttcaaaatttgataaatgaaacagtatacctgatgaaaagaaagaaatagtatatcttggaaaacaaatcacagagggctctatggaggaggtaacatctgagctcatcgttgatgggtagaatttggaactctgagatagaggaaagattatctcaaggagagaaaattaagagacttctgttgggaagatttcttgactcagcagaaatgagtgcctcattgactaatgataacggccatgggatagaagaggcatgctggcacacattaattgctaaatctgaaagataaataaactcttacagaaactagattaaagagaagttattggagataaagatgggctaagcagcaaatcctttctctctgatttttcttctgcctgatccagtttggcaattagatcaaaaatcgttttgatgataatgtccacagatacatattaatacattcaaccaatggataataacatatctytacagcctcagctcccaccaccactgctggtcatatcaaaacccgagt

SEQ ID NO: 372273 - DNA, 620 bp, Homo sapiens
tcctttcctggttttggtattagagtgatgctggcttcgtggaatgaatcagtgaggattccttctttctctgtcctgtggaactgtgtcaaaaggattggtaccaattcttctttgaatgtctggtagatctgctgtgagtccatctggtcctggacttttttttgttggtaatttttaaattacgatttcattcttgctgcttgttattggtctgctcagggtatctaattcttcctgatttaagctaggagggttgtakttttccaggaatttatccatctcttctaggttttctagtttatgtgcataaaggtgttcatagtcgccttgaatgatcatttgtatttcagtggcgtccattgtaatatctcctgtttcatttcttagtgaggttatttggattttctctcttctttgcttggttaatcttgctaatgttctatcaatttaatttttctttacaaagaaccagttttttgttttatttacctttagtattttttgtttgtttgtttcaatttcatttagttctgctctgatcttggtaattttctttcttctgctggatttgggtttggtttgcttttgattctctagttccttgaggtgtgacctta

SEQ ID NO: 372274 - DNA, 620 bp, Homo sapiens
tcctttcctggttttggtattagagtgatgctggcttcgtggaatgaatcagtgaggattccttctttctctgtcctgtggaactgtgtcaaaaggattggtaccaattcttctttgaatgtctggtagatctgctgtgagtccatctggtcctggacttttttttgttggtaatttttaaattacgatttcattcttgctgcttgttattggtctgctcagggtatctaattcttcctgatttaagctaggagggttgtatttttccaggaatttatccatctcttctaggttttctagtttatgtgcataaaggtgttcatagtcgccttgaatgatcatttgtatttcagtggcrtccattgtaatatctcctgtttcatttcttagtgaggttatttggattttctctcttctttgcttggttaatcttgctaatgttctatcaatttaatttttctttacaaagaaccagttttttgttttatttacctttagtattttttgtttgtttgtttcaatttcatttagttctgctctgatcttggtaattttctttcttctgctggatttgggtttggtttgcttttgattctctagttccttgaggtgtgacctta

SEQ ID NO: 372275 - DNA, 642 bp, Homo sapiens
ctctatgacttttagcagaaatcatcaccatcacgctattgcaaggtcagccacagatccaatcccctccctcgttttaatcactctgtttctattaatcacatttaaaaatgttggtaatgtaagaattatctttcattagataaattatcctaatacctgttttaggataggcataatctactcatcaataacctcaaggacaaatgctagaaaattcaacctaagaaacagcaaagtccaagttggtcagtcaggaaagctcttcagaagtctgaatyatattttcattatcctgagaaaagttctgggcattaagcaggtgttaaataaatatttgtacttggattcagaggcatgactggattttagaaattccttacaaagtagaagttacctagtagttaggaaatgaaacagagttttcacacggggaaaaagaaattcgaatacatgctaatttcgtgacaaaaaatagtttctttcaagaaagctgtttgtcaattaaaagagcagacagttcaaaaaaaaacaaaacaaaacatttttcttcccaattagaccataagttgctgaatgaatagatgttatcaggtacctgggataaagtaagtgtttggccattatttgttgaatgtatga

SEQ ID NO: 372276 - DNA, 620 bp, Homo sapiens
ctgaatgaatagatgttatcaggtacctgggataaagtaagtgtttggccattatttgttgaatgtatgaataaatattgcgtaagattgttgcttttaaacatgttcaaccttaagaccragcaacgaacaatcaatacttggagactttagagttacaatttcgaacccaatcaatctcattttagattttccttgacacttaggaaagtggggatggggactcttttttgccagacctgacccataactggtaatctttctcagcacccttaaagacaaaatgaactaataagaattacaacaaatctttcacagtaaatatttgaagaggatcacacttccttaggatttctacattttcagaaaggaaaggaactaggaccagtcaaaatgcaattttatctatggggctggccatggtttttgagttaacagggctgatttcagtaacccctgttttccacccagcttctaataaactattccagattcttgccttgtcccttttgaaaggccatggatctgtgaaaccacagtgcaatcaatccctcactttctgagtgacccatggaatacaaaatcacatatacactccctcactaaaaaagaaaaggcta

SEQ ID NO: 372277 - DNA, 605 bp, Homo sapiens
caactgtaaactgtaggaaagaataatgcttacctcaggttgttttgaagattaattaaaataaagcaagagaattgtcagtgaattgtctgggatgtaataggccctcagttagcgtgacctgctattggcctgtgttatgaactgcaatgttctcttttcggggcttttccagagacctcaggtaacatgatccctttaacyttacagtactctttagggttgggactcactccagtgcttcagaccagttccacacgtgtgaaatttgggctctttcctgagctgcttcaagcttttttttttttcttagccgagggaagtgcaaagcccatgacccatgactcaaatccatctccttttcttagcacaaccaaagagaaagtctacattcaaacttaaacagggactgtttgaattctgcaaaccgaatacctcttcaccatatcccttgtagataagtgtggaacatccatctcatttgccattctttagctggattttcttgctaagggtaacatttaatacaagacctgtcttcatctttttatagccactgactgtagttccctggcaactgttacattttgcctctgacaaacatt

SEQ ID NO: 372278 - DNA, 464 bp, Homo sapiens
aaatagtaactgaattccagcactggaagagtttataattcagtccaagtttctcattttatacatgaggtacatgaagcacagataaatttaatgacttgactaaattttataaactaatacataatacctagacttctccgacctgcaaattttctcttcatactcacataagaaaatttagacagagatcattttttctgcctccaaatgtgtrctgcccggtggttaagttatctcatttgaatagatggaaaaagaaaaatacttcctattcagtgttaaaaaataaaacagtgtatattctactttaaacagttacaaaaaaaggcagaaaatatataaaacgtatgttaaaaaataaagatctatgaagtgtgtatttaatagtttcaacagagtcaatgctattttctggcaataggtgattgcaagtttttcaagaacttgactattattaacaa

SEQ ID NO: 372279 - DNA, 544 bp, Homo sapiens
taaataataaacctagtcattacccaacatatcacctatctttactaaggaactacttaacagatttgagatgatgggtgaataatatataaaatatttagaaattatggcaagttattgaatcatgartttatgaatatatgaaaggaaagtattttaatattaaaagattgtctaaaattatagattctacaatttcttgggcacttgatctttttaatcaaattcaatgaatcaaaacttaatagagccacttcaaatggaaaattattgccctaaagagactggggtttaaatgttcttagggttaaaggtatatttagaaataaattgatgtttcatgaagccaaagtagattacaaattcagagaaaatctctctttgtcaaaatactttgtaatttagaaatgaaaataagcatgtggaaaatttttataaccaaaaagttacaatacagtttctctctattttctgaagcactagattagctcccccagtttttttagcagtcacattattctcccatacatgtctatttttggtg

SEQ ID NO: 372280 - DNA, 554 bp, Homo sapiens
ccttctattcaatgtagtagtagaaatactagcaagagaaatcagacaagaaaaataaaaggcatctaaatccaaaaargcagaagtaaaattatctctgtttgcagatggcatgatcatatatatatatatatatacacacacatatatgtgtgtgtatatacatatacatatatatgtgtgtatatatatccatatatgtatatatgtgtgtatatatatgtatgtatatatccaaagattccacaaaaatctgttagaactaataagcatctagtaaagttagaactactaaacttacaggatacaaaaccaaatcacaaaaatcagcagcatttttacgcacaaataaccacctaactaaaaaagaaatcaagaaaacaatcccaataacatcaaaaacaactacaatagcatcaaaaatatctaggaataaatgtaacccagaaggtaaaagatctatacactgaaaactgtaaaatattgatgaaataaattgaagtagacacaaataaatgggaagatgtttatgttcatggaccagaagaactaac

SEQ ID NO: 372281 - DNA, 554 bp, Homo sapiens
ccttctattcaatgtagtagtagaaatactagcaagagaaatcagacaagaaaaataaaaggcatctaaatccaaaaaggcagaagtaaaattatctctgtttgcagatggcatgrtcatatatatatatatatatacacacacatatatgtgtgtgtatatacatatacatatatatgtgtgtatatatatccatatatgtatatatgtgtgtatatatatgtatgtatatatccaaagattccacaaaaatctgttagaactaataagcatctagtaaagttagaactactaaacttacaggatacaaaaccaaatcacaaaaatcagcagcatttttacgcacaaataaccacctaactaaaaaagaaatcaagaaaacaatcccaataacatcaaaaacaactacaatagcatcaaaaatatctaggaataaatgtaacccagaaggtaaaagatctatacactgaaaactgtaaaatattgatgaaataaattgaagtagacacaaataaatgggaagatgtttatgttcatggaccagaagaactaac

SEQ ID NO: 372282 - DNA, 607 bp, Homo sapiens
ctgcatagaagtagccttttatacatctttacagtatattttataacttcagaactaagaaaatttatggactgatagaggttgtgcagaaataatattaaaaaatgataattctaggcaaaagtaaaggaaaagtcaactttttgcaatatggaaaaaattatttggtgtgacttttctaaaacctttttctgtgttcattttaattttattctttttttaattttcattttcattttagattcagggggtasatgtgcaggatttttccatggttatattgcatggggttgaagtttgagcttctattgattctgtcacccagggactgaacatagtacccaatagggagttttgcagcccttgccctactccctccaaccattcttttggagtccccagtgactatgttcccttccttatgtctgtctgaacccaaggtttacctcccacttataagtgagaacatgtgctatttggtttttttctgagttaggtctcttaggataacggtctccagctgagtccatgttgttgcaaaggacatgatttcattcttcttttatggctgtgtagtattccatagtgtgtatgtaccacattttct

SEQ ID NO: 372283 - DNA, 578 bp, Homo sapiens
tcaaaacacaatcacgccttcccaacagtcccccaaagtcttaactaatttcagcattaactcaaaagtccatagtccaagtcacacctgagacaaggcaagtcccttccacctaaaaacctgtaaaataaaaaacaagttagttacttccaaaatgcaatgtggatagagacattgggtaaatacattccaagaggtagaaatcagccaaaacaaaggggctacaggccacatgcaagtctaaaacccagcagggcagtcattaaatctcaaagccccaaaatgatctcccttgactgcacgtctcacatccaaaccacactgatgcaaggagtgggctcctaaggcyttgggcagctctgcctctgccactctgcagggtaccaccacctcagctgttttcacaggctggcattgacctgaggcttttccagatgcatggtgtaagctgtcagtggatctaccatctggggatctggaggatggtggtcttcttctcacagctccactagggagtgccccagtggggactctgagtgggagctccaaccccacatttctccttcacactgacctag

SEQ ID NO: 372284 - DNA, 571 bp, Homo sapiens
ggattataggaatgagccactgcacctagcctcctgttttgggcttttagataactccttgatttggtttcaaaaaactggacagcatgagcacattactgaactaaaagaagaattactcaaataaatttttccaagtcctcatatgtagaagtttccacacagaatcttcagatttgtacatatagatacttatattagaaaatctaaaaatctataaaaacaagcaggtgtttgtcacatttccaatgggccatatagtgttagtttgataatgcctttagaggtgatatctagaaaaatgattttatctgataactaattgtttcataaaaatcttcagatacacagacatagggtaaaaaacatttaaaaaaatttcaggaaaaaagtcatcttatatcacaagacactttttcaacgtgtattcttatattcaatgtgccctaagctctgcatctagattattcttcatgtatgcttcctgcaaaattcttttcatttcrtaagttccactgaagagttttagcattgtctcatgaatcagtgaagtcacagggagatttccaca

SEQ ID NO: 372285 - DNA, 649 bp, Homo sapiens
tataaatcagctctgggttcacaggaccctagatcccttgagtatctggaaaaagacatgttttttcctaggaatgttctactctgtcttggatgtaaattggaggtagctatgttctcttgccactgagacctctagttagcaaggttgaggttgctaggaagaattaatgggggagaaaccatataggtttgcagaggagtgaaaattgcaatttggagcttgtkgtggtgctaaagagaagaaaagtggaaaacaagaagtttgcttgacgggagaacatggaaactcagcagaaaccaaaattgtggcataggtaaaataaagcaaactgaaataactcattgtaggcaaagctagggtgagttatctgggtttaaaaaatactattttaagagaatgagaaaataatatatttggtttaaattattctgaggaatgtggaaattgtttctaataagggaaaatgaaaggagatacctgtggattgagattaaaggtgattttttaaaaaaatttgatacctgtgaagactcagagtgactgagtaagataaatattacctttgtctttggccagccaaatttatgttcccgttttttctttactagtgacatttctttcttgaaattcttgcctagaatgcccc

SEQ ID NO: 372286 - DNA, 649 bp, Homo sapiens
tataaatcagctctgggttcacaggaccctagatcccttgagtatctggaaaaagacatgttttttcctaggaatgttctactctgtcttggatgtaaattggaggtagctatgttctcttgccactgagacctctagttagcaaggttgaggttgctaggaagaattaatgggggagaaaccatataggtttgcagaggagtgaaaattgcaatttggagcttgtggtggtgctaaagagaagaaaagtggaaaacaagargtttgcttgacgggagaacatggaaactcagcagaaaccaaaattgtggcataggtaaaataaagcaaactgaaataactcattgtaggcaaagctagggtgagttatctgggtttaaaaaatactattttaagagaatgagaaaataatatatttggtttaaattattctgaggaatgtggaaattgtttctaataagggaaaatgaaaggagatacctgtggattgagattaaaggtgattttttaaaaaaatttgatacctgtgaagactcagagtgactgagtaagataaatattacctttgtctttggccagccaaatttatgttcccgttttttctttactagtgacatttctttcttgaaattcttgcctagaatgcccc

SEQ ID NO: 372287 - DNA, 413 bp, Homo sapiens
caccacaatctcagtaatggacagatcatagacacaaaatcaacaaagcaacatcagaattaaactacacactagaccaataggcctaattgacatttacagattaatctacccaactgctgcaaaacacgcattcttttcatcagcacgtggaacagtctccaatagaccatatcggaggccacaaaacaaatctgaataaatttttaaaagtagaaattatatcgtttattcttgaccataatgggataaaactataaatcaataaaaaggagaactttggaaactacaaacacaaggcaattaggcaacgtgcttctgaatgaccaaygggttaataaataaattgagaaggaagtttaacaatttcgtgaaacaaatgaaagtgggaatacaacgtgccaaaatttatg

SEQ ID NO: 372288 - DNA, 570 bp, Homo sapiens
catctccagaatcagtattccactcacagtcacccagtagctgtttcgctctagtccttgtaaaatcttgccctgtatatactagaaaatggtatttggccaaaactggatagggggccccatgaagatttctggtattccttctctgaacatcttcccaccctctagtactttcctcacaaattccagctatttcataaaccctgaacaccactttctaatattatataagaatttactttgtgtatttctcaaattatcattataattatcatcattactttctctcttctttaaatctgtttatcaatcttccagttctcgaatttttttcaaggtttagatttatttgtttctgtccatacttattcagggacactaaccttctagggatttatgtcattaggagccttttgctactttttgcaaacaatctaacttgctttsaaattatcctggtctatacagtttctaccacttccaaaggcaacagatttgtggattttccccctctcttttctgtattttttccttgctatgaaagaagaatttacctgtaaaagatgctgt

SEQ ID NO: 372289 - DNA, 571 bp, Homo sapiens
ttctgtattttttccttgctatgaaagaagaatttacctgtaaaagatgctgttaatatcggctgcatgctcccagctactttcaatgttttgattgagcgctatacactttttgaatgactgctttaacttaaaataatacacaaataaaatacacattattttttgctggcagatttttccacagatgaaccaataaactggaagtgaaaaatcagtatcaaaagatccagaacacttgcaaaatattgagatgatatggtatttttagactgacatcttatgttataaatgcacagacaatgtcccttgctttggaaaaytactggtttctataatctcttacatcatgagaataggatctgcctattcatgggcattttcatttacatcaactctttcattagcatttatttagctcatattctgtgtctggcactggattgggacacaataacttcttttaaatgagataattaaccaaggggaaaaaaaagaagaaaagaaaagagtcctagtaggttgtagaaggtgatttctcttgagtagatgactaattattttagttagt

SEQ ID NO: 372290 - DNA, 463 bp, Homo sapiens
aattgattcaaggtataatacaatgctcctttttagagtgagatgtgacagggaagaaatatttgttgttgcagggagctatttctttttagtagttgtttttccctgaaaaaaaaattgtcacactaatggtaaacayaaatgtcctcagatgtttactgtgggaaggcttgtacctaatttcctaaaaattatgataaaaactagtacaaggcatcagcattcattactgacagaaaactttaaaaaaaaatctgttttctatctcaagggccttggacttacaaccaaattaaaataacttctatcactttcactttctaatattcccaatgaatgtaaaaagtatacaaaaataatctaggaactgagtctcttaaacaaagatgttattaaatatatagatacaaattttttcacatcataaaaagccttgcttggatgcaaagagccatctcaaaag

SEQ ID NO: 372291 - DNA, 649 bp, Homo sapiens
gttttctatctcaagggccttggacttacaaccaaattaaaataacttctatcactttcactttctaatattcccaatgaatgtaaaaagtatayaaaaataatctaggaactgagtctcttaaacaaagatgttattaaatatatagatacaaattttttcacatcataaaaagccttgcttggatgcaaagagccatctcaaaagcagtatgcaaaaaatgaaaaatgttgcacatcttttgtgataatgagccaagcaaaataaaaattcagctcctccatagatacatttttttttagcagacagaaagggaacattgtctttataggaaatgtttttagcagaatactatagattctataaaacccattaaagggttattggtgtccaggacaacaaatggcttctggtaagaaaataaagggctactctttctaaatactaacataactacaaagattaagacaaaataagtaaaggaaaatatgttccccttaaaaattgaatgtgagtggtctgcaaggtccgaagaaggacacaatgagcactcttgttgtttatctttcaggctgagcccagttgggtacaatgaggggtggcagaaagagcacagtcttgccttgaaagctggcctggactctagtca

SEQ ID NO: 372292 - DNA, 467 bp, Homo sapiens
aggcttcaaaaaaagttacttggcaggatcctaagtatctaactgcaacaaaggtagagcttactaatcaagcttcaagaaaaaaatagaaggggccttagtagaaagtgctcatggtctctctctatctgagtcacactgctataagttactttgttttaactgctttttttcctcctatgtaccaactcaagattcaaatttctaagataaataatcgttttggcattgctgaaattatttttctactcctattatctgaggatgaggcaygttttgagctgggcagacatactgaagagtgtgcagtgggagagacaacattcctgtagatgaataaaatgaagtgtatctgcaaagtgaaaaaaggaaaaagcatgaatttactgtgtaccatctagtcaattattttaaatatttgattaaagaaaaaagctattctgttgacatttcaggtccttgattac

SEQ ID NO: 372293 - DNA, 587 bp, Homo sapiens
aagagtgtgcagtgggagagacaacattcctgtagatgaataaaatgaagtgtatctgcaaagtgaaaaaaggaaaaagcatgaatttactgtgtaccatctagtcaattattttaaatatttgattaaagaaaaaarctattctgttgacatttcaggtccttgattacaaaccttttataatatttgaagttaatgtggagacatttgccattatgaattcaagataaaactgatttatgtgtgcttttgaatctcgagagtttcaagtcaaatctttaagtttatttttaaacactgaagaaagatcaaagcaaaggaaaagtcaatgtaactaagaatttttcatgcattttaaaaacagatactgagttttacaatgactcttgaggaaatgatataatgctgatgaaatggcaattcaggaaagctaactcaattctacaaatacttgttgagtatttctagtctatgcaagccactaaggccacacacaaataagtgaaatctgtcgctgtcctcaaggagcttaaaacataatgaggaagataaactaaaatttcagataactataataccaggtaata

SEQ ID NO: 372294 - DNA, 531 bp, Homo sapiens
atagatacaaattttttcacatcataaaaagccttgcttggatgcaaagagccatctcaaaagcagtatgcaaaaaatgaaaaatgttgcacatcttttgtgataatgagccaagcaaaataaaaattcagctcctccatagatacatttttttttagcagacagaaagggaacattgtctttataggaaatgtttttagcagaatactatagattctataaaacccattaaagggttattggtgtccaggacaacaaatggcttctggtaagaaaataaagggctactctttctaaataytaacataactacaaagattaagacaaaataagtaaaggaaaatatgttccccttaaaaattgaatgtgagtggtctgcaaggtccgaagaaggacacaatgagcactcttgttgtttatctttcaggctgagcccagttgggtacaatgaggggtggcagaaagagcacagtcttgccttgaaagctggcctggactctagtcagtccctccctgcaatttcccagggcc

SEQ ID NO: 372295 - DNA, 612 bp, Homo sapiens
cctgaaaattgagcttctgccaggcccctttgccatctgtctgaggaagaaatcagtaatttgatagactttttcatatagactgaccatctgcaaccctggtaactgtatttaagctctgagctccctgtaggaaatctgtccaaatgttttttcaggtcatctggtgctttatgttttaagtattttaaaactaaataaacaggcaactttggttatattgggagaaatttcctttcaagcagagaatgatccragtaagcacttctgaagattatatccagttgcatacaatttgacattgtgcctttctggaaaaatgtgagattagttgaagatatcagaaaatagggattatgacaagttatgttcaaataatatggcaattgattttggaacattcatataattaatatccttttgatataatattagataattttagttatttggaattattataaattaacatggttactttcagtaaattaaatccctataacagaaacaaggcagtctatgctgcattaataaatggatcttttatgatacatagtgaatttactagagtaacatattagacgatagcttcatgaaaagtcccatggcaaa

SEQ ID NO: 372296 - DNA, 631 bp, Homo sapiens
atttcaagggtgatacaatgctaaaaattctggtcgatctatcactgctggcagaagccacatgaaaagcatgaaaaggaatatagccagcccctaggagcaaactccagccctacgtgacagcttgcaaggaaaggggacttcagtatacaacctcaagtaactgaatttaccccaaactttgaatgagctcattagcaaattcttttcccaaccctccagtaaggagtgcagccctgacaacaccttgatcagccttatgggaccctaagcagaggacccagtcaagcctacgtaatctccttattgtgtaacataataaattctcattggtttcagccactaagattatggtaatttgttataaatgcataaaaactttatactgtggtacctgaaaatggtgtgctkctgtgataagcacctaaaaactcagaagtggcactggaatcagaattaagtggatgctagaagaattctgaggagcattagagaaaacaccacctagattgtcttgaacagactgttagtaaaaatacagacattaaagactctgccagaaaggggttggaagttatggaggagcattatagagaaaacctagcttgccttagagaaaagttaaatcaga

SEQ ID NO: 372297 - DNA, 538 bp, Homo sapiens
tgggaccctaagcagaggacccagtcaagcctacgtaatctccttattgtgtaacataataaattctcattggtttcagccactaagattatggtaatttgttataaatgcataaaaactttatactgtggtacctgaaaatggtgtgctgctgtgrtaagcacctaaaaactcagaagtggcactggaatcagaattaagtggatgctagaagaattctgaggagcattagagaaaacaccacctagattgtcttgaacagactgttagtaaaaatacagacattaaagactctgccagaaaggggttggaagttatggaggagcattatagagaaaacctagcttgccttagagaaaagttaaatcagaacaaacaaactttgggtagaaatatggattttgaaggcattgctgatgagaactcagaagaaatgcattgaaaacgggaggaagggagatccttgctgtaagcaggccaacaaaataaaactgcaccctctagtcatgtagagcacggactttttagatggtgaact

SEQ ID NO: 372298 - DNA, 631 bp, Homo sapiens
atttcaagggtgatacaatgctaaaaattctggtcgatctatcactgctggcagaagccacatgaaaagcatgaaaaggaatatagccagcccctaggagcaaactccagccctacgtgacagcttgcaaggaaaggggacttcagtatacaacctcaagtaactgaatttaccccaaactttgaatgagctcattagcaaattcttttcccaaccctccagtaaggagtgcagccctgacaacaccttgatcagccttatgggaccctaagcagaggacccagtcaagcctacgtaatctccttattgtgtaacataataaattctcattggtttcagccactaagattatggtaatttgttataaatgcataaaaactttatactgtggtacctgaaaatggtgtgctgctgtgataagcacctaaaaactcagaagtggcactggaatcagaattaagtggatgctagaagaattctgaggagcattagagaaaacaccaccwagattgtcttgaacagactgttagtaaaaatacagacattaaagactctgccagaaaggggttggaagttatggaggagcattatagagaaaacctagcttgccttagagaaaagttaaatcaga

SEQ ID NO: 372299 - DNA, 595 bp, Homo sapiens
ccagctagattgaatagaacataaaagctcaaaagaggagcaggtattttcatagacatagacaaaatcgtctcctatggagccaagaaagcatcttccctgagaatacaaagccttctctcaagctcagcaggaytaaatgttatgaacatgactagccctacaaaaccgattctaaagttaagaattagttcatacgttttagaggaaacaaagacagaacacttcctgagaccaccaggcttttttgatgatcaaaaaatgtatattaaaagaacaccttgtgcagtgaaggcttaaatgaccacctttttgactgatgtgaacagccttcattcttccattcttggcactgaaaatcagtcatgtctgcagcacctcgcagagcactacaggcaaatctttgaagcccgaggattcctcagtagtcaggatcactcaccattatgatgtcaaggttctaaggctcatccgacaactgacaaactgacatactcctttctcagatattctcccatcttttaacttctaaaatctcacctttatatttttagatcatcgtagattcacaggtggttgtgagaaataatacaga

SEQ ID NO: 372300 - DNA, 595 bp, Homo sapiens
ccagctagattgaatagaacataaaagctcaaaagaggagcaggtattttcatagacatagacaaaatcgtctcctatggagccaagaaagcatcttccctgagaatacaaagccttctctcaagctcagcaggactaaatgttatgaacatgactagccctacaaaaccgattctamagttaagaattagttcatacgttttagaggaaacaaagacagaacacttcctgagaccaccaggcttttttgatgatcaaaaaatgtatattaaaagaacaccttgtgcagtgaaggcttaaatgaccacctttttgactgatgtgaacagccttcattcttccattcttggcactgaaaatcagtcatgtctgcagcacctcgcagagcactacaggcaaatctttgaagcccgaggattcctcagtagtcaggatcactcaccattatgatgtcaaggttctaaggctcatccgacaactgacaaactgacatactcctttctcagatattctcccatcttttaacttctaaaatctcacctttatatttttagatcatcgtagattcacaggtggttgtgagaaataatacaga

SEQ ID NO: 372301 - DNA, 595 bp, Homo sapiens
ccagctagattgaatagaacataaaagctcaaaagaggagcaggtattttcatagacatagacaaaatcgtctcctatggagccaagaaagcatcttccctgagaatacaaagccttctctcaagctcagcaggactaaatgttatgaacatgactagccctacaaaaccgattctaaagttaagaattagttcatacgttttagaggaaacaaagacagaacacttcctgagaccaccaggcttttttgatgatcaaaaaatgtatattaaaagaacaccttgtgcagtgaagscttaaatgaccacctttttgactgatgtgaacagccttcattcttccattcttggcactgaaaatcagtcatgtctgcagcacctcgcagagcactacaggcaaatctttgaagcccgaggattcctcagtagtcaggatcactcaccattatgatgtcaaggttctaaggctcatccgacaactgacaaactgacatactcctttctcagatattctcccatcttttaacttctaaaatctcacctttatatttttagatcatcgtagattcacaggtggttgtgagaaataatacaga

SEQ ID NO: 372302 - DNA, 578 bp, Homo sapiens
tagccctacaaaaccgattctaaagttaagaattagttcatacgttttagaggaaacaaagacagaacacttcctgagaccaccaggcttttttgatgatcaaaaaatgtatattaaaagaacaccttgtgcagtgaaggcttaaatgaccacctttttgactgatgtgaacagccttcattcttccattcttggcactgaaaatcagtcatgtctgcagcacctcgcagagcactacaggcaaatctttgaagcccgaggattcctcagtagtcaggatcactcaccattatgmtgtcaaggttctaaggctcatccgacaactgacaaactgacatactcctttctcagatattctcccatcttttaacttctaaaatctcacctttatatttttagatcatcgtagattcacaggtggttgtgagaaataatacagaaagattccatcaacctttcatccagtttgccttagtggtaatatttccctaacctatagtacaataacataaccaggatattaacatggatgcaatcaagatactgggcatttcatttaccccaaggattgtctatat

SEQ ID NO: 372303 - DNA, 655 bp, Homo sapiens
ggccatttagtttgaactcctttttagttattttaaacagtatatgcttaaacatcacacgattttataaagcaagaaaaatgaaatgatctccctattcccccacggtgtaggcctccagatccttttctggcttttaggcaggacaattaacaatgtggattctgcagtcagactgatggggtttccatgcatggcctcaccattaactcctcactggggagaccttgggcctcggttttttattcatagaatgcatgttgaataaaccatgtgggaaaaagcagagccagcaccagcccctgctgactcactgatccctcggaaaggtctgggatgagtcaagtcttcagggaataagcagcaaggacttggaattcctgagcaagccttgggttccccacgccctaggaagtccctctggaaggggagcaggacctctcccaccagatgacggagttygctttctcgcccagcgcagctcccaccaggcgtgagctggcagtccagaagcggccccagatgtggctatccaccgcccagtctgcttccctgcctcaaaccccagggagacagaaattacctaaaaatgcatatcattgccttatgccaagatgattcaaataagcctgagaaagagaggccagcgctaaat

SEQ ID NO: 372304 - DNA, 655 bp, Homo sapiens
ggccatttagtttgaactcctttttagttattttaaacagtatatgcttaaacatcacacgattttataaagcaagaaaaatgaaatgatctccctattcccccacggtgtaggcctccagatccttttctggcttttaggcaggacaattaacaatgtggattctgcagtcagactgatggggtttccatgcatggcctcaccattaactcctcactggggagaccttgggcctcggttttttattcatagaatgcatgttgaataaaccatgtgggaaaaagcagagccagcaccagcccctgctgactcactgatccctcggaaaggtctgggatgagtcaagtcttcagggaataagcagcaaggacttggaattcctgagcaagccttgggttccccacgccctaggaagtccctctggaaggggagcaggacctctcccaccagatgacggagtttgctttctcgcccagcgcagctcccaccaggcgtgagctggcagtccagaagcggccccagatgtggctayccaccgcccagtctgcttccctgcctcaaaccccagggagacagaaattacctaaaaatgcatatcattgccttatgccaagatgattcaaataagcctgagaaagagaggccagcgctaaat

SEQ ID NO: 372305 - DNA, 595 bp, Homo sapiens
atagagacagaaagtagaatatggtgtccaggggctagaaaagaaggaagtaagaaatgactattaatgggtacagtttctttttaaggtgatggaaatattctggaattagatagtggtgatggttacagagctttttgaatacactaraaatcactaagttgtataaagttgtataaagaaatcactttataagggtgaattttatgatatgtatattatatttcaaattttttaaaagaattaatgtatagccaaaggaaatgcaaactctcagacacacatggtaggactgggtctccgatataaggtgcaagtctccaaaacctagctttatctttcttagtttcacctataatcagcccttgttctatcaaatgtatgcagtttccaaccaataagttacttgggcattggcaaaaatcaaattcctaagcattaataatttgtaataagcattttaagtttcttaaatatacataacaagatcctaagtgttcataacatttaagatagtggatatccaactggaagattcaactggaagaagaaacatggcaaaggcagattattaaaacacagcttcttatgtaca

SEQ ID NO: 372306 - DNA, 597 bp, Homo sapiens
tgcactaccccaccatgaagctgaactaaggcaagtacacaaagaagtcaattcaattttgagaaagaaatagttgtcctcatccagcagtatttgttacagtcttcagcaaagtgcctggcattgtgttaagtatataaaagcayggaagagagaattactaactttatactgttcagtctagtggaagaaatagaaggggcagtatgaatgaaggctaagaagtgtgaaacagagtggcaaatgaggaactcagaaggttgctgtggctaaatcataggacaaatttgggagagtgtccatggatagggctacagacagagaggggtcagagaatagccaacattcatttaaagtttagtatttgccaaatgctgtggtgaatatgtcactttttttttttttgaattgagttctcacaacacaagtctacaaggcagacactattttgattccccattataggtgatgaaactaagacccagaaaagtacactggatacacactcacacccatgcaacccgctcactgacacctatgcaacctgctcataggtagggggatgtgagactgtcatgtgactgctgttcccactcg

SEQ ID NO: 372307 - DNA, 487 bp, Homo sapiens
tatttttaaagaaaaattttgtagattcagaaagaataatagcaaagtaaagacagccaagtctttatactgttagcagaatatgttatatggcaatatgttaagaggtaaggaaacaatattaggacaagcaattcattgttctattgggggagaaagatttctgtgaaataaaaaattcttcccaagagtctcttcctctttggtcttctattacttttattcttttcctaaaggtcctgctatccacttacagaagataaatrcatcttttttttaacctacaaaatttcctttacagtttaggaggtcacactattagcaggaattatgaaaagattgtaaaatttcaagttgaacgaccaggattctagttctaattcctttaccgtgtagtgtgtgaattttatttcaacacaatacacattgtcttatggaaccattttcccctcctcagcagagatgagtaattgtgacagagacctta

SEQ ID NO: 372308 - DNA, 577 bp, Homo sapiens
agaggttcagtttgcattatccttcagtatgtggaggtatgtgcaacaaagaaatggcagatatttcatctcactcttccctaaggacaagattcatgtgtaattcatctttctattcccctacagtgcctagcactttaatggcacctggtactttttcacatggtagatgttcaaaaaatctcttgaatggaaaacaccgtagcttcacaaattgtgatttgttaagaaacctagatgcactggatggtaactggtcagcttgtaaactataatcaactctttagattctcagaggttttgccaaataccacttctgaactccagctgataytaaagcaaataagagaaaaaaattactagatcccagcacctcaaatcttatggtaacattatctaatgagttatgcatataatgagtcgtgcataacatgttgtataacgtgacaatgaggttattatatgtatacattataatatgtatacatcacatatatatgatagacatatatacagtgtatatgtaggtatatatacacaatatatactataatgtcctttatttttgaagcactat

SEQ ID NO: 372309 - DNA, 577 bp, Homo sapiens
agaggttcagtttgcattatccttcagtatgtggaggtatgtgcaacaaagaaatggcagatatttcatctcactcttccctaaggacaagattcatgtgtaattcatctttctattcccctacagtgcctagcactttaatggcacctggtactttttcacatggtagatgttcaaaaaatctcttgaatggaaaacaccgtagcttcacaaattgtgatttgttaagaaacctagatgcactggatggtaactggtcagcttgtaaactataatcaactctttagattctcagaggttttgccaaataccacttctgaactccagctgatactaaagcaaataagagaaaaaaawtactagatcccagcacctcaaatcttatggtaacattatctaatgagttatgcatataatgagtcgtgcataacatgttgtataacgtgacaatgaggttattatatgtatacattataatatgtatacatcacatatatatgatagacatatatacagtgtatatgtaggtatatatacacaatatatactataatgtcctttatttttgaagcactat

SEQ ID NO: 372310 - DNA, 509 bp, Homo sapiens
tagcctctgctccctcctataactacacayacaagtgaaaaaaaggtctgtgggcaggggggtgggggtgtaggtgaagatgaggatataaaagtcagaggcccaaaagaacaatgagaataagaagggaaacaataacagagagaagaggcagggagggagagacagggtgcaaattataaatgccggaaagtgaaaagataaaaaacaactaacttagcagagcagatgaagctgaaagttcaatgctaagaatgggtagggaagagaaatagccaattaacaagcaaattcacttgacagaaatcagaaaagggtgcaggaatagggcacatatttgtatttttgaaggcagtggtataggtagggctgagaaaaatggttggttaaacatctaaaaagcatataggctcttagatccaatccctaccctaagcaaccagatgactacacctcctccacccagtaagacaatagcagctgggtcttctaaaaagttaaaccaatag

SEQ ID NO: 372311 - DNA, 568 bp, Homo sapiens
ttagcctctgctccctcctataactacacacacaagtgaaaawaaggtctgtgggcaggggggtgggggtgtaggtgaagatgaggatataaaagtcagaggcccaaaagaacaatgagaataagaagggaaacaataacagagagaagaggcagggagggagagacagggtgcaaattataaatgccggaaagtgaaaagataaaaaacaactaacttagcagagcagatgaagctgaaagttcaatgctaagaatgggtagggaagagaaatagccaattaacaagcaaattcacttgacagaaatcagaaaagggtgcaggaatagggcacatatttgtatttttgaaggcagtggtataggtagggctgagaaaaatggttggttaaacatctaaaaagcatataggctcttagatccaatccctaccctaagcaaccagatgactacacctcctccacccagtaagacaatagcagctgggtcttctaaaaagttaaaccaatagtctagtaggaacgagttcagaatattcctttctgagtaaattaacacacacaggacaa

SEQ ID NO: 372312 - DNA, 603 bp, Homo sapiens
gaatgatgcataaagacacacattcacagaagtacagtctcaaaaacagaacctgctagagaacaaggtcctctgatagtagtcagactctaaggctcttgttgacrtcgtgtataaagatgccacacacacagaaaaataattctctgcaactgctctagtcacctcctctgaatatccttgtttaaggggtctttgaaagtgcatcacgatgcagaatcaatatgcaacttcttacgtcttctgcttactagataataagtacctggtgaataataatgagcctcccaagtgcaggtggaggccagctgtttcagcacaagctgtctttgcttcacatgaaacgtttcagaaattgcacatatggggacacacagacctagggtggcagcattaaacggaaggacacttgttactgtccaatactccaaaatatccacaaacaaactctgagtttccatgagaataatataatgagctggcaagtaattaatccccactggtagttaacactaaaaatgaggcagagctgcccaattactctgcagacaaaattttctcatttaaaaaaatataagcatgaaatgaaaactgcattttaca

SEQ ID NO: 372313 - DNA, 533 bp, Homo sapiens
atctagaaatcataatgctatggtctgaatgtgtcccccaaaattcatttgttggaagctttatccccaatacaaaagtgttgggagrcagggtgttttgggaagtgtttaggtcatgaaagctccaacctcacgaatggattagtgcctctatgaaagggcttggaggaatgggttctgtcttttgcccttttgccatgtaaggacaaagagtttgtccctctcttgcccttctgtcttctgccacgtgaggatacagtaaaaaggccctcaccagatgaagccttgatcttggactttccagcctccaagaatcatgagagagaataaatttctgttcttcataaattatccagtctcagatattctgttatagcagcacaaaataacccaagacacaaaagtttaagaaggcattgctccacaaagtatgttataacttatctgtgtgcagttccaagtaatgttggcaaccacgacactcctgtacaatgacaaaatcagcaattcttcaagaatgggactggataaac

SEQ ID NO: 372314 - DNA, 569 bp, Homo sapiens
gacccatttaattaaatacttataattgttagtgttattatccatataatggcctgaataccagagtctgcagctctatggagccaggaaacatgtctctattacccacccaccattttacacctagagctgatccagcacatggtgtagagaagacacacataaagacttgtttcartgaatgaatgagtggcttggtttcttatccagtttggagataaatttatggtaacttgctgaattgatgcactacatgaactcatactaagcctgggtatttgaaagtctcaggattttcttgttctaagtttgaattcagatctatccttctgaaggtattttcaaagattaaaaacattaataagtcagtatgttagagctttccacctttaaaaaaaatctcatgtactatctgacttctgatcttagaagtatttttactgatgaaacacaaaaggtaaaaaatgacataattaatgattcattattaccactcccacgtggaacattctattcatttgtggcttgagttcatttgaacagagtttatcattgttcttgccatagca

SEQ ID NO: 372315 - DNA, 536 bp, Homo sapiens
tgttcttatgtcattcattaatttctctaacatttattgagcacctgctgtgtgtcaggcacttttctaaggatataagaaataataaaataggctccctgctttcaaggatcttgcagcataagagaagcagacaaacataaatacagaaacacagtaattagttacagaaactatggcaaatgttcttttaagtgcaattggacaaaaggaagcacagctgtttcctcacaaggagggtgattccaggaaggtgttcactragaagacgacacttgacacaacttttgagagatgatgtgtcagatgcagatggtgtagaatttgtcaagacacaaaagaattgtgaaaggcatgtaagagaaaggcatacgggattttacaataaaggatgaatgtgaggggtatgtggtaagatgtaagactggaaaggaatacaagagtgttacacataatatacaaaatttcacttttcatgcatcagctggctaaattcttcctgtccactgcttctactgggagaaaggccggaatcc

SEQ ID NO: 372316 - DNA, 498 bp, Homo sapiens
caaaattaatattccatccaaacacacttgctctatttcttatcacactctctrtcctcaaaccctgctggggtaagcatgacttgtaatgagaaggacctttttacccatcctcactttgctattatggcaaagccagatttctcttagggtccaggaccacaagactgtgaacactcacatctcacacattactattttttgttctcaaatattcacaactccagactgtgggaaacatttatgagacaaatgacctggtttcttctacaaacaagtttcaaggagggagagaagagggacagagataaagaagaacttaccaattgagaaagattaaaaaaacagcaaccactcataatgcacaggtcatgtctgaattttgattctacttttggaaaaaaaaaacacattcatatttataagatatatgagatcattggacattagaatactgactggataattgatgatactaaaaaatgtgaattctatttg

SEQ ID NO: 372317 - DNA, 497 bp, Homo sapiens
tctgtctttttgtgtttgtggtctaatttctctttaataaaagatagatctgatagatagagagatggatagatagataagtagataagagggagaatctcagaatagacaatacataaacctaaaaacgtacaattgggagatggcatagtgagggctgcatgagtaggccttgggaaaacaatcatagaaactctatggtttctgaaagtctaaatagtgtcatgcacttcawtgatccacctgcataatttctttttggtattagaacctacatttcagacctattacacaattcttaaaaagattctaaagtgcaccatgacttttcagatttggccgacaccccgctgcccactttgtatatccactcaagaaaatttcctgattacagcctctgttgacccagcagcttaatttagaatggaaaggtaaagaagatttttttagatatatctgtggcacctttctattagccacccataccatgagccata

SEQ ID NO: 372318 - DNA, 497 bp, Homo sapiens
tctgtctttttgtgtttgtggtctaatttctctttaataaaagatagatctgatagatagagagatggatagatagataagtagataagagggagaatctcagaatagacaatacataaacctaaaaacgtacaattgggagatggcatagtgagggctgcatgagtaggccttgggaaaacaatcatagaaactctatggtttctgaaagtctaaatagtgtcatgcacttcattgatccacctgcataatttctttttggtattagaacctacatttcagacctattacacaattcttamaaagattctaaagtgcaccatgacttttcagatttggccgacaccccgctgcccactttgtatatccactcaagaaaatttcctgattacagcctctgttgacccagcagcttaatttagaatggaaaggtaaagaagatttttttagatatatctgtggcacctttctattagccacccataccatgagccata

SEQ ID NO: 372319 - DNA, 602 bp, Homo sapiens
atggaggtgggtcagtgaaccagaagtgtctgcctcagcttccctagaaatatcagttgtaaaatatggtcctccagcagtagatgtttgcatctgccgattaagaaagaaggcaaccagcagccttctcacgttcaggttcaggtccttgtgggtgtgctatgtttgttaacatttcctctaaagacaagagtccagggagtattagctcccagccatctctgtgattggtattgctgtgtcaggtgagcgtggtgagttcctgtgaatgaattttgaaagtragtgcaacacttcaaatcaaccttatctccttagcagtggaaaatggaattaatcaaacaggaagcatcaaaatcatgctatctttaatttggaggggaaaattatgaatgtatttaaactcccaactggatggaatacctgacaagctttattcagtgtctgccttaataggtctaatggcagggaacttactatctcacaaagctaaatcactattttgttggaatactccttaaaacactttttatacggaactgaacctggcagcctcttaaattctaactattgaccctaggtattttttccagagttaagtt

SEQ ID NO: 372320 - DNA, 602 bp, Homo sapiens
atggaggtgggtcagtgaaccagaagtgtctgcctcagcttccctagaaatatcagttgtaaaatatggtcctccagcagtagatgtttgcatctgccgattaagaaagaaggcaaccagcagccttctcacgttcaggttcaggtccttgtgggtgtgctatgtttgttaacatttcctctaaagacaagagtccagggagtattagctcccagccatctctgtgattggtattgctgtgtcaggtgagcgtggtgagttcctgtgaatgaattttgaaagtaagtgcaacacttcaaatcaaccttatctccttagcagtggaaaatggaattaatcaaacaggaagcatcaaaatcatgctatctttaatttggaggggaaaattatgaatgtatttaaactcccaactggatggaatacctgacaagctttattcagtgtctgccttaataggtctaatggcagggaacttactatctcacaaagctaaatcactattttgttggaatactccttaaaacactttttatayggaactgaacctggcagcctcttaaattctaactattgaccctaggtattttttccagagttaagtt

SEQ ID NO: 372321 - DNA, 539 bp, Homo sapiens
ttctaagtagtgaaatcagtacgtaagcatagctgaaatataaagtgactgcaaaatttataaacaacaccctatcagtgacaagcgctgcttcttcaaatctttggctccaggtaatgcattcactgttcttattctggggcaattttacagttatgccccccaaaacactattgaaagtcaaaaatgctggtttatagccgcatcttttatatgacrtgcgttttatcacttacatttttgtacctaaaattgtcacattttaaaacatatgggtttgagtcactctgaaatattccagttctaaacccaaactatccatcatctaatccagacataaaaatgaaaaagagttgggaaaaagaagaacattgtccaactaatttctgcagaaatataccctggaaggcagtgtatgaagagattgtttctccctagtggaaagtaaagcattgatacatagtgttctcaacctcaattcaattgaatctcttcaaaaagataatgcacaggagcttcttgtgcaatatccataccac

SEQ ID NO: 372322 - DNA, 539 bp, Homo sapiens
ttctaagtagtgaaatcagtacgtaagcatagctgaaatataaagtgactgcaaaatttataaacaacaccctatcagtgacaagcgctgcttcttcaaatctttggctccaggtaatgcattcactgttcttattctggggcaattttacagttatgccccccaaaacactattgaaagtcaaaaatgctggtttatagccgcatcttttatatgacgtgcrttttatcacttacatttttgtacctaaaattgtcacattttaaaacatatgggtttgagtcactctgaaatattccagttctaaacccaaactatccatcatctaatccagacataaaaatgaaaaagagttgggaaaaagaagaacattgtccaactaatttctgcagaaatataccctggaaggcagtgtatgaagagattgtttctccctagtggaaagtaaagcattgatacatagtgttctcaacctcaattcaattgaatctcttcaaaaagataatgcacaggagcttcttgtgcaatatccataccac

SEQ ID NO: 372323 - DNA, 539 bp, Homo sapiens
ttctaagtagtgaaatcagtacgtaagcatagctgaaatataaagtgactgcaaaatttataaacaacaccctatcagtgacaagcgctgcttcttcaaatctttggctccaggtaatgcattcactgttcttattctggggcaattttacagttatgccccccaaaacactattgaaagtcaaaaatgctggtttatagccgcatcttttatatgacgtgcgttttatcacttacatttttgtacctaaaattgtcacattttaaaacatatgggtttgagtcactctgaaatattccagttctaaacccaaactatccatcatctaatccagayataaaaatgaaaaagagttgggaaaaagaagaacattgtccaactaatttctgcagaaatataccctggaaggcagtgtatgaagagattgtttctccctagtggaaagtaaagcattgatacatagtgttctcaacctcaattcaattgaatctcttcaaaaagataatgcacaggagcttcttgtgcaatatccataccac

SEQ ID NO: 372324 - DNA, 525 bp, Homo sapiens
atgcatggactaaaataagtgtcggattctgtcttaaagcctgccaccagatgcagcttaattgtcacttgccactcactgatagggttttaatataaatttgcaagcaattgcacagagacttgtaggtctctgtgcagcgaaacctctctgctaatgttaatctgtatttgcagccactccctagggctagcatccctacttaggctccacctcagatcatcaggcattagagtctcataaggggcatgcaacctagatccctcacatgcacagtccacaatagggttcatgctcctatgagaatctaatgccctggttgatccgacaggagacaaagctgatgagataatgtgaggatacggagtggctgtaaatacagatgaaactttgctcacttgcttgccactcacctcctgttgtgaggcctggtycttaacaggccacagaccagtaccagaggttggggacccgtggtgtatatttatttactacatcttctttatccattcaatcattgatggg

SEQ ID NO: 372325 - DNA, 556 bp, Homo sapiens
tttttaattgggttagggtttttttgctgttgagttgagtttctcatatattctggttcctaatcctatgtcagatggataggttgaaaatakttcctccgattctgtgggttatgtctccattttctcaattgtttcctttgctgtgcataagctatttagcttgatataatcccatttctctatttttgcttttgttgcctctgcttttcaggtattacacaaagattctttgcccagactcatgttctagagtatttctgcactgtttacttccagtagtttatattttaggtcttaaagcctttaatccattttgatttgcttttggacatggcaggcaaaaattgcatatggaaagagatagggatatggtttagttctgcatatagttttctagttttcagagcaccatttattgaagacactcatttttccccaatgcttgttcttggcactgttgtcataaattagttggctgtaaatgtgtagatttatctgttttgtttcattggtctatgtgtctctttttaggctggtaccatgctgtttgggt

SEQ ID NO: 372326 - DNA, 570 bp, Homo sapiens
cagaagagtttttgtttttctcacaaagcaaaktaggaatctgaaatgtcaggtagaccgatgtgttaaaattcttttcaggtagaggaagagagatgagtcaacatgtatataaagaggaagcaaaacagaattcagttctattgtgttttggagagtataaatgtcataaattagagttccgaattacttcaacaaaatctttgtctgttcataagatttctcagaaaacaccccttgatgatgatgatgatgatgatgatgatgatgatgatgattattttagagatagggtctcactatgttgcccaggctggagggcagtggctattcacaagtgtgatcatagcgcactacagtctcaagttcctggcctcagtcttcctacctcagcctcccattagctggaactatcttgttttttttttttaaagaagcaaattgctgttaaaacacaactgactggttctctaatttcgtccattgagttttcaatttataagcatttctttcttctttaaatatgcctgctttaatgaaagaaacttaagcttttcctacaggagctag

SEQ ID NO: 372327 - DNA, 570 bp, Homo sapiens
cagaagagtttttgtttttctcacaaagcaaattaggaatctgaaatgtcaggtagaccgatgtgttaaaattcttttcaggtagaggaagagagatgagtcaacatgtatataaagaggaagcaaaacagaattcagttctattgtgttttggagagtataaatgtcataaattagagttccgaattacttcaacaaaatctttgtctgttcataagatttctcagaaaacaccccttgatgatgatgatgatgatgatgatgatgatgatgatgatkattttagagatagggtctcactatgttgcccaggctggagggcagtggctattcacaagtgtgatcatagcgcactacagtctcaagttcctggcctcagtcttcctacctcagcctcccattagctggaactatcttgttttttttttttaaagaagcaaattgctgttaaaacacaactgactggttctctaatttcgtccattgagttttcaatttataagcatttctttcttctttaaatatgcctgctttaatgaaagaaacttaagcttttcctacaggagctag

SEQ ID NO: 372328 - DNA, 559 bp, Homo sapiens
ggagggtcatcttttaggccactcattggagctaggtcactctatccaaatggaataagccataataaagatgctgaagtataaatcttaggtagtcatagaaaatgggaaatgcaggrctcaaattaatcaaagttaatacatacaaagcaaccatgggactcaccctgggacactgctcaattgaaaagggtgagtaaaaatgaagaggtcagactgcacagtcagaggtgccagtgagaatactcagaagttcaggaagattgacctttctagatagagatgatgaattgtttcaaatatctccaatttctcttattgcatttattcagatgtatctttatgctttccccaaattctataccataactataaagaactagttttatttctcagacatgctttacatttatatgctcttctttatactgatttctttgcctagaaggctttcaccccacttcttccttgacttctgacaaaatcccatcaatctttctctgtaactatggtcccaagcactctgtgaaattttctacaacgtgtccgtctcttccca

SEQ ID NO: 372329 - DNA, 606 bp, Homo sapiens
ttactgttccagccggccttcctcacactcacctttctcatgcctctttgtgatcagtttgaagcattgattctcaacatttcctatgtttgaggtgtcaagaaacacataaatattgtattatgcattattcttctgagttgaaatttaggcaatagaagctattgtcttggacaacataattttaatgccaaaagacttcagttttagttctatttctcgcttctttcttggacaagtaatgttgtagaaggaacaactatcctgtgttttagttttcctcattggtaaaataaagaaaataatgaaatctagttcctagaatggcaagggatacgagaggtactctgtctcagagcctgtaaatatagaaagtatatatttgcaatttttaaatacgttcatgaatataaagttaaaaaaaaagtttataggttatatttagaagttttgaatttgtctgtagattttgcctctctctggatctctctctctctgtctctgtctctctctctctmtatatatatatatctccatatatatatatatgtgtgtgtgtatatatatatatatatatatatatacatatgtatcagttctgtatct

SEQ ID NO: 372330 - DNA, 522 bp, Homo sapiens
actgcattctattccatcccactcgctttcataaaatactgcagaaaacatcggcattatagagacagagactttattatcatgattgattctgatatggtctggctgggtccccaacaaattctcatcttgaactgtagctcccataatccccacatgtcgtgggaggtaaytgaatcatggggacgggtttttcctgtgctattatcttgatagtgaataagtctcacaagatctgatggttttataaagggcagttccccggcacacgttctcttgcctgcctccatgtaagatgtgcctttgctcatcctttgccttctgccatgattgtgaggcctctctagccatgtggatctgtgagtccattaaacctctttttctttataaattacccagtcttgggtatgtctttgttagcagcataagaacagactaatacagattcctattgtaaggacttatttttcccccatccctacttgttatgcataaataagcagaagcatatctgatagagaa

SEQ ID NO: 372331 - DNA, 588 bp, Homo sapiens
cctcactatctgcctaaataatttctttttatctcctatatcaacgaaatagggatattctcaacagtgtatttttgtattttgttaagattatcaagttccattgggaatgccttttccttggggatttagaataacaaataagaatcttgtggaaaaaattctatcatatagaatattgttgtggcagtaaatgaaaccttataatttagtattaatattaatgctcaaggttttaatatacttggactataaagtaacactctagaaacaaacattcaggtggtgttgtctcctaatgtactttgtgccttggtcagtcttgactcaaaaatatggrctgaaaatgtttgtatttgttttcatgggttgctgttaaaaaaaaaaagcatcacagaataggtggaatatacaatagaaattgattcgctcagagttctagaatctagaagttccagatgtgaaagtattagcatggttgcttctttcttaatgctgtgagaaaacaaacaaacaaacaaaattttttccatgcctcttttctaccttctggtggtttgctggcaatcacagagccccttggcttgc

SEQ ID NO: 372332 - DNA, 554 bp, Homo sapiens
ctagtttcattacaatgcagtctgagaacatacttcatatgattttgagacttgttttatggcctaatatatgctctatctttgagaatgttccatttactgatgaagagaatgtatattctgtagttgttggacagaatgctctgtaaatatctagttatgtccatttgatatagaagtcaacttaagcccaagatttctttgttaattttctgttttaatgatctgtctagtgctgtgagtcagctgttgacatcctctattattattgtattactgttggttttttattaggtctagttttaggaatctgggtgctctgttgttgtatacatatatacttaatgttgttatatcccattgttaaattgattcccttattgttatgttatgagcttctttgtcttttttttcctgtttttatytgaagtcagcttcatccgatttaagtatagctactttttgcttttggttttcgtttgtgtggaatatatctttcttttttatccttccatctataattgtctaccagaaaagtgagtttctgttaagca

SEQ ID NO: 372333 - DNA, 529 bp, Homo sapiens
aaatgggatttcatcaaaataaaaaagcttctgtactgcaaaggaaaccattaatagaggaatgargcgacccacaggttaagaaaaatatttgctaatcatgcattgcacatggggaaaatatctaatatattcatagaactaaaactactaaataatgagaaaacataacattcttaaaactgtacaaagagtgtgaacagacatttgtcaaaagaaaatatacaaatgtctagctaatatactaaaaatgctcaacatttctaattacaggagaaatacaaattaaaaccaaattaaaaatgagatatcatctcatacctgtcagaatggcaattatataaatatgaaagataaaaagtgttagtgagaatgtggagaaaagtaaatgcttatatgctattggtgacctcattaattagtacagcctttttgacaaatagggtgaagattcctcaaaaaacgaaaagtagaattactataggatccagtaattcccctactgtgtatatactcaaaagcattgaaa

SEQ ID NO: 372334 - DNA, 571 bp, Homo sapiens
agaaaaccacaaaactttaaaaataaacattaaaagagaaagtaaaaaaaaaatagcaatacaaaccaaacagaaaayaatcaacatgacaagagtatgtcctcacacaccaacaaagcattaaatgtaaactgatttaattcctcaattaaaaattatagaccggtctaatggtaaaaaagaaaaatcaactacatgatgcccataaaaacagacattccatgcaaacaaaaagcaaaagtgaataaaaatagctatacttatagcaaataatatagactttaaggtggtataaaaaaaaaaaaaaaaaaagccaggcatggtggcgggcgcctgtagtcccagctacttgggaggctgaggcaggagaatggcgtgaagccgggaggcggagcttgcagtgagccgagatctcgccgctgcactcgagcctgggcgacagagcgagactccatctcaaaaaataaataaataaacaaacaaataaataaaacaaagaagatcattatatattgacaaaaggattatttcagcaaaatgatataacaattataaacatatgtacactcaa

SEQ ID NO: 372335 - DNA, 608 bp, Homo sapiens
ttgcagcactattcataatagcaagaaaatggaatcaagcttggtgcccatcaatgatggattggataaagaaaatgtggcactgacaacactgaatactaagcagccataaaaataatgaaatcatgtcttttgcagcaacttaaatgtggttggacaccatcatccaaacgaaataacacaggaaaagaaaaccaaatacctaattatttaagaagtatttcaacccttttaatttaagaaaaataagtgttygcttttatttctcagaatttattattagattcaaaaatatcttcaagtatttgtcattcttcagactgtaaaatataaacaacacacctgggaagttttgcatctgtatagtttcattttttgcaagaagtatgatttctagagatatctgtcaacatttgaaagttgctgctattgttactaaaattaaatacaacatacttcaattattaaaaaagaaaataaaaccaaataccacatgttctcacttacaagtgggagctaaattttgggtattcataaatataaagatggcaacaatagtaactgggaactattatagggaggatgaagggaaggggtcaagcattgaa

SEQ ID NO: 372336 - DNA, 595 bp, Homo sapiens
gtttcattttttgcaagaagtatgatttctagagatatctgtcaacatttgaaagttgctgctattgttactaaaattaaatacaacatacttcaattattaaaaaagaaaataaaaccaaataccacatgttctcacttacaagtgggagctaaattttgggtattcataaatataaagatggcaacaatagtaactgggaactattatagggaggatgaagggaaggggtcaagcattgaaaaactactggttactatgctcagtatgtaggtgatgtagtcattcatacctcaaacctcagcattatgtaatatacccaggtaatacacctatacacatwctaactgaatctaaactaaaatttgaataagaaataaattatatgtaatattttatctgaacacaatagaataaaactaaaaagctaatttaaaaagaaacatttgaaagtatgaaaatacatagaaattaaacaacatgctcacgaatgaccaataagtgaagaaaaaaactcagaagaaaatgttaaaattccttgaaacaaatgaaaatagaaatacagcataccaaaatccataaactacagcaaata

SEQ ID NO: 372337 - DNA, 626 bp, Homo sapiens
attcaacattcttaaagaaaagaatttacaacccagaattttatatcctgtcaagctaagcttcaaaaatgaagattcttttcagacaagcraatgctgagggaatccatcaccaccaggcctgtattgcaagagtgcctgaaagaagcactaagtatggaaaggaaaaacctttaccagccactacaaaaacaccctggagtacacagacaaatgacactatgaagcaattacatgaacaattctgcaaaataatcagccagcatcatgatgacaggatcaaattaacacataacaatactaaatttaaatgtaaataggctaaatgtcccaattaaaagacacagaataacaagctggataaagatccaagactgactggtatgctgtcttcaaaagacacagctcatttgcaaagatgtgcacaagttcaaaataaagggacagaggaaaatttaccaagtaaatggaaagcagaaaaagagaaaaaaacaggggttgaaatactagtttgacaaaacaaactaaatcaacaaacataaaaaaaatacaaagaaggacattacataatggtaaagtgttcaattcaacaaggaaagctaactatcctaaatatatatgcacct

SEQ ID NO: 372338 - DNA, 626 bp, Homo sapiens
attcaacattcttaaagaaaagaatttacaacccagaattttatatcctgtcaagctaagcttcaaaaatgaagattcttttcagacaagcgaatgctgagggaatccatcaccaccaggcctgtattgcaagagtgcctgaaagaagcactaagtatggaaaggaaaaacctttaccagccactacaaaaacaccctggagtacacagacaaatgacactatgaagcaattacatgaacaattctgcaaaataatcagccagcatcatgatgacaggatcaaattaacacataacaatactaaatttaaatgtaaataggctaaatgtcccaattaaaagacacagaataacaagctggataaagatccaagactgactggtatgctgtcttcaaaagacacagctcatttgcaaagatgtgcacaagttcaaaataaagggacagaggaaaatttaccaagtaaatggaaagcagaaaaagagaaaaaaacaggggttgaaatactagtttgacaaaacaaactaaatcaacaaacataaaaaaaatacaaagaaggacattacataatggtaaagtgttcaattcaacaagraaagctaactatcctaaatatatatgcacct

SEQ ID NO: 372339 - DNA, 637 bp, Homo sapiens
taacgttcaactttcataaaagctctttatactttttcattctgcaaatattccttctccatcagtgtcacacatactcattatactattccaagaggcagtaattgttgggtaattatatacaaatcctacataatattttaatgctttataatttaaagacatgtttatgctttcttttttcttgactcctgtaacagtacaaggactgctttagttgattaagaaatagtttttatcgcaaacttgtgacaaattcaacaagtagtaagtagaagatcatgaatttgaataaacttgggataaaaaggagaaggtaaaaacgtgaatctttgcttccaacatagaaaaattcttctcaataaaaggtcaaataaaatggatacataagaaaatagcatatgctgcctaatgctttttgtcataagaaccagaacgctggatattggtagatacgatgagtatgcagtggttatcccagaggtaaatcagttggaaagattataggttatgtaatcctatagwacaagcaaattgcattttgatcttaatcctgtagccacttttaagcttgtgttttggtttgtctcgtggatctcctgaaatcatcttaccttatcaagtttggctcaacaac

SEQ ID NO: 372340 - DNA, 637 bp, Homo sapiens
taacgttcaactttcataaaagctctttatactttttcattctgcaaatattccttctccatcagtgtcacacatactcattatactattccaagaggcagtaattgttgggtaattatatacaaatcctacataatattttaatgctttataatttaaagacatgtttatgctttcttttttcttgactcctgtaacagtacaaggactgctttagttgattaagaaatagtttttatcgcaaacttgtgacaaattcaacaagtagtaagtagaagatcatgaatttgaataaacttgggataaaaaggagaaggtaaaaacgtgaatctttgcttccaacatagaaaaattcttctcaataaaaggtcaaataaaatggatacataagaaaatagcatatgctgcctaatgctttttgtcataagaaccagaacgctggatattggtagatacgatgagtatgcagtggttatcccagaggtaaatcagttggaaagattataggttatgtaatcctatagtacaagyaaattgcattttgatcttaatcctgtagccacttttaagcttgtgttttggtttgtctcgtggatctcctgaaatcatcttaccttatcaagtttggctcaacaac

SEQ ID NO: 372341 - DNA, 500 bp, Homo sapiens
aatctaaaagcttccctaaaagttttcagttttgtctgtttagcctgtatatctttgtcatttggtagccgaccttcaactttgctatgggaaaatatattgtccttgttttctccactcttcagatgacattctttgcccattaggtattagtaactagatactcattttttctctggtctccatattttctgaaacttggttcttgagattttcctttgattctgtggtgtaagaaaattcttacttaaggaaactgaagccaytatttgtgtttggaaaccaagagccttaacttacgtgaattcaatttagttattatacactacacctgtgctcttcagaattgtgccagattcccactactctccctctcattttactcctaatctttcttttcaaacacctgcccttctaccatttttttacaatattcattttgaaaacgtgtagtttttttctggagcaaactcaggcacagtcttttaaaaattggttaa

SEQ ID NO: 372342 - DNA, 611 bp, Homo sapiens
acactgtccatgaatctgtggagtaaaggctggaatttgaaagtctgtctttggaaacctagacactttccaatgtgcttgtttccttaggtgattctaatttgtatcatttcactgtaataaaccatatctgtgagtataacaacttttgataagttccatgagtctttctagtaaattattgaagctggggtagtttcaggagcccccataaatactgcagttggtgtcaaagtgaggttggtctggtgaactgttcattaactgcatatatcaccccttgtatacaaataagaaatgcaaaatcatraagaactttcttcaagatttacatgcactacaacaatgaacaaatatttttaacaaccactttacagatatggaaactaaaactcagaaagattagggaatttgctaaaatttacactagttgcaaatgggagaatagggataccagtctaatgctattgtcttttcactattttatattgcctccttggaaacagatggggggactagattatgcctgtgaatattttagcaattgggataatttatatctcgatttttaagtaatgtgtgtttatagtgcatatgctacagtccctcaa

SEQ ID NO: 372343 - DNA, 654 bp, Homo sapiens
aaaatttatatggagccacaaaaatccccaatagataactactcctaaacaaaaagaacaaaamcagacacatttcactatgagtcttcaaaatatactataaagttgtattagccaaaacagcatggtaccaatgaaaagcatatatgcaaatcaatggaacagaatagagaacccagaaattaatccgtttatttacaaccaacttatttttgacagagataccaagaacactcattaggcagtcacttcaataaatgttgctgggaaaactagatacctatgtgcaaaagaataaagctatactctcttctttcaccctaattgaaacaaaaatctactcaaaatgggttaaagacctacatgtaagacttaaagctttaaaactaccaaaggaaaacccagagagaacacttcaagacattggtctgagaaaatattttatgaataaggccttaaaatcacaggcaacaaaaggaaaaataagcaaacaggattatatcaaactaaaaaacttctgcatagcaatagaaataatcaacagtgtaaaaagacaacctccagaataagcaaaattatttgcaactcctcttcccacataatattaatgtccagaatatacaaagaactcaactatctcaacaggaaaaaaat

SEQ ID NO: 372344 - DNA, 567 bp, Homo sapiens
acaaattcagtaaagtctcaggatacaaatcaacatacaaaaatcagcagcctttctatacataaacaatgaactagctaaaaaaaaataggaaacaattccacatataacagctataaacaattcctaggagtaaatttaactaaggtgaagaaatatctctatgacataaatataaaatgtaaaacaccgatgaaagaaactgaagaagacacacaaaaaacgagaagacatcccatggtcacggacttgagtaattaatattattaaaatgagcatactaaccacagcaacctatagattcaatgcaatcattatcaaaatgccaatggcatattttacatatatttaaaaaattctaaaatttatatggagccacaaaaatccccaatagataactactcctaaacaaaaagaacaaaaacagacacatttcactatgagtcttcaaaatatactataaagttgtattagccaaaacagcatggtaccaatgaaaagcatatatgcaaatcartggaacagaatagagaacccagaaattaatccgtttatttacaaccaact

SEQ ID NO: 372345 - DNA, 569 bp, Homo sapiens
tacttagtatgtcatcaagcaaggagactacactataaatgtttgtatagtctttctgatgataatgattctactagtaatactctatcatgaaagatacttctccatcctcsatcaaaattgcctctccttaaatgatgaagcttgagttgctctgggtgtgtcaggtagaaaatccaggtacatttccaagggaagagatgattttctactcttgcttctttacgactgatcttttcaattgacatgatagtggatatgtggcaccagagtttttgccagatttatctttttaaaaagcagcagatgcatctgtcttgctccatttttagaagagtgcctttcccagaaatgtgctcaattaatatttcttaaattaattaaagaaagaatgtcaaagattctttcctagaatgtaggaagatgttttcctacatccaacccaggtgcaaaatttctaattacatgaattatttgacatactacagataagttcttaccttgtgtacattcttgggatgtcatagattgcattagagatcattctgctcagactttctctctcacag

SEQ ID NO: 372346 - DNA, 630 bp, Homo sapiens
tgtctattctgatgttgataagccrtataactccagaattcagtcacacagagctgtttgaatttgagtgttagtaaaaatgtgattgctcttacttctgatgtcacattactaaatataactcttaatatttggtgtattccccttcctttccaccacaccctagaagtttcaggaggataaatgtgtattttacattgattttgatcaaatggcttttgccctgagtagtattagatggttaggtcattgcagcaattatatggcagtattccccaagcagacctttcatctacttttaatagaaaatcaataatggctaaacaaggacagagatggcattttaatgtttaccaaagagcatttagacatctgagatgcctcagaagtggtttcaaaatccattttgagaatagggacaaaaaatgttctttatattctatttgtaccctgaaaatacacctttttagggagctaaatgatgagagcacatggactcatagagggaaacaacacacactagggcctttcagagaggggagggaaggaggagggagaagatcaggaaaaagtaactaataaattctagactcaatacctgggtaatgaaataatctatacaacaaatcc

SEQ ID NO: 372347 - DNA, 502 bp, Homo sapiens
accataaacatatccatcactttcaagttttctcccatcatctttatttaattttttgtatgtgataagaacacatcatggaagatcttcccacttacctcatctttaagtgtacaacagagtattgttaactgtagtcattatgctgtagaatagatccataggacttattcatcttgtataactgtatgtttgtaccctttgaccaatgcctccttatttctccctgcctccaaatcctgacaatcactattctagtctctatttatataaatttgactatttcatattcgtcatacaagtgagatcatakagcatttgataattgtgtgtatgtcttatgttacttagcataatgttctctaggttcatccatgtttccacaaatgatggatttccttctttttaaaggctgaattatattccattacatgtatataccacattttctttacccgtcgatgaacatttaggttgctttcagctcttggctattgtgaat

SEQ ID NO: 372348 - DNA, 606 bp, Homo sapiens
atcactggactggttataagatgggccttcaggcttggtgtgtaaaaacagcccttgagcctgagtccacaggggtaagtcttctgttggggaagccctggagcttatgtccatggggactggcctggtgccatcttctcctggaccttgaatctaaacctgatgccatggggatgagcccagagcgtggagacacaagtgctgacctagtgccttgaccaacaggggcttccctggagcttggatttatggcactgccctaaatactgagggcacaggtcctggtttggagrctaggtttgtgagggatggccagtagcctgggatcctggtggctggcttggctttggtgggcctagagtctgtgtctgtggaggttggcctgggttcttgggtcacacagtacaagcccaaaagctgtgtctactagggtgttctttgaacttggctctgtggggaccagcccagcactggggcttacagggatgagcttggaccctgagtcttctgaagcaatcctagcccttgggtcttcatggatcaacctagcacagaagttacaggttgacccttcatgggtcaaccaccatgaggctgcaagagtga

SEQ ID NO: 372349 - DNA, 622 bp, Homo sapiens
taatgattggtcctaaccccataatgagtcagggacgcatatggtagcctctagtgtaatcactaaaatcaggtaaaaaaaaaagcgtaaccgacaagttataggaggaaaaaaagcaatgataattttgaataatctaagtcatcaagacagaaaagatactagaatataaaaagtatgagacatatagaaaatgaatagtaagatagtagatctaaacagatataytaattacagtaaataaaaaatgtattaagaaaaatttaaaattgtcagatcagataaaaatttatctccatttattgtggcttacaaaaacaacgctctgtaaatctacacagaatgaagcaatgtacgtgcaagcattaacccaaaaaagctggtagacttaccatattatggaacgacaattgtaaggtaagaatctttaatccagataaataggaacactccataataataaaaggaattagttccataggaaatattataaattctcttgacatacctcccagagttagtctactcaaggaattattatgccagtacataaatatgccattacgatccaaagtcttttcagcctatgaaactgtctctacgatacatattgttaaccagt

SEQ ID NO: 372350 - DNA, 636 bp, Homo sapiens
tgaatcacatttacaagtttattacttaagtttaccacataggcatttttacttacttccattacattttstaattggctactgctacttaatgcaagtaatattgatttggtttgtttttattttccaagaaattctgaaaaaaatgtgaattttccatttggagaatcacattgtctttggcgtttctaaatttaaatgtttgcactttgtattttgattttaaaggtaagaaatggtcactgaaaagcctttgacaacacatgctacagaatttttcccacacctaaatactaaaaatatttttaaaatatttaaaaacatcatcaacaaaattttaaaaatctaataaccaattaatggtgtgaacattttcaagaagtcatagtttaaaacataaaatttattaatttgtagagtctccctttcaagtaaaaacaacactaataattgcaaattattatcttaacaaatcttaaactaattagtaaatcttttgctttgtcaaatctataagcagagaataattgattcaaaattgcaaagaatttgttctagttactagaattgtaatcgagaatggatactcaaatttaaaaacctatcagagttctcttgtctaccaacttgaaaatt

SEQ ID NO: 372351 - DNA, 621 bp, Homo sapiens
tttgttttaatcatgctttagtcatgaaatcatttaatcccagtttaatcattccacattgtaaacatatatcaaaacattaaattgtaccccataaatatatatatatctgtcaattcaaaataaaattaaataatttaaaaagagagtgcaagataggtttgataatgcagtgaaactatgtactctataacctaatattgcaagaataaattcacaatttattttataatttctaaatcagagatttggcaaattattaccagtgctatgccaggtttccaaatcctgttcttctgtcaaacaaaagaagaacatggcaaaagtggcaaatatgattacagggtaaatagaaaggagatggcactaaatgrcctttacatcagtaaaaattgtacttcattgggaagtttacaaataaactctttagactttgctatatccttgaaagagcatagtacgcatgttctctggagcagcatatatgctaatcagccaaaacgtaaacctatatctgtatttttcttttacttatagctaatcaaattcgtcagtggttttctaaaaacaacatcttaaacaggcactttgagttgttatcagcttttaagttactaaatg

SEQ ID NO: 372352 - DNA, 531 bp, Homo sapiens
aggtttccaaatcctgttcttctgtcaaacaaaagaagaacatggcaaaagtggcaaatatgattacagggtaaatagaaaggagatggcactaaatggcctttacatcagtaaaaattgtacttcattgggaagtttacaaataaactctttagactttgctatatccttgaaagagcatagtacgcatgttctctggagcagcatatatgctaatcagccaaaacgtaaacctatatctgtatttttcttttacttatagctaatcaaattcgtcagtggttttctaaaaacaacatcttaaacaggcactttgagttgttatcagcttttaagttactaaatgccttctttgagattctaatataaatattttataatggccaacagagtctttaatccatcacaggaacaaataatgacatgtaaacagagcagaggaaaaatacaggagaggcacagtagaggtaaagaggagaggacatgcaaaggagaaagaaargtcatttaaatatatctctcactcttata

SEQ ID NO: 372353 - DNA, 567 bp, Homo sapiens
attggttgtgggtgggtggggaagagactgactggaagggatgtgaagaaattttcccaagtgaaatgttgtatrtcttgatgaatgtgttggttatacaggttaatttaacaaaactcaataaattacacatttaaactttctgcattttattgcatttaaatttttaattagacaatagaaacacaaagaatgcatgtatttttacttcataaatgcatgaagtaaataataagaaaaacatgaagggatttcttcagtaaagttcaaaatttgattgaaataaaaaacccacaatgaagtagaattgtactagatacagctcttattaataaataaaaaaattatataggccatcttgtcgccatgggacaaataattgctgtgaatttatattatcttcaataaaacatatttgtaatcagtaaataggtatactcttcattatggcaactagtatggaaatttgggtacagaagataaattctgggtgatactaaccctacctctgagactttttttttttttttgagccagagtctcactcttttgcccaggctggagtgc

SEQ ID NO: 372354 - DNA, 635 bp, Homo sapiens
tggggttaaacattaacaaatcctttgggaggtcaggcaattgaatgatgtcttttccagcacatttatgcagcccttttttttctgcttacaaaagaagaaaaataatgaatgttgcctttgggttagaaaagtacagcacagggaaagaaccatctctcactttataatatgtaaaacaatttcatattcaccatatgatttcatccgcacagcaaccatgttgtaacaaaggcagggaatgttacccaatcacacagatgagagagctgaaggtaagtcagataaagtaacttgccaaataccacgcaagctagttttagaacaactgactctaaatcttgcacattttccataacactgaaatgtttaagaagaaagtttgattggaaaaggaggtaagaaaaggaagtattgtgtgacttaaagtaaagagtaatgtcttagaaaggtactgaggggaaatcaggtcaatgtcttayctgcatgctatggcctctccttatactaagagaatgattaaacaaatgataattaaatccatcagatacattatttaagaatacttgatggtatggaaaaaaaatgctcatattttaatattaagtttgaaaggcagagaaagaacaacagtt

SEQ ID NO: 372355 - DNA, 508 bp, Homo sapiens
tttgggggtgggggtggggcaaaaaaaaagcacaggctggacacatgctataaaattgaaataaggaaaagttgttctgaaagtgcagaagaaaaccctagttctttaaaaaaawaataataatttaatattaagaaaaaaactgggaacgtctgttctgggttctcaagtaaatacatgaaatggtacgcttgttaaggttagggatgatgataagtgatgagataaaaagacaatttatggcaatatagtctaaaattattaagggacctggctgagaaaagcaaggtaacaaaatagccaaattaatcctaccctggaattggaaaagaacaaaactggcactataaaaaaattaaataggctgggcgctgtggctcacgcctgcaattccagcactttgggaggccaaggcgggcggatcacttgaggtcaggagtttgagaccagcctgaccaacagggtgaaaccccatctctactaaaaatacaaaacttagctgggcatg

SEQ ID NO: 372356 - DNA, 508 bp, Homo sapiens
tttgggggtgggggtggggcaaaaaaaaagcacaggctggacacatgctataaaattgaaataaggaaaagttgttctgaaagtgcagaagaaaaccctagttctttaaaaaaaaaataataatttaatattaagaaaaaaactgggaacgtctgttctgggttctcaagtaaatacatgaaatrgtacgcttgttaaggttagggatgatgataagtgatgagataaaaagacaatttatggcaatatagtctaaaattattaagggacctggctgagaaaagcaaggtaacaaaatagccaaattaatcctaccctggaattggaaaagaacaaaactggcactataaaaaaattaaataggctgggcgctgtggctcacgcctgcaattccagcactttgggaggccaaggcgggcggatcacttgaggtcaggagtttgagaccagcctgaccaacagggtgaaaccccatctctactaaaaatacaaaacttagctgggcatg

SEQ ID NO: 372357 - DNA, 508 bp, Homo sapiens
tttgggggtgggggtggggcaaaaaaaaagcacaggctggacacatgctataaaattgaaataaggaaaagttgttctgaaagtgcagaagaaaaccctagttctttaaaaaaaaaataataatttaatattaagaaaaaaactgggaacgtctgttctgggttctcaagtaaatacatgaaatggtacgcttgttaaggttagggatgatgataagtgatgagataaaaagacaatttatggcaatatagtctaaaattattaagggacctggctgagaaaagcaaggtaamaaaatagccaaattaatcctaccctggaattggaaaagaacaaaactggcactataaaaaaattaaataggctgggcgctgtggctcacgcctgcaattccagcactttgggaggccaaggcgggcggatcacttgaggtcaggagtttgagaccagcctgaccaacagggtgaaaccccatctctactaaaaatacaaaacttagctgggcatg

SEQ ID NO: 372358 - DNA, 495 bp, Homo sapiens
tttagttggtgatgtccactgctaaaatgtaaatacatgttttgctgctttgctattgttatcatgtccatacatttttagaacaaaccataacttcattcaataacttagtctgaacatacctttggagtcctggattcttgtatgaattctttcagattttcagatctggccttcagcaagttgaggggaagcaaagtccaagtcacccagccctctctccagccactctaggctaaaacccctgttstcgtatatttgtgcacctgttttctggatcacctcataagtttatgttcactcctattttattgcatgatggtttcatcatgattcaccaacaacaaagttaatttttgttgaatcattgattcaacaaatgttaccaaatgtcagttgctgtctcacacctaggacactgttgttacttctattattaaaaataatatgaataagaattatcattaagtaaatacttattgtacgtcaggtact

SEQ ID NO: 372359 - DNA, 495 bp, Homo sapiens
tttagttggtgatgtccactgctaaaatgtaaatacatgttttgctgctttgctattgttatcatgtccatacatttttagaacaaaccataacttcattcaataacttagtctgaacatacctttggagtcctggattcttgtatgaattctttcagattttcagatctggccttcagcaagttgaggggaagcaaagtccaagtcacccagccctctctccagccactctaggctaaaacccctgttgtcgtatatttgtgcacctgttttctggrtcacctcataagtttatgttcactcctattttattgcatgatggtttcatcatgattcaccaacaacaaagttaatttttgttgaatcattgattcaacaaatgttaccaaatgtcagttgctgtctcacacctaggacactgttgttacttctattattaaaaataatatgaataagaattatcattaagtaaatacttattgtacgtcaggtact

SEQ ID NO: 372360 - DNA, 620 bp, Homo sapiens
tcattttcttctctatagcttctgtcactgttttttctatagcttctgttatcattttcttcaacatgtgctgggagataatactctgttcccttacaaatgcttcccaagtattagctagaaaatttactggaggcctctgtacattcagaatgtagatgactagaaccagaaatgaagtcaaaaaatgaaaccaagatttaaaaaactttccaactactacaggatttgaaaatgcctttcttagcatacttcaaaatgagtaaattgcttctaagtgagtaaatacttctaagtaaatttgaataacatccaaaaatacacatttcctgttttttaagtgtcagggtatgctgagggagagaagaagggtgtttgctgtctagtacatagagagactttagagctgttaccagttgaattggtgacaatagataacattaagcaacttaaagtccttaattcccgaagcattgatacacatgtttaaaaawataaaacacgaatcagaaatatttcttaaatttcaaattcaatattagaattgatataaatttcagacattacacagttcaatgccttcattgtacaaatggaaaaaactgaggcatagggaaatg

SEQ ID NO: 372361 - DNA, 522 bp, Homo sapiens
ggaaatctcaggagagaaaagaaaactataacataggactaatgagaattctataataaaaaatactttccctgaataaattcactagatrggctgaacagcagattagacactacaataaagggtcaatgaatttgaaaacatgtgaatataaattaaccaatctgaagacaatgaaaagaaaatgattgagaagaacaagcagagccctggtacctcagaaaattcaactatttgtgaaaatccagaggaagaagaaaaggagacggaggaggagaaaaagtaggagagaagaaaaggtagggagagaaaaagaagcaaaaaacaaaattcaaaattcaaaatttgttttaaaaattaccctccagattcaagacatttagtaaaccctaaaccatgtaaatagaaaaccttgactgagtatattataatcaaagtgctgaaagataatggtaaaaagaaaatcttaaaatgtatcaaaaaaaaaccctcatatgaagggaaaaaagatgaaagatgatg

SEQ ID NO: 372362 - DNA, 574 bp, Homo sapiens
gtcttcttccataactaattgaattgaatatcctgaattcggttttgagtgctggtcccacatgtgagaccttagataaggcatattctttttttaaaaattttactttaagttctgggatacatgtgcagaacatgcaggtttgttatatgtgccatgtggtttgtatacatgtgccatggttgtttgctgtacctatcaacccatcatctaggttttaagccctgcatgcattaggtatttgtcctaatgctctccctccccttgccccccacccccaaaaggcccccgtgtgtgacgttcccctccctgtgtccctgtgttctcattgtttaactcctacttatgagaacatgcggtatttggttttctgtccttgtgttagcttgctgagaatgaaggttttcaacttcatccatgtccctgcaaaggatatgaactcattcttttttatggctgcatagtattccatggggtatatgaaggcacatcctttattgatttcaggtttatcacttatggtaatggcatagcaatctgttctctygcttcgacttatctgtagttcaatctt

SEQ ID NO: 372363 - DNA, 503 bp, Homo sapiens
aagcctcataaaatagaaaaaggaaaccagcgatctcaagaatgcaaacttctgcatctgcaaaaatgggctcagaagtcagatgaaaacagattctagattggacttttgattgtttgtgctgctggggctgagtaagcaataaaaactaacttccctgcattatttggctcccagacttcaagtgactgctggaaagagtgtgccaataaacttctttattggatctttgagcatcatcccaattcatgaatacaaaaaagtacaaaggcaaatgatgataagagaaaatactacaaacagaatgttgcagagacttcacggtctctaaggtagtctcatctccattcctacctcagaaccacgtggagtgcctgttcaaagcacagatttctgggatctgtccgcgactatttcaagcacaatctgcgaggatataacacaagaacacgtatttttaacacgctccctaggtratccttattagcaacttagtgccagcc

SEQ ID NO: 372364 - DNA, 594 bp, Homo sapiens
ggtgatgttgtgatttcatcagcctctcagtttttctcaatccttctattctgcgttcctattctgtagcttccatcctcaaggtcaagtcatggtctaaagatgtctgtctgtctattgcagctccaaccatcacatctgagttttagaaatagagatgtagaaaaaaagaaaggcctgtcaatggaatgctttctgcttctctgaagtccctcttaaaattgtttaaattttaacacctatctacaagggtggctaggatatgtagctgggcacattgttgctatcaacaatacagagattgtgttaataaggaggaagtgagaatagatattggccaggcagcagatgtctctgcacacagagaattttgagtggaatttatgtcatcgatgttttatacaccatatacaaaataggactttaagaagatgtttcataatctatacagcaaaatttactatattaatattgagttattactcctaamatttgttccttgtgctcaaatacagaattggaaggattctttatcattgctccaaggaatgagggggaaaactgtcacattcctctgaaaagtaaaaaatgtgg

SEQ ID NO: 372365 - DNA, 594 bp, Homo sapiens
ggtgatgttgtgatttcatcagcctctcagtttttctcaatccttctattctgcgttcctattctgtagcttccatcctcaaggtcaagtcatggtctaaagatgtctgtctgtctattgcagctccaaccatcacatctgagttttagaaatagagatgtagaaaaaaagaaaggcctgtcaatggaatgctttctgcttctctgaagtccctcttaaaattgtttaaattttaacacctatctacaagggtggctaggatatgtagctgggcacattgttgctatcaacaatacagagattgtgttaataaggaggaagtgagaatagatattggccaggcagcagatgtctctgcacacagagaattttgagtggaatttatgtcatcgatgttttatacaccatatacaaaataggactttaagaagatgtttcataatctatacagcaaaatttactatattaatattgagttattactcctaaaatttgttccttgtgctcaartacagaattggaaggattctttatcattgctccaaggaatgagggggaaaactgtcacattcctctgaaaagtaaaaaatgtgg

SEQ ID NO: 372366 - DNA, 594 bp, Homo sapiens
ggtgatgttgtgatttcatcagcctctcagtttttctcaatccttctattctgcgttcctattctgtagcttccatcctcaaggtcaagtcatggtctaaagatgtctgtctgtctattgcagctccaaccatcacatctgagttttagaaatagagatgtagaaaaaaagaaaggcctgtcaatggaatgctttctgcttctctgaagtccctcttaaaattgtttaaattttaacacctatctacaagggtggctaggatatgtagctgggcacattgttgctatcaacaatacagagattgtgttaataaggaggaagtgagaatagatattggccaggcagcagatgtctctgcacacagagaattttgagtggaatttatgtcatcgatgttttatacaccatatacaaaataggactttaagaagatgtttcataatctatacagcaaaatttactatattaatattgagttattactcctaaaatttgttccttgtgctcaaatacagaattggaaggattctttatcatygctccaaggaatgagggggaaaactgtcacattcctctgaaaagtaaaaaatgtgg

SEQ ID NO: 372367 - DNA, 559 bp, Homo sapiens
gctagtaagaaaaatatgagcaaaatataccacagaataaacttaagctgcattttaaaaagactattatcttgtatgaaaataattcataagttaaaatgttaaaaggccagggaccacacctgtaataccagcactttgggaggaaggggtgggcagatcacttgaggtcaggggtttgagaccagtctggctaacatggcaaaaccccatctccacaaaaaataaaaaaaaaattagccaggcatgtgacggtgcacgcctrtaattccgcactcctacttaggaaggtgaggtgggaggatcgctggaaccgggaggcagaggttgcaatgagccaagatggcactgtattccatcctggaagacagggtgagactctattaaaaaataataaataaataaaaataaatagttaaaatgatatttcagtgtaattttagtaacacagaaaactcgatatatttattacaactcaaagttataataataagaataaaactacattgtcaaggcaccctatgaattaagaattaaaacggtcattagttaagcagca

SEQ ID NO: 372368 - DNA, 559 bp, Homo sapiens
gctagtaagaaaaatatgagcaaaatataccacagaataaacttaagctgcattttaaaaagactattatcttgtatgaaaataattcataagttaaaatgttaaaaggccagggaccacacctgtaataccagcactttgggaggaaggggtgggcagatcacttgaggtcaggggtttgagaccagtctggctaacatggcaaaaccccatctccacaaaaaataaaaaaaaaattagccaggcatgtgacggtgcacgcctataattccgcactcctacttaggaaggtgaggtgggaggatcgctggaaccgggaggcagaggttgcaatgagccaagatggcaytgtattccatcctggaagacagggtgagactctattaaaaaataataaataaataaaaataaatagttaaaatgatatttcagtgtaattttagtaacacagaaaactcgatatatttattacaactcaaagttataataataagaataaaactacattgtcaaggcaccctatgaattaagaattaaaacggtcattagttaagcagca

SEQ ID NO: 372369 - DNA, 564 bp, Homo sapiens
cagtgatgacctgatagcttgctgttcttgacataaaccttgttctgctcccccttgctcacacagttctctgaatagttctctctctccctcttcctcccatgcatatcactttctaacaaaacaccaaactgtctgtctcctcaaggggccttgccttcctcagtccaatcaggtcacctctcttcattttctattcatatgctttgctatctcgtattggaaacaagtagtgtgagtctaagataaagtcagtgaagaaggyggtatctatggagaccaggcaaaacccagttccttcataggcacagtcggaccaaagcagcagtgttgctctaagaagtgtcttctatccgtcttctacttgagtgctcctggggattggaagtttctaattagcccttttgatgaccagttggagcactcttacatacattttttaaaaatagagactcaatttgtcatcatgagagaatctttcacttctggacatgctcggctcccagttttaatgccttaaaacagctgccagtgaaggaaaagagaagaaatgagaaaggtgct

SEQ ID NO: 372370 - DNA, 564 bp, Homo sapiens
cagtgatgacctgatagcttgctgttcttgacataaaccttgttctgctcccccttgctcacacagttctctgaatagttctctctctccctcttcctcccatgcatatcactttctaacaaaacaccaaactgtctgtctcctcaaggggccttgccttcctcagtccaatcaggtcacctctcttcattttctattcatatgctttgctatctcgtattggaaacaagtagtgtgagtctaagataaagtcagtgaagaaggcggtatctatggagaccaggcaaaacccagttccttcataggcacagtcggaccaaagcagcagtgttgctctaagaagtgtcttctatccrtcttctacttgagtgctcctggggattggaagtttctaattagcccttttgatgaccagttggagcactcttacatacattttttaaaaatagagactcaatttgtcatcatgagagaatctttcacttctggacatgctcggctcccagttttaatgccttaaaacagctgccagtgaaggaaaagagaagaaatgagaaaggtgct

SEQ ID NO: 372371 - DNA, 592 bp, Homo sapiens
agagttttaaaaaatctaaattctaccatttgtarcaatacaaagaaaacacactattctctgttcatgtatctaaggtaataagcaaatttaaagaataatacagaaaaagctagataaattaacttgaatgaaatagtttctttttttcttgaaatggctcaagtccttttcaaactaccactgaagttttttagaagttaaaaaatccatggcaggatataggtttcttccttcttgtcccaattaaaagcattctgaatactaaaactctaattttattctcttcactttcgtctagatgtagaaatacaagggcagatgagcaaaggatctttgtagcagattgtttgaaaaaaggaggatttaaaagaaaaaaattagctttaaccatagaaaatgttgacccttaggaaaaaatttgtaaatgcaattaaaggaaaaaaaaaggaaataaaaatttagaaataaaatgatctgtggtagggatatacagagtgctacattgaacacacgttttcacccctcatactcctggagcaagtatatgttcaggagagatgaataacaatgtcttcagtgggaagcaatg

SEQ ID NO: 372372 - DNA, 624 bp, Homo sapiens
actcctcagtgtcagttacggccgtctatatgtccatgagcacccaatgtttagctcccatttgtaagcgagaacatgcattatttggttttctgttcatgcattaatttgcttaggataatgatctccagctgcatccatgttgctgcaaaggacatgattttgttctttttttggctgcatagtattccatggcatatatgtggcacattttctttatccagtccaccattgatggacatctaggttgatttcatgtgtttgctattgtgaatagtgctgtgatgaacatatatgagtgcatgggtctttttggtagaataatttatttccttttgaatatatacccagtaatggggattgctgggttgaatggtagttctcttttaagttctttgagaaatctccaaacttctttccaytgtggctatactaatttacattcccaccaacagtttataagcattcccttttctctacagctcaccaacatctattgtgttttgactttttaataatagccattctgactgctgtgagatggtatgtcattgtggtcttgattttcatttctctgataattagtgatgttgaacatttttttcatgtttgttagctgcttgt

SEQ ID NO: 372373 - DNA, 512 bp, Homo sapiens
attcttttcctcacaaagactattgatattaatactctgggaaaggaattcattcctggggggaggtctataaacggccgctctgggaatgtctgtcctgtgtggttgagataaggactgagatacgccctggtcttctgcagtaccctcaggcttactaggawtggggaactccatcctggtaaatttttggtcagaccagttctctgctctcgaaccctgttttctgttaagatgtttatcaagacaatacgtgcaccactgagcatagacccttatcaggagttctgccttttgccctttgtcctgtttcctcagaagcatgtgatctttgttctgctttttgccctttgaggcatgtgatctttgtgacctactccctgttcagacaccccctccccttttgaaatctttaataaaaacctgctggttttgaggctcaggtgggcatcacagtcctactgatatgtgatgtcacccccagcacccccagctgtaaaattcctctcttt

SEQ ID NO: 372374 - DNA, 512 bp, Homo sapiens
attcttttcctcacaaagactattgatattaatactctgggaaaggaattcattcctggggggaggtctataaacggccgctctgggaatgtctgtcctgtgtggttgagataaggactgagatacgccctggtcttctgcagtaccctcaggcttactaggaatggggaactccatcctggtaaatttttggtcagaccagttctctgctctcgaaccctgttttctgttaagatgtttatcaagacaatacrtgcaccactgagcatagacccttatcaggagttctgccttttgccctttgtcctgtttcctcagaagcatgtgatctttgttctgctttttgccctttgaggcatgtgatctttgtgacctactccctgttcagacaccccctccccttttgaaatctttaataaaaacctgctggttttgaggctcaggtgggcatcacagtcctactgatatgtgatgtcacccccagcacccccagctgtaaaattcctctcttt

SEQ ID NO: 372375 - DNA, 590 bp, Homo sapiens
ttactggtgatatgcaaatactacaccattgtatgtggattttggtatccacaggggttctggaaccagtcccccaggaatactgctggatgactgtagtttcactgtgtttaaagtcctctgtgctttgccgattgatctccccatcttcactaacccctagcaaccagtgactttttttttcttttctaagctgacctataataattgtacatatctgtgggggtacattgtgattttgcaatacatgtaatgtatatgatcagagaagggtaattaagatatccattatctcaaacatttatcattttcttgtgttgggaacattcaatatcctccttgtagctatttgaaactacatattattattaactataatcacactacagtggtatggaacactagaacttactcttcctatctagctgtaatttttatgttttaacagatctctccctatttcccctgtaccctactcttcccagcctrtagtattctctgttctacttttaacttctatgagatcaactttttcagcttctacatatgattgagaactttaactttctattcctggcttatttcattta

SEQ ID NO: 372376 - DNA, 651 bp, Homo sapiens
atcagtgcagaggagttgaaattaaaaatacagtatttaaatttgccatagggatcgcttctcagccttttggctaagatcaagtgtaaatttaccataggtataaatcgaacaaaatatgtatacaacttatatgataaaagccacaaaattctgatgaaagaaatcagagatgatctaaataaatggagaaatattccatgttcatagatattgccaagataccaacttttcccaactttatccatagattcaatgcaatctcaataaaaattccaggaaattactttgtggatatcaacaaaatgattcctaactttacatggagaggctaagttcccagaatgggcaacctaatattgaagaacaaagttggaagggacacaacccaactttgagactcaatataaagctacagtaataaagactggtattggcaaaagaatggagaaatagmttagtggtacagaatagagagctcagaaatacacccatatgaacacagtcaactgatctttgaaaaagtagcaaaagcaaaactatagaccataacatagtctttttaataaatggttctggaataactggacacctacatacaaaaaatgaatctagacaaacactttacaccctttataaaaattaacccag

SEQ ID NO: 372377 - DNA, 618 bp, Homo sapiens
acatctcagcttataccattttactttttttatacatcatccgtttcctcctcagtacctggattgttttgaagtaaattccaaatctcagattacatcatttaatctgcaaatatttcagcatgcatgtgtgtatatgtataatatatgtttcagcatatatgtatatatgtaaatacatamattataatttcttaaataaccacaatattattatctgatacggtttggctgtgcccccacccaaatctcatcttgaattgtagttctcataatccccatgtattgtgagggggaccatttgggaagtaattgaatcatggggggcagttaccctcattatgttctcacaagaactgatggtttcataaggggcttttcccccttttgcttgccacatcttgctgccaccatgtgaggaaggctgtgtttgcttttccttctgccatgattgtaagtttcctgaggcttccccagccctgaggaactgtgaatgaattaaacatctttcctttattaattacccagtcttggatatttcttcatagcagcatgagaatggactaatacattatctcactgaatataattgctgtaatcccttagtgtaaatctagt

SEQ ID NO: 372378 - DNA, 448 bp, Homo sapiens
aaaagtgtctggaggtgagggatagaagacttcacatagggtacagtgtatactgctcaggtgatgggtgcaccaaaatctcagaagtcacctctaaagaacatattcatgtaaccaaacatcacctgtttcccaaaacctattcacgtaaaaaaattagagattcccaaatccatttccagtaagtctgaagtagttgatctaggcaatttgaagaagattaaaaattattaaatactctagatgattctgatatggatgactaagagccctactccaagacaggctcagaactccagaatgctgacagctgaatgaaaagggaacatttgcttytcagtagaaacccagcagtatgaagaggtagagggctagagaggaagccaagaataaaattccttaaaaaagaatggggggttttgatcccaaatgatttttcagaatttac

SEQ ID NO: 372379 - DNA, 572 bp, Homo sapiens
aattcttcctacaattttattaggtgagtgttattgcctactttacagaagaggaactcatattcagagactttacctgataaagctaatattacatgggaagtaaacggtaccacctaacaaagagctagtagagactgtctttttctgcagtaaggaaataacgtctcaaagagtattrcctctgtaactgtctggattagggaatcattgaccctagttacgtaaaaaactccaaatgaagacaaggaaagtaactagcacattgcagagatttttattttcagttaatgtttggaaactcacatctcacagcccaaaatgtccatctaatttatcagcgagcattagagctgattggatgccttgtcatgcaaatatgaacaaggaatctcatcacagttgaagagcttggaatgtatgagcttaatgcatgtctactcagtctgtacatatgaaacatttagtcccttgcttggtatagagcgtgctctcacatgcagccttgtgatcacaatctcgatgcctgtaggagccaggcatgagggcgctaagtgaagcagctggcctaa

SEQ ID NO: 372380 - DNA, 572 bp, Homo sapiens
aattcttcctacaattttattaggtgagtgttattgcctactttacagaagaggaactcatattcagagactttacctgataaagctaatattacatgggaagtaaacggtaccacctaacaaagagctagtagagactgtctttttctgcagtaaggaaataacgtctcaaagagtattgcctctgtaactgtytggattagggaatcattgaccctagttacgtaaaaaactccaaatgaagacaaggaaagtaactagcacattgcagagatttttattttcagttaatgtttggaaactcacatctcacagcccaaaatgtccatctaatttatcagcgagcattagagctgattggatgccttgtcatgcaaatatgaacaaggaatctcatcacagttgaagagcttggaatgtatgagcttaatgcatgtctactcagtctgtacatatgaaacatttagtcccttgcttggtatagagcgtgctctcacatgcagccttgtgatcacaatctcgatgcctgtaggagccaggcatgagggcgctaagtgaagcagctggcctaa

SEQ ID NO: 372381 - DNA, 588 bp, Homo sapiens
ctttctctaaattatgctatgcgtcaagtaaccccaaaatatcagtggctttaatatttatttcccattcaaataatatgccctgtgacagttctgctgagtctctgtttcaggctttggtcggtgyggtcggtgttcagatctgtgctaggtgtcttagagactcaggctgaaagagcagctcttcccaaaacatgctgttgtcaaaaaaaagagtagaaacagagtggtaaaatcaaaccacgtgagcacatttaaagcaccactcagaggtggtgtatatcatgttcacttgtgttctattagccaaagcaagtttcatggccaatactgacatcaggaaagagaaataactctgtctacaaaaagtcattacaaggatgtcaaaaatggagaccaatgttataaaaattaccagagtaatgtgttagggatgtgaataaataataaagatgtgtttttgttttattttatttttttttgtcttttacaagttcttcatggtcgataggagcttagtctttggagtcaaatagccttaataagactccaactctgacacttactagctgtttggttttgagcaaa

SEQ ID NO: 372382 - DNA, 606 bp, Homo sapiens
aatgtgttagggatgtgaataaataataaagatgtgtttttgttttattttatttttttttgtcttttacaagttcttcatggtcgataggagcttagtctttggagtcaaatagccttaataagactccaactctgacacttactagctgtttggttttgagcaaaccctctgtgccttagatttctgatctgaaaataaattaataatgcttatctcacagctttattttaggtattgagatgcttaatgtaaaactcttgagtatcttttcagaagtttcagtggcttcatacattaatatgctttccatctcaccctcatccatcatctccacacatcatatcactctttttaaaattctgaaaagtacacgcaaartgcaacttaaatagtaattttcaataatattttgcacaaatcactcttgtccttaatcacattaagtgaccttattttgttttatcatttgtcacactgttcctgcaaatgtacatgatatgaaagcaattaatctggggagagagtgcagaccatacagacatgctgtagaggcaagcccaagtgagcaggttattttaagttctggtgttctttctaatgttt

SEQ ID NO: 372383 - DNA, 584 bp, Homo sapiens
aactcttgagtatcttttcagaagtttcagtggcttcatacattaatatgctttccatctcaccctcatccatcatctccacacatcatatcactctttttaaaattctgaaaagtacacgcaaaatgcaacttaaatagtaattttcaataatattttgcacaaatcactcttgtccttaatcacattaagtgaccttattttgttttatcatttgtcacactgttcctgcaaatgtacatgatatgaaagcaattaatcyggggagagagtgcagaccatacagacatgctgtagaggcaagcccaagtgagcaggttattttaagttctggtgttctttctaatgtttatgactctattgcaaaagcaaattatctaaaacagtgaaaattatgtacactacccttcacctgctctttatagtgcaaatttccatattattatttttattccattctaaattgttagcaaatagcttgatcattatatactgatgggatatctaaatttagaaaatgttatataagctacaatgattatcatatacttgggagattatctctgtggtgagaatggggctgt

SEQ ID NO: 372384 - DNA, 550 bp, Homo sapiens
acccatggtaaacatttaccagagaactcaactctcaaaaatgatatcaacttttatcatatgaatgtttaccaaattgtggcatattatcccacaaagaaaacttcaataatacaataaattaatgacaatgaaaaggtcttcctagagataaaaggaaaaaacttggctgagtacagtggctcatgcctgtaatcccagcactttgggagactgaggtgggcagatcacaaggtcaggagttcgagaccatcctggccaacatgatgaaaccctgtctctactaaaaatacaaacgattagaygggcgtggtagcaggtacttgtagtcccagctcctcgggaggctgaggtaggagaatcatcacttgaacccgggaggcagaggttgcagtgagctgagatcgcatcactgcactccagcctggccacagagcgagactccgtctcaaaaaaaaattaaaaaaataagtaaaaagaaagaaaaaaaataacaacagtccttggataaaagaattactaaaactacagaattttagaaaaatatagc

SEQ ID NO: 372385 - DNA, 559 bp, Homo sapiens
atgatgaaaccctgtctctactaaaaatacaaacgattagacgggcgtggtagcaggtacttgtagtcccagctcctcgggaggctgaggtaggagaatcatcacttgaacccgggaggcagaggttgcagtgagctgagatcgcatcactgcactccagcctggccacagagcgagactccgtctcaaaaaaaaattaaaaaaataagtaaaaagaaagaaaaaaaataacaacagtccttggataaaagaattactaaaactacagaattttagaaaaatatagcatatcaagtgccagaaataacgctaaatacctaygttaatttgaaaataaaaattaagaataaaaagtaacacccacttaaaaagatggaaaaaaatgtttaaaaataagtgggagctgaacaatgagaacacagggaggggaatatcacacactggggcctgttgggagggcaagaggagggagagcattaggataaatacctaatgcatgcagggcttaaaacctagatgacaggttaatgggtgcagcaacccaccatggcacatgtat

SEQ ID NO: 372386 - DNA, 559 bp, Homo sapiens
atgatgaaaccctgtctctactaaaaatacaaacgattagacgggcgtggtagcaggtacttgtagtcccagctcctcgggaggctgaggtaggagaatcatcacttgaacccgggaggcagaggttgcagtgagctgagatcgcatcactgcactccagcctggccacagagcgagactccgtctcaaaaaaaaattaaaaaaataagtaaaaagaaagaaaaaaaataacaacagtccttggataaaagaattactaaaactacagaattttagaaaaatatagcatatcaagtgccagaaataacgctaaatacctatgttaatttgaaaataaaaattaagaataaaaagtaacacccacttaaaaagatggaaaaaaatgtttaaaaataagtgggagctgaacaatgagaacacagggaggggaatatcacacacyggggcctgttgggagggcaagaggagggagagcattaggataaatacctaatgcatgcagggcttaaaacctagatgacaggttaatgggtgcagcaacccaccatggcacatgtat

SEQ ID NO: 372387 - DNA, 647 bp, Homo sapiens
gtgacctgtatatatttgcttaagaagaccacagtcaacacaggtgaggaggggagagagagataattacaagacaatgtgaaaactagtttgcaaggattatgaagacaaagctagagcggtagaggacaagtgtctaacctggctaggttacttraagaacgcgtctcagatagcagtagaacaggagatattctgagcaaaagaaacagtagagcataattaaaggcacagaggagagacaggacatgggaagatgagtaatacatatggctaaggcacaggatgcctaagggccagtagtaaaaaatgatactaaagaacagatcttgaaaggtttttttttaaatgcatacatatgtttgatatcatactgtgggtcagtgttttctcaaaatataacttgtggagcaatagcaattgaaaaccacagaatgcttaattaaaacacagattaatagaacaagcttacaatctaactccgtaggatgtagtccagaaaccttcattttaccaaattcccaatcactaatgagaaaggcctgctattatcagttttgttatctaaaaaggaggatatggaagcagtgtggagaatggactggagggcctgaggggagaagctggaagtctagtagggaagctat

SEQ ID NO: 372388 - DNA, 605 bp, Homo sapiens
cacaggtatgcaaatacatatataggcttttcccccttttttagattgcattataccacactgttctgaaccttgatgtttttcttttttaattaaccttgtatcttgaagaacattttacatccataaagagtttttgcatttctttttacagcttcataatgccatttttatggatgcaccataataagcctaagcaattctctatgatgggcattttactcttacgaacamtgcagcaacaaaataccctgtacagccttcactttgcaagtatacaaatatacctggaggtgaaatttgtaggagtggaatttttgggttgaatgatatttgcacttgaagttgatggacaaggttaaattgcttccataagcattctacccatttagacttccacaaatatagatcttccataatttatttaaaccctcctcagttattgcacattttaaaatcctatattctaccctttcaaaataccattttatcctttcaagattttcatacctgtgtgtataacctccaggtatatttgtatacttgcaaatacatttcactcccttctgtatttagccaaaatctcacatctcattgcttcgact

SEQ ID NO: 372389 - DNA, 561 bp, Homo sapiens
ggctttgaaatgtatttccttttatttcctattcgccttgttatgcctcctagttcttcaagtttcaactcagatgcaacattttctaaaaagttttcctagacctctcagtcttggttaactgtcccttttagatgatttaataatcccttttgtagactttaatcattgccttatcatactacatacaattctctgttaggttgacatctgttccattagtttcatatacaatctagaaactcaataaatgttataaaatatttataaattagcttgcatttgtttgacttaattatttttacttcttgtcacattatgtttcaagawtttttagtaacaaatgctttaattttaaaatataatcaaaattaataattcataatgatttttattccctagagcattcttcattctcatggtatctcatttcatttaaataaaaaagtacatacatacttcatctaagacagaaggtgatctgctgaaaatcatctacttaaaatataagatggctttagaaataacctttatcaatactaatgtttataattttatatt

SEQ ID NO: 372390 - DNA, 585 bp, Homo sapiens
ggtccttttattttctggtaagtttcataaactgtatactgcagaaatgtgtggatgctcaaagcgactcctaaaattgagtatccaaggagggcaattacatcaattcactacaaaatgtactatagtatctttgtcagagttaaatgcctaaatgataaagaatattaatttaaaaattttctggctgatgtaattgtacttattctaagatgatgtaatgtaggctgaaacttcctatgatgcaatgtgaacaaaacwcaatatataatatgctttccccttctgaatctcagtcacttgtattcagaatgtatcttattcttttgtagatgcccagtgcctgtgccatagtaggaacgcaatgattatctgttgaattaatgactagagagaggttaataaatacttagggaattcatgacagacaatgaatcattcattcacctttttttttctttagaagcaagctcaattatccagtaccttcaataatataatcaggtcagaatatggagcataataaagaagaacatttggtttgggctggatgcccaggagtagtatggcatttgtgccacttac

SEQ ID NO: 372391 - DNA, 572 bp, Homo sapiens
cttctaaatagccaagagctctaattatatatgtgtgtatatatrtatatgtttatatatatgcatttgtttaaactccaaagagctattatatttgtatggacatatacacatgtgtttaaaattgctacttgctcaaacgaaataacataatatcacatatcaagaaattatgaagagaattcttagcactccaaagtatcaaattctatgatagtctaattaattctttaaaagctctgatgagacgcagtaggaaatactgtactgcatctattttaagcagtgtattcaaacgaggtaaacacagcccctttatatcaagaatataaaatcaggaaattggctgaatttccctttaaggagaaatgcccacaaacatcttaatcataaatatacatatatacacaaattcaaaaataaaggctttgactttcttttggatatttttatccagtgatctatcctgttttatatttagaaaagaaggtaatgaaagaaatgtacaaaaatacataaacagttctatgctaaatacaacaatgttcactgaacaatgcaattacgaaagc

SEQ ID NO: 372392 - DNA, 631 bp, Homo sapiens
atctatatctatttttatctccacagtattttattttattgaagtttagcgaatatacraaagatatataaaacatgagactacagctcaataaataaacttgattatgattaagaaataaaatattactagcatccatcctaatcaatacaccttgccttctgtccaaagaaaatgactctcctgatctttaacactataattatttagatttgcattagttaactatcagacatctgataagctttagaaactgtttagttatctatttatagcttaattattttatagtagagaacatgctgtgtatgatttcattcttttgaaatttgtagacacatgctctattccatactccaaggtcaatttttgtaaaggttttatgtgtattttaaaatgtcttctactgtttgtctctctggtgattcaatcttctgtatgcttattttgcttatttttttcttgttttataaatttccagaagtgtattaaaatctctgattaaatatacagtattgtctttttctcattaaatttctcattaaatatatggtattgtctttgaaatagggggatttcaaatcctcctatttttgcaaaattaaaggataaattattattgttatatata

SEQ ID NO: 372393 - DNA, 429 bp, Homo sapiens
aataagataattcatctgaaaaaattctttggaaagctttatgtaaacattattatttgtccttttacaaatattatcatatgtggcatttaaataatggttaaatataaatatatattatagaaacaaacatttattctaagagcttagaataactgtcaggatagaagacatagttttsgcagttgtgtataggaagaaggcaaaggctgcttttttatatctgaggttatctatacacataatgattatttcatacccttcaggtttcagtgaatttatatcatagggttcagttcactaggactaggactaatggagatttggggactactcttaggactaatagagacttggggagaatagttccaaaatctccattagtcctaggaataatagatggtgtcaactatctcagtggtttgttca

SEQ ID NO: 372394 - DNA, 429 bp, Homo sapiens
aataagataattcatctgaaaaaattctttggaaagctttatgtaaacattattatttgtccttttacaaatattatcatatgtggcatttaaataatggttaaatataaatatatattatagaaacaaacatttattctaagagcttagaataactgtcaggatagaagacatagttttggcagttgtgtataggaagaaggcaaaggctgcttttttatatctgaggttatctatacrcataatgattatttcatacccttcaggtttcagtgaatttatatcatagggttcagttcactaggactaggactaatggagatttggggactactcttaggactaatagagacttggggagaatagttccaaaatctccattagtcctaggaataatagatggtgtcaactatctcagtggtttgttca

SEQ ID NO: 372395 - DNA, 608 bp, Homo sapiens
tgtgctgtctgccatatattgatttttatttccatcattattttcaatttattattcaggattctactctgagagtgccccttctttatctacttcctgatcatctacatcactaattgaactcacagattttcagattttcagttgattctatcagttacatccattatagtaattatccattttgttgctctaattatcccagatgtaactattgggagctctatcaaattggtttctgtgttctttcaacatgcaggcgtatcttgaatttcttctgcccagacctagaatcwaccacgtctccaagttagtctcatttctttaattggagaatggtatttagaaaccaagatatggaagctagcttagctaattactattaaggcaacactgcttctcagtgagcaacgctaggaaataataagtatatgcgtatatgtaatatacgatgtctgtatatattttattccattctaacaccacagagttcatcctagtattccccatgtccatatttttaactcttttccctaacaatgagaaacctgtatctcatcatgaacaatatgtttacacaaaaattagctttagaattgctaacccat

SEQ ID NO: 372396 - DNA, 608 bp, Homo sapiens
tgtgctgtctgccatatattgatttttatttccatcattattttcaatttattattcaggattctactctgagagtgccccttctttatctacttcctgatcatctacatcactaattgaactcacagattttcagattttcagttgattctatcagttacatccattatagtaattatccattttgttgctctaattatcccagatgtaactattgggagctctatcaaattggtttctgtgttctttcaacatgcaggcgtatcttgaatttcttctgcccagacctagaatctaccacgtctccaagttagtctcatttctttaattggagaatggtatttagaaaccaagatatggaagctagcttagctaattactattaaggcaacactgcttctcagtgagcaacgctaggaaataataagtatatgcgtatatgtaatataygatgtctgtatatattttattccattctaacaccacagagttcatcctagtattccccatgtccatatttttaactcttttccctaacaatgagaaacctgtatctcatcatgaacaatatgtttacacaaaaattagctttagaattgctaacccat

SEQ ID NO: 372397 - DNA, 539 bp, Homo sapiens
ggcatgccaggtccagctgcagcctcacatggagctcatgcatgtgttgcctcctggagcttcctgccctgccacagcacagtctgcctggctgtgcactgtggctggacacctcactcgcttgctcatgtacccctcacctctccacacctggcctgcctgtgatggtcatggaatccaagccagtagcatgagctgaactcagcctaccaggctgagtgggcagagttagcccagtggtcacaagtgaaacccaggcagaggctccaccagccacagaggtttccagctggcaaagtggcaccaaaagaatcctgtgtcactaaccctcagtgagatgatataatactacctcaccaataaaggaaggggctttaggaggtgattaggtcatgagtatggcgctctcatgaataggattgatgcccttacaaaacaggccccagagagctcctttgccccccaggtgaggacccrgcaagaagattcactctatgaaccagaaaaggggtcctcaccagacactgaatctgccagtg

SEQ ID NO: 372398 - DNA, 560 bp, Homo sapiens
atttacaattataatttattaatatttcaaaggtacacttaattaatggccaattaaaacgaaataaagtacattctgatgggtttattttaagtgtattgtatttaacttaagatgtaagaagattatttttattaagtagactaatttctttggcacatggtttcattcctaccagcaacattccctgtgggttgcctattcaacagctctttttcttcttccttcgcatctgtagagtcctcattttttgtctggtcttcatcccttcttcatttgatttgtgtaaataacgattgacttgtgctaaacaggattgtcacattctgtttgactaaagtgatttaaaaagaattctactggagagatcccrtgaaagtttctttttcccattaaatattgataaaaggaaaaaaaagtttctctgcatatgcatgttattttttaaagatgggatatttaaatttcctctgataatgttgcaaccataaaggtaactaatacttctagtgctgagtgaaaacagcctgggttgttaatgaggtcatggaaatagcaac

SEQ ID NO: 372399 - DNA, 604 bp, Homo sapiens
ttgagatgaatgctcagtttaaaaaaagtggtggcttgcacttataatcctatcattttgggagtccaagatggaagggtcacytgaagctaagattttgagaccagcctgggtaacgtagtgagaccctgtcactacaaaagaatatgttttaaatcaatcaataaataaaaggaataatgtaataaatatatatttcaaaatatcttttgaaaatttagagttttgccagcaaagcaatagtaattttgatagccaggcacagaaagataacttaaaatgttatcttttattcttgaagaaaaacagctcccctcaaagttcaattacattattatcattattttggcaagctacttttttttttacaaatgatccaaattctaaattagtatcatatgaatttatcatttttccacatcctaaattgttaatgatatcactagtagcatgtgtaacattttttatattcctcacttcaactttcacttaaaatacctgaattaattttgtgattctttgtcacaaggtatattttacaaacttttaaaactcaatgttataaaaacaaaagccatcaggaaaaaaaaaacaggatataaaa

SEQ ID NO: 372400 - DNA, 604 bp, Homo sapiens
ttgagatgaatgctcagtttaaaaaaagtggtggcttgcacttataatcctatcattttgggagtccaagatggaagggtcacttgaagctaagattttgagaccagcctgggtaacgtagtgagaccctgtcactacaaaagaatatgttttaaatcaatcaataaataaaaggaataatgtaataaatatatatttcaaaatatcttttgaaaatttagagttttgccagcaargcaatagtaattttgatagccaggcacagaaagataacttaaaatgttatcttttattcttgaagaaaaacagctcccctcaaagttcaattacattattatcattattttggcaagctacttttttttttacaaatgatccaaattctaaattagtatcatatgaatttatcatttttccacatcctaaattgttaatgatatcactagtagcatgtgtaacattttttatattcctcacttcaactttcacttaaaatacctgaattaattttgtgattctttgtcacaaggtatattttacaaacttttaaaactcaatgttataaaaacaaaagccatcaggaaaaaaaaaacaggatataaaa

SEQ ID NO: 372401 - DNA, 604 bp, Homo sapiens
ttgagatgaatgctcagtttaaaaaaagtggtggcttgcacttataatcctatcattttgggagtccaagatggaagggtcacttgaagctaagattttgagaccagcctgggtaacgtagtgagaccctgtcactacaaaagaatatgttttaaatcaatcaataaataaaaggaataatgtaataaatatatatttcaaaatatcttttgaaaatttagagttttgccagcaaagcaatagtaattttgatagccaggcacagaaagataacttaaaatgttatcttttattcttgaagaaaaacagctcccctcaaagttcaattacattattatcattattttggcaagctacttttttttttacaaatgatccaaattctaaattagtatcatatgaatttatcatttttccacatcctaaattgttaatgatatcactagtagcatgtgtaacattttttatattccycacttcaactttcacttaaaatacctgaattaattttgtgattctttgtcacaaggtatattttacaaacttttaaaactcaatgttataaaaacaaaagccatcaggaaaaaaaaaacaggatataaaa

SEQ ID NO: 372402 - DNA, 587 bp, Homo sapiens
tctgttattctctgtttccctcagggactaattttttaatggacaaatcatagttgtatacatttatggggtacagaatgatcttttgatatatgtatacaatatggtatgattaaatcaaggtaattaacatatccattaccttgcttaaaattttgatactcaaaaaccagaagagatttttttcttcctctgttttctatataactgattccaatatgtcccttttctcaggccctcaggtagttcagaactaccaagctgctatccacacaactattattgtcaccaattttaaagagcagagtgcccaagtgttacagaaaataaggggaaagagagagaacattaaatgtttcaaaacccttttcctgactcactaattgtgataatgatggctccacatccactgagctaagagktgagatgcagaatatcacaatagaaatagaaattttaacactggggatgacttcctcatgaaaactttattaaaggaagcggcacaaacacagggcatatttacactttcagcatttatcacttaaaattagcccaattatattgtgggaatgccaataaaaaga

SEQ ID NO: 372403 - DNA, 587 bp, Homo sapiens
tctgttattctctgtttccctcagggactaattttttaatggacaaatcatagttgtatacatttatggggtacagaatgatcttttgatatatgtatacaatatggtatgattaaatcaaggtaattaacatatccattaccttgcttaaaattttgatactcaaaaaccagaagagatttttttcttcctctgttttctatataactgattccaatatgtcccttttctcaggccctcaggtagttcagaactaccaagctgctatccacacaactattattgtcaccaattttaaagagcagagtgcccaagtgttacagaaaataaggggaaagagagagaacattaaatgtttcaaaacccttttcctgactcactaattgtgataatgatggctccacatccactgagctaagaggtgagatkcagaatatcacaatagaaatagaaattttaacactggggatgacttcctcatgaaaactttattaaaggaagcggcacaaacacagggcatatttacactttcagcatttatcacttaaaattagcccaattatattgtgggaatgccaataaaaaga

SEQ ID NO: 372404 - DNA, 526 bp, Homo sapiens
cattttaaggtaatttcttcttagtacataaaaatctgccttttcatggagatgctttatagatataccataactgtttaactaatgaactattgctggacatttttactttttctamtcttttactatcatcaataaagctttaataaataatttttataattgtcacttttaaagtaaatgagaatatctgtagattaaattcgaaaagatgatggaccaatgagtatgtatatagagagagggtagaggaaagagagagagagagagagatgatgatgatgatagatagatagatagatagacgtgtctgttttgataaatatagtaaattcctataaaactatagcatctaaaaatcaactgtatgaaatatagtattatatttttacaagagaataaaaaccaatatttttcatttagtctttatgctagcataagtaaacaaaggcaaaaaaattcccatgtaattgttttctacatgtgggaaaaagaacaattactgcaaaaagcatgcatttttact

SEQ ID NO: 372405 - DNA, 526 bp, Homo sapiens
cattttaaggtaatttcttcttagtacataaaaatctgccttttcatggagatgctttatagatataccataactgtttaactaatgaactattgctggacatttttactttttctactcttttactatcatcaataaagctttaataaataatttttataattgtcacttttaaagtaaatgagaatatctgtagattaaattcgaaaagatgatggaccaatgagtatgtatatagagagagggtagaggaaagagagagagagagagagatgatgatgatgatagatagatagayagatagacgtgtctgttttgataaatatagtaaattcctataaaactatagcatctaaaaatcaactgtatgaaatatagtattatatttttacaagagaataaaaaccaatatttttcatttagtctttatgctagcataagtaaacaaaggcaaaaaaattcccatgtaattgttttctacatgtgggaaaaagaacaattactgcaaaaagcatgcatttttact

SEQ ID NO: 372406 - DNA, 597 bp, Homo sapiens
cttataatagattttgcaatgacaattgtacaattttataactttttgaaataatgaatatgtttacttacgtaccataagttataataaacaacagaagggcaatttattttaatccccttgttgtatatttggaaatgtcacacattcctttttagaagtctgaggacttcagataggaatgtaggyaggatttttaaagtataaaataagcaacaggtttcatttgaaatgctcaatacttttcatagctttatactgataacattctagttctatgaaaatagtacaaaaatggtgaggttgaatagaatatccctaaaattacactctctaccaattataccaaggaaaattagatacatataacatttttggaataggggttttatgactattattaagtcacagccaaaaattcatacttttctttatatttgtcaatagaaaaaatcaaatattctcattaataaccatctttcttccattaaaaatataataatactcagatagacttttaaattacaattataccatgtagagaaaatattagtatttttaagtttaatttacagtcacagaaaatgctacctcatt

SEQ ID NO: 372407 - DNA, 597 bp, Homo sapiens
cttataatagattttgcaatgacaattgtacaattttataactttttgaaataatgaatatgtttacttacgtaccataagttataataaacaacagaagggcaatttattttaatccccttgttgtatatttggaaatgtcacacattcctttttagaagtctgaggacttcagataggaatgtaggcaggatttttaaagtataaaataagcaacaggtttcatttgaaatgctcaatacttttcatrgctttatactgataacattctagttctatgaaaatagtacaaaaatggtgaggttgaatagaatatccctaaaattacactctctaccaattataccaaggaaaattagatacatataacatttttggaataggggttttatgactattattaagtcacagccaaaaattcatacttttctttatatttgtcaatagaaaaaatcaaatattctcattaataaccatctttcttccattaaaaatataataatactcagatagacttttaaattacaattataccatgtagagaaaatattagtatttttaagtttaatttacagtcacagaaaatgctacctcatt

SEQ ID NO: 372408 - DNA, 599 bp, Homo sapiens
gaggctataggaccccatgagtacagaagttcaaggctacagtgagctatgaatgacccactacactccagcctgggcaacagagtgagactctgtctctaggaaaataaaaacaaaaactgcatggcttatgggtacaattaaaactaatttcaaataaacaatttcttgactacccagaaggttttagtagagtgaaggacactcaatatctggtagtgaggatcaaatgagtgagatcttgcaaagactatcaggaagaaatggctatagaagctttcttttcttttagtttttcatctttttctcaaatgaatcacaaacatttcagtgttgatagcaaagaaccaagcaaatgatccaataatccaatatcactttcagtgttttgttaccaaaaataaggctaagcatagaatgtataataataatatagtaaattgtatggtcagtggaacacctaataaaaattccttcatgaaaaatctaaygtggctgtgttaggcagaataatggccccttaaagatattccaacgatttgacattcaacctgcagttgctggctttcgagaggaaagaaaggaagcatgaatcaagg

SEQ ID NO: 372409 - DNA, 599 bp, Homo sapiens
gaggctataggaccccatgagtacagaagttcaaggctacagtgagctatgaatgacccactacactccagcctgggcaacagagtgagactctgtctctaggaaaataaaaacaaaaactgcatggcttatgggtacaattaaaactaatttcaaataaacaatttcttgactacccagaaggttttagtagagtgaaggacactcaatatctggtagtgaggatcaaatgagtgagatcttgcaaagactatcaggaagaaatggctatagaagctttcttttcttttagtttttcatctttttctcaaatgaatcacaaacatttcagtgttgatagcaaagaaccaagcaaatgatccaataatccaatatcactttcagtgttttgttaccaaaaataaggctaagcatagaatgtataataataatatagtaaattgtatggtcagtggaacacctaataaaaattccttcatgaaaaatctaacgtggctgtrttaggcagaataatggccccttaaagatattccaacgatttgacattcaacctgcagttgctggctttcgagaggaaagaaaggaagcatgaatcaagg

SEQ ID NO: 372410 - DNA, 568 bp, Homo sapiens
tggaaatatacattcaattctattttcaattgtattcttgatttcagttgtattcttgatttcaattgtattcttgtaattatgytcaaggtaattgtatcactttgtgaattaaaaagtagttcttgatctaatatttatgatgatccttaatagatggactgattaaatttattaatttaactaattttatattttcaacagaaaatgtaactttaaatatgttgccttgttttattggcttgtcttagttgaaaaagataatcgattttaatattaaatagatacaatttattaagtagacacatttacagatattaaattgatacattttaagtatattttacatatgcaaagtgcacaatgtgatcaattttattccagctgtactcaaattatcaaaaatgtattgattgtgttgactacttgctgtgctacactgataataatgctacactaataataatgtgctacactaataattttctattggttgtttaagaatattttttcttgctgctatgctttttatacaaaaataagaataaaaatattcagcaaattttaa

SEQ ID NO: 372411 - DNA, 520 bp, Homo sapiens
attaagtcaaccagacttgaatatatatatatacacacatatatatacatacatatatacatatatgcttatatacatatatacacacatatatacatatatacacgtatatatgtacatatatatatatatatatataaagatttttttttttttttttttttttttttttttgaggcagggtatcactctgtcacccagaygggatcaagctatgcccatgatcgagctactgcaggatcatggctcaccgcagccccaacctctcagactcaagcaattttcccacctcagcccctggagtagctgggactacaggtacacaccaccagctctggctatttttttattttttgtagaggtgagggtctcactatgttatccgagctggccttgaactcctgtactcaactgattctcatgcctcagcctcctgaaatgctgggattagaggagtgagcaaccacacctggataaatataagatttgtatttgtatcattttgatttgggactatact

SEQ ID NO: 372412 - DNA, 520 bp, Homo sapiens
attaagtcaaccagacttgaatatatatatatacacacatatatatacatacatatatacatatatgcttatatacatatatacacacatatatacatatatacacgtatatatgtacatatatatatatatatatataaagatttttttttttttttttttttttttttttttgaggcagggtatcactctgtcacccagatgggatcaagctatgcccatgatcgagctactgcaggatcatggctcamcgcagccccaacctctcagactcaagcaattttcccacctcagcccctggagtagctgggactacaggtacacaccaccagctctggctatttttttattttttgtagaggtgagggtctcactatgttatccgagctggccttgaactcctgtactcaactgattctcatgcctcagcctcctgaaatgctgggattagaggagtgagcaaccacacctggataaatataagatttgtatttgtatcattttgatttgggactatact

SEQ ID NO: 372413 - DNA, 585 bp, Homo sapiens
cttaaccatatgatgcaacaattgcactccctgttatttaccgaaaggagcaggaaatttatgcctatactaaaacctacacatggatgtttatagcagtttcattcataactgccaaaccctggactcaaccaagatgttattcagtaggtgaatgaataaataaactgtggtacatccagaaaattgaatattgtttagtgctaaaaaaaaatgagctctcaagccataaaaatacatgaggaaactcaaatgtatattactatatgaaagaaatcaatctcaaaggctacatactgtatgattccaactatatgacattcttgaaaaggcaaaattactgggacrataaaaagatcagtggttgccagggcggagggagggaggaataggtggaacatagattattttgaagtcaataaaactacctgtatgataccataatggtagatatgttgttatacatttgttcaaatccatagaatgtacaacatcataatttaaactatggactctgggtgataagaatgtgtcaatgcaggttcatctattgataactgataatgggggaggctatgcatgtca

SEQ ID NO: 372414 - DNA, 600 bp, Homo sapiens
gatgagtgaaaagagccacttcagttcctgcctgcgaagggggtcaaggaaactatcccgtctcactaagctagtgcctcacacctcaatctagtcccagctctctattaaaggtgtgagatgctacctcaaaaaacatgtattccattaggctgatgctagattacatccatgagtatcagataaaagtaacaaaatattattgataatatagtgtcaccacatcgtayacacagaccatacaaagtctgacacctgtcaaagtcaacactggagtaaagttgtagaaatcaaagtctacatactacatgtcctattgcatattctctcaaatagacatttaattttttaacaggaagatattcacaacattctgacttaacaatcaatgtgtaataggcacttgcaaagctggccgtatgcaattcttaaaatattttgtgttttaatttttgtccaatatttgatattcgacaaaattttgcccaatatttgataaaaatcactgtatgatttttaatttacaagagaaacagaagcgatctagtactctgtgctaaataaaatgcatgtatatatttaagcttctagtatttcatt

SEQ ID NO: 372415 - DNA, 600 bp, Homo sapiens
gatgagtgaaaagagccacttcagttcctgcctgcgaagggggtcaaggaaactatcccgtctcactaagctagtgcctcacacctcaatctagtcccagctctctattaaaggtgtgagatgctacctcaaaaaacatgtattccattaggctgatgctagattacatccatgagtatcagataaaagtaacaaaatattattgataatatagtgtcaccacatcgtatmcacagaccatacaaagtctgacacctgtcaaagtcaacactggagtaaagttgtagaaatcaaagtctacatactacatgtcctattgcatattctctcaaatagacatttaattttttaacaggaagatattcacaacattctgacttaacaatcaatgtgtaataggcacttgcaaagctggccgtatgcaattcttaaaatattttgtgttttaatttttgtccaatatttgatattcgacaaaattttgcccaatatttgataaaaatcactgtatgatttttaatttacaagagaaacagaagcgatctagtactctgtgctaaataaaatgcatgtatatatttaagcttctagtatttcatt

SEQ ID NO: 372416 - DNA, 575 bp, Homo sapiens
acacacacaatattttaaaatgaacaatctaagaaccacaaaataatggaaaataatctgctctacattttttatattttctagccatattgggctaaaatcacataatgagaacataaaacctggctgggcacggtggctcatgcctgtaatcccagcactttgggaggcccaggcaggcagatcatttgaggtcaggaatttgagaccatcctgatgaacatggagaaaccctgtctctacagaaaatacgaaaattatcctggcgtgttggcacacacctgtagtcccagctacttggkaggctgaagcaagagaatcgcttgaacccgggaagtggaggttgtggtgagccaagactgcgccactgcactccagcctgggtgacagaccaagattccatcttaaaaaaaaaaaaaaaaaagagagagagagatttaaaaatctatgaattctgcagctcttcctaataaccaaagttgacatcaaagatacaaatcttttgtttttatttaatttgaaaattcatatattagcttggttttttgtttaatttatattacatataggacata

SEQ ID NO: 372417 - DNA, 556 bp, Homo sapiens
aagtttgaaaagcaacggtatcttccaaaaatatctacctactgatttcaattccaacacacacttacttcaaacagattgctgctctaaagcctttcccatataaatgtttaagacttaccaaattagattggaaggaatatttgcccatttttttcaggtaattgaattaacgaggaaaattagtccaaatcagggtagaatatattttatttatacttagtaaacagaaatattccaaacatccacagacttttccctttcatctggccrtagaaatatgtacttattagccattactactcattgtcctctaaatgtataagcaattacaacagtgatttcaataatcttatataattgaatctatcttaaagtacattcaatttttcagataaatataaattgcgttcatgtcttaccacataactttccacataaatcaatgtgtttctgtcctgtataaaattttaccaggatgtcttcaaaggagtcactaagcttggcataataataaaagtatatatgatattcattgtgggaatttctattgaaa

SEQ ID NO: 372418 - DNA, 543 bp, Homo sapiens
accaatttagcatcaaaagaattgtcaaaaaaaaaaaaaaaaggagttccatatgggccatgtcatgaaaggctaaaaragatgagccatttacctcctcccttctccaactacagaggaaaagaagaataagtaaatcaatttgagtctctaaagaacatgtggatttctttaagactcatgcttctccaagtagaatccacactatcagagtcactaagaaacatgggcaatcatctataaaccatgttttcaccatagagcattgaaaaaaccactttcaaacatgcccattctggtatccacatgtgcctctcttttggaatttacaggactatttgatctactccagcactgcctcgggccatgggaaagctctattcctccttactttctttctgctttcctctttccttccccaacaaagaatattctgggctagagttaaaacactttttttttttttttttttttacatacaagtgggcaagcacaaaagggaaaagacaaaggaagggagaattacagaccctggaaatgtga

SEQ ID NO: 372419 - DNA, 512 bp, Homo sapiens
  misc_feature (1)...(512): n = A,T,C or G
nnnnnnnnnnnnnnnnnnnntggatgatacatgtgaccacttcgatgccactgtcttcctcactcctaccacatttgtgatatcctctgaggctgtaatgatgaccagtcatcccagacattcacagatgtccttactgcaacatatagcaactgcaccatgctttcttctcttaagagaaaattgatggagtaaattgtacaacaaactcaaactaaacaacagataagtagctgtactttattttgagtggcagccaacaattcttatgtggaagaaacataaaacagaactaygttaagaaactaaaatcacaaactgaatctatttactaactcacatgtggaatagactcccttttcttggctatattctggggactgatgcttgacctagcatcaatgagcaacagtatggacctttcctaaattagacactgaatatgcctggtgtacaagctttctttttttaagtaataattctactgttacttaagaatatcagatggttac

SEQ ID NO: 372420 - DNA, 593 bp, Homo sapiens
ttttgtaacagcatacattggtcttttaaaaaatatgagttcacatatatatgcagatgttccaaatgttgataggtcaaggaatcacattagttaatatcaccaacaatctttcagaaaaatctttttcttaagtattaggaagctgtcaagatcacagtagcaggataattttccccaaactctaatattttatttaaagctcaaattttwacatcagtgacaatgtcagttgtttccctgtagtggcagcctcattttgctcattcccaaggaaatatatgccaagtaccttcatctaaaaaatcacagcttgtttattagttattgtttcagtaaaagtctaattccataaaaatgtgactagttcagcacgctacctaaaaagtgtcacaaatgcttttcttcaaacaatcatttcattttggtttacagttgaagtcttttatgcataatttgcattttattctgcagaatattataaaaattggacacaagtgtcaaactttaataaaatgaataatttttactttattttcagggacattcaaaatgaaaccagcatttgtttttactgagtgtatggcaaagat

SEQ ID NO: 372421 - DNA, 584 bp, Homo sapiens
cttcaggctttcaaggaaattgtcatgaaatcactggctaaataaacacaacctatagaaacagagactttacagaacacatgaccaagaatacaaactcgacaaaaatatataaaaagctgctaagtacacaaacagctaccaccacagcaaacacaaaaatataatttccayagttaccatattgtatgtaatttgtccaattttcaatgaaaaattataaagtgtgcaaataaacaagaaagtatgatccatttacagatttaaaaaacaaaaatctattcttcctgaggagacacaagcactgtacttactgaagaaaggacttaggtaaactgtcttaaatatgctcaaagaactaagggaatacatggaaaataagctaaaagaaacaaggaaaacaatatctgaccaatagataatactaatagagagatagaaattacaaaaagaaaccaaacaaattctggagataagaaatacactagactgaaataaaaaattcactagaaagtttcaaaagtagctttatacaagcagaataaacaaccagcaaacttgaagtcaggtaaatttaaattatt

SEQ ID NO: 372422 - DNA, 584 bp, Homo sapiens
cttcaggctttcaaggaaattgtcatgaaatcactggctaaataaacacaacctatagaaacagagactttacagaacacatgaccaagaatacaaactcgacaaaaatatataaaaagctgctaagtacacaaacagctaccaccacagcaaacacaaaaatataatttccatagttaccatattgtatgtaatttgtccaattttcaatgaaaaattataaagtgtgcaaataaacaagaaagtatgatccatttacagatttaaaaaacaaaaatctattcttcctgaggagacacargcactgtacttactgaagaaaggacttaggtaaactgtcttaaatatgctcaaagaactaagggaatacatggaaaataagctaaaagaaacaaggaaaacaatatctgaccaatagataatactaatagagagatagaaattacaaaaagaaaccaaacaaattctggagataagaaatacactagactgaaataaaaaattcactagaaagtttcaaaagtagctttatacaagcagaataaacaaccagcaaacttgaagtcaggtaaatttaaattatt

SEQ ID NO: 372423 - DNA, 584 bp, Homo sapiens
cttcaggctttcaaggaaattgtcatgaaatcactggctaaataaacacaacctatagaaacagagactttacagaacacatgaccaagaatacaaactcgacaaaaatatataaaaagctgctaagtacacaaacagctaccaccacagcaaacacaaaaatataatttccatagttaccatattgtatgtaatttgtccaattttcaatgaaaaattataaagtgtgcaaataaacaagaaagtatgatccatttacagatttaaaaaacaaaaatctattcttcctgaggagacacaagcactgtacttactgaagaaaggacttaggtaaactgtcttaaatatgctcaaagaactaagggaatacatggaaaataagctaaaagaaacaaggaaaacaatatctgaccaatagataatactaatagmgagatagaaattacaaaaagaaaccaaacaaattctggagataagaaatacactagactgaaataaaaaattcactagaaagtttcaaaagtagctttatacaagcagaataaacaaccagcaaacttgaagtcaggtaaatttaaattatt

SEQ ID NO: 372424 - DNA, 590 bp, Homo sapiens
ttataaccaaatgaaactgaaacagccttggatayacttttatgggggggaagttttaattaaaaaccacaactggcctcaaagaagtacaattttgttaaaattttgccccatgatatattctaaattaaaaattagtttgcatgcatcttttacaaagagttagatcctcctaatgtagaaaagagagggcagaaaaaggtctactaggtagagaagaaaatgaccagcagcctgctcaaattgccttagtttggagctcttcgtgaggtagctggagaaaaaggcactgctcatgaagtgggcagagtgaaggttttcatcatgttacacggtttccttgtgtagatcaccagatcacaagagagtcagctttggaaattactaatcagtgccaaaagagcactgttccaaaattaatataaattgctttaatatttctcccttctataaatttatattcatgctgtaggtttggacctacttttgaaatattcttacaaaggaaagttaccaactccacaaactgtttgtgagagtattagaagtgccaattgaaacaggaatgtaataacactgtgaaattgcat

SEQ ID NO: 372425 - DNA, 590 bp, Homo sapiens
ttataaccaaatgaaactgaaacagccttggatatacttttatgggggggaagttttaattaaaaaccacaactggcctcaaagaagtacaattttgttaaaattttgccccatgatatattctaaattaaaaattagtttgcatgcatcttttacaaagagttagatcctcctaatgtagaaaagagagggcagaaaaaggtctactaggtagagaagaaaatgaccagcagcctgctcaaattgccttagtttggagctcttcrtgaggtagctggagaaaaaggcactgctcatgaagtgggcagagtgaaggttttcatcatgttacacggtttccttgtgtagatcaccagatcacaagagagtcagctttggaaattactaatcagtgccaaaagagcactgttccaaaattaatataaattgctttaatatttctcccttctataaatttatattcatgctgtaggtttggacctacttttgaaatattcttacaaaggaaagttaccaactccacaaactgtttgtgagagtattagaagtgccaattgaaacaggaatgtaataacactgtgaaattgcat

SEQ ID NO: 372426 - DNA, 561 bp, Homo sapiens
aggagaaaaaaaggcaaacgtcattaaagaaatgatgacctaaaacttcctaaatttgttaaaaatattgcttctatccaaatatttttataaactccaagtagaataaattcaaaaaatccatacctagacacatcacaatcaaactgtcaaaagttaacgaatcttagaagtagcaataaagaagcaacttaacatatacaacaatacgactaacagttgatttctcatcaaaaaccatgaagtttcaaaggcagtgctacaatatattcaaaatgctaaaagaaaacaaaacaaaaaataccaccagccaataattcaattctgtaactggcaacactatttttcaaaatgaaagagaaattaagatcttctcaggtaaactaaaactgaggaagttcactgcttacataactttacagaaagaaatgctaaggtccttcaagcttaaatgaaaaagtaactgacagtaattcaactcaagaagaaatataaaawgctattaaaagtaactacaaaagtaaatatacagaacaatataaatgtatttttgttcataac

SEQ ID NO: 372427 - DNA, 638 bp, Homo sapiens
aatatttgttttacatatgaggaaactgggtcacaaagtgatagaaaactgaaaatgtttcacatttaagaaaagttttctcattgttaatacagtaccttctattattccagataatctagttttaataattaatttggtttatttagtcaaatattgtcttagttatataacacatttatgcatatatataattatatatacatataaatgtgtgtatgtatatatatgatatatccataaagtatgttttctagatattgagaaattcttctccaagaagtctgacaaatattttcataagtagaataagggatctaytttctggaatcttctccaaacacctggcaggagttttgttatctgtaatctgataggtgtagtatgggaattttcctttaatacttaaacctttctaatactagcaaggaccttaacgatcatctgtttcaagtctttattttgaagaggaaaatgagtcctagggaacataagtgatttttccaaaagcattagaacccaatacttgactctcattcagcttgtcccctttgtaatatgttgcaataagcaatctgatctaaattttcttatgtactgtttatgaattaaacttttttgaagtcattcagtgctaa

SEQ ID NO: 372428 - DNA, 579 bp, Homo sapiens
tctttctttgtgaatcatatgtaatctattttttaaaatcttgttgccgtatgttgactagggctttcaggacaatcttgaagcaggtttaaaccagggggcayttttgcctcattactggttttaaatgcaattaatctgacattttaccaatatatgctatggaggcttttacttgatagcgttcataaacttaatgaagttctgttctattcctagttcactagcactttttaaaaattggtgaacttttaatcttgaaagttttagatttatagaaaaatgcagaaatactatatatgtgtatgaatatatatatttcacacactcatttgcccttattattaacattttatattattatggtccacttgtcacaattagtgaaccaatattaatacattatcattaattacaattcatacctcattcagatatctatactttctacctcactgtactttttctgtgccaggatcccatcccatgttacatttagtcataatgtcacccttggcttctcctgactgtgcagtttcctaaacttctttgtttaccctgaccttgacagtttgaggg

SEQ ID NO: 372429 - DNA, 619 bp, Homo sapiens
agattattttaaaacctaaaatatgacaaaagattagtagtgcagttatctggctttcctacaaaataaaatatatttcaaaaaatttaaatagcatctcttcaatgattttcacttactgtagtcactaatatctgtataacccttacacatatctagctttatttaagggtaaaagtagatacagtgctttatttgcataaccattctatttggccataatttctaagaactaaagtaaatccctaaaatcataatttcrtatttttgctttacaactaataatgttattgattaacatatttgaacttaaaaaattattgactgatatcctaatcatggaaaatacattttaattactgtaatcaagttagaaattagacacattatccctaaattccattcccaaatgtagagaaactataagagaaactaataatagacaagactagcatgctttttctcacatgtaatacttgttaccagtgcctaatggcccaagtctaggagataccattcaaactgtattctatgtcaatggaattgtgctgtagaagctgccattctcatatattctatgacataaaatacaatgtgaatggtgtaccctggtgttggg

SEQ ID NO: 372430 - DNA, 590 bp, Homo sapiens
ggaaattatattaggaatgtaaaatttatatttgagaagtagaagaagaagcattagatagctccgggtggcagaactagggtcaaaaatttgaatgggatattcaataaaaagtaaaacatgcccagaatttatgaaaataattcaaacattcattgggatttggactacgtatgtcttccaagattaataacttttgaatttataattctgtgaaaagatggttaaaagttacacacgatgaatgtaaaagagtcagtgattaagatgttaccatacaggaggaggtagagcaagatagtcaaatagaatcctccagtgtttgtccttcctccagaaacaccaaattgaacaactatccaaacaaaaagcaccttcgaaagaatcaaaaatcaggtaagcaatcccagtatctggttttaacttcatatcactgaaaaaggcacsaaaaaaggtaggaaagatagccttgaattgtggatgtgatccctccctcatttccccagcagcagccacatggcacagagagaatctgtgtgcttggggcagggaaagcacagtgattgcgggactttgcattggaaccgagt

SEQ ID NO: 372431 - DNA, 591 bp, Homo sapiens
acatgagctttgtagggggattaggtagggtctttgtacccaaatcatttctgccatgacccatgtgcatagcacctatatgctatgttaaatgctatttccccttttctcccttctagtttttcagtattttcacccaagcatttgattaaactacatgtaagcctttaaaaatcaagaagaaaaagactccaggagtttcggtgtctttgggatttcatcaacaaaagctacattactactttcctgagagccatctctgtcgtgtcctcttttgatcagccrctggatcacttctctatgcttcttaggacaatttttcatggccccactgcttcacatttatttaagtataggtattatggaggccgttgaatcacaagctccttgaagtcaggagaatttatcttattcgtctttctatatcacacatcatttatttaatattatattttagatgatcaatgtaggttgaatattattttaaactcaaacagattttatgttttctcataagaaaaaaattataatacattctgataatcaaaaaaatctaatgcaaaggaactgagaaagtcatcaccacctagt

SEQ ID NO: 372432 - DNA, 591 bp, Homo sapiens
acatgagctttgtagggggattaggtagggtctttgtacccaaatcatttctgccatgacccatgtgcatagcacctatatgctatgttaaatgctatttccccttttctcccttctagtttttcagtattttcacccaagcatttgattaaactacatgtaagcctttaaaaatcaagaagaaaaagactccaggagtttcggtgtctttgggatttcatcaacaaaagctacattactactttcctgagagccatctctgtcgtgtcctcttttgatcagccgctggatcacttctctatgcttcttaggacaatttttcatggccccactgcttcacatttatttaagtataggtattatggaggccgttgaatcacaagctccttgaagtcaggagaatttatcttattcgtctttctatatcacacatcatttatttaatattatattttagatgatcaatrtaggttgaatattattttaaactcaaacagattttatgttttctcataagaaaaaaattataatacattctgataatcaaaaaaatctaatgcaaaggaactgagaaagtcatcaccacctagt

SEQ ID NO: 372433 - DNA, 601 bp, Homo sapiens
atcttgtatttcaggcaaaaatactgaatagtgaataccaaagartttgaagattggggttaaacatgaatagaaaatgccttttgtgtaatcatcactgaaatgtatctttatgttactaaattcattctccttagctttactaggattccttaaagcatatgcctcaaattccacaaggaactatttatttcttctataattatggagttgcccatcagatgaaagtttcagagggctgtccagtaagattaatggaggcactttgacggaagtatttgctccacgctctcaagaatacagctgcctccgtaattcttctgaatgaaaggtgaacctgcccttgctcacgtgtcttggctgaggtttttattattattattattattatcattattattcctgaaaggcttcaaggacttgtactctcaagaagttacagtactcatatataatgtttgagtcatccctgtatttgatcttggataagattttaccgttttacccaggctctgttagcaccagaacctagactattcgtggtggcagcacatagtgggtgaaccattccacaagataaaataacttgcctatgcaaagg

SEQ ID NO: 372434 - DNA, 601 bp, Homo sapiens
atcttgtatttcaggcaaaaatactgaatagtgaataccaaagagtttgaagattggggttaaacatgaatagaaaatgccttttgtgtaatcatcactgaaatgtatctttatgttactaaattcattctccttagctttactaggattccttaaagcatatgcctcaaattccacaaggaactatttatttcttctataattatggagttgcccatcagatgaaagtttcagagggctgtccagtaagattaatggaggcactttgacggaagtatttgctccacgctctcaagaatacagctgcctccgtaattcttctgaatgaaaggtgaacctgcccttgctcacgygtcttggctgaggtttttattattattattattattatcattattattcctgaaaggcttcaaggacttgtactctcaagaagttacagtactcatatataatgtttgagtcatccctgtatttgatcttggataagattttaccgttttacccaggctctgttagcaccagaacctagactattcgtggtggcagcacatagtgggtgaaccattccacaagataaaataacttgcctatgcaaagg

SEQ ID NO: 372435 - DNA, 598 bp, Homo sapiens
ggtcaggattttgagaccagtctggccaacatggtgaaaccccatctctactaaaaatacaaaaaaattagccggtcgtgktagcacgcgcctataatcctagctactcaggaggctgaggcaggggaattgcttgaaccagggagatggaggttgccgtgagccgagatcgcgccactgcactctagcctgggtgacagagcaagactccatctcaaaaaacaaaaacaaaaacaaaccaaaacacgaaattctttcaattaggtcatgctcctgaattcaacaggaatatctccctagggtatgtgaagattctacagctgattcattggtcctaaactgtaagagattgtggagtgtgcctgaggcttaaagccagtgtggctgtgtctctggtagctaccttgatagccttctggtgcgtgtgcccttgcaaagcaatccccaggtcattgcaacatctatggggcagttctactctataaacgaactgtctggcacttctctttattttcccatagacccccaggttctcagtaaggtcctctgatttcctgacttggtcagccaaattcaacctgactgagatgggcctttc

SEQ ID NO: 372436 - DNA, 598 bp, Homo sapiens
ggtcaggattttgagaccagtctggccaacatggtgaaaccccatctctactaaaaatacaaaaaaattagccggtcgtggtagcacgcgcctataatcctagctactcaggaggctgaggcaggggaattgcttgaaccagggagatggaggttgccgtgagccgagatcgcgccactgcactctagcctgggtgacagagcaagactccatctcaaaaaacaaaaacaaaaacaaaccaaaacacgaaattctttcaattaggtcatgctcctgaattcaacaggaatatctccctagggtatgtgaagattctacagctgattcattggtcctaaactgtaagagattgtggastgtgcctgaggcttaaagccagtgtggctgtgtctctggtagctaccttgatagccttctggtgcgtgtgcccttgcaaagcaatccccaggtcattgcaacatctatggggcagttctactctataaacgaactgtctggcacttctctttattttcccatagacccccaggttctcagtaaggtcctctgatttcctgacttggtcagccaaattcaacctgactgagatgggcctttc

SEQ ID NO: 372437 - DNA, 598 bp, Homo sapiens
ggtcaggattttgagaccagtctggccaacatggtgaaaccccatctctactaaaaatacaaaaaaattagccggtcgtggtagcacgcgcctataatcctagctactcaggaggctgaggcaggggaattgcttgaaccagggagatggaggttgccgtgagccgagatcgcgccactgcactctagcctgggtgacagagcaagactccatctcaaaaaacaaaaacaaaaacaaaccaaaacacgaaattctttcaattaggtcatgctcctgaattcaacaggaatatctccctagggtatgtgaagattctacagctgattcattggtcctaaactgtaagagattgtggagtgtgcctgaggcttaaagccagtgtggctgtgtctctggtagctaccttgatagccttctggtgcgtgtgcccttgcaaagcaatccccaggtcattgcaacatctatggggcagttctactctataaacgaactgtctggcacttctctttattttcccrtagacccccaggttctcagtaaggtcctctgatttcctgacttggtcagccaaattcaacctgactgagatgggcctttc

SEQ ID NO: 372438 - DNA, 602 bp, Homo sapiens
attatttaaaacagactttacaactccccaattgccagagtgtggcaggtagccttcttaaacagctcccaattgtccccacttcctggcattcatgcctttgtgttagtctagacctaatgacttgcccttaccaaaaagaatgtggcaaaagtgataggatttcccttctgaagttgggctatagaaggctaggacttctgtcttgcttacactcttactctgacttttccccacatatcacttgttttgataaagccagctgccatgttgtgagctaccctatggagaagcccatgtgacaaaaactgaggacttcagttgagcagcccataaggaaccaaatcctgcctccaaccatataggtaagaaagcagatcctccccaaatctagccttcaggagagaagagccctgtccattaccttgattgcagccgtgtgagagamcctgaagcagaggattcaactaagccacaccaggactcctgacccacagaaagtgtgagataataagtgtgtgttgttagaagctgctaagttttggggtagtttgttacacagcaataaataactaatgacaaatattttccttgaccagact

SEQ ID NO: 372439 - DNA, 396 bp, Homo sapiens
tccatcaaaaaggtcaagagcagaggtagagaggactactcactctgaacaagtcagcctgctcctgacaggagtgatgaataagcrttggcctaggaactgagtcctcctctccccaggccttcaacattccatcaacgtggatcaagagtccacctgattctcagctccatccagagtcagggaactcaaacattcatcaataccccccacactcacaacctcttcaccattttatttcttgccttctctgggactgatttcattataccctttatccctgtttatgtgagtcaccacaagaagtcctagactactaggtcatcccccaagtcccattcctataaggccctgaacatactttaatgtatctccatcttccgtccctcccaaacc

SEQ ID NO: 372440 - DNA, 521 bp, Homo sapiens
ttatcccaggtagtaaacaggtaacctaccaacaagtggcacactgtaacatacagattgtagtaatggacaaattgattgacagccaaatcttgaattatcaatgaaacagatgtaaggatccatggacaatttacaaataaaaatagcagagtactttaaccrtttgttttaatatcttctcaagtattataactatgcacagcagtgcaaaaatcatagtaaatatgaatagttttaattgtcttctttattctctgatgcatctccaaatgatcaaggaaaaaaaaaggcagaagaaagaagtagcctgaacaactcaaactgtacaatcattttctacacatgattgccccaataggtttgttattctaaattgctggctggctagacgtgaagcaactgtctgcttagctcattcttctgggtagtgcaaaacagcagtccccaaagcagggcgtgcaaggcaaccagctctcaaacaaaaagataatattagaagtcccattcctacttatttt

SEQ ID NO: 372441 - DNA, 521 bp, Homo sapiens
ttatcccaggtagtaaacaggtaacctaccaacaagtggcacactgtaacatacagattgtagtaatggacaaattgattgacagccaaatcttgaattatcaatgaaacagatgtaaggatccatggacaatttacaaataaaaatagcagagtactttaaccatttgttttaatatcttctcaagtattataactatgcacagcagtgcaaaaatcatagtaaatatgaatagttttaattgtcttctttattctctgatgcatctccaaatgatcaaggaaaaaaaaaggcagaagaaagaagtagcctgaacaactcaaactgtacaatcattttctacacatgattkccccaataggtttgttattctaaattgctggctggctagacgtgaagcaactgtctgcttagctcattcttctgggtagtgcaaaacagcagtccccaaagcagggcgtgcaaggcaaccagctctcaaacaaaaagataatattagaagtcccattcctacttatttt

SEQ ID NO: 372442 - DNA, 521 bp, Homo sapiens
ttatcccaggtagtaaacaggtaacctaccaacaagtggcacactgtaacatacagattgtagtaatggacaaattgattgacagccaaatcttgaattatcaatgaaacagatgtaaggatccatggacaatttacaaataaaaatagcagagtactttaaccatttgttttaatatcttctcaagtattataactatgcacagcagtgcaaaaatcatagtaaatatgaatagttttaattgtcttctttattctctgatgcatctccaaatgatcaaggaaaaaaaaaggcagaagaaagaagtagcctgaacaactcaaactgtacaatcattttctacacatgattgycccaataggtttgttattctaaattgctggctggctagacgtgaagcaactgtctgcttagctcattcttctgggtagtgcaaaacagcagtccccaaagcagggcgtgcaaggcaaccagctctcaaacaaaaagataatattagaagtcccattcctacttatttt

SEQ ID NO: 372443 - DNA, 629 bp, Homo sapiens
gtaatttatatatcagtgccatactgccatgctgattaccatccctaaagtttggggtaggtaggtggaggagaaatgaaagaaacagatgctgttttatgtgtgagttagatcagtgttatccaacagtactttcaacaatgatggaaatgttctgtatttgtgctgtctaaaatggtagccactagccacatgtggctacgaagaatatgaaatgtgactagtttaagtaagaaactgaacttttaattttacttaattgtaattagttttaaaattagcagctttactgaagtataatccttgcataataaattgcatgtgtgtaaagtaagttttgatatttttatcccctcttgaaactactgccacaattaagatgacaaatatttccatcacttccaaaatttccttacgaccttttgtaatctctccctcctgtccttttctscccccatatcccctggcaaccactgttatgctgtcattataaattagtttgcttcttctagagttttatataaatgaatgtgtatacatcccccgcccccacacacacacatgtagtttctgtcactcagcataattaatttgggatttatccatgttattgtgtatatcaatatatc

SEQ ID NO: 372444 - DNA, 472 bp, Homo sapiens
attcatataacatgaaatatgccattttgaccatttttaagtatatggtcacattgattacatttatagtgttatgcaattattgccactatctattttaaaaacacttccaccatctcaaaaagaaattatccacacattacttaataactccctactcccccaaacctctggtaacttttaatctatgttgtatctctatgaatttgcctattttagatatttcatgtaagtggaattatgcaatatttgtctggcttatttcatttaacatgttttcaatgtttatccatgtcgtagcacatatcagaacttcattcctttttatggttgaataatattccattatatgtatacagcacattttaaaaatcaattcatctgttcatggacactcgggwtatttccacctttggttattgtgaacaatgctgtaataaccacagcacaagtacaagtatctgtttaattc

SEQ ID NO: 372445 - DNA, 541 bp, Homo sapiens
acccctgttctgattgtttttttaccactgattgattttcctgttctgaaaccttatctaaatggaaccattcagtatgaactcagttatgtaaggtttctctcaatcagtaatatgtttttgagactcatgmaaatggctgcacataacagtagttcattcctttttattactgtggagtattccactgtatgaatatatcacggtttgtgtattcattctcctattgatgtacacctaggcttcaaatttttgaccattgtgataaagctagtaagaacaattttgtacaaatctttttacagacacgtgttttcatttcccttgggtaaatacccaggagtaaaactgctgcatcaaggggtagatgtctgaatgttgatttcacagtctcaccaacaacaaaagagttccagttgctccacatcctcgtgaatgtttaatattatcaacctttctcattttagctcttctggtaggtatgaagaaatttaagctgctattttagcaagttttccaaattaggaaaaaaatacttatg

SEQ ID NO: 372446 - DNA, 569 bp, Homo sapiens
ttagcaattttgaataaagctgccataaacatccatatgcgtgtttawgtgtagacataataccaaaagagcatgattgctggattatatagtaagagaatgtttattttgtaagaaactacaaaactatcttccaaagtggctgtataatttgcattcccaccagcaatgaatgagagttgctgttgctccacatccttaccaccaattggtgttgtcagtgttccagatttggaccccgtctaatatgtatgtagtggtacttcattgttgctttaatttgcattgccctgatgacatatgatatggaacatctcttcatatgcttatttgccatgtgcatatcttctttagtaaggtgtctgttaagatctttggcccatttttttaattgggttgtttgttttcttattgctgagttttaagaggttttcttttgttttttttttttttgtattttggaaaacagtccattatcagaagtgtcttttgcaaatattttctcccagtctttggattatcttctcattatcttgacattgtcttttgtaaagcagaagttttttaat

SEQ ID NO: 372447 - DNA, 569 bp, Homo sapiens
ttagcaattttgaataaagctgccataaacatccatatgcgtgtttaagtgtagacataataccaaaagagcatgattgctggattatatagtaagagaatgtttattttgtaagaaactacaaaactatcttccaaagtggctgtataatttgcattcccaccagcaatgaatgagagttgctgttgctccacatccttaccaccaattggtgttgtcagtgttccagatttggaccccgtctaatatgtatgtagtggtacttcattgttgctttaatttgcattgccctgatgacatatgatatggaacatctcttcatatgcttatttgccatgtgcatatcttctttagtaaggtgtctgttaagatctttggcccatttttttaattgggttgtttgttttcttattgctgagttttaagaggttttcttttgttttttktttttttgtattttggaaaacagtccattatcagaagtgtcttttgcaaatattttctcccagtctttggattatcttctcattatcttgacattgtcttttgtaaagcagaagttttttaat

SEQ ID NO: 372448 - DNA, 540 bp, Homo sapiens
aatccaataatagctggatacttcaatacctcattctcagcactggacagaacatccagatgaaaaatcaacaaagaaacatagtctgaactatataccaaataaatgtagaagacatttatggaatatttcatcaaatggctgcagaatacatgttatattcatcagcacatggattattctcaaagacagaccatatgttaggccacaagacaagtcttaaaacattttaaaaattaaaatgaggcaggtcatggtggctcacacctgtaatcccaacactttgagaggccaaggtgggtaggtcatctgaggtcaggagtttgagaccagcctggccaacatgatgaaacccagtctctactaaaaatacaaaaaattagctgggcagggtggtgtatgcctgtaatcccagctactcaggaggctgaggagggagaatcacaggaaaccaggaggcagaggtttcagtgagctgagattgcatcactgyacttcagtctgggtgacagagtgagactacatctcaaaaaaaattaa

SEQ ID NO: 372449 - DNA, 570 bp, Homo sapiens
atttagaggagttcaagactttagtggagtaagaaactgtagatatggtggaaatagcaagagaactagtattaaatgtggatctagaagatgtgactgaattactgcaatctcatagtaaaactcaaatagataaagagttgctttttatggatcagcaaaaaaagtgatttcttgagatggtatctatttctgatgaagatactgtgaacatggttgaaatgactataaaagatttggaatattacatagacttaattgataataaagtgtgagaagttgagaagattaactaattttgwaagaagctctacagtaaataaaatgctaccaaataccaaggcatgttacagagaaatgttttgtgaatggtcaatcaatgcagcaaaattcatgtttgtcttttgtaagtaattgtcaccagcactcaaacctttagcaattttcaccctaatcagtaagcagccatcaacattgaggcagaatcttccatcattaaaaaatatgattccctgaaagctcagataagtttttagcacttttagcaataaaatattttagaattaaggt

SEQ ID NO: 372450 - DNA, 570 bp, Homo sapiens
atttagaggagttcaagactttagtggagtaagaaactgtagatatggtggaaatagcaagagaactagtattaaatgtggatctagaagatgtgactgaattactgcaatctcatagtaaaactcaaatagataaagagttgctttttatggatcagcaaaaaaagtgatttcttgagatggtatctatttctgatgaagatactgtgaacatggttgaaatgactataaaagatttggaatattacatagacttaattgataataaagtgtgagaagttgagaagattaactaattttgaaagaagctctacagtaaataaaatgctaycaaataccaaggcatgttacagagaaatgttttgtgaatggtcaatcaatgcagcaaaattcatgtttgtcttttgtaagtaattgtcaccagcactcaaacctttagcaattttcaccctaatcagtaagcagccatcaacattgaggcagaatcttccatcattaaaaaatatgattccctgaaagctcagataagtttttagcacttttagcaataaaatattttagaattaaggt

SEQ ID NO: 372451 - DNA, 631 bp, Homo sapiens
agtagataataatgtacattttaaaatagctaagaaagcttcaaatgttctcaccacaaaaataagtatttgaggtgatagatatgttagacttattcaattattacacattatattcatagattataamctcattttgtaccacataaacatatacaactataatttgtcaatttaaaattaaaaataaaaattgaaaattatttattaacaaataatatacaactaccacacaactcagacactttatttttgagtatttactgagagaaatgaaatgtcaataaatagacttgtaagaccggcgtggtggctcatgcctgtaatcccagcactttgggaggccgaggtgggcggatcacctgagttcacgagttctagaccagcctggccaacacggtgaaacactgcctctactaaaaatacaaaatttagctgggcattgtggcgggtgcctgtaatcccaactactcgggaagcagaggcaggagaattgcttaaacctgggaggcggaagtggaagtgagccaagattgtgccattgcactacagccttggtgagaaaaagtgaaactccatcttaaactaaactaaaataaaataaaataaaataaaggcttgtacatgatta

SEQ ID NO: 372452 - DNA, 524 bp, Homo sapiens
tgtggaatctaaaacaatccaactcaaagaatcagatagtaaaattgtgattatcagaggcctggaaactgggagaaataaagaaattacggttaagaggtgcaaaacctcaattaaatagaaggaataagtgttgcgctttttttttacattccaatatattgcataccatgtagaatatagtagataataatgtacattttaaaatagctaagaaagcttcaaatgttctcaccacaaaaataagtatttgaggtgatagatatgttagacttattcaattattacacattatattcatagattataacctcattttgtaccacataaacatatacaactataatttgtcaatttaaaattaaaaataaaaattgaaaattatttattaacaaataatatacaactaccacacaacycagacactttatttttgagtatttactgagagaaatgaaatgtcaataaatagacttgtaagaccggcgtggtggctcatgcctgtaatcccagcactttgggag

SEQ ID NO: 372453 - DNA, 631 bp, Homo sapiens
agtagataataatgtacattttaaaatagctaagaaagcttcaaatgttctcaccacaaaaataagtatttgaggtgatagatatgttagacttattcaattattacacattatattcatagattataacctcattttgtaccacataaacatatacaactataatttgtcaatttaaaattaaaaataaaaattgaaaattatttattaacaaataatatacaactaccacacaactcagacactttatttttgagtatttactgagagaaatgaaatgtcaataaatagacttgtaagaccggcgtggtggctcatgcctgtaatcccagcactttgggaggccgaggtgggcggatcacctgagttcacgagttctagaccagcctggccaacacggtgaaacactgyctctactaaaaatacaaaatttagctgggcattgtggcgggtgcctgtaatcccaactactcgggaagcagaggcaggagaattgcttaaacctgggaggcggaagtggaagtgagccaagattgtgccattgcactacagccttggtgagaaaaagtgaaactccatcttaaactaaactaaaataaaataaaataaaataaaggcttgtacatgatta

SEQ ID NO: 372454 - DNA, 631 bp, Homo sapiens
agtagataataatgtacattttaaaatagctaagaaagcttcaaatgttctcaccacaaaaataagtatttgaggtgatagatatgttagacttattcaattattacacattatattcatagattataacctcattttgtaccacataaacatatacaactataatttgtcaatttaaaattaaaaataaaaattgaaaattatttattaacaaataatatacaactaccacacaactcagacactttatttttgagtatttactgagagaaatgaaatgtcaataaatagacttgtaagaccggcgtggtggctcatgcctgtaatcccagcactttgggaggccgaggtgggcggatcacctgagttcacgagttctagaccagcctggccaacacggtgaaacactgcctctactaaaaatacaaaatttagctgggcattgtggcgggtgcctgtaatcccaactactcgggaagcagaggcaggagaattgcttaaacctgggakgcggaagtggaagtgagccaagattgtgccattgcactacagccttggtgagaaaaagtgaaactccatcttaaactaaactaaaataaaataaaataaaataaaggcttgtacatgatta

SEQ ID NO: 372455 - DNA, 520 bp, Homo sapiens
atagttacactaagttaaaaattcaggtgtgaaatggttacatgytatataagtctagttatttagaatttaaaaaaattatgacaggaaaaggtcagtgattgtctgggacagaaagtggggatggattacagaggagcatgagaaaacttctggtgttgataaacatgtttgttatcttaattgttgtaatggtttattggatgttacaacaagactttagagtaaacaaaaaaaaaaaaacagaaatggatttcttgactatcatgttgaaagtaaccatgacttagctagttaatgatgtagcaaagaaactgcttgttttagatcaggttagttaagtaaactgtgactcagttatgctgctgtatttaatagataacttctttttctcctgtctttctgcctaccctaactttttcttttttttcgaattgcatactacaaaatatgtatgtgtgtgcacacatgtatttatatatatatataaaacagtttaattttaaaatatgggtaaaaa

SEQ ID NO: 372456 - DNA, 623 bp, Homo sapiens
tgtgcttaaacactttttgtctgtatatattttactctttgcttaaggtatttgtgtgtaaaagtgcatttaatattcaggatgtttacaattctggctgaattttcactttttgctgggacaatgcctcatctatggatcacacttttctatttttgtgtaacataatttcttattcaaacattatactataaaatatatgatggcaagtatacattattattttcccacccaggaatcattttgtttgctcttcattttgttttacttatttagtgatttgacagtactcattttgtagtgtttttccccctgcaacgtatagtcacttttgtctctgttcagttttttatacttttgttactgtttttgttattatccttattgttgcttttaagtatttagttttttttttttcccttggagccatctctgaatcagcataacttagggcccaccaaatgactcatttccatctagagattcacctggtgttggaaatrttttattcccataagtactcttgagattagttcttgtattaagttaccatgcttcaaacagttcgatcccctcaggtcttgctttttagctttataagggtgagaaaatagcaacaatta

SEQ ID NO: 372457 - DNA, 582 bp, Homo sapiens
gtgttagcctgcctctcccacttggaagaacagaatagtatgtagagattcacactgtgaacttttatccaataagcaatgcaggaatttaacattaaaagaaaaaaatccacaggccctttgaaaaaagtgacaggatgcagcctactctgtgagacaggtgaaaaactgtaagtccccagagtgtgatagggacagagactgcytccagaatacacatctccactggggaactgaaaactgaggccacaggaaaaggtcttaaccctacccagagctggaactgatttagggagtggcaaggaatataaaagtataaggagcagtgggaagtgccttgcaggcatttccagtctccatcatggacagagggaagttattcctaattatatctcacacaagatgctaggaaagtcagccaactagctcaaggaatggtcacagggtgaaagaagctcccaaatgaatttcttaatataatcttgagtggggcaaaactcccttgaccagaactcagggggtgagtgagaaatgtgctgcagacacaaacacgggacttgggtgactgatcttgtggccaga

SEQ ID NO: 372458 - DNA, 598 bp, Homo sapiens
ctaaaactcacaaggactatacaacaataacacaatgaaaaaaattaattaggtaacaactaatatgatgaatagaatagtacctcgcacctcaatattgacattgaatgtaaatgacctaaatgctacatttaaaaaaatacagaatgggagaatggataaaaatccacctaccaaatatcttctgtcttcaagagactcacctgacataaggattcrtataaactcaaggaaaaggattggggaaaaaatattcaattcaaatggaaacagaaagcaaagagaagtaactattctgagactaaacagacgttaaatcaatgacagttaaaaaaaagggcattatacaattataaaaggatcagttcaaagagaatatattacaatcataaatttaaatgaacctcatattggagctaccagatttataaaacaataactactagacctaagaaatgaaagagacagcaacacaataatagtgagttacttcaatactccactgacagcactagacagatcttcaagaaagaaagtcaactaagaaacaatagacttaaacatgtcctagaacaaatggacttatatatttacagaa

SEQ ID NO: 372459 - DNA, 604 bp, Homo sapiens
ctatatgttttccaacttgcttgatttctctctctgtctctcagacatgcccatgaattgtagatttggtctctacataattctatatttcttgaaggttttgtttattcttctttattgttttttctttatttttctctgagtgagttatttcatagaaccagtttccaagctcttagattctttcctcagmttggtaaattatgctgttaatacttgccattgcattatgaaatttttttagaatgtttttcagctctatcagatttgtttggttctttcttataacgagccatttcacctataagatcctgtattattttattgtaatctttagattccttggattttttttcattttatcctttatgcctgtgaccttcatttctatctatattctgaattctatttttatcatttcagccatctcagtgtggttagaaacccttgctgcaaaatagtgcaggtgtttggagggaaaaagacattctggctttttgagttggcagagtttttgtgctggttctttctcattttggggggtttttattccagcaatctttgaagttgttaatctttggaatttttttcttttatagtattc

SEQ ID NO: 372460 - DNA, 604 bp, Homo sapiens
ctatatgttttccaacttgcttgatttctctctctgtctctcagacatgcccatgaattgtagatttggtctctacataattctatatttcttgaaggttttgtttattcttctttattgttttttctttatttttctctgagtgagttatttcatagaaccagtttccaagctcttagattctttcctcagattggtaaattatgctgttaatacttgccattgcattatgaaatttttttagaatgtttttcagctctatcagatttgtttggttctttcttataacgagccatttcacctataagatcctrtattattttattgtaatctttagattccttggattttttttcattttatcctttatgcctgtgaccttcatttctatctatattctgaattctatttttatcatttcagccatctcagtgtggttagaaacccttgctgcaaaatagtgcaggtgtttggagggaaaaagacattctggctttttgagttggcagagtttttgtgctggttctttctcattttggggggtttttattccagcaatctttgaagttgttaatctttggaatttttttcttttatagtattc

SEQ ID NO: 372461 - DNA, 515 bp, Homo sapiens
atgtttttcaaatattcaaaattacttgggtgttgtgatataaactttaggggaacccaaagtttagtaatgctctagttcttgtcaactcatagaggtactgctttgttggtcttggacaagatttagaagatttctcttgattaataggcagagactcttgttctcttattttactttctcccaaacagacaaaatctctctctctctctctctctctctctctctctctctctgtctgtctctcctgagccacctatagcttgggatagagagaaaaaagcactcatgttgtcaccatccctagaatatgctgggtcacacttgaagccagcatagcacttggtcttatccaaggccttctgtaatcactccctcattagtatctatttctgctgaaagctctggagctctrcagtcaggtggcaaagccagccaggcctttgttcttcctttcaaagtggtgagttccctcaggccacagccaggtacagagatgctgtcttggattgagg

SEQ ID NO: 372462 - DNA, 541 bp, Homo sapiens
atgtgtccgtgtgttcttatcatttagctctcacttatgagtgagaacatgtggtatttggttttctgttcctgcattagtttgctaagaaaaacggccttcagcttcattcatatctctgcaaaggacatgatcacatttttttttttatggtagcatagtttttcatagtgtgtatgtatcacattttctttatccagcctatcattgatgattatttagattgattccatgtctttgctactgtgaatagtgcgacgataaacattcctgtgcatatgtctttattttatttttaaaaatttttattattttactttatttttccataagttaatggggtacaggtggtatttggttacataactaagttctttcatggtgatttgtgagattttgtttcacccaycacccgagcgctgtacactccaccatatttgcagtcttttatccctcccccctcccactcttccccccgagtccccaaagtccattgtatcattcttatgcttttacatcctcacagcttatctcccaaata

SEQ ID NO: 372463 - DNA, 607 bp, Homo sapiens
ccctatcttcagcttcctcaaacaaaacaatttttagcccaaaattttgtatctagcgaaactaagcatcatatatgaaggaaagatacagtcgttttcagaccaaaaaaaaaaatgctgagaacattcaccattaccaagccaccactacaaaaactgctaaagggagctctaaattttgaaacaaatgctggaaacacatcaaaagagaagatctttaaagcataaatcacacacgacttataaaacaaaaatagaagttaaagcacaaagcaagcaaacaaacaaaacagtgtacayaggaaataaagagcatgatgaacccaacgacctcacatttcaatacaaatattgaatgtacatggcctaaatgttccacttaaaagatacaaaattgcagaatgggtaagagctcaccaatgatctgctgccttcaggagacccacataagacataagaactctcataaacttaaagtaaaagggtggaaaaaggaaattcgtggaagtggacaccaaaggtgagaagagctggctatttttatatcagacaaaacaaactttaaggcaatggaagttaaaagagacaaagggggacattacataat

SEQ ID NO: 372464 - DNA, 586 bp, Homo sapiens
tgccatcatattattgtgcagtttttcctttttttcctgctttgatatgaagcaagagagacgtgggagtaggggaragcaaataaagcaggcatttatctgacaagaaaagctaggaagatttaacaaagttatccttcttcttagttgacagacaagtatttcccaagagagctccataattgagcagacgatgcatttgatggatttgtgtattgtggtgtaagtgaaagctggtgggctttcagataggtagataaataggctttcagttagatcaccattacaatctcagttcaggtgtgtgaccttggaggagctatagaaattataaaaatgctagaagaaaacctcgggatgactctccaggataatgctctgggaaaagattttattccccaaaagcacaggaaacaaaacccagaaatagacaaatgagactggattaaactaaagagtttctgtgaggcaagggaaacaatcaacagagtgaagaaacaacccacagtatgggaatatggccattgtagaatggctgttattacaaagaccaaaaatgacagacgttggcaagtatgtggagaga

SEQ ID NO: 372465 - DNA, 591 bp, Homo sapiens
aagttagctttatttgagaagccagcaaccgggaggagtcagtgaactagacttcagtgatcacctctctgagttgtgcctctggattagggttttttaagggaaagcagaggaaataatgatcaaaacattcttctaaaacgtgttcagtctcaggtgggcagttaatcactgctttcttggtcartgttttgtgaccttccacaggcaccgtcagcctattcttaccaggctggtcagccccttcccagagctgctggttggcgtgttttcttttatctctgttgaaggtcctgttttcctgagactattttagtgaataatctacaaactcaagcaaagcaataatcacattcaagcaagcaaacttttatcttaacttggagtcagtaacattacaatttatttgtaaaagatggcagagtgaagaaagataaaagaatctcccttccccgatcctactaaataaattaaaaaataatacataaataatggtaaaaagcagaatgagaagaagagaagactaaggaggagaagaagagaagactaaggaggagaagcaggagaaggagggagagagggaggaaagtg

SEQ ID NO: 372466 - DNA, 591 bp, Homo sapiens
aagttagctttatttgagaagccagcaaccgggaggagtcagtgaactagacttcagtgatcacctctctgagttgtgcctctggattagggttttttaagggaaagcagaggaaataatgatcaaaacattcttctaaaacgtgttcagtctcaggtgggcagttaatcactgctttcttggtcagtgttttgtgaccttccacaggcaccgtcagcctattcttaccaggctggtcagccccttcccagagctgctggttggcgtgttttcttttatctctgttgaaggtcctgttttcctgagactattttagtgaataatctacaaactcaagcaaagcaataatcacattcaagcaagcaaacttttatcttaacttggagtcagtaacattacaatttatttgtaaaagatggcagagtgaagaaagataaaagaatctcccttccccgatcctactaaataaattaaaaaataatacataaataatggtaaaaagcagaatgagaagaagagaagactaaggaggagaagaagagaagacyaaggaggagaagcaggagaaggagggagagagggaggaaagtg

SEQ ID NO: 372467 - DNA, 572 bp, Homo sapiens
taacacaatgaaaaaaaaaccaaggtattgaggcaacaaatagcatgatgaatagaatagtacctcacatctcagtactaacattgaatgtaaatggcctaaatgcctcacttaaaagatatagaatccattctacaatggataagaattcaccaaacaagtttctgctgtcttcaggagactcacctaacacataaggactcaggtaaacttaaggtaaaggaaaaagatattccatgcaaatggacaccaaaagtgagcagaagtagctattcttatatcagacaaaacaaactttaaagcaatagcagttaaaaaagacaaacagagacattaaagaatgataaaaggactagtccaacaggaaaatatcacaatcctaaatatatatgcacctaacaccagagctcctgaatttatagaacaattactactagacytaagaaatgagatagatggtaacacaataatagtgggggactttaagactctactgacagcactagacaggtcatcaaaaaagaaagtcaacaaataaaccatcaacttaaactataccctaaaacaaatgg

SEQ ID NO: 372468 - DNA, 572 bp, Homo sapiens
caaaagataagtgaaacaaaagcttgttattggaaaagataaataaaattgatagacagttagtgagattaaccaagaagagagaagatccaaataaactcaattagaaatgaaatgagagatattactactgatacgacagaaatacaaaaaaattatttaaggcttctgtgaacatctttacatgcataaactagaaarcctagagaagaggataaattcctggaaatacaaagatcttctagattaaaccaggaagttatagtaactctgaacacaccaataacaagcagcaagattaaaatgataatttaaaaattgccaacaacaacaacaaaagtccaggaccagacagatttacagctgcattctatctggcattcaaagaagaattggtaccaatcctattgacactattccattggataaaaaggaaattatctctaaatcattccaggaggccagtatccccctaataccaaaaccaaggaaggacataaaaaaagaaaactacagaccaatattcatgatgaacatatatgcaaaaatctttaacaaaatgctagctaatt

SEQ ID NO: 372469 - DNA, 584 bp, Homo sapiens
tggatactattcctttgtcagctatttctttgtcccatctttttttctgtttgtgacatttctttttcaagaaagtattacttagtgttttaggaacatttttgattaaacatgtttcccgctatgagttctcagaaatttaagaaatacacaaaggaaccaggtgggaattaaaattcagatctcgctttacgacctaaaatatagaactttgcagtaaagctagattagagaagatagcaagggcttctacctacctcttcaaattgaacttactcccccagtcactcttgtgaaaactgtagaactggatggtggagacttcaaagggacaggaagttctgcaaagatgagccaacctcttaagaaggaagtagtaacagtgcatgccacttgctagcaagctttagaccaggaggactttatgtaatactgtagcttagtggttaagagtacaggctttggcagcagactgcctgacttggaaaygaggtagagcctacttaatatctgcgcgaccttggacaaagtacagaacctctccatgcctcagttttcttacctgtaagatggagattaatatg

SEQ ID NO: 372470 - DNA, 595 bp, Homo sapiens
aattcatattttgaagtcccaacctccagtgtaactgtatttggaaataaggcctaaaaggaggtaactaaggtttaatgaggtctgaagggtggggccctgatcgaataggattagtagctttataaaaagagacataagagagctgcctctccctcctcactgccccccactcccgcccccagcaccaaatttattatctgtctccctttactgcagaataagcttcatgaggacagggatttttgtctatttatttcacatcacctacaacctggcatataacagatgactgataaatacttgttgaatgcataaagtgtaaatttaaaacattttaaaagttgataagctacagtaagaaacaatacatttttgtgatgatatgcaagggatccaataagaaataaaaatatacaatcttcaataagctaaagtttaaaaatcaaaatgatcaaaatttgtgttctaatcacagacccacagaatcctgctttcttggtttccyatttgctttcttgatttcctatgaatctgatccaacacaggctctgtcttcctcccacccattaaatgtggaaaatatgcaatactg

SEQ ID NO: 372471 - DNA, 604 bp, Homo sapiens
tgattagtaaatgttaatgttgtaatgctgaaactgataaaatagcagtcattacttgaatgtatgaaaaatgactgaaaactaaaaactgacttagaatattgtcccttaayaaatattgtaccctcacaaaacatactttacctccttatatttgcctcattactttgcctcaaaacacaaatgtgtgttttgaaaaacaattatggatttatctttttttttttgagacagagtcttgccctgttgcccaagctggagtgcagtggcgaggtctcgactcactgcaacctccgcctccaggttcaaatgtttctcctgcctcagcctcccgagtacctgtgattacaggtacccaccaccatgctcagctattttttgtatttttagcagagatggagtttcaccatgttggccaggctggtcttgaactcctgacctcatgatccacccacctcagcctcccaaagtgctgggattacaggggtgagccactgtgcccagcccaattatgaaattattttaacatgaaaaagtgaaactcaaaataaggaagttgttatagaagagaaagcccttgttattaaagaatataattgctatt

SEQ ID NO: 372472 - DNA, 604 bp, Homo sapiens
tgattagtaaatgttaatgttgtaatgctgaaactgataaaatagcagtcattacttgaatgtatgaaaaatgactgaaaactaaaaactgacttagaatattgtcccttaacaaatattgtaccctyacaaaacatactttacctccttatatttgcctcattactttgcctcaaaacacaaatgtgtgttttgaaaaacaattatggatttatctttttttttttgagacagagtcttgccctgttgcccaagctggagtgcagtggcgaggtctcgactcactgcaacctccgcctccaggttcaaatgtttctcctgcctcagcctcccgagtacctgtgattacaggtacccaccaccatgctcagctattttttgtatttttagcagagatggagtttcaccatgttggccaggctggtcttgaactcctgacctcatgatccacccacctcagcctcccaaagtgctgggattacaggggtgagccactgtgcccagcccaattatgaaattattttaacatgaaaaagtgaaactcaaaataaggaagttgttatagaagagaaagcccttgttattaaagaatataattgctatt

SEQ ID NO: 372473 - DNA, 604 bp, Homo sapiens
tgattagtaaatgttaatgttgtaatgctgaaactgataaaatagcagtcattacttgaatgtatgaaaaatgactgaaaactaaaaactgacttagaatattgtcccttaacaaatattgtaccctcacaaaacatactttacctccttatatttgcctcattactttgcctcaaaacacaaatgtgtgttttgaaaaacaattatggatttatctttttttttttgagacagagtcttgccctgttgcccaagctggagtgcagtggcgaggtctcgactcactgcaacctccgcctccaggttcaaatgtttctcctgcctcagcctcccgagtacctgtgattacaggtacccaccaccatgctcagctattttttgtatttttagcagagatggagtttcaccatgttggccaggctggtcttgaactcctgacctcatgatccacccrcctcagcctcccaaagtgctgggattacaggggtgagccactgtgcccagcccaattatgaaattattttaacatgaaaaagtgaaactcaaaataaggaagttgttatagaagagaaagcccttgttattaaagaatataattgctatt

SEQ ID NO: 372474 - DNA, 604 bp, Homo sapiens
tgattagtaaatgttaatgttgtaatgctgaaactgataaaatagcagtcattacttgaatgtatgaaaaatgactgaaaactaaaaactgacttagaatattgtcccttaacaaatattgtaccctcacaaaacatactttacctccttatatttgcctcattactttgcctcaaaacacaaatgtgtgttttgaaaaacaattatggatttatctttttttttttgagacagagtcttgccctgttgcccaagctggagtgcagtggcgaggtctcgactcactgcaacctccgcctccaggttcaaatgtttctcctgcctcagcctcccgagtacctgtgattacaggtacccaccaccatgctcagctattttttgtatttttagcagagatggagtttcaccatgttggccaggctggtcttgaactcctgacctcatgatccacccacctcagcctcccaaagtgctgggattacaggggtgagccactgtgcccagcccaattatgraattattttaacatgaaaaagtgaaactcaaaataaggaagttgttatagaagagaaagcccttgttattaaagaatataattgctatt

SEQ ID NO: 372475 - DNA, 575 bp, Homo sapiens
ttcatctgttaaataaaatcctcattgatgagaattttatattgattgtaactgttgatacaatagaactataaagaacatctttgcatatttgtctttgtaagaatttttaggataaaattttgaaattaaaattgctagattaaggaaaataaatatatcaaagattttgttaaatatttaaaaatacttaattttgggcgggagcccttgaaactgggttgctagtgtatttcttcttcatatcaaagttgtctgtataattacaactaattggataatatgtacacagttccttattacaattgacactatgactgtgctctcaagactttaaaaatactatttttctccagaaaagagaccatgtttattacctgttttatcaccaatgcctastaatttgtcaaaaatagagtgaactctcaataaattcaaataaaactatttgcaaattcaaaacatccttgagatttgtttggaatagttttaaatcacacaaagacaacctaacaaagtgctgaagcgcatgaattctaaggatgggtcagattctggagccagattgctctgcc

SEQ ID NO: 372476 - DNA, 440 bp, Homo sapiens
tttctagcatttttatagtgaacaaaagtccatttgtatcatatcatcattttggaaaactaatcttgtttgaatttacaaattcctttttgtaatccttcctcttratttttattccattaattattgagtcatttgactttatttagtcaccttattatccaagtacactatatccaaaggacctagaattctttacatactaacaatatcttttgccatgagtgcctcaatctgtgacctgaccagtgatcttggaagcataagggataaaaaagagagcatccttgattaaatcaatcatttaatcaacaagtattaagagctgtgagggagataaaaaaaacacagaagataattatctctgctatcaaagagcttacagtcttgttagaaatgtaatatgtgcaagaggcaattagagagtaagacagtatcta

SEQ ID NO: 372477 - DNA, 588 bp, Homo sapiens
ggggcattctccattcagagcaagtgcttttgtcaacaaataggttcatggagagacactagataagctgtcaaatatttgattctgattccataaattatatatcagtctcttctgcattataactttcctctgtgaagtacaaaatgatactaaactatgaatgtatgtggttttatttacaaaattggagtgcaaaccagttaggtcatcgatgtattaaaagagtgttttttgtacagctttttcccttcagaacttaacctatttyattgcaagtatattgttccatctctctcccgggggactgtggactccatgagagcaagcctcatgtcttcatgctagtagattcaattcctaagaaaatgcttggctgagggctacaggatttatgtttgctcagtgaattttttttaaacagaaataggtcatctgtaagataataagccacaaactttcccaaattgaatgaagtgaaaccaacttattttattttcttagactaagagtttcttttgaatatttttttgtagaaattggtaggagcttacctcttgttcatggatcatccacttaactttagca

SEQ ID NO: 372478 - DNA, 584 bp, Homo sapiens
ctccatgagagcaagcctcatgtcttcatgctagtagattcaattcctaagaaaatgcttggctgagggctacaggatttatgtttgctcagtgaattttttttaaacagaaataggtcatctgtaagataataagccacaaactttcccaaattgaatgaagtgaaaccaacttattttattttcttagactaagagtttcttttgaatatttttttgtagaaattggtaggagcttacctcttgttcatggatcatccacttaactttagcaagtttctggaatctttatgataattcaaggaagaagaaagttttgtttgctctacatatttattttttatttatttatttatttatttatttatttatttatttatttwttttacaaaagctgttcaattcttcttccaaaattgctccatacgacataaagtatttagagcacaggcaggcatgttagcactttgaaatgaccccaattaacaaacttgacaattgcttccacaaatgtagtcaaaagtggaaaaggtccatttttaagtggtacttctgagaagtgcgaactcataatggaaaacata

SEQ ID NO: 372479 - DNA, 598 bp, Homo sapiens
tcctacacaagttagatataaaacactgtggtttttacagagcacacacatgtgaactctagagtgtaatatgattcagctccatgttgacagctgtggttgatgagcaggtgctgtggatgaagaccaatgaataagagatacagttgttcaggagcctctgcatcaaatgaagttcagacacaatgattcctatatactttagaaccaaaagaatgaactgtaatgatatttcctgatcaaaattcaaagacattgcaaaccaaagtgacataatgaaagacaaatttagtacttagatatttagctcacttaatctttttgccatatttctcaagtgagttggagagtagatagtaggccatttttggatgaattttatatatcccagggaataatacaacttttcatgtctcagactagcaaaagcaaaatgaataagaattttttttcctctctagaacctcactgggttacaaatctgtgttgaccataaatcagagcctccctatcttttaatgctgtcattggagaactcggttctataagcaattaaartgttaacttggttcattaatgcagggaatattcacgattt

SEQ ID NO: 372480 - DNA, 572 bp, Homo sapiens
aaacggtccttggattcctcattgtctcataagcactgaaatattgtggccaggaacatctcagcaggaagctggatggrcaccagggaacaagccttacttttcacacctcaaaaaatttatctggaaaattaaagagcttcactgggggttggtaattttatcaggatctgtgctatgtaaaaaataaatgtatcactgagattggaaaaagactcattctaaatgattaaggaaagcacacctctttttttttttttctttttgacaacttgattgggggggaaagggtggaaaatggccctacttaagaaaagtaagcaaagtattggcaggcagtgactttaaattgcacattaaactaatccagggctatgccttaataaaggtgagggctgggaattcttatggattttctagctcattgctgggacaacatagaaaggcaataaatgttctattacttacacaagctgctagttttcagaaaattagtcaccagtgaccttttaccctttgtcttgctttcctcctcagtcactgcacctgaactgaatcaaatgcagaccaga

SEQ ID NO: 372481 - DNA, 577 bp, Homo sapiens
taaataagaccccaacctgtcccccttggagcccatagtttgactcacctaattggcccagaatgcagtatgtctagcaacatttaagatgtatacatcaaaatttcctttagaatggtaacagattcatttatttcttattttcataaaascatatgaccaaatatatgcctgattctgctgtaagaaataaacaattacagctacttaaatgggaaagagatttagtacagggaattgggtacccttacaattgctggaggagtggaattttgccagggtcccagaacaccactgccattctgcagtatggggaaggtgggaatcagagaagctgccaggcgagctgttgtgttcaagagtgcttggccttagctgctctccagtcgcaggaagttcctaacattcctgctctaaatgcctcctaaacccactgagctgggactgggcacggtggctaacacctgtaatcccaacaatttgggaggccgaggtgggaggatcccttgagctcaggagtttgagatcattctgggcaagtgggaggatcacttgagtccagaaggtcaaggctgca

SEQ ID NO: 372482 - DNA, 570 bp, Homo sapiens
ggtcctggagatatcctaactggaagtttaaaacattctctaacctagattttcaaatgatgtgaaagagcgtttctttccctgtactattcttcacatattttaactttcctaggatgttttataacaattcctttaaaagtcatctcttcatttctgtgtaatagttcagatttcataagagaaaagaaccagtaagaggtattttatgaaaaagtttataacaagaaaagtataaaacatattttaattttagttcttagtttgctgtgtgaccttgaacaaatcactttacatatctctatccctatkttttcattttcaatgtaagcctaattttagtttttattgcttacctaatagaaaactcaagctgcttgaaatcttaacaaaaaggatgatgagaataatagaaatgtgctctgaactctttagagaaaataagttgtatagatccaagttagcattttaattacataaaacacaatatggcatagcattaaagaaaatctcttcggacagacagcttggctcagtattctgccctgctctggacaaactggaagactt

SEQ ID NO: 372483 - DNA, 599 bp, Homo sapiens
atattttatgagagtataagaaggaagaagaagaggtggaatatatatatcttatatatatgtgtgtagatatagacatacacacatatatacatatatacatacatatatatgtgtgtatatgtatatgctcctaacttagatgatcttctaagatatgatgacttagatgattttctactaaagattacttacatacatataaggtatattccaccttttatatgcatatgtattacacatacacatatacatatgcatatagaaggtggaatatatatatggtgtacatatatacacatacacatatatatatatacacattagtgtgcatgttgtataaatatataatatacacacacacttatataatatacacacttataccacacatataaacatatatatgtgtatatgtgtaatgagtaaaacagtttttaaacaagaaggagaaataaaaaattgatatgaccaatttttgagcctttattttaatgatcatcaattaaaagccggcatggcaatgcastgctgaagatagatattgaattcccctgtattggtttgccccagtctgggatcaagattgccatcctacc

SEQ ID NO: 372484 - DNA, 575 bp, Homo sapiens
tctattgtatttacaggtctcattcctacatacggggaagagatatatggggtgtgtatacaaggagttggaattttggaggatattttagaattctgcctactacctcatgtttctgaaacatttttaaaatgattttcatgaatataaataaaaaagaagaattttactgttatttcaaatggtaaaatgatataataatttgctatacattattatgcatatggttgaagtattgcctatataatattgttagccaatataattttcataagaattactcattttaccactgaaaaactatttttcacatttcctgtggtaatacagacagtagataatagatagatgatacatagatagatagatgatatctaatagatagatgatacatagataggtgatgtagaccatacttaaactgaaacagacaataattaaagcacctattaacttctatgcaatgtgaytttttaatagggctttcaaatgtttctttctgattgggattcttcgaattttaagaattgtcactagattgtaagtgaaaacatatacatatattaaactgacca

SEQ ID NO: 372485 - DNA, 602 bp, Homo sapiens
gaaaatggaacacttaaaaattgttggtgggaatgtaaattagttcagccacactgggaagcagtttggcaatgtctcaaagattttaaaacagagcagcgatttgacccagcaatcccactactgggtatgtacccaaaagaaaaaaaaawtgttctgccaaaaagacacacatacttctatgttcatcacagtgctatttataatagcaaagacataaaatcaatgcaggtgcttataaacagtggattgaataaagaaaacatggtacatatacactatggaatactacacagccctaaaaagaatgaaatcatgtcttttgcagcaacatggatgcagctggaggccatgatcctaagcaaattaatgcaggaagagaaaactgaacaccacaatattctgacttataagtgggagctaaattttgggtacttatgaacatagagatggggaaaatagaaactgtggactactagggggaggaatggaggaagacatgggttgaaatactacctcttaggtactatgcccactacctggcaaatggaatctgtatgccaaaccttagcatcacacagcatacccatgtaacaaaccta

SEQ ID NO: 372486 - DNA, 602 bp, Homo sapiens
gaaaatggaacacttaaaaattgttggtgggaatgtaaattagttcagccacactgggaagcagtttggcaatgtctcaaagattttaaaacagagcagcgatttgacccagcaatcccactactgggtatgtacccaaaagaaaaaaaaaatgttctgccaaaaagacacacatacttctatgttcatcacagtgctatttataatagcaaagacataaaatcaatgcaggtgcttataaacagtggattgaataaagaaaayatggtacatatacactatggaatactacacagccctaaaaagaatgaaatcatgtcttttgcagcaacatggatgcagctggaggccatgatcctaagcaaattaatgcaggaagagaaaactgaacaccacaatattctgacttataagtgggagctaaattttgggtacttatgaacatagagatggggaaaatagaaactgtggactactagggggaggaatggaggaagacatgggttgaaatactacctcttaggtactatgcccactacctggcaaatggaatctgtatgccaaaccttagcatcacacagcatacccatgtaacaaaccta

SEQ ID NO: 372487 - DNA, 602 bp, Homo sapiens
gaaaatggaacacttaaaaattgttggtgggaatgtaaattagttcagccacactgggaagcagtttggcaatgtctcaaagattttaaaacagagcagcgatttgacccagcaatcccactactgggtatgtacccaaaagaaaaaaaaaatgttctgccaaaaagacacacatacttctatgttcatcacagtgctatttataatagcaaagacataaaatcaatgcaggtgcttataaacagtggattgaataaagaaaacatggtacatatacactatggaatactacacagccctaaaaagaatgaaatcatgtcttttgcagcaacatggatgcagctggaggccatgatcctaagcaaattaatgcaggaagagaaaactgaacaccacaatattctgacttataagtgggagctaaattttgggtacttatgaacatagagatggggaaaatagaaactgtggactactagggggaggaatggaggaagacatgggttgaaatactacctcttaggtactatgcccackacctggcaaatggaatctgtatgccaaaccttagcatcacacagcatacccatgtaacaaaccta

SEQ ID NO: 372488 - DNA, 440 bp, Homo sapiens
tttatttatatgactatttatagtcctcaccgtaagagacaaaaaaatggactttctagggaaacataattggacttycgttcttccaggaaattttgagagtccacctcaggctgctgattaaaaacccaaagtgaaattttcagacctggttgtgtaacttttctccaggcaaaattagctctctgggtgcaggtgatgaagaggtagataacgatagctgaataaatttctgaaaatactgtatgttaaatatttttgcctagaggcaaaagaaggccaagtaatccagattgcgaggatcaaagatgtcttccaaaaactcctttcagcaaaggagagtttgaagaagtaagacatggtattccagccagagaagtgtgcatatgtctagatccaggcatatgaaacagcacggcacatcaaggatctgtaaagaa

SEQ ID NO: 372489 - DNA, 566 bp, Homo sapiens
ttattttagtatgtcatatttttattgaggaaaatatctgtggttaactaataaatacacaaagctaatcagatgggtctataatgtttaatgaacaataacaatagtaataatggctgctattaagggttcttaatttatgctaataccagtgtaggtaacttggaataaattaactcatttactcttcagattctataaaatggtaatattaaccccattcagccagggcaagcaaggctagatattaatctcattctcaatgattctcaaactcaacttcttaaaggctctgctttacatttcscttgtaggaaaagcagaatatttgcagctagtgaactataagggtaggtctccccatctgtcattacagtacatctgctaacttttcttaccattttacattgcatctcaggcaggcacacaaatattaggagagtatagttctcaaaaccatttagccacttatttattcattcaatggatatatattgagtacccactatattccagatattgttttgttttaggtgctgaatagaagaacatatgaaatgtgcata

SEQ ID NO: 372490 - DNA, 560 bp, Homo sapiens
ggtttgatagtgaaatgtgcacgaaagaataatagagaaattctaaggcttttatgttttttgcaaattgaggtaagacttttgttattcaatttgcattcaactcaggtcaagaaatatcagtattctcttagtgcataatttgataattaccaacatgggatgaatcaactctaaaaaataaatttatatttatattttggatatactttgaaratttcaagcaatagagaaatgctgttaattaatggctaccatattaaaagtacttgctatttcaccataattctaatttgtatttcatatgcattaaaacatttaatattcccccaaaaaaacatgaaataggtattcagttgctctctatttactgaagacttccaatgccatattttaagtttattttagatgagaaaaaatatgcttaagaggttcagcacttgcttaagatcacatggtaaataagtaatacagccaggattttagaataagactttttgcttccagtactatgtaattttcacaacatagcaacactgtcttccactaccatctggtat

SEQ ID NO: 372491 - DNA, 560 bp, Homo sapiens
ggtttgatagtgaaatgtgcacgaaagaataatagagaaattctaaggcttttatgttttttgcaaattgaggtaagacttttgttattcaatttgcattcaactcaggtcaagaaatatcagtattctcttagtgcataatttgataattaccaacatgggatgaatcaactctaaaaaataaatttatatttatattttggatatactttgaaaatttcaagcaatagagaaatgctgttaattaatggctaccatattaaaagtacttgctatttcaccataattctaatttgtatttcatatgcattaaaacatttaatattcccccaaaaaaacatgaaataggtattcagttgctctctatttactgaagacttccaatgccatattttaagtttattttagatgagaaaaaatatgcttaagaggttcagcacttgcttaagatcacatggtaaataagtaatacagccaggattttagaataagactttttgcttccagyactatgtaattttcacaacatagcaacactgtcttccactaccatctggtat

SEQ ID NO: 372492 - DNA, 543 bp, Homo sapiens
taaattgttgggaatagattttaatactacatgtttatggtgttacacattatttgttcccacaaggaaagttaaatccacaaataatttgaagtcacatttagaaggaagttattcatccagaattgatttccaatttgaaaaatattatcaaaagtcatgttaaaacaactggtcttatcactgaatatgagccctacagatgccaaatttaactttccaattttggctaaaagttggtgtgaacagatatatcagtttctttgaaaagtcttattaacttgttgttcaattatgattattaatcacacttttccacattcataagttaaataagayagttatgtgatctgatacattatatggtcatctgaattaagtagaaccactgtcaccacaacttaacaactatgatgtgccaagaggtttcatagactttatagtctgattaggcctaagagctggcttttagtatttactatctgttattgaaactgcttccttgactggtatatctaacagtttggtcagataacttcatcc

SEQ ID NO: 372493 - DNA, 543 bp, Homo sapiens
taaattgttgggaatagattttaatactacatgtttatggtgttacacattatttgttcccacaaggaaagttaaatccacaaataatttgaagtcacatttagaaggaagttattcatccagaattgatttccaatttgaaaaatattatcaaaagtcatgttaaaacaactggtcttatcactgaatatgagccctacagatgccaaatttaactttccaattttggctaaaagttggtgtgaacagatatatcagtttctttgaaaagtcttattaacttgttgttcaattatgattattaatcacacttttccacattcataagttaaataagacagttatgtgatctgatacattatatggtcatctgaattaagtagaaccactgtcaccacaacttaacaactatgatgtgccaagaggtttcatagactttatagtctgattaggcctaagagctggcttttagwatttactatctgttattgaaactgcttccttgactggtatatctaacagtttggtcagataacttcatcc

SEQ ID NO: 372494 - DNA, 528 bp, Homo sapiens
atttcttctacatgttcacattaagttgactttctactctaatttagaatattgtaaatttttgtattgktctgtgtttttatagatattttggagaaaaaactacttgcaccaaatgaaataatgagaggctattttaaatcaaaatatcagagatattttaaatactaaattttaaaagttactaatatttttctattttttatttattacactttaagttcagggatatgtgtgcagaacgtgcggtttgttacataggtatgtatgtgccgtggtggtttgctgcacccatcaacctgttatctaggttttaagcccctcacgcattaggtatttgtcctaatgctctccctccccttgccccccactccctgacaggcctcagtgtgtaatgttcccctccctgtgtccacgtgttctcattgttcatctcccacttatgagtgagaacttgtggtgtttggttttctgttcctgtgttagtttgctaagaatgacggtttccaccttcatccatgtcactgc

SEQ ID NO: 372495 - DNA, 601 bp, Homo sapiens
tatatcattattcacatgtgaagcccatagagtgtacaatatcaagagtgaactctaacgtaaatgatggactttgaataatgctgcatcaatataggtttattgattataacaaatgtaccactctgattagggatgttgataatgtgggaggctactaatgtgtggggtcagggaatatatgggaaatctctgtaacttcctctcaattttgctctgagtttaaaaatgctctaaaaatgtttattaaaaaattaggaaagtaacactttctaaaatggattttattattataaaaacagattcttttaaaaatttatttattctggaacttgtctacatatgttaccaagtttaattataacagtcttggtctgccttttaaaatatttgttatatttttcaattttgtacagatagtttaaaaacaatataggcwacccaatatgttgaactaaaaattacattctcttcttactgaacctttaaattttgtttacaacttcctatttcaggcaatatttctacaacagcatcttttgcttttggtgagttttattccaaatacatatgtacctcagagatattgtggagttggttc

SEQ ID NO: 372496 - DNA, 601 bp, Homo sapiens
tatatcattattcacatgtgaagcccatagagtgtacaatatcaagagtgaactctaacgtaaatgatggactttgaataatgctgcatcaatataggtttattgattataacaaatgtaccactctgattagggatgttgataatgtgggaggctactaatgtgtggggtcagggaatatatgggaaatctctgtaacttcctctcaattttgctctgagtttaaaaatgctctaaaaatgtttattaaaaaattaggaaagtaacactttctaaaatggattttattattataaaaacagattcttttaaaaatttatttattctggaacttgtctacatatgttaccaagtttaattataacagtcttggtctgccttttaaaatatttgttatatttttcaattttgtacagatagtttaaaaacaatataggctacccaatatgttgaactraaaattacattctcttcttactgaacctttaaattttgtttacaacttcctatttcaggcaatatttctacaacagcatcttttgcttttggtgagttttattccaaatacatatgtacctcagagatattgtggagttggttc

SEQ ID NO: 372497 - DNA, 658 bp, Homo sapiens
tgatcctcaacaatgagaatttatattgtccaataagtatgtatactatatatgcatttaaaatctcccttcccccaagtttttattttggagatatagtctataaatgagcaattaagaaaccatctaaacaagtcaggaagtaactgcatgtcaagaagttatttgtgaattactctccaacatgtttgttttacaaattaacattaaatcttcaaataacaataggttggtgtgattttctgtgaagcaaacatgaagctctaagtgtttaaccatgttaagggctgcttttctatttacataatgatatatcatgtttatcttattcacactctaaaaacattagtaaccattcataaatggagctctgataaaagaatacttcatttcagaaycactagtctatgttaataccattttggtcagggtcttgttatagctgttaggatttcaacccctgtaggtcagagaaagaagataggaaaatccttaataaaatgttgttagaagctacaggtgggaaataaagaagctcttgcgacctataatcttattccctcataaagtcaccaagagagcacagcagcttctgcagttgaaattagacaacacactagtggcttttcaatcttaacttttacagttcgatgttatc

SEQ ID NO: 372498 - DNA, 555 bp, Homo sapiens
ttgcgacctataatcttattccctcataaagtcaccaagagagcacagcagcttctgcagttgaaattagacaacacactagtggcttttcaatcttaacttttacagttcgatgttatcattttcagtgaagaacaaatgaaggatacagcagcactgccaagatgctctctctgggtttaatcagtccactcaaccacatgagtaactctgccttaacagtattttattcccatttataaacaatgcagacgttttgctggtctgttcataaacaacagattctcaacatgctttatttgggttttatctatttctatgccaaatacatctaaagaaaaaaatttccttttaaacatttcttattaggtcagatcaaccttgtaacaggagttgtcatgagatcataaaacctacagaagaaatcagcccagrtaaagtgcagagtctctctaatatatggtcccactatattggcactgtgtaaaaatccatattaaaaaaaagtcctgtaaagggctacaggcaagggcttgggcaaataataatgttgat

SEQ ID NO: 372499 - DNA, 625 bp, Homo sapiens
agactgtaggcggtaaagttttaactttaaagaaggggttctctgtttctgttttcaagttaaaaataatgaaaggaaaacacactgaaattcccacattattaaataaaacatttaagtggccaagggccaatcattgtcacgccatgaacaaatgccttacggtaatatgttccataactgtttgctaaaaactaccaattttaacacatttgcacatgattagacaccataaaaakttgcttattgaagccagtgtcataacactgttactcatgcccaaggggagggaagcttcaacgcaaacctgaacaagaaaggtggtgggaaataagttccacgttgtgaaaacagatcataagtagatttgccaaatggctgactccattcgatggtcacaagttcataacatcaccatcacaagactgtgcagagctaaaaaaaagttttaactgaggagcttttctaagcaattaaaatatgcaaaagtggatgattaaaattaaatgtttgagagatctgtttgaccttacacatttccatatttggaaaataaatgctttatggaaagagaaaatttaggtttgtttaatgcatgtgagctctcccctaccaaaaaaagaaa

SEQ ID NO: 372500 - DNA, 560 bp, Homo sapiens
tacatttcctattaaaaaggtgaagtgtaaagtagattctgaaaagctaatccctataatttaagcccttatttgttccacatgaactaacttccagattgttactgaaacaaattttcttttatttgtgtattcaaataagcatgattcacttaaaaagcagtcccaccgaaccacatttgcatatcctaattagttgagcatgttcattttccattcacatgtttttcaaataaatgcttttgaagaatagtaaaacttaactaacatctgaggctgcaagttcacaaaaaaagaaaaaaaagagctgacacacacactagctaaaaaaaggcaaggatttcaatgtgtggcacagaggatgtggatttgattcgtgtttcataatggaggttgggatgtgtgtagtatgtaccaggatgtgggtggcttcagggccaactcatccatgtatttgtataaccaacaaagrgtggaaattaagtgccattgtaatcttctaatgcatagtaagagttgatcaatttttgaaaaatattttttactctaaaataagctaa

SEQ ID NO: 372501 - DNA, 520 bp, Homo sapiens
acctggtaaggtcatttgtggaaagactaactgatgtgtaacacaaggtgaaaactcaagggagaaactgatttatgatcaatggtttgactgtatatgtgtatgtgttggggtggtagattagagtactcggtatgtgttttttacatatcatatttagcacttactaattgtgtagtatttatgcaaacacccataaggaataaggaagggtaggaatgtcaagatattaatgaggyggaattattcattttaattaaagacagtgcttttgtccatgttaatgaagtagcacacgaagttctagtgaatacaaaacttaaacagaaagcagacataactatactcggaatgtacaatttgtcataagaagcaaacatacgcaagaataattattagaagtcatcttttgctctttggactgtcttttcaaagccaaatctgtgtttgtcagtagaaaatgcctggacttgtagactcgaccttcacctgtgacttcatctgcttttccactttaaat

SEQ ID NO: 372502 - DNA, 620 bp, Homo sapiens
tatgcaaacacccataaggaataaggaagggtaggaatgtcaagatattaatgaggtggaattattcattttaattaaagacagtgcttttgtccatgttaatgaagtagcacacgaagttctagtgaatacaaaacttaaacagaaagcagacataactatactcggaatgtacaatttgtcataagaagcaaacatacgcaagaataattattagaagtcatcttttgctctttggactgtcttttcaaagccaaatctgtgtttgtcagtagaaaatgcctggacttgtagactcgaccttcacctgtgacttcatctgcttttccactttaaattctttgtttttaatgtcttattttcacatatttttgtgagatattttaaatcttctttgaatcaaggtataaaaccaagacttaaatatatatggggaattcttaactataaaacttatacaattaaatctatgttttaggaagataattctggcaggacaggggtgtgtggattagaacagggagacaggggactttgggatgccaatgccatggcrcagatgaaacacaatgaggacttcacattgaacaaggacagtaacacttgaatgaaagagaaac

SEQ ID NO: 372503 - DNA, 643 bp, Homo sapiens
attttaataaatagttttcccagagctttttatttgtgggaatattagtccagtaaaagcttttctatcactaccggaaactaaacatgggccaatgacttataaacccactcctgtgaatcacaaggatgcagaaaagctatgtcactgtctgagaagagggtgttcttctttctatttatatatgtgtagctttaaatgaaacaatttcacatatttgtaatttattttaatactctwcttgaagaaaatagttcactacttggaagtcacctttccaatctcgtgacaatattattttttaaaatctgatttttctatttaagtatgtttataaaggtcatattatgacacaaactgtgagaacattgctcactcactctacacttaggctatccaacaatgttggtgatccatgcttggatctaaatgcttgagccttattagaacatcttggagttatcaaggccaatgacaaaaattcacagtgagccacacagagtggtgggtgggagtatacttcaaactgtagaatgactttatcagacagtttaaattctcaatgtgtgtatagcagagcatcaaatatttacgtaagaacttttttaattttttattttctggaatgatgttgtttgtgctt

SEQ ID NO: 372504 - DNA, 568 bp, Homo sapiens
tcttgtgtttgttctttctcatatttgtgggatgatgtttctttagtctttgaggttgctgacctttggatttttttttttaaatcctgttgatgtctttaggggtttgattgtgatataaagtggattcagctgactggatttatttctagaaggttttaaggggcctacactcagcttccaagtcctgactgtgtactataactctggaggacttgtattgggcctgaacttttttctckggcttttcgaggttaggaatccactgcactggggtgcccaaggtactctcaggcctctggtcactacactacaatgggtggtttagcgaaagcctttgacagtgtggtggaaataggtttggtccttggtagcatgtgccagcagcagcacgagcagcagcatggcagggtgcaggctcatttgttgcagcagggtgctaatgggtgccagggccagggtgcctgattccatgcaggtattcaccacagtggccgagacagcacagctgtgggggtggctctttggtgactatgtgtgccaccgtgctggtggtggtgttagcaaa

SEQ ID NO: 372505 - DNA, 605 bp, Homo sapiens
acatgactgtatttggatgtaagatctttgaagtgtgagttaagttaaaatggggcctggagggtacgccctaatccaatatgactggtttcctataagaaaaagaagagrcaccagaaatgtgcacacagaggaaaggacacaggaagatggcatctgtctgcaagccaaggagaggggtcttgcaggagaaaccaaacctgccaccctgttgattttggatttctacccttcaaaactgtgcaaaaataaatttctcttgtttaattcacctagcctgtggaattttgttatggcatccctagcaaactaatacagagggttagagaggttaggttccatatccaaggttgcccataacttattgggcataaatgtattagttatatgacataactatattgaacatgccctaagactagaactcctgggttgaatgtgaactccaaggcttttcttcccttggataaggggaccaagagaatatgcactgctaaaacttggcttgtctgacatataaaagcagggagtaatgtcaggctgttatgtgagcagaatgaagcaaaggccttctaaggagttaagaacctcatatcactcatttt

SEQ ID NO: 372506 - DNA, 443 bp, Homo sapiens
taaggaatttggctaaatactgaaaagctcctttaattattatgacattttaaattaattgtatatttccaactgtattttccagttgtgcrtataattattgttatgttaaacagtatttatacttaaatgtttaatagtttatgtaagtgactgaaattagtagtgttttacagccaaaccaaattcatctttaattgttatcttctcacaacctcaccattggcaattcctttgatgcaatgtgcagtttaattacaatcaccctatatcatgtgagatgcattaaatggcagaggccttgaatttaaccctgaaacgggcaggaatttccttttcaggggctcttccttctgagccctgagtccctgtgctctatcaccatagctgtgcatcccacctggtgttctctctccctctttttaatttttaatttttatggg

SEQ ID NO: 372507 - DNA, 443 bp, Homo sapiens
taaggaatttggctaaatactgaaaagctcctttaattattatgacattttaaattaattgtatatttccaactgtattttccagttgtgcatataattattgttatgttaaacagtatttatacttaaatgtttaatagtttatgtaagtgactgaaattagtagtgttttacagccaaaccaaattcatctttaattgttrtcttctcacaacctcaccattggcaattcctttgatgcaatgtgcagtttaattacaatcaccctatatcatgtgagatgcattaaatggcagaggccttgaatttaaccctgaaacgggcaggaatttccttttcaggggctcttccttctgagccctgagtccctgtgctctatcaccatagctgtgcatcccacctggtgttctctctccctctttttaatttttaatttttatggg

SEQ ID NO: 372508 - DNA, 590 bp, Homo sapiens
gaaagccatatttgggagagaggagacaaatctcaggttctaagcaaggtgggaaataggattaaagactgaaagctggctctcctaaaaggtgacatcttctgtgaaaaaaggaaataggaactaaagtgcccctcaagagcagtccagtaaatacaattacccttgggatggtgggaaggataaatttctcctgaaagattcataacagtgagttactcccactggatttaagtctagaattcccattgcttatataagctgagaaatcctaagctgataattcaaaatattctgggttacactgtgtctccaggtgcctggtaagggcaaacacaaactctcctgaaggcatgcaccttgattccaagcctcaaaaaattcctaagatataatttcaattaatataggctcaaaaataaaaatcacaaaataaaggaggaaacaagatgtcayggggaggtggggggtaatcaaaagaaacatcaagaatcaggcctgtagaaacttcaggtattagtgatgttgagtataaaatataaaagaggtattgaaagtataagaaactatcaagccgatttttaaaaaag

SEQ ID NO: 372509 - DNA, 616 bp, Homo sapiens
gaatacctgcttacctttgtgtggacaccctgatagtaccctctctcccttttaaaatagatcatgattcaacaatgtagtatgtcagtcaagtctgatgttttaggcaaggtttataaatatctgtgatgatggaaggattttctaaaagaaaatctatttctgtgttcaagcttactccagctggttctgtattcacttctgtttagtactttttctcttattcttattctcatcatttactgaaaaataacctattctaagactagagatcgaaagtgggaaagaaaacaggatttctttttcagaattgcatataacacataaataaatggtagcagtatacattttcccagtgcctcagtttcctattggcaaaatgagttcaatggtattaaccacctacctcaaagacttattgggaggattgattaggtaattacagagccctttgattttgtccaatatascttaagagtcaactaacgatttaaaagtctatctctaggtgtgtttcatagccctagtctggcttcacttacagtcatagagctagagttgtattcagtgggaggttttactgattttcatcaaaattaaaacaattagcttaata

SEQ ID NO: 372510 - DNA, 527 bp, Homo sapiens
ccaacataagtggcggacagggttgacactgcggcatgtgaggtggccacaaaaccttctgtaagcaggagtttgaatgccaaattgcacccataagaagagaagccctaaggaggccctgtatatagttagttatatgtttataaaaatagccttgcttatcactccacagatgaatcagcagttgtcttgcacagttaaaaatggagcataatttcctttcaagagtgaggactaaaatccaaactaattttatttcaatattgaaatgtcataattaagtttcttttcacacaaagcagccgagaatgcaaagaaagcatatgagtcgagatccatctcttctgaggagcctagttaactgttccctcatccttgctccaggtagagagcttatttcagtaaayctgttcatttcatgttctactggggggagaaaaacaaaacaaaacaaaaaaaccacattttactctgcagacattaatttctaggaaataattcctaggaattaatactgtgaggaagct

SEQ ID NO: 372511 - DNA, 325 bp, Homo sapiens
ctatagttaacaatgtattttatatttctaagtawctagaataggggacttgaattgttccaatatatagaaatgataaatactcaaagggatgagcacttgataatttgataattgataactacacattctatgcatgtaacaaaatatcacatgtaccctacaaagatgtaaaattttatgtatccattaaaaaatgataaaatatcatgctatagacctccatcattacacttaccagttgtattgtctgtcttcctctcagaagatagattacttttgtttattcaacaaatgcatttattggatgccagtttttctcatg

SEQ ID NO: 372512 - DNA, 605 bp, Homo sapiens
atgagtaataggctaaaagaaatcaagaataccacggtcaagaaaaagaagggaagattgattttagtttaaatagggtggtaagtggtcattgagaggctgagatttaagcagacttgaaggaggtgagggtgggtcatgcagatactggggagtgggcttgtcttgcctgggagagagtaaaaaagaygagctcagcaactgaacagagggctggaccatgtaggatgttaaagaccttggcataggatttagctttgaaatgagaagctagggcagggtgttgagcagagaaggggtgcaacttgacctatgttataaaaaggtctccctagttacaatactaagaacagactgtaggggcaagtgtgggatcagaaaaacaatttagaaggccattgcaacaatcaaggtaggaggaataaatggaaagattgtagaagaaaggaaaaaagagagaaaggaatcagagtacaggagaaagcaagagattgtgaagagaagacattagggaatgaaaaataaaagcagaactccctgttcagactctgagccagttgctaacccattagtatggtattccatcagctgcaaactcagcagtg

SEQ ID NO: 372513 - DNA, 550 bp, Homo sapiens
tttaatcacagatatcacaattccagattgtgtgaactaaagcaaattgtttaatctctctggacctcaggatcttcatctttaagatgggaataataatgtactactcctaaggttgatgtgaagataaaatgagttgacacatgtaagtagtgctaagaacgtagaaaatgcttgataaaattaattctggtyccagagcatttaccatatacgagacaatatactgtttttgcatgtcttatttaattctctcaacaacctttgaagtagaaccaattattttctctccagtttactgatgagaaaactaaggctcagagttacttatcagagtcaggctctgagttaactgagtcaattaattacttaacccccattcacatagcacagaagtgattaggctgtaattcaaacccgagcagccagattccagagcctgtctattatccagtttgagtttacttcttcccaagggccattacaaatcctgcctaatttgtcgagcttttcttgaccactaggtgcttcaatgttctatagcatttat

SEQ ID NO: 372514 - DNA, 550 bp, Homo sapiens
tttaatcacagatatcacaattccagattgtgtgaactaaagcaaattgtttaatctctctggacctcaggatcttcatctttaagatgggaataataatgtactactcctaaggttgatgtgaagataaaatgagttgacacatgtaagtagtgctaagaacgtagaaaatgcttgataaaattaattctggttccagagcatttaccatatacgagacaatatactgtttttgcatgtcttatttaattctctcaacaacctttgaagtagaaccaattattttctctccagtttactgatgagaaaactaaggctcagagttacttatcagagtcaggctctgagttaactgagtcaattaattacttaacccccattcacatagcacagaagtgattaggctgtaattcaaacccgagcagccagattccagagcctgtctattatccagtttgagtttacttcttcccaagggccattacaaatcctscctaatttgtcgagcttttcttgaccactaggtgcttcaatgttctatagcatttat

SEQ ID NO: 372515 - DNA, 550 bp, Homo sapiens
tttaatcacagatatcacaattccagattgtgtgaactaaagcaaattgtttaatctctctggacctcaggatcttcatctttaagatgggaataataatgtactactcctaaggttgatgtgaagataaaatgagttgacacatgtaagtagtgctaagaacgtagaaaatgcttgataaaattaattctggttccagagcatttaccatatacgagacaatatactgtttttgcatgtcttatttaattctctcaacaacctttgaagtagaaccaattattttctctccagtttactgatgagaaaactaaggctcagagttacttatcagagtcaggctctgagttaactgagtcaattaattacttaacccccattcacatagcacagaagtgattaggctgtaattcaaacccgagcagccagattccagagcctgtctattatccagtttgagtttacttcttcccaagggccattacaaatcctgyctaatttgtcgagcttttcttgaccactaggtgcttcaatgttctatagcatttat

SEQ ID NO: 372516 - DNA, 586 bp, Homo sapiens
attccgaaagtcttgttctgatcccctctccttgcccaccttgactaattttcactgccttttatttctaatttcatttctggcattttgacacacatacagatttgggggatgaatcaatctcaggagaagggctttataatactaaacttttctacagaattctactaaatgaaggctatttgcatgtgaaataaaaaatcacaggtatgcctggaccttaacctttctggcatgtttaatattatcattacctgggtgaaactgaagactctctataaccakcagacatttagcaaaatgtgaatttattcacccattcacccattgattcatttattcatccaacatacactaagcatttaccatgtgcctagttgtctgatgagtgctggagagattattactaagatttcctcctcttttcaaaaagctggctagacaactaacatctcaaacacagtcgtttgtttgttttaatactagaggtaagcatcggcacctgtgaaaacacaaaggaaagtcccttaaaccagaatgaatctgtcccaactgcaaatattgggaatgtgatagtagtttttga

SEQ ID NO: 372517 - DNA, 566 bp, Homo sapiens
ctaagaatatgtttatagacttatttacaaatccaccaatacttattgagtgtctactgtgtactaggtgctggggatacagtggtgcctaagtcagacccatctcctgtgctcatagatcttgaggggtctacacatgtatagtcaaatgtctataggaaattgtccaaagcctcgactctcaaatatttttaatacagaaggatggaatttacacatctaatttccaccttgaaaagaacaataatgcatagcagaaataccaagtgaaagtagaaattytaccttaattctagctaccttctcattcattcactttctgcctatgctagcaaagagaaaaaaaaaaaaaaaaaagacagagagagggagagaagccactggcttgcatctcaaatttcttttgttgatttgtgtcataatcttaatgttatttaacctttgctttttacacttaatagatatgagtgttctgataaatgtaataaaaacagtcagtaacatgccaaagcctgtccataatggactaacttgaggtgctggaaaataagggaccctgcttgcta

SEQ ID NO: 372518 - DNA, 525 bp, Homo sapiens
ttactgaagccagaatttgaactcaggtggtctagcttctgagtcagtgctctttattgccatacttcactgtatttacagctcacatttttaaggtggcatttataagctgtaataaagtcgtctgttttcytgtttaccccggtagaccgtgagtttctgcagggcagtgaccatgttagttgtgtttatactcttgcatataacccaaagtcaggcatatagacattcaataaataactttcaataactaagtaagggtttgaatttaaatcctgaaactttaagtccagttttttattttctctctatcacattagtcacattcattttatgtggcttttcgtcttactattataaatgagttctggaaatgcatcggctctattagttgaaatagtagtggagacatttattgaagaagactactatttcatttcaattatttcctttaatgttacaataattatgattcaaaaaggaatgctaatttcatgagatcttgttgtgcatgttaaaatgtag

SEQ ID NO: 372519 - DNA, 588 bp, Homo sapiens
gagggaaggaaggtggttaggtagtgataatatggcaggtcaactgtgtatggaaagtggccagagatgtggcttggcttccccaagccctcctaggcttccctgagacctgagtgcattactctgcccatttaaaccccttggcaatccagttgggaagttctgaagaaattaggagagccttgattgagcagctaagacatagagcaagaggaagtttggtggcttttcacaacccgaggcttaggctcaagttcttgttctatcacttacttgttggatgactaaagcaagttatttcaaattccttttgcttccgtttcctcctttatgtaaaatgttacctgcaggatcctacaagggatcttgtcaagcttaaaattagatatgctgtgtacatagcttttactgcagtgtcaactcttgacagattatttcktcttcacatcctcccaacctccctaactgcaatttaaaatatacatatacatataaatatatatttttgtatatattatacatatgtaattagtatatatataatttaatatatattatacatgtatatattatatataaatatatttt

SEQ ID NO: 372520 - DNA, 569 bp, Homo sapiens
tatgtaagaaatatcataagagcatgtgaaaataatactatttttatgttcctcctgaggtaaatttgcatatattcttctataatgtaagaaagaagggaggaggtgagagaaaaggaaggaaaagagaagggaagaagagagatttgtcaatacaaataagttggagaagaagtatttgctgcatattcttattaagaactaaaacactttttaggaacacagaatatctaaggacttttttgcttttattctttatttaaaaaatgaataacatagatccctctaagaaactgtttaaactaatrttccttatcctcaaacacatataattatctaaggcaatagcctatggataggaaaggaaaatacatattataaatcccatttgcaccttagaataaacaggcaaagtccatgcatttcaacaaatatttttaaaaaatataatatatgtttgaagctgtactaagtagctatgcaaaccacagatacaatagtgtgtgcatcgtgcattttcagtgggggccataccacccccaagtaggcaaaaatcggttggcaaagtg

SEQ ID NO: 372521 - DNA, 498 bp, Homo sapiens
gcctcagatctttatcacctttttcactttttgaagtcaacgttttattaacacattaagtacctatctttagcctgaggtaataatgatgactgctttgaaatagtaacctcaattagaataaaaaagtgaatatgccatttacattgtttttcaaaaatctgcaaatttcagttttagacagtggctcttattaggtagtattaaatgcatgcctacctatgcaacacgagacaaaaacctctttaaaatcaaacctaaaatgaccaggttgatagtataaaaaaaatatatatatatatatwtttttttttaatttgagacgaagtctcgctctgtcacccaggctggagttcagtggtgcgatctcagctcactgcaatctccgccatattaatagtgtagtgtcaaacaacctcctttctgtcatgtaagtcccagtatatatagatactaggcaacctctgaatcagtatttaaaagaagtgtataaagacc

SEQ ID NO: 372522 - DNA, 548 bp, Homo sapiens
atgctaaattttgtaagatactattacactagattgtttctgttattgttcagatagataaaatagctagaattaccaagtaaaaatatgtacctgtgtcccttatagtttctaatatttatgaagtaacacaagcacagcctggagtatgtgtcatactggtaaataatagagtagatacttttcagaaataggaacaaattttatagttctaactcaaatattttaccattcatatgtacttacaataatatattytacagtgttggtcctgaagctgaaagtagaatttgaggcattttgccaacacctaatttgcaacagagattgtaatgcaaatttcttacagattcccaaatgaaacctatagcttctcattaagtttcttttgcatttggtgaatattttacgaaatcacaacatagataaaacttcataatcacctttcagatggaatcagaaagaagctcccattatcttttttaaaaagtccttaatgattatgtgaatggtagcagaatcagataaaatgttatcaactgtatctt

SEQ ID NO: 372523 - DNA, 631 bp, Homo sapiens
tattttaccattcatatgtacttacaataatatattctacagtgttggtcctgaagctgaaagtagaatttgaggcattttgccaacacctaatttgcaacagagattgtaatgcaaatttcttacagattcccaaatgaaacctatagcttctcattaagtttcttttgcatttggtgaatattttacgaaatcacaacatagataaaacttcataatcacctttcagatggaatcagaaagaagctcccattrtcttttttaaaaagtccttaatgattatgtgaatggtagcagaatcagataaaatgttatcaactgtatcttacctctctcactgaagtcatctactagaatgatttctgctatcagactccctggggttcggttaattatactgtgtatggtccgcaggagtgaagtccaaccttcattatgaaatgggataatgatgctggtgtttggcagcctttccagatacatcttatgcttacagctggagatgagggaaaagaaaatggtgtgtcaaatgcaaaactcttgtatatcttattctgttgtttattcattatgttatcagacaactgtggaaacacgacttagtctaatactttccaaccagagtttgtac

SEQ ID NO: 372524 - DNA, 631 bp, Homo sapiens
tattttaccattcatatgtacttacaataatatattctacagtgttggtcctgaagctgaaagtagaatttgaggcattttgccaacacctaatttgcaacagagattgtaatgcaaatttcttacagattcccaaatgaaacctatagcttctcattaagtttcttttgcatttggtgaatattttacgaaatcacaacatagataaaacttcataatcacctttcagatggaatcagaaagaagctcccattatcttttttaaaaagtccttaatgattatgtgaatggtagcagaatcagataaaatgttatcaactgtatcttacctctctcactgaagtcatctactagaatgatttctgctatcagactccctggggttcggttaattatactgtgtatggtccgcaggagtgaagtccaaccttcattatgaaatgggataatgatgctggtgtttggcagcctttccagatacatcttatgcttacagctggagatgagggaaaagaaaatggtgtgtcaaatrcaaaactcttgtatatcttattctgttgtttattcattatgttatcagacaactgtggaaacacgacttagtctaatactttccaaccagagtttgtac

SEQ ID NO: 372525 - DNA, 571 bp, Homo sapiens
gaaggagggtctctgctcactgtgcttagcagaaatagccaacatcttgatcactgtcaatcattgtggtagatataaatgagaacactgatgggtatcaagctagtaattagatgatgtatccctaaaatggcacattgctgtctgcttacagctcattggtcagaactagtcatgcagcccaggggcctagaatgtgcagtctcatattgtacagaaggaatagagtcagaaacatttggcaaatgacactagcgaaatcaatcattttagtcttctgccttctttagaacaaaacaagaaaagaacattttacttgttggacaaaatttaatggaaaaatgaaagagattcaatttcttcacagatgaaaaacagaatatttacagtcccacatccatagaagcatgacaacagaggatattagagctgcaaccacatttaagaaatcatccagttaagccccccatttaattgagaattgaracagagttttagagagttaaacataaattattttacaatctaattggaaaggcattgtactgggtaaaaaagtgatacaatgatg

SEQ ID NO: 372526 - DNA, 605 bp, Homo sapiens
ggctttgttgcagtggatattttgagagtgacccttgccaggattgtgccagctcataggagctctagcttctcaggtcattttaaatgacaattagttttgagaatgtcaaaakagtaggttttgaaaagatctcagttctgtaattctcacatatgttctttccaaaataattgttgtcattaagaaaataaatgtaatatgagaaaaataccattttataatgccaggtagaaaggtaaattgccataattaccagataacatgaagtaggaaaataatagtcaaaacactacgatattttcaaatgtgaggaggagctgatccctgaaagagaagctcattatagaaggtcacttggactgtagttaggacacaattaaacaatgatgaggagttgatcataatacaactgcataatgagagaatgagcattcaaaagaacgcaacaaaacatagtgggaaaatgtcttaatttttctccagtaacaaactttacttctttacaattaattttgatttttgaattttaactagtggttggaagaaaacacatcaaaaacaatgaaatgaaacacatacagaaggattttttttttcagagc

SEQ ID NO: 372527 - DNA, 641 bp, Homo sapiens
ggcatcttgacagatttttttttataatttatttttttcgaggtggagttttgctcttgttgcccaggctggagtgcaatggcacagtcttggctcaccacaacctctgcctcctgggttaaagtgattctcctgcctcagtctcccragtagctgggattacaggcatgtgtcaccatgcctggctaattttgtatttttagtagagacggtgtttctccatgttggtcaggcaggtctcgaactaacgacctcaggtgatctgcccacctcaacctcccaaagtgctaggattacaggcatgagccactgcacccggccaacagaatttttttaactaagttaatgtgaagattctacaatatatttatctatcaattaaaaattatgtgagaccttatattactagaattcagaaattgtgaagtttactaggttgtttgctatatataatgaaagatgtttgtactaaaaatatacctaaaaaaatcaaaataagagaataccaaaatacatttatatatgatagtcctttttttaaaactgcgtcaatgtaataactgaaaggtagtttgctcaagtttgcagtgcattgtgacagtgtaagtcttttctatcattaaagattcagtatgaacaca

SEQ ID NO: 372528 - DNA, 585 bp, Homo sapiens
tttaaaactgcgtcaatgtaataactgaaaggtagtttgctcaagtttgcagtgcattgtgacagtgtaagtcttttctatcattaaagattcagtatgaacacattgatgcaacctgtctgatactgaaagaaggggcacatggcagtctgagtgcagagagaacacagtggtctccttcaatcctcacattatcactgtttctgattgtttatgtttattcataggtaataatgtcttttatctcaattataattttaatttggagctaagataggtaaactccaaaacatatttttaataatattgtgtattctataattattaagggtgtttcctttcattttcaaaagtgtcttagtttgcatgataaattatattgtcaccttagaccaggggttcttggacagagacatgacaatctggtaaaatttatgawcccttttgagaataatgttttgtgattacaaagagaagaaaacagaatagagttatcaaactattttaaaaagtcaatttgtgaagcagtagtcattgtgctcctttgccaactcattaaataacaagatctagggatagttaata

SEQ ID NO: 372529 - DNA, 575 bp, Homo sapiens
aaatacaggaagatataggaattctgttggattcctttaggaagtttttttgtttgttttacactttaaatttacttttagaaatacatcccaatttcatttctgttcagtatttgcactatttaccacctttgcactattaactttttcagatactctacaagatcctttggccaaaagcactaaactttaacaagacttaatcaaatattattcccttatattttacatcctccaggtcaatagaacagctatacatgaacaaaaatacaagaaagccaatattttagacatgtcattagcatgagccacttgctgattacttagaatkcatatttacaacaaatataagtatatagtaattgttaaattctgtaatagtgggtttcatatcaataaagtaaaatactaaaatattagataatcacagaataatgctaactattaccaagtgatttagaaaaatctgcttaaataagattgacctagttctcaaaatgctttaaaaaaagtgcatattccatcttgcagttctcagtttagacattttcctaaagcaagcttggtaacagaat

SEQ ID NO: 372530 - DNA, 463 bp, Homo sapiens
tctaatctctttggaagaactgtaattctcatttcaatattttttttaaaggaaagaagttctgtgtgtgtgtgtgtgtgtgtgtctgtgtgtctgtgtgtgtgtgtttctgtgtgtgtgtgtgtgtgttttcccacagagacatcctttctggagcttctctcctttcccttatacagttggactggaggatctctggacttgctaccattttgccacctctctgcaatgttgtatctttttccttctgtctctaattttgtttgtttttctgtttctcagtaggattcctttgaccttcattttccaaactgtgtcttaatttttctctccctgatatcacatttttacatttcargaactctctctgattctctaaatgcttctttttaaaaatctgtatctccgaaggaacttttcttaaagttctttgagaaaattaaatttagagtttttgaagctt

SEQ ID NO: 372531 - DNA, 613 bp, Homo sapiens
aaatgtaaatcattatcgaacgaaacgcctagtaacgctaattctattgtgctctcctggtcatttcacatcagtacaccattgtattaaattctttatccattaaatcttattttctcatcttattatagtatctatgtttcataaacaatgcaagtctattattcatactttttggcagataaattttcctttaaattagtatgatctcagttctgagtttctagctttccagaggatgctctatgttatatttttgtgattgcagagtctcagaaggaacagttgttttttgtctggcatgaaagctgctcaaaacccactgctactcaggcaaagagcatcaagtcaaactggcattgtggttctgaagtcagtctctggaaagtgttgccatcaggctccagagctggcacttttccttctctagtgggtaaacacacacatttcctctacagcactcattaggtaatggagccaagaaggcccataactcatcactgacaaatttgtgccagatcttggatatgaattttggaggatgttcaagtactcayttggatctctataaagttatgtctaaactgcaatgctttgctttaatgataatctg

SEQ ID NO: 372532 - DNA, 629 bp, Homo sapiens
atattcagacgggaatttagtttccaaaatgcttattctacaatagaaaaatgactgaaattaggaggtataaatttatttttaagtataccatggaatactatgcggccataaaaatgaatgaaataatgtcctttgctgcaacatggatacacttagatgtcattatcctaagcaaattaacccagaaacggaaaatgaaatattacatattcttacttataagtgggagttaacccatttgtgggttaacactgggcatacctggacaaaaagatgggaatagtagacactggggactacagggcagggggagtgaagtgggcaagtgttgaaaaactacctactgggcactatgctgagaactggagtaacaggttcaatcacaccccaggcctcagcatcatgcaatayaccctcataacaaacctgcacacatatcccctgaaacaaaaataaatgttgaaattttaaaagtaaaaaataaaaaagttactgcaaacaaaatttttaaaaagttagaaaaaaattagagaaaaataaaatagatgaacagagtcaaaaactggcttttgaaataactcataaaagtgacaaatttttgtcctggcacaatggctcatgcctgt

SEQ ID NO: 372533 - DNA, 310 bp, Homo sapiens
acactggggactacagggcagggggagtgaagtgggcaagtgttgaaaaactacctactgggcactatgctgagaactggagtaacaggttcaatcacaccccaggcctcagcatcatgcaatacaccctcataacaaacctgcacacatatcccctgaaacaaaaataaatgttgaaattttaaaagtaaaaaataaaaaagttactgcaaacaaaatttttaaaaagttagaaaaaaattrgagaaaaataaaatagatgaacagagtcaaaaactggcttttgaaataactcataaaagtgacaaat

SEQ ID NO: 372534 - DNA, 602 bp, Homo sapiens
gacataaaaaaaatacaaaacatcaatgaaagcagaagttggttatttgaaagaataaataagatagaccactagcaagatcaataaagaaaaaaagagaatatccamataaacattcagaaatgacaaagctgacattacaaacaatctcacagaaatacaaaaaatcttcagagactactacaaagacctctatgcacacaagttagaaaacctagaagaaacggataaatttctggaacatacaacctattaaaactgaaccaggaataaattcaaatcatgaatagaccaataattgattctgaaatggaataagaaaaaaggctaccaaccaggaaaagtccatgtccagatggattcacagccaaattcgaccagacatacaaagaattggtaccattcttactaaaactattccaaaaagttgagtaggagagattcctccctaactcattctataagaccagcatcatcctgataccaaaccgacagagagacacaacaaaaaagaaaattataggctaatatctttgatgaacatagatgcaaaaatccttaataaaatactagcaaattgaacccagcagcacatcaaaatg

SEQ ID NO: 372535 - DNA, 651 bp, Homo sapiens
attcatacctatgcaattgtattgagacacgtttccttggttgctgctggttatttttctttatattcccttatttgttgcacagacttgttgcaattgttgtaaatgtttatatctacttattagagtgattactttgyatttatgtctcagcagtgtgcatactgtaactcacacaaaatgttagccgttaaaaacgactgctgtgcctgagttaattaaaaatacagaggaggctgaatcttattgtgggtatcgtatcaggctatgtttggacaagagtttttatatattgtgaagtggaaagtgcaaaaaaacccttaaaaaaaaaaaagaaaagacttgtatcttgacagagccacatgcttgaaccatgcttcctaatttttgtaccacaaaggagatggtttgtgtctgattataattctgctcttcagaaatttatatgccaacaagctcttggcagaatatagatttttttttttttttgtcatttccagattcctttccctgtagtcctcccaactactcgcacccacctattttttttttctcctcagtgaaggacagcgtttgcagcagcaacagcacttgaattaacttaatttatttttctgtgtgtttgcagaatggttcaaggtccatagcaag

SEQ ID NO: 372536 - DNA, 606 bp, Homo sapiens
gagtcctcaaaacttgtgttggaccatgaggaaaatgcrttgtaatgaaggaaagggattgaaagaaaaatagtaggcaatatatttattcagtcaaagctgaataatggagtaaaggataaagagtagtcagggataaattaagaatatgattctaaaacatttttccagtcttacctgatttggctcatagtatgttttttattttctattgaggaagttctatcttagaaataaagattattttcttatgaaaactcatgcaattagagttggcaataaactatatttgagatacaagactttacctttttgaaaataggtttaagcatatcccattgagattgtatgataacagatggttgttatgatcattgttttcaatgtttaatagaatgtgacacttggtttcaaaatgcttatcaaaacatatgtatctgcataggtaaatctattatgcatgcagatatatatatatatctggtaattgaaaattaaagaattttaggaatcataactgagtctttttagaaccattagtttagtactttgacttttttcattgattatgcaacttatttctccaacctattatagtaatgtttc

SEQ ID NO: 372537 - DNA, 602 bp, Homo sapiens
gctggtgggaagagaagcactttccaggtacactatgggagctgttatacatatgagtcctcaaaacttgtgttggaccatgaggaaaatgcgttgtaatgaaggaaagggattgaaagaaaaatagtaggcaatatatttattcagtcaaagctgaataatggagtaaaggataaagagtagtcagggataaattaagaatatgattctaaaacatttttccagtcttacctgatttggctcatagtatgttttttattttctattgaggaagttctatcttagaaataaagattattttcttatgaaaactcatgcaattagagttggcaataaactatatttgagatacaagactttacctttttgaaaataggtttaagcatatcccattgagattgtatgataayagatggttgttatgatcattgttttcaatgtttaatagaatgtgacacttggtttcaaaatgcttatcaaaacatatgtatctgcataggtaaatctattatgcatgcagatatatatatatatctggtaattgaaaattaaagaattttaggaatcataactgagtctttttagaaccattagtttagtac

SEQ ID NO: 372538 - DNA, 614 bp, Homo sapiens
gtagttcaatagcacagtctctaaatagaacatccaattagatctccgttccaaatgactttgaagagggctgatcatgaaagtcttttagctagatgggactttggaaatcactagaatttgttgatctatagttttagtaaaaatatcttaaattactgttctgtttttgcatagccattcatgtcatcaaaaggtctaccttctcactattctatataaaaggctactcacattttcagataatcacatttatcagctgatgttaccttttgagatgaagtgtctaatattaccttttctcttcttgggaattatcttaatctacctactctgcctctttgatttttttctagaatttacttaaaaaaattgttccaaattaaagttatcctcagggactgaaaagaggcggttatgacccaatagagcctttttgggtcatatctgactattttctgtccctaaggagaaagttgtcgctgtttttacacttttcaatgtagtctgtaatcgatgtatacaacctcaaaaacagcarcgtgaagtgtgttatgacagcgatctatctggaaaaatactattaacaactttacataatgtatttatgtttc

SEQ ID NO: 372539 - DNA, 542 bp, Homo sapiens
gtctgactcagcacagtcatagtggtagtgatcacagggatgcttgtgtcagtctacctccagcatcaggtggctcagaacagacagagaaagagagagagagagagagagagagagagagagagagagagagagagactctgtttgcttgggagaaagtaagggaagtgaacaagagtctctgcctggtaacccagakaattcttctggatcttatccaagtccaccaaggtgatacttctatgagtatgcaaaaatcacagcattattgggctaattgtccaagtctctttgaatacctggaaagcctttcccaaaatggcagcccagactgtgaagactacaatagatacccaactcttcaatgcccagacactgaagaatatcttcaagcatcaacaccatataggaaaatatggccttgccaaataaactaaataagacaccagagaccaatccaggataaacagagatctatgacctttcagacagagaattcaaaataggtgctttgaggaaactcaattcaagataacatagag

SEQ ID NO: 372540 - DNA, 532 bp, Homo sapiens
gcaatcaatgttaaggtgtcatcagtttaaaataatgggttataagagagtatttgcatggcctctggtaacctaaaattgaaaaatatacaatagatacacaaaaaataaaaagcaagaaataataccacyggtgaaaatcaccttcattgaaaggaggacaggtggtgaaggaaacagaaaagactgaaaaacaacctaaaaaacaaataacaaaatggcaggaataagtccctacttatcaataataacattgaatgcaaactgagttaactctacaatcaaaagacataaagcggctgaatggatgaaaaaacaagactcaatgatccattgtctataagaaacatacttcacctgtcaagatacacacaggctgaaaatatgtatttcagggatggaaagagatattccatgccaatggaaacaaacaaacaaaaaaagagcaggagtagctatacctatatcagatgaaatagatatcaagacaaaacaaatttcaagacaaaaactgtaagaagcgacaaagaag

SEQ ID NO: 372541 - DNA, 539 bp, Homo sapiens
tgtgggaccctctgagctatgcgcgggatataatctcctggtgtgccatttgctaaggccattggaaaagcacagtattagggtgggcgtgtcctgattttccaggtactgttggtcatggcttccctttgctaggaaagrgaatttcctgaccccttgtgcttcctgggtgaggcgatgccccgcccagctccatgggctgcatccactgtctgacaagccccagtgagttgaacccagcacctcagtttgaaatgcagaaaacacccatcttctgcgtcactcacgctgggagctgcagactggagctgttcctattcggccatcttggagcctccccctagcaatcttccatatttactgctttctaacatgcaataacagatatttttcatttgccccttcagtgccattcaccctactctgtgccctgcattgatgaaatgtataaacagcatcaacaggctccttagtcctttgggttccagttaagtatagccaatgggaggcagcaacactagatctgaaggcagaagaat

SEQ ID NO: 372542 - DNA, 484 bp, Homo sapiens
aaaacacccatcttctgcgtcactcacgctgggagctgcagactggagctgttcctattcggccatcttggagcctccccctagcaatcttccatatttactgctttctaacatgcaataacagatatttttcatttgccccttcagtgccattcaccctactctgtgccctgcattgatgaaatgtataaacagcatcaacaggctcyttagtcctttgggttccagttaagtatagccaatgggaggcagcaacactagatctgaaggcagaagaataatgaagttggaatatttatttctccagcaacctcactgctgtgtctgtctctaccagttagctgcattgctctactaaaacccacagctcctatcagacagacttttctggattctgatagctatgctcttcacttgttccatccagcctactggtatagcaagaccttgaaatttctagtctgggaattctgcatgaggcttg

SEQ ID NO: 372543 - DNA, 484 bp, Homo sapiens
aaaacacccatcttctgcgtcactcacgctgggagctgcagactggagctgttcctattcggccatcttggagcctccccctagcaatcttccatatttactgctttctaacatgcaataacagatatttttcatttgccccttcagtgccattcaccctactctgtgccctgcattgatgaaatgtataaacagcatcaacaggctccttagtcctttgggttccagttaagtatagccaatgggaggcagcaacactagatctgaaggcagaagaataatgaagttggaatatttatttctccagcaacctcactgctgtgtctgtctctaccagttagctgcattgctctactaaaacccacagctcctatcagacagacttttytggattctgatagctatgctcttcacttgttccatccagcctactggtatagcaagaccttgaaatttctagtctgggaattctgcatgaggcttg

SEQ ID NO: 372544 - DNA, 547 bp, Homo sapiens
aatcattcttgactccaccctcctccttatctccaaatacaaccaaacccaaagtcctatcaactgtccatttccccatcaccaccatgcactggattactgaaaaagcatactagttgttttacctccattttgtcaccctctcctcccaatccattgtccaaagtcagtaatttttcaaaaatacaaatctattggtgtcactgatctattttaaaggcatccgttctcagacaccaagtataaactccttattaagttttctaagaacgttattaatctgattcstaccttcagcttcctttactgccattgtcctcccagctatgccccagccccttaaatgtaaatagctcacctaagctcattgatattgtctttcctgtgcctctcagcctcccagtatacctgacaaaataaagcctcaccctccagatctcagtttactggtcttatccaattgccacatcaaacacacttggggttaaatggcctttctaaatgctctgatgatacctaagacttctttcagttgtctgcattgctc

SEQ ID NO: 372545 - DNA, 568 bp, Homo sapiens
ttttattctcttggtaactgaaatgtggagtatgattttgattatttgacccagccacaaartctctgttaggtggtagatggcaggaaatcccagttctgtcttttcatatttgtctttctgtagttattcttgaagcttgtactatctcctgatattctctatattgtatgtcatttgaacactagcataacaccatttttgaacactagtttgaatatcattcaagagaaaatttcccacccactagaatggagatcagccccagattaagaaattttcataagaagaatttgttgatcttttttacttcctgaccttcctactcccaagtagctgcaatgaaccagtgagatttgttgaagcacagaaaattgtgctgtatatttatttttgacctatatctaaacatgtataactgaggctgctagttctctttgtgtctatgtgtgtaaatgaaaaaaaagtcattttcttctttgcaaaacgaaataaattagccttgtacaatattcttataactgtagctcttttgtatcagtggctgattcattctatcattttcttt

SEQ ID NO: 372546 - DNA, 545 bp, Homo sapiens
atatatttttacattaacataaacatattagaagcacagtgcagtatattgatggccaattaaagcctccttaaatccatacctttgcaacgtgattgtgcagccctactcatcaagaggtggagtctattcacctactctaggactatgagctggtcttgtgaatcggtctagccaatagaatccaatggaagtgataatgtgccagttctaactatgtgctttaagagactttacacagtttcattctttcagaaccctacatctacatgacaataagccagcaartctctaaaggatgagaagccacatggggaagagagaagttgtgcccactagcatgagcccaggtctggaccagatcatcatcattgttgcacaataaataataaatagctgttgttttaagccactaagttttgtgatgccattgtggcaatagataactgatgcatatacttaggtttatactcaaagactaacacaataactgtcaaattgattttttcaaagattttgtttcagaggtaaattatctgtcaagt

SEQ ID NO: 372547 - DNA, 491 bp, Homo sapiens
actgatgcatatacttaggtttatactcaaagactaacacaataactgtcaaattgattttttcaaagattttgtttcagaggtaaattatctgtcaagtcgtgacattagggatgacatttttaaaaccttgaggtttgtcaatgtccttgttgtcaatatgttcttagttcaaggtgatcaatgactaaatccatatggaaaaaaaatatgtatgtcctcagtagaggactccattcctctccactctgagattgtttattattacagcaaatttttgctaaacatatattatacaaatcaatcatatcattagcaggtaktttctgcccaaagccctgctacaagttacaggttataaatttcatcttttgaaagaaacatcaaaagaatggtagccttatgaacaatgcattttcttaacaatttatagtagcagaaaaagacctatgggtacaggtttctcagtttagtttaaactgacatcataa

SEQ ID NO: 372548 - DNA, 596 bp, Homo sapiens
gaaaaagacctatgggtacaggtttctcagtttagtttaaactgacatcataaccatgaacctgttagactaagcaaaagaactgattcgggatttcaggactttttttcctccagaaacagaaaacttcatatggtaatctgcttaaaccaagatcagcaaaataagaattaattatctagaactgaatacactgattgaattatgtttcatatttattttctaataaaatatgagaaagctttttctttgaatcaatttataaacttcaatttgtttgcttttactagtacaaactggaatgaaatatcctttaaatagtatataaatggtttcaactaacccttcagaacttgagggggaaaaagtcctaataaaaatgttcatatatatwataagttaataaatcattgtgaataactttatggaaattaagaacacattttcatttatcttatctttaaaacaatatagaacaatagttaaatatatataaaatgcctttactgagttcattatagaagtatttatttacaaagttttaataagaattgatacttttttctatcataatgtaattgaaaaatcaagtttgt

SEQ ID NO: 372549 - DNA, 646 bp, Homo sapiens
agtttctgcccaaagccctgctacaagttacaggttataaatttcatcttttgaaagaaacatcaaaagaatggtagccttatgaacaatgcattttcttaacaatttatagtagcagaaaaagacctatgggtacaggtttctcagtttagtttaaactgacatcataaccatgaacctgttagactaagcaaaagaactgattcgggatttcaggactttttttcctccagaaacagaaaacttcatatggtaatctgcttaaaccaagatcagcaaaataagaattaattatctagaactgaatacactgattgaattatgtttcatatttattttctaataaaatatgagaaagctttttctttgaatcaatttataaacttcaatttgtttgcttttactagtacaaactggaatgaaatatcctttaaatagtatataaatggtttcaactaacccttcagaacttgagggggaaaaagtcctaataaaaatgttcatatatataataagttaataaatcattgtgaataactttatggaaattaagaacacattttcatttatyttatctttaaaacaatatagaacaatagttaaatatatataaaatgcctttactgagttcattatagaagtattt

SEQ ID NO: 372550 - DNA, 622 bp, Homo sapiens
tatgaaaaaatgctcaacatcactaatcatcagggaaagacaaattaaaagcacaatgarttatcacctcacacatgttagaatttactatcagaaagagaaaagacagcaagtattggagaggacacagagaacagggaacccctgcacactgttggtgggaatgtaaattagcacaaccttatggaaaacagtacagaggttcctcaaaaaattaaaaacagaataccatttaatccagctatcccactcctgggtacacatccaaaggaaatgaaatcagtttgtcagagataactgcaccaccgtgctcactgcaccattattcacaatagccaagatatggaatcaacctaagtgtttgttaacatatgaatgaaaaaagaagatgcagtatatatacacaatggaatactattcagccataaaaggaaggaaattctgtaatttgtgacaacatggatatacctggaggacattgtgctaagtgaaatatgccagatacagaaaggcaaataccacatgacctcactcatgtggaatctaaaatgttgatctcacagtagagagtaaaatggtggcaaaaagagctggagcatttgggagcaggtgttagggagat

SEQ ID NO: 372551 - DNA, 512 bp, Homo sapiens
ataatgtgacaccaggggatttatcagtcttctagacagaagttactgatatgttagtatcatatgattctagttttgctaatgaaacaataaaagcatccatgttttaatccattccttattccacatttactaatgaaactgactcagtaaaacaccaagttaatgatattgaatcaaaagttgctagaacatgggcagagcattcaaatagagatttccctaaagaagacatacaaattgccaaaacatatatgaaaaaatgctcaacatcactaatcatcagggaaagacaaattaaaagcacaatgagttatcacctcacacatgttagaatttactatcagaaagagaaaagacagcaagtattggagaggacacagagaacagggaacccctgmacactgttggtgggaatgtaaattagcacaaccttatggaaaacagtacagaggttcctcaaaaaattaaaaacagaataccatttaatccagctatcccactcctgggta

SEQ ID NO: 372552 - DNA, 561 bp, Homo sapiens
tctctattaaaagatatatatgtatatatatcaaatttcacttccaaaatgaacatcccatatttcatctgcattatatttcctaactatggwataataatttctgaacatatttttgtgagaaccacacaaccagagcgccttgaaggtttcatcatgttctcaaatacattttttgttgtgattagttaaaacacacacctggcaaaaaataattagaaacatacatatagaaaaatgtttcaataattattttaagttaaaatagaaataaggcaccatttttcacttccaaatttaggaggaaaaccctgtgaacctataaaattccagagaaagtttggttcaagatgcatttccaacattattctcaattgcgtaatctacttggaaaacagattgacttggcaatatgaatcaagagcatacaacctagtaatttcctttttggaaatttctcctaagtatgaaaaaagctatatgcatgaagacacccatccccagtttcattataatagaaaaaatttagaaacaaatatctaagtaaattgtgttagagcc

SEQ ID NO: 372553 - DNA, 561 bp, Homo sapiens
tctctattaaaagatatatatgtatatatatcaaatttcacttccaaaatgaacatcccatatttcatctgcattatatttcctaactatggtataataatttctgaacatatttttgtgagaaccacacaaccagagygccttgaaggtttcatcatgttctcaaatacattttttgttgtgattagttaaaacacacacctggcaaaaaataattagaaacatacatatagaaaaatgtttcaataattattttaagttaaaatagaaataaggcaccatttttcacttccaaatttaggaggaaaaccctgtgaacctataaaattccagagaaagtttggttcaagatgcatttccaacattattctcaattgcgtaatctacttggaaaacagattgacttggcaatatgaatcaagagcatacaacctagtaatttcctttttggaaatttctcctaagtatgaaaaaagctatatgcatgaagacacccatccccagtttcattataatagaaaaaatttagaaacaaatatctaagtaaattgtgttagagcc

SEQ ID NO: 372554 - DNA, 542 bp, Homo sapiens
ttttgactgtttctaggtctacggaaatctgtttaactagatcatatcaaaggatggagattgatatcccatttaaaatctctaagacaattggaatttctgggtaggatactttttaccacctatgtagattcctagttagaacatttcaggtagtaaaatgcttaaggcaytcactatgggagaagagaatcaggcatgggtgcaggaggcagaagacattttccaggcgcatgatatcatgtctaaggaaagaggggtcttattgttattacagctactgctgctgcttggtttcaattttccaacagattttcctcaaaacaaaatagagacttaaaattccaaattcagttcaaaaaacacaattatttctttccttctggcatagataaacattctgcaggagcactacttattataaattaagttgaaactatcatttcacgtaatggaaaagcaaaaccagaaaaaatactgtttttattccaatttaatcaattctgattttttttctttccaacttttcaggtttagggtgt

SEQ ID NO: 372555 - DNA, 237 bp, Homo sapiens
aggtggaggggttactgaaaagatgacatgtagtaattatctgaggaaaatgtgacaagaagctaagtcaaaatgtaataaaattacttgtaaagtacttcaattcatatatatatatatacatacatatatacacatgtatatatatacttgtgtgtgtgtgtgtgtgactgcacaataatttcactatgaccttgaagatgytaggtgtcttacctccctcattgtagttattac

SEQ ID NO: 372556 - DNA, 598 bp, Homo sapiens
agtcctttgaattaaataggatgacacttgaattgaggtattatgaatccctggattttgcaaataatgtcyatgtgtgtacagtgttatagaggagatttgtcctttggaaagagagttttagtagaaaatctttaagtttcctcaaattctcaaagtctataattctgcaaagacagaacacacaagtagaggtcacctgagaaatgttattcaccatacatttattttcaaataatgtttaggataggcactgacccagaagaatcaattgacaaaagatgtctaatgataagcaggctaactttccattcataggtaacaaaatttcaggagagaccaaagaaaagtttttaggtgagaaattttaagattgttttgagataaaataagaggacttgatctctttcaggaaaaaaaaaatggtgacaaagagaatacagtaattttcaagataaaagggaaacattcaagaacctacataaatatctggactctgaaatgtgaattttatacttagatatgtaagttgatgtaccatatgccactatatcaaaaaagaaaatatttagaattggtaattcaatttgcctttcag

SEQ ID NO: 372557 - DNA, 622 bp, Homo sapiens
ttgtcccaggaacctcccctcagcattcagtgtttcttgcgttggatgcaggtgtcagatctactgagccctggcctgagccccggatttactcatgctctccaggcccatcttgtctggagacaaagcaagcattccagtcagttggatggcagtgggagaggactgcaggcatgagtccaaaggccaatataacctgactcattaccttcatttcccaagctggaactgagatactattaaattcatgtttgtctcagtcacacccaattagtccagtgaagcctttaatgctgtcgctgttagatacttaagtaatagcttatgctttggagaaagcttggtcaaattattgtctaaagggtcaattcatttcaagactcctcaactgaatgacatctggattacattttgacataaaacatctgacctattctgaggaagcttgaatgattcaaatatttaaactgaactaaacaattactaaaagtagattgatttttctgtctctgaaacaaaaactgattttttttatggaaattgtgagtaggtaataatttgcatggtagaaaaaagaggagaamattttttaaatgcatttttccttttatttttcccctcc

SEQ ID NO: 372558 - DNA, 549 bp, Homo sapiens
aggtatgtggtatatcttctggagactctaacataactgggaaagactttgagggaagtatgatgtcttggcattatccagatggtaactagaatttgttcattgaagctaatgagactgcatttttgctgacaggttagtgacatctggagcattcaaattacatttctataataaggaaaaaaacacctggtatatgactagccccttgagatgktacattttaactttattcactgttcttagcaacagtttcttcattttcccctttttcatcctcagcactgctagctttctgccaaggaggcagtattgtgttgttgataaggatttgggttctgggtaggctaatgatgtaattcatcatcacaaataggacattttgagaattaaaggacaagccagtaataattaccctgggacaacaggcaaaatggtgaaccacccaggaaaacaggaacgtgttcttcattgaggtctggagtcagccatgtgggtttgagctctgcatctaccatttatgggagccagggtgcattactcaaactt

SEQ ID NO: 372559 - DNA, 409 bp, Homo sapiens
gaatttgttcattgaagctaatgagactgcatttttgctgacaggttagtgacatctggagcattcaaattacatttctataataaggaaaaaaacacctggtatatgactagccccttgagatggtacattttaactttattcactgttcttagcaacagtttcttcattttcccctttttcatcctcagcactgctagctttctgccaaggaggcagtattgtgttgttgataaggatttgggttctgggtaggctaatgatgtaattcatcatcacaaataggacattttgagaattaaaggacaagccagtaataattaccctgggacaacaggcaaaatggtgaaccacccaggaraacaggaacgtgttcttcattgaggtctggagtcagccatgtgggttt

SEQ ID NO: 372560 - DNA, 610 bp, Homo sapiens
agctggaactacaggcatgcacaattatgctcagctttttttttcttctttgcagagatggggtcttgctatcttgcccaagctggtctccttggcctcctaaagtgctaggattacagcatgagccaccacacccagcctagatttttattatctaaaaatatgactggaaaaaaacaagaaatctgacatcaagatataatctaaggccaagaaagggagatctgagaaaagtctgcttattagtggaggaaagcaaaaattatttaattagtgtaaggtatcgagacttccactttcactgtgtatataaatatatatcattaaatttataaaaggcaattgtattttatatatttatctatatctttttttcgaatttggtaaaatactctggaaagcctcccaaaccttgattctaattcatccataatgattgctttgaatctttggtccaatgtactcaccygtttttcatcattctcatattaataactttcttttcatttcaatactttttgttgctcaaaaaatcccactgcaatatctacccttattttatgctaacttttacttttatgaaatcatagaagcagaaagcatgagtctg

SEQ ID NO: 372561 - DNA, 586 bp, Homo sapiens
tttatcactagaggactatgtgggggcatatactacctctttacaattttttcctacactactaattttaaaggaaagtatgaaagattttcctttcatgtttcttagcttagtatgggcatgtggccttcaatctgctgtggctggtgacaccatctcttccctcctttctacaaacaaggttctattttatgaactgggtattagcagtgaacatgcaaggtatggcccctgccacactggaaatcaacaggctagtagagggagatggaccataaacaaatacagagaaacatgtgtaatataatctcaagtagtaataagtggaatgaaagaaaataaatattaaggtaatgaagcaaagatggagggcagaggtcagtgggaagacagcaggctattttagagagaaaagtcaggaaggggctttatgagtaactgatattgaagctgagrcatgagtcaaactcttacaaagggagccatgagggaagaaaattttaaatagaagaaacagcaaatgcaagtaatttagtgtatttaaaaagtcaagttatcagcctaattatagtacagtgagcaaaaa

SEQ ID NO: 372562 - DNA, 601 bp, Homo sapiens
atccaaaccactgaacaacatcagccaaaaggatgtttggaccctcatcatgctaaaattatatacacagtggtatataaggaatcattgacgagaatattttgaaagaataaaaactcaacagttttatggtaggaacatgagatatttatattaatccctgaaaaactatgccaaaaaatttactccataaacatctccttttataagtcagcatggtttataaaagatataactacaccgctgtattccatgttgatttcaataygaaaactgaattttaaattttggaaatcaaaataccaaaatgaaactcttatggaccaatcatggctctagaggtaacctttttaaaaaaaggaagcttttagcataaacaattggcttacgttctgccaaactggcagctcctagtaagaggcttgcttttacaaatctgaatcataagctttcaattcaataccactaataatttatatcgtgcatgacaggcttcacagcatggaagcatcatgttgccttattgagcaatgcataatgtataataaaagcttgattcagaaaagctagaaaaatgttcattactaaatatgacttaaac

SEQ ID NO: 372563 - DNA, 635 bp, Homo sapiens
tgtattgaagcaaagtgactacgtttaactggaattattttagcatttatctaaaaatattggaataaattaaaatgtatattgcaacacctagagcaaccactaagaaaataattattaaaatatactttaaaaattcctggtatgattataatggtacactaaaagtatacatacaaaatgcaaaagaaggaagtaaaggaggaacackgggacaaaggagacgtgaatcatatacaaaataaatagtaaaatgacagacataaatgtagcatatcaattattgtaccaaatatgaatgaactaaagactccaatcaaacagactacatttttaaaagatcaaactctatgctctctataagaaaacactttatattcaaatttgcaaataggctgaaagaaaataaactatagaccaaaaagtaagagctaagtcattaaaatacttggaaaaatcatagaagaaaaacctttatcttattacaagcaaaaacttcttagatataacaccacaagcataccccagaaaagaaaaaaagaaactgatgaattagacttcataaaaattaaaaacctttgcttttcaggaatgccattaagaaaataaaaatatattccacagcctggggaaaa

SEQ ID NO: 372564 - DNA, 573 bp, Homo sapiens
tatcatctgtgtcaattgaagatcggtttggattgatttttctcctcagtatgagttgtattttcctacctctttgcatgtctggtaatttttattgaatgccagacattgtgaatttgaccttactggtatttgctgtttgtgtccctaaaaatatgcttgtgctttcaatttctatgaaagaaatttcttacaaacctaccttacgtggttcattcttcttccatctactatattattttctctcatatcactacatcctttagctgtgttacatgagaaataattcttttgtttttgttcatttacttctttattatctctctgtctcatattccagtaggccatcatctccaggaaaggaagggccactttgctctctttttatccctrttacctaacacagtgtctatcacataattgttcaataaataaatgaattattttagatttttgctcttttaacatcgtgagttaacattttgttttgctgaaaacattcttgacaacatttaaattttgttataatacatgtaaaatataagccatcttcaggtttcatagttttgattc

SEQ ID NO: 372565 - DNA, 583 bp, Homo sapiens
caatttaactaatatcttctctcaatttgctatgtaccactaaaaacaacctgttcattatttccttcgattcattttatcttagtgcctgctaatctgtttttttttcagttttcatataattttttaatgcaatcttctttaaatccccattaatagagtgatagctggtctccaattttctttatcctttaagcttgttatcctatgaaagaaattaaatacagcacagtggactgcatacacgtttataaatgatgtgagcctatctttattcaagcaattaatcttgctcttttagaagaaacccaaagggaaataacccaagttgtcttatatttccaggaaatatcatgcacaaaacagagggatttactgtttactatatctccaatgttagaaatatatcacccaaacagcacttttctcccaaatgcaaattattagataayctgattgataaatgtttactttgatctagaaatcagcttaaactgacaaatttatatattatagaaaaagtgtgctatttacacattcatttttaaaattatgccatgagaatttaaaaaagaaccaaata

SEQ ID NO: 372566 - DNA, 550 bp, Homo sapiens
tgtggagaagtctcttgtctaatgaagtgaattcccataatacacatgagacctcaggatttttgaaaaatttaaatcagtagaacactrccagcttggaccaaaagtgacagaaaccgtattaatggaaagaaggcttctggactcccaaaagtgtacaggcaggaaatagactattaaaatgactcagctgctaacccatgctacttttcatgaaaaaagaaggatgacttagaaggcagagctgaaaaccacagaggattattctcagacttagaactgttctcaagtttgcccagctgggttttaaaatggcttgggatcagtaaccctttttctttttattttatctcattttgaataggaattgcttattcctgtctcatcaaggtattttgtgagcagataacttattcttgagtttcacaggtccataaatggagaggaattatgcatcaagatggattatacccagggcttcacccatgccaaatttagatgtgtcaactctagacagtctcttttatttaggtgttaattttattgtttc

SEQ ID NO: 372567 - DNA, 566 bp, Homo sapiens
ctccagcctgggcgacagagcgagactccgtctcaaaaaaaaagaaaattgatgcatacattttataagtrtagttttccataaataatttctttttttctcttttcaaaaaagtgacactgagtttctactttgaaatatgttacatttaaccccatgaattgtataattgtatcctgtaaatgttgattgtgtaagtcaacatttataggatgtcagggactgctcaaatacaggtttagctctggctgccaatggcaaaaggcaccaaagtggtttctaacagaagttatatcatcctggcactcaaccacatggatttcagtttttctattcattcattcatttagctgagggagatagctatgagacatcaacagattcaagacatatttagtgattgtctaaatatgaatagctatttgagatcctaaaacacagcagtaaaataaatgaaaatgtatatttagtgtatttatggctatttgtctcttttgaaataagcaaactagagcagtttctttcagtgccccatccataactccttgtccttacttctgtgcatg

SEQ ID NO: 372568 - DNA, 569 bp, Homo sapiens
ctgtgtagtatttcatggagtgtgtgtatagaaatatatatatatgtatatacaccataaattgtaattgtgtgtgtatgtgtttatatgtgtgtgtgtgtgtgtgtgtgtgtgtgtatatatatatatatatatatcacattttcttaatccagtctacctttatcrgaatttaggttgattccatgtctttgctgctgtgatgaacatacacgtgcatgtgtcaaaattttgtttagctactcatcaattgatgaacattttgtttacctactcatcagttgatgaacatttgtttacctactcatcagttgatgaacagctaaaatttccagtttttagctgtttttgacaatacggcaaagaacattgattacaagtttttgtataaacatatattttaatatttcatgggtagatacctaggggtagagttgctgggtcatatggtatatctttagcatactgaagaaccgacaaactcttatgcaaagttgttgcactattttacaatctcacgaacaatatatgagagttctaacttctcgataatctttgctgtcacctgt

SEQ ID NO: 372569 - DNA, 507 bp, Homo sapiens
ggaatttcttattggtttggacccattgctggtgagctagtgtgattttttgggggtgttgaagagcctagttttgtcatattaccagggtttgttttctggttccttctcatttgtgtaggctatgtcagagggaaggtctagggccaaaggttgctgttcagatttttttgtcctacagggtgttctcatgatgtagtactctcccccttttcctgtggatgtgatttcatgtgagcccaactgcaatgattgttractctcttctgggtctagccagccagtgagtctacccagctccgggctggtactgggggttgtctgcagagtcctgtgatgtgaaccatctatgagtctctcagctgtggataccagtgcctgttccattggaggtggcagaggtgcattggactctgtgagggtcctagctttggtggtttaatgatcatttttgtgctgcttggcctgttgccaggagatggcactttccagaaagcatcagctgta

SEQ ID NO: 372570 - DNA, 656 bp, Homo sapiens
acttaaattgtgccgcaaactatgctatacaatttacatagctttagttcaactgacatccattcaagtctttaacatatatattttaatttttcctaattttactgaaagtaaactgacagagagggtaataaatacccaagcacacacgtaaaatattcagtaaaagcatggagaaagaatagtttgattttttattttatttttttaagagacaaggtctcactatgttgcccaagctggagtgcagtggctattcacaggcatgataattttgccactgcgcctggcctttcttcataatgggttaagagtctcagtttctcactcttattcccctaaacccttagtaggtatcctgtctcttttatgttctcatrtatctgccattgcaggttaatcagatcttctaatttatagctaattcagatgtgactacatttacaaagacagctgaaaatccttcctgacatgaaaatagcagatctcatatcttctatgggactgtttactgctctaatctagcaatctcccaatcttctgaattattcaccattgcaataaaaagttttgagtactctccaaaaatatacacacattcatttcttggaaattacacatatgtatgttgtatgaatatattaatcatattgcgg

SEQ ID NO: 372571 - DNA, 481 bp, Homo sapiens
tcaagcaaatagagaacaacaacaacaacaaagcaggagttgctatttttttcagacaaaagagactttaaaccaacaatcaaaaggacaaagaataatattatacaatgataaaagattcaattcaacaagaaggtgtaactgttctaaatacayatgcatccaactttagagcatctaaattcataaaactggttcttatagacctacaaagatacttacataaccacataatattagtgaaagacttcaacaccacactgacagtgtcagatcatcaaggcaagacactcaggacttaaactcaacacttgactaaatgtacctaacagacatctacccaacaacaaaatatacattcttctcatctgcagatggcacatattgtatgattgaccacatgctttactcagccataaagcaattctcaataaatacaagaaaaccaaaatcataccaaccatactctcgggccacagca

SEQ ID NO: 372572 - DNA, 510 bp, Homo sapiens
atcatcaaggcaagacactcaggacttaaactcaacacttgactaaatgtacctaacagacatctacccaacaacaaaatatacattcttctcatckgcagatggcacatattgtatgattgaccacatgctttactcagccataaagcaattctcaataaatacaagaaaaccaaaatcataccaaccatactctcgggccacagcataatagaaatataaattaatgccaaaaagccctatcaaaaccctacaattacacagaagttaaatgacctgcccctgaaacaatgtaaataatgaaattaaggcagaaaattttaaaaaagtctttgaaacaaatgaaaacagagatacaaagacacaacatatcagaatctttgagacatagctaaagcagtactaagaaggtttatagtgctaaatacctacatcaagaagttagaaaggtctcacattaacaacctaacattgcacctcaaggaaccaggaaaataagagcaaaccaat

SEQ ID NO: 372573 - DNA, 510 bp, Homo sapiens
atcatcaaggcaagacactcaggacttaaactcaacacttgactaaatgtacctaacagacatctacccaacaacaaaatatacattcttctcatctgcagatggcacatattgtatgattgaccacatgctttactcagccataaagcaattctcaataaatacaagaaaaccaaaatcataccaaccatactctcgggccacagcataatakaaatataaattaatgccaaaaagccctatcaaaaccctacaattacacagaagttaaatgacctgcccctgaaacaatgtaaataatgaaattaaggcagaaaattttaaaaaagtctttgaaacaaatgaaaacagagatacaaagacacaacatatcagaatctttgagacatagctaaagcagtactaagaaggtttatagtgctaaatacctacatcaagaagttagaaaggtctcacattaacaacctaacattgcacctcaaggaaccaggaaaataagagcaaaccaat

SEQ ID NO: 372574 - DNA, 521 bp, Homo sapiens
aattttgtgtcacctggctatacaatgtttaactgacataggtggtttaatatataccctgtacctatcatagtgtactcataaaataataaactttaaccagtaaataaacacagaatagtgattcagacttctagcatagctagcccatttttaatctttcctgaagagctgtaacttcatggccagtatctccaaaggtgaagagttaacagagggaggagtaatggggtaaaggttggagatattaaagcgcaaattacatgttaatacaaatataatttttatgttttactgaagccacctaagagatctcagggtaaaaacacactcttttaagagagcttttgttgtttctttttcrtgaaatggaaaccacaggcagatatatgggcaatagaggcagctgctcacctttcctaaggctatgaaaagaataaaagggccatctgtgtctccccttgcttcttcctaaccttggcataaaaaggagaggtagtcctgcaactcaatccctttta

SEQ ID NO: 372575 - DNA, 617 bp, Homo sapiens
ttctaaatgtgattttgtgattttataagctatgattttcttttctccttttgatgacgcatagagccattggctcccacagaccacctccacttcctaccaaccttcatgcagtcaactgacacattccatagacatagagtctgtataggtcaactttctgcagtagtgaactactgaaaacaaaagctgaacaaattatattttcaattgtgtatacaaatctgctattgaaaattattttatagtgtaagtttaaaaccaattcaataggcaagataatataatacattcggacagcctgaaatctgacaaattttggaaacctgtggaattgtacctcaggcttccttaagtaaayttatcagtgaaaaaatgtgattattctaacctagacacaacttgtgaagctaggaaaacacactgaaggcagtgggagaggactagtgagcaagagggtgggctatagcacaagtcctgggctttaaatcccaaacacaatcattaaccagccttgtgagagggacaggaaatttagcctctctgtgcctccattgccccactgggaataatagcatcttctttatgcagttgtttcagttttctcctttttttga

SEQ ID NO: 372576 - DNA, 613 bp, Homo sapiens
taaccaaacacatgcaccagacaaacacttttgtatggcacatgacgagatgcaatttgcaaactttgacataaggtattagttacataaaaattctacttaaatgtacataggttacctggaaaccacgttattaattaactaattaaactccaaatcaatattgaaaaacaacctagagaagagattcttaaattttagaatgcttcagaatgaccttgaagggcttgataaaatacaaattctgcttcctccccgacactcagtgtttttgattcagttggtctaggcaagagtctgaaaatctgcaattcaagcatgctcctaaatgatggtgagctaccagtttgaggaccatacttagaaacacaaatgaaaaatcactcttgctttaaagatttctatggttaattcattcatgaatcattctttcatgtatttgttcattcagttaccaaatttatcagctccaagatactacactaggaaaaaaaagcgttgggtttgtccctcaactcataaataataatttattgatggcattctcaatttgttactagctcaaattttacctrtgaggaaacatattcagagattctaagtgatttggtta

SEQ ID NO: 372577 - DNA, 560 bp, Homo sapiens
tgagaaagtatgtgttccctagtttactttataatttgaggacatttgttttacttttctcatctagagacatgcattttaatattagaatgtgtaaattttccaaatttattggttcatttaccagmaaattctacatgcatttttttcagctacccttcttttgaaagtgtgagttcaaagaagcagccagtttttttgcagttatttgcacccatataaattcctgtgcacagggttatcgtttttctcttgtgatagaaacaatggtaagattcacatccttgacctcccttgtttcatcatagctcatccacttgagaagtcagggattagaatgaagatgaatctacttttctctctgaaggtgtgttccactgacaggtgtcactagaatgctttttctcacttccttttgcagaattgaagtctctcatctgaatattgatctccctgtacgcctgacttatctttaatgaggaagaaggatggtaacagtaaagggacattattagataaagtaatatccagaataaacaaaattttgacattaggaaata

SEQ ID NO: 372578 - DNA, 595 bp, Homo sapiens
ggcccacccatggctgcccatggaccaatgggactgcacttcttcccctctgaggcccataaaacgtcctagactcagaccagaagagatgacgggaggaccagctacagagagaagctactcrctccagggtgccctctttgctgagggctaaacactcatccagaaaccctgactaccatgctcaataaagctcctcttcatcttgctcaccctctatttgtttgtatacctcagtcttcctgaatgcaggacaagaacttgagacccgctgcatggcagaactgaaagggctgtaacacaaacaggcctgaaacacacaccttgctcaccaccttgtgtgtgacaagaaagacagaagagagaaagagagaagacctgtggcccttcaaggagcccaaacctaggagctccctgagccagggttgtgacaccctctttagggctctgtggttcctggtgtctccaagcttctgggtgccactgtgttcctcggtatcagctgtggaagttgtttatggtgtgcctggtccagctgcagccttgcagagagctgaggccatgaggctggggccatgctggtgcctggagctgc

SEQ ID NO: 372579 - DNA, 595 bp, Homo sapiens
ggcccacccatggctgcccatggaccaatgggactgcacttcttcccctctgaggcccataaaacgtcctagactcagaccagaagagatgacgggaggaccagctacagagagaagctactcactccagggtgccctctttgctgagggctaaacactcatccagaaaccctgactaccatgctcaataaagctcctcttcatcttgctcaccctctatttgtttgtatacctcagtcttcctgaatgcaggacaagaacttgagacccgctgcatggcagaactgaaagrgctgtaacacaaacaggcctgaaacacacaccttgctcaccaccttgtgtgtgacaagaaagacagaagagagaaagagagaagacctgtggcccttcaaggagcccaaacctaggagctccctgagccagggttgtgacaccctctttagggctctgtggttcctggtgtctccaagcttctgggtgccactgtgttcctcggtatcagctgtggaagttgtttatggtgtgcctggtccagctgcagccttgcagagagctgaggccatgaggctggggccatgctggtgcctggagctgc

SEQ ID NO: 372580 - DNA, 560 bp, Homo sapiens
tgtgttagcaatacctgcctgacacaatggcactgcaattaaggcacttttcacctgactccaaagttcagtaaatttattatgtatctcagaaaattttgcctgaggaaatgctataaaagtaattttgccaataaaaagtgctagccttatgtaataaatgaacagtacaaaatccatagtattaaaatctaatgctgctggagctagagtgatgataatactactaaaatattaacctattgtttgatttgattgatactacactttggtcaatatctagtttcctcaaaatggacaatgagcagcgtgtcttcagaagggagttrgtggatgttcaggggattccccttttctagagcattgctgaagagtggtttcaagtagaattgtttgaggcctgaccagatgatattctgatctctacctatcccaaatctggaagacattttcatttgtttgtactcaatgatttgatagtgatccatatgtgtaaacccactgatttacagattattagtcaggtctaacttgaaattattaaacattttttgaggaaa

SEQ ID NO: 372581 - DNA, 569 bp, Homo sapiens
gtggatgttcaggggattccccttttctagagcattgctgaagagtggtttcaagtagaattgtttgaggcctgaccagatgatattctgatctctacctatcccaaatctggaagacattttcatttgtttgtactcaatgatttgatagtgatccatatgtgtaaacccactgatttacagattattagtcaggtctaacttgaaattattaaacattttttgaggaaaccctgtggtggttgctgtgagagtgtcatcttaagttagactaatttacttcctattctgaaaggytaccaattgaataaagaatatatctgagagaaaaattaatgtcgttttcttgtttttctttttaaattcaaatagaaattattaaaactgtatatatatatgttttggatacattagaatatgtatattccattatatacacacacatatcagatatattggaatatacatattctatacattttgatatttaaatattttgtttgtatatttaaacaactgctgatttcagtatacaatctcagaaaaacttaagatgacttattaagaat

SEQ ID NO: 372582 - DNA, 569 bp, Homo sapiens
gtggatgttcaggggattccccttttctagagcattgctgaagagtggtttcaagtagaattgtttgaggcctgaccagatgatattctgatctctacctatcccaaatctggaagacattttcatttgtttgtactcaatgatttgatagtgatccatatgtgtaaacccactgatttacagattattagtcaggtctaacttgaaattattaaacattttttgaggaaaccctgtggtggttgctgtgagagtgtcatcttaagttagactaatttacttcctattctgaaaggttaccaattgaataaagaatatatctgagagaaaaattaatgtygttttcttgtttttctttttaaattcaaatagaaattattaaaactgtatatatatatgttttggatacattagaatatgtatattccattatatacacacacatatcagatatattggaatatacatattctatacattttgatatttaaatattttgtttgtatatttaaacaactgctgatttcagtatacaatctcagaaaaacttaagatgacttattaagaat

SEQ ID NO: 372583 - DNA, 566 bp, Homo sapiens
tatttacaaactcaaggaaaagagatatggatatacgatcttgcattattaaattaaaaaaatagccataagcttcatggcctagttcaatcttagaattcaaatatgggagagctggaaagggattttgaaatcctctagtgcaaytttctcatatcataaatgataaacagaagaatataaatgaagaaaaattctagacattatgattcttgacctgtagctctttctacctcatcaaggtgttctatctgaggattttatagccacttatgaagatgatagtcttatgttgctcataggcataaaagagtcttctcagagtttatcttttttaatctcagtgtagattttaagagtatatgaagtcatatagccattttaagccatatagtggggtttagaaaatcttagattatattgtaaatcatatttataattctatgtttacatggtagtttgttaattttttgtgattgtaggtgttgagcagttgcaaaacatgcagtctcctcaattagtgaaaacacacctgcctgttcaacttctcccttcttcattttgga

SEQ ID NO: 372584 - DNA, 552 bp, Homo sapiens
tggatatacgatcttgcattattaaattaaaaaaatagccataagcttcatggcctagttcaatcttagaattcaaatatgggagagctggaaagggattttgaaatcctctagtgcaattttctcatatcataaatgataaacagaagaatataaatgaagaaaaattctagacattatgattcttgacctgtagctctttctrcctcatcaaggtgttctatctgaggattttatagccacttatgaagatgatagtcttatgttgctcataggcataaaagagtcttctcagagtttatcttttttaatctcagtgtagattttaagagtatatgaagtcatatagccattttaagccatatagtggggtttagaaaatcttagattatattgtaaatcatatttataattctatgtttacatggtagtttgttaattttttgtgattgtaggtgttgagcagttgcaaaacatgcagtctcctcaattagtgaaaacacacctgcctgttcaacttctcccttcttcattttggaagaataactgtaa

SEQ ID NO: 372585 - DNA, 608 bp, Homo sapiens
tttgcctaatctgggtacatttcactctttttcttgccttaataaactggatacaatgtctactataatgtcaaataggagtagtgagggcagacatcttgtcttactcttgattttatgaaaagtgcatgcaatagttcactgttaagtatgatggtattacctgttttatttttgtagatacttttatttggctgaggaaattcctttccaaggtttttattagtcatgcatcctggattcagtctaatactttcttggtgtccattaagatccatcatacagtttaccgtcatttttttcttttaatrtgatgaattacattaactgattttttttttttttttgagatggagtctcgttctggagtccaggctgcactccaggcagcctcctgagtagctgggaatacaggtgcatgccatcatgtctggctaacttttgtattttttaatagagacagggtttcaccatattggtcaggctggtctcgaactcctaacctcaggtgatccatccgcctctgcctcccaaagtgctgggattacaggcatgaaccaccgcactcagtcagatttttcaatgttaaaacaaccttgtatatgttg

SEQ ID NO: 372586 - DNA, 466 bp, Homo sapiens
atttttcatgtttcaagagatgctcttgctggggtggtgacacatgcctgtaatcctgctatggtgaggcgtaggcataggtaggataattgctcaagcccaggagtttgaggtcagcttctgcattataaagagacctcccacttaaaacatcaacaacaacaacaaaaaacaaaaacaagatagagagatgttcttttcttttctttttgagagataaagaaaaagtargcatgtgagagatgagaactcttcatgttaaaacaacatacaattgttgagtatcctacatcaggatatagatataaatgccaaaatcaggaaatagaaaacaagcattctgttaaagtgagcaaaagcttaaaaactattagacaatagaaacaaagtcctgctttttcaaatctctccacagatgatctacatggcatggaatgccaaagatgtggctgtgtcttattattat

SEQ ID NO: 372587 - DNA, 640 bp, Homo sapiens
gcaaggtgagtgttggaagtatgttaaaaagcaaaacaggaaaagcctgctggactattataattacccagatgagaaacactctctggctggcagtagcagaagtgtttaagaggcagtagatataaagaaagcctgaatataatgaattagatgttgtggttaagagaataacgtccaagcttatgtgtagatacctggtgttgactctacacaggtcattaaaatgtaaatggagaaaacacaatatgctaaggaataaaatgaatttatttttgaactaattgtatttggaaaatttggacatttttcaggtggcaaaatcatgtaggcagttgtatataaagcataagtctggattttagtgctatcagcattaagatgatatttaacaccttgagagtgggtaaaacatggatcttatcctgggagccccaacagctgagatgaaacttcagaagaaaaataaagtaaatggcataagaagaaagaatcagagaattaaatttgttgtttttttaaaccaattaggacaaatccatctttgtaagcccaaaaaagtatatcattaaaggtatacatttgattcytaaaattgagaattacaagtataatatttgattaggtgttaatgaaagtg

SEQ ID NO: 372588 - DNA, 584 bp, Homo sapiens
gttttgaaatgtgagcacatgagagttggatggggccaggggccaaatgatatgktttggctgtctccccacccaaatctcatcttgacttgtagctcccataattcccacatgttgtaggagggacccagtgtgaggtaattgaataatgggggtgggtctttgccatgctgttctcgtggtagtcagtaagtctcatgagaactgatggttttaaaaaggggggttcccctgcacacatcttcttgcctgctgccatgtaagacgtgtttttgctacccctttgcctttggccatgattgtgaggcctccccagccatgcagaactgtgagtccattatacctctttcctttataaattacctactctggagtgtggtttttttattagcagcataagaacagactaatacagaggttaacatctatatgctcccaattactagcttcataaccttggcttgttagttagcatgtctgattctatttccacattgctgaaaagtatttcatagcattatgaagagaataaaataaaatgaaatatgcaaaatctcacatggagtacataaaaacatgtaaaa

SEQ ID NO: 372589 - DNA, 581 bp, Homo sapiens
ctgcatgtatgtcttcttttgagaagtgtctatttatgtccttttcctatttttttagtggagttgtttttttgctcattgaattgtttaagttccttttagattctggatattagacctttataaaatacataatttgcaaatattttttcccattccgtaggttgtctgtgtactctgttaataatttcttttactgtgcaggagctctttagtttaattgatcctatttgtaaattttggggggttttgcaattgctttaacaatgtaattataaatttgttgtcaaggctaatttccagaattgtatttcctaggttttcttctaagatttttatagttttagttcttacctttaagtctccaattcatcaagttaatttttgtatatggtgaaagataggggtccrgttttaatattttacatatggctagtcagttatcccagcaccacttactgaatagggattcctttcttgattgcttcttattattgagcttgtcaaagaccagatgatcgtatttgtgtgacattacttctgggctctctattctgttccattgttctatgtgtctgttt

SEQ ID NO: 372590 - DNA, 516 bp, Homo sapiens
cgctccagcctgggcaacaagagtgaaacttcgtctcaaaaaacataacaaaacaaacacacaaacaaacaaaaaacaaacacacaccaacaaaataactcaaataaacaatctaagtttgcatctaagggaatagaaaaaaaaagaacaaacttaccccaaagctagtaggagaaaagaaatgacaaaagttagagaataactgaacaaaattgagacataaaagtctatacaatagatcaatgaaaccaagtgttggctatttgaaaaaataaacaagattaatagactactggttagattaataaataaaaagagagaatatccaaataaacayattcagaaatgacatagatgacataacaactgatcccacagaaatagaaaagatactcagaaaataatatgtacaagcgtatgcacacaaattagaaaatctacaggaaaatgataatttcctggaaacacacactctcccagggttgaatcaggaagagattgaagccctgaatagac

SEQ ID NO: 372591 - DNA, 548 bp, Homo sapiens
aaatttctcaggtatagaacaattggagaagaatccatcaccccggattgtgaaaacacatctaccgactgatcttcttcctaaatctttctgggaaaacaattgcaaggtatactccagactccatgtcagttttttagtatggccctatccctttacccactcacatagtttattttttaaaatattttttgtttctttaaccatatacttgcaacaatctatactatacccactcaygttgtacgtaaatcttcaaaagccattaagttttagtctgagtttatatactcaagttttccaaacttgagcagcaacagaatccaaacctcagcacaatattactacttttttttccaactctccctagatcttcaggccttctgtaaaaactgaacttaaggacgttagtccttatttgaagatttggtataattctttgttgtaacatttgttcctgcttatctgcttttggggaaattttatacttcaaattctatttatttaatagctacagtgctatgtagattatgtgtttttttcttatc

SEQ ID NO: 372592 - DNA, 518 bp, Homo sapiens
tttctttcctattttctaaaataagcctttagtgttgtaaatatgtttcctcagtaaagctttagttgcatcccacacattttgatatgtcatgctttcaattgcactcaatgctatgcacatttttattttatctgaaatttcctcatttactgcaagattttgaagtgtatgatttaacttctaagtgtttgaggatttttatgttttcattctgttattgatttctaattttattccgttttagtcaaagatcatactctacataattgcaattcttttaaatttcttatggttcatcttgttctatcttgttaaatgttttctgagctcttgagcaggttgcatattcttctttgtaggtggatgtattcyctatatttttattacatcctcttgaccaataatgttgttcagttcttttatatcctttcttgttttatgtctagcagttctatcaattgcctgacagtggattgtaaacatgctcaactatgactaatgatgtgtctattctt

SEQ ID NO: 372593 - DNA, 631 bp, Homo sapiens
tactgaacaccagtgataaagaaaaaaccttaaaaattgcagaaaagttttaaaaaacatatcacctaatgaatgaagaaaatatagaaatagacttctcattaaaagcaatgcaagctagaaaacaataaagctaaatctaaaaagtcctgaaaaaatacaatccttgtgataaatatatgtatgcccagaaaattaaatatatagcaaatataattttaaaaatagactgaataaagattttttatagctacaagaaacaagaaaattaatcttctctagaagaccacttctttaaaaaatgttaaagscagaagaaaaataatatctaatggatatttggacatagacaactgaatggagagatgtaaaaattgtaaatatgtgtgtgaatataaaagatgtttaaaaattttatttaatatcactaaaggttaaatgactgcttaaaaccaaaataataactactgttatttattgtattgtgaagttataacacataggtgtaaaatatatggcaacaatagcagaaaatctgagaagaggtacaggaagtaaactgttgtaaagttgttatgcgaaagatgatattaattgcaaactgaacatacaactacaagaaaaggaacaa

SEQ ID NO: 372594 - DNA, 590 bp, Homo sapiens
catggcaagaacctgctctataaaaatacataaataaaaatttaaaatttaaaaaataggcttccccatgtaatcaaattcccactgagaaatttcaatccacctwtgtcacagtatctaacttatctttatttttgcaatagctggattattacaacctatgtatcatttgcagtgttattccaatctttatagccttgctgtgcttttctattgaatgatgatcattgacacacgttgaaaatattaagtactcgagaataatgccttaagcaggagtacttgacacacgtgaaaaatttaacttggtagcaaacaacaaaagaacaatggtaacagtaatgaagccagaaacctccttgcctcccagtaatttgcgacatatttctacattttgaagccagctagcagtgtggaacaagaaatccgatgcctcaatcccatttagataaataaaatttcaagattttcacaatgattaccttcatggcagctgatattaaatgagcacactgaagtatgctaggcactgttttaattgttttatgtattatttcatctttgcaataaatactcattgtctacattgt

SEQ ID NO: 372595 - DNA, 590 bp, Homo sapiens
catggcaagaacctgctctataaaaatacataaataaaaatttaaaatttaaaaaataggcttccccatgtaatcaaattcccactgagaaatttcaatccacctatgtcacagtatctaacttatctttatttttgcaatagctggattattacaacctatgtatcatttgcagtgttattccaatctttatagccttgytgtgcttttctattgaatgatgatcattgacacacgttgaaaatattaagtactcgagaataatgccttaagcaggagtacttgacacacgtgaaaaatttaacttggtagcaaacaacaaaagaacaatggtaacagtaatgaagccagaaacctccttgcctcccagtaatttgcgacatatttctacattttgaagccagctagcagtgtggaacaagaaatccgatgcctcaatcccatttagataaataaaatttcaagattttcacaatgattaccttcatggcagctgatattaaatgagcacactgaagtatgctaggcactgttttaattgttttatgtattatttcatctttgcaataaatactcattgtctacattgt

SEQ ID NO: 372596 - DNA, 601 bp, Homo sapiens
gtgaagccacaaagtgagaaaaaaggagctcctcctctgggagactgaccaggagaaggcctttaaagaaatcaaaggacccttgactcaggctccagctttagggctgccagatctaactaagcctttctttttctatgtccatgagtgaaaaggaatggccatagggatcctaacccaagtcatagggtcatggcactgcctggtggcatacttatccaggaagttagattctgtggcacttggatggcctccttgttttaaggcactatctgccactgctctgctggcacaggaagctaatgaactgactttaggacagcaactgacaatccaggtaccgcactcaggtgtaactttgatggaccaaagggggtaccattggttatcaaatccgagaatgactyaataccaagggctcttatatgaaaatccctgaataactttagagattgtgaatactctaaacccagctaccttgctccccaatgagtcagtgccaggaagtgcccttcattgccgtgtggatgtggtagatgaaatgttctcaagccagagagatttgacagatcagaccctcaaggacccggacattgaatat

SEQ ID NO: 372597 - DNA, 598 bp, Homo sapiens
tttacaaactatacatctgacaaagatctaatatacagaattataargaacttaaatcaatgagcagaaaacaacccaattaaaaactggcaaaagacatgaacagcacttttcaaaataaggcaattaaaacagaattaccatgaatcccagcaatcctattactgagtagttacctgaaggcatataaattgttctaccaagaagacacatgtatttgtatgttcatcatagcactagtcacagtagcaaaggaatcaacctagatgcctaatatggttttgttctgtgtctctacccaaatctcaccttgaattgtaataatcctcatgtgacaagggcaggaccaggtggaggtaattgaatcattgggttggtttctctgtgctgttatcatgatagtgagtgagttctcacaagacctgatagttttataagtacctggcatttcccttgctaaaactccctctgtcctgccaccctataaagaagatacctgcttctcctttgccttccaccatgattgtaagtttcctggggccttgcaagcaataggaaactgtgagtcaactaaacttctttcctttataaataatcc

SEQ ID NO: 372598 - DNA, 549 bp, Homo sapiens
gtaggtagttggcaaatttgatattccttttgaggtgtgggggatgattggtccaccctccaagacaacttgtaatggaatgttgacgcttttttatgatagctactttaaatctttgtcagataacttaacatttgattcatctcagttttgtttttcttgcttatttgatttctggggctgctggacatactgtaccatccctgctgatgccacataaaaggagtataaggtactttcctggacttcccrctcttgttagctgactttttgaaaattggagagaagccttcgggcctgggagaaacagggcttctctgatgtcatcactgtgaatgggtgggactgcttataaagccccgtttatatcgcaggagtttgaatgtcccagtacttcattgccattactggcagtgagttagctcacctacagagacccgggtgtggagcagagtttggaattctccactatgtctctgttgggcttcctctttcctaatcctttgaccagggagagcaggtttttctagatatttttttgtttcgtgt

SEQ ID NO: 372599 - DNA, 549 bp, Homo sapiens
gtaggtagttggcaaatttgatattccttttgaggtgtgggggatgattggtccaccctccaagacaacttgtaatggaatgttgacgcttttttatgatagctactttaaatctttgtcagataacttaacatttgattcatctcagttttgtttttcttgcttatttgatttctggggctgctggacatactgtaccatccctgctgatgccacataaaaggagtataaggtactttcctggacttcccactcttgttagctgactttttgaaaattggagagaagccttcgggcctgggagaaacagggcttctctgatgtcatcactgtgaatgggtgggactgcttataaagccccgtttatatcgcaggagtttgaatgkcccagtacttcattgccattactggcagtgagttagctcacctacagagacccgggtgtggagcagagtttggaattctccactatgtctctgttgggcttcctctttcctaatcctttgaccagggagagcaggtttttctagatatttttttgtttcgtgt

SEQ ID NO: 372600 - DNA, 461 bp, Homo sapiens
aatatttaatttgatgaatgtttatgaaaatagacttttatctggttttagtggcctatggttcctggtttactcatgttaaaaactggtggaagaaaaaggaagaacacccaatactttttttgtactatgaagatatgaaagaggtaaaatggtagatatggattctggataatttccccactgcatcatgctgtaaaaggrttgatatttgctttccaacttagtctatcgagtccaaaatgatgattgctttgcctatccaccatgtgtttttacccaaatcttgctataattaatgagtttctaattgtgaaaagaattatttatttttattcctcttatttcttagccactgcgttatatctgaccactctttcttctgcaattatttcctatatttaccaggatatcacatgcttacagttatccttagatatctactcattaatattttaaca

SEQ ID NO: 372601 - DNA, 550 bp, Homo sapiens
aaataaattaatacagatacacaaacacatgtatgcaaaattatacttttaacaaagatatatgttttacttttgaaatatgtttcatttagactgcaaaacaagcaagaagatttattatgaatcagagttgtttgtgctctcaggaaggaagataatgatctaaccaatctctttcactgggaactgttttctgaatattataaggccccagggattccagatggaatacagtataattaactcttcaccaccaaatacctatgttagaagaccttgagaataaatgattgcctaatagcaaatggcatcctacttcttgactacacttgcacctgaggatacaaaaggacaaggtgtatttaaccttagaatgtctctataagatgaaaacaagtaagtgcaattatctcyacttaaagtctaaagttggcaaacacttataagataaatgacttgctcaagactgactaggaggaagagttttagtataaaaacttaaactcattatctcttttttacatgggactgaatggaggattgagaatgg

SEQ ID NO: 372602 - DNA, 552 bp, Homo sapiens
cttcaccaccaaatacctatgttagaagaccttgagaataaatgattgcctaatagcaaatggcatcctacttcttgactacacttgcacctgaggatacaaaaggacaaggtgtatttaaccttagaatgtctctataagatgaaaacaagtaagtgcaattatctccacttaaagtctaaagttggcaaacacttataagataaatgacttgctcaagactgactaggaggaagagttttagtataaaaacttaaactcattatctcttttttacatgggactgaatggaggattgagaatggctctttatgtggaagataacatatttaatatattttctttcgttttaaggcrgtattgaaatgaaaaaagaataaacttctagattctgatagtatacatggtaataatgtaatcattttagtaataattaagctatattgggtaatttttgcatgccaaacagcatactgcatatttacatgttaaatcattccttttatgaaattttaacaatgacaatgatgtaatagcaatgattctatgaag

SEQ ID NO: 372603 - DNA, 501 bp, Homo sapiens
atttcttgagaattctttttaattacttcaatctctttgttacatttctctggtaaaattcttaattatttctccgttatcttgaatttctttgattttcttcaacacagctattttgaattctctgtctgaaagttcacaaatctctgtttctccaaaaacagagatacctggagccttatttagacaagtccctggtgccttatttagttcatttcaggaagscatgtttccctagatggtgttgatgctaatagaggttctttggtattgaggagttaactatttattgtagtcctcactatctggagttattagtagctgtactttttttgaaggttttccagatacgtaaaggaacttgggtgttgtgatctcagctgtatcttcttcagggagcaccataagcccagtaatactgtagttcttgcaggctcatggaggtattgccttaatggtcttgaacaagatttggatgaattctctggtttaccaagaaga

SEQ ID NO: 372604 - DNA, 501 bp, Homo sapiens
atttcttgagaattctttttaattacttcaatctctttgttacatttctctggtaaaattcttaattatttctccgttatcttgaatttctttgattttcttcaacacagctattttgaattctctgtctgaaagttcacaaatctctgtttctccaaaaacagagatacctggagccttatttagacaagtccctggtgccttatttagttcatttcaggaagccatgtttccctagatggtgttgatgctaatagaggttctttggtattgaggagttaactatttattgtagtcctcactrtctggagttattagtagctgtactttttttgaaggttttccagatacgtaaaggaacttgggtgttgtgatctcagctgtatcttcttcagggagcaccataagcccagtaatactgtagttcttgcaggctcatggaggtattgccttaatggtcttgaacaagatttggatgaattctctggtttaccaagaaga

SEQ ID NO: 372605 - DNA, 619 bp, Homo sapiens
gcatggtttgatatctgcatggttgtttctagaggacataaggatagcaaagattaatttaccagttataaaatcagctagaatttcctaagaaaaaaaggaaaacatttacttgttatttttccatatgagaaggcaggttagctgtcaaaagaccattgttctgaacttcagctttcctcttatttaatattctatagaatttgacaaagttctaaaacctcatatattgggtaagtagaatataaaaatgctacctgataaacatagggattttttccagctgtgctaaaataagtaaagatataaatgtcacccttagtttttattttttctttaccatattgcattatcacatatctccaaatattaggcagtattgacagattatattataagcaatactctttgagtgctcaaagtacagagactgaaaatggaagagaaaattagaagttaaagaagattggaagaatatcactaatttaatttaataaaaagtgactrttttgtgtatttctaaagtgtttaaaattgttcctcatatagattttgtatatgctttgttaaatttatgcttagttattttatctttttaattagattatgaacaacttat

SEQ ID NO: 372606 - DNA, 621 bp, Homo sapiens
taatctccaacaaccttgacataatgtggtcgggcgcgccggcccacttcgcacctgcagtctgaatagggctccttgtcaatgggggacacgcttgttgccctggcttgcaaaggagggaagtgaataagtcaagctttgtgaatgcccatgcgctctctcccgctctcctttgatcacggaaaatgtcttctaatttgtccctttttcattgtaacaacgttttcaaggccctttctatttttccaaaccacatttttataaaggacataaatcgycccccgaaaacaaaaggggcgcgtcctggccaactggcgctatcacgcttcagcgtttcacggttccagaaagactgttggttcttgaggcttccatctaagcaaacactgggctagaaggccccagttctccagagctccagatctgggcttctgggagaaggatggcgacagggccccttaaaagggaatgcagagggcccccctttttagtgggtgggggaggtagacagtcagaagggcaatggggtaagactcatatactaggcaccaaggggaggatgtgtcttttagagatgtgatgcagattccctgaactaactggaactcatcaggcagtttc

SEQ ID NO: 372607 - DNA, 621 bp, Homo sapiens
taatctccaacaaccttgacataatgtggtcgggcgcgccggcccacttcgcacctgcagtctgaatagggctccttgtcaatgggggacacgcttgttgccctggcttgcaaaggagggaagtgaataagtcaagctttgtgaatgcccatgcgctctctcccgctctcctttgatcacggaaaatgtcttctaatttgtccctttttcattgtaacaacgttttcaaggccctttctatttttccaaaccacatttttataaaggacataaatcgtcccccgaaaacaaaaggggcgcgtcctggccaactggcgctatcacgcttcagcgtttcacggttccagaaagactgttggttcttgaggcttccatctaagcaaacactgggctagaagkccccagttctccagagctccagatctgggcttctgggagaaggatggcgacagggccccttaaaagggaatgcagagggcccccctttttagtgggtgggggaggtagacagtcagaagggcaatggggtaagactcatatactaggcaccaaggggaggatgtgtcttttagagatgtgatgcagattccctgaactaactggaactcatcaggcagtttc

SEQ ID NO: 372608 - DNA, 531 bp, Homo sapiens
ggcctgaagatcctgctctctcctccccatcccagaactgccacacagagcctttgatattgtcccaagtttaatttggtaaggcaagaaaacaacctaataccacttctcatcccctgatttcagagaatctaatttttcctaactgcccctacagacttgaaggtaggggtgggcttttccacaagctccttctatgagtgrggcttggctgacacctgtgctgagaatgctggagaaggtggttggaaaaccaactaggacagaggaagctgagctcttggtgccccccactccctcttttatcctctttatgacattgttcgcaatgactgtctagtttagatatgacgagaccagcgcctcccttgaaatggaaacagaggactggataaagaagaaaaaagcactttgtagtctgcatcgtccatctttaattcagagacgcatctctactccagggagctctgcctttgatctctttgatttttttatgccagatctgttatggactaaaattcctaggttttc

SEQ ID NO: 372609 - DNA, 498 bp, Homo sapiens
gtttttaaacaaactttgggtgattctaamccttgatcaaattggagaatctccagtttaaagaatctttcctacccactcaccctgctaatggaaatgttgaatgtaggagtttgtatccctgaagactgaaaacaaatctgggaggaaagacaaggacaagccctctgaagctgagggctgagaacagagcagccaatgagcggccctggcttcccatccacacgtagcccagcactggatctaggggacaactgtttaggttcccagtcccactttgctgtgactacgagccctggtgagtgaaaaaagtgaaagggagatagccatgtgctcttctccaaagagaactccagagagggatatgctgacactctggtagggaagaaagttatggaaggaagagtcagaggggaagacacttgaggcaaggttctccaacacagactgaggagttcagataccacccaggaaaaggcagggggagatgacttgtgt

SEQ ID NO: 372610 - DNA, 498 bp, Homo sapiens
gtttttaaacaaactttgggtgattctaaaccttgatcaaattggagaatctccagtttaaagaatctttcctacccactcaccctgctaatggaaatgttgaatgtaggagtttgtatccctgaagactgaaaacaaatctgggaggaaagacaaggacaagccctctgaagctgagggctgagaacagagcagccaatgagcggccctggcttcccatccacacgtagcccagcactggatctaggggacaactgtttaggttcccagtcccactttgctgtgactacgagccctggtgagtgaaaaaagtgaaagggagatagccatgtgctcttctccaaagagaactccagagagggatatgctgacactctggtagggaagaaagttrtggaaggaagagtcagaggggaagacacttgaggcaaggttctccaacacagactgaggagttcagataccacccaggaaaaggcagggggagatgacttgtgt

SEQ ID NO: 372611 - DNA, 562 bp, Homo sapiens
ctatattatctggggatgatttaatggcaaaagtctcaagagaggtatgagttgttatgtaaattcagttgttttgattctttaatactgttttggaagacccaaaagcaatgtttcctaagcttttrtcacaggatgttttgtagaatccttgcttggaaattaaagcatatccaagtatattttcttccatactcagttccattaatgatgtttaaaactcaaatttccatagcagaggagaagaatatcctcttttattgccaaaatcctaacagatctcatctcctttgcacaatttgggcttagaaatacggatggcctcctggggcttatgttatttctttgcataagaatagaggcaaactccctgtgtaggaatcttgaagtctgtttgtgactagcctctaaagaaatttacctctgtttagggtggcaacctggccagaaacagggaagaaagaactgaacaagtgactattgatttagtgcagaacattcagatgacaagacttgtttctagccaggttctatacagtggccctcagctgagtaaggccca

SEQ ID NO: 372612 - DNA, 408 bp, Homo sapiens
tgtgttagtaaccaatggaagacaagaacctactaggatctatggacttataagtgttcattctataaatatattagccacagcgattgcatgcacaatcagttcatgtaggaggccaggtcttgtttcacttgactttattsatagtaagaaaatcaataaagtgaaaatcaataaaagattgtgattcttgaacgtattactttgttaatttgactagatctttaaccttcctgtgctgcttagaatttctggtatgggtctttctgaaatgtcttaaagaatatgactaatataaaatgttatagttatacatatttgacaaggcaaataggtatgtgattttggttgggcttttggaaaaattttaccacaataacaataaaacacaagaattagctactgcct

SEQ ID NO: 372613 - DNA, 550 bp, Homo sapiens
gtttatttggtgttgcataacagttatctaagtaaaatcttcagggaactagtaaattggcattttgtgtgagaatagaaatttgtgatgttcttatccaagttaggaaacttctcacatgttctttctactctgagtaacaatacatgcaacatgcaatattacatgtatctatataacaagattgcttatttaatattacaattagtctcttaattttttattctccatgtgatgcctatcacaggtttgcctttttacaataatggatttagatactgtaagtaaccatgattacagtaaattggtatttgttttcataggaaaagatcttataaaatgttaatggtasaaccaaagttaatgctattgtaaaaatacaaagatatatgtgtacattgatgtatctttaataaagatactgtaagaaaaatgtattacaccatcgttttcaagtagtctaaaattttttttctggtaaaacctattattcaccagaagtatgtaattaagcaactgaattaaaatactgcttgatctggttaatttt

SEQ ID NO: 372614 - DNA, 674 bp, Homo sapiens
agattattgaaaaatggagagagtccccttaattttattctaggtgcttgttcataaacgtattatttttttcattctaagattgatgtttttacctttctgctacttttgtgctgtacctaaagtcaatgtggaacatggcttttaaacaaactttctcctaccctgaaagtctccatagcccaacagagagaaggcaaattttgcccagggatcaagagaaaggatttccaagggagaactggtgaaccctccctcttctccacctgaatacagttcatggaaatctgaaaaataccttgcaaatgtttggagaaatcacagtggctttcagacattcaaatctgcattcccagactgtggcatgagttggtgytaccctcgtctactgcatcccttggactgaaagaagtaaatactcctctctttcaagggaatgaacctccctgaaagaatattgaaaatatcctcatttttcttaatttgctctccctgtcttggtagtcctgccaacagaattgagccatggaaattggtgaggttttaccatgttgcagataatgaaaggaatgtggaaaattctgatctcagctagaaaccacagttaaggaaagttcattttgctcctatgtcaaagttcgggaaaaggcagcccagttatctaaataatttca

SEQ ID NO: 372615 - DNA, 662 bp, Homo sapiens
attacctttgtaataaaatgtaaaaaatgcaaatggctgttgtctttattacgttttaaaccattggtttatctgcactatttcacttgtcacttgcacaatatgttggctaaaggggcggcacagtttgataacagagagctaggtcctgtgtgtaatcttgcaggcatgtacagtttgggtcatttcctcatctcccgcagaaaatacattatcctgctcatatttacatacttttcaatatttgtcaaacaatcataaattataaattaatgaaatgttcgacagtcttcagagatcagactaatgaagacatttacctttttagtgattttgagtctcatctttgtaagtttaatgacattttggtgctcacgctttattaggctttattagatttgtccttcactcccgctgtcattcagatgtctctacagaaacatcacctgcttcaggtataagaacaaatcgactttgaccaggaaacattaaaaacagggactctgcaaccttagttttaaagaattaatgccaagttgggtttaaaagaycactggaaatttttacccttcttaaattttttaatgaaactgctgttgtatttatttcaccagcagacaataacatgaatacttctgcatatgtacaagctgatatactgt

SEQ ID NO: 372616 - DNA, 662 bp, Homo sapiens
attacctttgtaataaaatgtaaaaaatgcaaatggctgttgtctttattacgttttaaaccattggtttatctgcactatttcacttgtcacttgcacaatatgttggctaaaggggcggcacagtttgataacagagagctaggtcctgtgtgtaatcttgcaggcatgtacagtttgggtcatttcctcatctcccgcagaaaatacattatcctgctcatatttacatacttttcaatatttgtcaaacaatcataaattataaattaatgaaatgttcgacagtcttcagagatcagactaatgaagacatttacctttttagtgattttgagtctcatctttgtaagtttaatgacattttggtgctcacgctttattaggctttattagatttgtccttcactcccgctgtcattcagatgtctctacagaaacatcacctgcttcaggtataagaacaaatcgactttgaccaggaaacattaaaaacagggactctgcaaccttagttttaaagaattaatgccaagttgggtttaaaagatcactggaaatttttacccttcttaaattttttaatgaaactgytgttgtatttatttcaccagcagacaataacatgaatacttctgcatatgtacaagctgatatactgt

SEQ ID NO: 372617 - DNA, 530 bp, Homo sapiens
tagatatataaattgcggaaaatgcattcaagataagagtatataacaagaaagtagacaatctacatttgcatgcaacaacaggaatcagttttataaacaatgtttatcaataaaagcaaaacataaaagtattttggtagatcaaattcaaataaaaagttaaagctaagatttatagtttaacaccattggcaagtttatttcttttaagaaggcaaatatttacaagaaaagttaggaaagtcgttagctcttgggggaggaaaagtactttgggaaggaaggattctagggtggtagcatctatattgtttctgctaagtggcccactatcaaaagctgtaggtatatatttaaatgcttttctctgtgttatattttacaatagtagattttaaaaaaacctaatttactagaaaaggagrtgctgagcatctattttgctagacgctttgggaataggaaattttagggtgaccaactggcccagtttgccttaaaccgagctgtttcttggagcatgattt

SEQ ID NO: 372618 - DNA, 566 bp, Homo sapiens
gttgttaagtgaagtaagccaagcacagaaagataaatattgtgtgttctcgttcatatgtgaaagcaaaaaaaaagttaatctcaaagacaaagagtagatttgtggttatcagaggccatgaagggcagggaggagaaaagatgaaaataagatgtaaatatatgggttgccagaagaaataagacctagtgttagatagatcagcagggtaactacagtttacaataatctattgcatgtttcaaaatagctagaagagaagaatggaaatggttctgtcataaagagaasacaaatatttatggtgatggacatcccaagaactgatttgatctttacaaattacatgaatgtattaaataatcatgtgtatcaccaaactatgtacatgtgttatgcatgaattgtaaaaaaaaaagaattgggtgataatttgagtccagtaggttaccatataccccagggaaaactgctatatctacattttttactatttatatattatcttgttaaatagacctcaatgattatgtcagatattcattgaagctataaattattat

SEQ ID NO: 372619 - DNA, 595 bp, Homo sapiens
agtccagtaggttaccatataccccagggaaaactgctatatctacattttttactatttatatattatcttgttaaatagacctcaatgattatgtcagatattcaytgaagctataaattattatgtagagttataataatgatgtggagaataagcttttttgtgcagactttttagactatagccttaacatgaacaaaaaaattaacaaccataaaaagtattcattatttttcacgaaagacacaaagtgtggaccactcttaaattattccaaaaaaatgaacatttttcacattttactaatagcttacacaaaataagttggtggccataatctttcagatatttctagccttactttaaaaatatgtaattataaaagaatgttgtggctgaaaataaaataaaaacttcctaaataacaaatcagtgaaaatccctattcttatctgattaaagatacatttcattttaaaggaaaaaagaacacctactctatagcatttggaaagaatgattttaattgtaaaactttttactttttcagcatattcaaccttccaattctccatgaagttatatgagtatt

SEQ ID NO: 372620 - DNA, 604 bp, Homo sapiens
attaggaggttggtcagtttttgtgtgaagagaaacatttagccaggtctcaaagttttcagagaaggagaagaagatgctattgtgaggtttgtctggtggaggtgatgagacctcagaaagcacatgtaattgacaacataaaacaaaacaaaacaagaatggagatagcatgaatagagtctcattaataaataacaaaaaacaggttccttgagtatctaagaaaggcaaaattccatggccyctaataaatagtgaaaatgatggaagagaattcccacgccatgtcagctcaaaacaagtatattttttgcccaagccatgctcaagctcttgctctttttctatgcctcctgtgctcatccccactcctattgtctaggatcccgcacactgggttattgatgtagctagtcatgacacttggctgatggagttcatttcaataccctagtagctaatgtcaatagaactttcattgattttccagtgtcctttaattcgttaggtattgaccttttatttaaatcccacatgaccattccaaacattttccacacttttcaagcctcaatttctagtcccttcattttttacaccc

SEQ ID NO: 372621 - DNA, 625 bp, Homo sapiens
tgatgtgtaagatggtgtttcattgtggttttaatttgcatttctttggcgattagtgatgtggagcattttttcatatgtttgttggctgcttttgtgtcttcttttgaaaaatgtccacttatgtcctttgcccactttttaatgggatttttttttcttgtttgcatttctaatagattctggatattaaccttttgccagatgcatgtttgtaaggattttctcccattctgtaggttgtctgtttattcttttaattattatcttgtacaggagcttttcagtttaatgaggtctcatttgtccatttttgttttcattgcatttccttttgagggcttatctgtaaattctttgcctaggccaatgtccagaagactttttcctaggttttcttctaggatttttatggcttcaggtcttacatttaagtctttaatccaycttgagttaacttttgtgcatagtgagagataggggtccagttttattcttctgcatatggctttccaattttaccagcaccatttcttgaatagggtgtccttttcccaatgtattttttaattgcctttgtcaaagatcacttggttgtaataatgtgactttatttctgggttat

SEQ ID NO: 372622 - DNA, 567 bp, Homo sapiens
ttggctctccttgctcctcagcctgcagacagcctattgtgggacctttgtgggatcttgtgattgtgttagttatacttaataaacatatatatatataagtttatagcaaataagacatactattttgctatctgaaggaaccagaagtttgtagatagcaaatactaagcagcaaaacaagcttaaggtaagttagaaaatgtatgggaacttcattctgattagaaaagaaygtgatatagaacagtagcatcactgttgcataacatctttctgaattgccaagtatttgaacaagtttggtagatactttgaagctaatagtagataaaaattgttcaaaaaaataatgacttctggttcaatatggtctgttacctttggctgtgaggcagcccctttacaacttcaataaatactataatgataaaggagaagatgaaaatctcaagatcacaaaaaataaatctaaccatttaccaatttgcaattgaggagaaaatttaattaggataatggaagtgaattgaggaaagcaatcagtgacttttacataataatata

SEQ ID NO: 372623 - DNA, 576 bp, Homo sapiens
attctagggcatgggtgtccagttttttggcttccctgggcaacattggaagaagaattgcctggggccacacataaaatacactaacactaacgatagctggtaagctaaaaagaaaaatcgccaaaaaatctgatagtgttttaagaaagtttacaaatttgtawtggacctcatttaaagccatcctgggccacatgtggcccacaggctgcgagctggacaagcttgttctagggcatccacaagtggcagagctcctcccagtgacaccttcctgactcttaggaccactgcaacatagtatgttagccacttgctgaggagagtcctgtcatactgacagctaattgattacagttatttcactctcttctgtatttccaaatactaactagaaattacttatacaaatttctgccaatatttgtttctatcctcctattttaagaacactatagataagtgcattgattgtcacgtctcagaattttgataaataccaaggttagatgttgtttttttttcagctatgactacaatcccctacattatatgttccatgattgcttcata

SEQ ID NO: 372624 - DNA, 587 bp, Homo sapiens
aactgtcctttctggggctggaacaattttcccgctaccccttggccctatcaccattgcaaagtgcatgtattcatgcagcacagacattcccttgcttgtcagctcttcctcattctagggcatgggtgtccagttttttggcttccctgggcaacattggaagaagaattgcctggggccacacataaaatacactaacactaacgatagctggtaagctaaaaagaaaaatcgccaaaaaatctgatagtgttttaagaaagtttacaaatttgtaatggacctcatttaaagccatcctgggccacatgtggcccacaggctgcgagctggacaagcttgttctagggcatccacaagtggcagagctcctcccagtgacaccttcctgactcttargaccactgcaacatagtatgttagccacttgctgaggagagtcctgtcatactgacagctaattgattacagttatttcactctcttctgtatttccaaatactaactagaaattacttatacaaatttctgccaatatttgtttctatcctcctattttaagaacactatagataagtgcattg

SEQ ID NO: 372625 - DNA, 576 bp, Homo sapiens
attctagggcatgggtgtccagttttttggcttccctgggcaacattggaagaagaattgcctggggccacacataaaatacactaacactaacgatagctggtaagctaaaaagaaaaatcgccaaaaaatctgatagtgttttaagaaagtttacaaatttgtaatggacctcatttaaagccatcctgggccacatgtggcccacaggctgcgagctggacaagcttgttctagggcatccacaagtggcagagctcctcccagtgacaccttcctgactcttaggaccactgcaacatagtatgttagccacttgctgaggagagtcctgycatactgacagctaattgattacagttatttcactctcttctgtatttccaaatactaactagaaattacttatacaaatttctgccaatatttgtttctatcctcctattttaagaacactatagataagtgcattgattgtcacgtctcagaattttgataaataccaaggttagatgttgtttttttttcagctatgactacaatcccctacattatatgttccatgattgcttcata

SEQ ID NO: 372626 - DNA, 726 bp, Homo sapiens
actttctactacttgctttcttactactttcaactaatatccagttaatacctggcacataccttatacactcctgccttcagcttaggtttatgccagccttccactcagaatgccttgacctctcatctatatttatttatatcctacctgccctcaaagcctaggttcaaatcctacctcttccatgaccacccagcctcttttcctgtgatctgttcctctcttaaatacagtagttatgttgtccatgcctctccctagaaacttaacataagctgtctgtgtaaggggctaaaaacacagagtgatcgatatatactatatatctatattcccaattttagtcctatacattcccagttagactccaaatgccttgaaaacaaaactatactttataccagtagttctcaatgctggatgaatatcagaatcacctaaggagtttttaaatataygtctagagtgggacctaggcatctggcatttttgaaagtttcccagaatatttaaatgttcagttagaggaatgaagtctgccttgtgcctcatccttcatggttcccagctcagtgcattgcattctagaggtgctcaacaaagggctgattaatgggttcattagctgagcccttctacatttgacattatcattacttcaaaagcattatccaaaatgcatcaaatgttacctctatatccaaggagtcagttacaccagtg

SEQ ID NO: 372627 - DNA, 513 bp, Homo sapiens
tgaagtttttttttatccctggcaatattctttgctcgaaatatactttaatattaatatagctactccatttttttattttgattactgtggcgtggtctaccttttctatccttttacttttaaactttttttttttttagctatagagcattgtacattttggggctctaggttttatgtgggtggatctttgatatcattttgcacttttgagggacttggactgtatcttcgctcccctatgtgtgccccattaacatgctgagtcagaatggtaggtagttttatttgtgaagatgtagagaagggctcattttggatataaagggttgttggattttgtgtggtcaatttgagttagcaattcctgatggactaccttgggggcrgatatgtccagcaggcagttgaatatatggttctggatctcagaactacgtgttcaggaggacttgaattcatgggtatggaagagtttccctaataaaactcttcagaatgagaggacca

SEQ ID NO: 372628 - DNA, 635 bp, Homo sapiens
agcataattttaaaaaatcttaacacatgataaaagacaaatgttaaaaggcaaaggttaaaagttatcttacatgtttggttcaagagtaaaactggaatcagattaggaatcaatcactgaggactcaactgtcttaaaataatctttcatcattgatatggcatcaattgttttataatttcctaacacaacaacttggtgtagcctcttaattactaccaaccaggtctcaccatttgtgacctattcttcattactaggatcccctaagagtcacagttttgggtttgtgtccctatgatagactcaatccttccatctagccaatgcaacatgccttgcctgtggtagaaaaagtggtcttctaatgagtgttagagggtgttagaaaatagaaaaagagaamtcaacaagaaaactccctgacaaaatgagaatggccactgatttcagagaagaggaatagttaaaaaaaaaaagtcaacttcagaacaaagaaattaaggactgtatgagtctttgttgtcaatatagaaaaaaaaattacagcaaaatgtagacaacatcctaaattcagcatttttaccctttttcctcttcttaatattatagctgtgtttttcactgctttt

SEQ ID NO: 372629 - DNA, 587 bp, Homo sapiens
tagaatgttataccctgtaaaattatccttcaaatacaaataaagactttcccaaacaaacaaaaggtgagagatttcactgacaccagacctgttttccaagaaattctaaagggagtttgttcaacctgagaaaaaaaagaggttagtgagcaacaagaaatcatcttgaaggtatacaactcactgctaaaagtacacaaacacagaatactctaacaatgtaattgcgatgtgtaaaccattcatatttttagtagaaaaactaaaagacaaatataacaaaaataataactgcaacwtaagagataaataatataaaagataaatagagataacaaaaagtcaaaaaataggaagcatgaggttaaaatatagagtattttagttttctctttgttttctttgtaataagagttaagttgccatcagtttaaaataattgattgtaagatgttatttgtaaaccttgtgatagccacaaaacaaaaatctattttagatacgtaacattttaagaaaagaaactaaaacatactaccaaagaaaatcacttttacacaaaggaagatggatggaaggaagga

SEQ ID NO: 372630 - DNA, 587 bp, Homo sapiens
tagaatgttataccctgtaaaattatccttcaaatacaaataaagactttcccaaacaaacaaaaggtgagagatttcactgacaccagacctgttttccaagaaattctaaagggagtttgttcaacctgagaaaaaaaagaggttagtgagcaacaagaaatcatcttgaaggtatacaactcactgctaaaagtacacaaacacagaatactctaacaatgtaattgcgatgtgtaaaccattcatatttttagtagaaaaactaaaagacaaatataacaaaaataataactgcaacttaagagataaataatataaaagataaatagagataacaaaaagtcaaaaaataggaagcatgaggttaaaatatagagtattttagttttctctttgttttctttgtaataagagttaagttgccatcagtttaaaataattgattgtaagatgttatttgtaaaccttgtgatagccacaaaacaaaaayctattttagatacgtaacattttaagaaaagaaactaaaacatactaccaaagaaaatcacttttacacaaaggaagatggatggaaggaagga

SEQ ID NO: 372631 - DNA, 558 bp, Homo sapiens
aattgtttacctgctaagttctaaggtatcaaccaaaggtcaactttacaagcagatgttgctaagagtagcagtctcaagcttgctatattaagtgttttctgcataattattataaataatgctataataaacaattttgttaatctttagtcacatttcagataattttcttaggaaagactcttagaaattggtattacaaaaaatatgaacatttaaaagacttttattactgacaattactttcctaaaagtcttcaaattttcattttcatcagggatgtatgagttcaggcatcaaagccttggctaaaataggtaaggtacatatgattcatatatcaatayacgataaacttggaataattcttatttttttaaaaatcaaattatgtgagataaatgaaaaactaattaattattgcttccttttcaggtagaccactaagaatatgccctttaaattatcactcggtgtccacttttccccaggacctctgtctttcttgcttagaaacctatacttcactgttatctgtaaaacatgtactatct

SEQ ID NO: 372632 - DNA, 562 bp, Homo sapiens
tttctgcccatttaaaacgcatctctctattctccatctcagaaagtagcagttctcatcttccagttcatcaggactaaagcctaagagtcatccttcatgctgtctttcccttacactccacacctaatctttcagcaagtactgacaattctgccatcaaaatatttttatgacagtatttttaaagtgatattagaaatgaaggaggagaaaataaaacaagcaagaagggaaaactaatgtgaaatttttttctgagttgaccatcattataagatactggttgcttaactgtccgaaaccttctgagaagctttataaaaggttattgagacccttctgcccagggacagaagggaggaaacatttayccactggctctcatccccccttcctggttgtttatgtgtcagctgaagctggtcctatgaatgtctcaagccaggaaggagtccaggaagtatggaacaaggaccagtaaccctagcagtggctgcagtgcctggaataagagatgagcccaagaggatttcaggtgatgaatgagaagtgtttgaca

SEQ ID NO: 372633 - DNA, 576 bp, Homo sapiens
acgggctgtgtggtaaaagatgtacttttaatatgctttttgctgcaatgttaagtattagtagatatttgctcaaaaccaagaccctaagtacctagtatctctctatgcccattcmtttctaattgtagactagccaggacttttctcagtttatctcatgtttataataattcccaaagcaagccagaaaccagcaatatgtcttaataatgaatttcccaacttctttacctgaagctacaaagctcagtaggtacatggtctagattccaacttattggtggtggcagtttttaccattatataagatgcatctccaaccttctaatttgctatacctggcttcatgctgccacttagtgtaaaccactaacccactaccacagctcttccctgtgtcttatgctttactttattgttgaccaagtttaaataactctacctttctaatgtgtgtaaaatctctcccaacactatccccagtgttactaccttcatttaagttgtctttccccgtgtgaattactatctccttattggtctctatgcatctaaaatccatcataccccatc

SEQ ID NO: 372634 - DNA, 630 bp, Homo sapiens
actgactcaaccagtcctatcacccccattcagaagctgactcagtatacaaagattatttttgaccccctatgatttcatacctaacccaaccaatcagtattcactattcactagccgtatacccaccaaactgtctttgaaaaaaatctagcctgtgaattctcagggaagtggatttcagaaacatctcccatcctcctgcttggctaacactatgataattaaactctttctctactgaaataccatgctctcaatgtattggcttttctgtacagtgggcaaaagaacctgttgtgtggttacaatacctggtcaacttatgaaccttgaagatgggtctttcccgtacaatttagctgcaatgcatacagtttcatgktttccttccccagcccctcaagggcttctgcaaatatttctttcattttatacacaacatttcctcaaatacatcagagtattgcaagaatttacacagaatcccaagattttatctactattctaggtctcaagtaaaacctgaatttgattatctaaacaaatttaccagacaggttacaccagattgtgtgccacataaaatttaaattttgaacaaaatagatctctcttcctttgatctc

SEQ ID NO: 372635 - DNA, 533 bp, Homo sapiens
accagtggaccagaataaagtccagaaatagagccaaataaggacactttatttatgacaaaggtgacactgcagactagtgagtaatggacaatcttttcagcaaatagtgctgtgtcaactaaaattcatatggagaaaaaaaagaattttgacccctattttgtcccctaccaaaaaaaaaaaatcaattccatgaggtttttagatctaaatgtaagagcttaagaartaaagcttctaattaaagagaatggatcacagaactaaatataaaatgcaaagttagaaagcttctagaagaagacatggagaaaatctgcatgactttacgtttggtgatgagtttttattttattttatattttgtggatgcatattttatgtatacagagttttcgatacaatagcaaaaagtacagcaaaattgaaaagttgactttattataaaagaaaaattgataagttggaattcattaacattaaaactttttactctgtgaagaaattgttaagagaatgaaacgacactg

SEQ ID NO: 372636 - DNA, 616 bp, Homo sapiens
tagcaccatctgtgcacttccttgcaaattccagttttaacaaagaatcttgctgatrctgtctggctgtgttccgacccaaaatctcatcttgaattataatctccataatctctgtaatccccacatatcaagggagagaccaagcggaagtaattggatcatggcagcagtttcccccatgctgttcttgtgatagtgagtgagttctcaagagatctgatagttttataagtgtttggtagttcctcctgcgttcattctccttcctgctgccttgtgaagagggtgccttgcttctcctttgccttctaccatgactgtaagtttcctgaggccttctcagccatgctgaactgtgagtcaattaaatctcttttctttataaattacccagtgtcaggcagttctttatagcagtatgaaaatggaccaatacacctgctaactcagtttagtgagaagccctcatccttaatatctaatcaagttcctcatcctcccccacccccaggcaatgtctgatgactctggcctatcttcagcaataatccttttaggtcagttgagccagaatttcctttatcctgatgtttactcttagtaaattctcact

SEQ ID NO: 372637 - DNA, 627 bp, Homo sapiens
attattagcatgaattttaccattcattcttaattctacttttaagtacaaacatcagagcacttaactcacatgcagaatcactgaaatttcacaatttgtgtcttgtgaatcatcactggatagtgcctccagaggaccagaagaaaacttgggagtgggacaccccaggcacagagaagaccaagggagggcctccttaggacactcatggggcaggtgmagactctcacaggtctctggggttcctgccctgcaatctgggatcaagcctgttggccactgggatcctccttccacaaactattggaatggtggccaggactgggatgagaatggagaagtcaagtgaggcattttttcatcccataacctgccaccccaaccatagcgaacaagcaatcctcaagggtattgcaacctccatgccaggacatgtgagtcacagatgggtaagaagctcccaagtgctgagtcccccaccaaatggtgctgtgatgctgccagccaagggcaggaatggccactgccatgacccaccccaagaagccatggggcatggatgtctgacctagaccctcccaacaccctgtgcctgggtccctccaacactagagagtagagggt

SEQ ID NO: 372638 - DNA, 381 bp, Homo sapiens
atacatcccttcataccatgttatgtcatcttgtattgcattcctttgtttattcattaaacatcgatatggcacatgttcctctaagaagcggggatgcagcagtgcacaaaacacagttcttgacctcacggatcttccattctagtggggaaaagaacaatttttattgaatgtacttcgcatcccatttaattatcaaaaaaaaaaaaatcccctgtgaagtggattaaaatatcctccaattaatagataagaawattaaggcacagagaggctgggtaacttgctggtcacacagtgaagacatagcactgcctggcctttgccttggctgtctgcctcctgggaccacatttcccctactgcttgtgagagagg

SEQ ID NO: 372639 - DNA, 514 bp, Homo sapiens
acagtgacatagtctcaatctactgtcacacgcagtgcaaaaccagttttaagattagtcctctarctgccaactttcagattgttgccctttagtaaatattttaaaactacaagctatattagtggatgctcaagtcaatttagtgggtactttccagatgttcaaaaattatagagtatagaatggaatgagtgcattgcctgtagtgagtattgtataatatatttggttctgttttatgtcttttgtgtgcatgtgtgcatattggagtataatgtaaactacattttttactgtaggtcatgggacaaggcagtttataaaacagtatcttaagtttttcttacataaaaaatgttggagccccattgactggaattatccacagcattctctcttctctttctaagagaaagcccttatcaaaaataaaagataaaataaaaggactccctgatatgtttcctcatgagagcacttcaatggcaacatccataggaacatagagagt

SEQ ID NO: 372640 - DNA, 577 bp, Homo sapiens
gtaatttttataatatttaactatccaaaccactgagaaactcattttaacatgtctcattgagttyttgtaataacaacaataactataacaacttttttaacacttgacaatcaacaaatgcttatatccattattttatttgattctcacaataatcctgtctttgttttataaacgagaaggcacatgcatggagagtgtctgacttgctgaagtcatccagcaagaggaaggctgaagccaagttggggttgtcaggcagggtcgtcatgcgggaccagttgtgaaagccctgaaagcaggtcacaggggctccattttattgggtcagcagcccagatacctgaaagagacaagttacctgatcaaagtggagagagattcaaatcaggcaggccaggtgagaggcccctcaggattctagagagatctgatggtggctgccccaagatggtggcggcttaggtggggagagggagtgtttcacccttatctttcagggaatcctgaatcctgcaaccaaaacctctttctttactttgccccttgaagaaatgcagactagccccaaact

SEQ ID NO: 372641 - DNA, 577 bp, Homo sapiens
gtaatttttataatatttaactatccaaaccactgagaaactcattttaacatgtctcattgagtttttgtaataacaacaataactataacaacttttttaacacttgacaatcaacaaatgcttatatccattattttatttgattctcacaataatcctgtctttgttttataaacgagaaggcacatgcatggagagtgtctgacttgctgaagtcatccagcaagaggaaggctgaagccaagttggggttgtcaggcagggtcgtcatgcgggaccagttgtgaaagccctgaaagcaggtcacaggggctccattttattgggtcagcagcccagatacctgaaagagacaagttacctgatcaaagtggagagagattcaaatcaggcaggccaggtgagaggcccctcaggattctagagagatctgatggyggctgccccaagatggtggcggcttaggtggggagagggagtgtttcacccttatctttcagggaatcctgaatcctgcaaccaaaacctctttctttactttgccccttgaagaaatgcagactagccccaaact

SEQ ID NO: 372642 - DNA, 594 bp, Homo sapiens
ctggctatactaaagtaaatagagtatacaagctatygcaatgggtgcaacacaggattatgtcaggagatatagtcagagaaacaaggctagccaagatcacaacacaacttcaggtcctatttaggctaataaacacaggactgtagctattggagctagaatagtacataaattagtggcaattatttatggtgtgaggttccatctccattctccactatccagatcccgtctgaagtttctagtcctatataagacctttgaaaccaccaaaagtgaagcagagaagggagtcagggtggcaaaggaattcgaaagcattttcttctggtatggtcatggagacaggccttcctatcccccctttgtaaaggaaacagctctatccttgtccctaggctgttttttcctaaagaaagttatggccaaccatgagttctaactatctgactcaaggcagttaattcacaggctcattttgcattgacgagcaggtgtctttaggttgggctctctgggaaacaggccccgagatgaaaatatctatgcagaaggtttatcatggtgcactgtcaggatcagcaacctaag

SEQ ID NO: 372643 - DNA, 510 bp, Homo sapiens
gttttaatgccaatgctgtccttttcctttggtttttacatagttcttatgtatggattttataggttttctcttttattccttaaattttaatgttttactgaatgaacctttgcagttggatttagaggatacaggtgcagagctcagctctcctttccctggyggtgctgccttggacagctgtagctctggggcttcctcacctgtagcattagggattattagcattgggctcacaggatttcagaaaggatcacatgaacctgaatgccagaaggtgttcctgtggtgctgggcatatggaaggggctcgatacatgttagttcctctccttcctaatgactgtaacccttttgaacctaccataacggaactgagctccattcatgtatcctgtgatggctgctgagaaacagagataaatgagacatcacagaggttatcttttaattatgatgattatttctaaaagaataattgtaaagaatgctgtaataacaagtcca

SEQ ID NO: 372644 - DNA, 532 bp, Homo sapiens
ctgtccttttcctttggtttttacatagttcttatgtatggattttataggttttctcttttattccttaaattttaatgttttactgaatgaacctttgcagttggatttagaggatacaggtgcagagctcagctctcctttccctggcggtgctgccttggacagctgtagctctggggcttcctcacctgtagcattagggattattagcattgggctcacaggatttcagaaaggatcacatgaacctgaatgccagaaggtgttcctgtggtgctgggcatatggaaggggctcgatacatgttagttcctctccttcctaatgactgtaacccttttgaacctaccataayggaactgagctccattcatgtatcctgtgatggctgctgagaaacagagataaatgagacatcacagaggttatcttttaattatgatgattatttctaaaagaataattgtaaagaatgctgtaataacaagtccagagaataagggagcactggagggacatttattctcat

SEQ ID NO: 372645 - DNA, 568 bp, Homo sapiens
tacacctcacacatcatctatagaaactcttccctccaagtaggaaagtgatgcatctacatttcctcatggactccgtactcatagataggtatctgccctgtggaagtttatgctttcagctcaggcagaagatacttgtccttgtaactgctttggataattgttcaatactctacaagtggaattgaccagtggaaatgcaacgttttgaaatacagcttttatcctaacttttagatagttattgcatgtgaagacataatgtttacagattcaaagttcacacacacaaaacaaaactttgttctaataatcaatatattcaacaaacatgtattgaagacctagtgaataatgaacactgagctcagattttaatattcaccatcagcatgtagctgccagtctctatctatgtagctatatttatcttactttatttgtctrtctatctactgcctcattcaacaaatgatttgagattgattaatactatcttattcacccttaaaaccctccagtgagaaattgactattattatccattttacatgtgagacaacaa

SEQ ID NO: 372646 - DNA, 466 bp, Homo sapiens
cctatctatgtgtgtcctcactgatgtctgttagtaagatcataaaccatatgctcaaggaccttatggtcctctgaagaaagccagtctatagaatcaagatatgattatggtcaatcactgtctcatcaggcaacataaattggagactgttttcccatgtgcagctcatgacaagtcttatgattgggggcctatgttttattgcctataaatccttaatattatactagctggcagcataaagctaccatttggaaaccccagtaagttaaaaaaacaatagccccacagactctgccaattctaatttctttaatgtttagggtcattaagtggcagaaagatatcactatgaagtcmttatacttacaacatttggacccagatggcagttgttcttagccattatggatcaactcttcaaaaaggctgaggacagatccacattggagagcatagttta

SEQ ID NO: 372647 - DNA, 634 bp, Homo sapiens
gaacctacttgagatgtggtgggctgtcagttattgtcataaaaaatgcaagcctggtgttatatctctcaatttcttaagagaggcctgatatatagatttttatgcaaaattaccaaattaaaatattttaaaacataaaagatgttttgaaggtcgcaaaaactagtcatactctagttgcatcttatggtctttctttttattattattgccttagaatgtaggataatgtcattgtgagaaggaagagattagggtaggaaaagatgtcaagtgtgtgggtcaaaagcagagtcaggggaaaaaattctgaagctttggagrgacttcagcacacagctttggcataattttatgtttgcagcttttggtgttatttttatagtatgacttgtctcaaggaggggcagagtaacagtagttcatgcttggattttggggtcagagagacctgaatcttagatgagtttttaaagctctctgacctttaattcttagtctaaaaaaaagtaatacatctatctcacacagttattggcaggattagaggtgatcagtcaggtgaagcacgtatcacaatgcttgaaatgtagtaaggacttaaaactggtagccaataatacaattattg

SEQ ID NO: 372648 - DNA, 634 bp, Homo sapiens
gaacctacttgagatgtggtgggctgtcagttattgtcataaaaaatgcaagcctggtgttatatctctcaatttcttaagagaggcctgatatatagatttttatgcaaaattaccaaattaaaatattttaaaacataaaagatgttttgaaggtcgcaaaaactagtcatactctagttgcatcttatggtctttctttttattattattgccttagaatgtaggataatgtcattgtgagaaggaagagattagggtaggaaaagatgtcaagtgtgtgggtcaaaagcagagtcaggggaaaaaattctgaagctttggagggacttcagcacacagctttggcataattttatgtttgcagcttttggtrttatttttatagtatgacttgtctcaaggaggggcagagtaacagtagttcatgcttggattttggggtcagagagacctgaatcttagatgagtttttaaagctctctgacctttaattcttagtctaaaaaaaagtaatacatctatctcacacagttattggcaggattagaggtgatcagtcaggtgaagcacgtatcacaatgcttgaaatgtagtaaggacttaaaactggtagccaataatacaattattg

SEQ ID NO: 372649 - DNA, 634 bp, Homo sapiens
gaacctacttgagatgtggtgggctgtcagttattgtcataaaaaatgcaagcctggtgttatatctctcaatttcttaagagaggcctgatatatagatttttatgcaaaattaccaaattaaaatattttaaaacataaaagatgttttgaaggtcgcaaaaactagtcatactctagttgcatcttatggtctttctttttattattattgccttagaatgtaggataatgtcattgtgagaaggaagagattagggtaggaaaagatgtcaagtgtgtgggtcaaaagcagagtcaggggaaaaaattctgaagctttggagggacttcagcacacagctttggcataattttatgtttgcagcttttggtgttatttttatagtatgacttgtctcaaggaggggcagagtaacagtagttcatgcttggattttggggtcagagagacctgaatcttagatgagtttttaaagctctctgacctttaattcttagtctaaaaaraagtaatacatctatctcacacagttattggcaggattagaggtgatcagtcaggtgaagcacgtatcacaatgcttgaaatgtagtaaggacttaaaactggtagccaataatacaattattg

SEQ ID NO: 372650 - DNA, 634 bp, Homo sapiens
gaacctacttgagatgtggtgggctgtcagttattgtcataaaaaatgcaagcctggtgttatatctctcaatttcttaagagaggcctgatatatagatttttatgcaaaattaccaaattaaaatattttaaaacataaaagatgttttgaaggtcgcaaaaactagtcatactctagttgcatcttatggtctttctttttattattattgccttagaatgtaggataatgtcattgtgagaaggaagagattagggtaggaaaagatgtcaagtgtgtgggtcaaaagcagagtcaggggaaaaaattctgaagctttggagggacttcagcacacagctttggcataattttatgtttgcagcttttggtgttatttttatagtatgacttgtctcaaggaggggcagagtaacagtagttcatgcttggattttggggtcagagagacctgaatcttagatgagtttttaaagctctctgacctttaattcttagtctaaaaaaaagtaatacatctatctcacacagttattggcaggattagaggtgatcagtcaggtgaagcacgtatcacaatgcttgaaatgtagtaaggacttaaaamtggtagccaataatacaattattg

SEQ ID NO: 372651 - DNA, 582 bp, Homo sapiens
gatggattcaggggcatggagggttgtttcctttgtgttgtaaaggtatagcttttttctgaacctttatttctaagaaacctaggttacgaattatttgtgaaataatctcctgtcccaatcagcattggttctgctacctcccttccaccaggctaccmgatttttaaatgatctcctcctataccagtgttcctatttggaaacttgagatgacatcattctaattttaaccatgtcccaaatcttcccctttttctgattctcatctgttcactctctcatatgtatctctgtgtgtatatacttacatacgcatagatgtatatgaatgtctatatcaatgtcattatttcttccagtgaacatttattacaatgttagacatttggggtcaaatgatgagcaagataagaatgggtgctggccctctggagtccggagtcctaacaggaaggcatagcaataatatgaaattgttgggataaattctacaataaaaggagttcagagcgcataggaagcctgaacccagacctggaaggttcagcgacaacttctcagaagagatggcatttaaac

SEQ ID NO: 372652 - DNA, 582 bp, Homo sapiens
gatggattcaggggcatggagggttgtttcctttgtgttgtaaaggtatagcttttttctgaacctttatttctaagaaacctaggttacgaattatttgtgaaataatctcctgtcccaatcagcattggttctgctacctcccttccaccaggctaccagatttttaaatgatctcctcctataccagtgttcctatttggaaacttgagatgacatcattctaattttaaccatgtcccaaatcttcccctttttctgattctcatctgttcactctctcatatgtatctctgtgtgtatatacttacatacgcatagatgtatatgaatgtctatatcaatgtcattatttcttccagtgaacatttattacaatrttagacatttggggtcaaatgatgagcaagataagaatgggtgctggccctctggagtccggagtcctaacaggaaggcatagcaataatatgaaattgttgggataaattctacaataaaaggagttcagagcgcataggaagcctgaacccagacctggaaggttcagcgacaacttctcagaagagatggcatttaaac

SEQ ID NO: 372653 - DNA, 520 bp, Homo sapiens
tattttgaaaagtgaaccaatgtcctttcctctcattatcatatgttatcccatgatccttctctgtttgagtggtcagaccacagagagttgaaagcagaagaagggcttttaaatttcaaaaccctgtgaaccctgaagggtcttgggcctcaagaaaacaaacacgagtcagaccagggtttcttgccttcaagactccataaaagggaaagggaggaggsggagagcttgggcattagggatacatgcctcctaccccattcgaagccacagaaactccagaaaggaatcagagctgggaatctgagctctgttttgagtgttcacccaagaagccatgaaggaaccaaggggataaatagctacaatccagtcacaggaaacagtatctccccacttgccccccaatactttactattactaagcattatttaagcctcctggaacttaaaaaagaaaaagtcgagctctaaaaccccagttataaaaggcattcttgggataattgggggattt

SEQ ID NO: 372654 - DNA, 520 bp, Homo sapiens
tttcttctgtagagacagtaaaataaagagtctctggattaaagaactccagagtaggatactattgtttaaaaagaaggaggggataaaaatcaggtaacaaaaatagctcttagaaaaaaattgtaaatgcaagaacaaaggtaaaactcagtagaagggttagaaaataaaatttagaaaatctcccagaatgtagagtaaaaagaccaaggatggaaaataagagataaaagaaaatatgaagactgttayaggaagtataaaatccaagtaacagaaatttctgaatgcaagaacagagaaaatgtattatccattacattagttatccagtgctgcatagcaaattggcccaattactcagcagcttataataacaattttttttatcttacccaatttctgagggtcaggaatctgggagcagcctaataggatagttctggctcagggtctcccgtgaagttgcagtcacgttgttggcaagggctgcagtttcatctgaaggcttgaatgg

SEQ ID NO: 372655 - DNA, 639 bp, Homo sapiens
acttaacatttccctactccttacccattccctccccatctctctgcttcccactccctctcctggggtatttggacttgaggtttaatgcgggctttgctgtgccttggccactggagtcaggctgttcaggctccttcttagtggaatctctgctgcatcctgtactgtrtgcattcactgggaggagttggaagggttttaattcactttaattcaccctgtgtgtgtgtgtgcacgtgcacgcattgaatcttttacaaaacactttttttctatccattctccacaaaccagagaggctggatgaactatgagtcccattttacagatgagacaactgaaacacactgctttcttacagagtttccacctagctagctgtggcagctgggatgaaactcatgtttgattcacaacaaattactgcctcccgcagagaaaggaatccaaaatctctgcaaaagggtggaggagagggtcctgagctgggcaggctaaggatcctaagtgcaaacatatcctttggtcagtgctggaattgcctccgtctgatcttcttcactgaacctcccagctcactcccaacactcccagtgacagagcaaactccccatcccgaggactcccgcgaccaag

SEQ ID NO: 372656 - DNA, 580 bp, Homo sapiens
cagtgctcctgtaaagtgcacagcagcactagcaaatctaagcctgaatgaccttagctacttgaaccgcctctcgaccctgagccaggctgccttccccatccagactctagccaggctctaggctggccaggccccaccatcaacagcctctccatgcccagggctggcatgaaacactgcctgatcatcccagtctgctgaattctcacagtgagggtggcctgagtcagcaggagcycaggagctgagaacttgttttaagagaaaggaaacttgtctaagctcacctcctactctctccctggggtgagaaaagggagcctgcccagaaatgtcattttctgctaatttcaaagtgtacattgcactttgctgggctgtttattctcttaatgcattctgtctgaaaatagcagtcccttccctgagaccccagtccatgcccagtcctgggcagttagagaaaccctgctgctccagcctctcccttgcagagtcttttgctgttctccatcctccccagccctccctgtctgtggtgctgtctcttctgcctctcctcccatctcagtcctca

SEQ ID NO: 372657 - DNA, 585 bp, Homo sapiens
ctaacagcaattatattagtgggagaacagttaagaatccatgttctaatggtggctgtaatgagtattgtaataagaaactcaaggcaaattttatctagtagatcaatcaagaagaaatttaaattgagcattatgagtgagtcattgtcttgtatgcaaaacaatgagtgcaaatgttagagcaacaggagaggggaattcacatgactcagcctgactgtgaatgacttcccaatgaggtaagcattcaatctcaaacaatgcttcgaagatgaaygacatttctaaaattccacagagagtgagtagtggagcctgggcccaaattaggttctgtctgataccaaagccccacacacttttcaaagttgactgactttgagcctttgtctatgactgtccctggcctcccttgcccagcaagactgggtaccagaatggctcagaacaaaggagtgtgggcaaccatgacagggaaggtctccttcaatgatgatgggctatacagaacaaataaccaggagctatagtttgcaaagtgtaccaggattatatttaagatggaggggaaaacccacacac

SEQ ID NO: 372658 - DNA, 616 bp, Homo sapiens
aatgtactcatacacattaattagccatacaaaaggaaagaaaaaaatgagtggtattaatggtcccttccagtcctgattggccaaagacctctgattctggacttctcaggagtggacaaagttgggtctgggtctggggcgaagtgaggctcctggggatggccctggaggacatctatcctaggaaactggaagttgtctcactgagtacattgagtcatttagcctccactttggtcttcacctcttacccagctgacaacaaggcttcttggtccctctgagtctgatacacagaggctcatcttgccttgtccactgtgctgcaggytcactggcattatttggggcttctgtcaatctttattccaagtcttctcctttggccaaaaatgtgctttccttattagtacacttgcagttccagggatgaaaatctaacccctacaggtttaaataaaacagagaagaaatgaggtgtcttattggcccattcaactaagacatccaagagttgatggctttgagcacagctgaatgcagtggcttaagggctatcatcttataatcttgcctttccatctcttgaccagtgcttctacattgagttaat

SEQ ID NO: 372659 - DNA, 540 bp, Homo sapiens
cttgattgggagttgggggctccccacttcatccctgctccagcatttccctgcaatctgaggcagtggtggaaggagctggactgaaagtccgtgtgttgctgagcaactcttgcttcgggtccattcattactcagcaactatgcactgattgtccaccatgtgccagggcactatcaatagcacagtggtcaggagtgtgcatgataaacgtggactttctgggttcacaacccatctctgtcacttaccagctgtgtgtcccagaacgagttacttagccactctatgcctcagttgtctcatctacagaatttgataatattatttatttcccagtgttctgggaagaactaargtagatactttatgcaaagtgctcccatcaattgctggcacatactaagctcttgatgaatgttaggaattgttaggcttgtatgggttcttcactgaacatgacagatattgtccctgcctcacaaagcatatctacaaggtagcagtctattgagtagatgatgcaagtgtggctcaca

SEQ ID NO: 372660 - DNA, 568 bp, Homo sapiens
tatttgaggaaatctctgtcgaatcatagaccactaagttacttgagtggagaattcagccaccacacataataagaaatacagactttaatgactaagttcaagaaagccactcaacagagaagcagcagcaggaacagcaacaacaaagtccaaggagggcattagaaatctgatttcatatgttgtcccattagattatttaaggtgtccagtttcaacagaaaaattttacaaggcatgcaaagaaagaagaatacaacccataygcaggttaaaaaaaaaaaagtagtcaatagaaaccatccttgagaaagctcagagtttggacttactagacaaagactttaagatagctattataaatacgtccagacaacaaaaagaaaccatgtccaaataattagtagacagtctgcaaacaatgtttctccaaatagtgagatagaaattacattttaaaatagtcaaatagaaatcctgaagctggaagctacaacaactgaaatggatatttcaatagtgactcaataatagatgtgagttggtggtagaagaaaaaaaatag

SEQ ID NO: 372661 - DNA, 568 bp, Homo sapiens
tatttgaggaaatctctgtcgaatcatagaccactaagttacttgagtggagaattcagccaccacacataataagaaatacagactttaatgactaagttcaagaaagccactcaacagagaagcagcagcaggaacagcaacaacaaagtccaaggagggcattagaaatctgatttcatatgttgtcccattagattatttaaggtgtccagtttcaacagaaaaattttacaaggcatgcaaagaaagaagaatacaacccatatgcaggttaaaaaaaaaaaagtagtcaatagaaaccatccttgagaaagctcagagtttggacttactagacaaagactttaagatagctattataaatacrtccagacaacaaaaagaaaccatgtccaaataattagtagacagtctgcaaacaatgtttctccaaatagtgagatagaaattacattttaaaatagtcaaatagaaatcctgaagctggaagctacaacaactgaaatggatatttcaatagtgactcaataatagatgtgagttggtggtagaagaaaaaaaatag

SEQ ID NO: 372662 - DNA, 568 bp, Homo sapiens
tatttgaggaaatctctgtcgaatcatagaccactaagttacttgagtggagaattcagccaccacacataataagaaatacagactttaatgactaagttcaagaaagccactcaacagagaagcagcagcaggaacagcaacaacaaagtccaaggagggcattagaaatctgatttcatatgttgtcccattagattatttaaggtgtccagtttcaacagaaaaattttacaaggcatgcaaagaaagaagaatacaacccatatgcaggttaaaaaaaaaaaagtagtcaatagaaaccatccttgagaaagctcagagtttggacttactagacaaagactttaagatagctattataaatacgtccagacaacaaaaagaaaccatgtccaaataattagtagacagtctgcaaacaatgtttctccaaatagtgagatagaaattacattttaaaatagtcaaatrgaaatcctgaagctggaagctacaacaactgaaatggatatttcaatagtgactcaataatagatgtgagttggtggtagaagaaaaaaaatag

SEQ ID NO: 372663 - DNA, 536 bp, Homo sapiens
agcttccatttgagtttgttgtcttagacactctgaccacagcagttattttctttgcagtgggagcagagctctgtgtttgacatcccagaggtcagcatggcctcagccaagctgtttaagtcacwacctctagggactattcccagggctggctgggcccttgttctccctctccctacttagcctctggaagctccttgggtaggtagggttgggcctgggaagtggcacatcagtgtggcttttccttaagctcaacctctctgcagacctgcagcatccaactgggtctccccagggatgacctccagtccctagggggcctttctgggtctcagcactttaagctaaggatttttggacaaacttctcaagtcgaagatcctttattttaatgaaactggctggtactcaaggcctgaggatgttcacgtccattctcagcttcttcatttgttctggtatagattttttagtacttggtagatatgtttcagattgtgtggatgaaatttctagtataagtcataata

SEQ ID NO: 372664 - DNA, 555 bp, Homo sapiens
ctcagcaccagagctgaggctgagagatttttctcagaggtggaagctaggcaaagaatagaaagcaccaagtaaatctccaaagaactgacttaatttgcaacagagtgtggggaagttcaaatctaagggaactgtcaaaatcaggagaagttgtggtgaaaggcaactgagaagagaatgataggttaattggagacataggttaaactggggtacaactattttgccagagagaattaggggaagagacaggtgggaagacacccccctgggggccgaacaaatctcagatgctgatttggaactataccttgaaagaagcctaaatttgactggaatttgcctgtgaagcaatttctgctccagcgtattgttgaaaatgacagagcaatcaactggcaattagtggagcttaagaamtgggtatagtcagagaaagagatagttaaagagagtcttgcaaaaaccacagtaaccccagggtgactatgggcatacccacttctattcaacattgaactagaagttctagccaagacaattaggcaagaa

SEQ ID NO: 372665 - DNA, 555 bp, Homo sapiens
ctcagcaccagagctgaggctgagagatttttctcagaggtggaagctaggcaaagaatagaaagcaccaagtaaatctccaaagaactgacttaatttgcaacagagtgtggggaagttcaaatctaagggaactgtcaaaatcaggagaagttgtggtgaaaggcaactgagaagagaatgataggttaattggagacataggttaaactggggtacaactattttgccagagagaattaggggaagagacaggtgggaagacacccccctgggggccgaacaaatctcagatgctgatttggaactataccttgaaagaagcctaaatttgactggaatttgcctgtgaagcaatttctgctccagcgtattgttgaaaatgacagagcaatcaactggcaattagtggagcttaagaactgggtatagtcagagaaagagatagttaaagagagtcttgcaaaaaccacagtaaccccagggtgactatgggcatacccacttctattcaacattgaactagaagttytagccaagacaattaggcaagaa

SEQ ID NO: 372666 - DNA, 614 bp, Homo sapiens
aataaatttgaaaacttagatgaaatggtcaaattttttgaaagatacagattttgtaagctcacttaagaagaaatagataacctgaatagcccttatctctttaacaagttgaatttgtagttacaaatccctcccataaaactccaggaccagaaagcttgtcaggtacattctatcaaacagttaaggaagatatttacaaataatacctcccaacttcttttatgaggccagcatcatcctgatgccaaaacctgacaaagacatcacaaaaaaggaaaactacagaccaataaccctcaagaacatagttgtaaaaattcttttttctttttcttttttttttttttttgagacagagtctcgctctgtcacctaggctggagtgcagtggtgtgatctcagctcactgcaagctctgactcccagttcwcgccattctcctgcctcagcctcccgagtagctgggactacaggtgcccaccaccatgcctagctaatttttttgtatttttaatagagatggggtttcaccgtgttagccaggatagtctggatctcctaaccttgtgatccacccgcctcggcctcccaaagtgttgggattacag

SEQ ID NO: 372667 - DNA, 576 bp, Homo sapiens
aaatatcatagccatcacaatgaatgtaaagtggtatctcattgtggttttgattttcatttccccaatttttagtgatagtgatgttgagccttttttcatgtgcttattaaccactcatatatcttatttggggaaaagtatatttaagtcctttgctcatttttaatgttgttgctattgttgaattgtaggtgttctttatgtaatctggatattattcccatatcagaaattaatttgcaaatattyccttccattctgtggattgcctttttactttgttgattgtgtcctttgatacacaaaagattttaatggaaaaatgaggctaaatgtattatttttttccatttttcatctatgttgttggtgtcctttccaagaagtcattgccaaatccaatgtcataaagatttttccctgtatttttttctaagggttttacagttttagctcttacatttcagtctttggtccatgttaaattaatttttatatacagtataaggtaagagtcctacttaattattttgcatgtggatatccagttttcccaatgccatttgttgaaaa

SEQ ID NO: 372668 - DNA, 514 bp, Homo sapiens
gcttgccaagccccacagtcttaaaccttgcagcctctgaatatgtcacctttaataccccgtgctggcattgggggctcattgactttccttctcagtcaccatcttcaagctgctctagtccagccctatgtgacacagagtctgcttctacactgagggggagcccgccccgcacctagactgctccaggccaagcgccactttggagcatggaagggggaagggaggggaggctcctgagkgctggggatgcccaggcagtgcagagggagcacaggccctactgtgggagtcagaggcttagggctaaggctctgaatgggattccattgcctccagattaaggccagctcctcctctgaccagctgtgtgaacgagtccactgtgccctctgttaccaggagtcatgacagtgcctactccaagggaatgtggtcaggacgaaatgagacattgattccaaagtgcaaagcctggtgcttaataactgctcattgttgctgtaaatga

SEQ ID NO: 372669 - DNA, 673 bp, Homo sapiens
tgtcacctttaataccccgtgctggcattgggggctcattgactttccttctcagtcaccatcttcaagctgctctagtccagccctatgtgacacagagtctgcttctacactgagggggagcccgccccgcacctagactgctccaggccaagcgccactttggagcatggaagggggaagggaggggaggctcctgagggctggggatgcccaggcagtgcagagggagcacaggccctactgtgggagtcagaggcttagggctaaggctctgaatgggattccattgcctccagattaaggccagctcctcctctgaccagctgtgtgaacgagtccactgtgccctctgttaccaggagtcatgacagtgcctactccaagggaatgtggtcaggacgaaatgagacattgattccaaagtgcaaagcctggtgcttaataactgctcattgttgctgtaaatgagcttggggatatagmcttgtcccatgatcctcttccaccatgttcttaacaacactttgaacagatggcatcaccccagttgacagatgaggaatccaagactggagcagagaaggaggctgcccaaggccacatgcagtcccatggcagaagacagagtttccagccctaggcagactcatccacccaccctgctctctcc

SEQ ID NO: 372670 - DNA, 673 bp, Homo sapiens
tgtcacctttaataccccgtgctggcattgggggctcattgactttccttctcagtcaccatcttcaagctgctctagtccagccctatgtgacacagagtctgcttctacactgagggggagcccgccccgcacctagactgctccaggccaagcgccactttggagcatggaagggggaagggaggggaggctcctgagggctggggatgcccaggcagtgcagagggagcacaggccctactgtgggagtcagaggcttagggctaaggctctgaatgggattccattgcctccagattaaggccagctcctcctctgaccagctgtgtgaacgagtccactgtgccctctgttaccaggagtcatgacagtgcctactccaagggaatgtggtcaggacgaaatgagacattgattccaaagtgcaaagcctggtgcttaataactgctcattgttgctgtaaatgagcttggggatatagacttrtcccatgatcctcttccaccatgttcttaacaacactttgaacagatggcatcaccccagttgacagatgaggaatccaagactggagcagagaaggaggctgcccaaggccacatgcagtcccatggcagaagacagagtttccagccctaggcagactcatccacccaccctgctctctcc

SEQ ID NO: 372671 - DNA, 606 bp, Homo sapiens
gtgcccacatttcctcacctgtgaaatggcattgaggatatctgtaaggaattacaaataaggaaattaaacaagtagagctaatattaaataaggaaataaaaacaaatagagctaatattataaaatgtgtactttgtgccaggcactattctgaatgctttaaactgaattagtagatgctgagatatggatggcaatagaggcaggctgaagccrtggtctatcctctgcaaaactgtgccaaaatgaggggacagtacttagagcaggccaggaatatcctaaaatcagcatttctccatgtttggtctgcacacaacctttcatcagagtcacctgggaagagaagggcagtgtggtaaggtgggaggtgtctacctgaattacagattccttggccctgtctgatacagaatcagaatcactgggacctagggatcagcatgttgaatagacatgtcgactcttggccaggtgattcttaagcctcctgaagatttggactcagggactgagtgtgcaatgaaagtggttatgagtttatgtcacaaatttcaaggccaaacagccagagccctcggttctagagcaagccctgccaca

SEQ ID NO: 372672 - DNA, 606 bp, Homo sapiens
gtgcccacatttcctcacctgtgaaatggcattgaggatatctgtaaggaattacaaataaggaaattaaacaagtagagctaatattaaataaggaaataaaaacaaatagagctaatattataaaatgtgtactttgtgccaggcactattctgaatgctttaaactgaattagtagatgctgagatatggatggcaatagaggcaggctgaagccgtggtctatcctctgcaaaaytgtgccaaaatgaggggacagtacttagagcaggccaggaatatcctaaaatcagcatttctccatgtttggtctgcacacaacctttcatcagagtcacctgggaagagaagggcagtgtggtaaggtgggaggtgtctacctgaattacagattccttggccctgtctgatacagaatcagaatcactgggacctagggatcagcatgttgaatagacatgtcgactcttggccaggtgattcttaagcctcctgaagatttggactcagggactgagtgtgcaatgaaagtggttatgagtttatgtcacaaatttcaaggccaaacagccagagccctcggttctagagcaagccctgccaca

SEQ ID NO: 372673 - DNA, 625 bp, Homo sapiens
aatattgaattttatcaatgctttttcagcttccatggaaacgatcatatgatttttgtccttcattctgttgatatgatgtatcacattgattgatttgcatatgttgaaccatccttgaagctatgggacaaatctcacttgatcatgatgaatgaccttgttaatgtgtttctgaattctgtttgctagtattttggtgataatttttgcatccgtattcatcagagatattggyctgtagttttcttttttcaatgtgtctttgcctgttttcggtataaagtattactggccttgtacaatgagtttggaaatattcctcctctatatttagaacagtttgagtaggatgggtattagttcttcaaaagtttgatggaattcaccagtgaaaccataagatcctgggcttttctttgctgggaaatcttttattatggctttgatctcattacttcttattggtctgttcaggttttatattttttcatagttcaatcttggtaggttgtatgtgtctaggaatttattcatttcttctagattttccagtttttggcatacagctactcatagtagccactaatgatcctttgaatttctgaagtgtcagttataatgt

SEQ ID NO: 372674 - DNA, 565 bp, Homo sapiens
agaaagtatctctgagtaagcaatactgaaactgagaccttaatgagcaggtgatcactgagccaataaagagaaagataattcttagaggaaagctcttaaggtgagaatgagaaaattatagaaagatcaaagtggccagagtgtagcaggtgaaacagtggttctgaagactctgtataatataaagcctttagccagaatcatcaggaaataatgtataaacataagtcaaatatgtagatactctcctttctatacatttccttttattctcctcaagtttaattatcagcataaattattacaccaatgtcactatcatactctgtgctctacttttaaaatacttctttgttaggcttattcaataaccatctctacaacatgctctgttatttgtawttataactatagacactgattacttaaaattccagttagaggcatcattacaatcttctaacccttagttcattgtagtgggacttatggtggttcaatatggaggttaccaaagagattaaaagaaggaaaaaatggcagatgacaaatatcagctgac

SEQ ID NO: 372675 - DNA, 658 bp, Homo sapiens
tatcacgagtcactttattctctttcacatttgaaaatttgattatattgtgtcttggtgtggattcgcttatgtttatactgttggggatcttttgagcttcattaatctggatgactattttcctctccagatttagaagttttcaaccaaccttccttctttgtttttccactttctccattccgttttctcccttcctccctcccttcctccctcccttcctcccttctttcctttctttctctctttctctctcactttctttctttctctttctctctcttttttctctctccctttctttctctttctctttcccttccttacttccttctctttctttcttttttctttctttcttctctttctctttcttttcctttttctttctcattttctttctttctttttctctcttgctctttctttcttttctttctttctgtctttctgkctgtctttctttctttctttctttctttctttctttctttctttcttcctttctttctttcttctttctttctttcttgatgagatcttgctacattgactagactggagtgcagtggctcctcacagacacttccctcctttcctcctggggaaaatgtttaagggttatgtatcttttcccaatcttgcagaattgtgc

SEQ ID NO: 372676 - DNA, 587 bp, Homo sapiens
agacacctgtggcatttttatagtaaatgcaaagtgaggattttaggtgatcaaaatgaataggcctaactagttcacagctttgagatgtggccacactgcttattcatggagagaacagagcttacagagtatcctgcatatttacacttgtatcaatcagcttgtgctgccatcacagaatacaacagactgagtggcttcaacaacagaaatttatatgttcaaagttctggaggctgaatgtccaagatcaaggtactggcaggcttagtttttggtgaagccttgtcttagtcaaattgggctgctataacaaaataccctagactgggcagcttagaaacaatagaaacttatttcttacagttatggaagctggtaaggttaagaacaaggcactggcagattgaatgtctgctgaggggccactttctggtgatagatgtccccttcttcctttgtcctaacatggccagctcatgcaaggagacagagagggctctggtgtttcttccttttcatrtaagaacaccagtcctataagattagggtccaacccttataatcttatttaaacttaatca

SEQ ID NO: 372677 - DNA, 602 bp, Homo sapiens
ctagaaatgtaagctgctttctagtcaggcacacccctcatcccagaagagtctgccacatcaaaggtaaggtgacttaaggtcctagtatgtgtctctattctctacacttgggctatttgataattctggcaggtaaacacaacgctgctattcaaaatatttaaccactggagaggtatgggaattgactattgggactagatgccagcactgtagtgagagcagaggcctggagtgagagcagaggcctgcagtccctctctgtgttggacagtaacccttaaattgcttgattgttaggacaggggcctggagaggggccaaagtggccaggaaaatggggaccactcagggagctcagggcagccttgaccaattgatataaaaatatttcagtattttaacaatccacacatctgcatgctaaatatcatccctaaggaagcatatgttttactcttgcttccttcccttctgtcttgtcttttctccctccytccttgcctcctgccctcattccctcccttccttcctccctttcttctctttccttcctctctcttttcctagcttttactttaactttatacagtagaatt

SEQ ID NO: 372678 - DNA, 672 bp, Homo sapiens
aaacaacaatgagatatcaccttactcctgtaagaacggccataattaagttaaaaaaacaatagatgttggtgtggatatggtgaaaagggaacacttttacacttatggtagaagtgtaaactagtrtacaaccactgtggaaaaacagtatgtagattccttaaagaattaaaggtagaactgccattcaatccagcaatcccactactgggtatctactaaaaggaaaataagtcattatatgaaaaagacacatgtacatgcatgtttataccagaacagttcacaattacaaagatatggaaccaacctaagtgctcattaaccaagtggattaaaacaatgtggtatatatacaccatggaacactactcagccataaagaggaatgaaataatgtcttttgcagcgacttggatggagctggaggccattattctaagtgaagtaactcaggaatggaaaaccaaagatcatatgttctcagttacaagttggagttaagctagaggatgcaaaggcagaagaatgttataatggacttagggactcagtgggaaggttaaaaagcgggtgaggataaaggactacatactgggttcagcgtacactgcttgggtgatgggtgcaccaaaatttcagaaatcaccactaaagaacttatccagt

SEQ ID NO: 372679 - DNA, 672 bp, Homo sapiens
aaacaacaatgagatatcaccttactcctgtaagaacggccataattaagttaaaaaaacaatagatgttggtgtggatatggtgaaaagggaacacttttacacttatggtagaagtgtaaactagtgtacaaccactgtggaaaaacagtatgtagattccttaaagaattaaaggtagaactgccattcaatccagcaatcccactactgggtatctactaaaaggaaaataagtcattatatgaaaaagacacatgtacatgcatgtttataccagaacagttcacaattacaaagatatggaaccaacctaagtgctcattaaccaagtggattaaaacaatgtggtayatatacaccatggaacactactcagccataaagaggaatgaaataatgtcttttgcagcgacttggatggagctggaggccattattctaagtgaagtaactcaggaatggaaaaccaaagatcatatgttctcagttacaagttggagttaagctagaggatgcaaaggcagaagaatgttataatggacttagggactcagtgggaaggttaaaaagcgggtgaggataaaggactacatactgggttcagcgtacactgcttgggtgatgggtgcaccaaaatttcagaaatcaccactaaagaacttatccagt

SEQ ID NO: 372680 - DNA, 672 bp, Homo sapiens
aaacaacaatgagatatcaccttactcctgtaagaacggccataattaagttaaaaaaacaatagatgttggtgtggatatggtgaaaagggaacacttttacacttatggtagaagtgtaaactagtgtacaaccactgtggaaaaacagtatgtagattccttaaagaattaaaggtagaactgccattcaatccagcaatcccactactgggtatctactaaaaggaaaataagtcattatatgaaaaagacacatgtacatgcatgtttataccagaacagttcacaattacaaagatatggaaccaacctaagtgctcattaaccaagtggattaaaacaatgtggtatatatacaccatggaayactactcagccataaagaggaatgaaataatgtcttttgcagcgacttggatggagctggaggccattattctaagtgaagtaactcaggaatggaaaaccaaagatcatatgttctcagttacaagttggagttaagctagaggatgcaaaggcagaagaatgttataatggacttagggactcagtgggaaggttaaaaagcgggtgaggataaaggactacatactgggttcagcgtacactgcttgggtgatgggtgcaccaaaatttcagaaatcaccactaaagaacttatccagt

SEQ ID NO: 372681 - DNA, 672 bp, Homo sapiens
aaacaacaatgagatatcaccttactcctgtaagaacggccataattaagttaaaaaaacaatagatgttggtgtggatatggtgaaaagggaacacttttacacttatggtagaagtgtaaactagtgtacaaccactgtggaaaaacagtatgtagattccttaaagaattaaaggtagaactgccattcaatccagcaatcccactactgggtatctactaaaaggaaaataagtcattatatgaaaaagacacatgtacatgcatgtttataccagaacagttcacaattacaaagatatggaaccaacctaagtgctcattaaccaagtggattaaaacaatgtggtatatatacaccatggaacactactcagccataaagaggaatgaaataatgtcttttgcagcgacttggatggagctggaggccattattctaagtgaagtaactcaggaatggaaaaccaaagatcatatgttctcagttacaagttggagttaagctagaggatgcaaaggcagaagaatgwtataatggacttagggactcagtgggaaggttaaaaagcgggtgaggataaaggactacatactgggttcagcgtacactgcttgggtgatgggtgcaccaaaatttcagaaatcaccactaaagaacttatccagt

SEQ ID NO: 372682 - DNA, 562 bp, Homo sapiens
tctcatcagagttgtctactctgtccatatttctaccaatattctcttcctgtccactgaagtaatctccaagaataccaaggctctctctacagctctcctcttctgggctctcaccagaattacccttaatgctgcagccacagcagtatatgatttttctggcctactcctccaaactyttccagcctttgcccattacccagttccaaagctgcttccacatttttagtatttttttttttttttttttttttgaggcagagtcttgctctgtcgcccaggctggagtacagtggcgtgatctcggctcactgcaagctccacctcctgggttcacgccattctcctgcctcagccttctgagtagctgggactacagtcacctgccaccacgcccagctaattttttgtatttttaatagagatggggtttcactgtgttagccaggatggtctcgatctcctgacctcgtgatctgcccacctcggcatcccaaagttctgggattatagacataagccaccataactggcctcatttttagattttttttatagc

SEQ ID NO: 372683 - DNA, 562 bp, Homo sapiens
tctcatcagagttgtctactctgtccatatttctaccaatattctcttcctgtccactgaagtaatctccaagaataccaaggctctctctacagctctcctcttctgggctctcaccagaattacccttaatgctgcagccacagcagtatatgatttttctggcctactcctccaaactcttccagcctttgcccattacccagttccaaagctgcttccacatttttagtatttttttttttttttttttttttgaggcagagtcttgctctgtcgcccaggctggagtacagtggcgtgatctcggctcactgcaagctccacctcctgggttcacgccattctcctgcctcagccttctgagtagctgggactacagtcacctgccaccacgcccagctaattttttgtatttttaatagagatggggtttcactgtgttagccaggatggtctcgatctcctgacctcgtgatctgcccacctcggcatcccaaagttytgggattatagacataagccaccataactggcctcatttttagattttttttatagc

SEQ ID NO: 372684 - DNA, 601 bp, Homo sapiens
aattaactttacaatggagaaatctgacaacactgctgagccaggtgatcaaagtcaatgtaaatagagataaatcatgttgatattatgtacctctgatgtaatgtggtatcaagaaaatagcactttacctctgtggtattcctcctccaaacttaacaacctcagtcaaatcatgagaaaaataccacaaaaattcactagaggaatatcttgcgaagtakctgaccatttctcctcagagctattacagccaagaggagcctaaagatacttgagaactaaatgtaatgtaccctggatgggagattggaaaagaaaaaaagaattaggtaaaaacaaaagtaacctaaataaagtatgaattttagttaataatatattaatattggtttattaataataacaaatcaactacactaatgtaagttattaacagaagtaactgtgcaggctatatgagaaatctttgtgttattttagcaatttttctgtaaatctaaaactgttataaacaataaacctattttaaagtaacatatacattatacaatgtgagaaaatataatggcaaaaaaagaaaatgcaagcacaaactata

SEQ ID NO: 372685 - DNA, 601 bp, Homo sapiens
aattaactttacaatggagaaatctgacaacactgctgagccaggtgatcaaagtcaatgtaaatagagataaatcatgttgatattatgtacctctgatgtaatgtggtatcaagaaaatagcactttacctctgtggtattcctcctccaaacttaacaacctcagtcaaatcatgagaaaaataccacaaaaattcactagaggaatatcttgcgaagtatctgaccatttctcctcagagctattacagccaagaggagcctaaagatacttgagaactaaatgtaatgtaccctggatgggagattggaaaagaaaaaaagaattaggtaaaaacaaaagtaacctaaataaagtatgaattttagttaataatatattaatattggtttattaataataacaaatcaactacactaatgtaagttattaacagaagtaactgtgcaggctatatgagaaatctttgtrttattttagcaatttttctgtaaatctaaaactgttataaacaataaacctattttaaagtaacatatacattatacaatgtgagaaaatataatggcaaaaaaagaaaatgcaagcacaaactata

SEQ ID NO: 372686 - DNA, 538 bp, Homo sapiens
tgcaaggctggttcaatatatgcaaatcaataaatgtaatctgcatataaacagaaccaaagacaaaaaccacatgattatctcaatagatgcagaaaaggcctttgacaaaattcaacaaygcttcatgctaaaaactctcaataaactaggtattgatgggacgtatctcaaaataataagaggtcaaagattcttaattccttgaactccaatttacttgtgaaatttcatgtgattaacttaaaattccagggatcctatctaacatcacagttgatggaaaaatgtatactgagaaatcagttttggtgaacagtaacagcattactgataataggcaacaaacactactgtattttatttctgatacgcattataggtggtaatcaaaatgattaatgattttattgctctttatattatctataacaggtgatctgacaaaattgtacttttttctgagaagttggtaatgtacttactactgtattttgtagttatacaataaatcttacttagctgacaagaaactagg

SEQ ID NO: 372687 - DNA, 525 bp, Homo sapiens
ccagcaatttcttttttgtttctcattgctatttacatctaaaattatttatatttttatgtcataagtaactaaccaaggccccataaactagtttatagtattcatcttcttcatgcataggtatttgtccatttttttattccttactccctcacagagttagattcccttcattaaggaaaatctcgattacctaggccaccagctttaggttccagtagttctttccaccatgtatctgactttgtctgttaccctatagggtacagaaaagtgacggatgccttcactgaaagtccattccgttttacatgtaaagtgtcagaagataagaattatgttctaagttctttctcaaaacagtacctagtattaatagaacgttttgtgcccaatggacactaygcaaacattcttagctgatttaacaattgaattgagaagattatgtatttctggctgtgtcacgtgtccagctcattaaatgcatcttcatgttagccaaagaattgagtgaaataa

SEQ ID NO: 372688 - DNA, 646 bp, Homo sapiens
atttgaagggttttcattagggttaaatgaaaaaggtacatgaagtgcctagtgtagcccatccataattatgtgtcctattacacaacaatagcgtccactttattttcaactctttcataacatcattctgcttgcattgtgtttaattatataatcgtgtttctttctgaaagccactatcatatgaaaataaaatacaatatgtaaatcacagtacatgtctacccagataaaaccagagagctgaaaacaccacctcaagtcatgctgtgtagtaggaactgtgctactctgtaaagaggtcatggaaaatgaatgagacttctgcccttaggtatctcayggctgcccagctgtgtttctgtggcatctggtacctatgtggtgccgacacaaatggcaactactggaatagctgcagactacaaagagaatgttttccctataagtgtcattttcaaaagattaattaattcaatgactattcagtagtgcccttctggttgtatcagagagtgtggatggtgggttcacaaagaccaacaaaacatggccctttccctcacaagtctcccatctagcacaggacacaaacacattcattacatccacaggtattttctgagtgactccagtgtatgct

SEQ ID NO: 372689 - DNA, 472 bp, Homo sapiens
tgactttcatagacaacttttcaggcatggcattgctattcttatcaacttagcaaatgggggccatactattcagtgactctaagatggactatgttacatatttggattccctgaacacatctggtcagacactggtactgcctttatagcaaaaagtaacaaacagtgggcagccatatagatattctctggatattttatgccccatatcatttccaggcagcaggtgccactgaaagataaagtggactcttaagggagaaaatgaaaaagacaactggttaaccaaggctcagatcccaatggagcacacacttaagacaggcagtttgggctctaaatgtggtaattcttcagaaakgtaactcctatttaaataaaatgtttaattatgaggctgaagagtaggaaaggaagtccaggctggcagtaagaaaatacaaaccataattttctcctctcactctac

SEQ ID NO: 372690 - DNA, 570 bp, Homo sapiens
gcacttcagttatgtgtaaatggataagcagatggtttaagagataygggggtaattcagacaaaaaagaattgtgtgagcaatggctcagaggttagaaatagaatggtgtatgggtgaagtggagctgcaaacacacgtgttaaatgtgaatggaaatggtgtagggagatgattttaatgagattagcaagagtaagattatgaggaaccttgaatgccatgctaaggactcaaagacatatatcatgtcacctctgttgtaaccttccttcccaattcctattcttggcatctcagaacttccagaggcttgatagaacagaatataagagaattatatttttggttcctagggggtagggtgaggaaggcatccagaaggagtgagccagcagacaggagagggtacaggtagggactacataatggaagggtttatatcagtgtgtcagagaaagaagattcaagaaagagattggtgatttactgaaatcctcattgctggcttcatccttattctgaagatcctacgatgcctggagaaattctaggcctcacatctggtga

SEQ ID NO: 372691 - DNA, 570 bp, Homo sapiens
gcacttcagttatgtgtaaatggataagcagatggtttaagagatacgggggtaattcagacaaaaaagaattgtgtgagcaatggctcagaggttagaaatagaatggtgtatgggtgaagtggagctgcaaacacacgtgttaaatgtgaatggaaatggtgtagggagatgattttaatgagattagcaagagtaagattatgaggaaccttgaatgccatgctaaggactcaaagacatatatcatgtcacctctgttgtaaccttccttcccaattcctattcttggcatctcagaacttccagaggcttgatagaacagaatataagagaattatatttttggttcctagggggtagggtgaggaaggcatccagaaggagtgagccagcagacaggagagrgtacaggtagggactacataatggaagggtttatatcagtgtgtcagagaaagaagattcaagaaagagattggtgatttactgaaatcctcattgctggcttcatccttattctgaagatcctacgatgcctggagaaattctaggcctcacatctggtga

SEQ ID NO: 372692 - DNA, 568 bp, Homo sapiens
agactttttgccattgaagggtttgagctccttatatattctggttattaagctcttggcagatggatggtttgcaaatattttctcccattctgtgggttgtctcttcactttgttgattgtttcctttgctttgcagaagcttttgaacttgatgtgatcccatgtgtccatttttgctttggttgcctgtgctcgtggggtattattccagaaatctttgccagtccaatgtcctgggcagtttccccaatgttttctttcagtagtttcatagtccaaggtctcagttttaagtctgtgattcacgttgatttgattattgtatatggtgaaagataggggtctagttttattcttctccatatggatagtcagttttcctggcatcacttattgaagagactgtcctttcttcaatgtatactatgacacctttgttgaaaatgagttcactgtagatggatggagttatatctgggttctcycttttgttccatttgtctgtctgtttttatgtcagtaccatgctcttttggctactatatctctgtagtataatttgaag

SEQ ID NO: 372693 - DNA, 557 bp, Homo sapiens
ttttttgtagtttcttttgctgtgcagaataattttaacttgatgtgatcccatgtgtccattttggctttggttgcctgtgcttgtgggttattactcaagaaatgtttgcccagactgatgtcctggagagtttcccaatgttctcttgtagtagtttcatagtttgagttcttagatttaggactttattttgatttgatttttgtatatggtgagagatagaggtctagtttcattcttctgcatatggatatccagttttcccagtaccatttattgaagagaatgtcttttctcttcaatgatcctttgaatttccatggtatcagttgtaatatttcatttttcatctctgattttattgatttragtcttctctcttttttattagttactttgaataaatttgtgttaattttatcttctcaaagaggcaactttttgcttcattgatcttttgtattcttttcttcatttcaattcatttatttctgctctggtctttattatttcttttcttctagtaactttggatttgattggttcttgctgct

SEQ ID NO: 372694 - DNA, 589 bp, Homo sapiens
tgtgttgagtcatccttgcatccctgggataaatatcatttagtcatgataaatgatatttttaatgtgttgttgaatttggtttgctagcattttgttgaggatttttatataaatattcatcagagatactggcttatagttttctttcttttgatgagtcattgtctggttttggtatcagggtaatactgacttcatagaatgagtttggaaatattccctgctcctctattttcaggataggttgagtagaattggtattctattcttctttaaatgctttatctcattacttgttattggtctgttccgattttagatttcttcatggttcaatcttgaaaggttgtatgtgtctaggaatttatccatttctgctacatttactaattttttggcatataatttatcatagtagcctataatgatcctctgaatttctgaggtattggttataatgtctcctttttcatctctaattttatttatttgggtcctctctcttttwttcttagtctggctgaaagttttttgattttgcttgtcttttcaagaaggcaactttttgttgatctttcatatgttt

SEQ ID NO: 372695 - DNA, 568 bp, Homo sapiens
tggcctcttttattatatacaaatggccaaattttgtaggagttatagtttttctatcaggaacatactgttatttagcttgcaaaacacagcagtttttctwtgatgccagagggattcagtgttgtgaagctacctacattgtttcaagaaattttatttgaaaagcaggccttgaattttgggggagcttatcagtttttcccgtagctgggcagccaagcctgctgataatgaaacctttgtcaaccaacaagacatcatttatacagtgaaaactttggacatcagaggaatttcctaacaccgtataaacattcaagattcaagtatgtaacctattttaaaccaattacacatttttacaactatatacacaatggatcttctcaagcctcactcaagttactttttttctgtctccatagcaagttttgcccaaactctactaggcatcttttttttcacagaaacatagaacaagaggcacctccagagttacagggtagctggaagctcagagaataggggaatagggtggcacagggtgagcaacttacaccagtaa

SEQ ID NO: 372696 - DNA, 568 bp, Homo sapiens
tggcctcttttattatatacaaatggccaaattttgtaggagttatagtttttctatcaggaacatactgttatttagcttgcaaaacacagcagtttttctatgatgccagagggattcagtgttgtgaagctacctacattgtttcaagaaattttatttgaaaagcaggccttgaattttgggggagcttatcagtttttccygtagctgggcagccaagcctgctgataatgaaacctttgtcaaccaacaagacatcatttatacagtgaaaactttggacatcagaggaatttcctaacaccgtataaacattcaagattcaagtatgtaacctattttaaaccaattacacatttttacaactatatacacaatggatcttctcaagcctcactcaagttactttttttctgtctccatagcaagttttgcccaaactctactaggcatcttttttttcacagaaacatagaacaagaggcacctccagagttacagggtagctggaagctcagagaataggggaatagggtggcacagggtgagcaacttacaccagtaa

SEQ ID NO: 372697 - DNA, 533 bp, Homo sapiens
tataatcctggaacatatattaacaacatatctatataaatataacttaaaataattccaatgccacctcagattttggtggtcagagctgtggacctaggcctctctgcactcttaggagcctggaaagttacccctgaccaagaccttgcaggtgcgtgctctcactgcctggcttctccccactgtcggtgtccactccaatcttggagcaatgtgttgccaagcccatgcactgttgcagcctgaccaggggtgcacacacttggcagtgctgacacgacacgtgtgccccctactgcctcagtcccctctggactttgggctccaacaagtatgrgaaggaggctgagtgggggctgaggacggcctggcactagcctgcaggtgtcctttggcacaagcagcctgggcaccatggacagcagcaggaggaagacaggctcctgggcagaaggaggcaggtacccagtgaggcctcactttcaggccagggagggcctggaggctgagggcagactgccagtccacaa

SEQ ID NO: 372698 - DNA, 586 bp, Homo sapiens
ttggtaagcattatgatggtttcttaaaaacttaaacataaacttactgtactacccagcaattccactcctgtgtatctacccaacagaattcacaaaagcacttgtacatgaatgtttaaaggcgcatattcatgaagtccaaaaatgagaaacaatccaaatatttattaactggtgaatcagctagaaaaaaagtgatatattcactgattaaatactattcagtaataaaaattaacatagttctgaaacaagcaacagcataaatgaacctaaaaatatcgtgctataggaaagaagcaatatacaaaaaatctacatgttgtttgatttcaggtatatgaaatacccagaaaaaacaaaatatagtcaaaaatatcagtagttttctgggcttgacaagagagtgggaattaactrctcatgaacataagagatcatttccacatgttggagaagtttaaagagtagattatggtaatggttgcaccattccataaatatactaaaaatcatataatgtgcattcataataggtacttttagtacatataaaccataagattataaatgagaggtgtta

SEQ ID NO: 372699 - DNA, 586 bp, Homo sapiens
ttggtaagcattatgatggtttcttaaaaacttaaacataaacttactgtactacccagcaattccactcctgtgtatctacccaacagaattcacaaaagcacttgtacatgaatgtttaaaggcgcatattcatgaagtccaaaaatgagaaacaatccaaatatttattaactggtgaatcagctagaaaaaaagtgatatattcactgattaaatactattcagtaataaaaattaacatagttctgaaacaagcaacagcataaatgaacctaaaaatatcgtgctataggaaagaagcaatatacaaaaaatctacatgttgtttgatttcaggtatatgaaatacccagaaaaaacaaaatatagtcaaaaatatcagtagttttctgggcttgacaagagagtgggaattaactgctcatgaacataagagatcatttccacatgttggagaagtttaaagagtagattatggtaatggttgcacmattccataaatatactaaaaatcatataatgtgcattcataataggtacttttagtacatataaaccataagattataaatgagaggtgtta

SEQ ID NO: 372700 - DNA, 577 bp, Homo sapiens
gtctttctcttcctctgctagaagttggtcaagttggccactatgaatgtcaaagaaaatatataaagtcagtctttattctgagtgctcacatgttcatctaatctctaggagttctactgcaaagaaggaaatggaaatatatttgtgaaatatcaagtaatctctgccattctatttaacatatattctttttattattctccattttagtattatattttaatatcaacacttttgcacaagtttttaacatgatttttcatttttttgtgtatttcagctttcttctgctctatgataagccttattatgtcattgaaaatctgttcttttcatcatattttcaacattgcctcacatgatatctaggataaagtrggcactttttaaatatttattgaatagaaacaatgggaagagatctagttatttattttataatacatttaattttatagtctgtattagtctgttttcatgctgctgataaagacatactggagacttggcaatttacaaaagaaagaggtttaatggaattaccatttaatggacctacagccctggagaggga

SEQ ID NO: 372701 - DNA, 577 bp, Homo sapiens
gtctttctcttcctctgctagaagttggtcaagttggccactatgaatgtcaaagaaaatatataaagtcagtctttattctgagtgctcacatgttcatctaatctctaggagttctactgcaaagaaggaaatggaaatatatttgtgaaatatcaagtaatctctgccattctatttaacatatattctttttattattctccattttagtattatattttaatatcaacacttttgcacaagtttttaacatgatttttcatttttttgtgtatttcagctttcttctgctctatgataagccttattatgtcattgaaaatctgttcttttcatcatattttcaacattgcctcacatgatatctaggataaagtgggcactttttaaatatttattgaatrgaaacaatgggaagagatctagttatttattttataatacatttaattttatagtctgtattagtctgttttcatgctgctgataaagacatactggagacttggcaatttacaaaagaaagaggtttaatggaattaccatttaatggacctacagccctggagaggga

SEQ ID NO: 372702 - DNA, 491 bp, Homo sapiens
tatctaccattctggggtctggagggcagctgccctctttccacagctccagtaggtggcgcccactagggactctctgtgggggctctgagcccacatttctcttttgcactgccctagcagatgttctccgtgagggttccacccctgcagcaaaattcttcctggacatccaggcatttccatacatcctctgaaatgtagacagaagtttccaaaccacagttcttgactttggtttacttgcaggctcaacaccacatggaagctgccaaggcttttggattgcactgcaccctctgaagccatggcccaagctctatgctggatgctttcagccatggctggagtggctgggacacagctaggctgtgcacagtacagggaccctgagcccagcccaagaaacaactttttacgcctaggcctctgagcttgtgatgggcrgggctgccctgaagacatctgacatgtcctggagacattgtctt

SEQ ID NO: 372703 - DNA, 425 bp, Homo sapiens
gatttgggtagggacacagccaaaccatatcatactctaacatttgttttcaatttcttcatattactatttctataatcttttrtattattcctattaaaataataaaatttatatagcatcctataaggaaaaagctatattttatgaaaaatattattttaagtgctataatactagataatgtaaatgacaatgtaaaagtttattttaatttactatgtaacatttattacatcacctataacacatttataactttttaattaattaattttttatcttacataaaacatttatttatttatttttatttcaacttttactttagatatggggaaaaatgtgcatgtttttacataggaatattctgtgattctcaaggttggagtatggatcccatcacccaggtaatgagcattgtg

SEQ ID NO: 372704 - DNA, 477 bp, Homo sapiens
attttctgaagacagctcgccagtgtctcccgtgcccgtgtgctattgtgtaatgtcatctgacattccttcagtgaagaagtggggcccaggacctctctgcttgaatgtgggcaaagttgtaactcctttgtagtcagaaacatgtaatgttgtacgtcttccaagcataggtgataataggtgaaggagctgttttctttcctgragccctgtagtgtcatgtaagaaatctgatagccctaagtcctctatactgtaggaaagattaaaccagccctggctgagaggcaccatggcaaagctgtaagacttcccaaagagagaaattcctgaccaacctccagatgctccaactctagctattgcacaatagaaagcctgagccagaaccacctacatggcttttcctgaatttatgatttataaaacccatgagtgttaacaaagaagagtattaccttcttaaccactgaa

SEQ ID NO: 372705 - DNA, 592 bp, Homo sapiens
ctgtggcaaactgagatgaaagagaattagacatactcaaactcaaaatgcaaattttataatgcatcaacttctcactggacgcaagcagtctaacttgcacctttcaaaccagtgtttcaaaaattgtggcacagtgaccacctctgtctgggtaacctaggtcacttgttataaacttgaactcctgggctccaccctgatttaccttatttattaagggtgggagctaggaataagactgtaacaagctctatggttcattctgttgcacaacttcaaagctattgctttacatcatctacttggaattgagtagagattaaacatgttgtatagtaaaagattttcttgaaatttgctaaccttcaccgtaggccagtatgaaaagtaaacatttctagttaacattcattatttgtgttaaagatattgctcagtagccagtattgaatattcagaaaatgagatataattttagagaaaagtttaaacctaaaacaaaatrctggatgataggaaatcctaaaaaatctggccattaacacccttcggcacaaagagttcagaggagataagaaaaaagtagatt

SEQ ID NO: 372706 - DNA, 615 bp, Homo sapiens
accgtaggccagtatgaaaagtaaacatttctagttaacattcattatttgtgttaaagatattgctcagtagccagtattgaatattcagaaaatgagatataattttagagaaaagtttaaacctaaaacaaaatgctggatgataggaaatcctaaaaaatctggccattaacrcccttcggcacaaagagttcagaggagataagaaaaaagtagattggaaaattagacaatagaattaaaaactgtgactgagatagctttcagaaggaaggttttaagaagtacccacaacaaagaaaactaatttcttttttcctttttactctcaggattaatcacaaagtatttttaaaaattaattattagtccccttttcttcttagtgattcacctctgaaaataaaccatttaaatatgttcttacaatttcctgctgttttggtcagcattattcactttggtggcagcaaatgtcaggaggatcattccagaaccaggttgtcacaaattaacaaccaaaatcactttacaaaagcctcttggaaaatgagtgtcacttctcttactctggagtttcatccatgtaataataccaaaaggcaagagaca

SEQ ID NO: 372707 - DNA, 597 bp, Homo sapiens
tcagaaaacattaatagatttgcaaagatatgataaacaaatgttataaaactaaatatgtttatgaaatgagttttaaaaaacaagatttattaagacagagcttttccatattttttcatatgattataagtgttttaaactccaagaagactatagagcatgcagcattacccagacttattatgaaacaagaaaaccctttcactctataattctgctcctgaaagtcctttagcctttgtcatttttcatatgaaacacattttggagatctctagcctattaccattgttctatttcatattttgccctcatttcctgttactctcatattttgatacctgartgtgtagttttattgattatccaatgatatgtgttatcaatatttataatataaatggtatccttttatatagatatttatgtttatttattgaaaaactaaattcttatttctatcaaattttaactttatactctgtgaaagaaagtttaattatttatataagttcattaaatataaatatattaataattatatttcatggcaaggtccattttttttaggaggatcacaggacacatcatgcg

SEQ ID NO: 372708 - DNA, 625 bp, Homo sapiens
ggcactcagcagtggatgtagccaggtcagccttggtgagtggaattccatgttgctgagcccatgcataacctccatcactgccaccatggccactttgttcatgggctcattgggtgatgacaggtgtggctagggacagaggctgagttgtgtttacaaaacaggtcatcctatccacttgattattaaacttcttcactgaggtcacctgttgctgaacactcacatgggtgggatacaaatatcttcacagtttttgaccactcagagaggtccatccacatacctcttctccaaatttttttgtcaaccaattttccagtcttgcttcttccaagtccctgagcatccaggtaaagcattggctacaacccatgaatcagtgtgtaatcagacatccagccaattctccttccctgcacagtgcacaaccaggtgcactgctcaaagttctgcccactgggaagatttcccttcactgctgtccttcagggatttcgtagaaargggctgtagtgctgtagctgtccactttcagctggtgcctgcatatggtgcagagccacctgtgaaccaggccctagtcttctcttcctctgtcaactgatcacagggaactccc

SEQ ID NO: 372709 - DNA, 594 bp, Homo sapiens
gaaaaataatatttgaaaaattactgtgtgttctatggcccagtcatgttaacataaaaataaccatcacrtaaactgataggcatataccattatagtatttataatttgtaattgtataataaaactatggaaaggctttgtattcttaatcctattcaccctgatattttgatgatcagggtaataagattgattctccttttatatagctggtgtcagtgagtgtgtacactcttgttggactctgttagataaatagaataactctgacttagttttaagtaaagaatataataattcctgaagtgacctcactagtgaacccactctttactggttcccctactttcaatggcatcataattaccaggttttagcctcctggttttactgctagtttaccttctcactgccaccctttccctaaaggccttcttttaggtaaccgtttcttcctctaagacggactacaactcttactagtccttgcatcatgcacagtgacaccaggcatccttctttaaatgcagcttaagtcacatctttcactccggcagcgggtggtgaaaagagcatgaactttagaagcag

SEQ ID NO: 372710 - DNA, 537 bp, Homo sapiens
ctgacatgaccccaggtcagaacttatccacttgaccttcgaccagtgtgcccttccatagaggaaaatggaacagggagagccagtgctctctggttttagactcttgtttataccatcacagtaagtgattaactctttaatttttggtttgttgctttagtcagctattccaacacttgaaaattcagctctttctctcccagmtcagctaagctcctgacataagcaatcagaaaatagtatagacagtacacctgtaagtgcaacaaaaaattttaatgcctacaagtaaacacaattacaagacgaaactgtaatttacattgaagatacttacatgaataaagaggcatattcccttatgcaatggcaatattagatcctcaatattggtagagttaactattctttctaaataaatttataaattcagtgcatacaatcctaatcaatattctaactctttaataaattcagttggaatatatatatatacagcttcacaaaggctaaggcaatttccttaaaaatata

SEQ ID NO: 372711 - DNA, 533 bp, Homo sapiens
gtctctccttcctccttctgtcaatacttaccaccaaatatttttttctatgtatcttgctattttcctctaggttactatggataaatattatccttattattttatgtataattttaatatgttattttgtgattgtaattataattaaattgatttaacttaattaactcaatgatataaatgagcagaataattgggacagccaattaattttctctgaccaatattattctgttttcttaacatcctttttcttagtaatttattacagtctagacacaacttcatcyatttggttttgtgaatatacaatactacttataaattttcaatggattattatagcacacagttgccacatttcttatatacaaggaccagaatgttttactatggcctacctccctggtcccatccaccccaagcctccttcattcactgtgttcttatgtgacagggcttctatgaggtacttaaaacatccatattcctttaacaactcctttacaactttttcttatcccatgctc

SEQ ID NO: 372712 - DNA, 464 bp, Homo sapiens
gacctttgtcagatgggtagtttgcaaatactttctcccattctgtaggtttcctgtttactctgttgatagtttmttttgctatgaagaagatcttaagtttaattagaccccatttgtcaatttttgctttacttgcaattgtttttggtgtctttttcatgaagtctaggtctactctcctgttcctgcttttaggattatttaatagatgtttgaaaccattgtgaagtttacagaaatgaaaacaaaatgccattttatttgtaatattgttgcctctcatcttattctttctataaatcctctaatgccaaacactttcataacatctgagctaagaatcttgaaacttatacatctgttatcagaaatacaatacttcaagtgtatcccatttcaaggtagctaaggagacagttagtaaatcaaaaatttgctaagcttcataattcccttttatt

SEQ ID NO: 372713 - DNA, 610 bp, Homo sapiens
tttcttctctaatctctgtaaataaaaggaattttaaaaagaggaatacatcttcataaggagattaatttgcaaaccaaagtgtaaaaactcctactcactgatgaggccagctttaccttgataacaagattttttaaaaaaagacatcacaagaaagaaaaaactatatgccactatttttatgaatatagaggtgtaaatcttttaaaatagtaccaaactgaatccagcaacataaaaagaggattttatgtcatgatcaagtgagatttactccagaaagcaaggtttgtttaacataaactaatcgattaattaatgtaacacatatgaaaaraatgaataataaaaatcacaagatgtacttaatagatgcagaaatagcatctgaaaaaaaatacaacacccttccatgacaaaaacacacaaaacaaactgaaatagaaaagggtacctccctaatttcataaagagcattacaagaaatcctcagctaaggtcataccaaatggtgaaagactaactgctttctccctaataagagcaacaagacaaggatgtttgctcttgtcatttgtagtcaacattgcactgaagtttctagcca

SEQ ID NO: 372714 - DNA, 558 bp, Homo sapiens
cctaattttattgttagataataatactattatgctcaataacatttatatgtggtttccattatataataacatttgagaagtgtgagtgggaaaatctcccaaaaaagataatcatctaaattttcttttgcaagatttaattgtattttattatatatatatattatatatatatatatatatataatatatatatatatagagagagagagagagagagagagacagagagacagagacagagagagatacgtatttttttaacttttaatttcaggggtacatgtgcaggtttgttacataggtaaacttatgtcgtgggggtttgttgtacagattatttcattacctagatattttgtaaaaaagctatttctcyaggttacactactatctgcactgtttcccaataccacaaccctgaggtagaatttaatgtatccaaaagagcacaaaccttttattttttgaactcatatgacacataataatgtttaatagctatttctaaaaaattttctagttgtgtatacataagtttatactgcagccaca

SEQ ID NO: 372715 - DNA, 558 bp, Homo sapiens
cctaattttattgttagataataatactattatgctcaataacatttatatgtggtttccattatataataacatttgagaagtgtgagtgggaaaatctcccaaaaaagataatcatctaaattttcttttgcaagatttaattgtattttattatatatatatattatatatatatatatatatataatatatatatatatagagagagagagagagagagagagacagagagacagagacagagagagatacgtatttttttaacttttaatttcaggggtacatgtgcaggtttgttacataggtaaacttatgtcgtgggggtttgttgtacagattatttcattacctagatattttgtaaaaaagctatttctctasgttacactactatctgcactgtttcccaataccacaaccctgaggtagaatttaatgtatccaaaagagcacaaaccttttattttttgaactcatatgacacataataatgtttaatagctatttctaaaaaattttctagttgtgtatacataagtttatactgcagccaca

SEQ ID NO: 372716 - DNA, 596 bp, Homo sapiens
tctagttgtgtatacataagtttatactgcagccacagtagtagaaaacttttgttgaaaattcartacaataaatcacagcaaacagttgtccctttaccccttatatgtaaaagattaaattatgtctattctgaaattttgataaaaagtttgtagttagatgtttattttagtaatgtctgaagattatattttattaatattccatatagtcaatttgtctgagatggtcacacaaactaacattttgttatttaatgcaaattcttcattaaaaatattttttaagaatatagacataattggcaaactctttaaagtaaaaaagttataatcataaaatttaaaataatggttacctctgtggaagacgcagagagatgcaacaagaaggagcagtcaaaaaactttaaagtagtgttgttgttctggtgattatgtaactaggtcatgaccaaattgttgttaggcataaaaataatcatatgtgatattgattatataatcacatttgagaactatgactagaaaaaaccttggaacaacataagtgtttttgcttccaagatgcaaaataacaggaaaattaccat

SEQ ID NO: 372717 - DNA, 596 bp, Homo sapiens
tctagttgtgtatacataagtttatactgcagccacagtagtagaaaacttttgttgaaaattcaatacaataaatcacagcaaacagttgtccctttaccccttatatgtaaaagattaaattatgtctattctgaaattttgataaaaagtttgtagttagatgtttattttagtaatgtctgaagattatattttattaatattccatatagtcaatttgtctgagatggtcacacaaactaacattttgttatttaatgcaaattcttcattaaaaatattttttaagaatatagacataattggcaaactctttaaagtaaaaaagttataatcataaaatttaaaataatggttacctctgtggaagacgcagagagatgcaacaagaaggagcagtcaraaaactttaaagtagtgttgttgttctggtgattatgtaactaggtcatgaccaaattgttgttaggcataaaaataatcatatgtgatattgattatataatcacatttgagaactatgactagaaaaaaccttggaacaacataagtgtttttgcttccaagatgcaaaataacaggaaaattaccat

SEQ ID NO: 372718 - DNA, 622 bp, Homo sapiens
tgtaattgtttaacaaataacacaattatattttatctaaagttttttttgtttatttaaataattcgcacaaatatctacttggcataacaaagaatggaaaacataacattttccaaaaataaatgacattttatttggagttggtatagctttgtcaaatctgaagctcartagatgacagagaatctttgtcaattttttagggggtttcacaagtagtcattgagtgtaaagatattacacacagtcttttgtcatttaattgatcactaaaacttatcaaggatttctcaatttctcttttccattgtcagtgctttatgtacttaatgatagatcatggcttacgttatgggttgaattgagttctctaggaagatatgtggagatcctaacctctgccactgtgaataggaacttacggggtaataatctttgcagatataattgagatatacatgtaaattataatgagttcatacaggaataagtggatccttgatctaatatgactactttctttaagagaagaggcaaagagaaagggacagttgcacacgcagcagaaatgccacctgacaacataggcagaaattgaagtgatggatctacaagccaa

SEQ ID NO: 372719 - DNA, 622 bp, Homo sapiens
tgtaattgtttaacaaataacacaattatattttatctaaagttttttttgtttatttaaataattcgcacaaatatctacttggcataacaaagaatggaaaacataacattttccaaaaataaatgacattttatttggagttggtatagctttgtcaaatctgaagctcagtagatgacagagaatctttgtcaattttttagggggtttcacaagtagtcattgagtgtaaagatattacacacagtcttttgtcatttaattgatcactaaaacttatcaaggatttctcaatttctcttttccattgtcagtgctttatgtacttaatgatagatcatggcttacgttatgggttgaattgagttctctaggargatatgtggagatcctaacctctgccactgtgaataggaacttacggggtaataatctttgcagatataattgagatatacatgtaaattataatgagttcatacaggaataagtggatccttgatctaatatgactactttctttaagagaagaggcaaagagaaagggacagttgcacacgcagcagaaatgccacctgacaacataggcagaaattgaagtgatggatctacaagccaa

SEQ ID NO: 372720 - DNA, 542 bp, Homo sapiens
gtccaaaacaatatatttctcattaaaaacaactaaggaagtccaatattaaagtgagtttagcattatgctatagactgggatgagcaatacacaaaccagaattaaacaagaagaaccaggggaaaaagacagtcacaatggactttagtgcgtttctgtaataatctggaaggctgcactgatggccaaagaggtaggtacactcaggagacactagaaagggctgaactatcaatactagcttaacataaggccttgcaaagggagaaagtaaaagttgggccaacatgtaaactgacatattgaatgtgttcaaactacttacagacctagtgacaaacagccraaggcttgcagggtcaagatgtttaagtgcaacttctgactacttattggcagacactaaactatggtgacccaaagtgactcaagcttaaaaaccataaacaaaactgcaacaacaagaaaatattcatagatataactggccataccctgctagtatgtcatatcatcagggagacaaaccatacagaatt

SEQ ID NO: 372721 - DNA, 559 bp, Homo sapiens
cattgtctgttgttcccttctttgtatccatgtatattcaatatttagctaccacttataggtgagaacatgcaatatttggtttttgttcctgtgatagtttgcttagtatattggcctccagatctatccatgttgctgcaaaggacaggatctcattcattttatgattttcatagtattccatggtgtataggtaccacattttatttatctagtctactgttgatgggcacttaagttgattccacgtctttgctattgtgatagtactgcaatgaatatatgcatgtgtgtatttttttttttttttttttygagaccgagtctcgctctgtcacccaggctggagtgcagtggtgcgatctcggctcactgcaagctccacctcccaggttcacgccattctcctgcctcagcctcccgagtagctggaactacaggcgcccgccaccacacccagctaattttttgtatttttagtagagacggggtttcaccgtggtctcggtatcctgacctcgcgatccgcccgcctcagcctcccaaagtgctgggg

SEQ ID NO: 372722 - DNA, 586 bp, Homo sapiens
cagctggatgttggagagaagcagcttgacttcagagagatggcttgatggtggaccttagcagtagagtctggccagggacggccagactccaggagaagatcaccttcttgctccttcccctttccagctctccttcctactgaggggcactttcatcaacaawaaaatcctctgcattcaccacccttcaatttgttcatgtgacctcattcctcctggatgctgttcaggtgcaaaaggctgtcacaactgaagccatccacgattggcaaggctaaaagagcacactgtaaaccacctcccaccctggggcctcaggagttgtgggtagttccctggacactgcaacagggctgcatagagttttgcttctgccggtgcccaaaagtacttcctccggccctgaacccactcacctgtgtgtttcccctcccacaaggggctgagatatgtgggctgagtaagtgagaaacctctgtcatgaggcccatgaggagttcaaggaaaatttcccctttcaatattattattcttaaggggcataatacatttttaactattgctatgttacaaagtaccccaa

SEQ ID NO: 372723 - DNA, 581 bp, Homo sapiens
atgttgtattctgggagataatataaaaaatgcagacgtcacagatttcaatctttattttcwaattaatatggatgttcaaatgcattttttgataacatgataaattaaatctaaatttactaggaagatttgataaccaagaataatataaccaattttgctgaagaataatgaggtgaaggatttaaaacttattttaacacaccagcatggcacatgtatacatatgtaactaacctgcacattgtgctcatgtaccctaaaacttaaagtataataataataaataaataaataaataaataaagatttccaggaaaaaaaataaaaaataaaaaataaataaaacttattttaaaatgcaaataattaaaatacatcattataaaaaaattaatagacaaaattaaaatttcaaaatgattctgagaatttattcataataaaagtagcagttctgaaagatatgaaaataatatatttaaaataaatgttgattttactattatgaaaataaatatataaataaatgtgtacataaaaataaattttgacaaatgcttatttttctatcaatt

SEQ ID NO: 372724 - DNA, 572 bp, Homo sapiens
ggagactactggacttctacagtgaacatttagtacttatcagtgaccatcattttctactgtttattctggttatttaacttgtttctttgagcagttgatgcactttgatcccaaatatatagcacctcaaccagaaacaggaccactataaccatttacttacatttttaaatcataaatttattacaaatgtgtattaaaatttacttcattttattaaatatgtgtcatatcaagtatgttcatcaaaaatcaaattttttgctatttgtttaaatttgaagagtaaatctaatatatcacaaacaccttagtacwgcacatcaaaatacagtggcatttgtgctactaattgatgaaatattggatatttaattcaaacctgataaacacatgtaagcctggatccttatctgaagtgcacgagaattctcaggttttattattgtgttgacagccacctcccttccctgacattttcctatttcaagagaagaggcagaatgtaatttcttagaaccagttaaaattgaaagggcaaagttctacaaaataaaatttaggaaata

SEQ ID NO: 372725 - DNA, 597 bp, Homo sapiens
gctaagtgaaaagagccagacacagaaagacaaatactgtaagatcttacttttatgtggaatctaagtaaatcaaactcataattctagacagtagaatggtagttaccagaggcactgggatgggagggaagggggaaaagaaaatattaatcaaagaatacaaagtttcacctagatatgaagcataaactgtagtgatatgttgcacagaatagtgtcaataactaataataatgtattgtattaaaattgtttaaaaattaaatttaaaatgtcttcaccacaaaagttaataagtatgtgaygtaatggatatgtttattagtttgattgactcattccacaaagtaaacacatatcaaaatatcacattgtacctcataaatatatacaattatttgtcaattaaaagtaaaagaaaattttcaaaaataaaaacaatcattcttcctcattcaatgcattcaatttcatagactcaataccctgtatttgaaagtaaggtatatttggactatgattagaagtctgtactatttctatcttctctaatatttttacacaaacttgcaccttaaatttgtattatggaaa

SEQ ID NO: 372726 - DNA, 597 bp, Homo sapiens
gctaagtgaaaagagccagacacagaaagacaaatactgtaagatcttacttttatgtggaatctaagtaaatcaaactcataattctagacagtagaatggtagttaccagaggcactgggatgggagggaagggggaaaagaaaatattaatcaaagaatacaaagtttcacctagatatgaagcataaactgtagtgatatgttgcacagaatagtgtcaataactaataataatgtattgtattaaaattgtttaaaaattaaatttaaaatgtcttcaccacaaaagttaataagtatgtgatgtaatggatatgtttrttagtttgattgactcattccacaaagtaaacacatatcaaaatatcacattgtacctcataaatatatacaattatttgtcaattaaaagtaaaagaaaattttcaaaaataaaaacaatcattcttcctcattcaatgcattcaatttcatagactcaataccctgtatttgaaagtaaggtatatttggactatgattagaagtctgtactatttctatcttctctaatatttttacacaaacttgcaccttaaatttgtattatggaaa

SEQ ID NO: 372727 - DNA, 624 bp, Homo sapiens
ctagcagagtgtagagtacaaattttggagaacaatattttaacttttacctagaaaaagctagttaagaggataacaatattaacacacgatacccagtcatagctggcatactcaattaagcagatttctaagaaaccattactattttagtttgtatgtgtccttattttatatgtatttattgagggattgttactgtattaatctgctagggctgccataacaaacgtccataaactgtgtgtctcaaacaacrgaaatttatttctcaccctcttagaaacagaaagtcaaaatttaaggtccagcaggattcagtctggtgagggcattcttcctggcttggaggtggatactttctcattatatcatcacaattcctttcctgtatgcaggggaaagagagctagaaagagagacagagagagatctctctgttttctcttctttttaaaataaagtcatgaatcctatctgatcaggaccctatccttatgacctcatttaacattaattgcctcctatgggcctgtctaaatacagccacatggggggttaaggcttcaacatgaataaattttgagaggacaaaattcagttcagagtagtcactgatagtaa

SEQ ID NO: 372728 - DNA, 551 bp, Homo sapiens
ctcctgcctcagcctcctaagtagctgggattacaggtgcacaccctgtaaaacaaattctactagatctatgaaaatatttatactgatacaataatagtgagagacttcaacacctccactgacatcactagacagatcatcaaggcagaaaatcaatatagaaactttggacttaaactgaactgtagaccaaatggatctaatagaatatacattaatagaccatttaatccaacaactacagattatacattcttcccttttctgaatggaacattcttcatatgtttggccataaagcaagtctcaataaattaaaaaaaaaattaaaattataccaamtatcctcttgaaccacagtgaaataaaattagaaattaataccaataggaaagaaaaaaactacccaaatacatggaaactaaaaaaattattcaataatgaccttgtgcaagcaatgaaattaaggtggaaataaaaacaatttacaagacaaatgaaaacagagacacaatatatacaaccctctggattacagcaaaagcaag

SEQ ID NO: 372729 - DNA, 538 bp, Homo sapiens
taaccataacacccccattacttttggcatcaaattggtgtaatgtaaataagaaattattaccagaacttaaattcaaatgttcccttttgctttagcaattatcattggcaaggaaagtrtatttgttctttagtgcctctgttgtacaaccagggacattcctagaccaaaataatatctgagaacactggattacgttccaaccagaaaatgtttgcaatgggggaaaaatcagagaactaaaataagcttaattctcttttaaactgtgtaagggagataaagccaagaagaaagggaaaaaaaacctgtcttgcttgaatttttgctctcctaagatggaaggcaactttgaagaaaataatactccacacaattactcttgaaaaagtcagtttcaacttcagtaggcacagattgacatccctttcaataattttataaaatggaggtttttgctatttaatgtcatataaggtaatgatttaatagcttctaccacagccttatcaaacatcacttgattatgttccca

SEQ ID NO: 372730 - DNA, 472 bp, Homo sapiens
gggtttctcgaggaggagaacaatgaattacaactctttacatctgcccgatgcctagcagtccagggaatatcaaagaaactcagtaaatttcccatgaacaaatgggacttggtgctccttgcgaagtgattgamctacacagatgatgccttttatgtttgtaagcttgaaccttttcaagacacacttacgatcttcacattcctgggaggtcagaaagttgtatatcagttctgctataagatagaagaaacaaatacagagaggtaggaagtcaggccaagcagctagtccctcgcagtgacaggaccagggtctcagtcacctctctcctattcctgtgccttttctacctgctcctctggattctctgaaccaaggcagccacccagaggtctttggaatttctaggctccagtgctgcatgctgctctccaagtaagagcagaacacagtgagcttccaaagg

SEQ ID NO: 372731 - DNA, 452 bp, Homo sapiens
tttggcagtgtgcccagatttaatggcattctacaagggctattttataagtatgtgctttgaaatgtgctttaaagaacatattctgaaggagagctttcacattgtcagtgttcctgtacttcactggctgtagagacaataaggacacctttacatttaaagcttagtatccagaggttgataccgtccacccatgtaacagagggagctcagaccacatttcaaaattcaacacatcttttaacagaactctgcactcagggtccagctcttatgctcctggaacagattgttccaaggttgaattcagaccgcygccatttctttgctccaggctaatcttaaatgttccacctgggacactgcttgctccagcaccactctttgcttatactgaacctgatgccctgatccttggctcacctgtccacctgccatcctctgcacca

SEQ ID NO: 372732 - DNA, 581 bp, Homo sapiens
agtgtttgttgtgattacaaggttcagattgaccttctctgctccagtgctttctaccctaagaaggctgtatcctgacagaagctgctctttcagccttggtcctagaacaatacgatgctggtaacagacccaaatccaacctacagcctggaatgtcaatgatttatttaataaatctttagaaaatgcttaggcatgaatgatacagcaaagaacaaaaagatgtggtctttattctcattcttcttaaaattaagtaactgaaaccatcctttttttttttttttttttttttgaggtggagtctcactgtccccaggctagagtgcagtggcgtgatctcggatcactgcaaccttcacctccagggttcaagtgattctcctgcttcagcctcccgagtagctgggactacaggcgcgtgccaccacgccyggctaatttttgtatttttagtagagacggggtttcaccatgttggtcaggatggactcgatctcttgacctcgtgatccgcctggctcggccttccaaaatcccaaagggattacaggcgtgaaccactgcgcccggccaac

SEQ ID NO: 372733 - DNA, 508 bp, Homo sapiens
gaagtgttgctggaaggagcacactatggggtatgatgtggtgtggacatttaagagtatcatgctcaattcggtgatgaaattgtgtgaataaattgrgtgcaagaaagcccacacgttctcagttgccacttcacttaatctaccagcagcatttgaactgatacactaggtcagcccctcttcccagaagcacttttttttgcggagtttccaagactccccattctcctgactttgctgtggtctcctttgctgattttacctcgtagtgctgatgtctgactattgaagtgacctggggcacttcttttgatgatcccacccaaacacctccctgtaaataccatgtacacactgacaactccaacatttattacctttagcttagaccttgcccctgagcttcagacacacatccaattgtctattcgtttgatgcttactttgtatgtccaatgggcatctcaagcctaacacaaccagatcaaaactcctgaccttcccc

SEQ ID NO: 372734 - DNA, 599 bp, Homo sapiens
catctcctctaaagatggatgtggccctgtcaggctggatgacatttcacagtcccttcaagcctcatgatgccatggttctgtgaacagcgagctacagttcaaagttgaatgaccacgaaaaagtcatctgatgagaaatcggaatgccacgaataatattgaaatgaaaaggaaagcttgatcttgaaaaagttccaataaccctcaaagccaaacagaatttccctggatgttggtccaactttaacatctgccaaagagcaatttaacttcagtttggcaaaacacttgtgcatttaactcaggagcaagaatgcaagcttaccgggaataatttaamccacaagaaagcaaattagcaacctaagtttaattgtggggactgtaattaacaatagaaataatctttttaaaattttttttaatttttaatacttttcttagagacaaggtcctgccatgttgcaaaggctggtctcgaactccaggccttaagtgattctcctgcctcagcctcccaaagtgctgggattacaggcatgagccacaacacccgggcttggaaatgctctttatgcatttatcaacatggctgc

SEQ ID NO: 372735 - DNA, 599 bp, Homo sapiens
catctcctctaaagatggatgtggccctgtcaggctggatgacatttcacagtcccttcaagcctcatgatgccatggttctgtgaacagcgagctacagttcaaagttgaatgaccacgaaaaagtcatctgatgagaaatcggaatgccacgaataatattgaaatgaaaaggaaagcttgatcttgaaaaagttccaataaccctcaaagccaaacagaatttccctggatgttggtccaactttaacatctgccaaagagcaatttaacttcagtttggcaaaacacttgtgcatttaactcaggagcaagaatgcaagcttaccgggaataatttaacccacaagaaagcaaattagcaacctaagtttaattgtggggactgtaattaacaatagaaataatctttttaaaattttttttaatttttaatacttttyttagagacaaggtcctgccatgttgcaaaggctggtctcgaactccaggccttaagtgattctcctgcctcagcctcccaaagtgctgggattacaggcatgagccacaacacccgggcttggaaatgctctttatgcatttatcaacatggctgc

SEQ ID NO: 372736 - DNA, 561 bp, Homo sapiens
ctctggtctctcttcctcctcttgtaagagcactaatcccatcttgggggccccaccctcatgacatcatctaaagctaattacctctcaaaggacacacctccaaagagcatcacaccaagcttagggtttcagtatatatattcttggtggacacacacattccatccataacacccagaagtgagcatgaatagcycatgtgcttgccatccaccccttactcctactcctagtggtgggctggtttccctatgttggctatctgtcccttccacaatgaagtccctgtcctaaactgcccaggacccaaagccctcccttctacctgctggttctcctcctctgactgcagcccaaccctcaattgggagcagacatcactcacaggcacatgtctaacttgctagctcacagctttgagtttaatggtaggctcctcatcattgagctctatgcaagcatcagggctagatgaagtctgaacatgtctggatgcacaagcaccatgccccacgcctgtcctgcagcgcctcctgagtgagcatctcgagttctgtc

SEQ ID NO: 372737 - DNA, 595 bp, Homo sapiens
caacatttttttcagctggtcaatacataaccttgttttatgtgtgtttctgtttaaagacactttatttgatatgtattgttgattcattaacactgaactcacagccaacagtgctrtaacttaggcctgaacaaagcttatctaaaacacatgttttctccataaggcacatcacagcctcctggcatttaggaacactatacacacttcaatgctacacctggggggcattttaaacagtataattaccaacaaaaaacacacagatgctaaggccttgtggttttagcattctaatagatcacaaaaagattatggcagccaagctgaaacgagagagcagagtgtcaccttgtttgacctcaactgggagcgcatgcactagggactcagatttttcaccactctgcacatgattgcaaatgaccatcaaagcccttgtgagtatcaattttagggtaacaaaaaattttggcaagtaggtgaattcgcaaataggaaatccatgaatactttggattgactaactgtactgtgtgttcagactttttgtcaaagcagttatcttcatttcaatttaatatgaacagct

SEQ ID NO: 372738 - DNA, 502 bp, Homo sapiens
ctttttgctttttttccccctctacggttttgtgtattttcaatagcttctctttattataagaaaacagggttgacattttgggtcattgtgctccttgccatctgccacagaaactttgacatggtgtaacgagagaggcaccatgtcaagctggcaggattctgagggtgattttaaatccgaaaaattccatctctgtatctcttggtctcattttaaatggccacattttcctgtgaaagtctgccttttgtctctttggctttttttttctttttgtttttcttcctgtagcttttcccctgtggttttccatttggccttcccacatcacaaatctaattgggaaaaatggacaaaaatgcccaagagggtggygatggtgcctacccatgtgacctccaacactctacagcctcctaggctttatgccaggggagtcttccagggcttgtcttggataaagaggagaatttcatttgctcctgtgtggttgtac

SEQ ID NO: 372739 - DNA, 639 bp, Homo sapiens
tggcaaaacacccacaggtgcatctgtgacttgcatttttcttgggcccaccctcaagctggctcaataaaccttaattgattggggcacttgcctcagtcattcattttggttgtcaatattataattttgcaagacrttgccaatgggagaaacttggcagagtttatagggaaacgtctcttatttcttacaactgcatgtgaatacaattatctcaaaaaaatttcaattaaaacattgcaaatggtcaaaatcatcctataaaattcctaaaatgtattatacagaatttatgccccatattaggggctaaaattcagactctcattaaagcacaatgctgaaagttaaaacaacaggccaggtgtggtggctcatgcctgtaatcccagcattttgggaggctgaggcaggtggatcacgaggtcaggagatcgagaccaccctggctaacacggtgaaaccccgcctctactaaaaatacaaaaaattagccgggcgtggtggcgggcgcctgtagtcccagctactcgggaggctgaggcaggagaatggcgtgaacccgggaggcggagcttgcagtgagccgagatcgtgccactgcactccagcctgggcgatagagagagactctgt

SEQ ID NO: 372740 - DNA, 619 bp, Homo sapiens
aaagcacagagcaatgtgtgaatatagacagtgtgaagtcagctttaagtggtagcatttatttttagagttaatcacagtgttatggtccacttggacaggacatacatatcaaaaatttaatactatgatcatatcatagtaagtaattcatttatcttagtttgaatgtaatagtttgccaagtcaggactcaatcatgagaaatattagagttccaactctagggatgttttccttgtagaatcttattatttatttatttatttatttatttatttatttatttatttttgagacagagtttcactcttgtcacccaggctggagtgcaatggcatgatctcagctcactgcgacctccatttcctgggtttaagcgatttctcctgcctcagccttccaagtagctgggactacaggcaartgccgccaccacacctggctaatttttgtatttttagtagaaacggggtttcaccacgttggccaggctggtctggaacccctgacctcaggtgatctgcccgcctcggccttccaaagtgctgggattacaggcctgagcaactgcacctggccttctttgtagaatcttattcacttagtttcgtagacc

SEQ ID NO: 372741 - DNA, 570 bp, Homo sapiens
ctcagttccctcattggtaaaatgaggatgcctcaggagggtggtggcaaggattaacataaccaggcatggtggcacatgcctgtaatcccaaccactcaggaggttgaggcaggaggatctcttaagcccagatgttttgggctgtagtgagctatgatggtgccatcatactataggctgggcaacagagtgagacccccatctttaaaaaaagttttaaaattttgtttttttaaaaaagttctcatagctgatataggtaaaagccttggcacttcattacaaatggtcattgttattcraactatttttagaagttttcctgtgtagccagctcactgaggatggcccatttcactgtcccctcaccttggtactccagagagaaatagagaatgagttggacaatgaggttaagggtcaagtagaaaatctagggcattctaaatttgaactcaaaatcttttttgtgttcgtgttccatgcccctttcctggttcccagaggcccctctgccttgaaatttattttctcctcttatatccaatgaactcccctcctgcaatc

SEQ ID NO: 372742 - DNA, 541 bp, Homo sapiens
cttgtgtttgaataatggtgtataattttgtttgaattttgtacttccttgataactaatgacatcaagcaccttttcatgcatttactgcccatttgattatcctcttttgtgaagttcctgttcaagtgtcttcctcacttttctgttgggctgtctacatttttcttattgatttgtaggtgctctttacatatcctggattaaaactctttgtcagagtgtgtgctaaaaatatattcttctaaagttaaattatatatatatatatatacatattctactttgtgacttgtctctcatgctattaatcaaatattttatasacaaaagcacttacttctaatatagtccagtttactaatctaataaattgggattattaaaactgcttcaaaatttttccttagtcaagttgatgaagaatttttttattacatttgttctagaagcctcatttcactttccaatttaggtttacaactcatattaaactgattcatattaaaacacaaatgaatacgtattttaatgtggatat

SEQ ID NO: 372743 - DNA, 542 bp, Homo sapiens
atgggaagccaggcaaacagacagcataacaggcccaagacagtgagccagccttgccgaccaaaggaccactcacttagcgtccaggatcatcatacaggctgatctcaaatttgaaatctggaagctctttgggcagagtgagaggactcagccctagagccaggcagcacatgagaagtcatatacctacagttactgtgtattgagcatttaatacaggccaaacactgcactaagtgctttgtatgctgcagcagtcttgtgagagctggtcacagatgttcccttccttctgggtcttagttggatccccttgtgctactctggaagtgagccttgaccatgaacctttctttggccaatacacatgagtcatatgaatggatgatttytgggtggaagcattgaaagcctaaatcattacatgattttccaactgctctttagctgctttggcagccacaaaaacaatatcagaatggagcttccattgggcaaggcaaccaagatgaggatggtccccagccaataggcacagg

SEQ ID NO: 372744 - DNA, 542 bp, Homo sapiens
atgggaagccaggcaaacagacagcataacaggcccaagacagtgagccagccttgccgaccaaaggaccactcacttagcgtccaggatcatcatacaggctgatctcaaatttgaaatctggaagctctttgggcagagtgagaggactcagccctagagccaggcagcacatgagaagtcatatacctacagttactgtgtattgagcatttaatacaggccaaacactgcactaagtgctttgtatgctgcagcagtcttgtgagagctggtcacagatgttcccttccttctgggtcttagttggatccccttgtgctactctggaagtgagccttgaccatgaacctttctttggccaatacacatgagtcatatgaatggatgatttctgggyggaagcattgaaagcctaaatcattacatgattttccaactgctctttagctgctttggcagccacaaaaacaatatcagaatggagcttccattgggcaaggcaaccaagatgaggatggtccccagccaataggcacagg

SEQ ID NO: 372745 - DNA, 588 bp, Homo sapiens
attttaacaaccaagagcattatttgtaactaataatacaacattctgtgtatggccagcaattttactttttcctgaaatttcacagtggaattcaaagtccagaattcttgttacaaaacacgacttcctcgcagcttcttattcattattttagtatggaatgattcyctataaacatttatttcttagtaagtgttcatcttaagtgtcgaccatccagtgacaggaaccatatttaaagattgattccaatcctcaactaattcaggtcattttcttcttgtccaacctgagaattggcccagcagcctttaaatcagaaaagaagaaataaattattctcacttttagcaaagtgggtggaaatccattctttggttgtctgctttatctcacatgattgactttcagattaatctatccctctgaagtctggacagagcccacactgccacatttcatttcaggggaattctgttattatgatgaccaaatatgtgtgtcatttgaagtcataacttatttatttccttaatacttagattggcttttaaagcaccagcaaaataactgagtaggctgttt

SEQ ID NO: 372746 - DNA, 588 bp, Homo sapiens
attttaacaaccaagagcattatttgtaactaataatacaacattctgtgtatggccagcaattttactttttcctgaaatttcacagtggaattcaaagtccagaattcttgttacaaaacacgacttcctcgcagcttcttattcattattttagtatggaatgattccctataaacatttatttcttagtaagtgttcatcttaagtgtcgaccatccagtgacaggaaccatatttaaagattgattccaatcctcaactaattcaggtcattttyttcttgtccaacctgagaattggcccagcagcctttaaatcagaaaagaagaaataaattattctcacttttagcaaagtgggtggaaatccattctttggttgtctgctttatctcacatgattgactttcagattaatctatccctctgaagtctggacagagcccacactgccacatttcatttcaggggaattctgttattatgatgaccaaatatgtgtgtcatttgaagtcataacttatttatttccttaatacttagattggcttttaaagcaccagcaaaataactgagtaggctgttt

SEQ ID NO: 372747 - DNA, 537 bp, Homo sapiens
ctcttgaattcaaaaaaatttatattgtatactaatttaatttttcatagcactttctttaatattaattcattaaaaatgttcgtgatgtttcaaaggagcaagagaataccaccaakaaatttatttaaagccccctttctaattgaaagggtgtgtagagaaaaacatcagaatagatatatgcatctctcattaaatgtagttgaaaaagtaaaacaaatgctacactgatttaaatatcaaatgaggagaatgatttttttaaaaatgtatgcaatgctctcttttggagtatctgagtgaagaagaaagcatagatgctcacacgctttcaaataaccacatcttcctttccctggtctccaatcctcagaggaggctgagcatcccatactcatgcagaaaggtgagactgctgtggcacacatggtatgacttgatactttcaatgaaaatctaaaagtgagaaagcatttaagtataatgcgtgcaccgctcatgactcaagacatagtcatagaaggctgcaccact

SEQ ID NO: 372748 - DNA, 537 bp, Homo sapiens
ctcttgaattcaaaaaaatttatattgtatactaatttaatttttcatagcactttctttaatattaattcattaaaaatgttcgtgatgtttcaaaggagcaagagaataccaccaagaaatttatttaaagccccmtttctaattgaaagggtgtgtagagaaaaacatcagaatagatatatgcatctctcattaaatgtagttgaaaaagtaaaacaaatgctacactgatttaaatatcaaatgaggagaatgatttttttaaaaatgtatgcaatgctctcttttggagtatctgagtgaagaagaaagcatagatgctcacacgctttcaaataaccacatcttcctttccctggtctccaatcctcagaggaggctgagcatcccatactcatgcagaaaggtgagactgctgtggcacacatggtatgacttgatactttcaatgaaaatctaaaagtgagaaagcatttaagtataatgcgtgcaccgctcatgactcaagacatagtcatagaaggctgcaccact

SEQ ID NO: 372749 - DNA, 567 bp, Homo sapiens
aaaacaaatgctacactgatttaaatatcaaatgaggagaatgatttttttaaaaatgtatgcaatgctctcttttggagtatctgagtgaagaagaaagcatagatgctcacacgctttcaaataaccacatcttcctttccctggtctccaatcctcagaggaggctgagcatcccatactcatgcagaaaggtgagactgctgtggcacacatggtatgacttgatactttcaatgaaaatctaaaagtgagaaagcatttaagtataatgcgtgcaccgctcatgactcaagacatagtcatagaaggctgcaccactgattttcagtaagagaataaaggaaatagaccagctaaaagcacaaactgcaaaagaacatacattcagagtgaaactaaaacgaagatacgttctatcaccctcccaaggctagactgttatccctgatactaaaatcagccacatcattggttgattacatgctcttygcatgtaatgcataaagatgctgtttgccccctttaaactaataacaccaccagccccttcactaattctggaga

SEQ ID NO: 372750 - DNA, 551 bp, Homo sapiens
gaggcgagcaccgggttatgcttctggacagcgtccatccaaagggtcagagggaaattttcatgttgcagaagaggagggccagaacaaatgagacacctttggcagggaggactggtagaagccagggacaagcagtcagtttcgccagccccctgccctcgccgccacctccaaagctggaggctgccacayggccaccgaggatagctggagagaggacgggcttgtctagaaagcagccccagggagctgccaggatgggccctgtgggactcagagctcactactctcacccacacacatgccctctggggcctccagcagaggatagttacagaccatccatgttcagcatcccctggtgccgggaaggctccatggggtcagtcccacaagcagtgctccagcagagaggaacccataacatgaaggactggaaataatatgcacaaccgctttccttttagtattcctgactgcaaaaatcccttctcatagctaagctctgtcgaaaaggaattaagcaatgagttctaacctaaaatatc

SEQ ID NO: 372751 - DNA, 338 bp, Homo sapiens
acacatgccctctggggcctccagcagaggatagttacagaccatccatgttcagcatcccctggtgccgggaaggctccatggggtcagtcccacaagcagtgctccagcagagaggaacccataacatgaaggactggaaataatatgcacaaccgctttcyttttagtattcctgactgcaaaaatcccttctcatagctaagctctgtcgaaaaggaattaagcaatgagttctaacctaaaatatcgctcttgagagtgagctcaggtagctcagaaaacttcctttttatctttcaccatctctaataattgcatttatttgcctttgcatt

SEQ ID NO: 372752 - DNA, 539 bp, Homo sapiens
cttttcttttctttttctttctttttttcttgttctttttctttttttgagacatggtcttgctcttgtcgcccaagctgcagtgcagtggcacaaactsggttcactgcaacctccacctcttgggttcaagcgattcttctgcctcagcctcccgagtagctgggattaccggtgggcgccatcacacccagctaatttttgcattttttagtagagacagggtttcaccatcttggccaggctggtcttgaactcctgacctcaggtgatacgcccacctcggcctcccaaagtggtgggattacaggcgtgagccaccgggcctggcctcccactgctttcttgagcggacaggccttccctggtggttggcacccagcagcctcatagtgcaagatatatttgtaggtgagtgggaaggaagggggatggctggtctttcacttagccagggagcaaagatgccagagacttggctccaccctcaaagggttttgaccatgagaatcaactataacctccttaggatggtgtca

SEQ ID NO: 372753 - DNA, 398 bp, Homo sapiens
agcactaggcattcccaaactaaggcaatcattctagatgctgtgactaaagagatataaaaactgaccatcttacattcttctatgtccatatataaagaatgtatatcctaatagggaggagaaagaaagggtgggagaaaggacagtaagccaataaacaaatactggatactgttaaaatgcaatgaaacaaatgaaacaatgaaattatggaggcatgaacagaggggaaaagagagcaaaaccaaaggcactaacaactttctagctcccacaaggctctttcttgagtctcagttccctcawtaaatgagacaatataactcatagtagtattcaataaatgttaactgcctcctccatatacatattttccagatagcatattataacca

SEQ ID NO: 372754 - DNA, 570 bp, Homo sapiens
agctagaagggaggagaagggatttttcttcattctaccatcagctgtatcccagcactggcaatttgctccaggttctggcttctttcagtatactcaaccccgacctcatcaggcccccttaaagatattagtatcagccaggtgctgccccttcttagaagtacatgtattaaatgcatgggactcctccaccaagttcytaggttctggtaacccaggctcttccctttgattccctaagccctgtctggttctcaggttaatcttatacagagacattattcataattcaaaatcactatttctatttctgatatgaactgttcattcattacactactgaaacataactatgaaactcctcatatccatttttggcaagaaatttgtttacataattgccataccagaagtagaatgcataacaccaggaatcttttaacctaccagaatagcccaataaccccacctaattttgagtatgaccaaactacaaaataaaattgatctttttaaaacttttaccagtgaaacacataattacctgtacagatttggttgttgatg

SEQ ID NO: 372755 - DNA, 533 bp, Homo sapiens
ttggtaacgaccatttgttaacaatttctagaagaatattatcatttcaaaatgactactatatggttcatttttattgagaatgtaacagaaacacagaagggaaactattttcttatgatgcccataactgagtaaatattagtacaaggtacataaagagaacatgtgaaagtgcacatgaaaaaaaagtatttaaatcataaaaaaaccattttttaaaaaatcaatctccttcacttttttctcttatttggatcttcacatcaaaaaattaagcagccttagccaggtgtggtggytcatgcctgtaatcccagcactttgggaggccgaggtgggtggaccacttgagctcaggagtttgagactagcctggccaatgtagtgaaaccccgtctctactaaaaatacaaaaattagccaggcgtgatagcatgcacctgtagtcccagctattcaggaggctgagacatgagaatcgcttgaacctgggaggcagaggttgcagtgagccgagatcaaaccactgc

SEQ ID NO: 372756 - DNA, 601 bp, Homo sapiens
tacttccatttagaactaggatgcggggggatggggaagaacaaggactttttggtgagagtgaaaatcattcatgactcaactttcyggtgtaggggagaggaattgactcatatggcctgtagactccactgtcttcttcgtgtaccccagcttttaagaggagggcaggatcaagatgatcttctaagatatctgttattgatctcccaggaagacctgcattaaggaaatatcagcttcatcttcatcccttttgtttgaggttcctacatgcatttagggaaaccagaaggctagctagcccaggttgtccaaggggactctcagagctcattcccaaacagcagggatggcagaaaaatgctggagaaacctagggaggaatctgcttctctctgatactctgatcagtttggtgtctcagacttaggctgcaaaccctaatcctgcggctgtccatagcagatgccagacaaggaaccccaatgtccgctatcagagagcagaaaaaattctgtcgcattccctttggatttcagccttactctttaaactgttctccttgagtctcagtttttacttgaccttacactatgaa

SEQ ID NO: 372757 - DNA, 601 bp, Homo sapiens
tacttccatttagaactaggatgcggggggatggggaagaacaaggactttttggtgagagtgaaaatcattcatgactcaactttctggtgtaggggagaggaattgactcatatggcctgtagactccactgtcttcttcgtgtaccccagcttttaagaggagggcaggatcaagatgatcttctaagatatctgttattgatctcccaggaagacctgcattaaggaaatatcagcttcatcttcatcccttttgtttgaggttcctwcatgcatttagggaaaccagaaggctagctagcccaggttgtccaaggggactctcagagctcattcccaaacagcagggatggcagaaaaatgctggagaaacctagggaggaatctgcttctctctgatactctgatcagtttggtgtctcagacttaggctgcaaaccctaatcctgcggctgtccatagcagatgccagacaaggaaccccaatgtccgctatcagagagcagaaaaaattctgtcgcattccctttggatttcagccttactctttaaactgttctccttgagtctcagtttttacttgaccttacactatgaa

SEQ ID NO: 372758 - DNA, 601 bp, Homo sapiens
tacttccatttagaactaggatgcggggggatggggaagaacaaggactttttggtgagagtgaaaatcattcatgactcaactttctggtgtaggggagaggaattgactcatatggcctgtagactccactgtcttcttcgtgtaccccagcttttaagaggagggcaggatcaagatgatcttctaagatatctgttattgatctcccaggaagacctgcattaaggaaatatcagcttcatcttcatcccttttgtttgaggttcctacatgcatttagggaaaccagaaggctagctagcccaggttgtccaaggggactctcagagctcattcccmaacagcagggatggcagaaaaatgctggagaaacctagggaggaatctgcttctctctgatactctgatcagtttggtgtctcagacttaggctgcaaaccctaatcctgcggctgtccatagcagatgccagacaaggaaccccaatgtccgctatcagagagcagaaaaaattctgtcgcattccctttggatttcagccttactctttaaactgttctccttgagtctcagtttttacttgaccttacactatgaa

SEQ ID NO: 372759 - DNA, 601 bp, Homo sapiens
tacttccatttagaactaggatgcggggggatggggaagaacaaggactttttggtgagagtgaaaatcattcatgactcaactttctggtgtaggggagaggaattgactcatatggcctgtagactccactgtcttcttcgtgtaccccagcttttaagaggagggcaggatcaagatgatcttctaagatatctgttattgatctcccaggaagacctgcattaaggaaatatcagcttcatcttcatcccttttgtttgaggttcctacatgcatttagggaaaccagaaggctagctagcccaggttgtccaaggggactctcagagctcattcccaaacagcagggatggcagaaaaatgctggagaaacctagggaggaatctgcttctctctgatactctgatcagtttggtgtctcagacttaggctgcaaaccctaatcctgcggctgtccatagcagatgccagacaaggaaccccaatgtcckctatcagagagcagaaaaaattctgtcgcattccctttggatttcagccttactctttaaactgttctccttgagtctcagtttttacttgaccttacactatgaa

SEQ ID NO: 372760 - DNA, 549 bp, Homo sapiens
tcatcccttttgtttgaggttcctacatgcatttagggaaaccagaaggctagctagcccaggttgtccaaggggactctcagagctcattcccaaacagcagggatggcagaaaaatgctggagaaacctagggaggaatctgcttctctctgatactctgatcagtttggtgtctcagacttaggctgcaaaccctaatcctgcggctgtccatagcagatgccagacaaggaaccccaatgtccgctatcagagagcagaaaaaattctgtcgcattccctttggrtttcagccttactctttaaactgttctccttgagtctcagtttttacttgaccttacactatgaaagggggatctctttgggtttgtaaaccaaaattaaaattctaagcccccccaatagactgaatggacccccctcacaaccaagaagatttcaaagaaacctgaaaaaccagtttagtccacgaagggaagtgggggattggacatgcctaattataccctcccccttttggagtttagcacaactgaccagcata

SEQ ID NO: 372761 - DNA, 561 bp, Homo sapiens
ttacaagcccttcctgcagtcatctgccctgagaatatcattttggattggaggcagccttaaggtttgatagcctgaaggtatagaagcaggtgggacttgcccatggagtacccctgtagccccagtaaggggatttgagatcctctgtgagagggctgtgaacatgaagcctgtgagggacaaggacacgagactgcaggagccctggcctatgacagcactgcgactctgtggccaccataagggcggatgtggccagggtgactgaacacatgttccaagacagcttgcaaagtctcaaaactaattctcctttttgcctagacatgccaggcacattgaataaaacaacttcaagtgtcttagycttcatgtctctgccacctttgcctcatcgctctttctaccaccctttccaggcccttatccctcatttctttcacccgtgggaaagacccagcttaaagtcacctattctaagaatttttcccagcttcctccagctaaaatgaattatttctttgtcccagccgccaaagtattttgtttgtactgtca

SEQ ID NO: 372762 - DNA, 537 bp, Homo sapiens
tattaacactgtcatatatacggcatggattataagggtagccttaagtaatagggacttattgtaagttatgtgagattaaagaagcacaggaaactggctcagaatccaaataatccctctgtgcttgtgcttcattgggtggaatgtatactagtcttcatggagaattggaatagtggtttattgtcatttctgatttgacagcagctccagtgattccactttagtcttttttttacactttactgattcatactcctcaaacacaaagatctgattgggtagttctggtcaccatctcttacgcagagaattactatggcagctttggcttatgatccacagttattcatttgtgacaagagaaaaacctggggccactcttctgagaaaatgactttggyaggcactgggagcttcataaactactataccacacagcctgttttttttaattattattcttttttccccgttcttagtaagtgtgcattaaattctttcttgtattggttcctaattgtttgatctaaa

SEQ ID NO: 372763 - DNA, 550 bp, Homo sapiens
ttttttttttaacacttcgaaatgctgtgaagcaaagtatcatccctctctttcctcaccctcttctcttccttaacacctttcttcagttctagctgttggcagctagatgcaacttaataatgccattttgttttcatttggcatgtcattcatcattttcaaaataaataaactttaattttgtgctgccacaatcaggaatatttgaacatttacagcttatcttgggtatctgcccttattactttctgaggagctgccctttatagcaatcagggaactataccacttggaagactaattgtctttatacaaaaataaaatccttgtgttcagatttctgtcttgagtggctggtttgaatctaattttctgttatatgaagcaaagatttattatttaacatagtttcaaaattaaaattgatagtgaaattttatgtgccatgcaatgtcatgtgtgttcttttaaggtgaagattcattttttaatagctttattgaggtataattgacmtataataaactgcacatatttaacaccacat

SEQ ID NO: 372764 - DNA, 558 bp, Homo sapiens
tcacaatctttttttttaaagcctatgcattttccaattaaaacataataatgcatgcttaaggtttctagatacacaagactacagatgtgacacttgttcaataaatatcttccaggtggttactaataaggttcaactgggaagttcctgctcctctggcagactcccggaccagagaagatcatagccttgcagtaaaaagactgaaaacaggccaggcgcagtggctcacacctgtaatcccagcattttgggaggctgaggtgggcagatcacaaggtcaggagttcgagaccagcctgaccaacatggtgaaaccctgtctctactaaaaatacaaaaaattagctgggcatagtggcaggtgcctgtaatcccagctactcgggaggctgaggcaggagaatcgcttgaacctgggaggcagaggttgcagtgagccaagatcrcaccactgcactccagcctggggaacagactgagactccatctcaaaaaaaaaaaaaaaaaatggggccaatcaaaaaattcttttgaataacacaaatgatgaaa

SEQ ID NO: 372765 - DNA, 553 bp, Homo sapiens
gtgcaagactgctacatcagtaagtgtaactaatctaataagcagatgtccatgggtggttatgcaccttggaaaggaataagcattaggaccatagaggacactctaggactaatgctcattggaaaatgactaggggtgctggcatccctatgttcctttttcagatgagaaacgttccccccaaggcaaaaacacccytaagatgtattctggagaattcggcccagccagggtgtatgtacctttttccctctcagacttgaagcaaattaaaatagacttaggtaaattctcagataaccctgatggctatattgatgtttcacaagagttaggacaatcctttgatctgacatggggagatataatgtgactgctagatcagacactaaccccaaatgaaagaagtgctgccataattgcagcttgagagtttggcaatctctggtatctcagtcaggtcaatgataggatgacaacagaggaaggaacaattctccacgggccagcaggcagttcccaatgtagaacctcactgggacacagaatc

SEQ ID NO: 372766 - DNA, 500 bp, Homo sapiens
aaaaatctgcacagaaatagcataagtaaaaaacaatcacaacttctggaaatgaatgacacacttagagaaatgcaaaaaaaaaaaaaaaaaaaaaagaaagaaacaaaaaaaaaacctgaaaactttcagcaatagaaccaaaaaagtggaaraaagaactcagggctcaaacaaggctttcaaattaacctaatcaaacaaagacaaagaaaaaagaatcaaaataatgtgcaaagcatcaaaaaagtttgggattattttgaacaaccaaacctaaaaataaatgtgttcctgaggaaaaaaaaaaatctaagtgtttcaaaaacatatttgagggaataatcaaggaaaaatgtcctggccttgctagacatctagacatccaaatacaagaaactcaaaggacacctggaaaattcatcacaaaaagatcgtcacttaggcacgtattcatcaaattatctaaagtcaatatgaaggaaacaatcttaagacct

SEQ ID NO: 372767 - DNA, 500 bp, Homo sapiens
aaaaatctgcacagaaatagcataagtaaaaaacaatcacaacttctggaaatgaatgacacacttagagaaatgcaaaaaaaaaaaaaaaaaaaaaagaaagaaacaaaaaaaaaacctgaaaactttcagcaatagaaccaaaaaagtggaaaaaagaactcagggctcaracaaggctttcaaattaacctaatcaaacaaagacaaagaaaaaagaatcaaaataatgtgcaaagcatcaaaaaagtttgggattattttgaacaaccaaacctaaaaataaatgtgttcctgaggaaaaaaaaaaatctaagtgtttcaaaaacatatttgagggaataatcaaggaaaaatgtcctggccttgctagacatctagacatccaaatacaagaaactcaaaggacacctggaaaattcatcacaaaaagatcgtcacttaggcacgtattcatcaaattatctaaagtcaatatgaaggaaacaatcttaagacct

SEQ ID NO: 372768 - DNA, 500 bp, Homo sapiens
aaaaatctgcacagaaatagcataagtaaaaaacaatcacaacttctggaaatgaatgacacacttagagaaatgcaaaaaaaaaaaaaaaaaaaaaagaaagaaacaaaaaaaaaacctgaaaactttcagcaatagaaccaaaaaagtggaaaaaagaactcagggctcaaacaaggctttcaaattaacctaatcaaacaaagacaaagaaaaaagaatcaaaataatgtgcaaagcatcaaaraagtttgggattattttgaacaaccaaacctaaaaataaatgtgttcctgaggaaaaaaaaaaatctaagtgtttcaaaaacatatttgagggaataatcaaggaaaaatgtcctggccttgctagacatctagacatccaaatacaagaaactcaaaggacacctggaaaattcatcacaaaaagatcgtcacttaggcacgtattcatcaaattatctaaagtcaatatgaaggaaacaatcttaagacct

SEQ ID NO: 372769 - DNA, 500 bp, Homo sapiens
aaaaatctgcacagaaatagcataagtaaaaaacaatcacaacttctggaaatgaatgacacacttagagaaatgcaaaaaaaaaaaaaaaaaaaaaagaaagaaacaaaaaaaaaacctgaaaactttcagcaatagaaccaaaaaagtggaaaaaagaactcagggctcaaacaaggctttcaaattaacctaatcaaacaaagacaaagaaaaaagaatcaaaataatgtgcaaagcatcaaaaaagtttgggattattttgaacaaccaaacctaaraataaatgtgttcctgaggaaaaaaaaaaatctaagtgtttcaaaaacatatttgagggaataatcaaggaaaaatgtcctggccttgctagacatctagacatccaaatacaagaaactcaaaggacacctggaaaattcatcacaaaaagatcgtcacttaggcacgtattcatcaaattatctaaagtcaatatgaaggaaacaatcttaagacct

SEQ ID NO: 372770 - DNA, 533 bp, Homo sapiens
attacaatcctaattatatacacacctaactctagagtttccaaatttataaactcttacttctagacataagaaacaagataaatggcaacacaataaagtgggggatttcaatgtcacactgacagcactagtcaggtaatcaagacagaaattcaacaacaaaaaatggatttcagctataccctagaacaaataaacttaacatatattcacagaacattctaccccaaaactgcagaatacwcattctgttcatcaacaaagggaacattctttaagttagattatatgataggccacaaacaagtctcaaatttaagaaaatcaagctatatcaagtactctctcagtctacagtggaatgaaattggaaatcaactccaaaagaaaccctgaaaaccaggaatatatattgaaattaaataacctgctcctgaatgattattgtatcaacaatgaaatcaacacgaaaatttaaaaattctttgaaatgaacaataatagtgacacaacctaacctatgaaaacct

SEQ ID NO: 372771 - DNA, 572 bp, Homo sapiens
tgtatggtgttaaacatcttcataaaaagatggaatgatcacaaattaacaatgtaacattgcacctcaagaaactagagaaacaagaataaaacaaattgaaacaagaatgatcacaaattaacaatgtaccattgcacctcaagaaactagagaaacaagaataaaacaaactcaaagctaacagaaaaaagacaagaaacataagagmagaattaaataaaattgagacaagaaaaacaatacaaaggatcaaggaaatgaaaagttgattcattgaaaaaataaagctgaaacagtgctagctacattaagcaggaaaaaaaagattcaaattggcacatagataacaactttgccctgcagctcccatgtagaaggatgaaaacggtgagtgaattcctgatcttcaattaaggtacaaaggttctctcattaagactgactcggtggttggcgtgacccacaagagcaaggaaaaccagggtggagtgatggcctacccgggagctgcacaggccaaagggagctccctctggcagccaagggaggtggtgggagattgtgctacc

SEQ ID NO: 372772 - DNA, 523 bp, Homo sapiens
tttatgagagttgcatcgattttgtagattgctttttgcagtatggtcattttcacactattaattctacccgtccatgagcatgggatgtgtttccatttgtttgtgtcatctatgatttctttcagcagtgttttctgtttttttttttttttcttgtaggggtctttcgtgtccttggttaggtatattgttatgtattttctttctttttttgcacgtattgtaaaaggggttgagttcttgacttgattctcagcttggtcactgttggcgtgtagcaragctactgatttgtgtacattaattttgcattctgaaagtttgctgaattgatttatcagttggaggagctttttgaagaagtatttattttctaggtatacaataatataatcagaaaacagcgacaattttgcttcttttttaccgatttggatgttctttatttctcttgtctgattgctctggctaggacttccagtaatatgttgaagaagagtggtgagagtgggcatccttg

SEQ ID NO: 372773 - DNA, 367 bp, Homo sapiens
gtctggttgtaatatgagtgcaaaaaaagactggacatagggcattttccccatttttccactcattagcaataattgcttaagtcagttaaaattgtaaagttgaatgttccatttgcggaccatttggacccattatctaattcatactgcagccagcctgtattgcaaaaaagacaaggcacttagggcagatatattgcctgaggcstaaggtttgcagattttttatgaggcagcctacagggctgttttttggaatggaggaccaggagtttcccataatggagggtcaactcaggagaacaaagaaaaaggagaccatcctggaaagctggagggagaggataaaaggagcaattatcac

SEQ ID NO: 372774 - DNA, 632 bp, Homo sapiens
atgggctctgtgttggtctttagttgtagttgtttagtgcactagttttgtgctggttggccacttgccaggaggtggtgctttcaagaaagcatcagctgtggtagtatagggaggatcaggcagtgggtggggccctagaactcccaaaagaatatgattttttacttcaactaccagggtcggtggggaaagaccatggtgggacagggttaggtgtatctgagctcagactctctgggttgggtttgttgtggctgctgtgcaggacggggtgtggttcccaggacaatggaggtacgttctcaggaggattatggctgcctctgctgygtcatgcaggttgtcagggaagtcggggaaagctgtccgtcacaggcctcacccagctcccatgcaacccaaaagactggtcttactcccaccctgccccaaccaacagcaccaactttgtttccaggtagtgagtgagcaggatgataacttgtcctagtctagcagcctcccagctgagaaagcaagcaaggctttcacacctccttcacctgtagagtctgcacaccagactcacaccctccccgagttctggacaggaagcttcacatccggttgtaattgttagaaagttcaac

SEQ ID NO: 372775 - DNA, 632 bp, Homo sapiens
atgggctctgtgttggtctttagttgtagttgtttagtgcactagttttgtgctggttggccacttgccaggaggtggtgctttcaagaaagcatcagctgtggtagtatagggaggatcaggcagtgggtggggccctagaactcccaaaagaatatgattttttacttcaactaccagggtcggtggggaaagaccatggtgggacagggttaggtgtatctgagctcagactctctgggttgggtttgttgtggctgctgtgcaggacggggtgtggttcccaggacaatggaggtacgttctcaggaggattatggctgcctctgctgcgtcatgcagkttgtcagggaagtcggggaaagctgtccgtcacaggcctcacccagctcccatgcaacccaaaagactggtcttactcccaccctgccccaaccaacagcaccaactttgtttccaggtagtgagtgagcaggatgataacttgtcctagtctagcagcctcccagctgagaaagcaagcaaggctttcacacctccttcacctgtagagtctgcacaccagactcacaccctccccgagttctggacaggaagcttcacatccggttgtaattgttagaaagttcaac

SEQ ID NO: 372776 - DNA, 367 bp, Homo sapiens
gtctggttgtaatatgagtgcaaaaaaagactggacatagggcattttccccatttttccactcattagcaataattgcttaagtcagttaaaattgtaaagttgaatgttccatttgcggaccatttggacccattatctaattcatactgcagccagcctgtattgcaaaaaagacaaggcacttagggcagatatattgcctgaggcctaaggtttgcagattttttatgaggcagcctacagggctgttttttggaatggaggaccaggagtttcccataayggagggtcaactcaggagaacaaagaaaaaggagaccatcctggaaagctggagggagaggataaaaggagcaattatcac

SEQ ID NO: 372777 - DNA, 485 bp, Homo sapiens
tggggaaggatagcattaggagaaataccttatgtaaatgacgacttgatgtgtgcagcaaaccaacatggcacatgtatacttatgtaaccttcacgctgtgcacatgtaccctagaacttaaagtatagtataaaaaaattcctatggcatagacctggtcgcaaaaccatcaccaaactcctaaataaagaccaaaatgtttstaatggcaaatatgaaaataaatgtgagctatagatacatttcagaaagattaatacaaacaattgagagaattttttccccaaaaagatgaattaatgccaatcattttcaaattctttgaacaaatggaagaaaagagaacactttcatactacttttatgactctagcattaccctgagaccaaagccagacaaggatattatgagaaaagacaataacaggctaatattgctgaagaacatagatgtgaagatcctcaacaaaatactagcaaac

SEQ ID NO: 372778 - DNA, 485 bp, Homo sapiens
tggggaaggatagcattaggagaaataccttatgtaaatgacgacttgatgtgtgcagcaaaccaacatggcacatgtatacttatgtaaccttcacgctgtgcacatgtaccctagaacttaaagtatagtataaaaaaattcctatggcatagacctggtcgcaaaaccatcaccaaactcctaaataaagaccaaaatgtttctaatggcaaatatgaaaataaatgtgagctatagatacatttcagaaagattaatacaaacaattgagagaattttttccccaaaaagatgaattaatgccaatcattttcaaattctttgaacaaatggaagaaaagagaacactttcatactacttttatgactctagcattaccctgagaccaaagccagacaaggatattatgagaaaagacaataacaggctaatattgstgaagaacatagatgtgaagatcctcaacaaaatactagcaaac

SEQ ID NO: 372779 - DNA, 538 bp, Homo sapiens
tcctatctatcctatccaccaacataccctgcccccttcagctttttcacacttcccaaactggaatctgtttctctgtcatcacctctgctgaaaactgagcttcctccagagagaagaaaggattttgagtagtgagagaggggcaagctacaagttcaactcattacctttaacctgcacactgctgcaggtgagtcatgtaatggtctcactgaccaaaggcaggtgtcggggtgtcccccaaccaggaagatgttagcccagsagctaatgctatctcttgcttgggtaaatttcttcagccatctatgtcaaggcccaagtggtttgcattctgaaaaccacaatcctaggttactcaccatcaattggctaaaaaagaactaatgttttgactaataccttctagcagggtgaatggccaaggctctgcaggcctgatagggagtttcctatcaaacaatgctttactggtactgagaatgttagatttgcatgagacctttggagaacatatagtataatactgtcttcc

SEQ ID NO: 372780 - DNA, 613 bp, Homo sapiens
tctcgtgtccagcttcaaggcaaaggacacatattctgggcaaaacacagaccttggcctccacataaagcaaaattcattctgactacccctcacctggaggcacaggaatggaagatgggaggggactttgttgaaacactgcaggtcctagtggccaatttttttgcagtgagatttaaggtattttcctcctaagagtcagccactctccaatagatactccagtaacctttgctgtcaaatgtctggctcaccctcctactctgtctggcttctggttgctatggcaatgtggccaggagcactgttctcccagtgtaaatgagtggaagcctgtgaatgtagacaggrgtgcactgtggggacagggggaaattctcgaaggcaagaatagcctaatatacttaggtcctttggtgattaacacctcccacagctcctccattaagcatttacagcagcattcccagaagctatgcgaggtagattgcaaacagggagccttaaagcagatagcagagccttttattagtgtcatttcccagaaaaaaaaaaaaatccagtttgttagggagatttcacttgctcatgttccaaagttagtatcact

SEQ ID NO: 372781 - DNA, 618 bp, Homo sapiens
aaactagaaacaaactatcgatttcagtcatttctcttgggaggtcatgatatgagaattgccaagaccatggtggcaggagatcttctttctctctaacttgcaaatagggaagagctagacatggtcagtatgaggcagtgacaatgtgcctaagtgagaacttatgagggacagtcccacggtacctttaaaattctcacccaaagttctcccataggcctctgtgtttcaacatttttgtcatctgtgatagcctacctttctcccaaaggctttcagttgtctgtaaatcagagctcargggaacattggctacccttagaatcatcaatgaggttttggtacactgagtgttcattcatgaagggcagtttgccctcacaatctggaccttaatctcctgattctggtccctagggaggcatggaggaaactgtcctgcagacctcaccagtgggtgtatctgatctacctgttgcaagagtgagacccatggaaggttttctctcatgcaaggtgtagagctgggggaccacacagggccaggagatgatcttgaaagaaaacaaacccctcctttgtcacctggaggaacttttgcaaattaatttgaca

SEQ ID NO: 372782 - DNA, 581 bp, Homo sapiens
cttggcacctggctgtgaaatgtcttctttcagaaaaaagagaagctaggcacaaaaaaagtgtattaagttggtggtagaaatggagatttgctatggttctaccattgttgcttgcccagatctacatgggctgatagtctaagaacctttctgtagcatctagaagcatccttgctagggtcacttaatgccattaaagaaaaaatttaggtactatagaacagggactatcattgtaaggtaggaagatataggaagaaatgaacttttaaaaattgtccaaaaccttgatacttagctkattcatccatgatagaaactcaaaatgtttttcctcttaggaaaccctaaaattcacatgggtctaggtgctccatttatttgagaataactatggagaccctgtggaatctatatgctgctttataagatcctcagaaatttctgcctcactttttcttcaggatgttggtgtaaagcatgaataatcagcacattgccatctgatttcatgaggttaaaaagggttccccacacacaggaaggctgtgtcatttcaaagtcctattccttgtctt

SEQ ID NO: 372783 - DNA, 519 bp, Homo sapiens
ttgttttaactttttaaaagatggttgggatacagattaactttcttttgtaaataactgtttcactttgcctgaaataggacatatattcactctaataaaacagaatggaaagtctcaattcatgggagttcctgtacaaggggctgattctgtgtttggagctgagcttctcacagcagctttttttcagttatcttattatagatgtgctctaactgatattcaatcccctctttctccaagggaataaaccactttcacaaagagctgccctatgtagatcacacagttttatagcttgcaacaaagtgattagggacaaataaaaaagcaaaaataaggaaactaacactgaagcaatcctacttctcatgtctctgaatagagaagtaaggtaatctttaaccaaaggaaataaaaatatgcaagttaactacctactttatttactgttagctaaatttgtttacctaaggctttayccctttgcaaaccaaagatttttttttattaatg

SEQ ID NO: 372784 - DNA, 452 bp, Homo sapiens
gcaataagcaatcttaaaataacattgaggaaacaatcctacgtataacataaaaatcacatgatagtaaatttaaagtaagtgyaagattttttatattaagaactatgcaagcttgttaaaaaatttaaagaagagctaaataaatgaaaagacatcccatgttcatggatcagaagactattattgttaagttggtaataacccccaaatgatctatagattcaaggtacacaacatacaaaaattcactcaagatgtatcagaaacctaaatgtaagcacttataatgcttttagtatttgaagaaatacttttagaagaaaacaaacatataaatggttataaccttggatttggaaattgtttcttagatatgaaatcaaaatcacaagaaaaaattgtttgaagcacagaaaaatcaagaacatgaaagactaagcaaatataaa

SEQ ID NO: 372785 - DNA, 623 bp, Homo sapiens
cacatattgtcttttgcagaagatgttgtacaaatttacattttctcccacagtgtgtgttaccttttctctgcatcgtcatcaacaccagttgtttttwtgactttgtagtactagccattctcattggtatatgttggtatcacattgcggtttaaatttgcatgtatctgctgattagtgacactgagcagtttctaatatgtttgttggctgcttgtatgtcttttttttgaaaaatatctgctcttatcctttacccaattttaatggagttatttgtttatattcttgtagagcgtttgagtttcttgtaaattatggatattagttaattggcaaatgcatggcttacaaatattttctcccattctgtaggttgccagtttatgctgttgattatttcagcagattatttcacagcttcaatcagaagctgtgtagaagatttttagtttaattaagatccacttgactatttttctttttcttgcatttgcttttaagattttatttataaattctttgcctaggtgagtatctggaaaagttttttctagattgtattctataatttttatagtggtaagtactacctttaagcctttaactcttcttgagtt

SEQ ID NO: 372786 - DNA, 562 bp, Homo sapiens
aatgtaatgttgccatctttgttcttttggcttaggacttctttcactctttgggttcttttttggtcctatattaattttaggattgctttttctaattctgtgagaaatggcattgacaaattaacaaaaatggatggaatctaaattgtgctttgggcagcatggtcatttaaacaatgttgatttttccaattcatgagcatgggayggttttccattggtttgtgtcatctatgatttctttcagcagtgttttgtagttctcttgtagaaatctttacgtccttggttaaatgtattcataggtattttattttattttttattaatttttatttttattttaaattctggggtacatgtgcaagatgtgcaggtttgttacataggtaaatcctgtgccatggtgatttgctgcacctatcaacccatcacctaggtattaagcacagcatgcattagctgtctttcctaatgctttccttccccctaccccatccctcaacagacctcagtgtgttttgttttcctccctatgtccatgagttgtcactgttca

SEQ ID NO: 372787 - DNA, 562 bp, Homo sapiens
aatgtaatgttgccatctttgttcttttggcttaggacttctttcactctttgggttcttttttggtcctatattaattttaggattgctttttctaattctgtgagaaatggcattgacaaattaacaaaaatggatggaatctaaattgtgctttgggcagcatggtcatttaaacaatgttgatttttccaattcatgagcatgggacggttttccattggtttgtgtcatctatgatttctttcagcagtgttttgtagttctcttgtagaaatctttacgtmcttggttaaatgtattcataggtattttattttattttttattaatttttatttttattttaaattctggggtacatgtgcaagatgtgcaggtttgttacataggtaaatcctgtgccatggtgatttgctgcacctatcaacccatcacctaggtattaagcacagcatgcattagctgtctttcctaatgctttccttccccctaccccatccctcaacagacctcagtgtgttttgttttcctccctatgtccatgagttgtcactgttca

SEQ ID NO: 372788 - DNA, 562 bp, Homo sapiens
aatgtaatgttgccatctttgttcttttggcttaggacttctttcactctttgggttcttttttggtcctatattaattttaggattgctttttctaattctgtgagaaatggcattgacaaattaacaaaaatggatggaatctaaattgtgctttgggcagcatggtcatttaaacaatgttgatttttccaattcatgagcatgggacggttttccattggtttgtgtcatctatgatttctttcagcagtgttttgtagttctcttgtagaaatctttacgtccttggttaaatgtattcataggtattttattttattttttattaatttttatttttattttaaattctggggtacatgwgcaagatgtgcaggtttgttacataggtaaatcctgtgccatggtgatttgctgcacctatcaacccatcacctaggtattaagcacagcatgcattagctgtctttcctaatgctttccttccccctaccccatccctcaacagacctcagtgtgttttgttttcctccctatgtccatgagttgtcactgttca

SEQ ID NO: 372789 - DNA, 529 bp, Homo sapiens
  misc_feature (1)...(529): n = A,T,C or G
tttatgtgatgaattatgtttatagatatgtgtatattgaaccagccttccatcccagggatgaagccaacttgatcatggtggataaggttcttgatgtgctgctgtatttggcttgctggtattttattgagaattttcgcataaatgcttatcagggatattgttatatttttcttttttagttgtatttctgccaggttttggtatcaggatgatgctggtctcatagaatgaattagggagacactcttttttaaatttttttccaataatttattgaggtacatgtgrtatttcattacatgagtaagttctttggtggtaatttgtgtgattttggtgcacccaacaccccagcagtctacattgcactatatttgtagtctttattccttgccaccccanacccatcttcccccattcccccaagtcctcaaagtccattgtatcattcttatgcctttgcgtcctcatagcttagctcccacacatcagtgagaacatatgatgtttggttttccattct

SEQ ID NO: 372790 - DNA, 578 bp, Homo sapiens
gaaggatgagaaggctgcaaaacaaacagaaaacaaataacaaaatggcaggagtaattctttacttatcaataataacattgaatgtaaatgaactaaatgcttcaatcaaaggcataggctaactgaatgaataaaataaagacaagacccattaatatgttacctacaggaaatatatattacctataaaaacactcagactaaaaattaagtgatggaaaamgatattccatgccaatgcaaacaaacaaaaaaacaaaaacaggagttgctatacttacatcagacaaattatatttcaagacaaaaaactattagaagagtcaaacaaggtcaccatataatgaaaaaagagtcaattaagcaggagaatgtaacaattttaaatatatatgtacccaatactggagcaccaaggtatagaaaaaatatgtttttagagttaaagggagagataggccctgatccaaaatagctagagacatcatcctctcactttcagcactaaacacatcttccagacaaaataccaacaaagaaacaccagagttaatctgcactatagacaaacttaa

SEQ ID NO: 372791 - DNA, 434 bp, Homo sapiens
ttggttatttcttttcttctagctttggggtttgtttgctcttgattctctagttcttttagttgtgrtggtagtgtgttgagatctttctagctttttgatgtgggcatttagtgctataaacatccctcttaccaccactttagctgcatcccagagattctggtacattatctgtttgtttgcattagtttcaaagaccttcttgatttctgccttaatttcattatttacccaagagtcattgaggagcacgttgttcaatttacaggtagttgtgtggttttgagtgaatttcttaatcttgagctctaatttgattgtgctgtcatctgagagactgttatgatttcagttctctcacattggctgaggagtgttttacttctgattatgtgatcaattttagagtaagcaccatgtggtaatgagaa

SEQ ID NO: 372792 - DNA, 585 bp, Homo sapiens
gttaaactaaatcaacctctaggacttggttgagacaaatacagggtgaatgactattcacttatgtctttccacataaaattaagaattataatttcctyttccaaaatacagataaactgtcagctaataaactgacctaaaataaaaatgaaacatttttatgtaaattaaaatatatacatatattaagcatatatatgtatattaaataacatactaaacatatattaaagtatattataaataaaagcatatatatgttaaataaaaacatattaaaagtatatttgaaataaagtttgactacacaagttttatacatatggtactttaaaaaaatagtaattgtatcatttacatgacaattatcaaaggaaaaaatttacataaactctgaaacttttatgttagtacctaactgcattacaatttttaataatgaaactttaacattatattaaagtaaatttctattcttaaactgctttctaaaaatgttaaccttcatccttccatacctgtctaccccagggatgaaaatacatggtatccagagaaaaatcctgataaattaacaaaaat

SEQ ID NO: 372793 - DNA, 585 bp, Homo sapiens
gttaaactaaatcaacctctaggacttggttgagacaaatacagggtgaatgactattcacttatgtctttccacataaaattaagaattataatttcctcttccaaaatacagataaactgtcagctaatraactgacctaaaataaaaatgaaacatttttatgtaaattaaaatatatacatatattaagcatatatatgtatattaaataacatactaaacatatattaaagtatattataaataaaagcatatatatgttaaataaaaacatattaaaagtatatttgaaataaagtttgactacacaagttttatacatatggtactttaaaaaaatagtaattgtatcatttacatgacaattatcaaaggaaaaaatttacataaactctgaaacttttatgttagtacctaactgcattacaatttttaataatgaaactttaacattatattaaagtaaatttctattcttaaactgctttctaaaaatgttaaccttcatccttccatacctgtctaccccagggatgaaaatacatggtatccagagaaaaatcctgataaattaacaaaaat

SEQ ID NO: 372794 - DNA, 529 bp, Homo sapiens
ggtcacagaagaaatcacaagagaaatcagaaaatacttagagacaaatctaatgcaacaaccaaaacaaatgggatacagcaaaagaaatgctcagagaaatttatagttgtaaatgcctgcatttaaaaagaaaaatataaaatcagtaacctaacttcacacctgaaggaactaaacaacaaagaacgaaccaaacccaaagctagcagaagaaaagaaataataaagattagagtagagataaacaaaatagagaatagaaaaaaaaatagcgaaaatcaatgaaaccaaaagttgkttacttgaagagatcatcaaaatgaacaaacctctaggggaaacaaaaagagagagagagagaagaaagaatttctagacttcaagacaggtctttttaaatgacccagtcagataaaaaagaaaaagaagaaataatttaaaagaatgaataaagccttcctcatatatgggacactatcaagtgaaaaaatattcagattttgggagttccaagagaagagatgag

SEQ ID NO: 372795 - DNA, 542 bp, Homo sapiens
ttcaaccatgttataaggtaaaaaacaatgatgagctaattaggtatgacaagaggccaacaagaaaattttgaaataactgaaaggactatttgcaatctgtatttatattcactgttattcataataaaccttgtcctaggtatttgttgagctttgggctattagctaatggcagcagcccacggatataatttatctataaataatttacacacatactagagtataggyttacatatgtattttaattgatggagttgcttgattaaaaacctttgtacatggaagacaagctctcctcttgacttgctctgagcaggaatagctactgatcagaccagagttgagcatgcagtgatttgctaaaccacactggctcttgctaagaacccgactggaatgtatggaggagaatggtcaatttaaaaagaggattattcagtcagcaacagaagtgacacacaccaaatacacagtcccttgagctgcctcgtttcttgcagatgttactcttgaaggccaaacgtgcttttggtatg

SEQ ID NO: 372796 - DNA, 576 bp, Homo sapiens
acactctagtcaaatcttagctgtttgttacattggtcctttcttatggggaagactacttccaagtacttctagccagccatctggccagtcgccaggcccagaatatactatatttacgtacaagcaaaaattgctaatcactcacttttttttgttctgttatttttcacaaagtatactcttccatgtccaagacaaaattaggaatgccacctcagattgtatttactcttttgtgacaaaatttcaagggaacattgtttattgtttatgatccagacatatatagttattgagtattgtttcaacccctcatcctgttttttctcttaatgctgggcctttctccattgagttatttttttcatgtcatatttttgagagcaaatccaagtgccatatcatatctaygaaactccataatatccagggtttctgctatatctatatattctcccttcaccaaacttaaatatccagctctgttgatccagttgaggtttctgccacacactttctttctggattttagaagatgtagtttctcccatgccaggagcccattgttctaat

SEQ ID NO: 372797 - DNA, 600 bp, Homo sapiens
agatctcacctaaggtcaccctgctagttaagtggtggagtcattattcaaacctaggatatctaatgacatatattttcgaattatcataccataccacccctcaatcttcatttagccatttgccaaacaaacatcttctaaatgcctatcaggaattcccagtgccagatagcaagtgggataagtgctgaggactacctaggactagtatggaccctgcctccaagcacattacaacctaagaagtgcaatgcatttctgtcagtgctrtaacgtcagtgctgtgacagacctatgcacacaatatagtggtggaacaaaggaggaaggagtaatttattctacctgattttaggggagagggagatggtcagacttcaaataagaggtagcccatgaccttggtgtgaaagataagcaagaatttgccaagtaaaccaggaaaggacatgtggaaacttgcagaactgtagtggtaaactaagggaagattctttttctcagactgttgctggaactacaagatatttctagcaacaggagttcttaacctgggatccacagaccctcaaagcgttcttaaataaaaccatattc

SEQ ID NO: 372798 - DNA, 583 bp, Homo sapiens
tggtgctaaagccctaaattagtagattttgatttctttttttgagacatagtctcactgtcacccaggctagaatacagtgatgggatcatagctcactgtagcctccaacttctgggcttaagtgatcctctcacctcacctcccaagtagctgggactgcaggcacatgccaccatacccagctaattttttkaaatttttggtagagacgaggtctcactatgttgcccaggctggcagtagaatttttgtatgggactgaagttaagttgttgtcagtttaaaatagaatgctataaaattaagattaaattatgtaattgcaatagtaaccacaaagaaaatatctatagaatatgcacaaaacaaactgagaagggaatcaaagtatatcaccacaaagatcaataaaataccgaaaaaggcaataaaagaggacaggaagggagaaagttacaagacatacagaaaacaacaaatggcaatagtaattccttccctgtgagtaattactttaaatttaaatggattaaaatcttcaataaaaaggcatagattggctgaattaatttaaaaaaca

SEQ ID NO: 372799 - DNA, 583 bp, Homo sapiens
tggtgctaaagccctaaattagtagattttgatttctttttttgagacatagtctcactgtcacccaggctagaatacagtgatgggatcatagctcactgtagcctccaacttctgggcttaagtgatcctctcacctcacctcccaagtagctgggactgcaggcacatgccaccatacccagctaatttttttaaatttttggtagagacgaggtctcactatgttgcccaggctggcagtagaatttttgtatgggactgaagttaagttgttgtcagtttaaaatagaatgctataaaattaagattaaattatgtaattgcaatagtaaccacaaagaaaatatctatagaatatgcacaaaacaaactgagaagggaatcaaagtatatcaccacaaagatcaataaaataccraaaaaggcaataaaagaggacaggaagggagaaagttacaagacatacagaaaacaacaaatggcaatagtaattccttccctgtgagtaattactttaaatttaaatggattaaaatcttcaataaaaaggcatagattggctgaattaatttaaaaaaca

SEQ ID NO: 372800 - DNA, 563 bp, Homo sapiens
acaccacactagtttcattacaccaggctagttttgaaccttgaatctgaacaaacctacatatttcattcattttaacaaatgtgtgtttttaaaattacatgggaaaggatcttaccttaaattcaaatgacttactatttttagcacatcttttgctttttctttttccacttcgaactctcctccgtttttcgctactaccytcactcataacacccccactcagaatacaacctaatttgtttccttccacatttttctctacttcacttcctgatttttgccaaaatagacaattatattatgcaataacataaacatccttatacatttttcctttgcttttatttctgtaagataaataatcagaagtggaattgctggaacaaaaggaaattatttttatgttaacagttgctgccaagttgctttcttgaaaagtctatgataacttatatttccaccagcaatatgaatgcccattttccataggagtattgattttttttaaattttgcccatctgtaaagtttaaactcccattagtgttataaataatt

SEQ ID NO: 372801 - DNA, 563 bp, Homo sapiens
acaccacactagtttcattacaccaggctagttttgaaccttgaatctgaacaaacctacatatttcattcattttaacaaatgtgtgtttttaaaattacatgggaaaggatcttaccttaaattcaaatgacttactatttttagcacatcttttgctttttctttttccacttcgaactctcctccgtttttcgctactaccttcactcataacacccccactcagaatacaacctaatttgtttccttccacatttttctctacttcacttcctgatttttgccaaaatagacrattatattatgcaataacataaacatccttatacatttttcctttgcttttatttctgtaagataaataatcagaagtggaattgctggaacaaaaggaaattatttttatgttaacagttgctgccaagttgctttcttgaaaagtctatgataacttatatttccaccagcaatatgaatgcccattttccataggagtattgattttttttaaattttgcccatctgtaaagtttaaactcccattagtgttataaataatt

SEQ ID NO: 372802 - DNA, 623 bp, Homo sapiens
gaatgccaagccataaaacaagcctcagtaaatttcaaaggattgaaatcatacgaagtatgttctttgaccacagtagaactaaattagaaagtttccaacaaaaggaaagttgggatattaataactatgtggaacttttacaacgtactcctaaatgggtgaaagaagaaactgcagagaaattagaaaatactttgagatacatgraaacaaacaaaaacataatataaagatgttctttaagagaaatctatagctataaatacttatatttaaaaagagcaacctcaaatcaataacctaaccttccaccttaggaaaataccaaaaggaaagaaaaccaaacccaaagcatgcagatggaagaaaataataaagattagagaagaaagtagagaatataaaaccagtagggaataccaataaaaccaaaagttggttctttgaaaagatcaacaaaattgacaagttctttgctagactgaccaagaaaaaatgaagaaaagactcaaattattaaaatcaggaattaaagagggaatattactatcaatattacagaaattaaaaaaagattataagagaatactatgaacaattgtatgccaacatagtagatc

SEQ ID NO: 372803 - DNA, 623 bp, Homo sapiens
gaatgccaagccataaaacaagcctcagtaaatttcaaaggattgaaatcatacgaagtatgttctttgaccacagtagaactaaattagaaagtttccaacaaaaggaaagttgggatattaataactatgtggaacttttacaacgtactcctaaatgggtgaaagaagaaactgcagagaaattagaaaatactttgagatacatggaaacaaacaaaaacataatataaagmtgttctttaagagaaatctatagctataaatacttatatttaaaaagagcaacctcaaatcaataacctaaccttccaccttaggaaaataccaaaaggaaagaaaaccaaacccaaagcatgcagatggaagaaaataataaagattagagaagaaagtagagaatataaaaccagtagggaataccaataaaaccaaaagttggttctttgaaaagatcaacaaaattgacaagttctttgctagactgaccaagaaaaaatgaagaaaagactcaaattattaaaatcaggaattaaagagggaatattactatcaatattacagaaattaaaaaaagattataagagaatactatgaacaattgtatgccaacatagtagatc

SEQ ID NO: 372804 - DNA, 603 bp, Homo sapiens
tctttcctagaaatatataaattacygaaactgaagaattagaaaatctaatagagcagtaacaaataaggagatttaattaggaatttaaaaacttcccacaacaaaagcccagagccaaatggcttcaccagagatttctaccaaacatctaaggaagaattaacaccattccttcacaaaccgtcccagaaaatagaagagggaatacttcccaattcatctataaggtcagtaacatcctaataccaaaactagacaaagtcatcatgagaaaagaaaactacaggctaatatcccttatgaatatagtggaaaaaaatctgaacaaaatcttaacaaaccaaaaccagcaacatatagcaagtattatacatcataaacaagtgagatttactgcaggaatgcacatttggtttaatattttctaaaaatcattaatgcaatatatctattaatggaattaaaagcaaaaaccacacaataatctcaggagatgcagagaagcacgacaaaatccaacaccatttttttttactctcagcaaaaaggaaaagaaggaagcttcagcaacctaataaagagcttctgtgaaaaacttac

SEQ ID NO: 372805 - DNA, 615 bp, Homo sapiens
cttacgcccacataaaaacctgcacaggaatgattatagcaactttattcataatcaccaaaaactggaagcaaccaagattccttcaataaagcaaatgaataaayacactgtagtagtacattgatacaatggaatattattaagagataaaaagaaatgagctctcaagccacaaaaagacatgggtgaatttcaaaggtatattgctaagtgaaagaagtcggtctggaaaggcaacatattatatgattccacttatatgacattctggaaaaggcaaaactatggaaatggtaaaaatatttgttgtctaagggtttggtggaaagaaagtgaaacacaagatattttaggatggtaaaaattctgtatactataatggtgaacacatgacactatatatttgtcaaagcccatagaacttgatgacacaaagaatgagccttaatgtttacaaatttagaaaaaaaagtcattttggaggtctggtaatcccaggatgaaatgcagaatgtgaaagaaaaatcaaaccatgttgcaagtgtgtgacacaaactcactgaagaggattaggggaaaaggagccaatataaaaagtggtttgggggtaaa

SEQ ID NO: 372806 - DNA, 548 bp, Homo sapiens
caatagctagagctgagtagtgtctgtccctttggcccagtgcactacagtcttcactgctccctgctacttcctgacactgaagttgaatgttagttgccatttgtcatcatatttgcatctttatttttcttttagaagaggattttcttcttctatccaacccacttctctaatttttgttatctatctgacaacttcagacagattgatacctcaactctacatgtggattattgacatagtagtgacatgaaaatatatttaagctatattaattgacaaatacaaaatactgaataatctgtatagaacaacttcatttgtggagaaagggagggacgtggagatatgcmtgtatatgtgttgaaaatatctagaaggagccacaagaaacaatatatctggggagtaacaatataagaaacaacgtatctagggagtaagaccttcactttttcatttttacctttttgcattgcttgaattttatgtagcaaggatgaattacctgaaaaacaaaaataactagactttaaacccatgcc

SEQ ID NO: 372807 - DNA, 577 bp, Homo sapiens
aagatggtgccattgcactccagcttgggttagaagagcaaaactccttcaaacaaacaaacaaaaaaagcttttaattaaagtagcagtagaaattattttcttcttcagcacaaaaaatatctaagaaaccacaatctttactgcatctaaacttaaagaaacataaattcctgagtcacactgatgtatgcccctaagtcaactgtgataaaatacagtttatctaacaatggactgcctttctattttaacttgtgactcactggaacttgaaggtttctcaaacactttagtcctcaagagtatgtatagaaatcatctgtagagtttattacctttctttctttttaaaaaatacaaatgcccagtgggtaccgccacagacttactgaatctgaacttccgcacatcgggccctggcttatatttattttcgaagctctctacacaattataatgtccacttctgattacatattatttgtctaatctaaagcccatggtctgaaaggcaagtccayttgttaccagatactgtagtaaaacaaattaaaagctagtttttttaaaaagg

SEQ ID NO: 372808 - DNA, 586 bp, Homo sapiens
tttgatttccttggatccccataacacacacagaaaactatratttgtgtaaaatgcgctgaagtaccttttaagggaagtcatttggctttctctctggcttaacaacacggggagcagttccattttatctggaacagggaagtttatttccctagagaactagggttaccaaaaatgttcgatcccacaaggcagttttgtttgcatattttcacagaaacttccttctactacttaaagtcctcacattgggctgacctgggaaacatgaagataaaaagagtgggtaaacatgcctgcttgatgagccagaaaaaaaggcagaaacctgtggtctgggtagaacagatcctgctcagaatgtaagcttcaaacatgtttatcatgccttggttcaacctaactctctgacatgttcctaaactcctgctctctcaagttatgtccctttcctcttttcaaatatctctcagaattcaccctttcgggaacctttgctgattgactcctattttatttgaattctgcatcatcatctgattacttaaattaacctgtaccttctttatttatacttgttaac

SEQ ID NO: 372809 - DNA, 527 bp, Homo sapiens
gcctgaatcatttagccatgcccagggccaatggacacagcaaggtggcaaatttatgtgagctgataatactggcatattatcagaaagacaaagcaaggtaaactaaaaaggtgggtaagagraggactagctttggagtcaaaatgcttcaccagccaaacagatttcacagaggttttttgaaagacagaagggtgaggacttaatggactctaatatggcaacaaagcaacatcaaagaagcttaagaggaccactgcgggtaaaactagtgataaagaaggaatgcctgagctgctgttccatctgccttaggctcattatcaagtattactgtgacacaacagaacactcatgttaaatcctaaacactgtcaagccctgggcactgaacttcagtatacagagtaattactcagtaatacacagaatgaactcctgtttttaagaggcaaacttagctccacttaaaattatagtcaacaactatattgcagtgaatttaaagaaagctttgtcgaagg

SEQ ID NO: 372810 - DNA, 559 bp, Homo sapiens
gtttgtctcctaactcaggacctagctcgggagtggcacattgctagcaagcagtacatgttcttggtggcatttttcaagtcagttggtgtattagtctgttctcacgctgctaataaagacatacctgagacagggtaatttataaaggaagggggtttaattgactcgcagttccacatggctgaggaggcctcacaatcatggcagaagagtaagggacgtcttacatggaggcaggcaagaaatttgtgcaggggaactcacatttataaaaccatcatatctcatgagacttactcattcccacaagaacagtatgggggaaatcatgcccatgattcaattatctccacctggccccacccttgacacatggggattattacaattcaaggtgagatttgggtggggacacagccaaaccatatcagttggacaaagacaagctacagataaaaactgaaaacagtcgtctttcaattgcagaaggcattggccttcccacatgattccagttcaaacwtctaaggagaaactcaagctaggccagcacctt

SEQ ID NO: 372811 - DNA, 587 bp, Homo sapiens
tcacaaggattatggcggagtagaccacagactagaagcattgactattttaagctggaagaggcctcacagtcatctgatctgacctcttgaagtcatrcaactatatcctaactcatgcccctgtccagttccttctaagcatggtgttagtttcctcagtgacttatgaagcaggtgcatgttttatgcgggtaatggttgagaaagtcatggttccaccccttggaatttctacccaatgatctggattcttaagcaattttcctctcagcacagaggaggtaaacatacgtagatgtgagtttctcctctgattgctaattatgacctagcaacttccctccttttctcctctatgttctctctagcccttttcagtcctgattgaggtgaaatatttttttacagccatatattacttagagttctaggggaaactctaaaaatgtaaactgaaaacactcaaggataattaagtaggggaggggtgacagagagaaatggtaattctatcactggatttcaagttgagataagagtaattccatttaaaccaaacttcaatattcacttgaaagcctgta

SEQ ID NO: 372812 - DNA, 587 bp, Homo sapiens
tcacaaggattatggcggagtagaccacagactagaagcattgactattttaagctggaagaggcctcacagtcatctgatctgacctcttgaagtcatacaactatatcctaactcatgsccctgtccagttccttctaagcatggtgttagtttcctcagtgacttatgaagcaggtgcatgttttatgcgggtaatggttgagaaagtcatggttccaccccttggaatttctacccaatgatctggattcttaagcaattttcctctcagcacagaggaggtaaacatacgtagatgtgagtttctcctctgattgctaattatgacctagcaacttccctccttttctcctctatgttctctctagcccttttcagtcctgattgaggtgaaatatttttttacagccatatattacttagagttctaggggaaactctaaaaatgtaaactgaaaacactcaaggataattaagtaggggaggggtgacagagagaaatggtaattctatcactggatttcaagttgagataagagtaattccatttaaaccaaacttcaatattcacttgaaagcctgta

SEQ ID NO: 372813 - DNA, 569 bp, Homo sapiens
aatattacaggagtgatgctgtgttctcactgcatcctgtcaggtggtacatgatttctgtttgtcccattactgatgatgttaactttgatgatttaattaaagtgatatctacctgacctctcctctataagttattcttttttccctttgtaattaataagcattttgtgaggaggtacttagtcattatgtacatacctcttttttatcaatttattcctttatttatttatatcagtagtgactcatggtttctattttattcacagggttataatgttactaatatcatttattttcatgatttctccaccagatttaaccattggaatccccttcaagctggcttttgggtcttttttgatacatctttatcattctttgaagattttcttgcttttgggcaaaacaggatgtcataggctcattctgtactttccctgccccagtcatgtgctatggacagcattgtgtctcctcaaaatttatatgttgaagccctaacctccaataygactgtatttggagatagggcctataaggaggtaattaaggttaaatgaggt

SEQ ID NO: 372814 - DNA, 562 bp, Homo sapiens
gcatttgagccacttcctcatgtaacctacttgtgccttcaggacctgcttaaacctgatcatgtataaagcacttccatttgatgatggaatgctgctgtgcatgaaccactttayggctagatgggtcagaaagcacccagttcatgataggaagttcaggtcgcatggcgacttgccctgtagtcaaatgttcagtttccaccaaagcccagtaacaggctaaaagctgtctctcaaaaggagagtagttatctgcagaagatggcagagccttgctccaaaatcctagaggtctccgcagtgattcacctatgggggtctgtcaaagactccaaacagcatccctgtctgccactgacacctcaagcaccattgggtctgctgggtcatatggcccaagtggcagagcagcttggacagcagcctggacctgttgcagagccttctcctgttctggaccccactcaaaacaggcagccttttgggtcacttgataaatggggtggagtaacacacccaaatgaggaatgtgttgcctccaaaatctaaataggcccac

SEQ ID NO: 372815 - DNA, 526 bp, Homo sapiens
ctgtgaatccgcatataatcgcacatctggccatttctccttccttgcaatgtgcacaaccaggtgcactgattgaagttctgcccactgggatattccccttcaccactgtgcttcagggatgtcctagaaagaggccgtactgctacagctgtccactttcgggtggtgcctgcatatcgtgaagaaccatctgtgaaccaggccctaatgttctcttcctctgtccactgatcatagggaactccccatgaggccattggtgcaggctagggaagagaaggcagggtggcaggagtggagaccatgggcatttgagccacttcctcatgtaacctacttgtgccttcaggacctgcttaaacctgatcatgtataaagcacttccatttgatgatggaatgctgctgtgcatgaaccactttacggctagatgggtcagaaagcacccagttcatgataggaagttcaggtygcatggcgacttgccctgtagtcaaatgttcagtttccaccaaagcccagt

SEQ ID NO: 372816 - DNA, 428 bp, Homo sapiens
aatttcagctctttctctataggatataagactctcactaagggcaatcttagcagatttgaggttcagtatccgcttctgaatccaggagacagaatccctgagttcatcactttctttcatcactttgcccactgaacttagaagaaaccaaccagcttcgttatgttccttggttctccacatatggtcaaaggtattatgtacagagttactaaactagcctctcatgagcagtgaatcaggagtgtccaatgcatttattttgcataactgtctaaatagttcatgccaaggactatcagtgttttccatactattagaagtagaatccttagcatttttgggtctaatcatattaagcagctgactccagaaaccccaaaatcaatgaaagaactcmatccttaatattctgttcctctaga

SEQ ID NO: 372817 - DNA, 594 bp, Homo sapiens
tcactgcccatgagaaagagacagagaaagaaaagatgcctggtttatgttctcactttcagttcyaatttccttgagcctggctgttcttgtttcttgtgaattctctctttctgtgtgtgtgtttaaatgttaaatatttaaattttaaactttaatcctttttagtatatgaccagaaagcctgcaattagaatagaaattggtaccaggagtggggtttcaagtgacagagccttaaaatatgggacagttatggtatcattgggagaagatataatctaaaataaattacaagatgagaattttgcaggctgtgatttttggtgaaaaactagttaagtgtcacctgcaatcccttgagacccaggacataaccatacaaaaggtggagctctgggaggcttgatgactgaatgtaagaataaggaagcagattatttattgcttagaatcttagattaaggccagcagcaaagagacacgtttctatccagaatgcctgtctatcagcaaataagaaaagcaaggtgattatgtaatcctggggcaggaagcccattttgtctgtaactggagctctctgattactta

SEQ ID NO: 372818 - DNA, 570 bp, Homo sapiens
actagcagctgcttttttttttttttttgaggccttactatgtgcacttgatagatatcttcccaattcacaattacttgtaattgtatgataggtttgaagcagaaaagagttaaggatgttggttggtgtaagttttctataagtaggtaccatgtggtgtggctgctcaaaatkatgatactctttaggctgcgttagtaggagcacattagtgtgaaggagagcaaacagtcctgtgttattctgctctggtcaggccaaagaagcaatgttcttttctgtcccaggtaagggtgataatcataactgctactattcattaggcacctactatgtgccagctcccgtgagatgcttgcatgcattctttttaatccccaaaacaatcccaagaggtagataatatgatcttcattttacaaataagaaaacttagcctccaagagtttcagttacatgccaatgtccttagagaaaggagaaaaataacacctactaaagaaagacctaaggaataagagtggtatcttcaagtagcagaaaggccatcataaggcaaagggacag

SEQ ID NO: 372819 - DNA, 603 bp, Homo sapiens
taaaatttaaaaattaaaattaggaaaaaatttaataagagatgaccagaactttacagtgaaaaccataaaacattgctgaaaattttaatgaacacttgaataaatggtgaggcatatcatgttcacatactggaaggctcagtgttaacattcacttctacccaaattggtgtttcaattcaaaaatttcagcaggttttttttctgtggaagtctacagactgtttytaaattatatatgaaaatgagaaggaccttgaataagcaaagcaaactttaaaaagttggaagatatgccctgtttggcttcaaaacttaaaataatcaagaaagtgtggtgctggcataaagataacaagtacaaccatgggacagaatagaaatccaagaaacagatcacatttatatgatcagtggctaatgtgaaatttttgcagtaagtggtgttaggataattggatattcctatgcaaaaaaaaaaaaaaaaaaaaagaaccacaactcctatctcataccatagagaaattcatagacctacatacaacagctaaaaccataaagcttttagagagaaacataccagaatatcctcaatgactt

SEQ ID NO: 372820 - DNA, 500 bp, Homo sapiens
aatcttgcatttcagaaatagattccacatagtcattgtgtataatcctttaatatgctgctgagtttggattgctagtattttattaaggatttgtgcatcagtatttacaggggatattggcctgcaattttcttgtagtgtctttgtctggctttattaggataatgctggcctcatggaatgagttaggaagtacttccttccttttcagtttttctggaagagtttgagaaggattgatattaattcttctcaaaatgtttggtagaatttaaccagtgaaaccatcctttcttgggaggtttttgattactgattcaatctccttgctagtcattggtctattcagattctgtttytttatgattcagtccctggtaggttgcatgtttctaggagtttatccattgtgttggcattcagctgttcatggtactctcttataatcctttttatttctatgaaacctggagtaatgttcccactttcattctgat

SEQ ID NO: 372821 - DNA, 507 bp, Homo sapiens
actttctgcaaaggccacagctgcccagaccactccctattagagggagccagcttctgactctcccactgtcactcctagataccctgaggctcataacacacagcaatgccacccctgccaccttctcttgacctctaagtcactcacatwcattaaggacctcagtgcttcaagctcactccaagtactaccatcaccctgggcaaggtcaaggttcatatggcaacacaaccacctcacccttccctttaattctgactatgagctgcagtccaaccccactccactacaggcaccactgtatggccatacttaggaatgtcatttggcagaatgtccaagagctctctctgaccacaaatttccaattcatcagttctccctcatacatattcgcatttataataattatttaaaaaataataatacgcaacactctgggagtatttactatgtactcaacactattgggagactcatttaatcctcccagcactcctgtga

SEQ ID NO: 372822 - DNA, 611 bp, Homo sapiens
ttaaggtttctatgggagagtccaactatgttctacaatctacattttggatttttaatttttactagtttactgcttatacaaatctgaaaatttaaaaarttaaaaaacaaccttttttttttttaaattccagatggagatcttataacaatttttgatagttctgacctttcctttgcaattcagtgcagtaggatactgaaactgacattatttggtgagtagtaaactttctaatgaatttactattttattcattgtattttaaagatgtttggcttttttccttttaaagactcaggtaagcaataacttattcaaatattattacatttatttgtgttcaggtagttgttttagattacttgaagcttatggctgtgtatgtttttaagaaaatgatagaagtttaattcagtaagaacagagtgttaagtatgttttttttgaaatcaggtataacttaggtatccctggtgcagtattatagttttaatttagctgtattagaatttttaaattgtaattatcttccttcacattacagtatgttgttacttattatcagggcttaacatgtaagtctgatacttgaaaccagtagtcgc

SEQ ID NO: 372823 - DNA, 582 bp, Homo sapiens
tatttcctttttatcctgtcaaaactataagtgttatttaattttcatgatattgctgaattcacattttaatttcctttttaccagtttttaaagttcttagtaactctgtaactgaaaattataactcattccaaaatcaaaacttcaaatgtctctaaaaatagtgaagactttttcacttttctaaacctagtctactagttactatatataatcttgcttctgaaaacgatcctgattaagaataaattgagtgaaaacactaaaaatagctatttcccctaatttcaaaatgctttttctacacagactagtctttgaactgtaattagttggtttttaagtttataatttaccaagtaccattaaaattttttttgaataactgcatctgttagcaatctggaatatgaaatttaaacaacaaatatttaatcagagcaattcgcatctggttaccctggtaacagtcactaatgttttcaaatcattcrtcttaaataacatagctctaatctaatcagatctctgggagtaagtattatgctagaaaaactaggacactgatctaataaatat

SEQ ID NO: 372824 - DNA, 610 bp, Homo sapiens
aggcaggtacaaattgtttaatattcaaataattccttggaagttgcataagtaaaaataaaagcacttagatgtcaaccaagcaaatgaaagaacaagtaaagtagctgtgatcacacttgaaagctactaaccttcactataatactgattcttattaggagcatgcaattatctctcagggaaacaaaccattattatattttagcttatcaacaatataaatattcttccaaagcccacttgtattacaaatggatatctattaccttcttatatacataaagtcaactttataataatgtatccaacttagctttggaagaataatatagcagggcttttcaatttaatttgtcaattgttgggagaaattgggctggtgggcacaggtagacaaagctgagctcactgtttcctctttctttactccacctccatccccaaacaaaattttttgtgcctggtctatattcttttatttgttgattgggatyccctgtcaaggaaggacttgctgcctgcctgcagggagtgaggtcagcagacggcacccagctatcatctccctcagagtaagcttcaaccagagagcactgaatggagatct

SEQ ID NO: 372825 - DNA, 509 bp, Homo sapiens
tgtgatctataggacatattctttttaattttattttttaaaatttttatttcaatggtttttgggttttgttgttacatggataaacatgaatggttttttgttacatggatgaattatatagtgttgaatttgagattttagtgcactcattacctgagtagtgtacactgtacctaataagttgtagttttttatccctagcttcctctcaccctcccccttctgggtctctaaagttcggtatatcactctgtatgcctttgtgtacttacagcttacctcccacttttaagtragaacatatagtttttggttttccactcctgagttacttcacttagaataatggtctctagatccatccaaattgctgcaaaagacgttatcatgttccttttttatcactgagtagtattccatggtgtatatataccagacattttctttatctacttattagtcaatggtcacttaagttggttccatatctttgcaattgtgaattg

SEQ ID NO: 372826 - DNA, 608 bp, Homo sapiens
agctgctccaagtgaggtacttgtgttgagtgaatgtgaaggccaaggacattactgtgcactactaaaggtttacaaacgctatacacttaggctatactacatttattttttaaaattccatttcttcaataaattaaccttagcttactgtaatgtttttactttataaacttgattttttaacttttttaatactttagcttaaagtacattgtgctactatacaaaaatatttattctttatatccttattctataagcatttttctattcttttaattttaaatttttacttttttaaacatttagaaaaaaattatgacacaaacatacacattagcctaggcctatacagcatcaggatcattgatatcactattttccacctccatatcctgtcccactggaaggtcttcagggtcaagaacatccatggagctctcatctcctatgataacaatgccttcttccggaataccttctgaaggacctatctgagcctggttctacagctttgtttttttttaaataagtaggagtacactctaatgatttaaaaatatagtatagtaamttcacaaatgagtaagagagtcacctatcat

SEQ ID NO: 372827 - DNA, 547 bp, Homo sapiens
tgcaaactaacagcacagacacagtaccaggtggtgagtctgttgcctgttccatttccttggatgaacctggctgtcctgcaagaaacaaatakcaggtgacaggacactctgaacaacctcagagaggctacccagaactccctctaagttagtatttcctcagcaccagaggcaaaccagaatattgggaagtgacggtaacagctaaagatcaacaacaaaaatgagaattctcaattcttgtggtttgtagagaggatgtggaaggttgaacttcactggcagaagccagtagaacctaatcattcacccaggagagaactccgtttatagtcaagaacatgtcacttctatctcagatggtgctcttcagcattgcttttgatattacttgcttttattacagccccagaacctcagactctactgccatcacagtcaacaataggtaataaagctttttttaatgagtgaaaacaaagtatctttaacactctccatgttcaactttgttcagctttgggttttgttttttttttttttt

SEQ ID NO: 372828 - DNA, 620 bp, Homo sapiens
gcttgaggcataatgtctccctcctcacgatgccacttcttgaaatatttcatgtttttggtatttgcttctgtagctctggaacctgccacgatacaaccggagcccttggtgcccacaactggtaattctactccctccaccacggctgctttcacgggttgtagcttttgctttccccactctccattacaggcatgactgcagttccaccacctcatcacagtttcatcccacgcttttcctcacctttcctgtctgggtctgaagatcctaaagataggagagttctaaaacaatccagtgtgctcatttagggaaggtctgtggtcttggacacaacttcctggttctctgctgaccttctgtctgccctatatgtgtcgtggggttgagaaagccatcaactccttctcagacagggacctctgtgctcatcctgaactgaacaaatggcaaaattttactccagtgccatggttagcatttcattgctttactgattcaacttctaggactttcttctttttaaaaagytgcatgaaataatggcttcttcggctcttctgtttctttgaaaaatgtttttgaataggtatggatagcgagaggaaccaaga

SEQ ID NO: 372829 - DNA, 573 bp, Homo sapiens
tgtggtttatagcatgaacacatctgccagtggtcacacactgaaattgtcccatccagtgtattttcctttccttcagcaggaccagaaacagcagggctaaaaccaggattctcttttggcaccttcccctcctgacatgttacctagaggcagctttctgtgcttctccatacagccatgagcctttctcgagtttgggcaggtttaaagataaattttctattctgtacaaaggaaagtagtatgagcttaaatataaagattgacttattttaatatggggataattttcatgttcacataagagttgaacctgcaagcaaaaacagcatcacaaagtgttctctttcctgtacaaacagctgtcactgtggtcacgagggatatagagaacacatgaattattacgargtagatgttgcttttcttgtccattcaaaatggcagcacagaaatcaagaagaaaggagctcacaggaagacgtagtcattggggttacttgtaattcaatgacagtttaatgcttttgagccagtgctggttgaagctgtaagaaagatagtatcaga

SEQ ID NO: 372830 - DNA, 595 bp, Homo sapiens
  misc_feature (1)...(595): n = A,T,C or G
taatgcttttgagccagtgctggttgaagctgtaagaaagatagtatcagaccatgtgacatcctctgaaagtagacagcattttatattgtactacatactaaagaggcaggaaatacattgcaatgtgtgaaggtgaatctactatttcacaaaatcctcaaaaatagcaagaatattgtgagttaaagatatgcacacattctgagaatgcatctattatattgtaatgtcaagtttcctttagccttgctgtcattttaaaaggtcagataagaatgactaattttttaaaagattaatcaaaagtgcccgcaatttctgatcttaagcttattttcagccaatttcaagtcatggatctggcayggtcagctctatctcctacaaaataagaaaaactttgccaacttgtatttaatcctctcacactaggtaagaaactatgagttaatggctttttatttctagtgttgcttttgaaacaatgtcatgactgtctttgttatcctaactcctaaagctcccttccatttagtgacattggaccaattttcctatagtctgtatttagttccaaaagnnnnnnnnnnnn

SEQ ID NO: 372831 - DNA, 595 bp, Homo sapiens
  misc_feature (1)...(595): n = A,T,C or G
taatgcttttgagccagtgctggttgaagctgtaagaaagatagtatcagaccatgtgacatcctctgaaagtagacagcattttatattgtactacatactaaagaggcaggaaatacattgcaatgtgtgaaggtgaatctactatttcacaaaatcctcaaaaatagcaagaatattgtgagttaaagatatgcacacattctgagaatgcatctattatattgtaatgtcaagtttcctttagccttgctgtcattttaaaaggtcagataagaatgactaattttttaaaagattaatcaaaagtgcccgcaatttctgatcttaagcttattttcagccaatttcaagtcatggatctggcatggtcagctctatctcctacaaaataagaaaaactttgccaacttgtatttaatcctctcacactaggtaagaaactatgagttaatggctttttatttctagtgttgcttttgaaacaatgtcatgactgtctttgttatcctaactcctaaagctcccttccatttagtgacattggaccaattttcctatagtctgtatttwgttccaaaagnnnnnnnnnnnn

SEQ ID NO: 372832 - DNA, 646 bp, Homo sapiens
gatagtatagtaagttctaaaatttgtaagtgtagcatgatatgtaggagagaccacaggtccttgcggttgataatagaccttggttccaggcctcgctctcctagtaaccatgtgatggctactttcctctacttttggaaggtattggtttcctcttttgcaaactgtagcaattggcttttttttttttcctgtggagaattcttgtgttccatcattaaaattgattgagatatgtttcttttacaaaaaatatttttctcaattaaattctgtacatcttttgattgcctagcagtcaactaaagtgcgtattcagcatatgagaattataagaagacctcagaaaccatcctttatgattacttccatgatttttgtgttttgcttatttgtattttaatttttgtaaatcttctagttgttttgactttatttggggtacatatcatatagtgtataatgaagttggaygtttcatgtaatgaacttaaatgcagcagcattttgtggtgttctccagagtccagcagaggactgggtttgagaaaggatgagcatgagcccccacagatcttggtgaaattatcctttctctagtatatgtaatgggctcagatatctgcaaaagatagaagatgac

SEQ ID NO: 372833 - DNA, 505 bp, Homo sapiens
tactaaaagtctgagaaaataatgattagtgaataataatgaataggaataaaaacatcaaagttttaagaatataccaagttattaaataaaccaagtatattaaatttgttattataataggaaactaaaatctaacgttaaaaatagcagacaaaattatatgagaagaagctctcagctttggatttgagtataaagcatagaacaaaagtagaaaacaaatggggagaagaaaccatgaaaacttgaatgttgaactataaaagatgaaaaatactaaaaattaagagactygggcatgaatcatggtcagtaaaaaatgtttaaggtaaaggagatatgaagtaataggaaaaatttatttgcagttttatctttttgagctgtactttgtacttactaaaatgcggtatagtaaatcaggagcttgctctaattttccattgttatactataagtttcaaatttatttcattttgacttagacttttagccaaccttt

SEQ ID NO: 372834 - DNA, 632 bp, Homo sapiens
ctccagatcttccgaaatagaatcaaccctttaacaagatccccaagtaattcatatgcataataaaagtcagcagcactggtctagaccatgcccaagcacttataactataggagctcattgcctgccaaggcaattcatcccacatttgaacatcttttaccattagaaagatcttcattatattgaatcaaaatattttccccaaatcctaatcttggtttaaacctgagatactttataggcaaattgaattccttttctatatggcaattcatcaaatatatgaagagaaaaattatgtcccatccctttttcctccaataaactttcctaattccttaacccttccatcacatgacaaaattccaagttttctcgcattaaaacacatgtggtgtggcttcaagtctggctctatacccagggagagtggacagcagcattatyccataaccagtgtccccaaaatgtgttgaattaatgacttccctattgtaagtgatggcatccgcatcttacaaggatgtggtctcaatttattttgaggtctttgtccaggaattgtggattttaattcgttcaaagtaacatcaacaaatatcagctgaagagtttatttttatgtgtc

SEQ ID NO: 372835 - DNA, 573 bp, Homo sapiens
atggcatgatgtgtttcctggccttatgtctccatgccatagttatgaaatgctgaaggaggcagatttgatcagataggatgtgaggttgtccctttcctggaggtggacaagggttagcttggcatccccttcaccaaaggtcaggaaccaccctccacatggagaactgtgttgaaaggattgtttaatttttgtcactgccagagtaattcccttccctgaactcygccaaattccccttgtggacaaaatctagagcagggtttctcaactgccacactattgacatttggggctggataatttttttgtcatggggctgtcctgtgcactgtagggtgtttaacagcatccctggcctcggcccactgggtgtatggcacatgccctgtccttgattgtgacaatcaagtgtctccaaacactaccaaatgtcccctgcttggcaaaatctcccccagttgagaaccactgatctagagatatgctggccccctggtgagctctgagaaaactaaatacgcttctatataccaagaagtagatctgtcaaaggtggccacctggtca

SEQ ID NO: 372836 - DNA, 593 bp, Homo sapiens
tccaactatttgtcagacttttgtaggtcgagctcttcaaccagttagagacaagttttcagactgttatattattcattatwttgatgatattttatgtgctgcagaaacgaaagataaattaattgactgttatacatttctgcaagcagaggttgccaatgcaggactggcaatagcatctgataagatccaaacctctactccttttcattatttagggatgcagatagaaaatagaaaaattaagccacaaaaaatagaaataagaaaagacacattaaaaacactaaatgattttcaaaaattgctgggagatattaattggattcggccaactctaggcattcctacttatgccatgtcaaatttgttctctatcttaagaggagactcagacttaaatagtaaaagaatgttaaccccagaggcaacaaaagaaattaaattagtggaagaaaaaattcagtcagcgcaaataaatagaatagatcccttagccccactccaacttttgatttttgccactgcacattctccaacaggcatcattattcaaaatactgatcttgtggagtggtcattccttcctc

SEQ ID NO: 372837 - DNA, 593 bp, Homo sapiens
tccaactatttgtcagacttttgtaggtcgagctcttcaaccagttagagacaagttttcagactgttatattattcattattttgatgatattttatgtgctgcagaaacgaaagataaattaattgactgttatacatttctgcaagcagaggttgccaatgcwggactggcaatagcatctgataagatccaaacctctactccttttcattatttagggatgcagatagaaaatagaaaaattaagccacaaaaaatagaaataagaaaagacacattaaaaacactaaatgattttcaaaaattgctgggagatattaattggattcggccaactctaggcattcctacttatgccatgtcaaatttgttctctatcttaagaggagactcagacttaaatagtaaaagaatgttaaccccagaggcaacaaaagaaattaaattagtggaagaaaaaattcagtcagcgcaaataaatagaatagatcccttagccccactccaacttttgatttttgccactgcacattctccaacaggcatcattattcaaaatactgatcttgtggagtggtcattccttcctc

SEQ ID NO: 372838 - DNA, 593 bp, Homo sapiens
tccaactatttgtcagacttttgtaggtcgagctcttcaaccagttagagacaagttttcagactgttatattattcattattttgatgatattttatgtgctgcagaaacgaaagataaattaattgactgttatacatttctgcaagcagaggttgccaatgcaggactggcaatagcatctgataagatccaaacctctactccttttcattatttagggatgcagatagaaaatagaaaaattaagccacaaaaaatagaaataagaaaagacacattaaaaacactaaatgattttcaaaaattrctgggagatattaattggattcggccaactctaggcattcctacttatgccatgtcaaatttgttctctatcttaagaggagactcagacttaaatagtaaaagaatgttaaccccagaggcaacaaaagaaattaaattagtggaagaaaaaattcagtcagcgcaaataaatagaatagatcccttagccccactccaacttttgatttttgccactgcacattctccaacaggcatcattattcaaaatactgatcttgtggagtggtcattccttcctc

SEQ ID NO: 372839 - DNA, 619 bp, Homo sapiens
gcaatcgggctgcaggtgggaagcagaggagaaagcaggttggaagtgaacaacagccagagctattcagtagcaaagtattgtggaagcacgaaggcatttaattaactaaaattatgctgctattttttatgctgtcatgttctttgtagtatttgtatttttttaacctgaactaattccctgggatttctttttttttattctaattgaatttatttttgttcctatttgtatttccagttttgttcytttattatttttctttttcatgagaatactccaaattatataagcctcaggtcatttttaaaaacctggtttggttaagataaggagaaagaaaagatgataaggacaaagtacaagatgaagggaggtccattggtcctttttgtggagggagaacttagaatatgtatacaaaggctaaacaagagctgtggaataaaagctaaaggtagaagaagaggaaatatgtcctatatcactctggtgtcatatgctgccgcacaaaaactcagttgtactcttcaacatgatatatactagctgttcactttccacatatccatcatttccaaaaacattctcaaccactaaaagataaaaatgtctg

SEQ ID NO: 372840 - DNA, 619 bp, Homo sapiens
gcaatcgggctgcaggtgggaagcagaggagaaagcaggttggaagtgaacaacagccagagctattcagtagcaaagtattgtggaagcacgaaggcatttaattaactaaaattatgctgctattttttatgctgtcatgttctttgtagtatttgtatttttttaacctgaactaattccctgggatttctttttttttattctaattgaatttatttttgttcctatttgtatttccagttttgttcttttattatttttctttttcatgagaatactccaaattatataagcctcaggtcatttttaaaaacctggtttggttaagrtaaggagaaagaaaagatgataaggacaaagtacaagatgaagggaggtccattggtcctttttgtggagggagaacttagaatatgtatacaaaggctaaacaagagctgtggaataaaagctaaaggtagaagaagaggaaatatgtcctatatcactctggtgtcatatgctgccgcacaaaaactcagttgtactcttcaacatgatatatactagctgttcactttccacatatccatcatttccaaaaacattctcaaccactaaaagataaaaatgtctg

SEQ ID NO: 372841 - DNA, 640 bp, Homo sapiens
aattagcctaagtgggatgaaaccagggaaagatgaygactgggggtagtgaatattccaacaagagggaaaaagaatcaaacgcccagaaacacaaaaatgaaattcatttgcggagtaggaagtagctcactggctaggacatagactaaggagggtagcaagtgagctcattatgaaatgtgaactttaggctcacagcttctgctttctcatttcccacagtggccactaaagattttaagcagaagagtgatgcaaacagagaaccattttagaaaatgtataccgacagcagggtagagaacaggttagctagagagaatgcagtaaatagagcagttaggatagtggatcattgtggaaattggtgataagagaaaatggtggcttgatctgagataggtagcatggggctggatggaattggacatatttgagagatatttttgaaagtagaattaacaggacttactcattgggcatgagaagcaagggagagaaaagaagcaaggatgactcctagaattctggcctgagcaactagacaagtggagatgtcatttatagaggtggggaacagtggaggagcagtaggtttgggggaagaaggattgtagtatttttttttaagtctgta

SEQ ID NO: 372842 - DNA, 631 bp, Homo sapiens
gtattctcatctgaaaaatgtagataataatagccacctcactattttctaatgaaagttaaatgaaaaagtatgcaaaaggcctagcacaatgtctgacacacagtaagtgcttaatttgtattttactaacccaggttatagcccgggtgttataacccaggtttactaacctcatcaaaaccaatattatccattcaaaggataacataatcaggtgtggtctgattgtttcaaagaagaataaatgaccaagatgaagcctagaaaagaagtcagagaaaggtcaactgtcaggatgttttcagtatgcctagagaaagtcctaaaatattccaattctcattggcaaccctgcttttcccaatagttagatgaatacttcacatcagcccccartcccaaggtcataccaatgtcctatgcattgagtcaggcccacagaacctatatagccgtagactcacacagtcatgaaccaaaggactctacctgagaggtagaatatgtgagagaccgatcctccacacattctacctcatctccccaaaagttacaaactatcatcattttatgccacagtgtgactaccacatgtttgttgatttttactgttttactcagagtggtg

SEQ ID NO: 372843 - DNA, 658 bp, Homo sapiens
ggtttactaacctcatcaaaaccaatattatccattcaaaggataacataatcaggtgtggtctgattgtttcaaagaagaataaatgaccaagatgaagcctagaaaagaagtcagagaaaggtcaactgtcaggatgttttcagtatgcctagagaaagtcctaaaatattccaattctcattggcaaccctgcttttcccaatagttagatgaatacttcacatcagcccccaatcccaaggtcataccaatgtcctatgcattgagtcaggcccacagaacctatatagccgtagactcacacagtcatgaaccaaaggactctacctgagaggtagaatatgtgagagaccgatcctccacacattctacctcatctccccaaaagttacaaactatcatcattttatgccacagtgtgactaccacatgtttgttgatttttactgttttactcagagtggtgagcattaaagccctttaaattaaaaagacttgagtatttacttgggggaatagcaagaaagtcaaaggtttcactgctgtttctcagctggcrtaagaagagaggtactggatgaagaaagagggtgaggcagctctaacaggagaaggaaagttagctcagcccttggtcacacaccggggaccgaac

SEQ ID NO: 372844 - DNA, 640 bp, Homo sapiens
gtgagtccttcaaattatcagagagacatttaaatgagacagaaatcacattttacttccccctactccacctttgggctatgtattcacctcttaaaactacttgctattgctgcaagtaaccataaattaatctaataatgctgcactggacatataacccacaccttacagcttaacaatatgtaaccaatcactaattaatgttatttctgcaaaccaatgagaattccaaaaaaaaaactttgtatcactttttttgcctttaaaaacctgcttgtaacaaaggctgagcagagctcaaaaccaaktttacttgggtctgagtcttccaggcagctgtcctccctttggctcaagtaaagtcttcaaatcatattttgtgtttcagcctctttcttttagattgacaagtaaacagctctataattctcaacagtctgcttagatgtgaattaatagccatgggatataggctgatgttaaaacaaaggatgaaatataaacttaagccaaggaatcttcctccttttgcatggtaacagcgggcactgaagtactatgggtgcccattctgaggttcaggactagctagttaggcttctgcatagattcaaaaacaagtctgagagaagtgacc

SEQ ID NO: 372845 - DNA, 640 bp, Homo sapiens
gtgagtccttcaaattatcagagagacatttaaatgagacagaaatcacattttacttccccctactccacctttgggctatgtattcacctcttaaaactacttgctattgctgcaagtaaccataaattaatctaataatgctgcactggacatataacccacaccttacagcttaacaatatgtaaccaatcactaattaatgttatttctgcaaaccaatgagaattccaaaaaaaaaactttgtatcactttttttgcctttaaaaacctgcttgtaacaaaggctgagcagagctcaaaaccaatkttacttgggtctgagtcttccaggcagctgtcctccctttggctcaagtaaagtcttcaaatcatattttgtgtttcagcctctttcttttagattgacaagtaaacagctctataattctcaacagtctgcttagatgtgaattaatagccatgggatataggctgatgttaaaacaaaggatgaaatataaacttaagccaaggaatcttcctccttttgcatggtaacagcgggcactgaagtactatgggtgcccattctgaggttcaggactagctagttaggcttctgcatagattcaaaaacaagtctgagagaagtgacc

SEQ ID NO: 372846 - DNA, 561 bp, Homo sapiens
aactacaatatagttatcacttaagtaaattttacattgataacaatattcttgtctaacctactgtttgcatttcaattttgtcggttgaccctttgtaaccatawttttccctccaggtcaggatccagtccagtattaggtattgcatttagttgttgtatctctttagtacccttcaactgtaacatttccacagctatatcttctcctttatgacatggatatatttgaagaatgcagtcttcccaccctttccctttttttttttttttcttgagggggagtcttgctctgtcacccaggctggagtgcagtggtacaatctcggctcactgcaatctccacctcccgggttcaaacgattcttctgcctcagcctcctgagtagctggcatgcaccaccacacccagctaatttttttgtatttgtatttttagtagagatggggtttcaccatgttggtcaggctggtctcaaactcctgacctcatgatccgcctgcctcagcctcccaaagtcctgggattacagcctctcttttttaatagcaaattcct

SEQ ID NO: 372847 - DNA, 561 bp, Homo sapiens
aactacaatatagttatcacttaagtaaattttacattgataacaatattcttgtctaacctactgtttgcatttcaattttgtcggttgaccctttgtaaccataattttccctccaggtcaggatccagtccagtattaggtattgcatttagttgttgtatctctttagtacccttcaactgtaacatttccacagctatatcttctcctttatgacatggatatatttgaagaatgcagtcttcccaccctttccctttttttttttttttcttgaggkggagtcttgctctgtcacccaggctggagtgcagtggtacaatctcggctcactgcaatctccacctcccgggttcaaacgattcttctgcctcagcctcctgagtagctggcatgcaccaccacacccagctaatttttttgtatttgtatttttagtagagatggggtttcaccatgttggtcaggctggtctcaaactcctgacctcatgatccgcctgcctcagcctcccaaagtcctgggattacagcctctcttttttaatagcaaattcct

SEQ ID NO: 372848 - DNA, 582 bp, Homo sapiens
gtctcttttctctacaccatggttttcaacttatttggggggaaatgccttgagcataatacaatgggaaaatattctctacccctttctcttcagaattcattcttatctcttcctgtctgaacaaaaactgtatggaatcaacaccaccaagttctgtgggagaaaagaaaaaccttctccctttgctctgctggaagctggagagtgccagacccctgtgtagcagtgcatagaattctagcttcttttctcctttctctgtatattgggttcagagagtaccgtgtgtctctgtgtgaatatggaccatcatttatcaacatgtatctgtctactttctcttgtttaaaaaaagaaaaaaaaacctgtaaaaaatgaggttatagaaagtcatcaaagggtgagtatgagatgtttgggtgggttaagtgggcattttaacaacatggcttctcctttggcatgtttatttttaawttttctttttgtttcactggaaaggaaagatgatgctcagttttaaacattaaaagtgtacagatttctttgttacaataaaactaaatgtatacacacaat

SEQ ID NO: 372849 - DNA, 608 bp, Homo sapiens
cagagcctagggcatacgtggtagtcagtgtttgttcttactaagtggcttccagcatgggacccctagcataggtaagcacttggtaaatataggtggtaaatgaatgaactcactgatctgaggggccaggtmtatttatatgtacccctacctggtcccaacacaagggcccaatccaagctgcttatttgtgcaaagccagatatgagggttactttctcttagtccacaggagctcctggccttgccaaccttccatgtgtaacctcatgctggctgttgagacaagctggttcccaccccagacctactgattcaaagtctgcattttcacaagatccccaggtgatttgctggcaagttagagtttgagaagcactgacctaatccaaggctttaagttttacttaaacttgctgcgctggagccagcagagggcagtgcaggagcttgcctgagccgcctgaaggccaaggggaagcaacttatcctgacacctcagttcacaagagtatactcatgactggaaattgaggctaattctggagtatcctctttgcacaaagacaaatgggcttgtgtatactgataagggaacacactaa

SEQ ID NO: 372850 - DNA, 571 bp, Homo sapiens
aacacccacgaatgatcaataaatactaaggggactcagaggctggtgggatcctccatatgctgaacgttggttccccgggcccccttatttctttctctatactttgtctctgtgtctttttcttttccaagtctctcattgcaccttacgagaaacacccacaggtgtggaggggcaacccaccccttcatctggtgcccaacgtggaggcttttctctggggtgaaggtacactcgagcgtggtcattgaggacaagtcgacaagagatcccgagtacatctacagtcagccttacggtaagcytgtgcactcggaagaagctagggtgacaatggggcaaactaaaactaaaagtaaatatgcctcttatcttagcttcattaaaattcttttaaaaagagggggagttagagtatccaccaaaaatctaatcaagctatttcaaacaacagaacaattttgcccatggtttccagaacaaggaaatttagatctagaagattggaaaagaattggtaaggaactaaaacaagcaggtaggaagggtaatatcattccacttacag

SEQ ID NO: 372851 - DNA, 633 bp, Homo sapiens
aaagaatcatggtggacacaatcagatgtttacagagttgaccaaagatacagacagtctcaatgaattcataaaatgcagccyacaagatccaaaggggcctccagcctgatagctggcaagaagttgccttctggatttgaaaagattctttttctccttaggcctttcacacatcaagttagcccaaggaatctcactgaactgactttgcaaacaccttggttataggttctatcccctaaattaaatgttttaattttgccagataccaacttcaacagtcttatgctctgattaaaaaaaaaagttaggaggcaggcagagagttctgaatttgtataaagcatgacattttgaatcattgctgatgctggaggaaggagcagctccactctgagtgacttatggtcactgagaaccctctgtgcaggagtgtgtgtgtgtgtgtgtgtgtgtgtgtgtatgtgtgtatgtgtgtgtttgagacagattgattcattcaaggtttatgatatcgacactaggaaccactggagaaatcactctaatactaggataagaagcaaagccagtagcctgaactttgtgtttcgtcagcctatggaactgatccagcaaaccattatagta

SEQ ID NO: 372852 - DNA, 593 bp, Homo sapiens
cacttggcttatactttacaataacaagatggagccaggaggcaagtgtgtgtctgtgccatcggcgcttcacctgtgctcccattttcaaaccaccatttcctgtggcagaagctccagctcttcttctctttgctcagtcatgtagtgaggcctctctggatggtgatgctgagaaatcaaagttgtcttggggtctagaagctcctgactccttcattcacaaagaaatgctacctgaacatttctgaaccagaggtttggaactccccctactcccgaggctcttagaggcggccgagcaggctggtcaataactcacatgccatttgggaagagtgctttgctcgagtctccaccctgggccctctccacctattgtctgtggtttaaacgtgataacttggcrgacagtcacacatccaaggaaaaagccagagggcgttttttttcttgtctctgaaagtgttgtcacagaaacacagaagcgtgtctctctctctctctctcttctcaagtcccaaaatcttattattaatattttttttagggaagatgaaaaagaaaactaaaaagaatctgagaaacaaatg

SEQ ID NO: 372853 - DNA, 565 bp, Homo sapiens
tgccttttgtggaggagatttgcctctgtagagaaaatctgcattggtgaaataaacagccaggctttctctgccccattctgtctagatctaggaaggataggctcctgggagagagactgaaagtctgacaccttatgggggctgacagaaacattctttctgagagctatgttgtccaaaasatcatcaggatggctaaatagtaggaaggagagcattagtagtgatattggtttggaaacccggaagagacagtctcaaatatgtgcctaagctggtgtctcttcaaagagaagaaggatggttgggtattacatgacaaagggtccatacagttttttttttttcctatctcttataatattcaattcacttttctttccttttttttctttcctttttttttctttcctttctttatttttttttttttaagacagggtttcactttgttgcccaggctggagtgaagtggcatgataatggctcactgcagccttgacctcccaggctcaagcaatcttcccacctcagtctccctggtagctggaactacagacac

SEQ ID NO: 372854 - DNA, 565 bp, Homo sapiens
tgccttttgtggaggagatttgcctctgtagagaaaatctgcattggtgaaataaacagccaggctttctctgccccattctgtctagatctaggaaggataggctcctgggagagagactgaaagtctgacaccttatgggggctgacagaaacattctttctgagagctatgttgtccaaaagatcatcaggatggctaaatagtaggaaggagagcattagtagtgatattggtttggaaacccggaagagacagtctcaaatatgtgcctaagctggtgtctcttcaaagagaagaaggayggttgggtattacatgacaaagggtccatacagttttttttttttcctatctcttataatattcaattcacttttctttccttttttttctttcctttttttttctttcctttctttatttttttttttttaagacagggtttcactttgttgcccaggctggagtgaagtggcatgataatggctcactgcagccttgacctcccaggctcaagcaatcttcccacctcagtctccctggtagctggaactacagacac

SEQ ID NO: 372855 - DNA, 632 bp, Homo sapiens
tacattgttttcccctgggagttttactttatatcacctttattgggatttaggtttacttgaatcagttccttcaaaacacacacacacacacacacacacacacacaaaatctcaaaacagacatgagatcatagccatccgttttaacattgctgccctctattagcgtgtacttgaacactgagtataacaaaggaaacaagagtacctagtcagttccacctatatcagcccccagctgattgctcatacctctttccaagtttcacatagatgagcccagtgatctccaaacttacaggtccatccctttcctaaggtccaagacaagaaaggtttgatttaggaatactccagtagcctgaatggcttggcacygaccatcaggctcctgttgcgaaggtgctctggctgccttgttggcctccatattgatctccaggactgcttcaagcacttggagctgacaaggtaggcctccgctgccttccactgaaggcctgagttatcacagggggaacagctttccaccctctgtttggaagctgggtttttgataagcagttttacccatatgtaatatatttccatttctataactggatttctgcttttgagcccttttctga

SEQ ID NO: 372856 - DNA, 632 bp, Homo sapiens
tacattgttttcccctgggagttttactttatatcacctttattgggatttaggtttacttgaatcagttccttcaaaacacacacacacacacacacacacacacacaaaatctcaaaacagacatgagatcatagccatccgttttaacattgctgccctctattagcgtgtacttgaacactgagtataacaaaggaaacaagagtacctagtcagttccacctatatcagcccccagctgattgctcatacctctttccaagtttcacatagatgagcccagtgatctccaaacttacaggtccatccctttcctaaggtccaagacaagaaaggtttgatttaggaatactccagtagcctgaatggcttggcaccgaccatcaggctcctgttgcgaaggtgctctggctgccttgttggcctccatattgatctccaggactgcttcaagcacttggagctgacaaggtaggcctccrctgccttccactgaaggcctgagttatcacagggggaacagctttccaccctctgtttggaagctgggtttttgataagcagttttacccatatgtaatatatttccatttctataactggatttctgcttttgagcccttttctga

SEQ ID NO: 372857 - DNA, 494 bp, Homo sapiens
aattctgctagtgcattttcagaactggcaagagatactagaagtagatctagaagttccaaacatagtaaatttctgttagagcaattgtttgtatttaaggagataacatgtacaatgacacagcactcccagatytatgttaatgttacaattttctttgtacaaataacaatcaatattcatgtcgttcttttagtttactgttatgccataagtaagaaaaatagggtttttaattcaagttctccaactcttttttgagactatttgtaaaaaatgggatagtaatctcttcctcatttattttagagtttgttgaggataaaagcagagtaatagctctgtgttttgaaaataaagggagtttatagagatgaggctcaacaatgataacgatgagtcatccatcactctaacctgatagaacaatcaactataattaggaaagacatttttctctctcaaacgccatcacaattgaatgccaagaa

SEQ ID NO: 372858 - DNA, 558 bp, Homo sapiens
ctttggccccccacttccccctaggatgatgtgataagagcaaggtcaattgctctatgtgagtaaacagacactccataggtaagaaacaaggacaaattattttccctacctataaaagagggaggaggcagctatcccccctccccgtcttaaaggtctgctccttattccaacactttggtaggtagataaatctctccaggagccagatagtccgttacatgtcttggcttttatggcaagtcctgggacttgactccaagttctggggctcattccttcttgcatgytgcataatgatggcacaagcttatgctggcctgcttaggaagatagtgactccaggcttcatggcaccctgggcgctctacctagggaccttgttcaggctataaccatttgctcctctcgggaaaaattttattattcgtttggatcagagcaattacctatgcaaataactacagatttaattcttatggtatgaaaaaatgtcagagctagtactcttcaccaggacactgaaaagtcgagagaagttttatttccccaccc

SEQ ID NO: 372859 - DNA, 616 bp, Homo sapiens
agaaaaccaccttagggctggaggtgagacatgctggaggcaatactgctctttaaggcattgagatgtttatgtatatgcacctcaaaagcacagcactttttgctttaccttgtttatgatgcagagacatttgttcgcatgttttcctgctggccctgtctccactattaccctattgtcctgccacatccccctctctgagaaacacctgataatgatcaataaatactaagggaactcagagactggtgctggtgcgggtcctccrtatgctgagcgctggtcccctgggcccacttttctttctctatactttttctctgtgtctctttcttttctcaagtctctcattccacccgacgagaaacgcccacaggtgtggaggggcaggaatcttagacagtcttcaggctcttattggccaatggctcattatctgtgaaacattccttctggcacaggccacagcgtgggcagtaggagaatcctaggtgagcactatttcccatcctggcctcccgtgtctgtggctcagcaccattctttccctttggtgatgcagagccccaacctgagaatgaggaggactatatttctgtagaaaatagccttc

SEQ ID NO: 372860 - DNA, 616 bp, Homo sapiens
agaaaaccaccttagggctggaggtgagacatgctggaggcaatactgctctttaaggcattgagatgtttatgtatatgcacctcaaaagcacagcactttttgctttaccttgtttatgatgcagagacatttgttcgcatgttttcctgctggccctgtctccactattaccctattgtcctgccacatccccctctctgagaaacacctgataatgatcaataaatactaagggaactcagagactggtgctggtgcgggtcctccatatgctgagcrctggtcccctgggcccacttttctttctctatactttttctctgtgtctctttcttttctcaagtctctcattccacccgacgagaaacgcccacaggtgtggaggggcaggaatcttagacagtcttcaggctcttattggccaatggctcattatctgtgaaacattccttctggcacaggccacagcgtgggcagtaggagaatcctaggtgagcactatttcccatcctggcctcccgtgtctgtggctcagcaccattctttccctttggtgatgcagagccccaacctgagaatgaggaggactatatttctgtagaaaatagccttc

SEQ ID NO: 372861 - DNA, 582 bp, Homo sapiens
tgcatggcccttggtgacaagaagtcttgarttcaaatactgtcttcccagctttccagatttgccaaggtattcatatgtcagccttagtgttaactggaagaattaatttctactttacaaggctgtcatgagtattgacaacaatgtatgaagcatctagtttagcagttggtatacaaaataagccctcaatgattcttacaggctccctatcttcaaggagctctccattattatttattattattattattattattattatttaggtatatcccctgttctctcagtctaactggggaggcagatatagcatcaggtaagtagactgtggtataataacgaggggaacaaacattgcttataacaaaatatatctgaataaggagggatgagagttaaaagtttgatatacaacattaattttgcataatactagcagcatttctgttgtaagaagcttatttcatgaatttagattagcatcttctgaagatttcaggcctagaacagcttataaaaaatttcccgaactttgccatgcacaggcacattcctgtatgagcaacacctcattta

SEQ ID NO: 372862 - DNA, 582 bp, Homo sapiens
tgcatggcccttggtgacaagaagtcttgaattcaaatactgtcttcccagctttccagatttgccaaggtattcatatgtcagccttagtgttaactggaagaattaatttctactttacaaggctgtcatgagtattgacaacaatgtatgaagcatctagtttagcagttggtatacaaaataagccctcaatgattcttacaggctccctatcttcaaggagctctccattattatttattattattattattattattattatttaggtatatcccctgttctctcagtctaactgggraggcagatatagcatcaggtaagtagactgtggtataataacgaggggaacaaacattgcttataacaaaatatatctgaataaggagggatgagagttaaaagtttgatatacaacattaattttgcataatactagcagcatttctgttgtaagaagcttatttcatgaatttagattagcatcttctgaagatttcaggcctagaacagcttataaaaaatttcccgaactttgccatgcacaggcacattcctgtatgagcaacacctcattta

SEQ ID NO: 372863 - DNA, 582 bp, Homo sapiens
tgcatggcccttggtgacaagaagtcttgaattcaaatactgtcttcccagctttccagatttgccaaggtattcatatgtcagccttagtgttaactggaagaattaatttctactttacaaggctgtcatgagtattgacaacaatgtatgaagcatctagtttagcagttggtatacaaaataagccctcaatgattcttacaggctccctatcttcaaggagctctccattattatttattattattattattattattattatttaggtatatcccctgttctctcagtctaactggggaggcagatatagcatcaggtaagtagactgtggtataataacgaggggaacaaacattgcttataacaaaatatatctgaataaggagggatgagagttaaaagtttgatatacaacattaattttgcataatactagcagcatttctgttgtaagaagcttatttcatraatttagattagcatcttctgaagatttcaggcctagaacagcttataaaaaatttcccgaactttgccatgcacaggcacattcctgtatgagcaacacctcattta

SEQ ID NO: 372864 - DNA, 566 bp, Homo sapiens
cttgctctgttgcccaggctggagggcagtggtgtgatcttggtacactgcaacctctgcctcctgggttcaagcgatgctcatgcctcagcctctcaagtaactgggattacaggtgtgcaccacaatgccaagctgatttttgtaattttagtagagatggggtttcaccgtgttggccaggctggtctcgaactcctggcctcaagtgattcacccgccttggcctcccaaagtgctgggattacaggcatgagccactgcatccagcctatttatttttctttttttattgatacataactgtacatgtttatgggatacatgtgatattttgatacatgcatacaatgtgtaatgatcaaatcagggtaattgggatatctattgcctcaaacatttatcatgtgctttgggaacatttcatatcttttcttgttattttgaaatrtttttaattatagtcagccttctgtactgtcaaacactagaagttattccttctgtctaactctgtttgtacccattagccaacctctttattgcccctctcccatgcttcccta

SEQ ID NO: 372865 - DNA, 583 bp, Homo sapiens
ttgaggggtaaataatgaataaagagagaagctaaagtaagtacttgtgttcttaaatctgaagtttttcttaatatgatcatagataatgctgctaaagatatttcctttaatatttactcayattagaagcagtcatctacaacaatttcatgtgtatccactggggaaggtttttaaatttttgattcaaataaaagacgtaataaataaaaagagtagtatattaatttaaaatattacattctttaacaatctgaaagtttaaaagaaagcaaacagctatagatttttaaacatttataatataacattttacatttttaattatactttatattctctatcattagaaacaagtgaacctttttacttattaatctgactccttgtcaataacatactttcattatcttaagcattctgtaattatagtatcatcaaacaagtccttagttaatgagataaaaatgaaacatacttacactatctaaactgtaaataggtaccatccaaagaatcctattggaaaaggaaaacagaaatttaaaacattttatgtcatatttatgaaataagccaa

SEQ ID NO: 372866 - DNA, 583 bp, Homo sapiens
ttgaggggtaaataatgaataaagagagaagctaaagtaagtacttgtgttcttaaatctgaagtttttcttaatatgatcatagataatgctgctaaagatatttcctttaatatttactcatattagaagcagtcatctacaacaatttcatgtgtatccactggggaaggtttttaaatttttgattcaaataaaagacgtaataaataaaaagagtagtatattaatttaaaatattacattctttaacaatctgaaagtttaaaagaaagcaaacagctatagatttttaaacatttataatatmacattttacatttttaattatactttatattctctatcattagaaacaagtgaacctttttacttattaatctgactccttgtcaataacatactttcattatcttaagcattctgtaattatagtatcatcaaacaagtccttagttaatgagataaaaatgaaacatacttacactatctaaactgtaaataggtaccatccaaagaatcctattggaaaaggaaaacagaaatttaaaacattttatgtcatatttatgaaataagccaa

SEQ ID NO: 372867 - DNA, 471 bp, Homo sapiens
acaagtgggatcctcacctccagggtctttcataaggctgcagacaaggcattggccagagtgggtgtctcactggactgttccactgaggaagaatctgcttccaaactcatgtggtttttgatgggattcaatttcttgtgggttgttggactgaaggcctcattttcttgtagactgtctgttctgagttccttgtcatatggtctttagcatagggcaactcacagcatgagcatggcagcttgcatcatcaaagccagcaagaaagagcatctgtgaacaacttggaaggcagattttatgtaatctattcacagaagtgacgacccatcacgtttgccatattctattggttagaagcmtgtcacaggtcctatccacactccagggaaggaaacttacacaagggcataaataccaggaggagggatgcactgggagctgccttagagtctacctaccactttc

SEQ ID NO: 372868 - DNA, 597 bp, Homo sapiens
aactgacttttatgatgtaaagaagacatcaggtttttcccctaaaaaatcatttgtcccacgagtattgatggagtaatctatctttccccagtagatttcaatgctaactctgtcatatatcaagtgccccatatgtatgggtctatttcaaaacatgttcttatctttcactgtgctattgctctaaatttataccagtatactaccatcttatatattcaagctttgcaataattcttcagaccaagtagggcaagcacccactgcatctctgaaaccattgttcttcttcaggattgtcctaactatttctaaaaatgttactagaagcttgttgattttatgtcagtaaaagactttcctggraatttttattgatattccactgaatttcagattaatatggaaagaataacattaaaagcaagcccttacatagtatttactatgtgtcaggccctcttttaagtatatttatgtacaatcttacataattaaaccaaggcccagagagaggttacacagattatatatgaaataatactgagattacatagctaataagtaatagggccaaaatttaaatacaggtgg

SEQ ID NO: 372869 - DNA, 605 bp, Homo sapiens
tgttttctatttatttctcagtcaactgagtaattatattttttatcaccagcctctccttcagtcagtagattccagctctggaaatttggctcagatctgaaaactgggcaaaggatagtaatttcattgtggtggttgccctcagcttcctgaccatctgttattgatttcttctgatggttttgaaccctattggatacccatctagggacatcaatgttattaaccatctctataactctctgcaactcagtcccccttgggtgccactctgacttagtcactcattacaacagtcgtatccacttggcttctgatggtaaggtagtgtcatcttacttctattgttttggggtctatattcttactgctaccagtgagtcttgttctgtagtagcctctcattccaacacccctggcctatagarcagagtaccagtgaaatttgtaatgctactggtgtccgtttcaccaatgcatacatgatggtcttggtaaatggaccgtatgccatgcttccccttggaacataatcatcttgcgagttatccagtcttcacatagttttccaatctgattacttccctgggtcttttaatacc

SEQ ID NO: 372870 - DNA, 605 bp, Homo sapiens
tgttttctatttatttctcagtcaactgagtaattatattttttatcaccagcctctccttcagtcagtagattccagctctggaaatttggctcagatctgaaaactgggcaaaggatagtaatttcattgtggtggttgccctcagcttcctgaccatctgttattgatttcttctgatggttttgaaccctattggatacccatctagggacatcaatgttattaaccatctctataactctctgcaactcagtcccccttgggtgccactctgacttagtcactcattacaacagtcgtatccacttggcttctgatggtaaggtagtgtcatcttacttctattgttttggggtctatattcttactgctaccagtgagtcttgttctgtagtagcctctcattccaacacccctggcctatagagcagagtaccagtgaaatttgtaatgctactggtgtccgtttcaccaatgcatacatgatggtcttggtaaatggaccrtatgccatgcttccccttggaacataatcatcttgcgagttatccagtcttcacatagttttccaatctgattacttccctgggtcttttaatacc

SEQ ID NO: 372871 - DNA, 605 bp, Homo sapiens
tgttttctatttatttctcagtcaactgagtaattatattttttatcaccagcctctccttcagtcagtagattccagctctggaaatttggctcagatctgaaaactgggcaaaggatagtaatttcattgtggtggttgccctcagcttcctgaccatctgttattgatttcttctgatggttttgaaccctattggatacccatctagggacatcaatgttattaaccatctctataactctctgcaactcagtcccccttgggtgccactctgacttagtcactcattacaacagtcgtatccacttggcttctgatggtaaggtagtgtcatcttacttctattgttttggggtctatattcttactgctaccagtgagtcttgttctgtagtagcctctcattccaacacccctggcctatagagcagagtaccagtgaaatttgtaatgctactggtgtccgtttcaccaatgcatacatgatggtcttggtaaatggaccgtatgccatgcttccccttggaacataatcatcttgcgagttatccagtcttmacatagttttccaatctgattacttccctgggtcttttaatacc

SEQ ID NO: 372872 - DNA, 583 bp, Homo sapiens
ttgtcattaatattctttagcttttaaacagccaaggaacataagaagtctgcctaagaaaacagtgacaactgtgcatctaaattctaactctcaaaaactgcttaggaggtagaaattaacatacattaaatcactcgatcccaggaaagcctaacccataaccagtctatctattatttgtacacagcatagaaagatgactgataaaaagaatccatagcttctcctacacctgcactcaatcgctacatactgaataaactgccgtgaatcaagaactcactggaggctagataggtagtactgggtggtgtggtagatagtaccatatctaacaaacacattagaaatgtttgttgactgaatagagaaatgagccaaaactcgaatcctcaacttcctgattcaaattttacatgtaacttcttgagcytcattgtagatagggatttaccaacttgcctccattagaactaaaggaaagccaaattcagctttgcagaagcaagaattaaaggagaaaggtgactctgaagtggtactgactttagataggaacatggaatctatctatttgtat

SEQ ID NO: 372873 - DNA, 614 bp, Homo sapiens
ttaaaaactccagttcctcttaactcttgattcaggtacaactgactctaaacctaaggctccaggaggaccccttgcagtttttctttttcaccattttgccaaacttttatccttttcagtaattcagtttaacattttgggggatttgcaatcactcttgggctctactgaataggatatgtcaagagggcatattaaacctcatctgtaataatcttctccttcaatagactatctactcccttttcattcaaagcaattgtgaatttsaaaagtgagggttaggagatcctaagagttttgtctgtgagctgtttactctttccctcacgattaccttatattatcttaaccataagaaatacaatcttaccaatgagtcaatttgaagaagactggaaagtgttccacataaacatactacccagcatctcctctcctctccctctctctcttcctgtccttttccctccaagaaataatggccatgagaaagagtgatcaagctccagtagacaaagccttaccagaaagatatctgaggtaagaagcaggtgatgtctcataattaccatgcaatatcttacctttcattttagcagattgtcata

SEQ ID NO: 372874 - DNA, 614 bp, Homo sapiens
ttaaaaactccagttcctcttaactcttgattcaggtacaactgactctaaacctaaggctccaggaggaccccttgcagtttttctttttcaccattttgccaaacttttatccttttcagtaattcagtttaacattttgggggatttgcaatcactcttgggctctactgaataggatatgtcaagagggcatattaaacctcatctgtaataatcttctccttcaatagactatctactcccttttcattcaaagcaattgtgaatttcaaaagtgagggttaggagatcctaagagttttgtctgtgagctgtttactctttccctcacgattaccttatattatcttaaccataagaaatacaatcttaccaatgagtcaatttgaagaagactkgaaagtgttccacataaacatactacccagcatctcctctcctctccctctctctcttcctgtccttttccctccaagaaataatggccatgagaaagagtgatcaagctccagtagacaaagccttaccagaaagatatctgaggtaagaagcaggtgatgtctcataattaccatgcaatatcttacctttcattttagcagattgtcata

SEQ ID NO: 372875 - DNA, 592 bp, Homo sapiens
ttgttttcttgttcattgtttgtgtataaaaatgttattaattttgtgtattaattttgtgtgctcattctgtatcctgcaactttactgaatttgtttattggttctaatagttttattgtttgtagtctttaggatttcataagatcatgtcatctgcagagacaatttaacttcttctttcccaatttggatgccttttttyctttttcttgcctaaaattgctctgactaggacttctaatactatactgaatggaaatggtgagagcgagcatccctagcttgttcctgatctcagaggaaaagttttcagcttttcaccatttagtatgatatgatctgtgggctcgtcatatgtggccttcattatattaaggttacatttatttatactttattatattgaaggaattgcattccttcatttttatatgcccatatatatatgtgtgtgtatatatttcctcattcctatatatctgtatatggctgcatacagtcatgtgctgcataatgacgttctagtcaatgatagaccacatataagacagcagtcccataagattataataccatatttttatttttt

SEQ ID NO: 372876 - DNA, 532 bp, Homo sapiens
tctaggtgtgatgttagatcattaatttcagctctttctcactttctgaggtaggcatttaacattatcaactttcctcttaatactgcttttgctrcatcccagagatcttggtatgttgtgtgtgtgtgtgtgtgtgtgtgtgtgtgtgtatttgtgtgtggttttgacacattttacttcatttaatattcacaataatatttgagcatttactttgctttctcctttttcatagggagggaagctaacattcagaagtaggtgacgttaccaagactgcacagcccatgaggagcacactcaagaaggaaataatcctagaatttttaactttactggtcttacatttctccattacaccacaatgatttttaaatcatttattgatccattcagcaaatattttttcaatgtgttatgtttcaagaattgtcataagctctgtgtaatacagtgatcaacagatagcagtagctttgtcttcatggagctatttgtctgaggtattgaaaactcagccttaaaattg

SEQ ID NO: 372877 - DNA, 587 bp, Homo sapiens
aaaattactcagggttctaagttcagccamcaagacgtcttactacaggtcatgggaagaagttaactcataaaaaaaatcagagaaaaggaagatttgaactcatcttccagcttttacagagcatattgaagccaaagatctggaagtatgtggaaaagatttatgtagtataaagaattacatgaattatattattagaaaaatgtaaaggggctctctattggaattattatagctgcttagctagtcagttttctcagctattaaccctccaaaatgaatgtgaatattttactctccttagagctctatcgcatctatgtatagtatcatcactgaaaaactcagtggagctgagacttactcttttttgagaatctcagactttgacatcaggaggatggatcctatttttggaggtcataaaaatctgagtgaaatcaccaaagtaatttggcttaacttatctgcataagctacttcctaaaaatgtgattctctatctttctttatatctttacattaaatatatttaaaacaagttgtttttgtttccctagcaagcatacctcatgctctacaga

SEQ ID NO: 372878 - DNA, 536 bp, Homo sapiens
gctgctttgacaataaccatagtttagcaagatggaagctttgtttttccccttctgtaagagtagctgtgcagtttggcaggtaggcagctctgctccacaggtaatccaaagagatccaggttatttctatctagttgctccatcatttgtagggtatgttcttctacatgattaaggctgactcactatcactatatctgcattttggcccaaagaaaggatgaaaagaaagtggcaagtaaagctgcttccttttagggatgtgaactataagtttacataccacttcttctcctatttcacctgtcagaccttggtcatgccaagctaccaggggaggctcaraaatgtctccagctgggctactacatgcttaccttaaactggaaagtggaaagttttgatgctaaaaggaagaagagaatggatgggcttggatgaaaatttaggagacaagagtggagcaccctttcaacaaatgccacattgtcaatgttcttgatagcacagaggatgaaaatctaagcaaaaac

SEQ ID NO: 372879 - DNA, 598 bp, Homo sapiens
catcctttccatttaaaaactaaatatgactaaagaatatgtttccctggttagttaagaattggtgaatgaatgtatcaagcaaattaattactacatttgctagtttatctgggaactgtaagccaaggcagtccctttctctgcacyccaatttatttcaaaattagcaatgcattatttgaatagatgtatttctataattagaagctttgctctctgagcttcttgtatctactggttgtcttaatctggataacagctcagctcatttaacacatatttttaaaatcctaaaattcacccaaatattcaattttatcctttttattttactattatatcatctcttgacttatttttatctcactgtctttggctcctctctaggtagtgataatcatattagaagaattttaattccaaccaattccagattaatatattattctacaacaaataaattgttccattcagaaacagaactagctactcaatttttccctattattttttcaaaataatttgtatatatatgtaatagttgtacatattgatggggtacatatgacattttgatgcaagcatgtagtatgta

SEQ ID NO: 372880 - DNA, 598 bp, Homo sapiens
catcctttccatttaaaaactaaatatgactaaagaatatgtttccctggttagttaagaattggtgaatgaatgtatcaagcaaattaattactacatttgctagtttatctgggaactgtaagccaaggcagtccctttctctgcaccccaatttatttcaaaattagcaatgcattatttgaatagatgtatttctataattagaagctttgctctctgagcttcttgtatctactggttgtcttaatctggataacagctcagctcatttaacacatatttttaaaatcctaaaattcacccaaatattcaattttatcctttttattttactattatatcatctcttgacttatttttatctcactgtctttggctcctctctaggtagtgataatcatattagaagaattttaattccaaccaattccagattaatatattattctacaacaaataaattgttccattcagaaacagaactagctactcaatttttccctattaytttttcaaaataatttgtatatatatgtaatagttgtacatattgatggggtacatatgacattttgatgcaagcatgtagtatgta

SEQ ID NO: 372881 - DNA, 598 bp, Homo sapiens
catcctttccatttaaaaactaaatatgactaaagaatatgtttccctggttagttaagaattggtgaatgaatgtatcaagcaaattaattactacatttgctagtttatctgggaactgtaagccaaggcagtccctttctctgcaccccaatttatttcaaaattagcaatgcattatttgaatagatgtatttctataattagaagctttgctctctgagcttcttgtatctactggttgtcttaatctggataacagctcagctcatttaacacatatttttaaaatcctaaaattcacccaaatattcaattttatcctttttattttactattatatcatctcttgacttatttttatctcactgtctttggctcctctctaggtagtgataatcatattagaagaattttaattccaaccaattccagattaatatattattctacaacaaataaattgttccattcagaaacagaactagctactcaatttttccctattattttttcaaaataatttgtatatatatgtaayagttgtacatattgatggggtacatatgacattttgatgcaagcatgtagtatgta

SEQ ID NO: 372882 - DNA, 598 bp, Homo sapiens
catcctttccatttaaaaactaaatatgactaaagaatatgtttccctggttagttaagaattggtgaatgaatgtatcaagcaaattaattactacatttgctagtttatctgggaactgtaagccaaggcagtccctttctctgcaccccaatttatttcaaaattagcaatgcattatttgaatagatgtatttctataattagaagctttgctctctgagcttcttgtatctactggttgtcttaatctggataacagctcagctcatttaacacatatttttaaaatcctaaaattcacccaaatattcaattttatcctttttattttactattatatcatctcttgacttatttttatctcactgtctttggctcctctctaggtagtgataatcatattagaagaattttaattccaaccaattccagattaatatattattctacaacaaataaattgttccattcagaaacagaactagctactcaatttttccctattattttttcaaaataatttgtatatatatgtaatrgttgtacatattgatggggtacatatgacattttgatgcaagcatgtagtatgta

SEQ ID NO: 372883 - DNA, 646 bp, Homo sapiens
ctgacaatgaagccaacacagagaaaagtgcagtcaagctacagagtgaggagcagtttctagtaacatcctgtgagcccctggacatagtctgaaggacaactcaaccctcaacttttcagttaaatgagccaattagttttatgcatatatagaaagtatatatatgtacatatatatgcatctatacccttatttttaaaacaaatgagagcatactctgtacactgttctgcctattgactttctcacttaatatatcttttagaattagcacatatagatctaccttattagaacatatagatctattttattctttamtggttgcataaaatttcattgtgtaaatgttatgtactatattgcaccagttccttgttgatcagcatttagattattttcaatcatttgctacatcaaactaaaaaaatgactacgcttagttgtatgtctttgtactgtatacaagtatatctctaggcttttaggaaacaactgacacattgattctagaatttatatggaaatttgaaggacctagaacagtcaaaacaattttgaagaacaacaatggattattcacattatctgatttcaagactttctataaagttacaataatcaagagtgtagtgtaagaatg

SEQ ID NO: 372884 - DNA, 570 bp, Homo sapiens
attgtgaatcctgtttcaccaaatactaaagcatcctgaagatgttatctcctcatatattgcaatgataaggtccctaataattttctggtttatttggagaggtsttggttgggggggtctttaaatttttttttatacattcagggggtacatgtgcatgtttgttatagggatatattgtgtagtggtggggtttgtgcttctagtgcacacatcatccaaacagtaaatattgtacccactaggtagttttcaacactcacttcccattttggagtccccagtgtctattatttctctctgtatgttcatgtgtacccattgttaagctcctacttacaagtgagaacatgtagtatttgatttattttaattaattaattaaattgtaattaattaattaaattttgttagagacagagtcttgctatgttgtgtaggctggtcttgaacttctggccttaagtgatctttcaacacctcacttggggccaggagtcatttaggataatggcctccagctccatccatgttgctgcaaaagacataatcttattcttttttagg

SEQ ID NO: 372885 - DNA, 630 bp, Homo sapiens
gctgcagtctgttgatgttcagacagtttaagaggatttgctcaataagcagagatttgtcttgcaacaagactgtctgggccacctacagaagaaagcaagttacactcctcagatttgcctttgaagaattctagcaactggctgtctcacacctacccttgcacatgcgttgctggtttcgttcagctacatgatccctttgctgtaactaggatggtctcctcaccaccaccggcaccagtctgcctgattctggtcagtgtatcttggctgatggtttttctctttttcttcaatcttggccaaygtgcgtacataatttttctctgggcttctcttttggagaagcctataaaacatttccattctgggatgacagaaactcctgcttgggagggagagatctcaaagattatctactggaatgcactatgcattacacagtgcagcgaaagggcacagccttcgaagcgtgagctccactcactacattagctatatagtttaggcatttcattgagtcataaatagtcactatctcatttattcctcactagcaatccaataggagaaaaataaagcacagaaagattaaataacttgccggggttctgtaaagtaagtaat

SEQ ID NO: 372886 - DNA, 630 bp, Homo sapiens
gctgcagtctgttgatgttcagacagtttaagaggatttgctcaataagcagagatttgtcttgcaacaagactgtctgggccacctacagaagaaagcaagttacactcctcagatttgcctttgaagaattctagcaactggctgtctcacacctacccttgcacatgcgttgctggtttcgttcagctacatgatccctttgctgtaactaggatggtctcctcaccaccaccggcaccagtctgcctgattctggtcagtgtatcttggctgatggtttttctctttttcttcaatcttggccaacgtgygtacataatttttctctgggcttctcttttggagaagcctataaaacatttccattctgggatgacagaaactcctgcttgggagggagagatctcaaagattatctactggaatgcactatgcattacacagtgcagcgaaagggcacagccttcgaagcgtgagctccactcactacattagctatatagtttaggcatttcattgagtcataaatagtcactatctcatttattcctcactagcaatccaataggagaaaaataaagcacagaaagattaaataacttgccggggttctgtaaagtaagtaat

SEQ ID NO: 372887 - DNA, 585 bp, Homo sapiens
aacaaaaacacacagaagtacaaaacagggtacctcagccttttcttgatgattggagargggacttcagtcattgcagttggtgacaggacatgcaataggaactttgcatgtcctgccacctccctaggtatttgtctttggtggtcgagtgagcagaatctgttacacagaaaaatgaggatgccccactggtttatgttacagccttatggcatttttttctattccctatttacttcttaatacagcataatttatgcacttttttgatcgtggccatgcattcagcaaatgtctttattgggtggtccataacaatgcctggatctgtttcctgtgaggtggctataaatttagatttattggtatgagagcattctggtcttctctccaaagttcttctattgaaatctgaatgtgaaagattaacacatttaattaatagacaagactcatttgttcctaaggctgactattcaaatgggagatactcattttataagatataattctaattgtgggctaggaattttactgatatttctttataatgtatataagcatggtatggcaatttgagat

SEQ ID NO: 372888 - DNA, 585 bp, Homo sapiens
aacaaaaacacacagaagtacaaaacagggtacctcagccttttcttgatgattggagaagggacttcagtcattgcagttggtgacaggacatgcaataggaactttgcatgtcctgccacctccctaggtatttgtctttggtggtcgagtgagcagaatctgttacacagaaaaatgaggatgccccactggtttatgttacagccttatggcatttttttctattccctatttacttcttaatacagcataatttatgcacttttttgatcgtggccatgcattcagcaaatgtctttattkggtggtccataacaatgcctggatctgtttcctgtgaggtggctataaatttagatttattggtatgagagcattctggtcttctctccaaagttcttctattgaaatctgaatgtgaaagattaacacatttaattaatagacaagactcatttgttcctaaggctgactattcaaatgggagatactcattttataagatataattctaattgtgggctaggaattttactgatatttctttataatgtatataagcatggtatggcaatttgagat

SEQ ID NO: 372889 - DNA, 590 bp, Homo sapiens
tttactgatatttctttataatgtatataagcatggtatggcaatttgagatgttattattcctcaaaagcaattacatatggaggtatttttgaatgaatcaaatagtctctgactttctctgctttttgttttacacacatttaacacatgtacatgccttaaattatgacacatgtgtacacacactcatacccacacatgcactcacacaatgctgttgacccaaattcratagagtaggtgatttttcctacccctgctaatagatttttactgatttatccatatcattttttctggtagctgtaatcatctctttttggaatatctttccatcctctgtctccttagagattctttccctcctttaaagcttagatcaaatcccactagtaaaccctgctttgattggcccactctattttctcccttgtttttgttcacatgagattcacagtcaataacataccacctgagatggcagttactatctaactgcttcaggtgaattatgttgtcccaaaaagattaggaatccatgaagaactctgatgagatggatctgatagtgcctggaatagagtagg

SEQ ID NO: 372890 - DNA, 590 bp, Homo sapiens
tttactgatatttctttataatgtatataagcatggtatggcaatttgagatgttattattcctcaaaagcaattacatatggaggtatttttgaatgaatcaaatagtctctgactttctctgctttttgttttacacacatttaacacatgtacatgccttaaattatgacacatgtgtacacacactcatacccacacatgcactcacacaatgctgttgacccaaattcaatagagtaggtgatttttcctacccctgctaatagatttttactgatttatccayatcattttttctggtagctgtaatcatctctttttggaatatctttccatcctctgtctccttagagattctttccctcctttaaagcttagatcaaatcccactagtaaaccctgctttgattggcccactctattttctcccttgtttttgttcacatgagattcacagtcaataacataccacctgagatggcagttactatctaactgcttcaggtgaattatgttgtcccaaaaagattaggaatccatgaagaactctgatgagatggatctgatagtgcctggaatagagtagg

SEQ ID NO: 372891 - DNA, 546 bp, Homo sapiens
tattaaaaaggatctaaataaagggaagttctttctgacagtgctttgtactaaaagggaggaggtaattttcyttggagttcttccccagcccccagcaatttctgtttttatattaatggattttatgggaccttgtctttgatcttgccctcttaaaaaccaaaggaggaatggaaggttaattccagcaattctaccctagtgtacctctgctattttgcatgaagaacacaaaatgaatataattgagcctagaattgtactgaggatatgattattttcttctgtgctaggataattttcatctttcctgaaaaaaaagaacccccatggttctcagtatatatatattatatgaaaatattgactaaatagtatatatactgatatatattatatatatataaattcagtagatgtactcatatatttctcatatttaaatatatgcttaaaaacttgacaatgccagggcagtatttagcaggacctaggctcagcttctctctccccttgtataaattttatttcttattatcctag

SEQ ID NO: 372892 - DNA, 500 bp, Homo sapiens
aaacaaaacagttactagcaatcgtcgtgaagtgtgcttttttgccttgtttttgcctatgtttgaagtctccacactggtgtcctcccttcctggaagcttctccttactccactccctccagctggtaccctttattctgcacagcacagaactctgaacccaccttggtgaaggctctgtcattataaggacatcgctggtttccctgtctttctctccagacggtgaacatcatgtctcgttaatctcagcattcctgctgctttgtgcaaatgtggttatagkaagagaccaataaaggtttcttgaacaaatgagtgtaaaataccactatttatgttatgcaaagactgatcttctttcagtgttgttgtcctcttttatattacttttagctgtagttttgttttttattcaaataatcttcagaacttgtggcacatcctttaaaaattttatgtcaaagtgaaaggcttttacactgaaaatgacaaaat

SEQ ID NO: 372893 - DNA, 629 bp, Homo sapiens
ttgtgtgcatggaagtgttcataatagtctctgagcctttttgtttctctgtggggtcattattaattttcactttgtcatttctgattgtgtctatgtgtgtctttttttctttattagtctagctagtggtctgtggatctyatatattctttcaatgcaccaacttttggttttattgatcttttgtatggttattcacatctcaatttcattcagttcaggtctcattttggttattatctttgcttctgctagtgttggcattggtttgctcttgtttttcaagttcctctaggtgtgatattaagttgttaatctgagatctttctaactttgatgcgggcttttagcactataaactttcaacactgctttagctgtgttgtagaattctgttatgtgttatctttgctttcactagtttcaaataatttcttgatttctgtcataatttcattgtttaccaagtcattcaggagaagtttaattgccatgtaattgtatggttttgagaaattttcttagtattgatttttatttttattgtgctgtggtctgagagtgtgattggtatgatttggcttttatttttttgaatttgttgagaattgttttatggctgaggg

SEQ ID NO: 372894 - DNA, 597 bp, Homo sapiens
ccattactagtttcctaggtgcaatatataatagtctacaatttagtaaataggtcaaagaaagaccaattcagattcaacccatcagaaaattctcctgtttctaaactcaacctaagaaatgagaaaatcggcacttctattagcctctgaatattccacatatatttgttttttccttccaggaagaatatacagttctactggaatattaaacaaaaagtagggcaagakctctattctcagaaaaatagagatcttgccctactttttatttaattttccagtatgatgggtgctaactcagtacctccaaggttagttatttatcacattgacctctgtagcctacaaacacctctctgctatacccacactttctccatctccaaaacttgctcattcattgaataaatatagcatcctagggcttgagtgagcatctggcaattcaatggcccctgacttcgaagtatttactgtctaagacaatggttctcaaacattagtgagcaactaccccacccgaagagctgaagtgcagctgagaatttgtatttctaacatgggtccaggtaatgtaggttctggtcgctg

SEQ ID NO: 372895 - DNA, 629 bp, Homo sapiens
ttgtgtgcatggaagtgttcataatagtctctgagcctttttgtttctctgtggggtcattattaattttcactttgtcatttctgattgtgtctatgtgtgtctttttttctttattagtctagctagtggtctgtggatcttatatattctttcaatgcaccaacttttggttttattgatcttttgtatggttattcacatctcaatttcattcagttcaggtctcattttggttattatctttkcttctgctagtgttggcattggtttgctcttgtttttcaagttcctctaggtgtgatattaagttgttaatctgagatctttctaactttgatgcgggcttttagcactataaactttcaacactgctttagctgtgttgtagaattctgttatgtgttatctttgctttcactagtttcaaataatttcttgatttctgtcataatttcattgtttaccaagtcattcaggagaagtttaattgccatgtaattgtatggttttgagaaattttcttagtattgatttttatttttattgtgctgtggtctgagagtgtgattggtatgatttggcttttatttttttgaatttgttgagaattgttttatggctgaggg

SEQ ID NO: 372896 - DNA, 599 bp, Homo sapiens
atgaacatgtactttttttataatttgattaaataaaataatatttaaatatcaactgaaagcaacattatgtataataaccaaagatcaatagcattgcgacctgtgagcttactcctcccagggggaggcttaccttcttagccacaccaagacttttcccagcgtcacccctgcccaaagatttaaagatacaagcttcaacaagatctagattttacagtcttttaatcctcctataattcattctataattcatttttatcagcttttctttgtctcctgtgaagacatcttgttgcataaaacacacacagtaatttaattgttggcttctgtgtgtaatatacttagccagtttctgcttattttttgaagatcctcaaatcccactctttagctgatagtttatcttttttaatatcaattggaattgccgcaacacccaacactgacacacagttyccagagcaaagctccgtggtcagactcccaagctccttagtagtggtggcaatgactgagaatcaccatcaaagaacatcaacagattgcattacaatctgtcaatcgttctctagagagaggaactggcaact

SEQ ID NO: 372897 - DNA, 562 bp, Homo sapiens
gttttatggctgagggtgtggtccattttggagtatgtgtcatgtgcagatgagaagaatgtctattatgttgctgttgagtggartgttctgtagatgtctgttagttccttttggtaagtgtgaagtttaggtcccgaatacctttgttggttttctgccttgatctgtctaatactgtcagtagagtgttgaagtctcccactattattatgtggttatctaagtttcttcataggtctctaagaacttgtttgatgaatctggatgctcttgtgttgggtgtatatatattcaggatggccaagtcttcttgttgaattgaaccctttatcattatgtactcctctttttgtctttttcaatcagtttgtttaaagtctgttttgtctgaaattggaatagcaattcctgcttttttgtgttttccatttgctggtaggtttttctccatccctttactctgagcctatgaatgtcattgcttgtgagatgggtcttttaaagacagcatacagtagagtcttgcttctttatccaactttctactccatgcttttta

SEQ ID NO: 372898 - DNA, 559 bp, Homo sapiens
tagtttcaaataatttcttgatttctgtcataatttcattgtttaccaagtcattcaggagaagtttaattgccatgtaattgtatggttttgagaaattttcttagtattgatttttatttttattgtgctgtggtctgagagtgtgattggtatgatttggcttttatttttttgaatttgttgagaattgttttatggctgagggtgtggtccattttggagtatgtgtcatgtgcagatgagaagaatgtctattatgttgctgttgagtggagtgttctgtagatgtctgttagttccttttggtaagtgtgaagtttaggtcccgaatacctttgttggttttctgccttgatctgtctaatactgtcagtagagtgttgaagtctcccactattattatgtggttatctaagtttcttcataggtctctaagaacttgtttratgaatctggatgctcttgtgttgggtgtatatatattcaggatggccaagtcttcttgttgaattgaaccctttatcattatgtactcctctttttgtctttttcaatc

SEQ ID NO: 372899 - DNA, 562 bp, Homo sapiens
gttttatggctgagggtgtggtccattttggagtatgtgtcatgtgcagatgagaagaatgtctattatgttgctgttgagtggagtgttctgtagatgtctgttagttccttttggtaagtgtgaagtttaggtcccgaatacctttgttggttttctgccttgatctgtctaatactgtcagtagagtgttgaagtctcccactattattatgtggttatctaagtttcttcataggtctctaagaacttgtttgatgaatctggatgctcttgtgttgggtgtatrtatattcaggatggccaagtcttcttgttgaattgaaccctttatcattatgtactcctctttttgtctttttcaatcagtttgtttaaagtctgttttgtctgaaattggaatagcaattcctgcttttttgtgttttccatttgctggtaggtttttctccatccctttactctgagcctatgaatgtcattgcttgtgagatgggtcttttaaagacagcatacagtagagtcttgcttctttatccaactttctactccatgcttttta

SEQ ID NO: 372900 - DNA, 462 bp, Homo sapiens
ggttttaaaatcactagtttaaatgataaaacaataatttttatggttcaagttagaaggctttgacttcacaccactgcctgtacaaaaaaagcctaaatttctcagcatggtatttatgactgactccccatgatctggcctcaactcatctcaattcctctgggctgctcttctaatatcctaagttcgaattaaataacatgaactttaccagccagggtagaatgctcttcctgctatacccattaccatcctcaccatcaactccactgtcacctgacttctaacagtcataattttatccaactttcccaccccagttgacacaccacttgtcctaaagaactctctccaaatccccatctgaaaatgactcatgmtccttctggacacccacagcactttgtttccacaatcccagaatagcaatatctcactgtaactttggttacagctatt

SEQ ID NO: 372901 - DNA, 591 bp, Homo sapiens
gtagaatgctcttcctgctatacccattaccatcctcaccatcaactccactgtcacctgacttctaacagtcataattttatccaactttcccaccccagttgacacaccacttgtcctaaagaactctctccaaatccccatctgaaaatgactcatgatccttctggacacccacagcactttgtttccacaatcccagaatagcaatatctcactgtaactttggttacagctattgacacagagatttatmtgccctgtgatgctgtaagctccttgaaggcaaacactagcctctccatctttgtccaacctgcaaggcttagtacactgtttggcgcatattaggggtgccagctattaagccattgtttctcacctccaaacctgtgatgctatagtcactacatgacgctggaatcaagactacgcaacccacttctgctctggggcacactagagggagaatacaaggcctgaagaggaggaaaggaattgctcatttttgtttgcttcctgttgacatcctgtctcttctccattcctaggtgaacagcaccttaaaaaagcttctttcccagcagttct

SEQ ID NO: 372902 - DNA, 460 bp, Homo sapiens
tcctctgggctgctcttctaatatcctaagttcgaattaaataacatgaactttaccagccagggtagaatgctcttcctgctatacccattaccatcctcaccatcaactccactgtcacctgacttctaacagtcataattttatccaactttcccaccccagttgacacaccacttgtcctaaagaactctctccaaatccccatctgaaaatgactcatgatccttctggacacccacagcactttgtttccacaatcccagaatagcaatatctcactgtaactttggttacagctattgacacagagatttatatgccctgtgrtgctgtaagctccttgaaggcaaacactagcctctccatctttgtccaacctgcaaggcttagtacactgtttggcgcatattaggggtgccagctattaagccattgtttctcacctccaaacctgtga

SEQ ID NO: 372903 - DNA, 555 bp, Homo sapiens
cagaagatgggtgatttctgcatttccaactgaggtacctggttcatctcaatgggactggttggacagttggtgtggcccatggagggcaagccaaagcagggtggggcatcacctcacctgggaagcacaaggagctgggggatttccctttcctagccaagggaagccatgagagactgtaccaggaagaaggatacactcctgcctcaatactgcatttttcccacattctttacaacctgcagaccaggagattctctcctgtgcctggctcagtgcgtcccacacccacagagccgagcaagctaagatccattggcttgaaattcttgctgctagtgcagcagtctgagattgacctgggacactggagcttggagsggggaggggtgtccaccattgctgaggcttgagtaggtggttttatgctcacagtgtaaacaaagctgctggaaagcttgaaatgggcagagcccaccgcaccccagcaaggccaactgcctctctagattccacatctgtgggcagggcatatctgaaaaaaaggcagca

SEQ ID NO: 372904 - DNA, 555 bp, Homo sapiens
cagaagatgggtgatttctgcatttccaactgaggtacctggttcatctcaatgggactggttggacagttggtgtggcccatggagggcaagccaaagcagggtggggcatcacctcacctgggaagcacaaggagctgggggatttccctttcctagccaagggaagccatgagagactgtaccaggaagaaggatacactcctgcctcaatactgcatttttcccacattctttacaacctgcagaccaggagattctctcctgtgcctggctcagtgcgtcccacacccacagagccgagcaagctaagatccattggcttgaaattcttgctgctagtgcagcagtctgagattgacctgggacactggagcttggagcggggaggggtgtccaccattgctgaggcttgartaggtggttttatgctcacagtgtaaacaaagctgctggaaagcttgaaatgggcagagcccaccgcaccccagcaaggccaactgcctctctagattccacatctgtgggcagggcatatctgaaaaaaaggcagca

SEQ ID NO: 372905 - DNA, 555 bp, Homo sapiens
cagaagatgggtgatttctgcatttccaactgaggtacctggttcatctcaatgggactggttggacagttggtgtggcccatggagggcaagccaaagcagggtggggcatcacctcacctgggaagcacaaggagctgggggatttccctttcctagccaagggaagccatgagagactgtaccaggaagaaggatacactcctgcctcaatactgcatttttcccacattctttacaacctgcagaccaggagattctctcctgtgcctggctcagtgcgtcccacacccacagagccgagcaagctaagatccattggcttgaaattcttgctgctagtgcagcagtctgagattgacctgggacactggagcttggagcggggaggggtgtccaccattgctgaggcttgagtaggtggttttatgctcacagtgtaaacaaagctgctrgaaagcttgaaatgggcagagcccaccgcaccccagcaaggccaactgcctctctagattccacatctgtgggcagggcatatctgaaaaaaaggcagca

SEQ ID NO: 372906 - DNA, 555 bp, Homo sapiens
attctaatacccacatctgtggctctgtacctgagagttttctytcagtcctaagagaagcaggctcagagctctagggagttcaggcagcaggagcatcccttgactaatgatgaatgggagctggaggataaacaaatacctccagcttccctaccttgcaggtgaaatcggtcttactgtctcttacactgtctcccagaactccctgccaaactgaatctcagtcacccacaggtcaacagaagtgattctgagccctttattagtttctttcccttccccatcttacatcgccactcctctgccagttcttcctgagatcacttcccaaaagaactactcacacttaatccctgctcaggttctccttctcagggaacccaaccgaaaatgctatgtgaaaggatgtgggctttattgtgaggacaatgggaagccactgacaagtgtttagggttttggctacaaacaacagaaagtaactccacctatataaaccagaaagtcaaacaattttttggaaaaatgcaaggaaactcatagacacaaagg

SEQ ID NO: 372907 - DNA, 649 bp, Homo sapiens
attgatatacacttggattttttcaagttttgaactattatgaatgaaactgctgtaaacattcttatacaagccttttttatatacatatattttcatttcttrttgagtaaatatttagaagaagaattagtatgtcatgcattgactagttattgagaataagctcaggacaatattagaaacagaaagacaaggtaagaaatttatatagtaatccaggtgaggtcttgagctaaggtagttctattaatcagctcaggctgccataacaaaatactatagattgggtggcttaacaatctatagtatttattttcccaaagttctggaggctggaagtccaagatcagggtgccagcaagactgagttctagtgaaggctctcttcctggcttgcagacgtctgccttcttgctgtgttctcacaaggagagagatctccataatctcttcttcttcttaaaagggcactagttctatgggattagggctctatcctcatgacctcatttaaccttaaaggctctatctttaatactgttatatagggggttaagcttcaacatatgaattgggttgggggacacaactcaattcaagcattagtaggtagcaaaaagatggaagggggaaagcagaaaaggga

SEQ ID NO: 372908 - DNA, 649 bp, Homo sapiens
attgatatacacttggattttttcaagttttgaactattatgaatgaaactgctgtaaacattcttatacaagccttttttatatacatatattttcatttcttattgagtaaatatttagaagaagaattagtatgtcatgcattgactagttattgagaataagctcaggacaatattagaaacagaaagacaaggtaagaaatttatatagtaatccaggtgaggtcttgagctaaggtagttctattaatcagctcaggctgccataacaaaatactatagattgggtggcttaacaatctatagtatttattttcccaaagttctggaggctggaagtccaagatcagggtgccagcaagactgagttctagtgaaggctctcttcctggcttgcagacgtctgccttcttgctgtgttctcacaaggagagagatctccataatctcttcttcttcttaaaagggcactagttctatgggattagggctctatcctcatgacctcatttaaccttaaaggctctatctttaatacygttatatagggggttaagcttcaacatatgaattgggttgggggacacaactcaattcaagcattagtaggtagcaaaaagatggaagggggaaagcagaaaaggga

SEQ ID NO: 372909 - DNA, 555 bp, Homo sapiens
ctcctgccctcctgctgatctcccagcccgagacagaagaggctctccagggctgtgttcttcagctcaggtttgctgatgctgcagcaatgcatggggctcttcagacagtggccaagcaggcaccttaggggagtggctacgctgaccccactggcaaatgaaatgatgacttcacttcaaccctgaagctgttatatagagaaagcttagagcctgactagagccagataaaccttggcttgaatcaccacacattctgtgctgtttgtgcaaccctcagcaagtacatgatccttctgagccttagatgttcatgtgtaaactaatgaaaccttgcctgaggaaggcatgtagccagtttctcgccttgggataaaaaaatctgttcgtgggtcctatttggagatctggcatctgtgctattggtaagtagcaactcaaattctgtaaacaatgccatccctgaatgacaatttcacttttactccacttcctctagtctctgctcatcttagtcttaacaattggcakgtcaacttactaactaaaaca

SEQ ID NO: 372910 - DNA, 632 bp, Homo sapiens
ttgataactggtgggtgaaatctgcagaaattaagggtaaaggccatctccaaaagaaatgtctagaaatgtccttattattatatacaattaatgctgaagtccggatcaaatgaaaactgggaattcaagtgggaggagacaaaaagttaaccatcaagtattcctaggcattaaagcaatcactttccttctttataaatatagcacacttgatccattctattgttgatgaacatgtgggtggtttctgttttgtgatattacaagcactgctgctatgagctatttcttaggtgtttcctggcgcacaggtgcaagagttatttttagggctgttgtgctcattaaaatcacccgtcraatctttactagctactgatgccctggccccatcacagagtaattgaataactaatcaaaatatatgggtagaggtagagattggtggcaggatgggatggggggtgggatgtcaagtatttttttccaacatctaatttttaaatattcaagtttcatcaatagctttgatatggtatggctctgtgtccccatccaaatctcatcttgaatttcactcccataattcccatgtgttgcaggagggacccagtgggaggtaactgaat

SEQ ID NO: 372911 - DNA, 412 bp, Homo sapiens
ctcaattctctgtcctttgagtttcttgtaaactagaggtgagttatataagcttgatcaaattcargttaaatatttttattgagaatgctttctaggtgatgctaagaactcctatggcatcaggttgagaggtgaggccagctagacttcctgggtcgagtggggacttggggaactttcctgtcttacaagaggattgtaaaatgcacagatcagcgctctgtaaaaggcaccaatcagcaggattctaaaagtagccagtcgcggggtggattgaaagaagggcactctgataggacaaaaacggaacatgggaggggacaataagggaataaaagctggccacccaaccagcagcggcaacccactcgggtccccttccttgctgtggaagctttgtccttttgct

SEQ ID NO: 372912 - DNA, 544 bp, Homo sapiens
ggaaaagagagagaaactaccatggaaagcgagacaaaaataatatagaagctggccatggtggcttaagcctgtaatcccagctactcaagagactgaagcaaaaggattgcttgagcccaggagttcaagaccactctggccaacatggcaagaccctgtctcaaaacaaaaaaatatatatacacggagttcagctgaggaaggtgttcagagccagaagtcaccatagagtaaagacctgtggaagagaactgaacttcccagtgaatataaaaataggacttcagtcacctggatctaaatttcaaagggcagagggaactcccctgatgtaaggatctaaaaatatacagaaagaggaatagcacaagcaaagcacaaaacgagggtaattccacacatgccarcattgtggtaatgggaaagccaaccccagtgaggctggggagtggcaagagcataaaagacaaagggtatgtggagccctcagcttgactggcctttcctgtaactgggattcatttataaggagaaaaatttc

SEQ ID NO: 372913 - DNA, 569 bp, Homo sapiens
tccctcacttcagattgacatacctgatgcgctcagtgagagagataaggtcaaatttacagtgcacacaaagaccacactgcccacatttcagaatccagagttttctgttacaaggcaacatgaggactttgtgtgactacatgacactcttcatgtaccctagaacttaaagtataacaaaaaaaaaaaaaaaaaaaagaaagaacagaccatgctgggcttattgtgagtgttttaraaaatcaaataagctagttctttctgccttgctattcatttagtttaaagagacttatatccactttttataatggattgtgaaatttttgatttcatctacctactaaagtatttgctaactattgggtaagtggaaaatatgtgaaggaatagtgttacagctttgaggtaatgcatacaggcttacattatttatgttgtaaagtggtataaacagtgtaatgactttagtcttatttacctttaggtttggtttttctctggtatgttctttccaatgtcagtagaattgatttctaggaaacattagtattggtaatagtatg

SEQ ID NO: 372914 - DNA, 563 bp, Homo sapiens
atatttagatatgttctgttcattcaaaatcaaagtccttgattatcctttgggattaggaaaaaaatcctttggaatactggagacttcataatcttgatggctaatcattggtgtttagcatttgttgtactagttttaggccaacattgaagcagtatagacactgttgtgctctgaacgattgtctgtaatggataaactgggcaaatgattgccatcaaagtgaatacaggaagatacctccttttaaatggccagaagaaataaggaaggttaagaaaaaacaggagttgacttttaaatagccccataggagtggagtggttgtctcctgtggaccagcaagagtagaacgaggcaccagctagaaaacatcgcttctgggacaagaggctcatgagttcctgcctctgctgcagattccgcctgctcctacgaaggctgacytcaatggtccttgagagaagatgcagaaactgggagaaggtaaagggtctttgaccaaagaagaatttgccaagatgaaataagaactggaagctgagtatctcgctgttttt

SEQ ID NO: 372915 - DNA, 545 bp, Homo sapiens
aggtttgtatcatttacctcagaatgttgtaaaaagcaaatcacccagaaccacacgaccccccccaaaattgtcactctctgttctgtgacggaagtcaggtgtactcataaagcattttcaattgccttttcagaaaatttcaagcagtataaaaatggactgacaatttttgtaaatttttgattccttagtggaatcaaatcccttgattaagtgragaattccacttgtaggtagaggcaccagaagaattggtggtgtagctttttttttccattttcttaaaaatcatccttttttctctaacttcagcagaaaaagagcattcatttgacatctccaggtacatggaagcaatccttccaagagaattacccaaaggcagtgtgtctgtgagcagcacccaggaccgtgcccaggtgtgcacaggctctgaagtatgacatcaagtgttccgtgctggggacaatccactctgaagcggccaccttgggagacgtggttaaatggagggccagctctagacaaaactgccaaggagg

SEQ ID NO: 372916 - DNA, 528 bp, Homo sapiens
cgccaagctggtacatattgcttttgttgatttccaggctttttcagatagcatatttcagcccagatttctttcctgaatccccaaactcacacgttaaactgcctgcttgaccatctccacctaacactttcaaacccaactcctcatcttccctccagaatcagctcctcccacagccttcctaattgtacttgcccagactaaaagtcgtggcattctactggactcctctatttctctggctgtctaaatgtatccagaatttgatcactttctgcacatcccgaagtcccaccctggtccaagtctgcagtgtctcttgccgagattattgcagcagcttcctaactggtctcccagctttcacattgctcccttcaatctaggctcaacatggaagccagagagagcttcttacatgtaagtcagttcacatggctcctgtgttcacaaggtgtagtggctttcctctctctcacagtaaaagcctgcraggccacatctacacagtggcctcacgggctt

SEQ ID NO: 372917 - DNA, 592 bp, Homo sapiens
aagtttgtgacttgtgaaattgggtgcacttcagttccttttttttccacttttattttaggttcaagggtacatctggagaaaagggaactctcatacactgctggtgggaatgtaaattagttcagccattgtataaaacagtttggtgatttctccaagcatttaaaacataactaccatttgacccagcagtgcccttttttaagatggaaaagcctaggggaagaacaggtttttcctttataagggtccagatcaaaagttctgttttggaaatatttggtttgagttttttcttagacatcaagcgagatgtcaaacaggcagttgaatgtgggagttcagtcatttaccagcaagccttgatgacttgcctcatcaatactttatagtctcacttygtgactatctaaccctatccttgggcaactaagacatggggaccctcatttcctgacaagtagagactcaatgaattacccaaggacacacaactaaagtggaagagcagggcttgaaccaggtcttctggcaacctacacatagtcctgtagggcactgctaacccctcctctactctcctgcttat

SEQ ID NO: 372918 - DNA, 543 bp, Homo sapiens
gtaaacagaggtcacacagggaagaaaaggccactttgctgctgcttttgaagacggaggaggtgaccacaaaccaaggtggtctgtataagctggaaaaggctccccagagccaccaggggaatgcagccctgcccacccactttagagctctgacctcctgaactgtaagacaataaatgagttgtttaaagccactaagtttgtggtaatttgtcacagtagcagtaggtagctcatacagtcttctcttctcctctctgtgatccttgtgtggctaaaaaggagaaatgctaatatttattagaagttacagcagtgaaaaacagagaaaacgtatttctaacatataaacttgaccacaaacttattaatttacaaaaagtttgataagaaaacaaccaaatgccaaatttttaaatgagcaaagaatatgaacacrtagagttcaggaaaagaacagtggattgctttgtgctaaaatgggaagcttctctcacacatgttagagtgaaaggagtgagctgcagaatacccaggggg

SEQ ID NO: 372919 - DNA, 593 bp, Homo sapiens
accattctgtcatctctcatgagtccaaaggttgactgggatcagctgggtggttcttctgttgcacatgatagcagctggggctgcggtcatctggggactactgggctgaagtatccaggataagtcactcacttcgctggtgccttgagggggtggatggaggcctggctcagttgtgaagctgggacagttggacctcccttcctccctgtcttcctctatccatatattctcaaggtctctccttctccacttgttctatgtgatctctccagcacagagagaccacacttcttacatagtgacttgaggatccccaaagcacaaaagtataagatttgaggatttttaaaacttagaccacaaacagcttagtgtcacttccaacacactttattggttaaagcaagtcacaggccagctcagattcagtgtgggaggggatcacacaagggtgatgtgattcactaggggaggtctgatttgctagggaacatcttgggatactagctaccccttgactgaatgcccagtarcatttatggaggccagggtctggttgtcattagtgacgagattactataaaaaa

SEQ ID NO: 372920 - DNA, 571 bp, Homo sapiens
gtctcagcactctgaaaggaagatccagttacagcagagtttctcgtggaatgcccagcctcaccaatagtatcttgcttgcagaaggcactcagtaagtatgtgccaacagagtgaagtggcagggatgggacatgaatgtagacagtctaactccagagcctgtacccttagcatttgccacaactttctcccagatagtccactccgttctccctgcttctcacccgaatagcatacgaaattcatgaaccactgactttgggaggctaaatgtcctccatcacagctcccttctcaatctccctgggtcagtaccaggaattagccagccagactgttccactctgtactgctagttttctatgtccagataccttttcccagttagtctgtaatgcctttgagggaaggcacagcatccatgcagagtctatggggggatgtatgagtccttttgaaattgcagtttctttctcaaaagcaagattatatctttgtgttttctattaataygattgtggtaggtttttttcttgaattttatatcaatatccttcaccctgcccct

SEQ ID NO: 372921 - DNA, 602 bp, Homo sapiens
tggttgtgacaattacctgagctatagaggcctgggatttacccagcaggtttttgaataaatgcatggaaacccatctgagagaatgaagtggcattaggtgatcttgaaagctgagatcctcttctttttcttaccctctgagagttgatctaattcagcttttgtttctctgttgaaggaggagttgacataaaactcagctaatttttctgtgagtgacttatctctcttagcggtctctacagtctccgtggcttcagtcttcttcctctctgtttaataccacagcagtgaatctccattaatgacacccargaagaagtctgcagggttattattgaactcacagtggtaaccagttgatgcaaagtaccccaagccctcttaagcaggcccatggaacattcctctttgtgaggccattaaggtgaggctatcaaacaacttgaagatggaataccaaggctggtgaatgggaagaagatgattgttcgtccctacttagacatccttttcaggagcaaaaaggtcagcatttgctgtgcttgagtccagtccagttgtgggctcatccaggaacaagatgagaggatcagtaa

SEQ ID NO: 372922 - DNA, 546 bp, Homo sapiens
ctgaaatcctctttctcccctccagtcctgcctctttaaggaccagtgctgacagcctgatgattcccttccacacagtgctactgtatttattcaaatcaattcacacctattatagataacgtgggcgggcttagctgtttygaatggcaatctagtacacagtggtggatgatggatatgggccattatgcagtaacacttttatttttgtaggatacattcctaaaaattgaattgcctgaaagatagtacaattcatgttctcaccagcactgtttatattggatattaccaatcttttgatttttggcattctgataccacttcccccaactacaaaagatataattgttataaatcccatttccccaggcatgagaagtgaattgaacatcttttcaaatgtttatcaaccaatataagttctctcttatgaattgtccttttatatcttttgctactttccattgctggtttctgtttgtttgtttttgcttctgtcaaacctataggacttctatgttaaaagaacactaacacagc

SEQ ID NO: 372923 - DNA, 649 bp, Homo sapiens
cgatcctcctgcctcagcctccccgtagctggaattacaggcaaccgccaccatgcccagctaatttttatatttttagtagagatggggtttcaccattttggccaggctggtctcgaactcctgacctcaggtgatccaccctcctcggcctcccaaagtgctgggattatgggcatgagccaccacgcctgacctctaagagtttttgatcacacaactcctaccattaaaacaaaagccctcttatgcttatatgcatgctctattatcattagctaatagacttatggcacaaagtaactacaggggaagattcatcattgatgagcagggatgcccatctctagctcagatacgcttctggatatgagcttctcattagagtgggttttataggttttattttaaatttatttttattatttttaattattaatcttaatttttgtgggcacatagtaggtgtatatatttatggggtacatgggatgttttgatacatgggatgtttcgatacatgcaatgtgtaataatcacatcttgcaaaatggggtacccatccctaaagtgggttttgtcttaatggctcaaygagctaacaaagacttcattccaggagtgggagacgtgtgattcattttcttgg

SEQ ID NO: 372924 - DNA, 495 bp, Homo sapiens
aaatatcgctgaattctttttctcagcaaggaacagccctgagagagggaatgtgttcctaggggtaggtctctgaaatggccgctctgggaacgtctgtcttctacgcttgcagataagggatgaaataagccccagtctcccatagcacgccccggtctccagtagcgctcccaggcctatcaggacgaggaaattcccacctaataaattttggtcagaccggttgtctgctttcaaaccctgtctcctgataagatgttaccaaagacaatgcatacccaaaacttcattagcaattttaatttcgccccggtcctgtgatcttaccctgcttccatttgccttgtaatatttwattaccttgtgaagcatgtgagctctgtgacccacaccctattcgtacactccctcccctttgaaaatcactaataaaaactttctggttttgcagattgggggacatcatggaacctgccaacatgtggtgtctcc

SEQ ID NO: 372925 - DNA, 773 bp, Homo sapiens
  misc_feature (1)...(773): n = A,T,C or G
gctagtagtaataagtgtttaataaaagtagtagtagtatttaatggctatataatgagtggtatagttagtggttataccgtaaattatttaaccaagctcctactactgtacattttgtttattcctcattctccataatcataaaaatgccaaaattaatatatttgtgcacatagtttttttccttgctttggatgattttcttaggaaagtgtccccagaaatgagatggctatctcaaacacagctggatggagagagtgagaaccatgccaggtcatcctccacagcccctttatcttctccctcccaccatgggtgtctccccttctctcctcttacccctctntggggtatggtgactctgagggagggtaagaagcaggggrtcccccaggtgggcatctcataatacatctnccctccctcccacaccatccagcacgactaggggttaagtgacatgtgacatgaaatgtgctagccctcctagggccatttgcattgtaacagcagctgagaccttaggccaaatgaaaaatgagctgatggtgacttaggaaacaatagagagcaggttggaatggcaaagctcctttagtctgggtgtagaggaagagagggagaggagaaggatgaggtgatcgtcagtcagctcagaaatgctccttcccacatcctagatcaggccctgccaactctggcttgaaccgacgctcaagcctaaggcagcactcaccaatctttttctcaccatggcatacataaaa

SEQ ID NO: 372926 - DNA, 510 bp, Homo sapiens
aatagtatcaggcacatgattttcttgtatattttattcacaatgagatgttaaggcaaaaaggttgaaacagatgaagtaagacagaaaagcatcaaggaaaaagaagttgaggaagcatggagcacaaaggaagacagmccaaaagaggaaaaaattagctaggtctataaaatcaatccccatactatatgcctctaatacattaaaatataaagtaagatagtcacaatgctattctattaaaattcttcctaatatagatgagatacaggtaatttgagggtagatttctgcagcaaattgaatataccagaatagttgttttccagttctaccacttggttggaacagtaagacagtgatggcctccaggtgtggtggctcacatctgtaatcccagttactcaggagaccaaggaaggaggatcaggaaattaaggccagaaatttgagaccagcctgggaaacatagcaagactcccatctctaagaaaaaaaaaattttaa

SEQ ID NO: 372927 - DNA, 510 bp, Homo sapiens
aatagtatcaggcacatgattttcttgtatattttattcacaatgagatgttaaggcaaaaaggttgaaacagatgaagtaagacagaaaagcatcaaggaaaaagaagttgaggaagcatggagcacaaaggaagacagcccaaaagaggaaaaaattagctaggtctataaaatcaatccccatactatatgcctctaatacattaaaatataaagtaagatagtcacaatgctattctattaaaattcttcctaatatagrtgagatacaggtaatttgagggtagatttctgcagcaaattgaatataccagaatagttgttttccagttctaccacttggttggaacagtaagacagtgatggcctccaggtgtggtggctcacatctgtaatcccagttactcaggagaccaaggaaggaggatcaggaaattaaggccagaaatttgagaccagcctgggaaacatagcaagactcccatctctaagaaaaaaaaaattttaa

SEQ ID NO: 372928 - DNA, 495 bp, Homo sapiens
atataccacatttgtttatccattcaaacgctggtgaacacttaggttgattccatgtatcactactatgaatagtgctgtagtaaacatggcagtgcagatatctstttgatatgctgatttttttcttgtagatatatacttagcagtggagttgcttgatcatatggtagatatttttagttttttgagtaacttccatactgttttccactgttgctgtactaatttacattcccaccaacagtgtactagcattcacctttctctgcatcctggccagcatgttatttttttgtctttatgataatagctattgaaaatgaggtaagatgatatctcattgtgatttcttatttgcactttctttataataaataatgagagcactttttgtataccagttggccactggtatgtcttcctttgagaaatgtccgttcagatcatttgcccatttgtaaattggattgttttcgtttttgctaaggggtt

SEQ ID NO: 372929 - DNA, 554 bp, Homo sapiens
tgtcagacagttcaccaacattaaacagagctgagatgcagaggtgttgtgttttaaatacagctattttatccacagccctatagctacaggtgaagggaaattagaagaagagaaaatcctattctagcttaataggaaatccagactatttgagtacctttacacacgttatcccatctttttagagttgcattagtctattaaatcctttgtgaaatcagaggcaatgcaaatagggttacagtattatttaaattaccaaagtctgagagtttaggataaatatgtacaaataggtagaaaggcaggaatttatcaacttgatggattaacaggtcatcagaagcccaaactgatagcttccagtaccaaaaatttccatatgattaagaaccaaattcactataatgtagtttatttggttcatacgaaattttcaaacatgcagtctctagggaaaaccatcaaagggtttctcttggtgctctagatgctatggagctttaaastacgtgatgcctttcatctagcaagaaacagaatgaatttat

SEQ ID NO: 372930 - DNA, 482 bp, Homo sapiens
acaggatgttgcttccaagattgagttacaaaaagactggcttccattttgacagacttctcttgctattactcactctgaaagaaactagctgccatgttgggagctgtccaatggagaagcccaggtggcaaggaactgatgtctccagccaacaaccagtaaggatctgaggcctgccaatagccacatgagtgatcttggaagcagatcttcctcaaggtgctccctgcagataatacagctctggcaaacaactggatcatagcttcctaggagaccctgtgctacaagccattcagataagccacactcacatattccacatccacagaaacttggaaataataaatgtgtrttattttaagctaagctttgaagtaatttcttataaatcaatatatagctaatacagacatccatttggaagagtaaccaatactaagtactggggacagcctcctgtagcaatttccttcttc

SEQ ID NO: 372931 - DNA, 539 bp, Homo sapiens
aacgatgttttgacttatgatgattcaactttaggatgttgtgaaaatgatacacattagcttttgttttggatgattttgcccaactataggctaatgtatgggttttgatcatgtttaaggtaggctaggccaagctatcatgtttggtaagttaagtgtattaaatatgatcctgtcttaagtcaaggagtatctgtaaggtcttctttgcatttattttcaccatgataataattgttttaaagagacatcgatctgtcacccaggctggagtgcagtggtgtgatcatagctcaatacagcattgaattcctgcaatcaagtgatcctctcacctcakcctctggagtagctgggaccacagatgtgcaccaccacacccagcttattttttagaaagttttttgtagagatggagtctcaaacataggagctcatacaccagcctatgttgcccaggctgttcttgaatccctgtcctcaagcaatcctcctgcctcagcctcccagtgtgctgggactacaggcatgagcct

SEQ ID NO: 372932 - DNA, 465 bp, Homo sapiens
gccgatctgcacagtaactgactgcagcatgagggccatctgccccagctgactggctttgaggctcacctttcagccagagttcttccccaacctgcatgtcctctgcttccgcagctgcgagggcygccagcatgatgaaggtatagccccttgttctggtgatccacgttacacatgtgggtgtccaacagcagcttcacaatctcaaaattggagtgggacatgctgtaatggagggctgtgttgctgttgccatctgccaagttgatgacctagtagagggcatccagggaggtagcctcaaaagcagctctgtagtctcccagggtggctgcaatggctaacttctgactggacacgcagaaccccttgtgctggagggtgttcagacagaacctcatatctttgctggtcacagctttggggtcatttatattatttttcagtaagttgcaagcagac

SEQ ID NO: 372933 - DNA, 512 bp, Homo sapiens
tgtcttcatcctcgtcttcttcaagaggatactactcaatgacactcaatgacatcacactcgtcatctgactcagaagaagagctttcatctgtgtgaaaatcatcacttgaagttgttgcataacctccattaatgccaacaaactgaagattctttttcatgccatttgaatctttgttaccatctttcttcttcataatgggctccagtgtactttcattgtttgtgcatatggaggccagcrgccatctggttgtctgtcaggttcactagagaccatgtcctttcctgagcggggaaggcatcctggctgctgaccagctttccttctgagatccctacctctgagcagccttcttcctgatacagatactttactaatgtagatttcctttctagatgtaaatttccttgtaaaaaggacagctttttagagccattcctgtgtctgtagtttctctgaataatcagctcgaaatatgccaaagaggtatatttttgggtggcac

SEQ ID NO: 372934 - DNA, 533 bp, Homo sapiens
cctgatacaagatactgggaaatgctcagcatgtactcacatgcacagagtacaatgtctyttccttttttcctatcacagcccagcagaaaacaaaatcctttcctaaagagagattcaggggcccaaggtgaaaaatgatttactgtctataggagagaaaataaaacccagcaatacaccaaatgccagcctggcaaatctcacacacacacacacactcacacactgggcactgctcacgaggaaagctgctggaagctagagtgcaatgcatatggcaccccccagcttccccctggcatctgccttgttgaggttctgcacattagtacatcttttcattttagtttgcaaacaccccaggggagggaaacgtgaaggtgtagatggtctatcaaagatgaaggagacatccaagagaatcccacccaatacgtgctgctcagacggtacaattaggatcttggggatgtcaccatttcttcaggaagaagtgaagaacaatctagtccactgtttttcccactttt

SEQ ID NO: 372935 - DNA, 541 bp, Homo sapiens
gcagccattggcccacagacaaagatatctattccaaacactcttttggaaaaaagggaaaataattatttctactctttcatgatattcactctttgaagagatcatgagaaagaagctgtttaagcttcaagaaagcmgttaaatgttcttttagtcaataaattatgccaatcataagataaacagaggcagaaattatgagtcatggagttattactgataacatttactgccttattaacattttagaattttctgttatctaaggttctccataaatttcatttcacatataaatgcataaacctaaaaaggaatacaaatttgaaggatgctatgaagaagaaaaagaaatgaaaaataacctaattatactggtcattctggatgactaaatttttttgacctctaagtggcaaaacctcaaatgcatttgaagctttagctcctaatggggcccccaaaacacccatgcacacaataaatctttcatgcaaatttctgtttttctatattttgatctaggtagtggttatgt

SEQ ID NO: 372936 - DNA, 541 bp, Homo sapiens
gcagccattggcccacagacaaagatatctattccaaacactcttttggaaaaaagggaaaataattatttctactctttcatgatattcactctttgaagagatcatgagaaagaagctgtttaagcttcaagaaagccgttaaatgtwcttttagtcaataaattatgccaatcataagataaacagaggcagaaattatgagtcatggagttattactgataacatttactgccttattaacattttagaattttctgttatctaaggttctccataaatttcatttcacatataaatgcataaacctaaaaaggaatacaaatttgaaggatgctatgaagaagaaaaagaaatgaaaaataacctaattatactggtcattctggatgactaaatttttttgacctctaagtggcaaaacctcaaatgcatttgaagctttagctcctaatggggcccccaaaacacccatgcacacaataaatctttcatgcaaatttctgtttttctatattttgatctaggtagtggttatgt

SEQ ID NO: 372937 - DNA, 594 bp, Homo sapiens
atgtctattttcagttcaacwtgcttactgttcctgagtaactggcaatgggaaatatcagctgatttcaaaatctgttctcaccatcctgaggttatgccacttacttgctcacaacgagaacatattacttgtgtggaccaaggattcttagccccatgtccctgtatagaaattcagggtgcctgtgaacttggatgtaaaaaatatacatatatatttatttattttcactaaccacaacctgaaattaagcatttcctcccatgatgaatgtaggcagcaaaccacagtattaatagcagtacctgtaactttgtcaccaatagatctcagctgttacaggaaaaacttgggactgtagtacccacccccaaactgggaaggtgctgaaagaccaaagaataacttggacaagtccagcttgatgagtagttgagtttattagggcttataacagggcactcctggatggcagcaggatagctctagagatccgtgcgtgtgcacgatgggactgttttccttggtaggttctcagattctctccgggatgtctgggttctcaaggacacctactcctcagctgggcac

SEQ ID NO: 372938 - DNA, 576 bp, Homo sapiens
aggaactgtttccagacggagtcagagcagaaccggcccactaggggccacaacccacaggctataaactgagggatctggagaaggtttttaattaaagagtgtccctgggggaacccctgcactgggtctggaattccaatcatggactctgtccccttggatgtcttcaggaacaagtcgttatgaaatggttccaggaatgatattggtttggagcctcctagcatcaatagcactttttaatagcacattttgtgcaaactacctcttcacttttggatctggtgtggtgggatgttaattaggtactcatggggcaggcagattatgtaatctgggtcrtttggatgcttacaacaggatgacaaggagacagagcatggtctctgagttacttcttccttatctcccaaagttttcttggtgtcttccttacatctagagggatcaggagaagtataaaagaggttatggaaaggaaagctttgcgggccactgtctgacttggcatttcagtgcctgctttgagctttgcatgatcatctatgtatcctttttcctcaaagcaagaag

SEQ ID NO: 372939 - DNA, 509 bp, Homo sapiens
gtgattctgaccccaaaactgggaggaaaggataaagagcagcatcaatgtggctctatctgtagaataaattatctatatgatgaaaaaaatacgttttgtgttaaaatttttggtacaatccagctgtgtttttatgtccacatgaaatgagttttagtctttttctgccttaccaaagcctctcttccttaattttttttttttttttttttttttttttttctgagacaaggtctcactctgtcacccaggctgaagggcagtagtgagatcatggcttctgcaactttcgcctccccrgctcaagcaattctcctgcctcagcctcccaagaagctgggactacaggcatgttccaccacgcccggctaatttttgtgttttttgtagagacagggtttcgctatgttggccaggctggtctcaaactcctgagctcagatgacctgttaagctcggcctcccaaagtgctgggattacaggtgtgatcaactgcacctggccc

SEQ ID NO: 372940 - DNA, 451 bp, Homo sapiens
ctacagttcctctaacctcacacacacacatamactactgtccttgtaggaatttttattaattaagatcactttttctcttccatcattaatatctgggtaactgccaccaattaattgttgttggctaaaaagttgaaatccaatttctatttataacttagaatgcaataatattttatcttctgaccttcctagttgtgacagggagctcattgtcatgttaaatctattatatctttcttccatttgaaagagaatgttatgtgagcatgtagctgcctagccaagaattttatttccaagtctcttgaaagtggccaacttcaattatgaagatgagaacaattcccttggtcttaggaaatggtggagaaagaagaacctcagtcccagatagaatggctgtcccaaaactgtcccactaatctccaaactattacaaaaaagg

SEQ ID NO: 372941 - DNA, 545 bp, Homo sapiens
tgttaaaatgtccatacttcccaatgggttctacagattcagtgcattccttacagcatttcrttttctttccttgttgctccagttagcacttagaataaatattgaaaaacaagaataatagcaagtatctttatctcacctcaccttatttcagaagaatatcttcaattgttcactactaagtgtcttgttcactagattatttacagttactcattttatcaggtagaaagtttatttttatttctggcttcaaagaattcttaaaaataaatgggggatagccaggtatggtggctcatgcctataatcccagcacattgggaggccaaggcgggcagatcacctgaggtcaggagttcaagaccagcctggctaacatggtgaaaccccatttctactaaaaatacaaaattagccaggtatggtggcggactctgagtagtaatcccactactcaggagcctctggcacgagaatcgcttaaaccctggaggtggaggttgcagtgagctgagattgttctactgcactgcagcctg

SEQ ID NO: 372942 - DNA, 545 bp, Homo sapiens
tgttaaaatgtccatacttcccaatgggttctacagattcagtgcattccttacagcatttcattttctttccttgttgctccagttagcacttagaataaatattgaaaaacaagaataatagcaagtatctttatctcacctcaccttatttcagaagaatatcttcaattgttcactactaagtgtctygttcactagattatttacagttactcattttatcaggtagaaagtttatttttatttctggcttcaaagaattcttaaaaataaatgggggatagccaggtatggtggctcatgcctataatcccagcacattgggaggccaaggcgggcagatcacctgaggtcaggagttcaagaccagcctggctaacatggtgaaaccccatttctactaaaaatacaaaattagccaggtatggtggcggactctgagtagtaatcccactactcaggagcctctggcacgagaatcgcttaaaccctggaggtggaggttgcagtgagctgagattgttctactgcactgcagcctg

SEQ ID NO: 372943 - DNA, 590 bp, Homo sapiens
tgccaagttggatttgtcagggcatttttggtctctcaacttgctttgtttggggaaagatttttttttaatgtgattctgggtttttctcactgtatgaggtattttaataaatattttatrtggattctatgttgtctttgggctctaaattgatatagtttttttgttatgctatagtcatctttagtctttcttcagcattgaagatatcaaatgagtctacagtttacaggtgctatctttggtttatatctttattttctattatgaatgggtaaagttccaatcactaataacccctatttctgggggagcttccatatgttactgctgatgtatttaatgttaaataatgatagaagtctagaacgaataagccaaatttgtacagaaatgcaactgaaagtttaataattcttatttgtttcctttatgtttattatgaaaataggagacatgggaactcccttcatgtgcaaattctgatctagcctgtaagatactctgtacttcgcatttctgatgaacaggctaaaagtggaaatgtctctgtgtgaggagaagaaactcagggaaaggatgttgct

SEQ ID NO: 372944 - DNA, 590 bp, Homo sapiens
tgccaagttggatttgtcagggcatttttggtctctcaacttgctttgtttggggaaagatttttttttaatgtgattctgggtttttctcactgtatgaggtattttaataaatattttatgtggattctatgttgtctttgggctctaaattgatatagtttttttgttatgctatagtcatctttagtctttcttcagcattgaagatatcaaatgagtctacagtttacaggtgctatctttggtttatatctttattttctattatgaatgggtaaagttccaatcactaataacccctatttctgggggagcttccatatgttactgctgatgtatttaatgttaaataatgatagaagtctagaacgaataagccaaatttgtacagaaatgcaactgaaagtttaataattcttatttgtttcctttatgtttrttatgaaaataggagacatgggaactcccttcatgtgcaaattctgatctagcctgtaagatactctgtacttcgcatttctgatgaacaggctaaaagtggaaatgtctctgtgtgaggagaagaaactcagggaaaggatgttgct

SEQ ID NO: 372945 - DNA, 618 bp, Homo sapiens
ctaataacaatatactaccttatttattaaatatttgtaagtgcttttaatgtaaaaaaccatgcattttatcagggccagctaaaggtggcccttgattttctttttgatatattacctccatgctcccactctccctccacaaattctatccctgcatctacaattccaagccatttytaaattttggtcagattttacagttttccacacaaatatcagataaaaatgaatttcagtttatagatgtgtcttcacaactaatcagattaagatattttaaaagatgttcttctgtgtgtggtattcttataaaataatatataatgtctgatttaagtcagtgggtatttgaaaatctcagaggagacaacagttatagagaataggcagacaagggtaatttctgaaagtcagagggaaaatgatggctttctgacttttaactagcaatgatggtcacacacggcaggatctcttttgtatacagctgtctacagaggaagcagtgaaataaaagtggaagttcacaagagaacaaaaggacatacatgtgtgtttgttcgtttaccctagaaaacccttacaacaatgtctcctcatctgcaaatttccttc

SEQ ID NO: 372946 - DNA, 658 bp, Homo sapiens
tctgactgataggaccttcgatacagaagtatatacatctttgccacagaaagtggtagcattcagctccacagaataatactgttaaaggattcctgatgcagctaagtgtggtgtttcacacctgtggtcttagctatcctagctacttgggaggatgaggtgggagaaaatattcagcacaggatttcgaggttgcagtcagctatgactgggccactgcagtccagcctggataacagagtgagaccctgwgtcaaaaataaaaataaaaatagaaaaataaaggaaaagaaaaggatgcctgatgctgaaataaaataatattcaactcattttcactattaacacttaaaatgagctcaggctataaaaataatgtcttctgcttaattacttttccagaactgtagggtacttaggcattctcactctaaatacaattacatgcatgtattttcagcatttatgttaaagatgattctaatgtcttttcccagtatctttaggcaataaaagtgatggcatcagtctgttgtctatttaaatgttttctgtaagctctataacacactcaaagatacagatagatttctttcgtttggtctaattcttttttaattctttttttattcacttgtttgtgttaatttttaat

SEQ ID NO: 372947 - DNA, 658 bp, Homo sapiens
tctgactgataggaccttcgatacagaagtatatacatctttgccacagaaagtggtagcattcagctccacagaataatactgttaaaggattcctgatgcagctaagtgtggtgtttcacacctgtggtcttagctatcctagctacttgggaggatgaggtgggagaaaatattcagcacaggatttcgaggttgcagtcagctatgactgggccactgcagtccagcctggataacagagtgagaccctgtgtcaaaaataaaaataaaaatagaaaaataaaggaaaagaaaaggatgcctgatgctgaaataaaataatattcaactcattttcactattaacacttaaaatgagctcaggctatamaaataatgtcttctgcttaattacttttccagaactgtagggtacttaggcattctcactctaaatacaattacatgcatgtattttcagcatttatgttaaagatgattctaatgtcttttcccagtatctttaggcaataaaagtgatggcatcagtctgttgtctatttaaatgttttctgtaagctctataacacactcaaagatacagatagatttctttcgtttggtctaattcttttttaattctttttttattcacttgtttgtgttaatttttaat

SEQ ID NO: 372948 - DNA, 588 bp, Homo sapiens
ttttctgccctgggcgggccaggtgttccttgccctcattctggtaaacccacaaccttccagcatgggtgctatggccattatgaacatgttacagagctgcagagattttgtttatggccagttttggggccagtttatggccagattttggggggcttgttcccaacactttctcatccaatcatatcagctaaaaaaattgtttctttataccttctttttcatttcaagggaaaataataaaaaaatagatatcatactcaaagaaaaagtattgaatactagatcttatgaaamatttaaaaatataattttggggaataaaatttcacattggtttgatttttgacttctaattttaggttgatgactatgtgtgaagaaaaatgtagatgaaagccactgtaaataaaatcaagcttgggaaataaattgatgactgtgaaatgatcattgcctttctgattttctttacttttgtttcttatattctgctatactaaatgtgtcattttgaatttgtcttgtttctattaataaagattttactgaagggaaatgattataagtaagacagtctacaac

SEQ ID NO: 372949 - DNA, 597 bp, Homo sapiens
agttaacttttgtgttaggtctcattgatttattatttcattattcattcattctgtaaaaagctatkttataatatttggtgtttcaaatttctaaatttacatattggcaactatgtaaaaataaaattggaatggattttgcaaaatagaggaggcttttaggtttctatcttatctctactttttcaacttgtactaggaatcctcacaaagagttacatgttcctgaaggctacagagacttacctacataatcatccatttcattattcgtatttaaatgcttttcattgatagaataccttaatcttacagccacaggacagaaaaggaaatggttaagagtgaatgtatctcacatctcttacagaaaacatggccaatttaagatttttggtaagaggccaggctgtgaagcctgttaagagcttgatctcaaagctgagccacttaaaagctggttaatattaaacaagttaggactcaactttttcatctctaaatatggcctaataataccatatgcttcatagaattgtaggggagaaatgatttcttagtagagctcgtggtacagtgcctggaccatagtac

SEQ ID NO: 372950 - DNA, 597 bp, Homo sapiens
agttaacttttgtgttaggtctcattgatttattatttcattattcattcattctgtaaaaagctattttataatatttggtgtttcaaatttctaaatttacatattggcaactatgtaaaaataaaattggaatggattttgcaaaatagaggaggcttttaggtttctatcttatctctactttttcaacttgtactaggaatcctcacaaagagttacatgttcctgaaggmtacagagacttacctacataatcatccatttcattattcgtatttaaatgcttttcattgatagaataccttaatcttacagccacaggacagaaaaggaaatggttaagagtgaatgtatctcacatctcttacagaaaacatggccaatttaagatttttggtaagaggccaggctgtgaagcctgttaagagcttgatctcaaagctgagccacttaaaagctggttaatattaaacaagttaggactcaactttttcatctctaaatatggcctaataataccatatgcttcatagaattgtaggggagaaatgatttcttagtagagctcgtggtacagtgcctggaccatagtac

SEQ ID NO: 372951 - DNA, 618 bp, Homo sapiens
atctttattagttttccaatgttgctataacaaattgctgtaaacctactggcttaaaacaacagaaacgtattatctcacactttctgtaggtcagaagtctgagtggactcaactggatctactgcttacaatctaaaaatattaaaatcaagattttacaaggactacaatggttaccggaggctgagggcaagaatcaacttccaagctcattcaagtagttgaccatatttatttcctyatgattgtagggcaaatgtccacatttccttgttagctgtcaggtgaaggctggttttgctcctgaattctgcctgcattcttaagctttctatgtgtcttcctccagtgagagtgagttgagaacatgctttaattctctctgacttcagctcctgtctcatctgactaaagggaaaataggcaaatatagttacaattatctaacagactagaattactgggcaaaatattagtaagtatataagagaaattaatgatactatcaactacattaatttaattgtgatttatagaacacgacattcaaaatggcaatttacacactttttttttttcaggtgaaatgttcaccaagacagacaaatgtagatg

SEQ ID NO: 372952 - DNA, 545 bp, Homo sapiens
attttcacaggtctcacccgcacttaattatgggaggggattatatataaggtgtatgccatgggttattttgggaccagcttagaattctgtgcacagactgttttgccatataccaaaagattagcccagagtcatttaaattttttggggggtgkatagggggaatatcggtgatggaaagaactcacatgtaataaaacaaattgcttttatctgatattctggtcttcagggcagattctctgttcagatgttatgacagcattgatctggctttgacctgttctaatttccttttatcactgcctttagtttctctttttaaaaatgtatttgcttttcatttttacctttaaaaattgacataaaattgtatgtgacaaatgcatacaattttatgtcaatttttaaaagtatgtctaagagaaatctaactccatgtttattgcagcactattcacaatagtcaagatatggaataaacatgagtctaccaaaggacaaatggataaagaaactgtgacatatatacacaatagagt

SEQ ID NO: 372953 - DNA, 516 bp, Homo sapiens
cctgcttcctgtataggcactaagacataaaaccatatgaaaatagcaaaaacattctttagaaattaattataaaaaataaccagaaraggtatggcttatatttgcttattttaaagcaaaacttataagtttactgaatgctaaatatgtaggcagttttgtttaaagcagacaaggtagaaaggaaaccaacacatttgggcagtaacctagagctgtagttaaacctgtggatttcagactaaaagaaggctgtttttgaatcctatcattagctgtagagccctgggcaaatttctaaacttctataaatttcagttgccttatctgagatacatagaaatgataatagtgtttctttcataatgtcattacaacgattgagctttaaggcttagtatagtttctggtaagtgcatataattctgagagcacttctttatgcctgtattatctcatttaaactgcacagtaaccttgtgaaaaaccttgtatttagaatacattacctga

SEQ ID NO: 372954 - DNA, 380 bp, Homo sapiens
tcacagaaattcaacttcacacaggctgtcagaaaatccctttcttaaggtgtgacaattaatacctgatttcaagacttctaaagatacagtaatcaagatgtgtggtactgaataactgtaggcaaagaaattaattgaacagagacaaaccaacacatgtatggacaattcaatttcaacgaagtgaaaagkcaatttagtggagaaaagataacctttctatgtagtcattataaattccattgaatggatgaagaaactgaaatttgtccatattgtcatagttggtaagtgatgttgtcagacctgtttaacatttatttctttataccattccaggggagaagaggagagtaaaagtgaagaagaaagaggca

SEQ ID NO: 372955 - DNA, 562 bp, Homo sapiens
gagttgcttttccagctgtaaacttcaatggccagtgacacctttgtccaagttttgttccactgactaggtctggcagrctgtgctcagctagcactaccagcctggacaccaagcctgccaaggggaagccaggtgcagacaggcaaggagtgcatgagcaagtgagtgcagggtgttgcttctgctgctggcagggtgggcagacctacattctaacagaagcgctgtccgtgcaagcctgttgctgagtctcatgcaccacaatcggctcccactgtgggtgcccatgtctggatgagaggcatgtggtggtgcctggaagcttgcagatgccagaaaccacagagcatcaaagaggatgtcacagatgtggctgggggagtccctgtgtttggaatccccaaagggccacagctcttctctccttgtcacccacaatgtggctagtggggagtgtgtttcagccctgtttttgttacagctctttcagtctcatgatttggtgtgtcccaagttcttgtccctcgtccaggaagaatgaggtatgtggacaactgga

SEQ ID NO: 372956 - DNA, 602 bp, Homo sapiens
atagcttattgtggtttaaaattacttttccataataatgttaagtatcttttaatagcttgtaatctatacctttctttggaaaaatgtgcttagtaggatgaacagttctcaatatttttaattatatattcatgtatgtaattaaattatacatctgttataattgtgttttaaaaggtcatcaccaaattaatttttgtagttatcaaatagattttattatatttggtgtaacttcttctgatgtaatcttttttataggttatataacaaagaaatgacaaataaaagaccttcatgagacagtgaaaaatggtatctcagttacctaaatgtatacaaggtttacacttaaaattaaaacaaaaacaaaatagttgttatgagaataaaataattatttctgggggctttgagataattggagttatctgaaactataaaacatagaataaaattatttttggtggcaatatctatcrttaaatcaataatttagtttatagaccttacctttgataactaacatatgtaaaaatttatcagagaaggcatgcaggcctggcatatacttttgtataaaattccggtattctaga

SEQ ID NO: 372957 - DNA, 578 bp, Homo sapiens
ctgaggcttgtgtttatacagcttgagtgctatgaatggttttacattttaaaaggatatattcatataatctgtatacacaacccctatatgcacacacatacacacacacacacgcatacacacacaccctcatatatcatacacacacacacacataaatgataaatatcagtatgtggccagcaaagattaacatacttatacaactttttacagaaaaaaaagrttaatccctgacttaaaagataaataaaaagtaataaaaaggacaaattactgaaacatgcaacaatgcaagtatatcaaataaacattgtactgagtgaaagaagccaggcacaaaagtttatactgtaggttatgtgtgacactctagaataggcaaaagcaagtgaacgaatttaacatcaacaataataaaataaactgacaagtgcctcctaatgttatacattgaaaaggagacaacattatgtgacattagtgccaaaaatgtataatgaaaatttaattatgaggaactagcagaattatcagaaaaatgttgaggaacattctacagaaaaattagcttg

SEQ ID NO: 372958 - DNA, 624 bp, Homo sapiens
caatgggtagctggggaaaaatgctgcaaaagatatcaatgagatagcagattctgaatatagatgctaatttatataatgactgtttctgtagctaaatgccagacaatgtagaaaatttatgctgaggtatatctaagggttaaaaatctttgagaaagggttgggcatggtggcttacacctgtaatcccagcactttgggaggccgaggagggtggatcatgaggtcaagwgatcgagaccatcctggccaacatggtgaaaccctgtctctactaaaaatacaaaaattagctgggcgtggtggtgcatgcctgtagtccaagttacttaggaggctgaggcaggagaatcacttgaactcgggaggcagaggttgcagtgagctgagatcacaccactgcactccagcctggtgacagagtgagattccatctcaaaaagaaaaaaaaaacttgagaagatgaacttccagtcaaagaaaccatacaatacatttaaatatgttaagtttgcacagcacttaagagccagttatgtatataattttcataaatgataaaattcatataattcagtactttcttgatggtgttgttcttgtttagaaattctcattgca

SEQ ID NO: 372959 - DNA, 624 bp, Homo sapiens
caatgggtagctggggaaaaatgctgcaaaagatatcaatgagatagcagattctgaatatagatgctaatttatataatgactgtttctgtagctaaatgccagacaatgtagaaaatttatgctgaggtatatctaagggttaaaaatctttgagaaagggttgggcatggtggcttacacctgtaatcccagcactttgggaggccgaggagggtggatcatgaggtcaagagatcgagaccrtcctggccaacatggtgaaaccctgtctctactaaaaatacaaaaattagctgggcgtggtggtgcatgcctgtagtccaagttacttaggaggctgaggcaggagaatcacttgaactcgggaggcagaggttgcagtgagctgagatcacaccactgcactccagcctggtgacagagtgagattccatctcaaaaagaaaaaaaaaacttgagaagatgaacttccagtcaaagaaaccatacaatacatttaaatatgttaagtttgcacagcacttaagagccagttatgtatataattttcataaatgataaaattcatataattcagtactttcttgatggtgttgttcttgtttagaaattctcattgca

SEQ ID NO: 372960 - DNA, 548 bp, Homo sapiens
ggaatattttatttcagtatttttaattttaaatatttttaaatatttttcccatctttcacaatttctttttagtctaaagcattctaattaaattttgtatattggtcttatttctaaatagcattattatacttactaatgaaaaaattacgtagaccatatattatctaaagataattatggtttgattttttttccttttaatctcaatatttttcatttgtttgtttatcttggattttctattttggttcatttgattatgctaagtagataccctgttataatgtgaacaaaactagtgatagcaatctccrtgtactggttcctgaaagaaccattgacagagcattttctatatttacaatgctccaataggtgattgttgctaagtcacattcataaaagaacactaccaaactgtctatcaaagatgaaatgagattcacattgtatggaggtggtattctccaatggagaaagttcataattactgttgtgagaactgtagtgtttagaatgaaatcaaatagattaaataacaa

SEQ ID NO: 372961 - DNA, 610 bp, Homo sapiens
agacaagtctaaaaagtgtaagcattctaactaaataataaaccataggtactctggtaaaatcttcaataaaaatccaaatactgactagaaagtaaaatgaggtagcagaaactgtttttccattaggtgagagcatgccctgtctaatagcgttaacagtgatgtatgtctcccagtgatagaatctagtggcttaggagaacagctgaagctgttagaatcacccaggccacatcttgaaggctttgctgcctagaaattccytccaccagataccctaagtcatcactctcaagttctaacttccacagatccctaggacatcgacagatgcagctaagttatttgctaagacatagcaaaagtgacctttactccatgtcccaataagttcttcatttccatctgagacctcaacagcctagaattcattgtccatatcactatcagcattttggtcacaaccatttaaccatttaaccagtctgtaagaagttcctaactttccctcaccttcctgtcttcttctgagctctcagcacacttacctactctacctgttacctaattccaaagctgcttccacattttcaggtgtctttatagc

SEQ ID NO: 372962 - DNA, 610 bp, Homo sapiens
agacaagtctaaaaagtgtaagcattctaactaaataataaaccataggtactctggtaaaatcttcaataaaaatccaaatactgactagaaagtaaaatgaggtagcagaaactgtttttccattaggtgagagcatgccctgtctaatagcgttaacagtgatgtatgtctcccagtgatagaatctagtggcttaggagaacagctgaagctgttagaatcacccaggccacatcttgaaggctttgctgcctagaaattccttccaccagataccctaagtcatcactctcaagttctaacttccacagatccctaggacatcgacagatgcagctaagttatttgctaagacatagcaaaagtgacctttactccatgtcccaataagttcytcatttccatctgagacctcaacagcctagaattcattgtccatatcactatcagcattttggtcacaaccatttaaccatttaaccagtctgtaagaagttcctaactttccctcaccttcctgtcttcttctgagctctcagcacacttacctactctacctgttacctaattccaaagctgcttccacattttcaggtgtctttatagc

SEQ ID NO: 372963 - DNA, 511 bp, Homo sapiens
agtgctttgttcagaggcaatgctgtgtggaataccatgatggtggaaaaggcattccatcagtccacggatggtagttttaggagaagcattgagtgcaagataggcaaacccatgtccagggtaagtgtctattccagtgaagacaaacctctgccctttccatgatggaagaggtccaatataatcaacctgccatcaggtagctggctgatmaccccgaggaatggtaccatattgggggctcagtgttggtctctactgctggcaaattgggcactcagcagtggccatagccaggtcagccttggtgagcggaagtccatgttgctgagcccacgtgtaacatccattcctgccaccatggccactttgttcatgggcccactgggtgatgacatggatggctggggaaagaggctgagtggtgacaacagaacgggtcatattatccactcgattattaaaatcctcctctgctgaggtcacccgctggtgaacattcacatag

SEQ ID NO: 372964 - DNA, 467 bp, Homo sapiens
gaaggtcaaactatctctgtttgcagatgatatgattctataggtagaaaacctcatagtctctgctcaaaagctcctaagtgtgataagcaatttcagcatagattcaggatataaaatcartgtacaaaaattagttgaaatgttatatgccaacaacatccaagctgagagccaaatcagaaatgctatcttatttacaatagccataaaagaataaaatacctaaaattatagctaaccagagagtcaaaagatttctacaattccaaaacaccactgaaagaagtcagagatgatacaaacaaatggaaaaacaagtgctattcctgttaaactaccacgaaattcttcacagaattagaaaaaaaatattataaagttcaaatggaacccaaaaagaacacaaatagccaaggcaatcttaagaagaataaaaaagccatagtcaccatattacccaactt

SEQ ID NO: 372965 - DNA, 467 bp, Homo sapiens
gaaggtcaaactatctctgtttgcagatgatatgattctataggtagaaaacctcatagtctctgctcaaaagctcctaagtgtgataagcaatttcagcatagattcaggatataaaatcagtgtacaaaaattagttgaaatgttatatgccaacaacatccaagctgagagccaaatcagaaatgctatcttatttacaatagccataaaagaataaaatacctaaaattatagctaaccagagagtcaaaagatttctacaattccaaaacaccactgaaagaagtcagagatgatacaaacaaatggaaaaacaagtgctattcctgttaaactaccaygaaattcttcacagaattagaaaaaaaatattataaagttcaaatggaacccaaaaagaacacaaatagccaaggcaatcttaagaagaataaaaaagccatagtcaccatattacccaactt

SEQ ID NO: 372966 - DNA, 600 bp, Homo sapiens
tgttttatcttatggtggttgtattctagccattatcctatttgggaaatggccactgccttaaggaaattcgggcactgtaatttcatctttgctggagtgtgctgttatttattagataagtctcagtagaatattttgtaacagagttctcctgccacagtctaaaaacctgataagacttccccatacaacacctttgtatagattttttgttttgacagggtttcactccatcacccaggctggagtgcagagccttgatcatatctcactgcagcctcaacctcctgagcttaaaggatcctcccatctcagcctcctcaataggtggtactattggtgcatgccactgcacctggctaatttttttttttttttttttkgcagaggcaaggtcttgctttgttgcccaggctgctggccttgaactccaggcttcaagcaatcatcccatcttggccttccaaaatgtggggattacaggcagcattttggaaggtgacctggataggcctagatcttattgtttaatatacagaaataatcatttttttaatcatgcaacctgtaaattatgtaaatctctattaaatgata

SEQ ID NO: 372967 - DNA, 582 bp, Homo sapiens
atattggcatgggtaaatactccctttccaaaagggagaaattggccaaaacaaagggtctacaaaccctatgcaagtccaaaacccagcagggtagtcattaaactttaaagatacaaaataawctcctttaactccatgtcttacatccaggccactgatgcaaggggtgggcttccaaggtctggggcagctctgcctctgtggctctgtatggtacagcccctacagctgctttcatgggctggtgttgagtgcctgtggctttttagggtgcacagtgcaagctgtcaggggatctatcattctggggtgtgaaggatggtggccctcttctcacagctcctctaggcagtgccctagttgagaatctgtgtgggggcttcaaccccacattttcccccagcactgccctagtagaggttctccatgagggctctgtctttgcagcagacttcttcccggacaaccgggtgcttccttacatcctctgaaacctaggcggaggctcccaagcctcagcaattcccctctgtgcactcacagtcttaataccacatggaagctgctgaggattatggc

SEQ ID NO: 372968 - DNA, 567 bp, Homo sapiens
attcaacaatgccttatgataaaaaaaactctaaacaartgaagaatagaagaaatgtacctcaatgcaatataagccatatatgacaaacccacagctagcattattctgaatgatgaaaagctgaaaaaaaaaacaggaataatacacagatactcattcacactactgttattcaacatagtagtggaagttttagccagagcaattagaaaaatgaaagaagtaaatggcattcaagttgaaagcaaggaaggcaagttatctcagtttgcagatgatatgatcttatatagagaaaactctgaagactccactaaaaaactcttaaactgataaacttagtaaagttgcaggataaaaataatcaacatacaaaaatcaataacattgctatatgccaataataaactagctaaaaagaaatcaagaaagcaatcccatttacatacaatactattgaaaaatctaggaatgaatttatctaaggagatgaaatatctctacaaggaactctattaaacattgaggaagaaaattgaacagaacaaaaaaatggaaacatgt

SEQ ID NO: 372969 - DNA, 567 bp, Homo sapiens
attcaacaatgccttatgataaaaaaaactctaaacaagtgaagaatagaagaaatgtacctcaatgcaatataagccatatatgacaaacccacagctagcattattctgaatgatgaaaagctgaaaaaaaaaacaggaataatacacagatactcattcacactactgttattcaacatagtagtggaagttttagccagagcaattagaaaaatgaaagaagtaaatggcattcaagttgaaagcaaggaaggcaagttatctcwgtttgcagatgatatgatcttatatagagaaaactctgaagactccactaaaaaactcttaaactgataaacttagtaaagttgcaggataaaaataatcaacatacaaaaatcaataacattgctatatgccaataataaactagctaaaaagaaatcaagaaagcaatcccatttacatacaatactattgaaaaatctaggaatgaatttatctaaggagatgaaatatctctacaaggaactctattaaacattgaggaagaaaattgaacagaacaaaaaaatggaaacatgt

SEQ ID NO: 372970 - DNA, 503 bp, Homo sapiens
aaggaataataatattttagcttatttaatttattttgatatttggcatactccatgcagaatctatcatgataaataaatgatttttggcaggctgactacataatctttgtgactagagaaagaatcaactttgatcctctgtctcaattaggactctattgaagtggtactgaacagttgagaaagaaacattaaartaatattctttactcccaaagatagatgcttgagccaggctgtatttataagtgtgtagctccaaccataaaaccattttctgcatccatgcaaactataatggatttacctttatcaccattgttaaggaaattattttgtttctcccccttctagttcttctaagctccttttagggtaactctttcaagcttttcaaactactctgtttgacagtcggtgaggttataaagataaaaccggtattggtattcattcacattttctagattagtgttttgcaaatgtagtatataatttca

SEQ ID NO: 372971 - DNA, 609 bp, Homo sapiens
acagacatgagccaccacacccagccaaagatatgtatgttcaaaaataagtcattaacaacttttgcaaaggaatcagtaacaatgaaggccataaaacacaacttatctgtggcctcctcactgccttaataaaagaggtttcgttaaatgcttttcagctctatgaacatgtaaaaatccatgtgtgactacagatggtagcctgggctcagaggtacctgttgtttgagtttctgtagaaatagagaagcttgccatttaaaaaaatactcatgtacatgggtatttggaaatcaaacaatgagaagattcttaatatgtgagttttcctcttagmggggataagttgtgtttttgcatctgtgaatggcaaccattgtaatgaaccataaaatataaattctcaagtccgtcagataaaaattatacctgaatttaagacatatttctaatgtttacataataaatttcattttttacagatatttttgcagtcagtgtgtgtgtttgattaaataatgtttaaccaatttctaacatagttttcttctttagaacattttttgaataattaataaaatttttagttacattcactgcagcctc

SEQ ID NO: 372972 - DNA, 584 bp, Homo sapiens
attttaaaaacttgtccccagactgaaaaaaacaagcaaaaagattttgaaagaatgataaaaatacagattcctgggccataccttcaagattctgattcaggaaatctggaatgggcctaggatttgccttttcacccaacatgttaggtaactctgatgcagaagatttaagaaccatggcttgagaatcattagtgtaagcagtagtccctgttcctaatatactgttactaatatactaacaatatgcagcagacaaaacatcaaacattttggtataaacatactgtaggtagagaacataactacaaagggaaaagcaactggtttttaccactgacttgactctctttttctccctactcctttaaaacccttctgtttctctttttcctttctttcacagactcctcaaagttatagctgtttgagaagacttaaaatacctagcagaaagmctccaccacttcaattcttttgaattattacttttattaagtttgggtaccaaaactgatactaaaatataacttcaaattattaattaaaacaacagataaaatatttaattttcaaaaaaa

SEQ ID NO: 372973 - DNA, 609 bp, Homo sapiens
gacattaaaggatatatgtgtctagtaatagcagatgcatgtttctgcccactaaagaaatggttgcagcttttaataaatatggctaagggaatgatgttaagattacgtgtgtgtgtgtgtgtgtgtgtgtgtgtgtgcatgcacatattgttctggatttcaaatgagtatacaaaattatcattatcttacaccacttgcattgggatcttcagtttttccttcaagaagtgaattattaataatatatttaacttttagagtattattgtggtaggactcgccagtttcttgctacaacatctattcatccctttctctttagaaacaaactagaatttttatattgcttcccataataaaaaacatattgccttccagattttgcagctaaatttggctatgggactaaattctggccttgagttgtttaagagagatacttgtgagagttctctgaagattggtcaaaggaaactaactcagatggaagatccatttgcyctcctgcctttcctcttagcttttagcctgaaaatcagtggtgatggctggagagccaatagccatcttggaacacgacgtgattctgaaggtgggaagcaa

SEQ ID NO: 372974 - DNA, 639 bp, Homo sapiens
ttcaattaatatttttgagctattatgggttacataagttatggaggggctttgttatttagtcaactcatgtccaatatcacaggggtcagttgtgaatttggaaaaaatagaagaaaagaaaaattaaagcaaatgacaaaagtctaaatattttcctcaaataattgtcttttttttccttaatgtcttgtgtttacagactggaatttaagccgcatttttctagatggcaccagcctattggtacatatattaatgtcaaacagtaatgctcaaattacacgggttcacagctgtttctacataatttcttaagtattcttgccacgaagtctccccctcttttctgggagacctgggggaagggtctcacatgtccttatgaccggtttgctcacattactcacttactagccacccttgtgcttacaagatccttcatgtaggagckccaccattctgtcttatgtcaggatcttccagtagaacactgctgtcccgtaataaggccatatacatgttctttctaggttacaatttcccacactgctaactgatgctgcattcactttaaactgcaccctactggggactgacttgttctatagaaatgaggtgactgtttctctagccaac

SEQ ID NO: 372975 - DNA, 523 bp, Homo sapiens
aaaattgcaacacagataaattaacttgtgtcattaacctcagctaatgattttaaattgaggtctatctaaatttagagcccatgctgtttcactattccggtccaattggactttcagcaagcatggaagtgatctttctctttggctctccaatgagattgtcactagccacatgtgactattgaacacttgaaaggtggctaatgctactgaggaactgcatcctaaattctattgaattaaaatacaaatttaaatgatacatatggctaatggctgccaaactggactgcacagccatcactgaactttcttattctgaccttataagcaacatataaagagaactttatgaaaaattgttaaatgagctcacttattaaattaactcaattttaaataaattgtattattcctcataagttaatcctttaactcattataaacyagaatttccaagtaaagtaacccagtgatttataatgcagaactcaaaaatttttcatttgaaattgttgct

SEQ ID NO: 372976 - DNA, 536 bp, Homo sapiens
gtctggcatttcccctgcttgcacgtctctctcctgccrctatgtgaagaaggtgcctgcttccccttcaccttctgccatgattgtaagtttccgtggcctccccagctgtgtggaactgtgaatcagttaaacctctttccattataaattacccagtctcaggtatttctttatagcagtgtgaaaattaacacaaatttgaagcctggtgttcaagattctaagaaataataatagtagttaatatttattgagtgttttctgtatgcaagatcggatactcttctaagtgctttctgtctgtaaactcaatcttcacaataatcttctgaagtagatactagtatcatcatttttatagaaaaacagacacccagaaagtttaagtattatacccacattctcccaagagccaggcatcaaatgcaacctgttctctactgtgtctttccaaaggacagcgaaggtgggaagttggcctcaaactcagaaaagacagcttagaagaaagaatggatgagaatttcagtgta

SEQ ID NO: 372977 - DNA, 536 bp, Homo sapiens
gtctggcatttcccctgcttgcacgtctctctcctgccactatgtgaagaaggtgcctgcttccccttcaccttctgccatgattgtaagtttccgwggcctccccagctgtgtggaactgtgaatcagttaaacctctttccattataaattacccagtctcaggtatttctttatagcagtgtgaaaattaacacaaatttgaagcctggtgttcaagattctaagaaataataatagtagttaatatttattgagtgttttctgtatgcaagatcggatactcttctaagtgctttctgtctgtaaactcaatcttcacaataatcttctgaagtagatactagtatcatcatttttatagaaaaacagacacccagaaagtttaagtattatacccacattctcccaagagccaggcatcaaatgcaacctgttctctactgtgtctttccaaaggacagcgaaggtgggaagttggcctcaaactcagaaaagacagcttagaagaaagaatggatgagaatttcagtgta

SEQ ID NO: 372978 - DNA, 536 bp, Homo sapiens
gtctggcatttcccctgcttgcacgtctctctcctgccactatgtgaagaaggtgcctgcttccccttcaccttctgccatgattgtaagtttccgtggcctccccagctgtgtggaactgtgaatcagttaaacctctttccattataaattacccagtctcrggtatttctttatagcagtgtgaaaattaacacaaatttgaagcctggtgttcaagattctaagaaataataatagtagttaatatttattgagtgttttctgtatgcaagatcggatactcttctaagtgctttctgtctgtaaactcaatcttcacaataatcttctgaagtagatactagtatcatcatttttatagaaaaacagacacccagaaagtttaagtattatacccacattctcccaagagccaggcatcaaatgcaacctgttctctactgtgtctttccaaaggacagcgaaggtgggaagttggcctcaaactcagaaaagacagcttagaagaaagaatggatgagaatttcagtgta

SEQ ID NO: 372979 - DNA, 536 bp, Homo sapiens
gtctggcatttcccctgcttgcacgtctctctcctgccactatgtgaagaaggtgcctgcttccccttcaccttctgccatgattgtaagtttccgtggcctccccagctgtgtggaactgtgaatcagttaaacctctttccattataaattacccagtctcaggtatttctttatagcagtgtgaaaattaacacaaatttgaagcctggtgttcaagattctaagaaataataatagtagttaatatttattgagtgttttctgtatgcaagatcggatactcttctaagtgctttctgtctgtaaactcaatcttcacaataatcttctgaagtagataytagtatcatcatttttatagaaaaacagacacccagaaagtttaagtattatacccacattctcccaagagccaggcatcaaatgcaacctgttctctactgtgtctttccaaaggacagcgaaggtgggaagttggcctcaaactcagaaaagacagcttagaagaaagaatggatgagaatttcagtgta

SEQ ID NO: 372980 - DNA, 505 bp, Homo sapiens
tgtgtgcttgtaataaaaatagctctcaagtatttaaacatgtccaactattcctatggtgaagaaatacccgttttaccaatgaatactttcaattcagagactaatttgcagaggttatacatttataagtgatacaataagtatatagcatagcaatagcaacaatctgtttaagaattaaaggtagttaaaaaaaggaaccgatccagaggttgagacaaaactggcagaatctgcaactacattaaggaattcggtgtttacatccattctcgaaactattccmtgccagttaaggaagtcggtgctttttgattgttttttaattttagattcgggggtacatgtgcttgcttgttacataggtatattgtgtaatggtggggattgggcttctggtgtacctgtcccccaaacattgaacattgtacccaatagctaatttttcagccctcacccccttcccaccctctccctttttggagtccccagtgtcttgtta

SEQ ID NO: 372981 - DNA, 554 bp, Homo sapiens
ttaagtttatgtgaatccttctgtgtcaggtgagtctcttgaaaacagcagatacttggttggtgaattcttatccattctgccattctgtaacttttaagtggagcatttaggctatttacattcaatgttaatattgagatgtgagttactattctattcactgtgctatttatttcctgaataycttgtggggttttttttttcatagtattgttgttttataggtcctgtgatatttatgctttaaggagattctattttggtgtattttgaggatttgtttcaagacttagagctccttttagcagttcttgtagttctggcttagtagtggtaaattctctcagcatttgtttgtctgaaaaagactatcttttcttcatttctgaagcttaatttcactgaatacaaaattcttggctgataattgttttgtttaaggagtctaaagataggaccccaataccatctagcttatagggtttctgctgagaaatctgctattaacctgatgggttttcctttataggttacctgattttttttgcctc

SEQ ID NO: 372982 - DNA, 647 bp, Homo sapiens
caaaccccatcacgtgaattagggatagggaggctcaaggaggttaagctgcccactatgtcctgtggccccgccctgcagccccgtattccacctccatcgtagcatgggtcacgctaccccagatgatttgcttaagctccgaggacgagagccagattgaattcgcctttgttatcccaacatttcacacmtgattggcatggagtagacactccaaaaaatatagaatgaatgaaagttttgtccaagatcaaacagctaggaagcagccaaactataattcaaacccagatcttcctgtatctcaacccagccccacacccttcgctctcctccaggaagccttctctgacttactcagtcaaggcagcttccccttcccccaaccccctcagaatcctgggcatttggatgtgttcctatccccgtctcccctgcactctctgaaggcaggaacttgggatagggtctcagcttggctctaatcctgctccttccccagaaccaggaggagctctatgagtgtgggatgcccaggctgagggtggagggctcaggaaggagggcctcacccaaatcagtggtgtcttcctgcctgggatcagccaccctgcctcatcgcccctgctcatcgggccaggggc

SEQ ID NO: 372983 - DNA, 585 bp, Homo sapiens
cagccgtcgtgctgttgctgagctggggacagagaagaggcgggtaggggaacactgagcccactttcctctctggctccatcttcctgtccacctgcagtcgaggcaccagggggcctctgggctgggagccggaacacctgggcttgccagacgccttagctgcaacgactgatcccttcttcctgggccctggcccaaaggcagcccctgatcccccaggatgcccatggtccccccgccagaggtagcaaaactgactctgtagcccattagattggggcctgaggctgggagcctgcagtatgagaggaaaagaatgctgagatccggaatttctgtttcccaaagaacaagaagggaagaggtttcaactgcctcaggaagctttgggccggttagcaggaagaccttcctctgtctstagaccatcagaccttggtgcaatgagaggcctgtggtctttcttcctgaggttaaatggctcccagagacagggtctagggacttgggtctgggggacagtcctagtgtgcccctttccgctatgagtccggaatctacctctttccctaacccttgtct

SEQ ID NO: 372984 - DNA, 616 bp, Homo sapiens
caccttggcatcaaggtgggggagacaagtccgtgtcctgcccgccccctcctcttggttctgaaatgtccccatcatctcagcctgcttgctgtatgtcatctcacaactagcctggattctttctgcttcacttgctagcagggacctggatcaattcagaaagaaccacagtgggatcaggagttggagacagtctgtaaagtggccctacagatttatccaaacccaaatgatgtccagaggcctttaatcaatctcttggtgacctgcgagttaagcagacttcttaacttctgcaagaaaaaaggggggggggggtgcmcataacagctaatggtcatctattgaaaccatgaaattcaaccagtgttcttgaaagaggtaccctaatcctgctaattccacaaagctaataccggatttattaatttgaagtccccacaccccaaatcctctctgattgtctcagtcatcttggctgtatgtcttatttggcccaactcttttttttttttttaactgtccttcctctttttgtgacctatgctgatttacattttgagtggagtgggggagacatcgtatttggacctcgtgaaggagctgagtaaga

SEQ ID NO: 372985 - DNA, 609 bp, Homo sapiens
aaatgagtaactgtgatcaaggataaaatcacagaggacaaataagttgtcaaaagctataccccatgaccttcagatataaaaccatactccattaggtgttaggtggtcaccaatactgtgtgtgaccacatagagtatgcagttttagttcttcatccaggaactggaatggaatgactgacatagatctgcagcctggcaagtacgtaagggcattctgtgtaaggctraagtgtaaggccttagacagcatgccaatctgaactggtggaccttgataaaatcatttcgatctacaatgatgccactaatctatttaattggcatgctgcttccactatctaccccctccttaccacaagtcggtgagctatgatttatgcctcaagcctgtcttcaactgtataaaatgatattgttatcgatttgatgtttgtgtctcctcaccaaaattcctatgttgaagccctaacctccgatgtgagaatatttggagataaggccactgggaagtaatgaaggttgtatgaagtggtgagggtggggcctttaatctaggactagtaaccttataagaagaataagacctcttccttttttcaacag

SEQ ID NO: 372986 - DNA, 572 bp, Homo sapiens
tctgtccttattaagtttcaaggtcctttccccgctccaaggaaatgagtaactgtgatcaaggataaaatcacagaggacaaataagttgtcaaaagctataccccatgaccttcagatataaaaccatactccattaggtgttaggtggtcaccaatactgtgtgtgaccacatagagtatgcagttttagttcttcatccaggaactggaatggaatgactgacatagatctgcagcctggcaagtacgtaagggcattctgtgtaaggctaaagtgtaaggccttagacagcatgccaatctgaactggtggaycttgataaaatcatttcgatctacaatgatgccactaatctatttaattggcatgctgcttccactatctaccccctccttaccacaagtcggtgagctatgatttatgcctcaagcctgtcttcaactgtataaaatgatattgttatcgatttgatgtttgtgtctcctcaccaaaattcctatgttgaagccctaacctccgatgtgagaatatttggagataaggccactgggaagtaatgaaggttgta

SEQ ID NO: 372987 - DNA, 572 bp, Homo sapiens
tctgtccttattaagtttcaaggtcctttccccgctccaaggaaatgagtaactgtgatcaaggataaaatcacagaggacaaataagttgtcaaaagctataccccatgaccttcagatataaaaccatactccattaggtgttaggtggtcaccaatactgtgtgtgaccacatagagtatgcagttttagttcttcatccaggaactggaatggaatgactgacatagatctgcagcctggcaagtacgtaagggcattctgtgtaaggctaaagtgtaaggccttagacagcatgccaatctgaactggtggaccttgataaaatcatttcgatctacaatgatgccactaatctatttaattggcatgctgcttccactatctaccccctccttaccacaagtcggtgagctatgatttatgcctcaagcctgtcttcaactgtataaaatgatattgttatmgatttgatgtttgtgtctcctcaccaaaattcctatgttgaagccctaacctccgatgtgagaatatttggagataaggccactgggaagtaatgaaggttgta

SEQ ID NO: 372988 - DNA, 634 bp, Homo sapiens
gcttcaggggaccaattctattgagttaattaatattgagtgttgctagccaattagcagccttctcccttattgcagaaaggttgctatgggacatgccgggcaaagctggcttcccctacacctctgctttgactccttctcccttccatgacagcaccattgatgaggaggtccaaaggcatagaattccccaccaccacctgcctgcatcctgggccctttcactatccatttagacatggcactcaaagtgtgggcggcagatcagcagaatcggcatcactggggatgcttattgaaatgcagaatctcaggccccaccctagacctagtgaattggaatctgcaatttaacaaaatcccttgtggtccatatgcacattaaaatttggaaagcgctgatgtacaagacccatccaaaaccttggccctcacaatttcttgcccttcttaatccagaagcttgctgctcatttcccttactgatcrcagacacccatgaacacatctagaaacttgcatttctccaccactttaattttaccagcctgtaatgcactctaacagttttcaaattccaacatgcaaatctctcatatctaacagagacctccagtggattggccaggcc

SEQ ID NO: 372989 - DNA, 574 bp, Homo sapiens
ccatcgttttttataataaattttcctctggttttaatacaatacactttctggaaagaacctatcaaccattcatactttagtgtgaatttaggtcacagtgtcatataatcttacagtggcaacagaccttgaattgcatctagttttacattccaccaaatgcagagattctctgatttgtgactctaacatggccacctagactgtcgtttaactcctcccatggcaggaaactcaccatgtgccactcctccacatccaggtagctctaattgctagagtagaatgaactgaaacttgcctctctgcagcttcctaccagcagtcctcactctcctctctagagcaattacaaaacaaattgtttcccccttcccatgacagcctttcaggtccatgcgagctctcatgacccttcttttctctaggccgagtgtcctattttctttacatattcccaataggactagttttrggttctcccaccatcctggccacctaggcatctgtatacgctccaactttaaaaattcagcattgaacatattccaccaggcagggtctaccaaca

SEQ ID NO: 372990 - DNA, 524 bp, Homo sapiens
tcatagaaaaaatgctaaaagggaagagggaagatgtgttagagattcctgccaggatgttattaaagaggtagaaaaaatgtgtaatgagcatatttattatgtgaacgtaaaggccagtacttaagctccttgctcttaagtaggctaacatttctcctgtttgcattatgaattttcttagcaactcccgtygcctttatgataaataaatacagacacatttttaaaagccgttgttaataattaagggactgccaagcccccagtgagttcactgcttgtcactggttatagcaaatgctctatagtgagtaactctcacctacaatcgtggacaccctttggtgaccatgccctttcaaaggttcatatctggttgtttaatgtttgcaccgttgggaggggatgaaaaggacagctgtcctgcattaggttgttcatcgttctttgttgagcctttaagctacaagcactcatgattcccttttgcttttcctagcatgatattccagttgccattt

SEQ ID NO: 372991 - DNA, 591 bp, Homo sapiens
atcaaataccagtatcttcacatattgatcaactgttacatagtcccaccaattcaaaattgaattgcatatataccacatactcaaattttcartcttccacagcacatgaacaaatttattagggaaacagggctgcgaccaaagaaggtacagagtgcacacaattctgacagggagagccatgttcaagggctggctttctttaggaaacaattctactgaaaaacaacatggcactagaagtaatttaaaatgtccgagacataaatgcaggactgtgactctacgttgccattcagtatgctttatattagagcatataaaaactaacccccatctatggaatgttaagctaacacccaagacagtcaaagcctcccataattcaatatcccgcactatcttctggttgtaccaaaaaataaacagccagcaaatgactttacttcttaaaaagcatatacttaaaaaatgggatgaggtgggattccctcaaaaacgtttctagagctactaaaatacttgcatttacaaaatagttgataaaaatactcttctggattgtacaagaagggagacggggaccgc

SEQ ID NO: 372992 - DNA, 609 bp, Homo sapiens
cacacagacagaagagaaggccatgtgaagatggaggcagagattggaatgatgtggtcacaaggaatgctggagccaccagaaactggaagaggcaagaaacagattctcctccagagcatctggaaggagtatggccctgctgacaccttgattgtagccaagattttggacttctggcctctagagctatgagagaataaatttctattgctttaagccaataaatttgtgctaatttattgcaggaggcttagacaattaatayacaaactattagaattaataaatgtcattagtaaagttgttggatacaaggtcaatatacaaaaatcaactgtatttctatcagcaactaacaaataaaaattaaaatgttatatttataatagcatcaataaacatcaaattcctaggattaaatataataaatgatgtacaacttcaaaatattattgagagaaattaaaaatgacttcaacaaataaaaagatatattatattcatgaattggaaactcaacattgtcctaagatgtcatttcttcccagattaatatattgattcaatataatctcagtaaaattctgacagtattttttttgcaaa

SEQ ID NO: 372993 - DNA, 576 bp, Homo sapiens
tttctcaatcctggtttttgttcctcctctgatccaactatacttcctctccttgtggccatgaaataaccccatgatattacagtgactcctctcattatgtttagtttaagcaagctcaggtaggctgcccacagtctccaactaacacagaacatgttgccacaagataaagtcatatttaaaatgtgttgacaaatggaaaatgagaactgaaggctaggatggtgtctggggwgagagatgataccagtggaagccacaaggcccagtgaatttgctgctagcagccagcatacctggctttcagttttctagtggccaatgccaaggagcaggactctccagggatcagtggttctcaaccctgactgtatgttggggacactagtgagcttctgaaaaatacttccaggccctactccaagagacagtgatttaattggtctaggctggcatctgtatgttataaaagcttactagtgattctaaagtatggccagagtgaagcgccaccaagttatactattcacaatatgtagaaataaaagtaaacagataaaccaaacaaaaaca

SEQ ID NO: 372994 - DNA, 320 bp, Homo sapiens
ctaccactggctaccatcattccttctgagggctgctacctgtgaggtttcatctgtataacaagaccacttttgctagccaggcctcctcttctctccctcttacaatctcttttgccatgctccaatccccaattctttctgtaacctcaagatagcataaaagcatcaaccatttggccayttctttgagtctttatattggtatgactctcacacacaaatgtgcacataacaaaacttgtatgccttttttcctatttatctattatcagtgtgttttataaactaaaattgtcaaaacttcagggggaaaattt

SEQ ID NO: 372995 - DNA, 526 bp, Homo sapiens
aaccttagggactcagacactctccaaagggttaggtagagaacaaaagtcatattatctgttgtccttgtctccattcttcccgtggtccctgacctcagctaaactctccaactttytcaattataagacaaaagtctccttacatatttaaaaaaaaaaaaaaaaaggtctgatatggtttggctgtgtcctcacccaaatctcatcttgaattataacttccacaattcccacctgtcctgggaggaacctggtgggaggtaattgaatcatgagggaaggtctttcccatgctacgcttgtgatagagaataagtttcatgagatctgatggttttaaaaaggggagtttccttgcacaagctctcttctcttgcctgctgccacgtgagatgtgccttttaccttctgctgtgattgtgaggcctccccagccacgtggaactgtaagtccaataaacctctttcttttgtaaattgccaagtcctgggtatacctttatcagcagcatgaaaatggact

SEQ ID NO: 372996 - DNA, 472 bp, Homo sapiens
tgggaactcacattctcctggagaagatagaaaataaagcgggggaaagggataaataatggcacagtgtgtatgtgtgtgtgtttgtctgtgtctctatgtgtgtgtctgtgtgtgtgtgcatacacgtgtgtgtgcatgagtgtgttttaggcagagtagagtggtcatgaaaggcttctttgaggaggggttcagatcagagacaygaatgaaatgagaactagttatatgaaaattggtgtaagagcttcaaagtcctctcctccaacagagggcaacataagctgtatataagccaccctaacccctgaattccagaacttactgcctgtgaaattcacacatctctgagcatatcctgccttgagttgcttcttaccttttcaagcctgactagatgataagttctttgagggtagtagcttgatcttacttcataaaaatcacagattactggggcattgtggca

SEQ ID NO: 372997 - DNA, 472 bp, Homo sapiens
tgggaactcacattctcctggagaagatagaaaataaagcgggggaaagggataaataatggcacagtgtgtatgtgtgtgtgtttgtctgtgtctctatgtgtgtgtctgtgtgtgtgtgcatacacgtgtgtgtgcatgagtgtgttttaggcagagtagagtggtcatgaaaggcttctttgaggaggggttcagatcagagacatgaatgaaatgagaactagttrtatgaaaattggtgtaagagcttcaaagtcctctcctccaacagagggcaacataagctgtatataagccaccctaacccctgaattccagaacttactgcctgtgaaattcacacatctctgagcatatcctgccttgagttgcttcttaccttttcaagcctgactagatgataagttctttgagggtagtagcttgatcttacttcataaaaatcacagattactggggcattgtggca

SEQ ID NO: 372998 - DNA, 557 bp, Homo sapiens
gctccaaattctacatctactatgtatggatagttacctggtcatrcacaaattacttaccttccctgagcctcatattctctatctgtataataaggttaataatagtggccctttctaatactcagtgacattaagaattaagtgagttagtaatgagcacttaaacagtttctgacacataataaacatttcataaatgttaactattgtaattattattattctgtagctgtatttgttatctgtactgtatagcagattaccacaacctactagcttaaaacaactcacatttggcatcttaaaatcaatgaatgtaatgaccatatcaagaaaaaaggacaaaaacccatatgatcatctcaaaggattgcagaaaaaagtgtggaacaaaatctaacacctcttcatgacaaaaacactcaacaaaccaggaatagcaggaaacttctttaacctgatgaagagaatctatgaaagtcctaccaaaaaagctaacaccagacttactggtaaaagactgaatgatttccccctaagattagggtaagaca

SEQ ID NO: 372999 - DNA, 524 bp, Homo sapiens
atgtaataaaattaagaggaagaaaataaactttcatgaaatttatggtcagttgatgttcaataagattgccaaagcaattcacagggaaaaagtatactcttttcaacaaatgatgctgggacaacaggaaagccagatgcaaaagaatgaaattggaaccctaccttatatcatatgcaaaaattaactcaaaatgaatcagagacctaaatgcaaaagctaaaattattaaactgttaggagaaaatatarggataagtgttcatgaccttaaattaggcaatagattcttagatatgacaccaaaagcacaggcaacaaaagaaaaaatagttaaaaggaactttattaaaattaaaaacttttctatttcaaaggacaccaccaacaaaaagacaacctggagaatggggaaaaatatttgcaaataatatatctgataaagcacttgtattgagaatacctaaagacctcttaaaactcaatagtaaaatgacaatccagtttaaaaatgggtgaag

SEQ ID NO: 373000 - DNA, 524 bp, Homo sapiens
atgtaataaaattaagaggaagaaaataaactttcatgaaatttatggtcagttgatgttcaataagattgccaaagcaattcacagggaaaaagtatactcttttcaacaaatgatgctgggacaacaggaaagccagatgcaaaagaatgaaattggaaccctaccttatatcatatgcaaaaattaactcaaaatgaatcagagacctaaatgcaaaagctaaaattattaaactgttaggagaaaatatagggataagtgttcatgaccttaaattaggcaatagattcttagatatgacaccaaaagcacaggcaacaaaagaaaaaatagwtaaaaggaactttattaaaattaaaaacttttctatttcaaaggacaccaccaacaaaaagacaacctggagaatggggaaaaatatttgcaaataatatatctgataaagcacttgtattgagaatacctaaagacctcttaaaactcaatagtaaaatgacaatccagtttaaaaatgggtgaag

SEQ ID NO: 373001 - DNA, 553 bp, Homo sapiens
ctggaatatagaaagagattcattccaaatagtaaaaagggtatttatttgcaggaagcaaatactgtttgccacttagttttggaaatttcccagcttttctctaagggactcataagatttattctcaatttatgtagtatctttcctccaaatagctttataaattttttatcaagattgtattttgggaactgaaaactacctgatttytaccagattgtcacatttgaaaggaattttatgaaacccaaatgggattttttaatgtctatatttctttttcttaaatgggtttccaacgaaggctttcagattttctctttttttttttaaagaggaccttttatatacaatgtcacagccagaaatataacattcagtaagtgacattctattttaattcactttgacaaaataatgaactctacttgtaggagcaatagagccttgtctgacaaggagatgtccctggagttttgctataaatgaaaaaaaaaaacccccacaaacgtattcctttttaaaaaaaagtttttgaaagaatggcaag

SEQ ID NO: 373002 - DNA, 597 bp, Homo sapiens
gcattgagatctaaatctcaaatactgtaatttggggttctagaatgtcctatctagacattgtatctagatctatggggagatactttgagaccatcaaaatatcctgctcctcatcagattttctccttcaatttcacatatattgatgatttatrcctgatccagtctttatcatgttggttataaaatagtgatttttccacttctactacttcctccacatttaccagttggcattctactgtaagaaatatttgcagcatatatcaactgagcaccccccttctcatctatctatctgtctattatctacctgtctatcacctatctcttacctaaactcatccctatttaaatgggttataatatataattatatatatgtataaaacataattatatgtccctattgttctgatgctcaaactgtcccagatttgatccagtcagtgacctttcaaggtggtttctttatctttgtaacacactctcctcattttatttgtttttgagtactttcttgttttctggcattaaaaaaaaagaatgttccagatctatcttgtaccttccctgagaaatgagccatttctc

SEQ ID NO: 373003 - DNA, 546 bp, Homo sapiens
gaggagggaatgaggggaacaggtgagggctgatgccaggcaggttggaacagacaggaagggacaaggtggtgagacatgtaggttcaggaactaagtctgtaagtgcagagggtccatcagggccctcttgattctttggacctgrggccttgccagaaacatccagaataaagtcatccaggtctttgaagggagtagcttcccatgagttgatacccatctgcaactgcaagcctcacctctaggaaggagacaatgatggcttttagagtacagtgtgctggcacagacccaagagatgtggcatctagacccagatataacttggtcttagactacccattccctcactagtaaagtaggggtgatcctagctcccagcaaacctcagagtcattttcacagacacaagtgagaaaacaggactgaaagtccagtgacatctacagtaagtggccctgaaaatgtcaaataccaaaactacagcagggcagaggcccatccctgccactagggaagaagagaaacaatgtgtcttcagaa

SEQ ID NO: 373004 - DNA, 546 bp, Homo sapiens
gaggagggaatgaggggaacaggtgagggctgatgccaggcaggttggaacagacaggaagggacaaggtggtgagacatgtaggttcaggaactaagtctgtaagtgcagagggtccatcagggccctcttgattctttggacctgaggccttgccagaaacatccagaataaagtcatccaggtctttgaagggagtagcttcccatgagttgatacccatctgcaactgcaagcctcacctctaggaaggagacaatgatggcttttagagtacagygtgctggcacagacccaagagatgtggcatctagacccagatataacttggtcttagactacccattccctcactagtaaagtaggggtgatcctagctcccagcaaacctcagagtcattttcacagacacaagtgagaaaacaggactgaaagtccagtgacatctacagtaagtggccctgaaaatgtcaaataccaaaactacagcagggcagaggcccatccctgccactagggaagaagagaaacaatgtgtcttcagaa

SEQ ID NO: 373005 - DNA, 546 bp, Homo sapiens
gaggagggaatgaggggaacaggtgagggctgatgccaggcaggttggaacagacaggaagggacaaggtggtgagacatgtaggttcaggaactaagtctgtaagtgcagagggtccatcagggccctcttgattctttggacctgaggccttgccagaaacatccagaataaagtcatccaggtctttgaagggagtagcttcccatgagttgatacccatctgcaactgcaagcctcacctctaggaaggagacaatgatggcttttagagtacagtgtgctggcacagacccaagagatgtggcatctagacccagatataacttggtcttagactacccattccctcactagtaaagtaggggtgatcctagctcccagcaaacctcagagtcattttcacagacacaagtgagaaaacaggactgaaagtccagtgacatctacagtaagtggccctgaaaatgtyaaataccaaaactacagcagggcagaggcccatccctgccactagggaagaagagaaacaatgtgtcttcagaa

SEQ ID NO: 373006 - DNA, 596 bp, Homo sapiens
acaggtcaggaggcaggtgagggctggggtgcaggcatgggatgggatgcaggtgtgaacagcttaagagccagggcagatggggtcaaggcagaaagggctagctgggaactgggaacgaggaggtgaatggagaaagtcagaatcaagggtgttggtagccaggttgaatccagaaggtgaaggcctggaaccaaggccagctacacccagtgctgtattgggaacccaggcaacatgatagcctgggaccaaggagagaattctgggggtcttgtatgcgactgtggagacaaattgtcagagtttaaatcctggctctgctccttatagctgaatgtctgggagaaaattatctaaattctctgtgccttggtctcctcatccgtaaattggatgactataatagtgcctttcttgtaggattgtttaagtgagttaagacatgtaaggttcttagaagtrgtacttagcccatactggcatcagattcagctattttcttttaaaaactgaccattagatcactttgcacatggaggattctgcctcaagaggatgttgcaggctctgagcagcttctgatgctgctgtac

SEQ ID NO: 373007 - DNA, 551 bp, Homo sapiens
tgggagggagaactggtgagttctttaagagggtggattgacagtcttttgtattatgggggctgcaggagagggaggtgctgagaagactccttggattctgagttgtacatccagatggagactggtgccattcactgacatagaaggcactcgaaggatggacttattttctgtacttgtccacacttttatgtatgtgtgactctcaaattctaaggataattttaatttgaggatgtttaagaatagtaatgtgtaagaggtggtttgatggctctgggaaatgagaaaacggcaacctggtattttctgtcacttatggatctgcactgttactaaaaaacatgacttagcgggtggagctggacacacatcacccccaagtggaccacagggaatgaggttcttaggcagcctttctgaaggcgaggcctccgccctggctttccaagctcacttggcaggacattcakaaaatttatactacttgctagaattccacattccccaaacccaggttctctgagggaggcttaagtatggaggaa

SEQ ID NO: 373008 - DNA, 561 bp, Homo sapiens
atgagggataatctaggcataaggaggggaagcagaaacagaaggtttccagctgagtaatgagagagggaaaaagaataatagcctcaaaggagaatgggaggaagagagtttattagccactatttgaaaacacagtggtcccagagcagaattcttaatagagtcaatggtttttacacatattttacctgcaaagctggaaaaagcatgtgagaaaggaatacagaaactcctgaggacagcttaactttcgattctgctctccttagaagatccagtctctcgctctttagcccttagggccttatccagggattccttgcctccttcttcacaaaccgtccctcyctcagaggatcagactaagtatagtggagccagttctcttgggaaggctgtgctgcttgaaggctgctcaggaatgcttctgaaagggctgagaaatcctttctttttctgtccagctcccccaactattagcatatctgcccactttggtaggctacaaaagtacccacctctcccaaaagatattcacctcctaatccctggaaccca

SEQ ID NO: 373009 - DNA, 609 bp, Homo sapiens
ctcggtaatttataaaagaaagaggtttaattggctcatgtttctacaggctgtacaggaagcatggcactagcatctgcttagcttctggtgaggccttggggagcttttactcatggtggagatgaagtaggagtagctatgttacatgatgagtgtgaaagcaagaaagagagaaggggttagcaacacacaatagactaagaaaaaataattaaaaagagaaagagagagagacagaagggggaggtcccagtttcccttaaacaaccagatgtcacatggactgagcgagaactcatcaccaagaggatggtgtgctaaaccattcgtgaaggatccacccctgtgatccaatcatctcccaccaggccctacctccatctctgggaaacacatttcaacaaaggatttggagggaacaaacatccaaaccatatgagtgactattttcatccactgtgctgggtactcaatgggccttttcactctagaaatccatgtccttcagctccatratattttcttgaacttatgtttagtgtctgtctctctaccattttatcctttctacgtctagaattcctatttttcagtgactggattgtc

SEQ ID NO: 373010 - DNA, 633 bp, Homo sapiens
gtatatttctatgggcagtactgccctagaggctagagagggtgctccagtggggatgggtggtcctccagcttggggctgggtctctgcctcataaatagacctcgagccatgttcccatttgagaccattattgggcctttgagacttctgagggggcagatcctgtggttgttggctttgtttaccatactcascttgaatccagttgaatctttgggcttgcttgtcaaccaccaagtgatggtttgcttctaggtttctgaaagtttattgctattgactcttcacctttaatctttgtccttgggatatatatatcatttactgttgccttagtggggtttcaggagggagcagagataaaaacacatgtcttcaatccatcatcttgaactggaaatcctaaatatcttttgattccttcttttgatccctcctacttttgtatcctcatggtttcctgagaggaaggttgtgtctgcctctgccagtgagagccccagaccacgtccagcctctccccagggtaagctctcttctaggctgcagatctgattctgttgcttctctctttaaaatccttcaccagctttcaacatgtaaataaaacactcaagctcctcagcatga

SEQ ID NO: 373011 - DNA, 637 bp, Homo sapiens
gcagcagcatgatttcggctcactgcaacctctgcctccaaggttcaagtgattctccttcctcagcctcccaagtagctgggamtacaggcgcacgccaccacgcccagctaatttttgtatttttagtagagatggggtttcaccatgttggccaggctggtcttgaactcctgacctcaggttatccgccaccttggcctcccaaagtgctgggattacaggtgtgagcccccgctcccggcagccactttattttgtgattcgactgtaaacagaggtaaaatcatgaagtgaatgtatttagaaacagcatccctatagggtccccctccttattagcccccaaccaaaaacatctctatccaaggaaatcctctctggccattgaggtccaaataacataccacctcctccaggaagctttcccaaattcccctaaatgaattttctctcctttccatgctacttactatagctctccttgtatctctaatatggtacctattctcatctgacttgtgtgcaaactttccacgaacatctaatagcctcaccaaacagtgaagagcccagaggctctgtgttatattcatctctgtgtccttagcatgctgctgaataaaggtatgatgaa

SEQ ID NO: 373012 - DNA, 637 bp, Homo sapiens
gcagcagcatgatttcggctcactgcaacctctgcctccaaggttcaagtgattctccttcctcagcctcccaagtagctgggactacaggcgcacgccaccacgcccagctaatttttgtatttttagtagagatggggtttcaccatgttggccaggctggtctygaactcctgacctcaggttatccgccaccttggcctcccaaagtgctgggattacaggtgtgagcccccgctcccggcagccactttattttgtgattcgactgtaaacagaggtaaaatcatgaagtgaatgtatttagaaacagcatccctatagggtccccctccttattagcccccaaccaaaaacatctctatccaaggaaatcctctctggccattgaggtccaaataacataccacctcctccaggaagctttcccaaattcccctaaatgaattttctctcctttccatgctacttactatagctctccttgtatctctaatatggtacctattctcatctgacttgtgtgcaaactttccacgaacatctaatagcctcaccaaacagtgaagagcccagaggctctgtgttatattcatctctgtgtccttagcatgctgctgaataaaggtatgatgaa

SEQ ID NO: 373013 - DNA, 637 bp, Homo sapiens
gcagcagcatgatttcggctcactgcaacctctgcctccaaggttcaagtgattctccttcctcagcctcccaagtagctgggactacaggcgcacgccaccacgcccagctaatttttgtatttttagtagagatggggtttcaccatgttggccaggctggtcttgaactcctgacctcaggttatccgccaccttggcctcccaaagtgctgggattacaggtgtgagcccccgctcccggcarccactttattttgtgattcgactgtaaacagaggtaaaatcatgaagtgaatgtatttagaaacagcatccctatagggtccccctccttattagcccccaaccaaaaacatctctatccaaggaaatcctctctggccattgaggtccaaataacataccacctcctccaggaagctttcccaaattcccctaaatgaattttctctcctttccatgctacttactatagctctccttgtatctctaatatggtacctattctcatctgacttgtgtgcaaactttccacgaacatctaatagcctcaccaaacagtgaagagcccagaggctctgtgttatattcatctctgtgtccttagcatgctgctgaataaaggtatgatgaa

SEQ ID NO: 373014 - DNA, 637 bp, Homo sapiens
gcagcagcatgatttcggctcactgcaacctctgcctccaaggttcaagtgattctccttcctcagcctcccaagtagctgggactacaggcgcacgccaccacgcccagctaatttttgtatttttagtagagatggggtttcaccatgttggccaggctggtcttgaactcctgacctcaggttatccgccaccttggcctcccaaagtgctgggattacaggtgtgagcccccgctcccggcagccactttattttgtgattcgactgtaaacagaggtaaaatcatgaagtgaatgtatttagaaacagcatccctataggktccccctccttattagcccccaaccaaaaacatctctatccaaggaaatcctctctggccattgaggtccaaataacataccacctcctccaggaagctttcccaaattcccctaaatgaattttctctcctttccatgctacttactatagctctccttgtatctctaatatggtacctattctcatctgacttgtgtgcaaactttccacgaacatctaatagcctcaccaaacagtgaagagcccagaggctctgtgttatattcatctctgtgtccttagcatgctgctgaataaaggtatgatgaa

SEQ ID NO: 373015 - DNA, 570 bp, Homo sapiens
tccaataagcacttattgaacacctgccatgagctatgtccagagaggatatttgggttcttcgctagaaacatttaaaataccaaggagatacattggattcaaagcaagaggggtcttaagtgattactgagaacagaaaatgattttattttgtttttaataaaattttcaagttggtcaaaagatgtatgtctagttgaaaagtacatatctatatcagtcgaaatggcttaagccaaaaaaatttattgatggatgtaattgaaaaatgttcagcatgataayggctaatgtttattgagggcctattgttagccagactgtgttctaagtgaatgacatttattaccctgttaaatcctagcagcagagccaagatttgaaccgaggcagtctgcttccagagactgcactcctaaccactatgctttactgactcttaaagagagagctttaggcaaaactggatccagggattcaagcattatttcaagacagcctttcactgtcactctgcttacttctgtactgagttaatgcacatgcaggttagattttctccattcg

SEQ ID NO: 373016 - DNA, 524 bp, Homo sapiens
cggggtttcaccatgttagccaggatggtctcgatctcctgacctcttgatctgcctgcctcggcctcccaaagtgctgggactacaggcatgagccaytgcgcccggccgaagactcagttttctgtcttattctgtctagtgttgctataaaggaatacctgaggcttagtagtttataaggaaaagaggtttctttggctcacaattctaatggctgtaaagttcaaaactggacatctgtgtatgctgaggctgcatccattcatggtggaaggtgaaggggagctggctatgcagagatcacatggcaagagaggaagcaagagagggaaggatcaccaagttccatttaataaccagtatttgtgggaactaatagagtgagaactcattcaacctaagggagggtattaatctattcatgagagatctgcttataaatatgctctgcttccctccatgacccaaatgcctcccattacaccccacctctaacactaggcataaaattgcaacatttg

SEQ ID NO: 373017 - DNA, 628 bp, Homo sapiens
tatactaattgataacccagaccagagttccagccatactcctattttccatttggaactaaatgagataacaaaatataaaggatttaaaacagggcctgggacatagcaaattctcagcaattgctagttgggcaataaaattagacagtgtagtgtggtggctcaaagcatggactctggagctagattcttttgcttaaaatccagctctatggcttgtaaactgtatgaytttggtctagttacttagtgtcttgtggctcagtttctcttccttgaaatgggaataataatagttaccaacccattagcttgttgtggacagcacttagcacatagaaagcacttgataagtgatagctacttttattaactaactgatagaaatgaagggccttttggagactgtctcattgtcttccatttttttttccctattattttatccccgcccaccttgcaataccccaacccagcatcaacgtaccctctgctgtctctgctggggcactggggaaacattttcatacctctttagcttggcctctgtgatggattagaaatgaatacaaattctttgaaacatctccctttggaaggtagagcttaatgccctggcctataa

SEQ ID NO: 373018 - DNA, 623 bp, Homo sapiens
gtctatttttacgatctccacaatagtctgaaatctgaaccattcatttgtctgcctcataggcttctaatagtcttaacccaattttggttctcagcggagcccagagcaggaataattgagagaaaaatttcaactattttccgaaaggggtcacatactcctcacccatgcccaagtcattcgtgcctttcttccattgcccccacctaattgtcatccccgccaccaccaccaccattgtgcggaaacaaaatctgattaagtgctcatggatggaaaagaaaatggattgtgattcagggaatttgaatttagttactcgaaactagctgtgggacctcgggcaggtcacctcgattactctgaccctcartgatttttactttttcaatgtaatagccccaatttttctataaacatgaattcagttcccactgtgtactaggcattgcactgaacaacacagataccattgtgaaaacagacacagtccttgactttatgaagcatatagcataatgggataaacagatgtttatcaaataatctccataatggcatataattacagactgagataagtggtctgaaggacaagagcccaattctatgagaagtta

SEQ ID NO: 373019 - DNA, 613 bp, Homo sapiens
ttgggctatattttcaaggatatttggaaaacaaccttgaaagatagagatgatatcttcctctacagtgatgggtaggcatgctcactgcccagtgtagaagattcagtttccagctgggtatggtggctcatgcctgtaatcccagagctttgggaggccaaggtgggaggattgcctgaggccaggagttcaagaccagccagggaaacataatgagaccccgtctctaacaaaacaaatttttttccaatcaactgggcatgtacctgtagtcctagctactcatgaagcagaggcaggagaattgcttgagtccaggagtttgaggttacaatgagctatgattacatctactgcactctagcctgggcaacagggcaagaccctgtctctaaaaaraaaaaaaaagaaaaaagaaaaaaaaagaaaaagattcaggttcccttttcacatcacacttttggaactggggcttagagaaccaacacaaaaatgatgatattctggattctgctattgctatgagtcataaactatcctttgtctctgacccaggtgtctcatgtcttttgcagcatccttgaagttatggccaactaacaggttagct

SEQ ID NO: 373020 - DNA, 613 bp, Homo sapiens
ttgggctatattttcaaggatatttggaaaacaaccttgaaagatagagatgatatcttcctctacagtgatgggtaggcatgctcactgcccagtgtagaagattcagtttccagctgggtatggtggctcatgcctgtaatcccagagctttgggaggccaaggtgggaggattgcctgaggccaggagttcaagaccagccagggaaacataatgagaccccgtctctaacaaaacaaatttttttccaatcaactgggcatgtacctgtagtcctagctactcatgaagcagaggcaggagaattgcttgagtccaggagtttgaggttacaatgagctatgattacatctactgcactctagcctgggcaacagggcaagaccctgtctctaaaaaaaaaaaaaaagaaaaaagaaaaaaaaagaaaaagattcaggttcccttttcacatcacacttttggaactggggcttagagaaccaacacaaaaatgatgatattctggattctgctattgctatgagtcataaactatcctttgtctcwgacccaggtgtctcatgtcttttgcagcatccttgaagttatggccaactaacaggttagct

SEQ ID NO: 373021 - DNA, 581 bp, Homo sapiens
tttcccttataaaaccatcagctttcatgagacttattcactaccatgagaactgtatggggaaaactgcccccacgattcaattatctcccactgggtccctcccacaacaggtgggaattatgggagctacaattcaatatgagatttgggtggggacacagccaaaccatatcaatatttcaacttcactatgtcttaatattactctagttaacctttattgagcaaatgtcatgtgccaggctccatgctaagtgatttacatacattatctcatctaattttcccaacctgatgagctattacataatacgtcctaacaggtaaatgatacatcaacattttcatttgttttatgtaaatatctaatgatgttgagtttattagattctgcagatgaaatatccccagacacattgtcatcttctaaataatgctgagaagatatgyacatttatatattggccaacacacacttctctagtgcaatgaaatttgaaccacagtgatgtgcaattgcagattcttcattcttaaaagaggctaaaaacatctaattgtaatgaagtttgatgccc

SEQ ID NO: 373022 - DNA, 498 bp, Homo sapiens
attctccagccctctctgtcccaccatcccaatgttcctctgtcattctacaggtgcaaagtactgatcaagggtgaacagaaattcttcccggctgatctttatggtgcacccctgctcacctcttagcctcctcctgttagcaagaccacatgctccaggttagacttcatctacaccactagaatgagaaaggcactcacattctgtgcaagcaagcggatctctaaaacaagaacctgtgagcacytctacccaattcaggtagctgatgccaagagaagtgtatgggctcttctcttggtgttctgaatacgtcattgggagctggaggcaatgaccaagttgcagagagcttctatcctacagagaagcagtgacagcatcacaaactcaacatcctacagcgagtctgtgggcatgtacatgaatgacaataaagaggggtggagattgctggctgtctgtctggggcccagttctataaccaaatgggtt

SEQ ID NO: 373023 - DNA, 585 bp, Homo sapiens
gaagcgctcagcccagatggagttttctgtcagcttaacagtgtcacttcacgtcttccaagaattccccagagcttcttgtctactggtagtacctttctcttcttttccagattttctacagttttaaaatttgtatcattgcagtggcatttggggaaggaatagaggtaaacatagaggctagatttaccctttagcaaacaaagtttgtttattgcattttaaaatgtggcaatttttgtttttgtttttgttttgttttcgttttttgagayggagtcttgctcttgtcgcccaggctggagggcaatggctcgatttcagctcactgcaacctccgcctcccaggttcaagcgattctcctgcctcagcctcctgagtagctgagattacaggcatgtgccaccatgcccggctaatttcttttgtatttttagtagagacagggttttgccatgttagctaggctggcctcaaactcctgacctcgtgatccacctgcctcggcctcccaaagtgctgggattacaggtgtaagccactgcgcctggccagcaattttatttttatagcaaaataat

SEQ ID NO: 373024 - DNA, 585 bp, Homo sapiens
gaagcgctcagcccagatggagttttctgtcagcttaacagtgtcacttcacgtcttccaagaattccccagagcttcttgtctactggtagtacctttctcttcttttccagattttctacagttttaaaatttgtatcattgcagtggcatttggggaaggaatagaggtaaacatagaggctagatttaccctttagcaaacaaagtttgtttattgcattttaaaatgtggcaatttttgtttttgtttttgttttgttttcgttttttgagacggagtcttgctcttgtcgcccaggctggagggcaatggctcgatttcagctcactgcaacctccgmctcccaggttcaagcgattctcctgcctcagcctcctgagtagctgagattacaggcatgtgccaccatgcccggctaatttcttttgtatttttagtagagacagggttttgccatgttagctaggctggcctcaaactcctgacctcgtgatccacctgcctcggcctcccaaagtgctgggattacaggtgtaagccactgcgcctggccagcaattttatttttatagcaaaataat

SEQ ID NO: 373025 - DNA, 585 bp, Homo sapiens
gaagcgctcagcccagatggagttttctgtcagcttaacagtgtcacttcacgtcttccaagaattccccagagcttcttgtctactggtagtacctttctcttcttttccagattttctacagttttaaaatttgtatcattgcagtggcatttggggaaggaatagaggtaaacatagaggctagatttaccctttagcaaacaaagtttgtttattgcattttaaaatgtggcaatttttgtttttgtttttgttttgttttcgttttttgagacggagtcttgctcttgtcgcccaggctggagggcaatggctcgatttcagctcactgcaacctccgcctcccaggttcaagcgattctcctgcctcagcctcctgagtagctgagattacaggcatgtgccaccatgcccggctaatttcttttgtatttttagtagagacagggttttgccatgttagctaggctggcctcaaactcctgacctcgygatccacctgcctcggcctcccaaagtgctgggattacaggtgtaagccactgcgcctggccagcaattttatttttatagcaaaataat

SEQ ID NO: 373026 - DNA, 372 bp, Homo sapiens
tcagtctaccaggatcctgcccagctctatctgcgctcccaaaaactcatccacctgccttctccctgaaccaccttacacactccaagctgacccagtgaggagttggtgggcgagtgaatatcttcaaggctttttttaaacagaccatcaacactcggaatgtatagccttaagtgtgttcctagaaagacagactgtctgggtagatagaatatataatcagaatttctcaaatggtactgcttggatactgttgtgagacattaatttgtattttctctcttttccttccttccakgcaggcaggtggctggcttggtggttgattgctttaagggaggaatgtgtcaggactgaaggcagaagtat

SEQ ID NO: 373027 - DNA, 610 bp, Homo sapiens
ctgtgctatgtagggtgggtaggaagtccaggcatccacaattagcacaatccaaaaaataaagtgagctcttttagaaagtcactctagtggctataataactatgtaactggtttttgttttttgtggttttttggattgaaggcaaaatattacacgatggctaaactgtacacttcccttcggttgaggtttgaagtcaacaattaatgcytctcttcactttctggttctaaactaagttaaaaaaataggtgcagatggaaattaaaatataatttaacttgtattcctcatcaagctagattgaagaatgaatctggaacccaaggccaaaattaggcattccatagctactcatcacctcttaaacttgactttgggatctgcctgaaggaaaagttggggaacccacccagccagccacagaggagatctagacttccctcaccctctctggggcctcacagagaacaatcataaatgtggcttccagacccacctctagaaatcaaaacaactcggtcctgccccactgaggataaaggctctatcatttttctgcaatgggcaagtcacagagacagaggaaaagggaaagacccaggg

SEQ ID NO: 373028 - DNA, 521 bp, Homo sapiens
caggtgccaccccctgcttctcttccatagacagcctcgagctgccggcagtcccttaggatctgtggccttaggcctagcttaattttttcctctccaaagagccatctgtagggccagagactggcaaagcctaacttattactggacgccacttcctttgcctgactttcagtgattcctaccttactctggggttttatgtttctcgtctcaacactgtcatttctcattcctccacaagttgaattgctcactccagccaactgaagcatgctcttcttgacacagatagctctaggcatatggttggtgaaaaaaaaaaaaaaagcagtatgtcaatttaattgatcaacaaaagtgatggctccactgcaaagtaaagttgatactgcctcggcctctgagttcaagagccttctagacaaagggctctgagctgaaacatgagcatgcacrcacatgcatctctgttggtctgatgaggtaatttggatacttggttgttatccttgagcatt

SEQ ID NO: 373029 - DNA, 507 bp, Homo sapiens
ggatcgcttgagcccaggagtttgagaccagcctgggcaacatagtgagacctggtctctacaaaaaaaattttaaaatagctgggcctggtggtggcacgtgcctgtagtcctagctactcaacaggctagccttggaggatgactttgagcccaagaggttgaggctgccgtgagcagtgatcttgcccactgtactccagcctagcgacagagagagatcctatctccaaaaattaaaaactgagtagacaggtgtcctggtggcatgataggtcctgggtcccctcccagatctgtgaccctggactggtgacttgacttttcctctggacctcagtgtccccatctgagtgaaaaaaaggcggtggataggtgggtctttgagtctaagtggtgtagaagccrcgtctgaaaagccatacccggggctccaagtccattccacagtcccagcagggcctggtggggtggccagggtgacacaggcatcaggtcccaacctcc

SEQ ID NO: 373030 - DNA, 507 bp, Homo sapiens
ggatcgcttgagcccaggagtttgagaccagcctgggcaacatagtgagacctggtctctacaaaaaaaattttaaaatagctgggcctggtggtggcacgtgcctgtagtcctagctactcaacaggctagccttggaggatgactttgagcccaagaggttgaggctgccgtgagcagtgatcttgcccactgtactccagcctagcgacagagagagatcctatctccaaaaattaaaaactgagtagacaggtgtcctggtggcatgataggtcctgggtcccctcccagatctgtgaccctggactggtgacttgacttttcctctggacctcagtgtccccatctgagtgaaaaaaaggcggtggataggtgggtctttgagtctaagtggtgtagaagccacrtctgaaaagccatacccggggctccaagtccattccacagtcccagcagggcctggtggggtggccagggtgacacaggcatcaggtcccaacctcc

SEQ ID NO: 373031 - DNA, 568 bp, Homo sapiens
ccaaactgccccagtatcatctgttggaatgactatcctttctgtattgaattgccttggcagctttgtcaaaaatcaattgtggtctatctggatgcccagtatgaagcttctaactttgttcttctttttcaaaattattttctctattctaggtcctttgcgtttccatgggaattttagaaccaccttgtcaatttttacaaaaacacctgttgggattttgtctgggatagcactgcatctatataggtcaatttgagaactgacaccttacaatattgaatcttccaaatctatgaacaaaatataactctccatttatttaggtcttcatttctctcagcaattttttttttagttttcaatacataggcctttcrtatttttgtctgatgtatgcttatgtacttaatacattgagattctatcattaataatttttttaaatttccatatctaattgtcactgatatataggaatacaatggacttttttgaaattttaagataagtttattaagtccaatgatgaaatctatcagaagaatattctcctgaaaataat

SEQ ID NO: 373032 - DNA, 568 bp, Homo sapiens
ccaaactgccccagtatcatctgttggaatgactatcctttctgtattgaattgccttggcagctttgtcaaaaatcaattgtggtctatctggatgcccagtatgaagcttctaactttgttcttctttttcaaaattattttctctattctaggtcctttgcgtttccatgggaattttagaaccaccttgtcaatttttacaaaaacacctgttgggattttgtctgggatagcactgcatctatataggtcaatttgagaactgacaccttacaatattgaatcttccaaatctatgaacaaaatataactctccatttatttaggtcttcatttctctcagcaattttttttttagttttcaatacataggcctttcgtatttttgtctgatgtatgcttatgtacttaatacattgagattctatcattaataatttttttaaatttccatatctaattgtcactgatatayaggaatacaatggacttttttgaaattttaagataagtttattaagtccaatgatgaaatctatcagaagaatattctcctgaaaataat

SEQ ID NO: 373033 - DNA, 522 bp, Homo sapiens
gatttgcctattttgccttgtgtttgaaagatatttttgctggatgtagaattataggtttactttttaaaatacattacagatgttgctccattcttttaaggtgtgttatttctgaaaaatgcctgctgaaatccttagctttgttatctgtctgtaatgtgtctttttctagctgcctttaagactttatcactggttctgagcaatttgattatgatgtgtcttggtgtattactactctgttactcaggctggagtgcaggggcacaatcttggctcaccgcagccttgacctcctgggctcaagcaattctcccacctcccargtagctgggactacagatatgcaccatcatgcccagctaattttgttcttttttgtagagatgaggtctcactatgtttcccaggctggtctcaaactcttcggttcaagtgatcctcctgcctcagcctcccagaatgctgggattacaggcgtgagccagagtgccaggcctttgttgaaatttttatatg

SEQ ID NO: 373034 - DNA, 508 bp, Homo sapiens
cctagaaagaaagttttttttttttaatttcccttcttccccctttttacaacacatcaaatgaaagtataaacttgactatttgatggttcattttctttccacaactacctgaaattgtcagtgatgctttaaaactgttccccattatttaacaaatccattagtacacatagatcatctgtggggaccagatgctgatgatgccacctggtctttttcctttaagacaacagcaaasctgttgtatcttaatgtaatttttgtgctctttttaaagaagttagctttcattatcagttgggacccttatgtgacatggggtgcctttagtcaattattctagtaatggcattttaaaaagtaattttggacatttttgaggtaacagtacatcaggtttttcagtcatttgatcagttaatataggttatgatttatgttatgatagattttggaatgtacagttgatttcattttttgcagtatgtctatatgcagttttagc

SEQ ID NO: 373035 - DNA, 508 bp, Homo sapiens
cctagaaagaaagttttttttttttaatttcccttcttccccctttttacaacacatcaaatgaaagtataaacttgactatttgatggttcattttctttccacaactacctgaaattgtcagtgatgctttaaaactgttccccattatttaacaaatccattagtacacatagatcatctgtggggaccagatgctgatgatgccacctggtctttttcctttaagacaacagcaaacctgttgtatcttaatgtaatttttgtgctctttttaaagaagttagctttcattatcagttgggacccttatgtgacatggggtgcctttagtcaattattctagtaatggcattttaaaaagtaattttggacatttttgaggtaacagtacatcaggtttttcagtcatttgatcagttaatataggttatgatttatgttatgatagattttggaatgtacagttgatttcattttttgcartatgtctatatgcagttttagc

SEQ ID NO: 373036 - DNA, 263 bp, Homo sapiens
gagttcttgttgttataactggagtgcagtggttgtttacaggcgtgatcatagtggactgcagcctcaagytcctgggctgatgtgatcctcctgcctcagtctcctcagtagcttggactgtaggcacaagccaccatgcctgtaaagtattctttactttgctagaaatgtgtcagtttgtgacttaagatttgtgttttgtgctcatttattttaatgacaaagcaaacttgtcactctttcagtgattgcttacttat

SEQ ID NO: 373037 - DNA, 263 bp, Homo sapiens
gagttcttgttgttataactggagtgcagtggttgtttacaggcgtgatcatagtggactgcagcctcaagttcctgggctgatgtgatcctcctgcctcagtctccycagtagcttggactgtaggcacaagccaccatgcctgtaaagtattctttactttgctagaaatgtgtcagtttgtgacttaagatttgtgttttgtgctcatttattttaatgacaaagcaaacttgtcactctttcagtgattgcttacttat

SEQ ID NO: 373038 - DNA, 407 bp, Homo sapiens
gttcgtaagatgccagtgagctttctttagggagaggattttagcattatgttaattatctaaaggtaactggagggcgcctgtttatcttcctctggtattccgcaaggggtcaggaagctctggtgacatctgggccatctggcttccttaagcagctgcgcctataaatagactatggraaaaaactggctgggcttggtggctcatacctgtaatctcaacgctttgggaggcggaggcagagggatgtcttgaggccaggagtttgagaccagcctgggcaacatagaccctgggtctaccaaaaaaaagaaaaaaaccacagctactcaggaggcttatgccactgacaatgtcatactatccaccagtgggggaaggaggatttgggaaataattgtttt

SEQ ID NO: 373039 - DNA, 507 bp, Homo sapiens
  misc_feature (1)...(507): n = A,T,C or G
aaagccagcaaagcactgggtctcactcagggcccactgtcaacactacctggctattgcctatgttcactcgaggccctggggctctactgtcagcaggtgtcaaagccagccaggcttgtgtctttcccttcagggcaacaagttcccttaggccctagcatgtccaragatgctgtctgggagccagggactgcagccaaaaaccttaaaaatttacctggtgctttattctaaggcggctgagcagacaccgaaaccatgagacaaagtccttcccactctgtctttccccttccacaggcagaggagcctcaccctgtggccaccaccacaggcgcacacggagtgctgccaggctactgttcgatgttctcttagggcccaagggctctgaaggcacttgtggtgaatgcttccaggcctgggactcacccttcagggcagtgggctcccctctggcctaggacgggcccagaaannnnnnnnnnnnnnnnnnnnnnnnnn

SEQ ID NO: 373040 - DNA, 507 bp, Homo sapiens
  misc_feature (1)...(507): n = A,T,C or G
aaagccagcaaagcactgggtctcactcagggcccactgtcaacactacctggctattgcctatgttcactcgaggccctggggctctactgtcagcaggtgtcaaagccagccaggcttgtgtctttcccttcagggcaacaagttcccttaggccctagcatgtccaaagatgctgtctgggagccagggactgcagccaaaaaccttaraaatttacctggtgctttattctaaggcggctgagcagacaccgaaaccatgagacaaagtccttcccactctgtctttccccttccacaggcagaggagcctcaccctgtggccaccaccacaggcgcacacggagtgctgccaggctactgttcgatgttctcttagggcccaagggctctgaaggcacttgtggtgaatgcttccaggcctgggactcacccttcagggcagtgggctcccctctggcctaggacgggcccagaaannnnnnnnnnnnnnnnnnnnnnnnnn

SEQ ID NO: 373041 - DNA, 566 bp, Homo sapiens
tcataactagaagatatgggatatgaaatacatagaacaaaactgctcaataatctatctagaatcacacaatgcttaagctttaccctgattgagatggcaagcttttacttcttcccaagtcagcaaataattcctcctcctcacttaatagttgactatgaagagcaagccattttgattttgcctccaatgagctttcacatttcattcctccttccactcccatgactaccaaaccaatgtaggttctcctcacttcactctaagacaacagcgtggccctcaactactgtcacactcttctaggctctgtgagcacaatgtgtctcatattctcttctgctgtcaccagatttactttacaatagtttctttactgtcactcccctgttyctcaaccagttatacagaaagatgaatagccagggtgatagtctacttagcagagggggaaaaaaaaaaaaaaagatctgtggccagtccacagacctgtttaagtacaagatattacatcagcactatttcctaaaactcttctacatgagtcctaccctccttgtgtt

SEQ ID NO: 373042 - DNA, 555 bp, Homo sapiens
acttaggtatctgctaaattaaaatgagtacaactcggcactcagatgtaactttaccagaccccaggtcaccactagattaagtaaatagcattaactagaaggattccaacgctggatgaaatttggactaaagtcaactcaattcaattcaacaaacatttactgatccccttctctgggttaaacactgctccagacacaagggctagcaagctaaataacatgyaggactcaccttccactactagagtttaaggaatgcccatgaacacaaatttgagtctaattatgagctaagtggacatatgtggactcttcaactgattttatagtcaactatggtaacatacaatctctcccctcctacaaattaaataaatcgaagttaaatgtctaagctaatttctgccttttgaaataggtacgaaactctactaaaatcatgagagttgtatgcatgcacaaataccacgaactattgctccaaaaatgcaaccctgactcaagtgaagctgctgaaatttcaagttgcatattttaaccaaaaaaaaa

SEQ ID NO: 373043 - DNA, 539 bp, Homo sapiens
tagctgaatggcttatattaaagagatggcactctcacatatgagcaaagatgtagaacaactggtagaagggtaaattggcacaacaatttggaaaacagtttatcatgatacagtaaagttgaagatgaggcagtcctgtgaccatcagtttcatttctaagtatgtactcgactgaaatatatccacatatgcaatgggagacatgaatcttaatgtatatagtagcattacatttggtaatttcaaattgaactaactcaaatgtgtgtcaccaagaagtgacaaagaagtctttgatatttgtacaaaggactactgtacagtaatgaaatgtaacaaatgacagyttcatataacaacatgatgaatttcagaaacaatgttgaaggacagaagcaagaccaaaagaacatataccgtgtgcttttatttatttaatgttaaaaaataagcaaaactaaagtgtagtgtttagggatacatacttatgggaagggtacaggtgattaaaaaagaaatgaacacttaaaaattt

SEQ ID NO: 373044 - DNA, 518 bp, Homo sapiens
attattgaagtctttgtatagtgagtccagtatctgggatttcttagagtcagtttctgttgattgcttgttttccttacgtatggcccatactttcttatttttttactgttcttatagtctttttattgttcttgttgaaagctagacattttaagtagtatagtagttctggaagtcagattttcttcccccacctcagggtttcttgttgcyactgtttgttttagtgtgtttgtttagtgactcttctcaattattgctgtaacatctatattctatgtggctattgaagtctctgcttggttagcttagtggtcagctaattattggatgaagactttcttgattgcctagaaccaataaatctcccagtctttgcaaagggcatgtgtgtgtatgtgtgtgtgtgtgtgtgtgtgtgtgtgtgttgtggcatgctttcaactctcagccaagcaactgacagctctgtcttggccctcactttctgcttatgcaattcctcaagccagatg

SEQ ID NO: 373045 - DNA, 634 bp, Homo sapiens
gatacagagatttggtattttattaatagctggtccctttccttgtcatggaaccaaaattcaccacaagtagtagagggtttattgtgagggaagttcagatgttagttggggctcttcctttgcattgccaatctcctatgtgcagatttcctgcatatatacatgtgtgtgtatagaaaacaggatattcattaagcagctatccttaatggttatctgggaaaagcttaattactaggccacaggattaatgggacccatgacmgcctgagatagaacctggaacggaaaggtctttcatagtcctgggagttttagggactttagaagcagagtcaatggatctgcatgttatccatcattgacccaactcaggtatccctatttgccattgatatatctgtgttctcctcttcctatgaccaactggctgattcttctacttttttgtttatatttgtgagagagaatgtttttgggagaaatattttatgctcctttagcgggggctgttttgggatggtttacctgagaagaaactaagggagtatcatgcatggtatttgagaggtttaatacttagaaaaatttaacatgtcccaagtcaatcaatggcagagtcaagaaatga

SEQ ID NO: 373046 - DNA, 607 bp, Homo sapiens
tacctatagagtggttacatactacactctcagtcttagttctaccaataaaatatatatttaatgctcatcatcagcttaaagtaccagttaaagagtgttaagaatacaggtctacaattctttttcaaayagaaatctttggagccacatacattcaaaaattcacttttttcttttgctttcaaagagaaataatatggttatagtaaacatacctgacagcaataatttaagcatatccttagaatgactttgtatggcagatgcacctgaatgtgtgttctgagctagggaattcaggagtggccaacccagagattccctccttgtctataaggacatctgagcccccaacctgtctcttggaacacaagccctacaggagactgaggctccaagttttgggtagaataaagagtgccaggtggaggttgctaggtggaagtgctaagtggaaatgctatataaactgcatgcctatggcaggcagttgtggttcttctgcccagcccactgccactggactgtatataaggcagttctcccgtccagcccactgccactgtaccctctcctttgtatgtaagcccccaataaaacccca

SEQ ID NO: 373047 - DNA, 546 bp, Homo sapiens
  misc_feature (1)...(546): n = A,T,C or G
aagcataaggttttatatttgatgatgatgatgatgataataattgttaacatttattaagtcctcattatgtgccaggattctctgctaagcactgttcatgaatcacctcatttaatcttcacaacaactataactatccccattttatagaggatgtagtcagggcttagagacattaacttatctaaggtcacagagtttacagggagcaaagccaggattcaaacccaggcagcagtctgattctagaaccccaactctgaatgtctgytgttaccaaaagcagagcttcttttgaaagagcatacccaaggtgatcccgattggtcaattttgattcttagaagacagaaaaagtttggggtggagggagtgggactcctctttagaattccaaataaatttcatttttatcattccaaattctatatcagctatgcaaacattttcactacagtgaactttgtaagaaaaagaagcatttggagaaaaaaaaaatttaactcttctgcaatcacctgagaaagtgctaggaagctnnnn

SEQ ID NO: 373048 - DNA, 553 bp, Homo sapiens
ttagtttcccaaagagccaaacaaaaacagctagacttacaaactggtggaggttgagagagagtttkcacaggctatagataaccaaaaaagtcatcatctgtaattaagcaggatttggtaaatatgaacaggctagtaaacttttttgaggttggcaaattagggagatttctgcagttggccataaatattaaaggtttcatgactttaagcccaagtatcaccttacatcctgcagacatttatcatacacctcgtttggtatatttcagactttaataaactgcaagatttcttcactatgatttctacctaccttaatatacaattcatatttaaaatcacccattaaaccaattgttgtggctgcttgggattctaatttgcagaagtacattttggaaacctgaatgcaataagaatgatataatggactttggggactgcagggggagggtgggaggggggtgagggataaaagactacacattgggtacagtgtacactgcttgggtgacgggtgcaccaaaatctcagaaatcactactaa

SEQ ID NO: 373049 - DNA, 553 bp, Homo sapiens
ttagtttcccaaagagccaaacaaaaacagctagacttacaaactggtggaggttgagagagagtttgcacaggctatagataaccaaaaaagtcatcatctgtaattaagcaggatttggtaaatatgaacaggctagtaaacttttttgaggttggcaaattagggagatttctgyagttggccataaatattaaaggtttcatgactttaagcccaagtatcaccttacatcctgcagacatttatcatacacctcgtttggtatatttcagactttaataaactgcaagatttcttcactatgatttctacctaccttaatatacaattcatatttaaaatcacccattaaaccaattgttgtggctgcttgggattctaatttgcagaagtacattttggaaacctgaatgcaataagaatgatataatggactttggggactgcagggggagggtgggaggggggtgagggataaaagactacacattgggtacagtgtacactgcttgggtgacgggtgcaccaaaatctcagaaatcactactaa

SEQ ID NO: 373050 - DNA, 625 bp, Homo sapiens
gttcttggtgctggagccataggggagtttgagtctgcagtttccacttcgggtggaagaggcaagaagggagagaagggggagggagcagggagccaggcaagaggaaaattaactcactaatgccaacaccaatgtcaaaaccaaccacaaccatgcggtgcttacaagaaagtgaaaggagctctgggaaaatgacctaattgatctaattattgttccaaagagcaggcttcctttgtagggcagcccatagcaccggaggattttggttgtcccagtaatgactgactgtktgcgtggttggaagcaacctgctaactccttgtggatggagtaagtttctaatatggttcccatagtctgtcttattgcagtgcgcactagtaggccttcggtgtgtgcttggtaggttgatcaatgtgaagcctttttccgagtacacttgagggcttgagggattcaggagcttaaacttcagattgtaaataaaagacgtttttattaagcagtaagtttgaatttttaacaatataccagaacttattcacctagattgactcctttcttccaaagcagtacacgttatatggataatgctgtcactacttaaaagtctttgtaa

SEQ ID NO: 373051 - DNA, 625 bp, Homo sapiens
gttcttggtgctggagccataggggagtttgagtctgcagtttccacttcgggtggaagaggcaagaagggagagaagggggagggagcagggagccaggcaagaggaaaattaactcactaatgccaacaccaatgtcaaaaccaaccacaaccatgcggtgcttacaagaaagtgaaaggagctctgggaaaatgacctaattgatctaattattgttccaaagagcaggcttcctttgtagggcagcccatagcaccggaggattttggttgtcccagtaatgactgactgtgtgcgtggttggaagcaacctgctaactccttgtggatggagtaagtttctaatatggttcccatagtctgtcttattgcagtgcgcactagtaggccttcggtgtgtgcttggtaggttgatcaatgtgaagcctttttccgagtacacttgagggcttgagggattcaggagcttaaacttcagattgtaaataaaagacgtttttattaagcagtaagtttgaatttttaacaatataccagaacttattcacctagattgactcctttcttccaaagcagtacacgttatatggataatgctgtyactacttaaaagtctttgtaa

SEQ ID NO: 373052 - DNA, 560 bp, Homo sapiens
tcagttacctctttgcaagctctccagccctgccataaaatgaaaccatttgcaatagttgctacatcatagcttgctcggcatctgctttcctgagctcgctccaattgttsccttcatggggtcaggtgaagttcgtgttgcatagggactaggatctaggtatggtttccatctcactggggcagcaggcagatgctgagcgcagaggacatgggtggtggctacacagctgcagagcagccatgacatgctcttggaaacaaaaataattgaacactgaagtatgtgtaaaagtacttttcccctttgaatcaagaatatgatcatgaaccttagcaaaacaaagcaatggagctgactcagtcttctaaacattggccctgaacctgaacctactattaaattgggctaaaaggtttacagagcaagtggattcattaaaactgttttttgctatattctctgttgtggctttgtcccagagatttccaatgcttccagcagctttggagttagtaactctgatatgtttgcatctgacttctgacctaaacttt

SEQ ID NO: 373053 - DNA, 632 bp, Homo sapiens
gtgtcaacttcaagaattatatggatcttattgaatcctcctatccctgaatgagacaattatgtaagcacatgttccttttcatttttcatattttgttcaaacagtagataatgttggttatagatatcttaatttttaaattatgactattctggtttaaaaatctactcttaatatttacattaatcgtcacggtcatattaacaactaatgacaattatttgcaataaactaagctttactgggcttgtttctcacaacctttattcttgatcactcttcagggtgtgttcttattacttttcttattttttttggaactgttagattaacataatattctataccccttgggaatgtagacatgtgtctttgacagatgtcagcagtgtttggacaatgtttaaatgtgaaygcccttagcctggccatgcttcctggctcacctcaatcctgatcgctccttccttcctgtttgatacaccttcttgcataacagtttgtgtttataaattctgtttcctagaccacatgcaatttctactatccaagtgtttaaaatgtgatcctgtgttcttacattaagttaacaccctgccttatgcctttttcttttgtacttaggcttt

SEQ ID NO: 373054 - DNA, 641 bp, Homo sapiens
acacacacatatatgcacattcacacgaactgaatttaaataattamtatgcaaggcttatataatggtggagattgctttcattcgggataaaacctattctctatcattgtccctaaagggggccattcagttataaccacttaacaacagtggaaaaacttgggcccatctgaatgtacattactttaattttgccattctccaacactacgcgattctcattttctccattccttttggttaattcagtgacatttgagagacttaagcagaaacaacgataaccgacaatgttgaactttacctcagtcctgtgctcctggaaaacagaaacagttaagaaattctttcaccgttttgtgtctggaaacagctttttgcaaagagacattcttccccatatgacttagattagactctcagatgataccctggttagcctgtgacagggacagacacagacacaacaccccccacccccagcaatgtcattatttttctcataaacgattagctgaacagtttgtcccagtgagccatctggacaaaatgctctgtaacttgtcttgaccaaaatttagtcagatgtcctctttccccataggcccctaaccttgacccacctcgggcaggcattt

SEQ ID NO: 373055 - DNA, 577 bp, Homo sapiens
tatcataagtcctataacttcctctcaggtcaaaatcaaattctgtattttcaggacttgtctaatgttctctttgtgtgtatgttatcttctgttactatttcagactagactattctcctaaatttgtttctaaagaaaacttgtaaacatctgctaattcatactcaatttataccatctctttaaagcattccttttcattattttttctctattcttgtcttcattctttatttcattaagctgaccttcgatcactgatatccttttttccacttgatcgattcagctattgatacttgygtatgcttcatgaagttctcttgctgtgtttttcagctctattaggtcatttacgttcttctctaaactggatattctagttagtaattcctctaacttttttcaaggttcttagcttcctcgcagtggtttagagcatgctcctttagctcggtggagtttgttattacccagcttctgaagcctacttctgtcaaatcatcaaattcattctccattcagttttgttcctttgctaaggaggagttgtgatcctttggaggagaagagg

SEQ ID NO: 373056 - DNA, 577 bp, Homo sapiens
tatcataagtcctataacttcctctcaggtcaaaatcaaattctgtattttcaggacttgtctaatgttctctttgtgtgtatgttatcttctgttactatttcagactagactattctcctaaatttgtttctaaagaaaacttgtaaacatctgctaattcatactcaatttataccatctctttaaagcattccttttcattattttttctctattcttgtcttcattctttatttcattaagctgaccttcgatcactgatatccttttttccacttgatcgattcagctattgatacttgtgtatgcttcatgaagttctcttgctgtgtttttcagctctattaggtcatttaygttcttctctaaactggatattctagttagtaattcctctaacttttttcaaggttcttagcttcctcgcagtggtttagagcatgctcctttagctcggtggagtttgttattacccagcttctgaagcctacttctgtcaaatcatcaaattcattctccattcagttttgttcctttgctaaggaggagttgtgatcctttggaggagaagagg

SEQ ID NO: 373057 - DNA, 579 bp, Homo sapiens
ataacattctgctacatagttatttgagttaatgcatgtaaagcacttagaactgtcacatgttaattgctctgtaagtgggargtctattatttttgtcatctttgctattgatattcacctaagtacctttcaggtacagatttgcttacttgaactggcatatactagaggatgtaacctaccttcttgtatattatctgtttaataatagttttcttaaatattaattggagaaaaacataaaatacttctctgaatttattctaatggatttatgtgatgacttctgtgttggactacaaaagacacaaaatactatagaaaagctatcaaattatgtctaactaccatgtatttatgactaataaatcaaatgttctacttgaattaaagtcacactaacaaacgttcaatagatttccggtttcttgtctttggtaataacagacttcctagggattgcgtactattgaataaataaacagatgaaaacataaaactattttggttaacaaatggaaataagagaagatttgacaagtgatagaactcttgttgcagtatagagaactttca

SEQ ID NO: 373058 - DNA, 555 bp, Homo sapiens
cctattgaaggaattcttaattttaaaaattacagtttttatcttcttcaatgtccattttattatttcatgttaaattataatctccattgaatttgtttcaccacttatttcattattatctctatattttctttattatttttacagttattttgaagttttctgctaacctcaacatctgtattataagttgacctgctccaggccgggtgcggtggctcatgcctgtagtcccagcactttgggargacaaggcaggtggatctcaaggtcaggagatcgagaccatcccagctaacacggtgaaactccgtctctactaaatatacaaaaaattagccgggcgtgatggcgggcgcctgtagtcccagctactcgggaggctgaggcaggagaacggcgtaaacctatgaggcagagcttgcagtgagctgagatcgtgccactgcactccagcctgggtgacagagcaagaccccgtctcaaaaaaaaaaaaaaaaaggaaactataatccattctcaagagaaagaagaaagaacaatagtcaccca

SEQ ID NO: 373059 - DNA, 409 bp, Homo sapiens
acagctttaacatatagttgttatgtgatcttaggtaagctatttaatctgtcctggaaatcaacatgttatatatttttttagattttgggttctgtattcttattatctatattcatttcctagctcaataaatatagagaagggccaaaatacccttttaatcccttcatttcctcagcaataatagaaaaacgatattattacttccctgttacagtatttgtgaagactaaatgggtggattcatgaaaagcatttaaaagagaatacttccttcaacttcacccagtattagttatctattatccatatgatgtgggtgtgtgacccttccaaatcttatgttgaaatgtgttcaccartgttggaagcggggcctagtagcaggcattgtgttttgggaggt

SEQ ID NO: 373060 - DNA, 352 bp, Homo sapiens
ataaaactctacagtgagcattaagtctctagttaaaaggggtactgagattcactacttcaaggagccacctgctttgaccaattctttctttctttttttttttttttttttttgagacagagtcttgctctgttgcccgggctagagtgcagtggcatgatctcggctcacttcgaactctgcttcctgtattcaagtgattctcctgcctcagcctcccaaagtgctgggattacaggcatgcgcccccacgcctggccaaccaattctttattttctttargtcattaaaacaaattattattatgtatgtgcctttaattctagttttatttgtgtggctttctgt

SEQ ID NO: 373061 - DNA, 302 bp, Homo sapiens
tggttacttcatttcctggatgcaatagtcctacctattttctagaaaccctggtgttggttaaccctttttttttaatctttctcttgggtagcacaggaaggctaagtgaggagccaagtgagaaatgcccccttcaccatagytaagataaagttctctcataattttgtgtttaggcaaagccctttctcctggaaagtaagcatttgtaatgaagaacactctgacatgctttacaaaggttattcctcccttctccctcccaggattacaaagaggtctttttcaacttccaaatg

SEQ ID NO: 373062 - DNA, 522 bp, Homo sapiens
tttcttttcttacttaatttagcatctcagatactcccatgttattgacaaacttgacttttttttggacagggtcttatcctgtcacccaggctggagcacagtggtgtgatcagagatcactgcaacctcaaccttctaggctcaagtgatctttcaaactcagcctcccgagtagctgtgaccacaggcataagccaccctgcctggctaagttttaaaattttttatagagattaggtctctctatgttgcttgtctcaaacagggctcaagtgatcctcccttttctgtctcccaaagtgcggggtttacagggtaagccactgcgtcttgcctaactgtgttttaaagtagctcttttgcagattgatatgtggaaatgattttactgttattttcatggataaagyattctcaggaatgtgggcaaagattaaggattaaaaggaagatgttggcactaataggtaccacattaaacaaagttctgacagaagtatttctggcttaaggaactag

SEQ ID NO: 373063 - DNA, 543 bp, Homo sapiens
  misc_feature (1)...(543): n = A,T,C or G
caaattcttttctactgaatttttatttcccagctttcttgaatgttcacatattcttcttaagtaggtcccacagaaaatcgtggtctagcagcaacaggggtgtcccagtatttttgcagctcttttactttgttagttcagcaagtaggaatgttacagttctttcactcccataattaggcgaattcctacttcttgtcccatgactgagaagaatgaggtatgcagacactggagagtgagtaaggcagagtagaatttattcagtcacagaaaaactcccagcagcaagaggggacctgaaagcagattggcagacatgaggctgagttcaggggattttatggacttggaacagagnaggtgcatgctcattagtttgtgggtagttttggaaaaagtaccacttagaaaaaggcacaatagtgtgtagagccaactrgaggaaggtaggtatatgtaaactaggtgaaagataaggaccaatgaggagaaagcacaccaaatgggggtgggaattctcacttcagtccatggatt

SEQ ID NO: 373064 - DNA, 439 bp, Homo sapiens
gcttaaacctgtgaggcagagcttgcagtgagctgagatcgcgccmctgcactccagcctggggtgacagagcaagactccatctcaaaaaaaaaaaaaaaaaaaaaaaaaaaaaaaaaaaaaaaatcaactattatgaaaacaacaacaaaaataaaagcatatatttggcaatatactagcaataatggaatgattatacaaagtaaattagaatattttcttctacaattaaatttcacattaatcttttttttttctcccttaagtcaccacagaaaggagcagaaatggaggaataaagctgactgtaaaacaaacatgaaaacaaaataaccttatccagaagctagtaaacccatctataggagtgtcatcaatattagtttactgtgattatataaaagaattatattgttttaaaggattttttcacaag

SEQ ID NO: 373065 - DNA, 439 bp, Homo sapiens
gcttaaacctgtgaggcagagcttgcagtgagctgagatcgcgcccctgcactccagcctggggtgacagagcaagactccatctcaaaaaaaaaaaaaaaaaaaaaaaaaaaaaaaaaaaaaaaatcaactattatgaaaacaacaacaaaaataaaagcatatatttggcaatatactagcaataatggaatgattatacaaagtaaattaraatattttcttctacaattaaatttcacattaatcttttttttttctcccttaagtcaccacagaaaggagcagaaatggaggaataaagctgactgtaaaacaaacatgaaaacaaaataaccttatccagaagctagtaaacccatctataggagtgtcatcaatattagtttactgtgattatataaaagaattatattgttttaaaggattttttcacaag

SEQ ID NO: 373066 - DNA, 494 bp, Homo sapiens
ttatgtaaatgtgagtcttactatttgctctcatattcctcctgtttcttttctttctttgtgccttttaaatgatttattttttactttaaaacattatcttctcctctcataatttgacagtattactttactgtattttagggcttcctcttgagattgctagccaaattcttgacttaacaagtgtaatgtaatttcaaaaattctcctctttctagacaacacacaagtatagaacatttaaaatccatgtgcctccttttgatatttgctgtagagaaaaaagtgactcatcctggatgctcatctgtcattttgacttctgattagctccaatcctgtgaatacctcctgatttctgttttatttaatgtycttagcgtaagaaaaaagcaaccttgattctattgcgcacattgtaggctgtgacacacacagcattcttgcctgtctggagggttgcctttagctgtcttgctagggcccatata

SEQ ID NO: 373067 - DNA, 625 bp, Homo sapiens
ttaataattagtaatagccaaccgaagttgtgaatgtgaaggaattttgtatttattagatgaacacagcattatgctgacaaagttattattgtcactttggtggaaatttgagaggcttctgcagttcaacctttgaacacaggttagtagtatgctgataaatacttaacagttagatctctggaagagcaggagccttcatttgcagcatgtgccagttttcctggtatatatagcttcatcatgaccaattccaagctaccaacataatgtcacttaacgtgaagtcaagaagaaatatatacaatgcactctggagctgtggcaagccatctcagcataccactgacagtcaggccaagaaagccacactttaatgaatacaaaacaggtaggtaatggagttatgaagtgttgctacctgattttactcaatagcaagctaatattatttcaaaaggaaaaagccaaattttatcctgtaagtctcttggyattgaacagcattggcattacgttgcattcagtgtagttctgattttgcatcattcaacctcagtttgttctctccgtggccacatttctaagacattttacaatttccttctctataaaattcaag

SEQ ID NO: 373068 - DNA, 435 bp, Homo sapiens
ttataatgttacaaggacttaaaaaaattgttgggaatatgaaggacaactagtaaatgggggaacaaaaagctgtttcaacatttcagatgaagaataatgatgataaactcaggtataccctgtcygtgtgaaaacaaaatttctgtttcaagagaattctttagacaatcagaatctataaagccagagaaatgcctccagaaggcaaaaccactaatcatgtcccttgtgatatacactgtaaagtagtgagaggaaatcctacaaaggttttcattgttgcgtttgttttccaaacatccatgagcagacttccccatcagatgtggctctaggaacttcaatgatgataaatcaacatcacaaaagcagctatggactatacataaaagaatgggtgtagctgagttccagtttcaataaaactttatt

SEQ ID NO: 373069 - DNA, 435 bp, Homo sapiens
ttataatgttacaaggacttaaaaaaattgttgggaatatgaaggacaactagtaaatgggggaacaaaaagctgtttcaacatttcagatgaagaataatgatgataaactcaggtataccctgtccgtgtgaaaacaaaatttctgtttcaagagaattctttagacaatcagaatctataaagccagagaaatgcctccagaaggcaaaaccactaatcatgtcccttgtgatatacacygtaaagtagtgagaggaaatcctacaaaggttttcattgttgcgtttgttttccaaacatccatgagcagacttccccatcagatgtggctctaggaacttcaatgatgataaatcaacatcacaaaagcagctatggactatacataaaagaatgggtgtagctgagttccagtttcaataaaactttatt

SEQ ID NO: 373070 - DNA, 413 bp, Homo sapiens
gtagagtaccaggtcaatttctctttggtagtcagtatcaattatcccagccagcactgtaacttccttccctgcttgttgattcagaggcatgaagagcccaaagtcatcaggtgaattttaacttccacatcagtggaatttgtgttgtgtcttctgctagaagcattcctctctttggaactaagacttctgaacaagcagagcgtaaggtcatgggagcaggaagcaaaattgtgctaatgggtcatcagttgtaatagtaaayagagccatttccattttcaccacttgaattgtggacccatgaattctagctatggaagaaatagtaccatattttggatatcgattcaaagtatatgtagactcctggagaactttgctacagctctgcaaggtactgtctcata

SEQ ID NO: 373071 - DNA, 533 bp, Homo sapiens
tgtaacatgaaaactgcattargtggttttcggttacagtacgcagttagtaccacctgttgtcatgcatttgttccctgactgattttcctggaggaggtcagagccctgcattactttgctatgcaccacgatggcagggtcctgaatatttaatcacgcttctctgatgagaagggtgtatggcagcaagttccaggggagtgtgtgagtgtggtcgtcctcagactgctgttgggaaatgaatccttaggaaacactcaaggacattcaaaaggcacagaggatttctgagccaagctttgcctttacctagttgaaattgaatttagatttgtaggatgaagtgctaaagaggtattcatcttccacatcatctaatattctgccttatgtaagtcaaaacaagaatatataatttgggaagaatgacagcagttatgtcttgttgctgttctattgctgccttttccagcagggcatgccaatgtgggccctcctatccaatttaatctaaaagttgcatgtgctgg

SEQ ID NO: 373072 - DNA, 533 bp, Homo sapiens
tgtaacatgaaaactgcattaggtggttttcggttacagtacgcagttagtaccacctgttgtcatgcatttgttccytgactgattttcctggaggaggtcagagccctgcattactttgctatgcaccacgatggcagggtcctgaatatttaatcacgcttctctgatgagaagggtgtatggcagcaagttccaggggagtgtgtgagtgtggtcgtcctcagactgctgttgggaaatgaatccttaggaaacactcaaggacattcaaaaggcacagaggatttctgagccaagctttgcctttacctagttgaaattgaatttagatttgtaggatgaagtgctaaagaggtattcatcttccacatcatctaatattctgccttatgtaagtcaaaacaagaatatataatttgggaagaatgacagcagttatgtcttgttgctgttctattgctgccttttccagcagggcatgccaatgtgggccctcctatccaatttaatctaaaagttgcatgtgctgg

SEQ ID NO: 373073 - DNA, 533 bp, Homo sapiens
tgtaacatgaaaactgcattaggtggttttcggttacagtacgcagttagtaccacctgttgtcatgcatttgttccctgactgattttcctggaggaggtcagagccctgcattactttgctatgcaccacgatggcagggtcctgaatatttaatcacgcttctctgatgagaagggtgtatggcagcaagttccaggggagtgtgtgagtgtggtcgtcctcagactgctgttgggaaatgaatccttargaaacactcaaggacattcaaaaggcacagaggatttctgagccaagctttgcctttacctagttgaaattgaatttagatttgtaggatgaagtgctaaagaggtattcatcttccacatcatctaatattctgccttatgtaagtcaaaacaagaatatataatttgggaagaatgacagcagttatgtcttgttgctgttctattgctgccttttccagcagggcatgccaatgtgggccctcctatccaatttaatctaaaagttgcatgtgctgg

SEQ ID NO: 373074 - DNA, 617 bp, Homo sapiens
ctgcctattgattgcctttgatataactgaaaatgaggcttccttgactcacttgtgatttgttttgaaatggaaggctgggaatgcattaccaagaccacatcccagcctctcagtggtctgcaggtggctttaggcagaaatatctggtgggttattgggagtttatagagccataattttgtcatcttcagcttgctctttgattgttctttgacttctcattccaagatggtatttggcttatgtcgctttgattatcaaaagtctgtgtttttgagaattcaggagatatcaaatctgtaagactcttcaccccatacttagaaattctgtctatatattggaggcggggcctaagaattctgcattttaaacaggcattccaggtggttctgatgcaaataggccaaacattgtactttgagaaaaaatgggtaagagtgtaaatacaattaagtggatgagctccagtgatctcaataaagaaaaaaagtttatatattaacactttaaaatggttatataattgtaggrtagtattttaatacttcctataactacatgtgttttgtcaggcaggagactgcatgactgtttaatagctgagaaaatgc

SEQ ID NO: 373075 - DNA, 631 bp, Homo sapiens
attcaaattccactctttctcaataaatactttgacttgttcttagctgctccaacaagaaagaactactggtaactactaagctggtatttctggtggtctgaaaactgtagcttcctaagcttctctgtaactaattgaaaagaactttgagagtagtaggtggcagaaagtagtaagtgccagaactcccaggtaatgcttttctgagatgctccaacaagaaagaactattggtamctactaagctggtatttctggtggtctgaaaactgtagcttcctaagcttctctataactaattgaaaagaactttgagagtagtagatggcagaaagtagtaagtggcagaactcccaggtaatgcttatgcaaaactaaaagctaaagtttgggaaccaacataagctaaaaaactgtgaatgagagacagagagagagaaattttattagagaaaccattccattcaatatttgttgagttcttactgttggtaaaatattgagctcagctttgtaggataaaaacatgaatgccaagatgaatacggcattttcctgtcctcataggtgtaatctcctttcatataaagcatatcttatgtttagtaatttttctagcaagtagcat

SEQ ID NO: 373076 - DNA, 638 bp, Homo sapiens
cataacacaaaaataatcttatactgaggttatatttatgacaagttttgtatctatttctaaacggtacgttcttccagcagactgatttaacactcttcgggtcacagacgttttaaaaaatctttttcataattatttggcaaatttatacctatctactctttagggacttttgtacaagctccctcacaaaaatcttctaaagttataagtttattgcacccatttacatagaaggaaactaaaaattaacagctatgtaaggcatctatgtttacctagctagtagacagcaaacctacattaaaagtgaggtatagtggagactgctaggtaatccccccaatttttttttgtttctttttggacayatagttgagctgtatttcccagtcttcaattccattggatttggccataaaacccagttctagttgatgggatgttagtgaatataatgaaagagatttctgggccaagctaataaaaatgccacacttttgctccttggtactcctttcctttttctagagtactgggaggttagtatcttctaaggcaaatgtgaaagtcatgcattgaagatagccaacctgaacatccacttagacaattaaatgagagagaaataaatc

SEQ ID NO: 373077 - DNA, 507 bp, Homo sapiens
gtggttatgcatacctgtggtcacaactacttaggaggctgaggcaggacgatccatcgcttgagcctaggaggttgaggttgcagtgaggcatgttcacaccacgtcactccagcctgggtgatagagcaagaccctatctcaggaaaaaataagtaataagatggcaaaattatgacacattttcctgtgaacagcacacttcagggtctgaggcagctgcagtttcaactggagagatctagatagcattaagtgtttatttaggtgtggcagactgaatcctcttgacctgtgaacatatactatttgactagagtgatgttttgcctttttaaattaaatttgagtakttttggttggagcattactactatttgcaacaatcctcaaaactccctatttattgctttttgcttggctcacttcacatccattgtaggcatttgtctgtgttctggtttaatgctgtgagttttaataagagtttctgtacggagcctgaga

SEQ ID NO: 373078 - DNA, 613 bp, Homo sapiens
caaatgttaatgagggtttaagaagaagcagagtattactgtgtttaagatctgggatgtggctgttgatctctccctttcccaatttaatcactgggtgatactgagccaggcacttattttattttattcatttctaaataataatatatccgtgttgcaatactgaatatttttgacatcttcttccagcaaggaaccagatttacctcccacctgaaacaaatgatgaacaagcaaaaccataaaataactgtttttagacattgagcttcaggcattgaagaacagtgattcttcaatcactgttgattgaacagtgatattgggaagcaagccaacaatttgtgcttcagggagagttttccaaaccaattgttattaatgagtcacacatcwtatctgatttatgatttattaaactttatgcattaaatactttccaaacaagacaagttttgtaatgtgccatatattataaaatacttttatgttttgtaaaagattcaaatgaaattagaaaacttagtgtgtgaaatatatatttcatttttaaataaaaactgtcaacttagtttcttgattaaaattaaaatttgcagagttctgtttc

SEQ ID NO: 373079 - DNA, 613 bp, Homo sapiens
caaatgttaatgagggtttaagaagaagcagagtattactgtgtttaagatctgggatgtggctgttgatctctccctttcccaatttaatcactgggtgatactgagccaggcacttattttattttattcatttctaaataataatatatccgtgttgcaatactgaatatttttgacatcttcttccagcaaggaaccagatttacctcccacctgaaacaaatgatgaacaagcaaaaccataaaataactgtttttagacattgagcttcaggcattgaagaacagtgattcttcaatcactgttgattgaacagtgatattgggaagcaagccaacaatttgtgcttcagggagagttttccaaaccaattgttattaatgagtcacacatcatatctgatttatgatttattaaactttatgcattaaatactttccaaacaagacaagttttgtaatgtgccatatattataaaatacttttatgttttgtaaaagattcaratgaaattagaaaacttagtgtgtgaaatatatatttcatttttaaataaaaactgtcaacttagtttcttgattaaaattaaaatttgcagagttctgtttc

SEQ ID NO: 373080 - DNA, 586 bp, Homo sapiens
ttattttcttctttttagagtgccatctctcttttagggcagaagaggcctgataattaattaattattaaatcaattttataacatttattatatacctgctatgtgccaggtgcttttcttgtaacttgaaatcaccaakaataaaacagtcttcatcagaatttaacagttaatgttgaactgttctaaggggaaataaacactaatgaagaagaaaaatattgccaaacaaagttgttttggtgtcctctattttcagttacagagaaggtaaggtagaatatcaaaataataaggtcatttgcttcagatatactaatgcaaagattacagggccttattccaaagcagtaatcctctccatctctcagagctgaaggcttatgtctatcattctgccagagccagatgcatcatagatagcaattgtgtctttgaatgtctcttgtcttttctcatgatccactggcagtggccttacttcgttttgctgcctttgtaaccaatgggtttccttgcctcttctccattgagtattttatggatgacttcgaagtacatctgaggtatccaatttttcagc

SEQ ID NO: 373081 - DNA, 586 bp, Homo sapiens
ttattttcttctttttagagtgccatctctcttttagggcagaagaggcctgataattaattaattattaaatcaattttataacatttattatatacctgctatgtgccaggtgcttttcttgtaacttgaaatcaccaagaataaaacagtcttcatcagaatttaacagttaatgttgaactgttctaaggggaaataaacactaatgaagaagaaaaatattgccaaacaaagttgttttggtgtcctctattttcagttacagagaaggtaaggtagaatatcaaaataataaggtcatttgcttcagatatactaatgcaaagattacagggccttattccaaagcagtaatcctctccatctctcagagctgaaggcttatgtctatcattctgccagagccagatgcatcatagatagcaattgtgtctttgaatgtctcttgtcttttctcatgatccactggcagtggccttacttcgttttgctgcctttgtaaccratgggtttccttgcctcttctccattgagtattttatggatgacttcgaagtacatctgaggtatccaatttttcagc

SEQ ID NO: 373082 - DNA, 441 bp, Homo sapiens
tccttgggtctcttaagcatgccctgcaagctgtctctttcttcactgagcagaagatatttaatggaacctttcagtctccatcatctcttcacttcaaaatgataatactttgaaaagttatgtgtaaagtgcatgtatttactaaatgagcataaaattatatgtgaaatccaagaatttaatagtaacttttagaccaacagagggaaatayggtatttttttcagaactttaaagatttaaagatactgaagaggttaaaaaaaaaaaaggccctcactgagcctatgtaaagtgatgaattgctccacaaagtgatgaattgctccgcaagcaacatgcagaaatattgcactttagtgttgtaactcacttacattcctagatgatgttcatgtaataatagttcatacatgttgaatgtcaaacacatgccaa

SEQ ID NO: 373083 - DNA, 648 bp, Homo sapiens
agtttaagaagccaggatttggagataacctataaatattggaggcaggcccaaaggaagttgtagggagtactaaatataagacttgacgacaatagagacacagccctattctcagggattttgattcactagatctgggtaggattcagtaataaatatcattttcaacaaaaatcctcagcgattctgytgcaggtggtcctcagatcacatcttaagaagtattgatgtaaacagaactgtttcaaactgcttctttcttcattcccttactccctctgctaaccaagtcctcccactcagtccactgaaagggccaggcttggtgatgctaaggtatggcttcctccctaaaggagataaacaatacaaaaactttcatgctgagccaaaatgttcacttaatatcaacttgtaacagtctcttgtattttgtgtctagatccttgatccaaaactacctaaatttggaatgaagctgctcaaactttcataattactgacattattaagattttaaatctgtatagaactaaagttttacttttttaattgatgcataatagatgtacatattttgggggtacacgtgctagtttgacacattcatataatgtataaattggtgtaattgggctattcatc

SEQ ID NO: 373084 - DNA, 619 bp, Homo sapiens
agctaaaatcacggggtccaacttctgttatttggaaaggcaattgcctgagtggccatgaatcttccaatcttaagacaattaaaagtaagtagcaatgawaaaaaaaaaaatccagttaaatgaatgctaatgacctgtctgactagcgatgtgtctttcaatcccagatgaaaaatcacaaacaaaaagatttaacaaaatcaaaactataatatctgaaattatagaattggattctcatgtctaaggatttgcacatttaggcaatttatgtttctgagatgcttaaacaaatttaatctagtagactgatagtcttatagtttaaaatatattttaatcaaaatataatgaagtaactgatagacttgtgattttaagttgaaattttagtagacttctgttcggtaatgggaaatctaagatttttttcattcgtcgattataaattttaggttttacttttataaaaattatttagtgaataggaaagtttgattaagttagagagttacctcaaaatgaagtaaaatatattaatttttgaataatataccttctattactacatataatagtgctaatgaaatggtagtatctattgttgcaatgcaga

SEQ ID NO: 373085 - DNA, 546 bp, Homo sapiens
gagggagtcttcttccagacagaaaaaaaccatcctctgttgtcttagaaatggtggccaatakgtttccttccttctgttgttttctctttggacaggaaaaatatgtagaaagaatgagaaatgccctaagcattaaattcagtaccctgaacaatcttactggggagttgaacccatgcctggatagccagagaaagaattatattatttggaggggagcttggggtggtggccatccagatatgggaactcagagaaaggatatttctggcaatggcagcttcataatttctaaatagtgataatttgatcagagagtgaaggtggtggtggctggtaggataataacattgagactcgatatgtatggcaaacaggatcctttttaacatatcactgaggatggatggagaggaagagagttatctttctgagaatccctgatatgatctgggaacagtagtcagcagagtcattacttttctattgctgctgtaccgaattaccacaaacttagtggcttccaaaattgcgaatgtatta

SEQ ID NO: 373086 - DNA, 546 bp, Homo sapiens
gagggagtcttcttccagacagaaaaaaaccatcctctgttgtcttagaaatggtggccaataggtttccttccttctgttgttttctctttggacaggaaaaatatgtagaaagaatgagaaatgccctaagcattaaattcagtaccctgaacaatcttactggggagttgaacccatgcctggatagccagagaaagaattatattatttggaggggagcttggggtggtggccatccagatatgggaactcagagaaaggatatttctggcaatggcagcttcataatttctaaatagtgataatttgatcagagagtgaaggtggtggtggctggtaggataataacattgagactcgatatgtatggcaaacaggatcctttttaacrtatcactgaggatggatggagaggaagagagttatctttctgagaatccctgatatgatctgggaacagtagtcagcagagtcattacttttctattgctgctgtaccgaattaccacaaacttagtggcttccaaaattgcgaatgtatta

SEQ ID NO: 373087 - DNA, 565 bp, Homo sapiens
cattgtttttaggggaaatgcaaggtaaggttaaattctcatgagcctctctcttgtacgtattctcctgatttgagccttcatgctgaagtacccatgctcacaattttagctgtggctcactgttagaaaactgttgctgaaatgttatctatgtacatgtaaggttgtctatttttgttattaaaggttgtcaggtgacagtgtgaccgtatactataaattgtagaacttcttctyttaaatatttggcaatatgactgttttgtaaaagcaaaaaacagactcctcccaagataacatgtgctctaggattcatacagaaatatatttggtgaggccacatggtttagtagaaagaaatattgagattttcaaatctgaaggcctaattaagtttaagacccagtattaatattggttataataatgcgtgactacatacaagctaataaaactttgttcactcctatttgagcttgtgtaaataagcacaaaataattctttttttttttttttgtctgtttgtttgtttgtttttgagaaggagtctagctctgttgc

SEQ ID NO: 373088 - DNA, 565 bp, Homo sapiens
cattgtttttaggggaaatgcaaggtaaggttaaattctcatgagcctctctcttgtacgtattctcctgatttgagccttcatgctgaagtacccatgctcacaattttagctgtggctcactgttagaaaactgttgctgaaatgttatctatgtacatgtaaggttgtctatttttgttattaaaggttgtcaggtgacagtgtgaccgtatactataaattgtagaacttcttcttttaaatatttggcaatatgactgttttgtaaaagcaaaaaacagactcctcccaagataacatgtgctctaggattcatacagaaatatatttggtgaggccacatggtttagtagaaagaaatattgagattttcaaatctgaaggcctaattaagtttaagacccagtattaatattggttataataatgcrtgactacatacaagctaataaaactttgttcactcctatttgagcttgtgtaaataagcacaaaataattctttttttttttttttgtctgtttgtttgtttgtttttgagaaggagtctagctctgttgc

SEQ ID NO: 373089 - DNA, 565 bp, Homo sapiens
cattgtttttaggggaaatgcaaggtaaggttaaattctcatgagcctctctcttgtacgtattctcctgatttgagccttcatgctgaagtacccatgctcacaattttagctgtggctcactgttagaaaactgttgctgaaatgttatctatgtacatgtaaggttgtctatttttgttattaaaggttgtcaggtgacagtgtgaccgtatactataaattgtagaacttcttcttttaaatatttggcaatatgactgttttgtaaaagcaaaaaacagactcctcccaagataacatgtgctctaggattcatacagaaatatatttggtgaggccacatggtttagtagaaagaaatattgagattttcaaatctgaaggcctaattaagtttaagacccagtattaatattggttataataatgcgtgactacatacaagctaataaaactttgttcactcctatttgagcttgtgtaaataagcacaaaakaattctttttttttttttttgtctgtttgtttgtttgtttttgagaaggagtctagctctgttgc

SEQ ID NO: 373090 - DNA, 615 bp, Homo sapiens
aacttcctaacatgatttgcaggaattggtccagattcatttcttttacatcgtctagcctcaatttcttaataaatgggttttatagtattcgctgagaaggaataagtaaaatacctagctaacacagtacctgaaataaataagggactattaaaagtttttttctgtttttccttattaagtatccatacttaccccacaaataaatttctgttagtttaaaatcaacatggctattctccagaaaggtatccttgatcatgataccttcttgtgacttatttaatttgtgttggaaataacagatggaaatggtctaaaatgggrtaaaataattcatccggtcttcaggctagacaagctattggttctggaccacattttggtgtcatctatatttgactcttttagtctttaaaaatcagtcaacccattaagcaaacaatttgcttttagtccttttagtgatattatttcaaaagggggagattttgaatagcaaacagagcaggaatagcatcgtgttgtatacctgaaatacatacaataaaatttatttaaaaaatgaaaattctaacagtttaagtgagagagcatatattcatgatatgg

SEQ ID NO: 373091 - DNA, 454 bp, Homo sapiens
ccaggcgcggtggcttatgtaagcatgtaatcccagcactttgggagactgaggcgggtggatggcttgcggataggcattcaagaccagactggtgaacatggtaaaaccctgtctctactaataatacaaaaattagctgggcatggtggcgcacacctgtaatcccagctactctggaggctgaagcaggagaatcgcttgaaccccagagatggaggttgcagtgagccaagatcctgccattgcactccagcctgggtgacaagaacaaaagtccgtctcaaaaaaaaaaaaaaaaaaaaagatgagaaaacaaaattttggagttgttaaggagcttgcctaatcacacaaatcataagtggctgaacggcagttcaaactgagagtgyttgacaccagaactccaagctttttacttatcattccataatgtctcccaattttaatg

SEQ ID NO: 373092 - DNA, 567 bp, Homo sapiens
aagacgtgatggtgcaaagataaaagttcaagtcattttctttgccaggtctaagtgtttctaccccaccaagccaccacctgaggcacttgtcacaatgtaaggttgtgagagcaatgtgcttgtggaatgggagagtaataatcagtacgtggaccaattagctgttatgaccttagtaaaatcacttgaataactcaggtccagttgtctcttccgaaaataaagaaaggagaccaaatgatttttaagatccattgagatgtaacgtgtctatgatccaagaatatattctgacacaaaaaattcgtttatatgagtgacatgataaacacaatgttgtctatattgttgccattgtgttaaggacttgtaccactttgagtgcaaacaagtttctcaaccttctaagttcagggattgtgcttttacttgaagataggcyaggagggcatcattggaaggaacatttgcatgtatttgggaacatacccagcacttggctgtatagtttcccttgggggaattcagtagacacagcataaaactgatctttaaagttctaaa

SEQ ID NO: 373093 - DNA, 567 bp, Homo sapiens
aagacgtgatggtgcaaagataaaagttcaagtcattttctttgccaggtctaagtgtttctaccccaccaagccaccacctgaggcacttgtcacaatgtaaggttgtgagagcaatgtgcttgtggaatgggagagtaataatcagtacgtggaccaattagctgttatgaccttagtaaaatcacttgaataactcaggtccagttgtctcttccgaaaataaagaaaggagaccaaatgatttttaagatccattgagatgtaacgtgtctatgatccaagaatatattctgacacaaaaaattcgtttatatgagtgacatgataaacacaatgttgtctatattgttgccattgtgttaaggacttgtaccactttgagtgcaaacaagtttctcaaccttctaagttcagggattgtgcttttacttgaagataggctaggagggcatcattggaaggaacatttgcatgtatttgggaacatrcccagcacttggctgtatagtttcccttgggggaattcagtagacacagcataaaactgatctttaaagttctaaa

SEQ ID NO: 373094 - DNA, 640 bp, Homo sapiens
ttatactacatactgatgctataagaaagagataaaaatgagaaggatatgtaagacagtatggcaattgaaaataaatatgttcaaaataagtacctctcttgggtggtaaagggataataggaagaatgggatgtcttatggagtagttagttccctacatctagggtgttttcaagcatgtgatccatagtgaaacaggccttaaaaagtcccctgtagggtaataatttgtaattatttattggctatttatgtcttgttccttttatcctcttcacggctccttttgcaaatgcctgtatttctgtgtagttaagataaagatagcactttttaacttgaagccttgcaaagtgacattttctccaaatgcacttggtgaatttttttatacaactctaaactagagctgaatcaactgtagggaatgtgctgaatgtccatccataaagggaaacaagattaatgacctctaagtgtgaatgggcaaaagcaatttacaagagtgagtgagggtcatattttatcacaggcaggtggcttattccaactttgcaaacagttaccaaaaatgcacacaaccacaaatctttggcctttccatcctcaygtgaaaccattgtgtgtgccagacaaa

SEQ ID NO: 373095 - DNA, 579 bp, Homo sapiens
attcttttacaagaacaaaacataacagcaacaaaacaaataaatgaaaacaggatgtccttagaatcctcaatataggttgcaagttgaagactttgatggcagactttcaggattcaaatcctaactttctaacttactaagtatttgaactcaggtaagttattgaacttcattttatgtatatagagctacagatatatacatctatgtatatatatagctatgtaatacagatatacatataaaatgtatatataatttggacaaataccagaaaagtagtttgtatataatacaaagtcattattactagttgtttatagtcctcttaatattactggaactaaagtttgtgtgtctcagccctaacaccgacattgcgaagttccaacaggtctacacctckaacacttctatatttatttatttgctcatccatctaatcttctggatggtaaatttcttaaggtaaaaaagttgtgcttctcattgatctaccttttagtggacaatttatgctggcttgactatcacaccagccttaacagtaaatcatccttgtagtataagttttca

SEQ ID NO: 373096 - DNA, 639 bp, Homo sapiens
ctgggattacaggcttgagccaccatgcctggcccctattgtttcttcttttacctgacacaaagatttcttcttgccactgctgatgagaggtgatggttcagtactagactctactgaaccacacartggatttctagggagtcttggaatcactgcatcatttatttattcagcaaatattcattgaacttttattttacttagctcccttgagatggtaacataaaacttggtcctgatgaagtaccatatattcacatttacattcatcctcaacaccctcaccccagcttcttaccaggagaacatataaaaatgctgttctccccataggttctctatgcaacgtctgttagcagcagctgaaacagcagcaggcagataataaatttaaattgactcctctatatttcttcatgttcctctgagatgaaacgagttcatttcagagttcctgggtgtctgatataattaggtttctttctgtctccttttccttctccttacttactttctgtcttatattccatctcatgtactgaagatgtgtatctgtttttggtttctagcatcagctatcatcaatgattagcaactgtaggggttttattgcagaaaatattacttcaatgatca

SEQ ID NO: 373097 - DNA, 639 bp, Homo sapiens
ctgggattacaggcttgagccaccatgcctggcccctattgtttcttcttttacctgacacaaagatttcttcttgccactgctgatgagaggtgatggttcagtactagactctactgaaccacacaatggatttctagggagtcttggaatcactgmatcatttatttattcagcaaatattcattgaacttttattttacttagctcccttgagatggtaacataaaacttggtcctgatgaagtaccatatattcacatttacattcatcctcaacaccctcaccccagcttcttaccaggagaacatataaaaatgctgttctccccataggttctctatgcaacgtctgttagcagcagctgaaacagcagcaggcagataataaatttaaattgactcctctatatttcttcatgttcctctgagatgaaacgagttcatttcagagttcctgggtgtctgatataattaggtttctttctgtctccttttccttctccttacttactttctgtcttatattccatctcatgtactgaagatgtgtatctgtttttggtttctagcatcagctatcatcaatgattagcaactgtaggggttttattgcagaaaatattacttcaatgatca

SEQ ID NO: 373098 - DNA, 639 bp, Homo sapiens
ctgggattacaggcttgagccaccatgcctggcccctattgtttcttcttttacctgacacaaagatttcttcttgccactgctgatgagaggtgatggttcagtactagactctactgaaccacacaatggatttctagggagtcttggaatcactgcatcatttatttattcagcaaatattyattgaacttttattttacttagctcccttgagatggtaacataaaacttggtcctgatgaagtaccatatattcacatttacattcatcctcaacaccctcaccccagcttcttaccaggagaacatataaaaatgctgttctccccataggttctctatgcaacgtctgttagcagcagctgaaacagcagcaggcagataataaatttaaattgactcctctatatttcttcatgttcctctgagatgaaacgagttcatttcagagttcctgggtgtctgatataattaggtttctttctgtctccttttccttctccttacttactttctgtcttatattccatctcatgtactgaagatgtgtatctgtttttggtttctagcatcagctatcatcaatgattagcaactgtaggggttttattgcagaaaatattacttcaatgatca

SEQ ID NO: 373099 - DNA, 577 bp, Homo sapiens
aaaaatggtcaattaacccccccaatatagggaaaaggcatgggtaagatccctttccccgcatttagagggaatcaaccctggtgaagccttgatttcagattttgagcctccaaacctgtgaggcaatatatttctattgttttagcccccccccccattagcaaaaatttgtttggggtggtttaacaaaataaaccaagctttatgggggtttccaagtttgtttagacatgttttagtccccccccctagggcccctgttttttttaaaaaaaaaaaaaaaaaaaaaaaaaaaagcttgattgacaagtaaacccagattttgttgaatatttcaacataataacacttgaaagaaaataatagaaaaactttgcttcttgaggaggaaacagccctgttctaaaactgcttaccatgagtgctagtgaaagaattataaagaaagtacagaactttagtaatttgatagtagaatattatgaatttgaggaytcatgacattcttgggatacattttagaaaaactgagaaagggcttcctcacatagcaaaggaggtaaaattcaaaaat

SEQ ID NO: 373100 - DNA, 621 bp, Homo sapiens
gactatttaatttaaccttagcatcaagcatgtaatataggaagaagtagaaaataagtctaaaaagggaggacaggagcctagaactgcattctggataacttgtggcatccatatgggagaaggatatataactcaataaatcatgtttaatatcagtggcttttgaaaatgagtctgaagcatgtcaatggattaggaacattaattcagagggtttatagaatagattcacttttcctaatagtcaaagttattattttatcattttcatcattatcattgtcatcattatcataattacaatgtttatccagtactcaatatatagcagaaattgagcactttcctatatcacatcgaaccctccaaacaacactatacagcagctgttattttccctattttatatgggaagtaactgaagatcaaatagagtacatcttttggtcaaagtcatattggttcgamgtggttgaacctggattcaaactcaagtctgaccctagatttctttctcttaagcattacatgcttctccgtttgagaaaaggacatctagactcacatctcctttcaaaatattgtcatccatgaggtcacctcaagactcaagtgcca

SEQ ID NO: 373101 - DNA, 501 bp, Homo sapiens
tctccttggcttgaagatggctaatcttcaccctttgtcttcacattgtcttccttctttacatgtctgtatccaaatttcatctccttatgaggacagcagtgatattggcttagggtccacactaatgacctcattttaatttaactctgtaagtcccattaaacaaatatagtttcatttgaggtactggaacgtattataatctttctttttgtgagggaggatgacacaattyagcccataacacagaagaaaaacacaatcaaaattcacattagggattttagctctaagaaattaaatatgtatattagaatacataaaaacaccaataagaatacgaagtcatttgtgtaaatgagtttattcatacattttcatactgctacaaagaaaaacccgagactgggtaatttataaaagaaagaggtttaattgactcacttttctgcatgggtggggaggcctcaggaaacttacaaacatggtgaaaaggga

SEQ ID NO: 373102 - DNA, 590 bp, Homo sapiens
tatagttagagagacggaaaggtacaagaycaactatggaagaatccaatgcctccaagcattacatgttaggataaagatcaggatcactgtttgcattctcagtaagataaacttagagaaactgcatgttttcccttttctcaatgatttaactttttcttagttacgagacaaactttagaacagccaataatccattagagtgaagacataattgtctttttaataacaatgcctcaaagtgtgggatatacgcctgtcaactcagagttagaattgaatgtttgactttcattttatttatgttgtagaaaaaaagattgattttttttaaaaaaaggaggtttttctgttttatttcattttaggctgaaattggttgtcagaatacagcatcactgaaatattatgtgcattgaacaaatggagctgggttgcattccacagtatgccaccaaagtgaaaagaaacaaagtttttgtatagaaaactggcatgttaataacgtcacactcagtggcacatgcctgtagtccaatatactcaggaggctgaggcttggaaatcacttgagcccagaagtttga

SEQ ID NO: 373103 - DNA, 590 bp, Homo sapiens
tatagttagagagacggaaaggtacaagaccaactatggaagaatccaatgcctccaagcattacatgttaggataaagatcaggatcactgtttgcattctcagtaagataaacttagagaaactgcatgttttcccttttctcaatgatttmactttttcttagttacgagacaaactttagaacagccaataatccattagagtgaagacataattgtctttttaataacaatgcctcaaagtgtgggatatacgcctgtcaactcagagttagaattgaatgtttgactttcattttatttatgttgtagaaaaaaagattgattttttttaaaaaaaggaggtttttctgttttatttcattttaggctgaaattggttgtcagaatacagcatcactgaaatattatgtgcattgaacaaatggagctgggttgcattccacagtatgccaccaaagtgaaaagaaacaaagtttttgtatagaaaactggcatgttaataacgtcacactcagtggcacatgcctgtagtccaatatactcaggaggctgaggcttggaaatcacttgagcccagaagtttga

SEQ ID NO: 373104 - DNA, 590 bp, Homo sapiens
tatagttagagagacggaaaggtacaagaccaactatggaagaatccaatgcctccaagcattacatgttaggataaagatcaggatcactgtttgcattctcagtaagataaacttagagaaactgcatgttttcccttttctcaatgatttaactttttcttagttacgagacaaactttagaacagccaataatccattagagtgaagacataattgtctttttaataacaatgcctcaaagtgtgggatatacgcctgtcaactcagagttagaattgaatgtttgactttcattttatttatgttgtagaaaaaaagattgattttttttwaaaaaaggaggtttttctgttttatttcattttaggctgaaattggttgtcagaatacagcatcactgaaatattatgtgcattgaacaaatggagctgggttgcattccacagtatgccaccaaagtgaaaagaaacaaagtttttgtatagaaaactggcatgttaataacgtcacactcagtggcacatgcctgtagtccaatatactcaggaggctgaggcttggaaatcacttgagcccagaagtttga

SEQ ID NO: 373105 - DNA, 463 bp, Homo sapiens
caggggattgggagacagtccagtcaacaaagatttattgaggcactgcttgcgtaatgtaagctgctggtccacacacaaaggacctcacactgtaacaagaaaataaagccatccatctcttacagcaattttagctaggccattttatttattcgtacaactatcctgtagcaacttgacaatggaatcctggtcaagttgcctaacttttaygaggcttaatttcctcatctgtataatagaaatgatcacttattcttacctcaatgagttgtacaaaattagatagaattaaataagcaaatgtacccaacacacccagtacaatatctgacatgccctaagacctcctaaaataaaagtaatcacttttatttcagagccaacatcatagaatgatctagatgctaaaggaatttagagacaggaatagtcaaggaagcattatgggagacactag

SEQ ID NO: 373106 - DNA, 549 bp, Homo sapiens
aagcatcaagtatagccccgttgactctcaaaaattattggaacaattgtcattattttttcattgttcatatgagattttcatcttcttwtaaagccaatataagctcaagtactttgaaaacaagtttcctcagaaatgtaaggaaagagaaaactgtttttgtttgattatttgttagttcttcctcctcccagatgggaaaatcgaagaatacacaaaaccttgatccttttctaaaaaacattaagttcaaattttccaaaaacatagaaattctccttaggagagaattatacaagagtttttggaactctggttgcacattttaaaaacttctttttgcttatttcagtttctgagaggtgggtctgaaataactgatgatttgttccctttctgcagctgggtaaggtggcagctcttaccaggctctctttcagtcataaatgcattttaatggactgacgtgcgcttaacaatacagacagcacctggatttttaagagcaatgtgctgccagggccttccttgtattaaaacttcatt

SEQ ID NO: 373107 - DNA, 564 bp, Homo sapiens
ctggagtgcagcggcgtgattatgcctcactgcagcctcggcctccctgggctcagctgatcctcctacctgagcctgacgagtagctggtactacaggcatgcacccacatgcccggctaattttcagttttttgtaaagatggggttttgccatgttactcaggctgattttgaacttctgggctcatgagatctgccctccttggcctctcaaagtggtaggattacaggtgtgagccaccgtgcctggcccataacgtgattttggccatgctctaaacgccrgttctttctataatctcaaggtgatataaaagcatcaaccatctgccatttctttgggcttttacattttgtatgtcgttgtgactcctgtgtgcatgtaataaaatgtgtgtgcattttttcctgttaatttgtctgtaattcatttcttttatagactcaagttattctcaaataacttgagggtaaaaatgtaaacttccctacatgtggaagtggattttctaaggccttcctgagcacatgagtgagtgcggaagcagatcttcctccattg

SEQ ID NO: 373108 - DNA, 571 bp, Homo sapiens
agtatattgggcccagagaggcatgagtatgaaacttcagtcacacacccttcccctgagctcaaggcacccatgctccaggcaattgtttaaagtcatttttttttcctgactacctgcctcacccattatcttcttgctcctggaatctgcgatacaaagaacaatgcacaggcaatctttagctggtatgattttaatgtaaatttctgataaacaacatagaaactgcctctttttttttttttttttctttaaaagtctgcttctaactgcagctaatcagagcagaatatacattcagggcaacctgaatctatattcccaggttgcaatactcaagcttggcccaaataaactatctacttatattaatattgccttggcttcttccttttaggtygacaactattaagtcatatcctttacaatttaacttaatttttgctaatctacttggataaaagaaccatgcagtccagttgagaaaaaggcatctaaattaaattgtagtataatccatgatggatgttgacctgcggtgaaaagcagagggaggtttttattcaga

SEQ ID NO: 373109 - DNA, 556 bp, Homo sapiens
taaatacctatggcaagtcaactatgtgccaagctcacaatgtggaacgtgctaaaaaagggatagatactagctccagcgggagccggacaggagaaataactggacaagcaaaggttatgcgaaggaaaacaaaacaaaggaaggaattaggaaaggggtggagtgggggtaacttgactagcattttcagcaaaggcttgaagaaattagcaaaacagcatccctatgaaattccagggaaactgccatttctaagtagttcgtgggacaggaaggtccgggtagcataaaggaggtaagtctggaaaggtgaagagaggcagagcttgaaagccctctgatgcttcctgaatrgttttcattcaaacttagaaacagtgcagtgacatgggccatatatttaacttagtaaaagtattttcaataacatagatgaggagtagatgaaaggactggtcatggggaatattaagtgtgcatcgaacccaaaagaagagtaagaagattattctttgcatagcaaaaaaaaggtaaggatcccacaaggggaatg

SEQ ID NO: 373110 - DNA, 520 bp, Homo sapiens
ccagagcagcgtagtggtttgattccaaaagcctctacctggaagaacatccgtaggtgccaaccatgtttgtttatgacagtcttgtattcttgaaaatgaatagcagtccccaaacttctaccagtagcacatttctaatgattcatccatcagtcacactgctatgagcatattattgcrtgaatcatttgttgtagttgtttagatgttttcttcccttcaggctagatcctcacaagttaattaatgtgtcaaagggtaaggaccttgatatccgtcaagcaatcacccacagtatatatcatccccaccgtgctaggcaataggataggcacttacatacatatcttgtgaattctgcacaacaatgccgtaatgtattattttcttcatttaaagggtgcacaagccagacttagaataaataacttagcaaaagccatgtgcctagttagcaggaaacatgggagacaaacccatgtttgtctaacttggaggcttttgcttttagccacca

SEQ ID NO: 373111 - DNA, 570 bp, Homo sapiens
catttgcccctagggatccccagacaatgtctgttttttctggcaaaagactctttccttgatctaactctagccaggctcctctgagtcctcccttgtactaggtgtgatgttgggctctgtccatgtcccgttttttccagttttagcaagaattctgcagagttcagtataccaaaacctcccaccttggtctgacctccttggatatattatcacacttgtctgccttcaacaaagctcctgttgggctagtttagcaaagaagtaccctacctctaagtaattttccattccctgacccccaccctactccttggctataaatccccacttttctttattgcattcagagctgagcccaatctttcctgctactataaaaccccatttagtagcccccgttatcttctctaacaattgtaaagaatactgttttttcaacacttctctagagacccactacagtctttccttggtcagctcgactgtgccatgaggtgcccggattaaacattatttctgggtgtggcsctgtgtgtttccggatgagattagtattaaaattgg

SEQ ID NO: 373112 - DNA, 575 bp, Homo sapiens
tattcctgagaggaaatagtaagtcaggtgtggctgtcccgccactccaggaaactaatttttaagacctgaagagaatacagcaggcccagcttgaagttctgcttagcttggctatttttcaagtttcttatgtgtgacgcttccaagggttacattactgtgctgagctgttatttacaaaactttttcattgtgggtgtttgttttgtttttaatcatcatctagacgccacaacaccctggtgagtaaaaaataaagctagcagtgcaaagctgagcttcagtcatgaggcatcaaacaaagccaatcaagcatttataagctggagaaaatgatcttsatccaatctaatttgcggggaaagatttcaaagccagttcttgattttccaaatgagtacaaccatttctaatttgatttgtctgagaactaccagcactgactggcacgctgtcagcaaatgtagggaaaagactgccctgtgagctcaagctaccttcctattcacaaactcagggtgactcgggaatcaaatcaaggctctttttcatttttgggaaagacaggctcc

SEQ ID NO: 373113 - DNA, 543 bp, Homo sapiens
taggtttgaaacccaatgactactacttttcaaatgatttctacttttgcataatttcagaattgcttgtctcctctactgcaatctttagtcatgcgtccagtctactcacataaggcaaaagcaacaagtcattataacagtaaggtgtgatggttaaatgtaggtgtcaacttcactaaattaaggaatacctaaaaacctggtaaagcattatttgtgggtgtgtctgaaggtgtttccagaggagacatgtgagtctgagtgcactaggaggggaagatctgtcctcaggtttggcaggcaccatccaacctgctaggggcctagagagaacaaaaacagaaaaaatgaacatgttcatctatctgcaggagctgggatgtactcttcctctcctgtcyttgaacaacaactccaggcgcctcagcctttggcctctaggtcttacactggtgcaccccacccccttgggttctcaggcctttggcctcagcctgagagttacactattggcttccctggttctccagccttcaaact

SEQ ID NO: 373114 - DNA, 570 bp, Homo sapiens
tatgtgttcacatgcaatatgatattagcctgtgaattctgatgcacacttctaggtcctactaactgagagactgcctgtgctctgctaatattcctctgtgacctagtcattcatttatgaamatttccttgcatgcttactctgtaccaggcacatttctttgcctgaacatccaaaagtgagcaagacagagagtttttgatcttagagtcatgtcattgattttccctgctctgatcttccttggatcaggaatctgcttttttttagtattatgaatcattcattcattcattcattcattctttcatctcttgtgtttggaacctttctgctgtgccaggtgctgggtagaagctgaggatatacttgagtgccgaccacagtagacaatctctaacttcagaaagctccatggaaggacacacatttgaaccaaataatcatggaaataaacatatatgctcccaaataccatgagtgtcctcatgcacataaatagagcaccaggagagaacctgagaggaaggccactttatactgcagagggggcagtgtgccaggaaa

SEQ ID NO: 373115 - DNA, 559 bp, Homo sapiens
tgtatgtgttcacatgcaatatgatattagcctgtgaattctgatgcacacttctaggtcctactaactgagagactgcctgtgctctgctaatattcctctgtgacctagtcattcatttatgaacatttccttgcatgcttactctgtrccaggcacatttctttgcctgaacatccaaaagtgagcaagacagagagtttttgatcttagagtcatgtcattgattttccctgctctgatcttccttggatcaggaatctgcttttttttagtattatgaatcattcattcattcattcattcattctttcatctcttgtgtttggaacctttctgctgtgccaggtgctgggtagaagctgaggatatacttgagtgccgaccacagtagacaatctctaacttcagaaagctccatggaaggacacacatttgaaccaaataatcatggaaataaacatatatgctcccaaataccatgagtgtcctcatgcacataaatagagcaccaggagagaacctgagaggaaggccactttatactgcagagggggca

SEQ ID NO: 373116 - DNA, 567 bp, Homo sapiens
caacatccttgcaaagaagtgatttaacgattactagatcaaaatgtcaaaaactttatattacttaagaagacaagtttactatatcaagtgttcttttgctatttctgttacccagttcaaagttcctttctaaattagaattcatgttaaaaaaacacacattgtaatctaaacataatccatttagtaagggtttggtttctaatttttttctaaartaagagagtcttcacttttaaaatctccaatagcatactatatgttgaagttattgacagaactcccaaaaccacctgctcaaatctgagtaattcagagtaagaggtactctgcttggtcaacaaaacatgtgagttcgttttctagggtgggtttagattaatgcctatcgcaaagtagaggcatgaaacccccaagttctgtgactattcttgtcctgatttcaagcttaattcacagccctcaaacatttggaaaacctaagaagctaacctaaaggaagaaaagatattgatcagtctggtggaaatattggtccctttgaaaatcataacatttaacata

SEQ ID NO: 373117 - DNA, 567 bp, Homo sapiens
caacatccttgcaaagaagtgatttaacgattactagatcaaaatgtcaaaaactttatattacttaagaagacaagtttactatatcaagtgttcttttgctatttctgttacccagttcaaagttcctttctaaattagaattcatgttaaaaaaacacacattgtaatctaaacataatccatttagtaagggtttggtttctaatttttttctaaaataagagagtcttcacttttaaaatctccaatagcatactatatgttgaagttattgacagaactcccaaaaccacctgctcaaatctgagtaattcagagtaagaggtactctgcttggtcaacaaaacatgtgagttcgttttctagggtgggtttagattaatgcctatcgcaaagtagaggcatgaaacccccaagttctgtgactmttcttgtcctgatttcaagcttaattcacagccctcaaacatttggaaaacctaagaagctaacctaaaggaagaaaagatattgatcagtctggtggaaatattggtccctttgaaaatcataacatttaacata

SEQ ID NO: 373118 - DNA, 563 bp, Homo sapiens
ctagtctcttgtcagtttgcttgcatgagtcattatcgtggtgactgtggtcctgggaatctgtcaagagtgaatttcaggccttatcatgtggaaaacccagttggctttgatttcatctgagtctccgtacyagcacaaatggcgtcacataaagacctataccagactacagatgttaacccaggacactcttcaaagctaaggatgggttacaaataattttaaaattcagcctcaagccaagtacagtagcacagccctccagtcctaattactgggcaggctgaggtggcaggatggcttcagctcaggagttcaagattaggctgggatacatagtaagatttcatctctaaaatataaataaataaaacattgaaagttagacctcagccctaccaactgatagcttcaaactttggaattcataaaaatccattaaaagctcttttaatgcagttgtttggaccctacaatcccagagattctgattaagtccatctggaatagaggttggaatctgcattttatccaacaccccagttggataaaagactgac

SEQ ID NO: 373119 - DNA, 636 bp, Homo sapiens
accccttgggctgctcattgtgggcagtggggcagcaactctgggaggtagttggtagtgtagacaatgtggcttcaaaagctaccattaaagagaactcaggagtcataagcagacattagccttcactttctgcttttctctacaaaacaaacacccttaaaggtaacttcttctgcctctttttccttctagtatggaggacttgtgcttttgatttgtacaaacaaattttcagcctgcatttttagtgtctgtgattttaactgaccacttgacttgtgagcctccctttcctagagatagtgatacttgtcttacaagattgttttattgattcattgaagtaattaytgtgataagctagcaccaagtccagcacgctgagtccagagtttgacacctggtagagaagttaactttattttatatgtgtaaatatttagggagaattaagcaagaaaagggagggagcagaatctctctgtctttcccctgtcaaacccactacctcccccacccccgaccaaaaccctagagatagcaaatagactgcaagttttataccagcctcaatgctagcaatggtggcatcagacagtatgcagattccctggcaggctttgggctcaatag

SEQ ID NO: 373120 - DNA, 564 bp, Homo sapiens
tatctgaccaaaacgagatcaatgcggttggctgctaattaaagcaaacagacaaaggaacgcaacctagctgatttttaatgtatgmgcttcataacacagcttacattagtcagcttgcattttgaggactattgaaatgttttgttcttttgtctccaaggaaagcatatagaaattgaaactgaccttcaattttataaagaaggaatgagaattctttaaaagggaggttactccatggagcataaatacattcagattcatgtatagagaatcatttatctgaacatttgggaatttcaaaggcctgtcatttggtgtcctattcatttcagtctgttatgggaaatggagaagagggaaatttaacagggaagaaaaattatttccgtaggtttttatttaagtacactgagtatattttttaatgctcttatcttttaagcgatgattttctcaagatgtgttcaggttgaagatttttttaagaggggtaggcatgtgtctaaacagttcatatgtctaaataactgcaataaaaaatgggcacttgggcacaca

SEQ ID NO: 373121 - DNA, 564 bp, Homo sapiens
tatctgaccaaaacgagatcaatgcggttggctgctaattaaagcaaacagacaaaggaacgcaacctagctgatttttaatgtatgcgcttcataacacagcttacattagtcagcttgcattttgaggactattgaaatgttttgttcttttgtctccaaggaaagcatatagaaattgaaactgaccttcaattttataaagaaggaatgagaattctttaaaagggaggttactccatggagcataaatacattcagattcatgtatagagaatcatttatctgaacatttgggaatttcaaaggcctgtcatttggtgtcctattcatttcagtctgttatgggaaatggagaagagggaaatttaacagggaagaaaaattatttccrtaggtttttatttaagtacactgagtatattttttaatgctcttatcttttaagcgatgattttctcaagatgtgttcaggttgaagatttttttaagaggggtaggcatgtgtctaaacagttcatatgtctaaataactgcaataaaaaatgggcacttgggcacaca

SEQ ID NO: 373122 - DNA, 633 bp, Homo sapiens
cccttcttccaccttgtccttgttcttagatggtaacaaaattctattatctggaagattgctgtagtaagaggaaacacagggagggaagcacagggaarcatgggctagcttttcaaagcttctacttggaagtagcaaacattacttccactcacattccactggccaaataaagccacgtgggcacacccaacctcaataggggctgaagtgcaatcttgccgtggaatgggagaaaacagaacctgaatattggtgaaaagtgctaatgactgcctgtcaaccgcagtgttagggagacttcaaatagaagaactgagctgatcttgttgtagaaatatgggaggaaacaaaaacaagaaagaaacaaaaaggatactcagaagcaaagaaacaaatggagacataaagcacaggggtcctctgctctgtggaaaattggaattttcaaatagtttcagatggctggagggtgctgaaggtgaggaggagtgataagaggggagacagagataggctagggtgtacacaagataaggagtgagggatagaaaacaaataaagaatatgagccttgattttttatttgtttatttatttatttatttattttttgagagagagagtttt

SEQ ID NO: 373123 - DNA, 633 bp, Homo sapiens
cccttcttccaccttgtccttgttcttagatggtaacaaaattctattatctggaagattgctgtagtaagaggaaacacagggagggaagcacagggaaacatgggctagcttttcaaagcttctacttggaagtagcaaacattacttccactcacattccactggccaaataaagccacgtgggcacacccaacctcaataggggctgaagtgcaatcttgccgtggaatgggagaaaacagaacctgaatattggtgaaaagtgctaatgactgcctgtcaaccgcagtgttagggagacttcaaatagaagaactgagctgatcttgttgtagaaatatgggaggaaacaaaaacaagaaagaaacaaaaaggatactcagaagcaaagaaacaaatggagacataaagcacaggggtcctctgctctgtggaaaattggaattttcaaatagtttcagatggctggagggtgctgaaggtgaggaggagtgataagaggggagacagagataggctagggtgtacacargataaggagtgagggatagaaaacaaataaagaatatgagccttgattttttatttgtttatttatttatttatttattttttgagagagagagtttt

SEQ ID NO: 373124 - DNA, 565 bp, Homo sapiens
ctagggtgtacacaagataaggagtgagggatagaaaacaaataaagaatatgagccttgattttttatttgtttatttatttatttatttattttttgagagagagagttttgctcttgttgcccaggctggagtccartggcacgatcttggctcactggaacctccgcctcctggtttcaagtgattctcctgcctcagcctcctgaatatctgggattacaggtgcacaccaccacaccgggctaaattttgtatttttggtggagatggggtttcaccgtgttggccaggctggcctcgaactcctgacctcgtgttccgcctgcctcagcctcccaaagcactgggattacaggcctgagccactgtgcccagcccagccctgatttttataattgtatagtcttattgagaccacgggtagggggaaacacatgaaaaagtatagaaagtttgccagtcagagaaatgtatgcccaactacggactataagtgtgattgagaaagataattctgaaatcactgtctggaattgcagagcatttcatgaaaaattagaa

SEQ ID NO: 373125 - DNA, 624 bp, Homo sapiens
cttattccttttccttgtcaatgatgcattcacagaaatatttagctttttatttttggggggcaacttatggaatgattactcagatagcttttgagtgacttcagattatgtctatataatactagtttactagctaaaatccagtctaggtttggcacagttcaagcgaatgtctaactggcgtctgggcagctggcgacatggctgatttaagcaaggattgtttttgtctttccatgcagcgggatttaaccgtaacaggttttactagattsgtgtgtaatcctacagttacagatagggtcacatggttcttactttacttaacctctttgaacatgcgtttgttccttggtaataacctacacctcacgggattcgaaggattaactcagatggttttgtaatttgtgtgtactaggaactgaaaatacttaccacaaagcctggcccatttcagctgttacaatcaaaagctgggctaatgttaacagctttcctttttctatttccatattttaagtgtttcctccataaagattatttaggaaccagaaaaaacatgtaaagtgcatatatgtacatatatttgtatcatatgcaataatatataggtaagag

SEQ ID NO: 373126 - DNA, 335 bp, Homo sapiens
acttgcatgtttatagcagcacaatgcacaattgaaaaaatatagaaccagcctaaatgcccatccaccaaatggaaaaggaaaatgtggtatatatgaaccatggaatactactcagccataaaaaggaacaaaataatggcatktggagaaacctggatggaattagagactattattctacgtgaagtaactcagtaatggaaaatcaaacatcagaagttctcacttataagtgggagctaagctatgaggatgcaaaggtataatcataataaaacggactttggggacttgtggggagggtggctggagggtgagggataaaagactac

SEQ ID NO: 373127 - DNA, 569 bp, Homo sapiens
ttacatttttaaaataaccgagatccactgagaagcctagtttttgaccaggttgttgaacactataggttaccacaaccatgaaaagacaacaggagcacaatttctaattatgttacagggcttttgaaaagcagctatcatacaaccattttggagagataaagaaagttattacggaaatgcaaggacrtggcacccaatgccaggtcaccagcattttctacgcagacagcataggactttgtatccagatgggcaaattactgtgcttccttactcaccatttctttccaatagttttcttgcatttagctggagatacctcacggtagtgttcctgactttactgcctcatgaacaacagccactgtgtcttacttttcataccctctgtatctaaaacagtgtctgcctacagaaagcactccataaatgtggttgctttgttgcagaaaatcctgaggcctgaaggctcaatgagcctaaagaggcccctacgttcctgcttcattacatgatgcagctggcatctctgaagaccagtgcttgaaacaaacaaacaaaca

SEQ ID NO: 373128 - DNA, 599 bp, Homo sapiens
ctcctttttttatgagtttttaatatggtttcgctgtgtcctcatccaaatctcgtcttgaattgtaactcccacaattcccatgtgttgtgggaggaacctggtgcgaggtaattgaattagggggcgggtctttcctgagctgctctcatgatagttaacgagtctcaagagatctgatcatttttaaaagggagagtttccctgcaccagctcttttttctttgcctgccgccatccacttaagatgtgaattgttcctccttgccytctgccatgattgtgaggttttcccagccatggggaactgtgagtccaattaaacctctttcttttgtaaattgcgcagtctcaggtatgtttttatcagcagcgtgaaaacggactaatacagtttttgtatacctgattttttttttcaattttcatcataaaccacaagccttggtataaaagatcagtagctccaacttcccttctgcacagaaataacttttcattcttagttcatttttctgttattgactggaatgactaaatagcatgtctatattgttacttcttattttttttttacttttacaagttatctatttatt

SEQ ID NO: 373129 - DNA, 578 bp, Homo sapiens
atattagcacaggggaaactggggtacacagaacctcacagtgcttttttttgttcaaagtttactataaattatgtcaaggtacaaagtcgaaaaaggaggcaggaggttaagtcagcaatctcacttgcaggtatatatttaagagaaatgaacacatgtgcccaaataaaagctgacatatgcatgtccattattcataatagtcaaaaagtggaaacaacccaaaagcctaccaaccaatgaatggataaacaaatgtggtatttccataccatgaaatattactaggcagtgaaaaggaatgagrcatgctacaacacagataaatcgtgaaaacgtgctaaatgaaagaagccagtcataggagagcatatattgtatgattccatttatgttaaatgtccaaattagacaagcctatagagacagaaagtacattagtgactgcaggggctgggggtggtggaggggagatgaggaatgacttaccatgtatggggtcactttttggggcatcgaaatgttctacaattaagatagtgaagaaggcttgcacagccaggtgagtatgctac

SEQ ID NO: 373130 - DNA, 578 bp, Homo sapiens
atattagcacaggggaaactggggtacacagaacctcacagtgcttttttttgttcaaagtttactataaattatgtcaaggtacaaagtcgaaaaaggaggcaggaggttaagtcagcaatctcacttgcaggtatatatttaagagaaatgaacacatgtgcccaaataaaagctgacatatgcatgtccattattcataatagtcaaaaagtggaaacaacccaaaagcctaccaaccaatgaatggataaacaaatgtggtatttccataccatgaaatattactaggcagtgaaaaggaatgagacatgctacaacacagataaatcgtgaaaacgtgctaaatgaaagaagccagtcataggagagcatatattgtatgattccatttatgttaaatgtccaaattagacaagcctatagagacagaaagtacattagtgactgcaggggctgggggtggtggaggggagaygaggaatgacttaccatgtatggggtcactttttggggcatcgaaatgttctacaattaagatagtgaagaaggcttgcacagccaggtgagtatgctac

SEQ ID NO: 373131 - DNA, 442 bp, Homo sapiens
agatgaggatattattgtattcttcattttatacataaaaaagctaaaaacaaaaacaggaaagcaactcaacctgaagctcagagaggtaaaatcatgtgtcctgcaggcaggccagcrcccgctcctggctccgctggatagtagctaagctgtcctcatgcttacaggggctcagcgaccctgactcatgccattgttgttatattacatggaacaaaacctcaataactcagaaaatttggggacttgaacagatcaaatcatcagtacaaattgccagttgagtcatacaactagaaaataatctctaaagataagatagcacagctcattcgttgatccttggctttggtattgaaatcgccatctagtgagcagggagtctaagtgaggaagtcctgcctcttttctccaggtattaaatagtatatatgagaag

SEQ ID NO: 373132 - DNA, 442 bp, Homo sapiens
agatgaggatattattgtattcttcattttatacataaaaaagctaaaaacaaaaacaggaaagcaactcaacctgaagctcagagaggtaaaatcatgtgtcctgcaggcaggccagcacccgctcctggctccgctggatagtagctaagctgtcctcatgcttacaggggctcagcgaccctgactcatgccattgttgttatattacatggaacaaaacctcaataactcagaaratttggggacttgaacagatcaaatcatcagtacaaattgccagttgagtcatacaactagaaaataatctctaaagataagatagcacagctcattcgttgatccttggctttggtattgaaatcgccatctagtgagcagggagtctaagtgaggaagtcctgcctcttttctccaggtattaaatagtatatatgagaag

SEQ ID NO: 373133 - DNA, 576 bp, Homo sapiens
aaaattgataccctaccatcacaactaatagaactagagaaccaggagcaaacaaaccccagagctagcagaagacaaggaataaccaaactcagagtggaactggagatagatatatgaaaaacccttcaaataatcaatggatccaggagctgttttttttttttttgaaaaaaccaataaaatagatagactgctagsaagactaacaagaagagagaagattcaaataaacacaatcagaaactataagggggataccaccattggccccacagaaatataaccatcagagaatactataaacacctctatgcaaaaaaaaaaaaaaaaaaactggaaaacctggaagaaatggataaattcctggacacatacaacctcccattctgaaccaggaataagttaaattcctgaatagaccaatatcaagttctgaaattgaggcagcaataaatagcctaccaaccaaaaaaaaaagaatcccaagtccagatagatttatagctgaactctaccagaggtacaaagaggagccggtaccatttcttctgaaacaattccaaacaattgaaa

SEQ ID NO: 373134 - DNA, 576 bp, Homo sapiens
aaaattgataccctaccatcacaactaatagaactagagaaccaggagcaaacaaaccccagagctagcagaagacaaggaataaccaaactcagagtggaactggagatagatatatgaaaaacccttcaaataatcaatggatccaggagctgttttttttttttttgaaaaaaccaataaaatagatagactgctagcaagactaacaagaagagagaagattcaaataaacacaatcagaaactataagggggataccaccattggccccacagaaatataaccatcagagaatactataaacacctctatgcaaaaaaaaaaaaaaaaaaactggaaaacctggaaraaatggataaattcctggacacatacaacctcccattctgaaccaggaataagttaaattcctgaatagaccaatatcaagttctgaaattgaggcagcaataaatagcctaccaaccaaaaaaaaaagaatcccaagtccagatagatttatagctgaactctaccagaggtacaaagaggagccggtaccatttcttctgaaacaattccaaacaattgaaa

SEQ ID NO: 373135 - DNA, 448 bp, Homo sapiens
tgttacaaacctgcacatcctgcacatgtaccctgtaacttgaaaaaaaaaacaataaaatgtttrtttaaaaatatacctgagactgggtaatttatttttaaaaagaggtttcattggctcatagttccacaggctgtacagggagcatgatgcttctggggaggcctcagaaaagtttcagtcatggcagaaagggaagcagaagcaggcatgtcttacatgtccaaagctgggggaagagaggcaggcagggaagtgctatacacttttaaacaatgagatctcatgagaactctatcatgagaacagcactaggagaatggtgctatttaaaaacccaccccatgatccagtcacttcccaccagaccccacttccaacattggggattacaattgaacaggagatttgggcagggacacagctccaaatcaaataattctgc

SEQ ID NO: 373136 - DNA, 593 bp, Homo sapiens
gcacacacgtgtgtgtgtgtgtgtatacatatattttttaaatgaggcacggtatcactttgtcacctaggctggagtgcagtggcatgatcttggttcacagtagtgttgacatctgggttcaagtgattcttctgcctcagccccccaagtagctgggattacaggcatgcactaccatgcctggctaatttttttttgatagagatggagtttcaccatgttgctcaggctggtctcaaactcgtgagctcaagtgattcatccacctatgcttcccaaagtgttaggattacagatgtgagccactgtacctcacgtaataaatttcatatctccatctgaaatctcatcagcctggatattattgcccatatgactcagaattttggtcaaaacaatttaacaagtctctaggaagttccaaactttcctgcaccttcctgtagtcttctgagcccytcaaactgttgcaatatctgctgattacccaattccaaagttgcttccacatttccaggcatccttagagaaattccccattaccagtaccaattttctacagtagtccattcttgcactgctgtaaggaa

SEQ ID NO: 373137 - DNA, 530 bp, Homo sapiens
atagtgtgtctatattagtttcctagggctctataacaaactacataacactggttttatttcacaccactgcaataaaatgagtatcacaataaagcaagtcacatgaattttctggtttccaagtattaccgcaaaggggtcctgatccagaccccaagagaaagttcttggacttcactcaagaaagaatttggggagagtctatacagtaaagttaaagcaagtttattaagaaagtaaaagaataaagaatagctattccataggcagagcagccccatcrgttgctggttggccatttttatggttatttctggattatatgctaaacaaggggggatttatcatgagttttccaggaaagtggtgggcagttcccaggactgagggtttctcccctttttagaccatgtatgataacttcctgatgttgccatgacatttgtagactgtcatggctctggcgggagtgtctcttagcatgctgaggctattattattagtgtataatgagcagtgaggatgac

SEQ ID NO: 373138 - DNA, 530 bp, Homo sapiens
atagtgtgtctatattagtttcctagggctctataacaaactacataacactggttttatttcacaccactgcaataaaatgagtatcacaataaagcaagtcacatgaattttctggtttccaagtattaccgcaaaggggtcctgatccagaccccaagagaaagttcttggacttcactcaagaaagaatttggggagagtctatacagtaaagttaaagcaagtttattaagaaagtaaaagaataaagaatagctattccataggcagagcagccccatcggttgctggttggccatttttatggttatttctggattatrtgctaaacaaggggggatttatcatgagttttccaggaaagtggtgggcagttcccaggactgagggtttctcccctttttagaccatgtatgataacttcctgatgttgccatgacatttgtagactgtcatggctctggcgggagtgtctcttagcatgctgaggctattattattagtgtataatgagcagtgaggatgac

SEQ ID NO: 373139 - DNA, 620 bp, Homo sapiens
gggacagcaggtttagttcatcctagggaggagctcacaagctgagtcccctggtggcacaagcattgtttcctggttgagactcactcatgggtgacatatgtgctgtggctcactggtagtttaatcagttggaataatacttgtattgttgcttatatttcagagggacaatttgctttctgtaaatgaagcttttccagaggactattttaggctgaagaatagtaatttaacagcttagaggtgggaatttttatttaagtgtctctcttttctctctaatgggtttatgatgtygaccaaagtgtggtgaccacatagggcttccagaaggctggtctcttaggcgaagctctggagctgctctgcgtgtgttgaagggctgagctttaaagtggtctctctggactagtggcagaaggcataatctcctgctaaattgggccattaaataaaactactaagtcataaagctgtagtattaccctgaaattaaagcattgtcacctttgagttgccaagaattttaacaggcacttagagaaattcctttcacatacccgttttagcacggccagttgactccaacccacatggatggtagcaggaggctcagg

SEQ ID NO: 373140 - DNA, 513 bp, Homo sapiens
tctgaatggttttaagaatcttgattcatatttccaacttgttttcctaaactcttattacggtttacactctgatcactactttctgagatcttgttttaccttctctgacattattgtttactacaacttgtaaaacgtttttacrtgtatttttactaacacagtggcatattaaaatagagattattattgaccctcattgtgaattccagattaaaaaaagagatttttttcagatgacttgtattataggaataagattgcttccacaatcttttttcagatgacttgtattataggaataagattgcttccacagaattttcttttttcattcaacaagtactttttgaaagtacatctgattcattaaactgtgaatttagtgattactgtcacattgaacagatccagtaagtgatacaagcacttgtccttgatcttctcgatgtttatgtctgatgacactcacatgtgccctgttcaggatcttttcaccatttctcagcc

SEQ ID NO: 373141 - DNA, 629 bp, Homo sapiens
cacaatctcggctcactgcaacctctgcctcccaggttcaagcaattcccctgccccagccttccgagtagatgggattacaagcatgcatcaccatgcctggctaatttttgtatttttagtagagacagggtttcaccatgttgacctggctggtctcaaactcctgacctcaggtgatccacttgcctcagcatcccaaagtgctgggattataggcgtgagccactgcacctggcctgattttccaaaacttctactaaaggcattgcagtctccctacaatagccaagtctagagtctactgtggctttcctagagctatgataacactgacaacttattcttaattaaataaagaaggtcatgcccctaaatccaatcttatcagaattaaracataagttcattaacatttcacttgggcttttgaagtgctaattcttgtcatgttttctgattatcacttagctttgttgaaacaacggatctgccacactcaacaggagcaatgactcatttttgtacatgggttctaaatactacaaaattatgataccatatgaaatcttttcaccaaaaagacttgtagcactactggacaatttcagagaaatatgaggtttttc

SEQ ID NO: 373142 - DNA, 590 bp, Homo sapiens
aggaattctaatatcttccaaatgtctgcatcaaaggattaagaactcaaaaattcaaaacacaaattcccaggtttctgaggatttaaattgtgaaatgattaygatttggaggggtaggaatgaaaagtaatctaggaaattaatgctttctttgtttaatagccatgtaagtttatcttctatgtgcccacactgaagtcttgagtagtaagatgtgggcttggagccatttttcataggtaagttcaggattcaaaattgacaaaaaattgtacctccaaagatggactaatctgagttagtcaagaactggctattattttataagggcttctatatcttaaagttaataatgattagtaatttacaaccatagaaagaaaacaactgttcagtgaatgccatctatggatcaagtactatggtaaatcctttacatatttataataagcataataaacatttatctaatctttactaggcacctaacacactttacatatataggtggccctccatatctgtgggttctccatctgctgattcaaccaattccaactgaaaaaatattcaggaaaaatagtaat

SEQ ID NO: 373143 - DNA, 470 bp, Homo sapiens
gacttctgcccacccctcttgtcccagtgtacagatacrtattgctatttcagcacccgtctcaatacttgctgacatctgtagacgtatctctcccataccagactgtgcctctgtgtctagcattgttcctcacaaatagagaaaacattatttgttgaaagaaggtgttctaagtttagcctttttatagtacattattgtttacaaaatgccctcatatataaaactggtatggtacaaactctttctacaacttagtgacaatggatgatagttataattatgctccctaaattttagcatttcaaaatccctcactcgcaagtcaacatttttcttgaaatctttatctttggtcagcctgtcagtctaagaatcttccaagggttcctgagccacatcagattgtatttctaggggaggacccttcctctattaggtctcttggcaagatggggagaggagag

SEQ ID NO: 373144 - DNA, 632 bp, Homo sapiens
tagcttcttatgagattttttcaggaggaatgattccaatgatcaaaaaacaacaggcccactgctcagaagatctctgaaaatggtgaattctactttctgtggtgagatagacacatttgaagcttatctgtaaatttgtgggtataagatgagggtcagggctggaagtgcatctttataccttcagcttcattcctttactgccttcttacttaacatagcatggtgtacggagggctctgctcctgcatgtaccctacgacctttgctaggatttcrtctgcatgagaaggatgggaaacaaggaagtggcttcttcaaatacaaaaagaggattgcacctcagagttggcaaggaaacagcaaaagaaactaaataggaatgaacacctggaggagatgttggaattccattttcagttcaggtctgtgattattgcagacttttgtcactctgtaataaatcacagagctgtattttagtgtaaaaaaataatttgtatgtagatgaaagcaatgtatttgaaaaggaaaacacacacaaaaaaaagttaacgctaacacttactgagtgcttactatttgccaggacttcaaaagtggtttctttgtattaactcattgaatcc

SEQ ID NO: 373145 - DNA, 629 bp, Homo sapiens
aaaaaaaagaattagctcccaggtgattgtccccttttatgtctccatggccattgattcttgtcatttatttattcattcaagaaatataatttgagtarctactatttgtatgacccagtgctggttgttggtgaaacaggattgaataaaacaaataaaatttcttctttcaatcattccataattccctggggctacagccactttggtattgtatagatacgttcctaccattccacatgcatagctgatatgtttcaggctgccacatcccatagttgtcattgggcctccaagtcacattcttctgtgtaggtcactgtcaccagtgactctactactgtcatactactgtcacactgtcagtaatatgtcaaactggaccccttccttacaccgtatacaaaaatcaacaatatatgtattaaagacttaaatgtaaaacccaaaactataaaaatcccagaaaaaaatttaggcaataccattcaggacataggcatgggcaaaaatttcatgacaaagactccaaaagcagttgcgaaaaaagcaaaaattgacaaatgggacctaattaaactaaagagctctgctcaggtcaacctcaactcaaaatggataaagaa

SEQ ID NO: 373146 - DNA, 563 bp, Homo sapiens
tttgttaatattttggtttgagattcttgtagcaccactcgttgtgagattggagttttgatttctcacagaaggcttttcttttctactcacagcactcagcagaaaagatgaacattcttgctactgccttgggctgcatgctgaagccttttttttttttttttttcttttaagtcccatttcatgaataggaacctttcaggttccagtgaaaggagttttattttcagatcctgcctcagttcctgcttaccattaaaattgtgatctcaaggccttaggggtatatatatttggacctgatactctcttttcccactgaattcttagtttctctgcttattgttatgacttgagttacctccatttttcttatgcctgaggatttctacttttttctttttagttttgatatgtacttagtatttgtggactatattttatccagcattctgtatatattagtagtgggataacatcagctactcaktgtggcacattgttactctggaaggcttgaacaggaatactcttattattgaaacaaaaattcagaaaat

SEQ ID NO: 373147 - DNA, 639 bp, Homo sapiens
tagaatatgccgtacccaaactagccagttgccacttttgttaggaaaagttccatgcagatgtttctgcctttgaagcaagatatttccctgaccccttcatgggacttgcaacagtgggtgcctcctttactcagcctgccgctctcaactcctcctgggaactggcgtgcatgagtgcttgaatccaccaggcacttcagcaccagcggcaccagtggcaccagggggatcaaaccccactcacttggacctgctgcattccaccccttgcaggagggagcacgcaggtgagtgggtgcaggaaccagagtaagcacctttgcgcgctggcagcacaaactccatgcaggccccgtggcagcgtccagttggggtgcctgcagctcccaaagccccaggtgatgtgatacagtgctcttttagctctgccatccactatggcttaggtgttaacagctcagtgggccctccaccttttcatgctaggtggctgtcctctgccagtgagggcaaagggccagtatgacgtccttttgtatcatacttgtggctcytgagctcttgtctggcatccaggagaagtgaggttacatgaacgaattgattagatcttgtgcaagagagattggaggcaaa

SEQ ID NO: 373148 - DNA, 613 bp, Homo sapiens
aacctaataaaagtgccttgaaaatcttaatgttttatatattctaaataaaagagatttacatattctaaattaatttgtaaaatatcacagaattccaattccatctaaatgtgcagcttctagtatattgccattttaggtttgttttgttttggwatattaatgaacactgattattattattttatttagctattctaaacaaagagacataaattaatcataaaatattatggaattccaattctcttatattcaaattctggaaagtgttgatgctgtaatcatcttaaaactttattcatttggataaatgtttccttagtattaccacaagatgtcaccctaagcctagcatctaaatgtgcagcatctagcatattgctgtttcagggttttttttattttttgcatttggtttgggcacactaatgaacaccaattgctgtctttcaaaaaattaaagtgactttttctactctcagttattggcaaataaaaaatcaaaataaataatacagggactctagaagaaaggaggaagaaagttaatcaaacagttcattctccatgcttatcaggtatcttgttacttaccataaaagcaatg

SEQ ID NO: 373149 - DNA, 613 bp, Homo sapiens
aacctaataaaagtgccttgaaaatcttaatgttttatatattctaaataaaagagatttacatattctaaattaatttgtaaaatatcacagaattccaattccatctaaatgtgcagcttctagtatattgccattttaggtttgttttgttttggaayattaatgaacactgattattattattttatttagctattctaaacaaagagacataaattaatcataaaatattatggaattccaattctcttatattcaaattctggaaagtgttgatgctgtaatcatcttaaaactttattcatttggataaatgtttccttagtattaccacaagatgtcaccctaagcctagcatctaaatgtgcagcatctagcatattgctgtttcagggttttttttattttttgcatttggtttgggcacactaatgaacaccaattgctgtctttcaaaaaattaaagtgactttttctactctcagttattggcaaataaaaaatcaaaataaataatacagggactctagaagaaaggaggaagaaagttaatcaaacagttcattctccatgcttatcaggtatcttgttacttaccataaaagcaatg

SEQ ID NO: 373150 - DNA, 595 bp, Homo sapiens
ccaacatattatttatatacatttgtatatatataatatttccatatatataattttcatatatatgtatatatggatttccaaatatttcttactctaaatgagcactgtgagaaagatatgttagaaaaagggaagtattgccgggtgcagtggctcacgcctgtaatcccagcactttgagaagacaaggcgggtggatyacctgaggtcaggagtttgagaccagcctggccaacatggtgaaaccctgtctctactaaaaatacaaaaaattagccgggcatggtggtgggcacctgtaatcccagctactcaggaggctgaggcaggagaattgcttgaacccagaaggtggaggttgcagtgagccaagattgcgccagggcactccaacctgggcaacaagagcaaaactccatctcaattaaagaaaaagtatttagaactgctgtgtatgtgcatcttggttggtagaccatactaatatgaattatttgccacattatataggctagcaagatttaatcttaactgcattacagcatacagctacttgatattaataagtatggactaaagctgcaaataacat

SEQ ID NO: 373151 - DNA, 547 bp, Homo sapiens
ttgcgtgtttactattacagttatataaaatcttattatgtaatctacttcatttgaaatttggatggagagcctaagcacctcactggtttagtaccctccctcctctgttaatgctcacgcactgrctctaggaccctgcaactaactttgaaagccactagaattaattagaattacttttaaacaggattatattgtagtttcttcataatttataactttccttggacatacccaagcctatcataaaggcattatatcaaacagactttttctttacaaagtcgattattattttgcatgtattcttctagtgtttacaaattaatttaatgttataaatatatcacaaagccttttgactgtaaagtgtttcttcagataaatagaggtttgtcttactttttatataactaatttacttattaagatcattttcctaaaatccaaaagcttaagggaatctaagcacagatgtggcagcagatgtaatgaattggacaaatcttttaagcccacctatgttcaccaggtaatcagaatg

SEQ ID NO: 373152 - DNA, 517 bp, Homo sapiens
atcaaaataaaagttaaatttaaaaaaaaagagagagacctgaggacttagcctaaggtgcttctacatttaggttagaagaaaaaagtgaacgaagtggtatgtacaagaaggtggacacgatcaggtatgtcaaatgctcctgaaaataaaaattcgccaatgaaatttgaaacatggaggtctctataaccttgataagtatgtgcaactttacttgtaccttgggtggagagtgaaggacacaaaagcatgatatggggtagcttcaggagaaaataggagatgaaaaggcatgaactgtgaggacaaacaacttttttttttgagacagagtctcactctgttgcccaggctgaagagcaattgtgcagtctcagctcactgtaacctctgcctcctgagttcaagcaatccacccacctcagcctcccaaagtgctgggattacaggcgtgagccactgtgctcagccataaagaactttgtatrcattttgctgtgaaggggttcacaga

SEQ ID NO: 373153 - DNA, 544 bp, Homo sapiens
ctaatctcttgggctttcattagttttacaaaggcagttttggtccttaagcaaggagagggttagttttagggagggactgttgtcttccttccttcaaagccaagctatgaactaaattcttcccatagttagcttggcctgtatttaggaatgagtgaggacagccagcttgtgatgttagaatcaaatggagtcagccatgttagacttctttcactgtcataatctttgcwaaggcaatttcaattatattttttccagcaacttgcccagcctgtctgttttcaaatttcttggcttaagttagttcataatattatcttctgatttttaaatctctacttgtaattgtttatttttcatttctaatattattttctctaatattttttatgttcaatactatcagaagtttgacgacgactattgttttcaaatactcaattttttttgttaatttgctttatactattctttgatttctattttattaaatttgattcccattatttcttttttcttctactttcttttattttac

SEQ ID NO: 373154 - DNA, 581 bp, Homo sapiens
ctgtaaattactagaagaatattacagcattttcattcatcactaagtcattttcatactttattcattacatgattggcataattcaatgtaatttccacttccaagagtttgaaatattagctactttctattttcattcccttcctacagaagcatcaattaccttaaagttttccaaggattccttctttgccgtcatttctgtcatcagtcagctggtgtgacacattaacattgaatgtctatgccatggaaatgactgaatgctgaaaatatcagaagaggttgaattacggtatgaggagtttctmatatgtcaaaatggtccaacaaagggagggaggaagggagcatcacgtgttcagaggcagtggtgaacaaaatgagaagaatcacttccaaaagcaaagaaactatcatcaatgataaataccacccacccaggactcactaggtgcaaggtttcctgttaaattctttatacatgttagctaatttacatatgtttattgttactgattgaaatgatgtaaagttatctttctcctccttcaagctaagcagaaaaaaggaattgc

SEQ ID NO: 373155 - DNA, 576 bp, Homo sapiens
atatacatattgggatggggagaaaattgaatttgtctttctgtgaatgctgctaattatttttggactatcaaactaacttaaaaacctatctaaggttacaggtgcaataaacaaatgaaaataacaaacaaacaaaaatcttaaaccagtgctctgatttgattttttaaaacaggacagaaatttttcaaatataaatgcatgccttgtatgtttaagtaaaatattttaaagaggccttgctgttattttttaaaaacttactatggaaattgtgagaagttgcaaaggctgtcaggctgtggtaagcatgaactaattaccaaatatttttaaatytggtagaattgagaaggccctgtactttcaaaatgtttcatgattccaataaaattattatgctgtagcaataatattaatctcccctctccaaaacaaaacaaaataacaaacaaacaagcaaaaaacctcatcgaggacacttttttcctggggaatatttatggtacaaataaaaaataaagatatgttatccctgattcttttcttgttgcatctccagaactcatttcc

SEQ ID NO: 373156 - DNA, 576 bp, Homo sapiens
atatacatattgggatggggagaaaattgaatttgtctttctgtgaatgctgctaattatttttggactatcaaactaacttaaaaacctatctaaggttacaggtgcaataaacaaatgaaaataacaaacaaacaaaaatcttaaaccagtgctctgatttgattttttaaaacaggacagaaatttttcaaatataaatgcatgccttgtatgtttaagtaaaatattttaaagaggccttgctgttattttttaaaaacttactatggaaattgtgagaagttgcaaaggctgtcaggctgtggtaagcatgaactaattaccaaatatttttaaatttggtagaattgagaaggccctgtactttcaaaatgtttcatgattccaataaaattattatgctgtagcaataatattwatctcccctctccaaaacaaaacaaaataacaaacaaacaagcaaaaaacctcatcgaggacacttttttcctggggaatatttatggtacaaataaaaaataaagatatgttatccctgattcttttcttgttgcatctccagaactcatttcc

SEQ ID NO: 373157 - DNA, 571 bp, Homo sapiens
ccagcttcttttccaatttctggacccctctagcaacagaaagtagtgatattgaccatcaacgaggagaacaacgtcggtagggcttattttttatgttaagaaaaattaggctctaaaaaatgtgaaggctttatttgaacaccgaaaaaaccaagactgtagtttgcaaaagtgaaatggctggttttatgcttttaatgaagtttggaggcaaacagttyataaccctggaaatatttaatttgggaaggtttatgttaagataataaaataattaactttttctcattagaagcgtgcagagcaatagagttacgtgttctggaaaattacattcctgctctctcactgacttaacgtgtgtggattgatgcagatcagataactaactgacaggcactttgcaagtttaccttgttttaactaattgccagttcagagtcactggagattccattttaaattaatggctgtgaggtattaaatgcaaacatgtatctattgagaaattagaaagagaataagaaactaaatttcatttcatgacagtgctctcagttcttggttg

SEQ ID NO: 373158 - DNA, 570 bp, Homo sapiens
tattctttggtggtgtttgaactcagaacatcctctctttctccaactcaggacagacgtaatggctgcttattggttatgycctagagcacttatgaaggcactcacaaacattgtagctctccccttccaggaacatggtagccttgtgtttccccatcccctttaaagttacatgtgacagtgtgtcttgccttggtcaataatctgagatccagtttgttgtgaagagtccttcaaagtgaggcatgcttctttacattttcttttccctctcctagactatttttcaatgttctagaaaatggctgttctgtcaacctaaatcctggagtgagatcaatgatgacatacaacagaactccctgctagtgatgatggaagattagcacaaaacgaacatttgttgttttatactattgaggtttgaggatcattttttaaccacaatatgatctaccctattctgactgatacacttcattatcatccatctgcctttttcttctaagtcgtccctgattatatttgagtctatgtaattttccagaaattgacctctcccacact

SEQ ID NO: 373159 - DNA, 570 bp, Homo sapiens
tattctttggtggtgtttgaactcagaacatcctctctttctccaactcaggacagacgtaatggctgcttattggttatgtcctagagcacttatgaaggcactcacaaacattgtagctctccccttccaggaacatggtagccttgtgtttccccatcccctttaaagttacatgtgacagtgtgtcttgccttggtcaataatctgagatccagtttgttgtgaagagtccttcaaagtgaggcatgcttctttacattttcttttccctctcctagactatttttcaatgttctagaaaatggctgttctgtcaacctaaatcctggagtgagatcaatgatgacatacaacagaactccctgctagtgatgatggaagattagcacaaaacgaacatttgttgttttatactattgaggtttgaggatcattttttaaccacaatatgatctaccctattctgactgatacacttcattatcatccatctgcctttttcttctaagtmgtccctgattatatttgagtctatgtaattttccagaaattgacctctcccacact

SEQ ID NO: 373160 - DNA, 577 bp, Homo sapiens
aactggtgggtacgtagtcatttatgtgcagaaccatactggtttcttctattttctactagatatttctcattgttttctcaaagttattattagcatggctagagctgaatgaagattaatttgaaatcatgggatgaagcatgttgtccggacatcagtgatctcccaaagatgcatacgttatgaaaatttatgaataaatgcgctggtagggagatttgagaatctaatagtaaagaaacaagattaagatttggagccttgaggttagagagatctgtatttgaatcctgggcatgcaacttgaagtcagaygctcttgggcaagccacacacctctccaagctttgggttagagtatgttttccacgcttctccttctgtgtctagagttctctcttagaagaagctccagagtcagggtcagtacgctttttctgttaagggcttctgtatggaaaccatagaatctctatggcaactcttcaattctcctgttgtagtgcaaaagcagccacagacaactgtaaacaaataagcatcgctgaattccaataatgctttatttaggaga

SEQ ID NO: 373161 - DNA, 559 bp, Homo sapiens
atcaactttttcagaattctggaaatgaatcataaacttatagcaatccaagaagtgttgtttcaagaaaaaatggttttcttaacctcaaacagaagactttgtgacattctaacttgccctatcctcatcttttctccccagctctgcaatagccttgtaaactaacagtccatcatcatagtgaaagccagtatcctggaagccactggagggggcggaactatattgagctacttcaatacccaatccrcagagaattgtcataatgtgacctgtctgagagttccctggaagtcccaattcacaacaccacatttatttgacctgacttggaacttaaccagtgcaaacagccctttctccagaagcatttatcaaaaaagcaagcagggtcaattgtttaaccttatgaataccagagatggttggtaacagttgagacaacaacagactaatcacaaagctgaaaggagaaagatgggcaataagagatccataggggactttgaatagctctgacatatttttgtgaatctagaaggctatgtgcatatga

SEQ ID NO: 373162 - DNA, 619 bp, Homo sapiens
aagaataaagaaaaagatcagaatgatatcttactaaaggctatacaaataaagagataaagccattaatagctttttcatagctcttaaagttgtttttaaaagcatcaaatagaaattctagagatgagaagtacaataactgaaataaaaattcatagcagatttgaagaggcagacgaatcaatgaacttgaatttrtaagattatctagcataaggaacagaaagaaaaacattttaaaaaaaatgaatggtctcggagacttatgagagaccaagtgtaccaacatacgcataatatgagattcagagaaaaggatagagagaaagaggcagaaagactgaggaagtcatggcagaaaaactccaaagcccaaagtttattaaaaacattaatatgcacatcaaagaagctcaatgaattccaaataatataaactgaaagaaattcataccaagacacatcacaatcaaactgttgaaagccaggatgggggttgtggggagcagaaaaaaacaacaccaagccaagaattctatatccatcataaatagcagaaaaatcaaggcatttctaaatacacaaaaactaagcaaatttgtcactagctgacttg

SEQ ID NO: 373163 - DNA, 619 bp, Homo sapiens
aagaataaagaaaaagatcagaatgatatcttactaaaggctatacaaataaagagataaagccattaatagctttttcatagctcttaaagttgtttttaaaagcatcaaatagaaattctagagatgagaagtacaataactgaaataaaaattcatagcagatttgaagaggcagacgaatcaatgaacttgaatttgtaagattatctagcataaggaacagaaagaaaaacattttaaaaaaaatgaatggtctcggagacttatgagagaccaagtgtaccaacatacgcataatatgagattcagagaaaaggatagagagaaagaggcagaaagactgaggaagtcatggcagaaaaactccaaagcccaaagtttattaaaaacattaatatgcacatcaaagaagctcaatgaattccaaataatataaactgaaagaaattcataccaagacacatcacaatcaaactgttgaaagccaggatggggrttgtggggagcagaaaaaaacaacaccaagccaagaattctatatccatcataaatagcagaaaaatcaaggcatttctaaatacacaaaaactaagcaaatttgtcactagctgacttg

SEQ ID NO: 373164 - DNA, 542 bp, Homo sapiens
gtgggatttttttttgggagtaatgaaaatattctagatttgattgtggtaaaatttgtacagatctgtractgtattaaaagccattgaattacacacttttaagtggatgaactgtaacatatataaattgtatccaaatgaagctctttaaaacaatgcctagctctattacttgaattccttagatttctgtttactaataagatttttctcattttatgcaataaacacggtgattcacagttattctattttatgaatatcttcttgtgatataattctgtacagctaagtgaacgtaaaagctgggatcatttaagaatgttttaatctctgcaagactcgtagcagtaattggatttccataagaaccaacatacacaccccacgtgcacacagaccaaccacattccataaaggagcagtcagaaactcctgttagctaacctctgactgttgtggaattatttaaatcactacagaaagtctctctgagaggggattcctctgttgtaaatgtcatggggcatccctgaaat

SEQ ID NO: 373165 - DNA, 542 bp, Homo sapiens
gtgggatttttttttgggagtaatgaaaatattctagatttgattgtggtaaaatttgtacagatctgtgactgtattaaaagccattgaattacacacttttaagtggatgaactgtaacatatataaattgtatccaaatgaagctctttaaaacaatgcctagctctattacttgaattccttagatttctgtttactaataagatttttctcattttatgcaataaacacggtgattcacagttattctattttatgaatatcttcttgtgatataattctgtacagctaagtgaacgtaaaagctgggatcatttaagaatgttttaatctctgcaagactcgtagcagtaattggatttccataagaaccaacatacacaccccacrtgcacacagaccaaccacattccataaaggagcagtcagaaactcctgttagctaacctctgactgttgtggaattatttaaatcactacagaaagtctctctgagaggggattcctctgttgtaaatgtcatggggcatccctgaaat

SEQ ID NO: 373166 - DNA, 632 bp, Homo sapiens
aaaaagttttttttaaaaaagcaacagaatctttgccatggactctgaagaaaaatgccacaggggttctttggactaatgactctacctgagcttcttgttcaagcaaaggcaggaaaatttaattaacaattccaaatccatatttctttgtaatctaacacagtagattagaaagctgagatttaagtcatatagctattgagtgggaaagctaagattcaaaccttaattttctgcccccagaactgttttcttctcatcttaaaatctcagctggttgatccatgaatattggcagtttaaagcagcaaatacrgaatttgctgtgaacttgtctttccatgtgatcctaacctctcagaaccttattttcctcttttataaaattcggacttttgtattggataattttaagggtttctcccaggccttcatcataaaggaataattatgcaaagtactgatacaaaagagttaaatttcagaatgacgatttcttttcatcacagctggtttaaattgccttaaagatttaagaaacactttcaagtaataaagcaatttagacaccttaaatctacgtctagctactgaggatgcactttctgtgggaaactgagcactacaaa

SEQ ID NO: 373167 - DNA, 632 bp, Homo sapiens
aaaaagttttttttaaaaaagcaacagaatctttgccatggactctgaagaaaaatgccacaggggttctttggactaatgactctacctgagcttcttgttcaagcaaaggcaggaaaatttaattaacaattccaaatccatatttctttgtaatctaacacagtagattagaaagctgagatttaagtcatatagctattgagtgggaaagctaagattcaaaccttaattttctgcccccagaactgttttcttctcatcttaaaatctcagctggttgatccatgaatattggcagtttaaagcagcaaatacggaatttgctgtgaacttgtctttccatgtgatcctaacctctcagaaccttattttcctcttytataaaattcggacttttgtattggataattttaagggtttctcccaggccttcatcataaaggaataattatgcaaagtactgatacaaaagagttaaatttcagaatgacgatttcttttcatcacagctggtttaaattgccttaaagatttaagaaacactttcaagtaataaagcaatttagacaccttaaatctacgtctagctactgaggatgcactttctgtgggaaactgagcactacaaa

SEQ ID NO: 373168 - DNA, 579 bp, Homo sapiens
tgtttaataggtggaatagaattcaactcaatgcttatcactgtacataaagcaagattacatttgctcaaagagtctgtttatggaagatagtccaacctcccttcactaaaccccaaagagaatgatggggctaatccgccrgtgccttgtccttgggggctagctctatcattctctctagttttacatctaacacatctctaatatttccacttggggaacttaattttactgggtgcaaggtatataggcaaactcatccattaatttttttgtctatttttttcataagtttatgaacctgaacttaaaaagaagggacgttttttgccatttttagctgccatgcaaaaccaaaccagaaaagtgttcccttttaacaattcactccaatgaagctgctgcagcagagaaaccactgtataacttgtctcattaagagtctgcatgggcctggagggcttgtaccttcgctgctcaaatcctcagcctgtaatggctttttcttccattcctcagtcctggaactgtgtgataacttgcccagaaaatcttcttgtggaatctgtctttaca

SEQ ID NO: 373169 - DNA, 559 bp, Homo sapiens
ctactgtctatcactgattatggttgtgtcataaaaaaggcaacaagctccaacagaattacaagggagcattcaaatgctttttttattatagtggaattttgtttcaggaaacacatgttgctacattttaaccattccaaacttytgctcctagtccaatcctttagctgtttccacaagttgggggagcaggagcatgctggacaagggaaatttagctagagctaaactctcctcctgattaaggattttgcctcttagaaaattgaatgacataggtggagataagattgtcagcatagcgatcaattaccacgagccaatcagtcactgtgatgctcaagaagctagatcacatatccacaatttttttaaagaagggaaactgatattcaatctttccgttcttttctctctgaatgctctcatcttattagcttcagttaacaaattatgattcccaaatatccaccttcattcccaaaggtcctgtatttttaatttcctctagaatgtttccaattataaatcatcattccaaattcaacaacaaatt

SEQ ID NO: 373170 - DNA, 546 bp, Homo sapiens
tccccacccacaccctgggcagaatgttgtcacagcgatcttgtcaaacctaccaggagcgcttctcttttctagctcccctgccaggccagtccccgagctcggcccctgggtccccaaaccgactggcaaaaacgggcgcggagggaaaggaaagccggatgggtcgggcccggggaccacccccaagacgaccgtccccagcgccctttgggcggcgctgcccaccgtagtgggggaagggccgggaggggtcgcgcggagaaagccgctgggagggttgggggttgaatctcggggcccgcgcccccgccccagtcccaggagggagaaacgargggacccgcgaggccctggctgcgggccccacccctcgctggccggcgggtctaggactgacagccggcggcggcacctcgccgcaccattcatttcccggcctcctccctcccccgccatcttccttcctccgcctcagtttccccacccccgcccgtaagcccccttaccccgtgccacagtccaccacacaggccggcagccgtc

SEQ ID NO: 373171 - DNA, 577 bp, Homo sapiens
agctgggccgccttcaccgtccggggggtagccgggaagccgaagcagtagcaagaaagcagcaggctcggtcggcggctatcacttccgtatcccaggcaggcaggcagtccccgccctgccccgccgcggcctcctccccctctctcttccctcctcctcactcctgcccccaccctacaacttcttcccctcacgccgcctttccscgggaagccaagatggccgccggtgccgacgccccggccaggccaggcccaggcccccagcgctcccccttccgctccgagcgggaggggctagcgagcatgcgcaataaggtacgttcgcctgcctgggctccgatcctgaagttggtgaaatccactgcgggttttccaggagtgtagaggcggagaagtctatccgagcttccagttctgcttctgaagctggaaggggcttttcggttgtaacccttgggttagtttcagttacttctttgctaggttgaggaaagggtggaagcgcctcctgcagccacgaatatcctccagtgcctgagagaaaacggcctaatcgaaaacgtccgcggcat

SEQ ID NO: 373172 - DNA, 553 bp, Homo sapiens
ggataatattaactaagaggcagcatggctttattgggatgggcggataagaactgcagccttcttcacctggactggtatcaaccagaagatgttctgtaaattgtctttggctctcatgctttctttagtaaaagatcacagtgaagagaggcctggccctaagctacctttctcttaagctaccatccattttctaagctaatgcccgcaagccgtgcagagaaatacttcaaggaccttagctagatayagagagtttactctggcaggtcagcagcaactagagatggcaggcgggtggacagcgagggacacacccttttttttggatgtggagatgtatgactgatgaactcactctgggatagagactggacatagactacctaaaagactggtttaagccaattaacacattgtatgatgaaccacatgttagaagaataacaatttgtacctgaaatacaaaataagatatggaattgtattctgatggtgtttttcttgtgctaccatatttgcatctacaataaggaaaatacataaataa

SEQ ID NO: 373173 - DNA, 604 bp, Homo sapiens
tggctcatagttctgcctttgagaaacactgaaccaactttagtcatcaagtcatcacacaaaagcagaaaaagggtcaatgaaagaccacaagggtctaaagattagtttgaacattggttatacccaagaaataccaataaatgccaaaggtgttcaaataaatagattagagaaaatgatgtattgtgtgatgtgtgaactggccacatgagtgggctggcataagaataataatggattcaccacagatgcttttatattgctttaggctctcactaaagaaaatatactctgaaaggatattatcatcacsctgtttcagcctaagcaatattacacgacagtggaaaacaacacttgctatggcaagcatcctcatccacgtggaacagggcattccaaactatggaaaaatatgcagtagagaacatggaataagttattaaagtcatgtggtggctttgagtaaaatgttctcttttgattttctctgaacctcctattgtactcatataatagagagacctgtctctagagagattccaagagagtaagcagtgaggtcataccgcaggaggggaaaaatattgcttaatgatgt

SEQ ID NO: 373174 - DNA, 561 bp, Homo sapiens
atattttaagtcaatcttttggttaaaaaacacttttaggatatacagattagaagtaaattcaaacttgtagctagaattgtcttacttcaaagattttgatgagataaagcaatgaggtcacatcatgaraggggaataattgcttaataatgtggactggtctgtttcctatgtcaatatcatagggcttttattagtttattattctatttcttcccatctttattttcgcaatggtattccaaatacaaataataattatatttggttcccttttctgaccaatttaaatgtgactttaaacattaatgataaacattttgtagaactgcttcaaaataattggggatataagttggtttaagttacattaactcaaggaacacgtgatttacttgttcaggtcagtaatgggactagtaaacttgggagggcaatgaaagaagtctcttaaggttatgcgttcaaatccatttctaagtgattgcttttggggagacaagacagtaaaaagaaaaccacagattcaagagtaaattttcatattactgtgctatt

SEQ ID NO: 373175 - DNA, 531 bp, Homo sapiens
gaatggcaagagctggatatcattaattgttcgcttaactatagaaaacctgggacaaatcaccagttccttctctgttcgagaagccttcaagactccagacaaggcttgtgctggctagacatgataagcaagattaccccccaggtcttgacttgctgtgccaaggtctagagggtgatccctctagagtatctcatatactctacacatttctgaagccctgaagcccaaaatagcttcaccttggccaactctcctacccatgtcatccttgaatgtgaaggcctttttgaaagaaacgttcaggacaaatcaaccagggcacaaaacatctgaaagaacttcttagatacaaatgattattctgggtggcaatgtttactctamaattactcattcgaattaaaatttcagagtggcagctgctagcatcctaccccacaatcattatctaaacaaagtccagtctgaagcctacctgcatcaaaatggcatgaggtcattgtgaaaagtgcaggactatggatc

SEQ ID NO: 373176 - DNA, 606 bp, Homo sapiens
aactgaggttacattctaccttgcgcagaagtaagttttgcacckcttagatagaaaacggctttctctatctttcctcccttgctagcttcaaaaatcctacttcctgtgaccaactaggagaaaaatgcatttcttgagaagactgacaaaaaaggaagttgggctacatttcagcattttaacctttctccatagtctgagtttcttggtttagtcatttcttgcccactgagtcagttaatgggccagattctaaggccttcccttcctgtatctgaggaaaagtcacaagggaactgagaggcaggatgatttcctgtttagcatgactgcccacgtgtgctttgccattaattacaatcgggcagtttccatggaggccgccacttgaataatgcttaagtgacagcacaatcaccaagagcaccatgttaagtgggcacagtcattggcctggcatctattttttttaataattaaaccatttattttaaaggaaaatgaaaatactatttacaaaacaccagaagatggtggagcctttaggatcaccagaaatttccaaaatctcttaggccagatgcctccaaaacagccccagga

SEQ ID NO: 373177 - DNA, 592 bp, Homo sapiens
tctctttgggaaaggttaaattctttatgtataatataccagtaacatcaaaaaaaatgatttatgtgactagtagtggaaatgaagttaaaaatcaatactgcattgaaatgagagtataagcttatagaaaaatatgctacttttctcataataagcagcttaaattaactgaggttacattctaccttgcgcagaagtaagttttgcacctcttagatagaaaacggctttctctatctttcctcccttgctagcttcaaaaatcctacttcctgtgaccaactaggagaaaaatgcatttcttgagaagactgacaaaaaaggaagttgggctacatttcagcattttaacctttctccatagtctgagtttcttggtttagtcatttcttgcccactgagtcagttaatgggccagattctaaggccttcccttcctgtatctgaggaaaagtcacaagggaactgagaggcaggatgayttcctgtttagcatgactgcccacgtgtgctttgccattaattacaatcgggcagtttccatggaggccgccacttgaataatgcttaagtgacagcacaatcacca

SEQ ID NO: 373178 - DNA, 597 bp, Homo sapiens
tttccttccctctttcctgaattacagtagatctaagtaccttttcacttaataacaggccccaccaccactggtttccttaaatctcacctttkttaagtatttggttttgatttttattttttctttgttcttttttttgtttgtttgttttgttttgtggtaagaacacttaagctaagatctacacacttagcaaagtttcaagtgtataatcctggcctatgttactttccctgtgttacctaaagaaagtataatgaactggatatagttctgaaggctagaagtctgaaatcaaggtggcagcagggccatgcctcctctgaagcctgtagtagaggtccttcatgttctttcagcttctggcagccccaggtgattcttgacttgtagctccatcattcccatctctgcttctgtcttcattcatgtggccttccccctctgtgtctacctgcctgtgtccaagttttcttcttcttataaggatgccaatcactagattagggcccaccctcatccagtatgatttcattctaacttggttatatctgcaaagatccgacttctgaataaggtcatattcacagatag

SEQ ID NO: 373179 - DNA, 510 bp, Homo sapiens
tccactttctacagcacccttgaatgagttctctgatcagaatttgagttttctcatcttaaaacagggaaaataatagccagctcagagagtagttcaaggattagtaccaaaaaaaattatttgaataatgcatgttaacagcataataattgtaaaactgcaacagaaagaaaggtataaaacagaatttgctcctgggatgctctcaattggaagagccacggatgctttctttttttttttttttttttttttttttttaaagcaatgggtagagtttgccttgagacatccacccactcattgcctgggaagtggaaacacacatttagttaagtagctgatgggaacaaaaacaagggcattcytaagagccatccgcagagtctcttctttactgaaagtaagcagagagagccacttgcatcaggccttgtgatgcaaaattgaaaggcaaaaccaatctcagctaagcatgcatttctgtttttgtttttgagtttttaa

SEQ ID NO: 373180 - DNA, 547 bp, Homo sapiens
tttagctgccacttcaattagaagtccttcaaatatgattaaaggtttactctgaactttaatataagagacttctstagggcaagcatgtgcatggattgacccaatagcattcaatcaattaatacatgcatatgctctccaataactgtgcagagttattgtgctttcctttatttatcaaaatgccctgaagattgctttatctcctagccatagtcgttcttgacatcgctttaagtgttcagacccctactgcagtcattttatttgtaatagtgccttgtgtgttgtgtctcctagctctacatacaaactaccacgcttacaatctccatgaacctaagtgcatcagtggcgctggggatgctatacatgccgaaagtgtacatcatcattttccaccctgaactcaatgtccagaaacggaagcgaagcttcaaggcggtagtcacagcagccaccatgtcatcgaggctgtcacacaaacccagtgacagacccaacggtgaggcaaagaccgagctctgtgaaaacgtagacccaa

SEQ ID NO: 373181 - DNA, 547 bp, Homo sapiens
tttagctgccacttcaattagaagtccttcaaatatgattaaaggtttactctgaactttaatataagagacttctgtagggcaagcatgtgcatggattgacccaatagcattcaatcaattaatacatgcatatgctctccaataactgtgcagagttattgtgctttcctttatttaycaaaatgccctgaagattgctttatctcctagccatagtcgttcttgacatcgctttaagtgttcagacccctactgcagtcattttatttgtaatagtgccttgtgtgttgtgtctcctagctctacatacaaactaccacgcttacaatctccatgaacctaagtgcatcagtggcgctggggatgctatacatgccgaaagtgtacatcatcattttccaccctgaactcaatgtccagaaacggaagcgaagcttcaaggcggtagtcacagcagccaccatgtcatcgaggctgtcacacaaacccagtgacagacccaacggtgaggcaaagaccgagctctgtgaaaacgtagacccaa

SEQ ID NO: 373182 - DNA, 582 bp, Homo sapiens
agtgagtaaatgttaaagtgaacagcttacagattcccatgtctgctttcaatgttagcatgtagtaaagttcctggtgtttaatatgtgttaagtaatattttgttagatgaatggctgagtagtcaacagaaatccagatttgggagtttttgccactggattggaaattatggtgatttgaaatactgagttatttttctgactgatcatgtttttacccctgccaagtttcttgtgtcaacaaatccaggtaccaaacatatgagcaatagcctcacattctcctgggagatggagaaagtctccattgttttatagttcagarttgaactggtataattgggaatgtctccatttttttggtagtcatgttcttcattctttagctttgtatcttctcaagttgaggaatgtgctaaactgagtagtaaatttaaaaaaggatttaagagagatcattataaaatgaattgcttcttctttgtaagatacaggaagtttagtagctttcttgaagtctcaaatgagaattgagatgttgaagagaacatctactcttttgctatttagtgatgggct

SEQ ID NO: 373183 - DNA, 565 bp, Homo sapiens
taaccgttgtatttttaatagagatggggttttgccacattggccaggctggtcttgaactcctgacctcaggtgatctgcctgcctcggccttccaaagtgctgggattacaggagtgagctacagtgcccggatgaatatttattttttaattgacaaatacaaattgtataatatgtatacattatgggatggctaaatcaagctaattaacatactcatttatctcacatatttttgtgtgtgtggtaaggaaacttaaaaatggctctcttagcaatttgcaaatatagaatgcattgttattaattatagtcaccatgttgtgcaacagatgtctttcttgccttcctcctgcaactagaatggagctttctgatggcgggaagcatgcctggcgtgtcacccttgygtgcacagcacatacgccagtccaggcacttgtatctcaataaaaatggcgaacttagtgtgctttaagtttgatcagatttaaaaagataaaagtaccaaaactaaaaaataggtaaacccataaatggatgactgtacaagtagtggaag

SEQ ID NO: 373184 - DNA, 566 bp, Homo sapiens
tttccactgatgatagtcaaccagaatagccattcatatgtctctgagcgtggtgggcgcaattcagttttctctcccagctttcttcatgccaataatacaccttcaaggtgggctacttargtcttgatggtaaattataaaaacactaaggtcataacattctctaaacaagaacaacttcatcctacttctatgcagcttcagttaatttctaaattccccagcactgcagggactccctactttctacccacccctaatttattttttataaaacatgatccaaatatatcatgggagatgcaccaggccttttcctgactttcaagtaatgcatttttgtgtaaacatgttgcttatgaaagagcctttcatggatgccttgtgttgcctttgctcaagaaaatacattttaaaagaattctccccagcctggcatgtaatctttcattagccaacataaccttgtttatttgctttttaaaattttatttgggaaaggaaatcaatttgcacccctgacatgctgccaggttcctgtttatatgcacacaataggcagc

SEQ ID NO: 373185 - DNA, 543 bp, Homo sapiens
ttcattcctgttttctttctttgtcagaaatgtcacagacccagggaggtcctctatcctgtactcatggtatctaattcatccatcttttattaatcctgtgacagcaggtgctggacacctggacacatactctacaccccttatgaagagtgaaatattaaaccaagggtgggtggcagaaccttgacttttccattgtgtatctgaggaggacaactcatcagggaattggagctgagacatgacatacaccctttagtgaaaacctggttagttgcagtgagccatgccttagcaggcttttccaacatccaagaagtagtttgggtctatcataaccaccatgactatcactccttcctaagcaaaagctgaaagaccaactctttgcccagtaagaacccatcctgcttttcttgttgttactgaagctgaatattcmaagatcagtgccatacaactgcttttatctcagtgcttaccaaatgccttctttggaacagtactcctgagaaacttgctgcattggaattaccaatg

SEQ ID NO: 373186 - DNA, 624 bp, Homo sapiens
ttggccaaactattaaccaagtattgttggaaaaacacagtaaaaaataaaaaataacaactataaatgcrttgtttaaaccaatattttatgtttaaacataagttcttaattggttgacttgtagaagttgaaggactcagatatctttatgaacaccctcaattcacagactaagcagtgcaagttcttccccaccaaagtgccttcgtcctgtagtttcttctgtgcaaatggtttgccctctgcatcttcacacaaacagctctttctgatccttggggtctcatctgaaacgtcactttccagaaaagcttttcctacctaatctatctaaaccatctctccctccccttctgcccctctattcaaactccattttagcatcttacttgtttctttcacattgacagtcatcacaaagtgtaagtccatattttagaattgtatcttgttttttatcagccgttctcactaatctgtgagcattttgagagcaaacttttatgttgacttctacataaaaagcccccaaaagagagtccagcaaactatggcctctcaaagctatctcttgagtgaatgaataaatgaatgaatgaatagaaattcactatcttcact

SEQ ID NO: 373187 - DNA, 624 bp, Homo sapiens
ttggccaaactattaaccaagtattgttggaaaaacacagtaaaaaataaaaaataacaactataaatgcgttgtttaaaccaatattttatgtttaaacataagttcttaattggttgacttgtagaagttgaaggactcagatatctttatgaacaccctcaattcacagactaagcagtgcaagttcttccccaccaaagtgccttcgtcctgtagtttcttctgtgcaaatggtttgccctctgcatcttcacacaaacagctctttctgatccttggggtctcatctgaaacgtcactttccagaaaagcttttcctacctaatctatctaaaccatctctccctccccttctgcccctctattcaaactccattttagcatcttacttgtttctttcacattgacagtcatcacaaagtgtaagtccatattttagaattgtatcttgttttttatcagccgttctcactaatctgtgagcattttgagagcaaacttttatgttgacttctacataaaaagcccccaaaagagagtccagcaaactatggcctctcaaagctatctcttgagtgaatgaataaatgaatgawtgaatagaaattcactatcttcact

SEQ ID NO: 373188 - DNA, 502 bp, Homo sapiens
tggagggtgactgagatcaggggctggctaaccttcgagccgagggacagaaaatcctcccttggcgacactggagctgagaccttaactacatctcctataagaaacactaagcataagttaagtagcagcgttctctgtcctcccgggatcccaggacaataggtccttcctgccttagcattacatgttttctttacattccatagatatttctaatgatggtgaacraaacttttaaagaacaaaacatttgaaaagaaaagaaggagcttgtccctgcagaccatcacccccaaaagaaggcaccaacaggagagagggagagaagaatcacagaaggaccctcacttctcctttcctgacatctcttcctagtcctggccaggcagttcagacttcagacatccatgtcctgtcatcagtcaacttcaggaaatttttcgaaattgctgcccaatctgcaaggacaggaggtagaggaaatggaaaagtgagagag

SEQ ID NO: 373189 - DNA, 568 bp, Homo sapiens
tttgtcttgtatgttgctccatttattctaacatccttgcacaccaccatgtttgataaaggtttaggtaaacccatatgcaggaagctttttatttacacacacacacacacaatgcagcttatagatctatgacaactggaagacctctagtgtgctgagtcctaccaccagctgaacaaaactccagtgaaggcggaggagaggggaggaacactgagccagaatggggtgcttatggtcttttatcttaatttttgtgacatgatccaattatatctattcaatagtgccctctaattactagcagagatgaataatgaaagattctccttgtattcaagctctccccaagtccgcttccctccttgrctcgctcatgtgaacagtctagattcacatatagagcatacctagagcttgtggcacacttagccaaataaagggtcacttaaaatactggaaacgccctccgggcctccaataagaggctgtggcccagagctgaccttgtgaatagcagggtggaatggaaagggaccctgtcctgcctccaggcacagtgtct

SEQ ID NO: 373190 - DNA, 645 bp, Homo sapiens
ggaatctatgcttatggtgagatttgggtttattttctgccatcatatacttctgtggatgaaagattaataataaccattttcttatagagctagataataagaggcaacactgcctactaaatagtgcttggtgcaaacatttcattcagaagaatcaaaactttcttcttctaaataaccacttatattccagtggttggattaacctactccttgcttctttcattggtcagataatgtatccaattgaggaacttctctacctagggcaagaacccratagataatttctcagtaaataataaaataataaatattaaataataaaataaaataataagataataaaagtcatgagcacagccctctctgtatttcttcttgatgtatatcatgttgattgttttctgtttcttgtccagattttttttgtccattatgatactatagatcaaaatagccctatcattggggccaaaattattttaattgatgtagaaaggtttttaatgacaaacattactcttaaataaagtgtttttaaactaagtttttcctttgttttatttttaaaaagatgtaaatgatttagtatttgcatcctaccccagggacctgggagaattaatatattctcttcca

SEQ ID NO: 373191 - DNA, 622 bp, Homo sapiens
catttatctctcatttgttttgtcaaagacatgacacttcaggactgtgtggaaaagagtatccagtcttcctatttttctatttttggccttcatgcatggaattcccttatttcaaaaatatctttttggggaaacccaaacaatgcgctaaaattaatactccaggaggaaatgaactggagctgaccttcactgcttcctgctccttgtttcctgctattttaacaactttctcaaaaatggcactcktccatctctggtcttgttatcagagttgaagttgatttcctgcccatgagacaaagaagtgaggggcacagtgctttgaacaaaatgaggggtttcacaaaattgagatcagacaagccagacacaagagtgccttcggtccttgattccactgacatgaaaccctagaacaggcaaaatgttttctagtgacagaggcagatcagttgagcctgggaagggggactggctgccaaaaggcaggagagaattttttgaggtgacaaaaatgtcttatatttttatcatgctggtggtttcatgggcgtatacgtttgctaaaactcaacgactgaacacttgacgtggataaatttcactatatgcaatt

SEQ ID NO: 373192 - DNA, 583 bp, Homo sapiens
aattctagaatacaagacagtggactgcattttcccatagaactgtctctggcaaaaccatcatccagatctcttgcgttggacttgttttacatgtttactattttagttgtttttctagttaaagctccgaaaataagccactgttagcagagtgagaataaaagaacaatttcctgataagattacttcaagagaggaagctatacctagtcacacacgcagcactgagtccccagagaagttaccttaccaagtagtttacaaaattaaattcattatgaaaataattaacattttagtgctgaaaagaacttcaagaattttctagtggtaccccaccccccaattttamaggtgaaaaaacttaaacctgggaaagttaagtttcttgggaactgtgggatagtgcatggagtaggtggtctggattcgagttctggctctggccattatcactatgacctggggcaagtcacttaatctctgaaccttactttactcaactgcaaaatgggtgtattaattcctgggtaacagaatcatgcatgccaaactagtagagatgtgccttgtaaacagc

SEQ ID NO: 373193 - DNA, 542 bp, Homo sapiens
cagtgaatgagaattctggagctgagactgactcaattaattggctaacccctttatatgtagggtaagggaaccaagcccgggggaacctgacccctaacccaaggtggcaaatgttttaaatggcagagcctgaatgtctaaaatccatgaactctgaacccatgacaatgcttttccttgactcccctctgacttgccatggttttgctccaagcaagctctygtattccaggcatatcttttcaatatgctgcacaaaagaacaaatgtctagatttactgtaagcacagaaagaatgattccaggctggttgctgtagaagtagtccctcatttgtgcctatcttttccaaaaataggagggaggaaatgcacactgagacacttacatggaagcttcaggaactctgagggccaggttctgtgtagaagttccagaaatgaagtcttcctccaagaaaagctcacaggcaaagccaactgtcccctcaggaaatggaacaaatctggaagttgaattgcatttgggcagggaatag

SEQ ID NO: 373194 - DNA, 542 bp, Homo sapiens
cagtgaatgagaattctggagctgagactgactcaattaattggctaacccctttatatgtagggtaagggaaccaagcccgggggaacctgacccctaacccaaggtggcaaatgttttaaatggcagagcctgaatgtctaaaatccatgaactctgaacccatgacaatgcttttccttgactcccctctgacttgccatggttttgctccaagcaagctcttgtattccaggcatatcttttcaatatgctgcacaaaagaacaaatgtctagatttactgtaagcacagaaagaatgattccaggctrgttgctgtagaagtagtccctcatttgtgcctatcttttccaaaaataggagggaggaaatgcacactgagacacttacatggaagcttcaggaactctgagggccaggttctgtgtagaagttccagaaatgaagtcttcctccaagaaaagctcacaggcaaagccaactgtcccctcaggaaatggaacaaatctggaagttgaattgcatttgggcagggaatag

SEQ ID NO: 373195 - DNA, 624 bp, Homo sapiens
cacacctcatgggattgttgtgaggatgggtgggttaacacacataaaacttggaacaagcctgggcatatagccagcagtcaatgagtattagtgctattttccaagagactaccaggaaattttcaattcaaatttgaactcttccacacttcaatcattctaaatattttatattaacaatcatacaactcaaatcacaggaatggtaaagccagtggagcatttgacaagaagcaatcttttaaggtagaaataaatgacttatgtagtgatctctacttgatrcagaaaacaatgaattatactaccttaatgtgaataatacatacgttaaatataaaatgacacacccaaatagaatgacctcataaatgaatgtactccaatgaagaaaggcaacaatctgttaggatatcattatcgtaaacttttcccagagggtgtaagaaattagttgaagaaaagcatatggtacctaatgacaacttagatacctttttaaaagactcttacagtagttatttcactaaaatgcatgtactattataatttcagaaaattgttcttattgaaatagatgatcctctatgatattatgtcattttaacaaaatgagtggcc

SEQ ID NO: 373196 - DNA, 496 bp, Homo sapiens
tgcctggttctactttcaaagcaaggatgcaggtaggttatccccacatgtggctagctgttgggaaggaattgcatatgcaatttggagctaagaatttctttctttgggagggatattgcatctttcattatcttatttgctcatctgcaaaacagtgccattgtagtaaaacactgtagaacaggaccattcaaagaggtattatgtgaaaacataactattggaagctaactgtaaattaagagaaaagtaagccctctggatttcaaatatatctttatttttcaaacctgaatattgtaactttccacagaaaaataaacaccttgaatttcagtccaagaaaatcaattactttgtgtttgtcttggtatctttctgtgtgtctgtgtgtgtctctctctctttstgtgggcatcttccctctgtctctttgcatgtctatttctccatgtgtgcctttctctcctctctttgtgtgtttgtctcctta

SEQ ID NO: 373197 - DNA, 584 bp, Homo sapiens
ccactatcattctgggaaatgagagacccacggcttgtaggtgttgcccatataggaccactgagacctgcaaacagacattctgattggtgcttcaggcccttccccatgcaggacataggagactattcagaacatatttgtgattctgactcattcagagaaatgattttttacctggtgagtcagcatgaagctaggtatttccctacctgtgctaaccatacaaggtcattgctacctggagagctaagtcatctcccccagaaggaaacacacaccatctctgctttttctagaacagctttcctggcatcatgagctcataggttggagctgactacgtggtgtccttccttcgcatcatccagatggcttgctggctggcaaagtagcaaggggacatgagaaagtattacttactttttcttcttttcttttctttgtcgctttagggaggtcaagtttgtcaagttayaatttacatatagtaaaattcacccttgcaacatacagttctatgagatttggcaaatgcatacagccatgtaacaaccactgcaaccatgatatagaacagtttc

SEQ ID NO: 373198 - DNA, 557 bp, Homo sapiens
ttatgaggttataagcttctattaatatggaaattgaggctattatggaacktgttgtctgctatgtatagtattaatacagataatgagggctttctccagtggacataacctgcttacagcctgcgctgattctatatacacattgggatgcttctggaaaaggatgctgggattagagacagagtctgtacaacagacttttccccaatggacagccacatgggtcaagtaaggatcaattctctatttgctctttaacagaattttctagaccaactgcagctagaagttttaaaggtggcgtgcagaaccagtccaatctgtccaatattttttgtgtaagacacatagaacgttcatgcaagaactttctttagccaaattctccactataaattaatccatcttccactttactaaaacctaatgagggaaccaatgcaagtctaaagactcagaggaaaagaaatcagaagacaactagagatgtagaattaaaaagaaataattgtcagaatgtagaccaaaggaaaaagaaagatactaaaaatgat

SEQ ID NO: 373199 - DNA, 612 bp, Homo sapiens
caacacttgtaattattcacctttctattttttcattgtttttcttgttttaatttgcatttctctgactgtaagtttgagcatctcttcacggatacaaaatatgaatagraatccaaaaagagaaagtcagtaggctggaaactcaggtaaagtttctatgttgcagtcttgaggcagttgtttcttctttgggaaacctcagtctttgttcttaatgcctccaagtgaggcattatgaggcccaccaacattatgaaggataatctgctttattcaaagtctactggtttaaatgctaatcacatctaaataattccttcacagcaatgtcttgacttgtgcttggccaaacaactggtcaccatagcctagctaagttggctcataaaattaaccatcacacctctgaactcttccctgaaccacttatttgtcttacaattatatgaaggcaggctaatgacatctctcgcattgtcatctttcggtatgtagctttggaagtgtgtaggtttgcctttccaactccttgaagataaagaccatatcttatacttcttatggggttcctggaatgcctagtggggtgctacacagaccttgcttaat

SEQ ID NO: 373200 - DNA, 612 bp, Homo sapiens
caacacttgtaattattcacctttctattttttcattgtttttcttgttttaatttgcatttctctgactgtaagtttgagcatctcttcacggatacaaaatatgaatagaaatccaaaaagagaaagtcartaggctggaaactcaggtaaagtttctatgttgcagtcttgaggcagttgtttcttctttgggaaacctcagtctttgttcttaatgcctccaagtgaggcattatgaggcccaccaacattatgaaggataatctgctttattcaaagtctactggtttaaatgctaatcacatctaaataattccttcacagcaatgtcttgacttgtgcttggccaaacaactggtcaccatagcctagctaagttggctcataaaattaaccatcacacctctgaactcttccctgaaccacttatttgtcttacaattatatgaaggcaggctaatgacatctctcgcattgtcatctttcggtatgtagctttggaagtgtgtaggtttgcctttccaactccttgaagataaagaccatatcttatacttcttatggggttcctggaatgcctagtggggtgctacacagaccttgcttaat

SEQ ID NO: 373201 - DNA, 618 bp, Homo sapiens
gttcataggaacacaacaagctttagggggtaattactttctgaatacttgatgtggatttgctgagaaacacatctgttatcaaatttgccaatgattaatttgattcttccatttccacagaaaaaggggcaagtgaagttgatgattaccagtgccaagccgattggtatatggcatctcccacagattcaagtattatattcttgggataggaaaaaaaaaaaaaatcagtrtaatctcctctcacacatacattggattaaaccctataggattatgtgtatagaaaaacattttctgtaattaaattatctttggtgttgttgaaaaaggtgcagagttttaaaagttaatggcttcttttggaaacagaatagttcgtgtttcagattttgcaagtccccaagcttccttccccttctttttcctttcctctgatgtccgcccacccctagccaaatcctttcacaaaacacacctcccctctgtaattccttcccgggttcatattctcagccaactggtgactaaccctttttgtgttttaactattatccagaatatttggtctaaagcatttgcatttgagctctggaaagctcttagcattttaca

SEQ ID NO: 373202 - DNA, 603 bp, Homo sapiens
tgctagttttagttatagaacagaatataaatgctacaacctcgataagataaacaacaaaatagaaaaatgagaagtgaatgagggaatataattagctagtatgagcgctagtatcatctttcacagcaaaaagtctatagatacatacatgtacacatatatacatataatattattgtatttacaaacaaaggcactctgacctctttgtatcattcattgtatcttttaaccttagagaaatcatttaaaaaatttttttgtctcaaatcatttattagaagttcaaattatttatcatttttactttgttttattctgttttctaaaataaaatttaatcttgaygttaaaagtaacgtctatggtatgatctcatttttataaaatatttgtattcttctatgctattatctatctatacatgaatacagtatatcttttctgtatttatatatatagaaagatggctataattttacccaatattaataatttttatttttagagaaagttttattggagataggttttttattttctttgcataatatttcatagtttgaatgattaaaataaaaatgcgttatattaaagaaa

SEQ ID NO: 373203 - DNA, 579 bp, Homo sapiens
tgactcaatagtgaacaatatctattatgatgtcataataattaaaacactgattatggcattaagcaaagattgtgatataactacattttgaaatataaaggtcgggaaagyagacagtaacaaagcttaaatcctcacttgccaaagtagaaaatttaatgaataatgtcaatgtacatctatccaccaacataagcatgttatttggaactatagaagcaagatccaaaagtttctccttccatgattggcgtgatgggagcaggaaccctggtgtttattctatgcacttagcactattgaatgctcaaaatgttttccttgttttcctttgataaaatattaattaattaaaaattgtttggcaccagtacatgtgcttggccattgtgagaagtgctaagaaaaaactttgttctgaattaagaaattgggttaaaagcaagatgcccaaagagtttggctttaaatcttgagttctattccacatatctgtatctgcttgaacatttatttactctctttacttcatatgcaaatatcagataattttactacttaccttgtggacttgtt

SEQ ID NO: 373204 - DNA, 579 bp, Homo sapiens
tgactcaatagtgaacaatatctattatgatgtcataataattaaaacactgattatggcattaagcaaagattgtgatataactacattttgaaatataaaggtcgggaaagcagacagtaasaaagcttaaatcctcacttgccaaagtagaaaatttaatgaataatgtcaatgtacatctatccaccaacataagcatgttatttggaactatagaagcaagatccaaaagtttctccttccatgattggcgtgatgggagcaggaaccctggtgtttattctatgcacttagcactattgaatgctcaaaatgttttccttgttttcctttgataaaatattaattaattaaaaattgtttggcaccagtacatgtgcttggccattgtgagaagtgctaagaaaaaactttgttctgaattaagaaattgggttaaaagcaagatgcccaaagagtttggctttaaatcttgagttctattccacatatctgtatctgcttgaacatttatttactctctttacttcatatgcaaatatcagataattttactacttaccttgtggacttgtt

SEQ ID NO: 373205 - DNA, 579 bp, Homo sapiens
tgactcaatagtgaacaatatctattatgatgtcataataattaaaacactgattatggcattaagcaaagattgtgatataactacattttgaaatataaaggtcgggaaagcagacagtaacaaagcttaaatcctcacttgccaaagtagaaaatttaatgaataatgtcartgtacatctatccaccaacataagcatgttatttggaactatagaagcaagatccaaaagtttctccttccatgattggcgtgatgggagcaggaaccctggtgtttattctatgcacttagcactattgaatgctcaaaatgttttccttgttttcctttgataaaatattaattaattaaaaattgtttggcaccagtacatgtgcttggccattgtgagaagtgctaagaaaaaactttgttctgaattaagaaattgggttaaaagcaagatgcccaaagagtttggctttaaatcttgagttctattccacatatctgtatctgcttgaacatttatttactctctttacttcatatgcaaatatcagataattttactacttaccttgtggacttgtt

SEQ ID NO: 373206 - DNA, 565 bp, Homo sapiens
gaacttcttcctggcctatttattgcctaagtggcacttaagaaaattagacaaaattttgcactaagcctgatgcataatcaatctattcaataattcccactatgccttgaccttcataaggtcactccactgttgacaagtcttgtctgtaacttaaagttacagacagstgggtaagcccatcaagtgtcatggacacatctatttgggcacttcttcaatactttgactttgaaaaactttcaattcaccaactggtatcagtggtctaaagagggtcacttcttgattatttgacagctcctggaaatctctgtgtttttttttttgcttctctctaagaataattatagatataaaggcttggaattcattttaaacctgtgatagtgtgactacagttcaacataaagattgataatgtagtgtctgttatgactcatatcttagccagtttttgttccccaatgtcagttttcatgttatacacatttccttttagttgagtatgaagagtagagctagcaacatatatttggagtttttgagtttgtaggcatca

SEQ ID NO: 373207 - DNA, 565 bp, Homo sapiens
gaacttcttcctggcctatttattgcctaagtggcacttaagaaaattagacaaaattttgcactaagcctgatgcataatcaatctattcaataattcccactatgccttgaccttcataaggtcactccactgttgacaagtcttgtctgtaacttaaagttacagacaggtgggtaagcccatcaagtgtcatggacacatctatttgggcacttcttcaatactttgactttgaaaaactttcaattcaccaactggtatcagtggtctaaagagggtcacttcttgattatttgacagctcctggaaatctctgtgtttttttttttgcttctctctaagaataattatagatataaaggcttggaattcattttaaacctgtgatagtgtgactacagttcaacataaagattgataatgtagtgtctgttatgactcatatcttagccagtttttgttccccaatgtcagttttcatgttatacacatttccttttagttgagtatgaaragtagagctagcaacatatatttggagtttttgagtttgtaggcatca

SEQ ID NO: 373208 - DNA, 559 bp, Homo sapiens
gggatttaggagtatttaccgaatagaatttttaaaaaacaaacagcagatgaattaaatatttagaacccacagtttaaccgtgctgggattttmtttgaccttctcttgcttctgtttcttgctgtgtgttggctcaatttccttctagtgatcataagctttaaaacaaccacattttagcaacttcagtgggaaagcacatgatatttgtaaatacttatggattaatatcaagcagagagttggatttatccatcctttgagccaaccactattgtctgggaaataggttataatatttgctaactcctattgctcatcgctatgaccagagggctagtgcaaactacaggtggaagaatataaaagacattcttttgtaaaaacaggaaaaaaataacactgcctagcacgtccactgcaccacttcttgtgcaaacacctgtataacatccttacaggtactcctcagcattaactgggtaaaatgtaggatatgatgaaaagtttattagacctggcatctatctcatctctgtttctagccagttttgtg

SEQ ID NO: 373209 - DNA, 621 bp, Homo sapiens
aatatttgctaactcctattgctcatcgctatgaccagagggctagtgcaaactacaggtggaagaatataaaagacattsttttgtaaaaacaggaaaaaaataacactgcctagcacgtccactgcaccacttcttgtgcaaacacctgtataacatccttacaggtactcctcagcattaactgggtaaaatgtaggatatgatgaaaagtttattagacctggcatctatctcatctctgtttctagccagttttgtggtgatgaaaaagacattttgcagctctgaactttatttcttcatccataaatttgttgctctatcattttcaatctctgtgaataggaattactgactgacaatctcattctgttgttgtagaactcagatcaatctccattgagctaaatgttgtctttcttgcattataatacagaaattaagagtgaactcttatatcagataacccttagtttgaatcctagtatgtggtactcagcaattcactcaaactctctatgtctcagtttcttcattgaaaggatttaattagaagatgtatataaagtgttggcaaaatgcctagcacatataaacactggataaatattagtcatt

SEQ ID NO: 373210 - DNA, 559 bp, Homo sapiens
gggatttaggagtatttaccgaatagaatttttaaaaaacaaacagcagatgaattaaatatttagaacccacagtttaaccgtgctgggattttctttgaccttctcttgcttctgtttcttgctgtgtgttggctcaatttccttctagtgatcataagctttaaaacaaccacattttagcaacttcagtgggaaagcacatgatatttgtaaatacttatggattaatatcaagcagagagttggatttatccatcctttgagccaaccactattgtctgggaaataggttataatatttgctaactcctattgctcatcgctatgaccagagggctagtgcaaactacaggtggaagaatataaaagacattcttttgtaaaaacaggaaaaaaataacactgcctagcacgtccactgcaccacttcttgtgcaaacacctgtataacatccttayaggtactcctcagcattaactgggtaaaatgtaggatatgatgaaaagtttattagacctggcatctatctcatctctgtttctagccagttttgtg

SEQ ID NO: 373211 - DNA, 621 bp, Homo sapiens
aatatttgctaactcctattgctcatcgctatgaccagagggctagtgcaaactacaggtggaagaatataaaagacattcttttgtaaaaacaggaaaaaaataacactgcctagcacgtccactgcaccacttcttgtgcaaacacctgtataacatccttacaggtactcctcagcattaactgggtaaaatgtaggatatgatgaaaagtttattagacctggcatctatctcatctctgtttctagccagttttgtggtgatgaaaaagacattttgcagctctgaactttatttcttcatccataaatttgttgctctatcattttcaatctctgtgaataggaattactgactgacaatctcattctgttgttgtagaactcagatcaakctccattgagctaaatgttgtctttcttgcattataatacagaaattaagagtgaactcttatatcagataacccttagtttgaatcctagtatgtggtactcagcaattcactcaaactctctatgtctcagtttcttcattgaaaggatttaattagaagatgtatataaagtgttggcaaaatgcctagcacatataaacactggataaatattagtcatt

SEQ ID NO: 373212 - DNA, 586 bp, Homo sapiens
agggtcaatgaaaaaaaatttaatcatgtccaagctactgtgctacatctttacaaaattcaattatttctatccagtgtggcacaagaaacatttggcaactgattaaaacaattcttaaagcaaattacagcactgtcagaaaacaagaaatcagaatgtcaaaatacaaggacatttctatgcaaaatgtsttgcaagtgtctttgacagagtatttctgtctgcttgttttattactttcattaatttggtccacatcaagtaaaaagaaaaaaaaatacttccatgtgttagctatttgaaataaaaattctcaaatgaataatattcccaaagataaccaaagtagccatgtggggaaattttatgctttaattttatccaagcttactcagcactgtaaaaatctatgttgaggtttctagctgtagggatcccaaaataactgctttttttttttttttttggcagtaaatccacatctatgcaatttcagctactactaatatgtagatgccattagacgtagatgttatgtattatttcagggcagaataaaacataacaatatgtaatttataat

SEQ ID NO: 373213 - DNA, 602 bp, Homo sapiens
attagacgtagatgttatgtattatttcagggcagaataaaacataacaatatgtaatttataatatatttgatgtgcattttaaaaagtgaagttttttaaagtttagaatgaataacaagtttgtttttcttaattatgctttaagttctgggatacgtgtgcagaacatgtaggtttgttatataggtatacacgtgccatggtggtttgctgcacccatcaatccgtcatctacattaggtatttctcctaatgctatccctccccctgacaggccccagtgtgtgatgttcccctccccgtgtccatgtgttctcattgttcarctcccacttatgagtgagaacatgtggtgtttggttttctgttcctgtgttagtttgctgagaatgatggtttccagcttcatctatgtccctgtaaaggacatgaactcatcattttttatgtctgcatagtattccatggtgtatgtgtgccacattttctttatccagtctatcattgatgggcatttgggttggttccaagtctttgctattgtgaatagtgctgcaataaacatatgtgtgcatgtgtctttctagcagaatatttta

SEQ ID NO: 373214 - DNA, 586 bp, Homo sapiens
tattgtggataacccaattagtatagcaaactgcagcccagagctctagggctcaaaaaatcctcccgccccagactcccaagtagcagggactctaagcacctgccacwgtgcctggctgggctctactttttatccctttacaatatatcttatagcttgtttttatatcaatttaaaataaacaatctcattttaaaatggatgcctaatatgacctgatatccttgcatataatatatgtaccagtccttttttgatgagcataaatttccaactttttgctgttccaagcaatgctgcaataagtaacactgtacatatattacatatatattttattattgagttttaaaatctctttgtatataatggaaattaagctcttgtctataaattctaaagtttttttattcaagtatgtaatagccatgctcacagagaggaagaatcaacattgttaaaatggccatactgcccaaagcaatttatagattcaatgctattcctattaaattactgttgatattcttcatagaactagaaaacactattttaaaattcatgtggaacaacaacaacaaaa

SEQ ID NO: 373215 - DNA, 619 bp, Homo sapiens
tcagctcacccagaagttaaactccttattctgtatgtttgttcatttgtaattaatgataagtgttttttagtgttagcgtcttcgtagttagcacgaaggagctttacagaagcctcaacttgtttctcgaattttagtaaagttgatttcaccatagagcaactcctctttgtgtatttacatatctctattactgtaattttaatttactgagcaagagtcaacatctatatcattatgtgtgattagacaaagaagatctattaacgttttcctaaacttataytgctttccccccatggttgaccctaccatatgaaaaagagactcgtggttgaaatggtacgttggatgaaaacaatgaatgacaataaagttggagagaggggagaaacagctgctggaaaatctctcttatccaatgtccagaatgctgattgttttggggaggaagtaaatttgtattggcttaggggaaatcagtttgtggacaatactggtttggggaaactttgttacatttctaatttcctgacctgggtcgttacaatcaaacaaaattttattcttttcacttgcactccagatggaagaaaatgtaaacagctgtccaagc

SEQ ID NO: 373216 - DNA, 619 bp, Homo sapiens
tcagctcacccagaagttaaactccttattctgtatgtttgttcatttgtaattaatgataagtgttttttagtgttagcgtcttcgtagttagcacgaaggagctttacagaagcctcaacttgtttctcgaattttagtaaagttgatttcaccatagagcaactcctctttgtgtatttacatatctctattactgtaattttaatttactgagcaagagtcaacatctatatcattatgtgtgattagacaaagaagatctattaacgttttcctaaacttatactgctttccccccatggttgaccctaccatatgaaaaagagactcgtggttgaaatggtacrttggatgaaaacaatgaatgacaataaagttggagagaggggagaaacagctgctggaaaatctctcttatccaatgtccagaatgctgattgttttggggaggaagtaaatttgtattggcttaggggaaatcagtttgtggacaatactggtttggggaaactttgttacatttctaatttcctgacctgggtcgttacaatcaaacaaaattttattcttttcacttgcactccagatggaagaaaatgtaaacagctgtccaagc

SEQ ID NO: 373217 - DNA, 619 bp, Homo sapiens
tcagctcacccagaagttaaactccttattctgtatgtttgttcatttgtaattaatgataagtgttttttagtgttagcgtcttcgtagttagcacgaaggagctttacagaagcctcaacttgtttctcgaattttagtaaagttgatttcaccatagagcaactcctctttgtgtatttacatatctctattactgtaattttaatttactgagcaagagtcaacatctatatcattatgtgtgattagacaaagaagatctattaacgttttcctaaacttatactgctttccccccatggttgaccctaccatatgaaaaagagactcgtggttgaaatggtacgttggatgaaaacaatgaatgacaataaagttggagagaggggagaaacagctgctggaaaatctctcttatccartgtccagaatgctgattgttttggggaggaagtaaatttgtattggcttaggggaaatcagtttgtggacaatactggtttggggaaactttgttacatttctaatttcctgacctgggtcgttacaatcaaacaaaattttattcttttcacttgcactccagatggaagaaaatgtaaacagctgtccaagc

SEQ ID NO: 373218 - DNA, 580 bp, Homo sapiens
taaacacagccatgtgacagcccaaatggagagaatcaagtcattgttaagaaagagaataggtatgcgccggttggactcctatgctgtggttattggtggtgattgcaatgtatgggtccagtccaaaaagaaatctcttactcaatacttctctagttgctgggcacatatgaaagaaatgaagacatgagggaattcagatggttaaataaagctaacaagacagatttttctttttaaaattttgtttaagtctgtgggctaaccatattcacttaggaagcaatacatacagtaaaaatgcaaaattaatatatttaacttaaacaaatttagatttatgcatagggtatgcccctatttagggtacacccctattactcatattaagcagacagttgatgcaatcacacagaaaacaatcaatgcaagctatcaaaatctatgaaagtatgtataaagtttatttcagggtttcctgaccattagaaagaattaaaattcactgtttaagygagcctcaagtagatagtgataaaattatcactattctcagggaagaaattgaagaaaattg

SEQ ID NO: 373219 - DNA, 596 bp, Homo sapiens
acttacagattcatgaagtacaacattgaaaatccactgacatttttgttctttgctttttttttctggttcctctctacttaaggaagtcaattttagaggtgatccacttatctgatactagattcagccaagttgcagaagcaacaaccaacacaactaagaacaaataaaatgaaaataaaaataaaaaaatctggagtttaaaaaccaagcgtgttgtagtcaataaagtgttaaaattttttaaaagttttcaaaaatacatgctgtaaataaactgaggattgactagctgcacagcctcaataaaaatattgaagacattatgaaatggtacacttgcatgatgatttataatttacacatgggtattaatttgaaactaccccaaaaaatacagcctacttacatagcttcagaatttaacccttctcccatttttcccccaaaagtgtccarttatctcctgtcagacctgacagtgagttatcttgttaaagagcttgcaattccattatagacaagctccaaatattgatttgtgccttttatttccttggtctttgacatcattgtaggactaaaaatgttca

SEQ ID NO: 373220 - DNA, 588 bp, Homo sapiens
taattgatgattttcacttgattttaggaatttttggtgtgataataggtggatttgaaaatgtcaggttttatcattaaataaatagtattctaatagagaaagtagaaattgaataattatctaataaattccaacagtgagaactactaagttggataaccaccctgaagtaatttgtatttttctttcagagtaaattcttttaacatatgtttaatttctttaaatgactccactcaacctaagataataagaatagcagtggctttttagagcattcrgatttcaaatacattttctggtaataatgtttctaccaaataaaagaggattaactctgtagagtattttaaagttgtgttcttaccgtataatcacacagacatttatagttaatgctacatttcttccatttgcagatttaactaacactttcatgaacattgttccattttttttgttccagtagtttatctttacaataaacaggtaactataagcaaagtgctatcctgagttctgtgaatccttctagaaaattatggaatctgagacaatgtaatgggaacccccagatttatagcc

SEQ ID NO: 373221 - DNA, 545 bp, Homo sapiens
acagaattattgggtaaaaaaataatgaatatccgttaaataagtgtaccatgtaatttacgttataagctgaggcttttttgagaaaaagagtctattgataattctgccatgacaattggatacatggaaactgtccagtgaaaacaaagatttatggccatgmtaccattgtataggtttttagggagatacagaccctaaggaggaattctatgcaaattaaatgacatctatatagagataatacataatgcacgtgcacaggaagtagatctttgtcactagattggaaatatttagtagtagtctccttggaaaaggaagattagaaacctattgtgcatagtcttgaatatcattccaaagactttggatgtttgtgaaattgaaagtgattaaagtctccattgcataaactggcataattggaccaatctttgttttaggaagaaaattttggtggtaatatttaaatgagtagaaaggacaagagatttaaggcaggaagactattcagagatccaatttttttttaatcttca

SEQ ID NO: 373222 - DNA, 545 bp, Homo sapiens
acagaattattgggtaaaaaaataatgaatatccgttaaataagtgtaccatgtaatttacgttataagctgaggcttttttgagaaaaagagtctattgataattctgccatgacaattggatacatggaaactgtccagtgaaaacaaagatttatggccatgctaccattgtataggtttttagggagatacagaccctaaggaggaattctatgcaaattaaatgacatctatatagagataatacataatgcacgtgcacaggaagtagatctttgtcactagattggaaatatttagtagtagtctccttggaaaaggaagattagaaacctattgtgyatagtcttgaatatcattccaaagactttggatgtttgtgaaattgaaagtgattaaagtctccattgcataaactggcataattggaccaatctttgttttaggaagaaaattttggtggtaatatttaaatgagtagaaaggacaagagatttaaggcaggaagactattcagagatccaatttttttttaatcttca

SEQ ID NO: 373223 - DNA, 597 bp, Homo sapiens
tcactcatccgtggagacaaagcaggccagaatgactgatggggatgcagtgagtggcagaggaaggatggtatgaaatgaggaagaaggaagggaaaaggcagacatactagtctcagaggccctagtcatgctttaggatttaattctaaaagcaatgagaatttatcaaagagcatgcaattggcagaggatttgttcttctatttagcctaagaggcctccagattaaatgttctttctaaatacttaaaaaaggtgacatagtctaaaagggagacagcaaaccagctagaggctgtggtcaggtgtggggaaggrggggacattcagcctccttgttgtattcaaccgccttcctcagctctgtcttctcttttctgattctgtccacattccactttaatcctcaatgcttgtgagatgatccagagtttgactgcatatttagcttttcagggatactgcagataatgatgagaattattcatctttcttcagcataaaccgtatttaacgaggggctagaaaaataatataaagaggctttatggtcaagtttcagagctgagttaggaaagtaattccaagtagtag

SEQ ID NO: 373224 - DNA, 597 bp, Homo sapiens
tcactcatccgtggagacaaagcaggccagaatgactgatggggatgcagtgagtggcagaggaaggatggtatgaaatgaggaagaaggaagggaaaaggcagacatactagtctcagaggccctagtcatgctttaggatttaattctaaaagcaatgagaatttatcaaagagcatgcaattggcagaggatttgttcttctatttagcctaagaggcctccagattaaatgttctttctaaatacttaaaaaaggtgacatagtctaaaagggagacagcaaaccagctagaggctgtggtcaggtgtggggaaggagrggacattcagcctccttgttgtattcaaccgccttcctcagctctgtcttctcttttctgattctgtccacattccactttaatcctcaatgcttgtgagatgatccagagtttgactgcatatttagcttttcagggatactgcagataatgatgagaattattcatctttcttcagcataaaccgtatttaacgaggggctagaaaaataatataaagaggctttatggtcaagtttcagagctgagttaggaaagtaattccaagtagtag

SEQ ID NO: 373225 - DNA, 557 bp, Homo sapiens
gttccactttatcacaccacctccctgtgagcttctgttgagattatttttttactgcctgatccacaatattattgtcatctttatttggcttggcggttgacaaaatgaatgcatttctagaatcttcaatgacgtgaaaattggattacaaacaaaaccatctctggaactgcctgtttcctgtattttccttttggggaaaaaaaaaaaaaactaaaataatgagctagacgagaattctgatctcagatatgccactacatgctcctgcacaccagagcaatgatgtacctctcgagacttctgtttctttatttgtaaactggtggggttggaattatgaattttaaattcctttctatctccaatacactgtgattttctgatgcagtgggtattactgcctcacaaagggcttacaaaatacactggagaaaacaccagtaatagaaaaytctacattcattgctacttaactttgtgctcattcaaatatcttcatagtgtctctctccagagactccaagcacttacttaatttaatatagcccttt

SEQ ID NO: 373226 - DNA, 509 bp, Homo sapiens
cactctgactttcatctctacaacccagtgcctaatgcattgcctggaacgtaacaagtatttaataagtgatagtgtaattagtgggggctccattattaccatactcattattctataaatagcatgcatttggacctctttcattcatctcttctggaaaatttcttatgtttgcttttctccccaatacaacytcctctcacttcttaatgctatggccttttgaatatttatgtgacctgcctgggagtctggccccttggaaatttggttcacacactatatttcagtatgcacgttgtgtctgtgatggttaattttagggatcaatctgatcggattaaataatacctagggaactagtgaagcattatttttgggcgtgtctgcaaggacatttccagaagaaattagcatgtgagtctgagtgaactaaggggaagatctgtcctcaaagtgggtgggcacaatcctatcagctgggggcctggatggaacaaaaacag

SEQ ID NO: 373227 - DNA, 401 bp, Homo sapiens
aataatgtaaatttttgtgtgttctaagttagaatatgtgtgaatgcaaactcaaaataactatatcttttaaaaagtccaaagtaatagaggagctactggctctgtttagagttaaaaattattgccacacagagaaacttgtctattaaactgggaatagaaaaacaatggtagataatatttatattattttgacattttaaaagtgtttcttttttgccttggtaaattgtaaacaagaagattaacaataaaagattagaaactatattctaaatattactttcttttcctctacaattttgcatgcatctccaaaaaggtacattgagtttttgagaatgaatgtggaaaccacagccactgcattygtatatgaaaatctgtatgtgaattcc

SEQ ID NO: 373228 - DNA, 540 bp, Homo sapiens
aagccaataaaaggatgtattgagtttttcaacaccatataggaatacgtgttcaatagtatagagacatctttaaagtgtatcaaatgcctctcagggctttccacctgaattaagcatggaagaagcatctatctattggctccgataccttagtaacaaggtgaccatataccccattatgtaaaacaggacaataaccagagtgaaaggagaaagtattaataatagtaactgaaaaaactggtatagctgaaatcaatcctgagccagtgagrctgtgtggccacctcacatattggtcaaagtttgtcctgtgggatattaactcttctacacatctagagtacatacctatatgagtaagagtcagctttgtgtgagtactcagtatcagagaaactgctggatgggaaatgagaattgtgagaaatggatcactgtcaggtaatatttatgttaggctgaatgaagcattagcttgaatgtttggtcaggatgagaatatttgaaatgatgcagaaaaacaaggcatagaat

SEQ ID NO: 373229 - DNA, 462 bp, Homo sapiens
aagccaataaaaggatgtattgagtttttcaacaccatataggaatacgtgttcaatagtatagagacatctttaaagtgtatcaaatgcctctcagggctttccacctgaattaagcatggaagaagcatctatctattggctccgataccttagtaacaaggtgaccatataccccattatgtaaaacaggacaataaccagagtgaaaggagaaagtattaataatagtaactgaaaaaactggtatagctgaaatcaatcctgagccagtgagactgtgtggccaccycacatattggtcaaagtttgtcctgtgggatattaactcttctacacatctagagtacatacctatatgagtaagagtcagctttgtgtgagtactcagtatcagagaaactgctggatgggaaatgagaattgtgagaaatggatcactgtcaggtaatatttatgtta

SEQ ID NO: 373230 - DNA, 635 bp, Homo sapiens
ttcagtaaatatttgttaagaatctagtgtgtcctaaaatccgtaaaattgcagtagaggaattagtctcatgcgtatgcatatggtttagcttatttggagtcatataacctaggtttgaaactattttgccacttactagttgtgtaatcccgggcaagttatttactctgtctaaacattattggatgtttgttaaaaggacactaatagtaattatgtcataaaatttgatgggagcataaaatgagatwgtatagggaaagtgtgggtaagaatagagcctagcaagcaactgcttgttaagtgttaattatgataatgatgatggtaataagatcacttattttttattttttatttttttgagacagagtttcactcttgtcgcccagtatggagtgcaatggcacaatctcagcttactgcaacctctgcctcccaggttcaagcgattctcctgcctcagccttccgagtagctgggattatagctgcccaccaccatgcccggctaattttttgtatttttagtatttttttgtatttttgtattttgtaattttttgtattttttgtatatttagtagagactatgttggacagtctggtcttgaactcctgacctcaggtgac

SEQ ID NO: 373231 - DNA, 586 bp, Homo sapiens
cttctggcaataagagtttgcacttagtttataaatgcacaaacctctccactgtgactcatagagatttctgacttgcrtttatttgagtttcatttctccaaacaatgtaatttttggttgaattctttcttagatttacattcttttatgtgttcggaagtgttgtgattcttggctctgtgaaattgctagaaaaaaagtgcagaagaaatattcctaatattgttgtaatttattgagttttattaaatgccagagactgtgtgttatggactaaattacgtcccctcaaataccctcaatatgttgaagaaactctaattcctagtgtgatggtatttggagatgaagttttgggaagtaattaggtttagataagctaatgagggtagcctgttcatgatagggttaatgtccttaagagaagagataccagtgacttgataaagaagatacaaaaaaaatttgattcatgccctgaatttctctccctttctgccaagtgtggacatagcaagaaggaggctgtctgtaggctggaaaatgagccttcaccagaacccaactatgttcacatcctgat

SEQ ID NO: 373232 - DNA, 586 bp, Homo sapiens
cttctggcaataagagtttgcacttagtttataaatgcacaaacctctccactgtgactcatagagatttctgacttgcatttatttgagtttcatttctccawacaatgtaatttttggttgaattctttcttagatttacattcttttatgtgttcggaagtgttgtgattcttggctctgtgaaattgctagaaaaaaagtgcagaagaaatattcctaatattgttgtaatttattgagttttattaaatgccagagactgtgtgttatggactaaattacgtcccctcaaataccctcaatatgttgaagaaactctaattcctagtgtgatggtatttggagatgaagttttgggaagtaattaggtttagataagctaatgagggtagcctgttcatgatagggttaatgtccttaagagaagagataccagtgacttgataaagaagatacaaaaaaaatttgattcatgccctgaatttctctccctttctgccaagtgtggacatagcaagaaggaggctgtctgtaggctggaaaatgagccttcaccagaacccaactatgttcacatcctgat

SEQ ID NO: 373233 - DNA, 586 bp, Homo sapiens
cttctggcaataagagtttgcacttagtttataaatgcacaaacctctccactgtgactcatagagatttctgacttgcatttatttgagtttcatttctccaaacaatgtaatttttggttgaattctttcttagatttacattcttttatgtgttcggaagtgttgtgattcttggctctgtgaaattgctagaaaaaaagtgcagaagaaatattcctaatattgttgtaatttattgagttttattaaatgycagagactgtgtgttatggactaaattacgtcccctcaaataccctcaatatgttgaagaaactctaattcctagtgtgatggtatttggagatgaagttttgggaagtaattaggtttagataagctaatgagggtagcctgttcatgatagggttaatgtccttaagagaagagataccagtgacttgataaagaagatacaaaaaaaatttgattcatgccctgaatttctctccctttctgccaagtgtggacatagcaagaaggaggctgtctgtaggctggaaaatgagccttcaccagaacccaactatgttcacatcctgat

SEQ ID NO: 373234 - DNA, 586 bp, Homo sapiens
cttctggcaataagagtttgcacttagtttataaatgcacaaacctctccactgtgactcatagagatttctgacttgcatttatttgagtttcatttctccaaacaatgtaatttttggttgaattctttcttagatttacattcttttatgtgttcggaagtgttgtgattcttggctctgtgaaattgctagaaaaaaagtgcagaagaaatattcctaatattgttgtaatttattgagttttattaaatgccagagactgtgtgttatggactaaattacgtcccctcaaataccctcaatatgttgaagaaactctaattcctagtgtgatggtatttggagatgaagttttgggaagtaattaggtttagatragctaatgagggtagcctgttcatgatagggttaatgtccttaagagaagagataccagtgacttgataaagaagatacaaaaaaaatttgattcatgccctgaatttctctccctttctgccaagtgtggacatagcaagaaggaggctgtctgtaggctggaaaatgagccttcaccagaacccaactatgttcacatcctgat

SEQ ID NO: 373235 - DNA, 636 bp, Homo sapiens
tgaaactaccccctgcctctttacaaaaactaataataaaaaaatttagtcaggtaattgggcacagtagtgcctgcctatagtcccagctactcgggaggccaaggcagaaggattgcttgagcccaggagttcagcactgtagtaagctatgattgcaccactgcactccatcctgagttacaaagcaagaatccatctcaaaaaatgaaaattatagatataaatgtgaaacctaaaactataaaatatctataagaaaacatgaaaaaccattcatgaccttatgttagaaaaggtttcttatacrcgacagcaaaacacgatcagtagaagaaaaaatgactgtgttggacttcatcaaaattaaaaacacttgctctgtaatgagaatggaaaagaaaaggcacagattggaagaatttctatataatttacctataattggggtagatgagaaattcttaaaaaataataacaatgcagtttttaaaatgagcaaaatgaaaagccatttcttttagtcatttttaattttggtggtttatgtgtttacaggatacatgacccaataagtgtatagtggtatcttattgtggtataaatgttcactttcctaatgattactgatattga

SEQ ID NO: 373236 - DNA, 636 bp, Homo sapiens
tgaaactaccccctgcctctttacaaaaactaataataaaaaaatttagtcaggtaattgggcacagtagtgcctgcctatagtcccagctactcgggaggccaaggcagaaggattgcttgagcccaggagttcagcactgtagtaagctatgattgcaccactgcactccatcctgagttacaaagcaagaatccatctcaaaaaatgaaaattatagatataaatgtgaaacctaaaactataaaatatctataagaaaacatgaaaaaccattcatgaccttatgttagaaaaggtttcttatacaygacagcaaaacacgatcagtagaagaaaaaatgactgtgttggacttcatcaaaattaaaaacacttgctctgtaatgagaatggaaaagaaaaggcacagattggaagaatttctatataatttacctataattggggtagatgagaaattcttaaaaaataataacaatgcagtttttaaaatgagcaaaatgaaaagccatttcttttagtcatttttaattttggtggtttatgtgtttacaggatacatgacccaataagtgtatagtggtatcttattgtggtataaatgttcactttcctaatgattactgatattga

SEQ ID NO: 373237 - DNA, 567 bp, Homo sapiens
agtaggcattttagatactggagttacagaagtaaacaaaacagacaaaaattcttgccttcgtggaacatacattcctgttaggggagacagagtaaaacaaaatagataagtgaaatatatactatattagatggtgataattgctggaagaaaaataaakcagggagataggatttagaatgttggggagggtgaccttactgaagagagaaactttgtataaagcccaaaaggtgaggaaggtgtgacccagaccgttaaaggagaagatgattacaagataatgaaatctcaggaataaagcctgaagaggtgtgggaactgtcataggtaaggaaacagatgggagaccaaagtggctggagcaaagtaagttggggaaacaagtagaagataatgtcaaagaggtcacagaaggtgagatcttggaaagctgtgtgggccactgtgctgactttggcttttactcaattgagacatgaagccactagaggacttatacaaagacaggacttgaactggccttttttgtagcagataacattgactgccatggagctgtaa

SEQ ID NO: 373238 - DNA, 587 bp, Homo sapiens
gggtctcagaatttgcctgccatgttcacagacagaaatggattaggaagattaaaacaaggagagaagacactatacataggtagaaataaagtgggataggtaaggtgcagctgactatagatatgtatggcgcatagctgacatatttgagctagagaatgaataccaatgcaaagttgttgggtattactgagcatagccctgccatggaattctactaaagaaggtctggttatttgaaggaattttatgttaaaagaattttgccgctaccaatagacccagggcaaatgccttttcagggtccttcttccagaayaataaccatcagatccagatatcaaattccttcaggtgctgaagctttggtatggcaaagataggctagatgttcagcaaatccatttccttttcctgagcacataggaaagcaccatttacaaacctactttgcagtacctgactagaattagttgatagaatatgagctaaagtgatgtgtgctacttagaggcctgcgttctaaaaattcacaaaagatcctggtctcaatctccctcctacattcatgtgactagaaaaaa

SEQ ID NO: 373239 - DNA, 512 bp, Homo sapiens
tgactaaaggttattatgatttacattttgacacagttactacttargaagcatcttgtgccaggctctgtgtgatgtacctatgacttttctataacatttaattctcatattatccttgtaaaagaagggtcatcatttagcagatgattaaactgaatgttaagtaattgaagtaacctgtccaagccacagagccaggaagacacataacaggattcaaacatagatctccataccctgttcaaaagagagaaaaataaaagaatgagactcaaacccaccttttataacagccagaaaaacatgtactgctgaactctgatagtggttgggaggcagagttgcagaacatggcttagggtcaaggtaaagcacataagtgtggcctcagagattgtcactgaatacccaatcttctggatcgtgtgagtaacctcttctttacttagcatgttaaatagggaaaggtaggttataagactgacctgggaaatggatgtttcaaactc

SEQ ID NO: 373240 - DNA, 589 bp, Homo sapiens
ataataatatctaccttataggatttccttaggattaaataaaacaacacagtgatttgtaaagtgtagaacactctaataatgttacctatttcattaataatatgcacataaatgtccatatacagaaatgaagaatttcattttcaaggtataccacacttggcaaaactatccttgaacaattattagattttgtaatgcaaacaggcatattgcaaagctgaaggagtgtctttcagaacttagcagggattagcaaataaaagcagttgcatttccccccactagaaataccttgatttcttatggttcagttttcattggtttgtgaatttcaggtgtttattaaaataaattcatgcccttttccaagaagaattccaayattacaatctctttttgaatcaatagtgataacttaatatgttttcctctgataatttagaaattgttttatgttttcatattttatgttctgtttcacatctattttgaacacgaggtagtgacaattctctttcatggcaatttaacattctggaagtagtggtgctttcttttttatttattttattttttgagacag

SEQ ID NO: 373241 - DNA, 569 bp, Homo sapiens
tttcatttgaaaagtgagttaatacttgcaaagcacttgaaacagtgccttacaagtatgagtgtatgggtgttttagtatctgatatataaatttattatgtaaaagaaatgaaattttaaaattgatattccatgakctgtaaattctgaaaagcttaaactatttttaattgacaattccatatttctaaaataaactcaactggaaaaaaatgttgagtttttaaactcaacagttgagactattaaatctattagtaattttgaacagcacattactggtaaatgggataatgagtaagtgaatgaataaaaatatgatctatttaaatatctggtgaatataattacaggtacagacaggcaagtagggtcctatctgaaagcaatgatgagtttcccattctgtattaatgccattttcagcttgcattgaatacaaaaactgcttgaaagttccaaaaagtctaagatattgctcacatttttaaaatgagttttgttattattgttttgaattttcattattttgttttttatatgtcagtgaaagcttttaccaaaagc

SEQ ID NO: 373242 - DNA, 416 bp, Homo sapiens
actcaggataatggttttgggcttgatctatgttgcagcaaaggacatgattttgtttggctgtttagtatttcatggtgtatatgtaccatggtgcatggtaccatgcatgcatatgtaccatgtctttaaccagtccaccactgatgggcatcttggttgattacatgtatttgctattgtgaacagcactgtgatgaacatataaagggatgtgtctttttcgtagaatgagtgcttttctcttgggtatacactcagtagtgggattcatgtctgttcatattatttgcccattttaaatggggttgttttttgccygctgatttggttaagttctttacacattctggatattagacatttgttggatacatagtttagaaatattttccccaattctgtaggttgtctgt

SEQ ID NO: 373243 - DNA, 485 bp, Homo sapiens
tgtcctcaatgaaaataagttgaattgaggacatgggctatgttctgacctcatcctccatttatttctcatttctttcatgtcttcttggttttcataccagattctttatttgtctacctaattctggtgttcctaagaatttatgactgctattgagaatatggctggcttaaacatcattttaatgatttttattgatgaagatacattctcataatatcattcaatsctctgcatacatgtttacacacacacacacacacacatattcacatgtatttatgtgtaaaaaaaggaacctgtaatcctaccacctgtaaacaccttaacgttaggtagccttcatttaggatatttctatgaaaaaaatatatacacatacaaaaagtatatggctaaatatataggtagacattaatgtcagttgattgctactttaagttgttttctgaacaattgtttaattccaggtgggctgagat

SEQ ID NO: 373244 - DNA, 586 bp, Homo sapiens
catcttacttatgtttctgtcagcagcatccagcacagtgtctgacatgcagtaagtactcaataaatgtctttttaatcartgacttaatctctgaatgagtcaactaataaattatttaatgagccagagtttctctctagggccaaagcagcaagaaaaaagaattgaatataactcagtgaattctactaaatcatttaaagaaagatggtatcaacagtctgagtttaaaaatgaagcaagaagattagtaaaagtttctgggctctttacatcacttccaaataattgtatacagttgccatattctggacatttcaaatataatgttatgcaatcttgggtgctgtttaaatctaatggagaatattgatttttttttaagtataggcaaacaacctggttagtttagtctgtaagttcccacttaccttcttaggctgcgcctccaactgtcagttttcaaagcctttgcagtgctatcaaagtttatcaaacatatgcctcattgagtggtcagtctttagccctgggcattgttccatcccatagttgagttctcaaaagttggtatgctgaccag

SEQ ID NO: 373245 - DNA, 586 bp, Homo sapiens
catcttacttatgtttctgtcagcagcatccagcacagtgtctgacatgcagtaagtactcaataaatgtctttttaatcagtgacttaatctctgaatragtcaactaataaattatttaatgagccagagtttctctctagggccaaagcagcaagaaaaaagaattgaatataactcagtgaattctactaaatcatttaaagaaagatggtatcaacagtctgagtttaaaaatgaagcaagaagattagtaaaagtttctgggctctttacatcacttccaaataattgtatacagttgccatattctggacatttcaaatataatgttatgcaatcttgggtgctgtttaaatctaatggagaatattgatttttttttaagtataggcaaacaacctggttagtttagtctgtaagttcccacttaccttcttaggctgcgcctccaactgtcagttttcaaagcctttgcagtgctatcaaagtttatcaaacatatgcctcattgagtggtcagtctttagccctgggcattgttccatcccatagttgagttctcaaaagttggtatgctgaccag

SEQ ID NO: 373246 - DNA, 586 bp, Homo sapiens
catcttacttatgtttctgtcagcagcatccagcacagtgtctgacatgcagtaagtactcaataaatgtctttttaatcagtgacttaatctctgaatgagtcaactaataaattatttaatgagccagagtttctctctagggccaaagcagcaagaaaaaagaattgaatataactcagtgaattctactaaatcatttaaagaaagatggtatcaacagtctgagtttaaaaatgaagcaagaagattagtaaaagtttctgggctctttacatcacttccaaataattgtatacagttgccatattctggacrtttcaaatataatgttatgcaatcttgggtgctgtttaaatctaatggagaatattgatttttttttaagtataggcaaacaacctggttagtttagtctgtaagttcccacttaccttcttaggctgcgcctccaactgtcagttttcaaagcctttgcagtgctatcaaagtttatcaaacatatgcctcattgagtggtcagtctttagccctgggcattgttccatcccatagttgagttctcaaaagttggtatgctgaccag

SEQ ID NO: 373247 - DNA, 507 bp, Homo sapiens
tctctggtaaaaaaaaaaaaaaaaaaaaaaacactccaaagccctatcttatccaacccccatctctcttgcctcatatcctatttctcttccccttgttatgtttcagcatttcttttattcctcaaagaacatattaggcatatttgcacttgctaatgcctttggcaacaaactactcccaratctttatattttgaatgtaaagaaatcatattattattaacaaaacttgggtcagggaccatgtaccataaatcaatttattttatcaaatgctttgttagaattaacttgtttaagtatcatctcactctgctagatactatttttaaaaccattttttttcaggcacataaaggttaactaacttgctagtaacaatgaacagcaagaaaatggcagaactgtgattataaccttctgtctacttccaaaatctgtgctcttataagctctgctctgccgctcttaatagttgagaggcattctctacacaaagtgcga

SEQ ID NO: 373248 - DNA, 477 bp, Homo sapiens
cacaaagtgcgatgtcatcttgcatattcacccccttcagccatgtgtggagttatggagggagtgaagatagatggggacctaaacctggagagataagaggcaagaaaattccccaatttaccaatatattcaccacatctataatattgagactaacgtattaacaaatgtctcttataaatgtggataccaaccacatctggccccaatttaaaaaaaaagctaagcttgccagctattcacagtaactttgatttttttttttttttttttagtytcttaatctatagtggaaatagcccctagctgattgggttttatgagattaaagcattttgtaaagtcctgattttgttagcacacatttcaatggagctgtctcagctacctgaagaaggtgaaaggtcagccatgtgcttccttctctggtggaggaagaaggctggaaagtaggtgaaatggcacaggcagaat

SEQ ID NO: 373249 - DNA, 627 bp, Homo sapiens
  misc_feature (1)...(627): n = A,T,C or G
acccaatcaacagtcccaagtccaatrcctcatctcagacaaggcaagtcacttacacctatgaacctgtaaaatcacataagttatttacttccaagatacaatgggggtttaggcattgggtaaacattcccattccaaaagggagaaatttgccaaaagaaaggggctacaggacccattcaagtttgaaacccagtaggggagttatccagtcttaaagctccaaaataatctctcttgcctccatgtcccacttctagggcatgtgggtgcaaggggtgggctcccacggccttgggcagctctgctcctgtggctttgcaaggttcaacccatatggctactctcacgggttgaagttgagtgcctgtgacttttccaaatgaagggtgaaagttgccagtggatctaccattctggggtctggatgatggtggcccccttctcacagttgcacagngcagttccctggtggggactgtttgtgggggctccaagcccacatttcctatccactcttccctggtagtggttctctgttggggctccaaccctgcaccaggcttctgcttgggcacccagtttgtctcatatagcttctgaaatcgaggtagaggctgtcag

SEQ ID NO: 373250 - DNA, 627 bp, Homo sapiens
  misc_feature (1)...(627): n = A,T,C or G
acccaatcaacagtcccaagtccaatgcctcatctcagacaaggcaagtcacttacacctatgaacctgtaaaatcacataagttatttactyccaagatacaatgggggtttaggcattgggtaaacattcccattccaaaagggagaaatttgccaaaagaaaggggctacaggacccattcaagtttgaaacccagtaggggagttatccagtcttaaagctccaaaataatctctcttgcctccatgtcccacttctagggcatgtgggtgcaaggggtgggctcccacggccttgggcagctctgctcctgtggctttgcaaggttcaacccatatggctactctcacgggttgaagttgagtgcctgtgacttttccaaatgaagggtgaaagttgccagtggatctaccattctggggtctggatgatggtggcccccttctcacagttgcacagngcagttccctggtggggactgtttgtgggggctccaagcccacatttcctatccactcttccctggtagtggttctctgttggggctccaaccctgcaccaggcttctgcttgggcacccagtttgtctcatatagcttctgaaatcgaggtagaggctgtcag

SEQ ID NO: 373251 - DNA, 603 bp, Homo sapiens
  misc_feature (1)...(603): n = A,T,C or G
gggctacaggacccattcaagtttgaaacccagtaggggagttatccagtcttaaagctccaaaataatctctcttgcctccatgtcccacttctagggcatgtgggtgcaaggggtgggctcccacggccttgggcagctctgctcctgtggctttgcaaggttcaacccatatggctactctcacgggttgaagttgagtgcctgtgacttttccaaatgaagggtgmaagttgccagtggatctaccattctggggtctggatgatggtggcccccttctcacagttgcacagngcagttccctggtggggactgtttgtgggggctccaagcccacatttcctatccactcttccctggtagtggttctctgttggggctccaaccctgcaccaggcttctgcttgggcacccagtttgtctcatatagcttctgaaatcgaggtagaggctgtcaggcattcttcactcttgcagtctgcatgcccacaggcttaacaccatgtggaagccaccaaagcttatgacttccattctccaaagtggcagtgcaagatgtatgtgttctcctttgagccacagctagatcttgagtggcct

SEQ ID NO: 373252 - DNA, 619 bp, Homo sapiens
agcactgtggggaaatgctacagggaaagaaatttattttggtcactatattagtgaccaaagggtcacttttataggggagtggttgttaaggtaaacacttagacagtaaagcattaatgtaaagaagttcaaaaaccacaatggtacatgaattgttaagataaacacaccctgataaccaccactgaatcaataaatgacattgctacaacccagagaaatctcattgccaatgtacttttacattgctctgaamccgttcatttaatcttcattttattaacagtagtttggtacacatagagatggttgtgtgcgtagttccttgggggaacaaaaaatggggaagtatatctgtgctcagtgtctggattcccttgtagcaaaaagaagacaaaaggtaaatgaggtgaaaagtgaaaaaattaaagtcaaagtaggaacagaaaactggagcgataaaaaaccatgagagtgtaaatccatgggaactgatacatgtcttgaattggactttccactgaccaagatttagcatgtacagaaacacaggagcttaactgggcatgcaattttaaattgaaagatcacaatccatgaattggtggaaacacat

SEQ ID NO: 373253 - DNA, 615 bp, Homo sapiens
cgtaaaaaactcactagagaaagccccttagggagacagcatggagtggtggcagagaacactggctgcctagccagattgttttgggtttgaacaacagcagtgctactttgtctctctgcaccttatttctatcatctgacaaactggattgtaaaaaatgaaggagataatatgtgtaatggctggcacatagtaggcactttattgaaggtagcacagtatagtgctggagagcactgggattaaatactggcagcatcacttarcaggtgcagaaccttaggcaaattcacttaacctctctatgctttgatttcttcctccgaaaaaatggagataaagaaatgcatacttcatagactggttgtgatgactgaataagttaacatgtgtatagtgtctgccacatagtaagcccttcttaagtatttgctattttgattaactaagttaaccattgtcagtcttcttttactcatgaaagttactgtacccaatacacaatctggatgatcttaataacaaagacagcactataaacggcagcacaaacctatggagacattgattatacaatctgagttttacagggcatctcgatcttcatgttgt

SEQ ID NO: 373254 - DNA, 584 bp, Homo sapiens
tttaagtctggagattaggtgagagatctggacaagatactttacatcaaaatgtttattgtgtagatgatatttaatgacatgaatgaaactgggtatgatcaccagtgaagcaagtgtagacagaaaagaggatcaacactgagctctggagcacttcagcacaatagccttcattttatttgaaattcataaatgtaaaaatatcagtggcaatagatgctagatcctttttgggaaggttatttttttatttttattttgcyagtgaggaaaatatcaaaagtgtataatgaagtgatcagtgaaactagaaaccttttttatcagggacaatgataagatagaaaaacaaatggcaggtgctgtgtagtattgtcacggcttacggctttctgggatttccaagtcaccattaaacttctgcaatttattcatttagaatcagaagggctatgaagctaatctaaacgaagttaaaagagatgtttataacagtaagcttagttcaacaaataaaaattgtctactctctgccattgattgtgctagacagtcattgacttaaagggatcttactttca

SEQ ID NO: 373255 - DNA, 630 bp, Homo sapiens
tcctcttttcttgagtgcaggtggaaattgtactctgttactagccaatagaatatgacaaaggtgaagggctttcacatatgtagttaaaatcccaagccagttaatctagttaatcaaaagagattaccctggtgggtctgaattaatcaggtctttaaaaaaagaactggggtgctccaagatttcagacacactctctccccggctgaccttgaagaagcaagccaccatgaatactacaactgcaaggaaattcattctttcaacgatcagttgaatttggaagaaaactcagcctcagatgagaccatgaggtcagctgacaacttcactgtagccttgtgagatgctgaccagaggatccagtaaaactatgctcagactcctgacacatagagactttgagataataaatgggtcttgttttaagctgctgaataggtcgtagggtaaatttttatacaacaatagacaacatataatgaagcaaaaaaaaaaaaaawtaaagatgtaattgaagaaaactcaccagaaataaaagcatatttcaatttatagcttgaaaagagatagcaaaactcaagaaagaaaggaacagaacatcaacatcggcagatagcctagcaa

SEQ ID NO: 373256 - DNA, 615 bp, Homo sapiens
tctttttgcttaaaatgactccaaatcctcaaaaaattaaaagttccactgttyattacaattggaaattttatgtttattgtcactgagcagagggtctaatgactccaaggcagtagtttcagatattgcacattgcaaacgattttcacacaaaaatgttttaaaaggctatcgggtgcagggctggttgtaggtagggacccaacctaagaattatgaaacgccatagttcctaattttggaaagatattagcggagagtaatatggattagtagcaagggctggagaaaacagtgctctatactaccttcaaggtgctcttttcatcgcttgtgacccaatggctgaatagtgggtaggaaacaggattcaggatctcaggcacggtctggatctactgactctgagcgtcattttatctcttgctggggtacacatctgcttctggatttaagtaacgtgcgctacaataatttaaggactataaaaccacaaggttatgagagcgtaaaccacaaagcgtgtaagtaaatgcctagaaaacgcaacgcggtagcacagcagcaacgcacaaacagccccagcaaacgacgcgcgccgggcttcccagc

SEQ ID NO: 373257 - DNA, 393 bp, Homo sapiens
aatataaaggaaaatgcctccaggcgtccaggccacactcaaggagagaattaagcttcaccacttgaaggaaggagtaccaatgaatctgtagacatatttcaaaaccatcactttctcccattcatctgcttttcttgagtcaaacttgtgtacaccaaggttctccttccttagagtgacttccttctcataaggctccctagttcgttatgcaaatgaatcctagcatcctctctgccagctccccgaatttgtaggggcacacagyctttatcctagcccagcacacttgcttttgtatgccatcgtggcccagaacaaacttacaccgaaactccacttccctatccttttgaccatcctgtgcctcaggaatgaggccaaacatcc

SEQ ID NO: 373258 - DNA, 536 bp, Homo sapiens
tgctgcagccaggaggagatgggatcagtctcaaatccacctcccagacagacaaaaactaggggtttatacagcagggaagaaatgtgacaatgtgtaagaaaacaasaactagggaggagcaaggaagcaatcatgatgaatgagggctctggcatctcattgtctagatgtggtgatctgatgagtttcagttctttgatcctttttttttctaagaggcctgggggtccttccctgaggaaggaactcagataaattaagttttaagctttaagaccagaaaagtcaatttctatgtttatctgaaaacaacaacaacaacaaaaactatgggacgattgggttggtttcactgcttcttcttcttttttttttttttaaagatgaatctgctgtggattattgtttctgcttagaaaaaaatacttaaacagtaattcttaataagaaataaaatatctcaagtgctggatcagttgatagtgtctgctcttgtgggatttttcatatcatgggatttttttaaaaatcaa

SEQ ID NO: 373259 - DNA, 422 bp, Homo sapiens
attacagcatacagaaggaagaaatagccagaaaggagttttattaatgaaaaattatttttcaggttgaatttcactttcatgttgatttttgaggaggktgtagaggggaattttggtatcttgtggaattatttatgttgtgaatctgttcatgctttcattgggcatacagctttggggcatgccaatgtatattttatagaaacaaattttactttagttatgcacatgtgttaataaacaggttctgttgtgcaacctatatactaaaaggcatacttttctcatgcctcagcattaggatatcaattttctttctgtaataaatggaacagctgcaatgttatgattgtgaggctcttccctttcttgtgccttgtacttaatgggatggggaggctaattatcagactgaaaaa

SEQ ID NO: 373260 - DNA, 422 bp, Homo sapiens
attacagcatacagaaggaagaaatagccagaaaggagttttattaatgaaaaattatttttcaggttgaatttcactttcatgttgatttttgaggagggtgtagaggggaattttggtatcttgtggaattatttatgttgtgaatctgttcatgctttcattgggcatacagctttggggcatgccaatgtatattttatagaaacaaattttastttagttatgcacatgtgttaataaacaggttctgttgtgcaacctatatactaaaaggcatacttttctcatgcctcagcattaggatatcaattttctttctgtaataaatggaacagctgcaatgttatgattgtgaggctcttccctttcttgtgccttgtacttaatgggatggggaggctaattatcagactgaaaaa

SEQ ID NO: 373261 - DNA, 597 bp, Homo sapiens
ggaggctaattatcagactgaaaaagtactggtcccttccttcactcattcaacatggttccacttacagaagccagtgcagctggcagagctgtggaaggacctggtccctgggcagatgtcagccaaaagtctaattacatgctagactaatctagagtaaagtgaattgccttatcaatacctttggtctactctaacgacaatgcacagaaaaagtaggaccttaagaatggctcattttttccactctgggtgctgtagaccccttacttcataaagttaatttgacttcagtgtttagggcaaaccatgtttgtatgtttttcaaatttataaaccactaacaattattgtttgaaaaagttctgaagtcttctggaagagtccatcttgtctctttttcaggtcttctctaaattgrtatattatgattatataccgtatgtgatgtaatgatgtcctacctacttctatctggtttgtcttctgagtcaaggcctctattctacaaagggatctttaattgactggctcattttctctgttgattttgtttgtttggtgtgtgtactgtttcttttttcgatcccttac

SEQ ID NO: 373262 - DNA, 422 bp, Homo sapiens
  misc_feature (1)...(422): n = A,T,C or G
tgaacagtaagtaatgatttatgataagtcatttgagaacataatttattggggaatcactcaaataaaaatgtctttctctccattgtggaaccatcttcaaaaatatttgtgtttgcatagttggaggaaaattaaaaatactcttcagaaaataacataaacgcacctttatgcantattaaagttggtatagtatattcaatatttgcgtccctgtgtccgagaactatattaattkgattttttaatatttatggaaaatagtaaatatattttaacagttattattttaaaaataataatataccgtaacacttaaataagagtttaaagaaaaaacttcaagaatacaaaggtagataactatcacgtaaagtagaatcaagaaatgctctcgggaacctaggataagttggtta

SEQ ID NO: 373263 - DNA, 547 bp, Homo sapiens
aatgtagcgaaatggattactgtaacaccagacattgaaagcatatttaatctatatatatttataaatacatgtatatttattcaaatacggatctacatataaaccaacatttacgtattctgcagatgtcctttcagatctttttttgagacaggttctcaccctgttccccaggctagagtacagcggcacaaccattgcccactgcagcctcaacctcctggactcaggcaatcgtcctgcctcagcctcctgagtagctgggatcgcaggtgcataccaccatgtctggctaatgtttaattatttgtagakatagggtctcattatgttgcccaagctggtcttgaaatccttggctcaagcagtcgttcccagccttggcctccccaagtgctgggattacagacatgagccacagcactcagtctcaaatgtttttaacactagcttcaaccacacatggaagagtccataataataaaaactgtcactctttaaaatctctgcttaatatcttagctttttaatccattgttttcca

SEQ ID NO: 373264 - DNA, 620 bp, Homo sapiens
aatgtcaaaggcagtattttttccagagaaagagttgtacatggaaataaatattatcattgtatgctgtaggcttatccctgaacaatatttattttatcataataatgtaaacacgttacactccttaaaaaagaataataaagctatattgagattatcagggaagaaaagtgtatgtatgtgggcagaagcagggtatgtacgagcaaactccttattttccacagttgaaaataaatagataatatctaaaactaaaaaatattaagaaaaatcagtataaagatgttattgagaggccgggtgtggtggctcacacctgtaatcccaacaatttgggaggctgaggcgggaggactgcttgagctcatgagtctgagaccagcctgggcagcatggcaaaaccccatctctacaaaaaaaaaaaaaattagctaggcatggtggtacmtgcctgtagtcccagctactcaggaggctgaggtgggaggatggcttgagcccaggaggttgaggttgcaatgagccaagatggcaccactgcactcaagcctgggcggcagagccagacttgcctcaaaaacaacaacaacaaaaagatgttatttagaaatttg

SEQ ID NO: 373265 - DNA, 561 bp, Homo sapiens
gggaccgcgaggcttcagcatcccgatgccctgaaagtctccccgcctcggggatttgtctctgtgttgcagctggcaggggccgcctgaagtgggagcagcgcctggagaaggcgggaggagcccggcccgggggacgggcggcgggatagcgggaccccggcggcgcggtgcgcttcagggcgcagcggcggccgcagaccgagccccgggcgcggcaagaggcggcgggagccggtggcggctcggcatcatgcgtcgagggcgtctgctggagatcgccctgggatttaccgtgcttttagcgtcctacacgagccatggggcggacgccaatttggaggctgggaacgtgaaggaaaccagagccagtcgggccaagagaagaggcggtggaggacacgacgckcttaaagggtaaaggaaccggttccctcctttggtgtgggtctcccaagtttcaagatccagaacaacgggcaggatgactctccctgtggaagactccttggcaagacctcctgggggcaccttagaggtgctagggttgtttagtcccca

SEQ ID NO: 373266 - DNA, 592 bp, Homo sapiens
aatcttgggccattgttgaggcagattttgggaggcgagaagagttccttggggaagaaggggaggagttgcgagtgggataagaggagaagcccgttcctttccctgcaatatcaattctggttgtttctagaggaaagtactttccttggggtcatcttggtagatgctgtatttgaaagggggcaaggaaaggaagggattcccatgacagtcagaggagaaatcacacagtagttgactcttccgtaaattatgcttattaaaattacggattgggttttctgggcaatgcttcctttaratgtctacattggaagcagaacagggcaagtggttctgagaactggttttttgagttgtgtggggctctccgtttcactgcagcagtaaggctgctgtggccggccttaagggagtatttttaactagtggtgtttgtgttgtgtacatgcaactgaccatttcactggcttcccatgccgctgttacagatgtttcagccggaaaaattttaattagacttgactaagggttgtcattttcctgtattgaaggacagtgggaatacatttcctttaagagaaatttg

SEQ ID NO: 373267 - DNA, 629 bp, Homo sapiens
tatctgtatctatatctatatttagatctatacatagaaataagatgccccagcaccattattttccctacttgatctgcaatgccaatatcaatgccataaatcaggtttctgtatatgcgcattataatcttactagcccaccagcatatatgtgytccctagttgactgaaacatccttatgcagcacatggctgcagtgtagacgcaaaatgctttcaatgacatcttattggccaaaacatagtcattgattaggtctctgtgcaagtgatgctgggaaataaagattttcagctggatggcaaaatgtccactgaaaaattgaagttcttattggaacgaatggccaaagaatattggattggcacctctgccacaggtggatgtactcaaatatagaattttctttaggaagtaattttatacctgaacaaatgtaggctttaattcccagagattcatatgagtatagccaaaattattttcccctgaaaaacatttttaaaaaagtgaccaccaatccaagaacatgctagaaaatgtcaaaagacattttctcagtttatctgatactcagaaatatgatttcccaccatacccactaagattaactaactttaaatat

SEQ ID NO: 373268 - DNA, 629 bp, Homo sapiens
tatctgtatctatatctatatttagatctatacatagaaataagatgccccagcaccattattttccctacttgatctgcaatgccaatatcaatgccataaatcaggtttctgtatatgcgcattataatcttactagcccaccagcatatatgtgttccctagttgactgaaacatccttatgcagcacatggctgcagtgtagacgcaaaatgctttcaatgacatcttattggccaaaacatagtcattgattaggtctctgtgcaagtgatgctgggaaataaagattttcagctggatggcaaaatgtccactgaaaaattgaagttcttattggaacgaatggccaaagaatattggattggcacctctgccacaggtggatgtactcaaatatagaattttctttaggaagtaattttatacctgaacaaatgtaggctttaattcccagagattcatatgagtatagccaaaattattttcccytgaaaaacatttttaaaaaagtgaccaccaatccaagaacatgctagaaaatgtcaaaagacattttctcagtttatctgatactcagaaatatgatttcccaccatacccactaagattaactaactttaaatat

SEQ ID NO: 373269 - DNA, 659 bp, Homo sapiens
aaatatttttatgtagttcattccctactttaaagaaaataatgctatcaccctacagaaggtatttattcttacatatttggttagaggataattcacttcaaaataattccaatagaagtgtttgtaacaagaaagatgatccaagatacaggatcatttcacagggatcaagatagctatcctatatatacgggtgacgtttcttcttactgtgactcttttattaagtgtttaagttacaatgaagccatatttatgcttataaataaaaaattaagttttggctgtatactcaaaaagtaayggttatgaaacaaaagaaaatattttactttgttttaaaaatttcaaataattcagttaaagagattttttaaaataattaataagtatagaagatatcactcacctaaaatttattaattatgaagctggcaagtattgattttttctttatgtaatacttcatgaattaattttacaaacagatttatgatatactattatttctcctaatacatttcaagaaatatttataatataaaaaaattttatttaaaattataaacatttttaacctcattcaaactaccaaggtaaactaatgaggtaaccatcaacattgatgcataaataattttttaattatctgtcca

SEQ ID NO: 373270 - DNA, 659 bp, Homo sapiens
aaatatttttatgtagttcattccctactttaaagaaaataatgctatcaccctacagaaggtatttattcttacatatttggttagaggataattcacttcaaaataattccaatagaagtgtttgtaacaagaaagatgatccaagatacaggatcatttcacagggatcaagatagctatcctatatatacgggtgacgtttcttcttactgtgactcttttattaagtgtttaagttacaatgaagccatatttatgcttataaataaaaaattaagttttggctgtatactcaaaaagtaacggttatgaaacaaaagaaaatattttactttgttttaaaaatttcaaataattcagttaaagagattttttaaaataattaataagtatagaagatatcactcacctaaaatttattaattatgaagctggcaagtrttgattttttctttatgtaatacttcatgaattaattttacaaacagatttatgatatactattatttctcctaatacatttcaagaaatatttataatataaaaaaattttatttaaaattataaacatttttaacctcattcaaactaccaaggtaaactaatgaggtaaccatcaacattgatgcataaataattttttaattatctgtcca

SEQ ID NO: 373271 - DNA, 577 bp, Homo sapiens
aagctaacataacagtttataaacaatttcagatgggagttcttgaagtttttaatggtaaccatctttaacacagctctttttgatttcattaaaagtgaattatgtttcagaatctaaattcactaattgaaatatttacaatgaacataaatacactttcttaattagaagctcgtcatctctcaagacttcaataacagctcttaatgtatctcccattccctaatccccttcaacccacaacraaaagtgtgattaatattgggaaacaaatttggaacattctaaagcaatttttatttgtcagtgccaaattagccaaaacaattttaacttatgtaaaataagtcctttattcctataggcatcattattctttcattgaaattctaaacagagaaaataacaattgccatgatgtattgagcacatactagatttcactttctgtattacccactttgttcatattatttcaccttatcatcataacaccagtataagaaagccactgctcttttgaaacaaaaccttggaatgttattaaattggcttaagcttttactacagataa

SEQ ID NO: 373272 - DNA, 581 bp, Homo sapiens
tctttaacacagctctttttgatttcattaaaagtgaattatgtttcagaatctaaattcactaattgaaatatttacaatgaacataaatacactttcttaattagaagctcgtcatctctcaagacttcaataacagctcttaatgtatctcccattccctaatccccttcaacccacaacaaaaagtgtgattaatattgggaaacaaatttggaacattctaaagcaatttttatttgtcagtgccaaattagccaaaacaattttaacttatgtaaaataagtcctttattcctataggcatcattattctttcattgaaattctaaacagagaaaataacaattgccatgatgtattgagcacatactagatttcactttctgtattacccamtttgttcatattatttcaccttatcatcataacaccagtataagaaagccactgctcttttgaaacaaaaccttggaatgttattaaattggcttaagcttttactacagataattagtggcagaactgtgattcaagaccaaatctatgattttaaatgctgttctcttgactattattct

SEQ ID NO: 373273 - DNA, 581 bp, Homo sapiens
tctttaacacagctctttttgatttcattaaaagtgaattatgtttcagaatctaaattcactaattgaaatatttacaatgaacataaatacactttcttaattagaagctcgtcatctctcaagacttcaataacagctcttaatgtatctcccattccctaatccccttcaacccacaacaaaaagtgtgattaatattgggaaacaaatttggaacattctaaagcaatttttatttgtcagtgccaaattagccaaaacaattttaacttatgtaaaataagtcctttattcctataggcatcattattctttcattgaaattctaaacagagaaaataacaattgccatgatgtattgagcacatactagatttcactttctgtattacccactttgttcatattatttcaccttatcatcataacaccagtataagaaagccactgctcttttgaaacaaaaccttggaatgttattaaattggcttaagcttttactacagataattagyggcagaactgtgattcaagaccaaatctatgattttaaatgctgttctcttgactattattct

SEQ ID NO: 373274 - DNA, 482 bp, Homo sapiens
atctgaacccctatatgcatttattaaatatgtaccttatgatgcttatcatactccattctataatttagttattaaaacgtttgtctcatttttctcttctctctttctaaaaactctaggtcttcatatttttttctccataatgcttagtaaaatggtcrgcaattaacacatatttattaaattttatagaattatgtactacatgtattttatagtattaaaacagagtgtaaataatagtctaaatattaattttatttttaagcatgagaaaaaattgtatttatatgatttaaaaactagaggataccttatagatcaactatgcaacactagcattcattattaaagaatttaagatccgaaagtttggctctctacctcaagacgtgtaaccaaccagtggcagagtaactggaatccaagcttgttttctcccaagataattattaattggtaagtaaaactgctgattt

SEQ ID NO: 373275 - DNA, 451 bp, Homo sapiens
gaaaatgacgccagtagacttgctggacacaaggttgccacaaacctgcagtttattaaaaaataatgcaatatatgtgaaacacaacaaagcaaagcataataaaacaaggcacgcttacatatattgattttatagatatttccagtagaatatttaacaaacctacaytccctcagtgtttcctttatctttaccaatagttaatactctcaatctttataatttttatcaatagagtggttctaaaataatatctcattattttttgcgattgtattttaatgttttttcttttatgtttttctaagtattttttaataagcatatatttatttagaaaaggatacaactcattttataattttttctttcatttcacttcagtaagtatttaacattatgctgattcctataattacactgataaattttctttttataaaaaagg

SEQ ID NO: 373276 - DNA, 451 bp, Homo sapiens
gaaaatgacgccagtagacttgctggacacaaggttgccacaaacctgcagtttattaaaaaataatgcaatatatgtgaaacacaacaaagcaaagcataataaaacaaggcacgcttacatatattgattttatagatatttccagtagaatatttaacaaacctacattccctcagtgtttcctttatctttaccaatagttaatactctcaatctttataatttttatcaatagagtggttctaaaataatatctcattattttttgygattgtattttaatgttttttcttttatgtttttctaagtattttttaataagcatatatttatttagaaaaggatacaactcattttataattttttctttcatttcacttcagtaagtatttaacattatgctgattcctataattacactgataaattttctttttataaaaaagg

SEQ ID NO: 373277 - DNA, 587 bp, Homo sapiens
ttgaatatcctgtattgatgtcaatttatccaaaatcatatatcaactacatcacaagttaatgaagttgaatagaaacctagttcattgtactactagcatgagaagtagacactaaaagattaatttccaaattattttcattctcttgaatatctgttacaattgttctctagtcttccacctcttaatcaaaattataaatcattatttaacttactaaatatgtggtatctgtattccaattcatttccacatcaactatatttttaacatagatgaatgacaacacaaataagaggagataggctattttccacaatatctatacgaatggagtatactgtacaatatagatacacagtggggtccaaaattagtgtaaatatacacacatacatacctgataaatatatgcacatatatgcatatgtgtatattaggcataagagagttagcatttctcagaggtccatagaatctgtcaagccagagtagagagagtttgctgaaccccttgagcaytgagaccctagaaagaccacacttcagcagtaactgattagtctaatcctggaggaaagaat

SEQ ID NO: 373278 - DNA, 525 bp, Homo sapiens
aaacatgaccttgttatttcttttcacctgaccattcttcctgtcatatggtagaaacttccaaatgcatttctagttcactcccagactatgttagtcactagaaataaaagtggaacagaaattaataactttgatacatttagcaaatgtagtttgaaaatcttaatagttgtaactacaactaaatctatattaagtttcagcaataagccagaagattcgtcaaagtcttttatttgtagaaacaatttcaacaacattcttttcacttttttctgcaaaaatttacctatactacgagtctgatatatgactcaaagtttgcatctagatagatcgttaaaaatggttgactacacaataacagaaaggaaagaagaaaggaaggaaggagagaaggaaggaaggaaatataaaagttatattcaaaattggaaaactatttagttttaaaargacagatagtcataatatataatgaccttaatatataaatactttttccatgtccatgaaaagata

SEQ ID NO: 373279 - DNA, 540 bp, Homo sapiens
attttccttaacttcactcacacttattataaaaccactccctgaccatttttgcccgctcttagagccctctatatcattaagtaaaagcctagcaaccatttccctgcaaagataataattttttttctcaccaacaaaaattttcatcaaaatcaaaatgaaggacactggaaagctttctaagagaatgctaaatttccttcaggactatatcaagatgatattaaaatagccacccatggtaatattatcttcatttttcaccatatatgccatgcaactgattgattttgtacagatttcagcagagatgataatttgctttggtgtcacgttgatatagtgcacgtttaatatcagattttttwaaagttctgttttaccactgctatgttttgtccatgaggtctaaagtttatttttcatgtttaagccatagagagaacatacagaagaagtcataaagaaataactaaagaaacaaatagcttcccatattgcctgatgtgctctttcgtctccatcctgacatcccac

SEQ ID NO: 373280 - DNA, 477 bp, Homo sapiens
taatttctgagatgagggtggtgataatgggagtgatggtgataatgggagtcatggtgataatgtcagttgaagtatttattgtttttttttctggagatagcagttaagcaaagtgagcagctccatttaacatatggtcagaatttcctctataaatgattatcagggagaaccaacacattctatgcttttttttttttttttttggaggacagtctattttgaagtagaaagtttcyttagttactttctataacagcagtgtggcatcttacaaaataatttgtagatctaataccatacaggaaacacactcagagacaatcgagaatgaagtgtccagcattttctaaagatgataagccaaaggcctgtggcaactttggtggaaaatttcattgaataaattcccatttgaaagtcagttcaatatgataggtccacagagttaccttacagtgtaattacaatgta

SEQ ID NO: 373281 - DNA, 555 bp, Homo sapiens
ctgtttgcagacttgccccagccaggcagaggggtgaaaatgcaaatcttctcaatcagaaaagtttagtgtgattactcaagggaaggaaaactaagaataggttctgcaatccaggtggcatcctgcatgttacatacgcttcaccatgttttgaatacacatgataaaaagtttttcttttattcctttaataagccagattgattcaggggcttagaatgtctctcaactgtaygtcagaagtcccacttgttaaattttgctcaaaaccaaaacttctgggacattcaaatgttgaaatattatctaccatggagttggaactctagaaaagtattgcttcaatctgtcccttgtttctgtgtactcatttttcattaaaagggatagcaagtgccctgagctaaccgttatagactggcattttttcaattcctggaaacaaagccacaatataagacacaataaacagaaagacaaataaagagggattgggcaatactatgctatgttgctttttctttaataatggagtggcaaaggtaggtatgc

SEQ ID NO: 373282 - DNA, 568 bp, Homo sapiens
ttcttctgtgtttagttttaaaatgtactgaagtgtaatattattactctggcatttgtaaacttgacctaatgaagtgatgaagtccactctgacaactcttcatagtttgcctttccagggttggatcgaaggaaaacgaaactttaggatagctttcacacctcaaaccatttttgagatttaccacagcagtcacagcaaagaatcacaatgatttgctataaaaagagtgatgctaggaatattagaattctttctcatgtttcttgattagcttcaaactattgtataaactgcataggaaaattttaaaacaaaagacacactcagacttrcctaggttaagtttctacactccatagaaaagccttggagacttgtagtgatttgttaaactcttgttatccatagaaatgtccttaccctcaggagatatattgatcaaactactatgaaatagttatatactgtacccacatagaaattttactctcttcaattatcctgtgactgacaacagtaataaattaactatatttcagtttcattataaaatatataaaat

SEQ ID NO: 373283 - DNA, 568 bp, Homo sapiens
ttcttctgtgtttagttttaaaatgtactgaagtgtaatattattactctggcatttgtaaacttgacctaatgaagtgatgaagtccactctgacaactcttcatagtttgcctttccagggttggatcgaaggaaaacgaaactttaggatagctttcacacctcaaaccatttttgagatttaccacagcagtcacagcaaagaatcacaatgatttgctataaaaagagtgatgctaggaatattagaattctttctcatgtttcttgattagcttcaaactattgtataaactgcataggaaaattttaaaacaaaagacacactcagacttgcctaggttaagtttctacactccatagraaagccttggagacttgtagtgatttgttaaactcttgttatccatagaaatgtccttaccctcaggagatatattgatcaaactactatgaaatagttatatactgtacccacatagaaattttactctcttcaattatcctgtgactgacaacagtaataaattaactatatttcagtttcattataaaatatataaaat

SEQ ID NO: 373284 - DNA, 615 bp, Homo sapiens
ctaatttcaaaacttactgcaaaccacacaatcaaaacagtgtggtactcatataagaatatccatatgagctaatgtaatagaattggaagtatagaaataaactcatatctataccaattgattttttataaggaatgaaatccatttaatgggaatagactccaacagattctaccagaataactaagtttccacatgcaaaagaaagaagttggatccctacctcaaaaatcaactcaaaatggattaacagcttaaaagtaagaaataaaatcatataactcttagaagaaaacagtaagcatgagtcttaattacccatgacttggaaatagactcttagatatgatatcaaaagcatgagcagcaaaagaaaaatagataaatgagatcaatttaatttaatttttaaaataaaattttttgtgcatcaaagaayattatcaagaaaatgaaaagacaacctgccaaattggaaaaatatttgctaaccgtatatctgagaatggtctagtatcaagaatatgtgaagtactcctacagctcaacaaaaaagaatcccgtcaaaaactgggcaaatgaccagaatagaaatttctccaaagatatgca

SEQ ID NO: 373285 - DNA, 597 bp, Homo sapiens
ggtcaatgaaatagaaaaggtatagaattttcctcttatacttatggactaattgatgatttaaaaggtgacaaaaacttatgaggaaaggatagtcttcaaaaaatggtgctgagactaatggatatccctgtgcaaaagaatgatgttacaactcttcctcattatatactcaaaatatttattcaacatggatcattgactaaaagtctcccccatcaagaaaaaagatacagaaacgactaacaaacacatgaaaatatcttcaatgtcattagttcactttgtgaatataataaacacccttacattatacacttcatatggttgaattttatatgtgaatgtaaatatacctaaataaagtgttaaaaatgggaccagtagacacagattatgaagtatcaattcaattccttaagtgggtttaggacaatgaataattctttgaaatatatttttctaagtaattattcactttatatagggctttaacttatagagattaaatgttcataacattttatcagttttaatgtgtctttaatttgttgtatctccatgtcctcttctttgrcttttctatatgttttgcct

SEQ ID NO: 373286 - DNA, 598 bp, Homo sapiens
agaaaccatccatcaatacattttgacagtcctatgcgtgtgaaataaatgcttgttttgtcaagtcactacaattttggagatatttgatatcgcagcatagactattaataccctgactaatacataagtaaagagaggctaagggatacagtcagaaacattactgtgtatttcattttgggttcaaaattaattgttttttgtaggtcatatcatcttaaggtgacatccgactttcatactcaggaaataaacctttcattaaatgtatgsgattggagagagaggaagtagtcaataacagaatgctgaagaaaggggttgaataccaactcacagattcttttaatatttttgataaaatatagaattttctataaactggacatggctggagaaaaatggatgttcagtagtattgtttctcatttggtttttattaaaatcatctagagacatgaggaaaaacctggcttttccccatagctgactagagtgaaaactttgttgcaggggacatttttgcagttcaattcatatatgagacatgaatatggtaaggaaaggatgtttcaacagtgctcattataagtag

SEQ ID NO: 373287 - DNA, 552 bp, Homo sapiens
ttttactaatttactaaacatatatatattttttatttttaattctttatttgtatgtactttttgagggaagtggtcattctgcccacgtttcaataaaagacatttccccttctctgtcatgtttattgatccaacaacctaatacaagatcagaatacatgcaggattagaatttggactctatcttcttggaacctaattccaggaatgaatcttaggaacagaaggcatagttggacaagagcccattaaagccacagcaatgcgaaagccaaaatgccatccaaagaatatggcacaggctctctaattatgaagtattggtccttacaayatgggagatattacatccattgagaaagctttgaaataggcaaaggacatgaacaggcacttcttaaaagaagacatgcaaagtgaccaacaaacatataaaaaatgcttatcatcactaatcatcagagaaatgcgaatcaaaaccgcagtgagataccacctcacagcagtcagaatggctattattaaaaagtgaaagcataacaaatgttg

SEQ ID NO: 373288 - DNA, 564 bp, Homo sapiens
  misc_feature (1)...(564): n = A,T,C or G
nnnnnnnnnnnnntcaaaatttgcattatggactttaaccatgttctttatttggcaaacaattttaaagagcaagtagctggagccttacaaaataacaagaaatacattggttcttacattaggtgatggacttatagtattctcttggttgctcttaaggtcccatgagcccctttaggtaagagagtttatcttaaaatactgaagctttgatcattgaatgaatataatctaaccccttctcgcttgcatgtcagatgcaaacacataaggtgttttccttgtccaccaacagctatagcaataaattgggaaaactaatacaaayttagtggtaacttttcagctgaaaagaataagtgtaaccaaaaatgtgtactctcagttcttcggagatttttccataggtttttctttgtagtatgactgatgatgtttctaaaggtcattttgcacaaatataaggaaagcctttttagaaaacaatgcaggtcaacccaagttacatatccctcccaacatggttagaaaaagctcttcatcccttctggaaaaagatca

SEQ ID NO: 373289 - DNA, 560 bp, Homo sapiens
gtctctaatagctttgcacttcgaagtaatgagatcatcctatagcattaccttaattttcctgaagttgtggagacagaatgcacagaaatcattgaagaattgtattgtaggtatcttgggaamatattatttctaatttttcaacctttctagacatcaagttttcatatatatttgttccatatgagacttccaaaaaaattaaggagtgccagctccaagggaaatgaaggagtcctgtgggtgatcatgttgatagaagaactaacagtaagtctctgagttaagttaatttgctcctctctcaattgaccaacttctccctttgttcccaaagcattttcagttatatgaatttgatttctgcaaaacttgtgggtttatttattttctttgaaatcaacagaaaatatgtgaaaaaaatcctgtattttcagctgggaaacctagaaggtcattcttttaaatctgtgtgtgcctcaagagttatgttgtaaacaagaaaatctgattttggattactaaccaaaagagaaattaattgcttgccggagtag

SEQ ID NO: 373290 - DNA, 679 bp, Homo sapiens
atggcaggaggtgattgaattcagcaatataccaactgtactctttcctaaattaatgttatcttagctttttacccgttgcagaatcattcttctcaaaagtacaaaggtaaagcctttcttcgacctactctgtatcttaatcagatgtgttgctttgggtaccaaattcctctgtgrtaccaaaaagacaaatggaaatattagtgaaaaaagttttagaagtgagtgactctgatgaacggctaatatgcatttctaagtgagattgtttccaactcttcgctttcaactaaacaaaagaagagcttaaaacaagttgctatgcacagattattaaataattatggctgatagagtattggcataatttatggcataaaactaggaaagaattaaaatagtgcggtaaaaaggcccaaatacaagtttctcaattcctaaatatttatctatgttgattaatttttatttaagcttcatatttcttattaaaaggaaggaattacattatattatgtctggaaagagaatgagggcaactcccatgtatttctgttcttagtgatttttagaaggtatagaaaatgatctgatctggctgctcatggtagtgtgcctttaatcccagcaacctgggaggctgaggcaggaggatcacctgaggccaggactttga

SEQ ID NO: 373291 - DNA, 679 bp, Homo sapiens
atggcaggaggtgattgaattcagcaatataccaactgtactctttcctaaattaatgttatcttagctttttacccgttgcagaatcattcttctcaaaagtacaaaggtaaagcctttcttcgacctactctgtatcttaatcagatgtgttgctttgggtaccaaattcctctgtgataccaaaaagacaaatggaaatattagtgaaaaaagttttagaagtgagtgactctgatgaacggctaatatgcatttctaagtgagattgtttccaactcttcgctttcaactaaacaaaagaagagcttaaaacaagttgctatgcacagattattaaataattatggctgatagagtattggcataatttatggcataaaactaggaaagaattaaaatagtgcggtaaaawggcccaaatacaagtttctcaattcctaaatatttatctatgttgattaatttttatttaagcttcatatttcttattaaaaggaaggaattacattatattatgtctggaaagagaatgagggcaactcccatgtatttctgttcttagtgatttttagaaggtatagaaaatgatctgatctggctgctcatggtagtgtgcctttaatcccagcaacctgggaggctgaggcaggaggatcacctgaggccaggactttga

SEQ ID NO: 373292 - DNA, 679 bp, Homo sapiens
atggcaggaggtgattgaattcagcaatataccaactgtactctttcctaaattaatgttatcttagctttttacccgttgcagaatcattcttctcaaaagtacaaaggtaaagcctttcttcgacctactctgtatcttaatcagatgtgttgctttgggtaccaaattcctctgtgataccaaaaagacaaatggaaatattagtgaaaaaagttttagaagtgagtgactctgatgaacggctaatatgcatttctaagtgagattgtttccaactcttcgctttcaactaaacaaaagaagagcttaaaacaagttgctatgcacagattattaaataattatggctgatagagtattggcataatttatggcataaaactaggaaagaattaaaatagtgcggtaaaaaggcccaaatacaagtttctcaattcctaaatatttatctatgttgattaatttttatttargcttcatatttcttattaaaaggaaggaattacattatattatgtctggaaagagaatgagggcaactcccatgtatttctgttcttagtgatttttagaaggtatagaaaatgatctgatctggctgctcatggtagtgtgcctttaatcccagcaacctgggaggctgaggcaggaggatcacctgaggccaggactttga

SEQ ID NO: 373293 - DNA, 594 bp, Homo sapiens
actgccagagaccctcacatcaggagagcccaccatgatgaaattaaacttgccaaaagtaggatgagaccagggacatctccctactgccagttcctgtggtcaagtaagtacacctctgctgcctctatcctgacatctagccaccaatcctgcagagattactgccctgaagagaaaagggtgggggatgggggaattctttcagggccatgccatgcctgttccttcctctttaccagcttgtggagcttagtgcattattagcctgcacagtgagaagaagaaaatgagcttgaccattgtttgaggtagatatttttatcaactgaaaaaaaaaacggagycttaaatattacactgggcccatgtaatgatactaactgaaaaatatatggcatcttgcaaaaatgtaattaacagacccactaattaatgggaaaggggaaactgataaaggaaagtccagctgaactacaggaagcaataatacaatttgatgcatatgcataaaagagctgagcctcctcaataaagtaatcacctaagtacgcttatagctattttggaggtaaagtaagaaaacccaaaaga

SEQ ID NO: 373294 - DNA, 594 bp, Homo sapiens
actgccagagaccctcacatcaggagagcccaccatgatgaaattaaacttgccaaaagtaggatgagaccagggacatctccctactgccagttcctgtggtcaagtaagtacacctctgctgcctctatcctgacatctagccaccaatcctgcagagattactgccctgaagagaaaagggtgggggatgggggaattctttcagggccatgccatgcctgttccttcctctttaccagcttgtggagcttagtgcattattagcctgcacagtgagaagaagaaaatgagcttgaccattgtttgaggtagatatttttatcaactgaaaaaaaaaacggagtcttaaatattacactgggcccatgtaatgatactaactgaaaaatatatggcatcttgcaaaaatgtaattaacagacccactaattaatgggaaaggggaaactgataaaggaaagtccagctgaactacaggaagcaataatacaatttgatgcatatgcataaaagagctgagcctcctcaataaartaatcacctaagtacgcttatagctattttggaggtaaagtaagaaaacccaaaaga

SEQ ID NO: 373295 - DNA, 594 bp, Homo sapiens
actgccagagaccctcacatcaggagagcccaccatgatgaaattaaacttgccaaaagtaggatgagaccagggacatctccctactgccagttcctgtggtcaagtaagtacacctctgctgcctctatcctgacatctagccaccaatcctgcagagattactgccctgaagagaaaagggtgggggatgggggaattctttcagggccatgccatgcctgttccttcctctttaccagcttgtggagcttagtgcattattagcctgcacagtgagaagaagaaaatgagcttgaccattgtttgaggtagatatttttatcaactgaaaaaaaaaacggagtcttaaatattacactgggcccatgtaatgatactaactgaaaaatatatggcatcttgcaaaaatgtaattaacagacccactaattaatgggaaaggggaaactgataaaggaaagtccagctgaactacaggaagcaataatacaatttgatgcatatgcataaaagagctgagcctcctcaataaagtaatcacctaagtacrcttatagctattttggaggtaaagtaagaaaacccaaaaga

SEQ ID NO: 373296 - DNA, 619 bp, Homo sapiens
tattatgaaatagaatcagaggttattaccaacaatgagcagaggaaaacaaaacccttctgagaaaggaatatcaaagattgatcctgctcgggtctcaatctcataattgagtaaatagcaacttaaaaaaatcccagagtgagaaacactgaggcattttatttcacttgtgatcatattagtgagtaataaatagcatgaaaatagattacatttttatttatttatgctgaagcttaggacagactcaccaaaattggccctgtgaggatacagtctgtgttggtttgaagcaggagtttaatcatatctgttttgtccctcaaataaatgaagtaatawcaaacaaaggcagtacacctgcctcatgttgttgcatatacaccagccacgaaaaaaaaaaaattgtgactaagagccacaggcactggtgcagcaattacagtggaagagaaaagggtttatagtcaactgtggagacaaggtaacagaaaccaggcatctcctgttctccagttatcacagcatacattcctagcacaatgcccttatatcccacctccggtgggtgtaggatcttgtttaaggtttctttctgagaaaccagatacagtgc

SEQ ID NO: 373297 - DNA, 574 bp, Homo sapiens
tgagtctcaaagacacatttttcctctaaacatgaggttaatctcactctgtctgcagatgtattataactgcacatgaattatatatttaatcctgtgacccagtagtattaattagcattacattttaattcacacatgaagaaaatacctgtactgtgaaaagcttttatgcctatggtgcagaagaagtctaccctccataaactaaaattaaagctagtttaacactacaagatttttttccttaccatgctatgaatgtattgtgatgtatatagtttattaccattgcatttccattgaccytttgtgttaggaattaattttgttcaacaattaattatcagaaatcctgggattcactcctactgtgttattggataacaatgtgacctcaggaaatcacttaacttgaaagcaccacacctgcatctctaaaatgtattgattcttctggggatattaaggttttcaggactcaatctactttctctctccaaaatgttcaggcatgattgtctctgtacctggtgaaacctccacctccttatcagtctggatgactcccatt

SEQ ID NO: 373298 - DNA, 643 bp, Homo sapiens
gagcaaataaaagaaaatcaaggcagtcattaattccaggacaaatgaaacattgcacaagtaaaggctttgtaattgtagttcaatacctctcttagctgtaaataatatttacaatgtaatgaagtgatgactactaaaaatgcactcaacccaaaagaatgatacataaacaacattaggaacatcagaagaggataagccctgaccctcccccccaaaaaatatatgagtgtatttcatgatagaaagctatgaagtcatatctaaaacagaaagaccaagagatgatataggaatgctatttataaatatagaggcaattagcagaaaaaactgttcaatgggtttagagtaaggcctcaatagattagaaatcagtaaagggggcaataggaagctcaatgctttcatcgtaggcttttatagtacaactatttgacttttaaaattatatacrtggaaaattttatttaagtaaacaaaaaaaatttaaagatttttcatgtctctagaaaaaaaacaagtcgcactgatgggcagaagaaaggctaaagtctgcaaaggattaaggaataaaatcgtggcttaagaccagtgtacaaccaagtcatgaatccatttaagtaaacaatcaggcatt

SEQ ID NO: 373299 - DNA, 281 bp, Homo sapiens
ctaaatctgactagaatgtgccagatgctttaaatgtgtccatgacaatttatttatttattcagacaagctcattttgccctttacacttcactgtatatttgtcctattctttcctggcgtaaattaaarataaaatcttaagatcctcactgattgaacagatttcctcttggccaaggggatcccaggaaaatcttaaaaactgaatttctagacacaacaagatggaagatcagacatgcctcattatatccccctcccttttgctgtttagacac

SEQ ID NO: 373300 - DNA, 550 bp, Homo sapiens
catcaaatctaacagcctgtatgtatgtattgatgaacattgacaggttttttcattatarcagatgaatcgctcatgttctaaaacccaccattctatgggcttccatccactctcactttctcaaggactttgccccagtaattatcctcaatttcctctgcatcacctacatcagtgcaaatgcatactgcaatttctctgatattaaacaaaaagtctctgataccatatctctatgtagctctgaaatagatctgcattgctccacagaaaaaaaaaattcctcacaagaactgtttgtacagtttccaaattctcatctcccattcttccatgattttaatctaatcaggcttttgtctccaaaaccccacagaaaacactttcttcaaggtcactaataccttcatatttgaaaatgcaatagtcaatgttttaaggtggtttaatttttttttctttttcttttttttgagtcagggtcttgtggtgtcacctaggctggagtgcagtgacatcaacacagctcactggagggttacttgta

SEQ ID NO: 373301 - DNA, 579 bp, Homo sapiens
gtttttttaattgactgcatttttcttgtttttctcttaaagatatgtctaaatctctactaaccttccttgtatgtgattcccagtgtataggtacaatattttctcctgggtgtatataaggagtttgaatctgtgactatttgacgtgtgaatatttacccacacaaaggaatgttaaaatattttaaagtgtttacctacaacaatttataagaatmtttttaaatccacattttctccaacatttcatagcatcacacttaccaatgtttgcaaatagaatgggtatgaaatggtgcctatgcacagtccaaatttatgtttctctaatctcaaataaggtagaacatctctccacatgattactggcctgtattagtttgttttcacactgctataaagatactacctgagactgcgtaatttataaacaaaagaggtttaatggactcaaagttccacatggtggagggtggaggggaagcaggcaccttcttcacaagatggcaggagagagagagcacaagtgaaaactgccacttttaaaaccatcagatctcctgagaactccctcac

SEQ ID NO: 373302 - DNA, 592 bp, Homo sapiens
gaaatcactaaaaaggaaaagctatgaaggtgactagcccaatcagacattgaaacatactataaaacctctataattacaacaatgtagtactagcacttgaataggtaagcaagtctattatagtttgtcaagtctgtcacagaaaaaacagaaataattttaaatacatatggaactttagtgtatgataagagtagcaactgaaatcactagggcaaaaatgcacttttaaataaatgatgctgggacaattggtttgccatttgggggaaaagatgaaactgagctacacctcatcacacctaytgaaaaataaactccaaatgatcaggaatctaaatggaaaatacatccctacaagtattaggagaaaacgaggtgaatttctctttaacttgcatgtagggaaagacattctaattatgactcaaaatccagattcactaaatgcactaaaaacattgataaaactgattaaattaaaacaaaaaatgagggtttttggcatggcaaatatcaccataagcaaagtaaaaagacagccaacacactgggagaaaatatttacaacatatattaccccaaaagc

SEQ ID NO: 373303 - DNA, 487 bp, Homo sapiens
taaggttcgcaggaaggggcgctggggagaggacgccggaaaggcgatccggggtggaggaggcaggaaccgggagcggggcgggggcgttggggaggggtcttcgggaagcggaccccggagaggggcagcaggcagagggagctgaggaacggggccagaaaggaacggctgggaagaggcgggggaaatgggtgtctcgggaggtggcggcagggaggggtcccctggaggggccccagccgggacccctggggaggaggtrgcggggaggggagtcagggatggagtttcggagagtggtagcccgagagaggcggcgggcagggtctccagggactggtcccggggagggacccaggcagggattgcctggttggggaacctggggagggggcgccgcgaagggaaaccaggaatgggactgcggggagggcaccagggctgaggtcccggaggaggagacttggggaggggcagcgggcgc

SEQ ID NO: 373304 - DNA, 516 bp, Homo sapiens
gggctggtgttgagtgtctgcagcttttcgaaacacagagtgcaagctgtcagtggatctaccattctggggtctggactatggtggccctcttctcacagttccactaggcagtgccccaatggggactctgtggggctctgaccccacgtttcccttccacactgccctagcaggggttctccatgagggctccacccctgcagcaaacttctgactggacagttatttcttacagttatggaagctgagaaggccaagatcaagggaatgcatctggtgagagtcttctcactagtggggactctgcagagtcccaagacagtgcagggtatcatatagcaagggggctaagcatgctaacatactaaatcaggtctctcccatctgataaagccaccagytccactccaatgataacccattaatccattaacccatgattaatccatgtgtgagggcagagccctcatgatccaatgacctcttaaaggccccacctttcaatagtgctac

SEQ ID NO: 373305 - DNA, 615 bp, Homo sapiens
ctcaattctatcatttttctcgttattttggggtcctgttaggtgcatatacatatgttaactgttatatctgatatattggctttttaaaatatcctatatttccagtaatatttgtcttaaagcccactktactgatatagacattccagctctcttacgattactgtttgcatgttatatttttccatactttcactttacagctattggtctttgaatctacagtgtgcctctgtgaacaccatatagttttttctttttaaatccatcctgaccatctctaccttttaactatttagtccattcacatttaatgaaattattggcatgattacttatggctgccattttgctatttgttttccaaatgtctatcattttgcttctttctttctgccttttgtgttaaatatttcttggtgtaccattttgttttttttaatttatttttaaattgatgcttcagtggttactccaggctctacagcatgcatttcaatttattacaatcatcttcaaattaggactaattaattctaataagatacatctttgtcccaatagagttccatttcctacccactcctttgttattaatatacactgcaccta

SEQ ID NO: 373306 - DNA, 559 bp, Homo sapiens
tgaatacacgagtgcatgcagataatctaactgtaatctaacttcctcagaaatgctgatgttcttctgtaacttccaggatggagggtcacagtgcttctctattgacatatattcagtgagcagggtgccttcactgttttcacagaacattatcttatttttggaaagtaacaattaaaacattctttctagcagagtgacatatgttggcccatatctcctccccactcgtctgccagggtcccacactcccagcctttgtcctstagcacagcaagtaagaaactgagaccaagtccctttgggtaggctctttactaggctgaacagagtctgtttcttaaactgttactcataccttcccaagcatccctcagtatgctcctgattccttacttctatggctaagaatccgtgtgcctggtggaagataacccagatttcaggtctgtgcagatctcaaaatatctcaaaatctgtttaaaaatcacaatttaaaaaaaactcaacttagcctgttctccaataaatcctcaataggtggcagtgttgatct

SEQ ID NO: 373307 - DNA, 559 bp, Homo sapiens
tgaatacacgagtgcatgcagataatctaactgtaatctaacttcctcagaaatgctgatgttcttctgtaacttccaggatggagggtcacagtgcttctctattgacatatattcagtgagcagggtgccttcactgttttcacagaacattatcttatttttggaaagtaacaattaaaacattctttctagcagagtgacatatgttggcccatatctcctccccactcgtctgccagggtcccacactcccagcctttgtcctctagcacagcaagtaagaaactgagaccaagtccctttgggtaggctctttactaggctgaacagagtctgtttcttaaactgtyactcataccttcccaagcatccctcagtatgctcctgattccttacttctatggctaagaatccgtgtgcctggtggaagataacccagatttcaggtctgtgcagatctcaaaatatctcaaaatctgtttaaaaatcacaatttaaaaaaaactcaacttagcctgttctccaataaatcctcaataggtggcagtgttgatct

SEQ ID NO: 373308 - DNA, 619 bp, Homo sapiens
gttgttcctttacgggttgagcatatgttgagcaggggaagggagaagggaggggccccgaatgtcccagccactgtgaatgcagctctttgctcagttactctgatggttatcctatggtctactcttgctttctgtctcttgtttctgagtttggggtttctctagggctcccttgagaaggaaagttcttggtmctggtgtttggggctgtggtttacctttgtactttctcagttgatctgatcccatctactttttcttttcttttcttttcttttttttttttttttttttttgagacagagtcttgctgtgttgcccaggctagagtgcagtggcaccatctgggctcactgcaacctccgcctcctgggttcaagcaattctcatgcctcagcctcccaagtagctgggattataggcatgcgccaccacacctaattttgtatttttcgcagagatggggtttcaccatgttggccaggctggtcttgaactcctgacctcaggtgatccgcccatcttggcttcccaaagtgctgggattacaagtgtgagccaccgcacccagccaatcccatctactttctagcttccagtattttctcagactttc

SEQ ID NO: 373309 - DNA, 588 bp, Homo sapiens
tgctaaactgatttagcaaagtttttcctaaagctgggtgatggatgcccaacaaggacagacattgaaggctgaggccttagcaaagcatgactgaagttaggtcaaggagagtctttgttaggaagcaatagaaataaaatgtatttttatctaaaagcatgataacttggattctaaaaattcttccaataaagttatttatacarttttgttttcttacctaaattatttttaatgctgaaaacctgcatttgttggtttttcagtgatacatttcaatagagaattgtgagtttcatagttttcttttcctagaaccacaatgaaattctttaacaaaaagtcttttggtagtgaatcactagcaatgaatagctcaaggccttgtttaaagaacctcaataataccaaaaaacagaagaggtcatgaaaagaaagaaaatctggatcaagtatggtctaaaaaattaatttaagacattctttttccccttgtttcttccaacaaagtaacaacagttgggagtctttcacatggaattggcctcaagcagtccatgaaatacagagagcatagagacagaa

SEQ ID NO: 373310 - DNA, 555 bp, Homo sapiens
actgaagttaggtcaaggagagtctttgttaggaagcaatagaaataaaatgtatttttatctaaaagcatgataacttggattctaaaaattcttccaataaagttatttatacagttttgttttcttacctaaattatttttaatgctgaaaacctgcatttgttggtttttcagtgatacatttcaatagagaattgtgagtttcatagttttcttttcctagaaccacaatgaaattctttaacaaaaagtcttttggtagtgaatcactagcaatgaatagctcaaggccttgtttaaagaacctcaataataccaaaaaacagaagaggtcatgaaaagaaagaaaatctgsatcaagtatggtctaaaaaattaatttaagacattctttttccccttgtttcttccaacaaagtaacaacagttgggagtctttcacatggaattggcctcaagcagtccatgaaatacagagagcatagagacagaaaatttaagcttaaattgtttcaaagacctctaactatattgtccttaaatatgtagaag

SEQ ID NO: 373311 - DNA, 555 bp, Homo sapiens
actgaagttaggtcaaggagagtctttgttaggaagcaatagaaataaaatgtatttttatctaaaagcatgataacttggattctaaaaattcttccaataaagttatttatacagttttgttttcttacctaaattatttttaatgctgaaaacctgcatttgttggtttttcagtgatacatttcaatagagaattgtgagtttcatagttttcttttcctagaaccacaatgaaattctttaacaaaaagtcttttggtagtgaatcactagcaatgaatagctcaaggccttgtttaaagaacctcaataataccaaaaaacagaagaggtcatgaaaagaaagaaaatctggaycaagtatggtctaaaaaattaatttaagacattctttttccccttgtttcttccaacaaagtaacaacagttgggagtctttcacatggaattggcctcaagcagtccatgaaatacagagagcatagagacagaaaatttaagcttaaattgtttcaaagacctctaactatattgtccttaaatatgtagaag

SEQ ID NO: 373312 - DNA, 592 bp, Homo sapiens
ccacacttattctatacagtgtaccttaatgttcctaggctaggaaacctgtacagcatgttactgtactaaatggtaacagtggtaagtatttatgaaatggaaacttttcagctccattayaattttatgggcccaccatcatatatgcagtttgtcattggccgaaacttccacatgtgacagatgactgtacaacaaagaatgctggaatttggattggggttgtactgagtttaaatatcaatttggagataagtgaaatcttaacaatatttagccttccaattcatgaatatggtatatctcttcattgatttaggtcttcttttacttctcttagcaatatgttagttttcagtgtagaggtcttgcatgccatttgttatatttatttctaagtttttaagtccatcttgatgttattgtaaatgtgtatattaattttattatgcaattgtttgcaattagtatataaaaatacactaagttttgcatattaactttgaatatatttttaaatttctaattagtaccagtactatttttgtagatttattagaagtttatttgaaaacaattgtatcatctg

SEQ ID NO: 373313 - DNA, 592 bp, Homo sapiens
ccacacttattctatacagtgtaccttaatgttcctaggctaggaaacctgtacagcatgttactgtactaaatggtaacagtggtaagtatttatgaaatggaaacttttcagctccattacaattttatgggcccaccatcatatatgcagtttgtcattggccgaaacttccacatgtgacagatgactgtacaacaaagaatgctggaatttggattggggttgtactgagtttaaatatcaatttggagataagtgaaatcttaacaatatttagccttccaattcatgaatatggtatatctcttcattgatttaggtcttcttttayttctcttagcaatatgttagttttcagtgtagaggtcttgcatgccatttgttatatttatttctaagtttttaagtccatcttgatgttattgtaaatgtgtatattaattttattatgcaattgtttgcaattagtatataaaaatacactaagttttgcatattaactttgaatatatttttaaatttctaattagtaccagtactatttttgtagatttattagaagtttatttgaaaacaattgtatcatctg

SEQ ID NO: 373314 - DNA, 597 bp, Homo sapiens
tttgtaagattttaatctttgaactaattagacttatggccccacagatggtttattgtggtgaatttattatgatcacatgaaatttacatatttgacacttgttgtggtagtgttgtaaaaatgtgagatcaagatgtttgaaagaggtgttcaaattttygaaatcctcaatgatttctttctagtgggccttcctctcattcacagactcacatattcaaatgccttaaatgtctaaaatttatcttagactcagcatattctgcccaaatatacctccctggtcctgccatcaagcctccattatttcagtaatttccattaccatccattcttctgccccttgctcaggtcaaaacactacgagtacatattttacttctctttatactacatacttcatacaatccatccatagattccattttgcctctaaacatattaaatctatttgttgccatctctactcataaaactgctcttgcattatggtatttttcactaactgtcctccctgccctgaccctcccgtcacagcctcacattccagaggagatgtggaagaggagccagaatgatcttgttaaattctcc

SEQ ID NO: 373315 - DNA, 597 bp, Homo sapiens
tttgtaagattttaatctttgaactaattagacttatggccccacagatggtttattgtggtgaatttattatgatcacatgaaatttacatatttgacacttgttgtggtagtgttgtaaaaatgtgagatcaagatgtttgaaagaggtgttcaaatttttgaaatcctcaatgatttctttctagtgggccttcctctcattcacagactcacatattcaaatgccttaaatgtctaaaatttatcttagactcagcatattctgcccaaatatacctccctggtcctgccatcaagyctccattatttcagtaatttccattaccatccattcttctgccccttgctcaggtcaaaacactacgagtacatattttacttctctttatactacatacttcatacaatccatccatagattccattttgcctctaaacatattaaatctatttgttgccatctctactcataaaactgctcttgcattatggtatttttcactaactgtcctccctgccctgaccctcccgtcacagcctcacattccagaggagatgtggaagaggagccagaatgatcttgttaaattctcc

SEQ ID NO: 373316 - DNA, 597 bp, Homo sapiens
tttgtaagattttaatctttgaactaattagacttatggccccacagatggtttattgtggtgaatttattatgatcacatgaaatttacatatttgacacttgttgtggtagtgttgtaaaaatgtgagatcaagatgtttgaaagaggtgttcaaatttttgaaatcctcaatgatttctttctagtgggccttcctctcattcacagactcacatattcaaatgccttaaatgtctaaaatttatcttagactcagcatattctgcccaaatatacctccctggtcctgccatcaagcctccattatttcagtaatttccattaccatccattcttctgccccttgctcaggtcaaaacactacgagtacatattttacttctctttatactacatacttcawacaatccatccatagattccattttgcctctaaacatattaaatctatttgttgccatctctactcataaaactgctcttgcattatggtatttttcactaactgtcctccctgccctgaccctcccgtcacagcctcacattccagaggagatgtggaagaggagccagaatgatcttgttaaattctcc

SEQ ID NO: 373317 - DNA, 466 bp, Homo sapiens
tgtcttaattcctctatgaaaaattcacaggcaatgcaattctaagttgtcttttgttttctctcagctcattgatagtatttaccattttattacttcccttgtgatttaaatacctgctgctaatctaagtgtcattcattctggtctttcttcactggtgatatttaagctcatttctatatatttctatacgagtggtactctgcaacttgattagaatgtgtctagaagtatatatcttttgcatttctcatgcttgttattcactgattttcttgaatttgagaatatttgtctgttaaaatgctggattattctcagccatccctttgaattttgcatttcttcactccttatcttctctctygtattagtattgctgtgttgcaatataggtaattctttcaagtacatcatccgatgaactaattcttatatcagctatatctaatatactatagta

SEQ ID NO: 373318 - DNA, 600 bp, Homo sapiens
attttgagctcattattttacatctttgcctgtgaaaattatgtaaggtctggtttagagaacattctttcagagatttttactcttgtagctcctaatatccaaactcttgaatgcattcatttatatccacatcaactctgtgttcaaattctattgcttttgtcttcaaaatatttccaaacttcaagcacttctcactatcttcaccattacctccctgggtcaagctttcatcaccactcaccaggattattgcagtagccttttaagtatcttcctatttcagcccttactccacttccatctcttcttcatattactctgtcaaaacttcgtgagagcactccatttctcaaattcygcctttttaatgaggccatctgagcaactcaatgctcaaaactcttttattacacagtttcttgatcttaccctactattttttttttcctttatggcatgtttcatcatttaacatattacatatcttatttgttttggttactgactctttcccctcactagaaatggagccatggagaaattttgatgtgtgtgtacatgtgtatgttatagataaatatttggaagtctctc

SEQ ID NO: 373319 - DNA, 571 bp, Homo sapiens
agcccttactccacttccatctcttcttcatattactctgtcaaaacttcgtgagagcactccatttctcaaattctgcctttttaatgaggccatctgagcaactcaatgctcaaaactcttttattacacagtttcttgatcttaccctactattttttttttcctttatggcatgtttcatcatttaacatattacatatcttatttgttttggttactgactctttcccctcactagaaatggagccatggagaaattttgatgtgtgtgtacatgtgtatgttatagataaatatttggaagtctctcctgtgctgctatttatttatttatttaaggcagagtcttgctgtgtcacccagggtggattgcagtggcatgatattgactcactgcaacctccgcctccctggcttgagattsttgtgcctcagcctcccaaatacctgggattacaggcatgcaccaccacgcccaactaatttttgtatttttactagagacagtgtttcaccatgttagcccggctgatctcaaactcctgacctcaagtgatccacccactta

SEQ ID NO: 373320 - DNA, 571 bp, Homo sapiens
agcccttactccacttccatctcttcttcatattactctgtcaaaacttcgtgagagcactccatttctcaaattctgcctttttaatgaggccatctgagcaactcaatgctcaaaactcttttattacacagtttcttgatcttaccctactattttttttttcctttatggcatgtttcatcatttaacatattacatatcttatttgttttggttactgactctttcccctcactagaaatggagccatggagaaattttgatgtgtgtgtacatgtgtatgttatagataaatatttggaagtctctcctgtgctgctatttatttatttatttaaggcagagtcttgctgtgtcacccagggtggattgcagtggcatgatattgactcactgcaacctccgcctccctggcttgagattgttgtgcctcagcctcccaaatacctgggattacaggcatgcaccaccacgcccaactaatttttgtatttttactagagacagkgtttcaccatgttagcccggctgatctcaaactcctgacctcaagtgatccacccactta

SEQ ID NO: 373321 - DNA, 459 bp, Homo sapiens
cttgaggtcaagagttcaagaccagcctggccaacatggtgacacactgtctctactaaaaatacaaatattagccaggcatggtggcacccacctgtaattccagctacttgggaggcctaaggtgacagaattgcttgaactcaggaggcagaggttgcagtgagccaagatcatgccattgcatgtctctatctcttggccagatcagcctggccaagagagagagactcgtctcaaaaaaaaaaaaatgagcagaaaatatagagagtrtttatgtatctaccctccatacagttttttctataattgttatgttataattgataagaaaatgttgatatattattattaactaaaagccatagtgtatattagggttcactcttcgtgtcgctcttatatagtcaacttgactttgtggttggacaaatgtgtaatgacttgtatcaactatta

SEQ ID NO: 373322 - DNA, 423 bp, Homo sapiens
atgaaaacagtaatggagccaattcaaataattatattttcttcagattaactgcctcccaccactttaaccttccttcatagtgtctcctccacaccctgactcatttttattattcaccagattctttttttcttcctaaaactattgaaaactgacacaatactctgctgatgactaacgtaaaatatagtggaacaatttcaagactctgtaagggtagctttcacactactactactamtgttatttgagtaaagttgtggcttacataatgcttccacatgcaccattctacttattagacaaccctgtgaagtggattcaaatactctcattttatagataagaacaatttagatctagaaatagtaaggaacttaaatccaatttacacaacaatgttttcttgtttccctgttc

SEQ ID NO: 373323 - DNA, 569 bp, Homo sapiens
ttgtggcttacataatgcttccacatgcaccattctacttattagacaaccctgtgaagtggattcaaatactctcattttatagataagaacaatttagatctagaaatagtaaggaacttaaatccaatttacacaacaatgttttcttgtttccctgttcttgttactacccttctgtacttcatcttaatatagaatggccaggagataagtgaagctatagaactgactgggtgattccagaaattggagctatagagtcccatagtaacttatgaattgtcctacagtgcagtcctacagctccgttatgataatcctccagatgaagctatgttcaagactggactagatcttgtgctataaagccacactggaaccatctccaattccccrccttgcttcagttttatattcttgcagatagcctctttgaatccatcaggtaagaacacagaaatttaaaattgtgtcttttatgagtctaattacattctaaatttacatttttcttctctgagtctctattttcgttttgtatgtatataatcatctaaccatcacaa

SEQ ID NO: 373324 - DNA, 569 bp, Homo sapiens
ttgtggcttacataatgcttccacatgcaccattctacttattagacaaccctgtgaagtggattcaaatactctcattttatagataagaacaatttagatctagaaatagtaaggaacttaaatccaatttacacaacaatgttttcttgtttccctgttcttgttactacccttctgtacttcatcttaatatagaatggccaggagataagtgaagctatagaactgactgggtgattccagaaattggagctatagagtcccatagtaacttatgaattgtcctacagtgcagtcctacagctccgttatgataatcctccagatgaagctatgttcaagactggactagatcttgtgctataaagccacactggaaccatctccaattccccaccttgcttcagytttatattcttgcagatagcctctttgaatccatcaggtaagaacacagaaatttaaaattgtgtcttttatgagtctaattacattctaaatttacatttttcttctctgagtctctattttcgttttgtatgtatataatcatctaaccatcacaa

SEQ ID NO: 373325 - DNA, 569 bp, Homo sapiens
ttgtggcttacataatgcttccacatgcaccattctacttattagacaaccctgtgaagtggattcaaatactctcattttatagataagaacaatttagatctagaaatagtaaggaacttaaatccaatttacacaacaatgttttcttgtttccctgttcttgttactacccttctgtacttcatcttaatatagaatggccaggagataagtgaagctatagaactgactgggtgattccagaaattggagctatagagtcccatagtaacttatgaattgtcctacagtgcagtcctacagctccgttatgataatcctccagatgaagctatgttcaagactggactagatcttgtgctataaagccacactggaaccatctccaattccccaccttgcttcagttttatattcttgcwgatagcctctttgaatccatcaggtaagaacacagaaatttaaaattgtgtcttttatgagtctaattacattctaaatttacatttttcttctctgagtctctattttcgttttgtatgtatataatcatctaaccatcacaa

SEQ ID NO: 373326 - DNA, 526 bp, Homo sapiens
tgatactgactgcagagaaggcaactggatactccaatatatagtgttcatatgactcagtcagcagcgccattcttatgtttggtatatatgggaaaaggaagagtcaattcagtgagtsacataaaatattgcatataggtgttagcaacatggatctgagtggtcaggatcccaattagtgtctatgggcttcaggaaaactgtcaagagataggtaggttaagagtatcatgagtgggaaagacattgacatatatgatagtcattgatccctaaatgagaaagaggaccgtccagagccaatatataaattacttcttatgcctgtcttggagggttaaaggactgagtccctaaaactcatatttgtctaagttttttggatctgttgaatttatttgaggcatgatcactaaccagagttaaagctgattcttccttttgaataagctttctttctttccctattttcttcagcctctgggtccagtctcacttgtgatcctgtggtaggcaccattat

SEQ ID NO: 373327 - DNA, 526 bp, Homo sapiens
tgatactgactgcagagaaggcaactggatactccaatatatagtgttcatatgactcagtcagcagcgccattcttatgtttggtatatatgggaaaaggaagagtcaattcagtgagtcacataaaatattgcatataggtgttagcaacatggatctgagtggtcaggatcccaattagtgtctatgggcttcaggaaaactgtcaagagataggtaggttaagagtatcatgagtgggaaagacattgacatatatgatagtcattgatccctaaatgagaaagaggaccgtccagagccaatatataaattacttcttatgcctgtcttggagggttaaaggactgagtccctaaaactcatatttgtctaagttttttggatctgttgaatttatttgaggcatgatcactaaccagagttaaagctgattcttccttttgrataagctttctttctttccctattttcttcagcctctgggtccagtctcacttgtgatcctgtggtaggcaccattat

SEQ ID NO: 373328 - DNA, 558 bp, Homo sapiens
tataatcccagaattggccacttttgaaaattcaaggggcttttctgctgcaaggaaagaaaaatagctgtgcactcaaagattcctgcctgtcctctttttcttattattttatttttctccttaaactctgtagaggaagacgaagggacacataggtgataacagtgggactcagggtttacaaaaggcaaagttaaaagttaacttctttatttcaaaggaaatttagacttcaggggctcaaggaatgagtattccaggaagatatccgtccttcattgtggataagccttgctgagttgaaaatgaggatatttatttcagaataattgtgatctcagggagcaatagggtagggtctttaagaagaaaagatgtttctaattctctaaccaagttttgcaagtgaagatatagggaaagggcagttaagaatagaatgaggctagtgccacaaagaaattgtgaggtggtgatgaagstaaataaacaagaaagtctaaatactacttagcagcagggctagtttgagttaatataggttcattctgctaa

SEQ ID NO: 373329 - DNA, 545 bp, Homo sapiens
ttagacgtttggtgagaacagcaataaaaataattatattgaggacttttgaacaaacaagccagttaaaagtttgaatgcctggagagcttgacaagagattggtaggaggcaaaggagtgggtaattagggaggcaaaggagtggrtaatataacctgatagcataggcttcaaacgagcaagggtttgcaaaagcaacaggttgttacacttggaaactgtcagtgtgggccaggaggaagttcacttcccctcctggccctgaggaacatggtataaaagagaaaagaaaaacaactttgattctatttgaagagaagtagcttcctcaggggacagctcaatttcagtaaaaacacagacatgaagggaacaatcagagaaaagagtaataatttaaagatgttcactgattacagacttagagctcaaaaggatggagagataaagtcttaagaaagatacttttccttttctttatgacagattgagtcagatcagaagagatgcatcaagtatgggaagagatggactcaaaggcaa

SEQ ID NO: 373330 - DNA, 613 bp, Homo sapiens
gtctcttcattaacgagcataatgatataaaatctattttaattcttaaaccattaatgagattgattttttggttatattgaggcagcagttctacattgaaaatattgtgacctgacatgttatcatgttgtgtaacgtttctgtgaacaaagatttaaagatattctaaatctcttctttaaaatcaaatataagtggtgataattaattgaagttatttccttaacttctcacctgtttttgttttcattttattcttacaaccttatgaggcagagagaatacgatcgactatgcatgacagatgaagagagaggcagaggaagaacacctaatcagtctacattcttctaactaataacctaagtgaatgctaaattgaataatgtcatttgaaataaaaagtttgtgaattagcctgatttaattattcacattgtaaatatataccaaaatatcacgttgtaccccacaagtatatggaattattatttgtcaattaaaattaaaatttcaaaagaagaacatgagaaaaaaaaattcaggtargtttccacagaacagagtgacaaaataatgagtcaatatagtgtaaacaaaaaggtaccag

SEQ ID NO: 373331 - DNA, 635 bp, Homo sapiens
ttgactggattgaaggatgcaaagtattgttcctgggtgtgtctgtgagagtatttccaaaggagattaacatttgagtcaatggactaggagaggcagacccaccctcaatctaggtgggcactatctaatcaactgccagcatagctaggataaaaacaggcagaggaacatggaaggactaaactggctaagtcttttggcttccaactttctcctgtgctggatgcttcctgccctcaaacatcggactccaagttcttcagcttttggaccctaggacttacaccagtggtttgccaggggctctcaggccttccgccacagactgaaggctgcagtatcacgccttacctacttttcargttgtgggactcggactggtttcctggttccttagcttgcagaggcctactgtgggacttcaccttgtgattgtgtgagtcaattatcctaataaactcccttgcatatacacatctatcctactagttctaactctctagagaaccctaatacatatacacatacagtattaaaaattaaaatacagaaactgaattgatatctgtttaagttataatgatttatgatccaattttacattaattttagtttcatcactgcaatatgtt

SEQ ID NO: 373332 - DNA, 635 bp, Homo sapiens
ttgactggattgaaggatgcaaagtattgttcctgggtgtgtctgtgagagtatttccaaaggagattaacatttgagtcaatggactaggagaggcagacccaccctcaatctaggtgggcactatctaatcaactgccagcatagctaggataaaaacaggcagaggaacatggaaggactaaactggctaagtcttttggcttccaactttctcctgtgctggatgcttcctgccctcaaacatcggactccaagttcttcagcttttggaccctaggacttacaccagtggtttgccaggggctctcaggccttccgccacagactgaaggctgcagtatcacgccttacctacttttcaagttgtgggactcggactggtttcctggttccttagcttgcagaggcctactgtgggacttcaccttgtgattgtgtgagtcaattatcctaataaactcccttgcatatacacatctatcctactagytctaactctctagagaaccctaatacatatacacatacagtattaaaaattaaaatacagaaactgaattgatatctgtttaagttataatgatttatgatccaattttacattaattttagtttcatcactgcaatatgtt

SEQ ID NO: 373333 - DNA, 566 bp, Homo sapiens
tcttgtgctctcacacactcacttctctcacctactgccatgtaagacatgcctctttcccttccaccatgattgtaagtttcctgaggcctttccagccatgcggaactgtgagtcaattaaatctcttttctttataaattacccagtctcagaaagtatctttatagtagtatgattatggactaatacagtagtcctgaactttgataaatttgtgtttccaaaactggtgatggggaagaaagaaactcggtagtctttttaggcctgccaacttacaaaaacttgccaacagaagcatcaaaatttttcctgacatgtcaagttccagtctagcaaagrttttcactacttacagaagtggcaaatttaggaaatctggaaaatgaagaaaggcataaagaaagtaaaaatccacaaattcactacttgccaacattttggtttatttcacttttccaagtcattttactatgcacatgtgttgagatgcatgtgtggacataagcttaacttgattttatttttagtaaattactcctaatgaagacatgctgggaaaa

SEQ ID NO: 373334 - DNA, 611 bp, Homo sapiens
ggaaattctacagtataataccttgactattatctctagtgccattgattggtcgggttagtaaaactgaaaactgatatcctgatatcctgttgaacatctctccctttttgtgttttttttttttttagagacagagtctcactctgtcayccaggctggagtgcaggggcatgatctcggcttactgcaacctctgcctcccaggttcaagcgattctcctgcctcagcctcctgagtagctgggattacaggcatgcaccaacacacccggctaatttttgtatttttagtagagacggggtttcaccaagttggttaggctggtctcgaacccctaacctcatgatccacccaccttggccttccaaagtgctgggattacaggcctgagccaccgcacctgcactggacacctcttttaacctgaatgtgtgttttgtaaaatagacatacatcaagaaattattatcttctaatggaatgactcaactaccaactatgatttttctccctttgacctgaacaattttaattgtaacaaagtgttttggggcccataataattgctcctatagtgttcccaatagtgaaactaataaaaatcata

SEQ ID NO: 373335 - DNA, 611 bp, Homo sapiens
ggaaattctacagtataataccttgactattatctctagtgccattgattggtcgggttagtaaaactgaaaactgatatcctgatatcctgttgaacatctctccctttttgtgttttttttttttttagagacagagtctcactctgtcacccaggctggagtgcaggggcatgatctcggcttactgcaacctctgcctcccaggttcaagcgattctcctgcctcagcctcctgagtagctgggattacaggcatgcaccaacacacccggctaatttttgtatwtttagtagagacggggtttcaccaagttggttaggctggtctcgaacccctaacctcatgatccacccaccttggccttccaaagtgctgggattacaggcctgagccaccgcacctgcactggacacctcttttaacctgaatgtgtgttttgtaaaatagacatacatcaagaaattattatcttctaatggaatgactcaactaccaactatgatttttctccctttgacctgaacaattttaattgtaacaaagtgttttggggcccataataattgctcctatagtgttcccaatagtgaaactaataaaaatcata

SEQ ID NO: 373336 - DNA, 611 bp, Homo sapiens
ggaaattctacagtataataccttgactattatctctagtgccattgattggtcgggttagtaaaactgaaaactgatatcctgatatcctgttgaacatctctccctttttgtgttttttttttttttagagacagagtctcactctgtcacccaggctggagtgcaggggcatgatctcggcttactgcaacctctgcctcccaggttcaagcgattctcctgcctcagcctcctgagtagctgggattacaggcatgcaccaacacacccggctaatttttgtatttttagtagagacggggtttcaccaagttggttaggctggtctcgaacccctaacctcatgatccacccaccttggccttccaaagtgctkggattacaggcctgagccaccgcacctgcactggacacctcttttaacctgaatgtgtgttttgtaaaatagacatacatcaagaaattattatcttctaatggaatgactcaactaccaactatgatttttctccctttgacctgaacaattttaattgtaacaaagtgttttggggcccataataattgctcctatagtgttcccaatagtgaaactaataaaaatcata

SEQ ID NO: 373337 - DNA, 418 bp, Homo sapiens
ctttccatagggcaactcacaacatggcagctggcttaactcagagagagggctctcaaaaaatatgagcaagagagagtgcccaagatagaagacagagtgtttttaaaatttaatcttaaagtgattcctatggcttttgcgctgagttrtttgttagaagcaagtcactaggtcaaactcacactcaacagaaagtaatgttacaagaacatgaatgtcaggaatcagaaataatcttaaggctgtctactgcaattttggcatctcacctatctgtgaagtaatgaacaaaaggaagccctcaataaatgcttattagttgatgggtgcatcttaaaaacttgatatcttcatagaaaaatgaaacattttttctcagaacttaatctaacaatttaactttcgaaagggtcat

SEQ ID NO: 373338 - DNA, 579 bp, Homo sapiens
ataagcaaaattaggtgatacttcttttggaaaatattctattaacaggtttttgctctttccaattgaatactctgatttgaaatgctttagtatatttgttcttctcttaggtttattttatccctaaattatctagcattkgtaaatctaacacaaatatcactggcatttactttgggattctctggaattcctggaaaatagactttctgaatttttatttcacattagagttatgatctgtacagaaaagtggtcgagtgctattaaaattagaattagcctttgagtatactttcaaatcacaaatttcttaatttgttacatagagaaatgactagaatatattatattaaaattgcatcattatatagattccatttcaggttgtaatacgtttcaaatacagcagtaattttatttgaaaatctttgggaattctctgaagacatactattttttgtaatatacatgaacactgaggatgttaaaaatgtaggaatcaatattgacttaagaaaattatttcttctcaactatgttaacaaaggacaatattttgtcactcattaaaaa

SEQ ID NO: 373339 - DNA, 512 bp, Homo sapiens
ttttgttttacctgttgctgcccaacttcaaatgaagtagtgcttcttttgtccaaagccaacccaggcatttgtattttgaacttcattcttcttctatctttgtgaattttcagcttgattccttttgctttatcaattttccctccattctctcttmagtctctttattctgccataacctcttgccattcaaactaaaaaagttgattttttttagtctgagcttaaaaagatatttttagtctggtatttattagcatgaactaagtaaagacaaacatgccaaaaccaaaattatacaactaagtagaactctttctaatgacttcccgattatgaaacccaattatatttatgtatttatgtatttatttatttacttttgcctttaatttattgtacttcttggcactcagcttctgttgatattttctactcccttgggttttcaatgcaactctctcttggtttccttcacaactttctggttagtccttctatttatctct

SEQ ID NO: 373340 - DNA, 576 bp, Homo sapiens
cctttacagaatacaaatttatcaaattaaaaataggaatgcaatcaaaagaaacttctacaagtggaaatattttaaggggcaattacaaaartaaatcttaaacactgtgtaagcgctcttcatctaatttgttccattcctcccttacttttgtgggcatacatttcaacgttttcctgtttgcatgtttattttaacaggaactttgattcaataagagatttaaaagctagtcatttggtactctatttgtaaatactttgattcaataaatcaaagaaattttaaaaaatgcaaacaaaattagacttatatgccaaaagaagttaaaaatctttgtagtacacatatgttgatttacaaagtagatttcaaaggttcacatatgtttaaaatcaattcataaaagaaggctatgtcacaaagtctgcaatgttgaagtattcttttgtattcaacatcaacttcattacaaaaaattattttcatcatgtaggtacaaaaatagttgtatatattggcacttcaacttctctttcaatgggtgtaatattatagctagcttctacccaa

SEQ ID NO: 373341 - DNA, 576 bp, Homo sapiens
cctttacagaatacaaatttatcaaattaaaaataggaatgcaatcaaaagaaacttctacaagtggaaatattttaaggggcaattacaaaaataaatcttaaacactgtgyaagcgctcttcatctaatttgttccattcctcccttacttttgtgggcatacatttcaacgttttcctgtttgcatgtttattttaacaggaactttgattcaataagagatttaaaagctagtcatttggtactctatttgtaaatactttgattcaataaatcaaagaaattttaaaaaatgcaaacaaaattagacttatatgccaaaagaagttaaaaatctttgtagtacacatatgttgatttacaaagtagatttcaaaggttcacatatgtttaaaatcaattcataaaagaaggctatgtcacaaagtctgcaatgttgaagtattcttttgtattcaacatcaacttcattacaaaaaattattttcatcatgtaggtacaaaaatagttgtatatattggcacttcaacttctctttcaatgggtgtaatattatagctagcttctacccaa

SEQ ID NO: 373342 - DNA, 544 bp, Homo sapiens
gtagatttcaaaggttcacatatgtttaaaatcaattcataaaagaaggctatgtcacaaagtctgcaatgttgaagtattcttttgtattcaacatcaacttcattacaaaaaattattttcatcatgtaggtacaaaaatagttgtatatattggcacttcaacttctctttcaatgggtgtaatattatagctagcttctacccaattataaattagggattcatyacaacaaattccaagtacatttccatttctcagattttcttaattagtaggatccttcatttgtctccctactttgctctaccaaatatcatattcagaccatcacttcaaataaattatcttgaattttgaatgttaaattagttgatattaatgttcaaaataatgtcatatgtttcaccttttacctaatgaattttctaaacctttatatagaatacataaattggattaaataatatcatctttatctgaattaactttcttgatattctagttgaaatatctgatgacaccaatatgaaatttgtatta

SEQ ID NO: 373343 - DNA, 569 bp, Homo sapiens
aatcaacacactgtgacactaagcaaagtggatattaaacacaaaagagaaatattttcaaataacaatttaaattcctgtgatgcaattcagtttcctatcattttaccttctgaaccaatgtacaggttgatgaaaccaaatactgagtaattttttggtgaacagatttctgacagcttcaagcatctagaacatgaatgcaaaatgggaagtgaacaacagtagtaaaatctatttatccagcatctagaatggtgcatttgttacaraagctcatggattttgttttgtgagtgaataatatagcaattgatgactaaattgtcagaaattttaggtttataaaagatttgtttctgttttcttctgtaccttaagtctttagtagaattgcaaaagacagaatattagaaccaatgatagaaataattaagactcatcaatatagttattctgacaagtgaaagaaagaaagagaagaatagtcaaagtcatgatgtgctggaaaacagcctggaatcattaggtagaggagaaaataacctttcacagctcaataactcctg

SEQ ID NO: 373344 - DNA, 622 bp, Homo sapiens
taacatattttatcttttatgccatatttttactgtaccttgttttatttagataagtttggatccacaaatactattgtgttacaattgtctacagtattaagtgcagtaacatgctgtacaggtttgtagcctaagaggaataggctatagtatatttgtgtaagtacactctatgatttcacaagaatataatagtaattgcataacgacatcattgcctaacgacacatttagaatatatcactgttcttaagcaatgagtggctgtacttattatgatatggatccttggttctcctccaccccatacccaccgagcaattctgtcactttcttttctttcctttccctttattttatccacacaagtctccttgctgtcctcatatatgctaatcagacttccaactcagagttttgctcttaccattccatttgcttggaattttctctgccagagatttgcatggatggtctgatcgattcttctgtgacattttccctggccactgaatccaatatttcagtatgttctcycccaacagctcctgtatctaacctaatgttatttttctccttatcatttatcttttatttttcttaatttccctttgcttgt

SEQ ID NO: 373345 - DNA, 626 bp, Homo sapiens
tgttggagataattgtttttgttatatcaacaattaagaaacaaagcaaaatcaaagacaattaacaattccaggaaaaataaactgctatactagaaagccataatcccaataagaagtaaacaaagcataacattatttggaacaaattaatataaaacaaaaaaagataactcaattggttttggtgattaaaacattttatttgtgacattagatttatcaatgtggaattatttcgtattctcttcaaattatgctccactagttatgctgttattcagaattttaatattgagtacacttgatattgcaaaaactgttttttaytcgatttaataatgaaatatcctcaagcatagcataattatcccactaaattggaggtttttagaggacagagattctgttttgttaactgctgtatgaatatcaccaaaagcagtatttaccctgacacacagtaggcactgcctaaatatttcttgataatcatgtgacaacacatatctgttattcactttgatagttctgggaaggggaggtgaaaggaaatataggaagataatttgttatatgtattctttggtaagagccataaaaagcataataaacactactgtaaa

SEQ ID NO: 373346 - DNA, 626 bp, Homo sapiens
tgttggagataattgtttttgttatatcaacaattaagaaacaaagcaaaatcaaagacaattaacaattccaggaaaaataaactgctatactagaaagccataatcccaataagaagtaaacaaagcataacattatttggaacaaattaatataaaacaaaaaaagataactcaattggttttggtgattaaaacattttatttgtgacattagatttatcaatgtggaattatttcgtattctcttcaaattatgctccactagttatgctgttattcagaattttaatattgagtacacttgatattgcaaaaactgttttttactcgatttaataatgaaatatcctcaagcatagcataattatcccactaaattggaggtttttagaggacagagattctgttttgttaactgctgtatgaatatcaccaaaagcagtatttaccctgacacacagtaggcactgcmtaaatatttcttgataatcatgtgacaacacatatctgttattcactttgatagttctgggaaggggaggtgaaaggaaatataggaagataatttgttatatgtattctttggtaagagccataaaaagcataataaacactactgtaaa

SEQ ID NO: 373347 - DNA, 558 bp, Homo sapiens
agctcagctcttgtcttctgcacacgtgcaggcccaacaccacatggaagytgccaaggcttgggagttgcacactctacagcaatgccctgagctgtacattgaccccttttagccacaactgcagctggagtggctgggacacaaagaactaggtcctgaggctgtacagagcagcagggccctgggcccagcccacgaaactatttttccctcctaggcctctgggtctgtgatgcaaggggctgccttgtaaatctctgacatgctctagcaacatttttctcattgtcttggctattaacattcagttcttcatttcttttgctaatttctgcagccagctttaatgtctccccagaaaatgggttttcttttcaaccacatggtcgagttgcaaattttccaaactttaatgctccgcttcccttttaaacataagttctaattttgaatcatctcttggtgaatgctcatgatggaacactttcagaatcagccaggtcacatcttgaatgttttgctgcttagaaatttctaccaccagatatcataaat

SEQ ID NO: 373348 - DNA, 503 bp, Homo sapiens
cagctaggtccattttcagccgaaccacctgcacccagcttggtcctcaaccttcccgcctgcacaagatccgattcaacccagtcagtcacaaccctcatgagaaccaggttgcaccccaccttcctattaatacaaagcctgcctctcacatccctcctgtttcactctgctcctgagtrtagccttgcactgcacgtggcattctcctttcttgggctgtgagtaaacgtgactaataatctgctgctaactgcatctgttcattgtcaagtgtcctgtgttcaaccgccttgtactatttataatgagggattccttcttcaccaacagggtgaacagaaaatgttcagagcaatcatcctctgaaaattcatataaatgacagcagaaatacaagaaggagattggatttcaatcctcttggaaacaattgatttggaagtggtctgtggtctaaagattttgacaaaattttaggagcaagtaaagatgatataaat

SEQ ID NO: 373349 - DNA, 553 bp, Homo sapiens
agcgatgccatgtgctgctgctggggaagggaagcagcagcactggggagcaagaaaccctagagctcttctccttggccttgttaaatgtgcttgtttgttgggatgatgcactggctttagagagaagatcaatggcctgaggcagctctagaggcttatttctgttaaactgcttttattctttaatcttacatatagtcacagtatcctttaggtggyaggctggaaaaattgaaatagggttgttggctgggcacagtggctcatgcctataatcccagcactttgggagccttaggtgggtggataacctgagatcgggagtttgagaccagcctagctaacatggagaaactccatgtctattaaaaatacaaaattagccgggcgtggtggtgtatgcctgtaatctcagctactcaggaggctgaggcaggacaatcgcttgaacccaggaggcagaggttgcagtgagctgagattgtgccattgcattccagcctgggtgacagagtaaggctccgtctcaaaaaaaaaaaaaaaaaattat

SEQ ID NO: 373350 - DNA, 462 bp, Homo sapiens
ttcacaatatgcttctgcacaggcgctccaaaattgtgcagacaccctctacagatcccatctttgaacaagccaaactgtcaccgctcattccttgtaagcatggccaggcacatgaaatgagacctgcttctggcaatcaggatttatttaatgaaaatttcaataatgctggaatcataaccttcttttcaagcaaacaagacagcattacagagttatcamatgacacttaattaaaattggcacttgaagattgtttgttggcaatgttttggaaaaatatgaggtctatttgttgtgaaccagcaagcaaagctttgaaataattaataacatacttatgctaacaggcattatctgaattactgaagccaaaataccaacaaaaattattcagtatagaacctgacctgaggctcatctttttcctattaaaaccaatactgaagatctagtttc

SEQ ID NO: 373351 - DNA, 628 bp, Homo sapiens
tgtaatttttcttgatttcatttccctgccttactcagaggtaaccactatctttgactgtttgtttttattcccttgcttttcttcatagaattaccacatacgtatgtatccataaacaacatattgtttagttttgttctttttttggctttatgaaaatgatgttacactgtatatattcccgtgaaatttgcttttctcagaaaacatttctttctaagattcaaataagagtgtctgcggctgctgttcttttattttattgctgcatagtattccattatatgggtaatctatgattaactatcctcctgtcaatgtagatgtagagtgtttacaggatttttttgttatgaatcaccaaaaatataaacctgctgtacatgtttcctgtgattccttaagttatgctgtccaataggataaccactggatacgtggctattgagcatttgaaatgtggcaagttaggattggtatgtactctacatataaaatacacatcagccgttaaagacttagtacaaaaaatgtaaaatatctaattaatatttttcatatattgattgcatgttgaaatgatactttggttgtattgcrtaaaattaactacattaaatttatt

SEQ ID NO: 373352 - DNA, 517 bp, Homo sapiens
gtctatccagtgaagatacaattaaggcagcataatactcgagttaaaaatatccttgyggctctgctctggggatttttctagcttttttttttaatagatggtgttaaaataaaaagaagcaatctaaaggtaagctgcaatcaatgcatgaactatttatttttatttcctcatttagcccatgcccatcacaaccacatccatctgggctgtgtatgacttaataagatgctttaaacagtaaaagattcaaatagaatatggaccctcttgcctgtccaccttccaacaaataaattacctgaatcttacacttcataaacctcccctgcagtgctcagattcaccctggccagcctacacagcaatcaaatgaccaaagatgtgtttttatatataaccattccagaagttaagcaggcagagaggaaaagtccaggagctaggggtaaatgctagagaagcctaaatgaatgaagcagaagttagccatcccagtgggtctgaggttctg

SEQ ID NO: 373353 - DNA, 560 bp, Homo sapiens
agtctgctcctactgaaaaaacaacagtgttttcctgatgtcccctagaggaagtcaagtgaatgatggctattctcaagcttggttttctcatttgtagatatcttggatggtcctggtatgcttcttccagtgctataggatctgctatattcttccttttttcctaaggtgtkgtcaatgttaggcataaaaaaatagacggtgcctggtcagtaagtttatgggtgacatacactatagctagtctctgccccttagcaatcctctatttatatgaaaatggaaacgtttgactgaaccaaatatgccacatcttcaggccttcctcattaacctctgtctctctgtcactaacctcctcctgtccctagagtctaggaatgacaaacctcatagatacatttggctctttagagctgactatgcaccatttgaagtcatgaaaaaaggaaattgctgctccagtgttcactaatgagtgattaaaagcaaaactatgtcctgtgaaagaattcaaaagatttagtaatatataaacccatgtggacattctgtga

SEQ ID NO: 373354 - DNA, 560 bp, Homo sapiens
agtctgctcctactgaaaaaacaacagtgttttcctgatgtcccctagaggaagtcaagtgaatgatggctattctcaagcttggttttctcatttgtagatatcttggatggtcctggtatgcttcttccagtgctataggatctgctatattcttccttttttcctaaggtgttgtcaatgttaggcataaaaaaatagacggtgcctggtcagtaagtttatgggtgacatacactatagctagtctctgccccttagcaatcctctatttatatgaaaatggaaacgtttgactgaamcaaatatgccacatcttcaggccttcctcattaacctctgtctctctgtcactaacctcctcctgtccctagagtctaggaatgacaaacctcatagatacatttggctctttagagctgactatgcaccatttgaagtcatgaaaaaaggaaattgctgctccagtgttcactaatgagtgattaaaagcaaaactatgtcctgtgaaagaattcaaaagatttagtaatatataaacccatgtggacattctgtga

SEQ ID NO: 373355 - DNA, 423 bp, Homo sapiens
atcttgggccttcctcagaataatctagaaatagtaaaataaaatcctctaggaccatcaatcaaataacatgaagactaaaataattcttcatacagcttggaaatcttaaaatagatatgcacgtatctggaaggaagacagggtctcagtcctgcccatcctaattacaatttccattttctagtataattcatgatttctgtatggcaggaggagctccctgacatgtcaccctcagaagctaggctaagcaaaaaggcttgctgtctcttttcagaaacagcaaaggcgtgttcatygtagcatgtaaacattttacactgagtgagttccatttctatccatactcatcacaaatgagcaccacaaaaatactcaaatacatattcacggtgtgcctcccaaatgcgctgtatgaaa

SEQ ID NO: 373356 - DNA, 560 bp, Homo sapiens
tctgtgaagttagctgtcttcaattacttgggtcctttttttggaatgagattatacttggttatacacaatgcttctcaaggctttgcaatacagtatctgcaaaggcaaaggaaaataaacccctaggagctccagtgacayggtgcagagtggcaaggaatctaagcaaatattgaaggtataaaataatgagggtatataatactgtaaaactaagatcctagacaacaatgaatgcatgttacctaaccagcaaataaccttaacaatgtaaagtttatgtatttgttagaaggggagttagaatactgataaaattaaactgcattaagtaaaaggtataagtatacagtaaaagcataatgtcaaagataaaaatttgagattaaccataaacatttataaagaaagtataaaacttgcaaaagagtaaatgaaacaaaataaaacaagaaaacaaaaagcaatttaaaaaaacagcacacaaaaactcaacaaataaaacaaaaagcataaaaggaaaaaaaagcatgtaaaactagaacaaatagaaagca

SEQ ID NO: 373357 - DNA, 560 bp, Homo sapiens
tctgtgaagttagctgtcttcaattacttgggtcctttttttggaatgagattatacttggttatacacaatgcttctcaaggctttgcaatacagtatctgcaaaggcaaaggaaaataaacccctaggagctccagtgacatggtgcagagtggcaaggaatctaagcaaatattgaaggtataaaataatgagggtatataatactgyaaaactaagatcctagacaacaatgaatgcatgttacctaaccagcaaataaccttaacaatgtaaagtttatgtatttgttagaaggggagttagaatactgataaaattaaactgcattaagtaaaaggtataagtatacagtaaaagcataatgtcaaagataaaaatttgagattaaccataaacatttataaagaaagtataaaacttgcaaaagagtaaatgaaacaaaataaaacaagaaaacaaaaagcaatttaaaaaaacagcacacaaaaactcaacaaataaaacaaaaagcataaaaggaaaaaaaagcatgtaaaactagaacaaatagaaagca

SEQ ID NO: 373358 - DNA, 560 bp, Homo sapiens
tctgtgaagttagctgtcttcaattacttgggtcctttttttggaatgagattatacttggttatacacaatgcttctcaaggctttgcaatacagtatctgcaaaggcaaaggaaaataaacccctaggagctccagtgacatggtgcagagtggcaaggaatctaagcaaatattgaaggtataaaataatgagggtatataatactgtaaaactaagatcctagacaacaatgaatgcatgttacctaaccagcaaataaccttaacaatgtaaagtttatgtatttrttagaaggggagttagaatactgataaaattaaactgcattaagtaaaaggtataagtatacagtaaaagcataatgtcaaagataaaaatttgagattaaccataaacatttataaagaaagtataaaacttgcaaaagagtaaatgaaacaaaataaaacaagaaaacaaaaagcaatttaaaaaaacagcacacaaaaactcaacaaataaaacaaaaagcataaaaggaaaaaaaagcatgtaaaactagaacaaatagaaagca

SEQ ID NO: 373359 - DNA, 600 bp, Homo sapiens
ataaacaatctgaaggaatcagaaatctataaagaaaagaaatttacttcttacatttatggggtctgagaagtccaaggtcaaggggccacatctgatgagggccttcttgctggtggggactctgtagagtccgaaggtggcacagggtattatatggcaataggactgagtgtgctagctcaggtgtctcttcctcttcttctaaagtcatcagtcccattgaagctcccatcagagccctcatgacctagtcaccttttaaaggccctacttctcaatactaccacattggggattaaatttcakcatgagttttggaggggacagatattcaaaatagcaaagggaatcaacaaagaagctaatcaagggaagctaagcatgatgggcagtgcagagggccacatatagtccaggattatacatacctttttatatttctggctatttgcccagatgtgtgcatttctaccagcagtgaatagtgacctgggcatgaggagaagaagttgagctgtggcaatgatctatagtcatcctcctttgggactttgctgggaaggtgtgggggcagcacagaaatacaaaaaatttgat

SEQ ID NO: 373360 - DNA, 600 bp, Homo sapiens
ataaacaatctgaaggaatcagaaatctataaagaaaagaaatttacttcttacatttatggggtctgagaagtccaaggtcaaggggccacatctgatgagggccttcttgctggtggggactctgtagagtccgaaggtggcacagggtattatatggcaataggactgagtgtgctagctcaggtgtctcttcctcttcttctaaagtcatcagtcccattgaagctcccatcagagccctcatgacctagtcaccttttaaaggccctacttctcaatactaccacattggggattaaatttcagyatgagttttggaggggacagatattcaaaatagcaaagggaatcaacaaagaagctaatcaagggaagctaagcatgatgggcagtgcagagggccacatatagtccaggattatacatacctttttatatttctggctatttgcccagatgtgtgcatttctaccagcagtgaatagtgacctgggcatgaggagaagaagttgagctgtggcaatgatctatagtcatcctcctttgggactttgctgggaaggtgtgggggcagcacagaaatacaaaaaatttgat

SEQ ID NO: 373361 - DNA, 470 bp, Homo sapiens
gtgtctgaacaagttgagttactgagccagctgctgtggttcttggattgttgatatgtcagctcagctcaaccattcgtattgccacaggaaggtttgcctgatactgaatacccaatgaggggtcattcacacttgctggattaaacttgattaaagtagcttatttgtgacatctgaaatgcctgtctttagaattctatgtaattatagtgatgtttagggacacagggatatccagtagtcatttagtctatgttagctccaggcaagggaatcgcgaatacatcttgagcataaagctctcccactctactgtctccctggtttcctttgtgaactctgttcagctttagtatccccatcttctaatccctgtgatagttgaatgtcctcaatgaggtaaacccggaagattacaggtcttaaatygggctctcctgcaacatggagatagaaattggaaatca

SEQ ID NO: 373362 - DNA, 562 bp, Homo sapiens
tatcatttaggaaccatggtaacacagtaaaatgtgaggagatgcagaaagtttggctgaccatgtcagttcggctactaagtgcagatagtcatactagatgtggtctgaggttgctccctatagcccccttgaggcattcactcacagcagtgctaggtacatacattttctccaggtccccaaatcctgaaaatgcacctttttggatgactcgaagcttggtgaggacaaacctcctgcaaagagagtagaaataaaatatcacaacctatccattaataagtaattgagttgctaatgtattcatatcagcaaacagttaccatatactaagtgcttgccataaagtaatgttgaaattgcttttacattctctcttttcatcctgtctacaactagtgatactgaaactattagtctttccattttgcataaggaaactagagtttagggagaacaaaaaatttacccagggtcayatggctgatacatgacagagatggaatatgaaccttgcttgttcccactaccgtatgttgccttctgcagccctgtgtga

SEQ ID NO: 373363 - DNA, 588 bp, Homo sapiens
aatgttttagttcatttgtgttgctataaaggaatacttgaaactaagtaatttataaagaaaaagtttatttcactcatagttctgcaggctgtacaagaaacacggcatcagcatctgcttctggtgagggcctcagaaatcttccactcatggcagtaggggaaggaggacaggcatcacgtggcaacggatgaaggatgaggaagggaagggagatgctaggctcttttcaacaatcagctcttgtgaaaactaatagagtgggaattcactcattactgcaaggatggcaccaagcygctcatgagggatctgcccccgtgacacagtcacctcccactaggtcacatctccaacaatggatatttcaatatgagatttgcaggaaggaaatataagtgggttgtcataatggctggaaaccccaccaagtcaataaagaacactaaaaacatattgaccaagaactaggttacgaagaaaattagtattaaaaaattactttctttgatgatgatgctattaaattacttagaaatcagtaataaatataattaactcttctcccccaatacacatagaccc

SEQ ID NO: 373364 - DNA, 588 bp, Homo sapiens
aatgttttagttcatttgtgttgctataaaggaatacttgaaactaagtaatttataaagaaaaagtttatttcactcatagttctgcaggctgtacaagaaacacggcatcagcatctgcttctggtgagggcctcagaaatcttccactcatggcagtaggggaaggaggacaggcatcacgtggcaacggatgaaggatgaggaagggaagggagatgctaggctcttttcaacaatcagctcttgtgaaaactaatagagtgggaattcactcattactgcaaggatggcaccaagctgctcatgagggatctgcccccgtgacacagtcacctcccactaggtcacrtctccaacaatggatatttcaatatgagatttgcaggaaggaaatataagtgggttgtcataatggctggaaaccccaccaagtcaataaagaacactaaaaacatattgaccaagaactaggttacgaagaaaattagtattaaaaaattactttctttgatgatgatgctattaaattacttagaaatcagtaataaatataattaactcttctcccccaatacacatagaccc

SEQ ID NO: 373365 - DNA, 588 bp, Homo sapiens
aatgttttagttcatttgtgttgctataaaggaatacttgaaactaagtaatttataaagaaaaagtttatttcactcatagttctgcaggctgtacaagaaacacggcatcagcatctgcttctggtgagggcctcagaaatcttccactcatggcagtaggggaaggaggacaggcatcacgtggcaacggatgaaggatgaggaagggaagggagatgctaggctcttttcaacaatcagctcttgtgaaaactaatagagtgggaattcactcattactgcaaggatggcaccaagctgctcatgagggatctgcccccgtgacacagtcacctcccactaggtcacatctccaacaatggatatttcaatatgagatttgcaggaaggaaatataagtgggttgtcataatggctggaaaccccaccaagtcaataaagaacactaaaaacatattgaccaagaactaggttacraagaaaattagtattaaaaaattactttctttgatgatgatgctattaaattacttagaaatcagtaataaatataattaactcttctcccccaatacacatagaccc

SEQ ID NO: 373366 - DNA, 588 bp, Homo sapiens
aatgttttagttcatttgtgttgctataaaggaatacttgaaactaagtaatttataaagaaaaagtttatttcactcatagttctgcaggctgtacaagaaacacggcatcagcatctgcttctggtgagggcctcagaaatcttccactcatggcagtaggggaaggaggacaggcatcacgtggcaacggatgaaggatgaggaagggaagggagatgctaggctcttttcaacaatcagctcttgtgaaaactaatagagtgggaattcactcattactgcaaggatggcaccaagctgctcatgagggatctgcccccgtgacacagtcacctcccactaggtcacatctccaacaatggatatttcaatatgagatttgcaggaaggaaatataagtgggttgtcataatggctggaaaccccaccaagtcaataaagaacactaaaaacatattgaccaagaactaggttacgaagaaaattagtattaaaaaattactttctttgatgatgatgcwattaaattacttagaaatcagtaataaatataattaactcttctcccccaatacacatagaccc

SEQ ID NO: 373367 - DNA, 597 bp, Homo sapiens
ccaaacaattagaggcatgaaagatggcacttaactacagatataacatatttaaattagagaactctacaattttataacattacttttttttttcttttgagacagtcttgctctgtcacccaggctggagtgcagtggcataatcatggcttattgcagccttgacttcctgggcttaattgatcctgccccctcaacctctcaaacagctgagactgcaggcatgcaccaccacatctggctgacttttgtttttgtttgggtttttttgggagagacagggttttaccatrttgcccaggctggtcttcaactccttggctggagtgaaccacctgtctctatttctcaaagtgctgggattacaggcatgagacaccacagctagactaacagtagatttgaaaaatcagaaaacatggataatttttacagaaatatatgcttacaaaaattgattcatgaagatacagaaaagtgaatagacctataattattaacaaattgtgttggtaatttaacagctgtcccctaaaaaaataaggtcagtaccatgtgatgttagaagtaaattccaccccttcaaaggaacaa

SEQ ID NO: 373368 - DNA, 597 bp, Homo sapiens
ccaaacaattagaggcatgaaagatggcacttaactacagatataacatatttaaattagagaactctacaattttataacattacttttttttttcttttgagacagtcttgctctgtcacccaggctggagtgcagtggcataatcatggcttattgcagccttgacttcctgggcttaattgatcctgccccctcaacctctcaaacagctgagactgcaggcatgcaccaccacatctggctgacttttgtttttgtttgggtttttttgggagagacagggttttaccatattgcccaggctggtcttcaactccttggctggagtgaaccacctgtctctatttctcaaagtgctgggattacaggcatgagacaccacasctagactaacagtagatttgaaaaatcagaaaacatggataatttttacagaaatatatgcttacaaaaattgattcatgaagatacagaaaagtgaatagacctataattattaacaaattgtgttggtaatttaacagctgtcccctaaaaaaataaggtcagtaccatgtgatgttagaagtaaattccaccccttcaaaggaacaa

SEQ ID NO: 373369 - DNA, 623 bp, Homo sapiens
tatcagcatttttgtcaaagccattcaacaagtctttaggaagttccaaactttcccacattttcctgtcttctgcctgtttccaacctctgcctgttacccagttccaaagtcacttccacattttcaggtgtgttttcagcaatgccccactctactggtacmaatttactgttttagtccactttcatgctgctgataaagacatttctgagactgggcaatttacaaaagaaagagatttaatggacttacagttccatgtggctgaggaggcctcacaatcatggtggaaagcaaggaggagcaagtcacatcttaaatggatggtggcaggcaaagagagagcttgtgcaggggaactcctctttttaaaaccatccgatctcgtgagacttattcactatcatgagaacagcacgggaaagacctgccctcatgattcaattacctcccaccaggtccctgccatactagccaaaccatatcagctagtaaaagaagtaatgctctccaaccctttttatgtggttagtgtaacattggtaacaaaagtagacagggacaataaaaggaaataatatagggacaatgtgcatttagcagagtctaaataaataata

SEQ ID NO: 373370 - DNA, 588 bp, Homo sapiens
gaaaaaaagacacagtgggcctctttttactctgaactcctaaagtaaagtctaaactcttcatctgagcacttacatatgtaaaatgctggactcatctttaatacagaacttatgtattattttgtctcccatatatagtaagctgaagattagcactgcactcttctcctgtacccagtcagggttggcgacatagtttggatgtgtgtcccctctaaatctcacatggaaacataatccccattgttggaggtggggcctggtgggaggtatttggatcattggggtggatccttcatggcttggtgctgttctcttgatagtcagtgacttcccgtgaactcctgttgttgtaaagtgtggtatctccccactaccttgctcctgctctgccacgtgggattcctgttcctccttcaactttcattatgagtaaaagctccctgaggcctccgcagaagccaagcagatgccagcaccacacacttcctgtaragcctgcagaaccatgacccaattaaacctcttttccttataaattacccagtcttaggtattttttaatagcaatgcaagaacagccta

SEQ ID NO: 373371 - DNA, 241 bp, Homo sapiens
aatatgtaatactttcccatctattttaattttctttcaataattattttatagttttcaagacataagttttgtactycttttgttaaatctattcctaagttcattttttataatactatcatgaatgaaatttttctcttatttttaatttgttcattgcaagtacagagaactacaattgattttggtatattgattttgtattctggagacttgctgaactcatttattagttcta

SEQ ID NO: 373372 - DNA, 571 bp, Homo sapiens
ttatttctagaaatgtgccaagtacagtgcttgagtaggggagagggtagttgaagcatttccatgtcagatctttacattcaagataatacagcaagaaataatgcagttcttttaaaaatttgtggaggtttaggtagaaagaaacaaaatgtggtacagagaaacttagtgacgtaaaataaacggcttctcaaatctcygtaaactgaatatagactctgccttagtttgcaattgagaaataatgtatttcagcaaataattgattatttatttatttgtttttattgcctgcagtatggactagctcagatcacactatgcttagagggtctttggattcaacatcctatgtttctgacttacttaaacatggtgttaacttagtcttttatgcataaaagcaaataggctccaattagatataaataacttttcctagaattaacttgaatttatcatcttgtttgttggtcttcaactcgtctttcttttaaagaaagaaaatagcaaatgaataaaggactgagtataaataataaatattaccaaaatgttttaaataacc

SEQ ID NO: 373373 - DNA, 550 bp, Homo sapiens
gtataacaaattatcttttcaatggtagttgtctcttgatctgttggcctcaccattaaacaggaatagtaataaagactaaattttaaaacaggattaaagatgcatatatatctcttaaaaaattctggagatgatcaacaccaaaatcagtatagtcacttctgtgacaagaagtacataattgtatctaaagtatcttatattaaaaaaaaacaaaactaagcaattatgaccaagtgttaagatttggcaaagctaagtggtgtcttatgggcatttattataatattctctatacttcatgcttgaaatatttcataattaattttcaagattgaaattctcaccagggcatatcccaagcatcatttattaactcaytattaattcatttgtttttaaacagctatttaaaagtatcatcacaccattcttgtcagatagtacctttacctccccataaagtgcctgaatgatttctgtaaagattaaataattcaccactatgacactaaaaaaaatttttttgtcactatactgcaggtta

SEQ ID NO: 373374 - DNA, 559 bp, Homo sapiens
aactgggcagtcataagaaaatcactcaatccctctggatctcagttttctcctctgtaaaatgggcatatgactatctgctctgccttctgagcagcttattaggaaggccaaaggagggaatatttaagaggtrttagggacaactttcaagtgcaatgtcaggagtatgaagagaagactctctacctgcctatctctccttcctgagacctcaggcctgaaatacctttaaaaggaggcaagccttaatgcttaacaacaagatgacatttgaagtgcaaacactgcagggagaagatatgcaagggcacacttatacctaggagtgagtgactatatcagcgatgtctctggtagccaagtttgatggaggaaggagagagagagatagaaagaaagaaaaagagagagagagaaagagagctcctgcagttggccaacagatagaggatatgagtgcatgggggaaggcaatgatagggaaaagcttaaattccagaataaccttcaataattttacagtttggctggagatggttcctgccattcagggatt

SEQ ID NO: 373375 - DNA, 533 bp, Homo sapiens
aacatgtgggaaaatggtagattccaactaaaagaagccttgtgtagcagaaaggaccagactaccttgggtttaaatcctagcttcaccacataaggatactctgatgttgcttggtttcttaccttttgtgaatgtcagtatccctgtctatacagtgtgarttaactgagatgtagtatttaaaacacctgtcccagaataggtgtggaataattgctgattttaaaaatcaactttgttgaagtataatttgacaaataataaaatgcattcattttaactcttccacctgttactactaccacaatcaagatataaaatatcttcaccacgttaaaaaagtttccttgtctgccttcccagacaatccctaacaccaccctgggaaccaggcaactaatctttctgttaccatagattagattttcttcttttttgaggttcatataaatagaatcatatggtataccttctgtgtctggcttctttgcttactataatgcttttgagagatttatccatgttgtttt

SEQ ID NO: 373376 - DNA, 605 bp, Homo sapiens
aaggctagctctaggtcaattccttacttcagtgtacgtattagaggacaaagttgcataaaactaagaaaaggaaagaaagttcctgccaggtgttaggattttcctccacctaaggaatgagtatagttaagagctttagaagctctctcaaatacccagtcttaagaagattctgtcttctgcacactcattggtagggcttgacttggaccatcttagagtttggctttgcaatcttcttggaaaggtgtactgaggtgagaagagaaatgttgctttgtctattagattttaaaaaaggaaaattatttcaggtcagtgtgttaatcactgaagagtagataaaatgtcaagtgaattacaactcacatactgttagaatgagagagcaattacctttatttttgcttccttaaaaagactgaatcaaggttatctaagtaaatggcagaacagggatgaaatggactgttcaactaagtatctctaattcaccttacaatcttscaagtttgcgtattaactttaatgattacatgaggtgtaggtggatggattattggacttcattgactgcaattgcttaatccatcaacatgtca

SEQ ID NO: 373377 - DNA, 533 bp, Homo sapiens
aacatgtgggaaaatggtagattccaactaaaagaagccttgtgtagcagaaaggaccagactaccttgggtttaaatcctagcttcaccacataaggatactctgatgttgcttggtttcttaccttttgtgaatgtcagtatccctgtctatacagtgtgagttaactgagatgtagtatttaaaacacctgtcccagaataggtgtggaataattgctgattttaaaaatcaactttgttgaagtataatttgacaaataataaaatgcattcattttaactcttccacctgttactactaccacaatcaagatataaaatatcttcaccacgttaaaaaagtttccttgtctgccttcccagacaatccctaacaccacmctgggaaccaggcaactaatctttctgttaccatagattagattttcttcttttttgaggttcatataaatagaatcatatggtataccttctgtgtctggcttctttgcttactataatgcttttgagagatttatccatgttgtttt

SEQ ID NO: 373378 - DNA, 533 bp, Homo sapiens
aacatgtgggaaaatggtagattccaactaaaagaagccttgtgtagcagaaaggaccagactaccttgggtttaaatcctagcttcaccacataaggatactctgatgttgcttggtttcttaccttttgtgaatgtcagtatccctgtctatacagtgtgagttaactgagatgtagtatttaaaacacctgtcccagaataggtgtggaataattgctgattttaaaaatcaactttgttgaagtataatttgacaaataataaaatgcattcattttaactcttccacctgttactactaccacaatcaagatataaaatatcttcaccacgttaaaaaagtttccttgtctgccttcccagacaatccctaacaccaccctgggaaccaggcaactaatctttctgttaccatagattagattttcttcttttytgaggttcatataaatagaatcatatggtataccttctgtgtctggcttctttgcttactataatgcttttgagagatttatccatgttgtttt

SEQ ID NO: 373379 - DNA, 593 bp, Homo sapiens
aattctcatatattatttctttgatgtcttattggttttggattgctagtattttattatggattctgcaactatcttcatcagggatattggcctacgttttcttttttttgctatgtccttgtctggtatctgagcaatgctggcctatgagaatgagttagaaagagttccttctgcttcaattttcagaatcatttgagaagaattggtattaattatttttcaaaggttctgtagaattcagcagtgaagccatctggtcctgggcttttctttgttgggagattttcaattacctgttcaaacttgtcacttattattggtctattcagattttctatttattcttggttcaatcttggtgggttgtatttgtctaggactttatscaggttttcaaatttattggtgtatacttgttcatagcaatctttaatgatcctttgtatttttttagtaaacattgtaatgttactactactgctactgtcattgtgtatgtttttcatttctgattttatttatttggttattctcccattttttcttagtctagctaatggtttgttcatttggcttatcatttcaga

SEQ ID NO: 373380 - DNA, 619 bp, Homo sapiens
ctctactttgcaagcacattaaagtttgagaagtgttacttggttgactctagaaaatggaagccaaagtgatttatactgcaccatccctaaaacactcagggactggaggcactggtatctctaggagtggggcaggggtggaaatcgggtaaaatggataaaataaagaggattggtggaaagtatatttaaaaggcagccagactttcccctcagaacagtcakgggagtgcccctacccacccaagcaaaaccccaaagaattattctttagagagcataaaatagggagtttttggacttgaggatgccaggtgccacttacgactgttggatgctgagaccctagttcttttcccaaccaccagaatgctggtagtcaggacttcatcctccagtaggaatttggaagaatcttctccaggaaattcaaccagcccaagtcaagacataaagattctgatgcagcaattccccaacaaacagcctagctgtttctttggctgaggttcttaaatctgctgctgcggctattgttgctcttcttcctccagaatcttaccccaaacatctgcttccagagccactttgtaattttcctatctgactagcataa

SEQ ID NO: 373381 - DNA, 619 bp, Homo sapiens
ctctactttgcaagcacattaaagtttgagaagtgttacttggttgactctagaaaatggaagccaaagtgatttatactgcaccatccctaaaacactcagggactggaggcactggtatctctaggagtggggcaggggtggaaatcgggtaaaatggataaaataaagaggattggtggaaagtatatttaaaaggcagccagactttcccctcagaacagtcatgggagtgcccctacccacccaagcaaaaccccaaagaattattctttagagagcataaaatagggagtttttggacttgaggatgccaggtgccacttaygactgttggatgctgagaccctagttcttttcccaaccaccagaatgctggtagtcaggacttcatcctccagtaggaatttggaagaatcttctccaggaaattcaaccagcccaagtcaagacataaagattctgatgcagcaattccccaacaaacagcctagctgtttctttggctgaggttcttaaatctgctgctgcggctattgttgctcttcttcctccagaatcttaccccaaacatctgcttccagagccactttgtaattttcctatctgactagcataa

SEQ ID NO: 373382 - DNA, 619 bp, Homo sapiens
ctctactttgcaagcacattaaagtttgagaagtgttacttggttgactctagaaaatggaagccaaagtgatttatactgcaccatccctaaaacactcagggactggaggcactggtatctctaggagtggggcaggggtggaaatcgggtaaaatggataaaataaagaggattggtggaaagtatatttaaaaggcagccagactttcccctcagaacagtcatgggagtgcccctacccacccaagcaaaaccccaaagaattattctttagagagcataaaatagggagtttttggacttgaggatgccaggtgccacttacgactgttggatgctgagaccctagttcttttcccaaccaccagaatgctggtagtcaggacttcatcctccagtaggaatttggaagaatcttctccaggaaattcaaccagcccaagtcaagacataaagattctgatgcagcaattccccaacaaacagcctagctgtttctttggctgagrttcttaaatctgctgctgcggctattgttgctcttcttcctccagaatcttaccccaaacatctgcttccagagccactttgtaattttcctatctgactagcataa

SEQ ID NO: 373383 - DNA, 486 bp, Homo sapiens
aaataacagaactattcagcccaagggaaacatgctcactctctaaatcccacaagtgagatcagaggagcgcaaggattacacagctgctggaatctgacgcctagagaaagcctattggtttggggaagtttggtgcctgaagatgcttgtaaaatcaaagcatttgagaattgaaaacatctcagcgtcattttacatcaaactttcagcaatctactgatgagttttctctcaatatcctcaatttgtkgatctttctgttgcatcgaaacagttaaacttttgaggtccctatttcttagaagttttcatcaagcttgccattagaaagatacaaaaatgggctcagctgtgcattcttgatggtttctgacacaggactctgtgataactttatgttgactcttgctgaaaaaggtctgagagatgagatgcaaaaaagggctcatgtcactctgaagactaaaagtataattgaattca

SEQ ID NO: 373384 - DNA, 486 bp, Homo sapiens
aaataacagaactattcagcccaagggaaacatgctcactctctaaatcccacaagtgagatcagaggagcgcaaggattacacagctgctggaatctgacgcctagagaaagcctattggtttggggaagtttggtgcctgaagatgcttgtaaaatcaaagcatttgagaattgaaaacatctcagcgtcattttacatcaaactttcagcaatctactgatgagttttctctcaatatcctcaatttgtggatctttctgttgcatcgaaacagttaaacttttgaggtccctatttcttagaagttttcatcaagcttgccattagaaagatacaaaaatgggctcagctgtgcattcttsatggtttctgacacaggactctgtgataactttatgttgactcttgctgaaaaaggtctgagagatgagatgcaaaaaagggctcatgtcactctgaagactaaaagtataattgaattca

SEQ ID NO: 373385 - DNA, 596 bp, Homo sapiens
agaggcaagtattatcacgtaagtcaagagaattgaatgatgtgcctagagtatagaatattcaacttttaactcagtagaccttgtttctagtcaacgtctctttctttctgtataaattaatggattctggaatgacacacaggaattttcttaaaacaaacacataaaaaagcaaggaaaataagaaagctatccgatcctatactagttcactgcaggagaaagtaataatcatcttttataagaattctttattcartactgaggagcagagcaaataaacagatgtaattcctcctgatttatcgaatcatttgtactacctgtaattgagcgtccagaatacacatcgtattgaaccagacacactaaggtgtacaaaggaaattttcactacagttgaggaaataagacacacatgaaaaattaaacgcaaggcaagattaagtgtgaaatgaactgcaccagtgtttgaatgaaagcaagtttaaataaagacggagtggtaagggaagacttcatgaaagaggcaacctttgagcaagattataataaggctgaatttcaagaaacaaagaataaactgagaatag

SEQ ID NO: 373386 - DNA, 559 bp, Homo sapiens
aagaaaccccatatcgttggcaatcaatgcctatttccttctccccctagccaatggcaaccagtaatttacyttttgtttctatatatttgcccattctgggcatttcatgtaaaataatcatatacaatatgttctattacctctgtttttcacttagcataatgtcttcaagtttcatctatgttatatcatttatcaggacttcattccttttaatggccaagtggtattccattgtatgaccgtactacattatgtttattcattcattcattgatgaatatttgggtgttttcaaattttgactattgtgaatgatgcttctatgaatatccatttttgtatggatgcatgtttttaatactcttgaataaatacatatgagtagtatttctggattatatgggaactcaatgtttaactttttgaggaactatcaaagtgtttgctaatgcagctacattaatttacatttctactaccaatgtgagagcattccaatttatcttcatcctcatcaacacttaatattgtctgtctttttaattacagtcat

SEQ ID NO: 373387 - DNA, 632 bp, Homo sapiens
accagtaatttaccttttgtttctatatatttgcccattctgggcatttcatgtaaaataatcatatacaatatgttctattacctctgtttttcacttagcataatgtcttcaagtttcatctatgttatatcatttatcaggacttcattccttttaatggccaagtggtattccattgtatgaccgtactacattatgtttattcattcattcattgatgaatatttgggtgttttcaaattttgactattgtgaatgatgcttctatgaatatccatttttgtatggatgcatgtttttaatactcttgaataaatacatatgagtagtatttctggattatatgggaactcaatgtttaactttytgaggaactatcaaagtgtttgctaatgcagctacattaatttacatttctactaccaatgtgagagcattccaatttatcttcatcctcatcaacacttaatattgtctgtctttttaattacagtcatcctagtgaatgtaaagtggcatttcattgtgattattttatctgcatttccctaatgactaatgatattgagcatcttttcatatgtctattggctatttgtatatctttactggagaaatatattttcaaa

SEQ ID NO: 373388 - DNA, 582 bp, Homo sapiens
caaaataatgaaaactaataatttgttagctgggaaatcctgaagaaaaattttacaaaaaggaaacagaacataaataataaaggaaatgcaacagaaatggcaaaatgtctacaatatctgcgtaaagacagtaaactattcttctcccctcttaaattatttaaatatgtatttggcagttgaaagcaaaaagaataaccttatctgatgcaatttttaatgtttgcaaataaaatgcctatgacaattacaacatggagggaggagcttaatggtggtggcaaggtttctgtattaccattgaagtaataaaatattaattctaagtggattctaaaagtttaatccctagagcaactacttaaaaatttatttgaagatatgtagtcaaatacaatttgagagaaatatatttaaataatccaaaagaaggaagaaaggaggaaactaatgaaatatagagtaaacaaacaggaaacaaattagaaagcratagacctaaatctaaagatattaataattatgtgtaaatgatctgaagacaccagttacaacaaagatattcaactatgtgctatg

SEQ ID NO: 373389 - DNA, 554 bp, Homo sapiens
ttagatgtacattagaatcatcaagggagctttaaaaaatgattaatgcttagacctcgtcctggamaaatggaataaaaatatctggaagtgatacttgggtgtgtacattatttttaaagttctccaggggattctaaagtgcagtctaagaagagaaccactcaacgtcatttccttgttattcccagggactcaaatcccctcttcccattcagagatctaaccagtctaacactggcctttcatttttcaccaggagccagtagaatcatcagcctctccttttcgctttgagtaagcgggactcaaggctgctttgaccattaactctcagaatcacagaaggttgggttaggaaggaacttaagtcatgtaacaaggggggtgctctgaagggcaaagctgagtggaacccaaattttctagcactgttgcagttacagttctggttacctgatttacttcctttccttttatctgtgctgagtgagcctgaagaactgagaattgggaggatcctcaacttttttaatgtgtttgcaacaattctc

SEQ ID NO: 373390 - DNA, 609 bp, Homo sapiens
tcaaaaggaactagaaattattagaacaaagtaaagaaacacttctaaattagtgatttcagaaagtagtccgtatttgacggtctcaacttcaaagacagtaccaggtgttagggttgggtagggggatgcctttggccagacgagggttgggggcaggtgaacagggtacagtcatggaaaagtccttcaatgagaaatttagacatcttattccgatctaacccaattctgtctctagttattactattataatttattgggtgtttaccgtttatcagccactttacctacatactctgtaatccttttgacatgcttgtgaggttggtattttggtctccacattaataaatggtcccacctgtatgaggraccaactgtggctgacagaagggctcacacactttcttctaccctccctgcctcccgtgccatattgagcacccctctgggccttggattctttgttgcaaaataaggggatacgatgagatcatttgtcaagtcttttccagaacagtgcaaggtgccttcatcctcaagcacagaagctctgcagaagacaattttcagagatgagtctctcctttcctcatcttctagga

SEQ ID NO: 373391 - DNA, 538 bp, Homo sapiens
tccaggggattctaaagtgcagtctaagaagagaaccactcaacgtcatttccttgttattcccagggactcaaatcccctcttcccattcagagatctaaccagtctaacactggcctttcatttttcaycaggagccagtagaatcatcagcctctccttttcgctttgagtaagcgggactcaaggctgctttgaccattaactctcagaatcacagaaggttgggttaggaaggaacttaagtcatgtaacaaggggggtgctctgaagggcaaagctgagtggaacccaaattttctagcactgttgcagttacagttctggttacctgatttacttcctttccttttatctgtgctgagtgagcctgaagaactgagaattgggaggatcctcaacttttttaatgtgtttgcaacaattctcattcaataaatctctttctctaaaagtccctctgttaagttaacttttctttccccagtgatctgggggtggaggctggagtgtcagactagtgttctcatttctatat

SEQ ID NO: 373392 - DNA, 554 bp, Homo sapiens
ttagatgtacattagaatcatcaagggagctttaaaaaatgattaatgcttagacctcgtcctggaaaaatggaataaaaatatctggaagtgatacttgggtgtgtacattatttttaaagttctccaggggattctaaagtgcagtctaagaagagaaccactcaacgtcatttccttgttattcccagggactcaaatcccctcttcccattcagagatctaaccagtctaacactggcctttcatttttcaccaggagccagtagaatcatcagcctctccttttcgctttgagtaagcgggactcaaggctgctttgaccattaactctcagaatcacagaaggttgggytaggaaggaacttaagtcatgtaacaaggggggtgctctgaagggcaaagctgagtggaacccaaattttctagcactgttgcagttacagttctggttacctgatttacttcctttccttttatctgtgctgagtgagcctgaagaactgagaattgggaggatcctcaacttttttaatgtgtttgcaacaattctc

SEQ ID NO: 373393 - DNA, 563 bp, Homo sapiens
gttatcatgaatatttcaaatgaattttatgtggttcatatttatggtttgggagctatttcacattttggcttattgcygcctcatctgcatataccatatttcagctgatgttgattggtctcatttgcatattcatcatgctcctatttccaaagatattttgttataaactagctttccccccacctccagtgttataataacacatagatgtgtttttaaattgaactcatttccatacataatttttctggttaccataaatcaccacattgtcacctactccccccaccctattcaatgtaatcttcacactttataccaagctgacatatggctccgaagtaattaaagacaatgtaaacagtttacagtgcactttgcaaagccacttcatgttgcagagagtttaatgatttcttttttccccccacaaagtctcaaagcaatgaagaatagggaggtttgagatagtgatgcagataaaagctaaggcatgaacagtggccatttcatttctaatgcacaaacttctattcctggttcttaaaaaaaagaaa

SEQ ID NO: 373394 - DNA, 627 bp, Homo sapiens
attggagtcctaaaactcagcaaagagaaaaatcccagcctaactattacatttccattcacaaaactgcaactaggtgtgaccaaagtgcttcagggtaatgtatatgcattattataagacagtgaagttgtgtaagggaaatgccatttttttccctagtagaatacacaaatataacacacacaatagaatacacacacaatagaacacggaaatatttatgatgaaacaataatgtctaggacttgttttaaaataatgcagtagaggaggatttggggaaagttggtaaacctagatgaaacaagwttaaccatttactgataattattgaagctgggtcttaggtacattggggttattatgttatttgctgtacattttttaatatgttaaaaatttcaaaacaaaatgctaaacctataaagatgcattgataggtagagaaacccatgtctttgaagtctttaagcagaagtagcagatcactttgtgagtatattaaagagagtgttagatgtgaagatccctgcaaccacttgaaccattgctgactgctatttaatttttattttggagagaaaaatttcctaatagttaactaagtaacaaagacagtaagac

SEQ ID NO: 373395 - DNA, 627 bp, Homo sapiens
attggagtcctaaaactcagcaaagagaaaaatcccagcctaactattacatttccattcacaaaactgcaactaggtgtgaccaaagtgcttcagggtaatgtatatgcattattataagacagtgaagttgtgtaagggaaatgccatttttttccctagtagaatacacaaatataacacacacaatagaatacacacacaatagaacacggaaatatttatgatgaaacaataatgtctaggacttgttttaaaataatgcagtagaggaggatttggggaaagttggtaaacctagatgaaacaagtttaaccatttactgataattattgaagctgggtcttaggtacattggggttattatgttatttgctgtacattttttaatatgttaaaaatttcaaaacaaaatgctaaacctataaagatgcattgataggtagagaaacccatgtctttgaagtctttaagcagaagtagcagatcactttgtgagtatattaaagagagtgttagatgwgaagatccctgcaaccacttgaaccattgctgactgctatttaatttttattttggagagaaaaatttcctaatagttaactaagtaacaaagacagtaagac

SEQ ID NO: 373396 - DNA, 618 bp, Homo sapiens
ttttcttttaggtatatacccaataatggaatcgttaggtcaaatagtacttgtgttttaaattatttgaaaaatcaccagccttctttccacagtggttgaactaatttgcattcccaccagcagtgtatgagtgttcccttttctccacagcatcaccagcatctgtgtttttttgacgttttaataatagccattctgactgttgtgaggctgtatctcatgtggctttgatttccatttctataatgattagtgattttgagcatttttttttttttgagacggagtctcgctctgtcccccargctggagtgcagtggcatgatctcggctcactgcaagctctgcctcccaggttcatgccatactcctacctcagcctcccaagtagctgggattacaggtgcccacgaccatgcctggctaatttctttttgtatttttagtagagatggagtttcaccttgttagccaggatagtctcaatctcctgagctcagtgatccacccgcctcggcctcccaaagtgatgggattacaggtgtgagccactgcgcctggccgattttgagcattttttataggcttgtttggccacatgtatgtctttttttg

SEQ ID NO: 373397 - DNA, 366 bp, Homo sapiens
ctttttcttggttttgagtttaaatgcattttatttttagacaacctacatgacacatttttcttaaaaacaatgcatccactccatgcacccacagtcaaaataaatgaagagctcaagatgacacccattcttaagtgcacaggaaacatactccagaatagaacatatgtggagtgggaycaaaatggctgactagaagcagtggtgattggaggctcccacagaaaagaaccaaacaagtgtgcaaatcctgcataggcaaccaaagtgtccaggtcctgacatcaggactgactaggcagctggcatgacccatggagaggatggaagagcagggtggtgctgtgacccaactgagagcca

SEQ ID NO: 373398 - DNA, 549 bp, Homo sapiens
atcaggactgactaggcagctggcatgacccatggagaggatggaagagcagggtggtgctgtgacccaactgagagccacatggggcagggacaccttgacccttagccaacggaagcagtgagtgagcatgctaccgagcctggaaaaccatgtgtttttttctcagaactgtgcaacccatggattggaagattccayttgtgagctagaaccagaaataccatttgacccagcaacctcattactgggtatatacccaaaggattataaatcattctaatataaagacacatgcacacgtatgtttattgcagcactactcacaatagcaaagacatggaaccaacccaaatgcccatcaattatagacgggataaagaaaatgtagtccacatacatcatggagtactatgccgccccaaaaaggattgagatcacgtcctttgcaaagacatagatgaaatcggaagacattatcctcagcaaactaatacaggaaccaaaaaccaaacaccacatgttctcactcatatgttggagctgaac

SEQ ID NO: 373399 - DNA, 499 bp, Homo sapiens
tgtgcattgtgttgtactacacatacattgctgcataccataacacttattatcacagtgacttagaacaacatttgtctataaatggaataaaatttgtaaacttaatatttgatttttaataaagaattgtctttgaatttgtaaatttaataaatttcatatcaaataataacaataaaactcaacacaacctttctttttgaaatagcagctttcaactttttcattaaaagcagatgatttgagtcattaaaaataaatttaaaaggagcaattctattccttaagatttaattactaaaaaccaaagtataattattttacttaaagattcatagcatagaaggtggcaataaatagatctaaaagatgagyatgtgtaactttaccttaagagctggaaaatacgattcacactattctctcttttcctggatgttggatgctaagggcagtgctcctatcagtgtggtcttacagaatgttacaggaggaa

SEQ ID NO: 373400 - DNA, 594 bp, Homo sapiens
tttgttttatccataatgagaatcccattatgcatatattcatatgcataatgttttttcacaggtctctgaggttttgtccatttttcttcttctatttcttatattgaataatttcacttgatctaagtttgctaattctttctactgccactttgaatgtgttgttaaacatgcttcagtttttgttattttcagattttttatttgagcttttgtatatttgagccccagaatatttatttttaaaagtaatttctatttattgatattttctatttgatgagacattgttcttatacttttctttaattctttagtcatgataacatttagttctttgaacatatttacaacagctgatttaaactccttgtctagtaagtctaacatctgtatttcttatagactgtttccattgactttttttctgtgtatgggccatacatatctgtttctttaagtgtcataatttcttattttgaactgtatattttacataatataatgtgtcaactctggaaataagatatctctctccccaaagcttacttttgytgcttgtttaataactttctgggacacatgctgtaa

SEQ ID NO: 373401 - DNA, 585 bp, Homo sapiens
aaagaggaatcagactagggcgagttaatgctacaaagctaactgttcttattaagatttaggtggtttttttgtttgtttttcataagtattctttctaagtatcatgcccacaacctgggtgagaggatctgcacgcaaaaattcagcataactgacatggtttggctttgtgccctcactcaactctcatcttacattgtaatcccataatccccacatgttgtgggagagacctggtgagaggtaattgaatcatgggggcagtttccccctatactgttctcatgatagtgggcgaattctcatgaaatctgatggttttataaggggcttcccccttcactygtcactgattctctctcctgccactctgtgaagaggtgccttctgccatgattataagtttcctgatacctccccagccatgctgaactgtgagtcaactaacctctttcctttataaattacccagtcttgggtgtgtctttattagcagcatgagaatggactaatacaataacacactatacccatgtaacaaacctacacatgtaccctcatatctaaaataaaagttgggat

SEQ ID NO: 373402 - DNA, 585 bp, Homo sapiens
aaagaggaatcagactagggcgagttaatgctacaaagctaactgttcttattaagatttaggtggtttttttgtttgtttttcataagtattctttctaagtatcatgcccacaacctgggtgagaggatctgcacgcaaaaattcagcataactgacatggtttggctttgtgccctcactcaactctcatcttacattgtaatcccataatccccacatgttgtgggagagacctggtgagaggtaattgaatcatgggggcagtttccccctatactgttctcatgatagtgggcgaattctcatgaaatctgatggttttataaggggcttcccccttcacttrtcactgattctctctcctgccactctgtgaagaggtgccttctgccatgattataagtttcctgatacctccccagccatgctgaactgtgagtcaactaacctctttcctttataaattacccagtcttgggtgtgtctttattagcagcatgagaatggactaatacaataacacactatacccatgtaacaaacctacacatgtaccctcatatctaaaataaaagttgggat

SEQ ID NO: 373403 - DNA, 585 bp, Homo sapiens
aaagaggaatcagactagggcgagttaatgctacaaagctaactgttcttattaagatttaggtggtttttttgtttgtttttcataagtattctttctaagtatcatgcccacaacctgggtgagaggatctgcacgcaaaaattcagcataactgacatggtttggctttgtgccctcactcaactctcatcttacattgtaatcccataatccccacatgttgtgggagagacctggtgagaggtaattgaatcatgggggcagtttccccctatactgttctcatgatagtgggcgaattctcatgaaatctgatggttttataaggggcttcccccttcacttgtcactgattctctctcctgccactctgtgaagaggtgccttctgccatgattataagtttcctgatacctccccagccatgctgaactgtgagtcaactaacctctttcctttataaattacccagtcttgggtgtgtctttattagcagcatgagaatggactaatacaataacacactatacccatgtaacaaamctacacatgtaccctcatatctaaaataaaagttgggat

SEQ ID NO: 373404 - DNA, 578 bp, Homo sapiens
taaataataaaaatgcatagcttcgctgttttattactagcttcctatctgcaaggacccaaatttgaaagtaaataaatgaaaagtgagttcaaaaggaaaaaaaaaagttaaaataattacatatgtgtgtgaatgttgttttagaggaaaatgtaatagcatatattacttcaaatttaaattggtccttagatagcaacacatggcaaaatttattgtactctcatataagcagtacttaaaataataatttgtgccttagagacagaaatggttttataccattctccaccacctcctacgtataacatccatttgtgcacatcctccaaagacgtgygacagatggggaggtaaaaattgattaatggtggtaataaaataaatggaaggcaatacttccttgggttaccctgtcatcctttatgaccccaggatgtgaaagtcatactcactgtgtctgtttgcattcataatctcctagatataatattgtaagtctcccttgctaaggtgtaaatttgtgtaatgtgtgtgtgtgtttgtggtagagagagaagtagagaaactgagac

SEQ ID NO: 373405 - DNA, 531 bp, Homo sapiens
gctaagtacaaatatctcaccaatgccaagaacagaggccactccaactccaaatgctgaaagctgactcaggtagaagaacatcattctgttgttgattctttggctgtttctatccttcagatgatcagtggctaatattctagttgaatatttacatattattttatgcttcagtggaatttaattcattcaygtgtagggaactatgttaaattaatagctttgcatgaatctaggtcataattcagagccaagcactcagggtaaagtgaatattatctccttatattgtagtaaactttcaggtgaacaaaactttacagtttactaagaaaaagtaggaattgcagcctccactctacctacttgatgcccatccacacagagttgttgaacatttgctctgtaggatgcactgagctcatattttggaccaaattgctagggattctctctctctctcgtgtgtgtgtgtatgtgtgtgtgtgtgtgtgtgtgtgtatgtgtgtgggtgatgggtcatttgcc

SEQ ID NO: 373406 - DNA, 538 bp, Homo sapiens
ggaacgagttttatttgcatattctcatgacttggcccctgaccatgacttgatgctcatggctgaaagtcctaatattatatactgtcttttgatcacttaagaaataggactcaggagttaagccttggcctgtcaactacaaagattacatttcacaatttttttttgtagctgagagtttgtaaatgtagctaagggcttgaataaatttgggctaaaggagyagaagtaaattgtgtgattcctggtccaactactttcagataaggtcccatattgatatcaaccagcagtatcagcttcatttcatccataatgatttcacttttctcctctactaggcttctggtctgaacacttgattcttcatcccattctgaagacaatttatagagcaatcccattcccatttttttccatgctgtgtcatatcatacttgaaggtgttccctgctttcaaaattgcacaggagaaaagtagtattctctatgtggagacctcagctttcagaaatcacccctttctgtttcctaa

SEQ ID NO: 373407 - DNA, 538 bp, Homo sapiens
ggaacgagttttatttgcatattctcatgacttggcccctgaccatgacttgatgctcatggctgaaagtcctaatattatatactgtcttttgatcacttaagaaataggactcaggagttaagccttggcctgtcaactacaaagattacatttcacaatttttttttgtagctgagagtttgtaaatgtagctaagggcttgaataaatttgggctaaaggagtagaagtaaattgtgtgattcctggtccaactactttcagataaggtcccatattgatatcaaccagcagtatcagcttcatttcatccataatgatttcacttttctcctctactaggcttctggtctgaacacttgattcttcatcccattctgaagacaatttatagagcaatcccattcccatttttttccatgctgtgtcatatcatacttgaaggtgttccctgctttcaaaattgcacaggrgaaaagtagtattctctatgtggagacctcagctttcagaaatcacccctttctgtttcctaa

SEQ ID NO: 373408 - DNA, 507 bp, Homo sapiens
gtaaactttcaggtgaacaaaactttacagtttactaagaaaaagtaggaattgcagcctccactctacctacttgatgcccatccacacagagttgttgaacatttgctctgtaggatgcactgagctcatattttggaccaaattgctagggattctctctctctctcgtgtgtgtgtgtatgtgtgtgtgtgtgtgtgtgtgtgtatgtgtgtgggtgatgggtcatttgccaatttagtgttttttttttaatcatataatagtaatagttatactaaaggggaaatacatgggcacatgcttaaaagaaaatgaaaaacccatatacacatcggctcagakttttgcttttctacctttttgtagaaaaaaatacagtgccacattcccaataagaaaggctaccaacaaagaaaaaaagacttggcatctagcattatccaatatcagaatttgttttgctggataaaaaaattaggattatagtggtgggtaagctactg

SEQ ID NO: 373409 - DNA, 541 bp, Homo sapiens
aaacagccaaacaatatcaaagatcattgtcttaaaccttagctagctagtttaaaaacatattttgtcttgccacttgctatctcttctgtaatcaccttctaccttcctctaagctttatcatctccagattattgctgtagattggtaactggcctccctgttccacgtcgcttctgcccttgcttattaaaatgtagtcttcaaaactgacaatttttttttttaatacataaaccaaatcctgtttggaatccaggaaatttgtacagtagcttcccacctccttcagaaaaggatcccaaatcyttgcagtgactcatgagaccctgcctagtttacagatggcatctatgggcttttctcccaccactctgattctcgcacgctcctcttcatccacactggagtttttgcagtttcactgcacctcaagaatgcaacagccctgaggactttgggattgctttttttttcattctggaatttatattcactatgcacccaagttgccacaggactcattcttttatttttttc

SEQ ID NO: 373410 - DNA, 496 bp, Homo sapiens
aatgagcgaccatgtagctgctcttttctatctggtcagctgtccctgatctttcttgggatggacaggctctggctcaaatatgtttcactttaatagygccttacctaactaagaagcagtcggtacatagttgacatatttttaatgggctacctaaaacatatatttttgtgccaatctgtatctagggtactaagggctaatatgtcataatttaactaatttcattgcttttgcctaccaaaaatagctctttaccaaccaaaaatgtatggatcctcataatgtaactaacattattggttttgcctacccaaaataattctttaccaacccagaatgcatggatccttggagacttattgtcttgtctctattgtcatgttctagagtatatcatctacagtgtgtcaagctctatggacagtttctgtatcaatcagaactcttgatttttacatatatacaactcaaacttagcacaaaagaaaat

SEQ ID NO: 373411 - DNA, 571 bp, Homo sapiens
ttttttgttgttaagcatgaattatttgctaaataatctaaatgaattcctatgatgtgaaatccaccaagattagtaacttcatataaatggacatataatgcacaatcatgaattaattaattataaggactttaaaggagggaggaaatgagagtgtaggcaaatgaagcacgaatgtataaaatgttaacgtgaaaagtcaccaagccaaaaattaaataagtaaataaataaataatgaaatggcacaggacaaaaatggagtgttgtaggctcaatgtcccatcaattcctaaagactgggctttctgagtctcttttactgggagagaaaggagttcaaataatgtaagttcataaggaattacaaaaattaccatttggaaggtatcctaggcattttttrcctgaaaaactttttatggtaacttatttaatagctatggatttgttgcaagaactttctccaggtaagtgaatgaagttcaagatatgtgacttactgaagattacacgtctttaaaggttgtagaggtggcataccaatattttggaagaaatacctgag

SEQ ID NO: 373412 - DNA, 426 bp, Homo sapiens
gtggcataccaatattttggaagaaatacctgagcatgttctgccccattcttcgtatttaaaataagtgaaaattccagaaggaatgcatattttctgcacctaatgacctacaattcattggctctcagaggtaaagtcttagtgagcccattcctcttataggtctacattttcctaagttttgtgtgattaacagagctgtcattttgatctacacctaactgacttctgtctctctctcaaaggttttaaactttgaggaagaggggtgcaatttattgactccatatacaattccaaccaaccaaagaattcatatggcaatgagtgtgtgcccggaggcaatacgctgacgtgcagttagaactgacaattggctgkataatactgatattttacatggatttgtcctttacaaaaatc

SEQ ID NO: 373413 - DNA, 612 bp, Homo sapiens
cctgtgacacacaatttctctatacaacaaacctgcaaatgtaccgctgaagctaaaataaaagtctaaaagaaaatgatgagttaatgggtgcagcacaccaacatkgcacatgtatacgtatgtaatgaacctgcacgttgtgcacacgtaccctaaaacttaaagtataatttaaaaaaaagaaagattcccatctgcgatggagaaaatgtgttatgtacactaacaatactctgctttaatatcttgattttaatatagaataaaaatgagaaaatctcaagtataataaggcttaataaaaaaatgaactatttccaagctataggttctaagacaattttaaaatttaatgacatattttagatactctgtaacctagagtatgtaataatgatgaaaaacatgtcttcagttcttgatacaattgatctttaccttatttatgtccattctaaaaaggtgaaattgtttaacttgttgattaaaataactttattgtacacaggcacatgataagataaacactatgaaatgtatttatgtaaagacagtatttaaacgtgattccttctttttctaagacaaatgttaatgtcaatttatata

SEQ ID NO: 373414 - DNA, 578 bp, Homo sapiens
aagggcttccttaaatgttttgtcacactcaacagcaatttcattgaaaaaatacttttaaatttttgaaaagccacctcttatggaaaatgtgtttagccagagcaattcctcctcttttcgtcagctttctgttcctgtgcttttgagagtagggtttaatggtatccatcttaggggcatggacttacatgagcaggcagtaggctttctgtatcacagctggggacaccctgaatcatagtgacatgagtcagaaaagatacaaattaatatatggtttgaaccccctaagttggggggtgtggaaggaggaggaatatatgttctttagggttaatagtctcataaagcagaagacagagatacaggcagagattgaagggtttttttgttgttgttgtttcctgataactgaaaggaaatatgggtaacacagacctaatggtttgtgtgtttcaagaaacaggaatttatattccagactatgacatgagacatcagagagataaatccttsacgaggcatagagtgcttcccataaagatcaggacatgactgataaaaaggaggtttat

SEQ ID NO: 373415 - DNA, 558 bp, Homo sapiens
tgttagcttttaattaagctgacttttaaccattgagctcctttttttaaaaaacgtcttttaaaatctcattactatatttcagctaggacaaattgctgctatttcagaagtaccaagtatcaaaccaaaaagggcttgattgaggaatcaaagccagactgttttggtggaacagagggaaggcagaaccttagctatcraactgcagtgtggggtgacagccattcctttcagtttggtctggctagcaaaaaggtggccttgttatataaataaaacccctttaggagtcaaaataaaaaaatatgtcctcttttctttttcgcctagcacaccacctaccaccctttattgtgtgtgtgtgtttgtgtgtgtgtgtgtgtgtgtgtgtgtgagagagagagagagagaatttagccacttcagaggccttgctcctcataatttggaactttcttttcctttatttggatttgatcaaattggatagagttaatcaaacccaatgggaaaaagacgaaaacagcaaaaacagaaacaaacaacaacaaaaaa

SEQ ID NO: 373416 - DNA, 558 bp, Homo sapiens
tgttagcttttaattaagctgacttttaaccattgagctcctttttttaaaaaacgtcttttaaaatctcattactatatttcagctaggacaaattgctgctatttcagaagtaccaagtatcaaaccaaaaagggcttgattgaggaatcaaagccagactgttttggtggaacagagggaaggcagaaccttagctatcaaactgcagtgtggggtgacagccattcctttcagtttggtctggctagcaaaaaggtggccttgttatataaataaaacccctttaggagtcaaaataaaaaaatatgtcctcttttctttttcgcctagcacaccacctaccaccctttattgtgtgtgtgtgtttgtgtgtgtgtgtgtgtgtgtgtgtgwgagagagagagagagagaatttagccacttcagaggccttgctcctcataatttggaactttcttttcctttatttggatttgatcaaattggatagagttaatcaaacccaatgggaaaaagacgaaaacagcaaaaacagaaacaaacaacaacaaaaaa

SEQ ID NO: 373417 - DNA, 562 bp, Homo sapiens
aatttattactttgtattctattgcactgcctctcattaagttggaatttattataagataaaaactaaatacaaaataaacaatacaagctagtaggtaacatttctaccagtgaaattgaattcctagtatcccctttctgtaactgacaaaaccaagtgatctctgggctgtgtgagcagcctccagggtgtataggctggaaagctgagctctcaggagaggagccacatagccagtgacttcaatagcctttagtgtcgtgaaagcactggactcccagaagagcctctggtaatgagtcctacagtacagtactcaaaatggatttcacttcttcacagaaacagaaagatgtgaaataattagaccacaaaaatacctttgccattatttatagatattaagaacaatgctgaagtcaascaagtaaataaatagattatgattctctgcctaactgtttagaatcctcttaaccttgtggctaacagtgtaacttgtatctgtatgtcatctttggccatatttgtatacttgtataaaaaaatcagcagatgt

SEQ ID NO: 373418 - DNA, 659 bp, Homo sapiens
tttgcttcttatcagttaataaatatatagaatatggaggaagattcaaatgacttctagacttcagggtaaaatggtattatttaatctgatctcaccttgggaatcctatttactcagcttttgatcttttttatttttttttttttttaccaaaaagatgtatacaaaatggtaatagtgtctaaatagggaacagatatgttaygtgaaagtgatgataagatagaaataaagaaatatatatttcaggatataaacatgatatgatcaaagagataaaagccctgaatttttaaatcacccaaataaattgatttgaggtataaataaaagctaaaacctcattaacaacatgtattactaggcaattgcctattcattgcattgcaaacaccaatattttgaggaacaactaaatttttgcccccaaaatgttctctcttttcatgtatgtagctttagtcaaaaggaagatttgatgaaagtatgggtaattctaataaaagggaaaaaaagattagtatttgagatgtgaacaaaaacttaatcttgcaagacatcaaagaggctaatagctctgtaagactctcctacaattctcaaactttagtcttcacagtaatcagaataaataaaaactgcattccttgctaaaa

SEQ ID NO: 373419 - DNA, 659 bp, Homo sapiens
tttgcttcttatcagttaataaatatatagaatatggaggaagattcaaatgacttctagacttcagggtaaaatggtattatttaatctgatctcaccttgggaatcctatttactcagcttttgatcttttttatttttttttttttttaccaaaaagatgtatacaaaatggtaatagtgtctaaatagggaacagatatgttatgtgaaagtgatgataagatagaaataaagaaatatatatttcaggatataaacatgatatgatcaaagagataaaagccctgaatttttaaatcacccaaataaattgatttgaggtataaataaaagctaaaacctcattaacaacatgtattactaggcaattgcctattcattgcattgcaaacaccaatattttgaggaacaactaaatttttgcccccaaaatgttctctcttttcatgtatgtagctttagtcaaaaggaagatttgatgaaagtatgggtaattctaataaaagggaaaaaaagattastatttgagatgtgaacaaaaacttaatcttgcaagacatcaaagaggctaatagctctgtaagactctcctacaattctcaaactttagtcttcacagtaatcagaataaataaaaactgcattccttgctaaaa

SEQ ID NO: 373420 - DNA, 432 bp, Homo sapiens
aatctgtaattgccctctttacatctttgagcttagttataaaatgggaacaagttacttcacaaagttattgttattgtgcaataagttacatgacatttccctgtaaaacattaggtgtatactgagatcattaaactggatagatatgaaacatttttaatgcctctgggctgctttgaaaatatgctgaatttgaagctttaaagtttagaagtatgtggagtttcaayctttggaatctagttagataaacaaacctctccagtactgtatcatttcactcagttaagaacctctaattaccttcctgcattctcccttccctctcccacccaaaatcaatctttttttttttttttctccaaaggaaatcaggtttctagttcaaatttatgcctctggcatcaccaattacaaccagaaataatt

SEQ ID NO: 373421 - DNA, 500 bp, Homo sapiens
gtaaaatcttgtgtgtgtggttttagtgattgaatatagattaagtgaacttactacttgttctagaacagtcatgacgtagatgtgaaaactttggcagatctttcagtctcccacaaactttcttaaattaaatcgaggtgctgcctgggcctgagccgatgtttgtctctggagcacaggtkgatgctctgcactgcccgtgatttctgtctgtagtcaccagatcacggacactccctctggctgcagctggctccccaagtttgaccagaggaggtacaactcaccccttgactgctgaggtccaatgcagaaacgatacctgctcttctcctcctcccattccctacagcacaaatgagtccagatatactgtttctaaaactttgtcaattgttgagaaacagaattatagcatagagaaacttatgtctgtctctaagttacttctgctttgctgagccctcagacctcaatacaggagacccgccccttgc

SEQ ID NO: 373422 - DNA, 500 bp, Homo sapiens
gtaaaatcttgtgtgtgtggttttagtgattgaatatagattaagtgaacttactacttgttctagaacagtcatgacgtagatgtgaaaactttggcagatctttcagtctcccacaaactttcttaaattaaatcgaggtgctgcctgggcctgagccgatgtttgtctctggagcacaggtggatgctctgcactgcccgtgatttctgtctgtagtcaccagatcacggacactccctcyggctgcagctggctccccaagtttgaccagaggaggtacaactcaccccttgactgctgaggtccaatgcagaaacgatacctgctcttctcctcctcccattccctacagcacaaatgagtccagatatactgtttctaaaactttgtcaattgttgagaaacagaattatagcatagagaaacttatgtctgtctctaagttacttctgctttgctgagccctcagacctcaatacaggagacccgccccttgc

SEQ ID NO: 373423 - DNA, 685 bp, Homo sapiens
gtgcatttttacctaagaaatttattgttaaatctatgattatatattaaaagaggtctctgatgatagtctgtttarcccatgatggtatccaaaatgtagtaacaaatttattttataaagaccatgtgactcatttcagtggtgccattaaaatcattgatttttagaacacataaatgaatggatagtttgtggcccattttatcatgacttaaattgattaatttattgactacctttctcctctgggcagaaatattcttatctatctcctgtctgtcactcaataaactaaccaggactaataagtactcctcacatctgaatatttaattagaacaagaataaataactgaaagtgttaatacacagagaaagaagtccagtcagtttgatcatctaccttccttacactgcagagtgtgttagttcaaaactccacttgagcatctcccacatgctgggataggtaccatcatgcagatgcttcctaaaattagctagtaggtgaattttttttttaccaacaacttagtcacaacgtatgataaaacgcccaggtattctaaaatgccacacatgttgaggcattcctttcaagaaaggcatcagaacatctttgtgcagggattgttgtttatgtgtgacctgtaatgaagttcaggtctatccaacaaggagt

SEQ ID NO: 373424 - DNA, 561 bp, Homo sapiens
taatatctttgcatttactctgcagacttgcatgatccatgctctttagagtgcatcattcagcactgctcctgcctccccatgcctgcatttcacatgcacatttctttgtcaatctccttctcagcacttccaattgcacagatcagtaagcagaaaaagaaggcagggaaatgaaggaaatcaggagacaagtcagtctataaggtcaagaatgatgttagaaactgacatgggtagtttatcaccagatcaccagatcctcaaaaccacccacaaaggaaaactctaaagatattgatccggagccaagataaagaatgtgatgtatatagataaatgatttatagggctgggtgtggtgactcatgcctgtaatcccagcactttgggaggtcgaggtgggcagatcacttgaggtcaggagttccagaccagcctrgccaacatggcaaagccccgtctttactaaaaaatacaaaaattgtcctggcatggtggtgcgtgcctgtaatcccagctacccaggaggctgaggcatgagaatcacttgaacttggg

SEQ ID NO: 373425 - DNA, 559 bp, Homo sapiens
acaaatctaaccaggccaatcaccacagaaataaaccctgtttcactcccatcccaaccagccagaaaaagccaagtagaaagtgagatttccaacctggccaggctgtaatgagaaatccctttcattcccaaggcatgtgtcccccctgttttttcttaccatttttttttcttgcaggtggtgaattactttattttagaaaagcaaaagtttacaatttgtgccataggcagaatatcatgaattcaacaagttattaatacagactttcaaaaacctttacagattagtccaaagtagaaaattattttttcccactcttagactcaagcgcattcagaaaaaatacacaatttataaaaataaaatggcaagcctaatcacaccarttaattgatagtgttaacatcccacactggttcatttgaacaattaatacataataagaatagctgaattactttttcaagtcctacctccatgttacatgaaacaattatgaaactatttgttactttttataaaaccaaagtaaaaaatgccccaaacaaaacat

SEQ ID NO: 373426 - DNA, 607 bp, Homo sapiens
attatgaaactatttgttactttttataaaaccaaagtaaaaaatgccccaaacaaaacatgaaataaccactaaaaaaatctactaaacaaaaatattacagctaaggtaactactcttatagaccctttcttcacctccttgagatttggcatcttaatattatttctaaaccagatatcaggaaacaactatgtgtgaaaaagaaaatgaaaactccatgtctaattcacattaaagaagtttcggataatagtagctgggaaaaacatttaagcacacaatgaaacaaacaaaaagaattgccagctataatggggtgcatagggtaattgataaaaacatataatttgtctaatcaaaatatctttaaatactgtctgatcatcaaatttcagcaaaagcaaggatctagaattttgaattttagataagtagaaatccaggactttttttttttgtcagggtgatagacacatagaacaatataatagaactggatccagaaatagacccacagaattatgcccaattcataktttacaaagacacaaaagcaattaaatggagggaagatagcatttccaacaaatgataatgaagaact

SEQ ID NO: 373427 - DNA, 569 bp, Homo sapiens
aagggtaatctattagcagtgtgagaatggactaatacagtaaattgttaccgggtagtgggaagctgctaaggaatrcccaaaatttggaagcaactttggaactgggtaatgggcagaggttggaacaatttagaggactcagaagaagagagaaaaatgtggaaaagtttggaacttcctagagacttgttgaatggcattgaccaaaatgctgatagtgatatggacaataaggtccaggctgaggtggcctcagatggagatgaggaacttgttgggaactgaagcaaagctgactcttgttatgcaaagagactggtggcatttcactcctgccaaagagatctatggaagttgaacttgacagaaatgatttaaggtatcctatgaaagaaatttctaagtagcaaagcattcaagaggaagcagagcataaaagtttgaaaactttgcaacctgatgatgcaatagaaaagaaaaacccactttttgggaagaaattcaagcctgctgcagaaatttgcgtaagtaataaggagaggaatgtgaagcatcaagacaatggg

SEQ ID NO: 373428 - DNA, 569 bp, Homo sapiens
aagggtaatctattagcagtgtgagaatggactaatacagtaaattgttaccgggtagtgggaagctgctaaggaatacccaaaatttggaagcaactttggaactgggtaatgggcagaggttggaacaatttaraggactcagaagaagagagaaaaatgtggaaaagtttggaacttcctagagacttgttgaatggcattgaccaaaatgctgatagtgatatggacaataaggtccaggctgaggtggcctcagatggagatgaggaacttgttgggaactgaagcaaagctgactcttgttatgcaaagagactggtggcatttcactcctgccaaagagatctatggaagttgaacttgacagaaatgatttaaggtatcctatgaaagaaatttctaagtagcaaagcattcaagaggaagcagagcataaaagtttgaaaactttgcaacctgatgatgcaatagaaaagaaaaacccactttttgggaagaaattcaagcctgctgcagaaatttgcgtaagtaataaggagaggaatgtgaagcatcaagacaatggg

SEQ ID NO: 373429 - DNA, 569 bp, Homo sapiens
aagggtaatctattagcagtgtgagaatggactaatacagtaaattgttaccgggtagtgggaagctgctaaggaatacccaaaatttggaagcaactttggaactgggtaatgggcagaggttggaacaatttagaggactcagaagaagagagaaaaatgtggaaaagtttggaacttcctagagacttgttgaatggcattgaccaaaatgctgatagtgatatggacaataaggtccaggctgaggtggcctcagatggagatgaggaacttgttgggaactgaagcaaagctgactcttgttatgcaaagagactggtggcatttcactcctgccaaagagatctatggaagttgaacttgacagaaatgatttaaggtatcctatgaaagaaatttctaagtagcaaagcattcaagaggaagcagagcataaaagtttgaaaactttgcaacctgatgatgcaatagaaaagaaaaacccactttttgggaagaaattcaagcctgctgcagaaatttgcgtaagtaataaggagaggaatgtkaagcatcaagacaatggg

SEQ ID NO: 373430 - DNA, 357 bp, Homo sapiens
tgtagtgatgtcctctctttcatttctgatattagtaattcatcttctctctctctctctyttttttaattagcctggctagaggcttatcaattttattgatcttttcaataaaccagctttggtttcattgatattctatattgattttctggttttaatttcattgatttctgctctaattcttgcttcttttcttcttagtttggatttaatttgcccttctttttctagtttcatcagatggaagcatattattgattttaaatctttcttcttttctaatatatgcattcaatgctatccatttccctcttagcactgattttactgcataccacatattttgataaattg

SEQ ID NO: 373431 - DNA, 357 bp, Homo sapiens
tgtagtgatgtcctctctttcatttctgatattagtaattcatcttctctctctctctcttttttttaattagcctggctagaggcttatcaattttattgatcttttcaataaaccagctttggttycattgatattctatattgattttctggttttaatttcattgatttctgctctaattcttgcttcttttcttcttagtttggatttaatttgcccttctttttctagtttcatcagatggaagcatattattgattttaaatctttcttcttttctaatatatgcattcaatgctatccatttccctcttagcactgattttactgcataccacatattttgataaattg

SEQ ID NO: 373432 - DNA, 357 bp, Homo sapiens
tgtagtgatgtcctctctttcatttctgatattagtaattcatcttctctctctctctcttttttttaattagcctggctagaggcttatcaattttattgatcttttcaataaaccagctttggtttcattgatattctatattgattttctggttttaatttcattgatttctgctctaattcttgcttcttttcttcttagtttggatttaatttgcccttctttttctagtttcatcagatggaagcrtattattgattttaaatctttcttcttttctaatatatgcattcaatgctatccatttccctcttagcactgattttactgcataccacatattttgataaattg

SEQ ID NO: 373433 - DNA, 598 bp, Homo sapiens
cagagctgaatgtattcattgtcttttaaatattactttttttcttacatctaaattagaaatccctcagaacacagaattgtttctctctaatttatcagcttttctaaagcaccttgcatagtattaagtttattgaggtataatttacagaaattaataatctccctttgtaagtgttcagttcratgagtttgccaaatgcatacagctgcgtatcttggccacaatcaagatctagaacattgccttcacctcagaagatttcttgtgcctctttacagtcaatctcttcttcctactcctagtttttggcaaccactggtctgatttctgtccctatagctttgcgttttctagaatttcatataagtagaatcaaacaatatgtagctccttgtttctggcttttttcacttagcataatgcttgtgagattccatctatttgtatgtaccagtgatttgtttcccttgtgtgaatgtaccacagtttgtttatccattaaccaatcggtgtgtatttgggcattttcagtttggggctattataaataagacttatatataattcatgaacaggtctttactataaatat

SEQ ID NO: 373434 - DNA, 589 bp, Homo sapiens
aagatctgaggagggttgaataaaagtgtaaaatgtgtttacgcaatcagagttattattctctcaacacagccagttgtaattatgacatgttttatgtcagcctcgtggtamccagaaaacaaaaatctttagtagacacacaaaagataaaaaggaatctatatatactattagtgaaactcacctaatcacaaaggaacacagcaagagaggaagaaaggaacaaaggatcaacaacactctcaaaaaacaagtaagaaaatggcagtaatacattcttacataccaataattaccttaaaagtaaatgaatttcttgaattaaaatacatagaatggctaaatggataaaaacaggactcaactacatgctgcttacaaagtactcacttcacctttatggacaaactgaagatgtgaagaaatgaaaaaaagatattccatgcaactggaacccaaaagagaccagggttggctatacttatatcaaataaaatagactttaaagtaaaaaactgtaaaatgagacaaggaatttcattatataataataaaaaggtcaattcataagacaatatacagttgt

SEQ ID NO: 373435 - DNA, 460 bp, Homo sapiens
ttttatgtcagcctcgtggtacccagaaaacaaaaatctttagtagamacacaaaagataaaaaggaatctatatatactattagtgaaactcacctaatcacaaaggaacacagcaagagaggaagaaaggaacaaaggatcaacaacactctcaaaaaacaagtaagaaaatggcagtaatacattcttacataccaataattaccttaaaagtaaatgaatttcttgaattaaaatacatagaatggctaaatggataaaaacaggactcaactacatgctgcttacaaagtactcacttcacctttatggacaaactgaagatgtgaagaaatgaaaaaaagatattccatgcaactggaacccaaaagagaccagggttggctatacttatatcaaataaaatagactttaaagtaaaaaactgtaaaatgagacaaggaatttcattatataat

SEQ ID NO: 373436 - DNA, 460 bp, Homo sapiens
ttttatgtcagcctcgtggtacccagaaaacaaaaatctttagtagacacacaaaagataaaaaggaatctatatatactattagtgaaactcacctaatcacaaaggaamacagcaagagaggaagaaaggaacaaaggatcaacaacactctcaaaaaacaagtaagaaaatggcagtaatacattcttacataccaataattaccttaaaagtaaatgaatttcttgaattaaaatacatagaatggctaaatggataaaaacaggactcaactacatgctgcttacaaagtactcacttcacctttatggacaaactgaagatgtgaagaaatgaaaaaaagatattccatgcaactggaacccaaaagagaccagggttggctatacttatatcaaataaaatagactttaaagtaaaaaactgtaaaatgagacaaggaatttcattatataat

SEQ ID NO: 373437 - DNA, 589 bp, Homo sapiens
aagatctgaggagggttgaataaaagtgtaaaatgtgtttacgcaatcagagttattattctctcaacacagccagttgtaattatgacatgttttatgtcagcctcgtggtacccagaaaacaaaaatctttagtagacacacaaaagataaaaaggaatctatatatactattagtgaaactcacctaatcacaaaggaacacagcaagagaggaagaaaggaacaaaggatcaacaamactctcaaaaaacaagtaagaaaatggcagtaatacattcttacataccaataattaccttaaaagtaaatgaatttcttgaattaaaatacatagaatggctaaatggataaaaacaggactcaactacatgctgcttacaaagtactcacttcacctttatggacaaactgaagatgtgaagaaatgaaaaaaagatattccatgcaactggaacccaaaagagaccagggttggctatacttatatcaaataaaatagactttaaagtaaaaaactgtaaaatgagacaaggaatttcattatataataataaaaaggtcaattcataagacaatatacagttgt

SEQ ID NO: 373438 - DNA, 589 bp, Homo sapiens
aagatctgaggagggttgaataaaagtgtaaaatgtgtttacgcaatcagagttattattctctcaacacagccagttgtaattatgacatgttttatgtcagcctcgtggtacccagaaaacaaaaatctttagtagacacacaaaagataaaaaggaatctatatatactattagtgaaactcacctaatcacaaaggaacacagcaagagaggaagaaaggaacaaaggatcaacaacacwctcaaaaaacaagtaagaaaatggcagtaatacattcttacataccaataattaccttaaaagtaaatgaatttcttgaattaaaatacatagaatggctaaatggataaaaacaggactcaactacatgctgcttacaaagtactcacttcacctttatggacaaactgaagatgtgaagaaatgaaaaaaagatattccatgcaactggaacccaaaagagaccagggttggctatacttatatcaaataaaatagactttaaagtaaaaaactgtaaaatgagacaaggaatttcattatataataataaaaaggtcaattcataagacaatatacagttgt

SEQ ID NO: 373439 - DNA, 642 bp, Homo sapiens
agttcatcctgaaagttggagtaggaaggtataagctgccacttcttctctgctttacacattccttatcctgaagtttaacacatgcttacaaactgtgtacatcrtcagattagcttctttgcttgtctaattctgtgatcactgcttttggaatatacaggggctgggaccaggttgctgggaagccacaagcttattagagctagtagaaacctttctgagtttgcaaaacaacaaggctttaaagaaaacatgtgcccttagaggacactatcacacaaagattccttttaggggacattatcccacaaaggctccctggatgtcaaagttcttccagagactgagaattcaaaggtcatcaactgagagagatattcctatcaccctccttgatgatcactagcaaagggctttgtgttcattccattcccttgccaacatttggttcccaagcttgtcctcttgtatccgtctacccatgtcctggaatgcagccagcccaccgacactgacaggatggatgctagctgcagcgagactgcttgtctgctgtatacagagaggatgacagcaggacatcagaacagctgttggaagggagaggaagtgggcagctgcaagcagggtggtcagaag

SEQ ID NO: 373440 - DNA, 642 bp, Homo sapiens
agttcatcctgaaagttggagtaggaaggtataagctgccacttcttctctgctttacacattccttatcctgaagtttaacacatgcttacaaactgtgtacatcatcagattagcttctttgcttgtctaattctgtgatcactgcttttggaatatacaggggctgggwccaggttgctgggaagccacaagcttattagagctagtagaaacctttctgagtttgcaaaacaacaaggctttaaagaaaacatgtgcccttagaggacactatcacacaaagattccttttaggggacattatcccacaaaggctccctggatgtcaaagttcttccagagactgagaattcaaaggtcatcaactgagagagatattcctatcaccctccttgatgatcactagcaaagggctttgtgttcattccattcccttgccaacatttggttcccaagcttgtcctcttgtatccgtctacccatgtcctggaatgcagccagcccaccgacactgacaggatggatgctagctgcagcgagactgcttgtctgctgtatacagagaggatgacagcaggacatcagaacagctgttggaagggagaggaagtgggcagctgcaagcagggtggtcagaag

SEQ ID NO: 373441 - DNA, 618 bp, Homo sapiens
accacgcccttggaaaccttgctggacgtctactggagtaatgctatttcaatgtcaagagtataatgtcaatatcaatgtgtagttttttttctgagaatttaaaaggttgtgttatgatttcagggttgtgttgtatttaaggaagtgtacttacrcaccttcctgatccccagtagacatcaaaatcattaaaaggacctatttttttaattcccaaaagtttcaaaaaccatcttagagggcagccagacttcgtcatgggttaccagagcaaggtgtctgctcattattttgccccttgctgggaagtatcaaagggattgccatgcccctgtggcctccttcaaggagttttttatgctttgttccatgtgaccctgctctcctggccatagtccatgggactaaggatgggtgccctatatggaacctgcatctataagacagcagcgatttatgagtgatcagtccaacaagagtgctctgcattagagaaggactggtatatcttccctctgagtttgcatgcatcacagaaaggggaagtcagctaaggggaggtcagcaggcaaagtagagtacacacagcaatactgcatcagcatcgtcatatgg

SEQ ID NO: 373442 - DNA, 508 bp, Homo sapiens
tagtttgtcccttcttcttcagtaaaaactctgaatcttaacaatatcaatacatttattcatttgctcaatcttataatacatccaaatttgtttcagaattttgttgcccgtaccactatattttaaaatgctacgaaaaagagttaaggatttgtttgaaattctctcccactatcccacccaatccaagactaggtaaaaagtaaaatagtgggttcaaagtaactaggataaattcattactttttttcctcttcattgtggggatggtattcayttaaaatacatgcgggaccatttggtccagtttgctttacattttaggacttcttttttctcttctcacccctattgatttaattttttaaaaaacatgtagaacattagcatgcttccaagaatcaaaataatactaaaagatatatttggagaggtatcactcactcccatatcccttctgcatgtttttctcccatccctttagtaggtaaagggtttcattgtt

SEQ ID NO: 373443 - DNA, 489 bp, Homo sapiens
agtgcaacaagaacacttgtgtaaatcaatttctaccagtgcctgggtagtattctaagaaaactctaataatgacttgatggtgcactagacagatgattccctttcacaagcttcatgaaactaattctgtaaagtgccactctttaaacaactccaggagaaaccctcggtcttcctgtttcacaagttgagaggaatttcytaagagaaaaacatgagattcagctttcctgtatccttgagtttcatccttaatctccaagctggtttatcaattttttctcacatcacttcattatattttatagtcctgtggtcttctcagggaattcccgcaggagttccctggctcctctcttcattcctgagggcagtgctggagttagagggtgacaattaattacttccctgcttttctgctccaagccccaaagcagttgacaggtagacaagagaggctggagctgtaagctggggccaagaatg

SEQ ID NO: 373444 - DNA, 595 bp, Homo sapiens
ttaaactgtaagtggggacttttcacagcacaaaacttgcatcatatgtttaaaagctgtggcaaagtcatctttcggcagaagttgtgtagccttaaacaaatcatgccctggtgtgcgtccttcagtagagggatggttctcaggtttaccatatggtgcatgcagtcagtctcatgactcattttggacttggcactgggaagggttcagaaaggtgcagaacatgcaaatggctttgaggatgagtgctcactccccagtaaggggatatccccgcctgcatacaaatagtccaggccactgttttccaaacataacaaacctacaatgctgtmccctctagaaacttctggatgctcagcagttcacctcctggtttagtccaaaacattatgtccaaaacataatctctttttgaaggacatttaagaaaatgcattttaagcttcacattggtctcttgatttgtaatgactttctcaaatatgtttgagaggagatgaaaggaattttaaactaggtggatttcacaaagtgaattggcttcatctgtgtactcatgaaaaccatgagcttgaaaagatcctaaatg

SEQ ID NO: 373445 - DNA, 566 bp, Homo sapiens
tttacgatggaccaaagttcacccaggagcctctgcagcagagcatcagctagtacacagagcagagggaaaagcaagcccaggcttaagaaaatttctgattaagtcttttgatcctttacaaaaagaaaaacatttccttcttcatgaaaatatgtttccacctggaagagcagcttcaccagagacaatttctaatgtgagctactggcatgtattctattctagctacacagcaccagcattcaagtcccactcaaatccaattctggtcttagaacaaagaaactggagcttttctcttcctagctatattcaatgcaaagcaaatcatactctttaagtagaaatggcttgtgtttctgaagaacacacaagtgttgatctccrgtgaagaaacttccttagcggtaagttgaatcaacagaacctaaattactctaacttgaaggggagctataaatgtctctacatatgttaggcctgacttccatgaccaaggactggctagaagtcagattcttgctcacatagtttatattcaaaatatatgcacgtaaaggcag

SEQ ID NO: 373446 - DNA, 566 bp, Homo sapiens
tttacgatggaccaaagttcacccaggagcctctgcagcagagcatcagctagtacacagagcagagggaaaagcaagcccaggcttaagaaaatttctgattaagtcttttgatcctttacaaaaagaaaaacatttccttcttcatgaaaatatgtttccacctggaagagcagcttcaccagagacaatttctaatgtgagctactggcatgtattctattctagctacacagcaccagcattcaagtcccactcaaatccaattctggtcttagaacaaagaaactggagcttttctcttcctagctatattcaatgcaaagcaaatcatactctttaagtagaaatggcttgtgtttctgaagaacacacaagtgttgatctccggtgaagaaacttccttagcggtaagttgaatcaacagaacctaaattactctaacttgaaggggagctataaatgtctctacatatgttaggcctgayttccatgaccaaggactggctagaagtcagattcttgctcacatagtttatattcaaaatatatgcacgtaaaggcag

SEQ ID NO: 373447 - DNA, 532 bp, Homo sapiens
taatatacaagacgaaaggaaaagaaagacaagtaaaaggaatgatctgcaaccacctggatattggagcacaattgtgagaacaactgggtaagaagagtccattttcttaccctcctttttcccccctttccaaagcatcctatattccattttggattattcttgataagtttcgtttcctatggaatgtgctacctatctattagcaactgatgctacctctcttagcttccaacttgataaagaggcattattaatatagctgctggatccaaattgaagggaaggaataatctagcaaaatatccacaaattagctgcactttcttttgtaacataaggcagctgtattcactcacctgagatggggtggaagatctcacacactgttctctgctttccttttctgctttgttyagagacacaagatgtaggcaccctgctgagcatggaactcctggctgcctcctccacctcaacatatgcttgttcaggtagagcccagctagggactgacagtggtagagca

SEQ ID NO: 373448 - DNA, 570 bp, Homo sapiens
caggctggagtgcaatggtgcaatcttggctcactgcaacctctgactccctggttcaggcgattctcctgcctcagcctcctgagtaggtgggattataggcacacaccaccacgcccagctaatttttgtatttttagtagaaatggggtttcaccatgttggccgggatggtcttgatctcctgaccttgtgatccacctgcctcggcctcccaaaatgttgggattaccggcgtgagccaccgcacccggcccagtgcagtggttcttaatcctgaagacatattagaataatctgagacattaaaaaaaataccaatccctgggcccaccccaaactaaataattcaaatctctgggcatgcagactgggtattggtatatttttaaaacactccctggctgactctaatctccaaaactctaacggaagagaattcggaggcaagtagggggccttgctgcaaaatgtggtctgcacatcaayatcacagggaggcttgatggaaatacaacctctcaggccccataccagacctactggattagaatctgcatcttaacaatg

SEQ ID NO: 373449 - DNA, 617 bp, Homo sapiens
tacatcacaggactctgtgcagacaacactcagtaccagcccggagccaggtagattcactgggtgactagacccagaagagagacaacaaacactgcagtttggctcacaggaagtcacatctataggaaaaaggagagaatactacatcaagtgaacacccygtgggacaaaataatctgaacaacagccttcagccctagaccttccctctgacagagcctatcccaatgagaaggaaccagaaaaccaaccctggttaaatgacaaacaaggctcttcatgccccccaaaaaatcacactagttcaccagcaaaggattcaaacaaggaagaaacccctgatttacctgaaaaagaattcagaaggttagttattaagctaatcagggagggacaagagaaaagtgaagcccaatgcaaggaaaccccccaaaaaatgatataagaagcaaagggagaaatactcatggaaacagatagcttaaagaaaaaataataaaaaattcaggaaactttggatccacttttagaaatgcagaatgctctggacagtctcagcaatagaattgaataagtaaaaattcagagctcaaagacaaggccttcgaattaac

SEQ ID NO: 373450 - DNA, 596 bp, Homo sapiens
tttatcacttccccaatcaatactcttgtaatttcctatccctgtctttgctttaatctcttaaacctgtcatctttgtaagctgaggatatatgtcccctcaggaccctgtgatgattgtgttacttgcacaaattgtttgtaaagcatgtgtgtttaaacaatatgaaatctgggcgctttgaaaaaagaacaggattacagcgatgttcagggaacaagggagataaccattaggtctgactcccttagagccaggtggaacagagccatatttctcttcttacaaaagcgaataggagaaatatcgctgaattctttttctcagcaaggagcagctctgagaaagagaatgcattcccagggataggtctctaaaatgaccactctgggagtgtctgtcttatacagttgtagataagggatgaaataaaccccgtctcccgtagcgctcccaggcctattaggatgaggaaattcctgcctagtaaattttagtcagacyagttgtctgctctcaaaccctttctcctgataagatgttatcaatgacaatgtgtgcctagtgggacacgaaacttcattagcaattttaa

SEQ ID NO: 373451 - DNA, 600 bp, Homo sapiens
cattaaaggaaaaatatcccccaaaaaataaaaaaaamcagtcaacatggcctccatactttgaagtcacatgggatccatatggacttaaacaagagacaaaagataaattcagggatgcctcccttccttacagcatttcataacatggtaccagcctgtaaaatcaagacatcaagaacgatttggctaacttgctcaatttttcctaaaataggcaagtgctgaaatacacagattcatgagattctagctgaaacatatacaaagctgatcttaggaaaaattgggaaataagtggaatttgttaatgtttcccccaactccactttttgtgtttttctcccattcaagccctcacattgccctacccacttgccccagaaggaagccatctgacaaactaaattatagtgaagggttagtggcaatttgttactcctagtaggtgtattcgcattttttaaaaaaactagaaagggcaattcaaaaccaaagaaatgattatctaatgttggctttttgctccaatgcaaattggaaaggagctattttgtggcagtctaattgctctgaaaacttctctacttgcatataaag

SEQ ID NO: 373452 - DNA, 600 bp, Homo sapiens
cattaaaggaaaaatatcccccaaaaaataaaaaaaaccagtcaacatggcctccatactttgaagtcacatgggatccatatggacttaaacaagagacaaaagataaattcagggatgcctcccttccttacagcatttcataacatggtaccagcctgtaaaatcaagacatcaagaacgatttggctaacttgctcaatttttcctaaaataggcaagtgctgaaatacacagattcatgagattctagctgaaacatatacaaagcygatcttaggaaaaattgggaaataagtggaatttgttaatgtttcccccaactccactttttgtgtttttctcccattcaagccctcacattgccctacccacttgccccagaaggaagccatctgacaaactaaattatagtgaagggttagtggcaatttgttactcctagtaggtgtattcgcattttttaaaaaaactagaaagggcaattcaaaaccaaagaaatgattatctaatgttggctttttgctccaatgcaaattggaaaggagctattttgtggcagtctaattgctctgaaaacttctctacttgcatataaag

SEQ ID NO: 373453 - DNA, 549 bp, Homo sapiens
gctctgcaccaataaagttatgttctaacaaaaatactttattccatggttgtgtgttccatttctgggacttcgctctatttcaatgatattcargtttcgagagtaaaaaaaacgttggaaatgggcaatcaataaatttctttcaaaaaccagaatactagaagggaaaacatttcagccactcaaagttttgtggtgaaattataaactccagaaaaactgaatttataatggaaatgctgacagacctttcagtggagcagtttgaacgcaacactgtaatttggcaatctctcttacagactaaagactaattctaacaagatgtcattttgactcacgtttattattacctgcaagaatgaaaaacgccgtttactcgggaggtgcccgagaaccagggtggggcgatctcacattttaagcaagacgcccgctgccttaccaaaatagccctctccgccaaaggaggggcagcctttcacgctcagcttctttcatgtcagcccgagcctttgcagcaagacgtgcctttcctacatgtta

SEQ ID NO: 373454 - DNA, 428 bp, Homo sapiens
cggccggggctcccttcccgcgccgtttccccacgcctccccgcccgccccgcgcgcccgctccccccgcaaacttgccccgccaccccgcccagcggcggggcccggggcccggggcccgggactcacctcgccggagaactttgcgtccttttccrcctcctcttccccgcgtcttcccggctcgcagccccctcccggcagccggcgaggtgggcagttcgtgggtcaccgaaagctcgcggaggggacgcgcatcacatggcagctcgttcccagccccccgagtgcgccgggaagggggaggggaaggggcgaggggaggccggggggaaagcgagagcggggcggcggcgggagtgggcaggcggggtggcgagggcggcggccgctcacgttagcgctgtgcgaccgcagcccgggcgtgc

SEQ ID NO: 373455 - DNA, 327 bp, Homo sapiens
agttgatattagggttgtttccaccttttggctgctgtgaacaattgcccatgtgcacctagatgccaagttaagtcatagagaggcatgagggaagaagaaagacagctgaaaagaacctcccagggagcatcttctgtcttctagagccttcctctctctgtagttggtcatctacaggctctttaggaggctgggtcagtcgtggggccagatttgggatctgttttcaytggcttcagtatcttcgttaaaccagagatagaccctccatatcacaccctctggatttaaaaaggaatttacatcccaccctcagggcactag

SEQ ID NO: 373456 - DNA, 592 bp, Homo sapiens
gacttgtggttaggagcaaattttcaagggattttgctggtgccattaccttgagaacatgggaccttcagttattacagtcagaaatgtttactaatgggcagttagtgtaaacatgggagtcctttcctgacatttaatttaggtttgagtaaaagctgatgtgttagcacactattttgagaaataattttacaggcttggcaaaatgttaagcttgatgtcatcacagacttttgcagatttaggcttcaggagtcagcgcaagaaaaaatgctactcttataaaggctgaacagcaggaacaaagttaagtggatggcatgtagatgcatcactaatttgtctattttaaaacaaagatatacattttcttgataccaatagcttatagaacattaaacaaattaaaaggtttatttggactgtttccctgaaagcctccttcttcgktaggatttaatattttgccagaagaattatgtttggggatttatttttcaaattttttaaaaaagctattttcactaagctttgggaggggaaccatattaagctgtctaactaagcacatcaggcatcatcatgtcaa

SEQ ID NO: 373457 - DNA, 617 bp, Homo sapiens
acaacctaccaggattgactcaggaagaaatagaaagcctgtaacagaccaatcacaaatagattggagaagtaatgaaaaacctctcaacaaagacaagcccaggaacagatagcttcacagctgagttctaccagacattcaaagaattgataccagtacttcttaaactcttccaaaaaaayagaactagaaggaatactttcaaacacattttatgaggccaggatcaccctgatacccagccagccaaagacatcacaagaaaagaaaatttaaacccaatttctctgatgaatattggtgcaaaaagccccagtaaaatattaggaaaccaaatccaacaacacatcaaaaagattacatgtcatgactaagtgggatttatccctggcatacaaagctggtttaacatctgcagatcaatcagtagtgatacattgcattaacagaatgaaagataaaaatcacatgataatcttaattgacacagaaaaagcatttgacaaagtccaacatcctttattgagaaaaatgctcaatagtgtatgtatagaaggaaagcttctctatgtaataaaggccatttatgaaaaacccacagctaacattataat

SEQ ID NO: 373458 - DNA, 607 bp, Homo sapiens
tttttttaagtaaaattggcaaacccatagatagtctaacaaagaaaaaagaaaactcaagtaaaaccaaaaatgaaattgaagaaattacaacagacacctcgggaataaaaaggatgataagtccctattacgaacaattatatgccaacaaattgggtggcctagaggaaacagataaattcctaggaaaatacaacctaccaggattgactcaggaagaaatagaaagcctgtaacagaccaatcacaaatagattggagaagtaatgaaaaacctctcaacaaagacaagcccaggaacagatagcttcacagctgagttctaccagacattcaaagaattgataccagtacttcttaaactcttccaaaaaaacagaactagaaggaatactttcaaacacattttatgaggccaggatcaccctgatacccagccagccaaagacatcacaagaaaagaaaatttaaacccaatttctctgatgaatrttggtgcaaaaagccccagtaaaatattaggaaaccaaatccaacaacacatcaaaaagattacatgtcatgactaagtgggatttatccctggcatacaaagctggtttaa

SEQ ID NO: 373459 - DNA, 515 bp, Homo sapiens
ggcaaaaggcctgagtagacatttttctaaagaagacacaaagatggccacaggcatatgaaagggtayacaacatcatatcagggaaatgcaaatcaaaaccactgtgatttacctcctcacaactgttaggatggctgttatcaaaaagtcaaaagataacaaatgttggtgaggatgtggaggactcttgtccactgttggtgggaatgtagattgggtatagccgttatggaaaacgttatagaggtttctaaagaaattaaaaacagaactaccatatatgacccagccattccttttctgggcatatacccaaaggaaatgaaatcaccacctcataaagatgtctgcactcccatgttcactgcagcatgattcacaataactaagatatggaaacaacctaagtgtctgatgatggacaaatagagaaagaagtggctgtaagtataccacatttggtttatacaaaatgaatattattcagccctagaaaataatgagagcttgtc

SEQ ID NO: 373460 - DNA, 635 bp, Homo sapiens
cctctcaggcccaactcaaatgccatctcctctgtcattctccccatttaccacagttgagtgcctcctgtcttcctgacactctttgggtctcagtttcaccactcaggtggcccatggctgccttgatacttctgtatgagtctttcacctactagatttaaaacttgatgatagaactgtgacttcctagtacttacttgctcttagcacaatgtcttacacacagtacatttttagtaaacaattgttgagtgaaaatgaataaatattgcttattgtggagcagatagaatgaagttcagtttggagaatcagtcttgtgtggccacagatcacatgaggaatgtaaaaattaaataaataaaacaagcctaagataatgtgttagaaggggagaaaggcctgtaccgattttttgcatctctaatgatcatagagatatgatttgtattatttatgtgggctagaaaaggggatctctattagggctctgaagtttgtgaaggctccagccacccatctgatgttgaaaaagtcaattgattgagaacccactgtattwacaatcttgacttattttggagcgttaatggaggcaaactgagatttgggttggttggttgtagggagta

SEQ ID NO: 373461 - DNA, 580 bp, Homo sapiens
agtagagacctttccaaggcactatgagaaagaggtcaggggagtaattgtaaggaaacacatggattcaatctgaaactagaattttaaagctgtcaggttcgtctctcaagggctatggggttctgtttttctctgagtatctctgctccattccttgaacttctgaccagctttctctgtttacttgggaagtcatgatgtgaatctcagccccatccactgagcatctgggtaagtctcctggagtaatttgtccatgcatccattggattaytagtctccacttgccaagtggcagaacgtcagctctgcctggactcagtgggggattggggagatggctctgttagcttctgtggctctgccatggctgttctggctgccactccagccctcgttcatgttgcttgatagcacggcccatgctgctccacagaggtgctggccaaccctgacctctaatacaccccaggacctctgttcgctcacttgcgggcatctccctcctaaggaaatggctgcttctgctagcctcctctggtctaggtgatgtgggggacgatgattcccatgggaa

SEQ ID NO: 373462 - DNA, 559 bp, Homo sapiens
agcagaggttaacagtgaaccttcaggccaactaragttttcttctgcagattaatgaaagtttcttctcaagaggaacaaggcatataacccattctggcttgctaagcagtttcagttgtaagcactagccccaattaaggtaacatcctacttatagcttgtccccaagatcttcttgagaatattttagttccttaattagaaactttttattggagagatagctggcccccttaacgcttctttaacagtgctcccattgcagtggatcactctgaagtaacccatcaggctgtctgttatttcagtttctcaccaaatcataggaaatatgtttgcctgaattgtacagcaaccccctccccccgccccgccaagggagagggaagttgaaattatttggaggggtctgggattctttcagcataaaatcaaagaaacccaggtaaataagacatggttagtaaacatttgttctagatgaatataattcagccttctcaatccaaagtgaacaaatggatcaagagttgcctggaatagccactgtgtactc

SEQ ID NO: 373463 - DNA, 661 bp, Homo sapiens
gagtaagtttgcacaccttttcatgtggttgaggaccatttgcatttctttgtgaattttcttttcttttcttttcttttcttttttttttgagacagagttttgctcttgtgctctcattgcccaggctagagtgcagtggcgtgatctgagctcactgcaagctctgcctcccaggttcaagcaattctcctgcctcagcctcctgagtagctgggattacaggtgcccgccaccatgcccagctaattttttgtgtttttggtagagatggggtttcaccatgttggccaggctggtcttgaactcctgacctcaggtgatctgcctacctcggcctcccaaagtgctgggattagaggcatgagccactgagcccggcccgtgaattttctattcacattcttygctcggtttctttgggttattggacttttctcaatttctaagactcttaagcatgaaggacctcagccctttgtgatataggttgcaaacattttctgagtttgttgtttgtattctgtgcttatgttgcttttttatgatttgtatcaaccttttctgtcatggttattgaaccttgagctatgatcagaaaggcctttgagcggcactgcagacgggtgctccagggagatcagcacaccccaactccttg

SEQ ID NO: 373464 - DNA, 562 bp, Homo sapiens
agctacactgcagagaacaaacaggccccaggtatctctagttaggaaggcttggtttttgagtacagatttcattaccatgaaattcctttagggccagaaagaattgaatcaaataaactatgtarggagacagactttgtgaatctttgtcccatcacttgtgttattaggtgctcctctctctttaatttgtcagaaaatgctcatttttggattctcattttgtttttaaatatattttgttggctgggcacagtggttcatgcctataatcccagaactttgggaggccgaggtgggtggatcaactgagatcaagagtttgagaaaagcctgaccaatatggtgaaaccccacctctactaaaaatacaaaaattagccgggcatgttggcacatacctgtagtcccacctactcaggaggctgacacagaagaattgcttgaacctgggatgtggaggttgcagtgagccgagatcgcgtactgcactccaggctgggtgacggagccagactccatctatatatatatgtttatatgtacatatatacacaca

SEQ ID NO: 373465 - DNA, 562 bp, Homo sapiens
agctacactgcagagaacaaacaggccccaggtatctctagttaggaaggcttggtttttgagtacagatttcattaccatgaaattcctttagggccagaaagaattgaatcaaataaactatgtagggagacagactttgtgaatctttgtcccatcacttgtgttattaggtgctcctctctctttaatttgtcagaaaatgctcatttttggattctcattttgtttttaaatatattttgttggctgggcacagtggttcatgcctataatcccagaactttgggaggccgaggtgggtggatcaactgagatcaagagtttgagaaaagcctgaccaatatggtgaaaccccacctctactaaaaatacaaaaattagccgggcatgttggcacatacctgtagtcccacctactcaggaggctgacacagaagaattgcttgaacctgggatgtggaggttgcagtgagccgagatcgcgtactgcactccaggctgggtgacrgagccagactccatctatatatatatgtttatatgtacatatatacacaca

SEQ ID NO: 373466 - DNA, 601 bp, Homo sapiens
aaaactgaatcagagaaagactaaatacctagctgagattcagtgctaatatttttggtaaattgggtagaggaactggaaaagtgggaagaatcacaggtatttccatgttttcgaggctggaagacagaaaaccacaagaccaatttggatggtcttgtggtttgtttctttgctttgttttgtttttgtcattatttatgatgctgagggccttggggatgatgagtgtctaattagctatgatagtgagtcccttaagtagaaatgtcctggaaagacttgaaaatactctcctgaagatcagatgagaggtttggctgggaattttggatatgggaaccatcagggagataaaagatgcaattatgagagtgccagagcctcctaacctctaggatagagtgtatagaatttcttaagagaatcagcttgggagggcgagctccatgggcaaaactccagcatcaactcagcaactaaaattcccagccacttttgaagagctcttctattatatagtttggtcagcagctcagytccatattttcatctaccagaatgttcaaatcaatactcccagtcctcatgatttactgaa

SEQ ID NO: 373467 - DNA, 577 bp, Homo sapiens
tggattatctattggggtaatgaggtaaacgaggtttagctttgagaacatgttcataggctggggagcttgtactgctgtcacgtggctagagttccaaggtaaaagctattgtttatgagtttatatacatgtttagatgtgtttatatgcaggtacatttattatatgttatgcctacaaaattggcttataaataaaagagcactggtaaattaagtaaataagttaaagcaattttcaatttcatgtgacttaagtacatctttaataaacaagctagcttcaaaattataggtaagataaaaatagaaatatcttcagcaatgtcagtatacatttttgtctgggttttatttttatctctgataggtattttgagatgtaagggtttggcatagaaggttagcaaactataaacccagccaaaacaaaattatctttgtttgtgtgacaaataagactaatttaatgttgttagcttaataaaaacarccaaatcttctgagttattggcaaaaatacccatgcatttaactttcagtttcttacttaggtgaacacctgatgtttacaa

SEQ ID NO: 373468 - DNA, 534 bp, Homo sapiens
tgctctccctccagttatccatgtatctcattctttcyggacacaggacaaaaactcgggacccacctaatggcgggactgaaagagccttgacacaaacagggctgaaacacgagcctcacttgccatattgtaggtgacgaggagagaagagctgtggcccttcagggagcccagacctatgggctccccaagtcaggggtgtgacaccctctttggggctctgtggttcctggcatctcaaggaattatttatttatttatttgctgtttacttcgcgttttatttatatatacatatataaaatcattgatgtattttagtttctaatggaaggtttatgtttgcttctatgaatagtcattttgtttcttatgcatttccaacagttcataatttcctctatttgcataaaattcctaagctatctttgtcaagcctccacaaaatgaagagcacactagcaatttaaaaaataaataaaattgaatggttttgtttacctctgaggatttagagagatataagagctt

SEQ ID NO: 373469 - DNA, 534 bp, Homo sapiens
tgctctccctccagttatccatgtatctcattctttctggacacaggacaaaaactcgggacccacctaatggcgggactgaaagagcyttgacacaaacagggctgaaacacgagcctcacttgccatattgtaggtgacgaggagagaagagctgtggcccttcagggagcccagacctatgggctccccaagtcaggggtgtgacaccctctttggggctctgtggttcctggcatctcaaggaattatttatttatttatttgctgtttacttcgcgttttatttatatatacatatataaaatcattgatgtattttagtttctaatggaaggtttatgtttgcttctatgaatagtcattttgtttcttatgcatttccaacagttcataatttcctctatttgcataaaattcctaagctatctttgtcaagcctccacaaaatgaagagcacactagcaatttaaaaaataaataaaattgaatggttttgtttacctctgaggatttagagagatataagagctt

SEQ ID NO: 373470 - DNA, 534 bp, Homo sapiens
tgctctccctccagttatccatgtatctcattctttctggacacaggacaaaaactcgggacccacctaatggcgggactgaaagagccttgacacaaacagggctgaaacacgagcctcacttgccatattgtaggtgacgaggagagaagagctgtggcccttcagggagcccagacctatgggctccccaagtcaggggtgtgacaccctctttggggmtctgtggttcctggcatctcaaggaattatttatttatttatttgctgtttacttcgcgttttatttatatatacatatataaaatcattgatgtattttagtttctaatggaaggtttatgtttgcttctatgaatagtcattttgtttcttatgcatttccaacagttcataatttcctctatttgcataaaattcctaagctatctttgtcaagcctccacaaaatgaagagcacactagcaatttaaaaaataaataaaattgaatggttttgtttacctctgaggatttagagagatataagagctt

SEQ ID NO: 373471 - DNA, 606 bp, Homo sapiens
gatcctcagatcagattttatatgtatacattaaacagcgaaacaagttcagattgacattagcctgaagtaaaatttatctcatggcatcccttgtccagatcagccctggaccagttgtacatcaatatgtgcaatgagggcaccccctagtggttagatactaaagcagcttttcaactgacacttcatgtatataaagacaaaaacagtaatttaagagaaaaactatcaaaatagatgcactatgcagagtgatacattttaaaataagaatagaagtaaaaagaagaaaagtcttctcagcgtccccactgtcctcattccccaagctgttcccactagctgggtgcccagaggtggtccccatctagagatttttttatttgtctttctttttgttttgtgtttttggttttccccagtggtcacagttatcmtacactcatacgttatctttgatgtcctcaactttatgcagcattcaattcctgatgtgaaatctttggtttaaaagaaacaaaaatctttgcgtatggagtgtttttttcttgctagagctattgttatttaaaaaaatatgtttcctgctctaagtttgctgta

SEQ ID NO: 373472 - DNA, 606 bp, Homo sapiens
gatcctcagatcagattttatatgtatacattaaacagcgaaacaagttcagattgacattagcctgaagtaaaatttatctcatggcatcccttgtccagatcagccctggaccagttgtacatcaatatgtgcaatgagggcaccccctagtggttagatactaaagcagcttttcaactgacacttcatgtatataaagacaaaaacagtaatttaagagaaaaactatcaaaatagatgcactatgcagagtgatacattttaaaataagaatagaagtaaaaagaagaaaagtcttctcagcgtccccactgtcctcattccccaagctgttcccactagctgggtgcccagaggtggtccccatctagagatttttttatttgtctttctttttgttttgtgtttttggttttccccagtggtcacagttatcctayactcatacgttatctttgatgtcctcaactttatgcagcattcaattcctgatgtgaaatctttggtttaaaagaaacaaaaatctttgcgtatggagtgtttttttcttgctagagctattgttatttaaaaaaatatgtttcctgctctaagtttgctgta

SEQ ID NO: 373473 - DNA, 519 bp, Homo sapiens
agattaataacatgaataataaatattttattattcaatgtgtaaaaattgatagataatagttgcattcattattgctgacctccttcaccttatatatgtttgagataaaagatcacttagtaaaaatcatttcaacaaaatctcacaatagttatcctatgtggtcatttacaaacttccaaatggaagactcaggcaaaacataaagcaaaaattatctcaagtaatcttacaagaaggctattgaattttgatgttttgcttaaaaatcatgttcaagaaccttgtccytaagcacttcatcaaatcaagaaaatggagacaatttcatcactaatttttagcagttttcagtcaatacttgaggtatatagtaatgagctataatctttgtgtttgactcttgaagcttcaggttctttgatgtttccaagtcttccaacacagctagtgtgtttgtctagttctcttggaagttgtcctttattttaaaaatcattttagtaagtcagttaa

SEQ ID NO: 373474 - DNA, 598 bp, Homo sapiens
cttctcagtgattcattgaaaatacagttattaagcccgattctcacaccagataatattctacgtaaatatgtccgaaccattggcttcttatttatttctgtataagcttctagaggtttggaagtgatttgtctcctttcttatctctggtcttttgagcacatattttcctaaaatccttcctcaaacagatttttgtggtttgtttaagttcatttgctgatttccttttacttcttagaaggttcttcaaaatcttatttattatcaatttaaaacattgagttaattgtcacacgcattatagtttttcttggttattactttaaatatattattggtttaaatgtattttgtgtcacatcgtagataatttggaaaatacagagaaagaaaatgtaagcttctatgtaaccaggactaggaaataacaactgttaayacttttgcatatttcctgatctgtttcaatccccataatacactagtctgagtattctaaaggtggaggatggcaatggctctgagcagcaggtaccacaaagttaagtactgctcctaaagaacataattgcaccctcctccagtagtttgt

SEQ ID NO: 373475 - DNA, 598 bp, Homo sapiens
cttctcagtgattcattgaaaatacagttattaagcccgattctcacaccagataatattctacgtaaatatgtccgaaccattggcttcttatttatttctgtataagcttctagaggtttggaagtgatttgtctcctttcttatctctggtcttttgagcacatattttcctaaaatccttcctcaaacagatttttgtggtttgtttaagttcatttgctgatttccttttacttcttagaaggttcttcaaaatcttatttattatcaatttaaaacattgagttaattgtcacacgcattatagtttttcttggttattactttaaatatattattggtttaaatgtattttgtgtcacatcgtagataatttggaaaatacagagaaagaaaatgtaagcttctatgtaaccaggactaggaaataacaactgttaatacttttgcatatttcctgatctgtttcaatccccataatacactagtctgagtattctaaaggtggaggatggcaatggctctgagcagcaggtaccacaaagttaagtrctgctcctaaagaacataattgcaccctcctccagtagtttgt

SEQ ID NO: 373476 - DNA, 599 bp, Homo sapiens
agaatgcccagttaaatttgaattcagatacacaatgattttcgtttgtaagtatgtttcatgcaattttggaacatcttatactatatagtttaagtttaatttatagtttaatttctgacaaactatagtttatcagaaattaaaattcaactaggtatactgtatatttactaaatcttcagcatkattaagatttcagttcataaatgacatagtttattgaattttaaaatctttgaagttgaaataattgggaaattctcaaatagtaaagaaaataaaatgttacataaatcataaaataacttgcttactaacattgtatctactgaagaaattttagttttatcaaaatgcagttacaactaggcaactatttcataaattattattatataagagtacaagcaaagtatcaaagttcaaaatcttatgcagacacacacacacacatataactattacccagaacaatactgaaatgaatacacttaactgacctttgattaaaaaaaaggcaaaacagtgaaacaaacgtagtcattttgaaagaccatgctgtaaaaattaaacatccaaattcaaaaaaataaatt

SEQ ID NO: 373477 - DNA, 556 bp, Homo sapiens
tttgttctctgtaattaggctattcggatatgctaattggtgtccattaaagttaggttcctactcctactcaacagcaactggggtatggaatactatttttcctgatgactacattttgaacggatggctttcaggtcttcagagaggaacgtttctgaattattaaactggtgagagctagtagaagatatatacacatttcatagaggcagagagcatttggacaagtgttctgaagtaaatcctcaaagaacaggaagatggggcctatagtatggattaaaccagtctaaactttagtcaaactgaaggaaactttaagccatcttagtaaagcccaaagttataatcagttttcatttggattccaaattcaaagtgagtaaaattgattgcctcagggaaggttaaatgtctaatccaggtccaatcagaattatctgttcaagttgtataatgtggcttcccaggtagttctcagaggcatgggttatagttgagtaattctgcaaacatttattgtrctattgttctgaaaatgttgtttattatt

SEQ ID NO: 373478 - DNA, 554 bp, Homo sapiens
aacatgctttcgattttacagtctcatargtggcagggacttgccttgtttcaggtgagactttggactgtggacttttgagttaatgctgaaatgagttaagattttgggggactgtgggaaagatgtgattggttttgaaatgtgaggacatgagatttgggagggagcagggttggaatgatatggtttggctgtgtccccaccctaatctcattctgaattcccacttgtcatgggaggaagctggtgggaggtaattgaatcatgggggcagatctttcctgtgctgttcctgtgatagtgaataagtctcatgagatctgatggttttaaaaagggaagttttcctgcacaagctcttttctcctgtctgccaccgtgtgagaagtgctttttgccttctgccataattgtgaggcctccccagccacatggaattgtaagtccaataaactttttttttcttttggcaaattgcccagtctcaggtatgtctttatcagcagcatgcaacagattaatacagatgctcttgcctggttgctctggcc

SEQ ID NO: 373479 - DNA, 613 bp, Homo sapiens
agtaattaacatgctttcgattttacagtctcataggtggcagggacttgccttgtttcaggtgagactttggactgtggacttttgagttaatgctgaaatgagytaagattttgggggactgtgggaaagatgtgattggttttgaaatgtgaggacatgagatttgggagggagcagggttggaatgatatggtttggctgtgtccccaccctaatctcattctgaattcccacttgtcatgggaggaagctggtgggaggtaattgaatcatgggggcagatctttcctgtgctgttcctgtgatagtgaataagtctcatgagatctgatggttttaaaaagggaagttttcctgcacaagctcttttctcctgtctgccaccgtgtgagaagtgctttttgccttctgccataattgtgaggcctccccagccacatggaattgtaagtccaataaactttttttttcttttggcaaattgcccagtctcaggtatgtctttatcagcagcatgcaacagattaatacagatgctcttgcctggttgctctggccagtacttccagtactatgttgaatagtagtagtgatagagggcatctttgtc

SEQ ID NO: 373480 - DNA, 613 bp, Homo sapiens
agtaattaacatgctttcgattttacagtctcataggtggcagggacttgccttgtttcaggtgagactttggactgtggacttttgagttaatgctgaaatgagttaagattttgggggactgtgggaaagatgtgattggttttgaaatgtgaggacatgagatttgggagggagcagggttggaatgatatggtttggctgtgtccccaccctaatctcattctgaattcccacttgtcatgggaggaagctggtgggaggtaattgaatcatgggggcagatctttcctgtgctgttcctgtgatagtgaataagtctcatgagatctgatggttttaaaaagggaagttttcctgcacaagctcttttctcctgtctgccaccrtgtgagaagtgctttttgccttctgccataattgtgaggcctccccagccacatggaattgtaagtccaataaactttttttttcttttggcaaattgcccagtctcaggtatgtctttatcagcagcatgcaacagattaatacagatgctcttgcctggttgctctggccagtacttccagtactatgttgaatagtagtagtgatagagggcatctttgtc

SEQ ID NO: 373481 - DNA, 624 bp, Homo sapiens
attgggctccagctttgatctctggctcctcaagttttggattgtgctgcactgttggggctgaggtgctctcggacttctggtcaaaacactctgatagttgttaccagccaaagcacttcataggatggttgtagtgggatctgttcttgtttgcatgttccaggagcggcagcagtggcagtgtggtggagtgcatgctcagcagctgcagcagggtgctagcaggtgacagggtgtcagcctccttgcagatgttcacaccagcagtgggagcaggatatcttatgggtaccagaggcccctgctggcaactgtgcatgtgtttataccagtggtggtttagcatggggttagggtgctggctggtacaggactgcatgcaccctctgtgtgtgttcaacttggcgatagtggttgttcaggactagggacaggtccacggttttctgtgcctagttttgtgcagatggccccagttcagggtcagtgtgctggttggggtgggactgacaggctccctgctgmcaatgcttgggcaacattggaggtacagtgggaagaggggctgtgatgcactcagataggcagcagtgacatggaaggatgtatgcgcacacacat

SEQ ID NO: 373482 - DNA, 487 bp, Homo sapiens
ttgaagtaacttaccaaagtgacaaaggtagtaagtggtagaactggccttgaaagtcaggaaacttgactgcagatgtcctgctctaaattacatcttacattaacatatttttacaatattatggcaatcacactcattacatttgtctaagactatttgtatccagttctttctttttttttaaaaaaaaaagtatgaactcccagatgtttggttgctaacctaaataaatttattcattcagcaaatatttgcacaatkatttgattgctgatctatagaaagcataatggctctcagagcattaagcataaaatgttaaacaaaatcaacacagattaaattggaggtctagtaaaggaaagagcaacacacaaataaataaataccacagcatactttttttttctgtgattaagttgctagctcagtattcaaaatcagctttcttttattacctattacccagtagactaatagtgtt

SEQ ID NO: 373483 - DNA, 487 bp, Homo sapiens
taggttgtcagttttattgttgcttcaacaaaggtaagtttattttcctagttattttacattctttactgactttgaatcatctttgatctgcttatttctttctctaagttctcatgtttaaaaaagttttttctaatgtgctgcagattgtatatttttaaaaatgtacacaggcaacagatgatgtatttattatccagaagcagaatacacttcccccactaggtaaataaagtargaagttcatcatcttcatccctcagggattgagtaggaatggaaatggatttcacttttgataaaggagtatgtgtgtttgaggaacatgacaggtatctggggaccatattcctcaactgcatatttgattgtatgtagttttatcagttttaaaaagacagtaaccttaactgtgcttaaggcaatactgttgttaaggtctcgccaatgcactacagtgtaacaaactctccttgtttgaggt

SEQ ID NO: 373484 - DNA, 545 bp, Homo sapiens
gtgtaacaaactctccttgtttgaggtattacctggagttatttttctcatgatcaggaaacttaaggagcgtggacagaaagggtgaagctggagcgaaagttggtaaagaaccaattggaggcagcggtgaaggcttgacctgggaccaattaggggctgaaataaaagcttagcccaggaccttggcccaggatcaatcaggggctgcagtgacgattcgccttgtttaaatgaagacttagcccacggacaattacagaaaggtaggcgtatgtcaaatggtgaaaagtaagaggccaatagatgaaaagtaagagacttaggcatgtcaaggaaagagaaatgtctccaaagagagagtggaatttttttttytaggttcacagagtaagcatttccattcaaggacgtgggctctttcctatcaggggccagcagtttgattttcaggatgttctttgaaggagttttaccaaggatccaccctaactgtgacgggtttcttactttctcctctaacattgtcataactattgaaatca

SEQ ID NO: 373485 - DNA, 545 bp, Homo sapiens
gtgtaacaaactctccttgtttgaggtattacctggagttatttttctcatgatcaggaaacttaaggagcgtggacagaaagggtgaagctggagcgaaagttggtaaagaaccaattggaggcagcggtgaaggcttgacctgggaccaattaggggctgaaataaaagcttagcccaggaccttggcccaggatcaatcaggggctgcagtgacgattcgccttgtttaaatgaagacttagcccacggacaattacagaaaggtaggcgtatgtcaaatggtgaaaagtaagaggccaatagatgaaaagtaagagacttaggcatgtcaaggaaagagaaatgtctccaaagagagagtggaatttttttttttaggttcacagagtaagcatttccattcaaggacgtgggctctttcytatcaggggccagcagtttgattttcaggatgttctttgaaggagttttaccaaggatccaccctaactgtgacgggtttcttactttctcctctaacattgtcataactattgaaatca

SEQ ID NO: 373486 - DNA, 545 bp, Homo sapiens
gtgtaacaaactctccttgtttgaggtattacctggagttatttttctcatgatcaggaaacttaaggagcgtggacagaaagggtgaagctggagcgaaagttggtaaagaaccaattggaggcagcggtgaaggcttgacctgggaccaattaggggctgaaataaaagcttagcccaggaccttggcccaggatcaatcaggggctgcagtgacgattcgccttgtttaaatgaagacttagcccacggacaattacagaaaggtaggcgtatgtcaaatggtgaaaagtaagaggccaatagatgaaaagtaagagacttaggcatgtcaaggaaagagaaatgtctccaaagagagagtggaatttttttttttaggttcacagagtaagcatttccattcaaggacgtgggctctttcctatcaggggccagcagtttgattttcaggatgttctttgaaggagttttaccaaggayccaccctaactgtgacgggtttcttactttctcctctaacattgtcataactattgaaatca

SEQ ID NO: 373487 - DNA, 571 bp, Homo sapiens
attggaaaatttgactatttcattgtgaatgttacttgtaagttttgctttatcttctactaagttactgtctttattcttattgaattaaaagttttcagtaagaccactaattctgctttgcatgtgtttttcctccttatttaaaatacactattctatcctgtagacatattttaaacttatattcagtcaaatttaatttatttttaatatttaagaattttaataatatgtttaatatgttagaaaccctttaccttagccaacttaatagaartattcacttatgtttacttgtttttaaatttaagttcttgtttataaggatgtttttcttcaaatactcatctacatatttcatcatcacttattaaacatttttatgtgtattgttcaatactttttatcatatgcaacaaattctcatgtggacttttttctccttctttcatcaagtccactaatttatgtttatatccacaggaactactacattttccaaaaatgttaggtttgtgttttatttttatttatggtatattgctccaaattcttcttaaattaaaaa

SEQ ID NO: 373488 - DNA, 535 bp, Homo sapiens
actttgaacagtttgcactgtcttctttattttgtgatgttatatttatatttattcaaattatctttgtatgtaatgttttgacttccactagatgctgaaaagtttgcttttctttacctttggttttctgaggtttcctttgagtttatactctttgggatttgctaagcttctggaataygtaatgtatgtttttcactaattttgagatgttttcaaacaatattccttcaaatatttttggttttgtttttgcacagatctctttcctgccttcttctggaacttaagtgacacaaatattaggtatttgatagtattctacaagtatggttggcactgtttaatgaatatcaatgtattattttccctctgttcctcagttctatattgaagttttatgtgataattgaaacatcttggtcaccagaagttgactttatttaagaaaattttatttaattaattgattaaatgtttttaacttaccagatattcttgctttttatatgtcaagtactattgtattgca

SEQ ID NO: 373489 - DNA, 604 bp, Homo sapiens
gacacaaatattaggtatttgatagtattctacaagtatggttggcactgtttaatgaatatcaatgtattattttccctctgttcctcagttctatattgaagttttatgtgataattgaaacatcttggtcaccagaagttgactttatttaagaaaattttatttaattaattgattaaatgtttttaacttaccagatattcttgctttttatatgtcaagtactattgtattgcatccttgaaatacaaaacatcttgggaaaatctctgttctgttaaaattccttagaggatgttaatttgctcattttatcagaaaattaactcaggtgtgaactgatatttgtgtgggcagtgattccaatgttagtttaagtttcaaaaatgtttccaggctatttgggttcatcatgagcatgggccactccaaagttaagagacatgagtgatgctttatgtcatagttctcttctcacagcctttgcatgatgtgtgctctacttccttggatctctttcatgtatgtatgcacagcttattgattaacctagtccttgtgttagatmtacacagtgttactaaaatttcttcagcagctt

SEQ ID NO: 373490 - DNA, 555 bp, Homo sapiens
aactggccctaggggaactgtcagacctgaactctgcaaggtgatcttccccttgaccagatggggctgttmtgacctgagtactgcttggtctgctggcttctcacagggttccagcctggctgcacctgcttgcagggtagcctcagctgcccttggggcccgcatcatagttccagtactggtggactgtgcatgactggtggagagctccagtaggctgaaccccctggccatgcaccagcccactagctccctcctgttactgcaacttccccagggacaatggccactccagatatcactttgctggtttgtgggccaggcaggttttgccttccttgcacagccaatgcatgtgtatatgttcaccatgcccagtcactgctgaagggggagccactctgccctctcttggcctgccatactgccattgcagtcagaaccttggcaaacacagagccagccagccccacccccaccagtgctggcctctgcaccaaaactgccatgggagtaaaactagggcagaaaatgctggaccctcccctgcgc

SEQ ID NO: 373491 - DNA, 350 bp, Homo sapiens
agctatgaattattgtggaaatactgtccaattagtgaacatcttactcagatcacttcaaacagaaaagtcctccatcyaaagttgtttgacagaggaaactacttttattttaggagaggaagataggagaccctgaatagaataattttattaatctatatatctagttctttttttctcctttcttccttcctttctgtttttctttcttcccttctttctcctttcctctattccttgcatccccttttccattaggctgtaggacacacacacagacacacacacacacacacacacacacacacacatatacacacaccacagtggcaagggatcatttactg

SEQ ID NO: 373492 - DNA, 617 bp, Homo sapiens
aactgaaacctccaaaaacaaaacttcagataagaggagacttctgtaataaatgtactgcaagaaaacaggagaaaattgttgttgggttaagcttgggttaagcagagcattcytcaatatgacaccaagagcaagatccatagagaaataaaatgaaaagttggaattcctctaaattaaaacctttatctctgtgaaagtcaccattaagagataaaaagacaagtcacacgtttagaaaaaacattttcaactcacttgtctgaaaatgaacttgtattcaaaatatattagaaaaattacatcaacaataagaaactgaacaacctaactttaaaaatgacaaatgcttgataggatgtttcatcaaagaaaatatacttttagcaaataaacacatgaaaagatatttgcaggttttttagaagtggattgtttactttccaagtacaggggcagggagaaggttatatattcttatattattggattctagcttaattccatttcagtcagtgaaatctactagacagttgcttcatgatccatcatatggcctatgttgttgaagcatttttgtacctttgtaaaaatatggattctgcattgttgga

SEQ ID NO: 373493 - DNA, 555 bp, Homo sapiens
cgattcctttgggtgcctacatcacaagggccctggatttcaagcataaaactgggcagttgtttgggmagagactgagctagctgcaggagtttttttcataccccagtggcacctgaaatgccagcgagacagaaccatttgctcccctggaaagggggctgaagccagggagccaagcagtctagctcagtgggtaccaccccagtggagctcagcaagctaagatcccaggcttgaaattctcgctgacagcacagcaatctgaagtcgacctgggatgctcaagcttggctggggaggagtgcctgccattactgaggcttgagtaggcagttttcccctcacagtgtaaacaaagcagctgggaagttcaaaatgggtggagcctaccacagctcggcaaagctgctctagcccaactgcctctctggattcctcctctctgggcagggcatctctgaaagaaaggccgcagccccagtcaggctcttatagataaaactcccatctccctgggacagagcagctgggagaaggggcaactgtgggtgc

SEQ ID NO: 373494 - DNA, 555 bp, Homo sapiens
cgattcctttgggtgcctacatcacaagggccctggatttcaagcataaaactgggcagttgtttgggcagagactgagctagctgcaggagtttttttcataccccagtggcacctgaaatgccagcgagacagaaccatttgctcccctggaaagggggctgaagccagggagccaagcagtctagctcagtgggtaccaccccagtggagctcagcaagctaagatcccaggcttgaaattctcgctgacagcacagcaatctgaagtcgacctgggatgctcaagcttggctggggaggagtgcctgccattactgaggcttgagtaggcagttttcccctcacagtgtaaacaaagcagctgggaagttcaaaatgggtggagcctaccacagctcggcraagctgctctagcccaactgcctctctggattcctcctctctgggcagggcatctctgaaagaaaggccgcagccccagtcaggctcttatagataaaactcccatctccctgggacagagcagctgggagaaggggcaactgtgggtgc

SEQ ID NO: 373495 - DNA, 555 bp, Homo sapiens
cgattcctttgggtgcctacatcacaagggccctggatttcaagcataaaactgggcagttgtttgggcagagactgagctagctgcaggagtttttttcataccccagtggcacctgaaatgccagcgagacagaaccatttgctcccctggaaagggggctgaagccagggagccaagcagtctagctcagtgggtaccaccccagtggagctcagcaagctaagatcccaggcttgaaattctcgctgacagcacagcaatctgaagtcgacctgggatgctcaagcttggctggggaggagtgcctgccattactgaggcttgagtaggcagttttcccctcacagtgtaaacaaagcagctgggaagttcaaaatgggtggagcctaccacagctcggcaaagctgctctagcccractgcctctctggattcctcctctctgggcagggcatctctgaaagaaaggccgcagccccagtcaggctcttatagataaaactcccatctccctgggacagagcagctgggagaaggggcaactgtgggtgc

SEQ ID NO: 373496 - DNA, 559 bp, Homo sapiens
gtgaagaaaaatattacatttaccttcttaggactttccactgggcctgagaattaaactgatatgaaacatagcaacagcgtaaaatcacgcaaatttatttaatataaattttatgtgatacaggagccctcctaagcaaataaagacacaaagaagcaattagagtcaaatgctgttatagtatatccacatttttcagttttacactataaagtgtaatgaaytgtaaaagcttgaaaaggcaaagatgcagaggccagggtagtcagttaagtaaagttaggacagctaattgagcccctcgcccagataaaaattagtttaacaggatttgtttgcagaaacttctctaggttttcacttcctattcttgacaatgagaatattactttcttccctggtatagggagactatctttgacatagcgggggttatatctcctgctttccataaatgttgtttatgagcttcatttagtttatgtgtgtcgtaaatcaatcattcagatttttgcatagcattttcttgtgtgaacagttattcaaccaatgatgg

SEQ ID NO: 373497 - DNA, 625 bp, Homo sapiens
aaatagccaataatatcagttcagggactttaattgtggtcttcctgaccatattgctttataatccgaatattatcgtaatcctattagtacattaaattagaatttaacaagataatatctgtggcagcctgctgtacagcttacaattcaacagccattgtttcttcaagttttatagtttcctacatcttttatatactatatgcacagaagctttgtgaggaagttttattctctccattttacaaatggggaaaatgagattcacaagagataagcaacattcatgaatttatattgaattaaatgtttaggtcagagtacacraattgaagaatatgagtaatttgaggacagggactctttttttttcaccactgcatcctgagtccctgtaagagatctggcacataggaagccctcaataaatgcctgatgaataattgaataactgaataaaaatagccaagaaaaggattatatgaatagaagtaagtatgtagacaggtctctcaaccttagttgtctgcctccaatccttcatgataaggaaatattctttcttgagaaactgttattattttttaactgagttttaatttaaatagaattgcctataaaa

SEQ ID NO: 373498 - DNA, 549 bp, Homo sapiens
agacaagtagctacttacaatggccaatattgtgaatcttctttaattatctataacatrgtgaacaccaatatatgaaaccatgaaaaatagtcgttttgtttgggcatagcattacatttccatttcgttttgtgaccctagcatattgagaaataaataggcattgatttcctctatcactgacttattaatgtaaacaattattttttttttaccaaataaaaacccaaagtcctgtttgtttgtttgtttgtttttggctttactaatcacttgtttatttatttactttacaaaagggaatggcaagaaacaaagccaaccaaaacaaacaaacgaacactttagacagattagctttaaaagagcttaactgagcaaagaatgattcataagtcagccagcgtcctgaaccagtagaagttcaaagagctctacccagcagtgcaagcagcaagcttatataggccagacacagaggcaaagtagaaaaattacttgattggctatagctaggcatctgccttttttggacatggtgtgatg

SEQ ID NO: 373499 - DNA, 549 bp, Homo sapiens
agacaagtagctacttacaatggccaatattgtgaatcttctttaattatctataacatagtgaacaccaatatatgaaaccatgaaaaatagtcgttttgtttgggcatagcattacatttccatttcgttttgtgaccctagcatattgagaaataaataggcattgatttcctctatcactgacttattaatgtaaacaattattttttttttaccaaataaaaacccaaagtcctgtttgtttgtttgtttgtttttggctttactaatcacttgtttatttatttactttacaaaagggaatggcaagaaacaaagccaaccaaaacaaacaaamgaacactttagacagattagctttaaaagagcttaactgagcaaagaatgattcataagtcagccagcgtcctgaaccagtagaagttcaaagagctctacccagcagtgcaagcagcaagcttatataggccagacacagaggcaaagtagaaaaattacttgattggctatagctaggcatctgccttttttggacatggtgtgatg

SEQ ID NO: 373500 - DNA, 633 bp, Homo sapiens
tcggcccagaggccttaatgaaattagacaaaaaagaataaatctgtgatatagtcaatgtatgatttcaatgataattgatgggtatgatgctaagtcggatcatgtgacttggatcatggttcaaaaatactctaccaatgctcattttaatgtccatgattgttggggaatggacactgctaagagttgcatccatggggaaacttcataatctcaagaggatcactctagtcttaccattttttttttttatttctgtagctctcagttacttaggcatttttttcttctttattctctgtgaccagtgtatccttgtgcccatctttgccctctcactcttaggtgcattgagatgactgatatgcttccactgtcttctcaggtttcttactttcccccaaaataatcacaatggcagtcttcttatttttcttacttttaaaaaaatacatgagtcttccagaagaataatgaaaaacaragcatggtttttgaattttcacaaaatttcccagaaaatgaaataaaccaatcgggaaagggaaaaaaagaaacacacaacatgaagatggtatcctcaataaaacttgtaaggaagaaatcctgatgaacttctgaacatgggcc

SEQ ID NO: 373501 - DNA, 545 bp, Homo sapiens
attatgcatacaaacctgggtgagggacttaaaaatcaatcagtaagactaagaaaatctacagattttaagtttctggtgagtacaaaagaactacatgcatggatatagaagaatatatagaataatatacaaaattgtgttggtttaagttcttatgactctcagaactgttcatcagatgctattttgaaatgacagagactactcatgatgaaatatactgaaattasaaaccaaattgagcatagcaagaagggtggggtcaagagaaacagaagattcagatagctgcgtgggagaacagatcacaaaattcttgttaacaagaaaattcaaaacctcaaataagagggaaaaatctaaatagagcaatttaaagggacaattaaagaaatgtgtgaatgaactttctatccacataaaaaaacaaacaaactgaaaaattatgtcctcaccagacatggtggctcatgcctgtaatccaagctctctgtgggatcaagatgagaggattacttgaggccaggagttcaagaccagcc

SEQ ID NO: 373502 - DNA, 611 bp, Homo sapiens
tatgtaaaatataaaatacaaaatcaatacaagtaaaaataagtaaatttgaataaaactttacgatgtggaaggatatttttatcataaacaaaattaaaaaggcaaaagagccaaaagaggagatttgcaatttatacacaaagataaaccttaatactgttcttcaatatctagaagacaaaattagtgaaagtcagctaaatatgtaaaaaatgcaaaagaagaaaataaaaactcttaaacttatgagacaatgctcaacctcaaaaataaaatacatttaaattacaggtaaatttaagtaakttactcatcaaaaatccaagtatttaaaagtggcaaaattgcagattacacatactcattttctcttgccaaaagtagatgctgattattagttttctatggctgctgtaacaaatgttcacaaactgggtggtttaagacaactgaaattatcagcacagctctggtgggtagaagtgcaaaatccagatgtcagcagagttggcttctgaagttctgagggagaatatggcccatgcttctctcctagcttctgccagttgccaagaatacctgtcattttgtggcaggcaatctccctg

SEQ ID NO: 373503 - DNA, 515 bp, Homo sapiens
ctagaggggaagacagacattaattcgtaaccacaaaaataatgacaaagtaacaggtatgaaaagggctatgggggctgagaacgtgtttatttgagaggtttggtgattctgagaatcaggaaaagccatcttcaaaaccctgctcaaaagcctgccctaattcctcccaactggaagtgatcctattggcttgtaaattctcagcaggaagcatgcatcctgcaattgacacttagcttaccgtattgtgtccagtattttcaccagtggtgtacacatcctgtctcctctgccagagtgtaaattctctgtaggcagagtaggccatctacatctttgcgtgcgtcacagtatctgttaaaagtcgattattttaaygaatcggcgaaattagcttcctgaaagctgccacaatttaactggactcgaagctttatgtttgctttttgcaagccaagttctcattgatttctaagtcattggtcagaacataagaggtggtgtgtagggaa

SEQ ID NO: 373504 - DNA, 472 bp, Homo sapiens
ataatactgtatttttcctgtgccttttctatgtttagatgtgtgaaatacacaaatacttattattgtgttacaattgcctacagtattcagtacagtaataagctgtcctatgtttgcagcctyggcgcaataggctttaccacatagcctagctgtgtaggtctgtgtatactttggaggtttgcacaatgattaaatcacccaacgacccatttctcagaaggtattcccattgttaagtgaagcatgaccgtattgagagacggccccaagattcttgtccccagatgtatacaccctatgtgatcccttccctttggagtgtgagccggagtgtaaacaggatgggatttcacccctgtgattaggttactctatccagcaatgatggggagaattttcacatgtaattaaggtccttgatcagttgaatttcagtgactcaaaagagagatcatccttagtgcgc

SEQ ID NO: 373505 - DNA, 472 bp, Homo sapiens
ataatactgtatttttcctgtgccttttctatgtttagatgtgtgaaatacacaaatacttattattgtgttacaattgcctacagtattcagtacagtaataagctgtcctatgtttgcagcctcggcgcaataggctttaccacatagcctagctgtgtaggtctgtgtatactttggaggtttgcacaatgattaaatcacccaacgacccatttctcagaaggtatycccattgttaagtgaagcatgaccgtattgagagacggccccaagattcttgtccccagatgtatacaccctatgtgatcccttccctttggagtgtgagccggagtgtaaacaggatgggatttcacccctgtgattaggttactctatccagcaatgatggggagaattttcacatgtaattaaggtccttgatcagttgaatttcagtgactcaaaagagagatcatccttagtgcgc

SEQ ID NO: 373506 - DNA, 472 bp, Homo sapiens
ataatactgtatttttcctgtgccttttctatgtttagatgtgtgaaatacacaaatacttattattgtgttacaattgcctacagtattcagtacagtaataagctgtcctatgtttgcagcctcggcgcaataggctttaccacatagcctagctgtgtaggtctgtgtatactttggaggtttgcacaatgattaaatcacccaacgacccatttctcagaaggtattcccattgttaagtgaagcatgaccgtattgagagayggccccaagattcttgtccccagatgtatacaccctatgtgatcccttccctttggagtgtgagccggagtgtaaacaggatgggatttcacccctgtgattaggttactctatccagcaatgatggggagaattttcacatgtaattaaggtccttgatcagttgaatttcagtgactcaaaagagagatcatccttagtgcgc

SEQ ID NO: 373507 - DNA, 407 bp, Homo sapiens
tgatttgcctcattttgagtgaattattctctctgttagtatagataattgagagctggacatgccccatccaaaagcatgtgtttacacttgctttaagcaccaatattgcaagataaatataatccaatatggggggtgggttgaagagtgggaacattatccaattggaagtattgtcaaggttgaactatgaaaataacccttcaacctcatttttctcctctcacagggctgcaacagtacaacgtacatacaggatgccttccagctgctgctgcctgttctgcaggtctcacatatccagaccagttgtttgaaagcrcagccgtgacctggccagactccatctagttaaaggagacagctggccgccttgcctcaatactgtaccatttaaggggatg

SEQ ID NO: 373508 - DNA, 648 bp, Homo sapiens
aatatgacttttataatttctgttttgggatacttaatttaagatgtatgtatttgacytaaaaaacaattgattttagtaaatgctctatgaactctagagacttagacatatgatgttctctttttgtagggtacagcttatgtctctattaaatcctttattaatttctcattcaaatttccatatatgtttttattttttgctacttgatctaacagtgacccagagaaatatgctaaatacttttactcacaatgtctccatgtgttttgtaacattttttactttgtaaattttgatgcaatattacttgctgcataactgttcttatctgttacatcttcattgtgaactatttgttttgaccatataaccagtataaagtagtagcttctcctatcgttgcccaactctctagtactttgaccgatatatactttgtatatattgtgtataaaaactgcaattcctgatgaacaccgctaccagtattccagtcgctgtccatatcggtaagtattgtctgagttacacatctcagaatgcggtgtgctccctaaagtggttccctgccccatgtccagctcttacctggtagtgtccatcactaagtgtaaagtttggggagaatggagtgtggcagtc

SEQ ID NO: 373509 - DNA, 648 bp, Homo sapiens
aatatgacttttataatttctgttttgggatacttaatttaagatgtatgtatttgacctaaaaaacaattgattttagtaaatgctctatgaactctagagacttagacatatgatgttctctttttgtagggtacagcttatgtctctattaaatcctttattaatttctcattcaaatttccatatatgtttttattttttgctacttgatctaacagtgacccagagaaatatgctaaatacttttactcacaatgtctccatgtgttttgtaacattttttactttgtaaattttgatgcaatattacttgctgcataastgttcttatctgttacatcttcattgtgaactatttgttttgaccatataaccagtataaagtagtagcttctcctatcgttgcccaactctctagtactttgaccgatatatactttgtatatattgtgtataaaaactgcaattcctgatgaacaccgctaccagtattccagtcgctgtccatatcggtaagtattgtctgagttacacatctcagaatgcggtgtgctccctaaagtggttccctgccccatgtccagctcttacctggtagtgtccatcactaagtgtaaagtttggggagaatggagtgtggcagtc

SEQ ID NO: 373510 - DNA, 648 bp, Homo sapiens
aatatgacttttataatttctgttttgggatacttaatttaagatgtatgtatttgacctaaaaaacaattgattttagtaaatgctctatgaactctagagacttagacatatgatgttctctttttgtagggtacagcttatgtctctattaaatcctttattaatttctcattcaaatttccatatatgtttttattttttgctacttgatctaacagtgacccagagaaatatgctaaatacttttactcacaatgtctccatgtgttttgtaacattttttactttgtaaattttgatgcaatattacttgctgcataactgttcttatctgttacatcttcattgtgarctatttgttttgaccatataaccagtataaagtagtagcttctcctatcgttgcccaactctctagtactttgaccgatatatactttgtatatattgtgtataaaaactgcaattcctgatgaacaccgctaccagtattccagtcgctgtccatatcggtaagtattgtctgagttacacatctcagaatgcggtgtgctccctaaagtggttccctgccccatgtccagctcttacctggtagtgtccatcactaagtgtaaagtttggggagaatggagtgtggcagtc

SEQ ID NO: 373511 - DNA, 648 bp, Homo sapiens
aatatgacttttataatttctgttttgggatacttaatttaagatgtatgtatttgacctaaaaaacaattgattttagtaaatgctctatgaactctagagacttagacatatgatgttctctttttgtagggtacagcttatgtctctattaaatcctttattaatttctcattcaaatttccatatatgtttttattttttgctacttgatctaacagtgacccagagaaatatgctaaatacttttactcacaatgtctccatgtgttttgtaacattttttactttgtaaattttgatgcaatattacttgctgcataactgttcttatctgttacatcttcattgtgaactatttgttttgaccatataaccagtataaagtagtagcttctcctatcgttgcccaactctctagtactttgaccgatatatactttgtatatattgtgtataaaaactgcaattcctgatgaacaccgctaccagtattccagtcgctgtccatatyggtaagtattgtctgagttacacatctcagaatgcggtgtgctccctaaagtggttccctgccccatgtccagctcttacctggtagtgtccatcactaagtgtaaagtttggggagaatggagtgtggcagtc

SEQ ID NO: 373512 - DNA, 577 bp, Homo sapiens
tgttttctttcttggattatgtttttgatgcgtatctcaaaagtcatcaccaaatccaaagtcacctagattttctcctatgttatcttctggaaattttatagttttgcattatacatttaggtctatggttaattttgagctgatttttgtgaaaactgtaaggtctgcgtctaaattctttctcttcttcttctttttttttttttgcatgtggaggtctaattgttccagcaccatttgttgaaaagactatccattctccactgagttgcctttgctcgtttgtcaaacagcagttgattatttttttgtgggtctatttctaagctctgtattctggtcatttgacctatttgtctattctttcaccaaaaccacactgccttgattgctgtagctttgtagcaagtctcaatgttaggtggtgtcagttatctggctttgttcttttaatttcttttttttttttttcctgtgaatgaacaatactttctgtttctttgcatggctaatttttttaaacaaataaattaragattcctttaatgccaagttacacaatcaaaaagataac

SEQ ID NO: 373513 - DNA, 399 bp, Homo sapiens
ccattcttagcacccgcaatctccatgaccatctcctaactctctccctccccctcatctatttcctacccatggatgaaactgtttgtgtctcacctactactacagtgagccccttctgcttacctccctgggccccaggctggccccmctgggtgctcctggcagcaaagtccatgtctgattagggaacttcttattaggaggcttccttgtttgctttacccaccttctccagactgggacccctggagacagagcccttagctcccgaggccaggtggtcccttgctgtgcccagcacagatcctggtgcctgggaggaaggcagtaaatctgtgtgaagtgggtcatttcattctgcattggaggatcattttcatgctccataacccacgg

SEQ ID NO: 373514 - DNA, 607 bp, Homo sapiens
gctgctgcaaatcaaaaatccctggtgctgaacaacagccagggggctgctactggggatggctcctcctcgcccygcctccctgtctcctttcactgcatctgatcttttcttctcttcctcagcattgtatcagttccccttggctgctcattgctggttttggaggcactaaattgttacaacctctgcttgttgggtaaggaggagtttggcagcatatattcaaaagttaacacaacctttctctttgcaattctaccactaaggatttatctaaagaaaataatggatcggcctggctcggtggctcactactgtaatcccagcactttgggaggccgaggtgggctgatcacctgaggtcgggagttcgagaccagcctgaccaacaaggagaaaccctgtctctactaaaaatacaaaattagccaggcatggtggtacatgcctgtaatcccagctattcaggaggctgaggcaggagaattgcttgaaaccgggaggtggaagttgcagtgagctgagatcgtgccattgcactccagcctggacaacaagagcaaaactctgtctcaaaaaaaaaaagaaaaagaaaataagaatg

SEQ ID NO: 373515 - DNA, 607 bp, Homo sapiens
gctgctgcaaatcaaaaatccctggtgctgaacaacagccagggggctgctactggggatggctcctcctcgccccgcctccctgtctcctttcactgcatctgatcttttcttctcttcctcagcattgtatcagttccccttggctgctcattgctggttttggaggcactaaattgttacaacctctgcttgttgggtaaggaggagtttggcagcatatattcaaaagttaacacaacctttctctttgcaattctaccactaaggatttatctaaagaaaataatggatcrgcctggctcggtggctcactactgtaatcccagcactttgggaggccgaggtgggctgatcacctgaggtcgggagttcgagaccagcctgaccaacaaggagaaaccctgtctctactaaaaatacaaaattagccaggcatggtggtacatgcctgtaatcccagctattcaggaggctgaggcaggagaattgcttgaaaccgggaggtggaagttgcagtgagctgagatcgtgccattgcactccagcctggacaacaagagcaaaactctgtctcaaaaaaaaaaagaaaaagaaaataagaatg

SEQ ID NO: 373516 - DNA, 607 bp, Homo sapiens
gctgctgcaaatcaaaaatccctggtgctgaacaacagccagggggctgctactggggatggctcctcctcgccccgcctccctgtctcctttcactgcatctgatcttttcttctcttcctcagcattgtatcagttccccttggctgctcattgctggttttggaggcactaaattgttacaacctctgcttgttgggtaaggaggagtttggcagcatatattcaaaagttaacacaacctttctctttgcaattctaccactaaggatttatctaaagaaaataatggatcggcctggctcggtggctcactactgtaatcccagcactttgggaggccgaggtgggctgatcacctgaggtcgggagttcgagrccagcctgaccaacaaggagaaaccctgtctctactaaaaatacaaaattagccaggcatggtggtacatgcctgtaatcccagctattcaggaggctgaggcaggagaattgcttgaaaccgggaggtggaagttgcagtgagctgagatcgtgccattgcactccagcctggacaacaagagcaaaactctgtctcaaaaaaaaaaagaaaaagaaaataagaatg

SEQ ID NO: 373517 - DNA, 579 bp, Homo sapiens
atgagtggcacgttcacccctgtcctgtgctatgaaagccttcaccttcctaatggaggaaccttgatgagggcatgaaattcaattcagttgggtgtgaaacaatggttgtacttaataatgaattcaaagcaatagaattgacttgcacagcatttttactctatttttagagtgtatgagtttttaaactattatttattgaagatactttttcaaaatatccatttttaaaaatttttaaagcaccaagccaaattattgatctattggggccaattccttcttgcaatttatagtgtccagtttccttccatgtgttatagcccaggtaagacgccacagggagcacactggaatcacctggggagcttgacaagctattgatgcctggatccaactccaaaarggtttaagacaatgtctaggtacagtctcagcatcaggaattttgtttaagcttcccaggtgattctaatgtattatcgagtttgagaaccactgctctaagataataagtttggtatttttgaaacgagcatagcagtttcaaattaaacatccttcctgcaaatggtc

SEQ ID NO: 373518 - DNA, 504 bp, Homo sapiens
taaaaattatagaagagaaacttaatgcctctgaacagcacacttacaaatggttaagatggtcatttttatgttacgtgtgttttaacacgattttaaatttttaattgacacacttatgaaagagaaacttaaaatggagaacgttctattccagagggagacctagccaacttgcatcaccaattagcctgtttttggtaaatgtacccactttttgcattytgagagagaactctgtcctctggaaagactttctcttagatgagccttttaattcatgcagatgtgggccggagtatttgagtatttcccgttatatgggggaagcactaaaaggtgaactgccctaaatgcagatttctcagtgtgaggttttaggtgctctgcttcacatgtaaaaggcaagacaggggacaggagtgaagacaaggtggggagggaacagaagagcaggccctgctccccacccccaaggcagtgaggaaacacccccaccagcac

SEQ ID NO: 373519 - DNA, 504 bp, Homo sapiens
taaaaattatagaagagaaacttaatgcctctgaacagcacacttacaaatggttaagatggtcatttttatgttacgtgtgttttaacacgattttaaatttttaattgacacacttatgaaagagaaacttaaaatggagaacgttctattccagagggagacctagccaacttgcatcaccaattagcctgtttttggtaaatgtacccactttttgcattctgagagagaactctgtcctctggaaagactttstcttagatgagccttttaattcatgcagatgtgggccggagtatttgagtatttcccgttatatgggggaagcactaaaaggtgaactgccctaaatgcagatttctcagtgtgaggttttaggtgctctgcttcacatgtaaaaggcaagacaggggacaggagtgaagacaaggtggggagggaacagaagagcaggccctgctccccacccccaaggcagtgaggaaacacccccaccagcac

SEQ ID NO: 373520 - DNA, 504 bp, Homo sapiens
taaaaattatagaagagaaacttaatgcctctgaacagcacacttacaaatggttaagatggtcatttttatgttacgtgtgttttaacacgattttaaatttttaattgacacacttatgaaagagaaacttaaaatggagaacgttctattccagagggagacctagccaacttgcatcaccaattagcctgtttttggtaaatgtacccactttttgcattctgagagagaactctgtcctctggaaagactttctmttagatgagccttttaattcatgcagatgtgggccggagtatttgagtatttcccgttatatgggggaagcactaaaaggtgaactgccctaaatgcagatttctcagtgtgaggttttaggtgctctgcttcacatgtaaaaggcaagacaggggacaggagtgaagacaaggtggggagggaacagaagagcaggccctgctccccacccccaaggcagtgaggaaacacccccaccagcac

SEQ ID NO: 373521 - DNA, 490 bp, Homo sapiens
tgagccaagcattgggatgatgtatctaccaaaaagtcacaaagtaatgtgatccccaacttttcttcctttacccctgaagtaagagaacaatatatacactaaatagcatcataaaactggtaccctcgttggaatagtatctgacgatcattgtctgcttcttggatttctacaaaccaataacctaaaagccagtttcaagtgtaaaaatgcctgcaaaggaggtggkaacaagggccgccaaaggcttaggaatgaaaacctcgccacaaacttgtctctctctgcaggaagcttgcaagaaatctgacaggagcgcgctagcattttctgaaaagcattgctctcaaaggaagcatccatcctggctgcagcctcagccattggggaagggcgagtttctctggaatcagctttctcatttccctctccctcctctcaagacaaacattttctcccagcttgaacgttccccccgggcgcgcgg

SEQ ID NO: 373522 - DNA, 548 bp, Homo sapiens
ttggccctttaactggtgcgcctgggagtccagtctgagcctctgaccccaagtacacatctctctccaccacacgtgactctcagaaggtccttccctctctcccattttcattaaaactatgaggatcaggggagacaggacaaataaaagtctgttttgcacacgccatgtccccgtgtccactgcagatttatcggagacacttccttatcatccagayagtgaccaatccctcttagcaaacaactacatgagacctcaatgttatatcactcatgttcttagagtttcaaagatgcagacaagaaatggtgcttcttaaaaaacaccctgccatgaatctatcattgcccaaaacacacttcctctgcacagaagttctaacatgtttccactgcaaggcagtgccaaggcaattctcttctattgtacaaatctactgggaattagtgaaacataaaggattaaggtgtcagacaccagcctcacatatgcatggttggcatgattaaattaaaaaactcacagatttgtgttctaagttt

SEQ ID NO: 373523 - DNA, 542 bp, Homo sapiens
cagggtgtcatgtgctgcagtgttccacagtaatcagcttgacaggagttggcacggctctgtattgggagtgccttataaacacctcatccatattatttatgctagtgtcgtgagtactcatgattagggctctgaggtttcgtttcagatgaggtgcagggtggggcatgtgaggacatgaaggctctagggagctttgaatggcttggaatgcctaggcatgggtgtttcagaagcccgacctctacaggacaatacagaaatcacatctaaattaagtctcagagacatttgttgggagttctctgaaagctccttcttcactgcaagaacccttgaggcrtgtttggtggggccaatacactctcattctgcagccaatgtttcttagaagccccttgaatcagggcgcagtgatatatttatgttaagtaatatctgttatgcaagaggtcaaaagctaaacagcttaaagtaaggttttaaattatttttctgtatgctttcttgcttgcttttaaaaattaccattcacagaa

SEQ ID NO: 373524 - DNA, 484 bp, Homo sapiens
tgaactttttctgggcatggggggtgggattaatcctgccaagacaactaatcctttaacatttgaaaaagaaaataaaactgcccctttttcaaactgttcaaagataagaaagatgcttagtattttcaaaggtgctaaaaaaatcttcgtttgctttctaacatctgctgtttttcttttaagtcagtttttgtttgaaaaccttgggattaaaccactacatcgagctttattatgaataaataacacattaaaggtgacattgtttgcacagttgtgatttaagacaattacagctatgaataattgcaraaaaggtggacctcaaaagtgagaatcctgagccctggtgtcaaaggccggcactgggtgtggacaagattcctttaagaacttcttcaactgcagaggcaacttccaaatcacacaaaacaatcacaaggtcctaagtgtaataataccactagttaccacttattga

SEQ ID NO: 373525 - DNA, 517 bp, Homo sapiens
aatcacttccaggagctccagcaccattgttagggtttttgtctccacatgtctctctgcctggagatggctcaggacaggagccctggctttgccacttaaagattcaatgggcctttggtaagccatctagctgctgtaggcccagctgtcaaatctgtaaaagcagggagttggatgagctcaatgattttcaaaatgtgagccctggtgctggatggggccactgggaccaggagaggatgggggtggcaccttctgcttctcccttgcttggccagaggcwgctctccttgtagctgatttacatagtgggaggcacttaagagttattttgaggagagtgttctgctgatgaagacatatttgagaaccacaggcctggatgaccaccagggtcctgtgattctgcaacctgattggctggacctcagcggcccagtccctcacctacagggctggtcttatctgaagcggatcagggagcactcagtctaggaggctggacacggctctc

SEQ ID NO: 373526 - DNA, 556 bp, Homo sapiens
ttacttaatgtttttaaaagttaaaacaccggttttagctttctcctatttcaatatctcatattcaatatgaaaacacagttcacataaagctccgttacctaaatgccttcacgtgtgtatttacgaagtaacagcacaaccgctggttggtttgctttatggttcttgaaaagctggataggaatggccggtatgtgccctaaaccgcactaggccctctggacaggtaagacattggccgctggaaacctcccagagtccaggaaggggccggggttacctgtgtgcatttgacagtggagctatctgcactgcaaggccacgtgcggtcacccsctctgaggtcaggaggccttacagagggcggctgaaccatgtcacgggctgcagcctcctgacctggccagggacgtgctgactcccggtgagtgtaaaatgcccattgcagacgtggtctgtccttctggagtcaaccacatggaggccattgggaacgcaataaagaaggtcccttgcagggggagggaaatgttgtctctgtatcccctggggt

SEQ ID NO: 373527 - DNA, 556 bp, Homo sapiens
ttacttaatgtttttaaaagttaaaacaccggttttagctttctcctatttcaatatctcatattcaatatgaaaacacagttcacataaagctccgttacctaaatgccttcacgtgtgtatttacgaagtaacagcacaaccgctggttggtttgctttatggttcttgaaaagctggataggaatggccggtatgtgccctaaaccgcactaggccctctggacaggtaagacattggccgctggaaacctcccagagtccaggaaggggccggggttacctgtgtgcatttgacagtggagctatctgcactgcaaggccacgtgcggtcacccgctctgaggtcaggaggccttacagagggcggctgaaccatgtcacgggctscagcctcctgacctggccagggacgtgctgactcccggtgagtgtaaaatgcccattgcagacgtggtctgtccttctggagtcaaccacatggaggccattgggaacgcaataaagaaggtcccttgcagggggagggaaatgttgtctctgtatcccctggggt

SEQ ID NO: 373528 - DNA, 568 bp, Homo sapiens
gtttatatacacatgtgtgtgcataattttattgaattgatccatatcagaaaattcattctatagtaaacaggtttgcttttcctgttacattgtaattatccttgtcacagatttaaaagtttcttccacataattatayaattaattgtaactttacactgtgatttcaaaaacacaattctgatgagaccatttcaaggttgaaaaacctcccttggatttccacttccacctagggagtagaaagctggaagagtatctgcccactggaataataggaaaaggcagaaaaaaaaaaatcatgcatttcttgagcccactggagaactgacctctcccattggagaaaggacaaccaacagcccaaaactcaggaaaggataggcttgcccaagaaagccagtattcactgactggcttacctgtgaaaatgcatgagagaaaggggaagttgacacataagtgcgtaagtagaaataagctaaaattttaaaaaaattctgaaggacaacagtggactaacacaaaagtatggaatccatggaagtcccagacagaaagggag

SEQ ID NO: 373529 - DNA, 555 bp, Homo sapiens
gctgaaaatctttcaaaaataatgaaagatattgagccacagatccaagaagcttggaggagcctcaggataaataacaagaaataaaaagtaaaaaaataaaataagatcaacacacctagacatttatattcaaacttcagaaaacaagacataaaagaacagacctgagagcagccagaggaaaaatacataaaagaaataacaaaaataagagttatggtagatttatctttagaaactatgtagaagacaatgggctgacatctttaaagaactgaaagaaaatatcaaaccaggccagatgtggtggctcatgactgtaatcccagcactttgggaggccaagggcgggggtggatcacttgaggtcaggggatcgagrccagcctggccaacatgatgaaaccctgtctctactaaaaaataaaaaaaaattagctgggcatggtggcatgcatctgtaattccagctactcgggaggctgaggcataagaattgctttcacttgggaggtggaggttgcagttagctgggattgcatcactgcactc

SEQ ID NO: 373530 - DNA, 576 bp, Homo sapiens
tttactgtatgtgaattacaccccaataactatgaccctccaaaaaaaacccaagaaatttctcaagactttttctttcctccttcttttcccttcacttctttactaaaaaataagttgtagagtcatcttggtgagcttagcaakgtaggcatacatgatgagggtggaggagccactgtgggtcccagtagaatgtcagagtctttgcagggtagagggatcacactcccaagttgtggccttctgcggggtgttacagttcatcaggataaggagaatgtcactgtgggggtgtagcctggtataggtagtcagggtccaaacagagtgaagaaggcacctcacaagcaggtgactcagggtggggagtcaaatcctatgtggggtaagtaaagcattcccaagtggtggtggcacagtgtgggatgtcatagcccgaatggagtgaatagtgtgtttctatgagaggaagtccagcatgggcgttggagcccaggcatgagaaagagagtaagatgaaattggtccagcagggattgggaaccagagcagggcaggaaatgtgtcttcata

SEQ ID NO: 373531 - DNA, 576 bp, Homo sapiens
tttactgtatgtgaattacaccccaataactatgaccctccaaaaaaaacccaagaaatttctcaagactttttctttcctccttcttttcccttcacttctttactaaaaaataagttgtagagtcatcttggtgagcttagcaatgtaggcatacatgatgagggtggaggagccactgtgggtccmagtagaatgtcagagtctttgcagggtagagggatcacactcccaagttgtggccttctgcggggtgttacagttcatcaggataaggagaatgtcactgtgggggtgtagcctggtataggtagtcagggtccaaacagagtgaagaaggcacctcacaagcaggtgactcagggtggggagtcaaatcctatgtggggtaagtaaagcattcccaagtggtggtggcacagtgtgggatgtcatagcccgaatggagtgaatagtgtgtttctatgagaggaagtccagcatgggcgttggagcccaggcatgagaaagagagtaagatgaaattggtccagcagggattgggaaccagagcagggcaggaaatgtgtcttcata

SEQ ID NO: 373532 - DNA, 478 bp, Homo sapiens
cacagtggaaccaaactacaaattaataacatgaggaactttggaaactgaacaaataaatgaaaattaaacaacatgtacctgaacgatcatatcaagataaaaattaaaaaggaaataaaatttcttgcaacaaaattaaaataaaacacaacatatcaaaacctgtgggatacagcaaaagcagtcctaacagtttatatcaatatatgcctacatcraaaaagtagaatgacttcaaataaatgatctaacaatgcacttccaggatctagaaaagcaagaacaaaccaaaccccaaattagcaaaagggaataaacgaagatcagagcagaactaaatgaaatagagactaagaaatacaaaggattggcccgcacagtggctcatgcctgtaatcccagcactttgggaggctgaagtgggaggatcacttgagccaggagttcaggagaccagcctggccaacataacaaa

SEQ ID NO: 373533 - DNA, 594 bp, Homo sapiens
ggtggtctcttatcaggcaaaaaaggaggggcagcatcaggtggctggtagggctggtttctgtttatcctttaggaaagagactctatttgtggttatcaagggagggggttttaatgagctgtgtctgatctcccatgctgccatggccgagaactcagttttcaaggttactctggggtcaccttggccaagagatggggtcagttgggggcttaraattttccttttagtttatgatgtctcttccctcccctggagagaaactaagaaagacaaaagctccatgtctcctccagaattttaacagagggtggagaatcagatttgacttgaggtgtccaattttagaagataaagagagtagttattttaaaatactgcacaatttttaagccccttccacctcaacctctgaaaatatgtctagtccctcacagtcacagtggcaagcccatttcaggccctggtccacacacttctagctgctggtgtttcctggtggttactacctgggctccagtcgttttgtttggggcatccactctctacctgtcttccttccacttctctccaccctcctgctgaacaagc

SEQ ID NO: 373534 - DNA, 559 bp, Homo sapiens
aagggagggggttttaatgagctgtgtctgatctcccatgctgccatggccgagaactcagttttcaaggttactctggggtcaccttggccaagagatggggtcagttgggggcttagaattttccttttagtttatgatgtctcttccctcccctggagagaaactaagaaagacaaaagctccatgtctcctccagaattttaacagagggtggagaatcagatttgacttgaggtgtccaattttagaagataaagagagtagttattttaaaatactgcrcaatttttaagccccttccacctcaacctctgaaaatatgtctagtccctcacagtcacagtggcaagcccatttcaggccctggtccacacacttctagctgctggtgtttcctggtggttactacctgggctccagtcgttttgtttggggcatccactctctacctgtcttccttccacttctctccaccctcctgctgaacaagcacctccgctgtgttctccagagactggaattacttcctccatcccagattcagcccgtctgccag

SEQ ID NO: 373535 - DNA, 579 bp, Homo sapiens
cttggaggcatttgagtttctcagccttccaaacatacctcagggtcctgtggaatctcagcaccatgaattgtgccccctatttcagctatagcaacaagtatcttaaccccatgctccttaaatgyctgtaaccatgataactaaacctacaggtcagctctgcatctgtagattctcctgactcaatctgcaaccccagtcaccctggatctctgtcctgtagcaatgaacagcttcatccctgtggtaattgatacctgtgctgggcattttccctttgccctctgacccactgccccttgctctgtgcccatgaaggctgaactctgggggcttcttcaatatgttcccttgccttgaaatgattttcttcaatggcatttataagcaggaagtcagaagatggaaggagctgggttgaagggtattagtgactcatgcaaaggctgtagatcctccacccccaacctgggagacccacctgtgtctcaggattctggtagaaaagattcactacctgcccttgtcatttcagtttcagggatgacaaaggctcatttcaggttcagggatgac

SEQ ID NO: 373536 - DNA, 579 bp, Homo sapiens
cttggaggcatttgagtttctcagccttccaaacatacctcagggtcctgtggaatctcagcaccatgaattgtgccccctatttcagctatagcaacaagtatcttaaccccatgctccttaaatgtctstaaccatgataactaaacctacaggtcagctctgcatctgtagattctcctgactcaatctgcaaccccagtcaccctggatctctgtcctgtagcaatgaacagcttcatccctgtggtaattgatacctgtgctgggcattttccctttgccctctgacccactgccccttgctctgtgcccatgaaggctgaactctgggggcttcttcaatatgttcccttgccttgaaatgattttcttcaatggcatttataagcaggaagtcagaagatggaaggagctgggttgaagggtattagtgactcatgcaaaggctgtagatcctccacccccaacctgggagacccacctgtgtctcaggattctggtagaaaagattcactacctgcccttgtcatttcagtttcagggatgacaaaggctcatttcaggttcagggatgac

SEQ ID NO: 373537 - DNA, 602 bp, Homo sapiens
gtccaattttcaagggcaggtagcatccagcataggagaaagatgtaggcttggaggctaagtcaatctagtcttttcacgttcttctgcctgctttattctggctacactggcacctgattagattatgcccacccagattgagggtgggtctgcctctcccagtccactgactcgaatgttaatctcctttgccaacaccctcacagatacaccaggaacaatactttgcatccttcaattcaatcaagktgatactcaatattaaccatcacatcaatataggagctcccccagtaactatggtcctttttgagacccaggataatgtaagacagacaagactctgacttgtcacttgggtaatatcagcctcctggtaacataggttgcccctgttaggctggcaatgtggcccctattcagagcaagtttaacatacatatatcctattataaggagtatgctgctagcagagatcagaaaagctaatctgtagatgggacttttacccccagtagtatttcccaaacttggcttcttatttatttgtttccttgaccttcactcagtcacttaccgatccattcatttatttgttc

SEQ ID NO: 373538 - DNA, 602 bp, Homo sapiens
gtccaattttcaagggcaggtagcatccagcataggagaaagatgtaggcttggaggctaagtcaatctagtcttttcacgttcttctgcctgctttattctggctacactggcacctgattagattatgcccacccagattgagggtgggtctgcctctcccagtccactgactcgaatgttaatctcctttgccaacaccctcacagatacaccaggaacaatactttgcatccttcaattcaatcaagttgatactcaatattaaccatcacatcaatataggagctcccccagtaactatggtcctttttgagacccaggataatgtaagacagacaagactctgactygtcacttgggtaatatcagcctcctggtaacataggttgcccctgttaggctggcaatgtggcccctattcagagcaagtttaacatacatatatcctattataaggagtatgctgctagcagagatcagaaaagctaatctgtagatgggacttttacccccagtagtatttcccaaacttggcttcttatttatttgtttccttgaccttcactcagtcacttaccgatccattcatttatttgttc

SEQ ID NO: 373539 - DNA, 602 bp, Homo sapiens
gtccaattttcaagggcaggtagcatccagcataggagaaagatgtaggcttggaggctaagtcaatctagtcttttcacgttcttctgcctgctttattctggctacactggcacctgattagattatgcccacccagattgagggtgggtctgcctctcccagtccactgactcgaatgttaatctcctttgccaacaccctcacagatacaccaggaacaatactttgcatccttcaattcaatcaagttgatactcaatattaaccatcacatcaatataggagctcccccagtaactatggtcctttttgagacccaggataatgtaagacagacaagactctgacttgycacttgggtaatatcagcctcctggtaacataggttgcccctgttaggctggcaatgtggcccctattcagagcaagtttaacatacatatatcctattataaggagtatgctgctagcagagatcagaaaagctaatctgtagatgggacttttacccccagtagtatttcccaaacttggcttcttatttatttgtttccttgaccttcactcagtcacttaccgatccattcatttatttgttc

SEQ ID NO: 373540 - DNA, 602 bp, Homo sapiens
gtccaattttcaagggcaggtagcatccagcataggagaaagatgtaggcttggaggctaagtcaatctagtcttttcacgttcttctgcctgctttattctggctacactggcacctgattagattatgcccacccagattgagggtgggtctgcctctcccagtccactgactcgaatgttaatctcctttgccaacaccctcacagatacaccaggaacaatactttgcatccttcaattcaatcaagttgatactcaatattaaccatcacatcaatataggagctcccccagtaactatggtcctttttgagacccaggataatgtaagacagacaagactctgacttgtcacttgggtaatatcagcctcctggtaacataggttgcccctgttaggctggcaatgtggcccctattcagagcaagtttaacatacatatatcctattataaggagtatgctgctagcagagatcagaaaagctaatctgtagatgggacttttacccccagtagtatttcccaaacttggctkcttatttatttgtttccttgaccttcactcagtcacttaccgatccattcatttatttgttc

SEQ ID NO: 373541 - DNA, 605 bp, Homo sapiens
tcacaccactatatccccatcctgagacaatgagcacagcaacactagctgctacaatggagaagaaagagggagaaagaaatcctggggtggagggtgtaattaatatagtatttccagagtagtatccygatacgtgtttttgacctgaatttataaggaactcaaagacaagtctctgcaatttaagatctatactttgaaaatacattaggccctatctagaaaatggttccctttttggctgggatttacagttagctgaattgggtgctaatcctccatgtatgaaatatgggagatgtgagtgaaatgcttttgcccctaaccaactgtgtgagccccttgggtctgagattcctcgtttgtaaataacagagttgcactcttccacttgttctttcagtaaatattggttgactgctgagagctccaggcactgggttggagtttcataatctagggaggacatcagacattaaacaacatctcattgcaaagcctgctgagtgccaggaaggtcagaggactctgaaggaaccaaggtcccttcctgcgccagtaacctgtggttttatagtggtttctattgtttcccatccctg

SEQ ID NO: 373542 - DNA, 566 bp, Homo sapiens
taacatttatgctggttggattattattcatttactcatatatagcctcctaaacattagcattgtatgtttaagacttcaaaataacattaaaaagcataataaccaaaatgccaaccataatggtattgacttggtgagcagaaggctctctggtcaggtctatgttaaatttctcaggtatttcatgcatgcggaaatcatcaaytgtctgtaaaactaacccaaattcgccctccagaaactttctaagtcagttaagacaacaaacacaagggacctttgttcagcacaaatttcattatgaaacgcaacactcgtgctttctaacaacagtttcctgataaaacagaatctttttcttagcctgttatttttataaaatcatactcaaaacttggacatttctacgatctcatattagtccttttctaatacttctttatcatttttctgagaatgttaatactggataaaagtaaagtctgtagagatttttgaagttttttaagtcaaaacaaaagttataaacagaggaattggaactgaggagaaagaaagtgttc

SEQ ID NO: 373543 - DNA, 513 bp, Homo sapiens
aaatggccattttaatgtgctgtgaattcagttttccagtattttgttgaggatttttgcatctatattcatcagggttatttgcctctaattttatgttcttgtcatgtcttgtctagctgtatcaagataatgctggccttgcaaaatgagtatggaagtattccctcttcagtgtcttggaagaatttgagaaggactgttattattatttttttatttttttgggaacatatacatgtaggggcaaaaacaataatcctattatttacttcaccctcatctaatgcctcttagtaataagcatgytttttttattattattattattattagactttaaattctgggatacatgtgcagaacgtgcaggtttgctatataggtatacacatgcaatggtggtttgctgcacctatcaacccatcatctacattaggtatttgtcctcatgttttccctcctgtagccccccgaccccctgacaggccccagtgtgtgatgtttcccccc

SEQ ID NO: 373544 - DNA, 513 bp, Homo sapiens
ctgggtatatacccaaaggatggtattattttttaaaaaaaatgtttgatacaattcagcagtgaagccatcagctcctaagcttttgtttggtgggagactgtttattattaactcgatttcttactcatgattggtctggtcagattttctatttcttcatgatttattcttgataggctgtacgtttctaggaatttacctatttcttctacattagccagtttgatggtgtgtaatggttcatartagcctcttaggttcttttatgtttctatggtatccattgtaatatctcctctttcatttctgattttattaatttgatttttttcttataaatgtttattttatcttttcaaaaaatcaattgccttatcattattttctgttgtatttataatttctatttcatttatttctactttgatttttattttttcctttcttgaacttactttcatcttagtttgttcttcttttcctaattccttgtgatgtgatgtcaggttg

SEQ ID NO: 373545 - DNA, 519 bp, Homo sapiens
atgtggaagagggtcatttgctgcatatgcaggagaccatcctgagggaagcatagtgttccacaatgtgattgacagagatggtctttgtcagttgtttttcttccacatattataacaaattgcagttttcaacctgtaagataaaaagtgggttaatttttataaaagcaatccatttttatagtagttttgaataacatgaggaaggygctgaaaatctatactggttatctgacaagaaagttcttagaagaaatgtgtgtttttattttacaaaagggcaagtgttccaaatgtgttgatcttttctatgatcacaaatggcttcagtggtataataactagcaaagcttatttcctaaaaaagtaaacacaattattatagcttttaaaatacaggcattttatatcaatgaataataaagaaattttattttgaaagaatattttataagtccattcttgcattgctataaggaaattcctgagactgggtaatttataaagaaaagaagt

SEQ ID NO: 373546 - DNA, 595 bp, Homo sapiens
tgcagacacattgaaagcaaaaggaaagctctcaactaaaagaggggtcctgcatgcaggttccccctcacaaattgaataccaggccaccacacatgagttgaaagggccaggctcctcctctccataaggcacaaattcctggtggctccacgacattctcccagtgcatatgcaacccttggtctgagccaccccacattgatttatttcagcttactgcgcacgtgttaagggatggaatttttcactgtggtcatgtttaggcaagccctctgtgcacaatgacctgggcaggtcagaggttccctgaggacccttccctatttgcctaggcatttggctgtctcttgtctctattataatgacatacttatcttcaaaatatgctgctaaaattttaacaaattcctttagtcatgaactgcaaacttaaaaagttgccagtaaaactcacttcctaaaygattgtttttaaataatattattttaaatttttcaaaatgtgcttgatgtggattgcattctttgtaaaataggtaatgactttccgtctatatctgagttttctattgaatacatttgaagttaacag

SEQ ID NO: 373547 - DNA, 573 bp, Homo sapiens
gaaagggccaggctcctcctctccataaggcacaaattcctggtggctccacgacattctcccagtgcatatgcaacccttggtctgagccaccccacattgatttatttcagcttactgcgcacgtgttaagggatggaatttttcactgtggtcatgtttaggcaagccctctgtgcacaatgacctgggcaggtcagaggttccctgaggacccttccctatttgcctaggcatttggctgtctcttgtctctattataatgacatacttatcttcaaaatatgctgctaaaattttaacaaattcctttagtcatgaactgcaaacttaaaaagttgccagtaaaactcacttcctaaatgattgtttttaaataatattattttaaatttttcaaaatgtgcttgatgtggattgcattctttgtaaaataggtaatgactttccrtctatatctgagttttctattgaatacatttgaagttaacagaaaatataaggaatgggttatatacttgcttccaaatttgtcattgttaatctggctatagaaagttcgcaaggtccatt

SEQ ID NO: 373548 - DNA, 490 bp, Homo sapiens
taacgtaattttggatttttttctttttcatatgttgtaaatcttccttaaccccaaatttaaattcattcaaaatgtataaagctcaagtaaccaaaaccattttctgagtactgtgtgytgataattgagacttatcaggatagctgtaacacatgattttgagttcttaaagaaaaaaaatagatgattaagcatcactgtgcattctgatttaagaatatgtctttagagtgtagttatttaaaattagaaatcaaaaatctatgagtgatatgcatatgttaccttggctatttatgcaaatcagtactccatgtcctcaatattgaatacatggaaagatactaatttatggaaagatgctaatttatcatttgtcaaatactacagcataaacacggaacttttactgtgagtacatattttaaacatattagctttttattgtcctatgttctaatagtacatttattatttattgtagtag

SEQ ID NO: 373549 - DNA, 577 bp, Homo sapiens
ccatctacctaaatcctacctgatattgaaaacctagcctatggttcatatctgcctgagaattcccagactattctagttcacaatgaagacccccttatttgaatgtcatagcatgtcattgactgtcataatctcatgaaatcacagattttttaaggatatcagaagtcatcaattccagccattatcaaaaccatgaaatatctttacaacattctcagcagtggtctttcactccctcctctacaccttcagtgatgaaaaattcactacctcctgcccattctatttttatgaacagctctaaatactagaaaagtattcccataaaccatatttctgcattgaaagaaacatccagggaatgaaatrttttcaatgagacagaatttacaatatagtatgtcaacctataaaccacgatagtatataaaaattattatctgagagtaaatagtaaattttgtccaaaaatatcaattgaacactttatatagtgaggtatttgtctcctttttgctattttaatattacataatgacttctaactatactgcagtctggccacaataat

SEQ ID NO: 373550 - DNA, 564 bp, Homo sapiens
tgttcctatgttacatgtgtgtgtatatgtgtgtgtgtgtgtgtttgtgtgagtgtgtacatgtgctgtgaagcatagaatgtgacataagcagatagaagataagtgcaaagagacttcatatgagataatcataccatctttccatattctcactggcatgtaattgtggtagctgcagtggcaatcccttttgacttttgctgccctataccaggtgagaactaacaacagagcagccataaagcagcaccactttcctttccacaagtgcagcaaggaagatgcagcgcccctcattcccaccttatgacagcagtacctraagagtaaagttttttttactctctgggccctcctccaggtgagagccaagagcaaaaataacctcctgcagcagcagcagcagcagcagcagcagcagtacgggcaactcaggaggctctcaaatgctttgtcttgcagctttgccactaagccagccaagaaatggaaaatgggcaatagcatagaaatctaaaaccccagctttctttccggaacaccagaaggggaaatccttag

SEQ ID NO: 373551 - DNA, 594 bp, Homo sapiens
caaatttacaaatcatataagcttaggaaactaaaccccaaacaggataagttaaaaaaaatcaaaaactaacaaacaaaacttaattcagccagaaggggaaagaaaaacacacagtaccaaaaaatgaaaatatgaatagctgcagatgtcttactggaaaccatggaggccataagacaatgaaatagcattcagaaagtgatgaaatgaaaaaaaaamctgtcaattcagagtcctatatccaattaaaatatccttcacaaagtaaaacaaaataagatcattttaggatgaaggaaaactgaaagaatttgtcaccagtagagctgctttaaaagaaatgctaaaagaggttcttcaaatggaaaggaaataattagagagaaacctaaaacaccaggattgtagcaagagagacagaaagggcaaatatctggttgaataaaatgtacgggatagtcagagtatatttctttaagccagtgacatttgggcaaaactttgaatgaagcaaagatgtgaactatatagatatctggatgaagcactctccaagcagatagaataatcagagcaatgcgactagtcgga

SEQ ID NO: 373552 - DNA, 594 bp, Homo sapiens
caaatttacaaatcatataagcttaggaaactaaaccccaaacaggataagttaaaaaaaatcaaaaactaacaaacaaaacttaattcagccagaaggggaaagaaaaacacacagtaccaaaaaatgaaaatatgaatagctgcagatgtcttactggaaaccatggaggccataagacaatgaaatagcattcagaaagtgatgaaatgaaaaaaaaacctgtcaattcagagtcctatatccaattaaaatatccttcacaaagtaaaacaaaataagatcattttaggatgaaggaaaactgaaagaatttgtcaccagtagagctgctttaaaagaaatgctaaaagaggttcttcaaatggaaaggaaataattagagagaaacctaaaacaccaggattgtagcaagagagacagaaagggcaaatatctggttgaataaaatgtacgggatagtcagagtatatttctttaagccagtgacatttgggcaaaacyttgaatgaagcaaagatgtgaactatatagatatctggatgaagcactctccaagcagatagaataatcagagcaatgcgactagtcgga

SEQ ID NO: 373553 - DNA, 575 bp, Homo sapiens
ctttttaaatcatcataacatttaactcaaaattcatattcccagaggaaagagtcctatggacccacttcggcacatcattggttagaggacatcaagtcccttgatttaacgttttcctaagtggactcataatgaggaagagttcttaggcccaagaacaagggtctcttattagatagattcaattacattaattataaattagattatcttaaattgaattcagaaaagaagagttgattytaaaaaacagaggaaatataaacatagggcctttcattggccatctaatataccatatcaatagacttttagtaatatgggcacatttttattaaatttaggattaatattacaaatgaaagttcgttttcaaggagtggaaaataattgtgcactgatcaagggaactggtgattcaaaagaaattaggttcatgtacatacttgtgtttattgatttaccctaaagtactgaaaacaaccagaggaaatatttaggtatactggatgtgctagatttttcaaacaattgagaagactggtgtgctgtttgtgacagtaaagccaacc

SEQ ID NO: 373554 - DNA, 406 bp, Homo sapiens
ggtaaaacatatgctataaaattcaaagggcacagaagaggatagtgaaaaaaaggtcatgctcctgtccctcagccatccagttcccctccccaatctcttgtgtgtccttcagacacatgctatgcttacatgagcagatacatacacatatttaaattttcaataaaaaatggaggcatagtgtactttgttctttgcttgtttttttttaacaaaattgatgtattttgaataccaacccttatcagtgcacaacagagttgcctccttttttaaaaaaaaaaaatatttatttcaatagatttttggagaacaggtgatgtttggttrcatgattaagttctttggtggtgatttctcagattttggtgcacccatcagctgagcattatatacggtagac

SEQ ID NO: 373555 - DNA, 509 bp, Homo sapiens
tatttcagcagtcagttctgtttcaggagctatttcttattctctgactgctcctttttcacagtagtatgtttttgtattatgatgcaatgtcatctcaattccccttaagagcgcctttggaatccttgtagtgtcccttttccttcttttaattttctctgcttcatctgatgttagtgtttccatttcttcaccttagtccctttttttccatactgctggttttccctgggtcttatgattctttcrtagttggtttttatttataaataaataactcatttgattaatataggtaattctcataggtttcttttgttatcattggccctacatcttatttaagaggactgagcacaaagtttgtgtgtggataaaatgcattaacagaaatatttaattttttaaaattttatattattaatgtttgtgtgtacatagtaggtatatgtatttatgggttacatgaggtattctgatacaagcatgcaatgcctaataatcac

SEQ ID NO: 373556 - DNA, 565 bp, Homo sapiens
atgccaacatctatttatttttatttttttgattatcattatttcagcagtcagttctgtttcaggagctatttcttattctctgactgctcctttttcacagtagtatgtttttgtattatgatgcaatgtcatctcaattccccttaagagcgcctttggaatccttgtagtgtcccttttccttcttttaattttctctgcttcatctgatgttagtgtttccatttcttcaccttagtccctttttttccatactgctggttttccctgggtcttatgattctttcatagttggtttttatttataaataaataactcatttgattaatataggtaattctcataggtttcttttgttatcattggccctacatcttatttaagaggactgagcacaaastttgtgtgtggataaaatgcattaacagaaatatttaattttttaaaattttatattattaatgtttgtgtgtacatagtaggtatatgtatttatgggttacatgaggtattctgatacaagcatgcaatgcctaataatcacatcagagtaaaccatca

SEQ ID NO: 373557 - DNA, 565 bp, Homo sapiens
atgccaacatctatttatttttatttttttgattatcattatttcagcagtcagttctgtttcaggagctatttcttattctctgactgctcctttttcacagtagtatgtttttgtattatgatgcaatgtcatctcaattccccttaagagcgcctttggaatccttgtagtgtcccttttccttcttttaattttctctgcttcatctgatgttagtgtttccatttcttcaccttagtccctttttttccatactgctggttttccctgggtcttatgattctttcatagttggtttttatttataaataaataactcatttgattaatataggtaattctcataggtttcttttgttatcattggccctacatcttatttaagaggactgagcacaaagtttgtgtgtggataaaatgcattaacagaaatatttaattttttaaaattttatattattaatgtttgtgtgtacatagtaggtatatgtatttatgggttacatgaggtatkctgatacaagcatgcaatgcctaataatcacatcagagtaaaccatca

SEQ ID NO: 373558 - DNA, 484 bp, Homo sapiens
caaactatatcattctgtcctggcccctcctgaatctcatgtccttctcaaatttcaaaatacaatcatgccttcccaataatccccaaagttttaactcattccaacattaactcacaagtccaaagtccaaagtctcatctgaaataaggttagtcccttttgcctatgagcttgcaaaatcaaaaaagagatacttcaagaagcaatgkgggtatacacattgtgtaaatactatcattgcaaaagggaggaattggccaaaaaaatgaagggctatagaccccactcaggttcaaaacccagcagggaagtcattaaatcttaaacctccaagataatctcctttgactccatgtcccaaatccagggcacactgttgtaagaggtgggctctcaaggcttttggcagttctatccctgtggctttgcagtgttcagcccctggagctgctctcatgggctggcatttagagcctgtggc

SEQ ID NO: 373559 - DNA, 494 bp, Homo sapiens
acgtttattatcatcttagtggtaaaagcactagactaggcattggaaggcctggtttcttctgtctttgctacttactaactgaataaattggggcaagacatttaacacctctgattctcagatctaagtctattaacatctctgatacctcacaaatatgttgtgaagagcaaataaatggttcataggactgttcagatgttcaatgtcatttgaaccacagaaagttttataaaagkaatacattgttttcatcaaaatagctgttaataatagtaaaacccagcagccaagcttattcggagggtcacagattaaggtctggttgttacagagctagtgaccctgagccagcagatgtcagcacaccaagaagaatattaagctctttatattgtgaagcttgcaaattatcaggttttgcccactttgattccaacaatctcaacttcagtaaccatataatccaaatatctgaagacagcaaaacc

SEQ ID NO: 373560 - DNA, 610 bp, Homo sapiens
gggtatcgccctaactactgccaatacatgtttgctaactcacatagcaacttctggttgtaacccctttccttcctcatcaagaccagcaggtgcacaattgattacattgaggtttaacctggcagatggcagacaagtggggaggtttagtaattccttagtagcggcgcctcttgccttttgggtgagaggtttctgcatattcttccagcatggggaaaattctggctctcactccagagaattgggtcacttagagacaactttaagaattcaaaggttttgcagaacaaaaatctcgagagcattccctcagatgtttccatttcacattgtaggatctcgggttttcctaaccaaggctcttactttagcaaaacagactcaccttgactgtgtatttaaatatctctggagctctactaccctatcagatcctgagtttcatcctcagctttgtctgctttaccgttgttggaaataaaggtgtctttatatgccaccatatwtaccttgtaggcctcacttcttagcttttaaatattagcccttaatttcgcatgatccctatgggcatcaatataacttagtaatatttggccaattc

SEQ ID NO: 373561 - DNA, 613 bp, Homo sapiens
tgtctgatattttctcatagctaggcacaaattataaacgtcggtagcaatatgaaagaagtgatgttggtctttagtgcatcctctcataagccacatgatgctatttatcacattacttataatgttaaccatacttggttaaggttgtatctgtcatatttttccattattattatttttccatttgtaattaacaaatatgttgtggagatrtactttgaggatatgtacatatcttacttcacatctaatttttactcaattgttttaacattcattaatgtttaccttaataaattattataatggttgccaatgttaatttgctaattatttcatcccttcaatattatttggccatatccgtgtctttttgtcacagagaatttaaagttgatagaccataaattctaagaagatcaatgctatgtctgtcttattcatggctgaagccctgtgctcagaataccttttaggatgatcattaataaatatttcttaattaaattaatgatggactaagtgagcaaaaggtgatgcgcattttagttagaaatcctaaaaataaatagtaataataaaaatagacaagtaataattaaggatacta

SEQ ID NO: 373562 - DNA, 607 bp, Homo sapiens
ctcctaacattattccacagccagttgctggacaagaaaaaccattttcataaaatttaaatgaggtgtttaaattggctccctgtataaattactctacgtgaatattcttctctttgacatacatgctgattttagatccatcctgctgctacatggaatgtagtttatgtaaaatggctaaggattgagaaaaaggaattttaggttggcccaatgagcaggttaaacttattctcttctcccaaagcttacattattgataaaattagatgcaaaaaagaaaaaagcttacattaatgacaaattaaatttcagctctttattatagagatgtaagaaattaacaagtgacagtaggatgatttccttaatagggaaaattttgagtttcaagagcttacactgcttcatttgaggaaaaagagaagaatcgtaggygtctaaggacaaatgtgacctaagaaattagagattacaattggtttcatgactctcctgaggcccacaagtttcctctgatgagaagcagaacattgtttccaatgcaaggtgtgaacactgaaaccaacagcgggttcacccattctgtcatatccactcttcg

SEQ ID NO: 373563 - DNA, 607 bp, Homo sapiens
ctcctaacattattccacagccagttgctggacaagaaaaaccattttcataaaatttaaatgaggtgtttaaattggctccctgtataaattactctacgtgaatattcttctctttgacatacatgctgattttagatccatcctgctgctacatggaatgtagtttatgtaaaatggctaaggattgagaaaaaggaattttaggttggcccaatgagcaggttaaacttattctcttctcccaaagcttacattattgataaaattagatgcaaaaaagaaaaaagcttacattaatgacaaattaaatttcagctctttattatagagatgtaagaaattaacaagtgacagtaggatgatttccttaatagggaaaattttgagtttcaagagcttacactgcttcatttgaggaaaaagagaagaatcgtaggtrtctaaggacaaatgtgacctaagaaattagagattacaattggtttcatgactctcctgaggcccacaagtttcctctgatgagaagcagaacattgtttccaatgcaaggtgtgaacactgaaaccaacagcgggttcacccattctgtcatatccactcttcg

SEQ ID NO: 373564 - DNA, 607 bp, Homo sapiens
gaacaattgtataatatgacatttatcaagcatactgtcaaggttctttgttcacagaatagtttctagcagatatttcagcttaaatagccagaaaatacaacagaaaattacaagaatagcaggtaaatagaaacctacaaggacaggtttcagtcaagttgcagttttttctttccttacttttcataatgtattagtctagtcatgatatacatattacaggaagatttcataaattaaactcctatagtgtgttaaaaatggatcctttacactccttatcacattacatttcaagcatttatttgtctccactatatggtgagatccttaaggatagaaattgtgtcttaaacatttttgcaatcttcagcctctagagccatgcrttgtatctagtaaatgctcaggtaaagttaactgaatacatactgcatggtgatttggaaacctctgttgattgcttataagctctgttacattaagctgatagttacctctttgagcctcagtcttcttattcttaaaaattgagaaaatattgtattttacatggatttagaaaaatctgaatataaaacatacggcctagcccataaaatcc

SEQ ID NO: 373565 - DNA, 577 bp, Homo sapiens
gagggctgcgggtcggggacagggcagggaaaagaaatataagtgaatctgttatcattgaacaaagcagagtaacacatttaggaagttttacctaaaccacagctgagtatcaaccactaggaggcctggattccctacagttgaatttctgtcctttggtcgataagtacctaatcactgcctaatcacttacaacctaccaacactttccsctctgtagcccatgcaatccaaggctatcctggcttgctttgcaccgacctccctgcagagtgggtgtatattaatctgttctcacactactaataaagacatacctgagacagggtaatttataaaggaaagaggtttagttgagtcacagttccacatggctagacagtcctcaggaaacttacaatcatagcggaaggggaagcaaacaagtccttcttcacattatgataggagaagaaatgagaacccagtgaagggggaagacccttataaaaccatcagatctcatgagaactcactcactatcatgagaacaggatgggggaaacagcccccatgattcaattctctccacctg

SEQ ID NO: 373566 - DNA, 616 bp, Homo sapiens
agttataaacttaaaaacctgatatgtttctgtgttcttccttctttccttccctcttgttagttttctgaatttagtcaatagcattatttttcttgcaatttacatttgaactgtcagtaggcttttattacatctagtacaccttgattccttgatttgtcagctttaaataatattctgtgactctcatctatcctagaggaagtgaacagaaaattcctacactatgtctccttccttctttgccttctcttgtccattaktttttgttagctgtatcacttctagattgtcagggctgatatcactcatattctcttctgtcatccaaatgcatgtatgtgtttcagtcttcactctatagctccttgagtttttgtaggctcaaaaccattcatagtcattatacttgaaggataatttggctaaatagaaaattcttggctgtgattttcgggcatttctccactgtcttcaagtgttgaatgttgccgtggaaaaaactgaagccaacctgatcttttgctcctgtcagtgaacttttaaatgccactcaaaggcttctttatgtatgaagttcagcagctttacacggagatgtatcaatgttgac

SEQ ID NO: 373567 - DNA, 482 bp, Homo sapiens
ttttttctctgactctgttcttgaagcaatggaagcatcaaatgtagtggtccggaggaggtggaggtggagggagtggtgctgagttgaagagagaacgagggagggcggaaggcgctgaatacttracagtatcctgtcaaatccgggatgacttcataaacactagctgctgtttgcaaaaacatttttggaagagaaactgtacagatgttaaagtgtgttggtggggggtgtctcccctaatgctatgtctgcaaagtccaaaatagcaatgtgccaagaaatctctctccaacccagttatttcaagaggaaacctggtggagtggatggaatagtggggtaagaatcaaaagaattggtttctctgtccagatctgccactgcctacctgggtaatcacagtcaagtcacatcgtctctttgaatcttggattatggagccggtaaaatgggagtgaaaacaccctctttggcta

SEQ ID NO: 373568 - DNA, 529 bp, Homo sapiens
tctccataggctcatcaaagatatatattctattcaccacattattcatctctcaggttacccttgwtgaccttccctgagaccgagatccacatctaggcattgatcaatgtgatttcttcctctccaaggttaaggtggaataattgggtatgtagggtgagagaatggagtgagggtctagttaagtaccagattagatgtgaaaggacagagattttccatatgtttatcctcctcttctagtgatggacacacagttcaattccttttcgtgctatgcaacatgacatataactttatatatatgtggtctgaatctctccttttcctcatccttgttatctttgccttggaacagtgatactagacagaaaggaggagatccgagatatctaaacatgcaatttaatatgactttgggtgtgggaggtggaggtgagggctggaacctggagtgacttctagatttcttgcttgggcaataggttggatggtggcactattcacagagattaagaatctagaa

SEQ ID NO: 373569 - DNA, 529 bp, Homo sapiens
tctccataggctcatcaaagatatatattctattcaccacattattcatctctcaggttacccttgttgaccttccctgagaccgagatccacatctaggcattgatcaatgtgatttcttcctctccaaggttaaggtggaataattgggtatgtagggtgagagaatggagtgagggtctagttaagtaccagattagatgtgaaaggacagagattttccatatgtttatcctcctcttctagtgatggacacacagttcaattccttttcgtgctatgcaacatgacatataactttatatatatgtggtctgaatctctccttttcctcatccttgttatctttgccttggaacagtgatactagayagaaaggaggagatccgagatatctaaacatgcaatttaatatgactttgggtgtgggaggtggaggtgagggctggaacctggagtgacttctagatttcttgcttgggcaataggttggatggtggcactattcacagagattaagaatctagaa

SEQ ID NO: 373570 - DNA, 569 bp, Homo sapiens
gtaatctatgtgcttgttaatatattaaataacaggacatagtggatttgtctattaacaaacataatttcaaagcagaggtgagaatacatggtacatcaagatagcggcatcaacaataatatgatattcaaaaatattgagccaacgtcacaaatactgctccttgctrcggtgggttttgttttttgttttgggagggggtggggcttggcctacattcataatagataaaaatgtgaaattttagttaaagttcagtaaaattgcagatgtaaatatgtttcatccaagttcacaattctttggactttattctcatgaagaaaagatgcatatccttttaattagcttggctggttatttttaattcctcaagatttttagaagctttatactcaccttcaattaatacatagtatgtgtttgttggtcctaacacaggcatcatgaaaggggccgggaatagggtttgttgcctgtataggcagactgcagatctgtaactctttcttctgttcactaaattaagtgatgcacataaatatttttcattgtacatcttccct

SEQ ID NO: 373571 - DNA, 594 bp, Homo sapiens
atagggtggaaaagaatctctaaaatacagatgcctggtttttgtgggttttctcaattctgcgtaggggtccatcttctccagactggcttggattgcaagaagctgcatcttcctacagaactattgtgataaaaatgtgaaacaacacggggtcccagwtcagacctgaatgaggtaccaaaggtgatttttgcaccactgatgctcactctccagcaccatactgcaaccagatgccccattcacttgacgaggtgtgctgccaacaggactggcatttttgctattgaccaacattagctggcatggttacaagagtctggacagccagttaatccttaaagatatgtcttctttgattgtgtgctataacattattcttgcaagtactattttctaaaggacttctgaagcaatagaaaaagccgtaaattgctttccattgctaggaaaagtcatgtgtctgtttaagtatacaagcatcttcagagggttatttgtgattgcaacattttcagactcaatagagtcacataataaagcaaaccctttctaagcatttgagtgtcctttctctgctgtttgaagcac

SEQ ID NO: 373572 - DNA, 594 bp, Homo sapiens
atagggtggaaaagaatctctaaaatacagatgcctggtttttgtgggttttctcaattctgcgtaggggtccatcttctccagactggcttggattgcaagaagctgcatcttcctacagaactattgtgataaaaatgtgaaacaacacggggtcccagttcagacctgaatgaggtaccaaaggtgatttttgcacyactgatgctcactctccagcaccatactgcaaccagatgccccattcacttgacgaggtgtgctgccaacaggactggcatttttgctattgaccaacattagctggcatggttacaagagtctggacagccagttaatccttaaagatatgtcttctttgattgtgtgctataacattattcttgcaagtactattttctaaaggacttctgaagcaatagaaaaagccgtaaattgctttccattgctaggaaaagtcatgtgtctgtttaagtatacaagcatcttcagagggttatttgtgattgcaacattttcagactcaatagagtcacataataaagcaaaccctttctaagcatttgagtgtcctttctctgctgtttgaagcac

SEQ ID NO: 373573 - DNA, 630 bp, Homo sapiens
cacataataaagcaaaccctttctaagcatttgagtgtcctttctctgctgtttgaagcacacagatgaagataaagatacactggggaggaaaacatatttctcccagagaagaagaacagggtatgtgaagtgttaaaaaactcagaaaagggataatgattagaatttcaggtattcttgagctattggatcaattcaaaatgcatgagtgtttcaaattttagagaatactataaatgaaaaaaaagtggccatgcaagtttaaatttaaatattgctgacttggagttttaacaaagcaattcacattgccgtgaattggagatggcaaagatccgcattgccaccaaatccgttgatctgttgagttcttaaattcagttcagtttttttttaatttctaattttaaaatattaagaaaattattatatttctcctggattgacatgtaatataagaaaagggaatttcagtatgtgtatactttaaaaaygtgaggagaaagagaaaacactttgaaaacataggtaatagccataaataaatattttgaaagtgtcactagcctccttctccataattagtgtgctaagatggcacaaactagggaaagggaggagaaaatt

SEQ ID NO: 373574 - DNA, 547 bp, Homo sapiens
agagaatatcttagttccttaggagtaggttggagaggcagctgacctgttggaacagcggtaggttgagcttgatgctaatagtggcaggaggtgatttggccacggttagggatgcattgaggcagatggacctgacrttgctctgtcttcaaagccagtgggtgggatgcagagtatcccaaagttcccgtggggcctcttggagaaatatccagttgtagaaggggtcagcaggtctgggtcaggatcaggaggtacactcaactataataggcaacattgactacagacttcagcagctgctccagcacattgctgccacaggttgtcacaacccaggactttggggcccaaagctgagaggacactctgctgattaagccccacctcccagccccattacactgaggactggtaagctactttttatatccacatgacatcttctcttcaaaaaagtacaggtgtcataaagaaaacttgagagacgagtatttttccaaatgagactttaaaaagttcttttaaaccagcgtggacagag

SEQ ID NO: 373575 - DNA, 547 bp, Homo sapiens
agagaatatcttagttccttaggagtaggttggagaggcagctgacctgttggaacagcggtaggttgagcttgatgctaatagtggcaggaggtgatttggccacggttagggatgcattgaggcagatggacctgacattgctctgtcttcaaagccagtgggtgggatgcagagtatcccaaagttcccgtggggcctcttggagaaatatccagttgtagaaggggtcagcaggtctgggtcaggatcaggaggtacactcaactataataggcaacattgactacagacttcagcagctgctccagcacattgctgccacaggttgtcacaacccaggactttggggcccaaagctgagaggacackctgctgattaagccccacctcccagccccattacactgaggactggtaagctactttttatatccacatgacatcttctcttcaaaaaagtacaggtgtcataaagaaaacttgagagacgagtatttttccaaatgagactttaaaaagttcttttaaaccagcgtggacagag

SEQ ID NO: 373576 - DNA, 547 bp, Homo sapiens
agagaatatcttagttccttaggagtaggttggagaggcagctgacctgttggaacagcggtaggttgagcttgatgctaatagtggcaggaggtgatttggccacggttagggatgcattgaggcagatggacctgacattgctctgtcttcaaagccagtgggtgggatgcagagtatcccaaagttcccgtggggcctcttggagaaatatccagttgtagaaggggtcagcaggtctgggtcaggatcaggaggtacactcaactataataggcaacattgactacagacttcagcagctgctccagcacattgctgccacaggttgtcacaacccaggactttggggcccaaagctgagaggacactctgctgattaagccccacctcccagccccattacactgaggactggtaagctaytttttatatccacatgacatcttctcttcaaaaaagtacaggtgtcataaagaaaacttgagagacgagtatttttccaaatgagactttaaaaagttcttttaaaccagcgtggacagag

SEQ ID NO: 373577 - DNA, 576 bp, Homo sapiens
tatcttactccttggaaggtagaggactcatatttttatgtcaaagtttrtgttttaggaattcagcttcagaaatgtcaaaataaatgggtggcagctctaaacaaggttctagactctggaattcttataaagctttagtattaatgatacactaccttcataaaaatatgttgaagagtgtctttatattttttgtactctggaagtgtgcgtaagattggaatcatctgatccttagatggttagttgaactgtcccataaaaacgtttgaatctgttggttatttgtggatagactctaaactattaatttaatttaaaaaataattatagttgtattcagtgtttctacataatctcagataatttttgatgagctatatttttctagggatttgttttgtgtaaactttcaatatcactgacatagttttaaaatctgttttgaatctaggtatgttttaattttcattcctggtatttacttgtgtctaattttttcttgctcagaattgacagagctttattttaataattattctttcatagaaccgccttttctccttttattta

SEQ ID NO: 373578 - DNA, 573 bp, Homo sapiens
agttgcacagtggacagggaacatggactttataataatgattcttttgatatttaatgagatttgcttttggyccattatgtggctaattatcataaagtatctttagttttcaattgctttatgcagagttctgtatatgttagttaatctaacttgtttagagtgtttttcaatcttctattttcttactcattttctacctgatttatcaatttctgaaagaagtattaacatatgaaaatctcccctattgtggtaaatttgcccatttcttcttgcagtgttgtcagctttttgcctcatgtacgttgatgttaggttcttagaagtctaatgttaataacttttcctggccttttattttaaatgtttccgagtccttacattttatttgttttgtgtacaaagcctagagctgtttattttttaacccaattttacaatttctgccatttaactaaacagtttagaccctttacatttattgtgattacttatacttttgatttatctccctcacttgacatcttgctttaaattttatattttttctctttctgcctacttttg

SEQ ID NO: 373579 - DNA, 566 bp, Homo sapiens
agaatataaacttttttttttttttttttttttttttwaaaaggctatgtgaaagctcccaatcatgggaactgggccacacagtatccaacttggtctccaaaaccctaggaatgcatgctgccaggaaggaatgaaaacatcacagagagagcagtgttttcccagtagcagttgtcattgaaagttatgtcattccagctgtcaaaggaggagtcttgggaaatcactaactttgcattctgggcctgatagtctgggatagtgatctgagccaaaatggcctggactggtgctgggggtgagccttgttggggaaaaggctaaagctacctaaaagtttgctcttttaaatcagggttgcctgatgaaccagggtcaagctgaggctgactttggtgggaagtttccctgcttgtcttacccttttaaatgcaggatctttaaaggcaatgactgggcatgtgcacagttattttctactacttacccagggtctgtcataatttatagttgattgataaacaattgttgaatgagttggaaaagcaaggaagaaggggagt

SEQ ID NO: 373580 - DNA, 566 bp, Homo sapiens
agaatataaactttttttttttttttttttttttttttaaaaggctatgtgaaagctcccaatcatgggaactgggccacacagtatccaacttggtctccaaaaccctaggaatgcatgctgccaggaaggaatgaaaacatcacagagagagcagtgttttcccagtagcagttgtcattgaragttatgtcattccagctgtcaaaggaggagtcttgggaaatcactaactttgcattctgggcctgatagtctgggatagtgatctgagccaaaatggcctggactggtgctgggggtgagccttgttggggaaaaggctaaagctacctaaaagtttgctcttttaaatcagggttgcctgatgaaccagggtcaagctgaggctgactttggtgggaagtttccctgcttgtcttacccttttaaatgcaggatctttaaaggcaatgactgggcatgtgcacagttattttctactacttacccagggtctgtcataatttatagttgattgataaacaattgttgaatgagttggaaaagcaaggaagaaggggagt

SEQ ID NO: 373581 - DNA, 566 bp, Homo sapiens
agaatataaactttttttttttttttttttttttttttaaaaggctatgtgaaagctcccaatcatgggaactgggccacacagtatccaacttggtctccaaaaccctaggaatgcatgctgccaggaaggaatgaaaacatcacagagagagcagtgttttcccagtagcagttgtcattgaaagttatgtcattccagctgtcaraggaggagtcttgggaaatcactaactttgcattctgggcctgatagtctgggatagtgatctgagccaaaatggcctggactggtgctgggggtgagccttgttggggaaaaggctaaagctacctaaaagtttgctcttttaaatcagggttgcctgatgaaccagggtcaagctgaggctgactttggtgggaagtttccctgcttgtcttacccttttaaatgcaggatctttaaaggcaatgactgggcatgtgcacagttattttctactacttacccagggtctgtcataatttatagttgattgataaacaattgttgaatgagttggaaaagcaaggaagaaggggagt

SEQ ID NO: 373582 - DNA, 619 bp, Homo sapiens
attactcatgccctgggagtgatcctttgagagcaaggtgaataaaaggattctaccttattactaaaaacttaaatgaggtttccagtcccttagtattcttttaataagtgttcagagtaacatatggtttactctcagtcctttcttgggatttatttttagtagctgagaaagctgatattttaaatgatcatggctcttgatgttcattgacttggccaagactagctttctaagtaaatgcaatatgaggaccccttggtgagagaggggctgtaaaaccactcttccaacaaaacaaaagtgtgatatgaggtgaaggggataagcactcattataaatctataatacaaaaataatrtattctaccaaatagtctttgtcttcaaagtttgattctcagtagggaatacttctgatttatataacttaagataggccaatggaaaatctgatgaattgaagaacaaatgtccaaaccaattgaaaaaatgcaactctctagatcataacatttctaggatgtgaagttatgtaaaagcagtatggtggcccactgcaggatgcttgataaaatttcatgatgtgtttaaatctctgcaatctgagaggacc

SEQ ID NO: 373583 - DNA, 571 bp, Homo sapiens
attcatttgttcacatctgacctctctgagaataaattttgtatgacttatggggatgaaacacttaaagaaattagatgaggaaaaataaatcaggcacaaacctttgaaacactgggtggagagttgagaggtaattaagtatacttttttctctccattttttgaatctactattaaggttttatggaattaattttccaggacttggctatagggtttataggctccttttctcaattcttatattatgcagcctgatatctgtgaactttagatatcatgtatttttgcaaatgtcttacccacagctagatcatgtgctcaayagcttggcaatgtcaggcacagtatctttggcaaggtttattcaataaccatgtataattctttttagacttcttttttagaagttatcatgagatgttaaaacatagaaaagctctaaatactaatataatgaatagctgtgtatccaccactgagcttatgaaataaatagtaccaataacttgaaactccttgtgtccttctcatctcattcccttcccacacccaccagagggaattt

SEQ ID NO: 373584 - DNA, 437 bp, Homo sapiens
tcttttgaacctagaatcacaaccctgggtacatgatctaagaggctacttcagaataatatcttctctctaggaaygatctttgtgttacccaacagccatcaatcatggttatgtcctgagtactgttaatctgacttaagaatgtgttagtttatcactaatagatttcttaattaaattactgaaatggttcaaaagagttcaagcttttgggaataggatttaaagcacattctcttccatcagtttttacaatttgagctacttattactgatttaaggtgttttctgaatgtgttgttaaatttccttaaagcaagcaggaagttaaaactttacagagagctcagtttcattgcttgatcatatgtggcaaagtagctttgctttaccctgtatttgaattgatccagtcacattttcctctaactttt

SEQ ID NO: 373585 - DNA, 571 bp, Homo sapiens
tgagtgcctattatgcgccaggcactgttctaggcacagcaaacaggtaaaatcctcactgtcctggaagttacaaactaattggaagacacacactaaacataaaaagcatacaaatgtcagtggtagataaatgttatgaggaaaagtaaaagaggttttcaagactaagatggaaggaagtagctacttttggatagggtggtaaagaaaggcctctctgaagaagtaatatttcaaaaatgtggaagaatagctctaattgcaaacacattaaatttctgatattaatrtgtgctttataaattttcaccatttaaaagtgatatggttagggtttgtgtccccatccaaatctcatcttgaattgtaacccccataatccccacgtatcaagggagagaccacgtggaggtaattgaatcatggggggtggttttccccatactgttcttctgatagtgagttctcacaagatctgatggtttcataaggggctcttcacccttcactctgcacttctccttcctgtgaagacggtgccttgcttccccttcaccttccaccatga

SEQ ID NO: 373586 - DNA, 637 bp, Homo sapiens
gtcttccatttatattgatttttaaaaatttgaatggcttttctatttttcttggaattatgttgtagagccataccataatagcacatgctatgtgtaaagcatgagacagagtgcttatcatatgstaatgctcagaaagtgagtcctggttttttcctctcctcctcttctccttttttcccctctagatggctccaggaattcataacagctatgtggcaaccacctgtctgaatcatgatttcctgtttaagccacaggtcctctattcatcctatttataacattggaaataattaaaggtaccatttggttcttaattaaaagtatcttctttgcttgacttagcccttcatgtaaacttggagatgtatgcttcttactgcatcattgctgtcaacatggccaatggagaaagagaagataaatgtgggaaatctctctacagagagtgtatggactccctttctcttttgttcccaaatggggaaaaagtaatatccacatttgctctttgagaaaatgaatgaagctatatcctctcatcagtgtaattgcaattttgaacagagtttaactagactaaggacaccttaatttatctcttaggctgacttcattgctgccccagatt

SEQ ID NO: 373587 - DNA, 427 bp, Homo sapiens
atttggtgctttatttagtttggtgaagtcatgttttcctggataatcttgatgcttgtagatgttcgtcagtgtctgggcactgaagagtcaggtttttattgtagttgtcacattctgggcttatgactgtgctkcttgagaaggcttccaggtatccaaagggacatgggccccaatcccaatgtcactgtggtttttgtggactcgtagaggtaccaccttggtggtcttgtataagatccagaagaattcactggattaccacgcagaggctcttgttcttttcccttacattttcccaaacgaagtctctctctctgtgctgagccacctggaatagggggtgaggtgatgtaagcactcctggggccaccaccactggggctgtgctgggtcagacctgaagccagcacagcactggatc

SEQ ID NO: 373588 - DNA, 427 bp, Homo sapiens
atttggtgctttatttagtttggtgaagtcatgttttcctggataatcttgatgcttgtagatgttcgtcagtgtctgggcactgaagagtcaggtttttattgtagttgtcacattctgggcttatgactgtgctgcttgagaaggcttccaggtatccaaagggacatgggccccaatcccaatgtcactgtggtttttgtggactcgtagaggtaccaccttggtggtcttgtataagatccagaagaattcactggattaccacgcagaggctcttgttcttttcccttacattttcccaaacgaagtctctctctctgtgctgagccacctggaatagggggtgwggtgatgtaagcactcctggggccaccaccactggggctgtgctgggtcagacctgaagccagcacagcactggatc

SEQ ID NO: 373589 - DNA, 617 bp, Homo sapiens
  misc_feature (1)...(617): n = A,T,C or G
nnnnnnnnnnnnnnnnnngtgtccaaaacctgaaacttaattcagtatcactgacctataaaatcacrtacagcagcctcaggaagaaaccatattcaacagataaggaaactgaaacccaaagagctaaaatgatttgctcgtgttcatagagctgcaactagcccaatcctggttgcccaaactcaattcagtgtgacaagggaacataacagctattaagcattcagatattctcaagacaacagagaagattctcttttatagcagtcttcacctttaaacagatctaccctcaagttagtgtattagaagatagctacaacggtatcaaatgtggacaactagttaggaggaacttaatatagatataattaatatagttataattaaacaaacatccaagtttatttaaacagaataaaacaataagaacagacaaaactataacagcattaggtaaagtatttcccaaagggctttagttaatagcctgtaagattcagtacatcaatatcaaaggaaatatataccttactcatttaatattttgcttggaagtcaaaagaaatgttttgagtatttgtttatcattaccagctgttctgtctaaaccc

SEQ ID NO: 373590 - DNA, 595 bp, Homo sapiens
ggttttatgtctagggaccatacagattttaatcatcttctttgtgctctgttctgtgtcttctttgtgaggcttttctacccttcagcactattgtttctcaaggatgatttttatcaagaaaaacaygcagagagtagaagaagatttaaatcttagtagaggtttattttagtttattattattttttaatttaagctggcttggtgaaattaaaaacaacaacaacaacaactcttcccaaagcaaatgtagtatttgagaataacataggaatgggtccctaacacatgagcaattattatggtgaggagtgagattctgttcactcactgcaagaaggggatgctttcataatgtctctatgtggtggaggagagggctggagtgaaagctgggatcaggtgtcacggggacatcagtcactccttcagcaaataggattctgagttgttgctgctcaatctagggctcaatacagcagtgaataagtgaaccacttaggggaagccaaacactgaatgactgattatgtgaagaatgaatgttgtggtgatatgtagcatactttattttatttttaactttttcagt

SEQ ID NO: 373591 - DNA, 587 bp, Homo sapiens
ttctactgcctggtgatgtttcagaacctctgttctgcggttctagggtaatggtacaaggttttctgggaccacatttggactcatccttagccggaagaatcaggacaatcatttgcccattctagtctatcataatagaatactctggtatgaagaaccgaaggatgcaagggaaataggtcaatggttctgaatgactgaagataattaagaagaaaacaaaaaggtcacaaaaatygtgacatgatctacatcagtacatgatgcttatatgatgaaatatgacctaatttgttacagctgatgtgtaactaggtgatgttgatgttagatacatcctgaaatgaaacaaatcacctactaaaaactgaaactattttgggaaagataagactatgtgccctgaatcttggctgtatgctcatatcagcttagtaattgatgcagaaatttactagctaaatatgaaacagtgagcagaccagttatgttatacatggccactgggtgtggttggtgtgtgttagtatcaccgccccattcatagaaaaaaaaaaaagccatatgtgtttcctaaatccaac

SEQ ID NO: 373592 - DNA, 613 bp, Homo sapiens
ttcatagtttcaggtcttagttttaagtccttaatggatcttgagttgatttttgtataaggtgagagatgaggatccagtttcattctcctgtatgtggctagccaattatcccagcaccatttgttgaaaagagtgtcatttcctcactttatgtttytgtttgtttgtcgaagatcaattggctgtatttggagttatttctgggttctctattctattccattggtctatgtgtttgtttgtttgtttgttttccagtagtatgctgttttggtgaatatggccttatagtatagtttgaaatcaggtagtgtgatgcctcctgatttgttctttttgcttagtcttgctttggctaagcatgctcttttttggttccatatgaattttggaattgttttttccaattctgtgaagaatgatggcgatattctcatgggggtggcagtgaatttgtacattgcttttggcagtatggccattttcacaatattgattcttcccatccatgagcatgggatgtgtttccatttgtttgtgtcatctgtaatttatttcagcagtgttttgtagttcaccttgtagaggtattttgcctccttggttaggg

SEQ ID NO: 373593 - DNA, 613 bp, Homo sapiens
ttcatagtttcaggtcttagttttaagtccttaatggatcttgagttgatttttgtataaggtgagagatgaggatccagtttcattctcctgtatgtggctagccaattatcccagcaccatttgttgaaaagagtgtcatttcctcactttatgtttctgtttgtttgtcgaagatcaattggctgtatttggagttatttctgggttctctattctattccattggtctatgtgtttgtttgtttgtttgttttccagtagtatgctgttttggtgaatatggccttatagtatagtttgaaatcaggtagtgtgatgcctcctgatttgttctttttrcttagtcttgctttggctaagcatgctcttttttggttccatatgaattttggaattgttttttccaattctgtgaagaatgatggcgatattctcatgggggtggcagtgaatttgtacattgcttttggcagtatggccattttcacaatattgattcttcccatccatgagcatgggatgtgtttccatttgtttgtgtcatctgtaatttatttcagcagtgttttgtagttcaccttgtagaggtattttgcctccttggttaggg

SEQ ID NO: 373594 - DNA, 575 bp, Homo sapiens
taacacattaagtcagactttaaaaaccactgtgcagaacaaatagaacatatctgtgtccctgacctagaccaggggccatgggtctctccttctgaggtagatagagatggaatgttcagagaagtaggaggaaagacgaagtcaggatgctgcattaagcctgacaagtaggaggtagttggtgatcttccagagagcaatttcactggcaaggtgaaggtagaggccaagtgaagagagagagagagagagaggagagagacatatccaaggaggggagaattctgagaagttttcttgggttgataatcttacrttgcctttacggcagatgggaagtctttactagctaggaccactaattaagaacatttcatgaggaaaataaaaaagactttccaaattactacattattatgagtgaattaggagagcaatttgatcacttggaaagtgctcctctttcaataaatgtaaaatatggattcttgctgagatttctaagctgcttcatctaaattatatgctaaagtagagaaacagatgttaaatatgattaaaaccaattacaa

SEQ ID NO: 373595 - DNA, 392 bp, Homo sapiens
ggctgcccttgtgtcagggaccatccatggccaatcagctttggtggggctttgggagccatctgataacaaaatgtgtctgttccttgagcaaggactgtagacctggaagattgccgtggatgggactgtaagcagcacacttccactagaagttaccttgctagtctcagtgtctaacacataagaggtcctcaataaataaatatctgttgaataaatgactgacaataratggagtggctttgttttatgattagaagcgtgtatgtttgtatgtgtgagataaatattctcacgtttgagactaaagtaggagtgtccaatcttttgacttttctggaccacactggaagaagaataattgtcttggctcacatataaaatatatt

SEQ ID NO: 373596 - DNA, 623 bp, Homo sapiens
tttgggctgagctatcattatctagatgaccattcattaacagatcattaacatcattaacatcattaagtagagagacctcctcttagtgggtcaggcaaacaatgtggaggttttctgaaatacttcctttaagtgcatctcctcttcactgccagtctttctttctggtttataaggttatttttgctttcttgagatatctggggttaagtcactttggttttccttcaagtgtttaaggtttgacaaagcaaaaaccctggatgtgccagcccctgactgtctccttcaattttcccttcagaaagttgcagcaagtttttctttttagaaagtactaacttctggaaacttgaacatgccatatgtatttgcttgaccagagaaaggatcttttttgaaaatctttggaatcttctccttaaagatttgcctggtagtttcaccttctaaatatctgcaccttgcccttayttctatgcatggtaactctaccaactttgttcctgcattcttcctccagcagttgccattccaggctcctggtgactttgggtttctgtagtttcttcaaagaagtcctagagcatttcctggaagaactgaaacattctcacttt

SEQ ID NO: 373597 - DNA, 522 bp, Homo sapiens
tagtaagatattagaattacttagaagaagactattgtagggttttgaaatactcatattctcagcatcctcaaaatagaattcaggaatctgaatatcaagtgctggtgagtattcaacaatggtagtcttagttaataatagtaaaataattctgaacaacaacaacaacaacaaaaaacctccaacaatgtgggatctttgtgatctaaaataaaattcatcattttcttgtgtctacaaaataaaacattgtgttgaaatattaatagtataagccagtgctgaggaacttgagtatttcttattgtacaaatataactacctgaagaaatatttcctcacaattctttcaacccctaaaccaggtgtctgatgcgttgaaaaagggttctctttcttarttggccaattatagatgatagataaatgataaatacagtcacagactgaaatccaaaaatttaagaagctttgaaagataaatttcaaatgagagattgaaaatggtatcaataccta

SEQ ID NO: 373598 - DNA, 557 bp, Homo sapiens
tttctacaaagaactgactcagcaaagggtctatgctttgagtgacttgtgcgtagtgatgatagatgtgctactcattcaaatgtcctcttctcaccatttctccaggaaataatgatttcctttgtgtgctagacatgaaggcaaggtgaacagactaccttgtacattaggctgtattcatcaatgaaacyttccaactttcatacttacactttgtaggcttgtatttaaaaggctggtgctccaggggcttttcactttctcctaagtatctggtttccaatgagaacaatagaaccacagaattttggaaactaaagggagtttagagactctttaacactctgactttagagatggtggaaatgaggcttagagaggttgaagtcacaaagttagttaatggcaaggccagggcttaaactcgactctgtctctttcatttaattataatgcgggccttctctatggcaggcacttgtaattgttgtggaagcagaagtgaatgagacagatacagaccctgggaaatgaaatttactaggctttatctc

SEQ ID NO: 373599 - DNA, 593 bp, Homo sapiens
aagtaggtgcttgccaagtgaccaccaggaaaaaaggggagaattctaggcagagagacaagcatccgcaaagaaacaaagcacaagagagcatgttgggaagactccaagcacttcaggattgatggacagtagagtgccagggttagagacccaagggagatgtggctggaaatgacagcaggagccatgcagagagattggcaagatcactgtggtcataatgtggcaagatttgagacagacaaaagtgttagaaggctgttgccgacagtgacggaagatatatttagaatttgactctctgcaatatttcagtaaataaaataagtgctgattcttcacttcatgccacatgatcataaattcaggactcgttctagctcccatctgtataaggtatgacttacctggtctaatctacaaattttttaatttgaacatcagtttgggaattagtgcamctaattgcagatgcttctctttaataactaaattattaacttggaaacttaaagaggcaactaagaaagttaataaaagtctggacagaaccacatagagtttactaaatttacaaacagattgaaagt

SEQ ID NO: 373600 - DNA, 619 bp, Homo sapiens
aggatttgaagcaggaaaggcacgatcagtttagggttttagaaggatcactctggtggcaagtactcataggtctgtctgagataatgctttaaaaatatagtccctatcactgttttgcatttttctctgcctgtattgaatcatttgaatggttttcattaatgtccaaatagctaaagctaaggacctgcacttaactacctgcaaacacacagtgcacggacaaggggatttacctttgtggaatttctcttaaagttgaagttgccaaaagcataaattgaacctaaaatttgggaccacctttattcatactctgaattgatttaactttctctttaaaatacctcaaatattttacatatactaggtaatctgtttttcagagagagagtggttgcaaatagccaaaacccattcaaactagctcaagctgcaaggaaaaatatattgaattattagaagggcaaacaatgtaaccagaacttagacctatagccagaatatagaaggagaataagtctaagaccaagggagctactgtttttcygggtctctctgatgcatgttggatactagcttaattctttgttatttctgcagcaagttgtttttt

SEQ ID NO: 373601 - DNA, 369 bp, Homo sapiens
caagacactgtggcatcttacaatagttacaaaggcattagcacaaggcagatttatttgtttatttatgtcccctataaaccacagctagactgttttttattgattttttttttwaatttgccttgacctcttttttctaaattccaaaatattaagattcttattcagcagatttgagaagtttttaaatgtaataaagtggttttgattgtagtgaggaaaaccagcccaagagcatatagctgctgtgaggatttactacctgggaaggtaaaagaaaacaaaagggtccatattcatgggggtcctttattttacatatgcatatctgtgttcatggaccagaatttgtattctccacttgta

SEQ ID NO: 373602 - DNA, 623 bp, Homo sapiens
agactcagttttgatgctgatttactgctcatgccatgttaaggttcttctcatggctatggcgttaggaatatggaccttttgttttcttttacttttccaggtggtgaatcatcacagcagctacatgctattgggctggttttctttagtacaatcaaaacctctttaytacaaatgtaaggataacctaatgcaaactacataaagaacaggtatattcagttttaggatacaaaacctagtcctgtttcatgttggagactgttctcacagatatgtctggaactttctttctgttccaaatttcttagtttactgcataattttatttaccctggaatcaggttacttttctatttatctgtcctgcttctctgagccaaagagcttaaatcttttctaattttacaatttcaaagttttaagtcttctaggaaatgaagatattttattcattctataaatgtatgttagatgaatgaggtcacaattagccaagttatatattatatatatattttaatatatagataaatatgaaatatatattatatattatgtaatatatattacgtataaggtgcaatacacaaaccatcacaatagtacacattcagact

SEQ ID NO: 373603 - DNA, 583 bp, Homo sapiens
ggattaatgttgaatgttgaattacaaatgtccccatgaccagttagcataagtgacctttgtgctccttttcaacactgtggtggattgagtggtgcaggtgaaagatggaagcaagaggggaaagaataaaaagctgacaaagtgagatgtcccccaccatcggtcagcacccctcactcctgctctggcttctaccttctgctcccyattaccatgtgggtaatacacaggttggtcacaaggaacagaggcaagacctgtggggggtgaattattacaagggatagatataatgggaaataatgaggcacaggcaactggctgctcacagctgaacagctaggagatctgacatgctctgggacagcagtagccactctaggaggcagcaccttggagtgggtttgtccatcacttcctcattctcaagtcaccttctttcagcctcttctactgaacctgcttctatgctattcctaactccccctcttgttttggctctttgagagcttctgcatgccgctttttctccacaaaccatttcacatcagctctgctccacatctgatctgtgggtgac

SEQ ID NO: 373604 - DNA, 583 bp, Homo sapiens
ggattaatgttgaatgttgaattacaaatgtccccatgaccagttagcataagtgacctttgtgctccttttcaacactgtggtggattgagtggtgcaggtgaaagatggaagcaagaggggaaagaataaaaagctgacaaagtgagatgtcccccaccatcggtcagcacccctcactcctgctctggcttctaccttctgctccccattaccatgtgggtaatacacaggttggtcacaaggaacagaggcaagacctgtggggggtgaattattacaagggatagatataatgggaaataatgaggcacaggcaactggctgctcacagctgaacagctaggagatctgacatgctctgggacagcagtagccactctaggaggcagcaccttggagtgggtttgtccatcacttcctcattctcaagtcaccttctttcagcctcttctactgaayctgcttctatgctattcctaactccccctcttgttttggctctttgagagcttctgcatgccgctttttctccacaaaccatttcacatcagctctgctccacatctgatctgtgggtgac

SEQ ID NO: 373605 - DNA, 564 bp, Homo sapiens
cgcatttaccccaaaataactttgccacaaaatatttcacatttgttattatgttcacatcactttagtaaatagactttggaaacaaaacacatcattctatttatagcattctgtttttagtagtggtatttccatttacaaaatacagtaattctcaatggctgaaaatgtcaaatcctagaaaacatagcatgccaatgatgttaacatcattcttgaacagttgttggctgaagattcattgcatgaatccaatgtttctgaaatagacaattctgatcattcagatgatygtgatattagttattatacataactacaagaacagtttctatattttattttcacattgaaaatcagtcagatttacttcagccacaaagagtgtgtttatgtaaaattaaatgagtgctggcagtgagctgcacattttatttttctaaacaggaaaagggttaaaaagagcctggagcctccctgcttgctctcttacctcctctctcaccctgtgatctctgcacatgctggctcccctttctctgaaactcccaccaggagctg

SEQ ID NO: 373606 - DNA, 556 bp, Homo sapiens
gtcacctataggtagggatgtaagttttttagaggtgggaacaaattgaagtcttgctattatggaaatacgtataaaaaggtagagtatggcaaatccctcctaggtactaagtcgaagtgtttgcatatttatctttatatggtagtgttttatgccaacctggtacaaagtacatgctccgtagatgttcactcaattgrcttgaatttttttcttctagttcccaaatcacttaggtggagccaaatgcattttaagttcattgaaccctggtagagtgtctggtagtttctggtatccactttaccctccaaaacacaatggtaaccatgtaggtgctcaaataatgcaataaacacatctctcacagagaatctgttatagtgaccttcaagttcagcatcagcattttgggggactatgaagaacaaagctggatgttgacaaggatctagaccacaatggtagctgtattcctagaaattttgactgagcaggattgagggaatacagattacagattcatattcttaaagcaagaccccattgagtt

SEQ ID NO: 373607 - DNA, 554 bp, Homo sapiens
tagaagtcaggtataacagggtagacaggctttttaattaaataatgtcagttacctcttgccatcagctcatagtttaattcaagcactcttgttataagaacactgggtcaagaatccatcctctggagtgctagggaatacaatcattcctgtccagctccagccagattctgtttggaggccattcccattgctttaattaggggaaaaaaattaatgttgtaaattcatagcatgtcactcctcatktctgtacaatccatcacactctgagcatgtgtatggcagctctttttaataaaggattttgcagagtacctgctgtggcaaaaatactttgtcatctttgctagctccaggagtcctagcattatgtcatgtttgactccaaaaaatattattataagccctggaattagaaacccaacaatggaactagctgatttcaattgcccgtgaagctatcatattttgagaaataaaacttggtaagttttcattttaatcaaaaactataacaggaccagggttgcttgtctgaaatgaataat

SEQ ID NO: 373608 - DNA, 553 bp, Homo sapiens
tccttttgacttctgctatcactagcctgataaggctttatttttacaatgcctyctctggggttttttgttcaatctgtaaggccttgaaaatgaattgtggttgctgacattactatttactaacatttactctcaaattgcaaatctctgagagagacaaagtagaaacatgacaagaggtaggaattccaactctaactaacacttactatctgtgtcttcagcatggcttttgaatttttctaagactcagattttcatctgggaaatactggtgaaatattgtgttgtgccttgtttatagtgggtgctcagtaaacattggttttctctctctcatgatttctgcacagtgaagtcaaagatgtctcaggcttacactgaaacctggaatgtgggagaacagaggaaaaggtaatagataaattctgatgaatacacaaatctctttccacacattctgatacatggaatctctgggttggtaagacttacatatgagagatcaagtggaaagagtgagttataatctcagagagttttgacagtc

SEQ ID NO: 373609 - DNA, 553 bp, Homo sapiens
tccttttgacttctgctatcactagcctgataaggctttatttttacaatgccttctctggggttttttgttcaatmtgtaaggccttgaaaatgaattgtggttgctgacattactatttactaacatttactctcaaattgcaaatctctgagagagacaaagtagaaacatgacaagaggtaggaattccaactctaactaacacttactatctgtgtcttcagcatggcttttgaatttttctaagactcagattttcatctgggaaatactggtgaaatattgtgttgtgccttgtttatagtgggtgctcagtaaacattggttttctctctctcatgatttctgcacagtgaagtcaaagatgtctcaggcttacactgaaacctggaatgtgggagaacagaggaaaaggtaatagataaattctgatgaatacacaaatctctttccacacattctgatacatggaatctctgggttggtaagacttacatatgagagatcaagtggaaagagtgagttataatctcagagagttttgacagtc

SEQ ID NO: 373610 - DNA, 553 bp, Homo sapiens
tccttttgacttctgctatcactagcctgataaggctttatttttacaatgccttctctggggttttttgttcaatctgtaaggccttgaaaatgaattgtggttgctgacattactatttactaacatttactctcaaattgcaaatctctgagagagacaaagtagaaacatgacaagaggtaggaattccaactctaactaacacttactatctgtgtcttcagcatggcttttgaatttttctaagactcagattttcatctgggaaatactggtgaaatattgtgttgtgccttgtttatagtgggtgctcagtaaacattggttttctctctstcatgatttctgcacagtgaagtcaaagatgtctcaggcttacactgaaacctggaatgtgggagaacagaggaaaaggtaatagataaattctgatgaatacacaaatctctttccacacattctgatacatggaatctctgggttggtaagacttacatatgagagatcaagtggaaagagtgagttataatctcagagagttttgacagtc

SEQ ID NO: 373611 - DNA, 591 bp, Homo sapiens
caaccatgtaagttcaaaatgcacgtccagctcacttttgtggctcatgattcaaatgtcaatstagttaagtctgcagttctgctgttgaggttagtgacacttgtgtaccaacctagatgacaggagtataccctatcgtctctagcaatggctagagtggggaaggcaggggcactcattactgcaggggatagaagacagagttccatgcactgacacagctggggatggggagtcatcttgttccgcagaggagatggatttacaattctgcccaccagctccagagagcaagggtgcttcctcatatctgtggtgtcatgggaggtgagtaacaggaaggtggaagtcagagttgacctacaggctctacgtaggaaggatacagcctcacatgcagagcaaagagatggaagaaagaaagggttccacccacaagtgctactgctgcaacacctgttgtggcggagggtaggtgtagtttttttcatggtgtttacctcaagaacagatagatgttcattaaaggcttctggactattatgttgcacttttctcagttctttgggcaagagaaaacagggtttt

SEQ ID NO: 373612 - DNA, 598 bp, Homo sapiens
tagggatacaagtggtttttggttaaattttagactaaaattttcgtgtacccaccacttgactagagtacattgtacccaatatgtagttttattatcctccactcctctcccaccctcccatcctctgaatctccaaagtccattatatcactctatatgcctttgcatacgcatagcttagccccccacttataattgagaacatatggtatttagttgtccattcttgagttacttcacttagaagaatggcctctagctccatccaagttgctgcaaaagacattattttattctttgttatggctgaggagtattccatggtatgtgtgtatatatgtatacattatagatatgtattatatatgtgtgtattatatataattatatataatgtgtgtattatatataattatatataatgtgtgtattatatataattatatataatgtgtgtattatatataattatatataatgtgtgtattatatataattatatataatrtgtgtattatatataattatatataatgtatattgtatagaattatatataatgtgtgtattatatagaattatatataatgtgtgt

SEQ ID NO: 373613 - DNA, 598 bp, Homo sapiens
tagggatacaagtggtttttggttaaattttagactaaaattttcgtgtacccaccacttgactagagtacattgtacccaatatgtagttttattatcctccactcctctcccaccctcccatcctctgaatctccaaagtccattatatcactctatatgcctttgcatacgcatagcttagccccccacttataattgagaacatatggtatttagttgtccattcttgagttacttcacttagaagaatggcctctagctccatccaagttgctgcaaaagacattattttattctttgttatggctgaggagtattccatggtatgtgtgtatatatgtatacattatagatatgtattatatatgtgtgtattatatataattatatataatgtgtgtattatatataattatatataatgtgtgtattatatataattatatataatgtgtgtattatatataattatatataatgtgtgtattatatataattatatataatgtgtgtattatatataattatatataatgtrtattgtatagaattatatataatgtgtgtattatatagaattatatataatgtgtgt

SEQ ID NO: 373614 - DNA, 598 bp, Homo sapiens
tagggatacaagtggtttttggttaaattttagactaaaattttcgtgtacccaccacttgactagagtacattgtacccaatatgtagttttattatcctccactcctctcccaccctcccatcctctgaatctccaaagtccattatatcactctatatgcctttgcatacgcatagcttagccccccacttataattgagaacatatggtatttagttgtccattcttgagttacttcacttagaagaatggcctctagctccatccaagttgctgcaaaagacattattttattctttgttatggctgaggagtattccatggtatgtgtgtatatatgtatacattatagatatgtattatatatgtgtgtattatatataattatatataatgtgtgtattatatataattatatataatgtgtgtattatatataattatatataatgtgtgtattatatataattatatataatgtgtgtattatatataattatatataatgtgtgtattatatataattatatataatgtatattgtatakaattatatataatgtgtgtattatatagaattatatataatgtgtgt

SEQ ID NO: 373615 - DNA, 598 bp, Homo sapiens
tagggatacaagtggtttttggttaaattttagactaaaattttcgtgtacccaccacttgactagagtacattgtacccaatatgtagttttattatcctccactcctctcccaccctcccatcctctgaatctccaaagtccattatatcactctatatgcctttgcatacgcatagcttagccccccacttataattgagaacatatggtatttagttgtccattcttgagttacttcacttagaagaatggcctctagctccatccaagttgctgcaaaagacattattttattctttgttatggctgaggagtattccatggtatgtgtgtatatatgtatacattatagatatgtattatatatgtgtgtattatatataattatatataatgtgtgtattatatataattatatataatgtgtgtattatatataattatatataatgtgtgtattatatataattatatataatgtgtgtattatatataattatatataatgtgtgtattatatataattatatataatgtatattgtatagaattayatataatgtgtgtattatatagaattatatataatgtgtgt

SEQ ID NO: 373616 - DNA, 539 bp, Homo sapiens
tagttaaatatatatatatatatttaactcaatactaaagggagcaaagtatgcgtaaaacatcatgagtgtgcctaagcttaatgctacataggtttgggagaagaaactaagctacccaaatgtatgtgccaactttgccatatagttcaacatccctaaagttaagtgttatttttaaaaggagtttttcacgtttaaaatgtgtaagcctaggtaggatgttaacacaaagtcttaaggcatataataatcacaaaaacatgtatgccatcagcaggatgaatttttttacttattcatatgatcataacaaatattcaaaaattacgccaacaaatctttccattcctttccattccctctgcaagaataamatcaaataactgttaggctataaacaacattaaagtatttattttccccctataaatgtgaaaggacagggataattaacttggtgcagaaactatgtttttggcatttcttaatatataaaattcatcccatatttttacagtagtatgtactttaacaac

SEQ ID NO: 373617 - DNA, 530 bp, Homo sapiens
tatttgatagcatatctataccacattttctttatcccgtcctccattgatggacacatgttgtttccatgactttgctatttattactagtgctgtgataaacatatgagtgcaggtgtctttttgatataacagtctcttttccaggggtgggattgctggattcagtggttgatttttagttctttgagaaatctccatactgttttccatagaggttgtactaatttaccttcacagcaacagtgtataagcattcccttttctctgcgttctcaccaacatctgttgcttttaaaatttttaataaaaaaatgaaatattttgtagagtatatgcctgattggattccttcaatttaccaacmgtaaatttaatagcaatctttgaactcagtgtactactctgtattgagttttattttgtccatctttggaggaagaaacagtgtcacaaatattatttggcctttgttttccagcttccattgtgattcagaaatggtggtgtcacatgaatccgtgtttgg

SEQ ID NO: 373618 - DNA, 530 bp, Homo sapiens
tatttgatagcatatctataccacattttctttatcccgtcctccattgatggacacatgttgtttccatgactttgctatttattactagtgctgtgataaacatatgagtgcaggtgtctttttgatataacagtctcttttccaggggtgggattgctggattcagtggttgatttttagttctttgagaaatctccatactgttttccatagaggttgtactaatttaccttcacagcaacagtgtataagcattcccttttctctgcgttctcaccaacatctgttgcttttaaaatttttaataaaaaaatgaaatattttgtagagtatatgcctgattggattccttcaatttaccaaccgtaaatttaatagcaatctttgaactcagtgtactactctgtattgagttttattttgtccatctttggaggaagaaacagtgtcacaaatattatttggcmtttgttttccagcttccattgtgattcagaaatggtggtgtcacatgaatccgtgtttgg

SEQ ID NO: 373619 - DNA, 590 bp, Homo sapiens
acctgactggggctgctgcctttctttcagggatggcctgcccagagaggaagaatctagagaggcagtctgactacagcggctttgcctagctgtggtgggctccgcccagtttgaacatccaggccagtttgtttacactgtgagggaaaaaccacttaamtcaagcctcagtaatggtggacacccctccccacaacaagctccagcatcccaggtaaacttcagactgctgtactggcagtgagaatttcacagcagtggatcatagcttgctgggctctgtgcgggtaagagccactgagctagaccacttggctccttggcttcagccccctttccgggggagtgagtggttctgtctcactggcattccaggtgccactggggtatgaaaaaaaaaatcctgcagttagctcggtgtcggcccaaatgactgctcacttttgtgcttgaaacccagggtgtaggcacccgagggaatctcctggtatgtgggttgtgaagaccatgggaaaagcatagtatctgggccagaatgcactgttcctcacagcacagtccctcgcaacttcccttggctagcagaa

SEQ ID NO: 373620 - DNA, 643 bp, Homo sapiens
tgtatataaataggctaaaagaagggtcaaaaaacttttttctgtaaaaggccaatgaatatgttaggccctgtgcaaaagcaatctctgttgtaagtactcacttctttcattgtggccccaaagtagtgttaggtaatatgtaaataaatgggtgaggctgtgtttcagtataacattattaaaacaagagtgggttttgctaacctctgggaaaaggaagaaaaaaaagattttatatatctagaggctagaaagggatttgattgaattccacatatagtactttaaatagaattctcagtaaaacaatgaataaaatcaatcttatgagcatagataatcttttataaggaaacatgagaaatgcagcttttacagtcaggaaaaaagttactgatgcctagtattttattgctattattcaatgttgcactagatgtcttagtcaatgcaacaacacaaaaaataaatgacagtctagcagaaaagataacttctatamaataaatttttttctatcctaaaatgcaagaaaatcaacttaaaaattattagaacagatgcagatttgcattgtgtggttagataaaagataaatatacagaaagatcaatagtgttctttattaaaactgaagaag

SEQ ID NO: 373621 - DNA, 603 bp, Homo sapiens
ttaaaatggcctatatggtatgtcataaatatgttgcatttttaatagttcagactttttaaattttaacatgaagaaaaatggagtgcaatctcttgggccttatcctgagagatttttagctcaggagctgtggggtgggccccaggaatctgcatctttgaagcactcctggggattgtattatagataatacctgagctaccttttgaaaaatagtatatatactcagagttccttattgcgaagagaaatattctgtatattctgtatatatatgtggggaaatcacacatttatgggtgctcagtaaatgtgtgataaatgaaggaatgaacagttaaatgaaaaggaagactaattctatatttctcaccttcagtactgttaacatgttgagccgaataattctttattgtgggagctgtcctgagcatggtagggtgtgtaggagcatccctgatttccacccaccagatgccaatggtaccstctcattgaaccagtctcataggttgatgcaacagcataagagaagacccctagcactgtgtggggcacataacatgcattaaataaacattcgcaccatcgtgtaaatca

SEQ ID NO: 373622 - DNA, 642 bp, Homo sapiens
gttcataactggaaacttactaagtttataatcaaacttaataatgaatgtttaggccaggcacagtggctcacacatgtaatcctagcactttgggaggccaaggtrggcgagctgcttgagcccagagtttgagatcagcgtgagcaacatggtgggaccccacctccacaaacaaacaaaaaaaaacattagccaggtgtggtggcatgcacctgtagtcccagctacttgggaggctgagatgggaggatcacctgagcccagcaagtcaaggctgcagtgagccatgattgcaccactgtactccagcctgagcaagagtgagacgctgtctcaaaaaaataaataaataaaaataatgaaagtttaaacttaataattaaaaatgagtgaacaattattgaatgcacattctaatactaaaggctttacatgtatttcatctagccctcacaacatatctataataaaggtagggattataattggacccatcttagagatgaagaaaaagaaggaataaggaggttaagttaccaagactacagcttcagagctagaatctgaactacatatttgttttaaagttctgtaatgtaatgacaaacataacaataaggaattcaagagttttttgga

SEQ ID NO: 373623 - DNA, 505 bp, Homo sapiens
tatgcattttaaactttatccctgagtgtggtgtgaaaagcttttctttcctagctggattttaggttttgggaaacaagcagagaggaagagggtgggggaagggagtacttacttgatgcatctgaaatcatgctgtgggtccgtggttttccaactgtttttagtcacatatcccattatgctgaagctcagtatctaaaattggttttacaaaatggagctgactggctgagacagaaatggagtgttcagaggcccatttattcacccttccttttcctgggggctccccaccagagaccatccaagagacctctgtggaccacagtttraaagccaactatggacttctggtttctgcgtggtttgtaggaacctgacacaagaagtaatatccaacatcttaacttttcttgaacccatcagagagctgatgtttcagggaaactagcctaaaatccaaggaaaaccaggcacctacaaagaaagactgaacgcaggc

SEQ ID NO: 373624 - DNA, 505 bp, Homo sapiens
tatgcattttaaactttatccctgagtgtggtgtgaaaagcttttctttcctagctggattttaggttttgggaaacaagcagagaggaagagggtgggggaagggagtacttacttgatgcatctgaaatcatgctgtgggtccgtggttttccaactgtttttagtcacatatcccattatgctgaagctcagtatctaaaattggttttacaaaatggagctgactggctgagacagaaatggagtgttcagaggcccatttattcacccttccttttcctgggggctccccaccagagaccatccaagagacctctgtggaccacagtttaaaagccaactatggacttctggtttctgcstggtttgtaggaacctgacacaagaagtaatatccaacatcttaacttttcttgaacccatcagagagctgatgtttcagggaaactagcctaaaatccaaggaaaaccaggcacctacaaagaaagactgaacgcaggc

SEQ ID NO: 373625 - DNA, 592 bp, Homo sapiens
tccttttccctccctcctcactctctccatttcagatgctcaacatggaattcctgtcagaagtctttttagagtgcttctccaaagctctgaggacttcctgaattataagagttcaccaggcccaagttgtagtgaagatgccagtctgtctgctatagcaggatttattttaaagcatctctgaagctttttgttttattctrctcagagtcaagagaacccctcttggggacagtgaaatatacttaggcacgtttctcctgagcacatgtttatattttagcgtgaaagagccccctaagcttgctaagaatttatatagcaaagattgcaatttctcaagtcccttgtaaagtcattatggttcatatgacctctgggataatgcacatcttaatgtgctgcagaatatcagtgtacacatttcttgatcagagtaggactctacctagaatttctgatgtgtatgtgcacgtcttcctcgctttttttctctctcaggtaataggacctatacccttcaaaaagtcatagtgtcttagaaagtgctattttagttgtgtagtagagattctttctgctgttcact

SEQ ID NO: 373626 - DNA, 496 bp, Homo sapiens
aggaaatctttctagaataaatatttttcwactttttaaacacactaaaagtggtttgattttttttgatgactcagttcttaatttctgactgcaacttttctgaaatcgatgtcagcagaatagttacctactgcatatttataggtatctttagaaaaacagttttctgtgatcaagtaaattggataaatactaggtaaacaaaattaggcagccttctttttttttcccagattattctgagcctttaccatgtgaatgtgtattttgagtctctgcagggggttatggaatggaagttttctcaaatataatggaccacagaaccccctttgtgttacatttgttataattcctgaagaaaatctttagaactttttgggaaaaagttgctttaatgtggtagcctctcaggctatcaatatgtatgggattatttgcctctattttgaattaccccagactgctgctgaatttttgtctccttttaaaa

SEQ ID NO: 373627 - DNA, 484 bp, Homo sapiens
cttaaatttattccttctctgatgttctttccttaatgttgatctaagttgctgaactatcattattcttttctctgaagaacttcttttaacattttataaagaataggtatgctgtgctaataataaatcccctcggttttgcttatgtgagaaagtctttatttctccttcacatgtgaaggataatttttatggatttagaattcaaagttgrtgagggtttatttttctttcaactctttaagtatttttcttcacttgcatagtttatgatgagaagtccactgtaattcttattcttgtttctctatagatatggtgatccccacaaccccagggcttctttcaagattttttcacattccgaagttgaatgtcatatatctaagtatagactttgtggaatttattctactttgtgttctctgagcttcctggatctgaatttaggttagatgtctgtcattaattttggaaaatt

SEQ ID NO: 373628 - DNA, 456 bp, Homo sapiens
gaaaaatgttgctgaccccttgcctggtggataaggtaaatattaaattctcaaatatgtgaataaatatgtgatttcaaatttctgtagtgcaagatgctgtgaaagaataagaaggagaacctcatttagactgggcagtaagtgaaaccttcttgagaaagtaggatttaagttgggccctgaaggacaaaaaaaaaaaatagaggatatggatgtgaggattaaatatgcagagggatgacctgcatggaattctgcagaaggaaaaraacatggcatatctgaataaataaaggaaggccagtggagctgcaactgagggaggagtgaaggtgagtggtttgaggttcaggtagagaggtagcaggggccaggtcaagcatggccttctaaaaacagcgttcttttcctagggtcactaggacaatactgaagcattttaaatagatttac

SEQ ID NO: 373629 - DNA, 588 bp, Homo sapiens
atattacccaaatattgcgtggggcatccttatcctgaaacagttttcattgtttatctaacattcaaattgaacctgacatcttactttttttgtatttgctaaatcttgacaaccctatatcatgaacttggggaaaattcagagtcaagccacaatatccaaaatctatatgccagaaaacagagaagaattgtaacagctcctttcaacagtgtttgcactggttgtctgctgttgaagtatcctcgtggacttgctgatgttgaagtatcctaatgaacttgctgaattttraaatcctctttactagaactgctgcaggtgaggagacagaacaatctaaattagagtgcaaagctaacatggatggaagtttatagagtacagttcaattgcctctccataattaattgaaagctctccaaagggatggcatttgaaagatgttttggaggcagatagaaattgttggttagacacattagcagatacacaataagagtaagtgattagatagtagtagcagctaatatttttcctgttatttagctagaaaaaatgaagattcggagaaatatagctaaa

SEQ ID NO: 373630 - DNA, 554 bp, Homo sapiens
gctgaatcaaatgaaataaatacataaatgtttacctggtttctaaaaggcatgtgggctagcccaagagtaaagagacctgacctgaaagaaacaaaatatttcctacatcttcaayctgtcccccttcttcactttcaaggaccagctaccttttggctggtaaacatattctagtggagaaagcacatgaataggagcccagttcaatttctggctctgtcggtctgcagctggagagctccaacccagtttctcagtctttctgtgccacagtttcctctttcctcatctacaaaatgaaggatatcggtccagaaaatattcttaagtcccttttccatgtttgacttatggagatacttacactttataacccagagcacatatagctaaacagaacggtaatcggttaaagagaaaggcaaagtgagacaaaaggggagatgagttatattacaaatctaagagtcaaaaaagaatttagaaaacgattttaagggtaaggtaacagcttatccattgaatacattattcctctaggaagctaccta

SEQ ID NO: 373631 - DNA, 543 bp, Homo sapiens
tactataaaagaggaagttagaggcaggaaaatgctatcatggctagaacagctgtctatccaagagctcagcagcccaaagccaaaatatagagttttattacaattacatttgaaatttatatagyctttttatactgcaaacagctaaccaaatcttcatcgtgcaggtttcagtgctaatttgtaagattttaccagctggacctttctagaagtaaacatgatgccatggaaatcagaaggcacagtcactaatcagttcagtgacctgggcatgccaactttacctctctgaactcagtttctccattttacaaattggctcatttaagtgtcctgtcagctctaaaatcccacaattccatcttcttagctgtggaaactgggtaacttaaccaagcctctgatagtgtatggctaagcaggatcttggatcctcatttcttcattctctgaattttaaaggtgtttcttctttgtagtaaataagcaaagtgttaaaaaggctgagcaccttttcttttatcccaaatcacttgt

SEQ ID NO: 373632 - DNA, 564 bp, Homo sapiens
ccttgtttaagtttccctcaataagcatgaaaagtaacagacaaccaagatgttatgagcttggagtgcatgtctcataaaccaaacgtgaggagctttttcttccgactgtaattctcaagcagaagaggtttctttatatgaacaccaggaaacggagattttaaatccctaagttgcatggagcttgtgaactttcaggatgctccaatagttccttaaatactcccaaatctttctcatgtggggcaagctttttttttcctaagcctttatcatctgtcagcagccagtgatgcattagatatacrgcttcatttctataacaaatgtaaaagacatacccaaaatgaattatagagaaactagcagggcaaactgtttgactgaacttcatttttgaaaatttatctttttttctccttacataatcaaaagctcaagtatctgagggagccattttaacaactctgctcttaagtaataattaaatctgctgccgcacaggagttctgcatctttataaatgtcaaccccattctgaagaatccaagctgctcccca

SEQ ID NO: 373633 - DNA, 564 bp, Homo sapiens
ccttgtttaagtttccctcaataagcatgaaaagtaacagacaaccaagatgttatgagcttggagtgcatgtctcataaaccaaacgtgaggagctttttcttccgactgtaattctcaagcagaagaggtttctttatatgaacaccaggaaacggagattttaaatccctaagttgcatggagcttgtgaactttcaggatgctccaatagttccttaaatactcccaaatctttctcatgtggggcaagctttttttttcctaagcctttatcatctgtcagcagccagtgatgcattagatatacggcttcatttctataacaaatgtaaaagacatacccaaaatgaattatagagaaactagcagggcaaactgtttgactgaacttcatttttgaaaatttatctttttttctccttacataatcaaaagctcaagtatctgagggagccattttaacaactctgctcttaagtaataattaaatctgctgcygcacaggagttctgcatctttataaatgtcaaccccattctgaagaatccaagctgctcccca

SEQ ID NO: 373634 - DNA, 599 bp, Homo sapiens
tttataaaatgcaattaaaatgtcagtgcaataactactgctacaaaaagcttctgaacctgtctcctcacagacccatagcagttctcagaggagcagagatccaaggaccacactgaattgtactgagagcccagtaaggcagggtgagtctgctgaattttattctgagggagctgtgccaccactagaaggttttgagcagaaactgctgtttctttcaactggcatgcccttccctctccaacacttggcaagatcttgcttaatcacatgaaccatctccaccattgacaaagagtatcttcaaccaggggccctctaagcacttcacatgtgtggatcccgagtggatctcatggcttctcttccacccctgccaaaagtaatgatactcaaytttttttctctttttcttctttaaaatactcttcatgtcctcaatatacaccatgatttttgagtacatgtcctatccatccaaacagtctataaactccaaatatcagagactattttataaatcattatacttattaacttgacactccataaatattcttgaattgagatctacactaggtcgacaaagatcagtc

SEQ ID NO: 373635 - DNA, 599 bp, Homo sapiens
tttataaaatgcaattaaaatgtcagtgcaataactactgctacaaaaagcttctgaacctgtctcctcacagacccatagcagttctcagaggagcagagatccaaggaccacactgaattgtactgagagcccagtaaggcagggtgagtctgctgaattttattctgagggagctgtgccaccactagaaggttttgagcagaaactgctgtttctttcaactggcatgcccttccctctccaacacttggcaagatcttgcttaatcacatgaaccatctccaccattgacaaagagtatcttcaaccaggggccctctaagcacttcacatgtgtggatcccgagtggatctcatggcttctcttccacccctgccaaaagtaatgatactcaactttttttctctttttcttctttaaaatactcttcatgtcctcwatatacaccatgatttttgagtacatgtcctatccatccaaacagtctataaactccaaatatcagagactattttataaatcattatacttattaacttgacactccataaatattcttgaattgagatctacactaggtcgacaaagatcagtc

SEQ ID NO: 373636 - DNA, 599 bp, Homo sapiens
tttataaaatgcaattaaaatgtcagtgcaataactactgctacaaaaagcttctgaacctgtctcctcacagacccatagcagttctcagaggagcagagatccaaggaccacactgaattgtactgagagcccagtaaggcagggtgagtctgctgaattttattctgagggagctgtgccaccactagaaggttttgagcagaaactgctgtttctttcaactggcatgcccttccctctccaacacttggcaagatcttgcttaatcacatgaaccatctccaccattgacaaagagtatcttcaaccaggggccctctaagcacttcacatgtgtggatcccgagtggatctcatggcttctcttccacccctgccaaaagtaatgatactcaactttttttctctttttcttctttaaaatactcttcatgtcctcaatmtacaccatgatttttgagtacatgtcctatccatccaaacagtctataaactccaaatatcagagactattttataaatcattatacttattaacttgacactccataaatattcttgaattgagatctacactaggtcgacaaagatcagtc

SEQ ID NO: 373637 - DNA, 599 bp, Homo sapiens
gtatgaacggctgcagttgaaataatggttgaaaaatgttttcttcatgttgtagaacctgtccttcaaattgaagtctgacctggagatccagtatgtaaaagtgataaagatggagctgttctggttaagtggaattctakggcctagggacgtaccctctgagtccttgaagcacctttgaagaacttctagggacatagttttagaatcactggtctacaaagtcaagtttagaaaacgtttttgatttgcgttttgatttctaattctttgattctcagtctcttcatttcaagtttcctgggtttcattttcacactcactatttcttttccttgtcctcaaaatgtttttgaggttaagagaaggtgtgctaaataggaagggcctgtggttatgttcacaccgagacccaacttcataagttcttaagctggaaaggttgtatgactgacacattctgcagctcttgcttaaagatttctgctgcagccttttggtttcaatacagatttggtggtcataccatggcttcagtgtcctggcttcggtccctgattacgggtgaaccaggagttttgcaagcccatggtcac

SEQ ID NO: 373638 - DNA, 538 bp, Homo sapiens
ggcattctcatttaacctcataatatattaatatgatcaaattttgctaaatatgtgaatgtaaatccaaaacagtgaattgttgagagtgggaaagaagtctggggaggtgggagagagggagagattctaacacttgttgaatayctgctaagtgccaggtgcttgctgtgtatcatctcattgaatcattgcaacaccactgtaaagaactagttccccagttttgcatgtgaaaaatattaattgctttcccagtgttacccttgcccagtgaatcatgggtcttaattctccaccaagtatttctgactgcaaagctcatgttttctgcccatatgcacatgatctgaaggatcaactcagcaagaaatacttaaagttttttgttgctgaatgcattataattttgagaagactttatgtatgccgttgcttcccaaacattacaatacaattgtggaacactcaatggaactttagttcattatggcagtgagaaggtaacaaggaaataagagcaggtctttgcccttcc

SEQ ID NO: 373639 - DNA, 538 bp, Homo sapiens
ggcattctcatttaacctcataatatattaatatgatcaaattttgctaaatatgtgaatgtaaatccaaaacagtgaattgttgagagtgggaaagaagtctggggaggtgggagagagggagagattctaacacttgttgaatatctrctaagtgccaggtgcttgctgtgtatcatctcattgaatcattgcaacaccactgtaaagaactagttccccagttttgcatgtgaaaaatattaattgctttcccagtgttacccttgcccagtgaatcatgggtcttaattctccaccaagtatttctgactgcaaagctcatgttttctgcccatatgcacatgatctgaaggatcaactcagcaagaaatacttaaagttttttgttgctgaatgcattataattttgagaagactttatgtatgccgttgcttcccaaacattacaatacaattgtggaacactcaatggaactttagttcattatggcagtgagaaggtaacaaggaaataagagcaggtctttgcccttcc

SEQ ID NO: 373640 - DNA, 538 bp, Homo sapiens
ggcattctcatttaacctcataatatattaatatgatcaaattttgctaaatatgtgaatgtaaatccaaaacagtgaattgttgagagtgggaaagaagtctggggaggtgggagagagggagagattctaacacttgttgaatatctgctaagtgccaggtgcttgctgtgtatcatctcattgaatcattgcaacaccactgtaaagaactagttccccagttttgcatgtgaaaaatattaattgctttcccagtgttacccttgcccagtgaatcatgggtcttaattctccaccaagtatttctgactgcaaagctcatgttttctgcccatatgcacatgatctgaaggatcaactcagcaagaaatacttaaagttttttgttgctgaatgcattataattttgagaagactttatgtatgccrttgcttcccaaacattacaatacaattgtggaacactcaatggaactttagttcattatggcagtgagaaggtaacaaggaaataagagcaggtctttgcccttcc

SEQ ID NO: 373641 - DNA, 538 bp, Homo sapiens
ggcattctcatttaacctcataatatattaatatgatcaaattttgctaaatatgtgaatgtaaatccaaaacagtgaattgttgagagtgggaaagaagtctggggaggtgggagagagggagagattctaacacttgttgaatatctgctaagtgccaggtgcttgctgtgtatcatctcattgaatcattgcaacaccactgtaaagaactagttccccagttttgcatgtgaaaaatattaattgctttcccagtgttacccttgcccagtgaatcatgggtcttaattctccaccaagtatttctgactgcaaagctcatgttttctgcccatatgcacatgatctgaaggatcaactcagcaagaaatacttaaagttttttgttgctgaatgcattataattttgagaagactttatgtatgccgttgcttcccaaacatkacaatacaattgtggaacactcaatggaactttagttcattatggcagtgagaaggtaacaaggaaataagagcaggtctttgcccttcc

SEQ ID NO: 373642 - DNA, 509 bp, Homo sapiens
gtcacatcacaatgaaaacacctcttgccaagcctggcaccagaaatatatgagtagtgaaggagaaacagcatgtaaaatgtatagagccacaagctagtctgtagaaaattcttccaatcatcaggtatctaaaattgtaaacaaaggattcagtttccatcagtggctagactaaacgaaggctctctcctgtcagaaacatattcaataatgcagtatatgcaattacaaatgcaacaaacctgtggcagtgctacaaatagcaaatttgtgtgcgtgagaattttcaggttttatgcaactattaacmataaaaaatagatttccacctaccatgatagaggacttatctttcctgtctttttgtagaaaatagtacaaaaccatcgtcacatgaaaaggcaatcaaagagtaaccaaaataatataataaataaaatagaggagtgtcagaaagtcaattactaaaaaatgttaaaaacataatacatgcattctgttcaagg

SEQ ID NO: 373643 - DNA, 591 bp, Homo sapiens
tccctcaggccttccaatggcaacttttccagttactgtgttgaaacatttttttccataatctttgtggacatgctgaccaataactttgactccttgtaggactagaaccctagccaaagacccatctaagcccctctctcagggtcttgctgccatcctccrgtcagtggttgccatgctgctgtgaagaagcaggtgcctctgctgtggattagctatgcctgactttgcactctgtgctccacctggaacccccaatgtgccagattgtcagcctctggtaccatgtgccagattgtcagcctctgttaccatgaactgccttcaccacacccattcttgggataggtctgtggattgttcagatgccctttgatatggtttggctgtgtccccacccaaatctcatcttgaattgtagctcctataatccccacatgtcatgggaaggacctggtgggaggtaattgaatcaagggggtgggtttttcccatgctgttctcatgatagtgaataagtctcacaatatctgatggtttcataaagggcagttcccctacacacgttctcttgcctgctgccatgta

SEQ ID NO: 373644 - DNA, 575 bp, Homo sapiens
cactgccagttctgctatactggtaaagaatcaatggtcattttgtttagcaagatattaacaaatttttagacaaaggcaggcatgaagtcaaataaggagttgccagctagacaactgtgcataaaatgcgagaaaaactgtatttaaagtatagctagaactggagcaggatgaagctgcaagagactggagcttgctacaaggstgacctaagagaattctgtgatgggatgactggaggacatttagaaacagaaaattctaaattcagtttgaggttgtgttgtggtgatggaactgctaactgatccctgttgccccaaacattcaataaagtctgttatacctaaaaatgccttgtgtgtgtgcaatccacagggaagtctaggaggagaaggaagccaggtatgggtcactatggagcatagggaagcagatggcaagggagatcaacacttcaatgggaactgaaagtcaaagtcagagtgactgtgagaatattacctctgaggaatttgaaaaaaaaaaaaaaaactttggtgggcctgaatgccccattggatgtagaaaag

SEQ ID NO: 373645 - DNA, 571 bp, Homo sapiens
atataaaaaaacatctggtgcttcaaagtgacagttgctataatgatgcctactctaaatgtgcaaatttwttctctaaatttttcaataaatactgcttctacggaaaaggaaaggctttgttcaggcctttggagccgacaataatgctctgtcattaaaatgtcaagtttaccttatcaatttgtccagttaactatgctgtgaaacaaactatcccaaaacttaataacaatgatattattatgctcacagacacagtgggtcaggaaattggatgggacacagaggacatatgttctttctgttccaaaatctgagacttcatcagggaagaattgaagagtgacttatggctgagttggaattatctggcaatgcttctcactaaatcacatctgttgcctgggctgataagactcaaagacttggcctactcaatagagtacctacaggtggcctctcctgtcttggctttcttacaatatggtggcctcaaggcaatcagatttgttacttggtagctcaaggcctagggcaagtatcccaataaagaagggggaagacacat

SEQ ID NO: 373646 - DNA, 571 bp, Homo sapiens
atataaaaaaacatctggtgcttcaaagtgacagttgctataatgatgcctactctaaatgtgcaaattttttctctaaatttttcaataaatactgcttctacggaaaaggaaaggctttgttcaggcctttgsagccgacaataatgctctgtcattaaaatgtcaagtttaccttatcaatttgtccagttaactatgctgtgaaacaaactatcccaaaacttaataacaatgatattattatgctcacagacacagtgggtcaggaaattggatgggacacagaggacatatgttctttctgttccaaaatctgagacttcatcagggaagaattgaagagtgacttatggctgagttggaattatctggcaatgcttctcactaaatcacatctgttgcctgggctgataagactcaaagacttggcctactcaatagagtacctacaggtggcctctcctgtcttggctttcttacaatatggtggcctcaaggcaatcagatttgttacttggtagctcaaggcctagggcaagtatcccaataaagaagggggaagacacat

SEQ ID NO: 373647 - DNA, 489 bp, Homo sapiens
tttctaacttaatcatcaaaacaaccctatgagttaggtactactactcttagtggagaaactgaggctaagaaaggttaactagcacacattactggcctaaacctagtaaatgwcaggttaaaaccccaggcagtcttattccacatttcctcataattatcatctgtctagatttttttgacaatagatctgatgaatatagcagctacagacatagcaaagctgtcatgcagctcatgagctgcatgaatcttaactagttgagtgactggtttcaggtaacaaacttttctggttctcaaattccttaaggaggtggtaggactaggatagagatgcacaactggggcagcaaccaccagggagcaatgtgtccatttatgggaaggcaggatcacaatgattgtggaccactattgtgggcatttggtaggcaaagttcagtcacagaggtggaaatgagtggaacaattccatcaaaggaaa

SEQ ID NO: 373648 - DNA, 602 bp, Homo sapiens
actacataatgtttatgattcccagctacacaggaaatgtatacaatatgtatatgaatgataaataccatgaaaggagggaaggaaagtgaaaaaggtaatataggaaagtgtcctcaggtggcttttactatcttgttatttttgttcttaaactggggctgcactcataggtgtttgctgtgttaatctctatttttatttgcaagtctgaagtagcttgcaaaaaggaaaaaaaaaagtggaggcaacagtttaaatagtttacatataattataatttactacataccaggtgcttagtgctacacaggaactccctcgatgaatccacacaacaaccctgtggaagggggtattatttctatcattcatttataggttaaataaataaataaataaggcacagagactacgtaatttggacaaggccacatactgagcaaaccaagccacataggctacaaaccaaggcagcaagactccaaagaccatatgtgaagccactctccaaacagcactcagaatcgcctctccaaaaataaacaaaagcttcagctggaggaagcygaacagcaaaggagggaagacaaagatagtaa

SEQ ID NO: 373649 - DNA, 495 bp, Homo sapiens
ttccaagtaagtggtgaggtgaatgaggaaaatatctctagttctcaccagtcagcagctcaatacttgaagtcaggttttcaggtagaatttctgttactcttctgttttttttttttcctctctttcaaataccaggtgtctcaggtaagtaataaaaggaggactaaagggagttttcacttttttcctttcatttattaatttctgcacatatttctccaaatggactatctaatgaatggtaaacagagttcctttaaagaaaaaggcccagtggacagaaaygctacagaaaaagagagaaaaaagagaaaaaggttttgtgtatggtattggagggtggcagtgtagagcttcctttttttctggacgctaataccagaggtcagttttaagccttagtttgtaaagatgcgatgtgaggttcacaagggaagtaaagggtaaaaggcttaaagcatagctggagaagctgaagctgctaattggctc

SEQ ID NO: 373650 - DNA, 418 bp, Homo sapiens
aacctactcattctctctccttccacacaagtctcagccagagtagaatgctaagcttctctgctgtctggagaacaagagtgcagagtagtgtctccccttacaaatgtaaaggaacagagatatgtctgccagagagaaaatctacccatatcaacaccacaggtcatctttggagtccaactgcaagtattccaccccaatcaatcttttccaaagragcattacttgagcctggttttttcaacagcttgctaagctgacctttcattaagagagtcataaggccacagtgtgtcaccaaagagtagtactcactcatttccgattctccctgagcccagtgaaaattagcaagttagaaaacatcccttctcagcccctcttttctctgtcactcttatcaaccaatgctttc

SEQ ID NO: 373651 - DNA, 531 bp, Homo sapiens
aagaataaaacacaacctgttaatttttatattcgtttcatgttaaaataatttttggccaggcacagtggctcatacctgtaatcccagcactttgggaggccaaggcaggcggattgcaaggtcaagagatcaagmccatcctggccaacatggtgaagcactgtctctactaaaaatacaaaaattagctgggcatggtggcacacgcctgtagtcccagctacttgggaggctgaggcaggaaaattgcttgaacccgggaggtgaggtcacagtgagacgagatcatgccacggcattccagcctggtgacagaacgagactccgtttcaataataataataatgataataataatttttgatgtgttaggctaaataaaacacataattaaaattaatttcactgtttatttttatgttttaataccaccaatagaaaattctaagtgacatatggaggccagaattatatttctgttggcagcactaatctagaagggttcgaggggtatgtaaggaattctgc

SEQ ID NO: 373652 - DNA, 560 bp, Homo sapiens
taattaaattaaaatacggtcactaggaaggttcccaatccaatatgactggtgttctaaaaagaggatatcaatacagatacatatggggagaagatacatgaagacacaacgagaagatggccatctataagccaaggagagaggcctggaacatagccttccttcgtggttctcagaaggaaccaaccctgccaaacaccttgatctcagacttgtcacaattataattaaataatcaatattgatacattattgttaaccagaggccatactttattcrgattttcttagctttaatctaatatatatatatatatatatttcttttttctgttccagcgtctcatccagctttacactctgtacttagtcaccatgtctccttatgcgactcttggctatggcagtttcttagacttctcttgttcttgatgacttgatgagcttgaagttttgagggttacaggtcaggcattttgcaaatgtccctccattgggacttgttagatgtttgtctcatgattagactatggtcataggttctgaagagtaagacc

SEQ ID NO: 373653 - DNA, 517 bp, Homo sapiens
agatttaggtgtcaccagcatctcaacaaagaggataaacacttgaccccaacccygaattattcttaagtaaaaatggttttagtgtcatactaatctaacaatgtggacccctagtccaaatgtgtattgtttatggaacagaaccacctgtttactttctcatcacagtgaatccctacatagatccactggaagtgacaccaagaaaaattagttttttccatttctcccttgagaatagtccagaacctggatgactaggtagttttgggtagtaattttgttatttttgcttagtccaaatgtgtattgtttatggaacagaaccacctgtttactttctcatcacagtgaatccctacatagatccactggaagtgacaccaagaaaaattagttttttccatttctcccttgagaatagtccagaacctggatgactaggtagttttgggtagtaattttgttatttttgcttacctaaactgtgttactaaacaattaataaatagta

SEQ ID NO: 373654 - DNA, 574 bp, Homo sapiens
caatctattagtggaagagaagggtcatttgaaacagtacagatatcacaagcattgacaaagcacatatgtgaacactaaaaagagccacagaaatgtaaggtttaagacagcacatgatgaattgcaaagttatgccttaaaggaagggtgggatggggrcaagatgggaaggatattcccatgtggccattggtgaggagacagacaagcacagtgagaatgtgcttaacaaagtggtgagtttgctttgtttgatgtaaagcacaggccttatccagacagattccctcaaaatactaatccatcagctccggtccttcacatgcagatttagctctatttactcttcctacatttcccttatctttcccctatattcccacctggctaatgctttctcatctccagattccatcttagatcttacctccttttgccaatatccctctaaccactaatatatagtggttctcttgaaccattaaccaacactcatttcctttacatttcaaatgtccttcctccgcaactagattataaattctaacattaggctgtgttttcccagagt

SEQ ID NO: 373655 - DNA, 616 bp, Homo sapiens
cacatgatgaattgcaaagttatgccttaaaggaagggtgggatggggacaagatgggaaggatattcccatgtggccattggtgaggagacagacaagcacagtgrgaatgtgcttaacaaagtggtgagtttgctttgtttgatgtaaagcacaggccttatccagacagattccctcaaaatactaatccatcagctccggtccttcacatgcagatttagctctatttactcttcctacatttcccttatctttcccctatattcccacctggctaatgctttctcatctccagattccatcttagatcttacctccttttgccaatatccctctaaccactaatatatagtggttctcttgaaccattaaccaacactcatttcctttacatttcaaatgtccttcctccgcaactagattataaattctaacattaggctgtgttttcccagagttccaaatatacctgtatttgtaatgtaattggtcctttactcacctatgtccccgcaaagactctaagcagcctaagggtagggaccaagtatgttttttggttgtttttgaccctagcccaagaacagtacttgagtcccagctcaatcacttg

SEQ ID NO: 373656 - DNA, 616 bp, Homo sapiens
cacatgatgaattgcaaagttatgccttaaaggaagggtgggatggggacaagatgggaaggatattcccatgtggccattggtgaggagacagacaagcacagtgagaatgtgcttaacaaagtggtgagtttgctttgtttgatgtaaagcacaggccttatccagacagattccctcaaaatactaatccatcagctccggtccttcacatgcagatttagctctatttactcttcctacatttcccttatctttcccctatattcccacctggctaatgctttctcatctccagattccatcttagatcttacctccttttgccaatatccctctaaccactaatatatagtgrttctcttgaaccattaaccaacactcatttcctttacatttcaaatgtccttcctccgcaactagattataaattctaacattaggctgtgttttcccagagttccaaatatacctgtatttgtaatgtaattggtcctttactcacctatgtccccgcaaagactctaagcagcctaagggtagggaccaagtatgttttttggttgtttttgaccctagcccaagaacagtacttgagtcccagctcaatcacttg

SEQ ID NO: 373657 - DNA, 549 bp, Homo sapiens
gatctaaatgggtagaatatgtgtccagcccctacggggtatattgcctctctccatcctctggcaggagaggtgctactctgcaccatggtatatttacttagtgtactatatacgttaacaaatttaaaaatgtataaagtggagatttatgaatacagagaaaataggggtagggaaagaatggtaaatctagaagtgaatccacaaaatgcatgctgagaggttctgtatggtggatgggcaagggccccmagttggctttgtgcctagagaaaaacatggtccaataagtgaatcagtgtccataagatacaacaagccagtgccagaagacaagctcaatgcttctttgtatgaaggcaagagggaagtttttccagtgggttttcctaaggaggatacttcgaaatgtaatgagccacattctcaatagtatcttgacaggcatttcatagaagtgcttcctataatgttcctcagataaaggctgatggcataaattcacagctcaattcaataaaaattcctatcttaaattctttacag

SEQ ID NO: 373658 - DNA, 622 bp, Homo sapiens
ctaactaaggcttttcagcctggggaggaaaaaaaagattcagaggggaaccagatttattctatatatactcagaaggcwgaagtagaattaataagtagaagttacaagcaggttgattttgttttactataaggaagaaatttctaaattataaagcttccatcaaattgctgcaagaggtaataagttgatcaaacaatgaccagacatatgcctatgtattttgagaaggtacctttctcagctagtcggttaaataagaagccctctaatattcctcttaattctgttattccattattttcccagtcaacatcagtttgtgtaacaggaacatttggcaggaataaaggaaatccacaagcagcttattctgtgcagaaagtcactgatcatatctttccactcaaacaagagaggcctctgtcctacggctatagacttaatcaccattcaaagccttcattacttagaagagctttccaaagtagataaagcacatttctgaggatgataaaatagaaggggagtctcttgacaatgatttacctgactgcccataatttaaactataaccatctttatataaattgttttcttttttggtttatttcctcaa

SEQ ID NO: 373659 - DNA, 609 bp, Homo sapiens
agtacatcctggcttccctcagcgaggcagaggggaaaaagcaggggcttcwtaatcattaactgactccaaactaaggaagataagaaggagtgcatgtaatctgttccctgaaatttcctttcagtaataaaggaatttttgcactaaaaattcctttattaggaagactatttgtctgtttctcctctgcagggtaaactgcatgagggcacagtgcacccatgcctcacagagcccctggccaacaggagagtagatgctgatccactgaatgaagggagagggacccaggggtggagtaagtcagtctcagtagggagtgaaagggtagacttcaaatcccaggtagtttttctggaggcaaatccccttcaatgcctgttaagggtaagcgttaccctaaagaagcagtattgggaaacctgcaagacagccttctgtttccatgaatcttctgctttggtgagtctattcagcccacagctgacatgcactagtcccctaaacatgtcagacttgacatttatcatcacattttcaagttttgcaaacctgctcctaaacatgggttccctttaaacaaaactacaaagaaccctttatatt

SEQ ID NO: 373660 - DNA, 492 bp, Homo sapiens
cattgggagaaggaggggagcaatcaagaataaaagaaaattcacaaagctatgctaaatgtggtactgcaaatgatgaggttgatcgggcctttaagacrtttcattttacagtctgagattgcaataacaagtgtgtaccaagtttcatgctaaacccttatccatgaactcaccattctgccattttgatggaaggctagacatgttccaaatagaggagtgaactacagcccatttttgattaatgaaagacagctgatctgatctggaactcctctgggggttctccaaggccacatttctgttacatgcaccattttaatgtcagcttctctgcttcagagctgagcctgaaaaggagccataaattacttttgatcatgcatatgctgtaagctggctggaggagatgggatgccaatctgcctcttttttgggggagcatggggagaccagatgtaacccaaagcatcctgagattctattttt

SEQ ID NO: 373661 - DNA, 492 bp, Homo sapiens
cattgggagaaggaggggagcaatcaagaataaaagaaaattcacaaagctatgctaaatgtggtactgcaaatgatgaggttgatcgggcctttaagacatttcattttacagtctgagattgcaataacaagtgtgtaccaagtttcatgctaaacccttatccatgaactcaccattctgccattttgatggaaggctagacatgttccaaatagaggagtgaactacagcccatttytgattaatgaaagacagctgatctgatctggaactcctctgggggttctccaaggccacatttctgttacatgcaccattttaatgtcagcttctctgcttcagagctgagcctgaaaaggagccataaattacttttgatcatgcatatgctgtaagctggctggaggagatgggatgccaatctgcctcttttttgggggagcatggggagaccagatgtaacccaaagcatcctgagattctattttt

SEQ ID NO: 373662 - DNA, 663 bp, Homo sapiens
gccagaagctgatgaattgtagtcattacttttacgttaatgtgctctcaaggtgactttctttaagcattttgattactatgtggaaaaaaaaggagtgttgagacaaactgctgtgtaacaaattactacaaatttattggcttaaaaccacacccattgattccctcatagtcctggagttcagaagtctgagctgacttgactaggctgtctgctcagggtctcacaaggccagaatcaaagtgtcatgagagatattgcacatgagaactgttttgtcctctcagatgtagattatatgactgttttaaggaaaatcartatcacatgacttgatactcacagctgaccatttagctgtagaggtttaagaggatgaacattttggtattccatctaatttgatgcaactgagtcttggtatttattcagacaacataatttcttctcttaaccagcagaccatttttttcctctgacattttagacatagaatggatacatttaagtttggcttcaagcactgtattgagagtcagcatatccaaaatggactttcagctctgcaacttgtgcaaatgatttttactttgcctccattttttcccataaagatatcaatactattttttactctttaagtgtattttattttgcaaa

SEQ ID NO: 373663 - DNA, 663 bp, Homo sapiens
gccagaagctgatgaattgtagtcattacttttacgttaatgtgctctcaaggtgactttctttaagcattttgattactatgtggaaaaaaaaggagtgttgagacaaactgctgtgtaacaaattactacaaatttattggcttaaaaccacacccattgattccctcatagtcctggagttcagaagtctgagctgacttgactaggctgtctgctcagggtctcacaaggccagaatcaaagtgtcatgagagatattgcacatgagaactgttttgtcctctcagatgtagattatatgactgttttaaggaaaatcagtatcacatgacttgatactcacagctgaccatttagctgtagaggtttaagaggatgaacattttggtattccatctaatttgatgcaactgagtcttggtatttattcagacaacataatttcttctcttaaccagcagaccatttttttcctctgacattttagacatagaatggatamatttaagtttggcttcaagcactgtattgagagtcagcatatccaaaatggactttcagctctgcaacttgtgcaaatgatttttactttgcctccattttttcccataaagatatcaatactattttttactctttaagtgtattttattttgcaaa

SEQ ID NO: 373664 - DNA, 557 bp, Homo sapiens
caaaataacttgcttatagaaatgggttaggaagtagagttgttactattagcaaagcatagatggaaatagattatgttgaaggatgggcttatagaaagtgacaaagtttaaggcaggaccaaaagacacctggatccagcctgatttccaccttcacttaggaatagtagaaatttcctcattagcatggtcctttatgggtccaggctcaaataaaccaacctagggttttcttctagtaagccaccttgattttgatatttattcctttacaaatgataaaatttgtcctaccttggaggaaaactcattatctatttttgcatggttttaaaatttttttaatttagttttactattttatattaagtttaaagaaacataatttcattttgatattttgttaaaaaattctcccagacattggtatatgaaatatgatgtatgtacatagttctataaaaatgaaattatacattatatgttgttttttaaactcctttttccactcagcaatatgtttggacstctctctatgacagtaaacacatttc

SEQ ID NO: 373665 - DNA, 569 bp, Homo sapiens
accctgaacggagggaccggctggagccgcggcagaggaacataaattgtgaagatttcattttaaaatggacatatatcagttcccaaataatacttttataatttcttacacctgtctttatttcaatctctgaacataaattgtgaagatttcatggacatttaccagttcycaaataatactttcataatttcttatgcctgtctttacttcaatctctgaacataaattgtgaagatttcattttaatatggacatttatcaattccaaaattaatacttttataagttcttatgcctgtctttactttaatctcttattcctgttatcttcataaactgagaatgtacatcacctcaggaccactcttgtgttaaatgtacaaattgattgtaaaacatgtgtatttgaacaatatgaaatcagtgcaccttgaaaaagaacagaataacagtgcttttcagggaacaagggaagacaaccataaggtctgactgcctgtggggtgaggcagaatagagccatgtttttcttcttgcagaaagcgtataaatgatgtgcaagt

SEQ ID NO: 373666 - DNA, 576 bp, Homo sapiens
tgaaaaaaagaaagaaagaaaatctgctcgctggcaagaagataacagagaacttgtctataggtggacaaagtctcccttaagactttataaccacagaactgaaagtcatgtgtactttggtctcaaatttttaccatctttgtattgtgggaaaccgtaagctgaaacaaatgactccaaatttgttctcaggccaatattatccctagatttcctggaagaamccaacacaaaatgctgtcagttcaggtgtactgagtctcatagttaaagccccactaaagatcagttcacagttccaaatgctacaatcaaagagtacacaattcattatgagtgctacaaacagctgattagataatataatatgatagaacctataagactgattatttttaatgtttcaaaaatttttcagacttacagaaaagttgcaaaaataatgaaaagaagtcctagatacctttaatctggattttcccaatgtttaacataagcattctattatagatatacagatatttttctgaaccttttgagagtaagttacagatgtaatgcctattaactact

SEQ ID NO: 373667 - DNA, 599 bp, Homo sapiens
gtgactctccgcaaataacatatacctttctctgatttactattgtggactatagcaagtgtttgaaccaaagaccttggttaaatcccagccctgcctctcactgctgtgtgacctcagcatggcaggaaactttctcaagcatagtttttgtgatggttaacttcatgtgtcaacttggctgtgccacagtgcccagatagttgatcaagcattattctggatacttctgtgaaggtggttttggatgagattaatatttaaattggtggactttgagtaaagctgagtaccctccataatgtaggtaggcctcatgcaatcaactgaaattcttaatagaacaaagactgacccccaccccgcaagagggaactgtgccagcagactgcctcaggactccaactgcaatgcttccctgggtctccagcctgctggcctacccctgctggtctaccctccagattttagactaccaggcctccataattrcataagccaattctttaaaatcagtctctctctctctcaatattcatatactacatcctgttggttgtttctctgaatctcctattagtaggagaatcctaaaaaat

SEQ ID NO: 373668 - DNA, 586 bp, Homo sapiens
aatctcccctggctcaagcataaccacagcaaataggcagcaatcagaaaattgcccccataaaggccatctcctcctgaggagcaggactgcatttttgagaagccttctcaggttgtttgcagcagctttgagggtcggctctgctgccttgcctacgtcaaaaccccaagtgtttaaccacaagacacacaattccaggacatagtggcggcrgccctccacccccgcagagagacaggccacgcgtatgtctaatctggcatgtggcctccctcaaaggccagcaaggcaactgtggcccactgcaccacacctggccaaattgagagggactatcgcacagtgagtagagtgccaaaatgggtgggaaatggagtggaattcttttctgaccatcctcctgccaatctgtgatcagagcccaaggtccccagtctgcaaaggccattcctgctagtagccaccaccacttttgttatttctggagccagggtacttgcactgtcatgatcacatacaaaacttccattataccccattttcagtagctcaaaatcctttgaaaaataatgctcagggccaa

SEQ ID NO: 373669 - DNA, 578 bp, Homo sapiens
ggaccagaagtctctaaaaataaacacaagtgtaataaaatgccaaattggaagttttaatgggggcaacaagatacaatagataagaaattctaaaataatgtttcagagtaagaagcagattttcaaaaggaaatatttgggaaccagttttatgcctccaaaaatcccttcctacaaggagtttataaaaagaattggaagtgtgggggttgagaaagaatgttatgaggaggatttctttgagagaactgtactgaattttttacccattccyacattgaggagagcttcagggagatgactcaaggacctcactaagtgccccctaaagttggaacttatgggcagtgttggactccagcctggaaatctagaagacaagagacacagacggtgaattgatttggtggtggattaaagaagagtagttgctttgttgggaaggctggtactccttgaacttgccaggacaaggattaatgcacatttcctgaggaccatatatgggccacatgaagagaaagtgagccaggaactattttcaagatcttttccgaaaggactacctgaaaaaa

SEQ ID NO: 373670 - DNA, 564 bp, Homo sapiens
gatctatagactcagtgcacatcctataaaaaatctcaccagggttttttggttgtttttgtgttttagcaaagaaagaattagcaaacttattgaaaatttrtatagaaatgcaaatgatatagaataaggaaaatgaatttgaaaataagggacaaacttggaagatttatactatgtgatttcataacttactatagccacaataatcaagacagtgtggtgtttggcatataagaatgggcatatagaatctacacatgatctatattatagatcactggaacagaattaaagtttagaaataaaactttacatttctatacaattgatttttgatagttccattgaaaaatgatagtttttcaacaaagagttctgagactattggaaacccacatgaaaaaaaattaactcagatagatcatagtcttaaatgaaagaaataaaactataaaacttcttaggataaaaacaggagaaaaatctttgtgaccttggacttagcaaagaattcttagatatgacactaaaagcacaatccataaaagaaaaaattaataa

SEQ ID NO: 373671 - DNA, 589 bp, Homo sapiens
ggggactcaacaaatgattcgcttttcttacagacaacaaaaatgcagatatcactggatttggacaggaagagattgtgcatgaggctcatgagaggactgtcgattcaatatggaagttggactctatatgcctctgacttgaggtacagcaggagaggagcaaacctagggtgtgtttaagtgaccactctgccatttcaatctgtgagacctggggcaagtcatgmaccatctctgggcctctgttacctcaggtgtaaaacaatagggctgatctccatgatttcctgggcctctcccatctctgacagtctaagactgtacgttgactccaaacagccatttgatgtgtgtccctccctccctgcagccatgagagctcacctataatcccagcagagagagcatcagccaaatccccgcagctttttgcaccagaagtggatccagcaaagacctgaaaggggtttttagtatttagaaaagctctggcaatagttcccacacatacaacaaaactattttaagccctggccttttgaagagtgggtggattttaagacaaactgactaatgaggtatatgt

SEQ ID NO: 373672 - DNA, 594 bp, Homo sapiens
tcaacaaaatcatgtatccataagtcactgatatattattttctaccttttcatctgacaaacccagaaaataaataaactcacacatataaatgcaacacctctgtaaacatgacggtgggagggaacagtggtgtgcataatcctacctggcagataatcaggatttgaatgttcagcatatgcaatacctgctgtgtagacagacccggacattccttgctggtctctacagtaagattaagggtgtggctccaaagggcagggcagtgtgaataggagctgggctcctgttggtcctgcttctgcctcagcaagggcacttctaggacagaccaccagccctctaggtcctaaatgagggggtgggaggatgggatattcaggtcagagtctgaggggtcagttccaaacccaagacccagagcttgggcagccagaaaggccaggtcagagacaagaatccaggtagggtagctggatcatggctgtgatctcacctcaatgtaaggctgagacaatgtcaaggctcccggrtggtcccctggatgccctttccacccttcctctgcacacctgctacctgtgtagctg

SEQ ID NO: 373673 - DNA, 487 bp, Homo sapiens
agatgctcagaaacttaaaataaaacagtatggaagtascaagttgggccttctctaatccctttgtgagcctaaataagccaccttccttctctgaatagtggaaaatgtggaccagaaccaagagctcccctgcccccacaatttggattttccatggttctaaaattcagaggggttaatggtggaaagaattcctaggttggccaggcagattggctttcctagaatcagaaggtgtgcttcgagtgggaaatggagaggtaggtggtatgacatcatagttaatagtgtgggttccagagctctacagcaggggttcaaatccaggctctcctacttcctagctatgcaactttcagccggtttttaacttctctatgcctttataacctcatatgtaaattgggactgatagtgatagtgacctcagagggcttaaaggaggaataagtaagttaatgtgtataatgcatccataattcta

SEQ ID NO: 373674 - DNA, 487 bp, Homo sapiens
agatgctcagaaacttaaaataaaacagtatggaagtaccaagttgggccttctctaatccctttgtgagcctaaataagccaccttccttctctgaatagtggaaaatgtggaccagaaccaagagctcccctgcccccacaatttggattttccatggttctaaaattcagaggggttaatggtggaaagaattcctaggttggccaggcagattggctttcctagaatcagaaggtgtgcttcgagtgggaaatggagaggtaggtggtatgacatcatagttaatagtgtgggttccagagctctacagcaggggttcaaatccaggctctcctacttcctagctatgcaactttcagcyggtttttaacttctctatgcctttataacctcatatgtaaattgggactgatagtgatagtgacctcagagggcttaaaggaggaataagtaagttaatgtgtataatgcatccataattcta

SEQ ID NO: 373675 - DNA, 583 bp, Homo sapiens
ataatgcatccataattctacctgctcacatagtaagtgctcagtggttactttttggtttttttttttttgagacagagtctcactctgtcacccaggctggagtgcagttgtgctatcttggctcactgcaacctccacttcctgggttcaaacrattctcgtgcctcagcctcccaagtagctggtactacatatgtgcgccaccacacccagctaatttttgtatttttagtagagacagggtttcaccatgttggccagaatggtctcaaaccctggcctcaaatgatctgcccaccttcaactcccaaagtgttgtgatcacaggcataagccactgtacctggtacacctggccacagtggatactttttatgtaagtatatatccatacttacatttatgtgtgtatatatacatatatcactctggtgcggtctgaaggtctatcagtgagtgtggcagagggtgccagatccctcacaatagcctttctcctttagggaaaaaatcatttcccacagaggtaggattcaaagctcagcaagctgattccagagcctggactgcaggggtgtga

SEQ ID NO: 373676 - DNA, 621 bp, Homo sapiens
agataaaatgataatagccaatattttaataagcacctactatgtaccaggccctatttgaagctctttacatctataaagtaaattagtcctcccagaaaccctctttgagcaatattattattatgcctgttttacaaatgcaaaagtcgaggcacaaaagggttaaataacttattcatagtcgcacagttagtaaaaaactatgccaggattctgacacaagcggcctggccccgccccagaatccagtttcttaattacttattggttcatgaaaaaaggaagcagaaaggaaaattaaacaagaatgtcaaaaagtatacctccaccarccttattattacatctttttcaatatcctcagaaccattctgtgctaatcctagagggctcggaaagaaaagatgggaaggaaaaaggaaggtattccaggtcctgcgggtgcataatcaagtactctaagacttagtgtcataaagcaaccatttattttgttcatggattctctgggtcgggaatccagaaaggacagaggggtcaaggctggtctctgtgtcacaatgtcaggagcctcagctggaagactggaagctggggataggaatactcattggaagc

SEQ ID NO: 373677 - DNA, 594 bp, Homo sapiens
gacaagacctgggctattttttagcttctataatggaagcaggccctacatcctaccaagtctcatataatacagaatattctaatcatggggaaaggttcagatgctagatagatgcccctccaaaggacaaccaacacaattataatctcccattacaagtggtaagttaacacttagcatacatatgtaaataattaaaacaatttcatgaaatctcttattatgtgccatgtactccaatattgtgtatatgttctattttacatcactaaaaagttatgatcatgaacaagtaaattgagtttataacctacaggaacatgaatcataatttgaaaaacraaagactaagattaatgtcagaagaaatgggaaatatttaggaggttatcccactatcagctgagaaaagataagggcatggactgtgacactaaatatgggaataaagctttggaaacagatgtaaaatgcttcaaagaggaaatattgacagattttcctgatgaatgaatgttgtttggggttatagtgagaaaagagtaaaggtaagatccaaaatttctagcccagataaaaacttagtgctta

SEQ ID NO: 373678 - DNA, 594 bp, Homo sapiens
gacaagacctgggctattttttagcttctataatggaagcaggccctacatcctaccaagtctcatataatacagaatattctaatcatggggaaaggttcagatgctagatagatgcccctccaaaggacaaccaacacaattataatctcccattacaagtggtaagttaacacttagcatacatatgtaaataattaaaacaatttcatgaaatctcttattatgtgccatgtactccaatattgtgtatatgttctattttacatcactaaaaagttatgatcatgaacaagtaaattgagtttataacctacaggaacatgaatcataatttgaaaaacgaaagactaagattaatgtcagaagaaatgggaaatatttaggaggttatcccaytatcagctgagaaaagataagggcatggactgtgacactaaatatgggaataaagctttggaaacagatgtaaaatgcttcaaagaggaaatattgacagattttcctgatgaatgaatgttgtttggggttatagtgagaaaagagtaaaggtaagatccaaaatttctagcccagataaaaacttagtgctta

SEQ ID NO: 373679 - DNA, 558 bp, Homo sapiens
cacagtctcctagggactagacactcaagcacagagtcctcttataaggaatccatatggaaaactactgctcataagcttgctttctgatctgaaatcatctggatgatgctaatgacctaatgataatcccaagacacattcatctttacagttaaataatgaaaattatacctgctaaatgakcccagttttcaagtctgctcatcagtacaccttttttagtggacattgctgggaacacagtgccacattttgtctctcaaactcctgttttatgaatcctatgcaaaccatgcccttgtctttttaatacagtctccttcattaggtaacttacaatcaagtaggcttaaactatttcagagttataatcaaaatccaacaatccaataacacctctttagatgaaattcaagtctccttgattagatgtcaaacatttctgaaattcccttctttttagtaatcatttgggttgtgtcatttttcagatagctagtttcgtgtgttttatttttaaacttcctaacatcattcaggaagggaaccttaagt

SEQ ID NO: 373680 - DNA, 550 bp, Homo sapiens
tctatgcaaataaggaagtaarcattcattcgtataattctgtggcaagttcttgggagggatgtccctatactttacttcatctcatcatccctatgttatagacgaggaaactgagggtcagggagacaagtaactttctaagactccccatcccatgtgaggtagcgaagaaaatcaagatcaacattgactgactgagagtccaagctttttctcaacaatttatggcccttcagctagattgcttttaagtgaaagaaggatagaaaaaaaaaaaaaaaccttatgaaatgagctaaggtatctccctttctgaaatagaagtgttccaacaaaactgattctaaaagcaatttctacacagcaaattcaaattttctagtgaccctgagatagagacatgagctaaatgcttttatggaacaagacagaaagaccacagcagaagattgccatgaaatgcttactaggtgcttacctagttgtcccattcacaaaaaacttatcagagatgctgttgttattcccatgtttacacgtgaggaaa

SEQ ID NO: 373681 - DNA, 550 bp, Homo sapiens
tctatgcaaataaggaagtaaacattcattcgtataattctgtggcaagttcttgggagggatgtccctatactttacttcatctcatcatccctatgttatagacgaggaaactgagggtcagggagacaagtaactttctaagactccccatcccatgtgaggtagcgaagaaaatcaagatcaacattgactgactgagagtccaagctttttctcaacaatttatggcccttcagctagattgcttttaagtgaaagaaggatagaaaaaaaaaaaaaaaccttatgaaatgagctaaggtatctccctttctgaaatagaagtgttccaacaaaactgattctaaaagcaatttctacacagcaaattcaaattttctagtgaccctgagatagagacatgagctaaatgcttttatggaacaagacagaaagaccacagcagaagattgccatgraatgcttactaggtgcttacctagttgtcccattcacaaaaaacttatcagagatgctgttgttattcccatgtttacacgtgaggaaa

SEQ ID NO: 373682 - DNA, 619 bp, Homo sapiens
atttttccttttgataatagcgtttccagctggtgtgaagagatatttcatagtagctttaatgtgaatttccttgatgactagtaatgatgagccctttttagtgtatctatcagccatttgtatgtcttgagtagcatctttcaggtcttttgtctgctttttaattgggttgttttattgctattgagttgtttgagttttttatgtattttggatattagccccctaccagatgtgtggtttgaaaatattttctcccagtccatgggctgtctcttcactctattttttcctatgcctwgcaaaagctttttactttgatgtaatcttgtttatttttgcttttgttgcctgtgattttggggtcatatcaaaaagtctttgaccagaccaaggttgtggaacatttcctctaagttttcttcttatagtttacaattctgagtcttccatttaagtctttaatccattttgagttgattcttgtatgtggtgtgaaataagggtcctatttcatttttctgcagaacatccagttttcccaccaccctttattgaagagactatcctttctccattatatgttcttgacactttagtcaaaaattaattgacc

SEQ ID NO: 373683 - DNA, 655 bp, Homo sapiens
gggaagggagagctatattactttccctaggatcattacgagttgaaatgttataagcttggagctattaaaaatgatctttgctgtcatgagggaaagagcggctcaaagcagaaagccaacacagaacaaagcagagttacaaaatggasaacaatggagtcttccagtctatttgcaaccctcaatgtagccatgatttcccattttcatgagtctacactttcctgttagtatcagcaacagcagcattgttactatgactactattttcttttttcctcttcgtgtgtgtgtgtgagatggagtctcgctcttgctgcccgggctggagtgcaatggcacagtcttggctcactgcaacctccgcctccggggttcaagcaattctcctgcctcagcccaccaagtacctgggattacaggtgcctgccaccacacctggctaatttttgtatttttcatagagacagggtttcatcatgttggccaggctggtcttgaactcctaacctcaggtgatctgcccgcctcagcctctcaaagtactgggattacaggcatgagccaccacacctggcctataactactatctttttaagccaatttgagtggtgtccattgcttgcagcaaagagtcctgcctaatataaa

SEQ ID NO: 373684 - DNA, 596 bp, Homo sapiens
ttcatgagtctacactttcctgttagtatcagcaacagcagcattgttactatgactactattttcttttttcctcttcgtgtgtgtgtgtgagatggagtctcgctcttgctgcccgggctggagtgcaatggcacagtcttggctcactgcaacctccgcctccggggttcaagcaattctcctgcctcagcccaccragtacctgggattacaggtgcctgccaccacacctggctaatttttgtatttttcatagagacagggtttcatcatgttggccaggctggtcttgaactcctaacctcaggtgatctgcccgcctcagcctctcaaagtactgggattacaggcatgagccaccacacctggcctataactactatctttttaagccaatttgagtggtgtccattgcttgcagcaaagagtcctgcctaatataaataaccccacacacacagttgcagggaactctcgtttggatgggctaaggtcctagcagggtagctgtaaagaaactaaacaaggaaagacaggcataagtctggcttgcaaaaatgactccaccagcagggaaaaagaagggctgtgat

SEQ ID NO: 373685 - DNA, 562 bp, Homo sapiens
tttgggaggccaacccaggaggatcacttgagtccagaagttcaagaccagcttggacaacacagtgagaccccatctccattttwgttaaataaaaaaaaaaaataaacttagaatgagggaacattttcagagcaaattaaggctaaatttgaagtttcttagaaacacttgcacataaagtgtgcacacaagagactaagaagcctaaaagataccaacctcttcatttcactcaaaaacatttttggtccctgcaaacaggcagtgcaattctaattttttcatatgatattctctgattagaagctgttaggttgagtaaactgtggaacatatatttgcataaaagtgtaacattgcaataaactatttacagcatgtttatttagtttgttttttaagtaagagttgttatatacctaagaaaaggaaccatgtaaaaaacgagattctttttgaagaggttttatggtgaaaacttgtaaactgaatagtcctattgtgaggaaaaattgagtattcacctccaccactgacagcattatatctcacatgaatt

SEQ ID NO: 373686 - DNA, 562 bp, Homo sapiens
tttgggaggccaacccaggaggatcacttgagtccagaagttcaagaccagcttggacaacacagtgagaccccatctccatttttgttaaataaaaaaaaaaaataaacttagaatgagggaacattttcagagcaaattaaggctaaatttgaagtttcttagaaacacttgcacataaagtgtgcacacaagagactaagaagcctaaaagataccaacctcttcatttcactcaaaaacatttttggtccctgcaaacaggcagtgcaattctaattttttcatatgatattctctgattagaagctgttaggttgagtaaactgtggaacatatatttgcataaaagtgtaacattgcaataaactatttacagcatgtttatttrgtttgttttttaagtaagagttgttatatacctaagaaaaggaaccatgtaaaaaacgagattctttttgaagaggttttatggtgaaaacttgtaaactgaatagtcctattgtgaggaaaaattgagtattcacctccaccactgacagcattatatctcacatgaatt

SEQ ID NO: 373687 - DNA, 615 bp, Homo sapiens
gatttttaacttcttaaacttagaaactatgtctgtgtgatttgcctttttatcctagygcttactacagtgcctggtatcagggtctcccagaagtcacgatgcagttttaagctttaataactgtagaagcataagtgatactaattgacaacgaacatcatttgaaagcttgattgtatttcaatttcacgtatacctacttatgacttttcattaatagacttttaattttttgatttttaattttattttttacccccacagacactatggtgacttatgcttcagtccatctgattaatgctggcaaagactaaaaattattaaaattaaaaatgtttattcaaaattcacaaataagtgtagaagaagtgaaagtaattagccttttcaggtgttcctatttgtaagtttatagtatgaaaaaaaaagatatgaaaatattaaaatttaaaactacactaaaatatttggaaaatgcagaatagtaaaggatcaaacattatatggttgaatcttcatctgaatgttgaaatctactgcctatcagaggttttgtttcagttctattctgacattactgtaggaatgcctttggctgcatgtaaaaga

SEQ ID NO: 373688 - DNA, 560 bp, Homo sapiens
tgacattactgtaggaatgcctttggctgcatgtaaaagaaaacagtgctttttaaaaagaataatttgtttttgcataactagaagtctggagttaggcagctgctgatgttggtttaatggttcattaatgccagggtggttcagccctcctccacaattccaagatggcttccatagctccaggctacaccttcaaagggtagggttaaggtagtaacactggctgcttgtgactaatatttttatcagaaaaatgtatgcttctcccagcatatgttcacttargtttcattagctaaaactatatcatgcagccaccctctagttacaaaagttactaggataggatataagtatttgacttctctgtcttctattttgttgatagaaaagagagtaaagtcaggcatgtatttgctagccaaacaagttcctgttatccttaatttttgtcccatctactctattaagtgtgaagtcaactacttctgaaactaatgggtcttttaattgttagataatattctcttttcttctaagagaatacaaagttttta

SEQ ID NO: 373689 - DNA, 604 bp, Homo sapiens
aattttctttcatatacatgaaggaatttacattaatgcatcagcagtgaatgtgacaaactaatagactaaggtactcaacaaatgaaatgcttagaccatactaacatatttcaaataagtatctgcatctaaaagggcaggttgtcttcaccatttatagcatacttcctgttttcagagttgcatattaagcatagatgagtctaaaagggggtagattctttgactcyaatcctatattctaaatgaagaggaagtgtacgccgaaaaattattgatgaaaatggtgcttcatcatttatgtttagaaatgaattgtaaatttctaattttacaataatagatttttaaaggagaaattatatttagaccattatcctttcagtatggttacattttgacacagaattagactagaaatagagtaattgtcagggtgattctgagaatatcttggtgtttattactcaggctgtcttttaggctagactgcaaaagcaggtttctaagccaagcagtttgcaatataagagtaagtaaaacctaaaagagtaaaaacaatgtgcaagcacaagtcattcactacaatggttctagtttc

SEQ ID NO: 373690 - DNA, 604 bp, Homo sapiens
aattttctttcatatacatgaaggaatttacattaatgcatcagcagtgaatgtgacaaactaatagactaaggtactcaacaaatgaaatgcttagaccatactaacatatttcaaataagtatctgcatctaaaagggcaggttgtcttcaccatttatagcatacttcctgttttcagagttgcatattaagcatagatgagtctaaaagggggtagattctttgactctaatcctatattctaaatgaagaggaagtgtacgccgaaaaattattgatgaaaatggtgcttcatcatttatgtttagaaatgaattgtaaatttctaattttacaataatagatttttaaaggagaaattatatttagaccattatcctttcagtatggttacattttgacacagaattagactagaaatagagtaattgtcagggtgattctgagaatatcttggtgtttattactcaggctgtcttttaggctagactgcaaaagcaggtttctaagccaagcagtttgcaatataagagtaagtaaaacctaaaagagtaaaaacaatgtgyaagcacaagtcattcactacaatggttctagtttc

SEQ ID NO: 373691 - DNA, 598 bp, Homo sapiens
gttacattatttttactttaaaaccactacggtataaaaacaaaatgtgagtaatgaccccaaagaagcaatagcataggcaaaaataattttcaaacaaaatagattttggtggcttgggaaccttgtaaaagaagactatatgagattgtggtgaattcaaatagtctaaaggagttgggcagacagtagwaaagcagctataaatggagaggggtaaagaagaggagtcaatcctgtgtataacaaagctgggggagcagaaggaaacatatcagaaacatgaacccattaaaagtttcccatcactggtaaagttatgatcaagtgatcaaaagcacatgtatgtttatatggcactttctttgaactagcactgtactaagcactacaggggtacaaagaaatgactggtacttttccttctagtcttgcaggtgatagctgaggttggtgatggggttcttaggaacatacagacaaaaatgagtgataaagtagggcagattacaaagaaggagtaaaaatagaaaaaatcttatcacagtaaggtcaggaaaaaatgaacttcaaaagataggaaagataaagtgttctt

SEQ ID NO: 373692 - DNA, 598 bp, Homo sapiens
gttacattatttttactttaaaaccactacggtataaaaacaaaatgtgagtaatgaccccaaagaagcaatagcataggcaaaaataattttcaaacaaaatagattttggtggcttgggaaccttgtaaaagaagactatatgagattgtggtgaattcaaatagtctaaaggagttgggcagacagtagaaaagcagctataaatggagagggrtaaagaagaggagtcaatcctgtgtataacaaagctgggggagcagaaggaaacatatcagaaacatgaacccattaaaagtttcccatcactggtaaagttatgatcaagtgatcaaaagcacatgtatgtttatatggcactttctttgaactagcactgtactaagcactacaggggtacaaagaaatgactggtacttttccttctagtcttgcaggtgatagctgaggttggtgatggggttcttaggaacatacagacaaaaatgagtgataaagtagggcagattacaaagaaggagtaaaaatagaaaaaatcttatcacagtaaggtcaggaaaaaatgaacttcaaaagataggaaagataaagtgttctt

SEQ ID NO: 373693 - DNA, 611 bp, Homo sapiens
taaaaccacaaaaaaaaatttaacatcaatgaagaggacagaatcccaggtaaagatttattttgaaaatcctgacagtctaaatgagttgccctctacagaagtgtctttttggtttttacaagtttaatcatttattttaaattcagaaaatatatttttagtccctttaaaactagattggttaccaccagaatgatacggaaaaaatgttcttggtcataggatggtgaaactaaataataatttcaagcataattaacggtgttttaatattgttatacatagtatatrtcagattcattacctcctttgcatttataataagcatttaaataggcagctccatagttcctataggaggagcaggaatttgaaccaagcagaatcctgaaccacaggaatctggaaggcactgtctcataccctcaaataggctcatcgtcacagagtcaaatttacttgtaattcaaacaagtccttcctctaaaaacataggtttatttctaaaaacctccccaattttccctctgcaaactgctgcttcagatattatttttataggattttattcgtgggcagatccctgatgatgctggaaaaaaaaccca

SEQ ID NO: 373694 - DNA, 606 bp, Homo sapiens
agagaattctcattcagagaatttattatttccatcaatataatggaaataatcagaggaagatggctatggttgcagagttcagactaatctggcaatatttccaaagtaggcaatgcaatgtaacatcccttgattgaagcatcaggatgtgtgggctaagcatgggagcttctatgaaccaatatggcaataacaaatcagggcatttaaggctgaaaaactatcctaatgacatgctgtattttcagaaagcatttagtcggtgggacagagcaaaagaycacaacataaatgtagggatacctgcagttgcttatttatgacacatgaataaggaaagaaatagaaaactcaaacagcaaagaacattaaccaaaataattttgccacagaatagataaccaaaaatattgtcataaataaaaaaaacttaatgaaattattgtctatataaagcaatcactcaaaaaaaaggtccaaaggtcatgaaatatgagagtttacagccaaaggcgggagatatgaactgaaacaacttaggaaagtggaatagaaagtaagatcgctatagaaatgcaggacacattagcagaatcacacagt

SEQ ID NO: 373695 - DNA, 590 bp, Homo sapiens
aactgaatgttttaaaaaactcacatcatttcaaatatcaatttttgttggtctttagtgtttatgttagaagtcaccagaataagtatttgctgattctaggcaaattgaaaatgtccttggttttgaaaataaattcactctgagcacgtttttatgtatcaagtttctatttaaccatcacagtttgaattctgattaatgtatgttcataataataacctatgtgtatcaagcatttgctatatgtcataaatgctatgttctaagtgctatattctaagtgctttttacatactatctaattaagtctctttatttcttggtgaggtaggtactattattaagcacattttagaaaagagaaaaatggagtacactgcacagaaaagagtggtayaaagtcataaatactaatccctgaaacagaaaacctacattcacattccacatctgtcatttagtgctgttttgaagaagtcatttagaatgaggtttcagtagtttcgattataaaatagtaataatagtagtgatagtaataacaatgataaaaaaagtcttacctactttacagtgttgttttgagg

SEQ ID NO: 373696 - DNA, 590 bp, Homo sapiens
aactgaatgttttaaaaaactcacatcatttcaaatatcaatttttgttggtctttagtgtttatgttagaagtcaccagaataagtatttgctgattctaggcaaattgaaaatgtccttggttttgaaaataaattcactctgagcacgtttttatgtatcaagtttctatttaaccatcacagtttgaattctgattaatgtatgttcataataataacctatgtgtatcaagcatttgctatatgtcataaatgctatgttctaagtgctatattctaagtgctttttacatactatctaattaagtctctttatttcttggtgaggtaggtactattattaagcacattttagaaaagagaaaaatggagtacactgcacagaaaagagtggtacaaagtcataaatactaatccctgaaacagaaaacctacattcacattccacatctgtcatttagtgytgttttgaagaagtcatttagaatgaggtttcagtagtttcgattataaaatagtaataatagtagtgatagtaataacaatgataaaaaaagtcttacctactttacagtgttgttttgagg

SEQ ID NO: 373697 - DNA, 328 bp, Homo sapiens
gattccaaatcttagttactgtgaatagtgctgcagtacacatgaagatgcagatatctgtttgatatacttatttaatttcctttgtataactattcaatagtgggattgctggatcatatggtagttttagtttagttttttgagaaacttcataccgttttttataatggctatagtgatttacattcccaccaaaattgtatgactttccttttctcaagcacctatttagatctttgcccmccttttaactgaattatttgtgggtggtttttttttggctgagttgtttgaattttttgtatattctgaatattagtccttt

SEQ ID NO: 373698 - DNA, 328 bp, Homo sapiens
gattccaaatcttagttactgtgaatagtgctgcagtacacatgaagatgcagatatctgtttgatatacttatttaatttcctttgtataactattcaatagtgggattgctggatcatatggtagttttagtttagttttttgagaaacttcataccgttttttataatggctatagtgatttacattcccaccaaaattgtatgactttccttttctcaagcacctatttagatctttgccccccttttaactgaattatttgtgggtgktttttttttggctgagttgtttgaattttttgtatattctgaatattagtccttt

SEQ ID NO: 373699 - DNA, 328 bp, Homo sapiens
gattccaaatcttagttactgtgaatagtgctgcagtacacatgaagatgcagatatctgtttgatatacttatttaatttcctttgtataactattcaatagtgggattgctggatcatatggtagttttagtttagttttttgagaaacttcataccgttttttataatggctatagtgatttacattcccaccaaaattgtatgactttccttttctcaagcacctatttagatctttgccccccttttaactgaattatttgtgggtggtttttttttggctgagttgtttgaattttttrtatattctgaatattagtccttt

SEQ ID NO: 373700 - DNA, 577 bp, Homo sapiens
ggtatgcctttagaaaactagtagggcattcaaaaaagcattgcaaggcgattgttcttggtatcataagcagtttttttgttgttgtttgttttgttttgtttagccccttcatttaaccaagatttaaagagtgtatggatactggactttttttctctacccttaaggaataatagtaatacatgtagacaaatatttatgggatttttagatcgttgcacataaaatagaggcaatataaagtgttgtgggatcaagatgaaacacacatttcacagaaaagtgaaaaagtgacatttgagctgaatatttaaggataagtagtagtttgtcaagtcagttgggcaagtcctcaaaatatataatcaaaattattacaacagcatcctaactartttcacactctccagacaagattttctatactttatcttttcagacaaaagaaataacagcataaacaaaattacagaacaataaaatgcaaaggatatttggggagaaactggagaaaatgaaataggttaaaaaaggatgagatggtgtaaattagtggtttttaaactttggtaac

SEQ ID NO: 373701 - DNA, 577 bp, Homo sapiens
ggtatgcctttagaaaactagtagggcattcaaaaaagcattgcaaggcgattgttcttggtatcataagcagtttttttgttgttgtttgttttgttttgtttagccccttcatttaaccaagatttaaagagtgtatggatactggactttttttctctacccttaaggaataatagtaatacatgtagacaaatatttatgggatttttagatcgttgcacataaaatagaggcaatataaagtgttgtgggatcaagatgaaacacacatttcacagaaaagtgaaaaagtgacatttgagctgaatatttaaggataagtagtagtttgtcaagtcagttgggcaagtcctcaaaatatataatcaaaattattacaacagcatcctaactagtttcacactctccagacaagattttctatactttatcttttcagacaaaagaaataacagcataaacaaaattacagaacaataaaatgcaarggatatttggggagaaactggagaaaatgaaataggttaaaaaaggatgagatggtgtaaattagtggtttttaaactttggtaac

SEQ ID NO: 373702 - DNA, 558 bp, Homo sapiens
gacttctaagcactgtaaacttaacatctccaacastgagctttcactgtttctcccagatttcaacatctgatggtgctctccacctaatcaaggattctccatctctccaattgcttagaccaagaatttagagtcatttttgactctttcctttctcacaaactccgttggctctcagcaaaattaagtcagaaagcaacctctctattgacctccattgccatcaattctattcccagaacatatcagcaactatcacttggttattcaagtaacttccacctgtccctgccctaaccctactctgttcaacacatcagctcagtttttatcagatgcaaatcagacatgatattcctctactaaaatgttccaatggctttctccttatggaagactataatcacaagactgtgcaataaccctgcaaggtcatattatacctggcccattgctatctttccaacagcattcctaaccactgtctttcttggacactccactcgagttacagagtcctgctcaagattccatgcatatatatgatatatctca

SEQ ID NO: 373703 - DNA, 558 bp, Homo sapiens
gacttctaagcactgtaaacttaacatctccaacactgagctttcactgtttctcccagatttcaacatctgatggtgctctccacctaatcaaggattctccatctctccaattgcttagaccaagaatttagagtcatttttgactctttcctttctcacaaactccgttggctctcagcaaaattaagtcagaaagcaacctctctaytgacctccattgccatcaattctattcccagaacatatcagcaactatcacttggttattcaagtaacttccacctgtccctgccctaaccctactctgttcaacacatcagctcagtttttatcagatgcaaatcagacatgatattcctctactaaaatgttccaatggctttctccttatggaagactataatcacaagactgtgcaataaccctgcaaggtcatattatacctggcccattgctatctttccaacagcattcctaaccactgtctttcttggacactccactcgagttacagagtcctgctcaagattccatgcatatatatgatatatctca

SEQ ID NO: 373704 - DNA, 609 bp, Homo sapiens
gaaattcagtttctgttttgtttttttttgttttgcctttgcataataaatccattgtctgatccttgcctaatgtcctaaaacaaatttaatttgagatcttggagtttggggtttgatagatattgatgcatagtgaaaattaaaaacagcaaaaaagctaattatagtcatatctctaaaagaataccaatacatttgtcattttttcaaataaaattgtaactacatcataaaattgtcaatgtagtacaacatactgggatttgaggtatcttgcttgtaaaatagaccagattttgcttgtagattgttagaaaaatcaatgaaatgaatacaggaaaataaaaagataaataatgtagaaaataacatctctcctatcagacattcttttgagaggtatcagtcttgagaatgacataaatagaaaacaaatgcatartatatacatttttaaaaatatattggaaataaattaaagtaatgaaattgaagaccacagatattattagtgatttcaagctttttcaactactttcaggcttatatgaacataagattagtacttaaactgccagattatcagataaataaaataaatgttaa

SEQ ID NO: 373705 - DNA, 651 bp, Homo sapiens
aaacctactaattcttgtactcartgcaccaggaggagagtaaggtagatgaggtgggaaacataggtaggaaaaacaccatttggcttttaggcctcaaaaatgagctttatttttatctaaaccattggtggacattagcagggaacatatattatcaaatgtaatttttaaaggagtcactttagcatgaatttgaagaagaaatttcaagtgaataggagcaagcagacaaataataagatacagaaatgcaagtaacagttgatagtttcttggagtataggtcttatagtacgcttttcaaatttcattgtggacatgaatcatctagtagtcttgttcaaatgcagatcatgacttgatggaattggagttggatctgagatttcgcatttctaacagatctctaggtttgctcatacactgagtagcaagaacttagatgaagatgatcatcatggagagagaacaacatttatcacacagtcccaacactgtctattcctcataggattttgttctccactaggataatcacagtgttgacaagctatcttggataatatagtaaaaactaaactttattccatacgagtgactcaaatggtgggaaatttatgagtgcaagggatattttaaggcagatgg

SEQ ID NO: 373706 - DNA, 551 bp, Homo sapiens
tttgagaacttcagaaaacactaagcaatagaatagtaggtttcccctactcttaacaytgatgaatatttttgcccataatattaagagattgtgtctagagtgtaatagataagtagcaaaccaaaatcactgaactagtagtaagttattgaagaagaaacagaagaaccaatttgaattaaagtagaaagttgataaaagtataacaatttaagtcactgtcaataatgatgaatacattaaaaatgttttccatataatgttttacatctactttgaaaaataaatgaggaatacatttccaaggtacatggcaccactgaatgcatattaaattcaaaatcaccattttgtaaagaatatggggaaaggtaaaacaggtatcaatctctcaaacagcactgggagcttatgataataatggagaaagtttgagcactgattgggaatctacccgggaagtactcttgaagcttaattaaaatttacttgaagaaacttaaacattttatatggaaccaccttaaaagtatttaatttaatttaat

SEQ ID NO: 373707 - DNA, 551 bp, Homo sapiens
tttgagaacttcagaaaacactaagcaatagaatagtaggtttcccctactcttaacattgatgaatatttttgcccataatattaagagattgtgtctagagtgtaatagataagtagcaaaccaaaatcactgaactagtagtaagttattgaagaagaaacagaagaaccaatttgaattaaagtagaaagttgataaaagtataacaayttaagtcactgtcaataatgatgaatacattaaaaatgttttccatataatgttttacatctactttgaaaaataaatgaggaatacatttccaaggtacatggcaccactgaatgcatattaaattcaaaatcaccattttgtaaagaatatggggaaaggtaaaacaggtatcaatctctcaaacagcactgggagcttatgataataatggagaaagtttgagcactgattgggaatctacccgggaagtactcttgaagcttaattaaaatttacttgaagaaacttaaacattttatatggaaccaccttaaaagtatttaatttaatttaat

SEQ ID NO: 373708 - DNA, 551 bp, Homo sapiens
tttgagaacttcagaaaacactaagcaatagaatagtaggtttcccctactcttaacattgatgaatatttttgcccataatattaagagattgtgtctagagtgtaatagataagtagcaaaccaaaatcactgaactagtagtaagttattgaagaagaaacagaagaaccaatttgaattaaagtagaaagttgataaaagtataacaatttaagtcactgtcaataatkatgaatacattaaaaatgttttccatataatgttttacatctactttgaaaaataaatgaggaatacatttccaaggtacatggcaccactgaatgcatattaaattcaaaatcaccattttgtaaagaatatggggaaaggtaaaacaggtatcaatctctcaaacagcactgggagcttatgataataatggagaaagtttgagcactgattgggaatctacccgggaagtactcttgaagcttaattaaaatttacttgaagaaacttaaacattttatatggaaccaccttaaaagtatttaatttaatttaat

SEQ ID NO: 373709 - DNA, 569 bp, Homo sapiens
atgcccctctacatctttgtacaaccatcaaccagaatcctgaatctttagatctttttgttgagacacctgtcatctcttaactagagtaaaagcatttgtcattctgggcttcccctaaacaaacaaaatgaaacgtcacacacacttgtttcattcatttccacgtaaaatcttgtggaacagctggcagctctcatggaagaatattttattgcaagatgtcatgtcagaagcacctcattttcataccyttgttttctctgacaatccttgccttattaatatcatttgaaagcagagaacatgtcttacagaggccttatcccctatttctgactgaatatttgatatatatgtgaggagagaataaattagtaaaaatgtctaaatatattaccttctttctgaataatataaaagttttgtatttaattaatacttaatgatggcaaaatttatttttcaggatataaacataagtaaagaattggatctgttcagatacatccaaataatgcaaaacacacttataacatacttttgttttatatttcatgtgctagaat

SEQ ID NO: 373710 - DNA, 592 bp, Homo sapiens
gagtcaatatgttatttacttatgttttattttcactatatttcttttccatcacctcctttctcaacagaggcctgattgcctccaggtcctcctgtaattccctcggcaggattttcatgcagagctcaaagggaaattttctctatattccctccctagtttttgtttcctgagagtctaggtcctttcatgaaagtacacyaaatgaaaagaggagggcaatgatggggaggtgttagagtttggggagaagcaatgaagatgatgtacacatcatctctaaggaaaatagaagggtctaggaatctgtattctcacatttggctaggatttcctcactcaggcttatcatggaaagaagagggtcatctgccttcatagaaaatatgggtttggacaatgatgactaaatggctttctccccatagtctagtcgctacaaaggcctattggattcttgcgcaaatcaagggaagagaaggtgccaaatgtttcttctaccctcaccccacaatgacctacataatgtttttcctgtcaaatatgataggggctttcaaatgtatttgaatttaagagaacaaagtaa

SEQ ID NO: 373711 - DNA, 616 bp, Homo sapiens
gctttggtgtattacacacctccatgcattgtagtctcrttacatctggaaatgtgtgcagcctgtcaaaaataatttaaactttccctaacggatattcatgttcatcgaaatagggaattgaacaaaaccaaattgtaaatcaaaatctggcatgaactatgctactcaattgaaaatataattgaaacaaatccaaatagtttttcactgagttactattttaatcaacaagagtaaacataacctgtatattttctgaaagtaatgaaagcaaattttaaaacttgagtctaaaattatacaattatattatatatttttgttaactaaattcagattggaaaaaaagtcagtcagctcaacaaataaacagattcatccctatgaaaagagaaaatagatttatagggaaacattacggaaaatgcactgcaaaccaagaataaaaatgagaaatatataaaaattatcccaatgttttcatattggaattcaacattctgtacaccagtagacacaataatacaataaaggtgattttacattttaatgggcaggtggtcatccactaaaagtggtggctagctcccacacatcttaggaaagttgggtt

SEQ ID NO: 373712 - DNA, 592 bp, Homo sapiens
ctttttctgattgcattaccttaaaataatattctacctcaacagcatacattcaattgagaagtaaatcttgaaatcataatgaagaaatttaaattaaaaaatatatgtgtactaagataacttaaatggctgcaaaatcataattctgtcatgccaaaatacatgccctatcatgaaatggtaacgatgctttttacattgttccatgctactatttcattttagtggtgtctacattaaaactaattcaagattgaaaattttgtgtaatatattatacaaaagtcaaaactaagtctccatgcagctcagtttctaaataactcatatatttaccgagtactcagtaactattattgatttacctataattatttaatattttwaggaatctgcaggtttccaaagactgaatattttactcataacgtttctatttaatctctatcctttattaaataccatgaaaattaactgcaaactactagtgggttcattgaatgccattagctattttttatagtgtgttccataattgatggagtaggtacatagacacacactgctgtgctttcccaaatataaccac

SEQ ID NO: 373713 - DNA, 583 bp, Homo sapiens
aaaccatggccacaattgttggctccagagacacgacatgcctgctgggactgcaccaacaaaatggatgacccatgccatcctctcagtatctgataagtggctagctactgggatttcagctaaagctgttgcagaaaaatcaacaaccttgcaatctatgttctgcaccagaaattgcagaagtaacacaaatgtggcctccacctcacttctgcccttctgacctcacacaaacacatgtgactagctgaatatttttaagtaccttctggaacactgtctgcaaactatactatggaatatagtgtttagctttctagccttaacaatgactgaaggggctctagaatgagggcagaatggatactgaatatcaatccacyacataaacaatggactcgctccccaggctcttgagcccagtggttaaagagcagaagaaaaatggttggagccagtggatccttcagtttcctgaagattagctatctagatcctccaaacgccctggttcctgtccttttaggtttctgcttttgtagatttccctttggctctggaagcccccaccatgacctta

SEQ ID NO: 373714 - DNA, 565 bp, Homo sapiens
ttatcttatttatatttggaatctaaaatagttgaactcatagaagtcgagagtaaaatggtggttaccaggggctagggtcggaggttgggaagatgttggtcaaaatgtacagaacttcagttttatgggaggtataagttcaagagatstattatacaacataatgactagagataatctatgtattacattcctaaaaattgctaagaaagtagatttttaagtgttctcaccacataaaatgacaagtatatgacataattcatatattaattagcttaacttagccattccaccatacatacatatttcaaaacatcatattatacacagtaaatatataaaaaataaataggtaaatttttcaaaaatcttctttctcatcacagagttcatgaaattaagattctaaacctcctaagatagaagggcaacttaaaccgcacaatccttcagagagacagaatatgatttttcaataggtcactctagctaagaatggtaaagacaactgaaaatgtccccattcagccagatatgagaaaattcaacgaacaattat

SEQ ID NO: 373715 - DNA, 555 bp, Homo sapiens
acaagtatatgacataattcatatattaattagcttaacttagccattccaccatacatacatatttcaaaacatcatattatacacagtaaatatataaaaaataaataggtaaatttttcaaaaatcttctttctcatcacagagttcatgaaattaagattctaaacctcctaagatagaagggcaacttaaaccgcacaatccttcagagagacagaatatgatttttcaataggtcactctagctaagaatggtaaagacaactgaaaatgtccccattcagccagatatgagaaaattcaacgaacaattatattgcattttgcaggttaaatcatcttaatagaattttagtcttggaactattagagatgtgaaaattagagacaaggactccctttttcttttgactagttttgcttccatcgtccttaaataaatatctaaaatatttaaaatatttatttaaggaaccataattatttaggacttaaatagttaaacttttckgttacttaagatttcctaatgtaaattttaaattaaatatt

SEQ ID NO: 373716 - DNA, 449 bp, Homo sapiens
caaattagtgttaggaaaataagaggattcagatcctctgatccttcctacttgtaaccccaggaggctcatagagatctcagtgagaaaggggaggatgaacagaaatactagcagggaaacaaggaaggagaccgacttctccatctcacctctgccccacctctgctccatctgccacaagtccaaggtatagggagcaaagaagcttaatcaaaatgaagttaatttctttttggttacccaggactggatatattaattgatggattgtgattttttaagttaaatcatttatttttamacagacaacaagtaatgtatatttatcatgtacaaatgacgttttgaaatatgtgttcattgtggaatggctacattgagctaattaacgtatgccttacttcatatactttttatttttgagatgagaacacttgaactataat

SEQ ID NO: 373717 - DNA, 449 bp, Homo sapiens
caaattagtgttaggaaaataagaggattcagatcctctgatccttcctacttgtaaccccaggaggctcatagagatctcagtgagaaaggggaggatgaacagaaatactagcagggaaacaaggaaggagaccgacttctccatctcacctctgccccacctctgctccatctgccacaagtccaaggtatagggagcaaagaagcttaatcaaaatgaagttaatttctttttggttacccaggactggatatattaattgatggattgtgattttttaagttaaatcatttatttttaaacagacaacaagtaatgtatatttatcatgtacaaatgaygttttgaaatatgtgttcattgtggaatggctacattgagctaattaacgtatgccttacttcatatactttttatttttgagatgagaacacttgaactataat

SEQ ID NO: 373718 - DNA, 449 bp, Homo sapiens
caaattagtgttaggaaaataagaggattcagatcctctgatccttcctacttgtaaccccaggaggctcatagagatctcagtgagaaaggggaggatgaacagaaatactagcagggaaacaaggaaggagaccgacttctccatctcacctctgccccacctctgctccatctgccacaagtccaaggtatagggagcaaagaagcttaatcaaaatgaagttaatttctttttggttacccaggactggatatattaattgatggattgtgattttttaagttaaatcatttatttttaaacagacaacaagtaatgtatatttatcatgtacaaatgacgttttgaaatatgtgttcattgtggaatggctrcattgagctaattaacgtatgccttacttcatatactttttatttttgagatgagaacacttgaactataat

SEQ ID NO: 373719 - DNA, 534 bp, Homo sapiens
tatgtctaaaatattcaagagggggaaaagtttctttawtagaactgtttcttccagcataatcaagttaatgagtgcctccttataatttaatgcgaagtaattttcacactggtggtgagcttcaaagataggtgaatagataattaatagcatgattccccctggcaaccaaggtaaacttcagtcctgattgggcaaaaacagtcaagaagaggatggaattaactacaaacagccacatttgtcaccagtgctctttggagcaacaagaagagaaaaaaaggcaataatgagtgttgaaagaggatgggatgggttgtaaacctaaagttagttgcagaagatttttctgttcatttgtttgtttgactatgaaatttggtctgaactgaactggaaaagctagaaggcaggagtgacatccaattttaataaaatcaatggcaggcaaaaatcattttcaatgtgtttgaagagagagtctgctcaattcatgggctgctggagcaagccatcacatggaggttagtc

SEQ ID NO: 373720 - DNA, 534 bp, Homo sapiens
tatgtctaaaatattcaagagggggaaaagtttctttaatagaactgtttcttccagcataatcaagttaatgagtgcctccttataatttaatgcgaagtaattttcacactggtggtgagcttcaaagataggtgaatagataattaatagcatgattccccctggcaaccaaggtaaacttcagtcctgattgggcaaaaacagtcaagaagaggatggaattaactacaaacagccacatttgtcaccagtgctctttggagcaacaagaagagaaaaaaaggcaataatgagtgttgaaagaggatgggatgggttgtaaacctaaagttagttgcagaagatttttctgttcatttgtttgtttgactatgaaatttggtctgaactgaactggaaaagctagaaggcaggagtgacatccaattttaataaaatcaatggcargcaaaaatcattttcaatgtgtttgaagagagagtctgctcaattcatgggctgctggagcaagccatcacatggaggttagtc

SEQ ID NO: 373721 - DNA, 558 bp, Homo sapiens
tgggggaagaaatgtcggaaaaaaacagaacaaaagtaatctttccccaaatgaagcctttgagaaggcctgtgggtgaggtgcctttctctctccctctctctggaatgggccttggcccattttcatgaaaatattggtttgggttgaggaaggtgtgacagtggcctggggagaatgactattatggctccaggagaggagaagaggaggagaaaaaagagaggcctccctgtagagccagaggtggaaagggcttctctaggcagcctgctctagggttgtgggaccctgggcccattctgggtcaagtattccaagctaakcttggcagttcttgcttagatattagaaaaactaacttggatgctccaccctctggccagtgtcaggactgtgaaggtggaaagaattgtgaagagtttggggaaagaccacaatgtgtgcccacttatgcccattgaattggtaagaatacagaaatctaagacaccacatgtggaagaggatgtggatgggcacaacttggaatgcagctagatgtacaaattggcccaa

SEQ ID NO: 373722 - DNA, 448 bp, Homo sapiens
tagtgagtacctaccctgtggcagccactggaaaggcagagaaagcccctgctctcatgtagcttataactgcatggagagaaacaaagaaatacaagccaaccagtaaataggtgaaaaaaattccagagagtcataaatgatttaaaggatataaaatagggcgatgtgaycatgactggggaagtggggagggacagtttagaaaggatagctagagaagacccctgcccaccattgcaggaagtgacatggtagacagaggaaacagcaagggcaaaggcctggaggctacaacaaacacggcgtgttccaggagcagagagagcccagggtggcaggagggaaatgagaggcagagtggaagatgagggtacggacaaagatgaagtaacatatggctttgtcatctatgctatggtaaggagtttccaatttattctaagta

SEQ ID NO: 373723 - DNA, 554 bp, Homo sapiens
ccacagtggcctccacctcaggtgggagggcgtcccttcctaattggcaggattggccacactgagatattcacatccccacacaatgccacgggcctctgcacccagacagggaggggaaaaaagagggaaattaacaggcgggtgagagctcggctcatagaatatttgtaagaaaattaaagatttgctcttcagatgttgggggccatgctcttaccagacagctggcaaatgggaaagattggaaatgatagaatagatcaaattatttaaatgagaaaaataaattcacacacagcctagccgctgcccggtgacagatccgtttatttatctactgtatcggcaccgctttgtctctgtcaaaaaggtcattaaamtcgcctaactgagtaattcgcagcctcctgctccagcctcgctccacagcctttcccttccctcacacccagcgccacttgaaaaaaaattattattgctaataaacaacgttgtttttctttttaacccctttagcttgctcccccacggatcctactccatcccacgac

SEQ ID NO: 373724 - DNA, 549 bp, Homo sapiens
ttatttttcttttcttctttctttaaattcatgggaatttctaacattatattttttatctcatctactagctttttatctacatctctttttagatggttactccaggaattgcaatatgcactcttaaattaacaaagcctaccttgaattaatattattccactttacatacaatgtaataatcttacaacagtatacttccatttcctccctcctttgctctattttggacatttattttatttttacatatgttaactcccacaatgcartgctattatttttgctctaaacagtcatttttcttttaaataaattaaaaattaaggaaaaagtattttacatttactcatatatactaccatttttggtgttctttattccttgatgaggatcttatcttccatctggtaccattcttctttagcttggtgatgaattctctcagcttttatttatttcaaaatttctctatttcaccttcatttttgaatgatttctgaattccaacttagggtgatgggttgtttttcttttagcacttta

SEQ ID NO: 373725 - DNA, 545 bp, Homo sapiens
tcttgttgttatacattctatggattttgacaactgtgtagtgacatgtgcccatcattccagcatcatacaaaattattttcctgttcaaaacatcttctgtgttccatattcattcctccttctttctcccttgaattcctggcaaccactggtcttttaactgtcttcatattttatcttttctagaatgtcatatagttgaaatatacaattttcaggttgttttcttttacttagcaatatgcctttaaggttcccccgtgtcttctcagggcttaatagctcatttccttttagtgatgaataatatcctattgtatggatggtgccacagyatgtttatttattcatttattaaaggatatctcatttgcttccaagttttggcaattataaatgaaattgctataaacattcctgtgcaggtttttgagtggaaataaattttcaactcatttgggtaaatactaaggggagtgattgctggattgtatagtaagggtatatttagttttataaaaaaacaaaagaaactgccaaac

SEQ ID NO: 373726 - DNA, 562 bp, Homo sapiens
acatgcattggaatagctaaaataaaaaagacacataataacaaagattgacaagtacatgcagaaattgtaaccctgatacattgctaatcaaattgtaaaatggtacagccacttttgaacaatttggtagttcctcaaaaagttaaacatagagttaactctataatataatagaacatttccactcctagatatatatccaagagaaatgaagacatatcttcacccaaatgcttgtacataagtgttcatggcagcattattcatgacagtcaaaaagtggaaacaacacaaatgmccatcaactgattaatggataaataaaatgtggtatatcaatacaatggaatattacacaaccataaaaaggagtgaagtacacactacaacatggatgaaccttgaaaacattatgctaagggaaagaagccagtcacaaaagatcacacattgtatgactgcatgtatatgaaatgtcatgcataggcaaatccactgagaaagaaagtgggttagtggttgccagggactgtcaagcaagggggaatgaggaatgact

SEQ ID NO: 373727 - DNA, 616 bp, Homo sapiens
agctctcataatacccatgtgccatgggagggacctggtgggaggtaaataaatcatggtggcaggtcttatgttgttctcatgatagtgaataagtctcacaagatctgatggttttataaagaggcattcccctgcacatgctctctctcttgcctgccaccgtgtaagatgtgacattgctcctcctttgccttccaccatgattgtgaggcctccccagtcaagtggaactatgagtcaattaaacctctttcctttataaattagtctcagttatgtcttttttkggggggggtggggacggagtcttgctcttgtcacccaggctatagtgcagtggcacaatctcagctcactgcaatctccatctcccaggttcaagcaattctcctgcctcagcctcctgagtagctgggattacaggcacctgctaccatgtctggctaatttttgtacttttagtagagacagggttttgccatactgaccaggctggtctcgaactcctgacctcaggtgatccacctgcctcagcctcccaaagtactgggattacagtcatgagccactgcgcccggcctcaggtatgtctaataccttacttttgggagag

SEQ ID NO: 373728 - DNA, 558 bp, Homo sapiens
aagccaccgcacccggcctacatttttttttaacttttaaaaagtatccggtgataagatggaaagaaatatgagggtcagggtcagaagtcctttttgcagtcagaggggctgtgtctctggacagggttccaatgggcatggggwgttgcaagttctcctgttcatgactctgtccaaggagtcctccaaggcctgttcacccagaggatagcaccgagtatgctcaggagcagaggcaccttcaggagtgggagaagcaggaagcaggtgctgctgggcagggacctgtgagacggagagagtgactagtagtaagctgccttctccggggagtcccaggctctgcctctcccccgccttccctcgaggtctcgtcctgtgccctcaaacccaatgtcagcatcaagcctggtgggtaccagggtcaggcagccccatgctgagggtcacaggctcctgaccttcattcagctcagaattaaccttgagtgtcaagacccaacagatgccggaggtgagggatagagaagaagagagatatgttaacccaggcag

SEQ ID NO: 373729 - DNA, 464 bp, Homo sapiens
tgtgctcttcagtgattttcctggtgactttgacccagtggaattttgaaggacaaagatttgtcttgaggaaaatgtattgcttccttgactgttataaggcagttggatttggctgctactcccaatgcacgaggctgtggccctgcccttggggtgggaggtgacgacacatgaatttgcgttttccaggttactccattgccgctaaaatcactggtccaacaacagtgaatggctcggagcagggctcattgactgtgcagtgtgcttatggctcaggctgggagacctacttgaagtggcggtgtcaaggagctgattggaattactgtaacatccttgttaaaacaaatggatcagagcaggaggtaaagaagaatcgagtttccatcagggacaatcagaaaaaccacrtgttcaccgtgaccatggagaatctcaaaagagatgatgctgacagt

SEQ ID NO: 373730 - DNA, 562 bp, Homo sapiens
tacgtagaagatcaaaagaggaaagtttcccagagggatgccaccaccttcaaatgcctttgctcaactcctgggactgagcagggtgaatatttttattcctatttcacagatgaggagactgatgctaagagacttttgctgatttgcctaaagtcatataactagtgaacagcagaccttaaaatctgagccagggctcccagcttatggccagaaccttcctcactgtgctacatggcccacatcatcagagtcaggtagagaccctctctgagccgggctccctatagcaccccagcccccatgttgggaagamcctccccacaccctgctccctagagagccctgtatttgtaacaagatcccaaagaggcatccattgcccagagctggtcaggaggctgccctcttggtgacgtctcccttgagtgccagtggggagggaagaaagtgggcagtggggtccaccatccttgggcacttgcccattctcaccatgatgcacaagatactgagaactactccccaaatggattgacgtcgggtagtagaggtgaga

SEQ ID NO: 373731 - DNA, 533 bp, Homo sapiens
tatagtaccttcctagcaagtgcatttgttttctattgttgctgtaacaaattactacaaatttagtggcttaatacaatacccacttattatctcacagttctgtaggtcaaaagaccaaggaggcttgactaggttttctgcttaggtctcccagggcaaaaatgaaggtatctgccaagctgagttcttatttgacaagtgtggggaagaatcagcttccaagttcattcaggttcttggaagaattcagttccttgcagttactgaggtcgccgtttcattgctgmctgttagccagggtccaccctcaccaacttgaggccaccacattccttcacatagtcccttctatcttagaagcaacagtgctacataatagagtcttgctcaggtttaaaagctctctgacttcctcttctgcaaccagccagaaaaagttctctgcttttccggactcgtgattagattaggcccacacaatatcctctccatcttagagccaactgtgccatataccagaatacaatcat

SEQ ID NO: 373732 - DNA, 543 bp, Homo sapiens
aaaccatggtcgctctcataacatgtagtataaacagaaactctcctttttttcaaaccatcaagattaacaatttaattttttcttatggttacctagttaacaagtatcaagaagygattgttttgtgagaacactgtaataagcattgtgtacatatttttcaatagaccctataatacttagtcttaagaagtgtaaataggtactggagagtgaagactccataagaaatactttggaaacagtgacagtgcatcccataagcaaatcattcaactccatcatcttatttctaatatctggttcagatatcaggaacaatggtacatcattgtgtcctacttctatagcacaaaattattaaagaatcagaaagtagccagaaagtctggtttaggtgcctcggtcttacagttctattacattctcttctcaaaagctagcctccctcaagatgatatgtgtttatttatttagggtgcactgtgtgccaggtactgttgtaagcatgttagaaataacaatttatatcagtaagat

SEQ ID NO: 373733 - DNA, 490 bp, Homo sapiens
tacccactatcctattctctacttccaagagctggaattattttagcttcyacatgtcagtgagaacatgcagtatttatctttctgtgcttgccttatttcactgaacataatgttcaccaggctcatttctgtggtggcaaatgacaggattgcattctgttttgtagctgaatagtattctattgggtatatacactacattttcttcatccttttgtctgttaacggacacttaggttgattccatatcttacctattgtagatagtgctgcaatacacatggacgtgcaggtatccctttaatgtatttattttatttcctttttataaatacccagcagtgggattgctggattgcatgatagttctagttttatagttttttgagaaacctccataatggctgtactaatttacattcccaccaacagtaaaacatagtataagaatcttataggccaggcatgttagctcatgcctgtcatc

SEQ ID NO: 373734 - DNA, 587 bp, Homo sapiens
aggagctgccaaccacagcctctgtgcccacctttcaaactataatgtctcatgttaaagtctcagacagcctgcatgtagtcaaatcctcccagtagcattaactccagatggctgctccctccttcatcaaactctatgccccttgtcttctgtgattccacattctcctgattttcctctaagtttctgttccttcttagttttcttaacagcatcctgctcctctctccaatttctttcctttgtcatcaacactcactgagtaggtcattcaatcccatggctttaagtatcatctaattgcttatggttattgttgcctgtctctagcccaaactgctctcctgatctctacagtcacatatttcagmggctttcctgacatcacaatgtggatgtataataggtatatctagctactcaagactaaaacagagcttacggtttttctcaaaatcttttctcagatttttttttaaatcaagttttataatgtcaggaaaataaaacaacaaaaacctcaaaaccaaaaccaaagcaagcaagtaaccaatcaaccaaccaaacaaaaaaatcccaagaac

SEQ ID NO: 373735 - DNA, 618 bp, Homo sapiens
aggataatttcaaaaaggtacatgtttatctcttaaaaagggataacctgatatgctgagaacatcatttctgttttgattattaggtttttgcgttaataactaaaaatgtagaattttattggtgctttagttttaagtttatcatgtagttattgaggaaattaaaaaaaaatcacattctatgccatcctaagcagttacaatgtttatagagaagtatgaaatagattactgcttcagctttagatacataattctaaggacataagtagtggttttagtagtataatgctaagatttcaataccagtcaaatagaactggttagggaggcacacaggcctccagcagaaccagctatcagaaataagccaaagatctgggatctaggaggtcgataatctgggaataagaaactaattcttgttacttccaggcaggcaggagttaaaaatgcagagaatgaaggtcgttcaaaatataccataaacagkgacacagacatgaaatgaacagagtatttttctctagtttcctttatactttttgaactccatatatctgaaactgagtttgaaggtgtgttctggaagtaattgaaatgtagggaattctg

SEQ ID NO: 373736 - DNA, 637 bp, Homo sapiens
catttaatacaattccagccttttatggtaactcttccaatattctaatcggcatcttgtcacaaaaggcaacactaactatttttaaacaaaaattctacatctagtcttctcgaggttgtccttgttttcacaaaggataaaccattttccaaagtgtgttccacagaacacaggctaatcataggtaataaacaatactatccttagaacccgatagctggggctcccaccctgagtcctccccaccacacttggtgccttggcttcctcagggctcacccttcagcagaagcttagaggggccaaagaggtatctcaccccctccacagttcctacacccaaaggatgtaaggggaggggtgcccaggaggtagaccctggatgtaggggttgtgatatccccagatatccatgcaaaactttcctggggtgggaagataagtgagaaaggagctcacaagcagggagccagaagcaagtgcgctctgtcatcagtgcacaaaactccaaataatccaaattctaaatgaaagcttggccttccagatcattttgcagatatatcattcaagggaaragcatggaacacattttaacaatcagttagtttaatgtacagcttttaaatattta

SEQ ID NO: 373737 - DNA, 523 bp, Homo sapiens
aacaaggtccagcttccagcaagaatcattgtctctattcgtttattttgcaataatcagggctattgatttatgcyatatctaactgtagcttgaaattagtttttctttattaagtctaaatttttccagtcgtcatgaaaggctgtttctaagaaatctgttgtctcagtatgatgctgatctgagttcattttaaagacaatccagtaactgccaataccgctcctgcaatcttacaggtaggcattgatcaatagcaacacgtcaagcctataagtgtcttgtggcaattagtccagatcaaccttaaaacaatttgcaagtttgtaaaggtgcagtctacatttctactagtaacatttttgtgtgtttttaaaaaatccaagtatgtaattaaggtgttgtttcttgttcaaagtatagggttaatgtccttattaatgtgtattatttagatatttatcaaagatcactgtataaatgattgtttttaaaagctttttaatattgtatatatttc

SEQ ID NO: 373738 - DNA, 561 bp, Homo sapiens
cactgttacacaattatatacagtataaatgtatcacctctaagttcatagtcactgaagactaccctttgtattaaaaggctgaaagatttgagggctgtttactgtctgccccacattaaacagttttttgtcaattaatattttttaacagtgataaaaaattttagtgaggtattggttatgaatagtcctcaatttataaataggcaatgttctcaaatttggtttgaaatctaatttgcatttcatataaaacaataattatagtcagcatttataaagtgtctaatatatactgagtgctttacaaatatgatttttaggctcccagtaaatactatgaagtaggtaaactgttctcattttacagatgagaaacctgaagcygaaagaggcttcaagtaacttgatgaaggttacacagtttctaaatgacagaattggaattttaatccaggtcaaatcctggtgagcacaaaaagtctactgaagtcataaatgcagcatcaataatacttcttaagacatcagagtttaactattcccccctaaactctt

SEQ ID NO: 373739 - DNA, 608 bp, Homo sapiens
agttccatcagttcttagagttaagaatgttctctgcattccatttagcagagaaaaatggctccattttgccagcattgctttctgattttcatcacactgctgtgatatttgcttccagcacctgaaagcagtataaaaatgcattttaaatcattgaatagcatttctatgttctgatttgtgttataaacttaaaaaaaaaagatttaaagctatgtatctcagctccttggcagcattcttattttttaaattctgaaaaaaatcaagaacacccatcagagaaatataatgccattaactcattgtactgatacatgataaattatttataatctaattattataattagagttaacatacaaaacccattcaggctcaggtttcacagcaatgttygaattgattttttgaagttcataataattggcatctatttgcacaggtggaaattgatgcctccttggttatcttctcagatctacccagtcccttacccttagagtctctgccaaactttgagctgtgacgagaatagagcaaaacatactattcagtattatccaacctattttcagtcacttcttcaaatcaaacaaaaatt

SEQ ID NO: 373740 - DNA, 552 bp, Homo sapiens
acgcgcacaggcaacatcccaggtcataaaaattaatatgaaaggcaagacctgctgaatacttaagagagagagaggggaawattggttggaggtgtggggtgatttgctgtgcagacatgaaaaaaacatcaagcagataaagggggctgtcaaaatgtgcctttaagcggtgattatgcagaaatacgcaccggtggggttggaagacaggctctccgcatagcctccgagcccccgccgccgctgctgccactgctgctggagctgctgcttcggcctccgccgccgccgccgccgccgccgccgccgccgccaccaccagcgttgctcgagctgctgggggagctggccgagggcgcgatgggagccgaggagcccggcgaggtgctgtgcagtgccgagtacttgggctccacgtgcaggctgccgccgtgcggcatgctaaacgcctgcttgctgttcagggacatcatcatcatcttcccgcccgccggggcgctggtccgtagaggcactcactggtcccggctgccgggaccctccgagaag

SEQ ID NO: 373741 - DNA, 529 bp, Homo sapiens
tatgcctacaaaaaacagagatgaaacataacggccctcaatgaatcatgccatgaatgctcttgttcctgttgataatgrtgatttattctcatcttataacccactgacacttccaacacttcatagcagccccttaggcaaccatcactcataaccaatgggataaaccccattccctatttatcctcctttgtaagagcagtccttcaaaatggatttggacaaagtgagcttcatggtgaattctgaattaaagaataaaaacaaggttatttcaggcataaaaggtattgctataaatgaataaattatatgactatctggctgaaatcaaaatggtaaaaatagatataggaaaagacaaaaatttttcataatattttagttcagtgtgtacactattctaaagcaaagaaatttctacttgtgataattttactgactcagagaatacatcattcatatttttttaaaaaatgaataatttgccttgaaccttcagaccttacctattttcaaattgccc

SEQ ID NO: 373742 - DNA, 469 bp, Homo sapiens
actctggggttggtaagggacacctggagatgcagggttaatacacatagggctggacagtcctactctcccagtgggctaccttggctttgctaaatggctgtctgcatttctgtgccttttggttaaactgggtgaagactcactgacttccagagacagagtaggtcatggtttggggaattattggcctratgtgtgatgtgacacaggtggagaatctttttgcagtcaccttatgctccaaattcaacagcagtcccaagcccgaaaaatataaggaaggcttctgacccttgccaagaaggggcaccttttgtgctcagttgttataaacctaggagcccctatttcttgcactggggtgagggtgaagtgtctctccctaggtggcagctggctccctggtgtaccaaagcaaggcctggattgtaaaggttcttaagcactgatctgaaccaaagcattt

SEQ ID NO: 373743 - DNA, 529 bp, Homo sapiens
actcaaattatcatgaattaggcaaagcaattacagataggtattaatattaataaaaattaaaatgtgaccgacaattataattctgtatttcctttttctaataattttatgatctataaaaattataaaaatataaattgcagaaactctttaaattttctgtttaaaagtaaaaaatttttatttttaaaaatcaatttgttgaaatctatataataccattctacttggtcaccttgtagtctacagttgtgcatatggtcagggaagaaatataaattgacrttttatcttgtatgttttttcacgtaggcagaaaagcatgaatggttataaaagtatatatatatattttggatttccagaagtactttattttttctgaaatcacatgtttgactttttaaaagtcaaatatgttcagaatagacaaatcagaacatatattttaagaagttttaaaattcccatattccattatccaaagacagttaatgtttttgcatatttattatactttaatata

SEQ ID NO: 373744 - DNA, 631 bp, Homo sapiens
tttctggttttgagacaaaagtaatttccttattttgcttaagcttgtttgatttgggtttctgttaccacttaaagagtctaggctgggcacggtggctcatgcctgtaatcccagtactttgggaggccgaggcaggtggatcacctgaggtcaggagacggagaccagcctggccaacatggtgaaaccctgtctctactaaaaacacacaaaaaaattagctgggcgtggtggcaggtgcctgtaatcctagctacttgggaggctgaggcaggacaatcgctcgaacccgggaggcagaggttgcagtgagcygagaccgtgccatcacacgccagcctgggggacaagagcgagatttcatctcaaaaaaaaaaaaaaagtactaaaacaaaactctttctaaaatatttctttagatttctcatattgaggctactgaatgtaatctactacctgtgtaatctcatgggtaacctataacatatatcacaatctattagctgtaactgaaaatgggaataacagtacttatttggaaaaactttgtgaggaataaagcacataaaaatgccaactgccatgtctggcattcagcaaaaataattgctctccacaattattgtct

SEQ ID NO: 373745 - DNA, 492 bp, Homo sapiens
aaaggattaattaaaactataattatctgataagactagcrtactgtctaacctgatttagagaaaattcatctacttcaactaaaaatactcaacataaaaaaaggtataatgaaacaaaaattaaccctgcagggcctgtttctattacatattttctaagtagcctcaggtatcacttaaataaagagtcatagtgcatttttaatttttattagtaacagttctgagtacaaataaatttaatgacatttagaaaaaaaaacaatttaccctgtaaggtttgttcataaggaaaaccctgttttgtacattttaatctccaattttaatgcttaatatcataatgcctttaaatctgtaacttaactttaggtttaattttaataattctgtcttgttgcatcttgttaaagagattatcaggtagaaaaaaagcaaaaaactaatttaaatgacgtgaataaaaaacttaactaaaaagttttaaaa

SEQ ID NO: 373746 - DNA, 599 bp, Homo sapiens
tgtgataataccagctccatttatctgattcaatcccataaacctttattgaggaccttccttgtgccagtccttgactaggcctcactaatataaggatgaacaagacaaatagggatcctgtattcaaaaagctcacatttcaacaggagaaayagatatacaacaagaaactgtgagtgtgatatgtattacaaagtgaaagtaggagcttatatataggggatttagcctagtcttaagactatgaggaggtacccataaggaattaaagttaaatggaatcttgaagtatgaatggatattagcctggggtgtgggaggaggcagtattctaggcagagatgacagcagatataaatacaaaaagtcaagataaaaatggaaagatttctcatttgcttgagcatagaataaaagggagagggtagaaatgaggctggagaagtcggcaggaccagattgtggggacaccatataagccaccttaaaaatttcaaacttagacttgaaagacatgcataacgtcctttaatacttaccacacgtgtatgaggtaggtcctattattatttccattttagatatgaggaccctga

SEQ ID NO: 373747 - DNA, 526 bp, Homo sapiens
tttctgttttttgggttttttttttcctgtcagataaaataaagaaccctattggttgagggggaatgtgaactgattcaagaatatgtcctgggtgggctccatggctcacgcctgtaatccgagcactttgggaagccaagacaggaggactgcttaagcccagggttccagatgagcccaggcaacatagactccgtgtctacaaaaaaattaaataaataaattagccaggtgtggtggcgcatgcttgtagttccagctactcagggagctgaggtgggaggatcacttgagccctgaaggtcaaggctgtagtgagccgtgatcrcaccactgcactccaagctgagaaacagaacaagaccgtgtctctattaaaaaaaatatatatatacacacacacatacatatatatacacacacatatatatatacacatatatatatacacacacacacacacacataattacttccattccttaatcatgaatgttgaaagttccatttaattgagggattg

SEQ ID NO: 373748 - DNA, 569 bp, Homo sapiens
tcagcattgtcctctactagttccctcatattcctttctgaagcaaaaccaactccttgctgttctcctcacacaccctgaatagtctcaccctgcatcctccctatctgcagacagaaattctactcatctttaaagtaccttctatggccacctttttcctttacatccacacaacactgtattagtacagtgtgtcttgttctgtcactatttctgtatctgtctttttctttcctagacaataggtrctctgctgacagagaaatgactcgttcaactttttatccattcttgtacctttcacagagtaggctctgagttccaattatttgagtttaactatatcttcatagctgaataattccaaactgaagaaaatgctgacttttataaagatttgcatttatataggaaatacggtatctacttttaagaaaattattttctattttataaacgtgcatttccacatttatggtagcaaaattaaagtacatttgccgagagatactaaagacagcaaaacttctatttaaaattttaaacacgaagaagaaataaagtcc

SEQ ID NO: 373749 - DNA, 538 bp, Homo sapiens
cccattaggagtgtctcttctattattgaaggaaatttaaaaagattcctactacagaaatggctttaagaaaagcaataggaaaggttataaatttgaaatattcataactgttctaaaaaatacttcataatgattgctctttgtgcaagaaatgtatcaaagagccagagacctcatcatctaatttcttactttttcttaattaacattgttcccagacctctgctaaactcccgtgttgaaaggaaaaaagtaaatacagtacagcagggaaaactggttcctttcgacaaaactgagagagaggcttgagcttttgtcaaacagaaagcacttgataaaaaactattcctaaactattagcaactatatagaagctttttatttaacagcatcctcctgggaractgcgctggaatgtgcagcggttctgaaaaaggcacagatttggctgaactgtaaatattaggtgcacagaggcgaagccattgtgtagggaggggtggggcaggtagggtcctgatttccaatgttg

SEQ ID NO: 373750 - DNA, 597 bp, Homo sapiens
gtagttaacttaagatcaattgatttaaccttcattagctaaaattgtagaggaaaacctgtcattaataacaaaaatagcaacaattatcattttttgggtaccttctttgtgtcaggaatattgctaggcacctacattcttatttcatttaagccacaaaacagccctatatattgttgtacatctttataaatgatgacaacaaaactcagagagtttcacttttgtggaggagttcagagtatactgggtcccacaaaggaagattagactatggatccaagtttagggtaaagctgatatataaaaataataaaatcatagaattttagagccaaaagggatagtcaaaatgacaaagtctaactttcttacttttacatgtgggaaaacttaggtttagaccctcgcctccccaaaaccacacaccaaatccaagactagaatayagactcaattcaatgaatcaattttgtcttgagttcctactatgtgccatatatggccaggtctctatctcccaaacccagggcttttatctgtcagatgatatgcaacaggaaggacaaggatggggactgtgcagccaggacg

SEQ ID NO: 373751 - DNA, 493 bp, Homo sapiens
ggatccaaaccaagacaaattctctgaactaccagaaaaaaacactctgaaggtcaactattaagccaatcagggaagcacaaaagaaaggctaggtccaacttaaggaaataataatttaaaaaaagatacagcatatgaatgggaaaatctccagtgaaatagataggataaacaaaaaatagttacaacttctggaaatgaaggacacacttggagaaatgcaaaatgtactggaaagtcttggcaaaataattgaacaagtagaagaagaactttagagctcaaagacaaggtttttgaattaacctaatccaacaaaggtaaagacaaaagaawtaaaaaaatgagcaaagcctccaagaagttttggattatgttaaacaaccaacctaaaaatcattggtgttcctgaaaaagaagggaaatctaaaagcctcaaaaacatatttgagaaaataatcaaggaaaacttccccagcctagctagaca

SEQ ID NO: 373752 - DNA, 566 bp, Homo sapiens
gtgtgaaacacacatagctgatattcattataatgactttaaaggtttgcttgatcctaaatgcctagaggagataaaacataagttaaatcctgtataatatgattataatggtttttgcttgtttctttttctgttttgttttgtttttatctttgagacggagtttcacttttgttgcccaggctggagtgcaatggtgcgatctctgctcactgcctcccaggttcaagcgattctcctgcctcagcctcccaagtagctgggataacaggcatgtgccaccacgcctggctgattttrtatttttagtaaagaaggggttttgccatgtcggccagggtgatctcgaactcatgacctcaggtgatccacctgccttggcctcccaaagtgctgggattacagacgtgagctaccgcacctggcctataatgctaattgtattttattatatgctaatttcttcaaaacttaaaattatatcttataatatttaataggaaaattcagttaaacattatatcttatttttaacatttaggagtaataagagttacttcatt

SEQ ID NO: 373753 - DNA, 527 bp, Homo sapiens
attttggtaacaaatatcttccaattttgtagttgattggttcacaaaacaaaacaatgatctcacaagaaggctgtgtttgtttgtttgtttgtttgttttttgttacagagtctctctctgttgcccagactggagtgcaggggcttgatcttggctcmttgcaaacttcacctcaaatgatctgcccacctcagcctcccaaagtgtgaggattacaggtatgagccaccgtgcctggccacaataaagactttgtttcatttctgtttcatatttctagattataaacatatttacataaatttctatagaagagcatggagactgtgattcttttattctctatttttttcaagttatatactactatacttcatggtgctcttcattgaattattttccatctcaaagttttttttaatttccatatagaacagttaatataattttttacaacagccatgaaatgcaatgctaattctcaatcacaattttcattgtatttaagtcttggttttaaaaag

SEQ ID NO: 373754 - DNA, 461 bp, Homo sapiens
tcaaagtgccaatcaatatagtttmtgttgatgactctcttccagtcttgcagatggtccccttctcattgtgtcctcacatagtgaagggggacagggagtgaattctggtctcttttctccccttataaggatattaagtccatcgtgggggccctctcacatgatctcatctaaatttaatcatcccccaaaggcccttcttccaaacactataaatactaaatatttgggagttagggcttcaacatatgattttgtaaggacacaaatgttcactgtataacattataaccctgatttcttaaatgtacaatcttcttgcgtacaaaatatatcattccatctcaaaagccccaaaagtcttaacttgcttcagcatcaactctaaagttcaaagttgtttataaatatcatccaaatcagatataagaacatgaggtacaatttatcctgaggct

SEQ ID NO: 373755 - DNA, 461 bp, Homo sapiens
tcaaagtgccaatcaatatagtttatgttgatgactctcttccagtcttgcagatggtccccttctcattgtgtcctcacatagtgaagggggacagggagtgaattctggtctcttttctccccttataaggatattaagtccatcgtgggggccctctcacatgatctcatctaaatttaatcatcccccaaaggcccttcttccaaacactataaatactaaatatttgggagttagggcttcaacatatgattttgtaaggacacaaatgttcactgtataacattataaccctgatttcttaaatgtacaatcttcttgcrtacaaaatatatcattccatctcaaaagccccaaaagtcttaacttgcttcagcatcaactctaaagttcaaagttgtttataaatatcatccaaatcagatataagaacatgaggtacaatttatcctgaggct

SEQ ID NO: 373756 - DNA, 496 bp, Homo sapiens
ttactatgcagatattactaatatgttctgtttaatctaattatggcaaaatgtgaaaatacagaaaaaataacacatacttagatgttttctaatgagggcaatacattattgctttcaataatttggaggtgagtactttcaatacttattttctctggtgaatactttcattaattgtatttayagtccaggggaggcataatgaatttaaaaagtatgtatcattttttgaaacagtctaatttctttgggaaaggcattcttatcagattagagttttcttgtcaggcattcagttcttgattcaatgacattgtttccttcaaagaaaagaaagcattcatttaaaccttatattattatttttcttaataatccctataaacactagaaataaaagtcagcatttctcacagttttcaattctgttcttctcagcattttatacaaaagccagtgagcaccatagttacaactttgataaaaatcaaaa

SEQ ID NO: 373757 - DNA, 537 bp, Homo sapiens
aatttaaagggaaataaacaataacacataaaacaagcttagtttatataaaatatataaatacatgctgtattttttgctagagctgccacaacaaactgtcacaaactggttggcctcaacaacagagatatattgtgtcacagttgtggaggatagaagttcaagattaaaatatgtcagcagggttggttccctctgagtactgtgagggaaaatctgttctgtgtctctctcctaacttatgatagttttctgatcgtttctggcattccatatcttaaagwtttattactctgttctctgcttttatttcacatgttggtttccttctgtttatatttatgagtacaaatttcctagggaaaccagttgttttaaatgagaccccactctaatgacttcattttaacttgataacctcatttaacttgattgcctctgtaaaggccctattttcaaataaggtgccttagtcagggttctctagagggacagaactaatatatgtattatatgtgtgtttgtgtatgtata

SEQ ID NO: 373758 - DNA, 456 bp, Homo sapiens
aacatggacaacatgttggagagctacatcaataaccttcgatggcagctggagactctgggctaggagaagctgaagctggaggtggagcttggcaacatgcaggggctggtggagaacttcaagaataagtacgaggatgagatcaatamgcatacagagatggagaatgtatttgctaccattcttaataaagaattaatttattttgactgaaacacatactgtatattttttgttcccttgatacaactcacatagctgcttaacataaacatgagggggcatcttactgtcctttgttgaagtctgcacaacataatctcctatttgtttctctgcagcatactgagaagtaagaggtacgcatgcttgttcctgtgggaacctgtgaggaggtcagatctaccatttcacctctttccgcatcctctctcacatagagcatctaatggc

SEQ ID NO: 373759 - DNA, 612 bp, Homo sapiens
ttatagctgtatgaaaatggactactacaggctgccatagaaaagacaggtaggaattggatgttaagrcaaaaaaagagattaacacatttgtccaaacagagtagtagaaaggtttttataatcacagaatcttatagtttgaacaaccatcacaatcatttctatcaatcgctcattttaccaacacagaaattaagaaacagagaaatgaatcatcttctctatgattacttaactagcctaactaattatcagtaaagagaagggaacaagaaagtcaagtatgctaggatgctatgataaagtgttgtgatattgtataacacgtgtaactctacataaaattttccacaacttactaaagcataccacttttattttaacttgatatatctttgctttgtaagttttgattgaagctgtgcctcgtacaagggaattttatcattcattggcattattgaagcattatttggtagtattaaagcattcagcccaataatttttatataggttctccttcatcagataagaggtatattggggaaaaatcaaataactctgcatccaagaaaaaaataaatataaaaaatatgtaaactcaaattt

SEQ ID NO: 373760 - DNA, 612 bp, Homo sapiens
ttatagctgtatgaaaatggactactacaggctgccatagaaaagacaggtaggaattggatgttaagacaaaaaaagagattaacacatttgtccaaacagagtagtagaaaggtttttataatcacagaatcttatagtttgaacaaccatcacaatcatttctatcaatcgctcattttaccaacacagaaattaagaaacagagaawtgaatcatcttctctatgattacttaactagcctaactaattatcagtaaagagaagggaacaagaaagtcaagtatgctaggatgctatgataaagtgttgtgatattgtataacacgtgtaactctacataaaattttccacaacttactaaagcataccacttttattttaacttgatatatctttgctttgtaagttttgattgaagctgtgcctcgtacaagggaattttatcattcattggcattattgaagcattatttggtagtattaaagcattcagcccaataatttttatataggttctccttcatcagataagaggtatattggggaaaaatcaaataactctgcatccaagaaaaaaataaatataaaaaatatgtaaactcaaattt

SEQ ID NO: 373761 - DNA, 612 bp, Homo sapiens
ttatagctgtatgaaaatggactactacaggctgccatagaaaagacaggtaggaattggatgttaagacaaaaaaagagattaacacatttgtccaaacagagtagtagaaaggtttttataatcacagaatcttatagtttgaacaaccatcacaatcatttctatcaatcgctcattttaccaacacagaaattaagaaacagagaaatgaatcatcttctctatgattacttaactagcctaactaattatcagtaaagagaagggaacaagaaagtcaagtatgctaggatgctatgataaagtgttgtgatattgtataacamgtgtaactctacataaaattttccacaacttactaaagcataccacttttattttaacttgatatatctttgctttgtaagttttgattgaagctgtgcctcgtacaagggaattttatcattcattggcattattgaagcattatttggtagtattaaagcattcagcccaataatttttatataggttctccttcatcagataagaggtatattggggaaaaatcaaataactctgcatccaagaaaaaaataaatataaaaaatatgtaaactcaaattt

SEQ ID NO: 373762 - DNA, 602 bp, Homo sapiens
tttctcatttctaatcttcagttagaatatagagtagcatgataaatagataaatattcttgtatgaattatgcataaagaggaaaagaaagaaaaggcaaggaacaattgccctttcaatttaagaagtgttastaagtgttgctgagctgatggagcactttggtgcaaagcccttgagccttagttgatggtctacatgaaccgcatgatctcaagaagagtaaaaatatatatctggtatcaaaggtaaagaactcaggtagctcccctgagagactactgctttgccatgtgaatgcagctaaaatcatcttaataatccccctcccacatccatcaccctacagcccccatcactctgctctgtgtgactgttagaagaccctaagctaattcttacaagtcaaatttttaaaaaatatataataattgactattatttctttaaaaagaaaagacacaaatatgtggtacttgttaaaataaactatatagatatgtaaataaaaaatggtaagaaacagaatgaactcatttttacatgacattctctatggaggttataccatgatctttcagtagccacaatttataatatt

SEQ ID NO: 373763 - DNA, 580 bp, Homo sapiens
ttagcagtaagaaaatgagtgaataaccctgtatttcagtcctctctattcaagaaatacattgtgatttagtgtgctagaaagattcttttgaactttatagacagatacaaatctgtaagatatcttccagaaagtttcatttttgaatgtcctctttttcttaaatgtatatagaatttaactgtgaagaatgatgtttgagggactgcttgaatctgatatatcattatattttctgtcagtcaaaaactaaatacctcggcagtctattaaaagtaatgaagtaaattatttttwaaaaatcacacacactcaaaaaaaatagtgctcctttatcctatccaaagcaatgagaattattgagaatggagagaaggaaacaagccaagaggccaaaacacattgagattaaaagcctgaaactagtcccacatttgcttcctcctctccccccagcgcgcacagcatgtctgcccccaagggaattcctttttttaagctgtagcccccaactaaagaggtctcaaactgtgtgggcgtggtaaagagaaatacatgtcttctctcgtcacaaaag

SEQ ID NO: 373764 - DNA, 201 bp, Homo sapiens
caaattatgtttgtcatattttaatccaatacattgatctactatgaacttgtaaataatgtatttgctttctagacacattccaggaagaccagagaaactgacttttatccatatggaataakccactggcaaatttcttttaggacagaccaaagcttatctagaacataatctttacatacttggatccttcccatc

SEQ ID NO: 373765 - DNA, 443 bp, Homo sapiens
gcacaggattatgatatccacttgtcttaacatacacttcatcatccagaagcagccagtgaaataaaacagtggtagagcatataaaaggcttagttacagctctagattagggacagcaccctgcaggattgggcacccctgttgggtggtgttcagccacccaactgttaatatataaggcagtgttccyaaatgcgaaattgcatcagtctatgaaacaatgggcaggaaaagaattgactcttctaaatataattcctaatgacacagttgaagaagttgtatttctcaaccttttgctcttaggctttgccatattagaggccttgatgcctgttggggtttcacgggaaagtgggaaggtaagggagagtgtcttcatccattctgtgctgctataacagaataattgagactaggtaatgtataatgaacataaa

SEQ ID NO: 373766 - DNA, 573 bp, Homo sapiens
taccctgtcctctgtgtaccctaattttcctataagtaaaatggagatattaacagagtatttgtctcatatagttgttgtgagggcttcttgagctattacatatgmggtatttagaagtgtccttggcaaataaaaagtaataccagaagcaccagtgacagtactagtggtgtaacattgattccaacatcaaacaaggactgaattacaggtcaatttttgatcataaacttagatgtgaaatgtttctacaaaatattagaaaactaaagttagcaatgcataaaaagcataaaatatcttcacaaatcaggtttactcaagaaatgcataatgaccccccacatagaaagtgtattactgtatcccaataggtaaaaaagaatttgataaaatttaacatccacttatgattttaaaggctgtaagctagtgagaaatagaagacatttcttaacctaaaagtcacctacaaaaaaatgcagaagatagtaaagtattaaaaaaattaaaaggatttttaaaaataagaaacacagcatattttctctttattagaacttttgttta

SEQ ID NO: 373767 - DNA, 478 bp, Homo sapiens
atgtcagctatccctaaacattccttctctatcacaaaaaaagcaaagtaaaaattgtcctatgtggtgccctcagtttttagctgtattataatggaaatgtggtttgccaaaatgtattgaggtctctgacattacatcataaacatagcaatccaaagggatctgctgctaaatttactttatatatatcccaaactgtaactcataaagactgctgatggaatcatggctgtttctgacttgtctacaagtaaagggctcatgtttactgtgattatgaatagtgttaccagtagagcatagatggctacaaaacagtggcagaggtgcgctcgtgcactcaggggatagtggtgaacattatctccagttatttattctctctgccaaatgacatgaagaggtacaagatatgcaagaaaatcaaygtgtagaaacatgttcctaacaagtctctgacagctagacaaattgc

SEQ ID NO: 373768 - DNA, 580 bp, Homo sapiens
cctgtaatcccagctcctcagaaggctaaggcaggagaatcgcttgaacccaggaggcagaggttgcagtgagccgagatcgcaccactgcactccagcctgggtgacagagtgagattcagtctcaaaaaaaaaaaaaamaaaaaagtagccagggaaagaaacatatattatgtagagagaccacagataagcagacttagcatgtcaaaccatacaagccaaaagataatggagcaagatctttaacataatgaataaaggcaaaaatctgaaaacagaattgtgttcacagtaaaaaatatctttcaagaataaagatgagttaaagattttttcccaacataccaaagcagaaaaaattcatcatcaatagagaggacttttactacctgattttcagatttattttaaagctatagtaatcaagaaagtttggtattagtgtaaaaacagacaaatagatcaactatatagaacagagtccagagatagattagaacatatatggccaattcattttcaacagctcacaaccaattcagtggagatgcaccacgggaatgtagctaagcaggtc

SEQ ID NO: 373769 - DNA, 580 bp, Homo sapiens
cctgtaatcccagctcctcagaaggctaaggcaggagaatcgcttgaacccaggaggcagaggttgcagtgagccgagatcgcaccactgcactccagcctgggtgacagagtgagattcagtctcaaaaaaaaaaaaaacaaaaaagtagccagggaaagaaacatatattatgtagagagaccacagataagcagacttagcatgtcaaaccatacaagccaaaagataatggagcaagatctttaacataatgaataaaggmaaaaatctgaaaacagaattgtgttcacagtaaaaaatatctttcaagaataaagatgagttaaagattttttcccaacataccaaagcagaaaaaattcatcatcaatagagaggacttttactacctgattttcagatttattttaaagctatagtaatcaagaaagtttggtattagtgtaaaaacagacaaatagatcaactatatagaacagagtccagagatagattagaacatatatggccaattcattttcaacagctcacaaccaattcagtggagatgcaccacgggaatgtagctaagcaggtc

SEQ ID NO: 373770 - DNA, 580 bp, Homo sapiens
cctgtaatcccagctcctcagaaggctaaggcaggagaatcgcttgaacccaggaggcagaggttgcagtgagccgagatcgcaccactgcactccagcctgggtgacagagtgagattcagtctcaaaaaaaaaaaaaacaaaaaagtagccagggaaagaaacatatattatgtagagagaccacagataagcagacttagcatgtcaaaccatacaagccaaaagataatggagcaagatctttaacataatgaataaaggcaaaaatctgaamacagaattgtgttcacagtaaaaaatatctttcaagaataaagatgagttaaagattttttcccaacataccaaagcagaaaaaattcatcatcaatagagaggacttttactacctgattttcagatttattttaaagctatagtaatcaagaaagtttggtattagtgtaaaaacagacaaatagatcaactatatagaacagagtccagagatagattagaacatatatggccaattcattttcaacagctcacaaccaattcagtggagatgcaccacgggaatgtagctaagcaggtc

SEQ ID NO: 373771 - DNA, 551 bp, Homo sapiens
ctttcgtctacaaactcatgtatgcaaggcatgccactttatttctccataaaggaaattaatttttacttatagcttctagtatgttttgtgacacaaatataaccttttagattagtttaacatcctctccttcacctccagtgatttaactaatttcttagggacttaagtgatattaaggcctaggtcagataaagggagcccttctaattctcaacattgaaatgcttaatcctttgagtctgagaagaaggttttgagtttgcaaagaaaggcaaagatccctgctatcaccatttctgttcattctcactttagatctcctagccaayatagtaaggcaaggaaaaaaaaataaaagcataagaattacaaaagaagcagcaaaatgatgtttatttactatgatataattgtgtttatggacaataaaaaagaatcttccaacgaattatgacttattaacacaattagcaagattgttggatatgaaataagtgcagataaatcatttcaatttctattctccagcaacaaagctttaaaat

SEQ ID NO: 373772 - DNA, 551 bp, Homo sapiens
ctttcgtctacaaactcatgtatgcaaggcatgccactttatttctccataaaggaaattaatttttacttatagcttctagtatgttttgtgacacaaatataaccttttagattagtttaacatcctctccttcacctccagtgatttaactaatttcttagggacttaagtgatattaaggcctaggtcagataaagggagcccttctaattctcaacattgaaatgcttaatcctttgagtctgagaagaaggttttgagtttgcaaagaaaggcaaagatccctgctatcaccatttctgttcattctcactttagatctcctagccaacatagtaaggcaaggaaaaaaaaataaaagcataagaattacaaaagwagcagcaaaatgatgtttatttactatgatataattgtgtttatggacaataaaaaagaatcttccaacgaattatgacttattaacacaattagcaagattgttggatatgaaataagtgcagataaatcatttcaatttctattctccagcaacaaagctttaaaat

SEQ ID NO: 373773 - DNA, 551 bp, Homo sapiens
ctttcgtctacaaactcatgtatgcaaggcatgccactttatttctccataaaggaaattaatttttacttatagcttctagtatgttttgtgacacaaatataaccttttagattagtttaacatcctctccttcacctccagtgatttaactaatttcttagggacttaagtgatattaaggcctaggtcagataaagggagcccttctaattctcaacattgaaatgcttaatcctttgagtctgagaagaaggttttgagtttgcaaagaaaggcaaagatccctgctatcaccatttctgttcattctcactttagatctcctagccaacatagtaaggcaaggaaaaaaaaataaaagcataagaattacaaaagaagcagcaaaatgatstttatttactatgatataattgtgtttatggacaataaaaaagaatcttccaacgaattatgacttattaacacaattagcaagattgttggatatgaaataagtgcagataaatcatttcaatttctattctccagcaacaaagctttaaaat

SEQ ID NO: 373774 - DNA, 493 bp, Homo sapiens
taagattaatacaaactctctagatatgacatcaaaggcttacaaactatttaggttgaaccgtatgtccttgctggggttttttgtcatgtttgatggacagaaacagtaactctatgtggctcaacctgacagaaaggaatagattgacagatttgatcagaaataacctggacatgtatatgacagagggttaatgatgacatattgagatatccatatgtaacacatatattatagaaatcttacctatcaagaaaaaacgtgaaacctaaaaggaaaagaaaataccagtgcccaacaagtataagcagaaatagtccgctacaatgataatcaaagaaatgcatactaacmccataagaacatacttctcttttggttagcagattggtaagactcatgtcaagttctctcctcaccaaacttatcctgcttaggttaaaaaaaataaaaataaaaataaaaataaaaaaaccaccaacgaccattt

SEQ ID NO: 373775 - DNA, 493 bp, Homo sapiens
taagattaatacaaactctctagatatgacatcaaaggcttacaaactatttaggttgaaccgtatgtccttgctggggttttttgtcatgtttgatggacagaaacagtaactctatgtggctcaacctgacagaaaggaatagattgacagatttgatcagaaataacctggacatgtatatgacagagggttaatgatgacatattgagatatccatatgtaacacatatattatagaaatcttacctatcaagaaaaaacgtgaaacctaaaaggaaaagaaaataccagtgcccaacaagtataagcagaaatagtccgctacaatgataatcaaagaaatgcatactaacaccataagaacatacttctcttttggttagcagattggtaagactcatgtcaagttctctcctcaccaaacttatcctgcttaggttaaaaaaaataaaaataaaaawaaaaataaaaaaaccaccaacgaccattt

SEQ ID NO: 373776 - DNA, 493 bp, Homo sapiens
taagattaatacaaactctctagatatgacatcaaaggcttacaaactatttaggttgaaccgtatgtccttgctggggttttttgtcatgtttgatggacagaaacagtaactctatgtggctcaacctgacagaaaggaatagattgacagatttgatcagaaataacctggacatgtatatgacagagggttaatgatgacatattgagatatccatatgtaacacatatattatagaaatcttacctatcaagaaaaaacgtgaaacctaaaaggaaaagaaaataccagtgcccaacaagtataagcagaaatagtccgctacaatgataatcaaagaaatgcatactaacaccataagaacatacttctcttttggttagcagattggtaagactcatgtcaagttctctcctcaccaaacttatcctgcttaggttaaaaaaaataaaaataaaaataaaaawaaaaaaaccaccaacgaccattt

SEQ ID NO: 373777 - DNA, 583 bp, Homo sapiens
tgggtttcctcagggaattctgacagttagacaatatattagggaggcagaatgcctgatatgagccctggttctgccacttgctagctaaatgaccctgggaaacttatttaacctttgtggtccttagtgttctcacctgtagtaccagcttcaatgggttttttaccaggataaaggaaataatatatggaaagtacatgcactagcatgatacatagaccagtgcctgaaatgtcataaaagcaaacctaaaagctagctactatttttytggattttaagttaaaataatttatacttgccaacataaaattaacttccatttcaacttaaaagacatctagtgattcaggataatcatccagagtttttaatccttcaggtagtttgtctcaatattgggagagatcaagaagctcaatctaagtttttctttaaaatcagccatccttatatgtgaagaaaacgtggagaatacaacacttgatctgtctaatggcctaggagactcgatcagatggccttacaggttgtctctcagctcgcctctcagaatctgagcctaataaacgcagtactg

SEQ ID NO: 373778 - DNA, 587 bp, Homo sapiens
aatgctgagcaacttcaggaaagtggaaatattactagcgtaggctctcagtttggagggtacagargaaggccttcaaaattcaactgctggacttcaatgtacaaaaaaactacaactccagaattacagaatgtgtcatttactcagaaaaaaaaaaaaagcctggactattaatgctataatacaattgatatacagccatgcactgtatatatcaattgaataagatattttgtttctcacagcagcaacataagacctatacatgtgttattttcattaacccatttaataaatgaggaaatggtaattagagaggctaagcaatgcgcccgatgtcacatacgcagtaacagctggaatttggattttggaagcagctactgtaaaattgaggtagcaattcttattaaacccttgctcagtttgctcagatatttacaggtattacaaaatacaggtaccaatgagcctgaacttaaacttctagagggcagcagatctgtgttaactaccccttatcaatttagaattggactcagtcacagaaaatactacatattaaatatttttaaaatgttaaa

SEQ ID NO: 373779 - DNA, 587 bp, Homo sapiens
aatgctgagcaacttcaggaaagtggaaatattactagcgtaggctctcagtttggagggtacagaagaaggccttcaaaattcaactgctggacttcaatgtacaaaaaaactacaactccagaattacagaatgtgtcatttactcagaaaaaaaaaaaaagcctggactattaatgctataatacaattgatatacagccatgcactgtatatatcaattgaataagatattttgtttctcacagcagcaacataagacctatamatgtgttattttcattaacccatttaataaatgaggaaatggtaattagagaggctaagcaatgcgcccgatgtcacatacgcagtaacagctggaatttggattttggaagcagctactgtaaaattgaggtagcaattcttattaaacccttgctcagtttgctcagatatttacaggtattacaaaatacaggtaccaatgagcctgaacttaaacttctagagggcagcagatctgtgttaactaccccttatcaatttagaattggactcagtcacagaaaatactacatattaaatatttttaaaatgttaaa

SEQ ID NO: 373780 - DNA, 587 bp, Homo sapiens
aatgctgagcaacttcaggaaagtggaaatattactagcgtaggctctcagtttggagggtacagaagaaggccttcaaaattcaactgctggacttcaatgtacaaaaaaactacaactccagaattacagaatgtgtcatttactcagaaaaaaaaaaaaagcctggactattaatgctataatacaattgatatacagccatgcactgtatatatcaattgaataagatattttgtttctcacagcagcaacataagacctatacatgtgttattttcattaacccatttaataaatgaggaaatggtaattagagaggctaagcaatgcgcccgatgtcacatacgcagtaacagctggaatttggattttggaagcagctactgtaaaattgaggtagcaattcttattaaacccttgctcagtttgctcagatatttacaggtattacaaaatacaggtaccaatgagcctgaacttaaacttctagagggcagcagatctgtgttaactaccccttwtcaatttagaattggactcagtcacagaaaatactacatattaaatatttttaaaatgttaaa

SEQ ID NO: 373781 - DNA, 579 bp, Homo sapiens
taaacgctattttctggatgtagagctaaaactgttcgattattaacaaaattataatgtactgtttacacatagcattatttttcatatgtgyatatatacacatacacatatgtgcacatgtgtatatacagggagacaaacagacaaagttcatctgagtatgacagaaagttccctattgaaaaatatatacgttttgcttctagtagcatagcagactagttttacacatgcacacacaaaaaccacacaaacacacataccaactcagtaacaaggaagaactaaaaatggtggaactttttaaaaggcattttcacacagagctgagttattagggaaatgaggagaattccttggaggccagaaatgacaaagggtggacacagagaggtacacagcactgaagccagtgtttactctgggtacatcagccaatcctgagttgactcagagtctagatttttaaagaaaatcaaagaaaaaagttgagggcccaacagataggcagtcagacagaagacctgcagatatgaaactggaagctcccaatggttgagctacaaaaataaaacc

SEQ ID NO: 373782 - DNA, 579 bp, Homo sapiens
taaacgctattttctggatgtagagctaaaactgttcgattattaacaaaattataatgtactgtttacacatagcattatttttcatatgtgtatatatacacatacacatatgtgcacatgtgtatatacagggagacaaayagacaaagttcatctgagtatgacagaaagttccctattgaaaaatatatacgttttgcttctagtagcatagcagactagttttacacatgcacacacaaaaaccacacaaacacacataccaactcagtaacaaggaagaactaaaaatggtggaactttttaaaaggcattttcacacagagctgagttattagggaaatgaggagaattccttggaggccagaaatgacaaagggtggacacagagaggtacacagcactgaagccagtgtttactctgggtacatcagccaatcctgagttgactcagagtctagatttttaaagaaaatcaaagaaaaaagttgagggcccaacagataggcagtcagacagaagacctgcagatatgaaactggaagctcccaatggttgagctacaaaaataaaacc

SEQ ID NO: 373783 - DNA, 579 bp, Homo sapiens
taaacgctattttctggatgtagagctaaaactgttcgattattaacaaaattataatgtactgtttacacatagcattatttttcatatgtgtatatatacacatacacatatgtgcacatgtgtatatacagggagacaaacagacaaagttcatctgagtatgacagaaagttccctattgaaaaatatataygttttgcttctagtagcatagcagactagttttacacatgcacacacaaaaaccacacaaacacacataccaactcagtaacaaggaagaactaaaaatggtggaactttttaaaaggcattttcacacagagctgagttattagggaaatgaggagaattccttggaggccagaaatgacaaagggtggacacagagaggtacacagcactgaagccagtgtttactctgggtacatcagccaatcctgagttgactcagagtctagatttttaaagaaaatcaaagaaaaaagttgagggcccaacagataggcagtcagacagaagacctgcagatatgaaactggaagctcccaatggttgagctacaaaaataaaacc

SEQ ID NO: 373784 - DNA, 579 bp, Homo sapiens
taaacgctattttctggatgtagagctaaaactgttcgattattaacaaaattataatgtactgtttacacatagcattatttttcatatgtgtatatatacacatacacatatgtgcacatgtgtatatacagggagacaaacagacaaagttcatctgagtatgacagaaagttccctattgaaaaatatatacgttttgcttctagtagyatagcagactagttttacacatgcacacacaaaaaccacacaaacacacataccaactcagtaacaaggaagaactaaaaatggtggaactttttaaaaggcattttcacacagagctgagttattagggaaatgaggagaattccttggaggccagaaatgacaaagggtggacacagagaggtacacagcactgaagccagtgtttactctgggtacatcagccaatcctgagttgactcagagtctagatttttaaagaaaatcaaagaaaaaagttgagggcccaacagataggcagtcagacagaagacctgcagatatgaaactggaagctcccaatggttgagctacaaaaataaaacc

SEQ ID NO: 373785 - DNA, 486 bp, Homo sapiens
agatatacctaatgttaaatgatgagttaatgggtgcagcacaccagcatggcacatgtatacatatgtaactaacctgcatgttgtgcacatgtaccctaaaacttaaataaaaaaaagtaatgcacgaatgtttaagcaaatcaaataataaaaaaaaattaatctcatttcaaagatcgagtgttgaaagaggaacaagaacgattatttctatgaaataagtactatttttactctcaaaactttacaaaaaagcttctcattcagcccaaaatgaatttaacatgttccactctaaacttgtttgagttttaagagtgccagtgcctaggtgtgcttcttttacctagttgggtagagagtgygtaagaaggaatggaccttggagggagggttaaggagatgaaatggcatccatggcaagtttgttggccaaacactttttgaatacaagtatgtgcaatactgtgtcaagtgttaaaa

SEQ ID NO: 373786 - DNA, 623 bp, Homo sapiens
tctcagtcctatactgactccttctggtacccttccttacttccaagaggccccagagttttgacccatttaaagttcctttgtaagaagttctctttcctatcaaacaacctcaagagtaggatacagttgcccaagaacaagatattgttgttctctacacagktggcacgtggactttgtcttaatgtgttctggctgctatcacaaaacaccatggattggatggctcacacaacagaaatctgcttcttacaattcgggaggatgaaaagggaaagtctaaggtcaaggtgccacccaattcagtttccagtgagggttctcttactgctttatagagggacatcttctggctgtgttctcacgtggcagagacagagaacgtaagaaggcatacactctggtgtctcttcattatcttaagagggaaccagctcaattggattagggctccaccctatgacctcttttaacttttatcacctcttgcaggccctatttccaaatacagtcacgttgagggttagggcttgagcatatgaattttggggtaacacagtcattccctggcagacttttcctttttgagggtgttgctcctattcatgattagaaatcag

SEQ ID NO: 373787 - DNA, 525 bp, Homo sapiens
agtgatcacagccagctttactatgtatgtatgtatgtatgtattataacacttcacaggaaagactgatgacacaaagtttacaggcatacattctgggcagtgaagaacaaaggcaatggtaaaggtaaagacaaaccaagaaatcaaaaacaaaacaaataatatacttatttttaatcagatatataagagcagtgtgagttttatggttgaataaatccacaaatcaggtgtccacaaatgttttctctcaatggccagctaggaaatatttaagctttacaggccatacaatctctgttgcaactattccactatggcactgcagcagaatgcagccataggtaatatgtataggaatgagtgtggccatgtttcaataaaattttctttgagratactaaaatttacatttcatgtcattttcatgtgttattaaatattattctccttttgattttttttcaatccattaaaaaaattttaaataccatcccagtttgtgggctctaaaaaaacagc

SEQ ID NO: 373788 - DNA, 631 bp, Homo sapiens
gttcataaatttgttaaatgatgaatatccctcaacactactgccatttgcactagaaatcaaatttttaaaaatttacttcttaatgtatgttaataaggcactgaatggcgcttatatatggaggagatgttgaagagtgtgcattgcaaaacatgcaaataagccaactgtgaaaacagtccttttcatggtgcttctgtatgcttgtaacaggcattcctggtwgccctatcaccaaaagcctgcaaagttaagttagacttgggggctctgctttgcaattcattgctgatcaggattacaagtttaattttaggatccattggatggattacagagctgcctaaacttcccttatgttgtggcttaagagagtccttccagaagaaaccaggatttaataagattatctttgaacttgtcttaactaaatgtattattggattactactaatgaacacactaaattttttagaccatggttaggaaattagctaatttaggaggcagattcacttaagcataaaataaaattgaatgaaatctccagagaactcagttccacttttgtgagaaattgaaaattttctttgctggtggttttaattgtgtaaggcacttgctcatt

SEQ ID NO: 373789 - DNA, 631 bp, Homo sapiens
gttcataaatttgttaaatgatgaatatccctcaacactactgccatttgcactagaaatcaaatttttaaaaatttacttcttaatgtatgttaataaggcactgaatggcgcttatatatggaggagatgttgaagagtgtgcattgcaaaacatgcaaataagccaactgtgaaaacagtccttttcatggtgcttctgtatgcttgtaacaggcattcctggtagccctatcaccaaaagcctgcaaagttaagttagacttgggggctctgctttgcaattcattgctgatcaggattacaagtttaattttaggatccaytggatggattacagagctgcctaaacttcccttatgttgtggcttaagagagtccttccagaagaaaccaggatttaataagattatctttgaacttgtcttaactaaatgtattattggattactactaatgaacacactaaattttttagaccatggttaggaaattagctaatttaggaggcagattcacttaagcataaaataaaattgaatgaaatctccagagaactcagttccacttttgtgagaaattgaaaattttctttgctggtggttttaattgtgtaaggcacttgctcatt

SEQ ID NO: 373790 - DNA, 563 bp, Homo sapiens
ttactggaaaagtttgccgaccctcatcctacagcmgaactgtgcagtaaaatatagtgtaattttacattttaaatgttatgaaatatatgcatcacataaatacatataagtttaaatttctaggagccaaataaaaaataattttaatattttaatctaatatatctaaaagcattaaaagttactattgagcaattttatgttttttaaaaaaaataattctttttaattttacattccattttaagtcatgagaaatctggtgtgtttttggcacttatcacgtatgtcttttgggaccatccacagttgcaatgccctgtagctaatagtggctcattgctggcatattgcatggggcctgttcagaggtccacatgtggctgcagcattttgaggagagaagtggtaataagatcaagtcttggccaggtcacgggactaaacacaggccaattacctctgggaaccccatctggcaatggctaattccagagcctatgtgagacaaactggggaataaaaaccaggtaagataaagagtaggaaatttagaacat

SEQ ID NO: 373791 - DNA, 603 bp, Homo sapiens
gtcttgtggtttcagtgctagctttgctacaatatattggaggagcaggtagatttctaaggtttctgactctaggcccagactcctgcacagcctctctggacctgtctgggactcaggaggaacttgccaccctaaagggaagaacacaaatctgactggcttcaccacctgctaattgcagagtcctagggcttwaagtaaacataggcaatagcccagtagtggctacagcaggccttaggcaagacccagtgctgtggtggcttcaggtctgacctagtgtagtaccagtggtggtggggccacaggaatgcttgtgtcacccctcctccagctccaggcagctcagcacatagtgagaaattccatttgtttgagagaaagtaagggaagaaaacaagaatctgcatctggtaatccagagaattcttccagatcttacctaagaccatcaagacagtatctctacaaatctgcaagaaccacagcattactgggtttggggtgccccctaatgcagatatagctaaagtgaccactggatcgcaacacccaagtctctttaaatacctggaaagccttcccaaggacaggtacaaa

SEQ ID NO: 373792 - DNA, 580 bp, Homo sapiens
attttaacatccctgccctccaaatcaataatttatatttatattcaatacaaaagtatttgatcattgagaaatatttrtttctttaaaaaaaacctattactctgcttgtctttatacattttgaaggtctaaatttagaggattatttgagatgttgtcagcatgaattcaggaaaattgaggggaagattaacagggttgtttatacatctaatttaaacatcaatttgtgattactacatttatccaggcttattagcaattcaggcagaatctagttgtcataactatttaatgatcagttaccatttcattaaaatacctattctaaagatagtatttaacactcttaaagaacctaatcattttctttttgtaggatcagttggaggttaggtaggacttggtctgactcagaaggaaaattattttacacctcagcaaacaaagtaatgggggttttttgacataaatagcactgctgtgctctgtaattgaagttcaaaaatggacgatgaaaccacagaagcagaaaaccaaagtaagcttgcaatgaaaagaaatacaggccacagtt

SEQ ID NO: 373793 - DNA, 580 bp, Homo sapiens
attttaacatccctgccctccaaatcaataatttatatttatattcaatacaaaagtatttgatcattgagaaatatttgtttctttaaaaaaaacctattactctgcttgtctttatacattttgaaggtctaaatttagaggattatttgagatgttgtcagcatgaattcaggaaaattgaggggaagattaacagggttgtttatacatctaatttaaacatcaatttgtgattactacatttatccaggcttattagcaattcaggcagaatctagttgtcataactatttaatgatcagttaccatttcattaaaatacctattctaaagatagtatttaacactcttaaagaacctaatcattttctttttgtaggatcagttggaggttaggtaggacttggtctgactcagaaggaaaattattttacacctcagcaaacaaagtaatgggggttttttgacataaatagcactgctgtgctctgtaattgaagttcaaaaatggacgatgaaaccacagaagcagaaaaccaaagtaagyttgcaatgaaaagaaatacaggccacagtt

SEQ ID NO: 373794 - DNA, 661 bp, Homo sapiens
ttatgtaccaattttctaaaaaagaaaactattgataaattcaattttgttaaaatgtaaaacttctgtttatcaagaggaaccatgaaatgataatccaaaaacagagaaaatatttgctgtatatataacaaacaaaactgcacctagaatatgtaaaaagaactcctataaatccataagacaaaaacaaaaaatctaatagaaaaacacacaaacatttcccagaagaggaaatgggaatgccaaataaacatatgacatgatgctcagactctttagtaagcaaggaaatgcaaattaaaatctcaaggagataccatttcacacctgccagactggcaaaatttaaaaagcctgacaatcttcttgacaatattgaggaggatataaagctccatgaatttttatgtaccactgraggaaaatgtaatttgatataatcactttgggaaacaacttggtattgtatagtagagttgaatatgagaatattcaatgaccaagtataaacctatgactaattctaagtgtaaaccccagaaaaactcttgcacaggtgtactaggagacatgagaaaatgtccacaaaaacatcagtcattatagcaaaaaaccctaagctcagatattcatcaacaagatgacagagcattaaatt

SEQ ID NO: 373795 - DNA, 661 bp, Homo sapiens
ttatgtaccaattttctaaaaaagaaaactattgataaattcaattttgttaaaatgtaaaacttctgtttatcaagaggaaccatgaaatgataatccaaaaacagagaaaatatttgctgtatatataacaaacaaaactgcacctagaatatgtaaaaagaactcctataaatccataagacaaaaacaaaaaatctaatagaaaaacacacaaacatttcccagaagaggaaatgggaatgccaaataaacatatgacatgatgctcagactctttagtaagcaaggaaatgcaaattaaaatctcaaggagataccatttcacacctgccagactggcaaaatttaaaaagcctgacaatcttcttgacaatattgaggaggatataaagctccatgaatttttatgtaccactgaaggaaaatgtaatttgatataatcactttgggaaacaacttggtattgtatagtagagttgaatatgagaatattcaatgaccaagtataaacctatgactaattctaagtgtaaaccccagaaaaactcttgcacaggtgtactaggagacatgagaaaatgtccacaaaaacatcagtcattayagcaaaaaaccctaagctcagatattcatcaacaagatgacagagcattaaatt

SEQ ID NO: 373796 - DNA, 565 bp, Homo sapiens
tagatagaaagatttcccttctaaagtttgtcctagttctaaaataattcccaggagggaaaactgatgctttacacattgattactcctcttcttaattcccaagggtcactgagtatgtatcaccatgttgtgcttaattgttctcaaaatcacttatactcagtttcaaagccacatactgaagccatatatacaagactcagactaaatatatcatatggcaaaacgtaatattataaaaatatatttaacgaatcattttcttggttatctggttaacttttctctatgtatatcttttaaagatatcacatatcaccttattcaaacgtcaactgctgctcagatgataaggggaaagawtacatgaagatgatttttgtgtttggcaatagggtgccagggagaaacctagtttttaaattccagctgggctgtgagccagttgcttcattataaagtgctttattattattattataagaactgtctacctaataggtactaaatgaaacactatatacacataagctattaatgtagtacctagcatatagtagat

SEQ ID NO: 373797 - DNA, 631 bp, Homo sapiens
aaatattaaattcctttctatttctgtggaaacatggatttaccctcaagaggttgtctccgtagttagaaaatctgattatcctccttcaaattttgctctgaatgaaacagcgtttgtgtttatgcccctctttactctgaaccattacaggtaatttccayagctttgggaataatatagcaaactccaaatgtctacataaaacaaaaaatcatgtataatttagtgtcgcaaatcaacacctacactgtaggtttttaaattactttctatgaaactgtagtttaaaaaatttacacatttgaaaaaaaatcaactgtagttattttaatcacacagaataaaagttattgcaaatactcttcaacatgtctgaaatcatagaaatttgctgataaatattagtaaatacttcatttatcctcatcacctactattttatgaccagattgaaaggccaacagactatttgagtaagaaggactacctaattgatatgaaagtctaaaagccaccaaaatattctacgagcaatactgaacaaaacaaatacgcaagatctgcaatgcatgagcttaaagtaatgagatcaaataattctaaaatgctgtttgatataatttcattt

SEQ ID NO: 373798 - DNA, 631 bp, Homo sapiens
aaatattaaattcctttctatttctgtggaaacatggatttaccctcaagaggttgtctccgtagttagaaaatctgattatcctccttcaaattttgctctgaatgaaacagcgtttgtgtttatgcccctctttactctgaaccattacaggtaatttccatagctttgggaataatatagcaaactccaaatgtctayataaaacaaaaaatcatgtataatttagtgtcgcaaatcaacacctacactgtaggtttttaaattactttctatgaaactgtagtttaaaaaatttacacatttgaaaaaaaatcaactgtagttattttaatcacacagaataaaagttattgcaaatactcttcaacatgtctgaaatcatagaaatttgctgataaatattagtaaatacttcatttatcctcatcacctactattttatgaccagattgaaaggccaacagactatttgagtaagaaggactacctaattgatatgaaagtctaaaagccaccaaaatattctacgagcaatactgaacaaaacaaatacgcaagatctgcaatgcatgagcttaaagtaatgagatcaaataattctaaaatgctgtttgatataatttcattt

SEQ ID NO: 373799 - DNA, 457 bp, Homo sapiens
tattgactatagttaccctgttgtgctatcaaatactagatcttattcatattttctatttttttgtacctattaatcatccccacttctgccccattccccccactacttttcccagactctggtaatcatccttctrctctcgatctgcacaagttcaattgttttaatttttagctcccacaactaagtgagaatatgcaaagtttgtctttctttgcctggcttatttcacttaacgtaatgacatttagttctatccatgttgttgcaaatgacagaatctcattttaatggcatattttgatggctcaatctcattctttttatgcctccattgtataataatactccattgtatataggtaccacattttctttatgcattcacctgttgatggacacaggttgcttctaaatcttggccactttgaatagtgcaacagtaagcatggga

SEQ ID NO: 373800 - DNA, 559 bp, Homo sapiens
actagctgacccactctgcaggagtcggcagccacagaagtcaccaaatgsaggatgaacaaagctatcaccctctttccccaaatataaagcagctactcagaaagccattctctcagcagagcatgaggtggaaccagaaggaaacgagcagcccagttatctagcaggctcttcttccacgacttctgtctctccctagagcttaggcctagtctctctaagggattaggccttgaaaaagaagaggaagtgaggatctagagaccatattgtcctactgtcaccaaagtccaagcagccaaggccatagtctactactgggagaaaagaagagaacttcaaatctgacctgacactggagtataatataagcaggaatgaccagaggttacagtatcttgccaaaatggactagaaggaaattcaacatggaaattttaaagctgtgactgaagaaataaaaatataatgtttttgtctccatgtatttcatggccatgtagtctttaaacaacgttagaaaggaagaataaaaggactaatggactgttaatgt

SEQ ID NO: 373801 - DNA, 570 bp, Homo sapiens
gaagtctattctggtttaatttcttgagtctttgttgaactgtgttcttaaacctgagcaaaaacatacctttgccacccattaaatgtaaatttatagttcttgtaaccttgggcaagtcttttattctgtgccagcatccatcctattatgtgtaaaataatgggtttctatatgctcattttagctgtaaaaactctaaggttattattgagtaaattcataatctgaatctcttttctcttggaagaaagccaactctgcagcttcttatggacagctgttgccacrattatcttgttttcaaaaatgaatgatctacagccaaccaagagtgggtggttaaatcaaaagaaaaaaaatcgatttattgcttctcctttgatctgcttccaagatctgagatgtgacatattcagtaaggatttcagcccatctgaaggccattctatctcttttctcttttattcagaaggatggtgaccatgaatgcagaaaagagagaaagtagtaagtaatcttcaaagttacaaatgctcaacatttgattggagagcatctttttgagga

SEQ ID NO: 373802 - DNA, 604 bp, Homo sapiens
tcttaatgtcatccaataatttgtctcaaatttttttaagtttgtttgaatatggatccaatattcatacattgcaattagtcaatatgtttcttaacacttttcatctataggtccccttcccctcatctctttccctcagcagtttatctgatgaaaaacttgtttatttgtcccatagagtttcccagaatctgaatttttttggttgcagcctcaaagtgtcactaacatgttcctctgtcacttatattttctacaaatttggaaattcaatctatagatttaatcaggttctggatcagttttttttgtaagaacacttcataggtgctgttgtatactttgatcagaaggttatataaaaccagtttctccttgaaaayaccttaaatgtctgatactaggagaatagttatataataatagttcatcatttacagtggaattttatgcaatcattaccggtcatagtttttaaagaatactgagtgatataggaaatgctaatcatataatgttaaggaataaatgagaatagaaaatacacatggggctgggcgcagtggctcatgcctgtaattccagcactttgggaggccaa

SEQ ID NO: 373803 - DNA, 555 bp, Homo sapiens
gtatagtcattattctcatatgttttcacttctctctggaaaaaaagtttcattctggtcatcactgtacttacatacctttcaagggtgggcagttctcttatctctgtcttacccctgagttgaatgacatgaggtagagctggggaaagagcgtatcgagtaatgagttagaaggtgaaacaggtaccagccagagcttctctatgccacgtagcagtgaggagtggggcgcatctggcattatttcttgatttgtccataggattcagacagcaatatgttcccacagcacctagttttacttgctttgaaaagaacactactttgtcaatatcattttatcctttaaaaatcttgccctttaacttgaatagcgcctaccaaggcatttaatgtacagttcacattaaaattatcttgacagttggatattaarcaatgaattccatgaactggaagataacagcaacaacaacaacaaaactcataagtgctttctgcttatctctactatctcaactcacttattgtcatttgatggttgggttagcc

SEQ ID NO: 373804 - DNA, 570 bp, Homo sapiens
tcaaccttaacatgccgaaaagtaaaatggcttctttcactcaaatctgcttctcctccttgttccttatcattgttaacaaagctgtcatgctcttagtctgcttcccagccttccctgtctcactgcgacatcattatccaccaagctgctagagccaggagtgayggtagcatcctttctcttctttcctcggttcagttaagcaataagaactactttgagaaaataatctaaatatttctatttctccccattgtcatgactaccaattgtttaagggtctagaacttagaaccaattgaaacagaagatataggagagaatcacatggagatcaaaatacctttactatggctaaagctgattgaaaatcttggcatagatatggaataaatattaatgtctccaaaatcttctcaaaatttatactatggcacaaacaagttaaatgtaggtctcttcctcaccatctatcttaggtctctttctcatattttcctccaatctctactgctgggaaggcgagggacatggaggggagagatcacctcaagtaggcacaggtaa

SEQ ID NO: 373805 - DNA, 494 bp, Homo sapiens
aagctgtagactaattgaagaattagtctgtaggcaaataagtacaataagatgttctgagagaaggttgtgtatgacactgcaatgtaggaartgtgttgaatttgtgcttgttgagtaaaaaagtaaattgtatttgctaaatattttgtcttcattatcaactgatctgtataaacaataaaagtattctattatcttcattgtacctatgaaaatatattgagtagctgcatgctaatctttagatttactaattctaacttctgcccaagtttaagcactataattctgatatctaactctgttaccttaattatttgaaatgaaattaacaattaacatctgttttatgtggttatactgtcctctccacagccgtaattttacttaaaaacataaaccatatcttggcagaaaaagctattgcattgaacatattatgggcttaagacattgtacttaatttcagtttgtagaattatttatgatcc

SEQ ID NO: 373806 - DNA, 580 bp, Homo sapiens
acaaaattaaaccattgattcttattccatgtcatgaaagggtaaaataatcatgtttttttcctcagatcattggcattttaaagcagcctaaaataatgtcaacctgttggcatgatccaatcaagcaaaatgcatacctaaattcatgaacaaaaaaaatgtgttgattctaaattgtgattctggtatttccttggagaagcggatgtaacttaaaaccaatatgcctatcttggctttactgaatggtgctttaggcatttgctttctataactggattgactaggaaatgaacttgagaaggtgagaattttagatgaagatctgaaagtatgactaagtgagagatttaaaagtagagattgaaaattatgtaaaataaaccttcataatgtcacagcatcacatattatcaccrtagtgacaccaataaaaaatatcctcaagttctttagtcatggggaataaaagaatgaaatagtgtagcatgctacagcactacaatttgatactattaagatttcacagttgctgtcagccaggtcacagtaagggttaaaacacttatcagttgtg

SEQ ID NO: 373807 - DNA, 550 bp, Homo sapiens
tggtataacaatccttcctgctcacttacttgctgtgtgtccctcggtgtgtcccctagtctcacagaacctcagtgtctttagctgggaaatgaatctaatactatttattccatgatggttagtttaatatgtcaatctgactaaactaagggatgctcacgtaactggtatacattcctcctaagtgtatctttgagagcatttctgaaaaagattaacatttgaatcaatagactaagtaaagaagattgctctcattaatgtggttcaacgttagtcaatctgcttaaatagaacaaaagtgcagaaggagagcaaagtctatcttctcgagctgagacatccagattctcctgcccttggataggaggttcttgttatggggtcgtcggactctgggacttataccattccctccaacatgtaagccaattcccatgtrtatatatatatatatgtatgtgtatatatgtatgtatgtgtatatatatgtatgtatgtgtgtatacatatacacacacacacacacacatatatatgtgtatat

SEQ ID NO: 373808 - DNA, 582 bp, Homo sapiens
atgaataaaagttatggaggcatagatttcaccttattttaaggtcaaattttaatatgatatttatacttatttagcaccaataattcttgaaatcaacttgattagcattgaaatgaatgtactttataatagaattgtaaataaaattgtctctttaacaaaatggggattggggtactgatcctcaacacttgaaaatctacatagaacttttgactccccacaaacttaactactaatagaccatgttgcccaaaagccttaccaattaatcaattaacaaatattttgcaatttatatgtattatatagtatatttttaccataaagaaagctagagaaaagaaaatgttatgaagaaaatcataagaggaaatatattktagtactgtattgtatttattgataccacaagtttagtcatttgtttacaagatgaatctctgaaatggcaggtaactgcagctgcaaatctcagtctatggtacatatcaagcaattcagcttttttttgcaacgccatgacttctctgcttctcggaagcacttccagcatcactagtggcacttcgtatgtgt

SEQ ID NO: 373809 - DNA, 586 bp, Homo sapiens
gatctgcattttattctctacctcagcatgtcttactatrttgagatttcaagattttcgttctattcaaatgttgattatttttcaaagttctagaacagaggcattaccaagtatagcaattaactgaaatataagatcattaacttacaatagtaatatgaaaataataatataacaagcttaggtatgtgtgtgtttgcatgcatgggtacagatacatgtgtgtgtatataacaatttacctttggaagaaaaaaatgttggtaaaaagaaattaatcgtagtgaatttttgtcagtttattctattaacatattgttaatattaattaaatcaagcaaggaatgactccttatattatggacaaatttttttaaagtgggtttgggcttaccaaacatataaattaatgcctcattgtcacctgagagactgtttcttttttatgttcaaaacaagaaaactaggatgtttgttcacatgtttcatctctgtcaaataaggtaataaatcaacagaaattcatgcagtatgaatttgtaaaactcagctaaatctctctagacttttgtcaagttataaa

SEQ ID NO: 373810 - DNA, 601 bp, Homo sapiens
taaagtcccatgatgggctgtctgcaagttgaggagcaaggaagccagtagtgaattggtccaagtcccaaaacctcaaaagtagagaagtcgagagtgcagctttcagtctgtggccaaaggcctgagagtccctggcaaaccactggtgtaagtccaagagtccgaagacgaagaacttasagtctgatgttcaacagcaggaagcatccatcacaggacaaagttgaaggctggaagactcagcaagtctgctgatgccaccttcttctgtctgctttttctagccctagccctagccctagcagcagagtggatggtgcccacccagattaagggtgggtctgcctctcttagtctactgactcaaatgttaatctccttttgcaacatcctcacagacacacccaggaacaatgctttgcatccttcaatccaatcaggttgacacttaatattaaccataacatcagggaagccataaatgctgaggatggttaagcaaagaaaaaaaaatggtttatcttcaaactttaattacctgtccaaaatgagaaggtaatatatcagaatacaaaaagatagggtctcaaacaattac

SEQ ID NO: 373811 - DNA, 589 bp, Homo sapiens
ggcatatcagcttggatggttatagattcatctattcttattctgttggcaagttgtattaataattctcttaaaaattggtaatgatgactgagaccctaaaatatgacccatccaatagccctaataatgcatttctttagacaggacctgcctgtaccatgagtgtatggtcgaaaacagggatgcaccagtaatcacagtgggaaaactgctaaaggaatgattaaaggaccttgttaatcacaacttgagtaatttatcatagcagtagacagtttaggaagtatagtccaggacaacaaccttgcacacagcaattrgaagtagaatagcatgaaggaactcagaacatttcagtgaagaaaaatgtgtaaaagaaaacgtcttaagtgttgacttaagtcataatgactgtgaatatacatatgagatactgaggtctaaacaaggatgaacctgcattgactttgccttagataatcaagtgttcttaaccactgtttttagacttaggaaaaattagaaattctagtattataaaaaagttctcctctttaactatgacactttttttgcttgcttattg

SEQ ID NO: 373812 - DNA, 621 bp, Homo sapiens
tgtaatgtctccttttccgtctttgattttatttacttaattcttctttccttttttcttagtctggctaaaagtttgtcagtattgtttattgtttcagaaaatgaactttcattttattttctattgttttcttcattttaatttcattcatttctgctctgatctttgttatttcttttcttctattttggatttggtttgttcttgtttttctagttttttaagatgcctcataagtatgtttatttgaagtttttctacyttttttaatgtaggcacttatagccataagcttccctcttgacactgctttcactgtatctcataggtttcagtatattatgtttctgttatcgactgtttcaagaaattttttcatttccttcttaatttcttcattgatccattggtctttcaggagcatattgtttaatttccatgtgtttatgtagtttccaaaatccttcttgatattaatttctaattttatttccttgtggtcagggatggtacttgatggtatttcaacttttttgagtgttttaagacttgttttgtgacctaatatatggtctatccttgagaataatccatgtgctgaggaaaaaaatttgtatt

SEQ ID NO: 373813 - DNA, 582 bp, Homo sapiens
tcacgtaaaactatcattaagacagaaaacatcagtttgtcagaaatttaatgctgattttgaacagaagctgtttaatattcagtgatgcatgatttcataaggttaaatgaagctataaattaatcaaatacaaaaagagcagcttcaaaattcataagttagtaacttggaagaaaacttcaaaatgcttttaagaaatgctataatgctsttaatggcataggttataatatcatgtgcaaaaatatggatgactttgctgagttgaaacataatataaaagagttagactccaaatgtaaagaagttttaaaaatatttaaccaattctctttatatgtaatcattagttttaggtatacacaagagtgatttttttttaattccatgagcaaattagtctaaaaaaactcttccaatgagtatacaacataattatagctttgaaagtaaaacattgtgtcattgtttaattagcatgtatcactctttcttattagctgataaactgagtgttttgtcctacaatcaaggcatcttaatgaatttgatataatcagcaagaaagcggggggggaa

SEQ ID NO: 373814 - DNA, 553 bp, Homo sapiens
atccttcaatttagcatcttccatattgtttctcttattttctaccctggacaatgaagaataagggtatttataattttattttaaaattcccaaagtgtaaatcttctggatcatgggagcatacagaagaaacatctaaaccaattttgcaggtgcaggaaagctttccttctgaagaggaagtttgacattttaagtaggccataaaggtgaatagctaaagaaagataatccaaagagagaggacggcatacaaaaaaagctctsggagagaaagaaatttgtaaacatcattcagatcttactttattcagaattttagattagccaacatattctaagattttattgagtgcctccagtatgcctttcttttatttatatcctttatttttcattatcccacattatcttcctactctataattttctttgttgattaaattttaatcatgcttctttcagaattgtatctgtagtaatagatgtctttttttggcttaaggctgttctgttctcaaatgatagaatcctgatatattctcttttc

SEQ ID NO: 373815 - DNA, 541 bp, Homo sapiens
gaacccacactgcccaggtgtctatcagaggtgggagtgtgggggctatagctctatcccaggagctttaggcttgagaagagccagtcaacagccttcagtcctgctccccaaaggaagaggccccaccacacaggaagaagagggtttcaagggctgcagttgaagtcccagccttgaagccagaaccatctagattctattattggagccctcactgcagcatttgagactttaaatatatttctttttgtgtcttcaagctcaagtttcttcatttctagagcaggatagtgatacctcaattagggtcttgaggctattctcaactgtctgcctcccttwcctgccctttctcttggacagcagaccctggggcctgggccaggccacacctgtgcttggggctagggctgcagctgcggtaggagagggctggagtgacacagcacctgagccagtcaggcagggctgatcttgctggggtcttggctgcagacaagtgtgatctccaggatgggacccggtggagccatgactt

SEQ ID NO: 373816 - DNA, 530 bp, Homo sapiens
atacacattggagaaaggacagtttcttaagcaagtggtgctggggaaactagatatcactgcgcaaaagaatgaaattagacccttatatttcaccatacacaaatatcaactcaaaatgaattaaagacttaagtgtaagacccaaaacttataaaactcctagaaaaaaatacaggtgaaaagctcctttacrttagccatggcagtgtctttttggatatgacaccaaaaggtcagacaacaaaagcaaaaataaacaagctggcctatatcaaactaaaaaactgcttagcaaaggaaacagaaaaacctctggattgggaaaagatatttgcagaacacatttctaaaaaggggctaatatccaaaatatattatataaggaactcacacaactcaatgaccaaaaaacaaatcacctgattttaaaataggcaaaggacctgaatagttttccaaagcagacatagaaatggtcaaaaggtatacgaaaatgtgctcttatcattcatcattaggaaaaggca

SEQ ID NO: 373817 - DNA, 609 bp, Homo sapiens
accaattggagtgccagtgttgttattatggttgcccttctcttgcgaatactccagatacagttggaggaactgtcacatgtcaaagtctcaccctttcttcctattgggtgatatttttcaagaaggctccattttggccaactcatgcattcttctagtcaggctcacacatgtattaatcttaaatgggcaaaggttagtctcaaactaagaacttttttactatgtacaaatacataaaaagttgttatattcttttgtttcctccatttaaaaatgtttttgtctttatgttcctaatcaataattaaccctaagttgaaaggagggaagaagtctgacaaggtgacagagagaatacgtgtaacaaaacacaaagaaaaaatatgccartaagtcagccccactaatgtgaataaattatttccatgatccttttctgtaatcacttctgtcaagtaatcacaatgtgccctaaaacctgatagtttaaattagcaactttcattgagtgttgtagtaatttcatatttccagtcacaatagcatgatgttttatgcttgcagggcactcatttgctcatcccttcattcatttaacagcag

SEQ ID NO: 373818 - DNA, 416 bp, Homo sapiens
attctgaattctttgtcaatgacttcatagatcttcttatttagagtccattactggagctttattaatttctttggaaggtgttatgattctctaattctttgtaatcctgtatccttctgttgtctatgcacttgaagagatagtttactcttctggcctttacatgtgttcttttgcagggatagacctttactatatagttttacctgagattctggaaaggccacctgccgataaccctgggcatgcggagattattgtgagttctttaggtgtctgggctgctgcctttgctctgatgttgggtggggcctcaggctaggctctgatttccagcgagatcatttgctgggctctgctatcaggcaaagtcactgactgtatactrtgatggtatctggtcaggctggtca

SEQ ID NO: 373819 - DNA, 585 bp, Homo sapiens
ctatttttcttatctttctaattttgaattttattcagttctgtggaccactttagtgactcaggcttgttttcaaatgctgaggtttttaaaaagatgttctgggctgtggatartagctagttgaactttctgtggagggaagtggagcttgagactttctatgctgccatcttgttgacctaagcagctttctcaatctgtttcctgcttattgaatcaaagggacatttccgttttcaaatagtcgcagtctgccctagtctcttttgatattacaactctgaataactgagtccatttttttaaacaattagaattataaaattaatatttatctatagtcatacccacaattctttctgaaaaattctggcctctcttagttatggctgcagtatttgttttctattactatgctataataaatcaccacaagcatagtattaaaaaattcttaacaatagttaataatggttttaaaacaatacaaatttattattgtacagttctggaggttatagtgattagtttgcagatcttggtgataattctgtgctcctgccagctttggtgccatattgg

SEQ ID NO: 373820 - DNA, 508 bp, Homo sapiens
ttgtccattctattatcatatcagtcctgtgagatagatattattattcacattttgcaaatgaaaaatttgargcttggagtagttgataacttacctaaggatgcacagtgcatagttagtaaagccaaaaatgaaattgatgttctctttcataaaatgccattcttgttctttactccctaaataactaaagtaaagaactttactccctaaagaactaatttattattaaaatattcagaatctcatctatagatttggaaggattgcaaatatcaaggatccaataactaacatattaacagatcattaaagcagctggtagaaatggagagaaaacaattgtagaagccaaatttggaggtcaagaatgtgaccaagtttctatatggcacattttcctgataattgactgttgttcttaccatattgccctaaaatgcttcctgtgactgataattgacattatggtggcatgtgaggggcttagagaaaatgtcacact

SEQ ID NO: 373821 - DNA, 516 bp, Homo sapiens
actcattcattaaactttctatggttatcaacttaaatcaaccacatgccaaacgtcgtgctaagaactagrcatttctgtgctttctactcaaggaatccaatgtagtaaaagaaacaggtgtgaacaaataatgtgatgtagtgtgatgagtgttatgacattggcctgcaaaggaaaccaagaaattgtgtaagagggacactaaatccagacaggaaacagaaggagacttgtgaactaagcctttagaaaaagcaagagaaagtcaaggaggaaacactgaccaaatcatccaaggagaagggaaagacaatttgagaaatgatattgacaaaaggaagaatgaagccatcatttcctcatcacccaacatgtaaacttgcaggaatattttgcttctttctctcccttttacttcatatccttctggttaaactatgttgattcattcctccttttctccccactacttctgcattacctggttcagtttttaatagatgcatcttacat

SEQ ID NO: 373822 - DNA, 522 bp, Homo sapiens
gctaagaactagacatttctgtgctttctactcaaggaatccaatgtagtaaaagaaacaggtgtgaacaaataatgtgatgtagtgtgatgagtgttatgacattggcctgcaaaggaaaccaagaaattgtgtaagagggacactaaatccagacaggaaacagraggagacttgtgaactaagcctttagaaaaagcaagagaaagtcaaggaggaaacactgaccaaatcatccaaggagaagggaaagacaatttgagaaatgatattgacaaaaggaagaatgaagccatcatttcctcatcacccaacatgtaaacttgcaggaatattttgcttctttctctcccttttacttcatatccttctggttaaactatgttgattcattcctccttttctccccactacttctgcattacctggttcagtttttaatagatgcatcttacatgactgcaaaagccccacaaactcgttaatttgtttaggaattgctcccctcaagtctatcttaga

SEQ ID NO: 373823 - DNA, 497 bp, Homo sapiens
gaaacacacacatgcacatatatacacacacagtcacattcacatacacacattcccattctcaaaggagraaataaatgttggaaacaaacatggcaaacaatgtacagagtattaccccagtagcacccctcatatataataacttcattatttctcaaatgattatttcagtgctcttattttgtaagccatgataaatttcaaacatacttttaaaaaaagagacaataaccctctcattcttagtgttcacatgttactaaaaaaagacatgcaccttcctttcctccccctcttttgttatcagattcatggcattatctctgggcctgttgctctctgacatctccagcactttgcaggacccagttttttgagtttgcccttctctttgtctcagataagcccacttctaaagccaaaaggcaaatgatcaattcattttggcccccttgtaactaggactcaaacagtattttttccctagccagcat

SEQ ID NO: 373824 - DNA, 497 bp, Homo sapiens
gaaacacacacatgcacatatatacacacacagtcacattcacatacacacattcccattctcaaaggaggaaataaatgttggaaacaaacatggcaaacaatgtacagagtattaccccagtagcacccctcatatataataacttcattatttctcaaatgattatttcagtgctcttattttgtaagccatgataaatttcaaacatacttttaaaaaaagagacaataaccctctcattcttagtgttcacatgttactaaaaaaagacatgcaccttcctttcctccccctcttttgttatcagattcatggcattatctctgggcctgttgctctctgacatctccagcactttgcaggacccagttttttgagtttgcccttctctttgtctcagataagcccacytctaaagccaaaaggcaaatgatcaattcattttggcccccttgtaactaggactcaaacagtattttttccctagccagcat

SEQ ID NO: 373825 - DNA, 497 bp, Homo sapiens
gaaacacacacatgcacatatatacacacacagtcacattcacatacacacattcccattctcaaaggaggaaataaatgttggaaacaaacatggcaaacaatgtacagagtattaccccagtagcacccctcatatataataacttcattatttctcaaatgattatttcagtgctcttattttgtaagccatgataaatttcaaacatacttttaaaaaaagagacaataaccctctcattcttagtgttcacatgttactaaaaaaagacatgcaccttcctttcctccccctcttttgttatcagattcatggcattatctctgggcctgttgctctctgacatctccagcactttgcaggacccagttttttgagtttgcccttctctttgtctcagataagcccacttctaaagccaaaaggcraatgatcaattcattttggcccccttgtaactaggactcaaacagtattttttccctagccagcat

SEQ ID NO: 373826 - DNA, 516 bp, Homo sapiens
agtataaaaactaatataaaacccattataaaaactaatatttttagtttttgttgtagatatggggactttttatgttgcccaagctagtcttgaattcctggtgtcaagtaatcctcctgcctcagcctcctaaagcactgggattaaaggaatgagccactgcaccttctgtcctttgcttattctttaaatgacagtgattccaatgtgtctgtctggtgggcctagtgtggttccattctcttcttaatctaaaacattcttcctatacaattacatcaactgccaaagttcccatcgttccctctaagcttcaatatccaaatttgttgattaaatgtatcagtaaacaaaaatcatctatattgtcatcgtcacctarcaacaggcctaccttctgacaaatgccttcttagatgattttgtcatcatgaaaacctcatagaatgtacttacacaaaactagatgggatagcctactacacatctaggctatatggtctagcctattgc

SEQ ID NO: 373827 - DNA, 618 bp, Homo sapiens
ggggtactcttaaagagacttgtggtgtaagtttgtctaacgaatatatggaaaagtccagcaaaattctcagaagggttacatttccagcatcattgccagctgggcctgaggagaaaaataatagtatggagttaggagaggccattgaacccccagagttttaccagcaagaagaagactgagagaactgctcagctacasgcatgtgctgcctgtttgtaaaaataaaattatgggggtggaaataagagcccgaagagaggagcagggagccacagtgaattcttcccagactttgagagctaatagagtactttccaatttgcctggctggatttcagaatttttatggactccttagaggctcccattttatctcttttgaacatgaatgtttatagtagctatactatgccttccccccatcatattaatatgttaggggtgagggtggaagacaacctctcagttttgtttcacatatctgtagatcaggagaaactgtatgtggggagctgtacccaaggaatcacatcaatgagcctcatctactcctggtccaggtttagatggcaagatcctgggctttaaggcaatggtataacagaatgaaat

SEQ ID NO: 373828 - DNA, 618 bp, Homo sapiens
ggggtactcttaaagagacttgtggtgtaagtttgtctaacgaatatatggaaaagtccagcaaaattctcagaagggttacatttccagcatcattgccagctgggcctgaggagaaaaataatagtatggagttaggagaggccattgaacccccagagttttaccagcaagaagaagactgagagaactgctcagctacaggcatgtgctgcctgtttgtaaaaataaaattatgggggtggaaataagagcccgaagagaggagcagggagccacagtgaattcttcccagactttgagagctaatagagtactttccaatttgcctggctggatttcagaatttttatggactccttagaggctcccattttatctcttttgaacatgaatgtttatagtagctatactatgccttccccccatcatattaatatgttaggggtgarggtggaagacaacctctcagttttgtttcacatatctgtagatcaggagaaactgtatgtggggagctgtacccaaggaatcacatcaatgagcctcatctactcctggtccaggtttagatggcaagatcctgggctttaaggcaatggtataacagaatgaaat

SEQ ID NO: 373829 - DNA, 578 bp, Homo sapiens
ctggagtcccagaattttgttctgtcatagtacttaagaaacaatgttttcattatgaaacagtttggctctgtgtccccaccgaaatctcatcttgaactgtaatccccatgtgttgagggaggggcctggtaggaagtgattggaccatgaaggcagtttcccccatgctattctcatgatagtgagtgagttctcaggggatctgatggtgttaagtggtggtttcccctgcacttctctctcacctgccatcatgtaagaggtgcctgcatccccttgccttccaccatgataatgttttcctgaggcctccccagccacgcagaactatgagtcaattaaacctcttttgttttatgaaattacccagtctcagatagcatttttatagcagtgtgaaaacggattaatgcaaattacttgtttttctacttamctctccctactagaaagtgagttccttgaggtctgtgtcatcaggacatagcaaatggaagataatagagatttttattaactgagtggataaaggaaggcaaggagaaaagatggaatgtctgatgccatgatggaat

SEQ ID NO: 373830 - DNA, 578 bp, Homo sapiens
ctggagtcccagaattttgttctgtcatagtacttaagaaacaatgttttcattatgaaacagtttggctctgtgtccccaccgaaatctcatcttgaactgtaatccccatgtgttgagggaggggcctggtaggaagtgattggaccatgaaggcagtttcccccatgctattctcatgatagtgagtgagttctcaggggatctgatggtgttaagtggtggtttcccctgcacttctctctcacctgccatcatgtaagaggtgcctgcatccccttgccttccaccatgataatgttttcctgaggcctccccagccacgcagaactatgagtcaattaaacctcttttgttttatgaaattacccagtctcagatagcatttttatagcagtgtgaaaacggattaatgcaaattacttgtttttctacttacctctccctactagaaagtgagttccttgaggtctgtgtcatcaggacatagcaaatggaagrtaatagagatttttattaactgagtggataaaggaaggcaaggagaaaagatggaatgtctgatgccatgatggaat

SEQ ID NO: 373831 - DNA, 552 bp, Homo sapiens
gacattagtgtaacaatctatattaaaccaaccagatagggctacccagaactttggatccagactgagcaacttaaaagaggaaggacagtggagaatatttttcatgttgggttggctttcataaacaccttaatcttagcatttataattcttttcaatcacatatttatgtatgcatttatttttaacgtctgttttctgctctagattgtaaactacatgaagacaaagaccatgcttctttttaacctacctcttttagcctaggaagaggcaaagcgcataccmcttactattaaacaaaggaatgaagagagcaacaaatgtgccctcggaaacaggcaagagtctagggttctgatagcaccaaagacagggagagaccagagggacaagctatgggttgatgtgaggagtaaatcaggtaattcctgtatctcacacacacagaggttcagtaaaagtttattacacataaatacaacaaaataaaattgtgagccctgatcttagatagcactttgccgtctgccctgtttggaagcctct

SEQ ID NO: 373832 - DNA, 603 bp, Homo sapiens
aaaacatttttccctaaagttggtaacttctttaaggtaatgcatccccagagtattttctatttagaattcaaggaaacaaattgaactattaggatttcttagtacaaaacaaaatatcactctgaaaggtctgttaataagtccattacttggcaaagtaaaactggactttcttaatggattccccatatagaatatgagctgtttttctattctttgagcaactctattagctcagtgattgtttacattctctcccttcagctcctctaaaaactgaaaacagctctacagacagctctctttcctttaaatacaataacaattgcatattaattataaaagaataactaaaatgtcttcagtgattcatatgttccagaaattgtacagtgtgctttattgcatcatttcatttaatcctcaaaacaaatatttgaggtaggtattattcttcttatatatagataagaaaactaaaayctagagggattaagtaacatgcccaaggtcacacacccagtaaaaaaacaacaacaacaacagaaaaacactcaaagctttttactactgttccactcagcttcccttctgatgagt

SEQ ID NO: 373833 - DNA, 410 bp, Homo sapiens
tgtagcctgatgatgcaatagaaaagaaaaattcattttcggaggagaaattgaagccagctgcagaaatttacataagtaacaaggagccaaatgtaaatcactaagacaatggggaaaatgtcttcagggtatgtcagagatctttaaggcagcttgtcccattacaggcccagaggcctaggaggaaaaaatggttttgtgggctgggcccagggccccctgctgtgtgcagcctagggacttagcgccctgtatcccagctgtggtagccatggctaaaaggtgccaaggtacagctcrgactgttgcttcagagggtgctagcctcaagccttggcagcttccacgtggctttgagcctgcgagttcacagatgtcaagaattgaggattgggaacctctaccta

SEQ ID NO: 373834 - DNA, 535 bp, Homo sapiens
cattcaacattttgtgtataaatcataacatcacttcgtaccccataaatatatataatttatcaatttacaataaaattaaaaaatagaattaaaaaaaamcctaaaattgagccattgattttcaaactgagctttttttattgttaaattttcactgttaggtcagcaaggtattttttttgttgtttcaaagttcatcactttgatataggctttagtcctgtttcatcaaaatgatcttctgactttatttttaaaaacatatgtgtgtcttaattgttttgtacagtttttgttatatttcatagagattaaggattgagttgattgacttagttcctgctaatacattagtacatttattttattaatcaccttggaacacacggtcaaagctctacttttcactgaactgattgcgttgaatgcttcctttttttcacctgttatctgtgatcaatggaactgatcaatgttttctgttcttggtaaatttccactctttccaagtctatttggtttgtttatcctt

SEQ ID NO: 373835 - DNA, 535 bp, Homo sapiens
cattcaacattttgtgtataaatcataacatcacttcgtaccccataaatatatataatttatcaatttacaataaaattaaaaaatagaattaaaaaaaaacctaaaattgagccattgattttcaaactgagctttttttattgtkaaattttcactgttaggtcagcaaggtattttttttgttgtttcaaagttcatcactttgatataggctttagtcctgtttcatcaaaatgatcttctgactttatttttaaaaacatatgtgtgtcttaattgttttgtacagtttttgttatatttcatagagattaaggattgagttgattgacttagttcctgctaatacattagtacatttattttattaatcaccttggaacacacggtcaaagctctacttttcactgaactgattgcgttgaatgcttcctttttttcacctgttatctgtgatcaatggaactgatcaatgttttctgttcttggtaaatttccactctttccaagtctatttggtttgtttatcctt

SEQ ID NO: 373836 - DNA, 612 bp, Homo sapiens
taagtatgatatttggatattaatatctaccacttaatacagaaactattctagcacttgtataggcagtataagacataattttagaactctaaaataaaaactcataaactgaagttaaatatccatttcccactgctatctccttttccttttaacacattgatatcatttggatctgtgtccccacccaaatctcatgtcaaactgtaagtcccactgttggaggtggggyctgttgggaggcaattggatcatcgggcagtttctcttaaatggtttagcaccatctccttggtgctgttcttgtgacagtgagtgagttattgtgagtctggttgttaaaagtgtatagcacctccccacctctcactcttcttcctgcttccagccatgtgaagtgctggctcccccttcaccttctgccatgattgttagcttactgaggcccctgcagaagcccagcagatgcatcatgctttctgtataacgtgcagaaccatgagccaattaaactgcttttctttataaattacccagtctcaggtatttctttagagcaatgtaagaaaggactaatatagaaaattggtagaggaatatgatattgtt

SEQ ID NO: 373837 - DNA, 531 bp, Homo sapiens
ttgttaaaagtgtatagcacctccccacctctcactcttcttcctgcttccagccatgtgaagtgctggctcccccttcaccttctgccatgattgttagcttactgaggccccygcagaagcccagcagatgcatcatgctttctgtataacgtgcagaaccatgagccaattaaactgcttttctttataaattacccagtctcaggtatttctttagagcaatgtaagaaaggactaatatagaaaattggtagaggaatatgatattgttgtaaacataccggaaaatgtgaaagtggctttgaaactggatagtgggcagagattggaagggtttggagagatcagaagaagacaggaagatgagggcaagttttgaacttactagagtcttgttacattgttgtgaccaagctactgatagagacacacaatgaagtccaggctgaggaggtctcagatggagataaggaacttaatgggaactggagcaaaggtcactttagttaggcattagcaaaaaggttg

SEQ ID NO: 373838 - DNA, 507 bp, Homo sapiens
caattaaactgcttttctttataaattacccagtctcaggtatttctttagagcaatgtaagaaaggactaatatagaaaattggtagaggaatatgatattgttgtaaacataccggaaaatgtgaaagtggctttgaaactggatagtgggcagagattggaagggtttggagagatcagaagaagacaggaagatgagggcaagttttgaacttactagagtcttgttacattgttgtgaccaagctactgatagagacwcacaatgaagtccaggctgaggaggtctcagatggagataaggaacttaatgggaactggagcaaaggtcactttagttaggcattagcaaaaaggttggctgcactgtgcgcctgccctagggatctgtggaattttgaacttgagagtatctcaagttctggtgggtatctggtggaaaaaatttctaagcagcaaagcattcaggaggtaatctcactacttctaacaaactattttgatg

SEQ ID NO: 373839 - DNA, 568 bp, Homo sapiens
gaccccaatggaccaggggatgctgtgtcctaggatggatccactcacagtgactccttaggctctgcaacctggaccagacttacatctagacagccttaaatcctatgagcaatagcatctcctgccatccctgctgggcagccttgtgcagataactgaccttcatggcctctataggacccctgggatattctgagaagatctggggagtgctgaaaaaaggatgccaggctgggtgcagtggctcgcgcctgtaatcccagcacttggggaggccgaggcaggcagatcacgaggtcaggatatgaagaccagcctgatcgacatagtgaaaccccgtctcaactgaaaatacaaaaaattagctgggcgtggtggcgcatgcctgtagtgctagctactctggaggctgaggcaggagaattgcttgaacccgggaggcagaggttgcagtgaactgaggtcacaccatggcactccagcytgagcaacaagagcagaactccatctaaaaaaaaaaaaagaggaagttgtggtcatgggctagtgcttggatggatttgaa

SEQ ID NO: 373840 - DNA, 579 bp, Homo sapiens
ggtcagtaatcatttgctttaaacatactctgatatttcaggcctttaaaacaatagcacaggttttaggaagyggatttccaagaaaacttcccatttttgcctgacatttctactactgccttctcacttatccactattgagtttcttctggatcaaacaaccttctcgaaaaatatcagatactttagccctaattaattctcacacttttttttttgagacagagtcttgctctgttgcccaggctggagtgtgttggcatgagcttggcttgccacaacctctacttcctgggttcaagctattctcctgcctcagcctcccaagtagctgggactataggcatgcaccaccatgcccagcaaatttttgtatttttagtagacatgtggtttcactatgttggccaggctggtctcaaacttctgacctcgtgatacacccatctcagcctcccaaggtgatttttgatcaagtagttccttacatacttacctttttcttcctttaagaagattttataaaatatttatatatctattaatattatttgcctttacctgacagaagtagat

SEQ ID NO: 373841 - DNA, 579 bp, Homo sapiens
ggtcagtaatcatttgctttaaacatactctgatatttcaggcctttaaaacaatagcacaggttttaggaagcggatttccaagaaaacttcccatttttgcctgacatttctactactgccttctcacttatccacyattgagtttcttctggatcaaacaaccttctcgaaaaatatcagatactttagccctaattaattctcacacttttttttttgagacagagtcttgctctgttgcccaggctggagtgtgttggcatgagcttggcttgccacaacctctacttcctgggttcaagctattctcctgcctcagcctcccaagtagctgggactataggcatgcaccaccatgcccagcaaatttttgtatttttagtagacatgtggtttcactatgttggccaggctggtctcaaacttctgacctcgtgatacacccatctcagcctcccaaggtgatttttgatcaagtagttccttacatacttacctttttcttcctttaagaagattttataaaatatttatatatctattaatattatttgcctttacctgacagaagtagat

SEQ ID NO: 373842 - DNA, 505 bp, Homo sapiens
caaatgggaaaaaatatggtgacttaaagcctatatattgtgatctggagaattagaatttaatttgtctatacaaagtaggtcatgatcctgataagtttagcaattagagtatttataaaaagtaagagctaaataatttgtttcagggatgcacttttatttcaattatctagacctgaaattatattttttgagatcrttcaggaagaagaaattacatgaggagaactttctaatcagtatgcttagtgtaagtatatctgatgagttcataagtctgtttcatttattattcttcagaataggtctgtagcatgacacaaacaatttctgatgacttcagctacctttttaaggaaggtagacttgctccatcccctatcttctattttgcatctgaaagaggatcatactcctgtttaagtaaactttattaatgtttttcaaaatatttcttctcttgccaatataaaataatgaaattgtagtaaaatgaggattg

SEQ ID NO: 373843 - DNA, 505 bp, Homo sapiens
caaatgggaaaaaatatggtgacttaaagcctatatattgtgatctggagaattagaatttaatttgtctatacaaagtaggtcatgatcctgataagtttagcaattagagtatttataaaaagtaagagctaaataatttgtttcagggatgcacttttatttcaattatctagacctgaaattatattttttgagatcattcaggaagaagaaattacatgaggagaactttctaatcagtatgcttagtgtaartatatctgatgagttcataagtctgtttcatttattattcttcagaataggtctgtagcatgacacaaacaatttctgatgacttcagctacctttttaaggaaggtagacttgctccatcccctatcttctattttgcatctgaaagaggatcatactcctgtttaagtaaactttattaatgtttttcaaaatatttcttctcttgccaatataaaataatgaaattgtagtaaaatgaggattg

SEQ ID NO: 373844 - DNA, 505 bp, Homo sapiens
caaatgggaaaaaatatggtgacttaaagcctatatattgtgatctggagaattagaatttaatttgtctatacaaagtaggtcatgatcctgataagtttagcaattagagtatttataaaaagtaagagctaaataatttgtttcagggatgcacttttatttcaattatctagacctgaaattatattttttgagatcattcaggaagaagaaattacatgaggagaactttctaatcagtatgcttagtgtaagtatatctgatgagttcataagtctgtttcatttattattcttcagwataggtctgtagcatgacacaaacaatttctgatgacttcagctacctttttaaggaaggtagacttgctccatcccctatcttctattttgcatctgaaagaggatcatactcctgtttaagtaaactttattaatgtttttcaaaatatttcttctcttgccaatataaaataatgaaattgtagtaaaatgaggattg

SEQ ID NO: 373845 - DNA, 505 bp, Homo sapiens
caaatgggaaaaaatatggtgacttaaagcctatatattgtgatctggagaattagaatttaatttgtctatacaaagtaggtcatgatcctgataagtttagcaattagagtatttataaaaagtaagagctaaataatttgtttcagggatgcacttttatttcaattatctagacctgaaattatattttttgagatcattcaggaagaagaaattacatgaggagaactttctaatcagtatgcttagtgtaagtatatctgatgagttcataagtctgtttcatttattattcttcagaataggtctgtagcatgacacaaacaattyctgatgacttcagctacctttttaaggaaggtagacttgctccatcccctatcttctattttgcatctgaaagaggatcatactcctgtttaagtaaactttattaatgtttttcaaaatatttcttctcttgccaatataaaataatgaaattgtagtaaaatgaggattg

SEQ ID NO: 373846 - DNA, 573 bp, Homo sapiens
atacaattattgataaataagttgggggttttacttgtgattttctcaaaacctgaataaaaatatcctttcttttttgagtcctgtattttcttcagtttgaacaaatattggaattattaactctgcaccaaagctaaataactgaktaaggacacatgatgaacctatttgcataaatgtgtaaatgttatttttaaaagcagtgaaaagttaatgaagatatttaattaaactgaagagtccacttactagataattcaatgtcattaattaggtgactcataaagcagaggctttccatttttcgagagtggcctagaaaaaaaagctatgtttacaacatgactctactaagaaacctgaatattatttcattacttcttatcaagctaatatgagaaaggaagcaataagattaaaataaatgacagtcacttcttgaactggaagcaaagaagtttaacaaaagaaaaaaaagcattcttccccactttcttaaaaattgagaccacattttaaaataattttgcttgaggtctaattaaaaatattatagtttctattttctgg

SEQ ID NO: 373847 - DNA, 537 bp, Homo sapiens
ccttggggtgttccatggtggtttcttcctgcctgggcgccaccctttccccagttcaggccctccctggaggactagtttgtgtattggcatcctccccagtggacccaaaccagcgcatacttggtgtgtggagatgggagacaaaggacagatctaggagccttgaaggatcaccagccaccgaccctccatcagggccaactgggcaggaaagggaacattgcagacctgatttcccgacgatgtcaccctgtcctccctcyttgcttcttgctctgctaactcaactctgccttcctctttttcattcttctactctgccctatatggaggacaaatggacaccaggggtgctaaccttattggtgcctgccccagcctaccccaggtgccagcagactctcgtgcacaggaggctcccacagttatggagccaggaaagaatttctctgcactggatggactgtatattgagattaaaaattatattccttatattcctgcttatatcaatgctctctctgtaaaacctct

SEQ ID NO: 373848 - DNA, 573 bp, Homo sapiens
atacaattattgataaataagttgggggttttacttgtgattttctcaaaacctgaataaaaatatcctttcttttttgagtcctgtattttcttcagtttgaacaaatattggaattattaactctgcaccaaagctaaataactgagtaaggacacatgatgaacctatttgcataaatgtgtaaatgttatttttaaaagcagtgaaaagttaatgaagatatttaattaaactgaagagtccacttactagataattcaatgtcattaattaggtgactcataaagcagaggctttccatttttcgagagtggcctagaaaaaaaagctatgtttacaacatgactctactaagaaacctgaatattatttcattacttcttatcaagctaatatgagaaaggaagcaataagatwaaaataaatgacagtcacttcttgaactggaagcaaagaagtttaacaaaagaaaaaaaagcattcttccccactttcttaaaaattgagaccacattttaaaataattttgcttgaggtctaattaaaaatattatagtttctattttctgg

SEQ ID NO: 373849 - DNA, 573 bp, Homo sapiens
atacaattattgataaataagttgggggttttacttgtgattttctcaaaacctgaataaaaatatcctttcttttttgagtcctgtattttcttcagtttgaacaaatattggaattattaactctgcaccaaagctaaataactgagtaaggacacatgatgaacctatttgcataaatgtgtaaatgttatttttaaaagcagtgaaaagttaatgaagatatttaattaaactgaagagtccacttactagataattcaatgtcattaattaggtgactcataaagcagaggctttccatttttcgagagtggcctagaaaaaaaagctatgtttacaacatgactctactaagaaacctgaatattatttcattacttcttatcaagctaatatgagaaaggaagcaataagattaaaataaatgacagtcacttcttgractggaagcaaagaagtttaacaaaagaaaaaaaagcattcttccccactttcttaaaaattgagaccacattttaaaataattttgcttgaggtctaattaaaaatattatagtttctattttctgg

SEQ ID NO: 373850 - DNA, 573 bp, Homo sapiens
aagcttgttctctttacctyttccccaaatgtattcaagattatagattatataaaacaaatattttcatagatttgcatattttatctatttgatctatcagcgtcagagaaagataaatcttttattttaattctatatataatagtatttaactttctgattataatagttagtatattaactagtttttgttattttaccattcttattttaactgttttttaatatttttatgtgtatatatttttattactattttatcatcttcatttcctttattttataaagtattcctccttgtctctcattagttttgcctttatttatattttacatcatattaaaattgctatctcaacttttattcatactttcctagtatgtaattttctgtcctttcattttcaagtttttacaccttttatctctgtcttctgtggacacaatattgctggatcttttttttttttccaatttaagattctctccttttgtttggtgagttcaaaacacatgtttattataatttgttctattggaatttataactgccatcttatacattctttc

SEQ ID NO: 373851 - DNA, 515 bp, Homo sapiens
cctgtacctggatatttatacttttctcaagttttgggaagttttctgtagttatttctttttaaaaaaataaattttaaaaacttcttattacattattttgttgagaccaggttttactctgtcacccaggccagagtgcagtggagcaatcttggctcactgcawctcctgcctcccaggctgaagtgatccccccacctcagccctgccaagtaggtgggactacaggcatgtgacgctatgcctgaataatttttgtattttttttagagagaagggatttcgccatgttgcccagactggtctcgaacttctgtgctcaagcgatccatcctcttcagcctcccaaagtgctgggattacgggcatgagccactatgcccaactatttctttaaataagctttgtaccctttgcttttgctcaaccccctcctgaacatcaataatttatagatttgatcttttgaggtagttttctacatcttgtaagttcccttcaccaccacccca

SEQ ID NO: 373852 - DNA, 545 bp, Homo sapiens
tgtttcccctatccccactcccaagaagggagaggttggggttatacaaagtgattaatctatgtgttcttcccagaaaaaaaaaaggcagagtttaatcaaataacttttccaacctttagtatatggttcattcaaactgtctgacctgtagtgtttcagaattaccaatggtcagtggtttctatgtactataccttatattttgcctttctaaatgggctatgagcattacatatcttagctcatttatcttttaaataactttaagaagctagtattattattagcttgattttgctggtgagaacattgagatgtagagattcagagtagctagtgtttggtataactatgatttaaatttagttctgtcttattataatattaaacaagtatgtgacttcgtagtgtaatgagtcwctttcaaaacatacagcagttgcagcctaacatcttgttactttaggtggtgacataatgtattgactcatattgagcacttctaagtgtgagttttaagtagctttttttctttagaaagg

SEQ ID NO: 373853 - DNA, 569 bp, Homo sapiens
gtcctttgcagggacatggatgaagctggaagccatcactctcagcagactaacacaggaacagaaaaccaaacaccacatgttttcataagtgggagttgaacaatgagaacacatggtcacagggaggggatcatcagggaggggctgtagggggtgggggcctaggggaaggataacattaggagaaatacctaatgtaggtgacgagttgaagggtgaagcaaaccaccatggcacatgtatacctatgtaacaaaactgcaggttctgcacatggacayggggagaggaacattacacactgggaactgttgggggtggagggcaaggggagggagagcattaagacaaatacctgcaagtggggcttaaaacctagatgacgggttgataggtgcagcaaacaaccacggcacatgtatacctatttaacaaacctgtacgttctgcacatgtattccaggacgtaaagtgaaatataaaaaaaaaaagaatgcccttttctggggttctcactaatacgacctgtgtaacttgaaaatcctcaagacagaaatttaaagtga

SEQ ID NO: 373854 - DNA, 569 bp, Homo sapiens
gtcctttgcagggacatggatgaagctggaagccatcactctcagcagactaacacaggaacagaaaaccaaacaccacatgttttcataagtgggagttgaacaatgagaacacatggtcacagggaggggatcatcagggaggggctgtagggggtgggggcctaggggaaggataacattaggagaaatacctaatgtaggtgacgagttgaagggtgaagcaaaccaccatggcacatgtatacctatgtaacaaaactgcaggttctgcacatggacatggggagaggaacattacacacygggaactgttgggggtggagggcaaggggagggagagcattaagacaaatacctgcaagtggggcttaaaacctagatgacgggttgataggtgcagcaaacaaccacggcacatgtatacctatttaacaaacctgtacgttctgcacatgtattccaggacgtaaagtgaaatataaaaaaaaaaagaatgcccttttctggggttctcactaatacgacctgtgtaacttgaaaatcctcaagacagaaatttaaagtga

SEQ ID NO: 373855 - DNA, 602 bp, Homo sapiens
ttcttcttttctttatttattttctggctgtgttaacttaaataatcagtcttcaatctctgagattcttttcttggcttagtccattctgctgtgaatatttccaatcattttatgaaattcttgtagtgtattttgtaactctacctgctaggtttggtttttgtttgtttgtcttgttttgttttttcaaatggctaatttttttctctttaatcattttaatggattcctcagattcttggaaatagtgttcaactttctattgaatttcaatgatcttcattttcttctacctctcagttctatatctgwcatttcagccatttccttctatttaacaaccattgctgtagaactagtgcagtcatttggaggtaaagtgacactctgatttttgagttgctagagttcttatgttggcttttttctcacctgtgtgggctggtgtttctttaactgtggtataatttgagcatagtcagttgactttgtttctggatgttttcaaagcacctttttgcatgatctttattagtagctgaattattgtcctgggtttcacagaggcttatattagcaaagtaattttagtgttgaag

SEQ ID NO: 373856 - DNA, 607 bp, Homo sapiens
aatttcaatgatcttcattttcttctacctctcagttctatatctgtcatttcagccatttccttctatttaacaaccattgctgtagaactagtgcagtcatttggaggtaaagtgacactctgatttttgagttgctagagttcttatgttggcttttttctcacctgtgtgggctggtgtttctttaactgtggtataatttgagcatagtcagttgactttgtttctggatgttttcaaagcacctttttgcatgatctttattagtagctgaattattgtcctgggtttcacagaggcttatattagcaaagtaattttagtgttgaagtttctgctgcaagctggctgatgacacttaggtataatggctgataggyaggctcttgttcagcctacctacctataatggctgataggtaggctcttgttcatacacaaatgtgtattttctcacatttggagccatgcttcgtgtcagtattctgtgtgtgtaggcttccctcctactgaaatgctggctgcatagcttggcttgtcactgcagtgctgcacatcacagccctgtggtgagctcaaggtttttcctcacaagcttggggac

SEQ ID NO: 373857 - DNA, 607 bp, Homo sapiens
aatttcaatgatcttcattttcttctacctctcagttctatatctgtcatttcagccatttccttctatttaacaaccattgctgtagaactagtgcagtcatttggaggtaaagtgacactctgatttttgagttgctagagttcttatgttggcttttttctcacctgtgtgggctggtgtttctttaactgtggtataatttgagcatagtcagttgactttgtttctggatgttttcaaagcacctttttgcatgatctttattagtagctgaattattgtcctgggtttcacagaggcttatattagcaaagtaattttagtgttgaagtttctgctgcaagctggctgatgacacttaggtataatggctgataggcaggctcttgttcagcctacctacctataatggctgataggtaggctcttgttcatacacaaatgtgtattttctcacatttgsagccatgcttcgtgtcagtattctgtgtgtgtaggcttccctcctactgaaatgctggctgcatagcttggcttgtcactgcagtgctgcacatcacagccctgtggtgagctcaaggtttttcctcacaagcttggggac

SEQ ID NO: 373858 - DNA, 591 bp, Homo sapiens
attttcttctacctctcagttctatatctgtcatttcagccatttccttctatttaacaaccattgctgtagaactagtgcagtcatttggaggtaaagtgacactctgatttttgagttgctagagttcttatgttggcttttttctcacctgtgtgggctggtgtttctttaactgtggtataatttgagcatagtcagttgactttgtttctggatgttttcaaagcacctttttgcatgatctttattagtagctgaattattgtcctgggtttcacagaggcttatattagcaaagtaattttagtgttgaagtttctgctgcaagctggctgatgacacttaggtataatggctgataggcaggctcttgttcagcctacctacctataatggctgataggtaggctcttgttcatacacaaatgtgtattttctcacatttggagccatgctycgtgtcagtattctgtgtgtgtaggcttccctcctactgaaatgctggctgcatagcttggcttgtcactgcagtgctgcacatcacagccctgtggtgagctcaaggtttttcctcacaagcttggggac

SEQ ID NO: 373859 - DNA, 632 bp, Homo sapiens
  misc_feature (1)...(632): n = A,T,C or G
nnnnnnatactttaacatgtgttcagtaactgygtgtgttcctaaaccttgtcatatttggatatgatttttagccataaatagtggggcaagatggaaaatctgaagttttacaaaaactaaatataagacaaaaacaatatatattcaactaaaaaggagttggcaacaaacttctctgattctatatcaaatcccaaaaaacaatggaatatgtatcagtaattattgactaccatagggtaataataataataaatggtcataaaataaattagttaatggaaaatgatagatattaattattgaatgataaagcacaatgtaaaacaaaatgatagaaataatcatactcacaaacataacaatctgtatgtagaagtctaggttttccaaattaaagctggttactcacaaaatccttgaaaagagtgagaagttggtggggtgattatatttttaagctatgaagtcagatagtgtgatgtttcatctcagtaccactataaaataaagttttaatcctgttcatgtcactcttaattttcactagctttttaggtaaggaaaattcatgtccatcccttccttgattcatctctttcaaaagcaacattttaaatggttgatga

SEQ ID NO: 373860 - DNA, 632 bp, Homo sapiens
  misc_feature (1)...(632): n = A,T,C or G
nnnnnnatactttaacatgtgttcagtaactgcgtgtgttcctaaaccttgtcatatttggatatgatttttagcmataaatagtggggcaagatggaaaatctgaagttttacaaaaactaaatataagacaaaaacaatatatattcaactaaaaaggagttggcaacaaacttctctgattctatatcaaatcccaaaaaacaatggaatatgtatcagtaattattgactaccatagggtaataataataataaatggtcataaaataaattagttaatggaaaatgatagatattaattattgaatgataaagcacaatgtaaaacaaaatgatagaaataatcatactcacaaacataacaatctgtatgtagaagtctaggttttccaaattaaagctggttactcacaaaatccttgaaaagagtgagaagttggtggggtgattatatttttaagctatgaagtcagatagtgtgatgtttcatctcagtaccactataaaataaagttttaatcctgttcatgtcactcttaattttcactagctttttaggtaaggaaaattcatgtccatcccttccttgattcatctctttcaaaagcaacattttaaatggttgatga

SEQ ID NO: 373861 - DNA, 599 bp, Homo sapiens
acaatgtaaaacaaaatgatagaaataatcatactcacaaacataacaatctgtatgtagaagtctaggttttccaaattaaagctggttactcacaaaatccttsaaaagagtgagaagttggtggggtgattatatttttaagctatgaagtcagatagtgtgatgtttcatctcagtaccactataaaataaagttttaatcctgttcatgtcactcttaattttcactagctttttaggtaaggaaaattcatgtccatcccttccttgattcatctctttcaaaagcaacattttaaatggttgatgacttaacatcactgcaactgttttctccttcatttaagaacataatcaaccatttatgtgggcatgtttattttacacctcaattttggctcaaggaatataacacatagtggcttctttctttcatttgccatatcaaatccatgaacacctgcctttaagatgtatcagattacttttacctcttactagacatgtccaggcaactgccaaagcactggatcattggaatagcttcataagtgatgaccctatttctctcactttcattcctagaggctgttttt

SEQ ID NO: 373862 - DNA, 599 bp, Homo sapiens
acaatgtaaaacaaaatgatagaaataatcatactcacaaacataacaatctgtatgtagaagtctaggttttccaaattaaagctggttactcacaaaatccttgaaaagagtgagaagttggtggggtgattatatttttaagctatgaagtcagatagtgtgatgtttcatctcagtaccactataaaataaagttttaatcctgttcatgtcactcttaattttcactagctttttaggtaaggaaaattcatgtccatcccttccttgattcatctctttcaaaagcaacattttaaatggttgatgacttaacatcactgcaactgttttctccttcatttaagaacataatcaaccatttatgtgggcatgtttattttacacctcaattttggctcaaggaatataacacatagtggcttctttctttcatttgccatatcaaatccatgaacacctgcctttaagatgtatcagattacttttacctcttactagacatgtccaggcaactgycaaagcactggatcattggaatagcttcataagtgatgaccctatttctctcactttcattcctagaggctgttttt

SEQ ID NO: 373863 - DNA, 382 bp, Homo sapiens
gccaaagcactggatcattggaatagcttcataartgatgaccctatttctctcactttcattcctagaggctgtttttcagccaggagtcagaataattataaaacataaatcaaataatttcactgtcttgctcatagctttctaattgttccccttctcaaagtaaaacccaaaaccttgtcattgtttgtgaaagcaacaatatgggatccttctccatacctcccccaatttattttatcacagccctcattgttttggtcattctatccttaagagcctcctgatatttcttggaaatgccaagattcacccaccttagaaaccactttgtttttctgtctttaaaagagacatgcgctgtagatatttgcttgct

SEQ ID NO: 373864 - DNA, 325 bp, Homo sapiens
cagaaccactcatgaacacactgttctctttggggacccttaaactgacctcaggaggagccttaactgccactttcccaaaacagcaccccttgtcagcaggaagcagttaagagcagtcgttgtacactttccycaacagaatttggggtctccactcctgaagggaggaatgaaaggagtcagccaacttgctttagggagacagtcaggaaagggtcccctggagaacctcctacccacccccaggtgtttataccaaatattttgtgcggataagggtacttgctaagggagcttgcctaaacatgcccatagtggaaaa

SEQ ID NO: 373865 - DNA, 460 bp, Homo sapiens
ggagtcagccaacttgctttagggagacagtcaggaaagggtcccctggagaacctcctacccacccccaggtgtttataccaaatattttgtgcggataagggtacttgctaagggagcttgcctaaacatgcccatagtggaaaatttcgttccttaacatatgtgcattaaggaaaataaatcaatatggagtggcacagactaagggcccacataactcactggaaagatggagtggagcaaccaggaattcacttctcatacaaccaggaattcacagccctatcagcttgtataaaaatgtccttgttgccgggtgcggtagctcacacctgtaatycgaacacttcaggaggtggaggcgggcagatcactagagcaggagttggagaccagcctgaccaacatggtaaatcccatctctactaaaaatacaaaaattatccgggcctggtga

SEQ ID NO: 373866 - DNA, 587 bp, Homo sapiens
acaaggctttgggagctcaatccttgcagtggtatgccctggatggcatcaaaggagatgttaagctttaagacttaataactttcctactgggtttcagacttgcatggggcccgtagccccttacttttggccaatttctcccttttgaaatgggagtatttacccaatccctgtacccccattatacattatatcttgggagtttttttttattttaattttacagggtcttaggcagaaggggcttgcctcatctcagataagactttagactttggatgtttgagttaatgctgaagtgagttaagactttgggggactgatgggaaggcatgattatattttgcaaactgagaaagacataaaatttgggagggactagggcaaaataatatgrtttggatctatgtccccaaccaaatctcatgtcaaattgtaatacccagtgttggaggtggggcctgatgggaggttattggattgtggagtggtttctttttaatggtttaataccatttccttggtgctattcttatgatagtgagtgagtgagttattaggaaatctggttgttaaaagggtgt

SEQ ID NO: 373867 - DNA, 594 bp, Homo sapiens
tattcaataatgaggtcacttgatttacttcatgtgtacatttcaatgartgactgcatgtctaaaatatattttatacttttttactgagattattcacacttcagtcttcctgttttggtacaaaatattttagacaaactattatacttgttcatgtataactgtcactttagttataaaaatgatgcttaagttaaaaataaaataattttaataaagaagtgtgagaagtaatatataacctctgagtcagtcagaatctagcaaagctttataggtcacattcattaaacattcttacattcactgtcagtggctctaattaagaatgatcatataaaaagatcttttcatttttcttggctttttctagtttgcccaaatcgcaccaattatttcttctatactgttggttcatgagtttgtgactgtacatagttagtaattacttaaaatcagatttttttttacattttactgaaacatagtttaattcacctttgcttttctcccactagcttgatatattattgaactataataattttaaaaagaaaattcacactatgctaaagataaggaagcatttaa

SEQ ID NO: 373868 - DNA, 594 bp, Homo sapiens
tattcaataatgaggtcacttgatttacttcatgtgtacatttcaatgaatgactgcatgtctaaaatatattttatacttttttactgagattattcacacttcagtcttcctgttttggtacaaaatattttagacaaactattatacttgttcatgtataactgtcactttagttataaaaatgatgcttaagttaaaaayaaaataattttaataaagaagtgtgagaagtaatatataacctctgagtcagtcagaatctagcaaagctttataggtcacattcattaaacattcttacattcactgtcagtggctctaattaagaatgatcatataaaaagatcttttcatttttcttggctttttctagtttgcccaaatcgcaccaattatttcttctatactgttggttcatgagtttgtgactgtacatagttagtaattacttaaaatcagatttttttttacattttactgaaacatagtttaattcacctttgcttttctcccactagcttgatatattattgaactataataattttaaaaagaaaattcacactatgctaaagataaggaagcatttaa

SEQ ID NO: 373869 - DNA, 594 bp, Homo sapiens
tattcaataatgaggtcacttgatttacttcatgtgtacatttcaatgaatgactgcatgtctaaaatatattttatacttttttactgagattattcacacttcagtcttcctgttttggtacaaaatattttagacaaactattatacttgttcatgtataactgtcactttagttataaaaatgatgcttaagttaaaaataaaayaattttaataaagaagtgtgagaagtaatatataacctctgagtcagtcagaatctagcaaagctttataggtcacattcattaaacattcttacattcactgtcagtggctctaattaagaatgatcatataaaaagatcttttcatttttcttggctttttctagtttgcccaaatcgcaccaattatttcttctatactgttggttcatgagtttgtgactgtacatagttagtaattacttaaaatcagatttttttttacattttactgaaacatagtttaattcacctttgcttttctcccactagcttgatatattattgaactataataattttaaaaagaaaattcacactatgctaaagataaggaagcatttaa

SEQ ID NO: 373870 - DNA, 594 bp, Homo sapiens
tattcaataatgaggtcacttgatttacttcatgtgtacatttcaatgaatgactgcatgtctaaaatatattttatacttttttactgagattattcacacttcagtcttcctgttttggtacaaaatattttagacaaactattatacttgttcatgtataactgtcactttagttataaaaatgatgcttaagttaaaaataaaataattttaataaagaagtgtgagaagtaatatataacctctgagtcagtcagaatctagcaaagctttataggtcacattcattaaacattcttacattcactgtcagtggctctaattaagaatgatcatataaaaagatcttttcatttttcttggctttttctagtttgcccaaatcgcaccaattatttcttctatactgttggttcatgagttygtgactgtacatagttagtaattacttaaaatcagatttttttttacattttactgaaacatagtttaattcacctttgcttttctcccactagcttgatatattattgaactataataattttaaaaagaaaattcacactatgctaaagataaggaagcatttaa

SEQ ID NO: 373871 - DNA, 463 bp, Homo sapiens
ctagtttgcccaaatcgcaccaattatttcttctatactgttggttcatgagtttgtgactgtacatagttagtaattacttaaaatcagatttttttttacattttactgaaacatagtttaattcacctttgcttttctcccactagcttgatatattattgaactataataattttaaaaagaaaawtcacactatgctaaagataaggaagcatttaaatgacagaactattttgtctgaataaagacacaagatcatatatagagaagagaaaatgagctaattcatatatttggatgatatgaagtagattaaatattttatgtttttaaataagtaacatgttaagcaagacaaaattatttttaataaaataaaaaatatacaaaagctttaaaattcatgcaaatatctaaatgaaagaagaaatcagacaatgtatatcttggcattgttcag

SEQ ID NO: 373872 - DNA, 414 bp, Homo sapiens
tcactgtgtttggggaaaatacacaccaaactggaaacactggttgtctctgaagaagagacagggctttggcaatattcaaattaggctttaactgtttctgaaagtttcagttctctataaggagaaggtattacttatgtaatttttaaaaattacatattaagtactaaatgactgaagcttcttagaattgatgggggcaggcatcacatgggcagcaaggcattcacataatggagaatcatggtctcctgtagatgtctaggagtgataaaattaactaccttttaggtggtgtagtttcctggttgagctgataattattaagttaatgattagtaggttatttctcaacacygaagagattattagtgtttcaaagttttcactgtaattcatctgtaaaaccat

SEQ ID NO: 373873 - DNA, 637 bp, Homo sapiens
gccaataatgccagcctatagaaacaacagccaattataacaaaaagcacattaaaaagtcaaatatagctgagtaatagacataaaaataccttattaacatttttgtaacactctcaactgaaataaacagaccactctcgattttagcatctggttccaaacaattcttgtttgggtgataactttttaaaaacaaatgctgggcatctttcatcgacttttcatcaagtaacagctgttcctttagaacaaaatgtatgcatgttggaagtgtgactgatgctcacttctgttttgttctgtgtgagaaagctttatgttgggtgcaattcagaaaacaaatggtttcaaatcttttgaatagatgccatagcacagtttaaatgcagcttcttgtgatttttagaataatttcagccacaatttttacattcaatttataactatactaagacattctccttcagaacaaaggcatttctgttttcatgtgctcttgggcatcttsgggtcattcattatatcaatcatttatcttcgtaaagtgtttggctatgaacaattacttactacaccaaaacatgaaagaaatagatatagctcatctgctcttgaatgcatttctacagattcc

SEQ ID NO: 373874 - DNA, 528 bp, Homo sapiens
ttacttgttactaaaacatacagaacagacagaaagttaaaattggttaatttctatctaatctggataagataaacacaatgagtgaaataaatcattatgtcaaataacaaaaacctcatgcatagaaacttcaacatttctgaataacaaaaagtataacattatgtagggcaaggtgccacttttgtatcaactagaaataagccctgaatctgaatgatgaaattttaatagtaactgttgaccrcagggcagagtttactctcttggtcagatgcttttgtgaatgacgcagtgtgtccagatcacttttccctataatcacttcaaattacttgactttttgatctgttccttttttctgtctcttttttgtccacaacagatattccaaatatccaccgagttttcaaatactccagtccataattggtcttcccattcctagcagaagtactttgtcttctacttcccagaataatgttaattctcttattttagacttgcttgctttaatttgtattt

SEQ ID NO: 373875 - DNA, 528 bp, Homo sapiens
ttacttgttactaaaacatacagaacagacagaaagttaaaattggttaatttctatctaatctggataagataaacacaatgagtgaaataaatcattatgtcaaataacaaaaacctcatgcatagaaacttcaacatttctgaataacaaaaagtataacattatgtagggcaaggtgccacttttgtatcaactagaaataagccctgaatctgaatgatgaaattttaatagtaactgttgaccgcagggcagagtttactctcttggtcagatgcttttgtgaatgacgcagtgtgtccagatcacttttccctataatcacytcaaattacttgactttttgatctgttccttttttctgtctcttttttgtccacaacagatattccaaatatccaccgagttttcaaatactccagtccataattggtcttcccattcctagcagaagtactttgtcttctacttcccagaataatgttaattctcttattttagacttgcttgctttaatttgtattt

SEQ ID NO: 373876 - DNA, 404 bp, Homo sapiens
ggtgcttaggggtctaagaccccctggggacttctcatgtgcctgatctggagctctgccccagattctatgcagctctccttgttagtctgaaggccccagggggatcactcagggtggatcacctgtgcctatgattacaaaggtccrtgacagaagtatggggccatgggactctctctcagtcactatttctttgtggtaaggatcctcccctgactccacccaatcctgggcgggtggctgttgtgtcttgctgtttttttctccatggcttctgttgcttccttgctgaatcccaacatgtcctcttggaagatccagttgaagtgctagtgtttactggccagtctatttcgttttcacaagagtggagcatactagctgcttctagtaagtcatct

SEQ ID NO: 373877 - DNA, 404 bp, Homo sapiens
ggtgcttaggggtctaagaccccctggggacttctcatgtgcctgatctggagctctgccccagattctatgcagctctccttgttagtctgaaggccccagggggatcactcagggtggatcacctgtgcctatgattacaaaggtccatgacagaagtatggggccatgggrctctctctcagtcactatttctttgtggtaaggatcctcccctgactccacccaatcctgggcgggtggctgttgtgtcttgctgtttttttctccatggcttctgttgcttccttgctgaatcccaacatgtcctcttggaagatccagttgaagtgctagtgtttactggccagtctatttcgttttcacaagagtggagcatactagctgcttctagtaagtcatct

SEQ ID NO: 373878 - DNA, 404 bp, Homo sapiens
ggtgcttaggggtctaagaccccctggggacttctcatgtgcctgatctggagctctgccccagattctatgcagctctccttgttagtctgaaggccccagggggatcactcagggtggatcacctgtgcctatgattacaaaggtccatgacagaagtatggggccatgggactctctctcagtcactatttctttgtggtaaggatcctcccctgactccacccaatcctgggcgggtggctgttgtgtcttgctgtttttttctccatggcttctgttgcttccttgctgaatcccaacatgtcctcttggaagatccagttgaagtgctagtgtttactggccagtctatttcgttttcacragagtggagcatactagctgcttctagtaagtcatct

SEQ ID NO: 373879 - DNA, 418 bp, Homo sapiens
tataaccccttcaacagccctttcaatgggttgctactattttgctcaccccatcttcacctgcctaatcatgaggaggcggggtatatacaatttcrgttaatttgtagttatcagtctattatagttctttccttctgaaaaccaacaagtaaataaaccagcaagcatcaccaataaactttgacagtttatggttcataacgtacgtctacaccaaactttccattcaaatgctttttcaaacctttggtttctttctctattaagacaacttttgcttttggctttcaaagacattctctccattataaactctgtcattattctctattgtgcttacctcaaactggtaactctttcaaatcttacctgtcagtttcttgaccaccatgcatgttaataacatttcttctct

SEQ ID NO: 373880 - DNA, 418 bp, Homo sapiens
tataaccccttcaacagccctttcaatgggttgctactattttgctcaccccatcttcacctgcctaatcatgaggaggcggggtatatacaatttcggttaatttgtagttatcagtctattatagttctttccttctgaaaaccaacaagtaaataaaccagcaagcatcaccaataaactttgacagtttatggttcataacgtacgtctacaccaaactttccattcaaatgctttttcaaacctttggtttctttctctattaagacaacttttgcttttggctttcaaagacattctctccattataaactctgtcrttattctctattgtgcttacctcaaactggtaactctttcaaatcttacctgtcagtttcttgaccaccatgcatgttaataacatttcttctct

SEQ ID NO: 373881 - DNA, 541 bp, Homo sapiens
cattataaactctgtcattattctctattgtgcttacctcaaactggtaacwctttcaaatcttacctgtcagtttcttgaccaccatgcatgttaataacatttcttctctattttagacagcaaatgtttctcaatatttaaaaaaaaaaatatcctactctttggtcctctctacctcccatttcatccaatatcacttgttcgagacctgaactcgtacaggtttttaacctgttgaagactgtcactctatggactctactctcttctctctcctccatagccttctcattgcctatcttccctacttgtccaggaaatgatgacatgtttcatcactataattaatccatttcaaatggcctttatgccaaattattttattatatgctctttctgtgccatgccttgttttccaaatttaccacagtacaaattttacaattagttttccattactgaattagtaccaatctgtcttaaaaaataaatacagtaaaaaatgataatgaatttatttcttcttataatactatca

SEQ ID NO: 373882 - DNA, 541 bp, Homo sapiens
cattataaactctgtcattattctctattgtgcttacctcaaactggtaactctttcaaatcttacctgtcagtttcttgaccaccatgcatgttaataacatttcttctctattttagacagcaaatgtttctcaatatttaaaaaaaaaaatatcctactctttggtcctctctacctcccatttcatccaatatcacttgttcragacctgaactcgtacaggtttttaacctgttgaagactgtcactctatggactctactctcttctctctcctccatagccttctcattgcctatcttccctacttgtccaggaaatgatgacatgtttcatcactataattaatccatttcaaatggcctttatgccaaattattttattatatgctctttctgtgccatgccttgttttccaaatttaccacagtacaaattttacaattagttttccattactgaattagtaccaatctgtcttaaaaaataaatacagtaaaaaatgataatgaatttatttcttcttataatactatca

SEQ ID NO: 373883 - DNA, 541 bp, Homo sapiens
cattataaactctgtcattattctctattgtgcttacctcaaactggtaactctttcaaatcttacctgtcagtttcttgaccaccatgcatgttaataacatttcttctctattttagacagcaaatgtttctcaatatttaaaaaaaaaaatatcctactctttggtcctctctacctcccatttcatccaatatcacttgttcgagacctgaactcgtacaggtttttaacctgttgaagactgtcactctatggactctactctcttctctctcctccatagccttctcattgcytatcttccctacttgtccaggaaatgatgacatgtttcatcactataattaatccatttcaaatggcctttatgccaaattattttattatatgctctttctgtgccatgccttgttttccaaatttaccacagtacaaattttacaattagttttccattactgaattagtaccaatctgtcttaaaaaataaatacagtaaaaaatgataatgaatttatttcttcttataatactatca

SEQ ID NO: 373884 - DNA, 541 bp, Homo sapiens
cattataaactctgtcattattctctattgtgcttacctcaaactggtaactctttcaaatcttacctgtcagtttcttgaccaccatgcatgttaataacatttcttctctattttagacagcaaatgtttctcaatatttaaaaaaaaaaatatcctactctttggtcctctctacctcccatttcatccaatatcacttgttcgagacctgaactcgtacaggtttttaacctgttgaagactgtcactctatggactctactctcttctctctcctccatagccttctcattgcctatcttccctacttgtccaggaaatgatgacatgtttcatcactataattaatccmtttcaaatggcctttatgccaaattattttattatatgctctttctgtgccatgccttgttttccaaatttaccacagtacaaattttacaattagttttccattactgaattagtaccaatctgtcttaaaaaataaatacagtaaaaaatgataatgaatttatttcttcttataatactatca

SEQ ID NO: 373885 - DNA, 637 bp, Homo sapiens
aacaagttaaattgaaaactatattaaaaataaattcacaaacaaaaattacaaaatacacaatgaaaaataatatacatgccaggcgcggtggctcacgcccgtaatcccaacaatttcggaggctgaggcgggtggatcacctgaggtcaggagttcaagaccagcyaggccaacatggcaaaaccccgtctctactaaaaatacaaaaaattggccaggcatggtggcaggtgcctataatcccagatatttgggaggctgaaataggagaattgcttgaacctgggagggtggaagttgcagcgagctgatattgcaccattgcaacccagcttgggcaacaaagtgagactctgtctcaaaaaaaaaaaaaataccaacaataagagtcagcagatgtaaaacagcagaattaaaagtatgtgtaaaaatagatgaataatttgaaaaaaattataaaattaataatatgtaatgaacatatataaacactaaagacatttaaaaagaaatgaagagcagatttggcaaaggatatccaaaaataaaaatatagtaattgaatttaaaaacctatgagatatggatgattaaaattaatataataaatatatatcacagagaaataaagtta

SEQ ID NO: 373886 - DNA, 583 bp, Homo sapiens
ataagccagtttgggtttcccaagaatcagacaccaagatggtattacacatataagagagtaaccagagaaaacacctttgaagaataaagagaagatagagcaaaaggaggctgcaagagcctccagatcatgatgcaagcctggcacctcaaaagaagagagagcatgaaagataattggaaaggaggagcctcagagaagagtgcatatctgagaaattgtcagccacactggaagagcaccaaagtgaactttgacctttagatgagtccatgtgggacaagaatgaaaagccctataatatcttccttgctcagcattggcagggagsaacctaaggagagcatggcacctgcatgtaagccaaaaataaaattcaacgtccgttaaccaactaaatgggccctttatcttggccaagggcattttaaactaaacctgaaacagtaatggaggccatgatggaaatgggtggttgaacatgcttcgttatttactttcatccttttggaattcatgcatagctgaacagtgttaacagtaaagtagagacttaagaatgacaaaacagacccttcat

SEQ ID NO: 373887 - DNA, 583 bp, Homo sapiens
ataagccagtttgggtttcccaagaatcagacaccaagatggtattacacatataagagagtaaccagagaaaacacctttgaagaataaagagaagatagagcaaaaggaggctgcaagagcctccagatcatgatgcaagcctggcacctcaaaagaagagagagcatgaaagataattggaaaggaggagcctcagagaagagtgcatatctgagaaattgtcagccacactggaagagcaccaaagtgaactttgacctttagatgagtccatgtgggacaagaatgaaaagccctataatatcttccttgctcagcattggcagggagcaacctaaggagagcatggcacctgcatgtaagccaaaaataaaattcaaygtccgttaaccaactaaatgggccctttatcttggccaagggcattttaaactaaacctgaaacagtaatggaggccatgatggaaatgggtggttgaacatgcttcgttatttactttcatccttttggaattcatgcatagctgaacagtgttaacagtaaagtagagacttaagaatgacaaaacagacccttcat

SEQ ID NO: 373888 - DNA, 583 bp, Homo sapiens
ataagccagtttgggtttcccaagaatcagacaccaagatggtattacacatataagagagtaaccagagaaaacacctttgaagaataaagagaagatagagcaaaaggaggctgcaagagcctccagatcatgatgcaagcctggcacctcaaaagaagagagagcatgaaagataattggaaaggaggagcctcagagaagagtgcatatctgagaaattgtcagccacactggaagagcaccaaagtgaactttgacctttagatgagtccatgtgggacaagaatgaaaagccctataatatcttccttgctcagcattggcagggagcaacctaaggagagcatggcacctgcatgtaagccaaaaataaaattcaacgtccgttaaccaactaaatgggccctttatcttsgccaagggcattttaaactaaacctgaaacagtaatggaggccatgatggaaatgggtggttgaacatgcttcgttatttactttcatccttttggaattcatgcatagctgaacagtgttaacagtaaagtagagacttaagaatgacaaaacagacccttcat

SEQ ID NO: 373889 - DNA, 558 bp, Homo sapiens
ccctctgaccgctcttccgacccagcatgaggcttgcctggctgcactagcttcctgcttttaggtggaccagaagttcaagggtgtgaatgagagtatagctaagcctcgaagcgaagctgggatgtagytggcacctgcatggccatgggctgggccgacatagtctcagaactgatctgggcactgtggctgattggcaagtgttaagtaggccaggtctattcacagtttgccaattcccagcctttttcctgaggaaagtgttagtacagttcagtattgctatttaaagatttctcctctacctgctgccacttctgtttgttcaggaacaaggaattggttatttatgcttcgcaatcatgtatgctgtagttagaggaacagtgctaacaaaactccgcatccccaccccaggccctctatttagcatatgtccctgtggcttctcccagtccccagcacgctggcatgcactgcccaagtccctgccatgtgcatgctgagacagcggcgcctgcctctgcttctgtgtccagtgtgtggtggggcaaa

SEQ ID NO: 373890 - DNA, 413 bp, Homo sapiens
cttatatacagaggtgataaaagaaaaatagaaatccaggaagatttagacttagctactaggctctgtaaacgacattgtaattgcaggatagaaatcytgagctattaatagaaaccacatctacggattaggctcttgggggaccaagataagaaaagagacaaacaaaataatatatgagagtaagacagacagatagacagatgattggtagatagatagatagatagatagatagatagatagataaatggatgccactttcttaaagtggccaatttaaaaataatatttttaaataaaaataaaaaaatttacttgataagactggccactttatttcatgaaatcaagtggccaggcttattaagaaaaatgatactaagaagtacaacaaaatagagtattta

SEQ ID NO: 373891 - DNA, 582 bp, Homo sapiens
cattggacttcagagaagattatctgacaagtggcaatactgctatacttcaggtaaaattacagtcccattagctgagagtgcaacacacaatgtgtataaaattgtaaacttatatacagaggtgataaaagaaaaatagaaatccaggaagatttagacttagctactaggctctgtaaacgacattgtaattgcaggatagaaatcctgagctattaatagaaaccacatctacgrattaggctcttgggggaccaagataagaaaagagacaaacaaaataatatatgagagtaagacagacagatagacagatgattggtagatagatagatagatagatagatagatagatagataaatggatgccactttcttaaagtggccaatttaaaaataatatttttaaataaaaataaaaaaatttacttgataagactggccactttatttcatgaaatcaagtggccaggcttattaagaaaaatgatactaagaagtacaacaaaatagagtatttattctcaaaaacatgcaagaaaatataggcacataagactacgtgtgtgtgtatgtgtg

SEQ ID NO: 373892 - DNA, 569 bp, Homo sapiens
catttttgcttagagcatcctcattttatatcagcatttttgtatgctgcaaaatatcatgcaacatgttgtattactagtgtcattttatactgtcaaatctataaaaggctttttgtaactatttctattgctctacaatatctaccaaaatatagcttttaatttgtgttatttgattaatataatttaaaaaatacctatagtatattaaagattctttttgacttctggaccacattggtgaacaataaaccaagtgcaaaaatgkaccggtctaatcaaaaaaaggaatagacaatttcaatctgataactatcctgagcactagcacacagattcctaaagtgacatataggaatgagaactaactcaatccagaaagttcttttaaaatgttatagaaatatgtgactgagcacagtggcttacacctgtaattccatcattttgggaggccaaggcacacagatcacttgaggagaaaaaattagctgggtatagtggcacaggtttttaatctcagctactagggaggctgagccacaagaatcactcaaacccaggag

SEQ ID NO: 373893 - DNA, 614 bp, Homo sapiens
gtgcctccagaattacaatttcaaagaccgcaataaatgcctgtcttattgcattgcagtctggttttccacctcttcttagttcacacttaaatgcatgatagtaattgaaaaaagccaatctgaaatggctatacattgcactatatcattcaaacaatatgacaatcagtaaaaggcaaaactayagagacagcaaaaaaaaactcagtggttatgaggcagaaattgttaaatcagtggagcagagaggatgttcaaatcaatgaaactaccctatatgatgctataatggtgaatgcatgtcattatacatttgtctaagcctatggaatgtacaccaccataagttaaccctattgtaaactatggactttgggtgataatgatgtgtcaatataggttaattgattctaacaagcatgccactttggtgcaggatgttgacagtggggcaggctgtgcatatgtgggaataggagatgtatggaaactataccctctacctcatttgtctgtgaacctaaaactgctcttaaaaatgaagtctgtttttaaaaaaccatctaggcccagtttcaagtacctttgttagggttattatgtctagagga

SEQ ID NO: 373894 - DNA, 438 bp, Homo sapiens
tggacaaatatgtgcctccagaattacaatttcaaagaccgcaataaatgcctgtcttattgcattgcagtctggttttccacctcttcttagttcacacttaaatgcatgatagtaattgaaaaaagccaatctgaaatggctatacattgcactatatcattcaaacaatatgacaatcagtaaaaggcaaaactatagagacagcaaaaaaaaactcagtggttatgaggcagaaattgttaaatcagtggagcagagaggatgttcaaatcawtgaaactaccctatatgatgctataatggtgaatgcatgtcattatacatttgtctaagcctatggaatgtacaccaccataagttaaccctattgtaaactatggactttgggtgataatgatgtgtcaatataggttaattgattctaacaagcatgcc

SEQ ID NO: 373895 - DNA, 614 bp, Homo sapiens
gtgcctccagaattacaatttcaaagaccgcaataaatgcctgtcttattgcattgcagtctggttttccacctcttcttagttcacacttaaatgcatgatagtaattgaaaaaagccaatctgaaatggctatacattgcactatatcattcaaacaatatgacaatcagtaaaaggcaaaactatagagacagcaaaaaaaaactcagtggttatgaggcagaaattgttaaatcagtggagcagagaggatgttcaaatcaatgaaactaccctatatgatgctataatggtgaatgcatgtcattatacatttgtctaagcctatggaatgtacamcaccataagttaaccctattgtaaactatggactttgggtgataatgatgtgtcaatataggttaattgattctaacaagcatgccactttggtgcaggatgttgacagtggggcaggctgtgcatatgtgggaataggagatgtatggaaactataccctctacctcatttgtctgtgaacctaaaactgctcttaaaaatgaagtctgtttttaaaaaaccatctaggcccagtttcaagtacctttgttagggttattatgtctagagga

SEQ ID NO: 373896 - DNA, 597 bp, Homo sapiens
tgtaacatattattttagttccacttgtctcatgttacatttgaattaaaagtttctatttttagtagcaggaatttaattgacctctactgactacattttatgtaggtatcagcccataattgaaaggttgaatatatgagtttggttatttttatccagatacagttaaagcaataaaagtgaagtcagttagcattcaccaaagttctaagaaatacattaatttcttttattaaacaaaatattatttgttaaygcaattgctttcacttatgacatagatgattactagcaaagaaaaagattatgtgggtgtcccttgatgaaacatgattaagtctatagtcagcaaaaattcaaatttcaattttccacatcctagttgcctgacattggcaagatacttagcctttttaaaatatatattttaaaggtttagaatattgtggattgcatgtgatgatatgcatagctgccttcgcacactatcttcgcacactataaaatatgtactcgataaatttcctaagattcaaatcaatgaaaaggatgcagtagataagcaagaacttctttttaccaaatttgttcagt

SEQ ID NO: 373897 - DNA, 556 bp, Homo sapiens
gataacttgtattttagaatttttttatttcagagttgtttcttatgctaccaatagacatttcgtttttagaaagagagctctgacatccccaaatatgttctggattaatagtaaaatttagttcaatcattttaatgtataaacttgtattaacaataaaaacacatttgccttttgaaaattattttttcagcaatttgaaagattgctaaagtcaatttgctcaacatttcaatggttttcatagttgaaacagctcacaaaaacgtggttccaaatggcaaacttgaccacaagcttgaatgtaaattacgttaaaacaagataacacaagacagaacacaaattaatctagcacgtctaatctgtgataaatcccaacacaatgaaagcaaatggatatgggaggcaaacctcttctcttaggataatttacacactatactgtgatatatgggccaaatgaagggtacygtgtctacctgcacaaaagacacaccaatgaagcaccctccccatgtaacctgtagtttgcagttcattcacatccatt

SEQ ID NO: 373898 - DNA, 607 bp, Homo sapiens
ctaattatgtttagcatgccacaccaacagcagtatggggaacgttacaataaaaaatatgttaatttttatagttctggctccttattctcccaacccaagcaataaattctcatatttttgggttccagacatgtcacttttgaaaagaaagtggttatcaatatgtgcatagtatgctactattattaaatcatcagtggactcttgaatcttttttacagtggctttccaggaaataaaaatggattcagtttgatcttcagcaaatctggaataacgtgccatttcatgataacaccatatattatacagtgatcttatccatttcccatcgtcttgttttacagaatagatttgatcttatcaccatctaaacctcaccagtgtagacgtgtgcgtgtgtgtgtgtgtgtgtgtgtgtgtgtgtgtgttgagagaaggtctttttcattttatttacttacaggttctcaaagaaaaggcaattatagttctcttaaaatatataatttgacctacctactgcaagtaatatggrcgagacttttctgcaatagatactatttaacaggatattttaaagaaatatctgaggtatagatgt

SEQ ID NO: 373899 - DNA, 410 bp, Homo sapiens
taatgatgatttgtgatcattctgtaatctagctggttagtgatccttaatcagtttagtcattttagcaggtttttttggtkaattaattctttagacatatttcctttttgtgtctgttttgaaataatgtttgagttttaaaatctgagaataatttttatattgcaaatcatttttctgtaacaaattaagataggagatcctccagtatcagtcaataagttggacatgtaatatgcttgttccattagtacttgaaatttaaagtgaaatctgtaatgataatttaaaaaaagagtaaagctgaatgcagtggctcacacctgtaatctcagcactttggacggctgaggtgggaggattgggtgagctcaggagttcaagaccagcctgggcaatatagagag

SEQ ID NO: 373900 - DNA, 641 bp, Homo sapiens
acaaaatacatgtatatatcaagagacgtggggagtatttttgcagtataaatgacagacttttgtttattaacatgtagaataatttttaaaatttgataatagaaatccaataagaaattgagagggaaaaaaagatacagtttaatgacagagcaggagtatcgccatcttgaacaagcccctcattctaaagttcaccttaataaaaaaaccacctaaatccaaagggcatcagcctaatagctaaggtcagcacgaccataaaccacaaataacatctccaatcagagacattccaaactcctccctgaccacagacatgctagccccaagataacccccttccagccrggaagatgccagccctgagttaacccccctctggccagaaagatgtcttccccaaggtaacctcccctccacccagagacattccaaccctgccataaacttctcccccacatataaacattccaagcttgtgataagccccttcaccctaaaaccaatatatactcttagtctgtaagagaaagcactcctgacagaaattggccagaagcccctctcaggttttatctaaagtaaatctatctttaactattgagctgaattttgtgtttctttcctctttcttt

SEQ ID NO: 373901 - DNA, 641 bp, Homo sapiens
acaaaatacatgtatatatcaagagacgtggggagtatttttgcagtataaatgacagacttttgtttattaacatgtagaataatttttaaaatttgataatagaaatccaataagaaattgagagggaaaaaaagatacagtttaatgacagagcaggagtatcgccatcttgaacaagcccctcattctaaagttcaccttaataaaaaaaccacctaaatccaaagggcatcagcctaatagctaaggtcagcacgaccataaaccacaaataacatctccaatcagagacattccaaactcctccctgaccacagacatgctagccccaagataacccccttccagccaggaagatgccagccctgagwtaacccccctctggccagaaagatgtcttccccaaggtaacctcccctccacccagagacattccaaccctgccataaacttctcccccacatataaacattccaagcttgtgataagccccttcaccctaaaaccaatatatactcttagtctgtaagagaaagcactcctgacagaaattggccagaagcccctctcaggttttatctaaagtaaatctatctttaactattgagctgaattttgtgtttctttcctctttcttt

SEQ ID NO: 373902 - DNA, 641 bp, Homo sapiens
acaaaatacatgtatatatcaagagacgtggggagtatttttgcagtataaatgacagacttttgtttattaacatgtagaataatttttaaaatttgataatagaaatccaataagaaattgagagggaaaaaaagatacagtttaatgacagagcaggagtatcgccatcttgaacaagcccctcattctaaagttcaccttaataaaaaaaccacctaaatccaaagggcatcagcctaatagctaaggtcagcacgaccataaaccacaaataacatctccaatcagagacattccaaactcctccctgaccacagacatgctagccccaagataacccccttccagccaggaagatgccagccctgagttaacccccctctggccagaaagatgtcttccccaaggtaacctcccctccrcccagagacattccaaccctgccataaacttctcccccacatataaacattccaagcttgtgataagccccttcaccctaaaaccaatatatactcttagtctgtaagagaaagcactcctgacagaaattggccagaagcccctctcaggttttatctaaagtaaatctatctttaactattgagctgaattttgtgtttctttcctctttcttt

SEQ ID NO: 373903 - DNA, 532 bp, Homo sapiens
atgattaaattatgctggataaataagagtggaggaatgttaaatattttctttgcactttacagtatattttatactagaaaatatatgtctctttcatgtaaaaagaaagatgagctattagaaaagaaacaattttaaaatatttggaatatagggcagagctctagaggcagagaaacaaaatcagacaaaaatgaaaagcaaataaacacatttctcctttcctatttggatttaataaatatattctttygcaaatatgacctagcactggtcgaaaatgataatgcatttcttgcaatgtcaaaagctttaataaaacctaagtagcagatttatgcagatgttagatatgaattaaatcacaaaagttcccaaaaggtttacgatcattatatcagcatttgtcatattcttttttgtgcttttttctttgcttgaatatagagtttcataatgctttgaatatatttatttgtcagtcaatacatattagttacaaagggaaaattagttacatgccatagtt

SEQ ID NO: 373904 - DNA, 580 bp, Homo sapiens
catgtctccaagtcttttctaatctatgacagtttatttttcttccctgctgttcatgactgttcagatgtcttgtaaaatgttcctgagttgggtttgtctgatgttttcttgtgtgatatagtttggatatgtgcccccacccaaatctcatgttgaattgtaatccctaatgttgtaggtgaggcctagtgagaggtgatttgatcatggggatggtttctcatgaatggtttaccactatcmccttggtgctgtacttgtgatagtgaattttcatgagatctggccttgtaaaggtgtgtagtaagacgactgctcctcctttgccttccaccatgattggaagctttctcaggtctcccccaaagcagaagctgctatgtttcctgtacagtcagcagaaccataagccaattacatctccttgctttataaattacacggtcggactaatgtatcaggattacactggaattatttattctgggaaagaatatcaaagaaatatccctcgccactttccatatactagttgttggaagcaagccactaagtccagcccatgctaaaaagaaat

SEQ ID NO: 373905 - DNA, 629 bp, Homo sapiens
accaggtaaaatagagctaaatgagtatatgtgtgcacatctgtgtggatgtttgtgcatgtggatgctatttaacttgactttctagattttctattcgtttttgtttgtttgtttgtttgttttggagacagaatctcactctgtcgcgcaggctggagtgcmgtggtgcaatctcagctcactgcaacctccgcctccagggttcagctgatatcttctgcctcagcctcccgagtagctggggttacaggcgcccaccactatacccagctaatttttgtatttttagtagagacagggtttcaccgtgttagccgggatggtctcgatctcctgaccaagtgatccacctgtctcggcctcccaaagtgctgggattacaggcatgagacaccactcccagcctcccctccatagttttaaattgtacacttctcaatctccgtttaccatctcctccttttaatacctcaacttcatcaatcttttgacttctgttaagttcttcaatccattttatcctattattttcactgtttattaacccatgatgagtactcatactttacattccatggtaaatcattataatcatattattacatatacattaatccctttgcttc

SEQ ID NO: 373906 - DNA, 629 bp, Homo sapiens
accaggtaaaatagagctaaatgagtatatgtgtgcacatctgtgtggatgtttgtgcatgtggatgctatttaacttgactttctagattttctattcgtttttgtttgtttgtttgtttgttttggagacagaatctcactctgtcgcgcaggctggagtgcagtggtgcaatctcagctcactgcaacctccgcctccagggttcagctgatatcttctgcctcagcctcccragtagctggggttacaggcgcccaccactatacccagctaatttttgtatttttagtagagacagggtttcaccgtgttagccgggatggtctcgatctcctgaccaagtgatccacctgtctcggcctcccaaagtgctgggattacaggcatgagacaccactcccagcctcccctccatagttttaaattgtacacttctcaatctccgtttaccatctcctccttttaatacctcaacttcatcaatcttttgacttctgttaagttcttcaatccattttatcctattattttcactgtttattaacccatgatgagtactcatactttacattccatggtaaatcattataatcatattattacatatacattaatccctttgcttc

SEQ ID NO: 373907 - DNA, 603 bp, Homo sapiens
taataacttaaatcccaaaacagtaaaaatgatagaaatatccctatttaaaagttaaagaaacagagattaaggaaagttaagtggtgtgtctaatgttcaaaaactagtaattggtagtgwtttattatgtcctgaagctgattatctacactactgactctctatttaggtattacatactcaattatttctcttgaacatctcacagttctgaatatttctaaagtttgaaagaatcatggataagaaacaagtagtttatgatgtaattcataactaaaacatatttatcctgtgttaaagcaaatataccttaaaatatgacacactaataataattaagaagctaaatgacaccatttattcttaattatattactttatatatatatatatatattcagcaatctgaccaatgtagtactttgctctgatactgttattttgtaatatttcacttttttcactgtatcatgatatggtctttcccacagatatgaaaatcaggttttcattttctacaacataaaagttaatttattcaataatcttaatcgattcttacatggtgttttcaaaaatgcagttgcattgagggaa

SEQ ID NO: 373908 - DNA, 575 bp, Homo sapiens
tccattaatatttcccagactgatatattcaatcttgaagtttttttagaatcatgtggacattggcttaccaaatagtcagaacattagtaatgaatttggattattaacttagtattaaccatgaataagtaaaaagaaattaatgtgaaacatagccttatttcattgagttaggtatagaccctttggtgactgattctaattaatatgtttcttctctattttataagttattagtatttattaaactgtaaagatttaagctttgttttattatgaaattatttttatagatgtatggatttttataaaatcttactttaaaatttggtgataagcatatgaataaactatagtttgactagtgcatatagatagtttgaaaaactacatatcctttatttcttcatagaccaygagtcagtaaactattgcttgtgagtcaaatgtgagccctgtgatcccactaccaattcgtgtatgagctatgaatgtttcttacatttttaaatggctaaacaaaattttaagaataatattttgtcatgttttaaacttatgcacaattcaag

SEQ ID NO: 373909 - DNA, 441 bp, Homo sapiens
ccagccacatccttgctaccaccctcttactacttcctattccagccaaactgtattagtttttaatttatttcactcagttattcttattacagtttaaatatagaaaatacaaaatatggatatttattttatttcttattatacaagcatatccatgttatctttgatattgctacttggtccacacaggtggataaggtaccatatttaccatctgaccctttatagaaaaagttagctgacccctcgtctaaactatgaagacagaaacatctgtttttttccttattgtagtcccacaacaggtgtaaatgtgtcctaaatgaatatcaktaagtgaataaatgatggaaaaattgtattttcctgtattgtctaataacctgatatattcttattctttatctgtcacctatttatcctaatttcaactaactt

SEQ ID NO: 373910 - DNA, 527 bp, Homo sapiens
atactagttccagcaaaaattaaataagtacattaattacttgtgtatgttacaataaatatgctttaaaaataaagtcatcagtaaatagaagatagccagctaatgcagccaggtggaacagctcccactgaaatgactggcgtgcttmtaacagctcttcagagggaagatgctaagtgggtagggaaggaaggcacagaagctggactgaagggggataaagctgggaacactgtatggggctatggcacagaggcactcatttttggaccgcaacagctccaggggaatgagtaagttaaattggcaagcagcaaccttgtcttgccatgggcctctggagccccagcagtaggagacctcaaacaacacgaacactcaagttggcagaaagagcttttagagaagtgggaggagcagcaagacagctgatgtgaagcccagaaggtttgatgcagaaacatctgaagtggagtatggacagggatggccatttctctagacttgacttgttgccataggag

SEQ ID NO: 373911 - DNA, 527 bp, Homo sapiens
atactagttccagcaaaaattaaataagtacattaattacttgtgtatgttacaataaatatgctttaaaaataaagtcatcagtaaatagaagatagccagctaatgcagccaggtggaacagctcccactgaaatgactggcgtgcttataacagctcttcagagggaagatgctaagtgggtagggaaggaaggcacagaagctggactgaagggggataaagctgggaacactgtatggggctatggcacagaggcactcatttttggacygcaacagctccaggggaatgagtaagttaaattggcaagcagcaaccttgtcttgccatgggcctctggagccccagcagtaggagacctcaaacaacacgaacactcaagttggcagaaagagcttttagagaagtgggaggagcagcaagacagctgatgtgaagcccagaaggtttgatgcagaaacatctgaagtggagtatggacagggatggccatttctctagacttgacttgttgccataggag

SEQ ID NO: 373912 - DNA, 427 bp, Homo sapiens
tgcggcacaataagtgtccttcagaattagagcacacagtacaggaatcaggagttgaatgttggccccctaatacgttccagaaattaagccagtctgctgaaaccacattataccataatcaatccctcacagtcatcaaataggattaaaaaaataaaaaaacatccaaatgtcagcaatctaaaagattgaaggtagataaacccacaaatatgagaatcagcacaaaaaacttgaaaaactttaaaagccagaataccttctattttccaaatgattgcatcacctctccagcaatcatctttccagcaaggcttcygaaccaggctgaggtggctgaaatgacagaaaaagaattcagaatatggatacgaataaaggtcattgagctacatgttgaaactcaatgcaaggaagctaaaaa

SEQ ID NO: 373913 - DNA, 427 bp, Homo sapiens
tgcggcacaataagtgtccttcagaattagagcacacagtacaggaatcaggagttgaatgttggccccctaatacgttccagaaattaagccagtctgctgaaaccacattataccataatcaatccctcacagtcatcaaataggattaaaaaaataaaaaaacatccaaatgtcagcaatctaaaagattgaaggtagataaacccacaaatatgagaatcagcacaaaaaacttgaaaaactttaaaagccagaataccttctattttccaaatgattgcatcacctctccagcaatcatctttccagcaaggcttctgaaccaggctgaggtggctgaaatgacagaaaaagaattcagaatatggataygaataaaggtcattgagctacatgttgaaactcaatgcaaggaagctaaaaa

SEQ ID NO: 373914 - DNA, 550 bp, Homo sapiens
ctgaaacagacttggaaacttatggattattttaactgttaggttgtgaatgattgtatctgaattttcagaggtgataggatgcatcaccatatccaatgaacctggtatgcaactaatgattgggaaaatacatttttaaaaattttatcttttagtagtgactatcaaaagcaaataatttccatctgaaagggccaacaatgtaccttcactgttacatgtctgcagctatatcaagtatctagccctatgttaaagtcaagtccatagggcatgggttgcctttctatctcatgggtcawcacaattttctaatgatgctgattggatctgatgaataggaagtagcaactactctagacatgtttttgggacatgtgaaatacatgctttggatatggattttcctgcaatgcatctgtcaaaatgactattttgggacatacagactaacttattccctatcatggtattatatacagcactgcttctgaccatggagatcatttcatagcaaatgaattatgaaaacaggctcatactcatg

SEQ ID NO: 373915 - DNA, 570 bp, Homo sapiens
gggtatatagtaccaggagtctgagggggcccttttgaattgtgagatgtggacccatggttcaaagccctgaagcttctctgcactgtgggtggtaagaaggacttggtatggtcccatccaacgaggttcaagagtgatcttcttctgatgtcatttccggaaggcccagtctccaaattccagaccatggagggtttgattgtcctcagttggtggatcttgaaatgcttcctttacctggtggaagtatactttggcrtaatacattaaagccttgcagtatttagtcatatcagagtttaagagagcaggagaagcatgagatgctattattagggacatgggcctcccagtgactatttcataaggggtcaatttatgttttccaacaggattgaatctgattgccattaaaaccaaaaggtagtacctttggccaaggcaactcaattgattcagttaacttggacagtttcagttttcaaatgccatttgttctttcaagctttcctgaagactgagggtaataaggacaatggtaatgcaactgtgtcagtaacaccttat

SEQ ID NO: 373916 - DNA, 572 bp, Homo sapiens
ttttgtctttacaaaaaacaagaacaaaaattagttgggcatggtggctcttgcctgtagtcccaactgcttgagaggctgaggtggcaggatcccttgggcctatgagattgagggtgcagtgaaccatgattgcacctctgcactccagtctgggtgacagagcgagaccctgtctcaaaaaaaaaaaagtgagtagcaatatgatgttgtgtgaagtatatcatatataagacttgagagttttagctttcgcagattgtgatcttggacaaatcgttacacagtcatccagtaacttttttctcaccgaagaaacaatgaargtaacttagtaatttctaaggcccagtctaatagtctctgattgttaataatagcaccataacttgtattgttttgtatattcaaatttttaggttaaaagttctcaaaattaagtacactgacatgaagcttctgcctggggaccatctcttttggattttgtttttataggttgtccttaatgacctggaattgttataacagctgtcaactgaggtaagcttcacagaaggggagctgcctta

SEQ ID NO: 373917 - DNA, 537 bp, Homo sapiens
taataattgccctactgatatacattgattgccttctatttggcattactagtaatattgcagtgattatttctgtgtataaatcttgtcttgtgttttgtataagctagaagggttttttttttttttttttttttttttggcaaaaagccttagggacctaaaatcctaccctttggaggtctacacatttgggaggccagtttgacttttaatactcctgtcaggagtaaaaatctaagggggagctcatcttttcattaggggctccgttgtcatgagggatgcggtttggaggcacaaaattgccacatttgcttttcaccttcccggaaaagtttgaggaaaaactttgtgacaaacaagtcatgaaccctctttttcttcagggaatttccaaaaaaggcagtatgttcwtttaaaggatcaattttgaccaagcaaaacatgttacggggtgaatagggctcttgcaccaaactgcggggcttcatatttcatttcaaaaatttcccatgtaccttctccctgctgttc

SEQ ID NO: 373918 - DNA, 586 bp, Homo sapiens
gtgtgtgtgtatatatatgtatatgggtatgtatgtatatatgtgtatatatatgtgtatacacatatatatacacatatgtgtatacacgtatataatatgaactgccgttggtaaacaagactcaaattcaaattaaagtcactttacacaattatgttgtaaaatgctggcaatttttgattgtttattcttatttttcacaaggcaaacaatataatctgtgtgatttttgccttaaaacttaatgtcagtaacaaacatttgatttcaataaaaagtttaactaaagagtaattctcatctgattatttatattttctgttcgaagatgctttttctaattgggtractcttgtttataatatacaagagattataggaatattgtgcatatacactcatgcataaaggtgtttcagtcaatggtgaaacataaagatgtttcagtcaacgatgaagcacatatataatggcagggccataaaattataacgcaactgaaaaattcacattgcctagtgacatggtcattttaatgtcatagcacaactcattactcacacatttgtgatgatgcttatgt

SEQ ID NO: 373919 - DNA, 617 bp, Homo sapiens
tttaaactttcaatttctcttttgtgcgtatatgtattagttaaggcttgttttgtttgaaaacagtaaatcctaagtcaaacttaagtgaaaaaatattattaatggaggcttataagagggcttcatatatttgctactaggaaaatagtagcattccagacctcaagcacatcctgtttgtactaaaattttcccaaagctccttctccatatcttctattttcttatatctatgtatatcagcataatttttcttttcacgtatgcaggattacctccacgtactgtactaaagtcttgcgtattttattggactagatgaactaaaaattatataaaaaagaaattgtggggtcagggagaagactgaaggctgaagttgtatcatctcatttggctctctgccataatttaattcaacaatcattcccacgtttggacttgttttatttctaggtaartctatatgttgcaaaattgtattctatccctaaaggtctacaattgtatactgcaagtagttgaagatttaagcctcctctttccttacagtgggaaaaagtgcaaatgcttcaatttttaaaagcatcatgtgttccataataagaaaaatt

SEQ ID NO: 373920 - DNA, 544 bp, Homo sapiens
gaaaacaaattggatactatactatagtatccaataacaataataaaaataaaatatagcaaatgggcaaacaatagagaaaactaatatcagcaaaattattttacttataaaattctataaaattgatagtcctttagctagaccagttgttactgagaattctacattggggtggatcctttaaccaaggagatcaacagagctgaagctctggagcaggaatcttggatcttgtgatagtgagcaaacaattgcaaactaacaccaaaaggtgagctcaaagcagtttattgaagcacagtaatacactctcagagggagagcggattgatttctgtaaagtgaaatcagcccctctttacaaaactcaaggtgcttctgatacaggaggtaaaaagaaattatttaggcagatagtgagggcaacgtagtcctcaggcagaacttcccwtctaacaaaaagaagccccaaaatcatttcttttctaacaaagagcagcctgaaaaatcaagctgcaaacatagataagcaaggtggaag

SEQ ID NO: 373921 - DNA, 627 bp, Homo sapiens
catgaacatttcagctcttcatgagtcttgtacattttcctttattccagtgttacaatcttcaaaatcatcagcatcctgtatttgagagcacctgttactgttctatagcttattataaaccatcttttgaaaagaacttaaacaagacaacaattatctgtgaatagcaaaatgtccagggtagttacagttagaaacacaattgacagagaagcttggttatctctgtggtttacaataacttaacatagaaaccttaattatgattcagagcatatacttagacattagaattttagaaagcccatacaattttgaaacatatattagcattattcaaaaaaataaaagctaaagaagattgagcattattttggcaatctcatgtacctaaacatgtcaaataatcctgtttacctctgttttctggacactttgggggccctctgagtattcaaaaaggcasagtccagggaagacaattttgaaactgaagtttgattttgggaaggctgttaaatgtttgaggtttaaaacacttgatattatggaatagaattccagatgaccataagttatttattttgccaaaatgatgactcagaaattttaaaaaagaaaaaa

SEQ ID NO: 373922 - DNA, 572 bp, Homo sapiens
tacacatctccccattatatctcaatcacctcatctcctttagagagacaggaataggacctgcttttgtggtctgaaggctgtccctgcattctctggttctctctccttttttccatcgagaatttctccaataactatcttgtakatctaatcccatcttggcgtatgctttcttgaatatccaaagcaactcaatacttttttaaaaaattataaacctaatcagttaagaaaataaaattttgagtaccaagtgtgagtccaaactgataacttgagtccaaactcatagctctgacactgatttaatggcaaacctcctctccaccatctcattcctggtattgagagaagccttcattggcatgacacctaaagctggattttcctctttttctccttattgtgctatttctcttctctgtccctctgtaatcttattactcagtccagagaatgtggagagggaatgaagagaataggtaaggagaaataatgtatcattgggaactagcttctctctccctgggattgatggttgcttaaagctgactctgttatggattctt

SEQ ID NO: 373923 - DNA, 572 bp, Homo sapiens
tacacatctccccattatatctcaatcacctcatctcctttagagagacaggaataggacctgcttttgtggtctgaaggctgtccctgcattctctggttctctctccttttttccatcgagaatttctccaataactatcttgtatatctaatcccatcttggcgtatgctttcttgaatatccaaagcaactcaatacttttttaaaaaattataaacmtaatcagttaagaaaataaaattttgagtaccaagtgtgagtccaaactgataacttgagtccaaactcatagctctgacactgatttaatggcaaacctcctctccaccatctcattcctggtattgagagaagccttcattggcatgacacctaaagctggattttcctctttttctccttattgtgctatttctcttctctgtccctctgtaatcttattactcagtccagagaatgtggagagggaatgaagagaataggtaaggagaaataatgtatcattgggaactagcttctctctccctgggattgatggttgcttaaagctgactctgttatggattctt

SEQ ID NO: 373924 - DNA, 572 bp, Homo sapiens
tacacatctccccattatatctcaatcacctcatctcctttagagagacaggaataggacctgcttttgtggtctgaaggctgtccctgcattctctggttctctctccttttttccatcgagaatttctccaataactatcttgtatatctaatcccatcttggcgtatgctttcttgaatatccaaagcaactcaatacttttttaaaaaattataaacctaatcagttaagaaaataaaattttgagtaccaagtgtgagtccaaactgataacttgagtccaaactcatagctctgacactgatttaatggcaaacctcctctccaccatctcattcctggtattgagagaagccttcattggcatgacacctaaagctggattttcctctttttctccttattgtgctatttctcttctctgtccctctgtaatcttattactcagtccagagaatgtrgagagggaatgaagagaataggtaaggagaaataatgtatcattgggaactagcttctctctccctgggattgatggttgcttaaagctgactctgttatggattctt

SEQ ID NO: 373925 - DNA, 459 bp, Homo sapiens
tatcaatacacttttatttccctacaatcttcctattttctgcctgttttggacttaggggkctattagttataaaaataattatcaaataacttatttgaaaatttctaagagattatttttcccctcacattcaaatttaacatttatcatactattattctttatattgttttggaaatgttacatttataataaatatataactataatcacttacacataattaaaacacctgaaaatagagagtaagcaacagattgaagatgtggtgtttggagtttcttctcgcatatacactgaaaattgctaaaaatacttaggaatattttgctgggttactaggttttagaaatagaagtacagggtgacaggtaaatatctgactcaaaaatagttttttagatgtgttaattgaattaatacagtcccatcacaatgaatattttacctatgcca

SEQ ID NO: 373926 - DNA, 459 bp, Homo sapiens
tatcaatacacttttatttccctacaatcttcctattttctgcctgttttggacttaggggtctattagttataaaaataattatcaaataacttatttgaaaatttctaagagattatttttcccctcacattcaaatttaacatttatcatactattattctttatattgttttggaaatgttacatttataataaatatataactataatcacttacacataattaaaacacctgaaaatagagagtargcaacagattgaagatgtggtgtttggagtttcttctcgcatatacactgaaaattgctaaaaatacttaggaatattttgctgggttactaggttttagaaatagaagtacagggtgacaggtaaatatctgactcaaaaatagttttttagatgtgttaattgaattaatacagtcccatcacaatgaatattttacctatgcca

SEQ ID NO: 373927 - DNA, 531 bp, Homo sapiens
tatatattaaaaagattaatacattatgaccaagtaaggaatatcccaacataagattatttcaatatctaaaaatcaatatattttaccgtattctcagactaaagaagaaaaactatatgattgccttcacagctacatacaaaaatttagaaaaattcagacttctgataaaaactctcaacctgttaaaggacatatctgtaaaacacagctatcatcacacttaagagtgaaagacggattgtcttccccttgccgtcaggaaagaggcacagatgcctaatctaatcacttctattcaacattatgctacagatcttagataatgcagtatgtaaggacatgaaatgaaagaaaaatagtttggaaataaagaattaaaactttttatttgcagactacatgatttyctaatagtgaatactaaagtatctgtaagtaaggtatcacttgacagttttagaaccacaaaaattatgttttatcttaacagtaacagaatctacttcaaagaaagcatcaccgtaa

SEQ ID NO: 373928 - DNA, 523 bp, Homo sapiens
actacatgaggttaaatttctcaagaaataaatttaaaaattattttgaaatagtgaacagtgatttcactatagaaaacctaatccttctcactttaaaaaaatattttataaggattttgttttaattttgtagttcaatacttggattccatttttcttttcttttctttttttttttttttktttttctttagctttatgtgcctaggaggattgaacttcaagtggttacaatccatgattcaactttacaatatctaactttcttagattattagagtatatcagttaggaattttagattttaattcgcaaataacaataactggaataagactgagattaacattctctcagataacagcaagtccagcggtaggcataagcagctgttagaatttaaaacatcataccagataagatgggcaaacataaattaattttctttcaatagcattgcaataggggaaagatactgaactcaatcctactgaaattaaaggaggaaagtttgtaaaaa

SEQ ID NO: 373929 - DNA, 544 bp, Homo sapiens
attcagactgttggagtttgtagacatcattctggggcaggcagacctttaagactggctagcaggactttggtttgtagaaacataagtaaaattctttcatttctaaaagaggccataaagacaatttggagcaaatggctggttcccaaacttgatttattcaaacaatttgtgaataatagatatatttaaatcacatatcaaaaatatagaaatacattccccttgagaagttcagagtagagcaagaggttcttcaggaaagaggctgtttggattattgcgcttgactgtatgattcacttcagtgtgtgacccagccatttggtgatgggagaaacacacacatttaacatttgagatggcaaatcaaaataagttgccattctaaattaggtcttgaaggaatcaaaagcatcagactttcttgtgagatagcctcaaaatcataagatggagacctacctttttacttcagggaagtggagtggaaaagctaggaccagaacaatgtgagccccrttaacaacagtcagaaaca

SEQ ID NO: 373930 - DNA, 570 bp, Homo sapiens
agaaaactaagagatagatttcaatagtccctaaggacattagagtctctagggaaaacatgaaaatctccctgtggatctctaaaacactaagatgtatttttagaatgaaaccattctgacagaggctgtaatctagaaacaaactttggggttcacgaaacaatacttcaaaatgagggcctcggcagcaaccttggaagcaaaatgttttctctgaccttcttctgccgtcctctcagtccagttgtcccctgaggctagccatagaaactagaatccctcttccccaaggcaggtcatagaaaccggaaccccttttccctaaagctagtcatcaaacctaaaaatattaccctaatttttcytctacctttctgtgtaaaaactggccataaagaaattacctggcctactttgtttgaccatagatcataagatcctaattccagaaaggttccttctccatatccagaaggaagaaatgcatgctcagagaagccaagaagagtctagagatagataggtcttgctgggttgcaccactcagttgataaatgttagatcata

SEQ ID NO: 373931 - DNA, 587 bp, Homo sapiens
ttataatatgtaaatactcttactcctctctttttctgctacgttcccctttttaaaatttatatttgctctccagtccttcaatgttggaatctccactgtgccttcttcaacttgaaacattttagttagctgtgctcacatttagattcaatcccatgtatgtatttatccattctggattgacttgcatttgccagccagttccacattgataaacctgtcatctgtgcttatcaaatctgtgtgtgacctagttggagcattccttttctgcttctagacattcttttaggtcatgcattccctatctacatatccaacctggctctttggctgggactctgattggcataattgtcaatttctagaataagtasgaataaatttatttacagcagctacatacaaaatatgcttcttatatggtctttccagtctaagcaaaaattattttctatcatttgaaagtccaacctaatactaataaactatgaagatggtttcttaacttggagttaaataaaaagtaatcagtgcacattgttacattgggagaaaagatatttctgatgtgatgaataaat

SEQ ID NO: 373932 - DNA, 587 bp, Homo sapiens
ttataatatgtaaatactcttactcctctctttttctgctacgttcccctttttaaaatttatatttgctctccagtccttcaatgttggaatctccactgtgccttcttcaacttgaaacattttagttagctgtgctcacatttagattcaatcccatgtatgtatttatccattctggattgacttgcatttgccagccagttccacattgataaacctgtcatctgtgcttatcaaatctgtgtgtgacctagttggagcattccttttctgcttctagacattcttttaggtcatgcattccctatctacatatccaacctggctctttggctgggactctgattggcataattgtcaatttctagaataagtaggaataaatttatttacagcagctacatacaaartatgcttcttatatggtctttccagtctaagcaaaaattattttctatcatttgaaagtccaacctaatactaataaactatgaagatggtttcttaacttggagttaaataaaaagtaatcagtgcacattgttacattgggagaaaagatatttctgatgtgatgaataaat

SEQ ID NO: 373933 - DNA, 533 bp, Homo sapiens
atctcataattaataatatgttagccacttttgtgtctgacaatctagcagactatatttcctagaatatctttttaaaaaacaattaaaaatagtataaccatgcaatgggttcattttgcccattttccagatagagctgatttatcaagacagaggaattgcagaagagtttagttcatgcagagctgagtgaacmcaagaccagagttttattagtactcaaatcagtcttcccagaaattcagactgggttctttaaagattaatttagtaggtagggagccaggcactggggagggctgattggtcagatccaagatgtaatcatagaaagtcaaagctgtcctcttgtgctgaattagttactgggcgggggtcacaagaccaaatgagccagtttatcaatctgggtggcactggttgatatatcaagagcaaagtctaaaaaatatcttaagcaccaatcttaagttttacaatagtgatgttatccctaggagcaactaacaggtttagaatcttgtgacctc

SEQ ID NO: 373934 - DNA, 533 bp, Homo sapiens
atctcataattaataatatgttagccacttttgtgtctgacaatctagcagactatatttcctagaatatctttttaaaaaacaattaaaaatagtataaccatgcaatgggttcattttgcccattttccagatagagctgatttatcaagacagaggaattgcagaagagtttagttcatgcagagctgagtgaacacaagaccagagttttattagtactcaaatcagtcttcccagaaattcagactgggttctttaaagattaatttagtaggtagggagccaggcactggggagggctgattggtcagatccaagatgtaatcatagaaagtcaaagctgtcctcttgtgctgaattagttactgggcgggggtcacaagaccaaatgagccagtttatcaatctgggtggcactggttgatayatcaagagcaaagtctaaaaaatatcttaagcaccaatcttaagttttacaatagtgatgttatccctaggagcaactaacaggtttagaatcttgtgacctc

SEQ ID NO: 373935 - DNA, 533 bp, Homo sapiens
atctcataattaataatatgttagccacttttgtgtctgacaatctagcagactatatttcctagaatatctttttaaaaaacaattaaaaatagtataaccatgcaatgggttcattttgcccattttccagatagagctgatttatcaagacagaggaattgcagaagagtttagttcatgcagagctgagtgaacacaagaccagagttttattagtactcaaatcagtcttcccagaaattcagactgggttctttaaagattaatttagtaggtagggagccaggcactggggagggctgattggtcagatccaagatgtaatcatagaaagtcaaagctgtcctcttgtgctgaattagttactgggcgggggtcacaagaccaaatgagccagtttatcaatctgggtggcactggttgatatatcaagagcaaagtctaaaaaatatcttaagcaccaatcttaagttttacamtagtgatgttatccctaggagcaactaacaggtttagaatcttgtgacctc

SEQ ID NO: 373936 - DNA, 571 bp, Homo sapiens
attaagcagaactgatgtcaaaaaatccacacctaagcatatcattttaaactatagaaaatcaaagatacagagaaaaataccttaaaagaagttagaggaaaagcaataccttacttatggagaagccaagataaaaattatgcgtgctttttcttagaagtcatgcaagaaaaaacacagtggaataaaatactaaagtgttaagatttttttaaaaaaggaatcacaccaacctagatttctatattcgaaaaattaatcttcagaagtgaagaattgacaaacccataactaacatcatactgaatagagaaatgctgaaaccccttcctctaagaaatggaacaagtatgcctactttcgttacytctgttctacatagtactggaagtcctagccagatcattcagggaagagaagaaaataaaaggcatacaaattttttaagtgattgtcaaattgtttcttttttcagataacatgatcttatacttagaaaaacctaaatatttcccccacaaaaacttttagatatgataaacaaatttgataaagttgtagggtacaa

SEQ ID NO: 373937 - DNA, 571 bp, Homo sapiens
attaagcagaactgatgtcaaaaaatccacacctaagcatatcattttaaactatagaaaatcaaagatacagagaaaaataccttaaaagaagttagaggaaaagcaataccttacttatggagaagccaagataaaaattatgcgtgctttttcttagaagtcatgcaagaaaaaacacagtggaataaaatactaaagtgttaagatttttttaaaaaaggaatcacaccaacctagatttctatattcgaaaaattaatcttcagaagtgaagaattgacaaacccataactaacatcatactgaatagagaaatgctgaaaccccttcctctaagaaatggaacaagtatgcctactttcgttacctctgttctacatagtactggaagtcctagccagatcaytcagggaagagaagaaaataaaaggcatacaaattttttaagtgattgtcaaattgtttcttttttcagataacatgatcttatacttagaaaaacctaaatatttcccccacaaaaacttttagatatgataaacaaatttgataaagttgtagggtacaa

SEQ ID NO: 373938 - DNA, 558 bp, Homo sapiens
tcatcaatgaataaaagaataaagaaaatgtaccctatttatgagaggaatttaaagtttattgaaaattgaattaaaatataaaaataaaaaaactttatttctaacacaggcttcatcaaggtcaagacactttcgtaagcaatgacaatagccatttagtccaytcataaagaactgacagtcttgggaacttaaccatgtcaatgtagccctttttaaagtgtaaactcaaaaacatgggtgccctttacagatttttaagattaggagacaaaaaaaggaggcaaatcaggactataaggagccaaatcaggactttaaggtaaatgtctaatgagtttccatgaaagctctcacaaaattgcgcttgtttggtgagaggaatgaacagaagcattgtcacggtgggaagaatactctggtaaagttttcctgggtatttttctgctatagctttgcataaatttttaaaaacattgtccttataaggagaggtattcatcgtttagccctcaagaaagttaacagaaaaatgccttgatcattccaataaat

SEQ ID NO: 373939 - DNA, 542 bp, Homo sapiens
ctctaactaacaaagtagggaaataatagcaaattgaattcaaagtaggcagaagaaaaaaataaaaaattggagcagaaattaataaaatggaaaacataaaaccaatggaacaaatcaatgaaatccaaagctggtttttaaaatgacaaataaagtkgataatatgctcccattataactaggaaaaaaggagagatgacacaacttactagtgtcagaaataaaggggagacatcactgaagattccatggacattaaaaagataataaataaataaataatatgaacagctttatgcctttaaggtcgctaacctagattaaatgaccaattttctgaaagacagggcccaccaaaactcacacaataagaaatagacaatctaattaggctatatctattaagaaattgaatcaataaataatgagctttcaaaggagaaatcaccagacccagatgggttcattggtaaattttacacaagttttaagcaataaattataccaattctttacaatctctttcagaagatggaagc

SEQ ID NO: 373940 - DNA, 589 bp, Homo sapiens
acattaaaaagataataaataaataaataatatgaacagctttatgcctttaaggtcgctaacctagattaaatgaccaattttctgaaagacagggcccaccaaaactcacacaataagaaatagacaatctaattaggctatatctattaagaaattgaatcaataaataatgagctttcaaaggagaaatcaccagacccagatgggttcattggtaaattttacacaagttttaagcaataaattataccaattctttacaatctctttcagaagatggaagcagtaaaaatgcatcctaactcatattatataatttacacttatacaaaaacagtcaaacacattacaatcaaagtcattamaagaaaaggttattattcctcatgaaaatacaagcaaaaatcctcaacaaagtattagcaggctgaatccaacaatatacaaaaataattaaacatcacaaccaagtaagttttattcctggtatgcaaagctggttcaatattcaataatcaattaatgtaatcaataatatcagcagactaaaaaagaaaaatgatcatatcaataaatgtagaaaatg

SEQ ID NO: 373941 - DNA, 545 bp, Homo sapiens
atgaaaatacaagcaaaaatcctcaacaaagtattagcaggctgaatccaacaatatacaaaaataattaaacatcacaaccaagtaagttttattcctggtatgcaaagctggttcaatattcaataatcaattaatgtaatcaataatatcagcagactaaaaaagaaaaatgatcatatcaataaatgtagaaaatgtatttgacaaagtctaacatccatttattataaaaatgctcaataaactaggaataaaaggaatcttcctcatttcatgaagaatatctacaaaactatggagataatataatacttaacagcaagaaactagaaacttttaaaataagattaggaggaaggcaagaatgcaccctcttggaactctttttcaacattatattggaagtcctagctaatgaaatgaaaaaaaagaaaaaggtgtacasattgagaaaagagaaataaaactgtttttgttttcagatgatatgattatctatgtagaacattcaacaaaattggaacaaaaaaataagaaagaac

SEQ ID NO: 373942 - DNA, 359 bp, Homo sapiens
tgctggctcaactggacatctacatgctaaaaatgaagctagacacagaccttatactgttcacaaaaatttgctcaaaatgggtcatagacataagtgtaaaatgcatactataaaactagaagacagcatraaagaaaacatagatgatcttgggtatggatgactttttagattcaaaacagagccacagtccataaaggaaaacaatgatatgttggtcttcattaaaattaaaaatgtctgctttgtgacaacaatgtcagagaataagaagacaagccacagattgggagtaaatatttgcaaaagatacacctaataaatgatttctatccaaaatatacaaagaattctta

SEQ ID NO: 373943 - DNA, 569 bp, Homo sapiens
agatcgaacaagcagttcaatttgtaactgactgtgaacagtcaattgagataactcactacctttggaccagctaatgctgaataattttaacaaccaatcttttatttcaaggtgaatccaacagccagaaatgcttgaccaatgtccacttttgttctatggcccattcatccaatacattggtaatcatggtgagactgaattaacactcttggctcaatattaaaggtagtgattagttcaacatattggtaaacagtgtgtgagaattcaaactaattgtagaaaatatcctaaaattcaacaaagatattctcaaatctttcatctttcagcatgtcacccgtttttctaacacaaaaataaaagctcaagctcccatccaacaagaatgtagcayttccattcctttattagaatttctatccaaagtactttttttcattttctctctattttgctttcttttcttttgtgtttaagagttataagagaaagcttacatgatgctttactatcataaagaaatttttcaagctttcagtcaactttgaaatcacattatc

SEQ ID NO: 373944 - DNA, 579 bp, Homo sapiens
tcattctgtatttagaaaacctactgcatacaattaattaaaactcattaaatttattaaaacttgctttttggcccagcacattgtctatactggaaaatgttcaatatgcacttaaaataaaattgtgttctaytcttactggttagagtgctatagatatgtcagctggttaaagttgtttgataatgttccaactttctacatttttattgatattctgtctagtttttctatcagttgcaaaaaaagagtgttaaaatctatcaatataatttttaatggactattctttctttcaaatttcttctttacttccatgcattgtgggactttgttgtgtgcatctgcatttataatatgatagctttcattttcttgatgtttttatcattattagcattcctctttgttctagtcagttttagtcatattccttttttttaaaacttattcttatattaatacagccactccagttctcttatagtatttgtacagtttaaacctttaccatccttttactttcaatctatttttttcaatctaaagagtgtctctcataaacaatatatagtt

SEQ ID NO: 373945 - DNA, 579 bp, Homo sapiens
tcattctgtatttagaaaacctactgcatacaattaattaaaactcattaaatttattaaaacttgctttttggcccagcacattgtctatactggaaaatgttcaatatgcacttaaaataaaattgtgttctactcttactggttagagtgctatagatatgtcagctggttaaagttgtttgataatgttccaactttctacatttttattgatattctgtctagtttttctatcagttgcaaaaaaagagtgttaaaatctatcaatataatttttaatggactattctttctttcaaatttcttctttacttccatgcattstgggactttgttgtgtgcatctgcatttataatatgatagctttcattttcttgatgtttttatcattattagcattcctctttgttctagtcagttttagtcatattccttttttttaaaacttattcttatattaatacagccactccagttctcttatagtatttgtacagtttaaacctttaccatccttttactttcaatctatttttttcaatctaaagagtgtctctcataaacaatatatagtt

SEQ ID NO: 373946 - DNA, 579 bp, Homo sapiens
tcattctgtatttagaaaacctactgcatacaattaattaaaactcattaaatttattaaaacttgctttttggcccagcacattgtctatactggaaaatgttcaatatgcacttaaaataaaattgtgttctactcttactggttagagtgctatagatatgtcagctggttaaagttgtttgataatgttccaactttctacatttttattgatattctgtctagtttttctatcagttgcaaaaaaagagtgttaaaatctatcaatataatttttaatggactattctttctttcaaatttcttctttacttccatgcattgtgggactttgttgtgtgcatctgcatttataatatgrtagctttcattttcttgatgtttttatcattattagcattcctctttgttctagtcagttttagtcatattccttttttttaaaacttattcttatattaatacagccactccagttctcttatagtatttgtacagtttaaacctttaccatccttttactttcaatctatttttttcaatctaaagagtgtctctcataaacaatatatagtt

SEQ ID NO: 373947 - DNA, 467 bp, Homo sapiens
gtcatttgaaaattaattttacactttcatataatgttgtttacctcttttacctctttcatctttcaagggcatgtgtaaataawtatgcttctcttaaccaatctaactgtaaattagtcattgtattttcatactttaaatttacaagttacatagaataaatttgtgaacttgggtatccaaggggttgaagaaacacagacacatttgaaagtgtttgacttctgcatcttaggtatattttccagaaatttgtttttcacttaagatgcatatttattttcacagtagaatttgtttgttaaaacgttctagcatattttggtaaatgctctctttttccttcatttttaggatgtttctacaggttcgtacttacattgctaaaacatttttaggacgtttctacaggttcgtacttatattgctaaaactttgtgcttttgagcttcaactgaatatgt

SEQ ID NO: 373948 - DNA, 570 bp, Homo sapiens
tcaataatctactcctttctcctctacgagcactgtacatctcaattcctgccaggtattcttgtaggtgcaggatcatctctctccctattttcaggctcagccttgtgacttcctttgaccaggagaatgtgagcctctatgatgtacatcatgtgttactacaagttttagatacatttgggtggctcagtcagtcttgttcctgtcttcttcctgagaacactggctctagttcagagctattcgtggrtcatggagtaggctgacttgaggagaagagttgagctggatagagctgagctgaggcagaacagagcaccagttgacatgcagacatttgaatgagaaataatattttgttgttgaaatgcactgaaatttggggattgctttttgccacatcaaaagctgacaaatacagccttcccacagctatgtcataaaggcaaaataaagcaaacaaatgaataacagtaatatttgtggctatctattgacttatcttactccatgtcagtcattcattccttttttcgtgcaatatttgtcactctatgagcaaagaac

SEQ ID NO: 373949 - DNA, 570 bp, Homo sapiens
tcaataatctactcctttctcctctacgagcactgtacatctcaattcctgccaggtattcttgtaggtgcaggatcatctctctccctattttcaggctcagccttgtgacttcctttgaccaggagaatgtgagcctctatgatgtacatcatgtgttactacaagttttagatacatttgggtggctcagtcagtcttgttcctgtcttcttcctgagaacactggctctagttcagagctattcgtggatcatggagtaggctsacttgaggagaagagttgagctggatagagctgagctgaggcagaacagagcaccagttgacatgcagacatttgaatgagaaataatattttgttgttgaaatgcactgaaatttggggattgctttttgccacatcaaaagctgacaaatacagccttcccacagctatgtcataaaggcaaaataaagcaaacaaatgaataacagtaatatttgtggctatctattgacttatcttactccatgtcagtcattcattccttttttcgtgcaatatttgtcactctatgagcaaagaac

SEQ ID NO: 373950 - DNA, 600 bp, Homo sapiens
tatttgtggctatctattgacttatcttactccatgtcagtcattcattccttttttcgtgcaatatttgtcactctatgagcaaagaactaccatttgcaactgggaatgaaaaaatgaacaaagaacactccacacaaaactctcgacttatgaaatctactgtcaatcagagcagtgcatgttgctttgaaaattatattccccacagtatcttaatactgtatactctattatgatatcaataggtaaattaaaattttatgtctattttcctcaacctcggaatcaataagtatgttaaaaatcacttttccaaattttgtactgtatgctcacttttaacaaaggaaatggcaacatatagtaaatactggaactgtctgtcaacattattatmtctgtgtctctatttttaccatacacatctagggatattttctctctccagaagagtatattctgcaacattttctttaaaagtcctcaccattgagaggaagaatttcaggaactccaggacattttacgatatcagcctgcattatcttaggagttcatttcctgccccacccatactttacatctgggtgtcatctt

SEQ ID NO: 373951 - DNA, 600 bp, Homo sapiens
tatttgtggctatctattgacttatcttactccatgtcagtcattcattccttttttcgtgcaatatttgtcactctatgagcaaagaactaccatttgcaactgggaatgaaaaaatgaacaaagaacactccacacaaaactctcgacttatgaaatctactgtcaatcagagcagtgcatgttgctttgaaaattatattccccacagtatcttaatactgtatactctattatgatatcaataggtaaattaaaattttatgtctattttcctcaacctcggaatcaataagtatgttaaaaatcacttttccaaattttgtactgtatgctcacttttaacaaaggaaatggcaacatatagtaaatactggaactgtctgtcaacattattatctctgtgtctctatttttaccatacacatctagggatattttctctctccagaagagtatattctgcaacattttctttaaaagtcctcaccattgagaggaagaatttcaggaactccaggacattttaygatatcagcctgcattatcttaggagttcatttcctgccccacccatactttacatctgggtgtcatctt

SEQ ID NO: 373952 - DNA, 562 bp, Homo sapiens
taacttgctgtggtcattctaccaagcgttttcttgtaagacataattgccttacctgtagatatttcagattaatcctaatggtgatggcagtggtggcccatctagaayagccgctgccatgacgccagctgcaggagggggaggtgtggccagggttccatgttccagggagctggtgggagccaggagctggcaggagtcccaccctcctgggtgtacctgcagccacccaagtcatggctgacagattaggacccaggcctccctgtgttcctaggagctgggagcagtcagcagccccaccttcctgagcatagctgcagccacccaagccatggctgcagacctgggcatctctgcattttcatggtcctgaggaggtcccccctgccctgcaggtttagaggtgtctgttcccaccacctggcctctccctactctcagtgcccactccaatctcggaacaagattggggtccagccaggaagctgctgcagcctagctgggtgtgtgcacactcagagcagctgctactttggcccctgctactttggccccc

SEQ ID NO: 373953 - DNA, 658 bp, Homo sapiens
cccaggaggcctattaacaaggctggtttcattgtgcctgctgccttggacaaagaaagaattataagcctgttatggctttatcttttacacttgtttctttaggtctcatgcagtaccatacgtatttccctgtcttcaaattctctttgtttttgtcttcctctcaggcttatgactcagctccttgccttgctatttttttaacaagttttcagattgaacacctatcctaatctatcatctgacttgcctccattatcggcttgatccattttccttgtccttatttttactgcccacacaattagagaattaactgcttccctccttgtatatacacagagttgacttggaaatgtgactttgaaatcacgctactcccactcccacaaaacaatatggaaatggaaatggaaatttgggcctgaaaatcatattggaattaacctacaaattgacacatagtagatgaaatcaaggatatagagtcaacttgaagaaacacagaatagctctcatgggtttggttagtaaagtgtgtgtgtgtgtgtgtgtktgtgtgtgtgtgacttaaaaacattttagcagtgctcttctacccagttttcagtgcctacacgttttttgtttacacagccaataagtagctataatg

SEQ ID NO: 373954 - DNA, 520 bp, Homo sapiens
cctacacgttttttgtttacacagccaataagtagctataatgacatttttagctttaattttgtcargatgccatggaaattttctaacataggtaacctatttggttatagttctactctagtgcctagggcagtgcagatcacccagctgcttctacaggagatcatcatctggtggtgaattccttgtagctatgtgctagtcaattaggaggtgctgatcaagtctccaagtctgtttgagaggagtttgttccatagctgcttcagagggtgtttcacgtaacttactcttgtaaagaaacttgaaggtaaattagttgtatgcattgtttggaaaatgaatattccccgtgctgtagagagtctgtgggtgatgaggattggtgaagatattggggattgaggaattgtcctgtgccctggtttatcttatttgctaaaaactacacctcactgcctgggcctaagaagtgatcgatcatgtgcattgccttctttccctgactcagtccctc

SEQ ID NO: 373955 - DNA, 520 bp, Homo sapiens
cctacacgttttttgtttacacagccaataagtagctataatgacatttttagctttaattttgtcaagatgccatggaaattttctaacataggtaacctatttggttatagttctactctagtgcctagggcagtgcagatcacccagctgcttctacaggagatcatcatctggtggtgaattccttgtagctatgtgctagtcaattaggaggtgctgatcaagtctccaagtctgtttgagaggagtttgttccatagctgcttcagagggtgtttcacgtaacttactcttgtaaagaaacttgaaggtaaattagttgtatgcattgtttggaaaatgaatattccccgtgctgtagagagtctgtgggtgatgaggattggtgaagatattggggattgaggaattgtccygtgccctggtttatcttatttgctaaaaactacacctcactgcctgggcctaagaagtgatcgatcatgtgcattgccttctttccctgactcagtccctc

SEQ ID NO: 373956 - DNA, 583 bp, Homo sapiens
cagataactcagtgtcaatcattttatggttgttcagcattggaagcaaattggaaacgtgaaaaagcttgataaatgggtgcctcaggagctgactgaaaaaaaaaaaaaaaaccaaaactcgctgttttgaagggtcatcttcttttattctacacaacaacaatgaatcatttcttgacaggattgtgacgtgtgacaaaagcggattttatatgacaactggtgataaccagctcagtagttggacrtagaagaagcaccaaagcaattcccaaagccaaacttgcaccaaaaaaaggtcctggtcactgattggtggcctcttgcccatctgatccactacagctttctcaatcccggggaagccattacatctgagaagtctgcttagcatatcaatgagatgcacccaaaactgccaacacctgcagctggcattagtcatcagaaagggctcaattcttctccaccacaatgcccgactgcatgtcacacaaccaatgcatcaaaatttgaacgaactggactacaaacttttggctcttctgccatattcacctgactccttgtcaactgacca

SEQ ID NO: 373957 - DNA, 583 bp, Homo sapiens
cagataactcagtgtcaatcattttatggttgttcagcattggaagcaaattggaaacgtgaaaaagcttgataaatgggtgcctcaggagctgactgaaaaaaaaaaaaaaaaccaaaactcgctgttttgaagggtcatcttcttttattctacacaacaacaatgaatcatttcttgacaggattgtgacgtgtgacaaaagcggattttatatgacaactggtgataaccagctcagtagttggacgtagaagaagcaccaaagcaattcccaaagccaaacttgcaccaaaaaaaggtcctggtcactgattggtggcctcttgcccatctgatccactacagctttctcaatcccggrgaagccattacatctgagaagtctgcttagcatatcaatgagatgcacccaaaactgccaacacctgcagctggcattagtcatcagaaagggctcaattcttctccaccacaatgcccgactgcatgtcacacaaccaatgcatcaaaatttgaacgaactggactacaaacttttggctcttctgccatattcacctgactccttgtcaactgacca

SEQ ID NO: 373958 - DNA, 522 bp, Homo sapiens
aatccaaaatctgcagtgtcggacagcagacagagccccacaagagccagtggtagataaagtccaaaggcagtctgctggagaatttcctcttactcgaggaggtaggtttttcttctattcaggccttaacctgattagatgaggcccatccatattttggaaggcaatctgggttactgaaagtttatttattagtgctaatttcatctaaatactttaagttgacatattaaaaataatcatcacaacttttaagttccaaaagttatagaaagcatctcatagcttaataagcattttaatttctattggattatcaaatctggttctttcctcttctaaagattatatttctgactggtagaattgtctttctatacttttcaattaaaaatattttaggaacayacttaatagcaaaatatacatgacatcaccattttgcagtagttgtaagtgcatgtgtatttctgtgtatgtatacttaaaatcaatatagtgaactgatggacatgtacc

SEQ ID NO: 373959 - DNA, 475 bp, Homo sapiens
tggcctttccaatgctttgaataataccattttaagctgaagatcctcccagtcaaccaacacaatggtggggctaaaaaaatattgctttaagccaccaagttttgagatagtctgttatacagtaataaatawccaggacagtgaaaaatgcaatgacagtaatggtcttccatagcaacatttcagaatcagaatggcagggaccatagcagctatacaatctgattacacatcagaggtttccgtattcttctctgcttttctttcaggtggcaatatagcctctgcttaatggccaggtatgccaataaactcaacaactgttaaaacagttgactcaacttttggataactctattcaaatatagttctttttttttcatttggaaaatctctttcctataattgctactcatttagttctatatctatccctgtagtcaactatgatgaaccactctacccagccaca

SEQ ID NO: 373960 - DNA, 475 bp, Homo sapiens
tggcctttccaatgctttgaataataccattttaagctgaagatcctcccagtcaaccaacacaatggtggggctaaaaaaatattgctttaagccaccaagttttgagatagtctgttatacagtaataaatatccagracagtgaaaaatgcaatgacagtaatggtcttccatagcaacatttcagaatcagaatggcagggaccatagcagctatacaatctgattacacatcagaggtttccgtattcttctctgcttttctttcaggtggcaatatagcctctgcttaatggccaggtatgccaataaactcaacaactgttaaaacagttgactcaacttttggataactctattcaaatatagttctttttttttcatttggaaaatctctttcctataattgctactcatttagttctatatctatccctgtagtcaactatgatgaaccactctacccagccaca

SEQ ID NO: 373961 - DNA, 475 bp, Homo sapiens
tggcctttccaatgctttgaataataccattttaagctgaagatcctcccagtcaaccaacacaatggtggggctaaaaaaatattgctttaagccaccaagttttgagatagtctgttatacagtaataaatatccaggacagtgaaaaatgcaatgayagtaatggtcttccatagcaacatttcagaatcagaatggcagggaccatagcagctatacaatctgattacacatcagaggtttccgtattcttctctgcttttctttcaggtggcaatatagcctctgcttaatggccaggtatgccaataaactcaacaactgttaaaacagttgactcaacttttggataactctattcaaatatagttctttttttttcatttggaaaatctctttcctataattgctactcatttagttctatatctatccctgtagtcaactatgatgaaccactctacccagccaca

SEQ ID NO: 373962 - DNA, 397 bp, Homo sapiens
ccaataaactcaacaactgttaaaacagttgactcaacttttggataactctattcaaatatagttctttttttttcatttggaaaatctctttcctataattgctactcatttagttctatatctatccctgtagtcaactatgatgaaccactctacccagccacatatttccttcttttgtgactcagttagaaggtcttttattcttctgatttttaacctcagcataygctgtagttgtccacatgcctcttaaaacagaaagcacttctttagggatggcccattttgtgctggaaaaaataagactatcgtgttttacttagggatgttaagtgaattttatgggactttacatttttcaaaacatcccatcatattaactcacatattt

SEQ ID NO: 373963 - DNA, 634 bp, Homo sapiens
gggtttcgttgcgtgaggatgttggtgaaggtttccttaaggacgtgtagattaagctggaatctacccatgtatcagatttattcctcttagtgtataatgtataggtattcactaggctaagagatttccagaagaaaaaatacttctgcagtgggagtgagcatgaatataatgccgagatggcagaggcaggagcagctagaggggaaggcaaggtgaaatgtggtttaagataatgatggagagaaaagtggggtgctggccatgaaggagctgtataggtcatggcaagaaactctgtcaggtatctaagaagattgttcaatcttcaaatgtgtaactgaaatggagatagagatttctacttcacaagataactctagttgcaggtagaaattagaaaggtgcaggttattgggaagaagaaattgaaaagtcaaggagacttactgaagaggtttgaatgggaaaactggcatgactaaaggtgtttaagtttatatcagtgaggaactcttctccctcatttttcattattttctaaaaatcaaatrtgggggagatatggctaattgaaatttcagacaagtcaggtatcagttaattgagtttttactgcacttgcaccatc

SEQ ID NO: 373964 - DNA, 556 bp, Homo sapiens
ctgagaagtcctagcaatgtcatttaactacagctcatcataagctgagatatgaataataaaagattgttgaatttaaccaagttcattctgttctttttcatgaggaaagtgaattacaccactaattcctttgattaaagtttttcttgtttatttgttttcttttttgatatgaatatctctacacatagaaatcatttctttcattgttttctgaaaaagacaaagacaaatgcagatgaagaacagttgttctatacattcttttttttttttgagcagagtttcactcttgttgcccaggttggagtgcaatggcacaatctcagcttgccacaaactctgcctccmaggttcaagcaattctcctgcctcagcctccccaatagctgggattacaggcatgagccaccacacctggctaattttgtatttttagtagagacggagtttctccatgttggccaggctggtctcgaactcctgacctcaggtgatccacccacctcggcctcccaaggtgctgggattacatgcatgaaccaccgcgccc

SEQ ID NO: 373965 - DNA, 477 bp, Homo sapiens
tgtcagacactgaatgtatttattctgcctgcaagtgtcacaagaagaaagtttgctatttattaagtcaatgtttacataattgaaaatatttttctttcttcatttttgttgtgctgtagttttactacactttagttactattcccattagcagacagagraaatgaatcttggaacaatttgtattttttctcaacaaatcagtgtgaaaataaaacagaatcttgttaccagaggaatgaagcaaaatatgctaacaaacaaatgaactaaaacaaacaaacaaaaacctttcctttctaggtggataatgattcagcttctgatattctttcatgcacatgctactctatgacataacagtgggcagtacaagctcctgttttatgaggcataaatcttttatttatatgcacagctccctaattatgctgcatgctctttcaagtaatatttatatttttattttcatta

SEQ ID NO: 373966 - DNA, 477 bp, Homo sapiens
tgtcagacactgaatgtatttattctgcctgcaagtgtcacaagaagaaagtttgctatttattaagtcaatgtttacataattgaaaatatttttctttcttcatttttgttgtgctgtagttttactacactttagttactattcccattagcagacagagaaaatgaatcttggaacaatttgtattttttctcaacaaatcagtgtgaaaataaaacagaatcttgttaccagaggaatgaagcaaaatatgctaacaaacaaatgaactaaaacaaacaaacaaaaacctttcctttctaggtggataatgattcagcttctgatattctttcatgcacatgctactctatgacataacagtgggcagtacaagctcctgttttatgaggcataaatcwtttatttatatgcacagctccctaattatgctgcatgctctttcaagtaatatttatatttttattttcatta

SEQ ID NO: 373967 - DNA, 420 bp, Homo sapiens
ggagggataatatatactgaagctgagagagttttaagcaaggctgtgatggttaattttatgtgtcatcttggctagactatggttcccagatatttggtcaaatgccagtctagacgttgctgtaaaggtattttttagatgcaattaacattaaactcaatagattttgagtaaagcagatggctcctcataatatgaataggcctcatacaatcagttgaaggccttaagaaacagctgcagttttccaagwaggaaagaattctgccttcagaagcccttaggatttgagaatgcaacatcaatttatcctggatctccagcctgccagcctgccctgcagatttttgatttgccagtctccccaagttgtgtgagtcaattccttaaaataaatttccttctctgtcacccacc

SEQ ID NO: 373968 - DNA, 466 bp, Homo sapiens
gactttgtagagtttcacatagaatatttaaaagatagacaagcaaataagactttccaccaaccaaccaaataaaacaagcaacaaatatcaaaaacaggtagctcggtttcataccttagcraagctgttttgcctggggtttgacctcagtactgttcagcatcagtaaaattttacacacagatcagaatatgagaatgtgtgcttatagactgtatttttaagaatttttcaggttgtgaaagcacatttgagctgatatattcagggaaacaatgtttccctgaataaaatatgcacgagtaagtaaagaagacaagaaactctgtcaataattgtacagtcataccacatagaaattgaaatgccattctagataaaagctaaatctaatgagtcaccatgatagtgactcagccactttctgcttcacttatagttcttttctcctacaccacaactt

SEQ ID NO: 373969 - DNA, 613 bp, Homo sapiens
tgcctaaaatcagttttttgttaccagctaagagatattcttgatcaaaaaaattgtcatagttccaacagcaaaattgctgctcagatagagctgacagaagattagggtttcaccattaaatttgtaaatttaattaacatataaactacttaagcaaattggatgtaagttcacattcctctctttgaatcaggaaatttctatggcctcattatgtggcatgattcttctacaattctaacatagaagcagcattacaagaggctgggagctggattttcttctctttgtgcttcagccggtaaaattatggctattactgaaatatttttgcatagtttctcatttcctcaggatttaagtgctatttttttcaatttttttttttacaaatagagccttattaagcaattcagacttgatagattctaatgagggcagggatgttattactgtccttattaatgttttgaatctgatttggactgaactgcaatgtacgcttactaaattaatgatttcaatttagtaagaattgaccaagttctgaggtcagtcrgtaaagtagtcagcgattcattaaaatgatgcttattattaggacagccaa

SEQ ID NO: 373970 - DNA, 473 bp, Homo sapiens
atgacaacaaattattaaaagctaaaattggaccaatatgtcattttakaagaaactttgtaatccacagatacaaaaggagttcacagttgcttgcaagctcttttccaagggcttctactgggtgcttatgagagagattgggggaaagacgagagacaagagacagttttgcttgcaggcacaggtatgtgtaagattgttgattgcccctagggaccagaaaaatacactgcccacatccagaaactcttctttcaaatgacagaaaggcttcaactgttggaggaaaagcaggaaacactgggtcctcagagctcaagaaaagagctactgcttctgaaagagaggtagaagtgaaactgcctgcctataggcaagacacaggaaaacctcttaggcccaagaggtctattatcatctgctaaggggcaggacaccgtatctcacctaagacacatacaatgaagacc

SEQ ID NO: 373971 - DNA, 473 bp, Homo sapiens
atgacaacaaattattaaaagctaaaattggaccaatatgtcattttagaagaaactttgtaatccacagatacaaaaggagttcacagttgcttgcaagctcttttccaagggcttctactgggtgcttatgagagagattgggggaaagaygagagacaagagacagttttgcttgcaggcacaggtatgtgtaagattgttgattgcccctagggaccagaaaaatacactgcccacatccagaaactcttctttcaaatgacagaaaggcttcaactgttggaggaaaagcaggaaacactgggtcctcagagctcaagaaaagagctactgcttctgaaagagaggtagaagtgaaactgcctgcctataggcaagacacaggaaaacctcttaggcccaagaggtctattatcatctgctaaggggcaggacaccgtatctcacctaagacacatacaatgaagacc

SEQ ID NO: 373972 - DNA, 571 bp, Homo sapiens
ttccctatggtataatttgtctttagcctgaagatattccagcatatcttttagagagagtacacttgtgaataacttccttacttttctgtcttctgataatgtattcatttagccttctttttttttgagacagggtctcactctgttgtctaggctgaagtgcagtgggtcartcttggctcattgcaacctctacctactagggtcaagtgatcctccctactcagcctcccaaatagctgggaccgcaggtatacaccaccatactcagctaatttttttgcattttgttgtagagacagggttttgacatgttgcccaggctggtctcaaactcctagactcaagcaatccaccctttttggcttcccaaagtgctaggttataggagtcaccttcattcttaaataatattttcattagacatagaattcagggtagatttgtttttcttttctttttcctcagaacttaaaaatgttattctactgtcttctggtcctcatggcatttgatgagaaatcttcagtcatttaaattaccatgcctctttatagatgtggcattg

SEQ ID NO: 373973 - DNA, 546 bp, Homo sapiens
acatgatgtcttagtctgtcagtgctgctgtaacaaaacaacttaaactgggtaatttacaaggaatagaaatttatttcttccagttctggaggctggaaagtccaagattaagatkccagcattgcagttgggtgagggttgctctctgcttccaaaatggcaccttacttgataaaaggcagaagggcattcttacctgataaaaggcagaagggcaagagtgagaacctttcaacctcaagacattttataagggcactaatcctattcatgagggtggagccttcatgacttaaccactttccaaaggctttgccgcttaatactgttgcattgagtattgaatttcaacgaatttcaacatgaatttcagagggaacaccattattcaaatcatagcacatgggtaaaatcatgtagttctccctttttttaaaaaacaacagtctttttaaaaatgtcccatagcagacacacaaagcctccttgaagggatgagtcacatagaacacacatttgcttcaacagatgacacgtggttta

SEQ ID NO: 373974 - DNA, 449 bp, Homo sapiens
aatactgcaaaggactgattattcaatatgtatttatcattgtcttatataataagaaaatcacagagaattgaaataatagataggatatgaaccaatacacaatttagaagagctcactgggattcagcataagagaaacaagtagtaaaccattgcagaatttcctttagaattatgattaggggaaaagtgaaaataacttcttcctatgttttcttattattaaaattagcattctcctagaatttctacttgaargtctttgatttttcagccaagtgaaaataaattggtatcttttataatctgtttatttcagtctttgtagtagtgggtttttttactgcaagatgtaggctgtcaccatagttggatcactgtgctgttcttttgcttttcatatactaacatttcttatatactcgcacaatattattaatagcaaa

SEQ ID NO: 373975 - DNA, 541 bp, Homo sapiens
atattttattggattaatgccaccaccttatcttttgtgaaatggagctaataacacctagggtggggctttttcatatctaagggataatttatgttgttctcagtgcctttcatttgcacatcttgagttaaatgccatcagccctcaccaacctaactcccctcttttgcaccaataccgtttcaggccatgggcagtgctctaggaggggtccctggttgacagcggacctagccctcaacggctaccaccaacccccatcacacaggccactctcctcccattcaccaggataatggatagaacaagaatgacatattaagagacaattatcccatttctactttggctasacactttccttctttatctcattcctgtggctagttctttgccattatttctcttcctgttggcacctacctcactgggaggcatggaatgaaaagtagtgaacacaaatcagtctattttagatattaacaatatccttttaagatactataacataaagtgtgctttaactaccaagaaaaat

SEQ ID NO: 373976 - DNA, 584 bp, Homo sapiens
gacagcaagcaattaatcgcctcctttccaataaaaaaaagtcatgaaaatgaaagtaagaaaatttcaagatgatggctaggcgcagtctatatttcactctaattattggtgtatttgttatttcctggactcacagtattccctgatgcctttgcttttgctcaagctatttattctccctataatgcccatgttctcttttatctttcrtaacttcatgtaccaaaattggacctatctgccatgactactgtaggggccaaggaaaatctttccctttgtcctctgaaggttagctgaaaaatcaactgacaaaaggcagattaatttggaaaagagcatacaaatttattaatatgcacacaggggagaagcacatagtgattgtccatcccacaacaaggtttagaagctcgtataccatcttgaggttacagaaagagtgggagatggattgtagcaaaacaggtagataagacctgggtagcaagggggtcttgtaatgtaaatgaaatctcacaggtagcaggcttcagaaagaatagacagtaaatatttattttagacctttaaaggtatca

SEQ ID NO: 373977 - DNA, 584 bp, Homo sapiens
gacagcaagcaattaatcgcctcctttccaataaaaaaaagtcatgaaaatgaaagtaagaaaatttcaagatgatggctaggcgcagtctatatttcactctaattattggtgtatttgttatttcctggactcacagtattccctgatgcctttgcttttgctcaagctatttattctccctataatgcccatgttctcttttatctttcgtaacttcatgtaccaaaattggacctatctgccatgactactgtaggggccaaggaaaatctttccctttgtcctctgaaggttagctgaaaaatcaactgacaaaaggcagattaatttggaaaagagcatacaaatttattaatatgcacacaggggagaagcrcatagtgattgtccatcccacaacaaggtttagaagctcgtataccatcttgaggttacagaaagagtgggagatggattgtagcaaaacaggtagataagacctgggtagcaagggggtcttgtaatgtaaatgaaatctcacaggtagcaggcttcagaaagaatagacagtaaatatttattttagacctttaaaggtatca

SEQ ID NO: 373978 - DNA, 606 bp, Homo sapiens
tacagcatttgtcttgactcttccttctcatgtgaaagcctcttgagagcagaagtcatattttctgcatctttgtgtccctyccctttcctctgaatgctaggcatgcttcaccataaagggaatacaaagaggtcagtatatgaaatcatctcattgtaacagtgagagaaatctgacatcactgacttcatcttgcttctatcctcacaggctaactgcctttgcttattcctacatgtaggccaaactaatcacggaaagagtttagatattttaactttagaactaatgactatttctcttttgaaagaggcctgtgaggagataaggaagtatgcacacaactaacaattctgttcaagatttatagaaacaaggtggacctgagaagcagttaaccacaaagaagttttgcaacctcttcacaccactcctgatgcccagatgtccatagacaccagttaccttttgactttaaccccctctttgttcccccctcccctaacataaaaggagcctaaaattctattaacttaatgtggttctttagggcattagtcctatatcttcttggcttactagctctctgaaataaagtcactt

SEQ ID NO: 373979 - DNA, 573 bp, Homo sapiens
tttatttaatgatttccaattcccataaagatgcttgttggattcttacagcaattttgtttaccaagttggagtagttgttgccatacccttattttcttattttctattgttttactcctttatcttaaagaataatctgtcaattaattttgcttttgacatttttctttaaaaggcagtaagaaaaacaaggaagggggaattgttctgaggacaagaacattatagggagaagaaatagcttgagcaaagcaaaggcatcagatggcttactggcatgaatgatccagccaccagctgaccccaagttcattttctaaaatttcgcaacctcagtgagacttccacactgtcytttctaaattatcacatccatctctctctttctttcttttttctctttttttttcttttttttttttttttgacacaaggtctcactctctcacccaggctggaatgcagaggtgtgatcttggctcactgaaacctctgcctcctgagctcaagtgatcctcccacctcagcatcccaagtagctgggaccgcaggtgcacactaccatgcctg

SEQ ID NO: 373980 - DNA, 550 bp, Homo sapiens
acaatatagtgatcattgatttgtacaaaatatttgcacttagaaagctcgaatgatcacaaatcttttctgtattttattcatagggaagaaaatctgtaaactatcttatatcaaaaattattggttttgaatgccatgtttgggtaaattkttttcaatatcaagaatttctacttttacatttcatttatatttaagattattatttgagatgtggtaacatcttgaatgaaaaagtgaccaatgaaacgacaaaagagagaaagggaaagagagagagatgggcagtggaaaggaaaaaggaaggaagaaaaatgctaacatttactgagtatggtgcaactttcttttacataaattatctcatttaatcttccgagtaactctcaaccatttaaatctgcagaacacatttttcaaatgaaattttgcatcataacaaagcagataactgctgaatgagtagctctggataaatagttgagggagtagatagtctcttcatcaccctttagatgacactcagcattattaaaaaatatattaa

SEQ ID NO: 373981 - DNA, 550 bp, Homo sapiens
acaatatagtgatcattgatttgtacaaaatatttgcacttagaaagctcgaatgatcacaaatcttttctgtattttattcatagggaagaaaatctgtaaactatcttatatcaaaaattattggttttgaatgccatgtttgggtaaatttttttcaatatcaagaatttctacttttacrtttcatttatatttaagattattatttgagatgtggtaacatcttgaatgaaaaagtgaccaatgaaacgacaaaagagagaaagggaaagagagagagatgggcagtggaaaggaaaaaggaaggaagaaaaatgctaacatttactgagtatggtgcaactttcttttacataaattatctcatttaatcttccgagtaactctcaaccatttaaatctgcagaacacatttttcaaatgaaattttgcatcataacaaagcagataactgctgaatgagtagctctggataaatagttgagggagtagatagtctcttcatcaccctttagatgacactcagcattattaaaaaatatattaa

SEQ ID NO: 373982 - DNA, 550 bp, Homo sapiens
acaatatagtgatcattgatttgtacaaaatatttgcacttagaaagctcgaatgatcacaaatcttttctgtattttattcatagggaagaaaatctgtaaactatcttatatcaaaaattattggttttgaatgccatgtttgggtaaatttttttcaatatcaagaatttctacttttacatttcatttatatttaagattattatttgagatgtggtaacatcttgaatgaaaaagtgaycaatgaaacgacaaaagagagaaagggaaagagagagagatgggcagtggaaaggaaaaaggaaggaagaaaaatgctaacatttactgagtatggtgcaactttcttttacataaattatctcatttaatcttccgagtaactctcaaccatttaaatctgcagaacacatttttcaaatgaaattttgcatcataacaaagcagataactgctgaatgagtagctctggataaatagttgagggagtagatagtctcttcatcaccctttagatgacactcagcattattaaaaaatatattaa

SEQ ID NO: 373983 - DNA, 489 bp, Homo sapiens
gcagatataatttcactctacaggaaaggaaactgagatagggtgactttcctgagattatacatttaatatattatatgtgtggtagggactaggttgtgacctatctctagttctgtctaggtctgtttgtactatcttactgtattcatttcctgttgctgccaacaaagtatcaccaactgaataaaatacaaatttattagctaacagttctggaagtcagacrtctgaaaatggatcttttagagttgaaatcaaaggcccgcaggggctgtgcactctttctggagactgaggggaatcacctgttccctccttgtcttttctggcttctagaggctgcctgcattccttggttggagaactctaacctctacttctcttgcctcatctcctccaactctgatcctcctgcatccctcctggaaggacccctgtaatgacatggggtccacctggataacccagagtaatctccccatttca

SEQ ID NO: 373984 - DNA, 654 bp, Homo sapiens
tacaccactgcctggatctgattctcgacactggtrtttcatcatctggaattatattatttacgtgttgtcttatttaatatctgtcttccccatcaagaaaggaagtgccagaatgtcaagagctgtgtttgtggcataaacttctgtatgcctgaccctccaacagtaactggcacatggaaggcacatgtgccttactaaataaataaatatttatttagtaaatgaatgagtgaataatggaggaaagtctttgtctgaaagaagtatattttacattcacagcacagcttctcaaacctcagctatatgcatggtgatcacaataactttgacagagaggacttagggaagatattacagaaggtcttgtgaggaatatcagaacacacattgctaaatgagggatatcatcaacataaggaaatgcagattgggcattgtggcatgtagccgatttagccagtgactctgcagccaaggctggtgcaggtttggaatgctgatccttccagagctgtctgttttcatttctcttctaggcctccctatggcctccaaccatgctagcttgtccttcctttccactttcactatctgacctccaaaggaacaatgttttcctcccctgttgggctctgctctattttc

SEQ ID NO: 373985 - DNA, 646 bp, Homo sapiens
tcttcaacttctccattctatttcagccccaaataaaaacccccatgctcatcaaatcgtgcaaataaattaggttactagttcatcaaacaggcaggttctgattccaagtttatgctcaacagaggcactgtgctgtaaaagaataatcktaactgtattataaatcacttataaacagtgagttattatagtgtattagaggctaggcagagtacataggtaaaaagtcatggtttctgtcctcaaagaaacttattgtccaggagtcacagttattatttcactaggatatcaggagagggcatatcaagtgcgtttctaaaatacataaactatatttttcctactttaccaaattaaatgtgttataaaagaacaattaaattgagtctgtcatgacttgttctcagttaagctcctagaattctttactccattctttatgttcttaaaattcatttgattgtatttctgagaatccacatcaaactacaagaatgcggtaaaaaaatcaaaacaaggctattgccagtcttttagcagttttcctgttctctgcagatcttcaaaagtgtttcactgtctgccacactctgttaatacctttgaaatgatatactagacaagatgccagcactttgaa

SEQ ID NO: 373986 - DNA, 468 bp, Homo sapiens
catctaaacatgttatatgacagggttttttgaatttcgatcatgcaragctaccctgcacttgcgtctcaaaggtttaatccccaaatttcccataagtaagattttaccacagagcacaagattgtttcaaaatggcaaaacttattctacaaacaatgagatctggggccagtgacaggctcattagctcaactctataacttcttttaatttatcttatttctataaacctgagtttattagtttgtgaatgggaataataatacagtctctcagccatactgatattttgagctaaatgtgctaatatatttgaaactgtttcataatttttaaaactttacaatgctattatgtttagttattatattatgtttagttattatgtttagttattatgatattatggttagttattatgtttagttatgatatttgtacaattttaatcttaatacattaatc

SEQ ID NO: 373987 - DNA, 579 bp, Homo sapiens
ctctaagttttagtcacactcttacctaggtgacaacctgaccaaaagaggggaattaatcaaaattatggaaggctgttgtctttgactgagtgtgtgcaccaatcctcagcagaccagaccaagccaaaatggagtcaatcatgctacatgccatgcaaccaaactgagactttaaagaaccagatagatcccaagacagaccagtttttgtttttgtttcttctgtctgaaaacaggagattccagcataataaggaagtgccctctgctttcatctttgatgtcaatgtttaaggttttggtcaaattgagaggttgagtcttgaccaatcactgaaggtcaactcttcaaataaagcaaacacagagctgtaacaaatccagctgtttctgggtgaactcaggtcagttttttgtacatcgctttcccttttytgttcataaatattgtgagacaaagtagcaaatataagacaccatgtttcctcatttctgcttgctagcataatttcacaaagcccctgactctgtgaccacgtgcagctttcctgaaagatgtttgaagacagaacagga

SEQ ID NO: 373988 - DNA, 574 bp, Homo sapiens
tcttggtaaattcctcttaatctcaggttgttgaattcccagcacaagtccactcagagaactaggtatgtcttacacaaagaataggtaagtaaaatgttgtgaatatgtatgataaaattgtatgcagcagtagcaatttgaaaaaatgaataacatttatacactaaggtgaacagattaaaaacatgtaatatcaagtgaaaaactgagatatgaaaatacatatgcagcatgacacaacgtatgtagaataaacaataaacatattgaagcctccagactctgggaccagattattttttagtgtgacctgctagctgtctgatctygggcaactcacataacctgtctacgtctcagttttctcatctctaagtggagaaagtaatagtactaataccataaaactgttgcaatggttaagtaagttaatataaacatatagaagaggtcctagcacacatcaatagctgaataattcttagaaatgtttattatttattttagtacgcatttaaaacatacacatacactcaataatactgcatatatttttaaaatattcatatat

SEQ ID NO: 373989 - DNA, 607 bp, Homo sapiens
cagaaatgtacaatgaggatgttagggcaatcaggctgcgacatctgtcacctcattgatcactagggtaaatatggctgatctggctggctaggcaggtgtccccttcctccctcaccactccttgtgcatgcctcccaaagctgcatgctgggtcaaagaagacgaccatcctcaatagatgaggatgagtcttcagtaaagggtatatgattacttgtgctcccttgctagaacctccaaacaagctctcaagaaatgtacratgaaaaaaaaaaaactttaaaaattcttttacctttcaaagtagcaactatattaaaaatacaataatatattatgcagggagtttacacggaaaagggcatttttgcctaatgctggagggaatataaatttgtaataaacatttttgcaatctttttggcaatatctatcatgagagataaaatgtttatgtgacctaaaaataacattttataatttgtaatttttgcttttagattgaaaaagccttaggcaagtgataatgtaacataatttgtacaattaaattattggaattataggtaaaccaaaatatatgggacaatggaaagagcattaa

SEQ ID NO: 373990 - DNA, 607 bp, Homo sapiens
cagaaatgtacaatgaggatgttagggcaatcaggctgcgacatctgtcacctcattgatcactagggtaaatatggctgatctggctggctaggcaggtgtccccttcctccctcaccactccttgtgcatgcctcccaaagctgcatgctgggtcaaagaagacgaccatcctcaatagatgaggatgagtcttcagtaaagggtatatgattacttgtgctcccttgctagaacctccaaacaagctctcaagaaatgtacgatgaaaaaaaaaaaactttaaaaattcttttacctttcaaagtagcaactatattaaaaatacaataatatattatgcagggagtttacacggaaaagggcatttttgcctaatgctggagggaatataaatttgtaataaacatttttgcaatctttttggcaatatctatcatgagagataaaatgtttatgtgacctaaaaataacattttataatttgtaatttttgcttttagattgaaaaagccttaggcaagtgataatgtaacataatttgtacaattaaattattggaattataggtraaccaaaatatatgggacaatggaaagagcattaa

SEQ ID NO: 373991 - DNA, 555 bp, Homo sapiens
aagggaagagatagtggcagcttcaattcactagggttagttgaagtagasaagtcaatctcactcatcctctttgatcctcactttgatcttcaagcaattaatgatgttgagctagatggacacaagtaagctttctgatagaaaatttcacccctgagtgtttagctgatgtgatataatgaaaggggtcatcccatttctaccatggtcattgagagtaatgcaataaaaatttaacttaacacagctatgagggaccaggctgcatgaatttgaaagagaaagattaaaagcagccacaggagaaagaaaggaaagcaaataaactgaaatgtctgctcagaactgctttacacaggcatacttatgaagattcctaggggaaaggaacaaactagaacagtgtgaaattttcatcagtaaaccccaaaccacatgaaaactgcctccttccagtttcttgcacaaatttcataccaatgggatttcattcacatatgtgggatgtttttcccttcacccaggaacccttcatcaaagaaaaaagaggga

SEQ ID NO: 373992 - DNA, 561 bp, Homo sapiens
tcattcaaaatattagcacatatttattaagctactgccttgtgctagaactatgccaaaaactgggtgtagtaaatcagaagcttcgggtacttgctaagtgctgatgtcagcatggccaccttcttaaagatccattttgcttaggttaaatgaccagctcacccctttctctatccacctgtctgttacaaagggagataaagttccaataaaggcccccttaggctgagaggaaagatgatgtttagagatgrctcttaagacaacattttaccttttataactttaaactacattcttattttcagtggactcttgagaggttaaaatatgtttagaataataaagaaaactattccacccaaaagaagaaaaaagaaatctatggcattctgacctataaaaatgttaacaatttaggccctttgtaatgtatacatcagaggtgtataagaaaacttgaatcatctgccaggaaattggactatagtttgggggaaatcaggataagaaatgatcagatagggaatgtggatgctgaaattatttttttctctc

SEQ ID NO: 373993 - DNA, 627 bp, Homo sapiens
gtgtatattccaacttagtagaaataattttataccactatgactgcatatattttaaatattatgtcaaagttaaaccagaaatccttctgtgtgttggagagctagagcacatttgggccacagaatcccataatcaaaccaatgatacataacattatttctgtcctttgatattatttgtcatattgccacatcctcagtcaagtacaggtgacagaacatgytggactatggttttataacctctctcatcatttcatgcttgtttcttttgtatggttaggcaaaaaacagtttggaacacaagatattttttgttccaaacatgacagattagttgaccctctcttctcctcagcttttctttgattttggagaaaactgttgccatggaatcaaaatttttagttaaagcatcaggaatcacagagttgatgggctgtagatctataaattagattttcattaatgagtagaggccaattactgtactctaaatgacagtgttaataaaaatacaaatatagacattcatcacaagacacttggtcaacccattttaatgtgtatctagttcaatttagggtagtcattccttaaataacttatgttatttatttctat

SEQ ID NO: 373994 - DNA, 542 bp, Homo sapiens
ctgggctgaatggggaaaaagctgggaaatctgcaagggytaatgagtactgagacttattttttaaccatagcagctctgggggaatgggtgagttaaactggcaaggagcaacctgctttcaccatgggcctctggattcctggatggagggtcccctcaaccatcacagacacttgaagtggcaggcagagctgcttagagaagcagtggagccgcacaccagctgatgtgaagcccagatcattgagacagaaaattaacaaagatatccaggacctgaattcagcaattgatcaaatggccctgacagatatctatggaactctccatcccaaaacaacagaatatacattcttcccattgtcacatggcacatagtctaaaatccatcacataattggaagcaaaacactcctcaacaaatgcaaaagaactgaaatcataagagtcccacagaccacaacacaatcaatcaaattaaatataaagaaagactaagaaattcactcaaaaccataaagttacatgaaaattgaata

SEQ ID NO: 373995 - DNA, 585 bp, Homo sapiens
taagtagtgtcattagaagagaagagatgcagacacaatgagtaacaacaagggatacctgggcagagagaaaaggccatgtgaaaacacagcaagaaggctgctatcttcaagctaaggagagacagggctcagaaaaagcaaacttgctgacacctttatgttccagcttttagacagtgagaaaagaaatttctgttaattaagccacccatctgcagtatgctgttatggcagccctagaaagcaaatacagttaagagtcagtatacttcctcaggtgatatagaagagcacacctggctgtcgtatccagggttggctgtgtcctacttctgagctgtgtcaatctgcacatttgctgctgtagcagaaaccaggttcttccttgccttcagtggtctagcttgagactttccattagtcccaggaacgccttaaaatrctttcaataaatattttgtgtttaagttcatctgatttggtttctgtagtttgcaactaagaacactaactgaaaattctgtggctgaatactgatatgcagatgaatcgcagcaaaccatataaggtaggaaaattttc

SEQ ID NO: 373996 - DNA, 390 bp, Homo sapiens
catgtgtgacgaagacatggtatattaggcttttgtgattcttttctcaacaatgaaaagattaatagaagtcaggccgaatcaatatgttcagagttctgtgacaggaataactttttgttctagacacttttgaaagagggattttawatcttagaaaatagtacattttagaattgctcttagatttttctaaggtggactgtatatatagaaagacctagaaaatctttccagggaaaaaaatagtaaccataaacctgaagagatgtttggcctcgtgtggttttcacttcaagtcagagtcttcatggaaaaaattgtgatagagggacagaaatggttaactgaatttcacctttctctgatttcagtttaattaaatgaagc

SEQ ID NO: 373997 - DNA, 582 bp, Homo sapiens
aataataaaaaaaataaaataaacaaatttgttccacataaaaacaaaagaaaacaaaaccaaaaaaaaaaaaatgtaagtggtaacttatgctatttctatattgctcaatgttgtatttttaactcttcattcctgtagctgtgtagtggtggtttactttcctactgtataatatcagttatattaaaatgcttttatttatcctaaaaaaaaacctggtatattctttataggaaataattataacctttccagagctatattaattttattttatattyactaacatacatatcctcacatgtatttttataaaagtatttttctagatacatacaattatcttaaaaatatgtaaaatggcttataaaaatgtggttgcctttacccacaaattgtctaatgctattttctttcttttgaaatttattgttttcacagatcacattctagaatttggtagagtgtaatatgacattttattcataagcataaccctacttcttcacttactaaatttccacatttttttttgccttttattaatgatattcttgaattttcttaatgattttgtct

SEQ ID NO: 373998 - DNA, 582 bp, Homo sapiens
aataataaaaaaaataaaataaacaaatttgttccacataaaaacaaaagaaaacaaaaccaaaaaaaaaaaaatgtaagtggtaacttatgctatttctatattgctcaatgttgtatttttaactcttcattcctgtagctgtgtagtggtggtttactttcctactgtataatatcagttatattaaaatgcttttatttatcctaaaaaaaaacctggtatattctttataggaaataattataacctttccagagctatattaattttattttatatttactaacatacrtatcctcacatgtatttttataaaagtatttttctagatacatacaattatcttaaaaatatgtaaaatggcttataaaaatgtggttgcctttacccacaaattgtctaatgctattttctttcttttgaaatttattgttttcacagatcacattctagaatttggtagagtgtaatatgacattttattcataagcataaccctacttcttcacttactaaatttccacatttttttttgccttttattaatgatattcttgaattttcttaatgattttgtct

SEQ ID NO: 373999 - DNA, 538 bp, Homo sapiens
acaatgaagcccacgtttaccagaggttggccaataggtacaaagttacaattagataggaggaataaattctaatattctacatgcagtagggtgactatggttaatagtaaaatattatgtatttcaagatcagcattcgaaggctctcacctgaaagaaatcataaatgtatgagacaatggayacactatcctgatcgaaacattatactacatagatatgtatcaaaacattgaattgtacaccataaatatatataattacaatgtatcaattgaaaataagtaaattaagtgtatttaagttatggttgtcttaacttaggttttgtaaaaacagagtcaaaagtgaatttaagttatggttgtcttaacttaggttttgtaaaaacagagtcaagagtgaaaacttaaataataacattttatgggtgagcaaatctcaaaaaaaaatggaagggaaaatgaactaagtaaaaatagaggaaacgttcacaacagaggggtgtgtttctgagctagctacagccacataa

SEQ ID NO: 374000 - DNA, 661 bp, Homo sapiens
attagctgtggcagagatagtaatgctcaccaaacattccatatgttggcatatgcccaacatatccttggctcatgttgctaggtaaggccaaatgactacttctgtccaatgctgggagtagaaatgacctacattacttctcgagctaggcagtgaaaaggctacgttccaatttgtagtttccctcttccttggctatggggaccaggaaagcttcatactccatttagtagtgctataaggtgaagagtctccatcatcttatgtctctgagtgactttgtggagcagagacctttgcttatgatacactacagagtgactggaaaataaatctttcttatattaaacytttgagatttaagatgtcaccctgagataatcagatggatcagaatccagtttaaagagtttactgaaacaaaaagctgggaatgatcatccagaaggaaaagacttcagagaaatgaagtcagtgctccaaagttaaaagttaagttcttgcttctgtagttagaaaacgaagaagcttagtaagattacaacattttctatacaagattggtttatgaattataccaatttaattggttacagttgtaattattatcatccaagattatatttttaaagtaaatataaatatataattctgacat

SEQ ID NO: 374001 - DNA, 614 bp, Homo sapiens
aatttgttgtacattttagaataactgagggagtacaattggaatgttcataactcaaagaaatgagtgcttgaggtgatggatacctcacttactctgatgtgattacacactctatacatgtaccagaagagctcatctaccccataaatatatatacctactatgtacctacaaaattaaaaaaaaaactgaaatgatatacgtcaaagctttggaactattaagtctatacaaactaagatgcatagcttgtttatctgcttggttttgtgggagtactccagtaaatacagactttttatgaaaagctttgtctttccctaaaaagacttgttctattggacacttaggaaaagaaaagactaaatcataggacaatgttagactaaagtttgaccttaagctttcaaggcaacagtcctgagggggctggattttgtggacagttgtgtcattsttggctcccaagtgtctcagatctccatgctgtccaactggcccatgtgttttcattggctccatcctcaccctctgcctaggtcatggggagtatgatgcaaggtctctcgtcttttagtcgcttgcctctggtgatcactcatagctctgct

SEQ ID NO: 374002 - DNA, 604 bp, Homo sapiens
tggaacagatgcccagcagcaccttggggtgaatgcattaagaagggggaactgtcatctcattctccctctcaratttattcacagtctcctgcggcacccagctggggctggtttagtgtgggttttgcctcagttggagagatctgcaagttcaaagccttctccttatttccaaatgggatctccctccagccttctctctcttccttccccactccgcctccccattgtgactctccgcacaccccgctgtgctgcctctgcctgcagatgctttcattgttttgcctgtactggttcaggaaagtggcctcccgaccttcaggcaaataggaggagagggctgaggcttctaggcatcctctgccttcccctgtctcccctctgctccttggcctggccatggctgggagccaagtccagccagcagggtcttctcgcagagggtgcctgagggaaggcttcaaagccgagcatggtagacctggggcttctgcttgcagcccagagatatgtaaatcaggtagcagggacacaaagagcagaggcccatattctaacagtttggcttacagtactgttcgctatgcagatactgcat

SEQ ID NO: 374003 - DNA, 512 bp, Homo sapiens
ggcacagacaccctctttgtgaataccttggcctggaagtgacacaatatatctgttcaccttccgctggtaaaaactagtcacatgaccccacctagataaagagtggctggaaaatgtagtccatagctgggcagctactttccagcagcaacagtgaaactattttggtgactatctttgtcacacacatgtccttgtayaggcagaatcaatgttataacaatatcaatgaactcatgttaattttaaatgtaaagtagctcagcattatgaattgtttactgaaatagacaagacacttttaaagctcatatgggaaactgaaaaataagtatagctagggctgggtgcggtgactcttgcctgtaatcctagcactttgggaagctgaggtgggtgaattacctgagctcaggagttcaagaccagcttgggcagccccatctggtttcaaaatggtgaaatactgtctctactagaaattcaaaaaattgaccagatatagtggt

SEQ ID NO: 374004 - DNA, 512 bp, Homo sapiens
ggcacagacaccctctttgtgaataccttggcctggaagtgacacaatatatctgttcaccttccgctggtaaaaactagtcacatgaccccacctagataaagagtggctggaaaatgtagtccatagctgggcagctactttccagcagcaacagtgaaactattttggtgactatctttgtcacacacatgtccttgtacaggcagaatcaatgttataacaatatcaatgawctcatgttaattttaaatgtaaagtagctcagcattatgaattgtttactgaaatagacaagacacttttaaagctcatatgggaaactgaaaaataagtatagctagggctgggtgcggtgactcttgcctgtaatcctagcactttgggaagctgaggtgggtgaattacctgagctcaggagttcaagaccagcttgggcagccccatctggtttcaaaatggtgaaatactgtctctactagaaattcaaaaaattgaccagatatagtggt

SEQ ID NO: 374005 - DNA, 536 bp, Homo sapiens
tgcaagactggttcaatgtatgcaaattaataaatataatacattgtattattagaaccaagaataaaaggcttatgatcatttcaatagatactgaaaaagaattaggtaaaattcaacatggctttatgataaaaaccttcatcaaatatgttaatataaggagtttaaacaactcaacagcaaaaaagcaaacaaacaattcaattaaaaagtggacaaaggacaggagtagacatctctcaagaaaagacatacaaatgactaacaggtatatgaacaaatgctcaacatcactaatcatcagagaaatgcagatcagaaaacacttatcagaataaattaatataaggagctcaaacaatagcaaaaaagcaaacaaacaattaaattaaaaagtrgacaaaggacatgaatagacatctctcataaaaaagacgtacaaatgaccaacaggtatgtaaaaaaatgctcaacatcactaagcatcagagaaatgcaaatcaaaacaacaatgatatatcgtctcaccccaa

SEQ ID NO: 374006 - DNA, 535 bp, Homo sapiens
gagaaataagtcaggcaaagaaaaacaaaaacaaacattatatgttctcatatgtgggaactaaaaaagtggatctcatgaagactgagagtagattggtggctaccagaggctgggaagggtagaggaagagagggatgaagacaggttgatcaatgggtataaatatacacttagaagaaataaaacatagtgtttgatagatcaggtgggtgacygtagttaacattaatcaattgtacatttcaaaatggctagaagagaataattagaaaggattaatatttaaagtgttggatatcccaattaccctgatttgattatttgaaggtatcaaattatcacaagtactctgaaaatatatatatttcttatatacctataaaaataaaaaataaaaaattcatcattgacaacatgattatggtctcaaaggatcatcataatattttgtgtatcactcactgaaagattaattatactaatagtcttaaaataatagatcagtaataatctttgctctgtattaaaattt

SEQ ID NO: 374007 - DNA, 601 bp, Homo sapiens
tgcatatatattaatacttctttacctaaaaattcaagtacatagcatgttgctctttgtattaatctgtgcttttactcatagataaaagaatccactttagctagtttgaaatatattattagtaataataacaacagaagcaacaacaaccataatgtaacattaatgtatttaccatgtgtcaggatgcattctaaatgctttacctatattaactcctttatactgtatgaaaaccctatgcaacagctacctatttgyaccacttttcagataaggaaactggcataaagcagtgagataacttgcctgagatcacacaattattaagcggcagagccaggattggagcccaggctactttccctagctcccagagtcacaaaaaggactagagggacaattctaggctgatttctactaacaactcctggaaacaccctgaggaactggccactgatcccaggaccccactgccctatccatgatagcaagtggcctctcctgcttcccccacttccaatcatagaaacttgtggcctctgccaccccccgggctgcaaaatggaaatcccatacctgccatttcctcacttcc

SEQ ID NO: 374008 - DNA, 628 bp, Homo sapiens
aacaacaaccataatgtaacattaatgtatttaccatgtgtcaggatgcattctaaatgctttacctatattaactcctttatactgtatgaaaaccctatgcaacagctacctatttgtaccacttttcagataaggaaactggcataaagcagtgagataacttgcctgagatcacacaattattaagcggcagagccaggattggagcccaggctactttccctagctcccagagtcacaaaaaggactagagggacaattctaggctgatttctactaacaactcctggaaacaccctgaggaactggccactgatcccaggaccccactgccctatccatgatagcaagtggcctctcctgcttcccccacttccaatcatagaaacwtgtggcctctgccaccccccgggctgcaaaatggaaatcccatacctgccatttcctcacttccaaatcataggcccttgcagttaggtctggttgaaagaaactaaatcacatgcctgaaccttagtatctcaagagacttagacttgtactgttatagtagaaccatcatattcttagtgctgcttcagtgtgtgttttgtaattagctaagcaacaagaaaataaaacattg

SEQ ID NO: 374009 - DNA, 585 bp, Homo sapiens
ccaaggtttgttgtctcaagccaaggaaatcaaagacatggatgcacaaggaatgggtttaggagcagaggtttaataggcaaaagaaagagaaaggagaatagctctctctcctgcagagagagaggggcgtcaaagtgggacttctggtccayggtccatggtccatggtggagtgtgcagggtggaggggaggaggaagaagtttggggtttatagactggcttgaagaggcagtgtctgatttacataggacctaaagattggttggagcaggtgtgacatttacatagtctgtgaagaagctggccacacgaccctaatctttttatcatgcaaatgggttttctacctggtcagtggccatgttgtctgctccttactgtacacgtggttgacaaggaaaagggaagatggagccgccatgttgaacttgcctagcccccaggtagccttctcctattggcacagctgccagcattcatccatgcaagcttccagcttgcttatctatgctgtggcttggttttttaggctccttttttgttataaaagaaatgatttggggctgcttttcattcaagg

SEQ ID NO: 374010 - DNA, 594 bp, Homo sapiens
aagaggcagtgtctgatttacatargacctaaagattggttggagcaggtgtgacatttacatagtctgtgaagaagctggccacacgaccctaatctttttatcatgcaaatgggttttctacctggtcagtggccatgttgtctgctccttactgtacacgtggttgacaaggaaaagggaagatggagccgccatgttgaacttgcctagcccccaggtagccttctcctattggcacagctgccagcattcatccatgcaagcttccagcttgcttatctatgctgtggcttggttttttaggctccttttttgttataaaagaaatgatttggggctgcttttcattcaagggaaaaccttactgaggactttcttaccctatctgtctaaataatttctttttaactcctatatcattatcacatttccacatgtaataacataattctcttgacagtccttaaggggcaagtatttttaatgaccattttacaggtgagaaaactgaagcatggagttaggggttaaaccacttaaggaagagccagctgacttagtaagtgagaaagctgggatttgaacttgagt

SEQ ID NO: 374011 - DNA, 585 bp, Homo sapiens
ccaaggtttgttgtctcaagccaaggaaatcaaagacatggatgcacaaggaatgggtttaggagcagaggtttaataggcaaaagaaagagaaaggagaatagctctctctcctgcagagagagaggggcgtcaaagtgggacttctggtccatggtccatggtccatggtggagtgtgcagggtggaggggaggaggaagaagtttggggtttatagactggcttgaagaggcagtgtctgatttacataggacctaaagattggttggagcaggtgtgacatttacatagtctgtgaagaagctggccacacgaccctaatctttttatcatgcaaatgggttttctacctggycagtggccatgttgtctgctccttactgtacacgtggttgacaaggaaaagggaagatggagccgccatgttgaacttgcctagcccccaggtagccttctcctattggcacagctgccagcattcatccatgcaagcttccagcttgcttatctatgctgtggcttggttttttaggctccttttttgttataaaagaaatgatttggggctgcttttcattcaagg

SEQ ID NO: 374012 - DNA, 537 bp, Homo sapiens
atttcacttaaagtttcaatttccaagaatctaccaacaacgttaaatgagaacttactgtaattgttttaaagtgtttgtatggccaggcacaatgctgaccactttacaaactttattttattggagctgaaaacaatctattctacagatgaggaaattaagtcacagagaagcaaaataactttgccagctttaatcagggccagggttgtagctctcacatagttcctattcagcgctgctacttggaataatgaacaaatacttgtggactgagttaggaggagctgctcagcttgggtgatttggatgttagccatacttctttactccataattgaaaacagaaatatagctgaagatagaaacatgatgtctttggcatacaatagttatcttccacctacctaacaggtcatatgccttaaattattcctctagtggagatactgaattggcaacaagggattcatagcctcttgcttgactgttaagtaaccaasgttgcaattttagtctcttgcaggaaaaaat

SEQ ID NO: 374013 - DNA, 605 bp, Homo sapiens
ccttttaaacccttgatttctgcccaaaatttgaagttgctccattaaggcaggaatctgaaccatttaccccttgctagctttggaaaataaagtctctttcttcctactgaatctcatccttgttatttgactttgcaagtagtgagcatctaaacctgcgttcagttacaacagcactacctaactgaagaatcacagtgaaattatcctaataaaaaataaccatcttccctgagggctctcatacattaaaaatgaatatatggatggaaggattcatcaataaacaacaaataaacaaatatttcaataattctaggtagttgtgtcttaaaatctgagttacattttgtttgatgctttaattgacacagaaccaagcagactaggatgagacaactgactcttggagttaaaggtaacctagagagtgactattccaagctcctaagtttacaaggaaagatgaaaatctcagagaaaaaaaaaggatttacctaagatatagaaatctatcaatggtagaacaaggataggttctagttcttgtttctgatcrttctagtgtttgatactatgccacagtgtcctgtctcatagtg

SEQ ID NO: 374014 - DNA, 588 bp, Homo sapiens
aagttgttgatttcagatatatgtttacagggtttaaagagatatgttttatatttttaatttcacaatcaaaccacttagagtagaatatgaaattatataaattgaaacactgtgtaagtggaacaattttattgtgctgtattcttttaagtgataaaagtttcattgtggtgaatgttaatattctaaacctaccagtttaagataaacttctttagcatttcctcatttataatacactaaatctcaaagctgaaaatgctgggcctctcttgacccttaagagacccagggtctctgactatattctcatatgtattgggtattttggaggcccaggagagaagagtttagtaaaatcaggcaccataggcaaagaatcaaaatattcttaaagattgcaattacatggcttggaaattgagccttctagaaccttattactcaaaatatggtctgtagaccagcagcctcagcatcttctggaggactgttagaaatgcagtatctcagaccccrttatgcagatctactaagtcagaatctgcattttatatggatatacacacatatattttttacaga

SEQ ID NO: 374015 - DNA, 600 bp, Homo sapiens
aatcatgtcatgatgcagatgtcggccaagtgatgtaacagttcagcaacttaggacaagactgtgaggtttttattatatcacagaacaaaggagaggggaatgtgttaagtctccaaacatttactaaaattatttacaaaacagatcactaaatatgatttatggagaatatattgtactagtctgttttcagagtgctataaagaaatgcccaagactgggtaatttataaaggaagaggtttaattgactcacagttctgcatggctggggaggcctcagaaaacttataagcatgaccgaaggggaagcaagcttggaccttcctacatggcagcaggagagagagagagagcgagtgaaaagcccggggaaactgccatttataaaaccatcataaatctcatgaaaactccctcactatcacaagaatggcatggggggaaaccacccccatgatccagtcacctcccagcaggtctttccctcaacacctggggatgagaattcaagatgagatttctgyggggacacaaagcttaacagtatcatatataaagaatcctcaaaacccaatgacaaaaaaaagcccaatta

SEQ ID NO: 374016 - DNA, 600 bp, Homo sapiens
aatcatgtcatgatgcagatgtcggccaagtgatgtaacagttcagcaacttaggacaagactgtgaggtttttattatatcacagaacaaaggagaggggaatgtgttaagtctccaaacatttactaaaattatttacaaaacagatcactaaatatgatttatggagaatatattgtactagtctgttttcagagtgctataaagaaatgcccaagactgggtaatttataaaggaagaggtttaattgactcacagttctgcatggctggggaggcctcagaaaacttataagcatgaccgaaggggaagcaagcttggaccttcctacatggcagcaggagagagagagagagcgagtgaaaagcccggggaaactgccatttataaaaccatcataaatctcatgaaaactccctcactatcacaagaatggcatggggggaaaccacccccatgatccagtcacctcccagcaggtctttccctcaacacctggggatgagaattcaagatgagatttctgcggggacacaaagcktaacagtatcatatataaagaatcctcaaaacccaatgacaaaaaaaagcccaatta

SEQ ID NO: 374017 - DNA, 445 bp, Homo sapiens
actgaactacaaattaggaattctatgaggagtggaggtgcagatttwccattctgcctttcccatttgaggctatctccttcagccctcctgtctgctctcaaaccccactgacatatgtttttttgagtacaatacagtgtaggaaaccttaatgcaacataattcttaactagcaagctgcctcagtgagcattattatagtgtataaaccaaacatgcatctttcccaggtgaggagactgaggtaagaaaggaggcagagaaaagcaatgcagaataaagcaagtaacttgaaacttcatttttgtgagctgggggtcactatatgggcctcgtttgcatacttgcctgggggaacccccatgtgctggaggcaagccttggggcctcatttgcataatccctctgaacttctgaggcaggcctatgaaatggacttggg

SEQ ID NO: 374018 - DNA, 557 bp, Homo sapiens
ttttcacttaaaagaagaactttatggcttctctttgacatatctaaattatcagcattactattcttgtgccttgggaccattattaagtaaaataaaggttacttgtaaccaagcactgcagttctgccacaatggatctaataactgagacggctactaagttactaacaggtggctactgtagagaacatgggtccactgggcacagggatggattacatcccagtcgggagggaatggtacagtgtatgatttcatcatgctattctgcacacacactttacagcttaagaattgcttatttctggaattttccatttggtattttcggaccacagttgactgcaggtaattttctgaaactgcagaaagtgaaattagatgaagtaggggagacttgtattttcctaaaatgtaccaatttacatttccaccaatatgcaagcaatattttctgacaawcctatttccctttgtggtttatgtctcacaagctagtcaatactgggtatcattaaacctttaaatctatattatgctaataggtagaaaat

SEQ ID NO: 374019 - DNA, 563 bp, Homo sapiens
ccttaaaggcaaagtgagtctcttgtgaggaacatacagttgcagctttaaaaagaatcctttcagcttcttcttttttttttttccaggatgggatgtcyttttgcagaggaagcccaggttggacttgaacttctgggctcaagttgcccatgctggacttgaactcctgggctcaagtggtcctctggcctcagcctcccatgtagctgagtctactgatgtataccatcacacctggctttttcttttcattggaaaatttagtccatttacatttaaagtaattgtaataggtaaggatttactgttgttattttgttaattgttttctggatgttttgtagatcctttcttctttctgttcttttttgtgacttgatgatttcctacagagttgcactttgattccttttatcttttgtgtgtctactatagactttaattttgtggttactatgaagcttatgtaaacatttttatggcatctgtttaaataatgtaaagtccctcaccaaaactataaaaatattaaatgatttcctataatgtgtttattttta

SEQ ID NO: 374020 - DNA, 563 bp, Homo sapiens
ccttaaaggcaaagtgagtctcttgtgaggaacatacagttgcagctttaaaaagaatcctttcagcttcttcttttttttttttccaggatgggatgtccttttgcagaggaagcccaggttggacttgaacttctgggctcaagttgcccatgctggacttgaactcctgggctcaagtggtcctctggcctcagcctcccatgtagctgagtctactgatgtataccatcacacctggctttttcttttcattggaaaatttagtccatttacatttraagtaattgtaataggtaaggatttactgttgttattttgttaattgttttctggatgttttgtagatcctttcttctttctgttcttttttgtgacttgatgatttcctacagagttgcactttgattccttttatcttttgtgtgtctactatagactttaattttgtggttactatgaagcttatgtaaacatttttatggcatctgtttaaataatgtaaagtccctcaccaaaactataaaaatattaaatgatttcctataatgtgtttattttta

SEQ ID NO: 374021 - DNA, 639 bp, Homo sapiens
atgcattgtttacagtggtaaagtctattagaatcaacagtttctacttttttcaccaccttgaagaccacatccttaaatttgtaatataaacataaagtttgtctctagtatattccattcatagactatttctatagtttattaaattcatagttaaaatattgtcctgttatgaccataaattactgccaatcaaatgctgaggtttcagtacctctctacaatagttggctgagtctattattgtgcttcttytccagggctcttcatgcatgttccagatttaatataggtagcattttaacaaataattttataatttactaagagattttcctggcttctccaagaccaatgattcaaactttttttatatttcaaaatcactaaaaaagttaatcataatgttctcatcacaaagaaatgctaagtatgtgaggtgacagatatgctaattagcctgatgtaacaattccagaatgtatgcatacatcctaacagtgtacccacatacatatatacaaatatttgtcgattaaaaataaaataagtctgggcatggtggctcacgcctgtaatttcagcactttgggagcctgagacaggtggatcacatgaggccaggagtttgagacg

SEQ ID NO: 374022 - DNA, 550 bp, Homo sapiens
ggcatatattatgtagtgttatagtgagaaggttagagggaagtatttagaaagatttattcttcactaggtaaatgtggttgctttgatttatttaaaattctgtgatgaatactgaaacaaatctatctacatgaaaatattaatttttgcttttctgtgtcttctactatcttatattctacaaaagtcgtatgtaaagtatataaaattacctgcattcagggtgatgaaaaatttgggctgattatgaagggtaagttgttaaaatcttacctgaatttgttaagatttacttacttattcatttgcatttcttttttggtcatagtgacaaaaaaaatcaacgaagtgcactttccaaccgagctacatcagggtttgcscctgctgattattgtttgatatgattatatttataaaaaacaacatatatgtaaaagatgtttagtccattatgctcctctttttacagagatgtgcttgtaaacattttttagctaatttagctgagccccaggatgtgacatttactaaaaacccaggataa

SEQ ID NO: 374023 - DNA, 603 bp, Homo sapiens
gaattatatatacacacgcacactaaaacacacacatgcacataaattctgctaaatcctgaaatacgtgaaggggaaggtttgtctagttgtataaaactgtgcattgcataaaccaaagttagagaacattacctcttttaacccactaattggatgctagcatagttctgcatgtttgtgaactattatggagaatgaaaattcttttactttggctacaactgggagamggccttaatttaaattgtgagccaacataggaagctattttatccacttaaatagcagaattgatatgctatcaggtcaccaaggaaattttcaaaaatttctctgagtggcaaaagaaagacccaatgatattttcagaaaaatataaatgagatacttcaatcaaaatatcttttagtggtaatttaaaactcatttgtgttttctactatctttggcaaagaaaggcttttaattgtgtttcttcaagaatgtaggtaaagtaaaaatacaaataattgtatatactgcaccatgggtaatatacagtatttaaaaaatcacaattccttgtaaagtcttctaagcttaatttacacttaaaaatta

SEQ ID NO: 374024 - DNA, 523 bp, Homo sapiens
taattgcacctggagtgtatcattccattgagcaagaaggacaacaaagtcaagtgtgccaataattctattaaaaaaaacttctccaaaatatgctgaaaaaactgacaatcaccctgttgggcagcctattgaaatcacttcgatttaactattcttgtatttctaaagaaggaaggtttttttccattatgaaattgcagctcatcaaatctattttctcagacaatgacaataacaatattatatggcataaagaaaaaattttgaattactttcccctctaaattgtccatactcatagattttctaaccacatagtaaattttttcatgagaaaattttctatgccttttgatctcttttatcatgaattttttcttactcacaggttaatcacattarcgagaccatttaaaccatttgagacatgtgattttagattgacagatgatatcaatctaaatgttttccttttctctgaagaggtagctcgggttctactcacatacattctcatcag

SEQ ID NO: 374025 - DNA, 508 bp, Homo sapiens
ttctactaataatattcctccaaattatttcaagacactaattaattgggaaagatcctactttttatagatctggagatcactgtgagtctcctctaaaaactctggacatcagttactttttaatgattcaaaccatgtagtaaactttamcaagttgttctaatcaagcccactattaaaagggacttggattaaggtccaggatgtgcctcttacttcaagaaggtatatgtaacagtcagtggatggcctgatatttcctcttcataatggtatctgtgcatttattctgttttcttgaatacatgtttctatgattatttttggttattttgcttcttgtagaagatataatgctactataccaagaaccttagttgaacaagttcccagccagctggatttttccatactaattggcttccaaggatgtgaataggccactgactgatccagatttgctttagacacatcatgtgttacatacatcacatttccagagttg

SEQ ID NO: 374026 - DNA, 566 bp, Homo sapiens
ggcttataacattctaccttttaattgaaaactaaaactgtaatgagattttgtattatatgagaagtcattgaacacaatcacatatacaataataattccagacaaagatctagaagaaataacaaaaacttaaagtttcattaggctatgtgaktacttatattatgattagagataaacaaattggaaaaaataaagcttcccagggctttttgaacaattagcattttacccaaaaattgtattagaaaattttaaaatgaaactttgacatgactggtataaccaaacaaaattgaatgtcatgcattctccactgaagccaatatagaaacatttcagcttgctaacaaatttgtccagctttggacatttttctgaagacagttaccctagtcagtactacacttgtaattcacaaagtatcttatgaaaagccatcttaaaagatttacaatgggttgtccttttgattttacattcactatttcctcttttttgataataaatattgccttaaagctcctatagaaaggatttgagaatatcttcaaatgccttca

SEQ ID NO: 374027 - DNA, 587 bp, Homo sapiens
caaaggcaaggattggcataagactggaatttgattataagtatgtgattatagttatataattcataacaggcaaactgatgtcatgctgtctcttgacatgaagacacagtatctataaatacagtattattgccaaaaatgagaaatattaacataatcacaagaagacgctagataaatataaactaaacagcaatttacaaaacaagtggtttgtactctggagaaattaaatttgaaaataaatgtcatgaatgatatagagaaattaaaaacaattccagattaaagaaaatttaaaagttaaaaaaaagaatgtgaaggcaatgcgtgtttctagatcaaaacttcgttaggggaattaaataaacatatgcataactaattacagtaccctgaaactaytgaacttcaaatataaatggaagcaaagcaggcaaaaaagaatagctgaataaatgaccaacagacaaaaatgttcattagaaaaaataacacaaaataaaatttctaaatgaaaggtttgaaaaaaatcctaatatcttgccttaccatgaattctgtatccagatactctgtcattt

SEQ ID NO: 374028 - DNA, 587 bp, Homo sapiens
caaaggcaaggattggcataagactggaatttgattataagtatgtgattatagttatataattcataacaggcaaactgatgtcatgctgtctcttgacatgaagacacagtatctataaatacagtattattgccaaaaatgagaaatattaacataatcacaagaagacgctagataaatataaactaaacagcaatttacaaaacaagtggtttgtactctggagaaattaaatttgaaaataaatgtcatgaatgatatagagaaattaaaaacaattccagattaaagaaaatttaaaagttaaaaaaaagaatgtgaaggcaatgcgtgtttctagatcaaaacttcgttaggggaattaaataaacatatgcataactaattacagtaccctgaaactactgaacttcaaatataaatggaagcaaagcaggcaaaaaagaatagctgaataaatgaccaacagacaaaaatkttcattagaaaaaataacacaaaataaaatttctaaatgaaaggtttgaaaaaaatcctaatatcttgccttaccatgaattctgtatccagatactctgtcattt

SEQ ID NO: 374029 - DNA, 521 bp, Homo sapiens
gatccagagcctcaatgctttgtgcagcctcaagactaggtaccctgtgtcccagctgctccagctccagctggcactaaaagasgccaaagtatagctcagactatggctgcagagggtgcaagcctcaagccttggtggcttccattttatttggggcctgtgggtgcacagaggtcaagatttgaagtttgggaacctctgcctgggtttcaggggatgtatggaaatgcccggatgtccaggcagaagtctgctgcaggggcagagacctcatggagagcctctgctaggccagtacagaagggaaatgtggggttggagtccccacatagagtcaccactggagcactgcctagtggagctgtgagaagagggccaccatcctccagaccccagaatggtagaaccactgacagcctgtaccataaacctggaaaagctgcggacagtcaatgccagcccataaaaacagcaaggaaaggggctgtactatgcaaggccattagggtggagcttcc

SEQ ID NO: 374030 - DNA, 521 bp, Homo sapiens
gatccagagcctcaatgctttgtgcagcctcaagactaggtaccctgtgtcccagctgctccagctccagctggcactaaaagaggccaaagtatagctcagactatggctgcagagggtgcaagcctcaagccttggtggcttccattttatttkgggcctgtgggtgcacagaggtcaagatttgaagtttgggaacctctgcctgggtttcaggggatgtatggaaatgcccggatgtccaggcagaagtctgctgcaggggcagagacctcatggagagcctctgctaggccagtacagaagggaaatgtggggttggagtccccacatagagtcaccactggagcactgcctagtggagctgtgagaagagggccaccatcctccagaccccagaatggtagaaccactgacagcctgtaccataaacctggaaaagctgcggacagtcaatgccagcccataaaaacagcaaggaaaggggctgtactatgcaaggccattagggtggagcttcc

SEQ ID NO: 374031 - DNA, 521 bp, Homo sapiens
gatccagagcctcaatgctttgtgcagcctcaagactaggtaccctgtgtcccagctgctccagctccagctggcactaaaagaggccaaagtatagctcagactatggctgcagagggtgcaagcctcaagccttggtggcttccattttatttggggcctgtgggtgcacagaggtcaagatttgaagtttgggaacctctgcctggrtttcaggggatgtatggaaatgcccggatgtccaggcagaagtctgctgcaggggcagagacctcatggagagcctctgctaggccagtacagaagggaaatgtggggttggagtccccacatagagtcaccactggagcactgcctagtggagctgtgagaagagggccaccatcctccagaccccagaatggtagaaccactgacagcctgtaccataaacctggaaaagctgcggacagtcaatgccagcccataaaaacagcaaggaaaggggctgtactatgcaaggccattagggtggagcttcc

SEQ ID NO: 374032 - DNA, 579 bp, Homo sapiens
cataggagcccacctcttgtatcagagtgacctggatgtgagacatgaagtcaacggagattattttggagctttaagatttaaagacagccctgctggactttggacttgcatggggcccacagccctttygttttggccaatttctcccatttggaatgtcagcatttacccaatgtctgtgccccaattgtatctaggacataacttacttgcttttgattttacaggcttacaggcagaagagacttgccttgtctcacatgagactttggactgtggacttttgagttgtgctgaaatgagttaagactttgagggactgctgggaaggcatgattggttttgaaatgtgaggacatgagatttgggaggagccagggtcagaatcatacagtttggctatgtgtccccccccaacatcacttgtcaaattgtaatccctacatgttgagggagggacctataatctccatgtgtcctgggagggaggtaattggatcatggggttggtttcctttatgctgttctcgtgatagcgagtgagttctcatcagatatgatggttttataagtgtt

SEQ ID NO: 374033 - DNA, 579 bp, Homo sapiens
cataggagcccacctcttgtatcagagtgacctggatgtgagacatgaagtcaacggagattattttggagctttaagatttaaagacagccctgctggactttggacttgcatggggcccacagcccttttgttttggccaatttctcccatttggaatgtcagcatttacccaatgtctgtgccccaattgtatctaggacataacttacttgcttttgattttacaggcttacaggcagaagagacttgccttgtctcacatgagactttggactgtggacttttgagttgtgctgaaatgagttaagactttgagggactgctgggaaggcatgattggttttgaaatgtgaggacatgagatttgggaggagccagggtcagaatcatacagtttggctrtgtgtccccccccaacatcacttgtcaaattgtaatccctacatgttgagggagggacctataatctccatgtgtcctgggagggaggtaattggatcatggggttggtttcctttatgctgttctcgtgatagcgagtgagttctcatcagatatgatggttttataagtgtt

SEQ ID NO: 374034 - DNA, 579 bp, Homo sapiens
cataggagcccacctcttgtatcagagtgacctggatgtgagacatgaagtcaacggagattattttggagctttaagatttaaagacagccctgctggactttggacttgcatggggcccacagcccttttgttttggccaatttctcccatttggaatgtcagcatttacccaatgtctgtgccccaattgtatctaggacataacttacttgcttttgattttacaggcttacaggcagaagagacttgccttgtctcacatgagactttggactgtggacttttgagttgtgctgaaatgagttaagactttgagggactgctgggaaggcatgattggttttgaaatgtgaggacatgagatttgggaggagccagggtcagaatcatacagtttggctatgtgtccccccccaacatcacttgtcaaattgtaatccctacatgttgagggagggacctataatctccatgtgtcctgggagggaggtaattggatcatggggttggtttcctttatgctgttctcrtgatagcgagtgagttctcatcagatatgatggttttataagtgtt

SEQ ID NO: 374035 - DNA, 599 bp, Homo sapiens
tgattctcatctaataatgttcaaataattttttaatctttagaaatatttctccttctttccttgctactgtcctacttttcatctttccttcatcctttcaaaatatattgtcatcaatgaaaacacttcaggcagcaaggaaagatcctagacttgaataaatatatccaaattattgttgcmttactagtacatgttcaaagaaataagaaaacatttttattaccccatttgcatgttgtgtaagtgaccataagtttcatgcagttcctgagagctaggttcactagagtcactttattgtgtctccagaagaaaaataaggtgatgatttaacatgtctgcatgtttgagcattgaatatttagttgatggctacatttgtgaacagtgcacttagcctgttgaccagcagttaataaaaatatacagaaataaatacataaatgggagcaaaatcagctagcagctatggagatgacagacagtatgtgcacaaattcagttttaagaaatgaatttaaagttcaataagaataggatttgagttctggaataactgctgtctctgagatattcaaacagttttggtaaca

SEQ ID NO: 374036 - DNA, 599 bp, Homo sapiens
tgattctcatctaataatgttcaaataattttttaatctttagaaatatttctccttctttccttgctactgtcctacttttcatctttccttcatcctttcaaaatatattgtcatcaatgaaaacacttcaggcagcaaggaaagatcctagacttgaataaatatatccaaattattgttgcattactagtacatgttcaaagaaataagaaaacatttttattaccccatttgcatgttgtgtaagtgaccataagtttcatgcagttcctgagagctaggttcactagagtcactttattgtgtctccagaagaaaaataaggtgatgatttaacatgtctgcatgtttgagcattgaatatttagttgatggctacatttgtgaacagtgcacttagcctgttgaccagcagttaataaaaatatayagaaataaatacataaatgggagcaaaatcagctagcagctatggagatgacagacagtatgtgcacaaattcagttttaagaaatgaatttaaagttcaataagaataggatttgagttctggaataactgctgtctctgagatattcaaacagttttggtaaca

SEQ ID NO: 374037 - DNA, 674 bp, Homo sapiens
ggagggaggaaggaaagaaggaaggaagagaggagagggagaaagagagagagagaggtaagaaatctatggtacaatatattgaaacagcttggtcaggttctcacagtaaaattgatgggtctgtaatgcatatacagatctgtatggtwccacagagaaactcctcttctgtctccacagctaatattctttcaactactctaatgtcaattttgcctctgaatgatgttctgttattaacttgctatgtcacttttttagtgtagctgtaattatagaggtcagtggatggaagggaaagcatacttaagcacataaaatgccttttgtatatgctattttgttgagattcataacaagtttttgaagtaggcatttacagaaaagataaaagtttgacaaagtcacacacttcaagggtttaggttcaggccttttgaacccatgtagcatctctttattctttcagaaaaaacatccctatcttcttaaagcttactctctatttttaaaaaggagtcacccacacattcacatatgtaccttatatattttatcatattatattgtatgtgtgcacacattatgttcttgcactatgtgtcatataaatatttataaaagactcatttgtaaattttacatatgctacacataaacacaccacacat

SEQ ID NO: 374038 - DNA, 592 bp, Homo sapiens
tgatacctaaaattgcaaaggcataataaaattttgacatatatttcaaggrggagtgaactaatcatatatgaccatgggggactttagataaagaaatcctttcagtgaacagagtctgggttcatggagatcaaaagacaatcttgagcaacagatttaaccctgaagcagaggatggagtgaccttcctgagaatcacattgagtggggcaggagacctgagagaaagcaaggtcccactagcaagacaggaaaggaaaaaaaaatgtttgttggacaggtgattaccagtgttttctatattaaataaaacagtattttacacatattattttgcttggtaataattaatttttaatttgtcttgcagaaatataacttgactctaagttcttacatctataaaaattttactatatgctgtcatagtgttatgatttatccctaatgtgcttttcattgcagccatattataagcacaattctatgctgttctgcaattgcacagaattagtactccaaggtagtagataaaaaatatttcagagggaaaaaaatgaagggtgttatgtcttttaagctttataat

SEQ ID NO: 374039 - DNA, 486 bp, Homo sapiens
tgggccatttttgtaatctatcacaatgcatttacctayattaaaaactataatcttagaaaggtaacatttttaatgcatagtgtatatagggcacaattctaggcagcaggaaatcatctaggataagagaaaatcactttggtcaacattattttgcttctatgattaaaacattattatcttatcaataatcaactgtatccatataattaagtacaaagctttggttaaaattcaaacttatgagtgtatgtgttgttagtggaaaggtaagtagagaatgttttatgaaatcattggacactctaatattgctaatttgtggaaaaagtaaaatggatatatcaggaaaaagaggatggaaatttaaagcagatatttctcacctgagaattttctccaaagttgattatagacgagcacctaaggctatttaagaatatttaccttaatgacattttatatatgattataggtggtaat

SEQ ID NO: 374040 - DNA, 486 bp, Homo sapiens
tgggccatttttgtaatctatcacaatgcatttacctacattaaaaactataatcttagaaaggtaacatttttaatgcatagtgtatatagggcacaattctaggcagcaggaaatcatctaggataagagaaaatcactttggtcaacattattttgcttctatgattaaaacattattatcttatcaataatcaactgtatmcatataattaagtacaaagctttggttaaaattcaaacttatgagtgtatgtgttgttagtggaaaggtaagtagagaatgttttatgaaatcattggacactctaatattgctaatttgtggaaaaagtaaaatggatatatcaggaaaaagaggatggaaatttaaagcagatatttctcacctgagaattttctccaaagttgattatagacgagcacctaaggctatttaagaatatttaccttaatgacattttatatatgattataggtggtaat

SEQ ID NO: 374041 - DNA, 486 bp, Homo sapiens
tgggccatttttgtaatctatcacaatgcatttacctacattaaaaactataatcttagaaaggtaacatttttaatgcatagtgtatatagggcacaattctaggcagcaggaaatcatctaggataagagaaaatcactttggtcaacattattttgcttctatgattaaaacattattatcttatcaataatcaactgtatccatataattaagtacaaagctttggttaaaattcaaacttatgagtgtatgtgttgttagtggaaaggtaagtagagaatgttttatgaaatcattggacactctaatattgctaatttgtggaaaaagtaaaatggatatatcaggaaaaagaggatggaaatttaaagcagatatttctcacctgagaattttctccaaagttgattatagackagcacctaaggctatttaagaatatttaccttaatgacattttatatatgattataggtggtaat

SEQ ID NO: 374042 - DNA, 562 bp, Homo sapiens
tgggtttaggccactttagtgtcctttaattttagtttcaagtattattatgttaatttttaaagggtaggtctcctagtaaaatattgtctctggatgtgtttgtcttggaatgtcttaatttcttctttgtttacaaagtaccattttgctggatatagaattattggttaacatgggttgtttgttctgttatttttctcttcccccagagctttgagtaggtcatcctactgccttctggcagtatggtttctggtgagaaattatctcttaatcttattggagattatttatatataatgagtcacttctctcttgctgcttataagattttctctttttctttgacttttggctattagtctaggcactaaattctaagtttatcatgtttggaatttgccaagcttctttttttttttttttttgtatagattaaccttgtaaatcaaatttgttaaatttttggcctttatttcttcaaatygtgcttactcctttctatctctcttctccaccttgctctctcatcatgtgttttttggtaggcttgatgatg

SEQ ID NO: 374043 - DNA, 496 bp, Homo sapiens
tatatacagaatgttatacatgtatgcaaatgagtaaactatagctatgagcaaaatataatgactcacatatattatgttgagtaaaggascatgtcacaagggattattggtttattacctattctattatactaatttaaattaaaataggcaaaaatcccaaacatttactaaccaaatacactagaaatgataatccagaacaaaagctgatacaaaatatatagatttgccaggcatagttttctccaacaagatgactgctcaagtcattcacctaactttaaattgggtttcatgtttttttaaacattgatttataggagtttctaatatattctgaattgttatatttaaaaaatttttatgtgtatgtctggttcattttatgttttattttcaaagaagattttcttgaatataattttagtgaaaaccaacataatctattgggaggagcatacattttgttattcaaagccatggatttaaa

SEQ ID NO: 374044 - DNA, 546 bp, Homo sapiens
ttgtggcctcaacctcctgggctcaagcgattctctcacctcagcctcttaagtagctgggacgacagccgtgcaccaccacaccaggcaaatttgttttatatttatagagacggtggtcttgctacattgcccaggctggttttgaactcctggcctcaaatgattctcctgtctcaccctcccaaagtcctggaattacaggcttgagccactgcaccccaccaaagacactttcagctcctttcttagtgtgctttgcagcagaacgtgaagcccackggcagccaggatgaggtgtggaaaggaccagtcagtactggggtgggggtggtcccaggagaatccccagggcagcatctctctccaagcagaggtgcagagacctagggcagcacggctggcggggggccctgcctggctccatgtgctttacctgactcccagccacaggcagaggcacattgactcgtgggaacgacaacacgcttctgggagagggtgagctgccaacttacctgggacatatttgtcaccaacgtgacg

SEQ ID NO: 374045 - DNA, 546 bp, Homo sapiens
ttgtggcctcaacctcctgggctcaagcgattctctcacctcagcctcttaagtagctgggacgacagccgtgcaccaccacaccaggcaaatttgttttatatttatagagacggtggtcttgctacattgcccaggctggttttgaactcctggcctcaaatgattctcctgtctcaccctcccaaagtcctggaattacaggcttgagccactgcaccccaccaaagacactttcagctcctttcttagtgtgctttgcagcagaacgtgaagcccactggcagccaggatgaggtgtggaaaggaccagtcagtactggggtgggggtggtcccagragaatccccagggcagcatctctctccaagcagaggtgcagagacctagggcagcacggctggcggggggccctgcctggctccatgtgctttacctgactcccagccacaggcagaggcacattgactcgtgggaacgacaacacgcttctgggagagggtgagctgccaacttacctgggacatatttgtcaccaacgtgacg

SEQ ID NO: 374046 - DNA, 468 bp, Homo sapiens
atggagcgcagcaccggtgggctggcactgctggggaacccagtacaccctccgcagccactggcccgggtgytaagtccctcattacccagggccagcagggctggccggctgctccgagtgcggggccgccaagcccacgcccacccggaactccagctggcccacaagctctgcacgcagccccggttcccactcgcgcctctccctccacacctccctgcaagctgagtgggtgggcttcagccttggccagcccagaaaggggctcccacagtgcagtggtgggctgaagggctcctcaagtgccgccaaagtgggagcccaggcagaggagctgccgagagcgagcgagggctctgaggactgccagcacgctgtcacctctcactatatcctgcgactctcctgaattcccccaaatttcctgaatggtttattagtcttagtattttatgaagtctttag

SEQ ID NO: 374047 - DNA, 540 bp, Homo sapiens
ggcattgcaacagaaattagtaaatccataaatcatagctagtacagttttgtgttttttgcgaaaattaaattttcagccaggcacagtagctcacacctgtaatcccagcacgtttggaggcccacatgggtggatcacttgagcccaggaatttgtgaccaggttgggaaacatagcaaaaccccatctctacaaaaaatgcaaaaaaaaaaaaaattagctgggtgtggtggtgtgcatctgtagtcccagctactcaggaggctgaggtggaatgatcgcttgagcctgaaaagtgaaggcagcaatgagtcaagatygcaccactccactctagcctgggcaacagagcaagaccctgtctcaaaaaaaaaaaagaaaaagaaaaagaaaattaaagtttcacttaatggtattattttgcaatttcctttttttgcaacattgtttttgaaatttattcatgttaatacaggatgtatccataagtgtatgtacacatatatcaactttgctaaggtataatttataaaaaat

SEQ ID NO: 374048 - DNA, 540 bp, Homo sapiens
ggcattgcaacagaaattagtaaatccataaatcatagctagtacagttttgtgttttttgcgaaaattaaattttcagccaggcacagtagctcacacctgtaatcccagcacgtttggaggcccacatgggtggatcacttgagcccaggaatttgtgaccaggttgggaaacatagcaaaaccccatctctacaaaaaatgcaaaaaaaaaaaaaattagctgggtgtggtggtgtgcatctgtagtcccagctactcaggaggctgaggtggaatgatcgcttgagcctgaaaagtgaaggcagcaatgagtcaagatcgcaccactccactctagcctgggcaacagagcaagaccctgtctcaaaaaaaaaaaagaaaaagaaaaagaaaattaaagtttcacttaatggtattattttgcaatttcctttttttgcaacattgtttttgaaatttattcatgttaatacaggatgtatccatawgtgtatgtacacatatatcaactttgctaaggtataatttataaaaaat

SEQ ID NO: 374049 - DNA, 554 bp, Homo sapiens
acaaggtcatgaggtgccagaggagggggtcaaaggctggttatgctttcatgggttgatttccccataaccagcagcacagcacccccttccacacaaccgtatcaggctggcgcactctagtcatctccctcttcccctgaccccctggttctcatgacccaacyaccccacgaagacccaagggtgagccacatagacagactctgtcgaagtctatccattatccactcactcgcccaggctggagtgcagtggtgtgatctcggctcactgcaagctccgcctcccaggttcacgccattctcctgcctcagcctcccgagtagctgggactacaagctcccgccaccacgcccggataatttttttttttttgtattttttagtagagacggggtttcaccgcgttagccagaattgtctcgatctcctgacctcgtgattcgcccgcctcagcctcccaaagtgctgggattacaggcgtgagccaccgcgccggcccactcattatctttttcattcacgggacgggaagacttttgaacacgtat

SEQ ID NO: 374050 - DNA, 462 bp, Homo sapiens
acctgtgccctgaatgttctctggaccttcttcttggagtcctttttcctcctctggtcccatctgaaatttctatcccatactgcagacctgtttttgctgattctgcacctgtaatcccagctacccgggaggctgaggcaggagaatcgcttgaacccgggaggggggaggttgcartgagccaagactgcaccattgcactccagcctgggcgactgagtgaaacactatctcaaaagaaaacaaaatgacaaaccccccaaaacaaatgctcatgacaaactgcaggttagttaaagtcctcatttaaaggagagcaaatctgagactcagagaagttaaggaacttgctcaagttcacatagctggtgaatggcaaagctgggagacaagctcaggtcaacagacaccaaaaacttgtgatttttttggtcgcaccacactgcctctcttctgcag

SEQ ID NO: 374051 - DNA, 505 bp, Homo sapiens
gaggctggcccccacattggctttttgcctgggccccacagttttgtcagtcagggataggtcccctaaagctctggatgaccctgctcccacttttctgggaagaggccatctggcctgttgaaattgacataatggttytcacttttggaaataaaggaacaggcctgataatctctgaatcacctttggagtcattctacttttgtcttgaaaaataataactggcttctgttgagatggatgattagacttgtggttcacaccatactaattacattatcaaatcagtcttggccacaccctcactgttctctttgtaatgttctttctcatttttggaatatggatagactgagaattacccaaatcttcaggtttgatttccttttagcataacaattttatctgtaagtcatttctttcttctcacattttactaccaaacatcaggaagagccaagctgcacctttaacactgtccttagaaataacataagctaaa

SEQ ID NO: 374052 - DNA, 604 bp, Homo sapiens
tgtttcttcaaaactcattttattaaaaaaattcaatttagagtgatgattcataacaacttgttattgaaaaaactcgatgcatgcaaaataagaatgagtttcttttttgcttatttgtcttatatccatttaccaaaaaaaatgcacctaggcatgccacctgatctgattttacttaattatgactgtttatagaagttatcattggaattgaagagccaaacagtcatgttcatggggtgactgtacttaaagatcatttagttgggactaggttctttrgcaggagtatttatgatgaattttaaaaatctttacatgatagttttacaggtacattaatgtttcattcaaatttaaaaacatctgtttatgttttaaaaacatctgtttctgccttgccttagctttactgtcgtaaataattaattcatgactaaaccaatattggttattatacttttactaatttattctctactcttaataattatgtttgctttagaaagattattttcacctccctgtttataacctaaaatatagtcaaaagggtactgtatttgttattaggaaacctgtgttcaaggctagtttgtca

SEQ ID NO: 374053 - DNA, 604 bp, Homo sapiens
tgtttcttcaaaactcattttattaaaaaaattcaatttagagtgatgattcataacaacttgttattgaaaaaactcgatgcatgcaaaataagaatgagtttcttttttgcttatttgtcttatatccatttaccaaaaaaaatgcacctaggcatgccacctgatctgattttacttaattatgactgtttatagaagttatcattggaattgaagagccaaacagtcatgttcatggggtgactgtacttaaagatcatttagttgggactaggttctttggcaggagtatttatgatgaattttaaaaatctttacatgatagttttacaggtacattaatgtttcattcaaatttaaaaacatctgtttatgttttaaaaacatctgtttctgcsttgccttagctttactgtcgtaaataattaattcatgactaaaccaatattggttattatacttttactaatttattctctactcttaataattatgtttgctttagaaagattattttcacctccctgtttataacctaaaatatagtcaaaagggtactgtatttgttattaggaaacctgtgttcaaggctagtttgtca

SEQ ID NO: 374054 - DNA, 568 bp, Homo sapiens
aacttgttattgaaaaaactcgatgcatgcaaaataagaatgagtttcttttttgcttatttgtcttatatccatttaccaaaaaaaatgcacctaggcatgccacctgatctgattttacttaattatgactgtttatagaagttatcattggaattgaagagccaaacagtcatgttcatggggtgactgtacttaaagatcatttagttgggactaggttctttggcaggagtatttatgatgaattttaaaaatctttacatgatagttttacaggtacattaatgtttcattcaaatttaaaaacatctgtttatgttttaaaaacatctgtttctgccttgccttagctttactrtcgtaaataattaattcatgactaaaccaatattggttattatacttttactaatttattctctactcttaataattatgtttgctttagaaagattattttcacctccctgtttataacctaaaatatagtcaaaagggtactgtatttgttattaggaaacctgtgttcaaggctagtttgtcacaacaaattgtaatttttaat

SEQ ID NO: 374055 - DNA, 617 bp, Homo sapiens
taaattattgataatttaacctgccagagacacttatttagactttctagaaattaatatgtttaggttcataaataatttagaacgtttgcatgctaaaggcaaagaataattttctatatttattatttgtataccaaatgcaaatattctctgtatacctctgtaaagaaaaatctcaatgaaatggagatgcccctcctggctctgttttttctccttagatttttacctcagctattttcttgttaaataaatctcatctctggactatttaaaaaaaacttgtactttgataaatcttggcttgctttacccaagaagcttcccttctatttcttcacatataatactcaaagtcattctcccagaatcaacccraaactttttgaaacttatccttgtaagtttttactatctcgtattgccataaaatgatattcgtatctagcagttgcaattattttgttttttggtttgctggtttacatttttgagtctctcatttgcttttgcagactaaggtggagaacacatcttcttcattttgtatcatttatgtctggcataattcctggctcataatatgcaatgttttgaaagaatgaccagcaagt

SEQ ID NO: 374056 - DNA, 633 bp, Homo sapiens
aaatcattctgtcttaaagacacatgcattgtgaatgttcattgcagccctattcacaatagcaaagatgtagaatcaatctaaatgcttatcaatgatggattggataaagagaatttggtaaatgtatgccatggaatattatgcatccataaagaagaacgagatcatgccttttgttggaacatgaatggagttggagactattgtccttggcaaactaatggggaacagaaaaccaaatactgcatgtacctacttataagagggagctgaatggtaagaasagatgaacacaaagaagaaaacatcagacactggggcctacttgagagaggagggtggaggagggagaggagcagaaaagatctctgctgggttatctttgagataactattgggcttaatacctgagtgatgaaattatatgtacaaaagcccctgttacccatttttacctttgtaacaaaccattacacatacccccaaacctaaaataaaagttaaaagatattgtaaaaattgttgaaattgtatgacaacttggtttatatatgaattagttagttgacaaagaaattttagaaacagtaaaacttatacagtcatttggtgtgtgacacataagatgtc

SEQ ID NO: 374057 - DNA, 581 bp, Homo sapiens
ctgactgatgtcacaggaaagctaaagaagaattatgggggcattaccaggaaatagaagcaaatccagagaattgaatccaggacctgagactacttttcttctgcagtgtctgcccgtttttatatatatacacatatgtatatataaatacatgtttatatatatataaacaaaaacaaaacaaaaacaaaaccaagaaactaaccagtgcttttaatggcctcacagagctatgaggaaagaatttagaccctcaaaatgtctatgctataaatcagggtttcccaactaatgtttcacagaatgcttgactttgagagaagacacaagagtcatgtgagaaattattattaaaaaataaacatggagtttaaaaggttgtattcttatcagccactcagcaatatctttatgggtctttaaaacctctatcacagaatacaataggaatgtattcattcggtgggtccattcccagttttgatgtgaggtaggtgttacaacccccaccttatgtaccaatggcaygtagaagcaaaaaagctctacctacataacaaaaaattggaaggaaattt

SEQ ID NO: 374058 - DNA, 315 bp, Homo sapiens
ttcttctgcatcttctacactctctcagccttcataaaattgaagaagttagggtcttgcttcggatgagactttggtttcagagaacgttgtagtcgatttgatctatccagactaaacttttccatatcagcaataagtttgtttcatttgtcattcgtgtgttcactggagtaacactgaattttcttcagaaacttgtcctttgcattcacaacttggttatctgacacaagaggtmtaactttcaagtgagttttgcttttgacaggccttcctgattagttttaatcatttcccccccccacttaaagt

SEQ ID NO: 374059 - DNA, 547 bp, Homo sapiens
tagaaatatgctgactggagcctttggcagaaaggggatattgtattcagcaaagatctttggggattatgcctcaaaagctgcatgctgcagaggcactttttagaccttttgaaaaacaactggcagcttgttactgggggcattggtgaaagtgacccctgcggtsaatgacagcacataatactgtgtcattatgtgctgggaccagaatacctttcaagtcttatgtaatgtcagagaagaatagagacgcagcttagcagagctcactgataaaacaaaaatattgtattcaacagcatgtgacaagaggaaattcaggagatgtaaactatgtatatatgcagcttacttctcttcttccaaggccaatgacagggctctgtggcttttcctacctctttacatccctactaactattgttatatgctctgatgccaaaaaatagctttcttggttcagtgattgaaattcttaattctatagttagattgcaattagaaattgatcataatacatgttacatatggtaaagtgttgatg

SEQ ID NO: 374060 - DNA, 369 bp, Homo sapiens
tgtccatatagaaaacaaaattgtattttgaccccagtttacaccagatataaaaatcaatcacagacagattgaagatctaaatgtgtgacaggcaaaacaataacttctggatgaaaatataggagaatatccttgtgaytttaagcgggacaacgttttcttaaataagacacaaataaaatgctaatcataaaaataaaaaatacattgtaatatattgaaattatagatttttgcttatcaaaagttagagtgaaaaagcaaccaatggagtaaaagaagtatttgcaatatatacatctgataaaggattcatgtatagaatatatttcttttaaactgacagactggcaaaagaaaggagaa

SEQ ID NO: 374061 - DNA, 601 bp, Homo sapiens
taatataaattaatttcttagtttatatatatattttcatgatgctacttttaagggaactaatttttattgaagtacatatagaaaagttcacaaatctgaagtcacagcttgataactttttggcaagtgagcatgttccagtaactgcctcacagaacaggcattcattcattcgatgtaggcactttgagtgcctaccagttaggcactgtgctacgtactagctagtatataatgctagtgtgacaaataagacatcacagtcyctgacttcatggtatttgtaatctacttagacaatcacaagtaattattgatgataataaataacaactagggcaccaagataaagcttaacaggcaatacctactttcagtattgtgatcagagaagacaaaacctgctacatgtggagagaaaggaaaggagagaatcagcacaggtgttctgatctcatttcctacctctctccctttaatcactctgtggtgccagtcatacggtttccttgctactccttaatcacaaacaatctagtcaagctcctgcttcaagatttttacatattttcattcctttatgaagaatatgctattc

SEQ ID NO: 374062 - DNA, 536 bp, Homo sapiens
cactgggggaaggtgatcatttaaatataccaccaaagtgtttatccttactgatgcacattagctgaatgtttattatgttaataatatcagcataaaatggcagtcaaagccatggatgtggtgaagaactactggcatcaaataagaaattaccattatgctgagcaccagtcttttatggtacgccagagaatctctacctattttctttatcattagctaatgcgctaatgagaaaaattatacagaaagtttcagcccaatccagtcattagaawgggcaaggttcacagtttcactacagcaaagcttcaaaggacaccatacaagtgacaggaatgaattgatgtcatgagcgttcagctagccttacaataacagccttgcagtgaaagctttcagccaacatctgctgctcttgacagctcaatctttctaacagaggctgtgccagcattgagatttctacttctaaatttgtttttgctgattcaagttttgtgaattttttaaacatttatatttgtattttt

SEQ ID NO: 374063 - DNA, 485 bp, Homo sapiens
ctttgatgtgttttgttacatgggtataggtaaccaggtcaaaatgggtgacctggaaatgtgatgttatcatgacaaaaatttaaaatatatgatattggctttgagaccacatgaggggcagaagctagaagggccttgaggaaattgctagtaaggacttgaagattattgcttgaggaaattgctagtaaggaaaagattatctgtgactagaaaaaaagtcacccaagttatataatgacagaagagttagtaaaactgttgatttatataataaggaacacagaatgagtacataatgatctccatgatctggttatagagatctccrggcagatattaaaagtgccaattggcttgcgaaaaggcagaaaaatactaaagagataattacttagttttgggcaccatttggaggaaatggaaacgagacagaaattgctaggtttaaaaataaaacagcttcttctccacactctttt

SEQ ID NO: 374064 - DNA, 521 bp, Homo sapiens
ataattaatagttttcaaagaatgtcaatgatgtgaaacctgcttagtcagaaaaaaaagggtttctaagaatctcaaatgtatgccccatataaactttcctcaaacaaaatattttcagaattctgagtgacactgtttcttagcacactgtttaacaaggaaatgtgggtatggcttttgtcaaatatagttgatacactgaagctcacaatcgttttaatgaaataataacagtgcagatttaaagagacaaagtggtacaaaattttaaaatgcctgaaggctgcgaccttcggtrgtcagacaataggctaagaagtttctcagttgcaagccttgaccttccctttttaatagaaaaagatgaataacccacaaattattcaattaaaaagtgggcaaaggtcctgaacagatatttctcaaaagaaggcatacaaatggcctacaatatatgaaaaaatgctcaacatcaataatcatcagggagatgcaaatcaaaaccataatgacatatc

SEQ ID NO: 374065 - DNA, 619 bp, Homo sapiens
gttgagttgtaggagttctttatatattctgcatagtgaccccttatcagatacatgatttgcaaatattctctcccattctgtaggttttcactctgttgattgtctcctttgctattagtatattttctaagtttgatttaatcctgtttgtctgtttttattgcctgtgctttgaatgtagtatcaaagaaataattgccaaattcaatgtcataaatcttttcccctattttattctagatgttttatagttttaggtcttaaatatgatcttaatctattttgtggtaatttttgtgtatgatgtaaagtaagaatccaatcgtttttttctgcatatggatatccaattttcttaaaattatttaagagaatccaatctttttcttttgcatatggatatccaattttctcaaaaatatttgtttaagaggttgtccttttccattgtgtgatcttggcattcttattggagattatttgaccatttatgcaatggtttatttctggaatctgttayattccagtggtctatatgtctatctttatgccactaccttactatatcagtatgctatgacagtatatacaatacttgtttattatagctttgtaa

SEQ ID NO: 374066 - DNA, 517 bp, Homo sapiens
gaagtgagcacaggaagcattttaagatggcagaagcaacagcagaacagtaatttggataaaccctaagacagattcctgtactaacttccctccttcacctcctagctctgtgtgcttgttcaagttacatgacccactgaacttgtttctttaactgaagaataagactatcaacaccaaacttaaataatttttatacatayttggctaggaaaacagagccacttaatgtgttctaagtatgaagggtttaatatgaaaaagtaaagaattcaaccattagaagagttgggaagtaagtgatgagttggggagtgaacaagagttgagggtggtcagggaagccccatgcccatgatcacagcccgaagcactggtatggggtttctcatgagcttatagggaagttgctgcaatgcctttgaaatatatgagtatatgaaagttcccattgatcttctctgtctgcatcagtaaaagcaatggttttcagtagctggctggaaagccaatg

SEQ ID NO: 374067 - DNA, 601 bp, Homo sapiens
atgatgaatcacacattgatttgtgtgtgttgaatcaacctggcattccagggatgaagtctacttgttcatggtggattagctttttgatgtgctgctggatcagtttgctagtattttgttgagattttgtttctatgttcatgaaggatattggcctgcagtgtgtgtatgtgtgtgtgtgtgtatgtgtgtgtgtgtgtgtgtgtgtgtgtgtgtgtgtgtgcttgccaggttttagtatcaagatggtgctggccacatagaatgatttgggaatgcatctgycctcttcattttttttttttttttgaaatagcttcggcagaaatggtaccagctctcctttatacatttattagaattcagctgtgaatccatctggtcctggacttgtttttggttgttaggttattcattattgactcaatttcgagctcgttattggtctattcgggaatttaatttctttctggttcagccttgggaggatgtatgtgtccaggaatgtatctatttcctctggattttctagttgtgtgcatagaggtgttcatagtggtctccgatggttacttgtatttccttggggtcagtggaa

SEQ ID NO: 374068 - DNA, 614 bp, Homo sapiens
taacttctagtgagaattatcttgaggaggtgaatctcatcagtggaatcttgccatttgtgatgcaaagaaaaacattaaaatcaagggagctcagaagggttgagtccagctccagaaatacagcatctccggtcccatttcaaacctgctgaaatataatccacattttaggaagatctcagccattcttattyatattaaaagttgagaaccactgtcgtaaaacaagaggtgcaggggaacttctaatttattcttataaaataacgttttggtcctcaatatatgttgtttattaaaatcaactatgggacttaaaaaaatgaagtagctgttgggtttattgcagacctgttgaatcataaaatacatggtgtgggacattggcacatggcatagataatttgagaaaaattaatacaccacccccaagacatatacataaacacaaatacacttaatatgctctctcccccccccaacataactacattaaaatgtatgtgggtgattctaacatgaccacagtttgagaaaactgagcgaagtctctttgatgcagaacaagccatcttcaaatcatctttctggaaaaagcagcattttgtgct

SEQ ID NO: 374069 - DNA, 617 bp, Homo sapiens
cttttttggatgacactaagtaactttattatctggtggcctttggaacttcatgaggcagtttagaataaatttctccagaatggcagagactgtctcaccctccagctctgttctggagttaataacccattcttcaattaggatatgaagattggaaaggatggcttttctccattcacaaatttgggaaacaagtttttaaaatcagacactggataactgaatttttgagacatcttttaaaagcaggtaatcttcaaattcttgttattttaaatatataaatcccttatttcatgcctagattctcatcagtattaaagaaaagggatttttatttgcttagtctttatttaaggcatagacaatgtatgtttaaggctgcattatttmatgattatgtaaagttaattactccctattatccgtagacttaaacaaatgaagcacacttgggtcttatttttaaccattgacttttaaaattttataaacacataaaatttcattatgcaaggcttctcaaaataagttaataacttccaatatggaataattagatggtccaaatttgaatcacaccatctttcattatccctgttgaaaaaggaagt

SEQ ID NO: 374070 - DNA, 604 bp, Homo sapiens
tccagggtattagggtggggctatctcagaaaaagtgttcttctttttctgtcttaggtagtagggagtttactaactcttctcatgtggttataaacctctgctccaaatcagcgtagactcttatgcccaggattctttcctgaccctctatccaggcagagtttctgcatctgctttgaccccagcatcaatgtattattgcttgtgtctaggacatgagtagtttctctacattttccccagaggcagatatcttcttctacttcctttacataagaaatcattgttgcctatgcccttgtagcaagagtatttgttgctctttcctcaatagttgaatgtttttgcttcataggaaacaaaggtcttgggaagagggcaggtatttgtgcctgtcctcaagaaactaattatctagtgaacattttgactaccaaggtgggttctttcaagtgtcctgccttgctcctaatctttcttatgattacaccataaagtcttgtggaaaagagtaaatgagtgctaattccctttgtktgtagagtccccagatcttaccaactgatatagtagcccatatttagcctttaagaatgtataa

SEQ ID NO: 374071 - DNA, 554 bp, Homo sapiens
gattctaaatgcattggatctttaaaatttggtaaaatgctacattatccttaaagtatattttcaatgcccatttcatccaaaggagtttttcttttgtaaatcccaattcctctttatctgtatctctcaaaagaaaaacctcagatctattttgtactatttacttgtgtgcagtgttgttaatagtatacatttttattatcattatatttcccacattacctaaaaagttacttcgaatatcacactgttggcattcattttgttgaaaaaacaaatgaatgaataaatggatratcactcaaaggataataatgatgtaaaaccagtgtaatgtattagaatactaactgaaccaggagttaagatatttagctcaagcctcttttctgctgttaagtcaagtatgacctcaaatgaatttctcctttataccaactatttttgtatgattattgggtgagatattttaagactttttctatacatatgaaatttgaaacaaaataattagctgttttttgactaaattatcttatagcttcaaacag

SEQ ID NO: 374072 - DNA, 507 bp, Homo sapiens
ctacaaccctttcactgatgttggaagagatatgcttgcaggtctgttcttacttattgttatggactgaattgtgtcttcaaattcatatgttgaatacctaacccccaatataattatgtttatagatggagtctttaagaaggtaaagataaaatgaagtcatgagagtggggtcctaatcttattgcactggtgtccttataagaagagtgagagataccaracatctctctttctctgcaaaacatagaggaaaggccttgtagggacttagcaagaaggtggctggatgtctgcaagccaagagaggcctcaccagaaaccaactctgccaacactttgatcttgagcttctagcctctagaactatgagaaaataaatgtctattgtttaagctacccaaatatgcctattgtttaagtgacccaactatgcctgttgtttaaaatgtcttttgtttaagccacccactattttgttgtggcagacaagcacactaatac

SEQ ID NO: 374073 - DNA, 519 bp, Homo sapiens
gcaatgctcatgattaaagttacttttttggaaattcttctgaaattttttcaattgctcggcctccctaatctatttagaaggatacttayagattatttctggtctaatggaactctgccacagagagggtttaatggattcagatcacagtgagtggagactatggtcagccaccatccttgatccagggaaagtttgtaacagagtgttaggagacttccatcatttgttgagtcattaaattgttctcacaggtgttatgatccatggggaaaaatccctgtgtttctacttcattaacaagcaagtcagcaaatgaagcaaagattttagccagcagtacatgaggatactcaatttaagacttcttttcaaagccaggacttataaagaggctaaagagctactagtttagtagctgcattttcatgtaagaagaagcaaatgcaaattctttccaaagggaagcattctcaatttgtatacccaaaattcccacaaattaaggagaaaatc

SEQ ID NO: 374074 - DNA, 519 bp, Homo sapiens
gcaatgctcatgattaaagttacttttttggaaattcttctgaaattttttcaattgctcggcctccctaatctatttagaaggatacttatagattatttctkgtctaatggaactctgccacagagagggtttaatggattcagatcacagtgagtggagactatggtcagccaccatccttgatccagggaaagtttgtaacagagtgttaggagacttccatcatttgttgagtcattaaattgttctcacaggtgttatgatccatggggaaaaatccctgtgtttctacttcattaacaagcaagtcagcaaatgaagcaaagattttagccagcagtacatgaggatactcaatttaagacttcttttcaaagccaggacttataaagaggctaaagagctactagtttagtagctgcattttcatgtaagaagaagcaaatgcaaattctttccaaagggaagcattctcaatttgtatacccaaaattcccacaaattaaggagaaaatc

SEQ ID NO: 374075 - DNA, 574 bp, Homo sapiens
tattctcattattccctaaagcctatcaccaggaagatcaaaatacttttccttttgccagtcaccacctctcccaatttcttttgtttgcctcgaatttgtctccttgggtgtggctcatttaaactgtcaacattttttaaattgttgcatattaattgtacatatttatggagtacaaagtgatsttttaatgcctacattatatagtgctcaaatcagtgtaattagcatatccatcacctcaaacttttatcatttcttgtattaggaatattcaaaattctctcttctagctatttgaaaatagataatacattattgttaactatagtcaggctaaagtgctatagaacaccagaacttttgcctcctatctagctgtaattttgtattctttttctttttttttttatactttaagttttacggtacgtgtgcacaatgtgcaggtttgttacgtatgtatacatgtgccatgttggtgtgctgtacccattaactcgtcatttaacattaggtatatctcctaatgctatccctcctcccttcccccaccccacaacagtcccca

SEQ ID NO: 374076 - DNA, 582 bp, Homo sapiens
ggattgctgggttaaatggtgtttctgagtctagatccttgagcaatcaccacgttgtcttccacaatggttgaaccaatttacactcccaccaacagtgtaaaagcgttcctrtttctccacatcctctccacatctgttaaaacctgacttttttttttttttttttttgagatgaagccttgctctgtcaccaggctggagtgcagtggcactatcttggctcactgccacctctgtctgcagggttcaagcaattctactgcctcagtttccagagtagctgggactacaggcacgcactgccacccccagctattttttaaatttatttatttttgtattttcatagagacggggtttcaccatgttgcccatactggtctccaactcctgaactcaagcaatctgcctgccttggcctcccaaagtactaggattataggcgtgagccaccgtgcccggccatttctcactttttaatgatcatcattctaattggcatgagatggtatctcatcatggttttttgatttggatttctctaatgaccagtgatgatgagctttttttcatctgttt

SEQ ID NO: 374077 - DNA, 630 bp, Homo sapiens
tggtttttattactctcctcctaaaaattctgactttcccacctaatgcacttgatgagctgctcacagacccataaagcaggtggccacaagatgcagtgcacctctaggaaatataatcggtgcttggcaaatttgtttaggcaggtggtctatgaacacaggtgtcctactaagcaagtttgattgtgtttccaatctcaggagataccagcaaaaaaayacagggaaaatattcaatatggttttatttcgggggaggtgaaatagaaggattattacgtaaataattttaaaaatcacgagaatagattgtttgtgggagttggattggaacagggattcagagacatggataagggtcttgactctgtgaccccaggtgagttacaaactaccaaagcatctggtctttatcatttcagaactggagacaacctcagcaattactttgttcaaccccttcatcttcaagatgtaaaatcctagtctgagagtgagtaagggacttcctgacagtcccacagcctggcaggggcaaaaacaatgtggaaactcactccagaaatcttgccactgtaacatactgcccctcctaacttaaaaaaggaattgataatttgaattatt

SEQ ID NO: 374078 - DNA, 397 bp, Homo sapiens
agtggaggaaaacctgtctaaacagatggaccwgcagcagtgtcttgaaattgagaaaacactacctatgttagaggatgcttaagataaaaggcttcttgaggggaaaacaaaaaaaactacctctgaaactacaggcattttaatcttcaagcatctgtttagtcctagtttgccagagactgcgctgtttcttgggatgtgggatttgcagtgcaaaaactaggacagttcccaggaaagcaggacagttggtcacctatttgtaggagttgtctcttaaatagtttctattttttaatactgcactggcaacctcactttttagtattctaactcaagctttgaatcactgaatgcatcaaagtaatggcatgttttagagaaatgtatagga

SEQ ID NO: 374079 - DNA, 590 bp, Homo sapiens
ggtattgttgctggtttagactctctatggtcagattctggatctttttcacttattagctgtacagctgtgagcatgtgacttatgtgatttgcgtctcagttcctttagttgtaaaataagcataatttccatttctatttcataggatttttatgaacattgagataaaacgtgccaaaagctcatggagagcctggaacatagtaagcaatttatacgtattggtcattctgaactctggcaagaggagcagcacgagaaaaaaatcacagaagtggtaacttttaaatgtgcttaaattcatgggctactttcaatattggacatgaaaatcacagagaaattactaaggactgtcaacttagaaatgcggtttaagtcatatggtgaaagaccatagatgctaaaatagggagcatgttttcaaggaaytgaagtgacaaaccacaaatgtaagctgttagataaaataaggaggaaaagccatgtacttattgtaggtgcctagtaagaaagttataaaggccagttagaataaaagaggaccagtcaagctccagtgaaggcttgcatctatatcattttgc

SEQ ID NO: 374080 - DNA, 614 bp, Homo sapiens
aatgttcattcttgtgtaacaatttttaaaawtccaaacttccttcaatttaaaattttgtggcaattatttccaaattgatctatagattcaatgtaactcctattaaaatccaatcaggctggccagacgcagtggctcaggtctgtaatcccagcactataggaggccaagatgggcggatcacttgagctcaggagttcagtaccagcccaggaaacaagggaaaaccccgtctacacaaagaatacaaaaattagctggacatggtggcgcatgcctgtagttacagctactcgggaggctgagggaggaggattgcttgagctggtaaggtcaaggctgcagtaagcaatatttgtgccactgcactccagcctgggtgacaaagtgagactctgtctcaaaaaaacaaaacaaaacaaaataaatccttttaggcttttttacagaaattaacaagctaattctaaaatgtatatgagaatgcaaagaacttagagtaaagcaaacaacttaataaaaacaaaacaaagttccttcttttatgttgataaaaataaaatttaaaaaaataagatgttcaacaccattcgcccttagggaaatgtaag

SEQ ID NO: 374081 - DNA, 614 bp, Homo sapiens
aatgttcattcttgtgtaacaatttttaaaattccaaacttccttcaatttaaaattttgtggcaattatttccaaattgatctatagattcaatgtaaytcctattaaaatccaatcaggctggccagacgcagtggctcaggtctgtaatcccagcactataggaggccaagatgggcggatcacttgagctcaggagttcagtaccagcccaggaaacaagggaaaaccccgtctacacaaagaatacaaaaattagctggacatggtggcgcatgcctgtagttacagctactcgggaggctgagggaggaggattgcttgagctggtaaggtcaaggctgcagtaagcaatatttgtgccactgcactccagcctgggtgacaaagtgagactctgtctcaaaaaaacaaaacaaaacaaaataaatccttttaggcttttttacagaaattaacaagctaattctaaaatgtatatgagaatgcaaagaacttagagtaaagcaaacaacttaataaaaacaaaacaaagttccttcttttatgttgataaaaataaaatttaaaaaaataagatgttcaacaccattcgcccttagggaaatgtaag

SEQ ID NO: 374082 - DNA, 614 bp, Homo sapiens
aatgttcattcttgtgtaacaatttttaaaattccaaacttccttcaatttaaaattttgtggcaattatttccaaattgatctatagattcaatgtaactcctattaaaatccaatcaggctggccagacgcagtggctcaggtctgtaatcccagcactataggaggccaagatgggcggatcacttgagctcaggagttcagtaccagcccaggaaacaagggaaaaccccgtctacacaaagaatacaaaaattagctggacatggtggcrcatgcctgtagttacagctactcgggaggctgagggaggaggattgcttgagctggtaaggtcaaggctgcagtaagcaatatttgtgccactgcactccagcctgggtgacaaagtgagactctgtctcaaaaaaacaaaacaaaacaaaataaatccttttaggcttttttacagaaattaacaagctaattctaaaatgtatatgagaatgcaaagaacttagagtaaagcaaacaacttaataaaaacaaaacaaagttccttcttttatgttgataaaaataaaatttaaaaaaataagatgttcaacaccattcgcccttagggaaatgtaag

SEQ ID NO: 374083 - DNA, 486 bp, Homo sapiens
aggccaaattttcttttatttattcttattggcatggtatacaaggaaatagytggaataaagtaatatatggctcacatgtgtgcacttgttttcatattacattttatttaacctctttttattaaatggattgtgttttatcaattgctagtgttagctcacctgttacaaatttagaaatttataacacaaaaatatagcaagaaagcatgaaacagcatgaaattatattgttattatatattttccccatcttctccttcctctttgcccctccaatctcttatctggactgctctggctcattatatattatgaattcaaaagtggaagttggcagtttgtgaattttgaacagagagagaaaacttaaaacttgtttatgccatgtgaagtaatacagtatggccaagattagaaagacaaaatctacatgaaagcaacgttccaagctcagctctggtctaaaatatacaagataag

SEQ ID NO: 374084 - DNA, 587 bp, Homo sapiens
gcaataaacatatgtgtgtatgtgtctttacagtagaataaattatattcctttgggtatatacccagtaataagactgccaggttgagtggcaattctgttagggcacatatgcaggattgttatataggtaaactgcatgttatggttggttggtgtacagmtttgggactgcagatatctctttgatatatactgatttcctttctttttccccatgcattttagcatgtgaaatttagtgaaagaacattatactataaaacaagttatacagtaagactacagcaaatttattgtatcagaaagaaaggcagagaagactggtgtaagggcaggtcagtttgagatttggtggtgtcctgatgaagtggccttggactttactgttacagtgaactccttcccacttccagctgctggtcccggcatctccttgcctgagggctttctccagctgctcaaagatgttctgcttgaatgtgaggggccagaactacctgggaattaggactctacagcagcagtccttgatttctcattttatttggaggaacctgtatacaaggacatctttactcccattc

SEQ ID NO: 374085 - DNA, 514 bp, Homo sapiens
attgtcaaacttctgaacagtaaacactgaaagaaaaaaaatctggaaagccacagtagagaaatgacatctgacctatggggccaaaccaatttgaatgacagcagatttttcatcagaaaccctgcctgccaaaaggaaaaatgagtagttttcaagtactgaaagaaaagaactatcaatcttgaatcctataaccaatgaaaatatccttcaagaattaaggcaaaatcaagatcaaaatctatcatttccagatgcaataaactaaaagaatttttcaacaccaaatctaccattaaaaaagtagctaaaggaagttccctacacagaaaggaaatgaaccttggttcatcaagaaggaagaaataatgcaataataaaagtatggataaatacaataggctttccatctcttggatttttaaatgtatattttatggttgaagcaaagattatagtaayagagtctgatgttactataatcacattgtctggtgtggttctaaatgtg

SEQ ID NO: 374086 - DNA, 569 bp, Homo sapiens
attacatacgtaagcatctttagctagtgacatttcttaacctatctcccccttgcatagcaaaaaggttttgtgtgattcttctgtgaaaacataaggcctagtttaaagagcggattgggtaatcatggacttacatgataaaactgctggcaaaatataattgccgatcatcctttttttgtggtaaattgtatgcctattatamgaagacagtttatccatcataaaggcaaggcatccttcttgactttacacaaatcactgcccaacttccccaaccctaagacattacttttcaataatcctatgattgatttgaagataaaaataatcatgcttgttgtgatacattctagttgtattttttttctctcttagagttgcatttgggaactgcaatgggttggctgtggtggattttatacagaagacagtactgttaagcatggggaccattgacctatatagatcaagtgacttataccagcgacaaccacggtctcctcgaaaaaacaaacagttcattgcaggtaggagataaaacaagatgagttatgaacttgatt

SEQ ID NO: 374087 - DNA, 609 bp, Homo sapiens
gtgatttaaggcactcagacattataaagtaggataattaaggtaaaaagtaaacraataaataatatcaacctttaccatggtatcaaacacagatccgaagatgtctagagtaagcaattataaaaactggtatagaaaggatgaagagtgagagtgtgtgtgactggaggtacagatgagactagtgattttatcggtaaatatttattgacataaaaaatgtttatcatatgttaatatattctgttaaaaagcaggttgtttaacaatatatacaaaatggccttatagttgtataacatatacattatacattatatacacacactcacacatatatgttgtttgtaacctgaattccttcagacctcaccagttcatagatactaatggaatcttatcagtaataaaacctaaaactttactggtttatgcccttagcttacaaaagtcagtctctatgaaatccttaaaatgttcctgggaatgcctagaagttgagtaatttttgctcataaatattctctagttttctactctagcagagcacccccttttaggaatccttcccactctctctgttcctgttgctgtgtgcgagaatat

SEQ ID NO: 374088 - DNA, 609 bp, Homo sapiens
gtgatttaaggcactcagacattataaagtaggataattaaggtaaaaagtaaacgaataaataatatcaacctttaccatggtatcaaacacagatccgaagatrtctagagtaagcaattataaaaactggtatagaaaggatgaagagtgagagtgtgtgtgactggaggtacagatgagactagtgattttatcggtaaatatttattgacataaaaaatgtttatcatatgttaatatattctgttaaaaagcaggttgtttaacaatatatacaaaatggccttatagttgtataacatatacattatacattatatacacacactcacacatatatgttgtttgtaacctgaattccttcagacctcaccagttcatagatactaatggaatcttatcagtaataaaacctaaaactttactggtttatgcccttagcttacaaaagtcagtctctatgaaatccttaaaatgttcctgggaatgcctagaagttgagtaatttttgctcataaatattctctagttttctactctagcagagcacccccttttaggaatccttcccactctctctgttcctgttgctgtgtgcgagaatat

SEQ ID NO: 374089 - DNA, 590 bp, Homo sapiens
tgaaatctaatccacagcataaggactaaagttaataaaattgtatttgagatttctgctaagaattttagctgtttttgccaccaaaaaaatggttaaatatgggagatgatggatatgttaacttgcctcactatagtaacatgtttaccatctatgtacattccataacgtcatgttgtataccttaaatatatacgataaaatttayttttaaaaatgaagtgtttcggctgtaggtaaggttaaaaaaagtgtatgctttaaaagtttggaagttcctttagtttatatatgaatgttttttcatcttttgctaatctctgaatgcctccattacacccacattattgaaagatgttttatctgcatatatataattccgcattgggaactattttcccccagcactatgatgatattatacaatgtttgccaggctaccattttattgttggaagtgttcagtcacacaattttcattcttttgtggtgattcatcctttctgtgacttctattacaattttatccgtacctttgatgttttatgatttcattgaagtggtttaggttggacatctctttcctt

SEQ ID NO: 374090 - DNA, 579 bp, Homo sapiens
ctcactggcagcacttgcagctataacatttatgccaagataactttgcctcaaaatatctcacttttattattattgttgtatcactctagtatattgactttggaaataaaagacatcattctatttatagcattctggttttagtagtggtatttccatttacaaaatatagtaattctccatcactgaaaatgtcttatcctaggaaacatagcattcctacgtgtgaagttaacatcattcttgtacagttgttggctgaggattcatttggtgaatttattttttccgaaatagactattctgatgttagttctgttcagaaataactccaggaacagctttcatattttattttcmccttgaaaaccagtcagattttcttcagcctcaaaaagtgtgtttacgtaaaattaaaggagcactggaagcaaactgtactttttattctaaatgggaaaagggttaaagaaacagaaatctgtgtattacctgacaaagagttcaaaataatcatcttaaagaaactcaatatattagagaatacaaatagaaaactaaacaaaattagggaaa

SEQ ID NO: 374091 - DNA, 579 bp, Homo sapiens
ttaggaaccaggccacacagcaggaggtaagtggcaggcaagtgagcattaccacctgagctctgcctcctgttagatcagggacagcattggattctcataggagtacgaaccctattgtgaactgcacatgcargagatctaggttgcacgcttcttatgagaatctaactaatgcctgatgatctgaggtggaacagtttcatcccgaatccatctctcaccacccgcatctgtggaaaagttgttttccacgaaactagtccctggtgccaaaaaggttggggagtgctctgttagaccacacatctgtagatgcaagttattagtaatgttagttctttggttgagtggtttcaatacgattatattctgtatattaaatctatgttacatacattgttattttcatatcaagtattacatgatgaaaaataaaatagaattaaattttgtaagggtatatagagtctcagatcaacatcctgcagatttttcagcaataaaatttaaaaatatctataagtttataattagagtaaacatacaaagtcattcatagcatctttatttgtaaca

SEQ ID NO: 374092 - DNA, 613 bp, Homo sapiens
taagataatacaaatagccaacagttatatgaaaataacatcactaatcaacatcactaattatcagggaaatgcagattgaaactaccatgagatatcacctcatacctgttaggatggccattataaaaaacaaaacaaacaaacaaaaacagaaaataacaagtgttgatgaggatgtggagaaattggaatcattgtgcactattggtgggcatgtaaaatggtacagctgagatggaaaacagcaatgaggttcatcaaaaaataaaaaatagaaccactatatgatccagcaatcctacttctgggtatttatccaaaataattgaaaacaggattctcaaagaaatattagyattctcatgttcaatgcagcattattcattaacagctaagaaacaaccatgaacttttaatttcacatattttatttttaagttctataatttccatttggttctttttcagcgtttcactttctcttctaaaattccccaacatatttactcagccaaaccatcttttcctatatattcttttggcggttgggagcagagtctcactctgtcgcgcaggctgtagtgcagtggcgcgattttggctcactgca

SEQ ID NO: 374093 - DNA, 613 bp, Homo sapiens
taagataatacaaatagccaacagttatatgaaaataacatcactaatcaacatcactaattatcagggaaatgcagattgaaactaccatgagatatcacctcatacctgttaggatggccattataaaaaacaaaacaaacaaacaaaaacagaaaataacaagtgttgatgaggatgtggagaaattggaatcattgtgcactattggtgggcatgtaaaatggtacagctgagatggaaaacagcaatgaggttcatcaaaaaataaaaaatagaaccactatatgatccagcaatcctacttctgggtatttatccaaaataattgaaaacaggattctcaaagaaatattagcattctcatgttcaatgcagcattattcattaacagctaagaaacaaccatgaacttttaatttcacatattttatttttaagttctataatttccatttggttctttttcagcrtttcactttctcttctaaaattccccaacatatttactcagccaaaccatcttttcctatatattcttttggcggttgggagcagagtctcactctgtcgcgcaggctgtagtgcagtggcgcgattttggctcactgca

SEQ ID NO: 374094 - DNA, 613 bp, Homo sapiens
taagataatacaaatagccaacagttatatgaaaataacatcactaatcaacatcactaattatcagggaaatgcagattgaaactaccatgagatatcacctcatacctgttaggatggccattataaaaaacaaaacaaacaaacaaaaacagaaaataacaagtgttgatgaggatgtggagaaattggaatcattgtgcactattggtgggcatgtaaaatggtacagctgagatggaaaacagcaatgaggttcatcaaaaaataaaaaatagaaccactatatgatccagcaatcctacttctgggtatttatccaaaataattgaaaacaggattctcaaagaaatattagcattctcatgttcaatgcagcattattcattaacagctaagaaacaaccatgaacttttaatttcacatattttatttttaagttctataatttccatttggttctttttcagcgtttcactttctcttctaaaattcsccaacatatttactcagccaaaccatcttttcctatatattcttttggcggttgggagcagagtctcactctgtcgcgcaggctgtagtgcagtggcgcgattttggctcactgca

SEQ ID NO: 374095 - DNA, 630 bp, Homo sapiens
tttggatagggcgtttcacataaagttagaaattcaacaataggatgatccatttcaagtactgtaattgcttttccatgcatgatggttaaacttggtcttctacaagctttgtcataggacagcccaccagagaatattatgaatggttcgctacataggaaaaaacatgaatgagactcagaagtcctttaaaatgacacaaagtcacaggactgaacctataaagaacaggttttgttgcataccatataacatgacagacagcaaaaaacttgcccggctcaaaatttctcattcaataacctactattctaccatttcccactttctagatgtacattctcacattaaatttactaatggaccagtctaaacatattggggtaggtttggggaaaggcagtgagcttggaggaagrtaaatgtgctcactgactctcaaaaggacatcttcacatactttacttggttcccaaactctaaatcactatcattggaatattagtctatgtcagaatatcagattaattagctggcctatggggcctaaaatctgtacaagagaaaagagacaaattttaatataaaatgaaatgtgacagtggaaagctcagaatggcagagggt

SEQ ID NO: 374096 - DNA, 630 bp, Homo sapiens
tttggatagggcgtttcacataaagttagaaattcaacaataggatgatccatttcaagtactgtaattgcttttccatgcatgatggttaaacttggtcttctacaagctttgtcataggacagcccaccagagaatattatgaatggttcgctacataggaaaaaacatgaatgagactcagaagtcctttaaaatgacacaaagtcacaggactgaacctataaagaacaggttttgttgcataccatataacatgacagacagcaaaaaacttgcccggctcaaaatttctcattcaataacctactattctaccatttcccactttctagatgtacattctcacattaaatttactaatggaccagtctaaacatattggggtaggtttggggaaaggcagtgagcttggaggaaggtaratgtgctcactgactctcaaaaggacatcttcacatactttacttggttcccaaactctaaatcactatcattggaatattagtctatgtcagaatatcagattaattagctggcctatggggcctaaaatctgtacaagagaaaagagacaaattttaatataaaatgaaatgtgacagtggaaagctcagaatggcagagggt

SEQ ID NO: 374097 - DNA, 594 bp, Homo sapiens
tcactttatccttcaggtgtttctcctatatgtcacctatcagtgaaatctacactggctaccatgtagcatgcccccatcctccaaccatgccttgacaccatctccccaatttattgctttaattttcctcatacaatttattgccacttgacttgacacatatttactcattatctgtttattgccagtccatcaccagaatatttaatgaatacagaataaataygtgttaaatgaatgaataaattaatacctaaaagacaggagttgagttttacttctataccagaggcagataatctaaagccctcagactaaatctagccagccatttgttttctataagtacataaaattttattgaaaagagtcctccaaatttgttaacatattgtttatggcaactttcgcacaatggcagagttgaatagttgtgacagaatgggaagttagcaaagacaaaaatattaagtgcctccttaaagaaaaggtttgctcaccttttaacttttgttaaatcttcatataaatgacttttattctactcttcactttcaaatgggcaagagtagctgtttttgtatcattcaa

SEQ ID NO: 374098 - DNA, 333 bp, Homo sapiens
tcatcctccctgaaacttttaaatgttatcttgtaaggaaaagagagcacttgtggatacaattaaggaccttgatatggaatgttatcctagattatasaggtgggtattaaatgcaaggacgagtatccttataagagagaggcagagggagagttgatagaaccagaagaggaggaagaaatagaataatggaggcagagattaaagtgatgtagttagaactcaaagaatgccagaaaccacgagaagcagcaagagggaggaattgattatcttctggagcctccacagggagtgttttcctgctgacatattgatttcactttagtg

SEQ ID NO: 374099 - DNA, 389 bp, Homo sapiens
agttaatgctgaaatgagttaagactttgggggactgttgggaaggaatgattggttttgaaatgtaagaccatgagatttgggaggggccggggtggaatgatatggtttggctgtgtcctgacccatatcccatcttaaattatcttgaattgtagctctcacaattcccacatgcaatgggagggacccagtgggagatagtggaatcatggcagtaatttcaaccttactgttctcagggtagtgaataaatctcatgagatctgatggttctgtaaggaatttccccttttacttrgctctcattttctcttgtctgccaccatgtaagatgtgcctttcaccttctggcatgattgtgagcctccccgcctagtggaactgtg

SEQ ID NO: 374100 - DNA, 519 bp, Homo sapiens
gtgtgagttgataatatagataaaaataagtagaagaaaaaawttccgtaaacctcagagtgagtcagatagcatagaaattattttgcttcatagttggttctaggcataaatgcccaaatgtagtggtggtatttctggagacttctttatcttatataaagctaacttaagtttcagggtaaataatataaacaaattattcaaaagtaactgtaaacttagatttcaatcacaactaaaggaaaatttagtgtttgtctcatattccaggaccagagacaagattgaccttaaaatatttatgaaagtaagtgtgaatggagatgtgtgtgtgcgtgtgtgtgtgagagagagagagacagagagagagagaggagagacggagagagagagagagagagagagagatgaagtgttattgatattgtttctaccccatcttcctgtattccatcattaaggcagataactacctcccagggaaggcgttagaatgacaccaaagaagagaggaaa

SEQ ID NO: 374101 - DNA, 573 bp, Homo sapiens
aaattgtcttcaagaaatttcattctcaaatagggtgccttcacatcatttgaggtgtgagttgataatatagataaaaataagtagaagaaaaaatttccgtaaacctcagagtgagtcagatagcatagaaattattttgcttcatagttggttctaggcataaatgcccaaatgtagtggtggtatttctggagacttctttatcttatataaagctaacttaagtttcagggtaaataatataaacaaattattcaaaagtaactgtaaacttagatttcaatcacaactaaaggaaaatttagtgtttgtctcatattccaggaccagagacaagattgacyttaaaatatttatgaaagtaagtgtgaatggagatgtgtgtgtgcgtgtgtgtgtgagagagagagagacagagagagagagaggagagacggagagagagagagagagagagagagatgaagtgttattgatattgtttctaccccatcttcctgtattccatcattaaggcagataactacctcccagggaaggcgttagaatgacaccaaagaagagaggaaa

SEQ ID NO: 374102 - DNA, 516 bp, Homo sapiens
catcccacagctgagctcctctccaaccgtccccagccggactcctccctacgttcagacactcctcctcttctctccttctctggtgtgctgctctgccactctgctgctcctctactcctctgtttgtggagcttggggtttatatgggcacaggataagggtgtggcgggccagaactgtcttggaaaaggcaatatttgagcgtgaaaacaggaatgtctgttcccatttagggccasgggtttccaagcttgatggtggggtttttcctgggcaccacccttttctacccagtatttccctgcatcctgtctgtatcactaccatttccttttggtttttctcctttgtgtgtgtgtgtgtgtgtgtgtgtgtgtgtgtctccatgtttattctttccttttgtcctaattttttcctttttctaatcatgcaaactcctggaaaattacttaaaattgtaattcagggatgtgtcaaaataataaaaaaaattaacaatgtagtttgagg

SEQ ID NO: 374103 - DNA, 575 bp, Homo sapiens
aactagtgtttgaagctcagcaaaagttgagttatggttaagccccagggtcagtggccacgtgttcagagtagtaccttaggtttaaagctgattcacaacctgaaaaacactcagtggtgttctctcccaaattatcaatcattamcttgtggtgttttaaaaagaggatagaagattgcttgaccagaaaataatgacaataaaaaggaaattatatatagtgtgtgtgtttatgtattacacatataatacataatgtgaattttcccccatgataactattaaacatgtttatttaatagttaaatatccatctttgagggcttttaaaatttatatttctttgttaactttgaagttgagactgcatgcaaaggctgctccatttcaggtaaatagtgcctcagtagctgtttgatttaccttaaaaaggaaaacaaaatgacacaccttccaacccatagactttctgaggtctttgaaatacaacaataactagaagaggagaatttgcatagtatagtgatatggtttggctgtgtccccacccaaatctcatcttgagttatggt

SEQ ID NO: 374104 - DNA, 537 bp, Homo sapiens
tatcatggttataaaaactggtaattctggaattatgttaagtacacatgtactctgtacagttatgtacaaattcccatgacagcttatttcccagggaaaatttaacttggacataatgcctggaggtgcaaccaaaagaataaaaacagaacgggaaraaaggacgagcctagatccttgcggagattggtgctgcacagccccagtctgccaatctccacacttcgttatgttagaaaaataaactcctatttcttaaagtcattggacagcaagttttcagttctttgcagctgcaggcatccctgacatagtcagcatggagcttagaacagtgtttctcaactatctttactctgtaacatttatgagggatagaatccattcccttcattaatcgttactcattacaacagtcattctcaacctagcaggcatcaaaatgtggaatggaggtggagaagactggctctgtaccttggtgactaccaaagcaatgtcttcttgtaagcatatgtctaggaggcaattcaa

SEQ ID NO: 374105 - DNA, 537 bp, Homo sapiens
tatcatggttataaaaactggtaattctggaattatgttaagtacacatgtactctgtacagttatgtacaaattcccatgacagcttatttcccagggaaaatttaacttggacataatgcctggaggtgcaaccaaaagaataaaaacagaacgggaaaaaaggacgagcctagatccttgcggagatkggtgctgcacagccccagtctgccaatctccacacttcgttatgttagaaaaataaactcctatttcttaaagtcattggacagcaagttttcagttctttgcagctgcaggcatccctgacatagtcagcatggagcttagaacagtgtttctcaactatctttactctgtaacatttatgagggatagaatccattcccttcattaatcgttactcattacaacagtcattctcaacctagcaggcatcaaaatgtggaatggaggtggagaagactggctctgtaccttggtgactaccaaagcaatgtcttcttgtaagcatatgtctaggaggcaattcaa

SEQ ID NO: 374106 - DNA, 523 bp, Homo sapiens
atctttcttttgacttattgaaacatgagtcacagcgggctgcaattctgtccattttatttttgcacaggaaaaactagtgagacaagattcaaacagtctctgtgaatcatctgtcagtggtgatgatcacgttaagtttcagaagtgtagtacatgatactcttaacaatttgtctaaagcaatgtttctcaaccaggggcaattttgctcctaagggracatttaacaatggagacattcttggttatcataactggtgaagaagcaaggtatgtcattggcatctagtgagttgaggctagggtactgctaaagatcctacaatgcacaggatacccccattctgtaccaacacatatttatccagcccaaaatgtccatagtgctaaggctgagaaaccctgttctaaaggttcatgctgtggtccaaatgtgtcctcccccaattcatatgttgaaacctattcccagcgtgattgtcttagatagaaggtggggccttggaaaggtgattaggcc

SEQ ID NO: 374107 - DNA, 523 bp, Homo sapiens
atctttcttttgacttattgaaacatgagtcacagcgggctgcaattctgtccattttatttttgcacaggaaaaactagtgagacaagattcaaacagtctctgtgaatcatctgtcagtggtgatgatcacgttaagtttcagaagtgtagtacatgatactcttaacaatttgtctaaagcaatgtttctcaaccaggggcaattttgctcctaagggaacatttaacaatggagacattcttggttatcataactggtgaagaagcaaggtatgtcattggcatctagtgagttgaggctagggtactgctaaagatcctacaatgcacaggatacccccattctgtaccaacacatatttatccagcccaaaatgtccrtagtgctaaggctgagaaaccctgttctaaaggttcatgctgtggtccaaatgtgtcctcccccaattcatatgttgaaacctattcccagcgtgattgtcttagatagaaggtggggccttggaaaggtgattaggcc

SEQ ID NO: 374108 - DNA, 580 bp, Homo sapiens
atttttaaaaacaccagaatatgtcacatgtaatggtctaagtgttgtttactgagactttttctttatatgtgtgtgcctgtatactggggttatgatgtaaaatatatttcttactgcaagtcatgcaaaaaagtttgaaatcaacttcactggatgaccatcaaagcatcttccagcgctcactctgtgaaagaggtctcaactgtgggtcacaagatccaggtcctccctcagccttataataacaagtcgttatccctctatgaatctgtttccccatttgtgcaatgatagtgaaaattatttacaactttagatasagtggtcaaagtctaaaggcccttccaattccagaattttttaattctaagaacatcctttaattcagcaaatattgctcaagcagtgccttcaatgtgccaggcactgttctaggtgtggggatacaggagtgaacaaaacagacaaaaaacagccctatccctcatggagcttatattctagtgagagtagacagtaaaataagtaagtgaactatgacaaatgttagcaataagtggtaagaagaaaaaataag

SEQ ID NO: 374109 - DNA, 567 bp, Homo sapiens
ttacagattgcctattttttgcttgtatttctgtcaaattttgccatatatatgtatataaaatttttttgagatagagtctcgctctgttgcccaggctagagtgcagtgatgtaatctcagctcactgcaatctctgcatcccaggttcaagtgattctcctgcctcagcctcccgaatagctgggactacaggtgcccaccaccacrctggctaaattttgtatttttaatagaaacagggtttcactacgttggataggctggtctcgaactcctagactcaagcaatccacctgccttggcctcccaaagtggccaaagggattacaggcatgagccactgggcccggtcaaattttaccttatatatttttgagtcaattatataatatatcccaatttcagaaatacgtagtttaaaatctatgatttacagtaatattgtttctatgtgcccactcactgttacattgcttaagcatgatttacacaatcctaaatcatatagaaaaagtcagcattatatttaaaagttaaaattatatactttatatcatgtatatg

SEQ ID NO: 374110 - DNA, 567 bp, Homo sapiens
ttacagattgcctattttttgcttgtatttctgtcaaattttgccatatatatgtatataaaatttttttgagatagagtctcgctctgttgcccaggctagagtgcagtgatgtaatctcagctcactgcaatctctgcatcccaggttcaagtgattctcctgcctcagcctcccgaatagctgggactacaggtgcccaccaccacgctggctaaattttgtatttttaatagaaacagggtttcactacgttggataggctggtctcgaactcctagactcaagcaatccacctgccttggcctcccaaagtggccaaagggattacaggcatgagccactgggcccggtcaaattttaccttatatatttttgagtcaattatataatatatcccaatttcagaaataygtagtttaaaatctatgatttacagtaatattgtttctatgtgcccactcactgttacattgcttaagcatgatttacacaatcctaaatcatatagaaaaagtcagcattatatttaaaagttaaaattatatactttatatcatgtatatg

SEQ ID NO: 374111 - DNA, 280 bp, Homo sapiens
gtaaattctgcagacagagttaataagatttattgactacctcaacctctgggtgtarcaagactggagggtgaagacgtgccattcatcttcactacttgctgattctgtacttgtgaatttgcaaaatttgcattctcataaaatgtacatgtaacccccaaaccaatacttgtggtacttttagtcatttgttgacatgcagagtggtgaaaattttgagtacccaggtgcacatgttcccatctgaggttgagcaaggcgacactctgaattcttg

SEQ ID NO: 374112 - DNA, 280 bp, Homo sapiens
gtaaattctgcagacagagttaataagatttattgactacctcaacctctgggtgtagcaagactggagggtgaagacgtgccattcatcttcactacttgctgattctgtacttgtgaatttgcaamatttgcattctcataaaatgtacatgtaacccccaaaccaatacttgtggtacttttagtcatttgttgacatgcagagtggtgaaaattttgagtacccaggtgcacatgttcccatctgaggttgagcaaggcgacactctgaattcttg

SEQ ID NO: 374113 - DNA, 592 bp, Homo sapiens
cataatgggatactccttttcctctaggaataatcctgcaattcccaatttactacttgatcttttggtatcatacgttgaatcaataatttctctaagatgccaaattcttttctaattagggaagaaggatcaataccaaatgctgagagggaggcattatcatttccttacactggagtatccrgaaagccttcgtaccaataatctaaccaaaaatgctgagattgggactcaaattggaattatatgtggaacattttccaggtacattcatttaacaaaataggatttaatcattaaaataaagttagcaaaggccagacatttaggaagaagagttacaaattattgttcactaggaaatccgtgagcctgtgtattaatatgcttaacaagctcagtgtatgtattgaagttctgaagccagtattttaaaaattcagagagaagatttttacataataatccagagaaatgttaaaacggcaacagaaaaatgatatatcacatttctacagtccatgtttttgaaagcattacttagtagagcaacagtttctaatgggcaaataatttaattaaagacgac

SEQ ID NO: 374114 - DNA, 592 bp, Homo sapiens
cataatgggatactccttttcctctaggaataatcctgcaattcccaatttactacttgatcttttggtatcatacgttgaatcaataatttctctaagatgccaaattcttttctaattagggaagaaggatcaataccaaatgctgagagggaggcattatcatttccttacactggagtatccggaaagccttcgtaccaataatctaaccaaaaatgctgagattgggactcaaattggaattatatgtggaacattttccaggtacattcatttaacaaaataggatttaatcattaaaataaagttagcaaaggccagacatttaggaagaagagttacaaattattgttcactaggaaatccgtgagcctgtgtattaatatgcttaacaagctcagtgtatgtattgaagttctgaagccagtattttaaaaattcagagagaagatttttacataataatccagagaaatgttaaaacggcaacagaaaaatgatatatcacatttctacagtccatgtttttgaaagcattacttagtagagcaacagtttctaaygggcaaataatttaattaaagacgac

SEQ ID NO: 374115 - DNA, 462 bp, Homo sapiens
cacaataataatctcttgggggaaagggttgctttagtagtgtggaggtaatcgttacttctgttttttttttttatgcacttctgtattatttggattatttgtaaagcatgtgtattacttttataatactttttcaactaaaaaaatcctttcaactgttttcacttcctctgtccttcataccatctaaacacaataaaaccgtgccaaaatgggtgcctgtagtcccagctactccagaggctgaggcgggaaaatggtgtgaacccagcaggcagagcttgcagtgagccaagatcacgccactgcattccagcctgggagacagagcgagactccatctcaaaaaaaaaaaaaaaaaaaaaaaaagttytgccaaaatcccacatatgcagaaaccaaaatatttgggtaaaatgtgtcattgtaaagtaaacaaaatgttggggagcctacaac

SEQ ID NO: 374116 - DNA, 559 bp, Homo sapiens
ttaggtgtctgcccaagtggccacccagttttgtgcttgaaacccagggccctggtattataggaacccgagggaatctcctggtctgtgggttgtgaagaccatgggaaaagagtagtatctgggctggaatgcaccgttccttatggcacagtccctcaggtcttcccttggctaggggagggagttctctgaccccttgcgtttcccaggtgaggcgacatcctaccctgcttctgcttgccctctgtggactgccacccactgtttaaccagtcccagtgagaagagccaggtatctcagttggaaatgcagaaatcacctgtyttctgcattgatctcgctgggagctgcagactggagctgtttctatttggccatcttgccagtcaccactgttagagaatatcttagtgggatgcatggtgtttgagtaaagacctggagagagtgagagagtgagccatgtggttacctggggaaagagtgtttagcaagtgcaaagaccctatggtaaaatcatgtctggcttgtgcaggaacagcagagaggccagtg

SEQ ID NO: 374117 - DNA, 612 bp, Homo sapiens
ctcccatctgcttctcttcctctttactttctcatcatgaggcctggctctagttagggacagtggccaagcactaactcaagcagttacttcatcaggccggacttcaccaatttttcatttctgagctgctgacaccaagttagtcatccttcctgaatctctctgaaaaagctggccctaggcaaatttgtaaagtaggtcagatatatgagtgctgccatacacactttcagtgctttctcatacacttttgtcacccttctgcaggggtaccccatacattggacttcgcaattttctccctttactcccatccttcaggaagtccatatccagtgtccttttttccattgcgtcatttctaggagaaatctggtagaaaaattctagcaaaatgttactcatagacaataaacatttagtatttcatcctctatggaatgagtttcaagatttatgtttctgtgttctgttgttaagataggcacgtggggcagycccagcaaagtcatcagctgaaactgtgagttgaggcacttgtaagtagagttggctgctctcttaaatgctagaatttgaaggaatttgatggcatattttaaaaagaaa

SEQ ID NO: 374118 - DNA, 604 bp, Homo sapiens
tttctaccaccttgtcaatggggacttgcactataattaagttgttctagggaaataaagacagttctctttcttgcccacctgaacagtggactgggatttatacctgctgcatgcgggaatttttgtgcaaaaatatttgcaccaagaatttagggcctaattattttgagatgtttggccagatgtgcaggataaggtggactcttagaagccactgttaattttagaacaattgagagagactgatgagacagagtttaaaaatataacacaattctttaaatctcctaagcagatatggtcagcttggtagaaagaaaagaaggtgaatgcagtctagtaasaaatcaagaaaatttattgggacccaagaaggtacccagaaaggcagccccattggtggtaatttttaaagaccccatttgtggtcctacatttctgaacctctttctggatggggaagtgtattatgagatgcatgggtatgtcctcccaaaaattaatatattgaaactctaacctcccactccattgggatggtattaggaggttgggcctttgggaggtaattagattaatatgaggtcatgaaggtgaagcc

SEQ ID NO: 374119 - DNA, 604 bp, Homo sapiens
tttctaccaccttgtcaatggggacttgcactataattaagttgttctagggaaataaagacagttctctttcttgcccacctgaacagtggactgggatttatacctgctgcatgcgggaatttttgtgcaaaaatatttgcaccaagaatttagggcctaattattttgagatgtttggccagatgtgcaggataaggtggactcttagaagccactgttaattttagaacaattgagagagactgatgagacagagtttaaaaatataacacaattctttaaatctcctaagcagatatggtcagcttggtagaaagaaaagaaggtgaatgcagtctagtaacaaatcaagaaaatttattgggacccaagaaggtacccagaaaggcagccccattggtggtaatttttaaagaccccatttgtggtcctacatttctgaacctctttctggatggggaagtgtattatgagatgcaygggtatgtcctcccaaaaattaatatattgaaactctaacctcccactccattgggatggtattaggaggttgggcctttgggaggtaattagattaatatgaggtcatgaaggtgaagcc

SEQ ID NO: 374120 - DNA, 367 bp, Homo sapiens
gtcttagaaatatagcccaatcacccaatcccaatgattgaatgtgtaggagaatctattttcatacctttgttaattacacaacatggacaccaactaatcagaatggataccagctataaacaagtgctatgatcatctgggtatgtgtcaggaaatatctgtgggttaccaatgggtttaaaacccaaagtgctcaatagctataygttggatgacattgaactgaacactcgctgccatgctataaggcaaaaactgggttaaaggcaaaaactgacttttagtcattaggtatcactcctgctgcctagtactgtacctgataaatagtagacagtgaataaataaataattgtgattttat

SEQ ID NO: 374121 - DNA, 367 bp, Homo sapiens
gtcttagaaatatagcccaatcacccaatcccaatgattgaatgtgtaggagaatctattttcatacctttgttaattacacaacatggacaccaactaatcagaatggataccagctataaacaagtgctatgatcatctgggtatgtgtcaggaaatatctgtgggttaccaatgggtttaaaacccaaagtgctcaatagctatatgttggatgacattgaactgaacactcrctgccatgctataaggcaaaaactgggttaaaggcaaaaactgacttttagtcattaggtatcactcctgctgcctagtactgtacctgataaatagtagacagtgaataaataaataattgtgattttat

SEQ ID NO: 374122 - DNA, 567 bp, Homo sapiens
aaagggcattccgattttcccagtacaattaaatgttgggactaatgaggcagagacaatattttcttatacaaacaatttttcaagtatacaggacagtagcatctaatgactgctaccaacacaaaatcacygggtggccagcttctattttatgcagtgaggttagcaattattctgtaacacttaatttcctgttactaatgctttccccgaagcacttaagcatgatggccttatgaatatagttattagtggaacctcactcagtgtttggattcttttagaaatttgataaagataatattctcccaaaggttactgtccagataacaagtcattttatcagcaggcctgagcttcagccagctgtcattaagagtgtcttgttaaccagtgaaggactttgtagctgggtcagggccgttgaagtctggggcaaggttgctaaggtaacgaatctgtccaaagacttctctcaggatcaacctttcatcttgttaaatttatataagcaaagcactgtgagaagaatgctaatacaccaaatgacagaaacaattgcac

SEQ ID NO: 374123 - DNA, 583 bp, Homo sapiens
atgtgtgcatatgtaaatgtatgcaaaatagctaccaaaaaatatttacttctaaatgggaactctctttaatgtgattgtaattattttacctagagtgtttacagtgaacacattaagtatgaaagccatgtttttaagactggaaagagaactttctaagcactagcttcactgctccaactgtgctcaattgttctgttactcaatctgggtttattgtaccctacttcctcactgatggaacataggagggaagccacagcctgccattttacctgctggccccaccaagagccatagggaggagacttactggtaactggccactaagtgtgaaaagcctttatcatccaagttgctatacttagcgtttcatcttgcctctcaactgttggagcagtaacaagccctttacattaactccctggytgaggataaaactcaaccaacatggagcccccatgtccttttcttctctgtcaatggtcccctatcagaaatatcctgccatggaaacattcatccatctagcctgacttccattataataaatgcttaatctactggttacaatttttcc

SEQ ID NO: 374124 - DNA, 583 bp, Homo sapiens
atgtgtgcatatgtaaatgtatgcaaaatagctaccaaaaaatatttacttctaaatgggaactctctttaatgtgattgtaattattttacctagagtgtttacagtgaacacattaagtatgaaagccatgtttttaagactggaaagagaactttctaagcactagcttcactgctccaactgtgctcaattgttctgttactcaatctgggtttattgtaccctacttcctcactgatggaacataggagggaagccacagcctgccattttacctgctggccccaccaagagccatagggaggagacttactggtaactggccactaagtgtgaaaagcctttatcatccaagttgctatacttagcgtttcatcttgcctctcaactgttggagcagtaacaagccctttacattaactccctggttgaggmtaaaactcaaccaacatggagcccccatgtccttttcttctctgtcaatggtcccctatcagaaatatcctgccatggaaacattcatccatctagcctgacttccattataataaatgcttaatctactggttacaatttttcc

SEQ ID NO: 374125 - DNA, 518 bp, Homo sapiens
aataataaatacaataattattgaacactgtgacattaactgataaagatacctgctttccttgaattatcaatttcacattggcataaaaaatagattagtgacaatttaatcctacatctggtgacctttaaataatgctattaacactcctcagctttgtcactagaatgtcatcagccttctctctaaaagaaatgctacctaaatattccattttagaactgtctccaaagtttgctaatgttcagtatctaataacaaatctagacgagtataaaagacccagacacaccaggtgactttgccagcagcaattttttaaataattctatcrtaacttaccacatgagaggagattagctagagtcaaaaactcctagaaccataatgtactttgtgtccacacagacatctgctcactgtcatgccctcttgctgggcaggtatattggtaccagcattgagaggtcaattggccaaatccatcaagatttcaaatgcataccccttcaact

SEQ ID NO: 374126 - DNA, 563 bp, Homo sapiens
gtctttgcagctctcccaacacctttgtaatgagatctctcaatttcctctactcggagcttggattttattttcctgactggatcttgaccaacacgacgagcaacaatggcagtttgaaccctagcagtgtaggaagagcaaatatatggatttgagatagtttttgaaattctgtatgaactgactgaagacagtggagaaatgagataatctacaagctacatctagaatttcctagcaccctgagcaggattaattaatttctggccaaagttagctrgcattaacttgactaaggaaaacaaatgaacatcatggacctgccctgaagccctcatcagtggtcatgaagtcagcaattggaatcaagctaatatcactccacccacagactcccacctttacattctaatctctagagttgaggtctgaataatatttctgggacagcagaaaaaagtttgaataaaatcctgtgcaaagtttgaataaaaccctgtgcaatagtatggccttaacacaagaagggatgctttctctttgttgagaatctcatgctc

SEQ ID NO: 374127 - DNA, 605 bp, Homo sapiens
ttgtttcaccatcatatatacatacacaccaagaaaacttagttcctgttagtgaagtctatctctgtgtgtttgcgaaaactcaatttgcagctggggaaagtggtatttatttgaaggagcttattgctgaaagtgaatcataaatctgctggctgttgagacttcaaggcagaagaacagaggcaattattagtctgaatgttccactgacgatatgaaatctttgtctttcaaagcatttgtttaagtaagaaaaagtttgcccaggctgcagaacattctattgtgggaagwgaaacttctgaaacctccaaagcttatttatatatttgctaggcttctctctgccaactttctcctctcccagagcgtccgttaatgctaagaaaagcctccgaaaagcacacattataagcagagaaaaatcttaatgaatgtaatatatttggcaaatctgttttatctactgaggagatttccttcctctcttcatcactcatctcttttgtttcttctttttttaatgttgttccccttgatttgtccttcttcctatggaattcatttttctctcgtcccaaagataaaaaatagaatcccaa

SEQ ID NO: 374128 - DNA, 580 bp, Homo sapiens
tcctcccgtttggttctatcttcaccctctgactttccaccatgctttgatgccactcaaagtcttcaccagaagctgagcagatgctggtgttatgtctcttgactttcccagcccgtaaaaccatgaactaaatgacacttcttttctttataaattgcccagtatcgggtattttgttaacacaacacaaaatggattgaaacaggcatgtactatatattgggactggaacaaaaaacttctggctttttattacaataaatatgttccttgagctgtttgttcccactcatctcagccttccctctagcccattaccatcaaaaggaaagcagtaagaataaaaccctctaatacatgaaccacrttcttttgtggagtgctggcattctggtaggagtgttccataataataattagaccacaagataatgaaaactggtatatcttgcacactggcaaatgtgaatggactctgcccttagcagtgggagacaggcattaaccctttagtgcctggatcttggaacaggtctcaggagtccaggggagggatcaccatggccagtgcaaccag

SEQ ID NO: 374129 - DNA, 311 bp, Homo sapiens
acttttgtatctactgtcttccaagtgcctctagcttaaaataatccttatgccacagtggcatatttttgggctggcatattctaccacccttcactgtatatctcagatacctcatccatatkcatgtaataatagtatctaacttatagggttgttttgatgtttaagtgggataatccatatagagccattaagatggtttctggcatatagctaccatacaaaagatgttgtctgttatgcaacaaacaaaagtcctggcattagtgaatatttattggtctcacctgcccagcataattcccctt

SEQ ID NO: 374130 - DNA, 311 bp, Homo sapiens
acttttgtatctactgtcttccaagtgcctctagcttaaaataatccttatgccacagtggcatatttttgggctggcatattctaccacccttcactgtatatctcagatacctcatccatatgcatgtaataatagtatctaacttatagggttgttttgatgtttaagtgggataatccatatagagccattaagatggtttctggcatatagctaccatacaaaagatgttgtctgttatgcaacaaacaaragtcctggcattagtgaatatttattggtctcacctgcccagcataattcccctt

SEQ ID NO: 374131 - DNA, 587 bp, Homo sapiens
cacttgtctccacttcttttcatatctagtgatggtttagggaccctttagattggcagctgctgcagtgattctctcattttagctctgaccagaccttaacagtacttaggaccctttcctatcctggtatgtcctaagttaagcttaacttttctagttaagcaattagcttcctctgtctgcttcacacatagacacacacacacactctsatcccctgactactcacacatgtaagtagcaagtattccactctgggtccctgcctttgtaagtgagtgtgtgtgtatctatgtgtgtgtatgtatattttctttttttggagggagaagtaggagatataagctgatcacatagaaaaaatgcatatttaggtaacatgggttaataataatatagttaatatctatttaatatttaattatgtgaggcttagggccaagtgctttatgtgcatcgtatcaaatattcctcaaaattatactatgaaatatgcaccattagtttacacatttaaaaaattaaaggaaataattgacagaaacaagagccaaacccaggtcttcttgatcccaaagcccaaa

SEQ ID NO: 374132 - DNA, 619 bp, Homo sapiens
atatagaagagcccacgggaggcctatcagctggagcagacagtgggagtgcacatcctgagtggctgcaaaactagagctaaggagtttttattttttctcacaaacaacgcgagcccaagaagtggtttttttgttgtttttgtttttgagacagtctcactctgtcacccaggctggagtgcaatggcacaatcttggctcactgcaaccactgcctcccgggttcaagcgattctcctgcctcagcctcctgagtagctgacaagaaatgtttcaagcaacagagtgacatgaaaggtatctgcctcctggctttcagaaacatccgtgtaaccttagcacctctcttcagtagagatgctcccccgagacaaggaaagactggaagccttcaraacggggtctcactccgttatgagtcttttattcattgcctcacaaattagtcgcaagaacttgccctgcagacaaggggatgcaaatgcaagtgacacagaattgtaataacataaacattaggaaacaatgcaaaccagttgggccccctgcagagaaataattcccccgcactccttttcaaattgtcttcatgaaaatttcataaaatttgccatta

SEQ ID NO: 374133 - DNA, 596 bp, Homo sapiens
agcctcttctgatgcatcacggaccccacagccatccaggtgatcacataacaagccttggagaactcctccaagagaacatgttcagttaagcaactgttccaatcttgcttccatttaaacctcagcacattttatagactcaacaagatgggctattgaacaattatcaccaaagtcattttcctcaaagatgctatcagcctgactaaacctttcacagtccaagtgtaagatacacactaatttwattctgtttagcaaacaagtaccaaatgctactgtttgctgaacactaaaccagcctctgataatgcagagaaaaatcagatttactccctgacctcaaggaatcagagagtaatggagaagacaatgtgaaaaacaaatctttaaaattcactgttataatatttatgtaaggtataatggcaccatgtttttcaaactcaagagttattattctacgtgggcacaagaaatgatgacagagaatatccaaattcatagggtaaaaatggttcattatcctgcaacatcaattgtattagaaaacaagggaactaaaattatgctatttaattagtaaagaatag

SEQ ID NO: 374134 - DNA, 611 bp, Homo sapiens
attttatagactcaacaagatgggctattgaacaattatcaccaaagtcattttcctcaaagatgctatcagcctgactaaacctttcacagtccaagtgtaagatacacactaatttaattctgtttagcaaacaagtaccaaatgctactgtttgctgaacactaaaccagcctctgataatgcagagaaaaatcagatttactccctgacctcaaggaatcagagagtaatggagaagacaatgtgaaaaacaaatctttaaaattcactgttataatatttatgtaaggtataatggcaccatgtttttcaaactcaagagttattattctacgtgggcacaagaaatgatgacagagaatatccaaattcatagggtaaaaatggttcattatcctgcaacatcaattgtattagaaaacaagggaactaaaattatgctatttaaytagtaaagaatagtatttctataatttagtctacatgaaaaattcaagttggaatggcagacctcaagaattaccatcattcgctctgtcttgtactggggctatttagacagaaatttttgaaaatcactaaaagggatccaaagccatcattcactt

SEQ ID NO: 374135 - DNA, 611 bp, Homo sapiens
attttatagactcaacaagatgggctattgaacaattatcaccaaagtcattttcctcaaagatgctatcagcctgactaaacctttcacagtccaagtgtaagatacacactaatttaattctgtttagcaaacaagtaccaaatgctactgtttgctgaacactaaaccagcctctgataatgcagagaaaaatcagatttactccctgacctcaaggaatcagagagtaatggagaagacaatgtgaaaaacaaatctttaaaattcactgttataatatttatgtaaggtataatggcaccatgtttttcaaactcaagagttattattctacgtgggcacaagaaatgatgacagagaatatccaaattcatagggtaaaaatggttcattatcctgcaacatcaattgtattagaaaacaagggaactaaaattatgctatttaattagtaaagaatagtatttctataatttagtctacatgaaaaattcaagttggaatggcagacctcaagaattaccatcattcrctctgtcttgtactggggctatttagacagaaatttttgaaaatcactaaaagggatccaaagccatcattcactt

SEQ ID NO: 374136 - DNA, 611 bp, Homo sapiens
attttatagactcaacaagatgggctattgaacaattatcaccaaagtcattttcctcaaagatgctatcagcctgactaaacctttcacagtccaagtgtaagatacacactaatttaattctgtttagcaaacaagtaccaaatgctactgtttgctgaacactaaaccagcctctgataatgcagagaaaaatcagatttactccctgacctcaaggaatcagagagtaatggagaagacaatgtgaaaaacaaatctttaaaattcactgttataatatttatgtaaggtataatggcaccatgtttttcaaactcaagagttattattctacgtgggcacaagaaatgatgacagagaatatccaaattcatagggtaaaaatggttcattatcctgcaacatcaattgtattagaaaacaagggaactaaaattatgctatttaattagtaaagaatagtatttctataatttagtctacatgaaaaattcaagttggaatggcagacctcaagaattaccatcattcgctctgycttgtactggggctatttagacagaaatttttgaaaatcactaaaagggatccaaagccatcattcactt

SEQ ID NO: 374137 - DNA, 625 bp, Homo sapiens
ttcctttcctttctcagtaagcatcccaaattctggtctttttttttagaaatgagagaagtatatccctttgctttgcaaacaggaaattttgaaattagtgagtggctccaattaatctactttgtttatgactctgaaaaaactcaccttaatgtaggcagttcaatccaacaaacgtctgtgcacatmtaatgtgtgaggtcttggattttagagaagcatgaagacattgtagaagtcatctagctcaaaagcttccctttgttttcattacaatctaaaatcttattttagatatctcaattgcaataaacagaaaataaataccactattagaccataggcttcttgaggcaggaattatgtctgttttcccacctcagtacctattatgtactgagttgtgctcaagccaccaggaatatacaggatacaatactcttttaaagtactttttcctttttctttcatttgtcacatttgaaattgtgtgtttaatgtctatctgcttttctagactgtaagctccatgagggcagggacctcgtctactttgttcactgtcgtatgtttcgtgtctggggctgcgctctgtacatagtagttgctcaataaatattta

SEQ ID NO: 374138 - DNA, 625 bp, Homo sapiens
ttcctttcctttctcagtaagcatcccaaattctggtctttttttttagaaatgagagaagtatatccctttgctttgcaaacaggaaattttgaaattagtgagtggctccaattaatctactttgtttatgactctgaaaaaactcaccttaatgtaggcagttcaatccaacaaacgtctgtgcacatataatgtgtgaggtcttggattttagagaagcatgaagacattgtagaagtcatctagctcaaaagcttccctttgttttcattacaatctaaaatcttattttrgatatctcaattgcaataaacagaaaataaataccactattagaccataggcttcttgaggcaggaattatgtctgttttcccacctcagtacctattatgtactgagttgtgctcaagccaccaggaatatacaggatacaatactcttttaaagtactttttcctttttctttcatttgtcacatttgaaattgtgtgtttaatgtctatctgcttttctagactgtaagctccatgagggcagggacctcgtctactttgttcactgtcgtatgtttcgtgtctggggctgcgctctgtacatagtagttgctcaataaatattta

SEQ ID NO: 374139 - DNA, 625 bp, Homo sapiens
ttcctttcctttctcagtaagcatcccaaattctggtctttttttttagaaatgagagaagtatatccctttgctttgcaaacaggaaattttgaaattagtgagtggctccaattaatctactttgtttatgactctgaaaaaactcaccttaatgtaggcagttcaatccaacaaacgtctgtgcacatataatgtgtgaggtcttggattttagagaagcatgaagacattgtagaagtcatctagctcaaaagcttccctttgttttcattacaatctaaaatcttattttagatatctcaattgcaataaacagaaaataaataccactattagaccataggcttcttgaggcaggaattatgtctgttttcccacctcagtacctattatgtactgagttgtgctcaagccaccaggaatatacaggatacaatactcttttaaagtactttttcctttttctttcatttgtcacatttgaaattgtrtgtttaatgtctatctgcttttctagactgtaagctccatgagggcagggacctcgtctactttgttcactgtcgtatgtttcgtgtctggggctgcgctctgtacatagtagttgctcaataaatattta

SEQ ID NO: 374140 - DNA, 607 bp, Homo sapiens
ggcatgaccaaggaggggctcactttttgtgggaaaggaaatataggttggtaaaaatgagagctgcttttataaagggagcattactaaatggaaaggggagtgtgagagctgtcatctacagtctcacactctgcaggagatgtgaagagggatcacaggtgattagaaatgttttgagctagctaactctcccaggtaaggttaagctcagcaagaagacccctgccagactatggctccacctttgatctacactcagtaagcagttggccttctgacctttatcaaaagcatgtttgagtggatgaaaacatgaagtggaagatggtagttatgaagtatccaggtatccatggttaattgcattaaccctcacttgtctatctggacattgtgtgagggtccttttgttctttgyatatgggtcctataggcacagagcatagcccagggagctccccactttcttcatcagtgatctggaaatttacttatttccagacaccaactgtattgttacagtgttaacgtattcttttatgttccctgctgggaatgactttcaataatgaccaactatcctaataggatgatttcctggttt

SEQ ID NO: 374141 - DNA, 551 bp, Homo sapiens
aatctctaaatctctgaatgtggggatggcccttacagtaacagtaacaagggtgacattcactgagtactcatggtgtgccagagcttgctctaaatttttttcacaaattatctcatttattcaattctattcatttcaatcctgtgaaggagatactataagaatctccattttacagatgtggaaactgaggctgacagaagttaagtaagttgctcatgatcacataggaaattctggcmcgggcaaatagaaacctaggctaatggtgctctcaaactttcactcattcattcagtaaatatataatgagcacttcacagacatagcccctgctcttagggagcatttttccaagaaacagaatgctaagcacagaggtctttgccctccaacacccaggctggggggctaatcaagagccatgctcccctaagtacatgcctcctcatctgggttctaaatagaagaaatgttaagcccagaaactgatgggccctcagtacccatgaaaaggcgcttttccatttttgagaagatgattctcc

SEQ ID NO: 374142 - DNA, 486 bp, Homo sapiens
tttctctgctgtgttagcaggtttagtgttcacagtgagcaggaaaagaaatatctattccctgaagtttccaagtgtgcactgatctgttcagtcactaacagcaacagacatggctacagctagttcaataagcagtacttactaaagaaagccatctgaaccagaagaagacaataataatgacagtcaagattctgctgcccacagtggacagacctggtaagggccatacatatcatamacattatataaagccatagaaatacttggaaatattaagcattttagtatcattgaagagttagaagtaaggcagatggatgagaaacgtgggttgtatgccatgcttagaaatctaaactttattttgtattttattatttccaaaactgtgctcaatgtctgtgagatattattcgttaggattgcaatcctattcattaggattgcattcaactgcaagcaacagaaaacccggagtag

SEQ ID NO: 374143 - DNA, 617 bp, Homo sapiens
tgtctttctgcattggttctcactcagtgctctgttggcatcatccccagaggaagtttctggcgtgctttatagttggagctatataackgtcttaatgcatcatgatgattctccttctccttcttcttcctctttgtcacatgaccaagatcacatctaaaaactactctttggactaaatattagagaatgaagactgccaaggacttcactaccctccaatatttccaatgtctgtcagtcagtgaattagaaggcagttggctgtgtctcccccagaatatatctacaggcaatggggcaggtaaggtagcatctccaggggattccctactccatgcaatctgcctgcgtgagccccagcccttatggaccaaaaaggaaacaactgcgggagtcatgggaaatcatctgtggaactagatagactctcagactcctgccctcctatgattagtgtccctaagtcctggatggcctggggctcccagcccagtcgatctctctctcctctgcccccagctgcagtgcatgcctctgtgataccactgctcatactgtactgttttatttgagaatgtgtctctccctccttcaaagtgaattatgtatct

SEQ ID NO: 374144 - DNA, 588 bp, Homo sapiens
aattcagagacaattatcaaagtgaagaaatatgaagtttattttctcaaaggctttaaaagstgagaaaattatgagctgtcttggggtaggttatgtaaaccaaaaataaaattctaagtcccccaaccatctgaatggatccctcctcttggaaaagggcattccaaagttaacctgaaaaactagttcaggctatgatgggaaggaggaggtaggagaggcctcattataccctcctcccttttagaattattgctagaacagactctttatgtctgataggaaacatttataatctattctctctgaagcccttgctacctgggggcttcacctgcatgataaaaccttggtctccacaaccccttatcttaacccagatatttctttctcttgattctaagtctttagagaataacttaattatctcaatcaattgccaatcagaaatctctgaatctacctatgacctggaagcagatcccccaccttccaactgtcccacatttccagacaaaaccaatgcacatcttacatatattgactgatgtctaaaatgtaaaagaccaagttgcggcctgacca

SEQ ID NO: 374145 - DNA, 578 bp, Homo sapiens
aaaccaatggacaagtctctaaactaatgcttggaaacttaatctgcacttctaaagcaccaaggaaacatgtaatttgcctgtgaccagatcccttttagaccctctgtttcaggagccctgggcatgggacctgcatgcttgcatagtgataaagcccccaggtgagtctsatgagcgtttttggttaagagccaaatatactaaaccatttcctcgctttagcaggcttaaaaaatctcctggagatcttgttaaaatacagattcctggacttttccctcaaacattctgattcaggggtctggagtgaggcctgagattctgcatttctaattccttctcaggtgatgctgatgctatgagtctgtggatcactgtgatcactaaagccatcacctgctcttcagttcttgctgggatagtgggactcagagctaagaggtgcccttgattggaaatgcttttgaaaacaaatgcatgcttctctatcttggacctttcagaaatcacacacacccaatcaccttgaaactacctgcccatacaggtgaaataaggacatgccagaggagttc

SEQ ID NO: 374146 - DNA, 554 bp, Homo sapiens
ttagaaccaaattctcagagattaatttgtgtttggatcatgtgggagttagctatgtctctttggccttcccattagcatcttttcaacttgctctggctggctcacctgttccacctgcctagagcttgctaggtggccaaggccatgatgttcaagtatatctagatcatctctctcccaactgtcatctcagggagttccgaaccttctttctcttccattgttgctggaagagaaagggggggcaaagaggctccccaccttcttaagtccacgctatttaaggaacctttctaaaagttctccacatgatttatcttgtttcttttggctagaaatttgtagatgactagctatacctagctttaagggaggtgttgtcttttgggaaatttttacctcttctactggttcacatcattccgtgttaaaagraagaaaatacaaagaggtccctaactctctgcaattgctttgagttcagcctttactattttccattactataaaatgaaggatcttcaataggagcagttgtctcctagcatgaa

SEQ ID NO: 374147 - DNA, 522 bp, Homo sapiens
tactttaagaaactaaccatattaattagagcaggttaggccatcatagcaaatagaccccggaatttaggaggcttagcataatggaagtttattatataaagttctagatagttgttccactcacagatgactctcctccacatacatactcagggctccaggttctcacaacttccaaagtcaccctggaatttgacattccatcgagcatcaggagtaatacatgtgggmgatttatatggaccaggcctggaagaactcatcactcccactgcattccaaaggagagagattggtaacacgtccttacccgactagaaagaaggcaggaaaggtggtctagctgggtgcccagggagaagataagcatatagatttgggtgcctagatagtggtcccaactgccctgagctcaaggaaataactaactgcctaagatctactggagcaaatttaagtctggccagttgttgcaatggctaacagaagacttagattctattaccagttctaccaatt

SEQ ID NO: 374148 - DNA, 523 bp, Homo sapiens
gaggagtctagaataagcctaaatgtctcaatcccaagaagataaaggcccttccctcagaatgagcagcactgacttcagcagcaggagagtatgctcacaamtttagagatcatctgatcccaccatcactacccttcatatattaaaaataaatgcatacaaacacaggagagggaaagtgacctcagaccacaaagtaagccagatacagagccatgatgagaacacaacccttttcctacagggacaggtaggatatctaggaatgcacattcatgcctaaaccatagggggtgagaggacagcccgttcccctcttgccccaagtaggttcctccttctcactgctgaagacattctcctcctgggagaaaagaacagatccaatgacctacctgggtatagttcttgatagttccacagactcattgtctctgatcctcacaaacattcatggcaataatgacaatcccccttgtgaaggcgaaggaaaaaaaaaactggaactgaaagaggataa

SEQ ID NO: 374149 - DNA, 523 bp, Homo sapiens
gaggagtctagaataagcctaaatgtctcaatcccaagaagataaaggcccttccctcagaatgagcagcactgacttcagcagcaggagagtatgctcacaactttagagatcatctgatcccaccatcactacccttcatatattaaaaataaatgcatacaaacacaggagagggaaagtgacctcagaccacaaagtaagccagatacagagccatgatgagaacacaacccttttcctacagggacaggtaggatatctaggaatgcacattcatgcctaaaccatagggggtgagaggacagcccgttcccctcttgccccaagtaggttcctccttctcactgctgaagacattctcctsctgggagaaaagaacagatccaatgacctacctgggtatagttcttgatagttccacagactcattgtctctgatcctcacaaacattcatggcaataatgacaatcccccttgtgaaggcgaaggaaaaaaaaaactggaactgaaagaggataa

SEQ ID NO: 374150 - DNA, 587 bp, Homo sapiens
agcagcactgacttcagcagcaggagagtatgctcacaactttagagatcatctgatcccaccatcactacccttcatatattaaaaataaatgcatacaaacacaggagagggaaagtgacctcagaccacaaagtaagccagatacagagccatgatgagaacacaacccttttcctacagggacaggtaggatatctaggaatgcacattcatgcctaaaccatagggggtgagaggacagcccgttcccctcttgccccaagtaggttcctccttctcactgctgaagacattctcctcctgggagaaaagaacagatccaatgacctacctgggtatagttcttgatagttccacagactcattgtctctgatcctcacaaacattcayggcaataatgacaatcccccttgtgaaggcgaaggaaaaaaaaaactggaactgaaagaggataagtgatttgtttaaggttaagggacagaggtcaaggacagacccaaggcttgaacttgatccaagtttgtatgtaaaatgtaaatactcctcagaaagaagttacacaatgccaccatataactggtga

SEQ ID NO: 374151 - DNA, 506 bp, Homo sapiens
tgggaacagtgtctcattagtcatggaaatttgaggacagacaaaggttttcagaatcagctgtcatcattgctcataagttacaaagagaacattcagagacaggaacgtggtctggacagaaaacaatggtgggtgggaggaaggtagagggctgtccgtcagtggagaagtgggcatccggcacacctgcattccaaaggtggaggactgcagggagggttcatgggtcaaagctatggactgtggaaagtggatttacctgactggctctggacctctcttcttccctcyaatgaggccacttgatttccttccctgtgtcctaagggaaatttagggatccacagaaactgtggacactgagacaactgactatcagcccactgtgaccctgggctctgatccacactaggctttagacttatcccagagtagaactcacagcgtaaaccaagttttagccctggaaattgaggcaataccctatacctaatccctgcttt

SEQ ID NO: 374152 - DNA, 613 bp, Homo sapiens
actcttctctttctttaaaagtgcagctcaattgttttgtttgtattcatgtagttagtaattatatattgctatgcaacaaatagccccaaaattttgtggcttaaaaaactcaccatgtattatctcagagtttctgtgcaatccaggaatccagaaatggcttagtttggtgcctctgcctcaaggtctctcacaaggctgtagagtgtctcccagggctgaagactcaacatgggacttctgtggttgttagtggaattcagtttcttgaggactgttgaaatcctcactcggctgggagccaacaagtcctctgccgctaggacctctccacagggcagctcataaaagggcaactggctttactcagaatgcgtcagagcgcacgggacakcatgcaagacgagagcctcagtctctttggaacacagagacaggctctttgagtctgtttgtcatctcagaggtaatatctatcacttttgccatattttcttcattagaagcatggcactcaaggctaacccacactcaaggggcagggattacataagtgcttgaatacaggaggaagagatcactggagctgtctgagaggctgcctgctgca

SEQ ID NO: 374153 - DNA, 567 bp, Homo sapiens
tttaatcaaggaaaaagctctcaataaaaacaaatgattagtctttataatagaaatgtcaatgggccattaatgaatgaatttgctaattccctgctgaggctttcaagtctcggatgagaacacttaagaccttatccctgagtcagagctcctgatttgggggctgtgtcacacttcacttgaccccaagaaccttggaaacacatctcgggggaaagcgtgatgctcctcaatggcaccccctatgcccccatctctggagaaccctgctcatcagcctcagtcctcagaagccaagtgcctttaaggcacagagacagtagcccctcattgggaacaagtaagagcacagagcggcttgtccatagcaccttagctttgctgtgggcagcaggtggggggttccttgcacgctcttctcatctggtttagccattagctaaaccagaccccggctcctctcacagctccagttcctgacctactgctagttgcacagagctccttctttgcrtgcaaattcacaattccttttatctctctggccttggacctatcataggg

SEQ ID NO: 374154 - DNA, 491 bp, Homo sapiens
tgaccctcacagtgatgctgcaatgtaaagtggacgtgattatccaatttcacaatgaggaagctgagactcatcatggtctggccaaagatacctcgctcagtcacttgttcataatcacacagtcagtcaatggtaaagctggtccttaagcctgactcwgtaaatgccaagacttcatttttttcttcctattgcccctctggttcttaaaccactgaattggaataaaactacaatatcaaactgctatctgtacccccactggagcagatagatgaatgggtgcactccaggcctaaaagaatccataataccttcctttcccttccttgccagcttctcttcctccaaaatcagcccagcaggaaggctcacttgcccagtaagggaggctgtttgaaaactctcatccaattaccatttaaattaacatcagattgacataatgacagtccagttctggaaatctggcctgagttgcaatgata

SEQ ID NO: 374155 - DNA, 548 bp, Homo sapiens
cttatgtgacttcacatagtatggggctgaagcttcatggatccatcacttgtgtttgtagcataagagatactgcttttgatgcagcctcctgctgtgaagaaggccattttggggtctggagacatatctttcaccagccttctgatagagaggcctcccaccgtatccatagtgtagtgtctctggaaaagaacaaatttggtctaaaacttcagcatcatcgattcttcttttcaaccgaaaaaaaggttctcatttttaatctgtgtctgtttgcatcctgttttgaatctgagctctgcatggcccagattcctgccctaagttcagatggattctgaaaggtattggaacaggaattaggcccacctgctgagaatatttctcccacttgagtcctggaaggaagtcaagtgcagagwcagcgcccggtgtctggcagagcaggtgacccacaacaatatgagcacagtacaacccttcagcaccagggagatccaacgtgggactaacatggggtcctacaacaaagaactgaggggcat

SEQ ID NO: 374156 - DNA, 467 bp, Homo sapiens
aaggtgcgagagggaggcaaaaggtgtgagtgtgaggtttgaagagcgaaacagaagccctcagaaaatactggggcatccacgggaatcctcacccccttaaaaggtcccaggagctaggagtcctataaaatctggatatgtgggagaccagttgtggataaagtgcttagaaccaaacagctttctcatttctgacaaaggggtaaataacttatgagtgtgccccagtcattgcgttgagtgctttccttgctgagtttatctgaacttcgcaactgccagagtgtaagatattatcagcccccttttacagatgagaaaaacaaggcttaggaggagtaagtracttgttcagtctctgacacagcaagtaagtgacagagcttgcatttgaaggcagggctacaccatgtcacctcctaaaaccatcaccatcactacccgtgaaagccaccaactatgtg

SEQ ID NO: 374157 - DNA, 552 bp, Homo sapiens
ggaatttgtggttgatgattctctgcactgttaatagaaatgacataacctttttgaagactcaaaaaatgggtcaaaatgggacttacaaaccaacttctgactccactaatttttcttggtgtctgacatggtttagctctgcatccccaaccaaatctcatgttgaattataatccccagtgttagggaagggacctggtgagaggtgattggatcctgggggtggattcccccttgctgttctcgtgatagtgagtgagttctcatgagatctggttgtttaaaagtgtgcagcacttcccccttctctctctccttctggccttgtgaagatgtgcttgcttcctctctgccttccaccaygatcgtgagtttcctgaggcctccccagccatgcttccagtacagcctgtggaaccatgagctgattaaacctcttttctttataaattacccagtctcaggtagttctttatagcaacgtgagaatggactaatataatgtctttacagaagtcacgtcagtttccaggagctaaccaatagctt

SEQ ID NO: 374158 - DNA, 610 bp, Homo sapiens
tgcttccagtacagcctgtggaaccatgagctgattaaacctcttttctttataaattacccagtctcaggtagttctttatagcaacgtgagaatggactaatataatgtctttacagaagtcacgtcagtttccaggagctaaccaatagcttagccatgaattccccttcgttactgtgtctgagtactgcacagccctcctaataagtttccctgcttccagtccaactccgcagtcaagtatctaggttgatcatcctgaaacccacatctggccaggccatcctccttttcttgcttaaaacccagtcatgggccttcagggtcaayatcaagctctttagcacggatatgaggcctttcctgaacacagcattatgccagagtcctttatcattacccctctgcttcggtgtgaccacaatgtttcctaaacatgcttggatgtctccaacttcatacatacagaaccctctgcctttgtccacctcaccccctttttgctccacttgtcctaactccaattcgctcttcaagatccagcttggctatttccctgacactctgaagtgttcctctgtgctccctcggcacctggtacttatcc

SEQ ID NO: 374159 - DNA, 610 bp, Homo sapiens
acttattctttgtaacaatcctgcaaggtaggaatgattaccccatgttacagaggaggaaacaaaggggcagtgggactatataactccccaagagcacatggctagtaagaggcagagctggcattccaactcagatttttccggtgctgaagccaatattctttccattagagcatgattactattagtgctgttgttgttattgagttatgcctcttctgtgatccatttcgagagcatattcttagtataaggaacacaatgaggtatttgggtctcatggaagggtacctgcttgyccccaaattctctcacttttaaccccataagccatactccaactaaattaatcagatttctgcagcattgtctcccaaagaggtctggattcctaagactgaggtcctcggggcatgcagggccagagatgatgcaaccaatgatgtggctgagaagatgactatttccagtgcctgctgatggcataagggagaccaggcagcattccccaggacagccaccttagggacaggctgatgggaggctcagtttctgcaacctacagggagcaaaaatctgagcccgcaatgcaggcaaatctagcctg

SEQ ID NO: 374160 - DNA, 508 bp, Homo sapiens
gaaccagttggagggtgtctcttttccaggcagtcattcaggaacaaaggccaaggaggctctgccattttctacaagtagcttccaaggttttcatggggctggtctgcattccagccaactagcagggagaatgggcataaaagagcatccatataagtggtctttatgggccaagcctaaaagttacactcatcacttctacttatattatgtgggctagaaccagtcacaaggctttcctaacaacaaggaagcctagaaaatataggctagttgtgtaccacagaggaagagctgtgcccttaggggttttagaaacatcctacagtctcttccatagcaacctactacatcagttaagtgaagttcacaattcatgaaaatacaaaatrtaggagcttatattagtctgttctcacgctgctataaagaactaaatgagagtgggtgatttatgaagaaaacaggtttaactgactcacaggtccacagacttaacaggaag

SEQ ID NO: 374161 - DNA, 385 bp, Homo sapiens
tggaaacagctgcaccacatcacacgcctcctgggtcattagggcaccttgcctggcttccccattgagccctgcagagttccttccagcaggctgacacttctcctgtcctttctctgaatgctcctgcagaagatctccaccagctgacatgtagggctctttcataacttccttttgccgccaaaatgcctctcctccttcagttcttcagaaaccaaaggcaagtgctattcagatgtatgatcaatgtggtcatttgttagaaaaccaggagaggggagggaccaagaaactgaggggaattaacatcattcargaaagtggagctttccagaagcgtagcacatctattttatttttaaaagaagagggtgctttgtgt

SEQ ID NO: 374162 - DNA, 593 bp, Homo sapiens
accacctgagttctgatggaattatggccatccttgactgtagcccaccagatacaacgcatcaacccctctgtctagagaataggatcagcctatctctcatcccacttttagcattggtagaaggctttcttcaagaggaagaaccatcctgactgagccaagatgctgctctctaaccagtctgttctttcccatgccccatccaacagccaaggctactttgagtcaatgccaggatgggtcatatcaaagtttctgtgttcctctgaacagcatctccctttggggaaggtctggagctcaattatttcccttcatcctggttaacgtaaycactgtggcataattttaagaaatttgatttttgtcccttgttcctggcatagagcttccaaatctcttgggattcccccattgataggagtgtctttgttacgctaatgaagtgactcttggcagggccctgagagagcttcaggatgggagctggttaccagaaagaccaaccctgtgattaaaggattggaactttcagccaggcccccagacctctgaggagattcagttcaatcatgtggtcaaaagattta

SEQ ID NO: 374163 - DNA, 529 bp, Homo sapiens
catagagcttccaaatctcttgggattcccccattgataggagtgtctttgttacgctaatgaagtgactcttggcagggccctgagagagcttcaggatgggagctggttaccagaaagaccaaccctgtgattaaaggattggaactttcagccaggcccccagacctctgaggagattcagttcaatcatgtggtcaaaagatttaatcagtgggcctacattaaaacaaaaacaaacaaacaaatctcttgtattaaaaaaactcaggacaatgaggttmcaggagcttcttggatggttaacatatcaaggacacctagggacagaagaggctactgtggcccacccacccaagatcttgccactctgtgtatcttttcctgggctgttcatttgtatcctttgtgataaaaggaaccacaatctaagtgtggcactttcctgagttctgtgagtcattccagggaattctacaatcagaatggggtcatgggaactcacaaatttgtagtcagctgggtagaa

SEQ ID NO: 374164 - DNA, 369 bp, Homo sapiens
caccacttcctctttggtctgagccatttgcatcttcagtattttctatttgcattcccttcccaataagtgatcttcaacctaaaaacaagagtgagcccttcaaaaagcaagtcagatcctgtcactcaaaagtggttaaaaaaaaaaawatatatatatatatatatatatatatcagtgtttagaagtgaggaaacaggctgagaaaggttaagtaaacagtcataccctcaagaagtggtaattagtaatcagcagtggaacaaggatgatttaagatttaaacctgacgccatttgaatccaaagcccatactctaaattatcacccatcctgccatgaaaccatttcattctttaaatccaa

SEQ ID NO: 374165 - DNA, 580 bp, Homo sapiens
gtatttccctctgatccctgaaatctgtgaatatgatgagtgatcacgttatgttacagggcaaagtttaccttaaaatagggagactatccaggtggtcttaatctaatcacgyaagtccttcaaagcagaaatgtctctgtccgatgatataagaggacgtcagagacattcaaagcaagagaaagattcaatgtgctgttgctggtttgaagatggagggagtcactttagaaaaaataggctgagcccccagcacatagtcagcaaggaatggggacctcagtcctatagctcagtcctacagctacaagaaactgaattctgccaatagcctggatgaacttaaaaatgggttctttatcagagcctccaggtaagagctagcctggtcaataccttgattttggcctagtgagaccctgagcatagaaccttgttgagcctgcctggacttttgacctacagagctatgaaacaataaatgggtgttaaactaccaaatctgtggtgactggttacatggcagcaggaaactaatacaaatgctttatattagtttatattagttattaataat

SEQ ID NO: 374166 - DNA, 580 bp, Homo sapiens
gtatttccctctgatccctgaaatctgtgaatatgatgagtgatcacgttatgttacagggcaaagtttaccttaaaatagggagactatccaggtggtcttaatctaatcacgcargtccttcaaagcagaaatgtctctgtccgatgatataagaggacgtcagagacattcaaagcaagagaaagattcaatgtgctgttgctggtttgaagatggagggagtcactttagaaaaaataggctgagcccccagcacatagtcagcaaggaatggggacctcagtcctatagctcagtcctacagctacaagaaactgaattctgccaatagcctggatgaacttaaaaatgggttctttatcagagcctccaggtaagagctagcctggtcaataccttgattttggcctagtgagaccctgagcatagaaccttgttgagcctgcctggacttttgacctacagagctatgaaacaataaatgggtgttaaactaccaaatctgtggtgactggttacatggcagcaggaaactaatacaaatgctttatattagtttatattagttattaataat

SEQ ID NO: 374167 - DNA, 498 bp, Homo sapiens
aatataataaatgcagtattaaactttcaactttttgtttacccggtaatttgcaaaaaaaaaaaaaaaaaaattttcatcggattcctcagyctctggattgaggataaaagagatgggtaaagacatgggcttgttacgttgtggtttcacattttgcatgtttgttttgaaaggactgcaccatcacagttctatgcctgctctttacagtagcacactttgccaagatcatgtataaaaatatggtcttccatcaacaacagaaacacagcctccatgtccacctgttttgcttttgttccccatttcctaatctgtgccctctaaccactgagggtgaaaggcctccatgtcatcagcattggagatccccacctgtctttccatctagaacattctcaggggtcgtggcagatcttattgaaccaccttgtctttttagaagtgttgcatggccccagggctgctgctaattactaaaccggttactattgt

SEQ ID NO: 374168 - DNA, 601 bp, Homo sapiens
atttatctctaagtaacagtttctccatctttaatatgcagttaataatagtcccttcttcatagtgttctgaggactggatcaggtgatatatgtaaagcgcttagctctgtgtctggcatacagcatgtaatcagtaagcacttgttttcttttctctttttcattcctactcattcattaaatattcattgaacacccagagtttgataggtactgtatttgatagagggtgtacagacatgaaagagacggtctcatgaagctcagagtggaatggaagaagtagataygtagcagatgaaaaaccagtaagtaacaatacagtatagttatatctgtattagaaatataaatgtattaactatggatacccagaagaagaaattcccagccttgtcttggagagtgagaaggtattcagtgtactgtagctcaagtattttgaagatacttatgctcaatctaattttgggaaagaatgttctctaatattttgtatatgtgggcttcgcttttataattttttaattttacattttagatatagaaatcaggaatgcttggttgatgatctattgaaaatagcaacaaggttgcc

SEQ ID NO: 374169 - DNA, 543 bp, Homo sapiens
gtaataatatctaacatttattgcaactattaataatactaataattattaattcatcttcaatatgtgacaagcatttttctactcacttttgttcattatctcagttaatcctccccagattctcataacatagatacttgtgttattcctagtttacaatgtaggaaactggaatttggagaagttaagtgacttcacgaagttaccagttaataatttgcagtagcaaaataatagttaataatttattatatatttcaaaatagctagaagagaagaattgtaatgttccaaacacaaagataaatatttgaggtgatatatattccagtttccctgatttgatcattacacattatatatatgtgtcaaaatatcacatatgtaccctcaaaatatgtaaagctatgacatatcaataaaaaatacaaagaaaatcacaaagttgtgacatgaaccgtggtttgtctggcttcaaagctcatgtttaygttcacttcagaaatctttttttagtaaagagaaatagcatgtttgggt

SEQ ID NO: 374170 - DNA, 498 bp, Homo sapiens
aatataataaatgcagtattaaactttcaactttttgtttacccggtaatttgcaaaaaaaaaaaaaaaaaaattttcatcggattcctcagtctctggattgaggataaaagagatgggtaaagacatgggcttgttacgttgtggtttcacattttgcatgtttgttttgaaaggactgcaccatcacagttctatgcctgctctttacagtagcacactttgccaagatcatgtataaaaatatggtcttccatcaacaacagaaacacagcctccatgtccacctgttttgcttttgttccccatttcctaayctgtgccctctaaccactgagggtgaaaggcctccatgtcatcagcattggagatccccacctgtctttccatctagaacattctcaggggtcgtggcagatcttattgaaccaccttgtctttttagaagtgttgcatggccccagggctgctgctaattactaaaccggttactattgt

SEQ ID NO: 374171 - DNA, 547 bp, Homo sapiens
atcagtaaagcaggactgtttgtcacaggtctagtgatcagaggtgccacaccctgggtaccagctacttacccccaaagcagtgtgaataccaagtaaggatggtattaaagccagcaacagcttccagttcaagagattctaaatgccagagaaagaagcagatgagggagaaaaatggaggttgagcatccctaatccaaaatgttccaaaatctgaaactctttgcacaccaacatgacatcacaagtggaaaattccacatctgaactcatgtgatgggtcgtagtcaaaacatagtcaaaacttggtttcatgcacaaaattattaaaaatatggtataatattatcctcaggctatgtgtgtaagttattatatgaaacataaatttcatgtttagacttgggtgccagtcacaaaatatctcctatgtataygcaaatattccaaaatccaaaaacatctgaaacccgaaacactgctagtcccaagtattttagataagggatactcaacctttacattctacagctagcactagaga

SEQ ID NO: 374172 - DNA, 502 bp, Homo sapiens
atgccctttattcccagcaggctcataatctagtagaaaaactagagatttaaaccaatcataacaatccaacaataatgtattgattggattgacagggtgaaacaagaagaacagattaagttataattttctgagatcctgctttgtactcatcactttttaaaataccagtcactttatttatatgctttactttactgccttgagtcctctgaacagctctgtaggtgaagtacaggagaaggtctgttaggctcaccactgctttggattgacccccactcttctttctcactatctgatgctrgctctactccgaacaggaatgccaggaaggctacttgatttctgtttcaatcaaaaacctatgttagacgcttactaagaatctcatacacttctgttcccaaatttgtttatgataattgtactagttgggatagtatataattagttaggtatgttgtaagtcagggaaacatgagtacagaaataaagg

SEQ ID NO: 374173 - DNA, 577 bp, Homo sapiens
tgatattctgagtagactggattttcccgtttgattttttctctctggttaaaagcattatagcatagcagtttattaccacatagacagacctgggttcaaatgcagactttgttatattataggtgtgtaattttaagttattgaccctttctaaagcaaagctacaccatccatagtgtggcataataagaggtacttcatgggactgctgcaagggtcaaacaagaggctgtatattaggatgggggtattctcagcttccctcagtggtcctttatgacattttagtttcagcattaaccaatgttatagaatatccttctrtattgtattagtccgttttcatgctgctgataaagacacacccaagactgggcaatttacaattgaaagaggtttattgcacttatagttccacctgactggggaggcctcacagtcatgatggaaggtggaaggcacatctcacatggcagccaacaagatggcttgtgcagggaaacccccgtttttaaaaccatcatatctcatgagactcattcactatcaagagaacagctcatgaaagacccgc

SEQ ID NO: 374174 - DNA, 548 bp, Homo sapiens
tggggcggattaggaaagaggtctacacaccctatttaatgatgtagagctgctcttccaggcagtggtgctcaaagaggcccccactgcttgtatttaaatgagattctggcacagcagcgaggtgaatggtggatcaacgcctaaagcagcaatctactaaacatctccgtgactggggaaaccccaaagggctacatccaaaccttcgtacctgcagccattaatgacttctagaggagcagagctcagggagggacaacaataggtgagaagtcaatttaattttcattccctgccagaccatattcttaacataacccaatgagaatttatgtcagatgcacattgtatatctgtccctgatttaaatggcagatctcgtctccatttcagattcattcttgggcctttagctgcatttattgaaaagtggctgtattcactatgaaccaatttttccmttgggttttattactgaaatcatcaaaataaatcacctagaatgctccatcctacctggtttgaaagccattggggaaacggtg

SEQ ID NO: 374175 - DNA, 564 bp, Homo sapiens
acagccacgaaatcactgtccattaactgtttggtttcctgagagcagagattagggatcctcagtcttgcctgtatatcaataccacctgggaccactcagaccaggtgaatcaatgtccctgcaggttgggcccaggtaatggtttattacgtgttctatgtaagtttagggtataaccaagtggttagaattactaactaaatcaaacctctttactgaccaattacattagaatgtaaattctctccaatatgtatccgtgtttctccaaaaacagccccagctctcaagtccaggattagtatgggaaaaaccaactcacaaaaacccacatgttgtgtccagctctccaccactttgacacaagcaccatccccaatcgatcagtgtgaggtgtgcttatttattctcacttctctggmagataaggattatagggatataaaaagcagagtgtgctataaaacattatttattagtgggccaatggatcttcatgtgaatcaggttttacaggttccattttccattgaaacaatggaatgttacatggctaataat

SEQ ID NO: 374176 - DNA, 296 bp, Homo sapiens
aaatagaaagtttaacagtgttctacaactcatctttcaatgggctgtactyaaagttctgtgccacagacacctccaaaaacagtggtgcctcagggcagaaaattaattttccatcttgaacaaaacgttggagcacacctggaaaagcttatcatataccatggtgtctggaccactgactggtatggagtagggagacagacttttgatcctcatggggtagtgactcactcttcctgggtccctgagtcccaaaatcctaatcacagtatgtagatgataatacctacccc

SEQ ID NO: 374177 - DNA, 296 bp, Homo sapiens
aaatagaaagtttaacagtgttctacaactcatctttcaatgggctgtacttaaagttctgtgccacagacacctccaaaaacagtggtgcctcagggyagaaaattaattttccatcttgaacaaaacgttggagcacacctggaaaagcttatcatataccatggtgtctggaccactgactggtatggagtagggagacagacttttgatcctcatggggtagtgactcactcttcctgggtccctgagtcccaaaatcctaatcacagtatgtagatgataatacctacccc

SEQ ID NO: 374178 - DNA, 648 bp, Homo sapiens
cccactgcattgcaattaccttttggtatacctgcttccctgactactaagggcaaacagcaaatctgactcatrtctaagaccccagtgcctagcatggggcttgcctaagtacatgcttaatgaatcatggaattttatagggaaagaagaccagagagagaaagtggattgggaggaagagattgggacaagaaaataacaagcaagcaaaagaaagagaaaatggtgaaatattgaaatgttcctgggttggttgaactacttcattttatggtaaagcaacagggtccgaaagaggttacctgcctgtagggtgatgctacccaaactttgttgtgcagttctgatgttttcttcttcctctccttaattcttcacctaaggagaaaaagatggaggtagaaagaaaacgtgattattatggcaaacttcctctggggcctggtggagccagcattttgtatgactgtagtctgagatgaactgcagggaaagtgttttttggatcattctttttctagatctgcccagggcccaaaggccaggactctgtccaccctgaccctatctctagatctacactatctattttggtggccatgagtgacatgtggctgttgagcaccagatgtatggctagatgaa

SEQ ID NO: 374179 - DNA, 648 bp, Homo sapiens
cccactgcattgcaattaccttttggtatacctgcttccctgactactaagggcaaacagcaaatctgactcatatctaagaccccagtgcctagcatggggcttgcctaagtacatgcttaatgaatcatggaattttatagggaaagaagaccagagagagaaagtggattgggaggaagagattgggacaagaaaataacaagcaagcaaaagaaagagaaaatggtgaaatattgaaatgttcctgggttggttgaactacttcattttatggtaaagcaacagggtccgaaagaggttacctgcctgtagggtgatgctacccaaactttgttgtgcagttctgatgttttcttcttcctctccttaattcttcacctaaggagaaaaagatggaggtagaaagaaaacgtgattattatggcaaacttcctctggggcctggtggagccagcattttgtatgactgtagtytgagatgaactgcagggaaagtgttttttggatcattctttttctagatctgcccagggcccaaaggccaggactctgtccaccctgaccctatctctagatctacactatctattttggtggccatgagtgacatgtggctgttgagcaccagatgtatggctagatgaa

SEQ ID NO: 374180 - DNA, 648 bp, Homo sapiens
cccactgcattgcaattaccttttggtatacctgcttccctgactactaagggcaaacagcaaatctgactcatatctaagaccccagtgcctagcatggggcttgcctaagtacatgcttaatgaatcatggaattttatagggaaagaagaccagagagagaaagtggattgggaggaagagattgggacaagaaaataacaagcaagcaaaagaaagagaaaatggtgaaatattgaaatgttcctgggttggttgaactacttcattttatggtaaagcaacagggtccgaaagaggttacctgcctgtagggtgatgctacccaaactttgttgtgcagttctgatgttttcttcttcctctccttaattcttcacctaaggagaaaaagatggaggtagaaagaaaacgtgattattatggcaaacttcctctggggcctggtggagccagcattttgtatgactgtagtctgagatgaactgyagggaaagtgttttttggatcattctttttctagatctgcccagggcccaaaggccaggactctgtccaccctgaccctatctctagatctacactatctattttggtggccatgagtgacatgtggctgttgagcaccagatgtatggctagatgaa

SEQ ID NO: 374181 - DNA, 648 bp, Homo sapiens
cccactgcattgcaattaccttttggtatacctgcttccctgactactaagggcaaacagcaaatctgactcatatctaagaccccagtgcctagcatggggcttgcctaagtacatgcttaatgaatcatggaattttatagggaaagaagaccagagagagaaagtggattgggaggaagagattgggacaagaaaataacaagcaagcaaaagaaagagaaaatggtgaaatattgaaatgttcctgggttggttgaactacttcattttatggtaaagcaacagggtccgaaagaggttacctgcctgtagggtgatgctacccaaactttgttgtgcagttctgatgttttcttcttcctctccttaattcttcacctaaggagaaaaagatggaggtagaaagaaaacgtgattattatggcaaacttcctctggggcctggtggagccagcattttgtatgactgtagtctgagatgaactgcagggaaagtgttttttggatcattctttttctagatctgcccagggcccaaaggccaggactctgtccaccctgaccctatctctagatctacactatctattttggtggccrtgagtgacatgtggctgttgagcaccagatgtatggctagatgaa

SEQ ID NO: 374182 - DNA, 616 bp, Homo sapiens
gggcgcctgtagtcccagctgctcgggaggccgaggcaggagaatggcatgaacccaagaggcggagcttgccgtgagcagagatcgcgccactgccctccagcctgggcgacagagcgagactctgtctcgaaaaaaaaaaataataattaattaaaaaaaaaaaagaaagaagccgtatttttttcctaagtcagtaagaaggaagtgagcagtaacattacagtaacagacatgtcctgagtgggaactgcatgtcaggctttgatatacaccttctcrcatccgatcttcattcaagagtgaactcttccttatccctattttacagaggagggagcaaaggcttaaaaaaggtaagtaacttagcctttcggacttatagcttctaaatatttagcacttacaaagttcttacacatacattacttcatttgttcctctcagtaaactcacaaagtaggaattcttggtaaccttatagttgagacaacagagccaagatgacttggggcccctgatcctgtcagggcagggccatgactagtacacaagactgtggttttcaaagactatagtttttccattatcacatcctgaacaatgattgcatgaa

SEQ ID NO: 374183 - DNA, 205 bp, Homo sapiens
ctaaggtcacatatctgggacttggtggagccacagtttgaattcccagggcaartccgtgagacggtgatgctcatggcttttctttgtcagacaccagataacagtggtatagtttggatctgtgtccctgcccaaatctcatgttgaactgtaatctccactactggaggtggggcctggtgggaggtgactggaagcgggg

SEQ ID NO: 374184 - DNA, 518 bp, Homo sapiens
aaatggcaataataaatagcacttcagccataatcacaattgctaattcaccttatatttgttgtttgcttattatgtgaaatactttacgtacattttaatctaatcagcacaattccaacgaagtctttattrtgatttcccccatacatataaggaaactgaggctctgggaagctgagatgacatcctttaagttcatgctattgaatacatgcccaagtcagaaatcaaacccagatgatgccaaatctaagtcttccttgatattttagatccaaactgagagctaatctgatagaccagctgatgtcaactcttagagtttatctatacaagtcctttttttttttttttttttaaatctagaccagtgtttttattttgtgttctgtggaatcttaggtctgtggaggtgccttagggtctgcgtaggtgtgagagatcaggggagagcctgagtaactggttaccatgacccccactcccatttcaaaataactgtgctttttttagat

SEQ ID NO: 374185 - DNA, 518 bp, Homo sapiens
aaatggcaataataaatagcacttcagccataatcacaattgctaattcaccttatatttgttgtttgcttattatgtgaaatactttacgtacattttaatctaatcagcacaattccaacgaagtctttattatgatttcccccatacatataaggaaactgaggctctgggaagctgagatgacatcctttaagttcatgctattgaatacatgcccaagtcagaaatcaaacccagrtgatgccaaatctaagtcttccttgatattttagatccaaactgagagctaatctgatagaccagctgatgtcaactcttagagtttatctatacaagtcctttttttttttttttttttaaatctagaccagtgtttttattttgtgttctgtggaatcttaggtctgtggaggtgccttagggtctgcgtaggtgtgagagatcaggggagagcctgagtaactggttaccatgacccccactcccatttcaaaataactgtgctttttttagat

SEQ ID NO: 374186 - DNA, 608 bp, Homo sapiens
ataattaattacaattataagagctttgggagaaaatactatgttccactagaacggaagctccttgagggcaggtttttgtctgttttgttcctgctgaatccacagttgttagaacaatcttggcgtgtgtttttgcatgaattttgaaacatagggtacacatcaaatsgtaaatagggccctcacataattggtgaagtctagaaaagtggacttccccagggaagtgatatttaagctgagactaggaataaattggttaagggtgggcatggtaagtggcagggataaagaaactgtgccctcagacaccgagagaaggctggggtcctgaagaagtgtgtcctgggtcttaaaggactggttcctgggaaggatttggatgttgatggatgccttcattcaataaaggctgtagacacacttaagtttcagaagagcatagtagtgcaggattttttttttctgttataccaatgaatgaatgaatgcttgcttgctgcctactatgtaccaggaagaaagggggtgtcattgataaagccacaaaaaccctatagcaaggtggtctcatttagtggctttgcagaagcagcaatggctcc

SEQ ID NO: 374187 - DNA, 606 bp, Homo sapiens
tctgttttgttcctgctgaatccacagttgttagaacaatcttggcgtgtgtttttgcatgaattttgaaacatagggtacacatcaaatggtaaatagggccctcacataattggtgaagtctagaaaagtggacttccccagggaagtgatatttaagctgagactaggaataaattggttaagggtgggcatggtaagtggcagggataaagaaactgtgccctcagacaccgagagaaggctggggtcctgaagaagtgtgtcctgggtcttaaaggactggttcctgggaaggatttggatgttgatggatgccttcattcaataaaggctgtagacacacttaagtttcagaagagcatagtagtgcaggattttttttttctgttataccaatgaatgaatgaatgcttgcttrctgcctactatgtaccaggaagaaagggggtgtcattgataaagccacaaaaaccctatagcaaggtggtctcatttagtggctttgcagaagcagcaatggctcctgaagacacagaccttgctatcacttagctgtgtggccctgagagaatcacctaagctctctgaattaaatgtatgtaa

SEQ ID NO: 374188 - DNA, 643 bp, Homo sapiens
aaaataattaattacaattataagagctttgggagaaaatactatgttccactagaacggaagctccttgagggcaggtttttgtctgttttgttcctgctgaatccacagttgttagaacaatcttggcgtgtgtttttgcatgaattttgaaacatagggtacacatcaaatggtaaatagggccctcacataattggtgaagtctagaaaagtggacttccccagggaagtgatatttaagctgagactaggaataaattggttaagggtgggcatggtaagtggcagggataaagaaactgtgccctcagacaccgagagaaggctggggtcctgaagaagtgtgtcctgggtcttaaaggactggttcctgggaaggatttggatgttgatggatgccttcattcaataaaggctgtagacacacttaagtttcagaagagcatagtagtgcaggattttttttttctgttataccaatgaatgaatgaatgcttgcttgctgcctactatgtrccaggaagaaagggggtgtcattgataaagccacaaaaaccctatagcaaggtggtctcatttagtggctttgcagaagcagcaatggctcctgaagacacagaccttgctatcacttagctgt

SEQ ID NO: 374189 - DNA, 632 bp, Homo sapiens
ttttttttttctgttataccaatgaatgaatgaatgcttgcttgctgcctactatgtaccaggaagaaagggggtgtcattgataaagccacaaaaaccctatagcaaggtggtctcatttagtggctttgcagaagcagcaatggctcctgaagacacagaccttgctatcacttagctgtgtggccctgagagaatcacctaagctctctgaattaaatgtatgtaatgcatcaagcccaatgkttctctcacagtgaatgctgcctcaattctctcatctgcatttattccttcaacaaacatttgcatgcctagtagacctgcctctaggctaagtaataaggaccctgtaatgaattgagatgctaagaaaaactacttgcctcatctcctcacttcaggtagcttcttttgatgatcaaataataattttgcatgaaattgttttgtaaattggaaagtactttattaacatgagttgtttttaactctataaacttgccaatttattgatcctcatcttcaggcatttacttgcaaaattacaagtgaaatcactgtggggctggtcaaataaagctataaaagttttagtagcacttatttgcattcttattattaagttccag

SEQ ID NO: 374190 - DNA, 554 bp, Homo sapiens
atagccctgttattttggaaggaattgtagtattttctcagaaacctgcagtttgggtctcagcaagctgtaggaaatgaaggatataagattgtttgctgataaacttgaagatcaaagcagacagtataatcccataggtatgtgaaatcactggaaagagaatcatcttggcaatgccgagcctgattgaatcatcatggccaaggaaagattatgccaatatctttgagtgctgctcagtcaaagagcacctatgtagtagttggacttcagagtatttcatttcagatgacttctggtatatctacagatgcagggagtgtaaccaatggacttttaagggttttttggttttggtttttsttttaatcaagaccattcttactgggaagtttaagttagtgtctctgcttgatagggttccatcccaacaagggcctcctcctgatttggttgcttacatgggcacatgtactaattaaacgagcttaggtcctttctgattcccttgataatggttcttcaggtgaactaatcaagtggcttctgat

SEQ ID NO: 374191 - DNA, 333 bp, Homo sapiens
gaattggggagagagagaggcagatgtagagaatcacaacacaccaaagcagaaacccctgagcagaaaccgccacaggaaccagtgctggtgtagaaaaacttaagccgtaattgatgcattactggaagcttggtgcggacaagtctgacagagaaagacttcaggggccccacatttctgtgagttttactcctaggagctccaccaggttctcacagtaaatattgaagaaaagtatcctcatggtttggcaagaagggaaaagtaacaattttgagatatrccacaacagtctgttcttaagaagagctgcccttaggagaactaatg

SEQ ID NO: 374192 - DNA, 561 bp, Homo sapiens
tgaaataatatatggcatgaaataagcatccacgtttggtattttaatggagaatataaatattttatctaatagctctagttctttacttttgtactaatcaatatgaattaaacttgatgacatgccaatatacatagactacagtcattaaatagtgtctacagttaataaaatattgactaattgtgattatttactaattttttctttaaaagtaatgaatgtcttattgtttaktgttataattcatcttattgctacaataattcttttaaaaacttttgaacaaaaagggcaacagcaacagacccagttgctgaagatgtgttgtatataaaaaatgtcctatcattttaaaatcttttattttaaaacatagatatctgtaaataaatgtatatgtgtgtatgtttatatctgtaaaccatagggtttgcaaaaagaaggaagtgattccacacaggaaattcttgtagtaggtgctcaaatcttcaagattaaggatgaaaagaaaatatttgaggtcaaaagggagaaaacagcttaagatacctcact

SEQ ID NO: 374193 - DNA, 561 bp, Homo sapiens
agggaggaaggagcaaatgaagcataagcagcatrtcttcaaagtcaattagattgtgattgatgccaccattttgaaattttctctcccttatagattatggcaaatgtttacttattacccaaaataaagtgtgtctggtatcttcagtattttatactgggccaaacaaatgcagcttatgactggctgcttgcttttgtaaatgaagttttattggcatccagccacacctgtctactctacaaaggtaaagttgagtagtttcaagaatgaccatgtgtcctacaaagtctaaaatatttgctgtcttgtctttgacagaaaatgattgctaacccctggtttagacagactttcgtttttgttccattctaatttaccagaatgttttcaaagtgacttaaagtttatattttttgaactggatttgctctgtgaaacaattcagattattttacactaaaaatcaaattattgttaagtttgtaatagtgaggctagcacatgcagctgaaaagtggcaaaataaagtgtttgttttgaaaatatcttttttta

SEQ ID NO: 374194 - DNA, 561 bp, Homo sapiens
agggaggaaggagcaaatgaagcataagcagcatgtcttcaaagtcaattagattgtgattgatgccaccattttgaaattttctctcccttatagattatggcaaatgtttacttattacccaaaataaagtgtgtctggtatcttcagtattttatactgggccaaacaaatgcagcttatgactggctgcttgcttttgtaaatgaagttttattggcatccagccacacctgtctactctacaaaggtaaagttgagtagtttcaagaatgaccatgtgtcctacaaagtctaaaatatttgctgtcttgtctttgacagaaaatgattgctaacccctggtttagacagactttcrtttttgttccattctaatttaccagaatgttttcaaagtgacttaaagtttatattttttgaactggatttgctctgtgaaacaattcagattattttacactaaaaatcaaattattgttaagtttgtaatagtgaggctagcacatgcagctgaaaagtggcaaaataaagtgtttgttttgaaaatatcttttttta

SEQ ID NO: 374195 - DNA, 562 bp, Homo sapiens
ctttctatactcatgatgtaccataattgaccctttgtgtcacccactcattggagaatttctgaacatgtgagcatgccacctggtggtggatagatgtttaccaggcatttgcaaaggattgattgaaactttttgggtcctttaagaaaaaagcagtatcctgaggcttctgattgcattattaattattcaactgatttgttccaatagttttrtttttccagcattacagtcagatcttattcattattaccatgagaatgttttagtaggtcagtataatgagcctaaaataactaaggtaaagttctatagtctgagggattcctgtctttctcacattgcctaggagcgtaatgagaattgaagatatagtatcaataatgcagttcctgattcagaggtcatgttgagagtggatttcataggtcttaaaaacactgaattttccttcttttttttttgccattctagggtgttagatttgacaattcaaaaccagattctgaagaatttaaattccaaattaatctggaaaatttataatgcacaaagaact

SEQ ID NO: 374196 - DNA, 562 bp, Homo sapiens
ctttctatactcatgatgtaccataattgaccctttgtgtcacccactcattggagaatttctgaacatgtgagcatgccacctggtggtggatagatgtttaccaggcatttgcaaaggattgattgaaactttttgggtcctttaagaaaaaagcagtatcctgaggcttctgattgcattattaattattcaactgatttgttccaatagttttgtttttccagcattacagtcagatcttattcattattaccatgagaatgttttagtaggtcagtataatgagcctaaaataactaaggtaaagttctatagtctgagggattcctgtctttctcacattgcctaggagcgtaatgagaattgaagatatagtatcaataatgcagttcctgattcagaggtcatgttgagagtggatttcataggtcttaaaaacactgaattttccttcttttttttttgccattctagggtgttagatttgacaattcaaamccagattctgaagaatttaaattccaaattaatctggaaaatttataatgcacaaagaact

SEQ ID NO: 374197 - DNA, 587 bp, Homo sapiens
ccaattggatccctcaaatattctgaattacttgttctcgagttttgcctactcatcagaattttataacctccccaggtgattataatgtgtggccccagttgcaagctrcttgctgtagatgaagacaaattaggttttcttaggccttatctttgcaatgcctgcacctgccaccagatgtgccaattaatgcttgtttcactgagcagatcgactcttttcagagaagcaaattggcttacaattttagctgattgaaatttttccaaagcaaaataactctttattaagctagcattacacattttaaaattaaaccattttgcctcaattttagaactacgaattatttaaataaatgcattcatccatttactcaaaaatgtttatttctatctaagcactgggcactgtaccaggcactggggatggagccatgaaaaagacaaagctcctattcctgtaggagggacaattcatatgaaaacagaaaataaatacttgcaaggaaaaaaatgaataaaggggtaaaaaggaattgagtggtggagagcattgcaatttaaataaagcaatcagaaaaa

SEQ ID NO: 374198 - DNA, 479 bp, Homo sapiens
gagaggagtggtttttttcccctcaagtttaacatattggactgtttttaaacaaagtggggcagtcatttcctttcacagtgaattaccttctctaggagttatacctgtgacctctaaattatactagcacttgataatgtaattacaattatttactacagaaaatgtacctaagagaaaacttgccccctacaaattttaaaatgttcttggcaggcacgtgtaaagcaaccatgaaaagtatattggatgatgcatgaggtctttttagactataatgagaaaggtcttcttatgacaaagaaatgatcattttcagctataactgtgttttctcttaaaatggttttatcctgtattttaattttcaaacaatccaaaagtatttttagtaagtaaattatgaataaaaatttatttttatgctattgtattttaaaaattagttaataaagktagcattatttttgatagct

SEQ ID NO: 374199 - DNA, 639 bp, Homo sapiens
atagctataaattattaaaktttcaaagttcacaaaccatatacagaattgaatgaaatgaggaatgaatgaggcttcaatgcaaattaaaattttatttttgaaaaatggtattttctagtctttgtgcaaacttcttcacttgggattccttggatcctctcctaaataaactacctgcaagtccttgtctcaaggtctgctttgagggaactcacatagagacaccctctaacaaaggctgcctcaaaggctagattttgaattgatatgggaaaaactaaggggtgaaactatccaaatctgcttgattttgacatacttcatttcagaaaatatttccaagcgtattcagcttctcctagtctggagctttgtcttctctcctaagtctctttttctctttagagaaaaatgtagagatccgggagaggtgaggggcatgatgcctttctttgttagtttttacaaaaattttataatttaacacatagtgtcttttagctagtgaggtcagaattattacttggtgagatacagagtagcagttatattctaagaagaatgcaaatttatcaagtggacacttaatgggagatcaaagaaatgaattttctcagctcttatttcagaaatttt

SEQ ID NO: 374200 - DNA, 639 bp, Homo sapiens
atagctataaattattaaagtttcaaagttcacaaaccatatacagaattgaatgaaatgaggaatgaatgaggcttcaatgcaaattaaaattttatttttgaaaaatggtattttctagtctttgtgcaaacttcttcacttgggattccttggatcctctcctaaataaactacctgcaagtccttgtctcaaggtctgctttgagggaactcacatagagacaccctctaacaaaggctgcctcaaaggctagattttgaattgatatgggaaaaactaaggggtgaaactatccaaatctgcttgattttgacatacttcatttcagaaaatatttccaagcgtattcagcttctcctagtctggagctttgtcttctctcctaagtctctttttctctttagagaaaaatgtagagatcmgggagaggtgaggggcatgatgcctttctttgttagtttttacaaaaattttataatttaacacatagtgtcttttagctagtgaggtcagaattattacttggtgagatacagagtagcagttatattctaagaagaatgcaaatttatcaagtggacacttaatgggagatcaaagaaatgaattttctcagctcttatttcagaaatttt

SEQ ID NO: 374201 - DNA, 639 bp, Homo sapiens
atagctataaattattaaagtttcaaagttcacaaaccatatacagaattgaatgaaatgaggaatgaatgaggcttcaatgcaaattaaaattttatttttgaaaaatggtattttctagtctttgtgcaaacttcttcacttgggattccttggatcctctcctaaataaactacctgcaagtccttgtctcaaggtctgctttgagggaactcacatagagacaccctctaacaaaggctgcctcaaaggctagattttgaattgatatgggaaaaactaaggggtgaaactatccaaatctgcttgattttgacatacttcatttcagaaaatatttccaagcgtattcagcttctcctagtctggagctttgtcttctctcctaagtctctttttctctttagagaaaaatgtagagatccgggagaggtgaggggcatgatgcctttctttgttagtttttacaaaaattttataatttaacacatagtgtcttttagctagtgaggtcagaattattacttggtragatacagagtagcagttatattctaagaagaatgcaaatttatcaagtggacacttaatgggagatcaaagaaatgaattttctcagctcttatttcagaaatttt

SEQ ID NO: 374202 - DNA, 517 bp, Homo sapiens
aagtgcccagcaataaatgttttaacaaaccctctacatctaatgcaaagctaaattttgagaaaaactgacctatcacaatcctgtcaattaactcagagttttgaagacgaaagtattaggcaacttctgttttcagcgttcaatatatcactctcagccctactcaaggcaagggaaagaagaggcctggctgtattcagaaaatagacactaaagataaaacataagcatgtttcattctttctgacttttctataacaggaaaacaaaaacacacattaatatctcaataaatattttaataaattgtcctaccacataaggtttttacctttttaccaataataggtttctgaaatagcaagttccaagcatgagatgtggtagcagtgtgctggcttgggattaggggttaggaatgagacygggaaagcaggataaaaggtgaaagaaaggtgctacatcaagtatagggaagaaagatgaggtttccctggaccagcgtgaactctta

SEQ ID NO: 374203 - DNA, 257 bp, Homo sapiens
atattcttatttcacaactctgctttggttattctcacatgctaattctacagataaactttagaatcatttttgtcacgtttctcaaaaaaggcctattaggaatttgtttttgttttatttatttatttatttttcaagacaggggcctcactatgttacccaagctkgtcttgaactcctgggcctgccttgcgcctcccaaagtgctgggattacaagtgtgagccaccgtgcccagccaggaatttattttt

SEQ ID NO: 374204 - DNA, 494 bp, Homo sapiens
aacatatcagctcagttgcaatcatcctttaaaaagattaaagccatcaacctagttctacaaatggcaacctaaagatccttctgctttttgtttctggaaggagagggatgggggaggggagaatttggagaggaggtgttggcttgaaaaataggcttggacgagttgcaagctctgaaaacagatttctttatctgcaagccaggttggagcgcatccccagcttgctattctgagccacctcgtccagktgagaagactgccatctctaggatggcgtatgagcgggatgctttttcacttccatggctctggacttttttctgtcttaggtctctcctaagcaggaaaatgccagttttgccaatctgtgttcttggtgatatggactaccatctatctgtgtggggctgggatcacaaacgtcctttcattggcaatatgatctggattgggaccaaggtcataaggtaaatagccagtgctttatc

SEQ ID NO: 374205 - DNA, 580 bp, Homo sapiens
gtaggcacatatcactacatatgaaccatgaaatgtatttgaaaataaatgttttaattaaaattgacatttctgagcctactgctgagggcagctgctttttctcttaaattgctttgtccgtctccataggagcccaatagaagagcagtttccatcccattttaatactaatttaatatcaagagaacagcaatactgtgtatacacaaattttcttctttgggttgttaaaccagttctgaaagactacaaatgggttttgtactctcctgaagcatttgtctattttgcctatttttccaaatccctgcatttaacaaaaawggctgtacaagactggtgaagtggagaccctctcggggcttatggatggagggagtcagggaacagacattgatgcctgctcttaccactctcccctctgtgttgctggggctgggatggtgggggggaggtacacactgagaagtagctgtgtgtcatcaactgtcttagaacaacgtatcaagacatttttgggaaccaccacagctaacatggattgagtacttactatatagtaggcatcactcataaa

SEQ ID NO: 374206 - DNA, 590 bp, Homo sapiens
tggcagcaccaatctcatagagttctttgtggatgaaatgacttacacatataaagtacttaaaacagtatccgtgtatagagagaacactcagaaagtgtcggctataattttatcatcaatatcactctcccctcagggattagggctatgtcaggatacagccatgcttcaacaaccctggatacaatcccgtcgagttgtatcactacctatttttattttttcagatctcaggaaacagcagcatcagccccaagcacaggtgaagtggggatgttaggtatgccaatatttccttgccatgcatgagaaagggatacattaagatattttaagcttcaggtagtagaggtctyggattaggctggcctaaacaatggggacaattcctgtggcacaggatgagaagttcagaggtaggtggcgctgcagctggtcaaattctccactcaataacatcgtcaaggacccagattcatttcacctttctgctctgtcatgttccgtgtgttggcttggactgcaggacaggactttcgtggttacaagatgactgtagtaaccacagtctgggaattatattctga

SEQ ID NO: 374207 - DNA, 524 bp, Homo sapiens
ctcaaattaggacaatttgaggagtttcataaaggaactctttacaaaggtttgggcagagcataaggaaaccacaaagagagaaaggtgttcagggctaggaaggaaagagcagagagcagaagccaaagaaaggaaggctgtgtggagaggggcttctagaggaggtaagggaggaaaagccagcctgtaacaaacctgtaagaagggaacccggaatatcaacgcaccactctcatcctgctctccagcctcctaccagtatgccccatcggccaaacccaaccagaggtcaaatggcaagagaacctattgatacgattcatataggtcagcctccagaggagagagaaggcaggggaacatagagagtggatagagaaggtgcaaaaggaagatgccrgccacagtattctatctaataaggctgtggtccccaacctttttggcaccagagagaggtttcatggaagaaaatttttccacggacctgagggtggggaaagtggttttgggatgaaact

SEQ ID NO: 374208 - DNA, 573 bp, Homo sapiens
cctgccttggcctcccaaagtgctgagattacaggagtgagccaccatgccccactgagaaaagagattatttaaagacagaacttacaattaaaaggaaagcagagtggaaagatttggaaaatctgcagcctagccaagtagtagagaatgagagtattttcagcagagaaatactasagagtgaccaagtgactgcttgagaagatgagtatgggtagaatggaaccagaggctattcattaggataatgggagaagaacctgaaagtatctcagagatctttcaggctgcccctcccatcacagtcctagagctgtgggaggacaaaatggtttcaggggacaagtcattgcccagcgtcacctccagtctctgctacctgcattcccatgcagtgtttctcagccacctcagctgtggctcaaatggttccaagtgtgactgcaccagccactcctgaaggtatagtcgtaaatcttgatggtatccacctggtgctaattctgtaggtgcacagaatgcaagagctgtggaggcatggcttcctccacttggattttaaaggatgtc

SEQ ID NO: 374209 - DNA, 600 bp, Homo sapiens
gcactatttcttgcctttcttcctacttctctgagcagacttcatctgacttttctttgtatactctttgtcctcttcctgatcttcacttgtttttcctttcagctttcattttaagaaaccggggtacatgtgcaggtttgttacatgagtaaattgcatgttgcagtggtttggtatacaaattatttcatcacgcagatagtgagcatagtacctgataggtagttttttgattccccccatcttctcaccctccactccactagtaggccccagtgtctattgttcccttatttgtgttcatgtgtacacaatgtttrgctctcacttatggtgagaaaatatggtatttggttttctggtcctgtgttaattctcataggacaatggcctccagtttcatccagattgctgcaaaggacatgattttttttatgactgtgtagtattccatggtgtctatgtaccatgtttaaaaaaatccagtttaaaaaatcccatttaaaaaaaatccactgttgatgggcatctaggttcattccatgtctgcaattgtgaatactactacaatgaacatatgtgtgtatgtgttcttat

SEQ ID NO: 374210 - DNA, 579 bp, Homo sapiens
tttttctttttcctttctactcacatctaatcaatcaatagctactgttgattctatttcctaaatatgccttacatctttctcctctcttcyagccctactatctctgtacattagaatgcttcagattttcagcatcccttggctggaatattgcagtagcttaatgactattttttctgcttctaagatgttgtctcccagtttattttgacattttctaatcaaagccgatcatgttacatgaaatttatcaatgactctctatggcctatggaataaaaactacgttcttaagcatggcataaaatgaatttctgtgatttgtctacagattcctgatgatacctcatcttctatcactactgtcatattttattttccagcaataataaactactagtggttgtttatgtaggcaaattgtaccatacctccatgtcttggcatgtgattttctctctgcttggagcagcagtcctcttcacttctctttgttcttattcattcttcaagttccatctcaaaagctaccttctctatgaagtcttcccacacttcatcatagaaccttaattc

SEQ ID NO: 374211 - DNA, 473 bp, Homo sapiens
tttttgacaagatcatgggacaagcagcagcaggatcttatattggaaaggtactttcaaatgtagcagaaaataatatctccagatgttgatctagggctttcagtccagggwtcttccaagaatctctcttgtcataggatgttagacccttttcatgattaaaattctgactattttaacttgcttctgatttattcatcatctatactatgtggaagaaattaatgtataaaaatttactaactaaagaaatagcctaatgtgaatgtgagaaaggtttattccagccagagtaagtttttcatggtcaaaagtcaaagaagagtgtaaatttctttttattttacaaatactcctggagctttagtttgtgccaggagccttgctggatcccgtaggtacaacagaggcaggtaagacatagtccaaacttcaagaagtttgtagtccaaatgcttagacaagaactt

SEQ ID NO: 374212 - DNA, 541 bp, Homo sapiens
catgaagtacatgcgtgtattgtttgaagacatttattaagcagctttctatcagcctggatgattcaacttaactcatctgctctttcctcccaacatatatttaacccattctttttaaccgaagatcaaatcttcagtaccatcaccaagcctactgcgttctttctgatagagggaagcagatagatttatgccaggccagcaaaagcctgtttgtgaaacttgtttctgttcttagttccacttgacttcctttgtactattgctcaagacacttaacttcttatgccatcataatgtccccttctgtaaaatagagacaataatatatgctgtgccacccccaacactccccacggtgagggttaatgagataatggctgtaaaacaccttaagctcttccaaggaaggtgccatagtgtggraaaaagtaaagggttattatgtaactaatcacattcaaaatacaggttgcaaatggacctgtggagttttgaaacaaagcttcagagagacaggctaatgcttcacttgccc

SEQ ID NO: 374213 - DNA, 606 bp, Homo sapiens
taactctcttaatattttccagtttctttaaaaagaaacttaaatggggtctttttttttgtgaaatgtgtttacaatgtaatgaaaaccctctttgtttacctaatgaagactacattctcccagtagtaaaaacaaaactccttttctttggggaccaactcactttcctccttggtaaatgctaacttttgacactaaactaacatgggagtggttgggatatgaagccacagatacaggcctgagccgaccattttataattcaggtatatcttttgccaaaaatgccatatcattgtttaccttgacaggtcttgtaataattgaaatagacaacatgaggaaaaaatgtatattgaattaaccttctatatttgaacaagatttaagttagtggcagcaggttaagagttcaaagttttgtgaattcaagtccaaaacattgcttaaataaatatcttacaacacttattaaccaaaaaaatatggctttgaaaaatggtgatgagaatttataaaatggaaaaagaaaacgtatcactcctcttcaaagctctgctctcygctttgtcacattgtagaccatttcctcatctattcaag

SEQ ID NO: 374214 - DNA, 549 bp, Homo sapiens
acattaaaagaagctaatatctttaaaatgtgaactatggcattattatatgtttaaaaaggcaagtgtctttgttcatccctaacaggagtcatgaggtttaytaggctagagtcatatttaccatgcccatgttttcggagaatcttatttgtatcttcaaagcatatctaatcatagaattcaaaataatttagctaagggtgttaacgactgtgtggcactgaacttgatgacaagttatattttttattttttattattattatttttttgagactgagtttcgctcttgttgcccaggttggagtgcaatggtgtgatctcagctcactgcaacctccacctcccaggttcaagcgattctcctgtctcagcctccccagtagctgggattacagacatgtgccaccacacccgggtaattttgtatttttagtagaaatggggttttaccatgttggtcggctggtctcgatctcctgacctcaggtgatctgtccatcttggcctctcaaagtgctgggattactggcatgagccaccgca

SEQ ID NO: 374215 - DNA, 549 bp, Homo sapiens
acattaaaagaagctaatatctttaaaatgtgaactatggcattattatatgtttaaaaaggcaagtgtctttgttcatccctaacaggagtcatgaggtttactaggctagagtcatatttaccatgcccatgttttcggagaatcttatttgtatcttcaaagcatatctaatcatagaattcaaaataatttagctaagggtgttaacgactgtgtggcactgaacttgatgacamgttatattttttattttttattattattatttttttgagactgagtttcgctcttgttgcccaggttggagtgcaatggtgtgatctcagctcactgcaacctccacctcccaggttcaagcgattctcctgtctcagcctccccagtagctgggattacagacatgtgccaccacacccgggtaattttgtatttttagtagaaatggggttttaccatgttggtcggctggtctcgatctcctgacctcaggtgatctgtccatcttggcctctcaaagtgctgggattactggcatgagccaccgca

SEQ ID NO: 374216 - DNA, 549 bp, Homo sapiens
acattaaaagaagctaatatctttaaaatgtgaactatggcattattatatgtttaaaaaggcaagtgtctttgttcatccctaacaggagtcatgaggtttactaggctagagtcatatttaccatgcccatgttttcggagaatcttatttgtatcttcaaagcatatctaatcatagaattcaaaataatttagctaagggtgttaacgactgtgtggcactgaacttgatgacaagttatattttttattttttattattattatttttttgagactgagtttcgctcttgttgcccaggttggagtgcaatggtgtgatctcagctcactgcaacctccacctcccaggttcaagcgattctcctgtctcagcctccccagtagctgggattacagacatgtgccaccacacccggstaattttgtatttttagtagaaatggggttttaccatgttggtcggctggtctcgatctcctgacctcaggtgatctgtccatcttggcctctcaaagtgctgggattactggcatgagccaccgca

SEQ ID NO: 374217 - DNA, 640 bp, Homo sapiens
gtgatctgtccatcttggcctctcaaagtgctgggattactggcatgagccaccgcacctagcctgacgcattatattaaatagctactgccatcatggaggtttaactttacaagggacattatgaatatatcaaagaaaggtcaagtaggttaatctgaatagcataatactatgtatgcaatgtaaaaagtgtgtatatgcaatattctgtataaaaaatcgcactgctagtgatacattgatgagctaaaaaaacatggattctgttgattagcaaactatattttggttaatcacaaatgacttttattttaaagctcaaacctgatattcagaaagatattttgactgtctctctgtttttggtcttcataaaactctaaaataggaagtttgtcatcacctcttctctgagcctttccctccacttcattacctttctgaattctctgtcccatgctgagttcttattcctggccacactccttttttccctgtctactcctgacattgtgctattccaggtccagaataacgtaaaaattgctttttaggaagccctctatwctgcaatgccattgctttcaagtcctggaaaaaaaaaaaaaactcttcagacctcacttttagtttaccc

SEQ ID NO: 374218 - DNA, 577 bp, Homo sapiens
tccatccagttaaatatgaattaattagacaaatctgcttttacctacatgctgtgtgtaaaacagcttaaacgtacaacgaagagaagagaagagaacagaagtgaagaagaaaagaggatttaaaagggaagcaatccaagacttccattttcttacttcagataaacatatttaacacccacaaattatacaggaagtttcagacagctttaagtgagccccacagaattatttactaacagacccaaaatgtacattttactgcctttaacttcccgattatatttttaattactgtcaaagtaccttctgcagactacaatatcatcgtgtgaaaaccacacatttccttttagttcccyctgctcagaaaagttctacattcatttaatcctgaatctgatttcatcggtctaaaattttgagtgtgttcaactacagagtgttttccttttagaaaacctgagacaataaccagaattcatagcaagttttcccattcaaccagacatttcttgagggaattgcaaaagctctgcgaagaaacagttaatatgtatatatctctctgaaa

SEQ ID NO: 374219 - DNA, 366 bp, Homo sapiens
catatagaaatcctctaatgtatcagtcactcgcaagtctaacatgtgttaaaaatgaatcttctctccattccaaccccctctatttaatacaaggcatctctatacctttggagacaatatgaacaagaagaaaattctacccagttcatggcaaaaacagaagttagcaacatggtccatgcagctgcaacattgcatttaaaattcagtttcctcataggaagagggctaatcctgcccccgtaattccctacagccaaaatgtgccccctccccgcgtgacagtgcaatgcaaagacactagcaygcttatcttgcctaaccagatggccgacttggatcaatgcacacacaccacgatca

SEQ ID NO: 374220 - DNA, 603 bp, Homo sapiens
ttttgcatatataaaatgggagaaagaacattttcttccattctgtgattcactttttgtttatttaatggtgtattttgaagaacaaacattttaaattttgataaagtccaatttatcaattctatgttttataccgtgtgcctttttatagcttatgtaagaaatatttgcctatcccaagtttgcaaagatttttttcctctacattttgtttwaaaaattttataatttcaccttttacatttaggtaggtgatctattttaggttaactttagtgtatgaggtaagataaaagtctgtgtttaatttttttcccattcagataatcaattattccagcaccatttgttgaagagatttttccattccctattggatttcctggcacctttattgaaacatcaattaatcatatatatgggtctatttctgactccctattctgttttattgatctatatatttatcctctcatcaattaaattttgtgattttatagtaagtggaaatcaagtaatgttattttcctatttttaattttttttattttcagtttttgtgagtacatagtaggtgtatatatttatggggtatgtttt

SEQ ID NO: 374221 - DNA, 585 bp, Homo sapiens
gggtgctaacagtaaaatgtcaccagtcactgagtgtgtgacacctcaaatgacacacaggtgtgacccagcaagtatggcccagaggccagattaactggttctttaaaatttatattcacatttartttggcctggaggtatggctataaaatagtgatagctataagacactgtgacaagatgctttaatataacgatgtagttgtggttctcagcgttactgtgattattgagaacagctgaattctagcttcactctcttcctttggggttgtccattggcatggttagaaagctggttaatagcgagtcaaacttgtgcaactaaaatggggcaggagaaaaagcaccatgtcccaacaaagcatctaaaaaatgcgattccagaaccacagggaaacaggcaactctacccagatttctataatgagtcttcatatttttatatagtaactatggtctcatggaaagaaggtagaaatagtactgtggacaaacatgcggccctggcaagagacttcttagtttcaaatcctggctttgccactcattgattgtgggctttagccaagatacttaaac

SEQ ID NO: 374222 - DNA, 585 bp, Homo sapiens
gggtgctaacagtaaaatgtcaccagtcactgagtgtgtgacacctcaaatgacacacaggtgtgacccagcaagtatggcccagaggccagattaactggttctttaaaatttatattcacatttaatttgkcctggaggtatggctataaaatagtgatagctataagacactgtgacaagatgctttaatataacgatgtagttgtggttctcagcgttactgtgattattgagaacagctgaattctagcttcactctcttcctttggggttgtccattggcatggttagaaagctggttaatagcgagtcaaacttgtgcaactaaaatggggcaggagaaaaagcaccatgtcccaacaaagcatctaaaaaatgcgattccagaaccacagggaaacaggcaactctacccagatttctataatgagtcttcatatttttatatagtaactatggtctcatggaaagaaggtagaaatagtactgtggacaaacatgcggccctggcaagagacttcttagtttcaaatcctggctttgccactcattgattgtgggctttagccaagatacttaaac

SEQ ID NO: 374223 - DNA, 468 bp, Homo sapiens
gtaatcccagctactcgggaggctgaggcaggagaatggcttgaacccaggaggcggagtttgcagtgagccaagattgtgccactgcactccagcctgggcaacagagcgggactctgttgcaaaaataaagtaaaataaaataaaaataaaataaaggcagatttattttaactctgctgtgtgctgttatcttccttcttcagagcaagaaaaacttcctgatctagaaaaaatcctagaaagtactggcaatccagacgttataaagtggccttagagttagtccagagccacagaaatactttcagtgctccagagatggcaaagtgaaggtaaaagcatcttcctcaccatttcttactttcttcaggctctgaacataaggccaaactccagcaccagcactaaagcaaagtaaaacagcarcagccctgctagttagaaaacaaagggtaaacaagtaga

SEQ ID NO: 374224 - DNA, 596 bp, Homo sapiens
caaattagcagcaccttttcaaaagaaaaatgataataactcggtggggaaaaaatgtaaaaggcctttcattgtattgtttcagatacacccaaatgaagaacatataattaagggtagagaaacccagctctggctgaagtttgataaatatctccaactctcaaaccagtctgcaagtgttcacttctcattaaatgtgtcattgcttttgtggccagcacctctcctttgcttttcgtgagatagacaggcagactctcagacacaatgatgcatacagaggaaatttacsatggccattcaaatatattaactcttcaaaagccccttatgtgtgttacatctctcatcatgggcaggtacaggaaagcgaatacacactaagggcttgagaatgcatgggaagaaggaagactaaacagttaaagacagtatgcattggagtggagagcatggattttatttatttatttattttttacttcaaatatataattttttattttttcctttttcttgcacaaaggtagcatattacatgctctttgtacttcaccttttttacttaataatatctctggaaatcactccat

SEQ ID NO: 374225 - DNA, 596 bp, Homo sapiens
caaattagcagcaccttttcaaaagaaaaatgataataactcggtggggaaaaaatgtaaaaggcctttcattgtattgtttcagatacacccaaatgaagaacatataattaagggtagagaaacccagctctggctgaagtttgataaatatctccaactctcaaaccagtctgcaagtgttcacttctcattaaatgtgtcattgcttttgtggccagcacctctcctttgcttttcgtgagatagacaggcagactctcagacacaatgatgcatacagaggaaatttacgatggccattcaaatatattaactcttcaaaagccccttatgtgtgytacatctctcatcatgggcaggtacaggaaagcgaatacacactaagggcttgagaatgcatgggaagaaggaagactaaacagttaaagacagtatgcattggagtggagagcatggattttatttatttatttattttttacttcaaatatataattttttattttttcctttttcttgcacaaaggtagcatattacatgctctttgtacttcaccttttttacttaataatatctctggaaatcactccat

SEQ ID NO: 374226 - DNA, 594 bp, Homo sapiens
gtcagttgcaacaagtgatttcttttttttttttcttttactttttgtgtttttagagacagggttccagtctgtcacccatgctggagtgcagtggagtgatcaaagctcactgtaacatcaagttcctgggctcaagtgatcctcccaactcagccttacaatggtaataatttgaagggggcgtctgccaccatgctcggctaatttatgcatttttagtagagacggagtttcaccatgttggtcaggctggtcttgaactcctgacctcaggtgatccaccygccttggcctcccactgggattacaggcatgagccactgtgctgggattacaggcgtgagccactgtgcccggccaagctgtcctaaaatgttaagacctacataacatcatcaagcaaataaatttaaaacagcctggttactgatattctctcttctgaattcagaaattctattttaactatttttaaatataaatgtaaaactagagtatattcacatattcctttaaatgttaaattccctcaaaatagaagaactagtcaaaacagcacaagaaacagataaataaaaactttaatacata

SEQ ID NO: 374227 - DNA, 610 bp, Homo sapiens
attctgttgccttcactgggtaatgaaaaattgattacttttctctctgtcaacaaactatagcccgttccccttggctgggaatgggtgagaagtgtgtgcgtcttgctccgtggctgtttgcttgctttcaacaagttgggtttgcttgacttagaggtgggggtggggcccagagcagagggacaggataagtggctgtgggggaggctcttggggagaggactctcctcacttcccttgagcgctccctcagttccagcaaatgccttcacccagctgacccgtggcatctctcccctctgcagtgttctctctgctcagcctgcccagaagcctcctygagtctctccagccctggggacagcctgagatacacagctaataccatttcctctgtgttctgctctgtgtggtgtctcctctggactgtgcactgggctggcatcccctacctgaggggatgggcaatagatatacccagaggagctcagcatgctagatttagaagggacctcagagagcatccagccctcttggttttacatttgtggaagagaaagctcatagggcaggtgacgtggctgtggccacatagctaagtggtaac

SEQ ID NO: 374228 - DNA, 570 bp, Homo sapiens
catctcatcgtgctatctttactccctcaaagtaatatctagattagtattcatctattttattaagaaaagtatattagaaagagataatataaagaaaactgaaaacagtagggttttacttagtcaaaattacacctcagtctacagtgtccrgagaaataatccctacagaagttaatttcaggatgatttgtacgtgaatcttctcttcacagtccagagacatttttgtttccttttttggattttatctgattggaaagtcacctttattatgcattttatgtgcgactcctttggtttagaaaagtcctatacatatttaaaataataaatacgtatttttaatccctttaaaaatggaatagccaaacctagatttttttgtaggcttttgctaacattatctcataacaaatatcagttgagagctcaaattcaaaattgatgttatttcctatgaaaaatagaattttctgttacactgatttcttctcatcgtcctatatcttacctaaatcaaatctaagcgtttaacagcatggatttgttattctcattgtgtga

SEQ ID NO: 374229 - DNA, 570 bp, Homo sapiens
catctcatcgtgctatctttactccctcaaagtaatatctagattagtattcatctattttattaagaaaagtatattagaaagagataatataaagaaaactgaaaacagtagggttttacttagtcaaaattacacctcagtctacagtgtccggagaaataatccctacagaagttaatttcaggatgatttgtacgtgaatcttctcttcayagtccagagacatttttgtttccttttttggattttatctgattggaaagtcacctttattatgcattttatgtgcgactcctttggtttagaaaagtcctatacatatttaaaataataaatacgtatttttaatccctttaaaaatggaatagccaaacctagatttttttgtaggcttttgctaacattatctcataacaaatatcagttgagagctcaaattcaaaattgatgttatttcctatgaaaaatagaattttctgttacactgatttcttctcatcgtcctatatcttacctaaatcaaatctaagcgtttaacagcatggatttgttattctcattgtgtga

SEQ ID NO: 374230 - DNA, 570 bp, Homo sapiens
catctcatcgtgctatctttactccctcaaagtaatatctagattagtattcatctattttattaagaaaagtatattagaaagagataatataaagaaaactgaaaacagtagggttttacttagtcaaaattacacctcagtctacagtgtccggagaaataatccctacagaagttaatttcaggatgatttgtacgtgaatcttctcttcacagtccagagacatttttgtttccttttttggattttatctgatyggaaagtcacctttattatgcattttatgtgcgactcctttggtttagaaaagtcctatacatatttaaaataataaatacgtatttttaatccctttaaaaatggaatagccaaacctagatttttttgtaggcttttgctaacattatctcataacaaatatcagttgagagctcaaattcaaaattgatgttatttcctatgaaaaatagaattttctgttacactgatttcttctcatcgtcctatatcttacctaaatcaaatctaagcgtttaacagcatggatttgttattctcattgtgtga

SEQ ID NO: 374231 - DNA, 570 bp, Homo sapiens
catctcatcgtgctatctttactccctcaaagtaatatctagattagtattcatctattttattaagaaaagtatattagaaagagataatataaagaaaactgaaaacagtagggttttacttagtcaaaattacacctcagtctacagtgtccggagaaataatccctacagaagttaatttcaggatgatttgtacgtgaatcttctcttcacagtccagagacatttttgtttccttttttggattttatctgattggaaagtcacctttattatgcattttatgtgcgactcctttggtttagaaaagtcctatacatatttaaaataataaatacgtatttttaatccctttaaaaatggaatagccaaacctagatttttttgtaggcttttgctaacattatctcataacaaatatcagttgagagctcaaattcaaaattgatgttatttcctatgaaaaatagaattttctgttacactgatttcttctcatcgtcctwtatcttacctaaatcaaatctaagcgtttaacagcatggatttgttattctcattgtgtga

SEQ ID NO: 374232 - DNA, 533 bp, Homo sapiens
ccttggctcctggccccttcctccatcttcacatcagcaatgttgcatctctctgaccttattccatagtcactttttcctctgagtctcttcttctgcctccatcttccatttttaaggaccttttgattatactgggccgacctcggtaaacagagaatctccctattttaaggtcagtggattagcaactttaatttcacctgggacgttgctgcccctttgctgtgtaacctaataacctaatatattcactggttctggcaattaggatgtgaacatttttggggagccattattctgyctactgtagagttagcaaccatgttatactattatcacaagcttgcctatggcagcttttgaaatcaatgcctaaaactgaaaatagtttttctacttcttaaatcaaagactgcatttttacaacaaatgtaaaaccagcggaattgctctgttatttcaactttcttactttcttctgctgtagatcaatacgtctataatgctagtcattcaatgggacttttctt

SEQ ID NO: 374233 - DNA, 533 bp, Homo sapiens
ccttggctcctggccccttcctccatcttcacatcagcaatgttgcatctctctgaccttattccatagtcactttttcctctgagtctcttcttctgcctccatcttccatttttaaggaccttttgattatactgggccgacctcggtaaacagagaatctccctattttaaggtcagtggattagcaactttaatttcacctgggacgttgctgcccctttgctgtgtaacctaataacctaatatattcactggttctggcaattaggatgtgaacatttttggggagccattattctgtctactgtagasttagcaaccatgttatactattatcacaagcttgcctatggcagcttttgaaatcaatgcctaaaactgaaaatagtttttctacttcttaaatcaaagactgcatttttacaacaaatgtaaaaccagcggaattgctctgttatttcaactttcttactttcttctgctgtagatcaatacgtctataatgctagtcattcaatgggacttttctt

SEQ ID NO: 374234 - DNA, 533 bp, Homo sapiens
ccttggctcctggccccttcctccatcttcacatcagcaatgttgcatctctctgaccttattccatagtcactttttcctctgagtctcttcttctgcctccatcttccatttttaaggaccttttgattatactgggccgacctcggtaaacagagaatctccctattttaaggtcagtggattagcaactttaatttcacctgggacgttgctgcccctttgctgtgtaacctaataacctaatatattcactggttctggcaattaggatgtgaacatttttggggagccattattctgtctactgtagagttagcaaccatgttatactattatcacaagcttgcctatggcagcttttgaaatcaatgccyaaaactgaaaatagtttttctacttcttaaatcaaagactgcatttttacaacaaatgtaaaaccagcggaattgctctgttatttcaactttcttactttcttctgctgtagatcaatacgtctataatgctagtcattcaatgggacttttctt

SEQ ID NO: 374235 - DNA, 520 bp, Homo sapiens
gggattaagatgacataattacaggtctaacttgaatccattctgatttctacaattcaacaagccactcccagactttgacatcttatcgtcagtagcgaattatttgctccacacttcacaactgatcactacacaccacaccttgcctgtgaattttccttccatgtgtctgaaggttcagtatgactgaaggatgggaggttgggtcccagctctggcctatacatattgaagcgttgtatattttaaatcacacatggatgagccgtgtgtgygcgcgcgcgtgtctgtatgtacgtgtgtgtgtgtgcatgtggatgtgtgtgtgtgcgtgtgtgtgtgcgtgtggacgtgtgtgtgtgcatatgcgtgtgtgtgtgcatgtgtctgtgtgtgcgcatcgcatgtgtgtgtgtttgcattgccagactgcctggaagagttttggtggatcagtcccttgacctctgacaacttctctgggtgcagatggagggcaggtgccgggacattggag

SEQ ID NO: 374236 - DNA, 620 bp, Homo sapiens
ctggattcatctatatatcctgtctgcctgcccaaccagaacactagcttcattagggagggacattgcaggtttttttcacttgtgtatccccagttcctaggacagtggccattctatacatcctaagcactaactattcattgaatgatttactgatayacatgtgtacagggatctgtttctcatggtgaattaacatatttgcagtgtggtagataaaacataaccaaattaagtggcaaacaggatgactttatgataataaataaattctgtttatttttttctctcacatagttcaagaaaaccagacattagtgtaagttggagaacatctgagtttggaaacaggtctttgccttaatggattgttgactagaaaatcagaggccgaaattcaaataatatgttttgaagtgttgttgtaccgtgttaataggtgtttcatataaaaagggtagcatggactgggtgcagtgtggctcatgcctgtaatcccagcactttgggagcctgaggcagacaaatcacttgaattcaggaattctaagccagcctgggcagcatggcaaaaccctatctctacaaaaagttagccaggcttggtggcatgcacc

SEQ ID NO: 374237 - DNA, 620 bp, Homo sapiens
ctggattcatctatatatcctgtctgcctgcccaaccagaacactagcttcattagggagggacattgcaggtttttttcacttgtgtatccccagttcctaggacagtggccattctatacatcctaagcactaactattcattgaatgatttactgatacacatgtgtacagggatctgtttctcatggtgaattaacatatttgcagtgtggtagataaaacataaccaaattaagtggcaaacaggatgactttatgataataaataaattctgtttatttttttctctcacatagttcaagaaaaccagacattagtgtaagttggagaacatctgagtttggaaacaggtctttgccttaatggattgttgactagaaaatcagaggccgaaattcaaataatatgttttgaagtgttgttgtaccgtgttaataggtgtttcatataaaaagggtagcatsgactgggtgcagtgtggctcatgcctgtaatcccagcactttgggagcctgaggcagacaaatcacttgaattcaggaattctaagccagcctgggcagcatggcaaaaccctatctctacaaaaagttagccaggcttggtggcatgcacc

SEQ ID NO: 374238 - DNA, 627 bp, Homo sapiens
agcccttctttctcagtctcctttgtgagttctttttttctcccttaaatgttggggctcagggtttagagctggtcactaggtgtgccttttccctaggcactctcaagcactcatatggcttcacatcccattcatgtttgctcttctgagctccagagccatatatccarctgtcttctggattctccacttcgatatcccacaagcatctcacatctaacacattctaatctcttctcccaaacttgctccctctcagtggatggcatccaccaagccagagtctaaagcaacattgttagcttttctctcttcttctgtctcaatattcaatcactaaatcttaacagttctacctactaagtagccaaacctccaaactgctccacttttctctgtctcctcagccaccatcttctcttgtctgataaagacagcagtctcctaacaggcctctctgctgccactttccaattcagtttccattttgctcatctctaaatcatggatctgattatgtcacatacctatatgaaactctgcagtggttccccattgttggagacccaccacagggccctgagacgcttcctctggggctcatcacccatcactgccccctgt

SEQ ID NO: 374239 - DNA, 538 bp, Homo sapiens
caatcttgttacttactcttgagttgctctgtctccaacaagtgccttggatttatttgcttggcatggttcttttgtgtgtctcagggcaaccaagctctggtcagctttctggaagagttgagttgcttctcttgctgtgatctgaggcagctcctgaccctcttccacccactggctggacacagacttaagatcccactgtccrtccaggggcagcctctggtggagtggagagtgagcagcccagctccctgctgcggtgcggccttgggaaagttattccgcccctcccaccttcatgtgtaacatgagaagactgggtgacctctaaggcccttttcttttcagctctgtggcattttttttttttttttgagacagattcttgctgtgttgctctggctggagtgcagtggcatgatcatggctcacagcagccttgacctcctgggctgaagtgatctcactttagcccgcccttgagtataacaccatacccagctaattttaatttcttctttgtagaaacaaggtc

SEQ ID NO: 374240 - DNA, 538 bp, Homo sapiens
caatcttgttacttactcttgagttgctctgtctccaacaagtgccttggatttatttgcttggcatggttcttttgtgtgtctcagggcaaccaagctctggtcagctttctggaagagttgagttgcttctcttgctgtgatctgaggcagctcctgaccctcttccacccactggctggacacagacttaagatcccactgtccgtccaggggcagcctctggtggagtggagagtgagcagcccagctccctgctgcggtgcggccttgggaaagttattccrcccctcccaccttcatgtgtaacatgagaagactgggtgacctctaaggcccttttcttttcagctctgtggcattttttttttttttttgagacagattcttgctgtgttgctctggctggagtgcagtggcatgatcatggctcacagcagccttgacctcctgggctgaagtgatctcactttagcccgcccttgagtataacaccatacccagctaattttaatttcttctttgtagaaacaaggtc

SEQ ID NO: 374241 - DNA, 563 bp, Homo sapiens
atcaagtcttcttggaaacaggaagcaaaaattttgtttgtgggtcactagggataagggtgagtggtgccccccacctccctccatttctaccctttgattcctgcacctgtgaatcctggctgtgggagaaatagtaccacatattgaacgctgattcagagcatgtacagccttctggacaaccttgccccagccctgcaaggtattgccacctagctggctctgtaattatgacttcaaaaggccattctactgttctgtcaagccagctgcttcggaataacgggaacatggtaagaccagtgaattccatgagcatgggcccattgtcacacttctttggctgtaaaatgagtttctttgtcaaaagcaatattgtatgaataccatggcaatgaataaagcattctatgartccatggatggtagttttgacagaagtatcacattcaggggagacaaatccatattcagattaaatatgtattccagtaaggaaaaaacactgcctcttccatgatggaaggggtccagtgtaagcaacttgccaccaggtagct

SEQ ID NO: 374242 - DNA, 521 bp, Homo sapiens
aaggcaggggacaggttggtggtggaccacatgggcttcagtcctcactctggctctgccatgcacagctgtgtgacctgtcacttacctccacagtgcctcactgtcctcacctacgcatggatatgacactaggacctacctcagggactgctgccacggttaacaagatcatcgtggtaatggctgccctcagatgccgactaaggccaggctctgagcctcatttaaaacacatttaatcatcagaacatacccacaaagaagatattacatccattttgtggatgaaagaattgaggcttggcagggttatgaaacttgcacaggarcctctaacagttaggggtggtggaatcaggtgccagcacctggaccattaaacatggtgtggtgtggcccctcaggggtgtgtgtcaggggcctggaccagggcttgccatgcagcgattactccagaaatgcccacacttatcaaaacaagtccggggcgggcaaccgagggccaaggaagtcgcccc

SEQ ID NO: 374243 - DNA, 559 bp, Homo sapiens
ggatcagtatggtcattgcaagcactggctttggagtttgtggatttgtaattgaaaatccgctcagcactttctagttacgtgaccccgggcaggtacttaacctcttggagcctcagtggcctcattgaacaaaaattaacacctgtttcatggggctctcaggaggatcaaggcaatgatgcgtgtaaatttcttagcatagtgtctggcatctatgagcactcaatgaagggcagccagtgttgctattaagggtcatgtgatttgcagggtagtcccaaagaggcgaggcccctgcccttcagtgtctagagcccctgtgctgctgtggacacctgctttggttcttcagtggggctcactttctgggacactggagtatctgagtctctttctgccaaggaaactgcccacrccctgacagacttgcttgtctccagatgcctaagaatcccatttgggccaacaggtttgctggaggtcagtggggaggaggagggcagtgtggtccctgctctgctatgaatttgctgaggcctgtgttgcctggaataag

SEQ ID NO: 374244 - DNA, 586 bp, Homo sapiens
agatctgacctgagatataagtttaaatgtagccttttaactctacaaagcagataacttgggaccttttcagaatctcttggctccctgtctcagggccaagaatcttactttgctcattttaatggttcctttctaattattcaggtccatgctcaaatgtcaccttttcagagaggcctttcatgacctctgggagcagagccaagctttgtggagcctgatgtttatgtgatttttgagagtggtttttaggaaaaagaatacacaattgtgaatacaaaatttggtcaggaagcatttattgtgggaacaagaagggacccaagtgagcaaggggccctaaagcttagctttattacctcggggtaaattcacttctgctgacctcactacatgagttcctgctcctccattcctctagtttagccctgttccttggtgtcttcatttttacagcatgcacagctactgatgtcatattctrtttgctgtctgactggagagcatgctctatgagggtgaggggtcattggttcactgctacacccctggcccccagaatagtacctggtacatggtgagt

SEQ ID NO: 374245 - DNA, 511 bp, Homo sapiens
agtgatggtgataaagattaacgagacatcgttgctacctcaacttatggtggttgtgcagtgcccccagccatctccctccatctcgaatctcaattttcacatctttaaartgaaagttttgacacaagcataggtctacacactggaacttgttgatggcaatttggcacttttaaaatccataggcaaaatgtttataatggaagtccttacttctgacacattaacttgagaagcagacttaaaaatatacatatggtttcaactttttactatggaattttaaatatatatattttatatataatatatatattctattataatatattctatatatcttatatatattttatatatatatattatatataatatatataatatatatataaaatagaataagatcatgaagccctatgtacccagaacctggcttcattagttatccacattatgccattcttaaagaatcttgattaattaaataaatagatattttgcaaaa

SEQ ID NO: 374246 - DNA, 511 bp, Homo sapiens
agtgatggtgataaagattaacgagacatcgttgctacctcaacttatggtggttgtgcagtgcccccagccatctccctccatctcgaatctcaattttcacatctttaaaatgaaagttttgacacaagcataggtctacacactggaacttgttgatggcaatttggcacttttaaaatccataggcaaaatgtttataatggaagtccttacttctgacacattaacttgagaagcagacttaaaaatatacatatggtttcaactttttactayggaattttaaatatatatattttatatataatatatatattctattataatatattctatatatcttatatatattttatatatatatattatatataatatatataatatatatataaaatagaataagatcatgaagccctatgtacccagaacctggcttcattagttatccacattatgccattcttaaagaatcttgattaattaaataaatagatattttgcaaaa

SEQ ID NO: 374247 - DNA, 511 bp, Homo sapiens
agtgatggtgataaagattaacgagacatcgttgctacctcaacttatggtggttgtgcagtgcccccagccatctccctccatctcgaatctcaattttcacatctttaaaatgaaagttttgacacaagcataggtctacacactggaacttgttgatggcaatttggcacttttaaaatccataggcaaaatgtttataatggaagtccttacttctgacacattaacttgagaagcagacttaaaaatatacatatggtttcaactttttactatggaattttaaatatatatattttatatataatatatatattctattataatatattctatatatcttayatatattttatatatatatattatatataatatatataatatatatataaaatagaataagatcatgaagccctatgtacccagaacctggcttcattagttatccacattatgccattcttaaagaatcttgattaattaaataaatagatattttgcaaaa

SEQ ID NO: 374248 - DNA, 531 bp, Homo sapiens
cacactgtcgtgcattgtaaaagtccctgctctatggagagagaaaaaaaaaactcaactctctttgcccttccctttttccctagcttgctcctccttccaagagcagctgaatcttcaaacgaggatacgttctgagtctttctgtattgggctagtaaatacttaccatgatcaagtgtggagaaaaccaatttaatctggggcaaagaagaactgaaaaagaggcaaaagcatctgtgaggctcaamgatagatgtttgaggtggctggaatatagttaaaataatttgactcactcaaacatatacctttaaatggagtctgtgacagaattaaggcaaacagtgtcgatgtctgtgtgccataatgatgcatgcatcaagatagtccagtttgtgggagatacagctctaagtctaaaccattaggaagaaccctagccagggatgtaaacaaagcagagaatggaactatattgcaggtagcaaattaccttatcatctttgcctgaatttccttgggtgtatg

SEQ ID NO: 374249 - DNA, 373 bp, Homo sapiens
taagtattttgaatacagtctttgcaaataaggttcccattctttatatctaaagctcgcatataaaaatgaggggtgtcggcagacaaaaacagtgggctaagtctgtactagttgtatgtaaagttagttcaggagaayagaaatcaccaaatccctgatgaagacagtggaagaggctgggacagcagcaacaccacactgtggggtattggcatcagctcgccagagagcagatagacagacatttgcaccccgccttctttctttctgactagatacgcttttgcaagttacttaacttctctgagtcttagcttagatggagaatgcagacaataattcttaccacaaataaatgttggtaattact

SEQ ID NO: 374250 - DNA, 367 bp, Homo sapiens
ataaaacatttgccccaaaatcacataagtagcaaatgacasaaataagaaaaaattttaactttctattttttaaaccaatgtttctttccccctattccattttgtagatggtagaattctcagtacaagagaatctagagttctcattttccccaggggagagtgaataaaatgaaggagttccaaaaccttgagctaatgagaaagaagggtcttctatagtctcagctctctagaagggcattaagtgtctagaagggcattcacaaaccagaattttgtctctagaagggcattcacaaacctgaattttatgactatctgtttctcagaatttattaatgatgttgcattatgaaagcat

SEQ ID NO: 374251 - DNA, 589 bp, Homo sapiens
tgaatgaacatctgaggcaccagcttggagagaatattttaggaattctttatataccccaagtcagcaaccatgtatgattctatgtcccccaaatgatagaatacataggtcctagaactaagcagtgaatgtaacagtagcctgtttaattatcattccaagtgacccacttagggaaattgtgcttctcattctgaaaactctgggctttgtgggcttagatgccttggtttccagagggagaaagcttccaccagggaatgcaagaaaactcccattaaagctcaagcttcagcaactagtgttcaatcactttaagtttcttgtgccatgatactggcatacaaagaaaggactcaccaacctggtaagtgattctgattatcaagaggaggaaggactgctcttacatgaaagtaaataatatgtttggcactcgggtgatccatttgrgcatctcttggtaattttttactcaattttgatagtaactgaacaagtttagcaaccaaaactcgagaaggacataccaatgcctcagagatgaagctctgaattgctttaacaggtaagccattgaggctaa

SEQ ID NO: 374252 - DNA, 562 bp, Homo sapiens
gctttaacaggtaagccattgaggctaacagagttgtcagctgaaggtgaaggaatcttgaatgggtaacaagagaggagtatggtgaatattagttatagcttcaaaactagcttcattggtgaaacctagtgttcattccattgaccatcttcttgtaaacttcctccaggaacaataacaccgatcccagacctgatgtatgtggagctgaatagcataaggtgtgaattctgtggtgttcacctagatcacactttaaaacygaaggactaaatttctcatctcaagagtgttggtaacatatctctaagctgagtccctctccggcacttgtccttggtgttaaaaagctgcattgctcaaggttacccccttcgctgggagagcctgggacaacttgatatggggatatgaaagctgtgcccctcacctcaatttgaaacaactatgaaggtccattccaggtctaggactctgcatgattttctgagtctttgctacaagttcatcacagttcaacttctttctcctgaattctgacttcttaacttccctgcag

SEQ ID NO: 374253 - DNA, 589 bp, Homo sapiens
aaacaaacaacttgaattactacaaaaattacacttaaaagttgactgtattttttttctaacaattctaacaatcacatcaggacccctgtctgagtctgttttttgttttgttttttgtttcttgttttgttttgtttgtttgtttttgctgctatatcagaaaaccacagactgggtaatttataaacaatagaagtttatttggctcatggttctggaagctgggaagtccaagattgaggcaccrcatctggtgagggccttattcctgcatcagaacatggcagaaggcaccaggtggtgagagggcatgcaagagagagagagagagagagagagagagagagagaggagggcagagggaccaaaataatccttttattagaaaacttcttgtggggtaactaacccactcccaaaataatggcattaatccattcatgaggtcagacctctcatgacctcttaaaggtcccacctctcaacaatatgacattgaatttcagacacatggactttggggatactttcaaacaagagcagatccttgcctctctgctgttctttatgatttacacgtaagatt

SEQ ID NO: 374254 - DNA, 589 bp, Homo sapiens
aaacaaacaacttgaattactacaaaaattacacttaaaagttgactgtattttttttctaacaattctaacaatcacatcaggacccctgtctgagtctgttttttgttttgttttttgtttcttgttttgttttgtttgtttgtttttgctgctatatcagaaaaccacagactgggtaatttataaacaatagaagtttatttggctcatggttctggaagctgggaagtccaagattgaggcaccgcatctggtgagggccttattcctgcatcagaacatggcagaaggcaccakgtggtgagagggcatgcaagagagagagagagagagagagagagagagagagaggagggcagagggaccaaaataatccttttattagaaaacttcttgtggggtaactaacccactcccaaaataatggcattaatccattcatgaggtcagacctctcatgacctcttaaaggtcccacctctcaacaatatgacattgaatttcagacacatggactttggggatactttcaaacaagagcagatccttgcctctctgctgttctttatgatttacacgtaagatt

SEQ ID NO: 374255 - DNA, 549 bp, Homo sapiens
tcacatttcaaaacacaattatgcccttccaacagtcccccaaagtcttaactcattccaacattaacccaaaggccaaatccaaagtctcatctgagacaaggaacgtcccttctgcctatgagyctgtaaaatcaaaggcaagctagttactttctagatacactgggggtacaggcattgggtaaatacactcaccaaaaatggaagaaattggtcaaaacaaaggggccacaggccccatttaagtccaaaatccaatagtcataaatcttaaagttccagaatgatctcctttgcctcatgtctcaaaatcaggtcatgctgatgcaagagatgagctcctattgccttgggcagctctgaccctatggctttgcagggtacagcacccctgctggctgatttcacaagctggcattgggtttctgtggcttttccaggcatggtgcaagatgctggtggatctaccattctggggtctggaggatggtggccatcttctcccagctccactaggcagtgccccagtggggactgtggtggggg

SEQ ID NO: 374256 - DNA, 559 bp, Homo sapiens
acaattcaatacaagatttggatggagacataaagccaaaccgtattagagaggaaaagtaatagggtgaggagggctgaacaatgatgttgaggacttgagcagaaatatcaatcagagggtaatttcagaggcaagcgtgactggcaaattcataagaatggatctctatgtggaagatagacttcctaatatagctgcaagaatatctcttccctcatttgctctacagcaactctatcaatcttctatgactgaagtggagcaagttccagcatagccgctatgtagcctaacaatgtctgtttcctgtctcttgaaagcattttcagtgaggggtggtatggggggacagaagtcaagaccaagaggaagatgccaatttataaatatacaattagctgatttctttattgagtaaaaagaataccttgaatgcaggcaagtaaacagccagtgcctatgagatgtagtggattttcagctgtatttatatgkaattaaagctttatcattgttggacattatcctacttttagtaaataggcagcagacactc

SEQ ID NO: 374257 - DNA, 520 bp, Homo sapiens
acttaggttagtggtgactcctcaagtccttaatttctatcarcactttttcaggactctttgctaaggttacaagatgtatgagaagggatactatttgagagaaataaaaaaacactgaaaagacaagtacaaggctctaaacacacatttcctactttaaattatttggagttgaaagatgtatgtggaaaaccctctattgcatggttaggcatcaagtattaaataatttcatttacaaaattattcttgtttaaatattaggtcaataatataaccaaaggatgagttactaagtcagtcagtccgcctggcctctttcataaatatttaaatgatctgttatggtgcccctcctctttagaatagcagcacctcagggaatgagtcatgtctgtttcatctttgaaacttctacgaagcacagtgcctggcacatgagagatgctcagtaaatgttcaagtaaataaaacctgaatactgtcttagtctgttaatgtcactataacaaaatac

SEQ ID NO: 374258 - DNA, 520 bp, Homo sapiens
acttaggttagtggtgactcctcaagtccttaatttctatcagcactttttcaggactctttgctaaggttacaagatgtatgagaagggatactatttgagagaaataaaaaaacactgaaaagacaagtacaaggctctaaacacacatttcctactttaaattatttggagttgaaagaygtatgtggaaaaccctctattgcatggttaggcatcaagtattaaataatttcatttacaaaattattcttgtttaaatattaggtcaataatataaccaaaggatgagttactaagtcagtcagtccgcctggcctctttcataaatatttaaatgatctgttatggtgcccctcctctttagaatagcagcacctcagggaatgagtcatgtctgtttcatctttgaaacttctacgaagcacagtgcctggcacatgagagatgctcagtaaatgttcaagtaaataaaacctgaatactgtcttagtctgttaatgtcactataacaaaatac

SEQ ID NO: 374259 - DNA, 520 bp, Homo sapiens
acttaggttagtggtgactcctcaagtccttaatttctatcagcactttttcaggactctttgctaaggttacaagatgtatgagaagggatactatttgagagaaataaaaaaacactgaaaagacaagtacaaggctctaaacacacatttcctactttaaattatttggagttgaaagatgtatgtggaaaaccctctattgcatggttaggcatcaagtattaaataatttcatttacaaaattattcttgtttaaatattaggtcaataatataaccaaaggatgagttactaagtcagtcagtccgcctggcctctttcataaatatttaaatgatctgttatggtgmccctcctctttagaatagcagcacctcagggaatgagtcatgtctgtttcatctttgaaacttctacgaagcacagtgcctggcacatgagagatgctcagtaaatgttcaagtaaataaaacctgaatactgtcttagtctgttaatgtcactataacaaaatac

SEQ ID NO: 374260 - DNA, 647 bp, Homo sapiens
cattggggttaagtttccaacacataaatttttaaggatacattcagaccatggtagatgccaaatcactgattgtgctgaagtgctgatgattttgaaatggcagtatggaaaggaaaggaatcactaggtctacaaatgagatatggaggaagttgggggtaagcctatgcacaggtagagacactaaaatacaaaaaagtacacacctgccattcacttttattttgatgtttcaattgctctaaattttctaaatttatcatatgttcacaatatggacattgggttagaatctttttttttttttttttttttttttgctgtgataaaaatcttctgcttcaacatgcgcttcaaaaggcactattttctgaatgattactgctgtgtgagtccagaagagtgataagtgaaaatccatgccaatgattaagaaggagttggctttactgggagcatgaaccttaattgkcatattgttttctttccctttttttgaaactttatttttgtatctatctttttggttttggttcatggctatggggtgtatatactcttaaatttctctctgaactgtcaattaatttcaacttgttatgcatttctacttagtttaacaagcgtaagctttttggttgctt

SEQ ID NO: 374261 - DNA, 647 bp, Homo sapiens
cattggggttaagtttccaacacataaatttttaaggatacattcagaccatggtagatgccaaatcactgattgtgctgaagtgctgatgattttgaaatggcagtatggaaaggaaaggaatcactaggtctacaaatgagatatggaggaagttgggggtaagcctatgcacaggtagagacactaaaatacaaaaaagtacacacctgccattcacttttattttgatgtttcaattgctctaaattttctaaatttatcatatgttcacaatatggacattgggttagaatctttttttttttttttttttttttttgctgtgataaaaatcttctgcttcaacatgcgcttcaaaaggcactattttctgaatgattactgctgtgtgagtccagaagagtgataagtgaaaatccatgccaatgattaagaaggagttggctttactgggagcatgaaccttaattgtcatattgktttctttccctttttttgaaactttatttttgtatctatctttttggttttggttcatggctatggggtgtatatactcttaaatttctctctgaactgtcaattaatttcaacttgttatgcatttctacttagtttaacaagcgtaagctttttggttgctt

SEQ ID NO: 374262 - DNA, 647 bp, Homo sapiens
cattggggttaagtttccaacacataaatttttaaggatacattcagaccatggtagatgccaaatcactgattgtgctgaagtgctgatgattttgaaatggcagtatggaaaggaaaggaatcactaggtctacaaatgagatatggaggaagttgggggtaagcctatgcacaggtagagacactaaaatacaaaaaagtacacacctgccattcacttttattttgatgtttcaattgctctaaattttctaaatttatcatatgttcacaatatggacattgggttagaatctttttttttttttttttttttttttgctgtgataaaaatcttctgcttcaacatgcgcttcaaaaggcactattttctgaatgattactgctgtgtgagtccagaagagtgataagtgaaaatccatgccaatgattaagaaggagttggctttactgggagcatgaaccttaattgtcatattgttttctttccctttttttgaaactttatttttgkatctatctttttggttttggttcatggctatggggtgtatatactcttaaatttctctctgaactgtcaattaatttcaacttgttatgcatttctacttagtttaacaagcgtaagctttttggttgctt

SEQ ID NO: 374263 - DNA, 647 bp, Homo sapiens
cattggggttaagtttccaacacataaatttttaaggatacattcagaccatggtagatgccaaatcactgattgtgctgaagtgctgatgattttgaaatggcagtatggaaaggaaaggaatcactaggtctacaaatgagatatggaggaagttgggggtaagcctatgcacaggtagagacactaaaatacaaaaaagtacacacctgccattcacttttattttgatgtttcaattgctctaaattttctaaatttatcatatgttcacaatatggacattgggttagaatctttttttttttttttttttttttttgctgtgataaaaatcttctgcttcaacatgcgcttcaaaaggcactattttctgaatgattactgctgtgtgagtccagaagagtgataagtgaaaatccatgccaatgattaagaaggagttggctttactgggagcatgaaccttaattgtcatattgttttctttccctttttttgaaactttatttttgtatctatctttttggktttggttcatggctatggggtgtatatactcttaaatttctctctgaactgtcaattaatttcaacttgttatgcatttctacttagtttaacaagcgtaagctttttggttgctt

SEQ ID NO: 374264 - DNA, 366 bp, Homo sapiens
tgcattctcattgctttaatggaggagcacatatttggatttccttattctaccattcctactgatgtccctgtcatgtgtcttgatgaaaaaaaaagattttcattttaatatattctactttatcaatttttcctccgtaattttgataaatcttttcctactatgtgatcataccctaatacatatcatagaatattattttttaacatactcttgggtttaaactagtaacacttggtaatttgacatgtcaactcatattagaagccattgtagcattattatcaaattgattgctatcagatggtaaacaatcttaccagaakttatgtaccaaatcaatcttttgaaaattgtatttct

SEQ ID NO: 374265 - DNA, 641 bp, Homo sapiens
tagcctctcagcagtttgatgggttttaagaacacaaaataccagacgcttcctgatgggggccacctgctctttccttcccatagaagggttcctaggccatcctcacttccattcttctgttgttcattatgtatctggtgtatgcatgaataccaatggagatcttccgcagctggkacttcctgttttaattgtctggatcttttcctttactagcttggaagagttttataagcttctcccagggtggtcaaatgtagctgcttttcctagcaaaacacagtccccaccgaatgaggccctcctttaccagttacctaaccctggatgaaaaaatgtgctgtgtattaataattctcttcttccttcacactccttagctagaatcaccttacaatttttgcctcttgcccactccatcttctctcttctttgtataggtaattttccattttaccaagtcaggagttttacttggtaccttgttgatggctgttttttaaatttacgctattcctcaaggctcaactgaagtataagttataaaaagtacacgtgatttttagatcagaccctgagcaaggcttaattattaagatgaaggacagtgtgttttattttgtcctgtgaaaactatg

SEQ ID NO: 374266 - DNA, 641 bp, Homo sapiens
tagcctctcagcagtttgatgggttttaagaacacaaaataccagacgcttcctgatgggggccacctgctctttccttcccatagaagggttcctaggccatcctcacttccattcttctgttgttcattatgtatctggtgtatgcatgaataccaatggagatcttccgcagctgggacttcctgttttaattgtctggrtcttttcctttactagcttggaagagttttataagcttctcccagggtggtcaaatgtagctgcttttcctagcaaaacacagtccccaccgaatgaggccctcctttaccagttacctaaccctggatgaaaaaatgtgctgtgtattaataattctcttcttccttcacactccttagctagaatcaccttacaatttttgcctcttgcccactccatcttctctcttctttgtataggtaattttccattttaccaagtcaggagttttacttggtaccttgttgatggctgttttttaaatttacgctattcctcaaggctcaactgaagtataagttataaaaagtacacgtgatttttagatcagaccctgagcaaggcttaattattaagatgaaggacagtgtgttttattttgtcctgtgaaaactatg

SEQ ID NO: 374267 - DNA, 641 bp, Homo sapiens
tagcctctcagcagtttgatgggttttaagaacacaaaataccagacgcttcctgatgggggccacctgctctttccttcccatagaagggttcctaggccatcctcacttccattcttctgttgttcattatgtatctggtgtatgcatgaataccaatggagatcttccgcagctgggacttcctgttttaattgtctggatcttttcctttactagcttggaagagttttataagcttctcccagggtggtcaaatgtagctgcttttcctagcaaaacacagtccccaccgaatgaggccctcctttaccagttacctaaccctggatgaaaaaatgtgctgtgtattaataattctcttcttccttcacactccttagctagaatcaccttacaatttttgcctcttgcccactccatcttctctcttctttgtataggtaaktttccattttaccaagtcaggagttttacttggtaccttgttgatggctgttttttaaatttacgctattcctcaaggctcaactgaagtataagttataaaaagtacacgtgatttttagatcagaccctgagcaaggcttaattattaagatgaaggacagtgtgttttattttgtcctgtgaaaactatg

SEQ ID NO: 374268 - DNA, 641 bp, Homo sapiens
tagcctctcagcagtttgatgggttttaagaacacaaaataccagacgcttcctgatgggggccacctgctctttccttcccatagaagggttcctaggccatcctcacttccattcttctgttgttcattatgtatctggtgtatgcatgaataccaatggagatcttccgcagctgggacttcctgttttaattgtctggatcttttcctttactagcttggaagagttttataagcttctcccagggtggtcaaatgtagctgcttttcctagcaaaacacagtccccaccgaatgaggccctcctttaccagttacctaaccctggatgaaaaaatgtgctgtgtattaataattctcttcttccttcacactccttagctagaatcaccttacaatttttgcctcttgcccactccatcttctctcttctttgtataggtaattttccattttaccaagtcaggagttttacttggtaccttgttgatggctgttttttaaatttacgctattcctcaaggctcaactgaagtataagttataaaaagtacaygtgatttttagatcagaccctgagcaaggcttaattattaagatgaaggacagtgtgttttattttgtcctgtgaaaactatg

SEQ ID NO: 374269 - DNA, 489 bp, Homo sapiens
ataaattttgaatgagtagaaaatttacttgtttgaaaattaaaaaaaaataaacattttgaaggatgagcttcaaaattacaactagataaattgctatgggcatatacattgatataaccactttgaaaatcaattcaacattgtttyataaagtcaaattttcacattcattatgactcagcagttccactttagagtataaatccaagagaaaaaaacaaacttataccaagttatgttatatatttaaatttagatagttacatctatatagctatagatatatatagatatagctttatatatacatatataaactactgatatataggtatagatagatgatatctatctacatacacacaaacatacatgcacagagagaaggatgtatatacgtatatatctttatatatccctctatatattatgggtatagatatacagatagataggtatagatatctatttatctgtatgtacaca

SEQ ID NO: 374270 - DNA, 489 bp, Homo sapiens
ataaattttgaatgagtagaaaatttacttgtttgaaaattaaaaaaaaataaacattttgaaggatgagcttcaaaattacaactagataaattgctatgggcatatacattgatataaccactttgaaaatcaattcaacattgttttataaagtcaaattttcacattcattatgactcagcagttccactttagagtataaatccaagagaaaaaaacaaacttataccaagttatgttatatatttaaatttagatagttacatctatatagctatagatatatatagatatagctttatatatacatatataaactactgatatatagrtatagatagatgatatctatctacatacacacaaacatacatgcacagagagaaggatgtatatacgtatatatctttatatatccctctatatattatgggtatagatatacagatagataggtatagatatctatttatctgtatgtacaca

SEQ ID NO: 374271 - DNA, 622 bp, Homo sapiens
gattaggagatcgagaccatcctggctaacgtggtgaaaccccgtctctactaaaaatacaaaatttatccaggcgtagtggtgcacatctgtagtcccagctactcgggaggctgaggcaggagaatcgtttgaacscgggagacggaggctgcagtgagccgagattgcaccactgcactccagcctgggagacagagcaagactctactctgtctcaaaagaaaaaaaaaaaagaaaaaaaaaaaagaggaaaatcaccaacagaaataacaaaaaggtaaagaaaatgtggcacaaaatagagtgcaagaaaaccccactcgtttgcagtatgataggtaaaacaagagggcagagaatcgccttgcttgacctcagctgggaatgtgcgactggaggctcagtctttttacagcctctttttacatgtctatgaatggctgtgaaaacacaataggtatcgatttggggcttgcacacatattttaggaataaataaatttgcaaatatggaattcataaataacgaggacccactgtgtgtgtgtttataagtatatatttatatatttaatgtgtgtgtgtgttcgtgtatgttaaaacctagcacataaagaag

SEQ ID NO: 374272 - DNA, 622 bp, Homo sapiens
gattaggagatcgagaccatcctggctaacgtggtgaaaccccgtctctactaaaaatacaaaatttatccaggcgtagtggtgcacatctgtagtcccagctactcgggaggctgaggcaggagaatcgtttgaacgcgggagacggaggctgcagtgagccgagattgcaccactgcactccagcctgggagacagagcaagactctactctgtctcaaaagaaaaaaaaaaaagaaaaaaaaaaaagaggaaaatcaccaacagaaataacaaaaaggtaaagaaaatgtggcacaaaatagagtgcaagaaaaccccactcgtttgcagtatgataggtaaaacaagagggcagagaatcgccttgcttgacctcagctgggaatgtgcractggaggctcagtctttttacagcctctttttacatgtctatgaatggctgtgaaaacacaataggtatcgatttggggcttgcacacatattttaggaataaataaatttgcaaatatggaattcataaataacgaggacccactgtgtgtgtgtttataagtatatatttatatatttaatgtgtgtgtgtgttcgtgtatgttaaaacctagcacataaagaag

SEQ ID NO: 374273 - DNA, 532 bp, Homo sapiens
ttttcacagaagcaagacaaagaaaatgtgtgattggttaargtaggacagtagttttaaatctctagttacaagttatattagtcagggttctccagagggacagaactaataggatagatgtatatataaaggggagtttattaaggagtattgactcacctgatcacaaggtcccataataggctgtctgcaagctgaggagcaaggaagcgagtctgagcccaaaagctgaagaacttggagtccaatgttcaagggcaggaagcatccagcacgggagaaagatgtaggctgggaggctaagccagtcaagtgttttcacgttcttctgcctgcttttattctggccatgctggcagctgattagattgtgcccacccagattaagggtgggtctgccttctgcagtccactaactcaagtgttaacctcctttggcaacaccctcacagacacacccaggaacaaactttgcatccttcaatccaatcaagtttgacactcagtatttaccatcaaagaggttaat

SEQ ID NO: 374274 - DNA, 532 bp, Homo sapiens
ttttcacagaagcaagacaaagaaaatgtgtgattggttaaggtaggacagtagttttaaatctctagttacaagttatattagtcagggttctccagagggacagaactaataggatagatgtatatataaaggggagtttattaaggagtattgactcacctgatcacaaggtcccataataggctgtctgcaagctgaggagcaaggaagcgagtctgagcccaaaagctgaagaacttggagtccaatgttcaagggcaggaagcatccagcacgggagaaagatgtargctgggaggctaagccagtcaagtgttttcacgttcttctgcctgcttttattctggccatgctggcagctgattagattgtgcccacccagattaagggtgggtctgccttctgcagtccactaactcaagtgttaacctcctttggcaacaccctcacagacacacccaggaacaaactttgcatccttcaatccaatcaagtttgacactcagtatttaccatcaaagaggttaat

SEQ ID NO: 374275 - DNA, 642 bp, Homo sapiens
catgaacttagaaacatccatatttttacttaaatagattcatagtttgaatgtcattaatttgtttaatttttttactattgtgaagagtaaaccataaatagatgtaaaccaaacaataaataattaaataatatattgctactaaattttgaaaaytgaaatcaagcaaatatgatcttttaaatgaggactgaaagactcttgagtactgtttttaaaacctgagagggcacgctctaccaatctatctcttctgccttcccaacataatctcttgcttgttccactccagctataaccttttagtttttaattattctgatttttctgcatcaaagctttcacaggattctttccctacaacacgccctttccacaattctgctcaaccttcagattccagacttcagttcaaaaattactacctcagggaagaattatctgtctctgtgactaagacaagtcctatatttcaaatcactatgtgctactcctttgtatgctggacactgtggcaattctccatttcttttgcatttctttgttaaatgcatgtcttccccagtaggctgaaagttccaaaatgcatccctggtatttctcaccccagcatctagcttagtacctgataagtagaag

SEQ ID NO: 374276 - DNA, 594 bp, Homo sapiens
ctatacactccttgagaggcagggttttgtcttaatcgtatttgaatttctcatagttcccggcataatataggcacacaataaaatatgtattcactgtataaattaatckggcatgtttcattttaaagaaacacttagattttctgggtttaactttaaaatctcatctcattccctaaatgggatactttgtcatgggcaatctttttcatctttcttttagttttttatacagagttctaagtagaggaaaagaaactctcctttagcaatttttaatctgtctaaggcagcagtgccaagatatggcttgagagcaacgtctaactgtggagatacatcaggccagaggaagatgaggaggcagagaacgcaccataggatgttgtagatcaacggcatccatgttcatttacaagctaacatttgataaagtttaggaaggatactgctaagtgggatgcccttgtactcagataagtttttcttttactgatatactctgaaaagtaggattaaatagttgacaatagtgataagtagctgttagttgtacaaatcagctatttatgtttcaatgactgtcagcta

SEQ ID NO: 374277 - DNA, 594 bp, Homo sapiens
ctatacactccttgagaggcagggttttgtcttaatcgtatttgaatttctcatagttcccggcataatataggcacacaataaaatatgtattcactgtataaattaatctgrcatgtttcattttaaagaaacacttagattttctgggtttaactttaaaatctcatctcattccctaaatgggatactttgtcatgggcaatctttttcatctttcttttagttttttatacagagttctaagtagaggaaaagaaactctcctttagcaatttttaatctgtctaaggcagcagtgccaagatatggcttgagagcaacgtctaactgtggagatacatcaggccagaggaagatgaggaggcagagaacgcaccataggatgttgtagatcaacggcatccatgttcatttacaagctaacatttgataaagtttaggaaggatactgctaagtgggatgcccttgtactcagataagtttttcttttactgatatactctgaaaagtaggattaaatagttgacaatagtgataagtagctgttagttgtacaaatcagctatttatgtttcaatgactgtcagcta

SEQ ID NO: 374278 - DNA, 594 bp, Homo sapiens
ctatacactccttgagaggcagggttttgtcttaatcgtatttgaatttctcatagttcccggcataatataggcacacaataaaatatgtattcactgtataaattaatctggcatgtttcattttaaagaaacacttagattttctgggtttaactttaaaatctcatctcattccctaaatgggatactttgtcatgggcaatctttttcatctttcttttagttttttatacagagttctaagtagaggaaaagaaactctcctttagcaatttttaatctgtctaaggcagcagtgccaagatatggcttgagagcaacgtctaactgtggagatacatcaggccagaggaagatgaggaggcagagaacgcaccataggatgttgtagatcaacggcatccatgttcatttacaagctawcatttgataaagtttaggaaggatactgctaagtgggatgcccttgtactcagataagtttttcttttactgatatactctgaaaagtaggattaaatagttgacaatagtgataagtagctgttagttgtacaaatcagctatttatgtttcaatgactgtcagcta

SEQ ID NO: 374279 - DNA, 582 bp, Homo sapiens
attaaaacaattcagcaaagatttttgagtatctacactgtagcaggtccaagcactacaaaaataagacacaataccattcctatcctcacagggcttgcgctctagcagaggtcattattggcataatcgcatcagcaaatgtaaaattgctctgagagcttacaaaagtgtttgacctgttcacaaagactttattagaattaggctaaacaatctcagaaatatttgccactcttcacaatgcccctgccttgtgcatacacggcagatgaagaagcaccagagatgaaaggtggaagaaagaatcttgaataccattcattgtgagttctggccattttttttgcaggagcttgactcatttgtgagccaggcatctaagctattatcaaataataaaggaagcatgagtttttgccataatatttgtgcaatttgaagatgggtakgacctcttatggctgtattcagatgtgtgggcaggaggaagtgactgctctcaaagtgttccctatcccactcaaagaaaaaaacatttttattatgtctgctttctcagaggatataatctagtagcta

SEQ ID NO: 374280 - DNA, 618 bp, Homo sapiens
cagctgcaaaaaattttttggctttcgtggttatggttatttctttctaaacgtgtaggagagactttagctagctgctgcctgtggtgtcagctgcactgtttgaagtccctggtgaagagacagctggatgccacagtggcagtctggaggccacaaaggattgttaagtgaacttgatgttctagttggcaagtttaacacatactctactcccacaaaattggataacattttgatcacatcataccaccagtcttgccactattatagaggtactccttcttggtaagaaggcatgyatagcttccttacaattatgatttcagctagactagcttccctttctcttaggcttaaagttaattgaccattgaagtactgacatttttgagaaattcatttcacttggatttttttttccatgtttgatattactagcttcacatcagcataaagaagtactcattcctttaattcatattcttgtttttggaaatatagtaggtctaaaatcacttcgttgtccaaaatatcttagtgatatgaaatatgcagagaaaacactcatccttttgtttagagtgaaccagctgaaagaaatcttggacattgtct

SEQ ID NO: 374281 - DNA, 581 bp, Homo sapiens
aaaatgcttccagatgatgttaaatatgtagaaaaggatgtgttagccagcctacacagactgttcttaaacagtcagttctggtttytgcaaggcagtgttgctgtctgtcaaagtttaagggggatagacttacagagtatgaagtgtactagtattgggaacagctgggaccaactagatgctgttaacataacaaataaagtagacctatgtgagaagaagcctgctgtaagaatagggtaaccagttcataaatcaacttgtgggagaatcaggtgtatactatagttctcagaggctcatgttatagagggtttttatttactttgtagaggtttctacagtcttgagcctcttattggatacctggaacaatctctcttcgacaatgttactggctacaatgtacaaaaataacttttcatggaaagaaaataaaacccacattatcaggtattgcagaaataggcaaatcaaatggtatgaaatgttgtaagtgtacgttaaatcccatgcctttaggttagctggcctgtctccattccttaaagactacacccagtttattaagagtgggg

SEQ ID NO: 374282 - DNA, 592 bp, Homo sapiens
tcttgtcctttagcatggattaatcatagcaccccatcctgacacaatgattatcccaaaggataggcatggattcttttgtatgttattaagtgacttctaggggggaaaatctttctgctgatattgctgcactggaggctatggaattgcatgctggttaccattttcaatgatatttgaataaagccacgcagagacagagatcggatataattgaatgagagtgagacagttctgatgaactgggtctcctgaaaccatgtcctgatccctgaagctctttgattctctgtgtgctattttkgtatttttccaagtcatacatgtatccccttgttaaattgaaacttgttttaattagatttttagaactcaaaattgaacatcttgcccatcatgagatgagatgattttttagaggtatgttggtaggagtgggtaagtttctcccttagtaaagactctaagattctagggcaggagctttaaatcttttctctgttgaaatacaaacgacagctgatgtgttttggtgagacatattcctatgcatatgttccaagtgaatagtacttgttattccatttat

SEQ ID NO: 374283 - DNA, 517 bp, Homo sapiens
agtaagtattagtagtgcttgacctgtttcatgtgtgggcagggcttgagagcatgtctgatacaaagttcttatgtgtatcagactctctttttcttttctttctttctttctttcttctttttttttttttttttttttttctgagacagggtcccccactgtaccccaggctggaatgcagtggcatgatcgtggctcactgcagccttgagcccctgggctcaagtgatccctgcctcagcttcctgagtagctgggactacaggtgtgcaccacgtctggccaatttttttcattttagtagagatgaggtctcactatgtttcctaggctggtcttgagctcctgagctcaagcaatcctcccawctcagccgcccaaaatgctgggattacatgaaccactaatccctgtgtaatacgtcacaagatgtatccaatttcttgtgaatttgaggatagcataagggatttacaaaatagaagaaaaaaatcactttaaggtcaatggcata

SEQ ID NO: 374284 - DNA, 576 bp, Homo sapiens
atcatccaaataagacgtctgaatatttgacatagaattttaagattaaagcaataaggacattcaagtgtatttttatactcttaaaaactctttatcaataggtttctgttctttattattattattattattattttaaaatgaggtctcatcatcttgctcaggctggtcttaaactcctgggcttaagtgatcctccagcctcagcctcccaaagtgctaggattacaggtatgaactaccgcaccaggccggttactattctttgatctcagtaaaatttacaggaaaygttccattttgtaagtaatgatcactgactagagtattcagtagaaattccatttgcacacctttaatttacttctctcagtatccaaaagttttctttaattctaggagggtggaatttagtaaaggtcttggagattctaaatggttattgaataaagtaatttaatttgtttagatacgttcacagagccccttcaatattagagcacagtgaataagagcagaatgaagctctcagaaaaataagaattgcattggaatcccacctccaccactcac

SEQ ID NO: 374285 - DNA, 542 bp, Homo sapiens
gaacttctacctaaaacctcctttactcacagcctcttccatcttagtcgatgcattcaattcttgaagttttcctggcaaagatacttggaataatcattgactattctctttctgttatatcctacatataattaatatagaactattggaactatggctctgcctttaagatatattyacaatccagccaattctcacttcacttcctccagttcatcttattctgagccatcattatcttagtctgagccaacattatttttcacctaatagtgttctaactggttattctatatctgtctttgcctgccctatagcttattccaaacacagtggccagagtatttcattcctttgcttaaaaccctgaaatagtatcccagatcccttagagcaaaagctagagtcaagacaagagactttaagtccctgcatcatcctctcccatcacttctttcacctcatctctttcggttcccacccttgcccactccactctggctgtactgaccttttggtcttccttgaactttccagac

SEQ ID NO: 374286 - DNA, 542 bp, Homo sapiens
gaacttctacctaaaacctcctttactcacagcctcttccatcttagtcgatgcattcaattcttgaagttttcctggcaaagatacttggaataatcattgactattctctttctgttatatcctacatataattaatatagaactattggaactatggctctgcctttaagatatattcacaatccagccaattctcacttcacttcctcyagttcatcttattctgagccatcattatcttagtctgagccaacattatttttcacctaatagtgttctaactggttattctatatctgtctttgcctgccctatagcttattccaaacacagtggccagagtatttcattcctttgcttaaaaccctgaaatagtatcccagatcccttagagcaaaagctagagtcaagacaagagactttaagtccctgcatcatcctctcccatcacttctttcacctcatctctttcggttcccacccttgcccactccactctggctgtactgaccttttggtcttccttgaactttccagac

SEQ ID NO: 374287 - DNA, 534 bp, Homo sapiens
attatagcatacaaattaccttaaaattattagttaaattaatttcattaagtatatacatttttaaaagtatgtctcttatatagtatgtcagtaattcacactgaatacctgtttgctctaactttaagcaatatttattcctgaataagaaaattcaagttatgaactagggtttctactaaaattattacttaagatagaacacattaytttacttgatctacttttgtaccctttgagcaaattttttaaaaattaaatgagccagactctaagaaatgaaaactggtaaataaaataatatgtgttgatttccaaagagtgctcatagtatccaagcaaaggagtacataacctatctggaaatagttactaggagagtctacgatgcatttttcccctaatttcactttcttttttctcctcctctctttctccctctcacctccccatatctcctcttacttttttttttctctctgcctttgtgtatgtgtatatctatctctatagctatatatctgtatctct

SEQ ID NO: 374288 - DNA, 599 bp, Homo sapiens
ggtcccaggtcttacatttaagtcttcgatccatcttgagttaatttttacacaagatgtaaggaaggggtccagtttcagttttygcatatagctagccagttttcccaacaccatttattaaatagggaatcttttccccattgcttgtgtgtatcagttttgtcacatatcagatggttgtgtaacaaaactgcatgttctgcacatgtaacccagaacttaaagtataataaaaaaattttccaagtgggagaaattattttatttttctaagatataaaagttaacagtatcctaaaagaccctgatagaaaataaagggaaaatataaaagtaaactggaataacaaatccaggggaattcaggcctaagaagtgtctgagcaatgtctttttcttaaacttttagataaattttccatgacaataataataattagtaataatataatgttacttcaaatacctccaaacaatgatatattaaaacactaaaggcatttgattatataaacactcataagaactatttcttttaaaatttaatatcaaagcatgtaaaaacttccttagcaaataaaattatatgtttctta

SEQ ID NO: 374289 - DNA, 608 bp, Homo sapiens
tgatttttgttcctagtttacttagagcttttagctttaaaatatgttgaattttcttaaaaattgtttctgcatttattgatatgaccatacggcttttcttattctgtcttttaacatggtaaactacattgattgttttccaattgtttacccagccttgtattgcttggataaacccaacttggttgtagcatatttgttttgattgctggatgcgattttctaacattttgttaaaggttttacatctatatacataaaaaataatggtatttagatttcatttattgcagcatttttatctattttgttattagggtgatatctcacaaaatgaattcggaaatatttctttttcacttaaagagaacgtatagaattggtatttttgcttcctwaagtgtttgatagaattcagcagtgaagccttctgggacagcatttttaaaaggttttaaccactaattcaatttctaaaatatatatagggctagtaaggttataaatttcttttttactgagttttcgttgtacatggctttcaaatttttctattttacctaagttgtagaatttatcagacagagttgttcatgatatcaaac

SEQ ID NO: 374290 - DNA, 577 bp, Homo sapiens
ggcaaaggacatgaacagacactttttcaaaacaagacagacatgtggccaagaatcatgtgaaaaaaagctcaacttcactgatcattagacaaatgcaaatcaaaaccacaataagataccacctaacactggtcagaatggaattattaaaaagtcaaggccaggtgcagtggctcacgcctgtaatcccaggactttgggaggctgaggcaggtggatcacgaggtcaggagatggagaccatcctggttaacatggtgaaatcccctctctactaaaaaaaaaaaaaatacgaaaaattagccaggtgtggtagcaagcacctgtagtcccaactactcggaaggctaaggcagragaatggcgtgaacctgggaggtggagcttgcagagagctgagatggcaccactgaactccagcctgggggacagattgagactacatctaaaaaaaaaaaagtcaaaaaataacagatgctgacaaggttgtgggagaaaagaaacacttgtacactgttggtgggtgagtaaattggttcagtcattgtgaaagacaggttgacaattcctctaa

SEQ ID NO: 374291 - DNA, 534 bp, Homo sapiens
aaggttgtgggagaaaagaaacacttgtacactgttggtgggtgagtaaattggttcagtcattgtgaaagacaggttgacaattcctctaagacctaaagatagaaatactatttgacccagcaatcccattactgggtataaacccaaaggaatataaattgttctattataaatatacatgcacacatatgttcattgcagcactattcacaatagcaaagatatagagtcaacctaaatgcctatcaacaatagactggctaaagaagatgtgatatatacatcatggaatactatgcagccataagaaagaaaaagatcatggcctttgcaaggacatggatggagctagaggtcattattcctagtaaactattgtagaaacaggaaaccaaatactgcatgttcttacttataagtggaagctaagtgatgagaacacatggwtacatagaggggaacagcacacactgggcctacttgaaggtggaagctgggaggagggaaaggattaggaaaaataactaatag

SEQ ID NO: 374292 - DNA, 591 bp, Homo sapiens
ttcctggcattagcaaaagttattccaaagttcatatgcaatgaaaagagaacctcagtggacaaagcaatcattagcaaaacgtacaaagctggaggcatcacattacctgacttcaaactatgctacaaagctacagtaaccaaaacrggtactgttgcaaaaacagacacatagaccattggaacagaatagagtgtgcagaaataaagccacacaccaacaaccatccaatctttgacaaattctacaaaaataagcaatggggaaaggattccctattcaacaaattgtgctggggtaactgggtaacaatatgcagaggatagacactagaccccttccttataccatataaaaaatcacatcaagatggattaaatactaaaatataaaatctaaaactataaaaaaatccttgagaaaaacctaggaaacactattatgaacataggccctggcaaagatttcatgatgcgacaaagcaatggcaacaaaaacaaacatcgacaaatgaaatctaattaaactaaacagtgtctacacaataaaagaaactataaacagataacttacagaatgagataaaat

SEQ ID NO: 374293 - DNA, 563 bp, Homo sapiens
tttgcaatctccaaatgtgtgggcagtgtttgtatattttttagcttaacttgtgagctatcagacagtatatagatcatctcttttcttccaaaaagaaatcctccatctattatgatatgtgcatggtagtgaaaaatcaatgaggttttaatgtgtgctggctgctgacatcctaggaactgcaagaggaaggggccccatatctcattgtgtagattttcacttattctcttacacacttgtgaaataagaacatcttgggctccttcacactggaagctgctcgtggcaaatgtgyctttcattctattcaaacttatccctgtgctcactgagatagatgcatacctgattgcatcctttgaaaaagctaatcagaaactcaaatattgattgatgtctcacgtctccctaaaatgtataaaactaagctgtgccccagccaccttgggcacatgtcattaggattttctgattctgtgtcatgggtgcatgtcctcaaccttggcaaaataaactttctaaattaactgagatctatttcaaattttgggggttca

SEQ ID NO: 374294 - DNA, 563 bp, Homo sapiens
tttgcaatctccaaatgtgtgggcagtgtttgtatattttttagcttaacttgtgagctatcagacagtatatagatcatctcttttcttccaaaaagaaatcctccatctattatgatatgtgcatggtagtgaaaaatcaatgaggttttaatgtgtgctggctgctgacatcctaggaactgcaagaggaaggggccccatatctcattgtgtagattttcacttattctcttacacacttgtgaaataagaacatcttgggctccttcacactggaagctgctcgtggcaaatgtgcctttcattctattcaaasttatccctgtgctcactgagatagatgcatacctgattgcatcctttgaaaaagctaatcagaaactcaaatattgattgatgtctcacgtctccctaaaatgtataaaactaagctgtgccccagccaccttgggcacatgtcattaggattttctgattctgtgtcatgggtgcatgtcctcaaccttggcaaaataaactttctaaattaactgagatctatttcaaattttgggggttca

SEQ ID NO: 374295 - DNA, 563 bp, Homo sapiens
tttgcaatctccaaatgtgtgggcagtgtttgtatattttttagcttaacttgtgagctatcagacagtatatagatcatctcttttcttccaaaaagaaatcctccatctattatgatatgtgcatggtagtgaaaaatcaatgaggttttaatgtgtgctggctgctgacatcctaggaactgcaagaggaaggggccccatatctcattgtgtagattttcacttattctcttacacacttgtgaaataagaacatcttgggctccttcacactggaagctgctcgtggcaaatgtgcctttcattctattcaaacttatccctgtgctcactgagatagatgcatacctgattgcatcctttgaaaaagctaatcagaaactcaaatattgattsatgtctcacgtctccctaaaatgtataaaactaagctgtgccccagccaccttgggcacatgtcattaggattttctgattctgtgtcatgggtgcatgtcctcaaccttggcaaaataaactttctaaattaactgagatctatttcaaattttgggggttca

SEQ ID NO: 374296 - DNA, 563 bp, Homo sapiens
tttgcaatctccaaatgtgtgggcagtgtttgtatattttttagcttaacttgtgagctatcagacagtatatagatcatctcttttcttccaaaaagaaatcctccatctattatgatatgtgcatggtagtgaaaaatcaatgaggttttaatgtgtgctggctgctgacatcctaggaactgcaagaggaaggggccccatatctcattgtgtagattttcacttattctcttacacacttgtgaaataagaacatcttgggctccttcacactggaagctgctcgtggcaaatgtgcctttcattctattcaaacttatccctgtgctcactgagatagatgcatacctgattgcatcctttgaaaaagctaatcagaaactcaaatattgattgatgtctcacgtctccctaaaatgtataaaactaagctgtgccccagccaccttgggcacatgtcatyaggattttctgattctgtgtcatgggtgcatgtcctcaaccttggcaaaataaactttctaaattaactgagatctatttcaaattttgggggttca

SEQ ID NO: 374297 - DNA, 617 bp, Homo sapiens
aataacctcatgagccatcctcagcccaagtggcaggacaataatattcaataatcccttgagaagaccattcatcctcttgccatctttggctttctcctacctttaaagatcattttttctttgtttaggttatatacagggactctgagggtgttatccactgttaatgttttggaggaaggagtagccttggggatgagctggaccctggtgtgatggactcagtgagggagtccttagactctcactgcagttggtgtgctgagtatcacagtgtaggggcctgtccacttcrgttgtagcttttggtgagtgttgagttggcaaataaacatgtctgtgcctgcaagacagttatgttgagaggacaaggaggtgtcaacagggagaggcatggcctcatttgctgcttcaagagtgaaagaccatgtctggattaaggaggggaggtaatttctgagtggctcaaagtctggtgagggtgaaggccctaagacaaaagtttggccacacatgatttcaaagggactataaaaagagggtgttttggttgttgcatgaagtctcatgagtgtgaaagggagatttttttgtccatgactggtgggtttcta

SEQ ID NO: 374298 - DNA, 553 bp, Homo sapiens
tttgtctcatagacatagaagaaaatatcctaagacacattcttggataaaaaacaaggaatatataaaatgattctataccatgactgagtcaggttttaaatctttgaatccaattcattcacttataattgccagaaatggactgaagtgtatcagcaaaatcacaatttcacaagtgtatctgaaattkggaagagtatatatattttgaaattattctgggctagaggaatgctgtctatgtcatatagagtaagcaattctgaggctgatggtgtatttcaaaaataatctgcatctgaaatttgcacatggaaactcgaaaacctttctagcattctgtaagaatgaagtagactgaaagtggttttcagatattaaaaaaaatagtatttttattattgagctttacttccggagaagatagtcaactaaatcttacatgatgggcactctaatataaactatgtaatgaaaaagtacacagggaattttgcttaaaacgtggaaaataaaagatggtcaaatctgtcctctgtgagctgcaaaa

SEQ ID NO: 374299 - DNA, 580 bp, Homo sapiens
tcccattgtaacagctgtcagttatctctaaaatgatacactgttgtttccatgaattgctaatagactgagctaagtaaaatatggcattcaagaagctgaaatgaaataatctaaataacaggagaatgaacagaatttcaatgaggacagagagaaaacactggaaaggaaggaacaggaatggattcacaacaattgaagcagaacaattgaatcagagctactgatggttagtgtacaatcaaaacaattacaacatatgtggtaaattatttttcccttcctattatcctgcytaactgtgtggtctttgttgcatatatttttgtctcctttttatagaacacagactgactgtcagttaaatttaaatatagccatcctctcagaatttgatagatcattttttttttagcttagggcagcaatacattcaaatagttgcccaatgaggatgtaacatgatgtcctaaagggatagatagatagtgatagagaatgatgcttaactgggtagcaaatttcaaacaaaaaaaatacagtagtagaatttctggtagaatgtcaacaaagtatt

SEQ ID NO: 374300 - DNA, 604 bp, Homo sapiens
tctcaaattttacagtgtggaaggaaatgaaatgaagagtacacatttagaattgatggctgcgtcaagaatagaaacgtgatgtcaactmaaactctaaaattaagaagctagaaatatagatggtagtagatatacagttaaccagatgtgcatgaggaagttgaagataaagggaggattgataacatgggaaataaagccttagctttggccttaagaatggagcaactggagagtcaaacaggtatttagaaatattgttagttcaaaggtcagacaatatctagttagtagaaaactttatttcatgtacataaatgaagatagaataattgtttgactttgccctgatactctaacaatcttaatttcttgagagacgttagttcatgtatgaaccacaatttttatttaggtttttgggaaaaacaagtcaggtgggttttttcgtctccatgcccatgattaaaataatggatttgtttatgtctattgatatgaaccaataaataatgaattgtcaaagccagtcacttaaatattattttaaaatgaaaatatcctctttataggtaaagaaattttcccacctgtaagtata

SEQ ID NO: 374301 - DNA, 541 bp, Homo sapiens
tagtatatgacccagcaatctcacttttgggtatgtaaccaaaagaactgaaatccagatcttgaagagatatctacactactgtgttcactccagcattattcacartactcaaaatatggaaacaatctaaaagcccattgacagacgaatggacacaaaaaatctggtatatacataaaatggaatattattcagctttaaaaagaagcgaatcctgctatatgtgataacagaaattaacctagagggccttatgctaaattagataaatgagcaacagaagtactaatatgttattgataatgacaggaggcagagaaattctaggcagacaagggcaggtctttggcaaaaccccaccttcaagctaaacagcctgaaacccgtggccctaagtgagaacttccatccctatgtgtctgctctcccctgattggttctttctgaataacgtctttttaccagttgaatgttgtcttttccaaaactacctatggctcaccccacccccatcctgtgcctgtaagaccccagaccc

SEQ ID NO: 374302 - DNA, 541 bp, Homo sapiens
tagtatatgacccagcaatctcacttttgggtatgtaaccaaaagaactgaaatccagatcttgaagagatatctacactactgtgttcactccagcattattcacaatactcaaaatatggaaacaatctaaaagcccattgacagacgaatggacacaaaaaatctggtatatacataaaatggaatattattcagctttaaaaagaagcgaatcctgctatatgtgataacagaaattaacctagagggccttatgctaaattagataaatgagcaacagaagtactaatatgttmttgataatgacaggaggcagagaaattctaggcagacaagggcaggtctttggcaaaaccccaccttcaagctaaacagcctgaaacccgtggccctaagtgagaacttccatccctatgtgtctgctctcccctgattggttctttctgaataacgtctttttaccagttgaatgttgtcttttccaaaactacctatggctcaccccacccccatcctgtgcctgtaagaccccagaccc

SEQ ID NO: 374303 - DNA, 541 bp, Homo sapiens
tagtatatgacccagcaatctcacttttgggtatgtaaccaaaagaactgaaatccagatcttgaagagatatctacactactgtgttcactccagcattattcacaatactcaaaatatggaaacaatctaaaagcccattgacagacgaatggacacaaaaaatctggtatatacataaaatggaatattattcagctttaaaaagaagcgaatcctgctatatgtgataacagaaattaacctagagggccttatgctaaattagataaatgagcaacagaagtactaatatgttattgataatgacaggaggcagagaaattctaggyagacaagggcaggtctttggcaaaaccccaccttcaagctaaacagcctgaaacccgtggccctaagtgagaacttccatccctatgtgtctgctctcccctgattggttctttctgaataacgtctttttaccagttgaatgttgtcttttccaaaactacctatggctcaccccacccccatcctgtgcctgtaagaccccagaccc

SEQ ID NO: 374304 - DNA, 537 bp, Homo sapiens
aatagacaatggaaatgtaatgattccattattaacttatctaatatccttcactacaacaacaaatgtacatacacacacacacacacacacacacacacatatgcacacacataccatataaaatcttttatgttgatttgcattgcagataaataattgaacattaaaagttaggaaaaaggtatatgggtaagcacaggcacaggaaaaaaaagaaaacgaataaactaaaatataaataaataaatcaagattggaaaatataataagargaagctatatggggaagaatattgaaatgttttgtgtattgtagaagtactattagttaaatcgaaatggaaaataaagataaaatattttaaatgttctgcaacaccatatccattcagtgggtaactttggagtgaccatcctccctcaaaagtgattgacctaaaagaaaaagtatgaattctgattatctcttcatttcaggaacaagtagcgtttaaatgtgtccaaattctttgtttttattatacttgtgtctac

SEQ ID NO: 374305 - DNA, 537 bp, Homo sapiens
aatagacaatggaaatgtaatgattccattattaacttatctaatatccttcactacaacaacaaatgtacatacacacacacacacacacacacacacacatatgcacacacataccatataaaatcttttatgttgatttgcattgcagataaataattgaacattaaaagttaggaaaaaggtatatgggtaagcacaggcacaggaaaaaaaagaaaacgaataaactaaaatataaataaataaatcaagattggaaaatataataagaagaagctatatggggaagaatattgaaatgttttgtgtattgtagaagtactattagttaaatcgaaatggaaaataaagataaaatattttaaatgttctgcaacaccatatccattcartgggtaactttggagtgaccatcctccctcaaaagtgattgacctaaaagaaaaagtatgaattctgattatctcttcatttcaggaacaagtagcgtttaaatgtgtccaaattctttgtttttattatacttgtgtctac

SEQ ID NO: 374306 - DNA, 573 bp, Homo sapiens
gtaatcataaagtagggcaaagggatatcaatttaaattggtttctggcatgtaactgaggtttaaaataggagagataagaggtgaacaaactctagattatcatttacatatagttattagcacataagctggaatagtgtattctacttttcactcttctgattccttctctattcttcatttcacctgaatgctgacacaaggtgcaagagacagatgattgaaaatctatttatattgaggtcccacaagaacaatttttggttaattgattggactactgaatacttaatgaaattttctttcctctttaacctccttttcccttgycttcccatctattttctaccatggttgtacacacacttttagaagacaccattgagaagcagtgttgtaaaaacaaagtaaaattagagaggaacatatatgggtagataagcatataaaaatatgcttaacactatgtgttattaaggaattgtgaattaaaacaatgagatacaactacacccctattataatgaccagaattcaaaataataacgacaccaaatgttgacaaggatg

SEQ ID NO: 374307 - DNA, 573 bp, Homo sapiens
gtaatcataaagtagggcaaagggatatcaatttaaattggtttctggcatgtaactgaggtttaaaataggagagataagaggtgaacaaactctagattatcatttacatatagttattagcacataagctggaatagtgtattctacttttcactcttctgattccttctctattcttcatttcacctgaatgctgacacaaggtgcaagagacagatgattgaaaatctatttatattgaggtcccacaagaacaatttttggttaattgattggactactgaatacttaatgaaattttctttcctctttaacctccttttcccttgccttcccatctattttctaccatggttrtacacacacttttagaagacaccattgagaagcagtgttgtaaaaacaaagtaaaattagagaggaacatatatgggtagataagcatataaaaatatgcttaacactatgtgttattaaggaattgtgaattaaaacaatgagatacaactacacccctattataatgaccagaattcaaaataataacgacaccaaatgttgacaaggatg

SEQ ID NO: 374308 - DNA, 536 bp, Homo sapiens
gttattagcacataagctggaatagtgtattctacttttcactcttctgattccttctctattcttcatttcacctgaatgctgacacaaggtgcaagagacagatgattgaaaatctatttatattgaggtcccacaagaacaatttttggttaattgattggactactgaatacttaatgaaattttctttcctctttaacctccttttcccttgccttcccatctattttctaccatggttgtacacacacttttagaagacaccattgagaagcagtgttgtaaaaacaaagtaaaattagagaggaayatatatgggtagataagcatataaaaatatgcttaacactatgtgttattaaggaattgtgaattaaaacaatgagatacaactacacccctattataatgaccagaattcaaaataataacgacaccaaatgttgacaaggatgtgggacaacaggaactcttatacattgcatagaaagggaaatgaaaattgacattgaagaagcttaaagttttccaaa

SEQ ID NO: 374309 - DNA, 573 bp, Homo sapiens
gtaatcataaagtagggcaaagggatatcaatttaaattggtttctggcatgtaactgaggtttaaaataggagagataagaggtgaacaaactctagattatcatttacatatagttattagcacataagctggaatagtgtattctacttttcactcttctgattccttctctattcttcatttcacctgaatgctgacacaaggtgcaagagacagatgattgaaaatctatttatattgaggtcccacaagaacaatttttggttaattgattggactactgaatacttaatgaaattttctttcctctttaacctccttttcccttgccttcccatctattttctaccatggttgtacacacacttttagaagacaccattgagaagcagtgttgtaaaaacaaagtaaaattagagaggaacatatatgggtagataagcatataaaaatatgcttaacactatgtgttattaaggaattgtgaattaaaacaatgagatacaactacacccctattataatgaccagaattcaaaataataacracaccaaatgttgacaaggatg

SEQ ID NO: 374310 - DNA, 620 bp, Homo sapiens
attgtaacttattacttatttctgccattggcatcaaatgggagcagggatgaccagcatcccattcctaatcgggagactgctttatctgcaactagaagaaaacagcgtatagttcaagaggcacttaaaaattatggctgctcttcaaatatttctttaaaagtcttaactgaattcattctttacaaaagagaaagatctttagaaaaatctctagcctgacatttaaaacataaaaagtatgcattaagtgcggagtgttttcttaaatctgtcattttaaaatgaaaacagaartttattattattataaaagtaataatgcctacaacagaatgttgttatgataactggtgaaacaatggaaggctaaggaccgactgccctagggaatggtctgcattaggtcttattattcctatttgattggtgggaaactcatgcttaaagaagttaagtttaagcaaataacagacaatctgggatattaacacagaatctcaggctccaacacccaattcctttccactagatcagcagggaaaggagtggggatattccttttccagtaagaacttcaaagtaggaatggcctttctacaaacacttgcatgtac

SEQ ID NO: 374311 - DNA, 620 bp, Homo sapiens
attgtaacttattacttatttctgccattggcatcaaatgggagcagggatgaccagcatcccattcctaatcgggagactgctttatctgcaactagaagaaaacagcgtatagttcaagaggcacttaaaaattatggctgctcttcaaatatttctttaaaagtcttaactgaattcattctttacaaaagagaaagatctttagaaaaatctctagcctgacatttaaaacataaaaagtatgcattaagtgcggagtgttttcttaaatctgtcattttaaaatgaaaacagaagtttattattattataaaagtaataatgcctacaacagaatgttgttatgataactggtgaaacaatggaaggctaaggaccgactgccctagggaatrgtctgcattaggtcttattattcctatttgattggtgggaaactcatgcttaaagaagttaagtttaagcaaataacagacaatctgggatattaacacagaatctcaggctccaacacccaattcctttccactagatcagcagggaaaggagtggggatattccttttccagtaagaacttcaaagtaggaatggcctttctacaaacacttgcatgtac

SEQ ID NO: 374312 - DNA, 584 bp, Homo sapiens
actcatgcttaaagaagttaagtttaagcaaataacagacaatctgggatattaacacaraatctcaggctccaacacccaattcctttccactagatcagcagggaaaggagtggggatattccttttccagtaagaacttcaaagtaggaatggcctttctacaaacacttgcatgtacaaattggcatcaaccacataagtaaggaagagaaacaatatattgaatataaaccggaatcttgaggctttattaattattttccaattatttatataaagtaatcaggtctaatgaagtttaattcctaaaagaagtgtatatttcaactttatatgcattattgtgtagcagaggtgtttatatatagcttacctgctcatgtctcaggattatgatgatggtcagatttgaaaatgtgaaaattttacttataataaagtgctcttaccaattgtatttactcacttaaaaagtcagccaccttatctacaaaaagctttttcatgagtcatctagataattactcttcaacttttgacttcattttcacaggcagacacagctttaaaggataattctg

SEQ ID NO: 374313 - DNA, 582 bp, Homo sapiens
ccccaccccaaatgccccaatgtattgtaactgtcattttactgtctacttttatgaaatcatctcttttagattccatayatgagtgagatcacgcagtacttatctttcctgttttatttcacttaacataatgtcttccaggttcatccatgttgtcacaaatgataggattctgagagggtgaatgttcagtgctctccccacatgataactacatgaggtaatgcatatgttaattagccagagttatcgttccactttgtatgtatactacaaaacatcatgttgtatgctataaatacagcagttcctctgtatctgtgggggatcggttccagaacctgccatggaagaccaaaatcagacaatgcttgagttcttgtcataaaatggcatagtatttgacataacagctgcatattctcccttatactttaaatcatctttagattacttataatacctaataaaatgtaaatgctgtgtaaataattgttatattatactggttagagaagagcaagacaaaagtctataacgtgttcagtacagatgcaaatttttttggagtattttcca

SEQ ID NO: 374314 - DNA, 560 bp, Homo sapiens
ggtggctcatgaggcttactagaagctttacagaaagagtttctgggccagtgtctgcctttcagtgccccatgctctgccgcaaccagctcaggaactagccctgctcagartgtccatgcacactcatccacctgtgctggcctgtccagcatctctgccttctctctcctgaaatcctgctcagcactcaggacagtgcagatgtggcctcctccatggtttttctccggttctgttaggaggacttgaattctgtgtcctcaaacttccttgtttaccctgctacatgccacttgttaccaatattcagcatttggttaatacagccttgtaatgtgagtttcttttctgtgtacacctttcacccaggttgcaagctcttggaaggccagggttgtctttatcttatattctaatctctgtattagttttctaggctgccataacaaagcaccacaaactgggtggctgaaaacaacagaaatgtattgtcttgcagttctagaggtggcaagtccaaaatcaaggtgtgagcaggactatgctcctcctaagcc

SEQ ID NO: 374315 - DNA, 560 bp, Homo sapiens
ggtggctcatgaggcttactagaagctttacagaaagagtttctgggccagtgtctgcctttcagtgccccatgctctgccgcaaccagctcaggaactagccctgctcagagtgtccatgcacactcatccacctgtgctggcctgtccagcatctctgccttctctctcctgaaatcctgctcagcactcaggacagtgcagatgtggcctcctccatggtttttctccggttctgttaggaggacttgaattctgtgtcctcaaacttccttgtttaccctgctacatgccacttgttaccaatattcagcatttggttaatwcagccttgtaatgtgagtttcttttctgtgtacacctttcacccaggttgcaagctcttggaaggccagggttgtctttatcttatattctaatctctgtattagttttctaggctgccataacaaagcaccacaaactgggtggctgaaaacaacagaaatgtattgtcttgcagttctagaggtggcaagtccaaaatcaaggtgtgagcaggactatgctcctcctaagcc

SEQ ID NO: 374316 - DNA, 544 bp, Homo sapiens
tagttttataataaactttataacaaaggaaattgccatttttatttgaacatgagagtcaggaatacaggaaccatgatatatggaaatttaccaagactttgtctttcctcttaaacattaactatcaacagcaagtgacaatcaacaaaaacagtcatttagttaagtcgattaaatttctcatcaatttacagaagacttttgtcaaactaggacaaaaatttatctggaataagaaggataatttcccattaactaaaatttcccaacaatttagatatatagaaatagtaggcagaatccttcattcctctgtgtatctacattatttgycacgtaacttttcaattctacaataagaggcagatatccttcctcagtcattaactttgagcccagcaatgtgattctctttgcctaaaataatgctaaaaaacatgaggcgaatggaagcttgaactagcttttgttgtacatttccccttgtgactcacccatcaacactggaagaaaatactccagctagcccaatggttcagag

SEQ ID NO: 374317 - DNA, 544 bp, Homo sapiens
tagttttataataaactttataacaaaggaaattgccatttttatttgaacatgagagtcaggaatacaggaaccatgatatatggaaatttaccaagactttgtctttcctcttaaacattaactatcaacagcaagtgacaatcaacaaaaacagtcatttagttaagtcgattaaatttctcatcaatttacagaagacttttgtcaaactaggacaaaaatttatctggaataagaaggataatttcccattaactaaaatttcccaacaatttagatatatagaaatagtaggcagaatccttcattcctctgtgtatctacattatttgccacgtaacttttcaattctacaataagaggcagatatccttcctcagtyattaactttgagcccagcaatgtgattctctttgcctaaaataatgctaaaaaacatgaggcgaatggaagcttgaactagcttttgttgtacatttccccttgtgactcacccatcaacactggaagaaaatactccagctagcccaatggttcagag

SEQ ID NO: 374318 - DNA, 562 bp, Homo sapiens
tgcaccagctgatactatcaggactgccaaatcaattgacaaaaaattaataattacctaatgttatgtatcactgacatttatggtattctgttatggatcaaatttataacttatatgaaaatcaagattgtagtgaatgacaaattcagatttcaaaatgtctatttctaaaatatgtggctattttcattttttgatatattgtgtacaatgatcaaataaaattttatgttaaccaatacaattttaccaaaccatattctggactttgtgggcagacttacgccttatacacatttataatataccaatgtgccctatgtggaattaaataaatattacttttaaacttagtgtctgagtgctgaacatgtcttagtttactgtattgcatttgctatatcttccttcatggtaagctataawttttcagaacaaatctacaagcccattctccaacaactgaaaaagaacagaaggttaactgagcaacaatagggtaatgtatattaactcagaaatctttacatgacaaattctgagtttaatgataagttaa

SEQ ID NO: 374319 - DNA, 562 bp, Homo sapiens
tgcaccagctgatactatcaggactgccaaatcaattgacaaaaaattaataattacctaatgttatgtatcactgacatttatggtattctgttatggatcaaatttataacttatatgaaaatcaagattgtagtgaatgacaaattcagatttcaaaatgtctatttctaaaatatgtggctattttcattttttgatatattgtgtacaatgatcaaataaaattttatgttaaccaatacaattttaccaaaccatattctggactttgtgggcagacttacgccttatacacatttataatataccaatgtgccctatgtggaattaaataaatattacttttaaacttagtgtctgagtgctgaacatgtcttagtttactgtattgcatttgctatatcttccttcatggtaagctataatttttcagaacaaatctacaagcccattctccaacaactgaaaaagaacagaaggttaactgagcaacaawagggtaatgtatattaactcagaaatctttacatgacaaattctgagtttaatgataagttaa

SEQ ID NO: 374320 - DNA, 610 bp, Homo sapiens
gagctatctatctacctatccatcatccrtcacccatctgtatttaaattagtgcttcccttaagccttctgtttcaaacatcaggcataaagaggattttgttgctcagaggcaatagctctgcatttatttctccccaagtccctggtaagcactaatttttttgtctctgtaatttgatgtttctaggtacctcttatacatagtatattacaatatttgccttttgtgtctgtcttatttcacttaacttaatgttttcatggttcatgcatgttgaattatctctccatggagagctctactttgagctactgtgaataatactgtgaataatactgtgaagaacattggtacacaaaaaatatgtttgaatctctgctctcaattatttgagtatctattggaagtgtaattgctgggtcatgtgtattttcacgtctaattattggaggaactaccataggtttttgtagagcagcttcaccattttacattctcaccagtaatattcaaggagtccaattcattccatctcccctgaatcctgttattttccaacttttccttctttttctttgtttgttttttctttttcataattgccat

SEQ ID NO: 374321 - DNA, 442 bp, Homo sapiens
taagtgattctccagaaaaactacatcctattatttgacatcatctaagtagcaagatattcatttctcatatcttctctcctagtgaaaagtcatgaccttcaacaggaagaagcagtgaaaagcttccatgtgccctttaagtcttcagttttctacctaagctttcaaagtcagtagagatacagtacaggtccctcttggttatataatttgttcccagatctaaacatttgcatgaataaaaataaactaaaagatgcataacatccatgtctattttattgaaagagtcaaaaaggtacatgacataaggatccaagtgggactgataaataaaaaggcagcttctgctgttaatggggctgagacaattgcaaggttaacaggaaacaccgcttctcccaacgtcacrcagcagctggaaaatgccatgaagaca

SEQ ID NO: 374322 - DNA, 606 bp, Homo sapiens
catatattttcatatttgtactcttggtatctagcatagattatggcatgtggcaaatatttatgtttaatgaattaaaactttaaaatagaaatgagtttatgctttacatattaaactccactcctaaattttgcatgaatttaaatgactaatgactttccccctcatttttattatttaataaacatgctgaccaggcacgatggctcacgcctgtaatcccagcactttgggaggccgaggcaggtggatcacaaggtcaggagttcgagaccagcctggccaacatagtgaaaccccgtctctactaaaaatacaaaaaattagctgggcgtggtggcaggcgcctgtaatcccagctactcgggaggctgaggcaggagaatcacttaaggttgcagtgagccgagatcacgccattgctctccagcctgggggacagtgcragactcatctcaaaaaaaaaaaaaaaaaaacaaaaaagctaaattaatgtgagttctaaaagaaatcaagattttttaaataagaaaaaatatatatttatctaagtaattacctttttctgtccctttatttctttatgtagattcactgctttaa

SEQ ID NO: 374323 - DNA, 566 bp, Homo sapiens
gggagtgggagagtggtcacaccatgggaacaacatgatgttttgatatgtgtgtatgttataaaatgatcgctgtaataaagccggttaacatattcatcacctcaccgtgtgtgtgtgtgtgtgtgtgtgtgtttagaacacttaagatccactctcttagtaaatttcaagtaaacattactaactattgtcactatgctgtacgtgaagtctccagtacttggtcacttgtgtctccttgactcagggagtccgccagattctagttagattccccatgcctgtgctgtgacctgaaagtgagctgagatgatcatagggcttactttgtttccattctttcaaggatcagtgtcctttgctgcctgatgtccaatgcctgataaccattgttttatatatttcatccatcgtttttagttgtttaagacaaaaagataaactcagttccttttgcttcrtcatgagcacaggagaatgttcttgtgttttattttaaccatattttattctcccaccaccctttcttgactctcttggtttaatcacattttcaaaatccc

SEQ ID NO: 374324 - DNA, 552 bp, Homo sapiens
cctgtgatgattgcgttaactgcacaaattatttgtagagcatgtgtgtttaaaaaatatgaaatctgggcaccttgaaaaaagaacaggataacagtgatgttcagggaacaagggagataatcttaaagtctggctgcctgtgggctgggcaggacagagccatatttctcttattactgaaaatgggtaagagaaatatcgctgaattctttccccagtaaggaatattaataattaacagccctgggaaaagaatgcattcccagggcggggcctctacaatggctgccctaggagtgtctgccttatgcagatgyagatagggatgaaacacaccctagtctcctgcagcatgcccaggcttgctaggattaggaaattccagcctggcaaattccagtcagaccggttttctgctcttgaaccctgaaaatgcatgcacagtgggacatggaagttcattagtgattctagtttcaccctgaccttctgccttgtgatcttttgtcacccttgaagcatgtgatctctgtgacccacaccctattc

SEQ ID NO: 374325 - DNA, 552 bp, Homo sapiens
cctgtgatgattgcgttaactgcacaaattatttgtagagcatgtgtgtttaaaaaatatgaaatctgggcaccttgaaaaaagaacaggataacagtgatgttcagggaacaagggagataatcttaaagtctggctgcctgtgggctgggcaggacagagccatatttctcttattactgaaaatgggtaagagaaatatcgctgaattctttccccagtaaggaatattaataattaacagccctgggaaaagaatgcattcccagggcggggcctctacaatggctgccctaggagtgtctgccttatgcagatgcagatagggatgaaacacaccctagtctcctgcagcatgcccaggcttgctaggattaggaaattccagcctggcaaattccagtcagaccggttttctgctcttgaaccctgaaaatgcatgcacagygggacatggaagttcattagtgattctagtttcaccctgaccttctgccttgtgatcttttgtcacccttgaagcatgtgatctctgtgacccacaccctattc

SEQ ID NO: 374326 - DNA, 591 bp, Homo sapiens
ccacaacctcttcatttgtttctggaattctcgcaaaggcgatttggttcatatattgttaagtcagtgtctctgtaggggaatgagggcctgggtttttattccaccatcttgctgacatcattccaataagaatgttttgctgtcttctgggtacgagtttgtttgtggatggagtcctgtgattgtgctgagtttagactgttctcttccaaaatccaacatctaaataaataagtgatgctttcagcaataagagtgataatcatgaattgttttctttctccctacccattccattctagcagtgtctgactcagaagcagctcagactggaaacagaatccaggacctgggccatcacaccacactagcttcccctggagtcccaccgcctgcttatcagccatagaaagtttggcttctgttctttatgtatcaaaacagcaaagccaaatagtttagacttatttaggcttgcaaagaggaaagragataaaaatagctaaaatgagctagtataagaattactgcactgaggcaaatatttgggtttgttttgctttgctttgtttttcagagtcactgcta

SEQ ID NO: 374327 - DNA, 561 bp, Homo sapiens
ggctgtaaatctctcaaatttgtctaaagatgtaaatttatagatccaagaagttcagtgaatcccagagtaaataggaagtaaatcattccgtcatagtcacaatgttgaaaaccaaacaaggagaaaaaaatcttgacagctgccagaataaaaaacgacacatcacataaaggggaataataattagaaaccactggcttttcatcagcacctataaaggcgatgcccctgcagtgggacaayatcattaaagtgctgaaagaaaagaaaacctctcaacccaaaattccacatcaagtgaaaataacctcaaaaattagagcaaaatgaagacttttgcagataaaagtaagccaaaagaatatatcatcagaagaattgcactgtaagaaatgctaaaggaaattcctcaggctgatgggaattgatagaaaacagaaaatcgtatcttaaggttgagatgaacgggatctgaaataacaattacccaggtgaatattttcaaatatttttctgtgtatttccttaatatacatatagttataatacacatggcga

SEQ ID NO: 374328 - DNA, 539 bp, Homo sapiens
atgccgtttaacttgtactctactagccagctgtgcccatattaaatactgaaataaatgaaaaaacgaggatgtcttaattttgatattccccaaagcagagcttaaaacaaggtccggagtgcacatagtytatttgggaaatgtatttgagaagcaagagtgagcaagagggaatgggacaaggaaggaagaaaacacaataatgggttgatcagttattgaagtggccaccactgaggctggtgggtaagagtctctgggaactttacaaggccagtgtagacagcacctccaaagtgtccttatgcaagacagaaagatgtgagcatttatccaccgactccatcacacagtgtttggtgccccagcagtagtaactccccgtcatttccagactgcacctgcatggagaatgggtgagatcctgggcttggaaaaagtcttgaggggaaaatctgagagaggagaatgacagtgtacatagaactgttcacggtagttgcagctgaaaccacaggttgacttagcagatataa

SEQ ID NO: 374329 - DNA, 603 bp, Homo sapiens
cctccctcttcactgtgtggggcctccctacaagaatctcagcaactccagccaggggtttagggacaaaattctgatctccctgggactaagcccctagcagcaggggyggccacggtctctgtggataagcaggcttagtcttctccctgctggctctgaggaacctgggcagttccgacgagtgggattccttcagcgcagtgcacccccatcgccaaggggcagccagagtgcttcattaagtgggtgcctgatcccgtacctcctgactgggtgagaccccccaagaggggtcaccaaacaccttatacaggatatttcccactggcatcaggttggtgcccctgtggtagagatcccagaggaaggatcaggcagccatttctgctgttctgcagcctccactagtgacacctccaggtacaggaggggcccagacgaataggagtgaatccccagcaaactgcagcagccctacggaagcacataggcctacgggccctatggaagtggagccagactgttaaaagaaaaacaaacagaaagcaacaacaacaacagaatcgacaaaaatgtccccacaaaaaccccatccaaaag

SEQ ID NO: 374330 - DNA, 603 bp, Homo sapiens
cctccctcttcactgtgtggggcctccctacaagaatctcagcaactccagccaggggtttagggacaaaattctgatctccctgggactaagcccctagcagcaggggtggccacsgtctctgtggataagcaggcttagtcttctccctgctggctctgaggaacctgggcagttccgacgagtgggattccttcagcgcagtgcacccccatcgccaaggggcagccagagtgcttcattaagtgggtgcctgatcccgtacctcctgactgggtgagaccccccaagaggggtcaccaaacaccttatacaggatatttcccactggcatcaggttggtgcccctgtggtagagatcccagaggaaggatcaggcagccatttctgctgttctgcagcctccactagtgacacctccaggtacaggaggggcccagacgaataggagtgaatccccagcaaactgcagcagccctacggaagcacataggcctacgggccctatggaagtggagccagactgttaaaagaaaaacaaacagaaagcaacaacaacaacagaatcgacaaaaatgtccccacaaaaaccccatccaaaag

SEQ ID NO: 374331 - DNA, 499 bp, Homo sapiens
aatataatactacaaagcaaatttagtggtggttattctgcaagcatgttttatttttttaaataattaacccttttccccattataaattttacttttatagttttgctaacttctcactcagaaagttaaawaagcataagcttttttttttttttgcttctttatcttatttatttaaggtgtatagcttgaattctaactaggaatgacacacacacacaaacccaaaacgatggagaaagatgcaactttctaacaaatcctcgcttttgctgttcaggatgctatctttctttataacataagggtattggcatgctctcattctgtgcaaaatgtacatggaatgaaaatttattgctcatgattcttgaataaataaaattctaaagcagcatagcataataggggcaaatgttttattaaaggaggtttttctttttcttttttttctattcaactgatataaatgttttatgaaggtttcagagtattc

SEQ ID NO: 374332 - DNA, 499 bp, Homo sapiens
aatataatactacaaagcaaatttagtggtggttattctgcaagcatgttttatttttttaaataattaacccttttccccattataaattttacttttatagttttgctaacttctcactcagaaagttaaaaaagcataagcttttttttttttttgcttctttatcttatttatttaaggtgtatagcttgaattctaactaggaatgacacacacacacaaacccaaaacgatggagaaagaygcaactttctaacaaatcctcgcttttgctgttcaggatgctatctttctttataacataagggtattggcatgctctcattctgtgcaaaatgtacatggaatgaaaatttattgctcatgattcttgaataaataaaattctaaagcagcatagcataataggggcaaatgttttattaaaggaggtttttctttttcttttttttctattcaactgatataaatgttttatgaaggtttcagagtattc

SEQ ID NO: 374333 - DNA, 554 bp, Homo sapiens
attggcatattaaagtggaatatctctatatatgtatatataatgtgaattttaattcccataaataattacaaagataatgaattagaaatattttgaaagccctccaataaaaattgataataatgaatgtttttctggaaagaaacagcacagaagcaaagaaaatcctagacagaatatatataagaatcamcatcctattccttcatggaaaactcaaataatatttttatttttggatattagatatgagtttattgatcaacatgatatcactttatgtttctattttgtttctttcaactctattgaggtacattgtcatgcatatgtaaagtgtgtacttccatgatcttgatatatgtatacctgtgaaactatcaccataatcaaggtaacatacaattatatcacctccaaaagcttacttgtgccttctttgtaattctttccttcctctctcctatccccaggcaagcactgatatgctatctgtcgctgtactctagtttgtatttcctagacttttatgtgagtataatcatacaata

SEQ ID NO: 374334 - DNA, 554 bp, Homo sapiens
attggcatattaaagtggaatatctctatatatgtatatataatgtgaattttaattcccataaataattacaaagataatgaattagaaatattttgaaagccctccaataaaaattgataataatgaatgtttttctggaaagaaacagcacagaagcaaagaaaatcctagacagaatatatataagaatcaccatcctattccttcatggaaaactcaaataatatttttatttttggatattagatatgagtttattgatcaacatgatatcactttatgtttctattttgtttctttcaactctattgaggtacattgtcatgcatatgtaaagtgtgtacttccatgatcttgatatatgtatacctgtgaaactatcaccataatcaaggtaacatacaattatatcacctccaaaagcttacttgtgccttctttgtaattctttccttcctctctcctatccccaggcaagcactgatatgctwtctgtcgctgtactctagtttgtatttcctagacttttatgtgagtataatcatacaata

SEQ ID NO: 374335 - DNA, 554 bp, Homo sapiens
attggcatattaaagtggaatatctctatatatgtatatataatgtgaattttaattcccataaataattacaaagataatgaattagaaatattttgaaagccctccaataaaaattgataataatgaatgtttttctggaaagaaacagcacagaagcaaagaaaatcctagacagaatatatataagaatcaccatcctattccttcatggaaaactcaaataatatttttatttttggatattagatatgagtttattgatcaacatgatatcactttatgtttctattttgtttctttcaactctattgaggtacattgtcatgcatatgtaaagtgtgtacttccatgatcttgatatatgtatacctgtgaaactatcaccataatcaaggtaacatacaattatatcacctccaaaagcttacttgtgccttctttgtaattctttccttcctctctcctatccccaggcaagcactgatatgctatctgtygctgtactctagtttgtatttcctagacttttatgtgagtataatcatacaata

SEQ ID NO: 374336 - DNA, 556 bp, Homo sapiens
ttaaaattgaatttaaacattgttcctaccaagaaggatcttataatcaagtgaaggattaattgaaaatccattctaattctcctagcctgctgtattttttttttttttttttggaaatgttggataacatctatctcaartttgtatctgcaacctaattttgtccagaataacttttgcttccgtaactaggcatccaaccctctactcagactgaattaggcctttaccaagtcattcttggtgtgacatcttacggcaaacattccatagcctatggacaagatagaaacctgattctgcctgttattttttttctgtgtgctgtggtgcattgtggaggtaccgtctctggcatagtgattaaggacaacagggattgtcggcaatgagaaagtttcagagaaatgactgtgatggaagggggaaccttaaaaataggaggccatccacatgccatgcaaagtttgtgattgatggactacctttgataaagaatgttagcacaacgggtcatatgtcatacattatagtttcatatatgatgggttaa

SEQ ID NO: 374337 - DNA, 556 bp, Homo sapiens
ttaaaattgaatttaaacattgttcctaccaagaaggatcttataatcaagtgaaggattaattgaaaatccattctaattctcctagcctgctgtattttttttttttttttttggaaatgttggataacatctatctcaagtttgtatctgcaacctaattttgtccagaataacttttgcttccgtaactaggcatccaaccctctactcagactgaattaggcctttaccaagtcattcttggtgtgacatcttacrgcaaacattccatagcctatggacaagatagaaacctgattctgcctgttattttttttctgtgtgctgtggtgcattgtggaggtaccgtctctggcatagtgattaaggacaacagggattgtcggcaatgagaaagtttcagagaaatgactgtgatggaagggggaaccttaaaaataggaggccatccacatgccatgcaaagtttgtgattgatggactacctttgataaagaatgttagcacaacgggtcatatgtcatacattatagtttcatatatgatgggttaa

SEQ ID NO: 374338 - DNA, 555 bp, Homo sapiens
aattggcagcagtcacatgcttttattaaactattccaatcaagtctccacagcatcatacattctgcttatcactaggcccacctgcagccagctctcttcctggcctcttatcagcaaagccaattactttctcatgtgcttgctttgtggttttgcttatagactccaccacacctccacaactaagcccacaggctattaggtaaattctatttcttattctaactccccgccctayatgagttactaccttgaggtggtatataagttcctgtctttgtctctatggagaagtgttcttttatttgaatgttttcttgcttttctgggtctatttatttttttcccctcttttcccttcattgcttcttcctcttactcctttttcccttctccttagcaaagttttgaaagcctttttaaaccctcagttaagaatgatttttaaaacatataatagttccctacaaattcctgtcccaaataactctaactttttattaattaagtttctagggaagtagtattaatgagaaaaagcaggaattttaa

SEQ ID NO: 374339 - DNA, 559 bp, Homo sapiens
ctaagagtagtgccctgtgctcctccttcacaccaccccccagttttctgcctagctccaactttctacttgctttggcattatgccatttggcatgtccccatccaggagggtaacaacactatctttcacacccgggccaagaacacaggaaagtgaagtagaagagtggataaggccaatcccactaagtagaaggctaagcagtgctgagcccttaacaaaagccacarcttccagctgatctttactgtgtttcaagacctgtcactcagggccagcttcacggtatgagaactgtacaggcccacaacacccatggtcagaaggttcccctgtttgtttaatgatctactattgctgtcctgaaatttttaataattttatctttgaacttattttttgtaagttcagtctaatgggataatgaagcgtgtgcatgagcagaagagatattcacagtaagttctctactatttcttgtgatctcacttgcacatagagttcatggtgcctcgtgagcacagaattctgatggacccatcataggtgagagttc

SEQ ID NO: 374340 - DNA, 559 bp, Homo sapiens
ctaagagtagtgccctgtgctcctccttcacaccaccccccagttttctgcctagctccaactttctacttgctttggcattatgccatttggcatgtccccatccaggagggtaacaacactatctttcacacccgggccaagaacacaggaaagtgaagtagaagagtggataaggccaatcccactaagtagaaggctaagcagtgctgagcccttaacaaaagccacaacttccagctgatctttactgtgtttcaagacctgtcactcagggccagcttcacggtatgagaactgtacaggcccacaacacccatggtcagaaggttcccctgtttgtttaatgatctactattgctgtcctgaaatttttaataattttatctttgaacttattttttgtaagttcagtctaatgggataatgaagcrtgtgcatgagcagaagagatattcacagtaagttctctactatttcttgtgatctcacttgcacatagagttcatggtgcctcgtgagcacagaattctgatggacccatcataggtgagagttc

SEQ ID NO: 374341 - DNA, 614 bp, Homo sapiens
attttcccattcaacttactttaatttcttagttgttttaaaagtttgtttgcagattgtcataaaatttgaartcatgtagcaataatgatagactgtcttgaaattatatatgaaagatagagttgcttcttccctttaactgtatatatcattttattttcattatttcattagttggacttctagcataatgttgaagaatagcaacaatagagggtgtcttcatctcaatatcaactcaaattagaaagatttataatgtctcaccattagatctgatgttcacttaaatttctggtactttattaagttaagaacactctattttggacttcttttactaaatgtctttattactaatgagtatttatttccagtaaatgtttgtcactactcattgaaatgaacaaataatgtttcattgttaatatatattaataggtattctaatatgggaatttactttatctagagaaatgctatttgattattcctttttaaaatatgctactcaaatttgacttgttaatactttatgtttttgcatttattttataattggcatatgggggtgtgtgtgtgtgtgtgtctgcactcacgcgcgtgtgtgt

SEQ ID NO: 374342 - DNA, 607 bp, Homo sapiens
tgttaggttgagaaagttctcctggatgatatcctgaagtatgttttccaactccattmtggtgcccctgtctgtctcaggtacccagattatttgtaggtttggtctttttacataatcccatagttcttggaggttttgttcattccttttcattcttttttctctaatcttgtctgcctttcttatttcagcaagatagtcttcaagctctgaaattctttcttccacttggtcttttcagctatcagtacttgtggttgcattgtgacattcttgtgttgtgtttttcagctccatcaggtcatttatattcctttctaaactggttattctggttaacagcttctctaatagtttatcatgattcttagcttctttgcagtgtgtgggaacatgctcctttagctcagtgaagttcattattacctaccttctgaagcctaattctgtcagttcagccatctcagcctcagcccatttctgtgcccttcctggagaggtgttgcaatcgtttggaaaacgggcactcttctccaaattctggccatgagctgccacagcctctgtgctttttgaatttttagcatattttgttgattctttc

SEQ ID NO: 374343 - DNA, 507 bp, Homo sapiens
ttgtgcagactgcctggttacctcagagccagcaggggaaaaactaagttcactgatctgcagagacacagccaccgctccccctaggggctcagtcctagggagatcagagttctatctgtaaaccccaggctggaggtgctgaaattcccacagggatccctgcccagtgaggaaggatgggtccaggcctgtcctaaagactcagtctgaccacgagctgctatggcctctgckctgcgctgtgaggatttcctcctgggtccaatccacccagtctccctggcattggcagggcaaaaacagcaggctggagctgcagtgatggttgccacccctcctggcggggctcagtcctcttaggcagcaggcagctgcagtgatgatggccacccctccccctgggtgctcagtcatcttaggcagctggcagccaaagtgatggtggccatgtgttcccccaaggaactcggtagtcttaatcagtctccagcccaggggccactg

SEQ ID NO: 374344 - DNA, 507 bp, Homo sapiens
ttgtgcagactgcctggttacctcagagccagcaggggaaaaactaagttcactgatctgcagagacacagccaccgctccccctaggggctcagtcctagggagatcagagttctatctgtaaaccccaggctggaggtgctgaaattcccacagggatccctgcccagtgaggaaggatgggtccaggcctgtcctaaagactcagtctgaccacgagctgctatggcctctgcgctgcgctgtgaggatttcctcctgggtccaatccacccagtctccctggcattggcagggcaaaaacagcaggctggagcygcagtgatggttgccacccctcctggcggggctcagtcctcttaggcagcaggcagctgcagtgatgatggccacccctccccctgggtgctcagtcatcttaggcagctggcagccaaagtgatggtggccatgtgttcccccaaggaactcggtagtcttaatcagtctccagcccaggggccactg

SEQ ID NO: 374345 - DNA, 507 bp, Homo sapiens
ttgtgcagactgcctggttacctcagagccagcaggggaaaaactaagttcactgatctgcagagacacagccaccgctccccctaggggctcagtcctagggagatcagagttctatctgtaaaccccaggctggaggtgctgaaattcccacagggatccctgcccagtgaggaaggatgggtccaggcctgtcctaaagactcagtctgaccacgagctgctatggcctctgcgctgcgctgtgaggatttcctcctgggtccaatccacccagtctccctggcattggcagggcaaaaacagcaggctggagctgcagtgatggttgccacccctcctggcggggctcagtcctcttaggcagcaggcagctgcagtgatgatggccacccctccccctgggwgctcagtcatcttaggcagctggcagccaaagtgatggtggccatgtgttcccccaaggaactcggtagtcttaatcagtctccagcccaggggccactg

SEQ ID NO: 374346 - DNA, 507 bp, Homo sapiens
ttgtgcagactgcctggttacctcagagccagcaggggaaaaactaagttcactgatctgcagagacacagccaccgctccccctaggggctcagtcctagggagatcagagttctatctgtaaaccccaggctggaggtgctgaaattcccacagggatccctgcccagtgaggaaggatgggtccaggcctgtcctaaagactcagtctgaccacgagctgctatggcctctgcgctgcgctgtgaggatttcctcctgggtccaatccacccagtctccctggcattggcagggcaaaaacagcaggctggagctgcagtgatggttgccacccctcctggcggggctcagtcctcttaggcagcaggcagctgcagtgatgatggccacccctccccctgggtgctcagtcatcttaggcagctggcagccaaagtgatggtggccatgtgttcccccaaggaactcggtagtcttartcagtctccagcccaggggccactg

SEQ ID NO: 374347 - DNA, 654 bp, Homo sapiens
ctcaagaatcttttacacatttaaaaatgatggtgaatactcatgagatttttcctatgtgtatgcatcaattgataattactgctaaattcttatgtgtttattaatttattttaaaagaatagtgagccaggcatggagtcatgaaatagtaatcccagctatttgggaggctgaggcaggagaatcacttgagcccaagagttcaaggattcaatgtgttatgattatgcctctgaatagccactctattccaatctgataaacagagcaagactccatctctacaaaaaaaaaaagtaaaagaatcaataaataaatatartaataaatccaatgtatgctgaagtgaccattttttttaacaaccaagtggaagattaacagagaatggcttctttttattattttcaatttcattaatgtctgactcaatacaagacaactggattcctgtacatgtgtatgcattcgatctgttgtgctatgttagttagttgaggtatatgaagaaaatctcatcttacacagatatgggaaaagggagaagttttttttaaattatactttaagttctggaatacatgtgcaggaagtgcaggtttgttacataggtatacatgtgccatggtggtttgctgcacccaccaaccc

SEQ ID NO: 374348 - DNA, 654 bp, Homo sapiens
ctcaagaatcttttacacatttaaaaatgatggtgaatactcatgagatttttcctatgtgtatgcatcaattgataattactgctaaattcttatgtgtttattaatttattttaaaagaatagtgagccaggcatggagtcatgaaatagtaatcccagctatttgggaggctgaggcaggagaatcacttgagcccaagagttcaaggattcaatgtgttatgattatgcctctgaatagccactctattccaatctgataaacagagcaagactccatctctacaaaaaaaaaaagtaaaagaatcaataaataaatatagtaataaatccaatgtatgctgaagtgaccattttttttaacaaccaagtggaagattaacagagaatggcttctttttattattttcaatttcattaatgtctgactcaatacaagacaactggattcctgtacatgtgtatgcattcgatctgttgtgctatgttagttagttgaggtatatgaagaaaatctcatcttacacagatatgggaaaagggagaagttttttttwaattatactttaagttctggaatacatgtgcaggaagtgcaggtttgttacataggtatacatgtgccatggtggtttgctgcacccaccaaccc

SEQ ID NO: 374349 - DNA, 602 bp, Homo sapiens
catctcaaaataaataaatacataaagttttaaattagatctgattggaagatctttcatttgttcaggggcaaaactggggtgcgtggggatatgtgggtgagtggagagtgaatgggaggtaggtattgcaaaacagaatgtaaaagattgagacctcaggagattgacatttcagacccatgctgtaccagactagtgatgctcagctgtagtgggactcaggaaagtcacagtagcctaaaattagatgtgggtcactcaggaagggtgaaaatgctaccatttaatcaccacaastgcataagtgaaaccatgcaacattctgtgatgttcccactaccgtctagtgttatttcctgacaggaaagggctgataaaggacatgctttgaaaatcttaccattgttgtaaagacaaaactgtgggcaagaaatgttagaacactggggaggaggggcagaggaaagaacatctgggggccatacatgacactgcagcagatttattcctcactaagcctgctgttgtatcattttacccttccagaaaatggagatgaagcgttcacttattataccttaccaaggtaagcttcatac

SEQ ID NO: 374350 - DNA, 602 bp, Homo sapiens
catctcaaaataaataaatacataaagttttaaattagatctgattggaagatctttcatttgttcaggggcaaaactggggtgcgtggggatatgtgggtgagtggagagtgaatgggaggtaggtattgcaaaacagaatgtaaaagattgagacctcaggagattgacatttcagacccatgctgtaccagactagtgatgctcagctgtagtgggactcaggaaagtcacagtagcctaaaattagatgtgggtcactcaggaagggtgaaaatgctaccatttaatcaccacaactgcataagtgaaaccatgcaacattctgtgatgttcccactaccgtctagtgttatttcctgacaggaaagggctgataaaggacatgctttgaaaatcttaccattgttgtaaagacaaaactgtgggcaagaaatgttagarcactggggaggaggggcagaggaaagaacatctgggggccatacatgacactgcagcagatttattcctcactaagcctgctgttgtatcattttacccttccagaaaatggagatgaagcgttcacttattataccttaccaaggtaagcttcatac

SEQ ID NO: 374351 - DNA, 561 bp, Homo sapiens
ttttttaatccaaaaatattctgtctaaagagacttagtttagctttcaagacaatcataggctgaaagtgaaaggatggaaaaatatatttcatgcaaatggttaccaaaagagagtagtaatgactatcctgacagcaggaaaacaggatgttaagtaaaaaattgtcacaagagacaaagaaggtcattatataatgatatagggatcaattcatcaagaggatacaaaagttgtagatatatatgcacctaacttcaaagcacckaaatatatgaaggaaatattaacagacttgaaagaagaaatagcaatgcaataataataggaaacttcagtacctcattttcaacaatggatagatcatccaataaataaggaaacagcaaacttgaataacagtatagaccaagtgaacctaacatacacatgcagaacattccatccaacagcaacataataaacattcttctcaagaacacacatggaatattctccaagatagagcacatatttgaccacaaaaaagtcttaagaaatttaagaaggttgatatcata

SEQ ID NO: 374352 - DNA, 561 bp, Homo sapiens
ttttttaatccaaaaatattctgtctaaagagacttagtttagctttcaagacaatcataggctgaaagtgaaaggatggaaaaatatatttcatgcaaatggttaccaaaagagagtagtaatgactatcctgacagcaggaaaacaggatgttaagtaaaaaattgtcacaagagacaaagaaggtcattatataatgatatagggatcaattcatcaagaggatacaaaagttgtagatatatatgcacctaacttcaaagcaccgaaatatatgaaggaaatattaacagacttgaaagaagaaatagcaatgcaataataataggaaacttcagtacctcattttcaacaatggatagatcatccaataaataaggaaacagcaaacttgaataacagtatagacmaagtgaacctaacatacacatgcagaacattccatccaacagcaacataataaacattcttctcaagaacacacatggaatattctccaagatagagcacatatttgaccacaaaaaagtcttaagaaatttaagaaggttgatatcata

SEQ ID NO: 374353 - DNA, 547 bp, Homo sapiens
ctaacttctttccttccttcacaraacacaatgccagtcttatagctgatatagatctagacaaggagaagtgggtttaatttctactgccttgacttctttccttccttcacaaacacaatcccagtcttatagctgatagagataagtaagcaagcaaatataatacagaacaatatgggctgcaatgagaataactgcacaggactgtgggatcccataggagagggatttagtctagatgtggaggtcagtgaaggcctctaggaataagcaatatctaaacaggaacccaggggacaaaagagttagccaaccaaaaggttggggtggaagaggaaagctcctgggcaaaggttttgttcaaatgaagcaccaagaaagagtatgaaccattgagagacctgcaagcagtgcagttgtagcctacggtgaaagtggaggaattgcagggaataagtttagaaagctatctagggactgggtgaaagaccagataatccctgtcttccagagtttgggttttatacagaaagtaatgtgtagc

SEQ ID NO: 374354 - DNA, 587 bp, Homo sapiens
atttagcatctaccgctgcatagtatttctgcattgccttctagacaaggagaagtgcgtttaatttctactgccttgactaacttctttccttccttcacaaaacacaatgccagtcttatagctgatatagatctagacaaggagaagtgggtttaatttctactgccttgacttctttccttccttcacaaacacaatcccagtcttatagctgatagagataagtaagcaagcaaatataatacagaacaatatgggctgcaatgagaataactgcacaggactgtgggatcccataggagagggatttagtctagatgtggaggtcagtgaaggcctctaggaataagcaatatctaaacaggaacccaggggacaaaagagttagccaaccaaaaggttggggtggaagaggaaagctccygggcaaaggttttgttcaaatgaagcaccaagaaagagtatgaaccattgagagacctgcaagcagtgcagttgtagcctacggtgaaagtggaggaattgcagggaataagtttagaaagctatctagggactgggtgaaagaccagataatccctgtc

SEQ ID NO: 374355 - DNA, 584 bp, Homo sapiens
ataaaacaaccattacctatcaacagctactgaagcccattctgtagattatcacttccaactttttctgaagtttaacatacctatggctgtctataaattckctggacaactttattatgccagtatcaaaatgtgaagtgatgaggaaacaacttctttccatgtctcagaacacatagggagttaaataaaattaaaaaatgaagatctcagtcttctaaagtagacaataattgttaatgtcaataattatttaaatgatttatttttattagcataagatgactaaaaagatgctgatttaatatatataagatatactcaagttagtcttttggaaatatagatctcatttgaggcttggggtggtctttaaaaatatttttttctttgcaaatttttataattttctttgtcttttaaaaattttcttaaagtatacatatttatgtataataaatgtaatatattataattatatataatataatgtggaaatattacattatatataattatgtttattatataaccatctcactgattcttttttttcttttttttttttgagaccaagtctc

SEQ ID NO: 374356 - DNA, 492 bp, Homo sapiens
taaatttagctagagccagattcttttaggaaaattggggaacacaatattctatagtactaagaccaaaggagacaaaagcagtgacatttatacaaaattgtgttttaaaaacaaagytagtggactcttggacagtaagaaaaatggaggggaagtactttgcatggtgtaattcatggataagtgtctagaggatgagaacaagagtaatgatattggcagaccaacccaattttcctaaaaatctatcttcaggatcctcttccataactgtttcctgctttttgttagcatgtcttcttcttgaacttttggttgtctagatatttagaaaaaaaaaatttaaattattttctcaggaagatcacacagagaagcaaaattttcccccaaagttggaataaactagttctttaacagttctctcgaggagacagtatgacacagtgatgaggagaataggctctggactcagggtacctataacaa

SEQ ID NO: 374357 - DNA, 410 bp, Homo sapiens
acatgccattattctgacaggaggtgcaaaagcattcagtcaaattcagaataatgctacctctctgatcccagcaaccgttcatggctgtgcccatctcagtgaaatccttcttttagaatcttaactaatttgataagatagacagataaatagaatactaartaaaaaatcagtatggattaaatttatattttcctcgatactgagtattttttcttaggtttagtttgggtttcctcttttatgagttgcatattcatatcctgcgtctatttttttctattggttgtttgtatttttcttccacattcattaaaattctttgcctattctggatactaatacttggaggaattacagattgcaaatatcttctcaatttcttttcactttctttctggtgtctt

SEQ ID NO: 374358 - DNA, 375 bp, Homo sapiens
ctagttaatgaattatataaaaaccctttaccattctttaacattcttcctaggtttagcagtagtagtttcacttggttaggaaatgccccatcatccactaaaaatacctgcattatctttctgtatgtatctctgctaattaaatttgtttaattagagctttgctaatgattagaagttacactaatagaaagttagattcctttgtgtctgtagggtgcacttagaacattgcggcctcagagccttgaattaatgattccttatcttctggggttcayacatcagaaaaagcagcaaagaatgtagaccacttaaaagagagtggtgacatatattttgctctcataatattaccatctactaattctg

SEQ ID NO: 374359 - DNA, 604 bp, Homo sapiens
aaaatcatagcaacatttcttttttactttttatttttctattatttttattttttatttattatcattttttttttttttttttttttgagatggagtctcgctctgtcgcccaggctggagtgcagtggcgtgatcttggctcactgcaagctccrcctccgggctcatgtattttttatttttttattatactctaagttctagggtacatgtgcacaacgtgcaggtttgttacatatgtatacatgtgccatgttggttcacagcaatatttcttaaactatcttccctttctccccaattctccatctcatagcttctccttagcctttcatctggaccctcttgccaatttctctcgcacatcttgccatggttctctctctctccatcctaactctcatatgtacaacgtcttagccttcctgagttctttaaaatgccctctctactttccaatgatccagattctcctcaataaagtctagactagacccagcaatctagaatccttacccttttcttcttttcttcctgtttctgtatgtctctttccattctcgtgattcagcattacaaaatgcctgaatatcaggccagc

SEQ ID NO: 374360 - DNA, 604 bp, Homo sapiens
aaaatcatagcaacatttcttttttactttttatttttctattatttttattttttatttattatcattttttttttttttttttttttgagatggagtctcgctctgtcgcccaggctggagtgcagtggcgtgatcttggctcactgcaagctccacctmcgggctcatgtattttttatttttttattatactctaagttctagggtacatgtgcacaacgtgcaggtttgttacatatgtatacatgtgccatgttggttcacagcaatatttcttaaactatcttccctttctccccaattctccatctcatagcttctccttagcctttcatctggaccctcttgccaatttctctcgcacatcttgccatggttctctctctctccatcctaactctcatatgtacaacgtcttagccttcctgagttctttaaaatgccctctctactttccaatgatccagattctcctcaataaagtctagactagacccagcaatctagaatccttacccttttcttcttttcttcctgtttctgtatgtctctttccattctcgtgattcagcattacaaaatgcctgaatatcaggccagc

SEQ ID NO: 374361 - DNA, 604 bp, Homo sapiens
aaaatcatagcaacatttcttttttactttttatttttctattatttttattttttatttattatcattttttttttttttttttttttgagatggagtctcgctctgtcgcccaggctggagtgcagtggcgtgatcttggctcactgcaagctccacctccgggctcaygtattttttatttttttattatactctaagttctagggtacatgtgcacaacgtgcaggtttgttacatatgtatacatgtgccatgttggttcacagcaatatttcttaaactatcttccctttctccccaattctccatctcatagcttctccttagcctttcatctggaccctcttgccaatttctctcgcacatcttgccatggttctctctctctccatcctaactctcatatgtacaacgtcttagccttcctgagttctttaaaatgccctctctactttccaatgatccagattctcctcaataaagtctagactagacccagcaatctagaatccttacccttttcttcttttcttcctgtttctgtatgtctctttccattctcgtgattcagcattacaaaatgcctgaatatcaggccagc

SEQ ID NO: 374362 - DNA, 569 bp, Homo sapiens
gtttgatgtaatattataaaaatatatattggattgagtgtcaagaattggaagaaagagaaggaccaggacttstagattaacaaagttaaaactggaataagtaacctagtaaaaaattagaaaaaggaaaaagaagaaacaataaaataaattaagtggtaagcatacataaaaatgaaaataataaacaattatttaaattgttcctctaaatatgaatggactggattttttctattagtgcagcagttgtcagccttggaggaaaaaaaattatgtgatttttaaaaaataaaacacatttgaaacaaataaattttttaaaatgttgaaaaaaaggagtaagcagatagacactagggatatatagataagcagatagacactagggatatataaataaaagaagagcagtcagggaagtataaatatagaaggtggaatttaaagttaagctcagtaagacagaacagagagaaatactatgtgatagtaaaaggcataatttatgaaaactttaaacctgtatacacgatacaatattaactaaaactattaaaaagaag

SEQ ID NO: 374363 - DNA, 491 bp, Homo sapiens
tccctcaggagcagtccatctttgctcttcctcctccttcagaggcaacttccatttctcctccactcccccaggaacattgcctgggtcctgggggcaggagtttcctgtttctctcccagcagtggattgcttttgctttgtgtaagtcagagaagggtacaagcagagtttcatgcctctgtgccactgaaaggactccctagagtcttttgcaatgctcccaattattatcattattttgagacagkgtcttgctcagtcacccaggctggagtgcagttcttccatttgtttgtgtcctcttttatttcgttgagcagtggtttgtagttctctttgaaggggtccttcccatcccttgtaagttgcattcctaggtattttattctctttgtagcaattgtgaatgggagttcactcatggtttggctctctgtttgtctatcgttagtgtataggaatgtgtgtgatttttgcacactgatttt

SEQ ID NO: 374364 - DNA, 515 bp, Homo sapiens
gattaatacattaatggcagttattcattagcaactgtgaacaacactccccaataagcagcagtctgggctttgttggagagcccactgcaactgctcgttagcatttgtgggaaacatcccagtaaaaataccaaaggctatcacgctaaatccgactggggtgacagaggtttacatacttccacgtaacttctagtcatctcccaatattcatagacccttccttcccatatatccctactgggttcccctcaattacactctgttgccccccatcatatccmgttccttggcaaagcccccttccttatttctatagcaaatcaattcatcaaacaagaagtaatccttctccagggaagaagagctgctgaatcactcttgggactggaagggggctggtggaggggacgaggcagatgcaaggggagaaaaaagtatagggatgaaaatgtgcagcacacaggaacgacaactgggaggactgtgctctcatgcctctggtttctaga

SEQ ID NO: 374365 - DNA, 566 bp, Homo sapiens
ccacagtacaacttgggatagttcttagttacaaaggggcctatgccacaggcagaatgaagaagagcatcaggatcccctccccaagattatgctatgcctagaagggattctgggaggtgtgcagtgcatacatgctatacatatgtgctgagattgtagtagattcactcccataacctccaaccctcaatacccttacaacagatccatgtgagtttgcaactaacccctacccacgtcagctggtcctggcattctgcacatacctccagggaattttyatccataggagcctggaccacaggtagaaggaccaaggaaaagtacaatgagttattagcatgaccgtcacttgaccatatgtatttagactggcatttagactcagaatttaaatgaaaaacagttcctgaacaacaacacattttaaattttaactttatttttaaaaagactgtgtgaaggccaccaaccatggctacaaatgctcctcccccttcctccttggttccataaatgttgagtcagaacaatttcaggaggtcaagcagccagagaagggc

SEQ ID NO: 374366 - DNA, 500 bp, Homo sapiens
accaaccatggctacaaatgctcctcccccttcctccttggttccataaatgttgagtcagaacaatttcaggaggtcaagcagccagagaagggcttctggaacttgcttgacaacataagaagaaaaaaagaagggaaggaatcacacattaaataaatagttttgaggaaaaatcagtcaatattttcataaggaaattattagtccaagactgaaagagatacactgatgctatcgtattcaacatatccacaggacaggaggctggtccctggaccactggggaatactcgctggacaccaaggaaccacagttagccctctgagaaccagatgccagggaggagagcygataacaccttccatacaagctttgtggccaagtcacaccagccttactcaggttcctccagtgcaaatggaaatggtaagaattgcagcaagaaacagacagaatcattctgaattcaataaggctctatatacattttagatac

SEQ ID NO: 374367 - DNA, 500 bp, Homo sapiens
accaaccatggctacaaatgctcctcccccttcctccttggttccataaatgttgagtcagaacaatttcaggaggtcaagcagccagagaagggcttctggaacttgcttgacaacataagaagaaaaaaagaagggaaggaatcacacattaaataaatagttttgaggaaaaatcagtcaatattttcataaggaaattattagtccaagactgaaagagatacactgatgctatcgtattcaacatatccacaggacaggaggctggtccctggaccactggggaatactcgctggacaccaaggaaccacagttagccctctgagaaccagatgccagggaggagagccgataacaccttccatacaagctttgtggccaagtcacaccagccttactcaggttcctccastgcaaatggaaatggtaagaattgcagcaagaaacagacagaatcattctgaattcaataaggctctatatacattttagatac

SEQ ID NO: 374368 - DNA, 484 bp, Homo sapiens
ttatatgcatgctacttttaaaataactttggtatttgcattaaataaatatgaattaaagaacatgcttttaccaaaagacacagaaagacatttattcatacagatggctggccaaawccacagtcatggctgctaggaaaatacaagcaatttcactaaaatgaatgccttctctctccccttctgcagggctgctgtggccaaaataattattgataacagaatttttgaatcaagagaactactctatccaatgagctaaggcgagaaaacctggcagcaagtacaatgtcctactgtgattatttcaggcaaaccagcaacatggggacagataaaagtaagaagcaggttaccttcgctctctggttttggaaccacacctggacgacacggacactcagccctgtctctgcagccagagtctctctcaccttggaaaaattgaacgagaaatgtagacacactggcatctcagggt

SEQ ID NO: 374369 - DNA, 593 bp, Homo sapiens
atttccttttttctgtctgttgttaagatgttaggccagtctcctccagcaacaaaaattctaccatcagagtttgcaattgctggctcaaaatattatcttactcttgccttattattttacttttcccaagtttataacttatcttgtcaacagctcctatttcaagaacaaggcctatggaatatttatatactctcacacatggtgggtactcactaaaagttgatattatttgactcatggatctaatttgttcaccctcwttctgaaataacataatatatataaacagtctagcataggagctgacacataatagatatccaataaagatgtctctcttctcttccttgtcactccagagaaatcatagttcagggcaacctatgaaaaaactaaaatttaaagcagatccctctgtttcttttttctttttaaaattgcttgatgataccataattgcatttgtcacaactttggcataagcacagagacaatataccctaagaatatctctgggattcattcactatagcattcattttactatttccaaaataaagaggtttttttctttttaaagtagcagc

SEQ ID NO: 374370 - DNA, 593 bp, Homo sapiens
atttccttttttctgtctgttgttaagatgttaggccagtctcctccagcaacaaaaattctaccatcagagtttgcaattgctggctcaaaatattatcttactcttgccttattattttacttttcccaagtttataacttatcttgtcaacagctcctatttcaagaacaaggcctatggaatatttatatactctcacacatggtgggtactcactaaaagttgatattatttgactcatggatctaatttgttcaccctctttctgaaataacataatatatataaacagtctagcataggagctgacacataatagatatccaataaagatgtctctcttctcttccttgtcactccagagaaatcatagttcagggcaacctatgaaaaaactaaaatttaaagcagatccctctgtttcttttttctttttaaaattgcttgatgataccataattgcatttgtcamaactttggcataagcacagagacaatataccctaagaatatctctgggattcattcactatagcattcattttactatttccaaaataaagaggtttttttctttttaaagtagcagc

SEQ ID NO: 374371 - DNA, 629 bp, Homo sapiens
gtgcgtttgtatgtggatatgtgtaatgggaattacatgagagagaattcattagaattcttgatatctgtgtttgtagagacaaatctgcagctgttatacaaaatgaaataaatctgtgtgtgtttacgtattttawgcatcccaagtttcaatagtaacaaacaaattttaacttacaaagctaaaagaaagactaaattatatttttattatctttggtagaagatgttataaaactatgtatgcacacaaaattgtatgtagctaaaaacgttttttgtgtacatggttttgtagagaaaaatacaaaaagtgtattaggcagttaattcataaacatgcattttttctgaattgtctgatgtttattgtacttgccagcttttaaaatttcataataccgttttctttcgttctaagtaaatatttacttttctgtcacatctgtactatgattttgtctttcttttaaaaagccccttcactctacctcctctaaagtgaataaacttaatcttagacaaccagggtctgctctggccacgtgtactgtgtagacgctgggttattatagtctgctggggttgaagaaggcttggctgaggagatgtgatttgagctgagct

SEQ ID NO: 374372 - DNA, 629 bp, Homo sapiens
gtgcgtttgtatgtggatatgtgtaatgggaattacatgagagagaattcattagaattcttgatatctgtgtttgtagagacaaatctgcagctgttatacaaaatgaaataaatctgtgtgtgtttacgtattttaagcatcccaagtttcaatagtaacaaacaaattttaacttacaaagctaaaagaaagactaaattatatttttattatctttggtagaagatgttataaaactatgtatgcacacaaaattgtatgtagctaaaaacgttttttgtgtacatggttttgtagagaaaaatacaaaaagtgtattaggcagttaattcataaacatgcattttttctgaattgtctgatgtttattgtacttgccagcttttaaaatttcataatacckttttctttcgttctaagtaaatatttacttttctgtcacatctgtactatgattttgtctttcttttaaaaagccccttcactctacctcctctaaagtgaataaacttaatcttagacaaccagggtctgctctggccacgtgtactgtgtagacgctgggttattatagtctgctggggttgaagaaggcttggctgaggagatgtgatttgagctgagct

SEQ ID NO: 374373 - DNA, 629 bp, Homo sapiens
gtgcgtttgtatgtggatatgtgtaatgggaattacatgagagagaattcattagaattcttgatatctgtgtttgtagagacaaatctgcagctgttatacaaaatgaaataaatctgtgtgtgtttacgtattttaagcatcccaagtttcaatagtaacaaacaaattttaacttacaaagctaaaagaaagactaaattatatttttattatctttggtagaagatgttataaaactatgtatgcacacaaaattgtatgtagctaaaaacgttttttgtgtacatggttttgtagagaaaaatacaaaaagtgtattaggcagttaattcataaacatgcattttttctgaattgtctgatgtttattgtacttgccagcttttaaaatttcataataccgttttctttygttctaagtaaatatttacttttctgtcacatctgtactatgattttgtctttcttttaaaaagccccttcactctacctcctctaaagtgaataaacttaatcttagacaaccagggtctgctctggccacgtgtactgtgtagacgctgggttattatagtctgctggggttgaagaaggcttggctgaggagatgtgatttgagctgagct

SEQ ID NO: 374374 - DNA, 629 bp, Homo sapiens
gtgcgtttgtatgtggatatgtgtaatgggaattacatgagagagaattcattagaattcttgatatctgtgtttgtagagacaaatctgcagctgttatacaaaatgaaataaatctgtgtgtgtttacgtattttaagcatcccaagtttcaatagtaacaaacaaattttaacttacaaagctaaaagaaagactaaattatatttttattatctttggtagaagatgttataaaactatgtatgcacacaaaattgtatgtagctaaaaacgttttttgtgtacatggttttgtagagaaaaatacaaaaagtgtattaggcagttaattcataaacatgcattttttctgaattgtctgatgtttattgtacttgccagcttttaaaatttcataataccgttttctttcgttctaagtaaatatttacttttctgtcacatstgtactatgattttgtctttcttttaaaaagccccttcactctacctcctctaaagtgaataaacttaatcttagacaaccagggtctgctctggccacgtgtactgtgtagacgctgggttattatagtctgctggggttgaagaaggcttggctgaggagatgtgatttgagctgagct

SEQ ID NO: 374375 - DNA, 584 bp, Homo sapiens
tccttctcttgcttcccagaccctaggttaggtgactgatcagatacctatacaagacaggacagtctggagttgcactgyttgtctctcttgacatgttcagcaaggcacgtcttatcaattaattctctcattagggctgttctctatcttcatctttccctttcattctgttctctacccctccctgtttagtgaaagtctttctagtaagtcacaacttttatgtttatgaagggggatgtccccacgaaccacatctacaactcccctctggccactccctcctttgggctgattccagccaccttcctaaactcccctctcccaacatccacactaacgaaagaatattcaggaaaagccctacttcctttcatctctacccattccaaccttggtttaaagccccccaggcccagcacatcagcacaggaacttcggaaatcttaactatagctttgtactttgaatactggctttgaagtatgtgctaacagctgtaattggcattatggaagaaggttaaaataaattacttgtagctaaggagccagcaaagtggaaattatccaagtcatgtt

SEQ ID NO: 374376 - DNA, 493 bp, Homo sapiens
caagacaggacagtctggagttgcactgcttgtctctcttgacatgttcagcaaggcacgtcttatcaattaattctctcattagggctgttctctatcttcatctttccctttcattctgttctctacccctccctgtttagtgaaagtctttctagtaagtcacaacttttatgtttatgaagggggatgtccccacgaaccacatctacaactcccctctggccactccctcctttgggmtgattccagccaccttcctaaactcccctctcccaacatccacactaacgaaagaatattcaggaaaagccctacttcctttcatctctacccattccaaccttggtttaaagccccccaggcccagcacatcagcacaggaacttcggaaatcttaactatagctttgtactttgaatactggctttgaagtatgtgctaacagctgtaattggcattatggaagaaggttaaaataaattacttgtag

SEQ ID NO: 374377 - DNA, 584 bp, Homo sapiens
tccttctcttgcttcccagaccctaggttaggtgactgatcagatacctatacaagacaggacagtctggagttgcactgcttgtctctcttgacatgttcagcaaggcacgtcttatcaattaattctctcattagggctgttctctatcttcatctttccctttcattctgttctctacccctccctgtttagtgaaagtctttctagtaagtcacaacttttatgtttatgaagggggatgtccccacgaaccacatctacaactcccctctggccactccctcctttgggctgattccagccaccttcctaaactcccctctcccaacatccacactaacgaaagaatattcaggaaaagccctacttcctttcatctctacccattccaaccttggtttaaagccccccaggcccagcacatcagcacaggaacttcggaaatcttaactatagctttgtactttgaatactggctttgaagtatgtgctaacagctrtaattggcattatggaagaaggttaaaataaattacttgtagctaaggagccagcaaagtggaaattatccaagtcatgtt

SEQ ID NO: 374378 - DNA, 584 bp, Homo sapiens
tccttctcttgcttcccagaccctaggttaggtgactgatcagatacctatacaagacaggacagtctggagttgcactgcttgtctctcttgacatgttcagcaaggcacgtcttatcaattaattctctcattagggctgttctctatcttcatctttccctttcattctgttctctacccctccctgtttagtgaaagtctttctagtaagtcacaacttttatgtttatgaagggggatgtccccacgaaccacatctacaactcccctctggccactccctcctttgggctgattccagccaccttcctaaactcccctctcccaacatccacactaacgaaagaatattcaggaaaagccctacttcctttcatctctacccattccaaccttggtttaaagccccccaggcccagcacatcagcacaggaacttcggaaatcttaactatagctttgtactttgaatactggctttgaagtatgtgctaacagctgtaattggcattatggaagaaggttaraataaattacttgtagctaaggagccagcaaagtggaaattatccaagtcatgtt

SEQ ID NO: 374379 - DNA, 536 bp, Homo sapiens
tgtacttgtatggccaacctgtattcattcattcatccactcaatattcaagacaaacttttaaagaactatctctgtgccagtcactatgagtataaattttagtttggaaacagctttgtaaaaaataattattttctatatggcaacctagtgtctagtttcatcaaggttgagtttccctctccaacctcatggccacttatagttttggtcttgggtaaagccaaagtggtggaggagttagagaaaggaactcatcagttactggctctctgccgtcaccttgaggtacctttcaccacagtcaatgccatcaatgtctttytacataactgctgtggtcctgctgcaaacctgggcatgctgtgaagtcatttctcttgagtcttctgacagccttagcaggaagcctgagtaggttctcgtcctttctcctttttcctctaatcaagtcaggaatcccttttttaactggaaaagcttttcttcattatatttctgatcaaaacatttttttctatatcctgatcctc

SEQ ID NO: 374380 - DNA, 608 bp, Homo sapiens
ttctgtttgaaaaatctgtaatatgggggtaaaatgagaatgccgtatttgttcctggggcttttgggagaacggtgtgaggtaatgtaaggttctcagaagtcaacagatagtctccatgaccatggtggatttggtgctgacacagcgatggaggttatcctccatatgctcattggttatgacatggggacaaggaattgaactgacattggatttctcttagactcataagcaaatttttagcaatgcttatgaggtgctttgaggtctggccctgcctacttcttttagtcttgcctcatctctcaacacccctaccccattctccaatacaaccctttccattgtaactgccaagacatgtggaatttctccaccatgcaacctttctctggcgtctgagtcttttcacatgctggtcgttctgtctggaagactcgtatcccaatactcctccctttgctgacagtcctgcaggatgcagctcagckgacacttcttccaggaagttgtgtctgacgccctagtctgtacaaggtgccctgcccccacagccatgtgtctgcactgcctcctgctcttccttttatcactgcacttaacac

SEQ ID NO: 374381 - DNA, 504 bp, Homo sapiens
gagcccctgccactccttagcccccagatgaccaccacatcatcatctctaaaaccctccaaaggctactgcacagaccctaaaagaaactcaagcaaactctacctactagattcttaatcacaacatcatcatgytggtctcaaaacaagaccctgctcctcaccataattctcgttagaagatctctatctggcctcccagacttgtataatcagtttgttccccttacttactcttggattatctgtactagtgaataactggagaaacagaactatacattctaattaaaccattctattgtttttatttttttccttttgtgtattttgtaccaatgataactagatgaggatagtataattcctttccttcattgttcaatttagatcactatttaaaaatatatatgtatatgtatatgtatatacatatgtgtgtgtgtgtgtgtgtatacattctttccaacactgtcttttcacaagctatccagtgccccca

SEQ ID NO: 374382 - DNA, 504 bp, Homo sapiens
gagcccctgccactccttagcccccagatgaccaccacatcatcatctctaaaaccctccaaaggctactgcacagaccctaaaagaaactcaagcaaactctacctactagattcttaatcacaacatcatcatgttggtctcaaaacaagaccctgctcctcaccataattctcgttagaagatctctatctggcctcccagacttgtataatcagtttgttccccttacttactcttggattatctgtactagtgaataactgsagaaacagaactatacattctaattaaaccattctattgtttttatttttttccttttgtgtattttgtaccaatgataactagatgaggatagtataattcctttccttcattgttcaatttagatcactatttaaaaatatatatgtatatgtatatgtatatacatatgtgtgtgtgtgtgtgtgtatacattctttccaacactgtcttttcacaagctatccagtgccccca

SEQ ID NO: 374383 - DNA, 504 bp, Homo sapiens
gagcccctgccactccttagcccccagatgaccaccacatcatcatctctaaaaccctccaaaggctactgcacagaccctaaaagaaactcaagcaaactctacctactagattcttaatcacaacatcatcatgttggtctcaaaacaagaccctgctcctcaccataattctcgttagaagatctctatctggcctcccagacttgtataatcagtttgttccccttacttactcttggattatctgtactagtgaataactggagaaacagaactatamattctaattaaaccattctattgtttttatttttttccttttgtgtattttgtaccaatgataactagatgaggatagtataattcctttccttcattgttcaatttagatcactatttaaaaatatatatgtatatgtatatgtatatacatatgtgtgtgtgtgtgtgtgtatacattctttccaacactgtcttttcacaagctatccagtgccccca

SEQ ID NO: 374384 - DNA, 531 bp, Homo sapiens
gcaatcacaattggcatcaagtgggtagagccagggatgctgctaaacaccctacaatgtgcagggcagccccctcacccccagacacacacacagaacaaataatcatatggcttacaatggcaatagtgctgagacagagaaaccctactacayccaccatggctcaacaactcaattaccttgaaatttccttgatgggcagctgaaaacatgcatctagagactagggtagagatggatttggtaggtttgagatccagaagtcaccctctggagacgccagctgaaactgggagagtggacaagttcattggctggaagaaggtaggcaaaagagatataaggagaggactgtgggaaaggaccacagagggaccgaaaggaggaagcagcagtactccaaggagagaagaaatccaagtgcaacccaaacaatgggctaactctacctttgcaatacaaccaagcagaggctcaagccatgtttcaaaggactactgcagtagacatggacacccagaaaaagcc

SEQ ID NO: 374385 - DNA, 549 bp, Homo sapiens
tagttttttttttttttttaaagtttgtacttagagcttaggatactgttttccactaaaatggttggagaataatgtaagacaacatacaaaattgtcttcttgtttgaatatgcttgagtaactaaagtatttgagatagacaaacacgtgctctgggtatttggaaagggaagaaattaccatggacaggagctgagggaggctgcaaagagcagatagatttggacctccctgttagcacagaactgtgaatttaagaagcctttctcactcctgcagtcattctttatcccattgctctgttttcttttctgtttttctttattcaccatcttctcctactagaggtaggaaggcaaaggctctcttgatcttgtccattcctccttattctgggtctaaaagagtggttacacatagtaggcacactgaagctggagttgttgaatgatggaattttccatatgaggagtttgagtttcttagccagtggggatatgtggtaagttcaygaacagccaagagtcataataaaaatatttgaaa

SEQ ID NO: 374386 - DNA, 557 bp, Homo sapiens
atgaaaaagagaaaccccaaattatgctaattagggatggagagaaggagggcgactgaagaaaataaaatggaaacagggcagagaaggtggacagcactgtggagaacatacaatcagcaatttgttatccagccagtcctcatgtgactgcaacacayagtctccaaggacagcttgggggaaagaggggagcacttggtcaggaggccctcagccctggcagactgggcggcttcccagctgagaaatcttggacagaccttcccatagccatgcttcgtcattggtgagaacacaagattaagtgaggaaagtataaatactgtttgcaaggaaagattgccctagattgctataaactgattataattgtatgcagtgaactccactacaatcattcggaaattatttatggttatttcccttaggtgaaattgagtgtctcaagatgatcttaatgttgatgaaatcattgctgacagtaccatcacaaacactttgtgtaattagttagccttgaatttctaacattaaaaactcttcaatactgtcat

SEQ ID NO: 374387 - DNA, 500 bp, Homo sapiens
tgaaaggaatctgcatcatgattcatctcccctttaccttcatgcttaaggtgctctcttccacctctattccccatcatctattcctggactgaggcaaaatgctgaacagcccttctgtttgcaagactggtgaattcaaagtcatgcatctctcacaaagcacaaatgycatccaatgtgtgggcttagctcagtgtcctagatcaagtctttcaatgagtcctccctcacagtcagctgtttcacctccatcagtgccagtgagatctagagcaagagattatagggaagcacggcaaacaagaaaaaaacttgccattgtgggtgcagctgagcttcgggaatcataggtggctgatgagctatgacagcagctggtaaagaggtgctgagcttaaccttgctgtcaggttctaagttgacattacttctttttgtatcaaatgccttgctctatataagggatgtgcatctgagaagttgtacatagaccaaac

SEQ ID NO: 374388 - DNA, 483 bp, Homo sapiens
ttgaaaattatgaagttcttcttctccattgctcttaagatggagttcatttttcttaacatggcttataaggccttctgcatacagccatttctttgtccttttcaagttcaatgccaattgcattaaaatactattacatcctaaaataagccatgctatcttttaactcctggactttacatatacttaaaaaaatctgaataaatcatctccattgactttcaccaacttcttttattcttcagatcctagtttaattgatatttcctgtgagaagactttygaaactatgtctcttccccccattccctcacctaatgatcctcttgtccctgttggctccagggaattttatattgtagcacttaccgcagtgattagaaatttggtttgttttttttttccctaggcttagctcagctgaagaaatttttttatttgctggtatatgtcactttttggacaagcagttgtaaactt

SEQ ID NO: 374389 - DNA, 508 bp, Homo sapiens
agatgtgtaaagtgtgtagtattctctgaaaaaaagtataaacatcatttggtcctttgcaccaaacaaaggacaaatatttcttcaaatggttacttggccacaggaatactgactttattatgtttttcaagagtagcatttatttaacrcacacacaccatacacacacacacacacacacacacagacacaccattatgagaccaccattgtatacgggatttgttgttgaccaaaacattgttatgggacacataactatattcacacacacgcatatatacacattatatgtgtatatatgaacctcatatatggcacataagtgtatatacacatatatacacatatatgtgtatttaaacctttatatggcacatatgtattcacacacatacatatgcctcagcctcccaaagtgctggaattacaggcatgaataactgttcctggccaaaatgttcacttttaagcagctttgcaagagattctgtcacccaccaaa

SEQ ID NO: 374390 - DNA, 508 bp, Homo sapiens
agatgtgtaaagtgtgtagtattctctgaaaaaaagtataaacatcatttggtcctttgcaccaaacaaaggacaaatatttcttcaaatggttacttggccacaggaatactgactttattatgtttttcaagagtagcatttatttaacacacacacaccatacacacacacacacacacacacacagacacaccattatgagaccaccattgtatacgggatttgttgttgaccaaaacattgttatgggacacataactatattcacacacacgcatatatacacattatatgtgtatatatgaacctcatatatggcacataagtgtatatacacatatatacacatatatgtgtatttaaacctttatrtggcacatatgtattcacacacatacatatgcctcagcctcccaaagtgctggaattacaggcatgaataactgttcctggccaaaatgttcacttttaagcagctttgcaagagattctgtcacccaccaaa

SEQ ID NO: 374391 - DNA, 508 bp, Homo sapiens
agatgtgtaaagtgtgtagtattctctgaaaaaaagtataaacatcatttggtcctttgcaccaaacaaaggacaaatatttcttcaaatggttacttggccacaggaatactgactttattatgtttttcaagagtagcatttatttaacacacacacaccatacacacacacacacacacacacacagacacaccattatgagaccaccattgtatacgggatttgttgttgaccaaaacattgttatgggacacataactatattcacacacacgcatatatacacattatatgtgtatatatgaacctcatatatggcacataagtgtatatacacatatatacacatatatgtgtatttaaacctttatatggcacatatgtattcacacacatacatatgcctcagcctcccaaagtgctggaattacaggcatgartaactgttcctggccaaaatgttcacttttaagcagctttgcaagagattctgtcacccaccaaa

SEQ ID NO: 374392 - DNA, 544 bp, Homo sapiens
taggcttttcaggacaagaacctcaaattataacctgaactatatgagatggagtttcgttcttgtcaccctggctggagtgcaatggtgcgatctcggctcactgcaacctcggcctccagggttcaagcagttctcctgcctcaccctcctgagtagctgggattacagccatgtgccaccatgccccgctaatttttgtagttttagtagaracagggttttaccaagttggccagtctgggctcaaactcctgacctcaggtgatccacccacctgggcctcccaaagtgctgggattataggcgtgagccactgggcccagccctcattgtcaatttttatttcaactggtttatctctcagatgccataacactggacattgatttcccttttaagtaattggtaacaaaacaaaacaaaataaaaactttatgccgtaagcaattttttgctttataacattagataaactgtttgattgaggattttgtaggtaaatctaggcatagcgtgtgtacaatatgaattagacatttta

SEQ ID NO: 374393 - DNA, 563 bp, Homo sapiens
tcaggctttcttcattttgctacatcttttgattcctccaaataatctaaaatatagtttttatcttgtttcacatatgaaattcctctgtttggttaatcaaactcttcaacaccttttcaactgctttgtcaagattttttctccacctggtagatttaggtcccagatgaatcctcaggaaaatctacactatgtaatgacataactttggcctgttatctgtcctcacagaagttttaacttttttcttcattgcatagctcactggtgtaatttttttttaaattagctagtaaatatctgcttctttctagattgtaaattccaaaagaaatattgattctcttgtttactaatatatttctaccacctagcatactgcctggcagatataagtattcaataaatatttgctgaataaaataatsaacttccacctattttggataatggaaaaataataaggactatgggattctgggataatttttacctcctttctaccattactttggtgtattttaataagcaaatttcaaatgtttcaactgtattttgag

SEQ ID NO: 374394 - DNA, 533 bp, Homo sapiens
tcacagctcctgtatttctcttcatggcactttgyacgcttgtaaactacttgaaagcagatatagtgccatgcgtatctttggtttctagaatgatatgcaatcaataaatcaacaaatatgaactgatttgtcttgcttaccaggacaagcccattgaaatcagactgctatcttaatgaaaccagtgtggaatctactgccacattgtaaacatgtacttaaatttctatgtcagtgaaagaaagaacacgaaactttttacacctgctactatacatacagatttgttcatagtccttagggctaaatctgcagttagaatcatttataaccatacaaacttgcccagttttcaaccactttctatgataggaacagatttatctcctaatctgcttacacacagacacagacacacatacacagtgcataatacccattgaaatgctctgggtactgtggaacacagaccagattgcctaggactaaaacaaagaagaaatatctttaactcaatttaagacacctaa

SEQ ID NO: 374395 - DNA, 681 bp, Homo sapiens
cttaatgatttcttaattaataaaaatcacattaaccagaattggcctttcctttaatcgaatgtgaaagtgtgattacttttggaatcaagttaaaatttaatatttaagctagtttatcattctcaactctttgtccagtcctcaatatgagaatctaaagcatgctttaaatatctaattagttctaatgcatagcacaatgcctgacatatagtaggtatatgacattggtgaatgatttaatacttaaacaaaacaaaattcttgttctcaaataaaaaataaaataagccttttktttttgtcagggtctctgttgcccaggttcgagaacagtggcacaatcatagcttactgtaaccttgaatttctgagctcaagcaatcctactgcctcaaactactgagtagccaggactatgggcatgtaccactaagcccagctcatctgtttttatttttcatagagatgggggttgccatattgcccacactggtcttgaacccatggctcaaactatcctccagtctcagcctcctgaagcactgggaaaaacctttctctttaaaagaaagacatacttgttattcataagaaaaaagaaagattttaaaacaaatatatctttaccttataataagttgatgacatatataaagtatcttactaaaatgttat

SEQ ID NO: 374396 - DNA, 681 bp, Homo sapiens
cttaatgatttcttaattaataaaaatcacattaaccagaattggcctttcctttaatcgaatgtgaaagtgtgattacttttggaatcaagttaaaatttaatatttaagctagtttatcattctcaactctttgtccagtcctcaatatgagaatctaaagcatgctttaaatatctaattagttctaatgcatagcacaatgcctgacatatagtaggtatatgacattggtgaatgatttaatacttaaacaaaacaaaattcttgttctcaaataaaaaataaaataagccttttttttttgtcagggtctctgttgcccaggttcgagaacagtggcacaatcatagctyactgtaaccttgaatttctgagctcaagcaatcctactgcctcaaactactgagtagccaggactatgggcatgtaccactaagcccagctcatctgtttttatttttcatagagatgggggttgccatattgcccacactggtcttgaacccatggctcaaactatcctccagtctcagcctcctgaagcactgggaaaaacctttctctttaaaagaaagacatacttgttattcataagaaaaaagaaagattttaaaacaaatatatctttaccttataataagttgatgacatatataaagtatcttactaaaatgttat

SEQ ID NO: 374397 - DNA, 625 bp, Homo sapiens
ggacatgcctaaacatttcaaagtagaaatagcatagttatattcaattcactataaaatgacaaacattcattgaacattggctttgaatagcatgtggaaataayggtataaggatgagtaagattgtctattggagaagacacatgtacaaatagaatatgacatctaatttaagtggtttaaaaacattttgctatagaaacccagagatgaaatattaaaattcaacaaaagccccactaataagtaacatgaggctaaatgtcaaaagaagggcagaaattgtccagaaataaaatctccaactggaaggaaagtgtactcagtagttaaagaaatagaaacggcacaaactcaggttacaggaagacataagaaattgggtgttgcagcaatatactggaaaagctggagaaaaaggagtatgttcaaagataaaacaagcatggattggagacagaaccagtaggttggtggtaaattaaagagtgttcatttgatccagaggtagtttgcaaaggcaaccatgttccaggccctaggataaatgtgttatgtttaatattgtttattctcacaactgtatatggtaggtagtgttgtcacctctttttcagatgga

SEQ ID NO: 374398 - DNA, 415 bp, Homo sapiens
aaacgtattcctcaggagaaagggaaattgcagtcaatttagtattattgaatatcaacttgtgtatatttttggctgaacaaaattaaagtcaacagccagcaagggaaaatttggttagaaatattttatgttatgtttgttttccacaatttcttacaaaatactttggagggrgaaatataaaatgattttattataaagatttaatgtatctttgtaacattacaacaaacaaaagaattacctcaaactcacattaaaattttcaccctccaaactgtaaaataaacactagcttaaaattatggaataaattcatctttcatttcagaatcaacttatatgctagctttttcatggtttatgagaaactattatataattttctttttttaaaattatgttttattgc

SEQ ID NO: 374399 - DNA, 415 bp, Homo sapiens
aaacgtattcctcaggagaaagggaaattgcagtcaatttagtattattgaatatcaacttgtgtatatttttggctgaacaaaattaaagtcaacagccagcaagggaaaatttggttagaaatattttatgttatgtttgttttccacaatttcttacaaaatactttggagggagaaatataaaatgattttattataaagatttaatgtatctttgtaacattacaacaaacaaaagaattacctcaaactcacattaaaattttcaycctccaaactgtaaaataaacactagcttaaaattatggaataaattcatctttcatttcagaatcaacttatatgctagctttttcatggtttatgagaaactattatataattttctttttttaaaattatgttttattgc

SEQ ID NO: 374400 - DNA, 415 bp, Homo sapiens
aaacgtattcctcaggagaaagggaaattgcagtcaatttagtattattgaatatcaacttgtgtatatttttggctgaacaaaattaaagtcaacagccagcaagggaaaatttggttagaaatattttatgttatgtttgttttccacaatttcttacaaaatactttggagggagaaatataaaatgattttattataaagatttaatgtatctttgtaacattacaacaaacaaaagaattacctcaaactcacattaaaattttcaccctccaaactgtaaaataaacactagcttaaaattatggaataaattcatctttcatttcagwatcaacttatatgctagctttttcatggtttatgagaaactattatataattttctttttttaaaattatgttttattgc

SEQ ID NO: 374401 - DNA, 636 bp, Homo sapiens
agagctaatgatcaggaatgtgatgtcagcctttaacactttcaaatggattaaattcctggttgaatattaagtgagaaggaataaaacaagtatctagtgcatacgacattcaacacatttggtatgcctttaatatgcattatcccatttagtatgaacactttggcttaagaagtattgtcattccaactttatagatgagaaaatggagcatctcaaaaagtttgacaaattgcctaaaatctaatwgataggaagatacaaagtcaacatttaacctcagaactctgatgccaatggccagtcctctaggttgtgacggttcctccatcttttctagatgctgataactttgataatttgagaaaaatcagtaaggtgttttgcagaatatctctgagttgatatttgtctgatgtttttccatggtaagagtaagggttacagatttttgggaggaagaacatagaggtaaagtacaattctcatcatatcaaaaatacttattatcaacaggacttattacagtttttgctgattttcatcaactggcagagatttttctatgtaactactcttttattctcccattctgtagtatactcttaggaagaaagtcattatgcacttaag

SEQ ID NO: 374402 - DNA, 488 bp, Homo sapiens
ttttgcttgtttgtttgtttgtagaccacttcctttttttctggtattacaagatgtttcaggctcattttacatatttccttcctcagtcctaaaatcaaccatttctccaaggatccctggctacttttatcagaaaatggtattagaaacctagatctgggcatgaagtttgctcatttctaaggaatattgttgcttttmtggtctcttagttgagagatcaagggaatatatgagtgtatactactgtgtgtgtatatacacgcctacaaatattgctgtatttcacatctatatctatattaagctaaacatgagttcatactgatgtctcccagtctaatctattatcacattgatattctacaacctcccattccaacagtgagacacctggctccgactgtcagccatccattgactttattccttaacgccagttacacatggattgtgatttcagaattgttagcccacacccactt

SEQ ID NO: 374403 - DNA, 488 bp, Homo sapiens
ttttgcttgtttgtttgtttgtagaccacttcctttttttctggtattacaagatgtttcaggctcattttacatatttccttcctcagtcctaaaatcaaccatttctccaaggatccctggctacttttatcagaaaatggtattagaaacctagatctgggcatgaagtttgctcatttctaaggaatattgttgcttttatggtctcttagttgagagatcaagggaatatatgagtgtatactactgtgtgtgtatatacacgcctacaaatattgctgtatttcacatctatatctrtattaagctaaacatgagttcatactgatgtctcccagtctaatctattatcacattgatattctacaacctcccattccaacagtgagacacctggctccgactgtcagccatccattgactttattccttaacgccagttacacatggattgtgatttcagaattgttagcccacacccactt

SEQ ID NO: 374404 - DNA, 547 bp, Homo sapiens
ggctacttttatcagaaaatggtattagaaacctagatctgggcatgaagtttgctcatttctaaggaatattgttgcttttatggtctcttagttgagagatcaagggaatatatgagtgtatactactgtgtgtgtatatacacgcctacaaatattgctgtatttcacatctatatctatattaagctaaacatgagttcatactgatgtctcccagtctaatctattatcacattgatattctacaacctcccattccaacagtgagacacctggctccgactgtcagccatccattgactttattccttaacgccagttacacatggattgtgatttcagaattgttagcccacacccactttggacaaactttaacaattatattacagagtgtttttttgttttgytttgtgttttgcctttagccttacagactcctttctttcaaaagtgacttagggtcaaaccgttttttctcacctcttttcctgaatttattctatacatttgtaatatatttctgttcgtctgtcctattctg

SEQ ID NO: 374405 - DNA, 614 bp, Homo sapiens
ccattaaccatccccactttccttttacccctctaccacccactacccttcttagcctctgcttaccaatcttctactctctatctccaagggttcaatagttttgatttttaaatcccacaaataagtgagaacatgyagtgtttgtctttctgtgcctgctatttcgcttaacataatgaactccagttcattatgaacggaatgaacaatagaatggactgaagggtgagttctatttacgttgttgcttatcaaatggtgagaatttcattctttttttatggccaaatagtacttcattgtgtaggagtaccacattttctttatccaatcatctgttgatggacacttaggcttaatccaatcatctgttgatggcgattgtgaacagagctgcaacaaacggggagtgcagatatctcttccacgaactgatttctgttatgggggatatagtcccagtggtggaattgctgggtcatatggtagctctatttttagtcttttgaggaccctccaaacccttctccaaagtgggtgtactattcactctctcaccaatagcatacaagggttgccttttctccacatcctcaccagcatttgttact

SEQ ID NO: 374406 - DNA, 516 bp, Homo sapiens
ttgacctagagagcttccctaatgttttcttgtagtagtttaatagtttgaggtcttaaatttaagtctttgatccattttgatttgaattttgtatatggtcagagatagggatctagtttcattgttctgcatattgatatccagttcacctagcaccatttactgaagacactgtcttttccctaaggtatgttcttggtacctttgtcagaaatgaattcactgtaggtatgtggatttgttcatgggttctctattctgttccattgaygtatgtgtctgttttatgccagtacaatatcatgttattttggttactatacctctgtagtataatttgaagtcaggtaatgtgcttcatccagttttgttctttttgcttaggatagctttggttgttctgtacttttgtggttccatataaattttagaatttcaaaatatttctgtgaataatgtcatgggtgttttggtaggtactgcattgaatctgtagattgctgtgggtagtat

SEQ ID NO: 374407 - DNA, 516 bp, Homo sapiens
ttgacctagagagcttccctaatgttttcttgtagtagtttaatagtttgaggtcttaaatttaagtctttgatccattttgatttgaattttgtatatggtcagagatagggatctagtttcattgttctgcatattgatatccagttcacctagcaccatttactgaagacactgtcttttccctaaggtatgttcttggtacctttgtcagaaatgaattcactgtaggtatgtggatttgttcatgggttctctattctgttccattgatgtatgtgtctgttttatgccagtacaatatcatgttattttggttactatacctctgtagtataatttgaagtcaggtaatgtgcttcatccagttttgttctttttgcttaggatagctttggttgttctgtacttttgtggttccatataaattttagaatttcaaaatatttctgygaataatgtcatgggtgttttggtaggtactgcattgaatctgtagattgctgtgggtagtat

SEQ ID NO: 374408 - DNA, 551 bp, Homo sapiens
aatttctttatcatttaaagcaatgtagaattacctttctgttctttgcagctttcaaaaatgtgtatcttgtctatgggaaaataataatttttattaaaagtagcattttgcctaacttgtttggttacatacttaataggaatcatctttcattgcatccctttgctcagtatctgaaagggaaaggtatagcgtactaattcatatgttcagttcatagggagattaataatgcatttttattgaatttttattccccttaaaaccctcaaaatttaccttttcctttatatgcaatcactgggaatttcagactcaaaatattatgttagggatgttgaaccttagcaaggtatcaatttattcattaattcttaaatcattcttayaacatttattgtgtgctgattatgttcttattacacaaaatttaagaaaatatcatctcttccctaaacaatcacctccaaggagatatagaaatataacagtataattgcagtacagagaatcttgactatggtaggcttagctacagaatatacttc

SEQ ID NO: 374409 - DNA, 551 bp, Homo sapiens
aatttctttatcatttaaagcaatgtagaattacctttctgttctttgcagctttcaaaaatgtgtatcttgtctatgggaaaataataatttttattaaaagtagcattttgcctaacttgtttggttacatacttaataggaatcatctttcattgcatccctttgctcagtatctgaaagggaaaggtatagcgtactaattcatatgttcagttcatagggagattaataatgcatttttattgaatttttattccccttaaaaccctcaaaatttaccttttcctttatatgcaatcactgggaatttcagactcaaaatattatgttagggatgttgaaccttagcaaggtatcaatttattcattaattcttaaatcattcttataacattyattgtgtgctgattatgttcttattacacaaaatttaagaaaatatcatctcttccctaaacaatcacctccaaggagatatagaaatataacagtataattgcagtacagagaatcttgactatggtaggcttagctacagaatatacttc

SEQ ID NO: 374410 - DNA, 367 bp, Homo sapiens
gatggtataggcataattttcaacccagtctcatcactatagactgcagtaagctgagtgagagtaggtgcacattcttctcaaaagtttcaaggacatatgcaagtgaatttcgtggttatcttagatacacaatatccccaatgaattctcattgaatcgaaaaycatcctcttctttccatagaacattcttttagaacttagtagggtaaaagatgccctgatgttgaatgaggactgttgatcattagttaggtaagccacagaaatacctcatggcctgtaacatatcaggtcctaatgtgagttggatagacactaggggctagttcacaggtagaaaaaacaaaacaaaaaaaatgact

SEQ ID NO: 374411 - DNA, 496 bp, Homo sapiens
cccaaaagaaactgaatcctcccaacagccatggaagtaagcttgaaagtgagccctttccaactgagtcttcagataaaaccccagttttagctgacaccttcattgcagtcttgtgagagactggaggaaggcacagcccagccatgcccagactctacccacataatctgtgagataataaatatgcattgttttaagccactaagtttgtgaaaatgtgttacagcacaatagataataaataaagaaaagatatttgaaatactcattagttaaaaaagacttaacttcacaatttttcttgaggcaaaraaaaaaatcatctccaactaaacctctgcaatgtgtctctataatattcacattctgattctacaacagcaggattttttcagtttttcacttactaattatattgtacctccaatatttagcaattttaaagtatttccaactttatgtaagataaaatattcagcttctttttattttt

SEQ ID NO: 374412 - DNA, 576 bp, Homo sapiens
ctgttacaatgacagttacatttcaacgtgagttttggaggaacattcaaatgatagtagacatctaagagaaaaaactactagaaataataagaattaatgagttatcaaacaaatattgttttattccggaaacattagctagccatggcagggggtgctagaaagagtgtattaatggtgaaaaccaaatgtggaaacctaaaaatagatttaattagaaacttttaagatttatttgaaaacgctcaaaaaatatagtgacattaaaaattgaataaaaaatatgtccctgaaagattaaatactgcaaagttgggtgttctccataaattaaattatagasacaccttttgggtaaaaacaaaaattgatttttccttcaatcttgattattctgtttcatctgcaaaaataaataaaataaattgtcaaattttaaaaagacaacgaaatgggctttttttattagaatttaaatatgctatgtaatttcaatgataatggtaataataattaatggtataatatgtgaacaagggcatacagaattatgacagatgatagaaagctcag

SEQ ID NO: 374413 - DNA, 611 bp, Homo sapiens
tgtccagcccatctggactattggattgagatctggggttctctgcctccgtactattgataagaatgagaagtgaattccaggaaaataccctgtgttatctctccattaaatcctgagttgtaatctcctccaggatgtttccctgatcatcctaagcagaattgctctgctaccttttttatggcattttcacatttgttgtagttatttgagtgcatgccttgctaactttgttccatggaaagtactggactcatttagctacccatagctatgagggctatatatatwttttttttaagatggagtcttgctctcttgcccaggctggagtgctgcgtgaccttggctcaccgcaacctccacctcccgggttctagcgattctccctcctcagactcccgagtagctgggattacaggcatgtgccaccatgcccagctaatttttgtatttttagtagagaccgggtttcaccacattggccaggctggtcttgaactcctgaccttaggtgatccacccaccttggcctcccaaagtgctgggattacaggtgtgaggcactgcacctggctttgagggctgttgtttaagtatacctgtgt

SEQ ID NO: 374414 - DNA, 573 bp, Homo sapiens
aatataataatagttttgcaaacactctggaatttgccaatttacttttctagatctgattgatatttgattgccaaaatgggaaaaaaatgtacttaggtgaatttcacccccaaccgagggactcaggacaccagaaaagtgaagacatattccaggaaattttgagcaatgataaaactggtccgtggtgtttgttgacaagagaaaamgtgcatccaagttctataaactgaaagtgtcacgagaaacttctttatctcagttccctatgttggatctgtcaattcaaccaggttttattgaactattctaattatcttaaagaaacctgattaaactttattctattcttgaatagtccttcccctttactatatgtttgcttttaaaaaaattaattgacaaataataattgtatatatggaatacaatgtgatgttttgatatgtctactctgtggaatgattaaatcaagctaattaccatatctatcacctcccatacttaatttttgtggtgagaaaattcaaagtctacccccctaacacttttatataaattattattaat

SEQ ID NO: 374415 - DNA, 571 bp, Homo sapiens
agttatcattttgtagtgaaaaccttttgcattcactctcttagcattttttcaagaatacaaatattgttaactttagtcactgtgttgtgcaagagatctcccaaacttatttctctatctaactgaaaccttgcatcttttgatcaacatcaacgtcttctcaacccctgaaacacccccgccccacccctcactgccagtctcaaaagtaatgtaatccagcttggatttggtgatttggacttgaactggattgaaatcaccaatccagcttggattagtgatttggacttsaactgaggggaaattataggtgttatattttattcataaaccagtaattttatagtaatgtgttaacaaaggagaaaaataaatggtccagtgaaaaattgagttatggttagattgcataggaatgtaatcaataaagtatgacatagtagagagagaaaatttgtaagaaaaaggtcataatgcagaactcttgtatttagttaagtatcatttgaggctctttttgttgaaaatggcagacaaaccagtatacaatagcttaggcaataaa

SEQ ID NO: 374416 - DNA, 570 bp, Homo sapiens
atattaactattgttaagaaaagatatgtatcagtgttaattctatccttatttttttataaatgtgagtgctgagaaaaattatttacacaaataagtaartgaacataaaaagtgttttaaaatagcaatgccacttaactttttgaaatccttcagtgttacatgttaaaatttgatagagatttatcatcaaaagtcatttttagtaatcaatcagattacactcagggctcacacatgagaattgcgctataaaaagactcaagatgttgagaggtaatgcatttcttctataaaatataaaaacaatatttgtaagagaaagttaattgggaattgggaaacggtaaaggaaaaatctatatatctattatggatttgttatcatatagactaattttaggaaaaaataactgtccactgatgctctgaaaaccgatttccttaaagctattcgtgccaatacataaagtccttgaaatgcctttctgaacccaagcgaatgcccatacttgagtttgaagcccataagaagaacatactatggaaccatatagccttggtata

SEQ ID NO: 374417 - DNA, 564 bp, Homo sapiens
ttttactgagaacctaaatatttagtttcatttaaataactcagtgtggtttgtggctaccatattatacagcgcagttctagagtgactgggaaggtataacataaccattgagatttacatgatcactctctgtattaattctactaaaccactgactctatttttaaaataccctagacacattgaaattaggggaattgataaaagtttgtattttgtattttattcagggagaaagagaaagaamcaagaaacaatggcaggaaaaaatgtgtagattgtcctttttctttcttttttttctttttttcttttcttttcttttttttttttttttacatttttcaacatactccacaagttggcaaaaatttctagagagacttcttcaattgtttaagtgtcatgaatgagcattatattgatgtgccctggaagaaatattagctcaacaggtgttcactactgtaagttgattcttaactagtcccaaccagtatggtgattaataatgtataaatatttgaagttaattcatctttttgaaaaacaagaccgtaa

SEQ ID NO: 374418 - DNA, 564 bp, Homo sapiens
ttttactgagaacctaaatatttagtttcatttaaataactcagtgtggtttgtggctaccatattatacagcgcagttctagagtgactgggaaggtataacataaccattgagatttacatgatcactctctgtattaattctactaaaccactgactctatttttaaaataccctagacacattgaaattaggggaattgataaaagtttgtattttgtattttattcagggagaaagagaaagaaacaagaamcaatggcaggaaaaaatgtgtagattgtcctttttctttcttttttttctttttttcttttcttttcttttttttttttttttacatttttcaacatactccacaagttggcaaaaatttctagagagacttcttcaattgtttaagtgtcatgaatgagcattatattgatgtgccctggaagaaatattagctcaacaggtgttcactactgtaagttgattcttaactagtcccaaccagtatggtgattaataatgtataaatatttgaagttaattcatctttttgaaaaacaagaccgtaa

SEQ ID NO: 374419 - DNA, 636 bp, Homo sapiens
ccatatgcccaaacatgttgtgtgtaccttggcaatgggaacgtaaggactaagtcagattaaattcagcttgccaagaaactggaccaaaaccaggggaaaaaaatctgtcataaatgccatggagctgaacagcagttcacttaagggtagtggggagaagagtggcyaatctatctatatctctgccagatattttctggcagacggccaggaaaaaaatttatagcatgactatggaggagtattgaaaaatttgggtttctcataagcatatgttaaattccaccaggaaagcttccccttgttcagcttgtgactgtaatattgccctttcagacacgatcgggcacattcagggtggtctggccatagactaatattagcttttcagatggtgtttctgattgtcatctcatacccagatcactgcattcttgttcacgtttctctatagcacttaccaccatctaataaccatgtaatttatttactcattttgtgtgttggttgaaatcacccactagaataaaagctttgtgaccgtagggatctttgttgcttgtttcattatttggctatactgaacctgctatagtgaacctttggcacagagtgctcagtatgtatttgtgg

SEQ ID NO: 374420 - DNA, 636 bp, Homo sapiens
ccatatgcccaaacatgttgtgtgtaccttggcaatgggaacgtaaggactaagtcagattaaattcagcttgccaagaaactggaccaaaaccaggggaaaaaaatctgtcataaatgccatggagctgaacagcagttcacttaagggtagtggggagaagagtggccaatctatctatatctctgccagatattttctggcagacggccaggaaaaaaatttatagcatgactatggaggagtattgaaaaatttgggtttctcataagcatatgttaaattccaccaggaaagcttccccttgttcagcttgtgactgtaatattgccctttcagacacgatygggcacattcagggtggtctggccatagactaatattagcttttcagatggtgtttctgattgtcatctcatacccagatcactgcattcttgttcacgtttctctatagcacttaccaccatctaataaccatgtaatttatttactcattttgtgtgttggttgaaatcacccactagaataaaagctttgtgaccgtagggatctttgttgcttgtttcattatttggctatactgaacctgctatagtgaacctttggcacagagtgctcagtatgtatttgtgg

SEQ ID NO: 374421 - DNA, 491 bp, Homo sapiens
cttcagtatctggtaacggtttcctttctgatttgtggatggctgccttcttgctgtgtcctcacacaggagagagcgagcttgtgtctcttcctcttttcataagggcattaatctcatcatgagggcctcatacttatgacctattctaacctaccttacctcccagaggtcacatctctaaatataataccactgggaataagggygttaacataagaattttggagaaatgcaaacattcagtccatatcagctatttcttagtcacaagtgcaccctgctctggtgaggttcaactccttactggagctgtgactattgccagcagggtacaccttgtgggagagctgacacctcctccaccacagtagtggagacctcggtaggcttctctctccagggatggcgaagtaatcataatccctgtcacaagggccaccaggcctgaggagatcaaggccttctggacacaaaacaggctgagtatt

SEQ ID NO: 374422 - DNA, 598 bp, Homo sapiens
tgcattacattttcaaaattaattcaattctttgttgataatcaatcgattgttgatcatcatcaattaagcagaattattgcttgcctctcagcacctctactgactttctatatactttatattggaagtcaatatttagaggcagtattcacacaatatgacataatgtgragtgaaaaagtcaaatatagaattagatctgtgctataataatgataggaatttacgcctatggacaaaaactgaaagaaaacacaagctttaaaaagtattatgttagcatggtgtgaatgtgggctaactatttttcatctttattttgttccttcaatattatgaaatatgcattaatgtatgtaattaatctctcatgtatcttttgatttgttttgaaatttttgattgaaatacttgaggttttctacttactcttacctttgggaaaaatacaatcaatttttaataattctatttcaaaggggccaggagaaagtatacaaaatgaaaggcatattttacagttattctgaggaaaattaagtaataatttacatatgcatagcaacaaatatatataatctacattttaatagaa

SEQ ID NO: 374423 - DNA, 585 bp, Homo sapiens
gtgggtgtcttggcctgggcctgcaggcatctctcagcacgaacaaccttggcgccatggatggcatgttgatggcaggagacagacaggttcctggaaggaaagcggagggtcctcagtgaaacsctacctccaaaacaaaaacagcctgaagcctgagggccgggctgccagttctgggtgaagtccctggcctggagtgaggacttcattgatgactgtttggccaatcagatggttgtttttccaggtctgcctatggccacccatggaccaatcagcacacaatttttcccttaggagctcataaaaaccccagactcagccagactcacagagacattgggattaccagctgtgggacggagctacctgctacaggtctcctctatgtggacagctggacattcatcaggataacctgcccatagaaaggagctacccactatgggtttcctctctgctaagagttgtacactcatcaggacaacctgcctgtggaaaggagcaacccactttgagtttcctctgagctgttctgtctcagtgacgcttctctctgccttgctcaccctccagttgtcc

SEQ ID NO: 374424 - DNA, 630 bp, Homo sapiens
tctctccttccttctgggtatggggcagggcctctctggaatgtgggtcttataacctataccaggtaaatcagaaaatttatttatggccagctgttatgcagaaaagagggggaaagttaaagtaatactttcaggttttatggctgtctttgacgaaagggagttctggtttctatgactcacattgtgggtgggggattctagttgtttctatggctagcctctggagaaactgaggggagagcaggagagtgtcaaagataaactttgcttctgaggccttcactttgtgatatcattttctgggccccaataagacctagcaccaccaaaatgtgaactaattaacagatagtcgtgcaatcattcctttccattaacgtaacttgcatagctcttcaacactttagaatggtagagggggcatcaatattatgaagaaggaaattgagttccacrgaagttgaatgatttaatccgaactcaaagagtcaattaattctgctcttgatttttccagtgtttatttatttcaaaaacctaagttaagttacacaaaaccgaacaatataagtagcctcaaaatagtgcactgtagtcagcttgtacctgattttccatttgtat

SEQ ID NO: 374425 - DNA, 618 bp, Homo sapiens
tttcatgactacattgctaaaaataaattacttctagtttttaaatggaaaaacaaaaaaatttaaagaaccaacrtgaaaacaacaactttaaaaaaaaggtatgagttattcttactctatgtggaaaataaattatgtgaataatttttgcttgttttggcacatttctttaactagatccataggcaagaaaagacagtaaaactcaagttgacatcaagccattaaagacctggaaagaagagggtgttaaaagcgctcaagttcagataacatgtccaaagggataattgatgctgcaaatttttaattggatttaattggatccaagaacatttaattggattatttgatctttagctaaaattacttttctttttggaagttttcggtacagacaatgatttctgattattgagactaacctgatgcacttcattttggaaaccatttcaactgtcattaaaaagacttgtttggggtttctttcttcccatggctctaatgtaattgacaagtgccttttcagtaaattacactcattacctgttctacttactcttgctagttatttttcttaagtatctgtcgaatcatgtcgtgatcctgaattaa

SEQ ID NO: 374426 - DNA, 562 bp, Homo sapiens
aggaaacatggtgaacttcaatttataatacttcattaaattacacatttgttgcatgtggttttctgtatctgggttttatatcaaaataaaaaagccttaaaaatgagtgtatttatctctgatagacatctataaaaattgatctgattgagttttcttcataaaatttgtatgtgacctaagtattaatgttaaagatattgasactctaaaccacatggattcaagagctataatacagcaagaagaataaaataagattatatctaatgtagtcaaagggcttctattcagtgaattgctttccctccaaaagggaatatttcttttttgaaaatgtatgttgtcaagctattttcctaataagaaagtaatcaatcaacaagtgttaaatgcgctttgagatccaagtacttggagaagatgaatttctgtcaggttactaatataattctgggcagagaaaacaatgaaagactatgtaaaattaaacaataaagtatgtgatatagcttatgaatgctatacatttagaggtctgaaaaattagtgaggattt

SEQ ID NO: 374427 - DNA, 472 bp, Homo sapiens
aaggaaaggtagattgggaaaaacattacaaaatttttcagaccatgcaaaagagagagaaggctggattaatgtgttcatttaaggcatttggctaagttatttrggagataaaataatgcataaaataatagtgtagagtccctggctgcaaagaactcatagtcttaaatacacacaagcccatctattcccttcttccccaccattcatacatgtaggtgcacatgtgtggacatattctttactccccagtgttttagaaactaggaaagaaaaccagaattaaaagaatagtcatggtttatgtttcactactcatcttagtggtgagtggtgaaatggcagatattatcaccattgatgattttacaaagaaggaaattgggacacagttaaaagaaggataggcccaaggtcacctggcactatcaatggaagacttcccaactgtggggtctaatgttccttt

SEQ ID NO: 374428 - DNA, 593 bp, Homo sapiens
ctatgtattgtctatgctctgtctcctttgctcctcacaatgtacctaaaaggagggtgttctgattgacgccatcttacaatgcattaacaccaattacttcaagttaaactgaggcttagaaggtttaagggacttgtaccaaatcccttagctagttaagtgatagaaccaggactcaaacagcctgactcaaaagcattccttacccactgsgctgtgttacattaggtgacgtacctttcacatgctctctcttgaaaggcaaatacagctttgaaaaatatctagcaagtggagccaattctgctgaaattctatagcaattttctcctgtctgtcatttcttcactggcatttagcatctgaaaaattcttcagagattttcttttctctaaaattacagaagtttaaaattaaagcaagcacaatattaactagtttccaaaaatgaaagttctaaccagctttttgaaagtttgtgataaaagataatatattcttacagtcatactcagaagaataaaggtatgcaagggacagagtggtcagtgaatgtgctcatgtgggagctgcgttcttttataactct

SEQ ID NO: 374429 - DNA, 611 bp, Homo sapiens
acttacgctgctgtattatctacacctaggaaacacacttaatacatgcattatgaacaatggaaggcttgcatggcccataataatggtaatgaataacacttattgaacatttactctgtgccaactctatgtattgtctatgctctgtctcctttgctcctcacaatgtacctaaaaggagggtgttctgattgacgccatcttacaatgcattaacaccaattacttcaagttaaactgaggcttagaaggtttaagggacttgtaccaaatcccttagctagttaagtgatagaaccaggactcaaacagcctgactcaaaagcattccttacccactgggctgtgttacattaggtgacrtacctttcacatgctctctcttgaaaggcaaatacagctttgaaaaatatctagcaagtggagccaattctgctgaaattctatagcaattttctcctgtctgtcatttcttcactggcatttagcatctgaaaaattcttcagagattttcttttctctaaaattacagaagtttaaaattaaagcaagcacaatattaactagtttccaaaaatgaaagttctaaccagctttttgaaagttt

SEQ ID NO: 374430 - DNA, 625 bp, Homo sapiens
tactatagacccagctgtacatgtttatccctgaatattggccatacctaaatttttctgtatataaaagcaaaaaagtgaaaagggcatggttctgtacaggaagaagttgatttgcaattatatttctcccatcaaacactatgacttattttatgacaataattttaaaagttctggtttattaatttaaaaaaatgttggggccaggcacaatggctcacacctgtaatcccagcactttgggaggcygaggctagcggatcacgaggtcaggagttcaagaatagcctggccaacacggtgaaacccctgtctctactaaaaatacaaaaattagccaggtgtggtggcaggctcctgtaatcccagccactcagaaggttgaggcaggagaattgcttgaacccaggaggcggacgttgcagtgagctgagatggtgccactgcattccaggctgggtgacagagcaagactgcatttcgaaaaaaaaaagaaaaaagatattggagtataagatattgtaaaaattatgtcatttttttctctgattaagcgttatacagcctataaactaatatttcattttgtaagagcccaaattcgtttgtcacaattatttta

SEQ ID NO: 374431 - DNA, 542 bp, Homo sapiens
gatgggaggtagttaaaaggcctaattaggcatccaacaaatgttactattaggaaaaagagaatgaggaggagttgctgttattattgtcttcaagtttgattctaatatgcatgacgcatccacaatgaactgtgcccttgcatttgcttgtttcactcttttccctcagccattgttcatcaaaagattcagcaaaactgccaccttcacagagaatgctctctgattccagaaggctttgctctggtttatttatttattttaattaattaatttatttttttaagacggggtctggctctgttgctggagtgcagtggcgcaatctcagctcactgcaacytctgcgtcctgggttcaagtgattcttgtgcctcagccttcacagtagctgggattacaggcacgtgcctccttacccagctaatttttctatttttattagaaacagggttttgcctgttggtcgggctggtctcgaactcctggcctcaggttatccacctgcctcagcctcccaaagtgctggaattacaggt

SEQ ID NO: 374432 - DNA, 525 bp, Homo sapiens
gattacatatctttttctagtttattatttatttatttatttttttttttttttgagacagggtcttgctctgttaccyaggctggagtgcagtggtgcaatcatagctcacttcaaactcaacctcctgggctcaagtgatcctcccatctcagcctcctgagtagccggatccactgttgcacaccactactctaatttttaattttaattttgatttttgtagagatgggtctatgttgccacgctggatgattacatgtcttcagaagaattctgttacaactgcaggcatttataaataaaaatgtcacctaagtctatacttccttaaaagccaaaaagtttttaaaatgagataaaactggggtcaaaatatcttagctaggtgacatattaggcatcttctaaaccaacaggaaggcacacatgagaaattaaaatagaagacgtaaaaaataactatgagtgtcttagtatcaatccagcatgaagtaagatggcacgaagtcctgctcctaagac

SEQ ID NO: 374433 - DNA, 535 bp, Homo sapiens
ggttataactcaaaaggaaaaagagggaaaaatgtaaagtattttttagggaagagaccctcaatgccatgcccaaggtttatcctaacaaaaccatcaagattcttcccttccttgattttctcttgctcagcraagctgcagaatcccaattccagattacagataggattcagcccttttttggcccaaaaattagacaagcgtggtctctgtctatcaagttcttgatttgacaagaatcaccagggagttaagatacatatttagggtagcaggttggcatgtccaacacaatacagagaaaatacaatgaagtttggttttatttaaacactgccaacttcctgaaatactgagataacctaatcctgactgttagagcaaatactcttgatgtggctttcaaggagcagctgcagacaccagcccttcaatatctggggattgttctctcactttagagtttaaggataccagcttcaactattgcaaaacctcactagaactttgtatcattctaccatgaagcatt

SEQ ID NO: 374434 - DNA, 516 bp, Homo sapiens
ttaaactggtagatctaaggatggagaatctttcttctcccatgtcctccaattcccaatatcaacacgcttactcctagtgaaaagaaacgtagatgctaaaataattcaccagaatccacatcctctctgcacctttgtacacttgcctttgcctcacattggttataactcaaaaggaaaaagagggaaaaatgtaaagtattttttagggaagagaccctcaatgccatgcccaaggtttatcctaacaaaaccatcaagattcttcccttccttgattttctcttgctcagcaaagctgcagaatcccaattccagattacagataggattcagcccttttttggcccaaaaattagacaagcgtggtctctgtctatcaagttcttgatttgacaagaatcaccagggagttaagatacatatttagggtagcaggttggcatgtccaacacaatacrgagaaaatacaatgaagtttggttttatttaaacactgccaacttcctgaaa

SEQ ID NO: 374435 - DNA, 587 bp, Homo sapiens
tcatagatgtagtgataactgacattggcacagtgatttccaggttactttcttgatttttcaaataccctgcgattttggcgcagaatacatgattggtcccattttagagacatgaataaggctcagagaaattaagctaacgtattatggtgttttagttaaagcttggactatccttgggtaaagaatcttgactctgttctgtctcttgctgggcaccttcaaaggcccacatgccctatgctagaacccaagagagacattagcaacaaatttaaagcactatgcaggcatggaagaaatatctatctatgatcactacatcagacttgaataataggcaggtagggaggttaaaattgatgattctattatttttgacagtggatcaagctaagaaatcagtaatatccaaaattcagtctcaagaagagttaatttgttctcttgcttagaaatgcggccgggagcggtggctcaagcctgtaatcccagcactttgggaggccgaggcaggcgaatcacttgaggtcgggagttccagaccagtttggycaacatggtgaaactccgtttctactaaa

SEQ ID NO: 374436 - DNA, 643 bp, Homo sapiens
gtaacatacttacatggcctcaaaggcaaatctataaaacaaggtatagtcagacatacaccttttactttgctccctctgctgtcctccctatacacaacttttaaaaagttttgttttggctggatgcagtggctgatgtctgtaatcccagcactttgggaggccaaggagaatggatcacctgaggtcaggagttcgagaccagcctgaccaacatggagaaaccctatctctactaaaaatacaaaattggttggacgtggtggcacatgcctgtaakcccagctacttgggaagcggaggttgtggtgagcccagatcgagctattgcactccagcatggacaacaagagcaaaactgcatctcaaaaaaaaaaaaaaagttttatctttccttttaaaaaattaacaaattatagataaatatttgcattccatacccatttttctccacatttgcttcctttttaaaaaaggtatacctggcagtcactttataacagtacatataaatatgtgccttgctttttatagctgtacagtagtactcctgtgtgtttattcagctagtctcccattgttagacattttgtttttttcctttagtcttttgctagtataaatagtgctgtaatgaata

SEQ ID NO: 374437 - DNA, 596 bp, Homo sapiens
aagtaattcataattccaatgtcatttattcctctctccaaacatttgaattgccatctttatatatactttctctatatttatatatctatattttagctctatctgtatctatacagaatctgtttccagactattcagatccactkattattggtttaatgttgagctaataccacactttcatttactaaaactttaaaatatggtttgatgatgactatcccagttgctataagctcccccatccccaccagcaaccagactatggtccctaaatactatttcccactaaaaagaaccaaggttttttggtgaaatggctgattcctagtctgaggcaggaaatgtataaaatgagtctgggcatcttgtcacaccagaaaataaggaagctacaaaagaatattaagaacttgccaaagcacttagaagcaaacctgaagaggccaaagctgggacaatacgaatatcaaaatgaataatagtggagtaaaagaacattaagtacttataaatctatgagttcgaaatgacactaaaataataataattgtgtagtgaaaggagccacttacacttttattccatgatcc

SEQ ID NO: 374438 - DNA, 578 bp, Homo sapiens
agtgagagtcttacctcctgtagagaaagtgctgaaattgtggaaaaacagacacaagctcttatcatgcaagtggctgacctgcaatgaaagatgcatgcacagcctcaccaggtatctactgttaaagtgagggcattgaytggaagataatggaaccttgaaacttggaatggggatgtgtgagaggaccatggtgaagctggggacactgagtttgtaaactctgatgaaccttttttgccagaaggaacagcttccccatccccagcagtggcaacatcccctccccaacccatgctgccatcagcctttccacccttgtctgaggagataaaccctgtgctgcctgaggcaactgtgatgccctcccctgaggcagttgccacgcaaaataatgttgattctccttaggagtcacccccaacacccctgcttgtttctagacctataactagactaaagtcccggtgggcccctagaggtgaggttgagagtgtgacccatgaggaggtgtgctacgttcgaaaagaatttttgagttttctaacttatataaacagaaatgtggagaacag

SEQ ID NO: 374439 - DNA, 585 bp, Homo sapiens
agtttctgctactgtttagagggctcagacctttgtctgtttaagggctgaagggaatgggcagagaggaagaaagagcaaaaggaataactgatagcttaaggtttcggagatagtagcaatggcctcccttcataatgaaattgcttaaatgagttgtctgtaactgtcttgtttctgtcttcaccttctaattccttctcatttcacttcaatrtggcttttattaaggtcaccaatgactcccatattgctgggaacacaaaaccacttctcagtactttaatgtccagagcaggatgggagatcagtgttttttagaagaggaatggctactctactgtaacgagaagagagaagaggcaaaccaggacagatgcagcttgtgttccagatttgctggccggaagttgaggaaggtcttggctggtattaacatttctttgtgtcacatatgaagcaaagtcattgagggggaggtgatacatttgaggcagaaggagatagtgtttgaaaagctttttcggagggcaggacagtaagcaagtcagacaggtataatgagatggccagccaaacagagca

SEQ ID NO: 374440 - DNA, 585 bp, Homo sapiens
agtttctgctactgtttagagggctcagacctttgtctgtttaagggctgaagggaatgggcagagaggaagaaagagcaaaaggaataactgatagcttaaggtttcggagatagtagcaatggcctcccttcataatgaaattgcttaaatgagttgtctgtaactgtcttgtttctgtcttcaccttctaattccttctcatttcacttcaatgtggcttttattaaggtcaccaatgactcccatattgctgggaacacaaaaccacttctcagtactttaatgtccagagcaggatgggagatcagtgttttttagaagaggaatggctactctactgtaacgagaagagagaagaggcaaaccaggacagatgcagcttgtgttccagatttgctggccggaagttgaggaaggtcttggctggtattaacatttctttgtgtcacatatgaagcaaagtcattgagggggaggtgakacatttgaggcagaaggagatagtgtttgaaaagctttttcggagggcaggacagtaagcaagtcagacaggtataatgagatggccagccaaacagagca

SEQ ID NO: 374441 - DNA, 526 bp, Homo sapiens
agtgagctgagatggttccattgcactccagcctgggcaactagagtgaaactctgtctcaaacaaacaaacaaaaagtaagaaggaagcaggaaggcagagctcagggctgcatcactacagccccctccggaagacggcgctgctctccagggattcccccagcagcgctaggtgtgtcctgctcagccacccacctggtccccactcctcctcttatccctctcctgtgcttcacaggcagaggacactcttctaaatgtacatcggatcacatcctttgcctgtgagatcgagtcccttgacccctaaatggcttcccatcacatttgagataaaacccaagctcctgctagcaccacygtctactctggcctacctctcccacctcactccctgtcacaaccccccaacctccctcaggctcactccacccacacacacaaagcccagtcctgtgtccaggtctcaggggttctctctgcctggattgctctgcccgcagatctgggcggggctgaccccc

SEQ ID NO: 374442 - DNA, 526 bp, Homo sapiens
agtgagctgagatggttccattgcactccagcctgggcaactagagtgaaactctgtctcaaacaaacaaacaaaaagtaagaaggaagcaggaaggcagagctcagggctgcatcactacagccccctccggaagacggcgctgctctccagggattcccccagcagcgctaggtgtgtcctgctcagccacccacctggtccccactcctcctcttatccctctcctgtgcttcacaggcagaggacactcttctaaatgtacatcggatcacatcctttgcctgtgagatcgagtcccttgacccctaaatggcttcccatcacatttgagataaaacccaagctcctgctagcaccactgtctactctggccyacctctcccacctcactccctgtcacaaccccccaacctccctcaggctcactccacccacacacacaaagcccagtcctgtgtccaggtctcaggggttctctctgcctggattgctctgcccgcagatctgggcggggctgaccccc

SEQ ID NO: 374443 - DNA, 584 bp, Homo sapiens
tcataaaataactctttgaccagctataaccctccttgatagaagttacagatggaaatgactgatgagtttgtttatatccagtacttgtatggttcagccttttaaccgatttgctttttttttttttgtgatggagtcttgctctgtcgcccaggctggagtgaagtggcrcgatctcggctcactgcaacctctgcctcctgggttcaagtaattcttctgcctcagtcccgagtagctgggattactactataggttcatgccaccatgcccggctaatttttgtgtttttagtagagatggcgtttcaccatattggccaggcttgtctcgaactcctgaccttatgatctgcccgcctccgcctcccaaagtcctggaattacaggcatgagccatggcacccggccctgattttcttttgaagaactaccacaaaaacgcagtttctttccccctgctcctcaggggccactccacattttaatgagatttttcctgattaagagcaaagatgttcttttgctcagtcagtggcagtttgacctttcctgactcctccctgcggccgcagcacagt

SEQ ID NO: 374444 - DNA, 584 bp, Homo sapiens
tcataaaataactctttgaccagctataaccctccttgatagaagttacagatggaaatgactgatgagtttgtttatatccagtacttgtatggttcagccttttaaccgatttgctttttttttttttgtgatggagtcttgctctgtcgcccaggctggagtgaagtggcgcgatctcggctcactgcaacctctgcctcctgggttcaagtaattcttctgcctcagtcccgagtagctgggattactactataggttcatgccaccatgcccggctaatttttgtgtttttagtagagatggcrtttcaccatattggccaggcttgtctcgaactcctgaccttatgatctgcccgcctccgcctcccaaagtcctggaattacaggcatgagccatggcacccggccctgattttcttttgaagaactaccacaaaaacgcagtttctttccccctgctcctcaggggccactccacattttaatgagatttttcctgattaagagcaaagatgttcttttgctcagtcagtggcagtttgacctttcctgactcctccctgcggccgcagcacagt

SEQ ID NO: 374445 - DNA, 584 bp, Homo sapiens
tcataaaataactctttgaccagctataaccctccttgatagaagttacagatggaaatgactgatgagtttgtttatatccagtacttgtatggttcagccttttaaccgatttgctttttttttttttgtgatggagtcttgctctgtcgcccaggctggagtgaagtggcgcgatctcggctcactgcaacctctgcctcctgggttcaagtaattcttctgcctcagtcccgagtagctgggattactactataggttcatgccaccatgcccggctaatttttgtgtttttagtagagatggcgtttcaccatattggccaggcttgtctcgaactcctraccttatgatctgcccgcctccgcctcccaaagtcctggaattacaggcatgagccatggcacccggccctgattttcttttgaagaactaccacaaaaacgcagtttctttccccctgctcctcaggggccactccacattttaatgagatttttcctgattaagagcaaagatgttcttttgctcagtcagtggcagtttgacctttcctgactcctccctgcggccgcagcacagt

SEQ ID NO: 374446 - DNA, 584 bp, Homo sapiens
tcataaaataactctttgaccagctataaccctccttgatagaagttacagatggaaatgactgatgagtttgtttatatccagtacttgtatggttcagccttttaaccgatttgctttttttttttttgtgatggagtcttgctctgtcgcccaggctggagtgaagtggcgcgatctcggctcactgcaacctctgcctcctgggttcaagtaattcttctgcctcagtcccgagtagctgggattactactataggttcatgccaccatgcccggctaatttttgtgtttttagtagagatggcgtttcaccatattggccaggcttgtctcgaactcctgaccttatgatctgcccgcctccgcctcccaaagtcctggrattacaggcatgagccatggcacccggccctgattttcttttgaagaactaccacaaaaacgcagtttctttccccctgctcctcaggggccactccacattttaatgagatttttcctgattaagagcaaagatgttcttttgctcagtcagtggcagtttgacctttcctgactcctccctgcggccgcagcacagt

SEQ ID NO: 374447 - DNA, 322 bp, Homo sapiens
attcagactactgggctgtcagtgcagcctgctgcctcaaggacttcactgtgatcctgggaatggcaggcacagccacacccttagcaggccagttcctctgtgtagttcaaatttacccgaggccaagcttagattttacaccttttaccttcccaatgacatcacctaraaatctcctgccttaactgctgctgtgcaattatcaatgctgacaaacagtggaaatagtataaaaaatatagaacaaagtaaactgtgtcatcggaatgtatgatgcatctgcagagatttccctacaccaagaatgtgagttctgaga

SEQ ID NO: 374448 - DNA, 322 bp, Homo sapiens
attcagactactgggctgtcagtgcagcctgctgcctcaaggacttcactgtgatcctgggaatggcaggcacagccacacccttagcaggccagttcctctgtgtagttcaaatttacccgaggccaagcttagattttacaccttttaccttcccaatgacatcacctaaaaatctcctgccttaactgctgctgtgcaattatcaatgctgacaaacagtggaaatagtataaaaaatatagaacaaagtaaactgtgtcatcggaatgtatgatgcatctgcagagatttccctrcaccaagaatgtgagttctgaga

SEQ ID NO: 374449 - DNA, 516 bp, Homo sapiens
gggagactctgctaatgtatttccttgggcaaattgcagaacactggcacaatcagtcggattgtttgcagcctccaggttgctgcctgtaggtaactggkgatgagccattctctgtgctgagtgcctttcttgcagtgtgatgtgtcaggctgttccagctccaatgttggctttcctgtggggcgctcatcactgtcactcatactacaaagatgttaccaagtcagaaaggggaaaaagcccccaaaaacaacaacaacaaaaaacaacaaaaagctccacgatgcatgtttctagaatgtattttgtttacacataggtattagaagtttaaaatgaataacaagagacctactgtccgaaaacattgttacatacattatttttatttaatcataaaaccaaatgtaacttttcttgctaaaatgtctcctgtaagtataaagtaaggtacatttttgtttgaaagatgacacattttgtaaaacaaaaaactttaaaatctttcctttt

SEQ ID NO: 374450 - DNA, 516 bp, Homo sapiens
gggagactctgctaatgtatttccttgggcaaattgcagaacactggcacaatcagtcggattgtttgcagcctccaggttgctgcctgtaggtaactggggatgagccattctctgtgctgagtgcctttcttgcagtgtgatgtgtcaggctgttccagctccaatgttggctttcctgtggggcgctcatcactgtcactcatactacaaagatgttaccaagtcagaaaggggaaaaagcccccaaaaacaacaacaacaaaaaacaacaaaaagctccacgatgcatgtttctagaatgtattttgtttacacataggtattaraagtttaaaatgaataacaagagacctactgtccgaaaacattgttacatacattatttttatttaatcataaaaccaaatgtaacttttcttgctaaaatgtctcctgtaagtataaagtaaggtacatttttgtttgaaagatgacacattttgtaaaacaaaaaactttaaaatctttcctttt

SEQ ID NO: 374451 - DNA, 585 bp, Homo sapiens
cttgttttaacatttaccagtaaactttattcatttgggaaatgataagaggtacttagcgtcagttattggtgatccaagtactaagctctgcactccataatttacatgatatgtaacagaaactatgcaaacaagtcactatgtccatttatgaatgaagaaatactcaaagatgttaaatgcctcattcgaggtcacattataagacagtaagtaagcttgtatttgacccaaattctacacacccaattacaytgcactcaatacaatttttttttttttttttttttttgagaggaattctcttcttaactgtgaattaccacttccccacgactcagttaagtcaactgtgcggtctgagacttctctctttcttagtgcacataagctatggaggcatgatttctttttattacttctggtttctacttttgagtagttttaatttcttaatttatacaaatttcggttgtcacacataaggtaacagttaacaggggacttacaaaaattagaaatactcctcctgcttttttggtaataaagcatctcctgtactctataaatatacacactatg

SEQ ID NO: 374452 - DNA, 532 bp, Homo sapiens
aatacaccatgggcagggagctgtttttttgcataaggaagaaaattttgtcttcaagatgagcagtggatatcagtggttctagaaatgagatcttacaccctgctgaggcattcacaatatggaggtgataaaatattttttatcaattgaactttcacgatgatactgtatttttttgttctgtagkttttttaatccagcattatcagagtgaggctcattgattagtcacataaaggagtaaaaatggtgatgatggaaggatcgagctgggctgttatatattatttagtgtctattcaggaagggccattctacaacttgtgccaccacgtattgttagtgtcgtgatattttggaagaacttttctgaagagcacactagcgttttaatgcagacaacttcagcgtgttttaaaccagtactctttcttctaaaaatctacacagactattcattaccaactatttaaaaagcaaaagaagattcattataacatttctcacaatcataaatcaaaatgtccag

SEQ ID NO: 374453 - DNA, 532 bp, Homo sapiens
aatacaccatgggcagggagctgtttttttgcataaggaagaaaattttgtcttcaagatgagcagtggatatcagtggttctagaaatgagatcttacaccctgctgaggcattcacaatatggaggtgataaaatattttttatcaattgaactttcacgatgatactgtatttttttgttctgtaggttttttaatccagcattatcagagtgaggctcattgattagtcacataaaggagtaaaaatggtgatgatggaaggatcgagctgggctgttatatattatttagtgtctattcaggaagggccattctacaacttgtgccaccacgtattgttagtgtcgtgatattttggaagaacttttctgaagagcacactagcgttttaatgcagacaacttcagsgtgttttaaaccagtactctttcttctaaaaatctacacagactattcattaccaactatttaaaaagcaaaagaagattcattataacatttctcacaatcataaatcaaaatgtccag

SEQ ID NO: 374454 - DNA, 297 bp, Homo sapiens
agctctctctgccttggcttagtggaatttgtagttacatccctaagtccgaaatacagctggagaaatacacattattctttatgtgaccgttcacgttaacgatatgcgcacataacgtttttacgttctttctggtaccataaacaaaagtcaagaggagctccagttttcttttctcccgactgcaaactctgtaattycttcttgccaagctccattgcgtctctccgccatgctctccatgtctcacttgcttctacttagtgctatctgtcctcaggggccgttgttctt

SEQ ID NO: 374455 - DNA, 441 bp, Homo sapiens
ggttagtaaaatgatctcctttaagttgctaagagtaagatgccaagtaacagaaaaatgaaactctcatgctagcaagtgtgtwtgtgtgttggcgtgtgtgtgtgtgtgtgtgtgtgtgtgtgtgtgtgtgtgtccgcctgtcagctctaaccttccagcttacttgagtaggtaaaactaaatattcatgggaaaatttattttaacatacctcttgaacttgaatctatcaaataactcaacatgaaattcacattcaaataaattctaccaaataagaaattattagacaattataattaattacaatcttaatagaagaatccaaatatatgcacagttaaaactttcatttaggctgatcatattgtgccactttacatctaagaatgtcatgcaataaaatattaatttcactctgaatagatttgaatagat

SEQ ID NO: 374456 - DNA, 545 bp, Homo sapiens
gctctgtgattctaagtctcccagctacactgacttccaaattcacacccagctgtttaataacagaaggtacttggattcacagaaagtcttccgtttgctcatcgaaaataaacatgttttcttcattatagaaagaagaaagcacattggatttttttctggctgctgtgagatattaccacaaatgtagtggcatagaaaccacaaagatctcacctcatatttccacaggttggaaggctgatgttggcttctaacctgcagatgggtctccctgagccgaccccgtggtgttgaggggcctgtgttcttttctgaaggagtcagggcagtcttctgcaggctgccaacattcctgagcttgtggccttctttctccatcttcaaagccagcaaggttgcatctyactgacgattttttaaatgacatgtccctctgacctgagccagaaaaggttttcagcttttaagaaatgttatgacaacagggaacccacacagataactgcaagtcatctcacttgctcaaaatccttaactct

SEQ ID NO: 374457 - DNA, 545 bp, Homo sapiens
gctctgtgattctaagtctcccagctacactgacttccaaattcacacccagctgtttaataacagaaggtacttggattcacagaaagtcttccgtttgctcatcgaaaataaacatgttttcttcattatagaaagaagaaagcacattggatttttttctggctgctgtgagatattaccacaaatgtagtggcatagaaaccacaaagatctcacctcatatttccacaggttggaaggctgatgttggcttctaacctgcagatgggtctccctgagccgaccccgtggtgttgaggggcctgtgttcttttctgaaggagtcagggcagtcttctgcaggctgccaacattcctgagcttgtggccttctttctccatcttcaaagccagcaaggttgcatctcactgacgattttttaaatgacatgtccctctgacctgrgccagaaaaggttttcagcttttaagaaatgttatgacaacagggaacccacacagataactgcaagtcatctcacttgctcaaaatccttaactct

SEQ ID NO: 374458 - DNA, 455 bp, Homo sapiens
tatacattatacaaaaattctaattttttgtctaataaaaatttgatgatctataaatcctcaaaatagtagcacagagaatctagatgaaaacttaaatagtggattgtgatgasttttcatttactgcaaaaataaaaatatgattcaatatttgaaaacatattaattcaacgtgttaagatggaagaagaaacaaactgattaataaaaaccaaatgacatttagtaaaatatctattattgaataaaattaacaattttggaacttaagaagataaaaatcacttttgtgatttttacaaaacaaaagcataaaacctagtaatgtaacagaaaccattcctgttaaagagacaagaatagagtgtctgtttacttcaatgttatttttttttgaaagtgctttctaatgcaattagttgggagaattaaataagtataattatttgaaa

SEQ ID NO: 374459 - DNA, 455 bp, Homo sapiens
tatacattatacaaaaattctaattttttgtctaataaaaatttgatgatctataaatcctcaaaatagtagcacagagaatctagatgaaaacttaaatagtggattgtgatgacttttcatttactgcaaaaataaaaatatgattcaatatttgaaaacatattaattcaacgtgttaagatggaagaagaaacaaactgattaataaaaaccaaatgacatttagtaaartatctattattgaataaaattaacaattttggaacttaagaagataaaaatcacttttgtgatttttacaaaacaaaagcataaaacctagtaatgtaacagaaaccattcctgttaaagagacaagaatagagtgtctgtttacttcaatgttatttttttttgaaagtgctttctaatgcaattagttgggagaattaaataagtataattatttgaaa

SEQ ID NO: 374460 - DNA, 508 bp, Homo sapiens
ctacaaatagcagaattagaactctaacaattctctataggaaagagaagtaacagtaatagtgactaactttagaggttaaaaaaaatcaaggtaaatctaaaatatgggacaataataaggaaggagtactaaagattaagcagtctcagaatttcactcattcccaggaaatgacagacttcaggttttaattttttttctgttttgttacattgccatatcattcatgcatttatttatatttggattaagttccacatctactttttaacacattttgtctagtttcattagggtatratgaacaaaatctttatacatataaggtatataatgtgatatattgagaaatgattaccattatcaaactaattaacatattcatcacttcacatagaaaacatttttctgtgtgtgatgggggcatttaagatctgctctcagccagaagaggtgactcatgcctgtagtcccagcattttgggaggccgaggtggcaggattg

SEQ ID NO: 374461 - DNA, 562 bp, Homo sapiens
cacataagctatggaggcatgatttctttttattacttctggtttctacttttgagtagttttaatttcttaatttatacaaatttcggttgtcacacataagggaacagttaacaggggacttacaaaaattaraaatactcctcctgcttttttggtaataaagcatctcctgtactctataaatatacacactatgtacccacaacaatttaaaaaaatgaaaaaaaattaaaaatgaagtcattttgttttgaaatatttaccatgcttacttaccaagaataacatcactttttctctttgaaaggcatgtctacatattcaacctactaggaagtgctttattagctatactatggctatttctttactgttcttgttttatcaaaaaagttacatcgtttaagttagcaatctgacaaagtattctctttgaaataaacttccaaaaataacactgtggttttagaagcttaagcaattcttgctagaataattataactgaaactcataaaatgtcctcataacattcatttgtatatattggtagtgtgttgt

SEQ ID NO: 374462 - DNA, 578 bp, Homo sapiens
tgagtccctgtgggaacctctttcagagagaagccagggaactcggtgacacaaggtgctgaatggcagaagcatcatgctgcayggtgggtgcaaacgcagttttgagactaattttaccccgcccctcaaagcttcctgtcacgtgtgtttgttgcgaggtgtctacagtttttcatggttagttgtctttcagtgatttaaaaatacatcctggtttctggtaacgagagccttgccagccttcttttgggttttgggttttgtaattcaaacatgtttcagtgttgttgtatcccattctcatttgtgtaagcctggcagtatgaattaaatccacagctgggagactgcagacaatggggcaacatttatagtggcaactgtggctttcttctgtcatgaaagcctcagtcataatcaataaagctaaaaggtagccatcccagaggccccagttaggtcatttcaatgttccttgttttcctaaaggcttcacaatgacctttctaaatattaaccagcttcggtccatgtgccaagtcttcccaggaaaggtttttgtatttgactcacag

SEQ ID NO: 374463 - DNA, 578 bp, Homo sapiens
tgagtccctgtgggaacctctttcagagagaagccagggaactcggtgacacaaggtgctgaatggcagaagcatcatgctgcacgstgggtgcaaacgcagttttgagactaattttaccccgcccctcaaagcttcctgtcacgtgtgtttgttgcgaggtgtctacagtttttcatggttagttgtctttcagtgatttaaaaatacatcctggtttctggtaacgagagccttgccagccttcttttgggttttgggttttgtaattcaaacatgtttcagtgttgttgtatcccattctcatttgtgtaagcctggcagtatgaattaaatccacagctgggagactgcagacaatggggcaacatttatagtggcaactgtggctttcttctgtcatgaaagcctcagtcataatcaataaagctaaaaggtagccatcccagaggccccagttaggtcatttcaatgttccttgttttcctaaaggcttcacaatgacctttctaaatattaaccagcttcggtccatgtgccaagtcttcccaggaaaggtttttgtatttgactcacag

SEQ ID NO: 374464 - DNA, 586 bp, Homo sapiens
gttttgttatgatctgatacatacaaatccctaggtacatagtgcctgggtggrcctggattctgcacgtgtggaagacgcagctgttagaggaggcaccctctttgattgggccatgccaggctgtcaccaacgatttggcatccagaggccactggagcatatgagaagcagtcaaggtgccctgaatgttccagagaacattgtggaacactggaagctcaggacggccaaactgtgttgccatactcactgcagcagaggggaaagtgtaaaattacaagagaaggaggcccgtgttcaaggttgggggcagtcagctttccaactgggactcctcatggcccagccctgggctgattcctatcttcgtgttgaatgcagcatctctgctcaccccaagacagtccagtccctgacacactgagagtaagtttacagagcccaggtttccaccttgtaaaataaggatgctaataaggaaaataaataaataaataagatggaatttaattacttattttgaaaactggtgacttcacagcattatacgaatataaaagacgaaataataggaagggtctca

SEQ ID NO: 374465 - DNA, 586 bp, Homo sapiens
gttttgttatgatctgatacatacaaatccctaggtacatagtgcctgggtgggcctggattctgcasgtgtggaagacgcagctgttagaggaggcaccctctttgattgggccatgccaggctgtcaccaacgatttggcatccagaggccactggagcatatgagaagcagtcaaggtgccctgaatgttccagagaacattgtggaacactggaagctcaggacggccaaactgtgttgccatactcactgcagcagaggggaaagtgtaaaattacaagagaaggaggcccgtgttcaaggttgggggcagtcagctttccaactgggactcctcatggcccagccctgggctgattcctatcttcgtgttgaatgcagcatctctgctcaccccaagacagtccagtccctgacacactgagagtaagtttacagagcccaggtttccaccttgtaaaataaggatgctaataaggaaaataaataaataaataagatggaatttaattacttattttgaaaactggtgacttcacagcattatacgaatataaaagacgaaataataggaagggtctca

SEQ ID NO: 374466 - DNA, 586 bp, Homo sapiens
gttttgttatgatctgatacatacaaatccctaggtacatagtgcctgggtgggcctggattctgcacgtgtggaagacgcagctgttagaggaggcaccctctttgatkgggccatgccaggctgtcaccaacgatttggcatccagaggccactggagcatatgagaagcagtcaaggtgccctgaatgttccagagaacattgtggaacactggaagctcaggacggccaaactgtgttgccatactcactgcagcagaggggaaagtgtaaaattacaagagaaggaggcccgtgttcaaggttgggggcagtcagctttccaactgggactcctcatggcccagccctgggctgattcctatcttcgtgttgaatgcagcatctctgctcaccccaagacagtccagtccctgacacactgagagtaagtttacagagcccaggtttccaccttgtaaaataaggatgctaataaggaaaataaataaataaataagatggaatttaattacttattttgaaaactggtgacttcacagcattatacgaatataaaagacgaaataataggaagggtctca

SEQ ID NO: 374467 - DNA, 586 bp, Homo sapiens
gttttgttatgatctgatacatacaaatccctaggtacatagtgcctgggtgggcctggattctgcacgtgtggaagacgcagctgttagaggaggcaccctctttgattgggccatgccaggctgtcaccaacgatttggcatccagaggccactggagcatatgagaagcagtcaaggtgccctgaatgttccagagaacattstggaacactggaagctcaggacggccaaactgtgttgccatactcactgcagcagaggggaaagtgtaaaattacaagagaaggaggcccgtgttcaaggttgggggcagtcagctttccaactgggactcctcatggcccagccctgggctgattcctatcttcgtgttgaatgcagcatctctgctcaccccaagacagtccagtccctgacacactgagagtaagtttacagagcccaggtttccaccttgtaaaataaggatgctaataaggaaaataaataaataaataagatggaatttaattacttattttgaaaactggtgacttcacagcattatacgaatataaaagacgaaataataggaagggtctca

SEQ ID NO: 374468 - DNA, 609 bp, Homo sapiens
ggctctcttcttttataagcgccatgatagtttcaccagcaarccagcactcaccaagggatgagatggtaaaagcgtgtttggctgggagaaactttcatgcattgattgattagtatataaattcagattgtttgtataaagaatagtggactagaaattaagacttgaatgttcctggactagtcctgccaactgtctgctgttggaaatggcatgtcatgtcatgtcatgaaatttccagggcttcaagtttcaaagcaatttttttcttctaattacaaaatagcccatttgtttaaaaaaaataaactggaaatatacacaaaaataatttcagaagaaagttccttaacaatttccattcattcaaatgatcataaataacttctctaaatgaaaaatctatatacaattatggagagccaacttaaactgaaggttggttgaagcaatttccaaaagaagacaaaaaattatgaatatttgattaatgtacctacatcacattaatatctgggtgaaaatttatccctcaagaaaaatttgtacattgtatttctataacgatgtgatagaatttattaataatgtcacaaagtgaactta

SEQ ID NO: 374469 - DNA, 432 bp, Homo sapiens
agaagacaattgaccacccattgattatctaagtgattttgtctttggtcattgtactcaatagttacttgagggtccctttctcgctgttccaggaattgttctagagaaatgctatgcaaactgtgttatagagcataaaaaagatgcggaaaagaaagcaatattgaggacggtgtgatttcctttycttttattggcgttttcttcactagaccgtacaacccatggggtagcccttggatgtcttcttcactttatattttaaggttttgaatgatatttagcacatatggggcgctgagtgttttataaataatacaataaatttctacttcgtctaaagtgtttccatagttttcaatattatctacattctctcttacaaagattttttgaagaaacatttatgcacggaaaaagtgtttaaaa

SEQ ID NO: 374470 - DNA, 600 bp, Homo sapiens
tttatagtttaaatgtgtatgtgattctttttgatgtttgtcgatttacttccactccaggcttttggttattttaaagtttatttgttttcaagcaatggtgatgacaaattggaagatttaaatgttgttatctccattatatctatcaggagtttaatatccctaggggatcttgttacaatgacaccagaaggaggtcagaacatatacatacatatatacacatattttatacatacrtataaaatatcccttctctttttctttaagtagcaaaactcttcactgtaaaaaaattattccattgaggtaactgagttttctagacatagaggaatgatgtgtgaaaataacacaatttaaatctgtcatgtaataacttggatcagttttgaagaaatttgtcatgttcagtgcactgtttttctgggagacagatctacaatagttgatatttacgcagtattttcccattaaacctgataagaaaaaagaaagaaaattttatttgacttgctaacactcttcaaactatttttaggttatccaaaatcatacatttataactttggctttttaaaaaattatttgacaaaa

SEQ ID NO: 374471 - DNA, 600 bp, Homo sapiens
tttatagtttaaatgtgtatgtgattctttttgatgtttgtcgatttacttccactccaggcttttggttattttaaagtttatttgttttcaagcaatggtgatgacaaattggaagatttaaatgttgttatctccattatatctatcaggagtttaatatccctaggggatcttgttacaatgacaccagaaggaggtcagaacatatacatacatatatacacatattttatacatacgtataaaatatcccttctctttttctttaagtagcaaaactcttcactgtaaaaaaattattccattgaggtaactgagttttctagacatagaggaatgatgtgtgaaaataacacaatttaaatctgtcatgtaataacttggatcagttttgaagaaatttgtcatgttcagtgcactgtttttctgggagacagatctacaatagttgatatttacgcagtattttcccattaaacctgataagaaaaaaraaagaaaattttatttgacttgctaacactcttcaaactatttttaggttatccaaaatcatacatttataactttggctttttaaaaaattatttgacaaaa

SEQ ID NO: 374472 - DNA, 606 bp, Homo sapiens
agttttgaagaaatttgtcatgttcagtgcactgtttttctgggagacagatctacaatagttgatatttacgcagtattttcccattaaacctgataagaaaaaagaaagaaaattttatttgacttgctaacactcttcaaactatttttaggttatccaaaatcatacatttataactttggctttttaaaaaattatttgacaaaaatatacargcctgcttttctactagttttatgaagatctattaacataaaaacatccgtttctaggtctttctacctattaaaatcccagttcttggagctccaggcaaagtttcaggcatggagacaagactgcatagtgtttcccgaagacccgggggcctgctctcagtgcccctgtgctctgtggaacgtttcaagcctagctgttactgttgctgctgcttggtctagctcagctaagcctaaacggttctaccagaaacttgcagagctgcctgtagcacaaatctacttgtgctgcgcgaaactcatccgcacagcacccagtagtcatcttcagatgcacagagctgtccacaacaggactacctgcactttaacataaaaacaaaga

SEQ ID NO: 374473 - DNA, 606 bp, Homo sapiens
agttttgaagaaatttgtcatgttcagtgcactgtttttctgggagacagatctacaatagttgatatttacgcagtattttcccattaaacctgataagaaaaaagaaagaaaattttatttgacttgctaacactcttcaaactatttttaggttatccaaaatcatacatttataactttggctttttaaaaaattatttgacaaaaatatacaggcctgcttttctactagttttatgaagatctattaacataaaaacatccgtttctaggtctttctacctattaaaatcccagktcttggagctccaggcaaagtttcaggcatggagacaagactgcatagtgtttcccgaagacccgggggcctgctctcagtgcccctgtgctctgtggaacgtttcaagcctagctgttactgttgctgctgcttggtctagctcagctaagcctaaacggttctaccagaaacttgcagagctgcctgtagcacaaatctacttgtgctgcgcgaaactcatccgcacagcacccagtagtcatcttcagatgcacagagctgtccacaacaggactacctgcactttaacataaaaacaaaga

SEQ ID NO: 374474 - DNA, 574 bp, Homo sapiens
cagggatgttcagattgtgccctgcaggagagccactcaactgggcagagtgggctccactcacagcagagtgagccctggattggggtctgtgaacctggaaggagggaatctatttccaaacacacaaagawgcctcatgaactagcagtagtctggtttatttgtagatacattcattaacatttctgagttttttcaagacaacttactagaaggggaaagactagttaagaacatttttaagatacttaataaatatgaaaattgctctcaggaagtctctgctaatttatgctcacaacaatagtcctattatagcttgaagtattatgatacattttatccttttctcatttgctgggtgggggaagtgttttcttctctcatttacagctctttgattacttagggaggttgcaaattttcatgtttactaatcacttgtaattacactactatgaattttccagtctgcccttcactgtaaagcattcacagaagatgatgtttataaagattggcaaatttcttatctaatttccatcaaaaatcacaattcttttatttaaag

SEQ ID NO: 374475 - DNA, 574 bp, Homo sapiens
cagggatgttcagattgtgccctgcaggagagccactcaactgggcagagtgggctccactcacagcagagtgagccctggattggggtctgtgaacctggaaggagggaatctatttccaaacacacaaagatgcctcatgaactagcagtagtctggtttatttgtagatacattcattaacatttctgagttttttcaagacaacttactagaaggggaaagactagttaagaacatttttaagatacttaataaatatgaaaattgctctcaggaagtctctgctaatttatgctcacaacaatagtcctattatagcttgaagtattatgatacattttatccttttctcatttgctgggtgggggaagtgttttcttctctcatttacagctctttgattacttagggaggttgcaaattttcatgtttactaatcacttgtaattacactactatgaattytccagtctgcccttcactgtaaagcattcacagaagatgatgtttataaagattggcaaatttcttatctaatttccatcaaaaatcacaattcttttatttaaag

SEQ ID NO: 374476 - DNA, 574 bp, Homo sapiens
cagggatgttcagattgtgccctgcaggagagccactcaactgggcagagtgggctccactcacagcagagtgagccctggattggggtctgtgaacctggaaggagggaatctatttccaaacacacaaagatgcctcatgaactagcagtagtctggtttatttgtagatacattcattaacatttctgagttttttcaagacaacttactagaaggggaaagactagttaagaacatttttaagatacttaataaatatgaaaattgctctcaggaagtctctgctaatttatgctcacaacaatagtcctattatagcttgaagtattatgatacattttatccttttctcatttgctgggtgggggaagtgttttcttctctcatttacagctctttgattacttagggaggttgcaaattttcatgtttactaatcacttgtaattacactactatgaattttccagtctgcccttcactgtaaagcattcacakaagatgatgtttataaagattggcaaatttcttatctaatttccatcaaaaatcacaattcttttatttaaag

SEQ ID NO: 374477 - DNA, 541 bp, Homo sapiens
taagaaaccaccacccacctttccacaataaagcaaccagttttcccaaaacaacataatgcgatgttctgccacccaacataatgcaatgctctgtgaccccgagcatggctgcagcagtttgggttctctagrtggaaatgccttctaagagaggcaggtggctaggggatttactggagggttatggggtggcacataacatgctggaactgctttggaaccaccaaaaccagctctgaggaccagactggggtggggcagctgatctgagggtgctacatctctccttgcactgatggctccaggacccagcctccaggagaaagacgagttaagatgaatcacagttagatagatcccaaccatggccaaatgagaaaacagcttcattggcagttccaccaaggttgaagggcagaggaatcttctccttagcactggtgttgcccacacaaaaagaagaagttgatgcaacagagtacatccaacctcagcatccactgtaatggaattctgagtttggcaggatgtgaaacgt

SEQ ID NO: 374478 - DNA, 541 bp, Homo sapiens
taagaaaccaccacccacctttccacaataaagcaaccagttttcccaaaacaacataatgcgatgttctgccacccaacataatgcaatgctctgtgaccccgagcatggctgcagcagtttgggttctctaggtggaaatgccttctaagagaggcaggtggctaggggatttactggagggttatggggtggcacataacatgctggaactgctttggaaccaccaaaaccagctctgaggaccagactggggtggggcagctgatctgagggtgctacatctctccttgcactgatggctccaggacccagcctccaggagaaagasgagttaagatgaatcacagttagatagatcccaaccatggccaaatgagaaaacagcttcattggcagttccaccaaggttgaagggcagaggaatcttctccttagcactggtgttgcccacacaaaaagaagaagttgatgcaacagagtacatccaacctcagcatccactgtaatggaattctgagtttggcaggatgtgaaacgt

SEQ ID NO: 374479 - DNA, 541 bp, Homo sapiens
taagaaaccaccacccacctttccacaataaagcaaccagttttcccaaaacaacataatgcgatgttctgccacccaacataatgcaatgctctgtgaccccgagcatggctgcagcagtttgggttctctaggtggaaatgccttctaagagaggcaggtggctaggggatttactggagggttatggggtggcacataacatgctggaactgctttggaaccaccaaaaccagctctgaggaccagactggggtggggcagctgatctgagggtgctacatctctccttgcactgatggctccaggacccagcctccaggagaaagacgagttaagatgaatcacagttagatagatcccaaccatggccaaatgagaaaacagcttcattggcagytccaccaaggttgaagggcagaggaatcttctccttagcactggtgttgcccacacaaaaagaagaagttgatgcaacagagtacatccaacctcagcatccactgtaatggaattctgagtttggcaggatgtgaaacgt

SEQ ID NO: 374480 - DNA, 497 bp, Homo sapiens
attaagccggggatgatgctgtgataatggcttaccatttccgtacccactattatggaataaaagcaaaaaagtccagctgaaaaataatgcaaaaaactaaagagtctccaaatatgaaaataggacaacagacctattgaacattccaacacatgattgaccagccaattccaagtgctgcgaaacagccatctattttggtgtatttgctttaaaagtaaatgagaaagcattgaataaatagacatcccatatagcaccgatgatttaaatttggtayttattatctatagccataccaccctgaacgtgcccaatctcatctgaatttgatatttattgtaaaacaataatgatttatgacatatatatccatgctaaaagaaatgcaatggtacggtttctcatttatttatttattttttttttgaatgcttaaactataaggcagggttctccaatcttttggcttccctgggcaacattggaaaaag

SEQ ID NO: 374481 - DNA, 497 bp, Homo sapiens
attaagccggggatgatgctgtgataatggcttaccatttccgtacccactattatggaataaaagcaaaaaagtccagctgaaaaataatgcaaaaaactaaagagtctccaaatatgaaaataggacaacagacctattgaacattccaacacatgattgaccagccaattccaagtgctgcgaaacagccatctattttggtgtatttgctttaaaagtaaatgagaaagcattgaataaatagacatcccatatagcaccgatgatttaaatttggtacttattatctatagccataccaccctgaacgtgcccaatctcatctgaatttgatatttattgtaaaacaataatgatttatgacatatatatccatgctaaaagaaatgcaatggtacrgtttctcatttatttatttattttttttttgaatgcttaaactataaggcagggttctccaatcttttggcttccctgggcaacattggaaaaag

SEQ ID NO: 374482 - DNA, 240 bp, Homo sapiens
gcagagaagggagtggctggaggcggaggctgtcakgtgcggggtcccggcgaagccgtgcccctcccagaacattgcccgcctggacagtccaccccgaccacggctgcggacagcgcccctccctccgggtgcactcaccgctcggactgcgaatagttgcaccggcccatcaagttgagtttgcagagatgcaggttatcgcagggtctctggcagtacttgcgacggcagacccgg

SEQ ID NO: 374483 - DNA, 513 bp, Homo sapiens
tctttttctgccattcccctattgccartgaggcctaagtcactctcagcaggctctaatcctatttctttgcctgtctaccctatgccaagtacctagtcccaagataagtctgttagtatcattacccatctgacccagtccatagcaccttctagagatttccatattcctttttcagagaatcagatagttcaagtatacattaaaaagtctcttctggtgcaatactttaagttttaaagtaagacattataaaaattctgttactcttcaaactgtcacccattagtttcagcatctattgatgattcctgccagaatcagttattatgatgatggctaccaactggtaattttccaattccatactttattctacttttattggttggctttctactataagagaataattttccctttttatttattaaatatcagtgtggactcatggattccttattcaatggttataatcctttactattgtacaggaaaggggtcctgatc

SEQ ID NO: 374484 - DNA, 513 bp, Homo sapiens
tctttttctgccattcccctattgccaatgaggcctaagtcactctcagcaggctctaatcctatttctttgcctgtctaccctatgccaagtacctagtcccaagataagtctgttagtatcattacccatctgacccagtccatagcaccttctagagatttccatattcctttttcakagaatcagatagttcaagtatacattaaaaagtctcttctggtgcaatactttaagttttaaagtaagacattataaaaattctgttactcttcaaactgtcacccattagtttcagcatctattgatgattcctgccagaatcagttattatgatgatggctaccaactggtaattttccaattccatactttattctacttttattggttggctttctactataagagaataattttccctttttatttattaaatatcagtgtggactcatggattccttattcaatggttataatcctttactattgtacaggaaaggggtcctgatc

SEQ ID NO: 374485 - DNA, 641 bp, Homo sapiens
ccaatcactccttgttgtgaggattgtacacttctcagcttgcaggcctggatcaggggagacaaaaggagggagagaggtgagatgtcggatgtgcggtcatggtctttgcttgcaggttctccctccctggggtgactgggttcagccatccagctgattatttttaggctcttgttaattgccaggcatggagctaggagcttgtgtgtcagagtggaagtgaacaaaaacagtggagaacaaatggagtcctcagggatacctatctcagtggcttcgaactgttcttagggtaaagtttaaaatcccacattctgcaaagcatcaggtgatctggcccttcctgcttctttgatctctccttggacctttctccagcaggctgagttccctcaattttccttggtgagctctgtttcttctcatctcagtgcctgcctgggtgctcagcccagacactcctggtcttgccacccctttcacctggtcagtgctgcttctcatctttcagttcccagctgtaaggtctcttgcccagagacgccttcccagacctctgggctggggttcagtttctccagcatgtgcccctctgggccttgtcycatctctatccaagcacatgccattaagggtga

SEQ ID NO: 374486 - DNA, 658 bp, Homo sapiens
tctctaaggacaggggaaaacccaggggacctgagttctgcctcctcctgcactcagcagtcagactgcacgttccaggcaggacgtgacaggagggaagcctggtggagcagaggcatttgctcagcaagagaaactctgtccttccctgtcctccygactccacctcatctggcccactagaaacaacacctcagttggcctcatgaaaaataccacgcccgatttcaacgaagacaccttggttgtgcacagccccaggcccacagggtgtgctttcccctctgcccttcccaccaaacgctcctttattatccaacagaccagatagcaatagggcgacttcatcctcctgagcggctccacattccacaaaggggccattgctatttgccactctgggagagaaagcccgtcacgggccttcccctatggagccctctctctttccctgcctctcctccagctgctcctggttcaagccgctgcctgccccggctaataatgccttgtcatgcagtgacagaattacggtctcacactggtttcacatgtcacaaataattgtgctcattgcgcatcatattgaagttgtcaggcctctcttacgcctataatttgtgtgagttgatcatactttggtaaatcagcaggtcgc

SEQ ID NO: 374487 - DNA, 574 bp, Homo sapiens
gtgttgggcacactgttcccacacagatcccaagaggggactgaaaacggagcccaaaggggaaagtgggcatgagggagtcaggggccctagcagcaggtggcttcaggtcattcctccaagttcatcttctgctccgagaatgttggattattgggagctctygagacatgtttaagggaagggggtggagagtaggaagtcctagccccatcagtacacaggcaaatcacctgacctttctgagtcccggtatcctcctgtgaaatagggataacaccttctttgctcctcttacagtggctgagagggtcacagaagttcacaaatgtgaaagtgcttggcagactataaagcactgaagatattctgagttttgctactattatgtctgtttgttcactagaagaaagcatctatgcagatattgaaacagccaaagcgaggaagaactccatgatctcccctcgcctcacagacttaagccaggaaggcagtccaggaatccacaataaacaactgcagctggcctgttctgtttctcgcacagtggacctgagttcttttctagaat

SEQ ID NO: 374488 - DNA, 574 bp, Homo sapiens
gtgttgggcacactgttcccacacagatcccaagaggggactgaaaacggagcccaaaggggaaagtgggcatgagggagtcaggggccctagcagcaggtggcttcaggtcattcctccaagttcatcttctgctccgagaatgttggattattgggagctctcgagacatgtttaagggaagggggtggagagtaggaagtcctagccccatcagtacacaggcaaatcacctgacctttctgagtcccggtatcctcctgtgaaatagggataacaccttctttgctcctcttacagtggctgagagggtcacagaagttcacaaatgtgaaagtgcttggcagactataaagcactgaagatattctgmgttttgctactattatgtctgtttgttcactagaagaaagcatctatgcagatattgaaacagccaaagcgaggaagaactccatgatctcccctcgcctcacagacttaagccaggaaggcagtccaggaatccacaataaacaactgcagctggcctgttctgtttctcgcacagtggacctgagttcttttctagaat

SEQ ID NO: 374489 - DNA, 606 bp, Homo sapiens
cagcatcctggggaatgagagacacatggagcaaagctgagtcaccctggtctccccagccaaggtcagcctttgtcagccaagtgagccccagatacatgagtgagttcagccaagatcagcagtgctgctgaccccaaacacaggagcaataaatgcttgttactgtgtgccactaaacttttgtggctgtttgtcagacagcattattgtgacaatatgtaacatacatatgatgctattagataatctctaaggctcattctagttccaaattccagcattacttagaacataacccactatatagacaaatatctagccctaagtgtatcccccatgaggcactggtgagtctcttaccctccctaggcctgttttaaacagckaatagtcattcttgtccctccctgcatacttcatagcctgggcccctcacaggggtattttcaaggacaaaagaaagagccaatgtggaatcactttgaaccattcaaaaagcagactccatattattagttaattcttagtcatactaatgctatatcttcttagggatctcattagaaagacccctaaggtgcatcacttagaagactagcaaaa

SEQ ID NO: 374490 - DNA, 606 bp, Homo sapiens
cctcagcctcccgagtagctgggattacagggacatgccactatgcgcagccgatttttaaatttttttgtagaaacagggtctcactatgttgcacaggctggtcttgaactcctggactcaaacaatctcccacctcgacctcccagagcactgggattataggtgtgaaccactgcacctggcctctgtatcttatgaaaagaagtaatcttatatatcatgtctttttcagtgagtgggtacttaacattttgaatacggaatagagattttctagagatcagaatgttttttgagaatgaattgttacttaaagcagttgatcttaacattttttgagccttagactcctttgagactctcaagcatattctctacgtcttygtaaggatatgtacatgcataggcttgatcacacagaattttgcctgctatttaatggagttcgtgtattacctaaatgacaacagcagtagcaataataaagatacaggtaccaactaacatttattaagctttatcttatgctaagcaatttgctaaaggcaattatttcattcaaactctttaacccaaattctaaacaattatcttaaaaaccat

SEQ ID NO: 374491 - DNA, 546 bp, Homo sapiens
ggtcagggtacagacagggaagaagcaacaaaaagtctccaggtcaaagatgtagaagacataaacatttgttagctgttcctagaaattactaaggaaagaagctttaggaaaaagactggatattccactcacctaaaaaatgagggtagagactttgtactcagacattaaaggaaatacaattctgaatataaattggaggaatcagtttgaactcataatgtatttcatcctaatttttttcctagcaccctctaaaaaagggatagaaataatgacaaattcagtagcaataagcagaatagacaaaactgtgatctccagatattaattcccactakaagaggtcccacccgggctcctcaaagaaacagatgattctgtatctgggccagaaaatgtaagggttaagactagagtgcctggtcataccagagagcatgaaagttatcaaagactacaaacagtgtcaaaaatgtcccagtaataacttcaagaagctcccccggtcaaagaaagaacaactgaacatcagtaaataac

SEQ ID NO: 374492 - DNA, 557 bp, Homo sapiens
ttatcattttccactgatgttttaaagaattgctgaacrtgtgttttttatccagagctgactgttctgttctgatgaatataaaacatacttcactttgtaaatgtgcattaaaagtattagaaaggcataatctttgactctgttactacatttcatctgtcaaaagagataattttgaactgtaatatttggtattgtatcaagatatggttcttagaaagatgcttttagtattaaaatggaattctactgtataacttaaatgccattgtcatccacagtaagattttggctgtattatgcttatttattttgttacatattggtatatatcagttgagttcagcatgtttatttcgtattaagagagtattgcactctcatcaccgacttattcatgcagattttcttgtgatgagactgcaatatagtttaagtacagcatgtcctcaaataacgtcatttcattcaatgttttgttatatcgctggtgagaaaaaaaacatcaattcatggccggggccactttctgtgtggtgtttgcatgttcttcc

SEQ ID NO: 374493 - DNA, 612 bp, Homo sapiens
ttttggcaacattttcttttctgaagtaagtgtattatgctttagtgttcagtgaaatctattatccatctgttctttaaccttcttgaaccatcttttacattactttgtcttcaggcttcatgggaaatttctttatgtagcttatagtttgagagaaacactaattgtggtatgagtcttttgaaagtgacagtgcaaaacaataaatatgtatgatgttttcttctggtgtgcgatttaatgtttaatgagaagctgcagcaaatatggttagtctcaatttagataagtgcaatcatcttatgctttttaacacaggtcagttcttttctttgtttaattttctctgtggtattctggatttcagtttatgattcatggtatttaggtggtagaaatttcagaggtcaaatggtggtcagatctgggccctcactattaaatgtgaagaccaaatacatgttttgataaaaagcataatctctgttaattaccgaytggaaaataaaaagctccaataatgtaacttcatatgctgatgaagcagaattgaggcagcttgatcaaagatgtacgatgagataaaactgcagtctctgctgtacagtt

SEQ ID NO: 374494 - DNA, 569 bp, Homo sapiens
gtagcaagctatagtaaccttgaactccagggttgaagcaatctttctgcttcagcctctcaagtagctagaactacaggcatgtaccaccatgcctgactacattttttttttttttgtagagacaggatcttgccgtgttgcccaggctggtcttgaactcctgggtttaagtgatcctcttatcttsgcttccccagatgctgggattacaggtgtgagccactgggcttggcctctatgctatgattttacatatgttaaacttatattaatgaagaaagacttgaaatgaataagcaaactaaattaaagtatgtgaatagtagttagcttttaggggtttaattttcttaattggtgtctttattcagtaaatttaaacatacatacatataaatgtatttcacactataaaatattttagaataactcttaggtggtatagcttttccacattttattaagtgttttatgtgttaaagaagtaagtcaggattccattgtgtgcagcttgtactttgccatggaaattgtcagctgaaattgccaggagagttgttatgtta

SEQ ID NO: 374495 - DNA, 569 bp, Homo sapiens
gtagcaagctatagtaaccttgaactccagggttgaagcaatctttctgcttcagcctctcaagtagctagaactacaggcatgtaccaccatgcctgactacattttttttttttttgtagagacaggatcttgccgtgttgcccaggctggtcttgaactcctgggtttaagtgatcctcttatcttcgcttccccagatgctgggawtacaggtgtgagccactgggcttggcctctatgctatgattttacatatgttaaacttatattaatgaagaaagacttgaaatgaataagcaaactaaattaaagtatgtgaatagtagttagcttttaggggtttaattttcttaattggtgtctttattcagtaaatttaaacatacatacatataaatgtatttcacactataaaatattttagaataactcttaggtggtatagcttttccacattttattaagtgttttatgtgttaaagaagtaagtcaggattccattgtgtgcagcttgtactttgccatggaaattgtcagctgaaattgccaggagagttgttatgtta

SEQ ID NO: 374496 - DNA, 589 bp, Homo sapiens
tttatgtagaagcgcattaatttccaaatctcaagagattttccaaaaacctttctgtaactgatttctggtttgtaattaaccagagatccaagatctcaatctttctaaacattttgagacttattttagggctgaatatggtcaacgtgataaatgttctacgtgtatttaaaatgaatgtattttgtgcaattgactaaaatgttttatacatgtgacacagatcaaggtggttaataatgttccagtcttcagtatgcttactgattttttgtctacctgttctctaaattactgacataacagggagaggctgtctatatttcattccacttctatccacttttgtctyatgaattttgaagctctatttttagatgtatgtaaatttaagatcatcaccttgatgaactggctcttttatcattatgatatgtcactttttcctctgataatataatgctttgtgtggtaatttgataattgttatgggttgacttatgactccttaaaagctatatattgaagagctacctcccagtacctcagaatgtaacaatttgcagagagaatattttcaagttaa

SEQ ID NO: 374497 - DNA, 566 bp, Homo sapiens
cacatgctacacatttatcagctcgctgtatttatgacaaacaatactttacatgattcatcttccctccctctccagggtttgctatttgttccagactgctggttccccaggcctctctgacattacaccagatcttttcaagcctaaatcttctttctgttgttcattaattttactgattccttactcaatatcctagtgggaaaatgtgctcctttatgcacaggaccatctttaagttactgagattatgatcaaggggyattactatcaaagaagataatttttcttcttccacagcaacttcatcagtcgtgttaaatcatttcatttatgaaaatgggccttaaaattaaacaagtaattgtcttttcctatctccaccttatttatgctccttttgtccctctagctattttccacatctctacttttatctctctctctgttccttgctgacaactggaagaagtttaagtgatttgaaatttccttgctgacagctagaagtaatttaaatgatttgaagttaattggtgactactctgtttgacagagtatat

SEQ ID NO: 374498 - DNA, 635 bp, Homo sapiens
ctggagccaggaaggctggacagtttggtctcaaggggaatcatggatcatcttccctcaagagcacactgggtatggcagactgtggccagattgcctcttcaggccagaccctgaccctccttcctcactgggtgaggcctccttgccttctcatttggagtttcttttctttgagagtgataaaaaataggccctcaatctctcctagtttgtaagaactctgctaagaagtgtgcgttagcctgatgaagtaccgtttttatgtgagctgacctttttttctagctgactttaagatttttttctcaagcatttcccttagatagtctggtaactatatgccttgatgttgttcattttgtgtagtatctggcatgcattctctgtatttcttgcatctggatatctctatctccaccaagattagggaaattttcttgaattattccctcaaatgtgatttccagattgcttayattttctccttctctctcaggaatgccaataatttgtaggtatgattactttatataaccccagatttcttggagactttgtttcttttttaaaattctttttttctttatctttgtctgactgaattagttcaaaagactgatctttaagttctg

SEQ ID NO: 374499 - DNA, 528 bp, Homo sapiens
aaaaaaaagttccattttccttttctacccacctgagtttcatgatctgttatacctgtaaggaaaaaggcagtatagaatagaggaaagatggagggatggattcagragacatgggttccaagctagcattcatcagtcataattttgggaagtcccttagctctgctgaactcagtttcctcaaatgcaagatgaagaatttagactagaagttctctgccagaagcaaggattttttcttttccttgatgtacattgtcagtgatctaaaaatacaagaggaagatccagcttaaaaggaagtactgctgtccaaaaatgatactagattttgcatttgcacagtttctagcccacagccagtgctcaataaatatctgtttaagcgaaatgaagcaaatctcagagttcagtgttgaattatctttgggatcttgccacctactttgtctcactgttctggcggatgagcgtataatagtcagttgtctctaacaatagacaatacagccaaggaaaagtcaa

SEQ ID NO: 374500 - DNA, 559 bp, Homo sapiens
gcacgcctttcttacatcaaatcaaaatatcctttttctgtatcagtcaagtaaccaagcacttattgaatgtattacagcaattgctggaagtagtagagaacaatggtccttgcttcacaggaatttacaattgtatttggagacaagattaacatgctaatgaaacaattagcaaacataacagaagatattatgtaattaaatggtacctcttgaaggtgcaaactataattacagaaatttggagaaagcaaatgatccaaaagaaaaggaaaggttagtgaatacatcttaataataataattattattattattttgtggcgagtatttttatattagtcctaaattccgcaaaatgggttcttatgttggctcccttttaaagccaatgaaattgtggtccaatgaaaggaaatgaccacccaaactcctcatagacagatagtggagggacataagcccaagcctsgcaagtctgagttctttctgcatagcaatactgctttttatggcattgagtggcctctaatgcctggaaaactttactatgcta

SEQ ID NO: 374501 - DNA, 549 bp, Homo sapiens
aactgggcagacacagccttagaggtagaataaatccagatctgaatcaagcacagatctagggacccgatcttctgggtcctcctgggccaagccagcttagcgattcaggtgacataacaacccattgcaaaatgaagttcaatccccaggctcatcaatttcctaattttgtgtttctgtttttgaatgaggtagttttatgcctcatatgactattttaaacttagccccatgtaacctgatggatatgctagacaagacatagtgtggtatttctactgtgtatctccttgctttgatgaaaaatgtattgccaggttgaaaaactggacacaaatcagactgaggttaaagagygaaaaagaaagaccttttcatgtactgtttaaaaaaaaaaataaagaaaaaagaaaaaacagaaatcgacctgctatttccatctccaacactatgatatgtagtgaatgtaatacgaatacattgatgatggaatatgttttcccttggtgaatggttaatatttctcaggtgagtggaaacaggcta

SEQ ID NO: 374502 - DNA, 549 bp, Homo sapiens
aactgggcagacacagccttagaggtagaataaatccagatctgaatcaagcacagatctagggacccgatcttctgggtcctcctgggccaagccagcttagcgattcaggtgacataacaacccattgcaaaatgaagttcaatccccaggctcatcaatttcctaattttgtgtttctgtttttgaatgaggtagttttatgcctcatatgactattttaaacttagccccatgtaacctgatggatatgctagacaagacatagtgtggtatttctactgtgtatctccttgctttgatgaaaaatgtattgccaggttgaaaaactggacacaaatcagactgaggttaaagagcgaaaaagaaagaccttttcatgtactgtttaaaaaaaaaaataaagaaaaaagaaaaaacagaaatcgacctgctattkccatctccaacactatgatatgtagtgaatgtaatacgaatacattgatgatggaatatgttttcccttggtgaatggttaatatttctcaggtgagtggaaacaggcta

SEQ ID NO: 374503 - DNA, 557 bp, Homo sapiens
actttttttttctaaaatgcaaagcactttcacacccataaatgtgttacttttctgttaaaagcagaaaacggaaaattcttatctttacatagctgggtttatcagctgccacagaaacaaacagaaatttcagattcactttcctgagccctcaaaatggctcccaagggctgtcaaaggctcaraaatcaggtcctgctccagatcctggagggcacacagcatagacttatcccaaaacgtggctgctaccttaagtgctttctgtaatgggcatctgtggttgtcatcccagccttcctttcctttctgttcctgcaatttaatcgtctactctgctccatctagatcccagagatatgtagcataagggttaagcttatgtatgattttgcagtcagattacctgggctcaaatccccattccacttactgtgcaatttgggtaacttaatttccccacctgtgaagtggaaataaaggcaatgcctctctcacagacttgttggaaaattaaatagatcatacacagaaactcttggaaaggtgcctgg

SEQ ID NO: 374504 - DNA, 577 bp, Homo sapiens
aaaggtggaggtttaatccaataaggctggtatcctaccaagaaaaggaagagacacaaaagctctctctccacacacacatatagaaaaagtcatgtaaaggcatagcaagaagataactgtttacaaaagaggaagagggcccctgccaggaaccaaatcaactgacaccttgatctaggacttcccagcctccagaatggtgagaaaattaatttctgttttttcagccccctagtctgtggtattttgttatggcagcctgagccaattaatagaatgccttctagtagcaacaatcaaagagaatccagtgacgttagggaatccttttaaacctaaagcaagtttgccaattggaagaygggcagttcacttaaaagaattttaaaagtccaacttcttagacattaagtatcagttaaggctagtggagcagagcttcatgattacttagaagttttttttatttttgaaatgatcagtattgttaatttttaaagtgttaatgcttttaagccaaaactttctccttttttttttttttaacaaaagacaaatttgaagctgtgaagga

SEQ ID NO: 374505 - DNA, 635 bp, Homo sapiens
tccctgtttgcaaatgacatgatcctatatctagaaaaccccataactcagcccaaaagccccttaagctgagaaaaaacttcagcaaaatctcaagatacaaagtcaatgtacaaaaattgatagcattcctatacaccaacaacagtcaatccaagagccaaatcaggaatgcaatcccattcacawtagcctcataaagaataaaatactaggaatacagctaaccgggaggtgaatgatctctacagggagaaatacaaaacacttctcaaataaattaaagatgaatcaaacaaagggaaaaatattacatgctcatggatagaaagaatatcattaaaatgagaataccgcccaaagcaattgatagattcagtgctatttctctcaaactatcaatggcattctttacagaactagaaaaaacttttgcaattcatatggaaccaaaaaagagcacaaatagctaagacaatcctaagctaaaagaacaaagctggagatatcatgctactcaatttcaaactatactacagggctaccgtatccaaaacaacatggtgctagtacaaaaacagacacataaacaaatggaacagactagaaagtcccaaaataaggctgcacaccta

SEQ ID NO: 374506 - DNA, 635 bp, Homo sapiens
tccctgtttgcaaatgacatgatcctatatctagaaaaccccataactcagcccaaaagccccttaagctgagaaaaaacttcagcaaaatctcaagatacaaagtcaatgtacaaaaattgatagcattcctatacaccaacaacagtcaatccaagagccaaatcaggaatgcaatcccattcacaatagcctcataaagaataaaatactaggaatacagctaaccgggaggtgaatgatctctacaggragaaatacaaaacacttctcaaataaattaaagatgaatcaaacaaagggaaaaatattacatgctcatggatagaaagaatatcattaaaatgagaataccgcccaaagcaattgatagattcagtgctatttctctcaaactatcaatggcattctttacagaactagaaaaaacttttgcaattcatatggaaccaaaaaagagcacaaatagctaagacaatcctaagctaaaagaacaaagctggagatatcatgctactcaatttcaaactatactacagggctaccgtatccaaaacaacatggtgctagtacaaaaacagacacataaacaaatggaacagactagaaagtcccaaaataaggctgcacaccta

SEQ ID NO: 374507 - DNA, 483 bp, Homo sapiens
gctgattggctgtcagctgcagggatacaaatgatgtcatcacccagatagtgagcatagtagccaaaagttagtttttcaaccttttctcccctcctctccttctcacctgtyagtctccagtgtccgttgttgccatctttacatccatgaatacccaatgtttagctcccgcttataagtgagaacatgtgatatttggttttctgttcttgcattaatttgcctcgggtaatagtctctagctgtatccatgttgctgcaaggacataattttgttttttatcataacttcatagttttccatggtgtttatgcactacattttcttcatccaatgcaccgttattgggcacctaggttgattctgcgtttttgcaattgtgaatagtgctgcaatgaacatataagtgcatgtgtctttttggtcgaaccatttattttactttgggtatatactcagtagtgggtatatcattgctg

SEQ ID NO: 374508 - DNA, 483 bp, Homo sapiens
gctgattggctgtcagctgcagggatacaaatgatgtcatcacccagatagtgagcatagtagccaaaagttagtttttcaaccttttctcccctcctctccttctcacctgttagtctccagtgtccgttgttgccatctttacatccatgaatacccaatgtttagctcccgcttataagtgagaacatgtgatatttggttttctgttcttgcattaatttgcctmgggtaatagtctctagctgtatccatgttgctgcaaggacataattttgttttttatcataacttcatagttttccatggtgtttatgcactacattttcttcatccaatgcaccgttattgggcacctaggttgattctgcgtttttgcaattgtgaatagtgctgcaatgaacatataagtgcatgtgtctttttggtcgaaccatttattttactttgggtatatactcagtagtgggtatatcattgctg

SEQ ID NO: 374509 - DNA, 614 bp, Homo sapiens
tgcaattgtgaatagtgctgcaatgaacatataagtgcatgtgtctttttggtcgaaccatttattttactttgggtatatactcagtagtgggtatatcattgctggcttgaatgataattctgttttaagttcttggagaaatttccaaactgctatccacaggggctgaactaatttatattcccatcaactgtgtataaacattccctttwctctgccaccttgtcaacatctgttattttttgactttttagtaaaagccattctgactggtgagacggtatctcattgtggttttgatttgcatttctcagatggttggtaatgtggagtgttctttcatgtgtttgttggtcatatatgtgtgttcttttgagaagtgtctgtacatgtactttgcccactttttaatggggttatttggtttttgcttgttgaattgtttaagatccttatagataatggatattacagaatgatatttcttaggttttcatctaggagttttatagcttcaggtcttacatttaagtctttcatccatcttgagctaccttttctatatggtattagatggtgcttcagtttcatttttctgcatatggttagcc

SEQ ID NO: 374510 - DNA, 614 bp, Homo sapiens
tgcaattgtgaatagtgctgcaatgaacatataagtgcatgtgtctttttggtcgaaccatttattttactttgggtatatactcagtagtgggtatatcattgctggcttgaatgataattctgttttaagttcttggagaaatttccaaactgctatccacaggggctgaactaatttatattcccatcaactgtgtataaacattccctttactctgccaccttgtcaacatctgttattttttgactttttagtaawagccattctgactggtgagacggtatctcattgtggttttgatttgcatttctcagatggttggtaatgtggagtgttctttcatgtgtttgttggtcatatatgtgtgttcttttgagaagtgtctgtacatgtactttgcccactttttaatggggttatttggtttttgcttgttgaattgtttaagatccttatagataatggatattacagaatgatatttcttaggttttcatctaggagttttatagcttcaggtcttacatttaagtctttcatccatcttgagctaccttttctatatggtattagatggtgcttcagtttcatttttctgcatatggttagcc

SEQ ID NO: 374511 - DNA, 393 bp, Homo sapiens
tccaaccacacatttcctctctgctctgccctagtagagattctccatgagggttctacccctgcagcagacttctgagtggatatccaggcatttccattcatcctctgaaatctaggcagaagctcccaaccctcagctcttgccttctgcacacctgtaggctcaacaccatgtggaagktgcaaaggcttagggcttgcaccctctgaagtaacaacaagagctgtacctttgtcccttttagccgtggctggagctggagcagctgcggccaagatgcagggctccatgtcctgaggctgcacagagcagcagggccctaggccttgtccatgaaatgatttttccctcctaggcctccaggcctatgatgggaggggctgccacaaa

SEQ ID NO: 374512 - DNA, 393 bp, Homo sapiens
tccaaccacacatttcctctctgctctgccctagtagagattctccatgagggttctacccctgcagcagacttctgagtggatatccaggcatttccattcatcctctgaaatctaggcagaagctcccaaccctcagctcttgccttctgcacacctgtaggctcaacaccatgtggaagttgcmaaggcttagggcttgcaccctctgaagtaacaacaagagctgtacctttgtcccttttagccgtggctggagctggagcagctgcggccaagatgcagggctccatgtcctgaggctgcacagagcagcagggccctaggccttgtccatgaaatgatttttccctcctaggcctccaggcctatgatgggaggggctgccacaaa

SEQ ID NO: 374513 - DNA, 393 bp, Homo sapiens
tccaaccacacatttcctctctgctctgccctagtagagattctccatgagggttctacccctgcagcagacttctgagtggatatccaggcatttccattcatcctctgaaatctaggcagaagctcccaaccctcagctcttgccttctgcacacctgtaggctcaacaccatgtggaagttgcaaaggcttagggcttgcaccctctgaagtaacaacaagagctgtacctttgtcccttttagccgtggctggagctggagcagctgcggccmagatgcagggctccatgtcctgaggctgcacagagcagcagggccctaggccttgtccatgaaatgatttttccctcctaggcctccaggcctatgatgggaggggctgccacaaa

SEQ ID NO: 374514 - DNA, 617 bp, Homo sapiens
attaggatactctgtcaccccttttacagtagataatgagagcttggtcagacattggactagttctttgaaattattctccagggtaactagaggactcttggagagagatcccaattagggtgtccccaaggagtatttgcctgggagcattcttgacagaaccagatattttttggttacactcccatggtggggagtagcagctcattaacatgtacttagaaagctctccattaccctgtggattatagcaagtgaaacagtgactgctattgttgcccaaaaaaagtctctagactccttggctagagtagttttagataaccacatagctttggagtatttgctcactgaacaaggcaggggtatatgtaattgccaattcatcttgctgtacctacattaatacatcagttgaagtaggagtacatattgaagtctcccagttataacatgtaaaggagaacagacctggattaggggacaggttttcaggattccytggtatttttaaagttgggtcatctacgttattaattatcttggttttacacatcatgcttagtcttatatttaaatgtggcttaaaatgttgttctaaaactgttaatgag

SEQ ID NO: 374515 - DNA, 580 bp, Homo sapiens
tatgtagctacattccttacccactacataaatccctatttttagtgggttagggggacagatttgagacttatctcccatctcctggctgataccacccatcttaaagccttcttccctggcaatatttgtcgtctcaatgactggctttcttcacagcaagcaactggaccttgaccaaacccctgttgtttggcaacaatactagtttcttaatgtctttatataaagatgaagttgaaaagataaaattgaatatagattttaatattgtattctctccaaataaacaaacaaatactctaagaagtattagtgagctgctaatggagctcactaataaataaacaaatactctaagaagtattagtgagctgctataaatkaaaaaaacaagatttaagcaagttactcaatcattctcaagttcagtttttttctatttaaaatgggtgtaaccaagtttaggatgagtgggaaaacatgtaaaaccctcaaaatatgctccttctaacattccacttatttctgctgaagcaggacattttcctgtcccattcatgggactcactgcagtgtt

SEQ ID NO: 374516 - DNA, 630 bp, Homo sapiens
taaatctctttcctttataaattactcagtcttgggtaagtcttcattagcagtgtgataacagattaatacacccactctttaaatatactctcaagttattcacttttagctttatgtagtgcttttctagtcttacttaatatgtgttcatcagtatcagcatagaacttcaacagtttgttcttttgtttcttcaggtcatacatggtggttattccaacaccatactgattttcttcaatagcttgactttctgtgctatagataaacataaatgcttcctcttttttttatcattgttacccataggagtatctttatgcctttttgacattatccacatttttacaccacagaaagagaatcatcaataatacacagtgagtaatacaagtaggtcatggccycatgtggagcatcatagggaacctacctttgacacatccaaacttacatatgtgccattgtaattccctttgtgggcatggttgtagggaggaatctgggcatgctcagaaaagatatattgcagatgaagggggctaggagggtcttttcttccttgcaggtactgaataaactgtgtgttctgcactgaattttgactgaatcctggcagatgaggtc

SEQ ID NO: 374517 - DNA, 630 bp, Homo sapiens
taaatctctttcctttataaattactcagtcttgggtaagtcttcattagcagtgtgataacagattaatacacccactctttaaatatactctcaagttattcacttttagctttatgtagtgcttttctagtcttacttaatatgtgttcatcagtatcagcatagaacttcaacagtttgttcttttgtttcttcaggtcatacatggtggttattccaacaccatactgattttcttcaatagcttgactttctgtgctatagataaacataaatgcttcctcttttttttatcattgttacccataggagtatctttatgcctttttgacattatccacatttttacaccacagaaagagaatcatcaataatacacagtgagtaatacaagtaggtcatggcctcatgtggagcatcatagggaacctrcctttgacacatccaaacttacatatgtgccattgtaattccctttgtgggcatggttgtagggaggaatctgggcatgctcagaaaagatatattgcagatgaagggggctaggagggtcttttcttccttgcaggtactgaataaactgtgtgttctgcactgaattttgactgaatcctggcagatgaggtc

SEQ ID NO: 374518 - DNA, 630 bp, Homo sapiens
taaatctctttcctttataaattactcagtcttgggtaagtcttcattagcagtgtgataacagattaatacacccactctttaaatatactctcaagttattcacttttagctttatgtagtgcttttctagtcttacttaatatgtgttcatcagtatcagcatagaacttcaacagtttgttcttttgtttcttcaggtcatacatggtggttattccaacaccatactgattttcttcaatagcttgactttctgtgctatagataaacataaatgcttcctcttttttttatcattgttacccataggagtatctttatgcctttttgacattatccacatttttacaccacagaaagagaatcatcaataatacacagtgagtaatacaagtaggtcatggcctcatgtggagcatcatagggaacctacctttgacacatccaaacttacatatgtgccattgtaattccctttgtgggcatggttrtagggaggaatctgggcatgctcagaaaagatatattgcagatgaagggggctaggagggtcttttcttccttgcaggtactgaataaactgtgtgttctgcactgaattttgactgaatcctggcagatgaggtc

SEQ ID NO: 374519 - DNA, 379 bp, Homo sapiens
tgttgtctttcaaaggaaataattttcttttaaaggtagtgagaattctgaggcagaaatttcccccaaggagagtggaacatttaaacatttcccttagcatataattgttyatgaatgcaaaagaatttctgtgctcttcttctttgacccccctttctcattgatttttggaagtagttgaacagtctagcatttaactcttacaaatttgccaaagtgcaagctgtgcaccgtttgcatgcaataattactttttagcttcttaatgcagtctcattatgaagaattattttctctttttgaataatagtaatgactcatttcctaaattaaacttagttatttcaaaatgatttcaccaaaaaattgttaaagg

SEQ ID NO: 374520 - DNA, 583 bp, Homo sapiens
taaatttgtttgcatttcaattacatttacaatttgtaaatgtataaaaatattggaaaactagaattaccatttggttaacactacttggytaacacctcagtaatacttgttgcaagcaagaatcgttaatagatgctaaaattagtgggtgaaacacaagatatttatatggtctcaaagtatattcgcacaaaattaccaaggggaaaatattaattttacaatagatatgatggagaggataaggcatgagaaatgactgtagaaataatcattaaaaacttctcatattttttggaagacataaatacacaaatttaagaggtttagaaaacccaaaacagcatacatttaaataaaaccatatacagagagagcataattgagtcatttcttttacagtaggtagtgagtcaggctgagcgggggaggagagggctcctccaacccatcaggaatgtcaggctgccatcaggtgatggtcaggcagttgctacactgcctctctaaaacagtaattggtcacagccagcacccagggagagccagtttcccaagagataaaagcacctgaaattgg

SEQ ID NO: 374521 - DNA, 583 bp, Homo sapiens
taaatttgtttgcatttcaattacatttacaatttgtaaatgtataaaaatattggaaaactagaattaccatttggttaacactacttggctaacacctcagtaatasttgttgcaagcaagaatcgttaatagatgctaaaattagtgggtgaaacacaagatatttatatggtctcaaagtatattcgcacaaaattaccaaggggaaaatattaattttacaatagatatgatggagaggataaggcatgagaaatgactgtagaaataatcattaaaaacttctcatattttttggaagacataaatacacaaatttaagaggtttagaaaacccaaaacagcatacatttaaataaaaccatatacagagagagcataattgagtcatttcttttacagtaggtagtgagtcaggctgagcgggggaggagagggctcctccaacccatcaggaatgtcaggctgccatcaggtgatggtcaggcagttgctacactgcctctctaaaacagtaattggtcacagccagcacccagggagagccagtttcccaagagataaaagcacctgaaattgg

SEQ ID NO: 374522 - DNA, 461 bp, Homo sapiens
ccactcctctacaacccagtgcattaaagtgacaatgttgaaagtattgttatcctgaagtgagccctttgatcctaaaatacagggttggctaaagacaaccccccaaccccctccatgtttcagaaaatgcttatggcaaggaacacactcttccccatatgagttagataagactcacggatgacaaccctgtttagctaatgacaaggccagacatagaccctccaaatttccattctttgctcatcaatggttagctgaaatgtttgccccactgatcagtgggaacaaacttcttgtgaaccaaacttgggttaagcttctctcctcccaggcatctgaacttaggctcaccctcagcctgaatcagcttccagctccaatggcccatcctgagcatagactgacatctgggcaaaacmttcactgattcatccaatcatgccactctttcaccc

SEQ ID NO: 374523 - DNA, 614 bp, Homo sapiens
cttgcaacacagttgtcatagtgaactctaagagaaattgaacccgtttgtctgcctgtccgccatgtcctatgtttattaaccttgtttttctagactattaattcactaaattcctaagatagggtccttgggaggtaacatttgtgggttctgaaaatatctttgttttgtcctgacatttgataatatttttgactgagtataaaaatctagattgaaatttttttttcattactttraaggtttttccccataatcttttagcttttagtagaccttataatttgttgtcgtttaaattatcacttattaatggacattttattatgatattttcaatctattatattccatatatttcaaatagttgtaatgctgacatattaccattatacatctaggtctggatatctcatttttattctattcagaactctgtaaacccttttaataagaaaattttggtttgcttgtctctgctaacttttcttttttaaattctaatttttaaattgtaaattgacaaattatagttgtatatgtttatggggtacaaagtgatgtcatgatttatgaatacaatgtcaaaaaattaaagcaaattgattacc

SEQ ID NO: 374524 - DNA, 570 bp, Homo sapiens
cagctagtcagacatgagcagggcaggagaggccccccaaccaggaatgccaggtgaccagcaggtgatggtcrtgcagttgttaaactgtctctctaaaataatgattggtcccagccagcgccagggaaaggctgtgtcctgataaacagacacacctgaaacttgtgattagcagcttcctgataagatcccaggagctgagcaagtgggctcaagcatacgcattatgaggcaaaatggctggagttaactggtatatgacctcctagagacatttgactgctaaaggaagaacacctcaaatgagcatgtgtacaactccagtaaacacactgcagatgctcacctcccaagtgctagcaggccactgcacatgtagacagcccaccccaagggaagaatcaggggagcaagaatgcaagaccctggaagcataccaacgtatgaaacctaaagtcaaaggtcaaaccatgcacttgatctctcaagtcacctgcttggccatcttccaactgtactttatttcctttcattcctgctctaaagcttttaataaacttttactcc

SEQ ID NO: 374525 - DNA, 570 bp, Homo sapiens
cagctagtcagacatgagcagggcaggagaggccccccaaccaggaatgccaggtgaccagcaggtgatggtcgtgcagttgttaaactgtctctctaaaataatgattggtcccagccagcgccagggaaaggctgtgtcctgataaacagacacacctgaaacttgtgattagcagcttcctgataagatcccaggagctgagcaagtgggctcaagcatacgcattatgaggcaaaatggctggagttaactggtatatgacctcctagagacatttgactgctaaaggaagaacacctcaaatgagcatgtgtacaactccagtaaacacactgcagatgctcacctcccaagtgctagcaggccactgcacatgtagacagcccaccccaagggaagaatcaggggagcaagaatgcaagaccctggaagcataccaacgtatgaaacctaaagtcaaaggtcaaaccatgcacttgatctctcaagtcacctgcttggccrtcttccaactgtactttatttcctttcattcctgctctaaagcttttaataaacttttactcc

SEQ ID NO: 374526 - DNA, 551 bp, Homo sapiens
tgtgggggcactcatctatttaattttaatagaacacaatgtagcatctttaccttgcagttttcaagagagtaaatattgctcactactcttcagctatttcatggatgactattctgtctgagcgaagggatttcaatgtgttggatctttctgtataaaagaagcaagcagatgatgtgaaatgttttaatcttcctcaagtgactataacattatttcaagcagtcttttgcttccttggaccaacagaaaaggggcatggcttgttacactaaccaaatgcatatcatcattatctgcttctgggaaaccgacctccagctttgttggacaatctggagtagaaaatgctatttgtttacctggttcagatttwagtggagaatgctgtctttcatcttcacagctctaatacctgtttgtgaaattgaactgcagttttggaagaggttttatcctctggtagctgcagggtaaatgcagattttctagctactcttaacaccttggggtgaatatcaggaaaagtagagtggaaaggagtgatc

SEQ ID NO: 374527 - DNA, 600 bp, Homo sapiens
ttagagatactgggccacttaaagactgagatatgatgtgggaatacaraatgtttctgacccctcaacccttgcccctgtatctacagacctcctgtatgataactgaaaattaaaactgaaacaaatgtaagattcaaccttcttcaagaaggaatctctaggaaaactgaaaagtaatgtgagagacaaaaatgaggtcagaagaggaaaatttagcccctgataactacagttgtaacgaatggtaaacacagtctaactcttagccagaaaatcataaaccctaagatgactataaacttttttaacttagtaatatgtatttaagtttcatccatgtaattttatggcttaatagctcatttcttttttattgttaaagaatattctgtcatatgggtatgttataatttatatactcacatattggattatatcttgttgcttcaaattttgggtaattatgaataaagtttttaaaaacttacacgtgcacaattttgtgtggacatgggttttcaaatcagttaggtaaatggataggagtgcaatttctgaaaaatgtagtaaaattttgttcttctctgtaagaaactg

SEQ ID NO: 374528 - DNA, 474 bp, Homo sapiens
caagccaggccacagcagcttctcagctttacatgaaaaagaggtagctatactttggggaaattgtattcccccctctgcttccagaagcaaaactggtttgataggttcctcaatttagagagatttctctacattcttgggcctgagacactgattttttggtcgctaagctaaaacttgatggtgtccactgtatgattcagcctcagcaccagctgttyttagttgagaatggatgggtgacagtgtctcagtggacataactcatagctctggacaatactctgcttgacgaaccttgctataattttgctggctttctggcttttgctaggggcctagatgtttggtctgccacacaaattatggttgctgaccaagtcatctagatcctacttgtatatgttcaaagtaagggactattctctgatgagcccaactaaaatccagctattgaatgaacctgcgcca

SEQ ID NO: 374529 - DNA, 552 bp, Homo sapiens
agtgtttagcattttagttgtaatacaatacagtaaccagtatactttggggaacctgggtgaggtgcacaacagcctagaaggaaggaaggttaagaagcaacaaaatggaaaccaggacaaagaactatactgcataccaaaacgacactatagttatttagataatacactatttgtagtttggattatgtattttttatctttttttttttattattttttgagacggagtctcgttctgtcgccaagctgtagtgcagtggtgatcttggctcactgcaacctccgactcccgggttcaagcgattctcctgcctcagcctcccgagtagctaggattacaggcacgtgccaccatgcccagctaatttttgtatttttagtagagtcgaggtttcaccgtgttggccaggatggtctcgatcttctgacctcatgatctgcccacttcggcctcccaaagtgccgggattacggcatgagccaccgcaccyggccagtttggattatttatttttatactagcccttaacattcaataaaaataga

SEQ ID NO: 374530 - DNA, 592 bp, Homo sapiens
ttcagtgcagtttctgtagacctcagtggccagtagcactcagcttctcccagtatccatgttggatggttttgtaacagggtgcttctgctatatatagtacctccttgtgaatagtgctccctagcatcttacaggtcagattaccaacaagttttggcaagcrtagttccagaaagctctgccatttggtaagccacatccatgccttctccaacaaggtctgtatcttggcccaggaggaacgtcttccttgggcactctagttcagccctaagggtagtggttgctccttataagtattgtttattctttattctctccacttcttactagccagtactttgctagtctaatttacttttagagttaattattcttaatattaactttgtctgctaaaattgctatgtggtttcaccctccttactagacccagatttcttcagtccatcaataggagagtggctaaacaaattgtagcatattcatacaataggttaatactaaacaataaaaggaacagagtactgatacataaaacactgaaaataaaagaaaaaaaacattatggttgagaaaaataagccag

SEQ ID NO: 374531 - DNA, 592 bp, Homo sapiens
ttcagtgcagtttctgtagacctcagtggccagtagcactcagcttctcccagtatccatgttggatggttttgtaacagggtgcttctgctatatatagtacctccttgtgaatagtgctccctagcatcttacaggtcagattaccaacaagttttggcaagcgtagttccagaaagctctgccatttggtaagccacatccatgccttctccaacaaggtctgtatcttggcccaggaggaacgtcttccttgggcactctagttcagccctaagggtagtggttgctccttataagtattgtttattctttattctctccacttcttactagccagtactttgctagtctaatttacttttagagttaattattcttaatattaactttgtctgctaaaattgctatgtggtttcaccctccttactagacccagatttcttcagtccatcaataggagartggctaaacaaattgtagcatattcatacaataggttaatactaaacaataaaaggaacagagtactgatacataaaacactgaaaataaaagaaaaaaaacattatggttgagaaaaataagccag

SEQ ID NO: 374532 - DNA, 630 bp, Homo sapiens
ggtcttcttcaatgcagcacacctgctttgcaaaattgcacacaaaatgcttctttaagcaggactccaatccattcctccccactgggcmaggcctccctgcaggggtcctttagtcactccagccaggcttatatgaacagaactctgatctctccgtaagaaagatcccaggggaggggtgaccactgactccgctgtttggagagtccaggtagtccagataaggaagggccacccctgcccaattcagcacatctgctctatcaaaagcagccaggctgattctgtaagcaggtccctgatctcgttcctcctgattgcctgtgacctctcaacagaggtctccggacagcaactacaggagcattcaggctggcaacaggtgagtacccacctaggatggagcttctagaggaaggagcaggctatcacctttgctgttttgcagcaatcactggtgatacctccaggtatgggaaaaactaaggcaactagggtctggagtggacccccagcaaaccacagcagccctatggttgctaacagacagaggcctattaaaataaaaacagacataaaacaacaacaacatcaactaaaaataccccacagaagcccaattcaaga

SEQ ID NO: 374533 - DNA, 630 bp, Homo sapiens
ggtcttcttcaatgcagcacacctgctttgcaaaattgcacacaaaatgcttctttaagcaggactccaatccattcctccccactgggcaaggccwccctgcaggggtcctttagtcactccagccaggcttatatgaacagaactctgatctctccgtaagaaagatcccaggggaggggtgaccactgactccgctgtttggagagtccaggtagtccagataaggaagggccacccctgcccaattcagcacatctgctctatcaaaagcagccaggctgattctgtaagcaggtccctgatctcgttcctcctgattgcctgtgacctctcaacagaggtctccggacagcaactacaggagcattcaggctggcaacaggtgagtacccacctaggatggagcttctagaggaaggagcaggctatcacctttgctgttttgcagcaatcactggtgatacctccaggtatgggaaaaactaaggcaactagggtctggagtggacccccagcaaaccacagcagccctatggttgctaacagacagaggcctattaaaataaaaacagacataaaacaacaacaacatcaactaaaaataccccacagaagcccaattcaaga

SEQ ID NO: 374534 - DNA, 630 bp, Homo sapiens
ggtcttcttcaatgcagcacacctgctttgcaaaattgcacacaaaatgcttctttaagcaggactccaatccattcctccccactgggcaaggcctmcctgcaggggtcctttagtcactccagccaggcttatatgaacagaactctgatctctccgtaagaaagatcccaggggaggggtgaccactgactccgctgtttggagagtccaggtagtccagataaggaagggccacccctgcccaattcagcacatctgctctatcaaaagcagccaggctgattctgtaagcaggtccctgatctcgttcctcctgattgcctgtgacctctcaacagaggtctccggacagcaactacaggagcattcaggctggcaacaggtgagtacccacctaggatggagcttctagaggaaggagcaggctatcacctttgctgttttgcagcaatcactggtgatacctccaggtatgggaaaaactaaggcaactagggtctggagtggacccccagcaaaccacagcagccctatggttgctaacagacagaggcctattaaaataaaaacagacataaaacaacaacaacatcaactaaaaataccccacagaagcccaattcaaga

SEQ ID NO: 374535 - DNA, 630 bp, Homo sapiens
ggtcttcttcaatgcagcacacctgctttgcaaaattgcacacaaaatgcttctttaagcaggactccaatccattcctccccactgggcaaggcctccctgcaggggtcctttartcactccagccaggcttatatgaacagaactctgatctctccgtaagaaagatcccaggggaggggtgaccactgactccgctgtttggagagtccaggtagtccagataaggaagggccacccctgcccaattcagcacatctgctctatcaaaagcagccaggctgattctgtaagcaggtccctgatctcgttcctcctgattgcctgtgacctctcaacagaggtctccggacagcaactacaggagcattcaggctggcaacaggtgagtacccacctaggatggagcttctagaggaaggagcaggctatcacctttgctgttttgcagcaatcactggtgatacctccaggtatgggaaaaactaaggcaactagggtctggagtggacccccagcaaaccacagcagccctatggttgctaacagacagaggcctattaaaataaaaacagacataaaacaacaacaacatcaactaaaaataccccacagaagcccaattcaaga

SEQ ID NO: 374536 - DNA, 522 bp, Homo sapiens
ccttgtcaatactcttttaagtacaaattttgacaatggtacctactttcattatgtagtgagatgttattttttggtctctgcacttttatggtgcagaggcatagatgtaagtttgcctcgttgcactcacccattcttgtagtcatacgtttgcaagctgttggaatagactgatactgcctgtcattttttctgacaccatttaaatcatagcaatggtttaatagtttccttaaagtgatgctatcattaattcactttctcagtgagcaagttttactctagagaatatattgtgttcaaaagatatggaatatttgtgtatgaataaatgagagttgtgtctccttatatgacactcagtactctattttaactcaaataaaaacatacgtaaaaaaataccctggattgtggtgaatagcatagtcttracaataggcagatctgactttatatcctggctttcccaagccagctgaacctggaaaagtttcttaaccactgtttctttacttg

SEQ ID NO: 374537 - DNA, 548 bp, Homo sapiens
acaatctcaaagattgaaggcagataagcccccaaagatgagaaagaataagctcaagaacaccaaaaaatcaataagcctaagtgcccttttttactcaaatgaccacatcatctctctagcaagtgttcagaactgggctgatgctgagatggctgaaatracagaaatataatttagaatgtgaatagaaatgaactacattgagctacagtaatacattgtaactcaatacaagaaaactatcaattatgataaaaaaaatacagacaaactagctggcattgaaaagagtgtaactgacctgatagagccaaaaaaacacactacaagaacttcacaatgcaatgacaaacattaataggagactagaccaaacagaaaaaaataatctcagaacttgaagactggctttctgaaataacacaggcagacaaaaagagggaaaaaaagagtgaaaaggaatgaacaaaaccttcaagaaatctgggattatgtaaagagatccaatctaagactgattagtgtacccaaaagagatgtggaga

SEQ ID NO: 374538 - DNA, 564 bp, Homo sapiens
tctgcttccgaaccggcagcttggaccctccctcctcaattccttgttctcacttcccttctcaaatggggtccccatcttgccaggagtcagtccccattcccagcatgggaagatccccttccctggggacctaccttgtcctgggatcmgaaggcacttcacacacacatcccattctcacacccggaaattcggggcggggacatgctgtgggggaggcagatactaaaagaagctgagagggtcctggcccatgggactgcccagcctagaaaatctgtgccttcgtgttagacgccctcttagggaaacataggaagggtacaccttacaccacagatgaccttgtggtcccttgcacccccaaggcggcctcatgcctggaacctcctaccctgggttcacggatcccccaacaacacagcaccttcccagaggattcgggcacccggcctcagaccagctttgacgaaataggagcgttgctagcatccagcaaaggcagcctttccccttcccctgtgcctgccagactctgtccttacgtcctccccatgatgt

SEQ ID NO: 374539 - DNA, 564 bp, Homo sapiens
tctgcttccgaaccggcagcttggaccctccctcctcaattccttgttctcacttcccttctcaaatggggtccccatcttgccaggagtcagtccccattcccagcatgggaagatccccttccctggggacctaccttgtcctgggatccgaaggcacttcacacacacatcccattctcacacccggaaattcggggcggggacatgctgtgggggaggcagatactaaaagaagctgagagggtcctggcccatgggactgcccagcctagaaaatctgtgccttcgtgttagacgccctcttagggaaacataggaagggtacaccttacaccacagatgaccttgtggtcccttgcacccccaaggcggcctcatgcctggaacctcctaccctgggttcayggatcccccaacaacacagcaccttcccagaggattcgggcacccggcctcagaccagctttgacgaaataggagcgttgctagcatccagcaaaggcagcctttccccttcccctgtgcctgccagactctgtccttacgtcctccccatgatgt

SEQ ID NO: 374540 - DNA, 564 bp, Homo sapiens
tctgcttccgaaccggcagcttggaccctccctcctcaattccttgttctcacttcccttctcaaatggggtccccatcttgccaggagtcagtccccattcccagcatgggaagatccccttccctggggacctaccttgtcctgggatccgaaggcacttcacacacacatcccattctcacacccggaaattcggggcggggacatgctgtgggggaggcagatactaaaagaagctgagagggtcctggcccatgggactgcccagcctagaaaatctgtgccttcgtgttagacgccctcttagggaaacataggaagggtacaccttacaccacagatgaccttgtggtcccttgcacccccaaggcggcctcatgcctggaacctcctaccctgggttcacggatcccccaacaacacagcrccttcccagaggattcgggcacccggcctcagaccagctttgacgaaataggagcgttgctagcatccagcaaaggcagcctttccccttcccctgtgcctgccagactctgtccttacgtcctccccatgatgt

SEQ ID NO: 374541 - DNA, 570 bp, Homo sapiens
gctatctgctgagtgtcactgccttcaggttaaagtgcaaactccttattaataggcccttattgcttgatctgacctggcctacagctctggccacatctccctccatagtcctcctctctcttcatgtccctttcagctccttagacccacagttcctttttgccaccaggcctctacacatactatcccctcttggacactcttagcctggccaacttgcatttaccagcacatgtgtgggtggtgtgatggagtggactttggagagaggcaggcataggtttgaattccagctctgttcttttcaagctgtaaaaacttaaggatgtcaaccaacctctctgagcctcarggtcctcatctgcagagagaggcatcataatattcaccatgtctccatatgttgatttctcttttcaatcacttgacccatctccacccacccactctcacccgctttttctgagaactgacccttcttccctatgcacacagagacgatggtggttcctggccaccatgttagtccaacacgatgcagcccactccccacagattactgggcca

SEQ ID NO: 374542 - DNA, 560 bp, Homo sapiens
ttctgtccagtttttatgggaagatatttcctttttcaccttagccctgaaagcgctccaaaagtccagttccagatactacaaaaggagtgtttcwggactgctctatgaaagggagtgttcaacttttgacttgaatgcaaacatcagaaagcagtttctcagaacgctgctgtgtgctttttatatgtattcccgcttccagcgaaatccccaaagctagccaaatatccacttgcagattccagaaaaagagtgtttcaaaactgctccttcaaaacggtggttcaattctcttagttgagtacacacatctcaaataagtttctgagaatgcttctgtctagttgttatgggaagatatttccttttccaacataggcctgaaagcgctccaaatgtccacttccagatactacaaaaggagtgattcaaacctgctctatgatagggaatgttcaactctgtgtcctgaatacaaacatcacaaagatgtttctcagaacgctgcagtctgcaatttgtatgaattcccgcttccaacgaaatcctcaaaacta

SEQ ID NO: 374543 - DNA, 560 bp, Homo sapiens
ttctgtccagtttttatgggaagatatttcctttttcaccttagccctgaaagcgctccaaaagtccagttccagatactacaaaaggagtgtttcaggactgctctatgaaagggagtgttcaacttttgacttgaatgcaaacatcagaaagcagtttctcagaacgctgctgtgtgctttttatatgtattcccgcytccagcgaaatccccaaagctagccaaatatccacttgcagattccagaaaaagagtgtttcaaaactgctccttcaaaacggtggttcaattctcttagttgagtacacacatctcaaataagtttctgagaatgcttctgtctagttgttatgggaagatatttccttttccaacataggcctgaaagcgctccaaatgtccacttccagatactacaaaaggagtgattcaaacctgctctatgatagggaatgttcaactctgtgtcctgaatacaaacatcacaaagatgtttctcagaacgctgcagtctgcaatttgtatgaattcccgcttccaacgaaatcctcaaaacta

SEQ ID NO: 374544 - DNA, 593 bp, Homo sapiens
ccgcttccaacgaaatcctcaaaactagccaaatatccacttgcagattccacaaaaagagcgtttcaaaacttctctatgaaaagraaggttctactcctttagttgaggacacacatcacgagtaagtttctgagaatgcttctgtctagtttttatgggaagatatttcctttttcaccttaggccggaaagtgctccaaatgtccacttacacacactacaaaaagagtgtttcaaacctgctctgtgaaagggaatgttcaattctgtgacttgaatgcaatcatcacaaagaactttctgagaatgctgctgtctgctttttatatgtaatcccgtttccaacgaaatcctcaaatctagccaaatagccacttgcagattccacaaaaagagtgtttcaaaactgttctgtctaaagaaatgttcaactgtgttagttgaggacacacatcagaaactagtttctgagaatgcttctgtctagttgttatgggaagatatttccttttccaacgtaggcctgaaagcgctccaaatgtccacttccatatactaaaaaaagagagtttcaaacctgctctaccaaa

SEQ ID NO: 374545 - DNA, 379 bp, Homo sapiens
ctctgtcagtagagggcacacatcagaaacaagtttctgagaatgcttgtgtctagttgttatgggaagatatttcctttttcaacataggcctgaaagcgctccaaatgtccacttccagatactacaaaaggagtgattccaacctgctctatgatagggaatgttcaactctgtgtcctgaatacaaacatcacaaagatgtttctcagaacgctgcagtctgcaatttgtatgaattcccgcttccaacgaaatcctcaaaactagccaaatatscacttgcagattccacaaaaagaccatttcaaaactgctctatcaaaagaaaggttcaactttgttagttgagtagatacagcataaacaagtttctgag

SEQ ID NO: 374546 - DNA, 492 bp, Homo sapiens
agttttgaggatttcgttggaagcgggaattcatacaaattgcagactgcagcgttctgagaaacatctttgtgatgtttgtattcaggacacagagttgaacattccctatcatagagcaggtttgaatcactccttttgtagtatctggaagtggacatttggagcgctttcaggcctatgttggaaaaggaaatatcttcccataacaactagacagaagcattctcagaaacttatttgagatgtgtgtactcaactaagagaattgaaccaccsttttgaaggagcagttttgaaacactctttttctggaatctgcaagtggatatttggctagctttggggatttcgctggaagcgggaatacatataaaaagcacacagcagcgttgtgagaaactgctttctgatgtttgcattcaagtcaaaagttgaacactccctttcatagagcagtcctgaaacactccttttgtagtatctggaact

SEQ ID NO: 374547 - DNA, 544 bp, Homo sapiens
tgtgtactcaactaagagaattgaaccacccttttgaaggagcagttttgaaacactctttttctggaatctgcaagtggatatttggctagctttggggatttcgctggaagcgggaatrcatataaaaagcacacagcagcgttgtgagaaactgctttctgatgtttgcattcaagtcaaaagttgaacactccctttcatagagcagtcctgaaacactccttttgtagtatctggaactggacttttggagcgctttcagggctaaggtgaaaaaggaaatatcttcccataaaaactggacagaagcattctcagaaacttgtttatgctctatctactcaactaacaaagttgaacctttcttttgatagagcagttttgaaatgctctttttgtggaatctgcaagtggatatttggctagttttgaggatttcgttggaagcgggaattcatacaaattgcagactgcagcgttctgagaaacatctttgtgatgtttgtattcaggacagagagttgaacattccctatcatag

SEQ ID NO: 374548 - DNA, 544 bp, Homo sapiens
tgtgtactcaactaagagaattgaaccacccttttgaaggagcagttttgaaacactctttttctggaatctgcaagtggatatttggctagctttggggatttcgctggaagcgggaatacatataaaaagcacacagcagcgttgtgagaaactgctttctgatgtttgcattcaagtcaaaagttgaacactccctttcatagagcagtcctgaaacactccttttgtagkatctggaactggacttttggagcgctttcagggctaaggtgaaaaaggaaatatcttcccataaaaactggacagaagcattctcagaaacttgtttatgctctatctactcaactaacaaagttgaacctttcttttgatagagcagttttgaaatgctctttttgtggaatctgcaagtggatatttggctagttttgaggatttcgttggaagcgggaattcatacaaattgcagactgcagcgttctgagaaacatctttgtgatgtttgtattcaggacagagagttgaacattccctatcatag

SEQ ID NO: 374549 - DNA, 544 bp, Homo sapiens
tgtgtactcaactaagagaattgaaccacccttttgaaggagcagttttgaaacactctttttctggaatctgcaagtggatatttggctagctttggggatttcgctggaagcgggaatacatataaaaagcacacagcagcgttgtgagaaactgctttctgatgtttgcattcaagtcaaaagttgaacactccctttcatagagcagtcctgaaacactccttttgtagtatctggaactggacttttggagcgctttcagggctaaggtgaaaaaggaaatatcttcccataaaaactggacagaagcattctcagaaacttgtttatgctstatctactcaactaacaaagttgaacctttcttttgatagagcagttttgaaatgctctttttgtggaatctgcaagtggatatttggctagttttgaggatttcgttggaagcgggaattcatacaaattgcagactgcagcgttctgagaaacatctttgtgatgtttgtattcaggacagagagttgaacattccctatcatag

SEQ ID NO: 374550 - DNA, 503 bp, Homo sapiens
tcaactgtgttagttgaggacacacatcagaaactagtttctgagaatgcttctgtctagttgttatgggaagatatttccttttccaacgtaggcctgaaagcgctccaaatgtccacttccatatactaaaaaaagagtgtttcaaacctgctctaccaaagggaatgttctactctgtgacttgaatgcaaacatcccaaagaagtttctgagaatgcttctgtctagatttgatctgaagacaatcccgtttccaacgaaatcctcaaggctaggcaaatatcctcttgcagattccagaaaaagagtgtttcaaaactgctccttcaaaacggtggttcaattctcttagttgagtacacacatctcaaataagtttctgagaatgcttctgcctagttgttacgggaagatatttccctttccaacatgggcctgaaagcgctccaaatgtccacttccagatactacaaaargagtgtttcaaacctgctctacca

SEQ ID NO: 374551 - DNA, 503 bp, Homo sapiens
tcaactgtgttagttgaggacacacatcagaaactagtttctgagaatgcttctgtctagttgttatgggaagatatttccttttccaacgtaggcctgaaagcgctccaaatgtccacttccatatactaaaaaaagagtgtttcaaacctgctctaccaaagggaatgttctactctgtgacttgaatgcaaacatcccaaagaagtttctgagaatgcttctgtctagatttgatctgaagacaatcccgtttccaacgaaatcctcaaggctaggcaaatatcctcttgcagattccagaaaaagagtgtttcaaaactgctccttcaaaacggtggttcaattctcttagttgagtacacacatctcaaataagtttctgagaatgcttctgcctagttgttacgggaagatatttccctttccaacatgggcctgaaagcgctccaaatgtccacttccagatactacaaaaagagtgwttcaaacctgctctacca

SEQ ID NO: 374552 - DNA, 488 bp, Homo sapiens
acctgctctatgatagggaatgttcaactctgtgtcctgaatacaaacatcacaaagatgtttctcagaacgctgcagtctgcaatttgtatgaattcccgcttccaacgaaatcctcaaaactagccaaatatccacttgcagattccacaaaaagagcatttcaaaactgctctatcaaaagaaaggttcaactttgttagttgagtagatacagcatacacaagtttctgagaatgcttctgtccagtttttatgggaagatatttcctttttcaccttagccctgaaagcgctccaaaagtccagttccagatactacaaaaggagtgtttcargactgctctatgaaagggagtgttcaacttttgacttgaatgcaaacatcagaaagcagtttctcacaacgctgctgtgtgatttttatatgtattcccgcttccagcgaaatccccaaagctagccaaatatccacttgcagattccag

SEQ ID NO: 374553 - DNA, 568 bp, Homo sapiens
cacatgttagttgtaggtttatcagagatgctctttatcatgctgatggtgttcccttgtattctttggttactgagagggattttttttttaaatcaggaatgaatgttgtattttatcaaatgcctctatctactgagatgatcatatggttcttttagttttttaatgtggtgaatacttatattttactgtcaaacaaaccgtgtatttagggataaaccccacttgtttatgatgtattatccttctaatgtatcattggatttgatttgccaaagctttatttagagcgttttaaaagactattttttagagtagttttagcttcacagcaaaattgaaagtaaggcacagagattatccctgtactccctgccccsacacgtgcatagcctccacaattatcaatatcctcaccagagtgctacacttgacctcattgatgttcctgaattgataatcataatcatccaaagtccatagtttatattagggttcagtctcggtgtcttatattctgtgaatttggacaaaagtataaggacatgtatttatcattgtagta

SEQ ID NO: 374554 - DNA, 568 bp, Homo sapiens
cacatgttagttgtaggtttatcagagatgctctttatcatgctgatggtgttcccttgtattctttggttactgagagggattttttttttaaatcaggaatgaatgttgtattttatcaaatgcctctatctactgagatgatcatatggttcttttagttttttaatgtggtgaatacttatattttactgtcaaacaaaccgtgtatttagggataaaccccacttgtttatgatgtattatccttctaatgtatcattggatttgatttgccaaagctttatttagagcgttttaaaagactattttttagagtagttttagcttcacagcaaaattgaaagtaaggcacagagattatccctgtactccctgccccgacacrtgcatagcctccacaattatcaatatcctcaccagagtgctacacttgacctcattgatgttcctgaattgataatcataatcatccaaagtccatagtttatattagggttcagtctcggtgtcttatattctgtgaatttggacaaaagtataaggacatgtatttatcattgtagta

SEQ ID NO: 374555 - DNA, 535 bp, Homo sapiens
cttggggtggtgggcagggcagggtggggctgtggagtggggcacttggcccgcccaaggagccacatcttggggagcctggagtggggagggggctggctggctggggtctctgtaagagcctcttcttgggcaatgtcctttaggtttcctgtgggctgagacctgagagaaatgcccctcccctgaccctgaggtctcttggggtacagaagggtgagaggagtggaagggggcatycccctctcagttggtttagatcctctcttagcacggcccacctttcccccatcctatagctgagcccctgtttgcccaccccagcctggagtgtaaacctggggaaaggtttacacgaggagactgggttagcaagggcttctagggatggggcagggtcagaagctgactggatggaactgtagcccctagagtgcattcctgggtgtcagactctgcagaaggggccactgcacccctctggagccccaatttctttatctgcgatgtgggttggtctccgagccttgatggc

SEQ ID NO: 374556 - DNA, 589 bp, Homo sapiens
gtaggagtggcctaaattatctaatgtaataaagtcagacaaaatgcatactttatagtttcaagattttcagtayataaaatctgtcctttcctacctggacatgtcccattaaaaagtgggagattttaaataatttctttacagatgttttatttaagcaggtagcacaatctactaatgttgtttgatctgtgtttgttatactggttgtaattaatttttttaattcatgaactagcggaaaatttattaaattaactattaaccacattcaccttgtaaatgactgtataaaacttgttgacaatgcactgactttagaaagatgttaatgtgcataaatagagtgtaaataaaatagtgttgatgtactgaaatatgaactgtataaaaagtattggtaattgtatatggggtgtacctatttatctgtaactattatccaaacaaattaaatactgtggatgcctctatgtactgtttttcctcatacaagtaaacacagaatgtcaaattcttcagcctccctctctgtgatcctgttttaattctcctacttgaataatttctttctgacttacagagg

SEQ ID NO: 374557 - DNA, 589 bp, Homo sapiens
gtaggagtggcctaaattatctaatgtaataaagtcagacaaaatgcatactttatagtttcaagattttcagtacataaaatctgtcctttcctacctggacatgtcccattaaaaagtgggagattttaaataatttctttacagatgttttatttaagcaggtagcacaatctactaatgttgtttgatctgtgtttgttatactggttgtaattaatttttttaattcatgaactagcggaaaatttattaaattaactrttaaccacattcaccttgtaaatgactgtataaaacttgttgacaatgcactgactttagaaagatgttaatgtgcataaatagagtgtaaataaaatagtgttgatgtactgaaatatgaactgtataaaaagtattggtaattgtatatggggtgtacctatttatctgtaactattatccaaacaaattaaatactgtggatgcctctatgtactgtttttcctcatacaagtaaacacagaatgtcaaattcttcagcctccctctctgtgatcctgttttaattctcctacttgaataatttctttctgacttacagagg

SEQ ID NO: 374558 - DNA, 589 bp, Homo sapiens
gtaggagtggcctaaattatctaatgtaataaagtcagacaaaatgcatactttatagtttcaagattttcagtacataaaatctgtcctttcctacctggacatgtcccattaaaaagtgggagattttaaataatttctttacagatgttttatttaagcaggtagcacaatctactaatgttgtttgatctgtgtttgttatactggttgtaattaatttttttaattcatgaactagcggaaaatttattaaattaactattaaccacattcaccttgtaaatgactgtataaaacttgttgacaatgcactgactttagaaagatgttaatgtgcataaatagagtgtaaataaaatagtgttgatgtactgaaatatgaactgtataaaaagtattggtaattgtatatggggtgtacctatttatctgtaactrttatccaaacaaattaaatactgtggatgcctctatgtactgtttttcctcatacaagtaaacacagaatgtcaaattcttcagcctccctctctgtgatcctgttttaattctcctacttgaataatttctttctgacttacagagg

SEQ ID NO: 374559 - DNA, 490 bp, Homo sapiens
acaatctactaatgttgtttgatctgtgtttgttatactggttgtaattaatttttttaattcatgaactagcggaaaatttattaaattaactattaaccacattcaccttgtaaatgactgtataaaacttgttgacaatgcactgactttagaaagatgttaatgtgcataaatagagtgtaaataaaatagtgttgatgtactgaaatatgaactgtataaaaagtattggtaattgtatatggggtgtacctatttatctgtaactattatccaaacaaattaaatactgtggatgcctctatgtrctgtttttcctcatacaagtaaacacagaatgtcaaattcttcagcctccctctctgtgatcctgttttaattctcctacttgaataatttctttctgacttacagaggggatgcttcatctctgaggttggaaactctgtagagcaggattccctaactcctgggctacagaccagca

SEQ ID NO: 374560 - DNA, 490 bp, Homo sapiens
acaatctactaatgttgtttgatctgtgtttgttatactggttgtaattaatttttttaattcatgaactagcggaaaatttattaaattaactattaaccacattcaccttgtaaatgactgtataaaacttgttgacaatgcactgactttagaaagatgttaatgtgcataaatagagtgtaaataaaatagtgttgatgtactgaaatatgaactgtataaaaagtattggtaattgtatatggggtgtacctatttatctgtaactattatccaaacaaattaaatactgtggatgcctctatgtactgtttttcctcatacaagtaaacacagaatgtcaaatycttcagcctccctctctgtgatcctgttttaattctcctacttgaataatttctttctgacttacagaggggatgcttcatctctgaggttggaaactctgtagagcaggattccctaactcctgggctacagaccagca

SEQ ID NO: 374561 - DNA, 550 bp, Homo sapiens
gccaggaatatttgctgcagctctcagggctggatacttcttttttcttttctttttttttttttttttagtaagagatgaggtctcactaygttgcccaggctggaatgcagcagctattcacaggcacgatcccactactgatcagcacaggagttacttatgacctgctccacttccgacctgggctggttcacccttccttagcaaatctggtggtgccccgctcccaggaggtcaccatattgatgccgaacttagtgtgaacacctgatcggcatagcacactacggcccagaatgcctggcctcaaatgatcctcctgccttaggctccctagtagctgagactacaggtgtttgccaccacgcctgctagatacatttttatatctcttcttagtcattgcttcctttctactgtattcccatcttattgttagacacaactcatctttaagtcggtaaaaggaaaaagccctcaagctcatcacatttcctttagcgattttcttgacgcctctcctggttctgaaggtcacatgatatat

SEQ ID NO: 374562 - DNA, 550 bp, Homo sapiens
gccaggaatatttgctgcagctctcagggctggatacttcttttttcttttctttttttttttttttttagtaagagatgaggtctcactacgttgcccaggctggaatgcagcagctattcacaggcacgatcccactactgatcagcacaggagttacttatgacctgctccayttccgacctgggctggttcacccttccttagcaaatctggtggtgccccgctcccaggaggtcaccatattgatgccgaacttagtgtgaacacctgatcggcatagcacactacggcccagaatgcctggcctcaaatgatcctcctgccttaggctccctagtagctgagactacaggtgtttgccaccacgcctgctagatacatttttatatctcttcttagtcattgcttcctttctactgtattcccatcttattgttagacacaactcatctttaagtcggtaaaaggaaaaagccctcaagctcatcacatttcctttagcgattttcttgacgcctctcctggttctgaaggtcacatgatatat

SEQ ID NO: 374563 - DNA, 550 bp, Homo sapiens
gccaggaatatttgctgcagctctcagggctggatacttcttttttcttttctttttttttttttttttagtaagagatgaggtctcactacgttgcccaggctggaatgcagcagctattcacaggcacgatcccactactgatcagcacaggagttacttatgacctgctccacttccgacctgggctggttcacccttccttagcaaatctggtggtgccccgctcccaggaggtcaccatattgatgccgaacttagtgtgaacacctgatcggcatagcacactacggcccagaatgcctggcctcaaaygatcctcctgccttaggctccctagtagctgagactacaggtgtttgccaccacgcctgctagatacatttttatatctcttcttagtcattgcttcctttctactgtattcccatcttattgttagacacaactcatctttaagtcggtaaaaggaaaaagccctcaagctcatcacatttcctttagcgattttcttgacgcctctcctggttctgaaggtcacatgatatat

SEQ ID NO: 374564 - DNA, 404 bp, Homo sapiens
ttacagtgactttatcctgatgtaaccacccctgtaagccaaaaggcttacacatatcatktcattactcaacacatatcattttcacagtattataaaaagtcagaaaatggtgagtcgaaccatgctaagtcaaggactgtctatatttgggaatctgacatgtggagaggctataaaaaggatactgaacctagaaagtcctggttcttttatatgtagtagtctttctttagcttatctcttgcattggttttactttcagcggctgtgtagtaacagtgccctttccttcaggttcccgtatcgttttcttgactatcctggagcccttcctaccagcttcttcgaggaccatcaggcttccactaacagtctctttaaaactcttcttgtttttgtgc

SEQ ID NO: 374565 - DNA, 562 bp, Homo sapiens
gaattcatcacgttccatagcttgaaaaaaatagctcaagaagtctggctctactcttcacttctgccatccctatggaattgtcagccagcacacagaaacggttctcagaaaacagaagcatcatcaacttctcagggttatggtagtgatttttaaggccaaaacatcccagtctcatctagtaacctattcaagcagttacagtttataagcrgtcgcttgagaggtaacactttaaatctccagtcatttacagtgtcattggtttacttttgccctcagaaaaagttccaaattccttaacatgtaatataaacacccacattcatttggttcttgtcaagttactcaggcttatctctcaccacttactttactctgcccctttgctctaggatccagccaaactggactgcacagaattccacagtgctcgtccttctcctccagctctttgcacttgcttctttgctctatctgccaacctttttttctcatccttcaggtatccactaaccatgcctccaccgaaaagcctacagtatcgagacaaaactgg

SEQ ID NO: 374566 - DNA, 569 bp, Homo sapiens
tttttgcagttccatatgaattttaggattgttttttccatttctgtgaagaatgttattggtgtttttttgttgcaagttataaagggcattttatttttatcttattmtttctctttcttaactttcagattcagggagtacatgtgcaggtttgttacacaggtatattgcataatgcttaggtttagggtgcagttgaacctatcacccaggtaatgagcatagtacctggcatgtcatttttcaaccattgtccaacccagtcccccttcttatagtccccactgtctattgctcccatctttatgtccatgtgtacccaatgtttagctcccacttataagtgagaacatgtagtatttggttttctgtttctgcatcagtttgcttaggataatggcctccagctgcatccatgttgctgcaaagggcagtattttgttctttttatagttgcatagtattccatattgtatatgtgctacattttcttaatccagtgcatcattgatgagcttctggttttattccatatctttgctgttgtgaatagtgctgcagtgaac

SEQ ID NO: 374567 - DNA, 551 bp, Homo sapiens
tttctccaatagtgtattagaattcycttttcactgtagcagctctgccaaaatctgggttgttgttgcttattttttgactttctagtaatagccattatgtctggtgtgagatggtatgtcattgtggctttgatttgcttttctctgatgatcagtgatgatgagcattttttcatatgtttgctctccacttttatgtcttttttggagaagtgtctgttaatgtattttgcctgcttttatatatttttttaaattcttgtttgttgatttaagttccttataggttctggatattagaactttgttcaatgcatagcttgtaaatacattctttcattgtttaggttgcctatttagtctcttgaatggttccttttcctatgcagaagctcctttgtttaactaggtcccaatttttctttctttttttttttctttaacaaaatttttacttaataaatggttaaaatcgcagtgccaaaaatacattcacatttagcaatttcactgaaaggaagaaactacagaatgcacggtttcagaaa

SEQ ID NO: 374568 - DNA, 551 bp, Homo sapiens
tttctccaatagtgtattagaattcccttttcactgtagcagctctgccaaaatctgggttgttgttgcttattttttgactttctagtaatagccattatgtctggtgtgagatggtatgtcattgtggctttgatttgcttttctctgatgatcagtgatgatgagcattttttcatatgtttgctctccacttttatgtcttttttggagaagtgtctgttaatgtattttgccygcttttatatatttttttaaattcttgtttgttgatttaagttccttataggttctggatattagaactttgttcaatgcatagcttgtaaatacattctttcattgtttaggttgcctatttagtctcttgaatggttccttttcctatgcagaagctcctttgtttaactaggtcccaatttttctttctttttttttttctttaacaaaatttttacttaataaatggttaaaatcgcagtgccaaaaatacattcacatttagcaatttcactgaaaggaagaaactacagaatgcacggtttcagaaa

SEQ ID NO: 374569 - DNA, 561 bp, Homo sapiens
tgttaatgtattttgcctgcttttatatatttttttaaattcttgtttgttgatttaagttccttataggttctggatattagaactttgttcaatgcatagcttgtaaatacattctttcattgtttaggttgcctatttagtctcttgaatggttccttttcctatgcagaagctcctttgtttaactaggtcccaatttttctttctttttttttttctttaacaaaatttttacttaataaatggttaaaatcgcagtgccaaaaatacattcacatttagcaatttcactgaaaggaagaaactacagaatgcacggtttcagaaagctattttaagttatttacaaataaagtatctaaaactcaaaaacaggctgtgtgtgctatatctcgtttatcccttcccgaacaaaatttctgttatttgggcaaattcttaaatcatgatttaaaccgtaatggttacaaaccacaaacacatccatccaaagactgaaaccatttttatcyggtcagtggcaaaactgttgaaagggcaatagttgaagctgttggg

SEQ ID NO: 374570 - DNA, 606 bp, Homo sapiens
gactgtagggaacaatcttgaaaatcatctttgtacaaagagtcattatctattttactcagcaattatgtattgagtcttgctatgtgctaggcactaggatttaaagagtgaaaagaaagcatgtcagagatgacttttctagagatcctgcccgagctgaggcttaaagagtgaggctagcctaattagaaggggtaggggacaggaaagagtgagagcatgacaggcagcaacaaaaggcagaaagaggcctgaaagagtrtatgagtttgcctgcaatcgaaggatgggtcagcaggacaggaccagcagttcagtaaggccagagaaagggcacacaggggaaagggctaaagatggagagctgagcagaagtcacattatgaaagccttacgtataactttaagatgcttggacattaatgttctcaagagtggtccctggtcttatttgcattggtgatagaacactgtcaatgccaaaaccaacatccctagcgaacacatttattaacgcaaggtggtagctcatgtggacacagccaaggagatactatgcagcaaattctcaataagtctcattaattactgacttggaaagtc

SEQ ID NO: 374571 - DNA, 606 bp, Homo sapiens
gactgtagggaacaatcttgaaaatcatctttgtacaaagagtcattatctattttactcagcaattatgtattgagtcttgctatgtgctaggcactaggatttaaagagtgaaaagaaagcatgtcagagatgacttttctagagatcctgcccgagctgaggcttaaagagtgaggctagcctaattagaaggggtaggggacaggaaagagtgagagcatgacaggcagcaacaaaaggcagaaagaggcctgaaagagtatatgwgtttgcctgcaatcgaaggatgggtcagcaggacaggaccagcagttcagtaaggccagagaaagggcacacaggggaaagggctaaagatggagagctgagcagaagtcacattatgaaagccttacgtataactttaagatgcttggacattaatgttctcaagagtggtccctggtcttatttgcattggtgatagaacactgtcaatgccaaaaccaacatccctagcgaacacatttattaacgcaaggtggtagctcatgtggacacagccaaggagatactatgcagcaaattctcaataagtctcattaattactgacttggaaagtc

SEQ ID NO: 374572 - DNA, 606 bp, Homo sapiens
gactgtagggaacaatcttgaaaatcatctttgtacaaagagtcattatctattttactcagcaattatgtattgagtcttgctatgtgctaggcactaggatttaaagagtgaaaagaaagcatgtcagagatgacttttctagagatcctgcccgagctgaggcttaaagagtgaggctagcctaattagaaggggtaggggacaggaaagagtgagagcatgacaggcagcaacaaaaggcagaaagaggcctgaaagagtatatgagtttgcctgcartcgaaggatgggtcagcaggacaggaccagcagttcagtaaggccagagaaagggcacacaggggaaagggctaaagatggagagctgagcagaagtcacattatgaaagccttacgtataactttaagatgcttggacattaatgttctcaagagtggtccctggtcttatttgcattggtgatagaacactgtcaatgccaaaaccaacatccctagcgaacacatttattaacgcaaggtggtagctcatgtggacacagccaaggagatactatgcagcaaattctcaataagtctcattaattactgacttggaaagtc

SEQ ID NO: 374573 - DNA, 547 bp, Homo sapiens
taaagatagtgaacagttaagaataaaagaagaggagtgtgggaaagtggttgaaacaaagcaacaacttaaatggaatctgagaagacttgttaaggaattgaggacagtaagaaataacttggatctggtaaattaatctttggtgtaaacttcatttttctaactttatgtttcatcggtattacttataattttttgccttcatgtatatcatttaggtttaaaataaaccaaaactgttatttcctcttaagaatgaactatgacatttatagataaaattatttactgtaaaccttgtcatctaatagatgctcagtctgtgtttttagagtggaggataagttgagtttaatyactaatatagctgttcatttacacattttttatgttaaaatacaggctaaatagctttgaaactataaggacactagttaaatgttttgaaagaaattttatttcacaatgctgtatcttctcgtagttaagaactgtttttcctctttgacagatttagctgtcatgtatgcaattaagatttgag

SEQ ID NO: 374574 - DNA, 337 bp, Homo sapiens
catgttcttaattcaactccatttgtttgcaagagtcaagtagtgacattcacagtggccttatccaaaggagaaacatttgttatttttcatagaattaatgatctttccacaatctcaaaatccttgctactaacaacagacgttctagttttcagacattatttcatcttcctaatatattaatggagaggttagattattatttccacttgyagtaaggatgaaatgtatagccagttcagaggccgtacttcagatgccgtttcccttacttttgaggagagtaacagtttgctccaagtagcgtctcatttcagtgcaaagagctttgaaa

SEQ ID NO: 374575 - DNA, 558 bp, Homo sapiens
aatcatgctgctgtgaacttttatttacaagtttttgtgtttgtatatgtattcctttctcttgggtatatacatatgagttgaatttctgggtcatatggtaacactatgctcgaccttttgaggagctkccagtctgctttccaaagtggttgcaccattttacgttcccatcagcattgtatgagggttctaatttctccacatccttgccaacatttttcatatttttgattgaaaaaggattccaacctagaggtatgaagtggtacctcattgtggttttgattcacatttccctaatgatgaatgactttaagcctctttttatgtgcttatgagccacttgtatatcttctttggagaaatatctgttcaaatcttttgcccacattaaaattgggttgtcctaaatttctgaattttaagagttctttatataccctaggtgtaagtcccttatcagatatgtttccaaatattttcaatggctttcctttttattttcttttttatgatttattatgtttttaaaatttatataattttaaattgtag

SEQ ID NO: 374576 - DNA, 558 bp, Homo sapiens
aatcatgctgctgtgaacttttatttacaagtttttgtgtttgtatatgtattcctttctcttgggtatatacatatgagttgaatttctgggtcatatggtaacactatgctcgaccttttgaggagctgccagtctgctttccaaagtggttgcaccattttacrttcccatcagcattgtatgagggttctaatttctccacatccttgccaacatttttcatatttttgattgaaaaaggattccaacctagaggtatgaagtggtacctcattgtggttttgattcacatttccctaatgatgaatgactttaagcctctttttatgtgcttatgagccacttgtatatcttctttggagaaatatctgttcaaatcttttgcccacattaaaattgggttgtcctaaatttctgaattttaagagttctttatataccctaggtgtaagtcccttatcagatatgtttccaaatattttcaatggctttcctttttattttcttttttatgatttattatgtttttaaaatttatataattttaaattgtag

SEQ ID NO: 374577 - DNA, 558 bp, Homo sapiens
aatcatgctgctgtgaacttttatttacaagtttttgtgtttgtatatgtattcctttctcttgggtatatacatatgagttgaatttctgggtcatatggtaacactatgctcgaccttttgaggagctgccagtctgctttccaaagtggttgcaccattttacgttcccatcagcattgtatgagggttctaatttctccacatccttgccaacatttttcatatttttgattgaaaaaggattccaacctagaggtatgaagtggtacctcattgtggttttgattcacatttccctaatgatgaatgactttaagcctctttttatgtgcttatgagccacttgtatatcttctytggagaaatatctgttcaaatcttttgcccacattaaaattgggttgtcctaaatttctgaattttaagagttctttatataccctaggtgtaagtcccttatcagatatgtttccaaatattttcaatggctttcctttttattttcttttttatgatttattatgtttttaaaatttatataattttaaattgtag

SEQ ID NO: 374578 - DNA, 521 bp, Homo sapiens
ttgcatgtggatataccgttttcccagaaccatttgttgaaaaatctattcatttctcatttaattttttttacacccttgttgaaaatcagttgaccataaaartgtgtgtttgtttttggattctcagttataatatattgagctatgtctatccttatgccagtagcaaatcacattttaggaaaattcattttcagtcctgttgcttattaccagttgtcttatgtaagaatagaaattcaagtagtagaatgtctttaatttcactttttgcttcttgaaggagtgtatggccagcttatgccttgctgactccatgacatgatgagagtcaggcttacgaagacagatcccattaattttttttctccagtcataccttttgtctctcacccagtgcctctctcttcattcccatttccatcaaatcttggtcacaggatatgctgactccttctactatttactgcattatgtttttattaactcattgtaagtcatagagtcatgtgtagatt

SEQ ID NO: 374579 - DNA, 521 bp, Homo sapiens
ttgcatgtggatataccgttttcccagaaccatttgttgaaaaatctattcatttctcatttaattttttttacacccttgttgaaaatcagttgaccataaaaatgtgkgtttgtttttggattctcagttataatatattgagctatgtctatccttatgccagtagcaaatcacattttaggaaaattcattttcagtcctgttgcttattaccagttgtcttatgtaagaatagaaattcaagtagtagaatgtctttaatttcactttttgcttcttgaaggagtgtatggccagcttatgccttgctgactccatgacatgatgagagtcaggcttacgaagacagatcccattaattttttttctccagtcataccttttgtctctcacccagtgcctctctcttcattcccatttccatcaaatcttggtcacaggatatgctgactccttctactatttactgcattatgtttttattaactcattgtaagtcatagagtcatgtgtagatt

SEQ ID NO: 374580 - DNA, 521 bp, Homo sapiens
ttgcatgtggatataccgttttcccagaaccatttgttgaaaaatctattcatttctcatttaattttttttacacccttgttgaaaatcagttgaccataaaaatgtgtgtttgtttttggattctcagttmtaatatattgagctatgtctatccttatgccagtagcaaatcacattttaggaaaattcattttcagtcctgttgcttattaccagttgtcttatgtaagaatagaaattcaagtagtagaatgtctttaatttcactttttgcttcttgaaggagtgtatggccagcttatgccttgctgactccatgacatgatgagagtcaggcttacgaagacagatcccattaattttttttctccagtcataccttttgtctctcacccagtgcctctctcttcattcccatttccatcaaatcttggtcacaggatatgctgactccttctactatttactgcattatgtttttattaactcattgtaagtcatagagtcatgtgtagatt

SEQ ID NO: 374581 - DNA, 521 bp, Homo sapiens
ttgcatgtggatataccgttttcccagaaccatttgttgaaaaatctattcatttctcatttaattttttttacacccttgttgaaaatcagttgaccataaaaatgtgtgtttgtttttggattctcagttataatatattgagctatgtctatccttatgccagtagcaaatcacattttaggaaaattcattttcagtcctgttgcttattaccagttgtcttatgtaagaatagaaattcaagtagtagaatgtctttaatttcactttttgcttcttgaaggagtgtatggccagcttatgccttgctgactccatgacatgatgagagtcaggcttaygaagacagatcccattaattttttttctccagtcataccttttgtctctcacccagtgcctctctcttcattcccatttccatcaaatcttggtcacaggatatgctgactccttctactatttactgcattatgtttttattaactcattgtaagtcatagagtcatgtgtagatt

SEQ ID NO: 374582 - DNA, 581 bp, Homo sapiens
tgctgactccttctactatttactgcattatgtttttattaactcattgtaagtcatagagtcatgtgtagattttaactatctatgaagggcaagattaagtctaggctgtcatctttcctcattggaaattgagctaattcatcatgttgcagtttacagttagatactcttttgacccagcacctggttctcttgtacactcccggagytgaatcctcttcttggcacagatactacattctcagaaaccagagttccctgcatttacctccttttgcttaaatagagatgcatagctatgcttttatagttcaatacataattcattgaataaatacttcaacccattcaaagaacaacttccaggagtacagcaactggaaatcaggtcatgtccaggcatttatcagaaacaaatggttgaattagttgtatgaatttcaaaatttcagagccaatttttatgatatggagaagcattttgatacaacataaagatgaaatgctcttctcttctccatacaaatgagcttgaagtaaggtaaaggggaaattgcatttaatagcttaacactcaa

SEQ ID NO: 374583 - DNA, 581 bp, Homo sapiens
tgctgactccttctactatttactgcattatgtttttattaactcattgtaagtcatagagtcatgtgtagattttaactatctatgaagggcaagattaagtctaggctgtcatctttcctcattggaaattgagctaattcatcatgttgcagtttacagttagatactcttttgacccagcacctggttctcttgtacactcccggagttgaatcctcttcttggcacagatactacattctcagaaaccagagttccctgcatttacctccttttgcttaaatagagatgcatagctatgcttttatagttcaatacataattcattgaataaatacttcaacccattcaaagaacaacttccaggagtacagcaactggaaatcaggtcatgtccaggcatttatcagaaacaaatggttgaattagttgtatgaatttcaaaatttcagagccaatttttatgatatggagaagcattttgatacaacataaagatgaratgctcttctcttctccatacaaatgagcttgaagtaaggtaaaggggaaattgcatttaatagcttaacactcaa

SEQ ID NO: 374584 - DNA, 506 bp, Homo sapiens
gctgtgacaagcaggacctgttagtagctgggaaaagacaaaggtcttacaccagttccacagtctgtgagcccctacctctcagacatgctgatctgcagagaatagtgaccccagatcatcactgagcacttcacctgtgtaagatgctcccaggtgccatagagcatctgagacctgaatccatgccatctcggcccccagggagtttgtcagtcagtaggactgtgagacacacacagtcaaggcatctgagtagatgctaagcaaaataaaagctcagcgctggaacagatcccttccagctaagatgggccaagaagtctctgaaggcgggtgagctatgagttgagttgtaaagggcaaatctgtttccaagatgagaggggaatggaggtgacagcaggtgtggctgctgccaggtcacttcacaggcttttccccattgtattgacctcgggcttttttttyctcaccattgtctgttcttacaaggtcttctgtga

SEQ ID NO: 374585 - DNA, 506 bp, Homo sapiens
gctgtgacaagcaggacctgttagtagctgggaaaagacaaaggtcttacaccagttccacagtctgtgagcccctacctctcagacatgctgatctgcagagaatagtgaccccagatcatcactgagcacttcacctgtgtaagatgctcccaggtgccatagagcatctgagacctgaatccatgccatctcggcccccagggagtttgtcagtcagtaggactgtgagacacacacagtcaaggcatctgagtagatgctaagcaaaataaaagctcagcgctggaacagatcccttccagctaagatgggccaagaagtctctgaaggcgggtgagctatgagttgagttgtaaagggcaaatctgtttccaagatgagaggggaatggaggtgacagcaggtgtggctgctgccaggtcacttcacaggcttttccccattgtattgacctcgggcttttttttcctcaccattktctgttcttacaaggtcttctgtga

SEQ ID NO: 374586 - DNA, 600 bp, Homo sapiens
gggcaatcttgtcttcttccagttttcaggaggaatgctttcaacttttccctgttcagtataatgctggctgtgggtttgtcatagatggcttttattaccttaatgtatgtcccttctatgctgattttgctgagggtcttaataaaataaggatgctggattttctcaagtggtttttctgcatctattgagatgatcatgtgacttttgttttttaattctgtttatgtagtgtatcgcatttattgacttgtagatgttaaaccatccctgcatccctggtatgaaacccacttgatcatgatggattatctttttgatatgttgttagattcagctagctagtattttttttgaggattactgcatctctgytcatcagggatgttggtctgtagctttcttttctcattatgtccttccttgcttttggtattagggtgtctattagtctgtttcagtattagggtgtgtattagtccattttcacactgctgataaagacatatctgagactgggcaatttacaaaagaaagaggtttatttgacttacagttccacatatttggggaggcctcaaagtcatggtagagtca

SEQ ID NO: 374587 - DNA, 600 bp, Homo sapiens
gggcaatcttgtcttcttccagttttcaggaggaatgctttcaacttttccctgttcagtataatgctggctgtgggtttgtcatagatggcttttattaccttaatgtatgtcccttctatgctgattttgctgagggtcttaataaaataaggatgctggattttctcaagtggtttttctgcatctattgagatgatcatgtgacttttgttttttaattctgtttatgtagtgtatcgcatttattgacttgtagatgttaaaccatccctgcatccctggtatgaaacccacttgatcatgatggattatctttttgatatgttgttagattcagctagctagtattttttttgaggattactgcatctctgttcatcagggatgttggtctgtagctttcttttctcattatgtccttccttgcttttggtattagggtgtctattagtctgtttcagtattagggtgtgtattagtccattttcacactgctgataaagacatayctgagactgggcaatttacaaaagaaagaggtttatttgacttacagttccacatatttggggaggcctcaaagtcatggtagagtca

SEQ ID NO: 374588 - DNA, 581 bp, Homo sapiens
gagactgggcaatttacaaaagaaagaggtttatttgacttacagttccacatatttggggaggcctcaaagtcatggtagagtcaaggaagagcaagtcacatcctacgtggatggcagcaggcaaaaagaaagagcttgtgtagagaaagtcctgtttttaaaaccatcagatcttgtgacattcactcactgtcatgagaacagcatggaaaagacccgmcctcatgattcaatcatctcctactgggtccttctcacaacatgtgggaattatgggagctaaaagatgagatttgggtggggacacagagccaaaccatatcatggtgattttggtttcatcaaatgatttagggaagatttctctttctctatcctgtgaaatagtgttaataggatgagtaccaattctttgaatgtctgatagaattcaggtgtgaattcatctggtcctggacttttttgttgttggcaatttttaaattaccattttcaatcttgctgcttctgattggtctgttcagagtctctatatcttcctaatttaatccaggagggttgtatatttccaggaattt

SEQ ID NO: 374589 - DNA, 378 bp, Homo sapiens
atgtgtccatttagacgaagtgtctttttccaaccctttgccttaagtttatgtgagtccgtatgtgttaggtgagtctcctgaagacagcagcaacttggttggtgaattcttacccattctgccattctatatcttttaagtggagcatttaggccatttacgttcaacattagcattgagatgtgaggtactattctattgtaacgctatttgttgcctgagtacctgaaaacctggaagcgttcccttgaaaactgacacaagacaaagatgccctctstcaccactcctattcaacacagtattagaaattctcaccaaggcaatcaggcaagagaaagaaagaaaagctattcaaataggaagacaggaagt

SEQ ID NO: 374590 - DNA, 648 bp, Homo sapiens
agacagtgtggtgattcctcaaagatctagaacctgaaataccatttaacccagcaatcccattacttggtatatacccaaaggaatataactaattctagtataaagatacacgcacasgtatgttcattgcagcactattcacaatagcaaagacaaagaatcaacctaaaagcccatcaatgataaactggataaagaaaatgtggtacatatacaccatggaatactatgcagccatgaaaaggaatgagacatgtcctttgcagggacatgggtggagctgcagaacattatcctcagcaaaccaacgcagaaatagaaaatgaaatactgcatgctctcacttacaagtgggagctgaataatgagaacacatggacacatggcggggaacaacacacacaggggcatgtgggatggtggcgggtgaaagaagggagagcatcgtgaagaacagctaatggatgctgggctattattaatacctaggtgatgggatgatctgtgcagcaaaccaccatggcacatatttacctatgtaacaaacctggacatcctgcacatcctgcacatgtacccctgaacttaaaagatgaaaataaaaaataataataattgcaggtcacctgatagaatgcagtgaga

SEQ ID NO: 374591 - DNA, 559 bp, Homo sapiens
taaaagcccatcaatgataaactggataaagaaaatgtggtacatatacaccatggaatactatgcagccatgaaaaggaatgagacatgtcctttgcagggacatgggtggagctgcagaacattatcctcagcaaaccaacrcagaaatagaaaatgaaatactgcatgctctcacttacaagtgggagctgaataatgagaacacatggacacatggcggggaacaacacacacaggggcatgtgggatggtggcgggtgaaagaagggagagcatcgtgaagaacagctaatggatgctgggctattattaatacctaggtgatgggatgatctgtgcagcaaaccaccatggcacatatttacctatgtaacaaacctggacatcctgcacatcctgcacatgtacccctgaacttaaaagatgaaaataaaaaataataataattgcaggtcacctgatagaatgcagtgagaagatcatgggataacttctgtgatactcttgccaaaaaaaaaattatcatctaaatcttatcataaaaaaagttcagaga

SEQ ID NO: 374592 - DNA, 559 bp, Homo sapiens
taaaagcccatcaatgataaactggataaagaaaatgtggtacatatacaccatggaatactatgcagccatgaaaaggaatgagacatgtcctttgcagggacatgggtggagctgcagaacattatcctcagcaaaccaacgcagaaatagaaaatgaaatactgcatgctctcacttacaagtgggagctgaataatgasaacacatggacacatggcggggaacaacacacacaggggcatgtgggatggtggcgggtgaaagaagggagagcatcgtgaagaacagctaatggatgctgggctattattaatacctaggtgatgggatgatctgtgcagcaaaccaccatggcacatatttacctatgtaacaaacctggacatcctgcacatcctgcacatgtacccctgaacttaaaagatgaaaataaaaaataataataattgcaggtcacctgatagaatgcagtgagaagatcatgggataacttctgtgatactcttgccaaaaaaaaaattatcatctaaatcttatcataaaaaaagttcagaga

SEQ ID NO: 374593 - DNA, 648 bp, Homo sapiens
agacagtgtggtgattcctcaaagatctagaacctgaaataccatttaacccagcaatcccattacttggtatatacccaaaggaatataactaattctagtataaagatacacgcacacgtatgttcattgcagcactattcacaatagcaaagacaaagaatcaacctaaaagcccatcaatgataaactggataaagaaaatgtggtacatatacaccatggaatactatgcagccatgaaaaggaatgagacatgtcctttgcagggacatgggtggagctgcagaacattatcctcagcaaaccaacgcagaaatagaaaatgaaatactgcatgctctcacttacaagtgggagctgaataatgagaacacatggacacatggcggggaacaacacacacaggggcatgtgggatggtggcgggtgaragaagggagagcatcgtgaagaacagctaatggatgctgggctattattaatacctaggtgatgggatgatctgtgcagcaaaccaccatggcacatatttacctatgtaacaaacctggacatcctgcacatcctgcacatgtacccctgaacttaaaagatgaaaataaaaaataataataattgcaggtcacctgatagaatgcagtgaga

SEQ ID NO: 374594 - DNA, 559 bp, Homo sapiens
taaaagcccatcaatgataaactggataaagaaaatgtggtacatatacaccatggaatactatgcagccatgaaaaggaatgagacatgtcctttgcagggacatgggtggagctgcagaacattatcctcagcaaaccaacgcagaaatagaaaatgaaatactgcatgctctcacttacaagtgggagctgaataatgagaacacatggacacatggcggggaacaacacacacaggggcatgtgggatggtggcgggtgaaagaagggagagcatcgtgaagaacagctaatggatgctgggctaytattaatacctaggtgatgggatgatctgtgcagcaaaccaccatggcacatatttacctatgtaacaaacctggacatcctgcacatcctgcacatgtacccctgaacttaaaagatgaaaataaaaaataataataattgcaggtcacctgatagaatgcagtgagaagatcatgggataacttctgtgatactcttgccaaaaaaaaaattatcatctaaatcttatcataaaaaaagttcagaga

SEQ ID NO: 374595 - DNA, 648 bp, Homo sapiens
agacagtgtggtgattcctcaaagatctagaacctgaaataccatttaacccagcaatcccattacttggtatatacccaaaggaatataactaattctagtataaagatacacgcacacgtatgttcattgcagcactattcacaatagcaaagacaaagaatcaacctaaaagcccatcaatgataaactggataaagaaaatgtggtacatatacaccatggaatactatgcagccatgaaaaggaatgagacatgtcctttgcagggacatgggtggagctgcagaacattatcctcagcaaaccaacgcagaaatagaaaatgaaatactgcatgctctcacttacaagtgggagctgaataatgagaacacatggacacatggcggggaacaacacacacaggggcatgtgggatggtggcgggtgaaagaagggagagcatcgtgaagaacagctaatggatgctgggctattattaatacctaggtgatgggatgatctgtgcagcaaaccaccatggcacmtatttacctatgtaacaaacctggacatcctgcacatcctgcacatgtacccctgaacttaaaagatgaaaataaaaaataataataattgcaggtcacctgatagaatgcagtgaga

SEQ ID NO: 374596 - DNA, 342 bp, Homo sapiens
tgtttgggactggcctttggagatgtaaacatggagcctccctcaggaacccagggcaggcgcccctgggaagaggaatggctccttctttcctccctcagtccctttcctgaatgcctatgtcacttctgggcacacaggggctcagcttgcagggagccactctccaggtgaggctmaggtttgggggctctctctgtgctccatctgctccagcacactctcctcagttgggcctcctctgttctctgctttgcgctccctgcaaggagtccaatcctcgaaggtgggagagtccagagaagaaaagagccaaatggaggaagaggaccctgggaaccc

SEQ ID NO: 374597 - DNA, 342 bp, Homo sapiens
tgtttgggactggcctttggagatgtaaacatggagcctccctcaggaacccagggcaggcgcccctgggaagaggaatggctccttctttcctccctcagtccctttcctgaatgcctatgtcacttctgggcacacaggggctcagcttgcagggagccactctccaggtgaggctaaggtttgggggctctctstgtgctccatctgctccagcacactctcctcagttgggcctcctctgttctctgctttgcgctccctgcaaggagtccaatcctcgaaggtgggagagtccagagaagaaaagagccaaatggaggaagaggaccctgggaaccc

SEQ ID NO: 374598 - DNA, 342 bp, Homo sapiens
tgtttgggactggcctttggagatgtaaacatggagcctccctcaggaacccagggcaggcgcccctgggaagaggaatggctccttctttcctccctcagtccctttcctgaatgcctatgtcacttctgggcacacaggggctcagcttgcagggagccactctccaggtgaggctaaggtttgggggctctctctgtgcyccatctgctccagcacactctcctcagttgggcctcctctgttctctgctttgcgctccctgcaaggagtccaatcctcgaaggtgggagagtccagagaagaaaagagccaaatggaggaagaggaccctgggaaccc

SEQ ID NO: 374599 - DNA, 638 bp, Homo sapiens
agtgaaaaactgttataaatttctttctgattttcatacaagttaaaatgcaaataatatattattttgcacaacttaatttttgtttgttcgtgtatcagtaggccatcaacttctcctcatgtcaatttacatggcttccttcattctttccaaaggctgaaatgtattcagttacaagctgaaacagaaattgctaagttcctcctagggtgaatgccattaagctttggtacttcataatttcaatttttaaaaattatgtaatttttatcatataaaactctatgcttacattaatctatttctacatgctatattcttaaaattagaatttctagttaattaaatagaatttctagttaattaaatacatttcaaagttkatatatgctgtgtgtattagtccatttttatgctgctcataaagacatacctgagactgggcaatttacaaaaaaagaggtctattggacttatagttccacatggctggggaggcctcacaatcatggcagaaggtgaaaggcaaggaggagctagtcacattttacatggatggtggcaggcaaagagagagagattttgcagggaaattccccctataataccatcatatctcatgagacttatttgct

SEQ ID NO: 374600 - DNA, 603 bp, Homo sapiens
gcctcaaaatatactcttataatagccacagtatatttcactattgaggattagagaatgctgcctaaggaaatcctaacatatatttgattgccctttgtttagctctgacctccatcagaacaaacatctgcagaactgtgattttggtcactttgtacctgctcttgtatgtcttcttttctgattctcataattcttgctcctttaactagagtttgtctatattttccctctaaatgtagcattgctctcaatgtcttctaaacaaatgcagtgtcaagtgtgtctctttatccaatctttataatccatattaaattctttttggaaataggataaaacttgatgtatggtacacagatgagagatagataaatgacagatagataataaacaaataaatttctaatgatggatagattagatgaaagtacactagcacyaaattttttattataactacctcctgtacatatttgttgtatcattgttggcttcataactgaagaatgatgatggcaaatcacagtaaattatgacatttttaatagaagggacctgtttttggtcatcttaacatattttatcacccaggcaaaa

SEQ ID NO: 374601 - DNA, 621 bp, Homo sapiens
gtccaaattcatgcagaataataattccaggtggtcagttmatttaaaatattctattcaatggatatttactacatgcttacaatggataaaggatgaggaaaaacagatatagccttgccattatggatcttacagtccagtaggagaaatgaatattaatttcataatcacacaaataagtgtataaatgaaaaatagggtaattgttataaaaagaagtaaatacttttatgacaatttataggcaagaaattaggccttgtgtgtgtatggagaaggggtcagatagacttccctgaggaaattatttatttaattaataagggtgagaaaatgttgaatgttattacaaacaaccccgattaataatggctaagcctacacacatctaagaggaacatcccttgttgagaagcattattttggggcagcagtcctccataaagcctccctggcagccatgcttcttcaatctactccttctgccaccttccacagtggcacccacaaaagggaaagggagagaccgtaggaagaacacacacacactatgagttgcctctgcccaagaagggcattgggtaattcagataaaactgaatttagcgttaaatgtgt

SEQ ID NO: 374602 - DNA, 621 bp, Homo sapiens
gaacaaatgagctctacactctctttcacctctgtcatgctaagatacaagagctaaaaattctagactggtctttcatttgctttcagtatagtaactaattcttctgagcctcaaattctctgtgtattaaattggaaaagacaatgtaatcaaaaaattagtgagtagaggraaaaccatacactgcctctatctgtgatcttaccagccaataaaacagaaacttcgattttcttaggcataatcagcataaactactaaccaccccctctcccatttttacaccttctacccacaggagtagaaattatttatctgtttgctaaaatggcaagagattgacagtcattcatatttctctaccgaggaaaaaaggcatatgcccaaggtcactcacaaagggaagctttctctgaagggctgtctgccctcatctacatatgcctcaggtcagtcctcctctcagctcagtgctcacctaattctccctacaggcagatcccagatttgaagttgaaagtaaaagttggggagtatgaggaagcccattttggtcacaaagagctatgggctagttaatgtttaataactgcctttctgcctttctggccgggacag

SEQ ID NO: 374603 - DNA, 527 bp, Homo sapiens
gaaaaaagtaaccccactttatttacccgtttatttttctttgaataaagataggtctatccaatttgctatgtgagaagattctcagcaagtccctttcctatgacataaacagcatttgacactacttttaaaaaggtttataacactataagatgactataattaataatctcctatattttcaaaaagctagaagaaaagatatttatatatgccataaatatgtacagttattatgtgtcaattaaaaataaatttcaaaagtaagctctagyggggctgatttatatatgcaaattaacttcatcattcagtagcatgagattgttggtagagaagcacagaaatttgtctctgtaaattttttccctttgtttattaaaatggctgaaggatgaacttgttttcaataccttttcctgtattgactcccttcaggcatctgatatgattatttctagtcttctttcctaaaatgtacttgccaatatttgaaatattgaccaacaccaatttgtgcagat

SEQ ID NO: 374604 - DNA, 610 bp, Homo sapiens
tgcagtacttatcaaaaggtgctcatactaatttttcaatcatcaactcttatcacgaaacactactggaaaaaaaaaagagaagaaaataaataaaagaaagaaaaaatattttaaaattcactgagcagatattcctttctttgtttacaaagaagcagaaattttgccctcacctcactttaagtaaaatgaagggttaaaagaccatttaatcacatctaagattaatacraatagttactctgaaggcactgaccactgcaatgcaactaaaaaatataacaatttaaatatattactatgctttaagaaacaaattttaatggtgaatacattttttaaaataccaagaagagtatgagcttaaatcagagttatagggtggttattagaaagccaaagtgaaagtctgtgcttctatatgaattctagtcctagaaaattagccttggaacctcagaaacacaagtgagtgaaaccttacacttctacagaggaatagagcaggatgttcaagtggtactgtattaattgttccttcctggaagaagccaacaaaatctttggagaaaagcatcccacaacagaggaaaccaatggctcaatt

SEQ ID NO: 374605 - DNA, 436 bp, Homo sapiens
taaacaaattgtcttataaggaggacaatgaaaacacatttaataagtgctataaatcatttatgcactccatggtttcacaaatacctattatttgctatgagttgaattataacccatcatatttaataccctgaagttctaagtacctcagaatatgaccttatttgaagatatggtctttacagtggtcatcatgttaaggtgagtgtattaaggttgcccctaatccaatatggytgatgtccttatacatcatttgtgagcaaagcagcaatcctggaacagattcttctctcacagtcctcagaaggagccaaccctccaaagaccttgatctgaaacatctatcctccggaatagtgagattataaattttgtttttcaagtcaccaagtttatctactttgttatagcagcactaataaactaatac

SEQ ID NO: 374606 - DNA, 561 bp, Homo sapiens
cacctgttccagtggaggtggcaggggggtgcaataaactctatgagagatcttagctttggtggtttaatactctatttttgtgctgattggcctcctgccaggaggtggtgctatccagagagcatcagctgtggtagtatgaaaaggaaccactggtaggtggggtcctagaacttcgaagattatgttccctactcagggtaagtagggaaggaccatcaggttgrggcagggctaggtgtgtctgagctcacactcttcttgggcgggtcttactagggctgctgtgggggatgtgggtgaggttcccaggtcactagagttgtgtacctcggaggattatagctgcctctgctgagtcatgcaggttgtcagggaagtgggggaaagctgacagtcacaggcctcacccagctcccatgcaatccaaagggctggtctcactcccaccaagccccctcctaacagccctgagcctgtttccagatggtgggtgaatggggcttgaaaacctgctccaggctagccacctcccagctgtgaaagaaaagggcttgg

SEQ ID NO: 374607 - DNA, 561 bp, Homo sapiens
cacctgttccagtggaggtggcaggggggtgcaataaactctatgagagatcttagctttggtggtttaatactctatttttgtgctgattggcctcctgccaggaggtggtgctatccagagagcatcagctgtggtagtatgaaaaggaaccactggtaggtggggtcctagaacttcgaagattatgttccctactcagggtaagtagggaaggaccatcaggttgaggcagggctaggtgtgtctgagctcacactcttcttgggcgggtcttactagggctgctgtgggggatgtgggtgaggttcccaggtcactagagttgtgtacctcggaggattatrgctgcctctgctgagtcatgcaggttgtcagggaagtgggggaaagctgacagtcacaggcctcacccagctcccatgcaatccaaagggctggtctcactcccaccaagccccctcctaacagccctgagcctgtttccagatggtgggtgaatggggcttgaaaacctgctccaggctagccacctcccagctgtgaaagaaaagggcttgg

SEQ ID NO: 374608 - DNA, 592 bp, Homo sapiens
cagcaagctccttcctctttctgctccttcctctacccctgaattcacttggctttctaaattgactcagctcttaggtaaggtaggaaacttctcccacaaacaaaccttcagtttctccartaagggtgtgtgttcgggagaggaggctctcccttacccacctctgtagatagtgcactcacagtatttgagatgtcttctaggtcctccaggagccatccaattccttcagagggtttgtgggtcctttcgggattgctggtttgttcttgcagtcaatctggagataaaaatcacaatgagaacctccgcatgatactgccctgtcaggagctgcaatctagtcctgcctccggtctgccatgatgatctaattctctctctctctctctctctctttttttttttttttaatgtggattcctggcttccactctcaaatgtgtgatttaattgatagggggtatggccagggcgtgaggatttttaaaagcttctgaggcgatattactaatcagcctatgtttgccatcaccagtgtagaatatattaatttctcatctttgaggaagaataagaatatatatat

SEQ ID NO: 374609 - DNA, 592 bp, Homo sapiens
cagcaagctccttcctctttctgctccttcctctacccctgaattcacttggctttctaaattgactcagctcttaggtaaggtaggaaacttctcccacaaacaaaccttcagtttctccaataagggtgtgtgttcgggagaggaggctctcccttwcccacctctgtagatagtgcactcacagtatttgagatgtcttctaggtcctccaggagccatccaattccttcagagggtttgtgggtcctttcgggattgctggtttgttcttgcagtcaatctggagataaaaatcacaatgagaacctccgcatgatactgccctgtcaggagctgcaatctagtcctgcctccggtctgccatgatgatctaattctctctctctctctctctctctttttttttttttttaatgtggattcctggcttccactctcaaatgtgtgatttaattgatagggggtatggccagggcgtgaggatttttaaaagcttctgaggcgatattactaatcagcctatgtttgccatcaccagtgtagaatatattaatttctcatctttgaggaagaataagaatatatatat

SEQ ID NO: 374610 - DNA, 577 bp, Homo sapiens
gcattctctctggtccctctgcattttgatttgctccttgccaaattattcaacatactgaagccaaaatgatgtttgaaatgagcaactcctatgctagcatctcactgccattttcccatgatgcagttactgacacaaacatacatatatgacatttttgtgtgtatgtttttcttcgagtgaaaaaaacaagagctagattgattttcactatattttaaaaataagtgttctgatactctgacttgaaaaaataggctycatgagatatacagaactcattgttaggaagcccctgagggcttaaaatataaacagtcattctccacggcagcttggagcattgatttgctattgaactaatgctacatattgacttgtgaatacacaactctagggtgtgaagcagcaggtttatggctctgctcagcaattccacttacattgtatgtctgtgaatataagttaaaatatttgaatggatcaaaatctaccaaatatagcaggtaaaccaatgtttgaattttagagtatattcatatcataatatgtacacacagtgagtgcattaaat

SEQ ID NO: 374611 - DNA, 577 bp, Homo sapiens
gcattctctctggtccctctgcattttgatttgctccttgccaaattattcaacatactgaagccaaaatgatgtttgaaatgagcaactcctatgctagcatctcactgccattttcccatgatgcagttactgacacaaacatacatatatgacatttttgtgtgtatgtttttcttcgagtgaaaaaaacaagagctagattgattttcactatattttaaaaataagtgttctgatactctgacttgaaaaaataggcttcatgagatatacagaactcattgttaggaagcccctgagggcttaaaatataaacagtcattctccacggcagcttggagcattgatttgctrttgaactaatgctacatattgacttgtgaatacacaactctagggtgtgaagcagcaggtttatggctctgctcagcaattccacttacattgtatgtctgtgaatataagttaaaatatttgaatggatcaaaatctaccaaatatagcaggtaaaccaatgtttgaattttagagtatattcatatcataatatgtacacacagtgagtgcattaaat

SEQ ID NO: 374612 - DNA, 577 bp, Homo sapiens
gcattctctctggtccctctgcattttgatttgctccttgccaaattattcaacatactgaagccaaaatgatgtttgaaatgagcaactcctatgctagcatctcactgccattttcccatgatgcagttactgacacaaacatacatatatgacatttttgtgtgtatgtttttcttcgagtgaaaaaaacaagagctagattgattttcactatattttaaaaataagtgttctgatactctgacttgaaaaaataggcttcatgagatatacagaactcattgttaggaagcccctgagggcttaaaatataaacagtcattctccacggcagcttggagcattgatttgctattgaactaatgctacatattgacttgtgaatacacaactctagggtgtgaagcagcaggtttatggctctgctcagcaattccacttacattgtatgtctgtgaatataagttaaaatatttgaatggatcaaaatctaccaaatatagcaggtaaaccaatgtttgaattttagagtatattcatatcataatatgtamacacagtgagtgcattaaat

SEQ ID NO: 374613 - DNA, 650 bp, Homo sapiens
aacttttctttatacatctggtagaatttgtctgtgaatccatctggcactggacatttttctgtctggtaggctgtttattattaattcagttttggaacttgttattgatatgttcagaatttcagtttcttcctgttttaatcttgggagattgtatgyttccaagaatttatccaattcttacaggttttctagtttatgtgcatagaggtgttctaatagtctctgaggattcttttgcatttctctggagtcagtgatgatgttccctttgtcatttctaattgtgtttatttggatcttctgtctttttctttattagtctagctagctgtcataaatcttatctattctttcaaaaaaccaaagtctggttttgttgatcttctgtatgttttttttttggcatctcaattttactcaattcagctctgattttggttatatcttgtcttctagctttgtagttggtttacaattattttcctagtttctctagtgatgatgttaggttgttaatgtgaatctttcttttttatatgagtgtttagaactattaatataaagttttctcttaagattgttttagctgtatcccagagattctggtatgttgtatctttgttttcattaatttcaaaaaaatt

SEQ ID NO: 374614 - DNA, 650 bp, Homo sapiens
aacttttctttatacatctggtagaatttgtctgtgaatccatctggcactggacatttttctgtctggtaggctgtttattattaattcagttttggaacttgttattgatatgttcagaatttcagtttcttcctgttttaatcttgggagattgtatgcttccaagaatttatccaattcttacaggttttctagtttatgtgcatagaggtgttctaatagtctctgaggattcttttgcatttctctggagtcagtgatgatgttccctttgtcatttctaattgtgtttatttggatcttctgtctttttctttattagtctagctagctgtcataaatcttatctattctttcaaaaaaccaaagtctggttttgttgatcttctgtatgttttttttttggcatctcaattttactcaattcagctctgattttggttatatcttgtcttctagctttgtagttggtttacaattattttcctagtttctctagtgatgatgttaggttgttaatgtgaatctttcttttttatatgagtgtttagaactattaatatraagttttctcttaagattgttttagctgtatcccagagattctggtatgttgtatctttgttttcattaatttcaaaaaaatt

SEQ ID NO: 374615 - DNA, 637 bp, Homo sapiens
gggaaaagtttatttgggcagttctaggtcaagatcttgcataaaattgcagtcaagctgtttgctagggatacagttattttaaaaaacattatttgaatatatttatataatttacataatttactatctggacaccctgtggcacgcctatagtaccagctacttgggaggctgaggtaggattgcttgaactcaggaggcagaggtttcagtgagccgagattgcaccacagcactccagcctgggtgacagagccagaccttgtctaagaaacaaaaataaaacaaaacaaaaacctactagtgtctgtcgtagttactattgcatctttatgggtaaaaacaaaccctgagaattagaacttttagatacaatgccttagaagacaacgtaagcaataccattctagacattggaatgagcaaaaattttgtgatgaagatgccaaaatcattcgcaataaaagcaaaaattgacaagtgggatctaattaaactaaagagcttctgctcagcaaaagaaactatcaacagattaaayagacagtgtacagaatgggaaaatatttttgcaactatacatcagacaaaggtctaatactcagcatctacaaggaacttaaacaaatgtaca

SEQ ID NO: 374616 - DNA, 588 bp, Homo sapiens
atgatgatttctgccaagggaaaagagaaccagaggcaaacattcaayttttttagtattccaagatgctttccatggagcccactctggtctcaccaaacgagccatgctaagagaaatggcatgtctagttcacctggaatcaggtggaaagatagcccataatggccagtagacagatcttcatggtagctctatgtacctgtgagcagtaacactcaatcagaggtatcagttaatagcatagctcacctgcaaaactgagctggtcactcctagaagtggtggaagttctactgggctttaatccccaggcagccagcctttaggactagcctcagactctaccccaaggacccaaccatggaaggaaatgacaactacagcaaatttagttaaagggtggaagctagttacaccacacttaggagtctaactgcctctgcttggccgcaaagcccagcccaaggccttcccaggaagataaatgaccaatgcaggaaatttcaaagaacaggagatagatctaccacccccaagaaacagtaattactttagctttaatgtccacccaaaggcaccacctag

SEQ ID NO: 374617 - DNA, 570 bp, Homo sapiens
aatgcaaatagctagccgggcatggtggctcacgtctgtaatcccagcactttgggaggctgaggtgggcggatcacaaggtcaggagatcgagaccatcctggctaacacggtgaaaccccgtctctactaaaattacaaaaaattacccgggcatggtggcgggcacctgtagtcccagctactccggaggctgaggcaggagaatggcgttaacccgggaggcggaactggcagtgagcctagattgtgccactgaactctagcctgggcgacaaagtgagatcactccgtctcaaaaaaaaaaaaaaaaaaaaaaaaatacaaatagctgaatgctttgcaaactgcctttataaatctcatgtaaaattcmcagtgttgctgtggactaggtgagtatcttaagtaataaaataatttattcagaaaagtaagatgacttccctaaggacactcaggtaataagtggcaaggtggctgagactcaaaactggattactttattttaaggccactactctttccactaccacataaattctgaccacatattaccagaaggcatgt

SEQ ID NO: 374618 - DNA, 515 bp, Homo sapiens
tagtattagagtcttagtatgagggtcagacttctacagaggacacaaagatcttttgaaccatcgaaggcatcaatctcccctctggaatccagctcctcccctgtggcttattattaaatggcccatcaggccaagccaacatgggggctccttacctgtgctgtaatgaggagattgttgtggtccatttccttattttgcttgttaaatggccaacctgggttctaatctctgttgggaaaccaaccagctgtgtttytggggcctgccacttttgcttttctggaaatcagttttttcctctttaagataaggggatagagttcaatcttcattaataatacctccagagctgatggtctatgattatgtaggtgactgtgaggtacatgtgcttaattagtaattaataaggacatagacaaaattaactgaatctatggtaagtcatcttagagctgctatagagacattttcccaagggtttcctgtatacataacagtaagtagaa

SEQ ID NO: 374619 - DNA, 481 bp, Homo sapiens
aggaagaagaaatggtggggaggtgtgttaagtggtttgagatggtgtggacaaagtgtgccaaagaggaaaagggcatagagatggagccagtaaaggagcatgggcagttactagaatagaaaagggaacagagaaagaatagaatccaaagtggagattattcatcctggacctacctcgttcacaaaaaccagaccagatgataaatgtaaaatgagaaacgttacggtgggtaagaaatagagaaagtttcaaacatgacttctattttctctataaagtaggagatcagtcatcagtcaatatctacagcagagatactgctgtatctaggttattccctggccttyaggatcactctgggtgagggcagagttagcgttggatggcggacaatcaatgcattagaagagagaagaggagccaaaagggatacagtatagaggcaagagcagagcgtgaggtacagtgttgagta

SEQ ID NO: 374620 - DNA, 583 bp, Homo sapiens
gagctttagttcattacatatcgtccttcaactaggttcacttggaatccaggaaaacatttttaggagttttcctatattgtcaaacctgtgttataggcacctattcaattttcctcagtaactcaggagcatgtgagtctgtgtgtgttttaacaattagagaaaaagacaagtaaagaatgyttatcatacaatctaatgataaatctcttcctggggacctaaatcagataactaataagataggaatgtcacaatgcatttgtggcccctggctggatccctgctctgaataagggctgattgtgctgatgatagtgatttatgtatcattcatggtttgttaaatcagatcatatgtaggaaagcaaggtaataaataaagaacgtgtaagtaaattgaagcaaaatcaagtaaagatttgagaaaactatctacgtaattctttccttaaaactcctttttgatgaaaagggaatttgtgaaatcaatctacactgatcagattacttccaatgaaattgctggggcactgttttaagtgctccttatgaaaaacctaaccccatgaatataaaa

SEQ ID NO: 374621 - DNA, 559 bp, Homo sapiens
tttcattctggccttgattctaatttccatggttactaatgaggtggaatatttcatcattttattggccatctatgttttcttttctataaagcactcgctgatatattttgcatatcttttttattgaattgcttgtggcttcggaatttttttacataaaataaaaattgcagataaagttgagatcctcatgtagctatccttgtcacatttccyttttcattcctcagcataaatcactatcattaatttaatgtttctctttcttaggcaccttttgatcaatttatcatatatttgtgtatatataatatatacatagtgctattgtgctattttttaaactaacaatcaatagcatcctatttgtcaatgtttgtaaaacttacttttctctcaacattatgtttatgagatttattctgattgttgtggctctcattttgtcttttaaactggtatatagtatttcactgtataaatatacaaaaatatatatttatgcatattcctattgatggacttttaagttttatcaatttattttactatcata

SEQ ID NO: 374622 - DNA, 621 bp, Homo sapiens
taattcttttgagcaggttgttgtctctctaggagccagatggctgattggatgactatggtgcccagaggtgctatgacgaacctgtcatcaactggaaaggagctgtttacatcaaggctacattcatttcccattgccattataacaaattgccataaacttagtggtttaaaacaacataaatgtattcttttacagttctagagacaggaagtccaaaaggagtcttatggggcaaaaaccaaggtgcaggaagggctggttccttctggaagccctaagggaaaatctgttccttgcctcttccaacttttgttagctgctaacattctttggcttgtggctgcatcccacctatctctacttctgtctttatattgccttckcctctacttagcctaatctccctctgttttcatcttataaaaacagttgtgtttatattgggtttaccgagataatccagaataacctcatctccagagatttaacctaaacatatctgcaaatcccctttggccaagtaaagaaatattcactgtctccagggattagggcctaaataactttgggaacctttattcccaaagttattgcccagagataaggaatgaattt

SEQ ID NO: 374623 - DNA, 599 bp, Homo sapiens
agtctcagtagagcttcctgttgtttgaggcatgggagagacagagggatggtttttgagtggctgagaaggcatggctgaaaggaatgcagcagatctcaatctgagaaccaccactcagagaaggtgcttcagagggctcctgaaagagttttcatgactttccagacattagctccaaatgtcctgcagtcccctggtttgtcaaagtgcctgccactctacckgctcttcatcctcaggcatccctctccttgtcgaggttgatccttccctctggctccagcccttcttgtttctgttgaatatcaactgccccttccccactgccatggtgatcaagacatgaaaccaagtcttattctccagtgcatggtctaaggcttgccaggggcaccaatggctggggtgataaccattctaaaccccatcctcacttccatgggctcagccacctaccacgtggacccagccttcacctggaataaccccacctctgaaaaggtaaactctgatctccagctctcgaacccacaacctcctcttccatgatgcttcctgtgaccagcagcctcctagtggcactttcttacctgctc

SEQ ID NO: 374624 - DNA, 537 bp, Homo sapiens
aaatgctgcaaggaatgaccatatggaaatggtgaaggtccttattgttatgcagcctctaggatgcccatgtaggaagttagaatggccccggccaggcagggctgggtaatgcaagcaagaagctcccagccttccttccctctccatggcagcaggcacaaggatacatcacattaccctgtgaaagacacctggctgtgaaagttctccagaagccagcacagctctttcctgctcattattacactgtttctggtttctcaccaagtcaaggagaacctcatggaacgcatatcactggcagggatgtacagacaagaatcacaaccagcagagctgccataagaaaaatcctggccatggctgcctccaaattggcacagagagcagcacagagatctgtccacggatcaagacagccatacagccagaaaagcagtgctgtcctggccaggctgcagggaggggagggtctcagagcacaggatcaacacagaacagcaggyccgtggatcttaggagcgtaagcttggg

SEQ ID NO: 374625 - DNA, 584 bp, Homo sapiens
gacattaggcatataaattggtaattcatagattgatctgaaatgccagttgggtgaactggtagggagtggagggcagaagtgtgacatccataaatggatttcatctgataggctggggctcacagtggaaatgtagwcatccaaggataggttttgctcagaagcctttcagaagtgcatgtcactacactgacaaccacatgagttagccctcctgtgctcattgtctgaacaatttctttgccccgcatgccaaaataacaacatacaatgtttatgtatctgaggaattagaaacatgtggtctgatttggtttacttatgggaaagaatatctaaagtctatattcttccagaaatctaatcactgtaattatgctttgaacagattatttgaaattgaaaaaaaatattagcatagtattagggaaagtttttcatatttaggacttgaaaaatcaataagacatgggttcacaaatgcttattatttttgacagtgaatgagacatgtgggagctgccagggccccagatcaggggatggatcacaagacaataatgagaaacaacacatttctg

SEQ ID NO: 374626 - DNA, 607 bp, Homo sapiens
tctattcataactcagactagccattggccaccatcagtttttacaargttattactgttaaaagtatttattaaccattcaatatatgattagccattttctatttgtccaattgttttatgtgttagataatttaatattcatgatcaaactgtgtggtaggttttataattagccccatttctcaggtgaagaagtggaaataaagtggggttcagcaaattgcccaaggtcactcagggagtaagttgtagagctgaggtttgaacctatgtctttaggaatcaaaagcctgcattctttatcactctgcactgatacctcaacttaaggccatttatgaaaatcaatggaggatttgcacttagagaccaacccataggtttactcttatattacaagatttccatactctgaagaaaggagctgctagattatttgttgtctcaggcagggttgagatgtgctgtcgggagatggtggctgtacttgggcaatgtcttccatcttcagagggaagagcatctgaactctcgggactgccagcccagccctttcataattagtgaattcacttagttgtccacccaactccaacccctcacc

SEQ ID NO: 374627 - DNA, 607 bp, Homo sapiens
tctattcataactcagactagccattggccaccatcagtttttacaaggttattactgttaaaagtatttattaaccattcaatatatgattagccattttctatttgtccaattgttttatgtgttagataatttaatattcatgatcaaactgtgtggtaggttttataattagccccayttctcaggtgaagaagtggaaataaagtggggttcagcaaattgcccaaggtcactcagggagtaagttgtagagctgaggtttgaacctatgtctttaggaatcaaaagcctgcattctttatcactctgcactgatacctcaacttaaggccatttatgaaaatcaatggaggatttgcacttagagaccaacccataggtttactcttatattacaagatttccatactctgaagaaaggagctgctagattatttgttgtctcaggcagggttgagatgtgctgtcgggagatggtggctgtacttgggcaatgtcttccatcttcagagggaagagcatctgaactctcgggactgccagcccagccctttcataattagtgaattcacttagttgtccacccaactccaacccctcacc

SEQ ID NO: 374628 - DNA, 586 bp, Homo sapiens
cagaagatactgctctttcactcttccattaaacagacttgttggcccatagctcatcatgtagattttccagaaagatgttagcaacaatccattatgtcacttaaactgcaggggacacatgaggcattctgtacctggtcctgttgcagcctcattgtcttgatttgagaagatggaggtgggggaaggcatcacaagacactaagatttctttttaagaataataataatctctcattgtcaattgttttatacycttgatgtgggtgagagatgtaagaggcagaaaaccaaattatgattaccccccggtaaatccttcatcactgtaagtggtaaacatggagatgtggtgctcatatcctctttcatgaaaggacttttattgcccaattgctcggaatgctgtctgtgaacagtctttagataacagtcctttaggaattgatccacccaacgtcacacactttttgtggatggccaacatgatggaggcaaaggtattgaggaccacctattttgtcacaacatggaacaaatttgactgatcattttgtagggtttgcttaggctgctgggccta

SEQ ID NO: 374629 - DNA, 586 bp, Homo sapiens
cagaagatactgctctttcactcttccattaaacagacttgttggcccatagctcatcatgtagattttccagaaagatgttagcaacaatccattatgtcacttaaactgcaggggacacatgaggcattctgtacctggtcctgttgcagcctcattgtcttgatttgagaagatggaggtgggggaaggcatcacaagacactaagatttctttttaagaataataataatctctcattgtcaattgttttatacccttgatgtgggtgagagatgtaagaggcagaaaaccaaattatgattaccccccggtaaatccttcatcactgtaagtggtaaacatggagatgtggtgctcatatcctctttcatgaaaggacttttattgcccaattgctcggaatgctgtctgtgaacagtctttagataacagtcctttaggaattgatccacccaacrtcacacactttttgtggatggccaacatgatggaggcaaaggtattgaggaccacctattttgtcacaacatggaacaaatttgactgatcattttgtagggtttgcttaggctgctgggccta

SEQ ID NO: 374630 - DNA, 572 bp, Homo sapiens
ggcagctctgtccctgtggctttgcagggtacacagaacctgtagctactttcatgggctggcactgagtgcctgtagcttttccaggtgcatggtgcaagctgtcaatggttctaccattctggggtttggagaacgatggccctcttcttacagttccactacacagtgccccactggcgactctacatgggggctccaaccccacattttttctccacattgccctagtagaggttctscatgagagctctgcccctgcagcagacttctgcttggacatccaggtgtttccatacatcctctgaaatccaggctcccaaatcttaactcttgccttctgtgcacccacaggcccaacaccacatggaagctgccaaggcttggggcttgaaccctctgaagcaatggcctgagctgtaccttggccccttttagccatggctgtagctggagtggctgaaatatagggcaccatgtcttgaggctgcacagaacattggggccctgggcctgacgtaggagaccatttttttccttcctaggcctccaggcctgtgataatagtggct

SEQ ID NO: 374631 - DNA, 607 bp, Homo sapiens
aacttttagccagcttttgcctgacctctaacttggattctgaagggcagtttctctttcaagatggcctcagcaacatcttcttgggccgctgcttggccctttagcagaactctttggctgtttcttagttgcagcttctgtcctcctgtgaaccctgaccccctcttcctttagtgccatttaattgcctggacttcaaattcacccatcctctgcatctatttctatccacccagtcattaaccctggcctggcaacttgcatcccttcctggattgcccctcgtcacatgcttgcaacttagacatattacaggagacatctgttgactgsagttggcttattctttgttcacacaagctgaaatatgggcaaaagggacaatgttgaaagaggcttggtgaaagattctctcctttccatgtatgtaaattaggcattccctcagggaagacttagaacctataattccaaacctgtaaaatgtttccattccttgtattatttagatggtgactcatataacttttcatcactcatcagcacataattgtggaatacataatctgtcaggtactgggccaggcacagaggatgcaagttc

SEQ ID NO: 374632 - DNA, 574 bp, Homo sapiens
tctatcaagttttgcttcatgtgctttgaagttctgttattaggtaagtaaacacagcattgwttgacttcctgcaggatttcctcatttttctttatctttatatttatctttttctttatctttgccaatattattttctctgaaatttactttgaaattaacatagaaaatttatcaccttttgattagtgttagcatataatatctttttctaacttaattatgtctttctattaatgtgtgtaacatatagttgggtcttgctttggggtgtttaaaccatttatatttaatgtgattattgataaggttacgtttaagtctatcatcttgctatttgttttctatttgtcccatggcttctttgttacattttcctcatttgtatcttgttgtgcatagagtggatattttctatgattctattttatctcctttgttagcttattagctataactctttgctttgttattttaatgtttgctttagaggttataatacacattgttagtgtatcaaaggccacctccaaatattatatgccttcatatatagtgtaagaacctgaca

SEQ ID NO: 374633 - DNA, 544 bp, Homo sapiens
aacattttttttaaaaaaagaccacttactcatctaaaactgaagtgataatccaatcattttcaataacattaaaaacataaatggcattccccctccccaccggcaaggtttattttcctatctgaaacaatttttttttaaagaaagaggaaatattggaaacattaaatataccaaacaacagatttcactcttgacatgaggcaaggggggtgaatgccatttacacaaaaactctgcacttgaccttctaatgtatataatactaaatatgtatatgtttataaatgctaaattttgatactattcttttccatttatagttatgggtgggaaaatgcagaaagatgcttttctgcttcaggggttttgccaattcttccatattgctaaaggataattaagtagatgatactttgtttagcagaatatatttatgagtttttaaatatgtaaatacaagccaaaagtcacaaaaaaggtgaagaacaaaattctgaaaaacraagtgaagggaattgcattttagcgggaaaggcag

SEQ ID NO: 374634 - DNA, 627 bp, Homo sapiens
cgtgtactaaatgccacctcatcctaaatgctttacatgttgctaattactcaccacaatcaaaatttaaagtggatttcactgcattgtgtttcagatggatgacttcaccatagacattatgtcacttttctgaggttaggaagtagccaatctaggatccacctgattccaagtctgatgctctgttagcacatccagctgttttctatcagatctctgtgggcttcagtctcctcatctatcaaaacaaacaaacaaatatgggattgcaacaaatgataccttctgcctctttcatattttcagtcctagcaatgrcaatgctggtatcagctccgtattcctcagctctttgcctatggtagggaagactcatgaagacattcatcatgtcaagaccttgcagatttgcttttggacttccaaactattgtcctcaaaggaatgtgaagaataatgacttcttcaaaagctggagtaaatttataacatcttagggcctttccttcaatttgaaggccccattcttggtgctgacaaatgctgaatgaaggttggctgccccatgctggaacaatcactaaaatgaacaataggaagatgttgaggtcaaatgtattagtt

SEQ ID NO: 374635 - DNA, 481 bp, Homo sapiens
cttggtctctcaaagaattgggattaccatcatgagccaccatgcccagcctattcacatgattttatgactacaaaaatatatgtatacttcctcatagaaatgccttaaagaaagaagtgttaattatttctttctatatcataagtgccatgcatcttgctaagatatattagatctgcaaagtgtttaytgaattaatttctaaaaataataaaactcttagctttgttgcgtgcatatatatatatatacaagtaaaatgcttattgcacagactaaactcattggagtaaaaacaacaaacagttttattttttcctccagcaccttaaatatgctatacaacccctcccttcccttagcaacatctgagtcagatgccatggtccctctcaggtattgagaatggggtggaggaaatgtttttagtttatattatttaacagttcctgctgatgtagttcttttggtcaccatg

SEQ ID NO: 374636 - DNA, 582 bp, Homo sapiens
caccctatacaaaagtcaactcggaatgaatccaaggactagatgtaagacctgaaactataaagctactagaagaaaacatgggggaaatgcttcaagacatttgtctgggaaaatattttataaataaaatctcaaaagcacaggcaactacggcaaaaataaacaaatgaaattatatcaaatgaaaaagcttttaaacaacatagaaaacaatcaacagagtgaatggacaacctacaaaatagaaaatatttgcaactattcatctgacaaggaattaatattcaagattatacaagcaactcaaacatctcaacagaaaaaaaaaaaaactaaagaaaagcctgatttaaaaatgggmaaatgatatgaacagatatttctcaaaatacagaaattttcaacaaatatatgtaaaaatgttcaacatcattaatcatcagggaaatgcaaatcaaaactacaatgagatatcatctcatctcagataaaattgctattgtcaaaaatacaaaaataataaatactggtgaggatgcagagaaaaggaaactcttatacaccactggtgcaaatgta

SEQ ID NO: 374637 - DNA, 582 bp, Homo sapiens
caccctatacaaaagtcaactcggaatgaatccaaggactagatgtaagacctgaaactataaagctactagaagaaaacatgggggaaatgcttcaagacatttgtctgggaaaatattttataaataaaatctcaaaagcacaggcaactacggcaaaaataaacaaatgaaattatatcaaatgaaaaagcttttaaacaacatagaaaacaatcaacagagtgaatggacaacctacaaaatagaaaatatttgcaactattcatctgacaaggaattaatattcaagattatacaagcaactcaaacatctcaacagaaaaaaaaaaaaactaaagaaaagcctgatttaaaaatgggaaaatgatatgaacagatatttctcaaaatacagaaattttcaacaaatatatgtaaaaatgttcaacatcattaatcatcagggaaatgcaaatcaaaactacaaygagatatcatctcatctcagataaaattgctattgtcaaaaatacaaaaataataaatactggtgaggatgcagagaaaaggaaactcttatacaccactggtgcaaatgta

SEQ ID NO: 374638 - DNA, 581 bp, Homo sapiens
attttctctggttggtgaaacaagaaatggaggtttagattgtttaaaatcacagagtttgtaagtgaagctcagaacagtgagataaaatacattgaaagaatttctggaattcaaggaagatgaaatagatgtaatttttccaactcctctcactgagtacaacttaaactccraaaattttatatatataaaaaataggatgactctactatggaaaaagaagacacattggctagagatcacaggacaagaggaataacacgatggtgacctctccaggctttctttttgcctcatatacttcagacttggagattaaaaagccagaaattccataatgccaatagaagcagacaagaagagcccccaaaaaagcctactgtctctctcagaggacaggaagggggcaaatatcaagagagacaacttttagacaatggccatcctactcgggctaccaccacagaaaacccgtggcccaaacccatcataccagtagaggcacattggggagcctcattcatccttagaagtttgtaagaagtgttttaacacctctgccatttcagagtaagaga

SEQ ID NO: 374639 - DNA, 581 bp, Homo sapiens
attttctctggttggtgaaacaagaaatggaggtttagattgtttaaaatcacagagtttgtaagtgaagctcagaacagtgagataaaatacattgaaagaatttctggaattcaaggaagatgaaatagatgtaatttttccaactcctctcactgagtacaacttaaactccaaaaattttatatatataaaaaataggatgactctactatggaaaaagaagacacattggctagagatcacaggacargaggaataacacgatggtgacctctccaggctttctttttgcctcatatacttcagacttggagattaaaaagccagaaattccataatgccaatagaagcagacaagaagagcccccaaaaaagcctactgtctctctcagaggacaggaagggggcaaatatcaagagagacaacttttagacaatggccatcctactcgggctaccaccacagaaaacccgtggcccaaacccatcataccagtagaggcacattggggagcctcattcatccttagaagtttgtaagaagtgttttaacacctctgccatttcagagtaagaga

SEQ ID NO: 374640 - DNA, 554 bp, Homo sapiens
ttcttcttaacaaagtctgccctcaggagaaactatttaaccagaacctaaactgctggggtttcatcagtgcctaacgaacttggaggaagtaaaattaccaactccagctggctctagtcttcctgtggaacaaaggaaatamacaattccagcctcctccagccatatggtcacacctaaagaggggagtggaactgaagttcacagtcaagaggtacaggctcactaaaaactgaggcctaatcataagtaattacattacttaaggcctatttatagcacttcccttgacccaatacatcatgtccagctgtcagttaaaaaattacaaaacatactgaaaggcaaaacacagtttggagagattgaaaaagcactagaacaagactcagatattggaagaaatggtggaattattagatgaggaatgttaaaacaactgtgattaatatgctaagtactctaatagacaaagtagaaagcatgcacaaatagatgggaaatgtaagcagagagatggaaattctagcaaaaagccaaaaggaaatgct

SEQ ID NO: 374641 - DNA, 583 bp, Homo sapiens
tttggaacattggaggagtctagttgagcacttgtagcaaacagatgactccttcataaagaaagagactgctgggcacgtgccgtggctcacgccagtaatcccaacactttgggaggctgaggcagatggatcacgaggtcaggtgttcaagaccagcctgaccaatatgatgaaaccctgtctactaaawatacaaaaattatccgggcgtggtggtgcgtgcctgtaatcccagctactcaggaggctgaggctggagaattacttgaacccgggaggcagaggttgcagcgagctgagattgtgccactgaactccagcctggatgacagagcaagactccatctcaaaaaataaataaataaataaataaatagactgagctaccagctaccatcctccatgcccaaactgtatggcaggcagctatgggaataattccagcctggggtgaaatattgatgacaggttgggcaataatgacattttcctacaaaaattggtggtttactgagggaccagcatggagctgagtattgtttcaactctcttggatggaagcagtttcccaattggcaac

SEQ ID NO: 374642 - DNA, 581 bp, Homo sapiens
agtgtaacatagcatgtgattttaactggtgccaaagactagggtgtggactaatcactgggagtgaggtgttgctcttcctatcacacaataaaactcattgggtgcaatattatcaacttcacataaattgtacaatttcactttatattatgtccccaaacaggaacaattaaacccttgttattttatatggttacattcacatgtactaacattacaaagcaaagcgacgcaatatgcatctctatatttaatataaccttaacttttgaggagagaagagtgtatgaattagaaacggctgaaaagcagctttctaaatgttggtaatgctccttttaataagctcgatgatgggcatcttacctgcttattttattattaatccttaaattattgtatttttcttttttaattcaatgctttggaaagataaataaaatgcataattttcttaataatatgtcttactgagatgaaatttaaargatacataaaactccaaaatttaaaaactccttaaaaatggatcgataattcagacccacaaataaaatctaggactaagaagggattct

SEQ ID NO: 374643 - DNA, 596 bp, Homo sapiens
tttcaaaacactctataaaatacaaccatccattctataataaaatgtttccttttactactcatctactttgaaagacagaattttaactatacactttgttttctttgtcttttaagtgacagtacaaattatatatttgaaagagtaaaatttgtatgcttgtagtattaatatcagaccattacttatccaaaatgatctctatttggaatggagaccaggataaacacttccraaatcaaaaaggaaaaatgtaaaacaatataatacatttttcatttattctgtgaatgaaaatgtatggtcttgttcaatagttttcaaaagcactacaaagttgcatttaaattaactgtagcagtttgaacaatagcaaaaaacaagaaattgttacccactatttatctgaagctgtttttcaataaaatatctgagaatgtgctttctaataaacatgctgatcctttagctattctaaaatataaattgttttcaaaatatattcccatattattaacataaatttcataaaatactaattgattctttgcagtttagaagcatagttattaaatttgtaatataatacaaat

SEQ ID NO: 374644 - DNA, 512 bp, Homo sapiens
caaattgctgatagtgatagggataaggaaatccaggctgaggtggtctcagatggagataaggaacttgtttgttagaaactggaataaatatgattctggttaagtttcagcaaagagaccagcagcattttgcccctgcactagagatctgttgaactttgaacttgagagagatgatttaggatacctgatgtaagacatagaaatagcagcaaagcattcaagaggaagcagagcataaaagtttgaaaaatttacagcttaaccatgaggtaggaaagaaatacacattttcttaggagaaattcaagctggctgcagaaatttgcataaataatggggagctgactgttatccaccaggacaatgagcaaaatgtcttcagggcatgtcagagacattcatgtcagccccttccaacgtaggcccaaaggcctaggagggaaaaacggtttcatgggctgagcccaggktccccctgctctttgcagttttgggacatggtgccc

SEQ ID NO: 374645 - DNA, 546 bp, Homo sapiens
tatgagcatccatccacaaaatgtagaaatatatttaataaggtgtttcacaatgtaggtacctaaaaaaaaaatccaaacctactaatatctgcaaattctgtgtgcttacctatttcagcatgcctaactaaactaagtcactatgtacagataacaaaatgaataaaattaatctgcatttttttctgaaatgccaaaaggaataataatacataaatgctgatcartacatagcaccttttcctttgtcataaatatttatgttatctactcatacatggtttcaaaaatggcaatgatggtaaatattcaattgtgatgaagttttagttatccaatacagaaaagtatagacagaataattttatttgtattgttttaggacattaaaatgtcaatttggattaatctatagtcaaaatgattgattatggatgatatttaaattgtatccaaatattaattgaacacctttcaaacacactgacttctgtgatggtagaaaaacataaaaatgcttctgtctcaaaatctttttatgta

SEQ ID NO: 374646 - DNA, 583 bp, Homo sapiens
tcattatcattttactttacattttactggttgccatgggaattattatacattgatgcaaaagtaattgaggttttgggcattacttmcaatggcaaaaaccacaattactttttccccaacctaacagctaggccataattatggctaatataaactatccataataattctttacagggccctaaaatatgtaagagagtgtggaaattaatgtttatatgatgttttatgttcaagaaaaaaattaaatctttggctttcctatttttctatactttttctcgatgtctctgcttttaaatttctaatattttctctttggtatgaaaataaatctgtgactctcaactacagggtggaatttttttctagaaaaataacataattgtaccaagatacttctaaataaataatatccctatgcattttaatatggaaacattttatatgtacttacttgattgcacaataactatgcctttaatcacataaattcccattatgtaatttttgagttacattgctgagaaatagtccttctacaaatgtattcaaatgtgaccatatcacatatatgatt

SEQ ID NO: 374647 - DNA, 583 bp, Homo sapiens
tcattatcattttactttacattttactggttgccatgggaattattatacattgatgcaaaagtaattgaggttttgggcattacttacaatggcaaaaaccacaattactttttccccaacctaacagctaggccataattatggctaatataaactatccataataattctttacagggccctaaaatatgtaagagagtgtggaaattaatgtttatatgatgttttatgttcaagaaaaaaattaaatctttggctttcctatttttctatactttttctcgatgtctctgcttttaaatttctaatattttctctttggtatgaaaataaatctgtgactctcaactacagggtggaatttttttctagaaaaataacataattgtaccaagatacttctaaataaataatatccctatgcattttaatatggaaacwttttatatgtacttacttgattgcacaataactatgcctttaatcacataaattcccattatgtaatttttgagttacattgctgagaaatagtccttctacaaatgtattcaaatgtgaccatatcacatatatgatt

SEQ ID NO: 374648 - DNA, 542 bp, Homo sapiens
atcacagaggtgcagacaaagaggcaggcaaccattttatctcccctattgttgcaagcctcttccactacagctaaaatgacttccaggagatttaaagagctggcagccttttccatccccttattttctttcgctctttttcaagccagaaaatacaggctgggccattgaaaagtaggtgatatagaatatacacaaaagaaagtgggaaaggaatttaaacatttcacaaaaaataaactacaaacacaagraggtagaaatgcaggaaatcagggtcaaaaaagcgctaatagaaaacaaatagctatcactttgggaggccaaggcaggccaatcaattgaggtcaggagttcaagaccaacctggccaacatggggaaacctcgtctctactaaaaattaaaagaaaatagtcaggtgtggtgacacacgcctgtaatcccagctactagggaggctgagtcaggagaactgcttgagcccaggaggcggagatcgcagtgagctgagattctcccagggcaacagagcaagac

SEQ ID NO: 374649 - DNA, 530 bp, Homo sapiens
ggtgcttgcttactgatatatcatttaaaatmgctttatttcaaaaatagttcaataaaaataaagagaatggttatacaaactttactgcagagttgccattacatttaatggcaaaaactgaaattacttttgcacaaacctaatactataatataatttaaaaaatactcttaaagaagagacatgttattaaataatactaaataacaaataagaaaaatgtgtatcaagcataattatctcctttaaaacactgagaaatatgcacacatgtgtattggtatgtagggtgtaggattacatgaatgtttcatagtatttctgagtattgtggttatatgagtagattttacttttttttattgttttggtatgtgatagacttccttcaaattacaaaaataacaattttaaaattgctctattattgcaaaagattcatgtttgttttctaaacgttctcttaaataccaataaatatttattttagatatgatttgagatttttaattgcagttaagtcagaa

SEQ ID NO: 374650 - DNA, 530 bp, Homo sapiens
ggtgcttgcttactgatatatcatttaaaatcgctttatttcaaaaatagttcaataaaaataaagagaatggttatacaaactttactgcagagttgccattacatttaatggcaaaaactgaaattacttttgcacaaacctaatactataatataatttwaaaaatactcttaaagaagagacatgttattaaataatactaaataacaaataagaaaaatgtgtatcaagcataattatctcctttaaaacactgagaaatatgcacacatgtgtattggtatgtagggtgtaggattacatgaatgtttcatagtatttctgagtattgtggttatatgagtagattttacttttttttattgttttggtatgtgatagacttccttcaaattacaaaaataacaattttaaaattgctctattattgcaaaagattcatgtttgttttctaaacgttctcttaaataccaataaatatttattttagatatgatttgagatttttaattgcagttaagtcagaa

SEQ ID NO: 374651 - DNA, 530 bp, Homo sapiens
ggtgcttgcttactgatatatcatttaaaatcgctttatttcaaaaatagttcaataaaaataaagagaatggttatacaaactttactgcagagttgccattacatttaatggcaaaaactgaaattacttttgcacaaacctaatactataatataatttaaaaaatactcttaaagaagagacatgttattaaataatactaaataacaaataagaaaaatgtgtatcaagcataattatctcctttaaaacactgagaaatatgcacacatgtgtattggtatgtagggtgtaggattacatgaaygtttcatagtatttctgagtattgtggttatatgagtagattttacttttttttattgttttggtatgtgatagacttccttcaaattacaaaaataacaattttaaaattgctctattattgcaaaagattcatgtttgttttctaaacgttctcttaaataccaataaatatttattttagatatgatttgagatttttaattgcagttaagtcagaa

SEQ ID NO: 374652 - DNA, 551 bp, Homo sapiens
tgagaacattttggattttgaatttttggatttgggatgcttaaaattcaatatataattattgcaaaagctgctattgaatttttaactgattaartttaaaaattaaaacatatttgaggaatattcattaaacttacttcttatttattcattaagcaagtttgttacttaatctttgtaacagtatttgttctaaataaatataaattttgtcattatttctttaaagtttccataagatgtgaataggacttagagtgctatttatttctcctttgactgaatctatacaactgaatattcaagataatcaagagtttttcaaatgttttcagtgtggtagctttttattcctactccatatccctcatcaataaaacaatagtcaggccaacagtgtccaagaaatcccagtagcaagataatgcaaagactataaaattcagataagatgttatctccaaaatacagcttccctccagccacaggaataattacgctttacttctgtataaaagtcttttattctcattagtgatacacacaca

SEQ ID NO: 374653 - DNA, 551 bp, Homo sapiens
tgagaacattttggattttgaatttttggatttgggatgcttaaaattcaatatataattattgcaaaagctgctattgaatttttaactgattaaatttaaaaattaaaacatayttgaggaatattcattaaacttacttcttatttattcattaagcaagtttgttacttaatctttgtaacagtatttgttctaaataaatataaattttgtcattatttctttaaagtttccataagatgtgaataggacttagagtgctatttatttctcctttgactgaatctatacaactgaatattcaagataatcaagagtttttcaaatgttttcagtgtggtagctttttattcctactccatatccctcatcaataaaacaatagtcaggccaacagtgtccaagaaatcccagtagcaagataatgcaaagactataaaattcagataagatgttatctccaaaatacagcttccctccagccacaggaataattacgctttacttctgtataaaagtcttttattctcattagtgatacacacaca

SEQ ID NO: 374654 - DNA, 551 bp, Homo sapiens
tgagaacattttggattttgaatttttggatttgggatgcttaaaattcaatatataattattgcaaaagctgctattgaatttttaactgattaaatttaaaaattaaaacatatttgaggaatattcattaaacttacttcttatttattcattaagcaagtttgttacttaatctttgtaacagtayttgttctaaataaatataaattttgtcattatttctttaaagtttccataagatgtgaataggacttagagtgctatttatttctcctttgactgaatctatacaactgaatattcaagataatcaagagtttttcaaatgttttcagtgtggtagctttttattcctactccatatccctcatcaataaaacaatagtcaggccaacagtgtccaagaaatcccagtagcaagataatgcaaagactataaaattcagataagatgttatctccaaaatacagcttccctccagccacaggaataattacgctttacttctgtataaaagtcttttattctcattagtgatacacacaca

SEQ ID NO: 374655 - DNA, 551 bp, Homo sapiens
tgagaacattttggattttgaatttttggatttgggatgcttaaaattcaatatataattattgcaaaagctgctattgaatttttaactgattaaatttaaaaattaaaacatatttgaggaatattcattaaacttacttcttatttattcattaagcaagtttgttacttaatctttgtaacagtatttgttctaaataaatataaattttgtcattatttctttaaagtttccataagatgtgaataggacttagagtgctatttatttctcctttgactgaatctatacaactgaatattcaagataatcaagagtttttcaaatgttttcagtgtggtagctttttattcctactccatatccctcatcaataaaacaatagtcaggccaacagtgtccaagaaatcccagtagcaagataatgcaaagactataaaattcagataagatgttatctccaaaatacagcttccctccagccacaggaataattaygctttacttctgtataaaagtcttttattctcattagtgatacacacaca

SEQ ID NO: 374656 - DNA, 585 bp, Homo sapiens
cctctgcttgttacccagttacaaatttgctttcacatttttgggtatctttacagcagcacccctttctctgtggtaccaatttactgtgttagtccattctcacacrgctaataaagacatactcaagatggtataatttatcaaggaaagctgtttaactgagtcacaattaaaatatgtgagagggaggcatggctggggaggtctcagggaacttaggatcatggctgaaggggaagcaaacacatccttctttacatggcagcagcaaggagaaatacagagtgaagagcaggccttggggggaagccctttataaaaccatcagatctcatgagaactcactcactatcacaagaagaccatggaggtaaccgctcccatatttcaattacatcccattgagtccctctcatagcacgtggggattgtgggaactacagtttaagatatgatttggtgcccatcagtgataaactggataaaaaaaatatggcgtatatacaccatggaatactatgcaaccctaaaaatgaatgagttcatgtcctttgaagggacatggatgaagctggaaaccat

SEQ ID NO: 374657 - DNA, 585 bp, Homo sapiens
cctctgcttgttacccagttacaaatttgctttcacatttttgggtatctttacagcagcacccctttctctgtggtaccaatttactgtgttagtccattctcacacagctaataaagacatactcaagatggtataatttatcaaggaaagctgtttaactgagtcacaattaaaatatgtgagagggaggcatggctggggaggtctcagggaacttaggatcatggctgaaggggaagcaaacacatccttctttacatggcagcagcaaggagaaatacagagtgaagagcaggccttggggggaagccctttataaaaccatcagatctcatgagaactcactcactatcacaagaagaccatggaggtaaccgctcccatatttcaattacatcccattgagtccctctcatagcacgtggggattgtgggaactacagtttaagatatgatttggtgcccatcagtgataractggataaaaaaaatatggcgtatatacaccatggaatactatgcaaccctaaaaatgaatgagttcatgtcctttgaagggacatggatgaagctggaaaccat

SEQ ID NO: 374658 - DNA, 585 bp, Homo sapiens
cctctgcttgttacccagttacaaatttgctttcacatttttgggtatctttacagcagcacccctttctctgtggtaccaatttactgtgttagtccattctcacacagctaataaagacatactcaagatggtataatttatcaaggaaagctgtttaactgagtcacaattaaaatatgtgagagggaggcatggctggggaggtctcagggaacttaggatcatggctgaaggggaagcaaacacatccttctttacatggcagcagcaaggagaaatacagagtgaagagcaggccttggggggaagccctttataaaaccatcagatctcatgagaactcactcactatcacaagaagaccatggaggtaaccgctcccatatttcaattacatcccattgagtccctctcatagcacgtggggattgtgggaactacagtttaagatatgatttggtgcccatcagtgataaactggataaaraaaatatggcgtatatacaccatggaatactatgcaaccctaaaaatgaatgagttcatgtcctttgaagggacatggatgaagctggaaaccat

SEQ ID NO: 374659 - DNA, 588 bp, Homo sapiens
ccaggagcattttcaatgagaagtaatattttgaatggaatctttttttactragcagtagttctcaacagtgggcttaaactactcagtaaaccatactgtaaacagatgtgctgtcatccaggctttattgttccatttatagagcacaggcagaatcgatttagaataattcttaagaagcttgcaatccttaaaacgggcaaatgaatattggcttcaacttcaagttaccagttgcattagctcctacgaagagagtcagtctgttctttgaagctttgaagccaggcattgatttctctgttctagttatgaaagtcctagatggcatctactttcaatagaaggctgcttcatgaactacactgaaaatttttagtttggtgtagtcactttcatcaactattttagtaaaatattctgagtaacttgctgcaatgttttctgcttcaccttgtacttttatgttatggagatggcttctttttttgaaattcatgaaccaacctctgttagcttccaacttctcttctgcagctttctcatctctcagatttcatagaattgaagagagttggtgctggg

SEQ ID NO: 374660 - DNA, 588 bp, Homo sapiens
ccaggagcattttcaatgagaagtaatattttgaatggaatctttttttactaagcagtagttctcaacagtgggcttaaactactcagtaaaccatactgtaaacagatgtgctgtcatccagkctttattgttccatttatagagcacaggcagaatcgatttagaataattcttaagaagcttgcaatccttaaaacgggcaaatgaatattggcttcaacttcaagttaccagttgcattagctcctacgaagagagtcagtctgttctttgaagctttgaagccaggcattgatttctctgttctagttatgaaagtcctagatggcatctactttcaatagaaggctgcttcatgaactacactgaaaatttttagtttggtgtagtcactttcatcaactattttagtaaaatattctgagtaacttgctgcaatgttttctgcttcaccttgtacttttatgttatggagatggcttctttttttgaaattcatgaaccaacctctgttagcttccaacttctcttctgcagctttctcatctctcagatttcatagaattgaagagagttggtgctggg

SEQ ID NO: 374661 - DNA, 577 bp, Homo sapiens
ataatctcattttgttttttgagcatttttggctctaaaatggttgttacgctattttttaaattatatctgctcttgaattgctaaaagacttgaatatgcaaaggcaaaaaattcttgattaattaacattgctcctttttaggagcaatcagtgcttttccttaagggaaagcatctaatggacactaattataarttttttcagtactttatatggaatgtaagcaacagaggccgtctataaggatcgtcacaagcttgacaacatgctaaggcttgctgacatagaaacaatctacaaatatatggcataaaaatgttaagagcaattaatcctaacatgagtcatatcttattatttttggctactcattaattcatttttaaaacatttataaggaaaaaactacatcattgtgataatggactctgaatagcattgcaaataaaatacttattcctttacaaaacttggggcaacttatactaagaaataccgacttcttcatttaacatcctataatttgcatttgctaaatgtgactataattttggagtcagaaggcttgcttca

SEQ ID NO: 374662 - DNA, 577 bp, Homo sapiens
ataatctcattttgttttttgagcatttttggctctaaaatggttgttacgctattttttaaattatatctgctcttgaattgctaaaagacttgaatatgcaaaggcaaaaaattcttgattaattaacattgctcctttttaggagcaatcagtgcttttccttaagggaaagcatctaatggacactaattataaattttttcagtactttatatggaatgtaagcaacagaggccgtctataaggatcrtcacaagcttgacaacatgctaaggcttgctgacatagaaacaatctacaaatatatggcataaaaatgttaagagcaattaatcctaacatgagtcatatcttattatttttggctactcattaattcatttttaaaacatttataaggaaaaaactacatcattgtgataatggactctgaatagcattgcaaataaaatacttattcctttacaaaacttggggcaacttatactaagaaataccgacttcttcatttaacatcctataatttgcatttgctaaatgtgactataattttggagtcagaaggcttgcttca

SEQ ID NO: 374663 - DNA, 577 bp, Homo sapiens
ataatctcattttgttttttgagcatttttggctctaaaatggttgttacgctattttttaaattatatctgctcttgaattgctaaaagacttgaatatgcaaaggcaaaaaattcttgattaattaacattgctcctttttaggagcaatcagtgcttttccttaagggaaagcatctaatggacactaattataaattttttcagtactttatatggaatgtaagcaacagaggccgtctataaggatcgtcacaagcttgacaacatgctaaggcttgctgacatagaaacaatctacaaatatatggcataaaaatgttaagagcaattaatcctaacatgagtcatatcttattatttttggctactcattaattcatttttaaaacatttataaggaaaaaactacatcattgtgataatggactctgaatagcattgcaaataaaatacttattcctttacaaaacttggggmaacttatactaagaaataccgacttcttcatttaacatcctataatttgcatttgctaaatgtgactataattttggagtcagaaggcttgcttca

SEQ ID NO: 374664 - DNA, 520 bp, Homo sapiens
acagccttaaaaataagagtccatgctttcagagctatacacagcctctctctctgtcatcatgggcattctgttaatttgcatattatgccagttataggatgaccaatggcaaaacatggctaatataaaatggctgagtcatttttttccctgtggatgtttagtgcctcttttgtgtgaagctgtttgatgggcattaatgtgcaatagcaaaatttccatactttgtggccactcccatatgtccatctccatgcctctaccacagaactctttaatccagattttgcagtccttttcctctcaggtctccaacaagacagctaggccattgacttctgccaagggttctgtatatattctcacctcagtccacttttccttgcacataatgtgcatgaygaaatgtaccctcacacatctgtccactgggaagatcctccctctccactatccttcaggcccactctcgaatgtagctgtaatccagccactgttcatttttgtattgcacata

SEQ ID NO: 374665 - DNA, 597 bp, Homo sapiens
gatagatcctcttcagtaacatagtaaaatgtacaacagagccaaacaatgcagagcctactctatacttctttaaagttattcttgagcctgtagaataagaaatcgagcttaacaatggaggacaaaaatgttagtgtttatcttagttcactgttgctgctataacaaaatccctgagactaatgcataagaatatacctgatttcttacagttttggagactgagaagtcaaagatgaaggcaccagcatttcatatatggtgagggccatcttgctgcatccttacatgacaaaagacmagaagagagcaaacccactccctaagcccatttagaagggttctaatcccatccatgagggctcttccctcgtgacttaatcatctcctaaaggcatcatctcctaaagacctcatctcttaatactatcacactggccattaagtttcaacacatacattttggggaacacagaccatagcactgttttattccaggaaaactaacaagaaatatctgatatacattggacatcagtggtcaaaatgctgaggatttttacctcagattctttttattaaaaaagaaaacac

SEQ ID NO: 374666 - DNA, 563 bp, Homo sapiens
agaaatgacagtaacttgtatttactgtagctctgtgagtgccacgagagtatgtgcagtaaatggcctatggcatgttttcaaatcattacaagccccagggttttcataaatcaccagttaggaagcactcatttaacattgttcttaagtaataaatatgataaatgcttatatgttaattttactcttaaaaataaagtactccaattttctgaaaacccaatttatgcattgtagctaagtsttaggtttgctgtaagtactgcccaacaagatgaacaaaatatccatgttctccttaacagaccaatagcaagagaaatgaaaagaaagagattgtggaatgaggaaagcataacgggaattaagtttgatgaattccaagttatgcttctggttcatcattttgaaactggacttacagaatatgcagagagaatccaaaattaaggttaaaatttatgatatctttaagcaagggaaacaatgcaggaagttgtatggtaataattaaaatatttaaatagattttaaaaatttaattatttggacaaaaagca

SEQ ID NO: 374667 - DNA, 585 bp, Homo sapiens
tatgatttatttcaggagagagaatggaggggggaaaaggaaggttgaagtgatcttcctgcttctgctgttttcttaaattctaaggtgctgtattttagagttctgtgtcctgaatcctgtcactatattagaaaaaaaatcactcaattatttttgccatttagaaggacagtgctgagtaggttgtatctataacttgcaataggtaaatctgaaggaatccagaaataggaacctaacttaatgagacatctttgaatctgtctcttcctaaataaggagactactttagaaacattaacctagataaaaagattaaaaaaaattgactttatacctataagaagtcaggaggtgtgtgattttactttatcctctagacaaacagtcatcaaggaaagttgtgttgtgtataatagacagctttttaaactataatacaaaaatggcaaatagacaatcttccttgtgcaaacttccrtcttgttgtgttaatgaaatttcaaataaactaatataacataaacaattataagtatatttgcataagtaatgaatagctcaaatataatcaatatttgg

SEQ ID NO: 374668 - DNA, 626 bp, Homo sapiens
ggatagtgacattttaatcaggcattgttacttctttgttggaatgtcctttgctttataaatatttcaaaggtgtccatgctgcaaagtcatgattaaggttaagtgcttttatgctttttgatcggggaatacaatgtaaatccatagtttcttttaatatagcataaaagttgataggaagaaacaaaatgaagattttgtttcacacgattccagagtcatagggtaggacaggggtcagcaaacattttctttaaagggatgggtagtaaatattgtttgcttttataccacacaatctctgttgcaaatacgaaactcagcttttgtaatgtgaaagcagtcatcgccaatatataaacaaatgagtgtgactctattccaataaaacctttttacaaaatattagtgggctggattttgcctgtggaccatactttttctggttctggctatacaatagtttactatgtgctctgtaagtgttcctcatctctgtacatggtcagtaataggattgagcaaacagctgatagyttgtatctaagatgtacggaagccaaacattggacatatatgttttctttgacaagttgtaatgtttgccgctgaagtgagcacct

SEQ ID NO: 374669 - DNA, 444 bp, Homo sapiens
gctgtgaaactatctgattctagttttgttttgttttttttttctttttggttggtaagctgtttattactgattcaattttagagtttattattggtatattcagggagtcaatttcttcctatttcaatctttggagggtgcatgtgtccaagaatttatccatgtcttctaggctttctagtttgtatacatggaggtrtttatagtagtttctgatggttatttttatttctgttgggccagtagtaacatcccctttgtcatttctaattgtgtttatttgtatattctcttttttcttctgaattcacctagctaacagcctatttatttcattatttttttcagaaaaacaactcctagatttgttggcctttggaatagtttttcatatctcatttttcttcattttagctctgattttggttatttcttgtcttg

SEQ ID NO: 374670 - DNA, 597 bp, Homo sapiens
gtacttggtatggagctcaacaaatttgtatttgttgtttgttacttgaacagcagataaaccatgtaaaattatgtaataaacatatattgtatatgagatctcttgatttcaagaaatgtgttggggataaartatttataagaaaaatctcacttagatcttacaactaagaatgactgactaggtagggagtaatcatggtcaatactccattcctcttctagatagttgtctagaggcactggtgaatttgatatatgaattcaagtgacctttaaataacttcaaaaatatagtcaacaaaataaatattaataaagttacagtaatcctttataagtaactttacatttactgaaatgtaaccaaaggctgcaaaatgacattttaattttgccatcaagtatatcattacttgtttactaaaagttgttttaaagattctcttcctttcatttacactgaggcactagtaaaatctttttacttttgttgaacaaatatgattatttgtttcaccttttgaccaaatattctaatcttatctgagattatgattaatattaatcaaaattatgaatcagcaccccctct

SEQ ID NO: 374671 - DNA, 597 bp, Homo sapiens
gtacttggtatggagctcaacaaatttgtatttgttgtttgttacttgaacagcagataaaccatgtaaaattatgtaataaacatatattgtatatgagatctcttgatttcaagaaatgtgttggggataaaatatttataagaaaaatctcacttagatcttacaactaagaatgactgactaggtagggagtaatcatggtcaatactccattcctcttctagatagttgtctagaggcactggtgaatttgatatatgaattcaagtgacctttaaataacttcaaaaatatagtcaacaaaataaatattaataaagttacagtaatcctttataagtaactttacatttactgaaatgtaaccaaagrctgcaaaatgacattttaattttgccatcaagtatatcattacttgtttactaaaagttgttttaaagattctcttcctttcatttacactgaggcactagtaaaatctttttacttttgttgaacaaatatgattatttgtttcaccttttgaccaaatattctaatcttatctgagattatgattaatattaatcaaaattatgaatcagcaccccctct

SEQ ID NO: 374672 - DNA, 406 bp, Homo sapiens
ttttaattttgccatcaagtatatcattacttgtttactaaaagttgttttaaagattctcttcctttcatttacactgaggcactagtaaaatcttkttacttttgttgaacaaatatgattatttgtttcaccttttgaccaaatattctaatcttatctgagattatgattaatattaatcaaaattatgaatcagcaccccctctcccctaagtctgtttttcttagaaatagctgttgtgcacaaaggatcaatttagagccaatagaagcttcctccaccttagctgtttcaggtgggcatggataagttctctgcttcctctctttcagattttttcatggatctgcagatttcataccacatacaaataatgtcttatttcagcctgtccaggttgat

SEQ ID NO: 374673 - DNA, 397 bp, Homo sapiens
aatatgtttttctaacatttagatttctcttcttcctcaggaacagaaattattcttaggtttagacatttaacattatccmaaactacttggagtcttcgttcatttctttttattcttttttctttgtctttgacagattgggttaatttgaaagtcttgttttcaaactctgacgttttatcttctgcttgttcaattctattgctgaaacttttcagttcattttgcatttctctaaatgtgtctgtgatttctagaagctgtgatttttttttttaaatttatactacctatttcacggaataattttccttttatatactgttcatatttttgatttctttaagttggactttacctgtctttggtgcctcctttattagcttaataatca

SEQ ID NO: 374674 - DNA, 608 bp, Homo sapiens
ctaacttccagtgtatttggagatagggcttttaagtaggttattaagcttaaagaatgttataagggtggagccctaaccaacaggaccggtgtctttataaaaagaggaagaagcaccaaatatctttctgtgtgtgtgtgtgcacacagagaaacaccackcaagaacacagaaagaagttgctatctgtaagccaaggagagaagcctcaccagaaaccaactctgctggcatcatgatcttggaattccagcatccagaactgtgagaaaatgaatttattttgcttaatctacccagtctgtggtattttcttacggcagcctgagaggactaatacacgatgccagggaatataatatttgtgattctttttaattattttctggtattcaatattattcatatactaatcgtcattgtcacatctttacagttggatgttgaattcatcccatactattgaactagtcttttttctatcctttgtactgactaaacttgtttctaacatgtctttgaacttctttcttcctttcacttggtgtaacctgtttgtaaaactttaaattcctggctcttctcagatataaaatcgtttcctc

SEQ ID NO: 374675 - DNA, 566 bp, Homo sapiens
caaacataagatttgagtgtccaactcttgatttttacatatactattatttaaagcatctctactcttcatagaatgcattaagctatgwgttttgtatacaccttattttatgtaattgtcacagaacaatccagaaaaggcagttaaaacaaattgatgaaattaaatcaaatcctgtctcatttaaatgaggttcagaaagattacatatactatccctggttctacaggaattaggggcagaacaaagatacaaatctgatgcatatttatatgctatggtttaaaattatgcctctagaattctgttgaaaattaatccacattatggtagtattaagagttagggccttttgaaaagtgattgattaattaacgagggtgaagccctcataaatggtattagcacccttataaaataatttgaagggctctaccctgccatttctcccatgtgaggaaatagcagcaaggtgccatctatagagcagacgtcgaatctgctggtgccttgatcttgaacttcccagcctttagaactatgaacaataaatttctgttct

SEQ ID NO: 374676 - DNA, 418 bp, Homo sapiens
tccctcaaattacaagtgttgccagctcttaggagaagaagggaaggattaattttagataggacatgaatttggcattttaaagtggttattttatcactgaacataatcaaatatggattctgcccaaaatgtcttcaggggtcagaaattaacattctgaagagcatgctagaaatcagtcattggagaaatataaaacygtttcaagtttatatacttccaagtttagactgctaaataaatcagttacccaaaaaagaaataggagcaattggagtagaaatggtaatataaacgtgttttaggggaataattaagacctgatgaaaaaatcacaagtttaccttctttaaagggtcaaggacttcttaaaaattagtgtacactacttgagatgcgcttttgtgttgtcaaa

SEQ ID NO: 374677 - DNA, 500 bp, Homo sapiens
aacacactgttttattaacatcaactaattaaacaatatgtgctgttttattttctttaataaaataaagaatgcctgggagttagagaacaataacctatgactttattttactaacaccgctagcagatttactcattttatgtcatccttggttttaattaaggttgtaattatttaaaatttatttttgcacttgctaaagaacacaacttattttttcaatgttaagtaatgaaaagaaagcctactaatgttagctatacatctttttattgtaatgtatctttcatttacataaaatgaacaatagttaatacaraaaaagttattacatacacacaaatggcattctatttctatttaggaagaaaaaagctggaataaccatcactctcaccataacagtaagagaaaagtctgtaaaattaaagctttaaaaaaaatcagtgaagtgaggtcacagagcaatcaatcagcttggaatctaagaaaagaca

SEQ ID NO: 374678 - DNA, 523 bp, Homo sapiens
ccaatttcatagttaaatttctgaatgtagtgaaatccaagacaaaatattataaaacaagtctttgaaaacattaatctttcagctattcagaagctctccctctgttcttagttttgctctgataaactccctttgactattggcctttaaaaactaaacgcactggaatactgggtattttaatatgaatcccttacagtaatatatggtgttaattacattgttagtcttccacagtagttcacactaaagmaaatgaatcttttatacgtataaaaggagtcaagattttactactcttgtgtcattttcaactaatttggctttcactatgataacaaaagatttttaaatgaaaattattgccatttcctttactcagtgtataattttagcttataaagagatttcttctggattattctacttgatataaatggaagagccacacttagactaagtttaaaataagaaaaaaatctgtactgtttaagttcgtgatttatctgtttgatattat

SEQ ID NO: 374679 - DNA, 523 bp, Homo sapiens
ccaatttcatagttaaatttctgaatgtagtgaaatccaagacaaaatattataaaacaagtctttgaaaacattaatctttcagctattcagaagctctccctctgttcttagttttgctctgataaactccctttgactattggcctttaaaaactaaacgcactggaatactgggtattttaatatgaatcccttacagtaatatatggtgttaattacattgttagtcttccacagtagttcacactaaagaaaatgaatcttttatacgtataaaaggagtcaagattttactactcttgtgtcattttcaactaatttggctttcacyatgataacaaaagatttttaaatgaaaattattgccatttcctttactcagtgtataattttagcttataaagagatttcttctggattattctacttgatataaatggaagagccacacttagactaagtttaaaataagaaaaaaatctgtactgtttaagttcgtgatttatctgtttgatattat

SEQ ID NO: 374680 - DNA, 523 bp, Homo sapiens
ccaatttcatagttaaatttctgaatgtagtgaaatccaagacaaaatattataaaacaagtctttgaaaacattaatctttcagctattcagaagctctccctctgttcttagttttgctctgataaactccctttgactattggcctttaaaaactaaacgcactggaatactgggtattttaatatgaatcccttacagtaatatatggtgttaattacattgttagtcttccacagtagttcacactaaagaaaatgaatcttttatacgtataaaaggagtcaagattttactactcttgtgtcattttcaactaatttggctttcactatgataacaaaagatttttaaatgaaaattattgccatttcctttactcagtgtayaattttagcttataaagagatttcttctggattattctacttgatataaatggaagagccacacttagactaagtttaaaataagaaaaaaatctgtactgtttaagttcgtgatttatctgtttgatattat

SEQ ID NO: 374681 - DNA, 680 bp, Homo sapiens
tgcattttaccagtaatcctgaagagtatctttatttcttaaagacaaaaatcacatgaactaaaaagtatttaagtgcttatttttcttcaagcccatcaattagtgttctttttatagacattacacacaacacatatatagtgacacaaacacaagattcaacacttgtaagattttttatttgccrgtttcttaattggattactggcatcagggtggaaactttagaggaagagagccaggtagcatgcatttctagggcctaataagcaggcatagcagaaggtaaaaacagatccctaaaattaaaggtgccattttataccgaattttggatctccaaaaagcaggagctactatagaagaagtctgtgtagtgcttctaccatgaatttcactgcaggacaacccaaagccagttggcttattttgtaattagcccatcctccatgggagtcttatctctctgacgggggtggggacgtttccatatcttttgggtggccaagagcatgcctctctgatttataactactatttgccatcccttaaagtgtatttcctacctagttattacacaacaaagctctctcctaatgtgaagtaattggataccccaaaaactcaaaacagataacaaaatgcaaaacagaaccaagcctttgattttgagagag

SEQ ID NO: 374682 - DNA, 680 bp, Homo sapiens
tgcattttaccagtaatcctgaagagtatctttatttcttaaagacaaaaatcacatgaactaaaaagtatttaagtgcttatttttcttcaagcccatcaattagtgttctttttatagacattacacacaacacatatatagtgacacaaacacaagattcaacacttgtaagattttttatttgccggtttcttaattggattactggcatcagggtggaaactttagaggaagagagccaggtagcatgcatttctagggcctaataagcaggcatagcagaaggtaaaaacagatccctaaaattaaaggtgccattttataccgaattttggatctccaaaaagcaggagctactatagaagaagtctgtgtagtgcttctaccatgaatttcactgcaggacaacccaaagccagttggcttattttgtaattagcccatcctccatgggagtcttatctctctgrcgggggtggggacgtttccatatcttttgggtggccaagagcatgcctctctgatttataactactatttgccatcccttaaagtgtatttcctacctagttattacacaacaaagctctctcctaatgtgaagtaattggataccccaaaaactcaaaacagataacaaaatgcaaaacagaaccaagcctttgattttgagagag

SEQ ID NO: 374683 - DNA, 482 bp, Homo sapiens
gaaacaggatggaggcttatagccacgtttattactgaccattctgctgggctggcttgaacagtaggcttatggagtcctgggtctccatcctaacctaaggtatcctttcttttgacagaaccatacagaaagacacacaaagtataccagattggctatagcttaagaccaacctcacaaatcctttttcactaattaaaactgtacagagaatataaacaacaatccttattatcccttttgccggtttgcatggggagagagaaaccaaaagctcgactggttaaaaaaaaaaamaaaacaaacttttaccttcttgccagcatgtcaggctactaggttcccttcacctgagattaactctaagccaaacattttaaggtttggtgaaattaactctttccatgttgaaagaacattataaaaaagccagttgaaactgtaaaagaaggaaaaacaccatagaaaagcctgcgggt

SEQ ID NO: 374684 - DNA, 605 bp, Homo sapiens
ggttggggattggagaggattggaagagattggttaatgggtacacaatttacagttatatgggaagaagtatttctagtgtttttgtagcacttttgggwgaatatggttaacaataattgagtgtacattttcgaaaagctagaagaaaggattttgaatgttcacaacacaaagttataaatgtttgaggtgatggacatgctaattatcccaatttgatcattacgcattgtatgcatgtatcaaaatatcattctgtatttcataactatgtacaatccttacatggcaactaaaagtaaaaggcgaaaaatgtggtgaatcaatctttagcatttttttcttgtccaaaaaccagtattagattaccaaaccagtcaagtaaacatgcttagtacatcaaaaaagcaggtgaaagatatatccagaaagttgacagaagcctattaacccatcatattttattcatgacactgctgtttaaactgcatagcaacatcatctgggaagccgagaacccccaagagaaagtgtggagttccactccaggtcaggaaaaagatataatccaatagaaaaccactttgagaattcttctttca

SEQ ID NO: 374685 - DNA, 501 bp, Homo sapiens
ggcaatttcttaaaataagactgcaatgatgcttgccacatygattgactcttcctttcgcacaagatttatttgcagtgtgtgatgctgtttgatagcatgttaccatgatataacttctttcaaaatcaaaatcaactttttcaaaactctgccactacattatcaactaagtttatgtaatattctacttcgttattatttcaacaatgttcacaacattttcactaggggtagcttccatctcaagaaaccactttctcagctcattcataagcagcaattccttatccattcatattggactgatcatgagcttgcagcaatttagtcacatcttcagagtccacctctgattttagttctattaatatttccacgcatttgcagttacttcctccactgtagtcttgaaccccttaaagtcgtccatgaggattggaatcaactttgtcccaacacctcttattgttggtataataactctcttccatgaatcac

SEQ ID NO: 374686 - DNA, 681 bp, Homo sapiens
catctgttcatttattcaagcatctgctaaatccaagcaattattaaacacccatgtgttcctgtctctgctgcctactagattgcataggctgtttaacttaccctaaagttaagttatggtatcatttaaataaagattgtaatcaccaccacacaagaaaatataactctaaagattaaatacgctcatgtacctaaggtataagtagagttccaccaataatgtatacttcttattgttcttattactttaattgagtataatattttacagataacatttgtttaaatttagaacatttttggcaattcatttattgcaaatgagttaactcctagaattttcaactaaataaaatagagcrctcacaaacatcttgtttattgttcaatagcactaattttgattttgtttattcttatttctggtgttcaccttaagtcctacaaggtagcatatggagcctaacagttgcttctggggcagatggacagatctaaaaaggagctacaggattataaaaatgcagagaaaaagggagctcgatgttggaccaagaattggaattacagggccaaatagtcactgagagaaacaataagggtgttcttagttaagaactgaaaggaattgttagaacaaacaggcaatggaaaggcagcaattgtttggagaaag

SEQ ID NO: 374687 - DNA, 570 bp, Homo sapiens
agcactatgccctcgtgctttataggaaacttgattccaaggaaggaatccattcaacctatcttatcaatggcattctataggatttcacagcatttctgtttttcactgacatacctattttattagcatgtatataataatgtgggtactacttcattaacttgaggttagccaggacccatttcacttggcacttaatgaacaggagaaacagtttcacttcattaaaaaacctacacttaactgctgttataccataatggtttctgacactgagataccttgtttgagtcactagaaatgttcactcacattagaggacccagaatacagacctgattaagcgtaacaacaacaacaaaaagacattggagacataccatctaggaaaaacccaatggattaaactcttattttagcagaaacaggccaatttatttaaaggtgggtcttagcttatctaaattggartaaataatgacaactcaattatattcacagattagtgttctgtggctccctccattctagggaattctagcctttctctagtttatctcaaggctg

SEQ ID NO: 374688 - DNA, 555 bp, Homo sapiens
aattgtggatgtgtgagcaaaataaatgactgtcatgttttaagctactacatgttgggtggtttgttgcacagccatagacaactggatgacaaacacatatctgacgctttatccgtcattgccatgctaagctgcagatatttttgtaatctacacgtttagaccttttccagcttttagagctcacacttcccttcagtacacctgcaagctccctgaattcattttcatgtaatcctccacttttttccttcagccggttcatgttaggtttctctcatagcccctaaacacagtgctcaaataccaataacctggatcccatcttgcagctctgcaggaagctgtttttgcacaaggttcttccacatttctgggaacccaggagatgtctacttcagctacaatctctcctgctcgtcccctgtcccctcgggagggtctggctcagaacagatttcactgtgggamccaagccaacctgttagccactcctaccccaggacggttgaaacacagtcttgcagtaacaagacttacttttgaaggatg

SEQ ID NO: 374689 - DNA, 599 bp, Homo sapiens
tttcccccttgttggccacgctggtctccagctcctaatctcaagtgatctgcctgccttggcctcccagaatgctggrgttacaggtgtgagccacagcacccagccctgattttttttaatgtaaatactgtatgaacccagacaaatgttctgccaggccactgctgcatggctcaccatgtggtggccctgagaatgggcctcatcgacctccctctactgggagtgtaattaaccagggccccagctgctgcgctggggaatccatatgcttccttccatgaggtgctcctggctaatgactgagcatggcagggacactaaagcagacccctccccgggagacacaggattcccctgtccccggctttggcttagggacttccctatggtgttcgcaccctaacttttttctcctctctcttttactcagagtcagacttgcattactgtctcaggttctcccagctttatgtggcaccttctttgctttctctcaagggcatttcccttaataaaaatcacatatgtgtaatcctgtatgggagtttgtttctcagaactgggctgacacaccatcttgcaaactctgcttt

SEQ ID NO: 374690 - DNA, 471 bp, Homo sapiens
aaaaaaaaaaaaaaatccagcacataagtctaggagcattgaacaagggtcagattgcatggattcagattccagctccattactaacwggctgtgtgaccttggacaactcaattgacctctctggccctcagtttccttatcagtaagacggaaactccaatcgtatctattgcacgggatagttgtagaaattaatagatacataagtgcttagtgcaacatgtggcactcaaaatatgtgtggtatgattgttattgacacaatggttgacccatgaatgactgtgatgccaaccccctcacagttggaaatccacctataacttttgactcccccaaaacgtagctactaataacctattgttgaccagaagtcttaccaataacacaaacaatatacacatatgttgtattttatatgattatacactgtatttttacaataaaataagctagagaaaacaatat

SEQ ID NO: 374691 - DNA, 608 bp, Homo sapiens
taactggctgtgtgaccttggacaactcaattgacctctctggccctcagtttccttatcagtaagacggaaactccaatcrtatctattgcacgggatagttgtagaaattaatagatacataagtgcttagtgcaacatgtggcactcaaaatatgtgtggtatgattgttattgacacaatggttgacccatgaatgactgtgatgccaaccccctcacagttggaaatccacctataacttttgactcccccaaaacgtagctactaataacctattgttgaccagaagtcttaccaataacacaaacaatatacacatatgttgtattttatatgattatacactgtatttttacaataaaataagctagagaaaacaatatatgattaagaaaatcataaggaagagaaaatgtatttattattcattaagtggaagtggatcatcataaatgtcttcatcctcattgtcttcacattgaggagactgaggaagaggaggaagaggaggaattggtttcgccgtctcagaggtggcaaaaacagaaaaaaatccatgtataagtggacccatgcggttcaaatccatgttgttcaagggcca

SEQ ID NO: 374692 - DNA, 471 bp, Homo sapiens
aaaaaaaaaaaaaaatccagcacataagtctaggagcattgaacaagggtcagattgcatggattcagattccagctccattactaactggctgtgtgaccttggacaactcaattgacctctctggccctcagtttccttatcagtaagacggaaactccaatcgtatctattgcacgggatagttgtagaaattaatagatacataagtgcttagtgcaacatgtggcactcaaaatatgtgtggtatgattgttattgacacaatggttgacccatgaatgaytgtgatgccaaccccctcacagttggaaatccacctataacttttgactcccccaaaacgtagctactaataacctattgttgaccagaagtcttaccaataacacaaacaatatacacatatgttgtattttatatgattatacactgtatttttacaataaaataagctagagaaaacaatat

SEQ ID NO: 374693 - DNA, 608 bp, Homo sapiens
taactggctgtgtgaccttggacaactcaattgacctctctggccctcagtttccttatcagtaagacggaaactccaatcgtatctattgcacgggatagttgtagaaattaatagatacataagtgcttagtgcaacatgtggcactcaaaatatgtgtggtatgattgttattgacacaatggttgacccatgaatgactgtgatgccaaccccctcacagttggaaatccacctataacttttgactcccccaaaacgtagctactaatarcctattgttgaccagaagtcttaccaataacacaaacaatatacacatatgttgtattttatatgattatacactgtatttttacaataaaataagctagagaaaacaatatatgattaagaaaatcataaggaagagaaaatgtatttattattcattaagtggaagtggatcatcataaatgtcttcatcctcattgtcttcacattgaggagactgaggaagaggaggaagaggaggaattggtttcgccgtctcagaggtggcaaaaacagaaaaaaatccatgtataagtggacccatgcggttcaaatccatgttgttcaagggcca

SEQ ID NO: 374694 - DNA, 608 bp, Homo sapiens
taactggctgtgtgaccttggacaactcaattgacctctctggccctcagtttccttatcagtaagacggaaactccaatcgtatctattgcacgggatagttgtagaaattaatagatacataagtgcttagtgcaacatgtggcactcaaaatatgtgtggtatgattgttattgacacaatggttgacccatgaatgactgtgatgccaaccccctcacagttggaaatccacctataacttttgactcccccaaaacgtagctactaataacctattgttgaccagaagtcttaccaataacacaaacaatatacacatatgttgtattttatatgattatacactgtatttttacaataaaataagctagagaaaacaatatatgattaagaaaatcataaggaagagaaaatgtatttattattcattaagtggaagtggatcatcataaatgtcttcatcctcattgtcttcacattgaggagactgaggaagaggaggaagaggaggaattggtttcgccgtctcagaggtggcaaaaacagaaaaaaatccatgtataagtggacccatgcrgttcaaatccatgttgttcaagggcca

SEQ ID NO: 374695 - DNA, 581 bp, Homo sapiens
ggtcaaggatggggtggtgctctctccagccattcaaggtgctgagaaaagaacagaactttcatctgaggaatacaagccttttaaattattaggcccagagaggcaatagaatgagatagcaatcatgtcctacataccccctttgagctcggtattcatttcttaaaactgcttgccattgccacaagtagctatmaattaatctaataatgccccactggatgctataacccacacctaatagcttaacaatgtatagccaatcactcgtcaatgttatttctgaaaaccagtgagaattcctgacaaccaactgtgtaccagcccactccatgtcccccttttttgcctttataaatccacttgtaactgctgctaattggagtgtatattcagggaaacttgaatctacgctccctggctacagtcctcaagcttggcccaaacagagtctttacttatattaattttgcctcagcttcttccttttaggttgacagtgctacaggctgaattatgtccccctaaaattcaaatttgaataaatgttcaaatatgaatttgaggccaggcacagt

SEQ ID NO: 374696 - DNA, 519 bp, Homo sapiens
actcttcactcatttttgtgtgtatgcaaacttaatgtctttcaataaattttccaagttattgtatgttcgcaaggacataattctgtttgacttcccatctttccaatactagtagtgagcctcattagcacatgaatgctggtgtctgtgagttgtgcttgccttcactgtcctgtttgccttgcccaaggtgggcgatggaaaggacaagccatctattattggttggaggaaggaccaaccatctactgtggcagtctgctcaggctgccatacaaaataccacatactacgtggcttaaacaggagacatttattgttcactattctgggggctgggaattcgaagatcaaggtgctgggtgatttgtttctccagtgagggccctctttgtggctttcagttggaagccttcttgttgtatcctcayaggggagagagagagcacgcaagcatgagagagtgcaagagagagagggagagatcaagcaagagtgagagacagagaaagacat

SEQ ID NO: 374697 - DNA, 517 bp, Homo sapiens
tcctgtcatctcgatttgatatgagaaatttgggatttccaaattgacagaaaactcgattttaaagatgctggaaggcaaacatctgtgaaaaatcacaggaayaatgtcaacatctgtccctgtgaaaggaaattgctgaggttctcaatttacagccaatcaatcaatcttggaggccagggtgcttgcaaattgaaatgcatgttgaagctatagggatggctaattaatttagtttgtatgcctataagatttttcattgtttccagttaaaaaaaaattctcttttgaatagaaaacgtgtgcatatggtaaaaaaaaaaaaaaaattaaacagtaccagaaaaagtatacagtgaaaattaagtttgttttccatcccaaccaccagttcttcttctccaaggtcacaagtgttgctggcttctcttgaaagtttccagagatacaatctttatatagaaaaacatatgtatatatgtctcctcccggttttataaatgatagcccattg

SEQ ID NO: 374698 - DNA, 517 bp, Homo sapiens
tcctgtcatctcgatttgatatgagaaatttgggatttccaaattgacagaaaactcgattttaaagatgctggaaggcaaacatctgtgaaaaatcacaggaataatgtcaacatctgtccctgtgaaaggaaattgctgaggttctcaatttacagccaatcaatcaatcttggaggccagggtgcttgcaaattgaaatgcatgttgaagctatagggatggctaattaatttagtttgtatgcctayaagatttttcattgtttccagttaaaaaaaaattctcttttgaatagaaaacgtgtgcatatggtaaaaaaaaaaaaaaaattaaacagtaccagaaaaagtatacagtgaaaattaagtttgttttccatcccaaccaccagttcttcttctccaaggtcacaagtgttgctggcttctcttgaaagtttccagagatacaatctttatatagaaaaacatatgtatatatgtctcctcccggttttataaatgatagcccattg

SEQ ID NO: 374699 - DNA, 615 bp, Homo sapiens
ggaggccagggtgcttgcaaattgaaatgcatgttgaagctatagggatggctaattaatttagtttgtatgcctataagatttttcattgtttccagttaaaaaaaaattctcttttgaatagraaacgtgtgcatatggtaaaaaaaaaaaaaaaattaaacagtaccagaaaaagtatacagtgaaaattaagtttgttttccatcccaaccaccagttcttcttctccaaggtcacaagtgttgctggcttctcttgaaagtttccagagatacaatctttatatagaaaaacatatgtatatatgtctcctcccggttttataaatgatagcccattgtacatattacactgcatcttgacttcattcaacaatatatctttgaggtttttgcatagcagtccatatagacattccttattctttttatcagctgtgtagtattccagtatacggatgtgtataaattaatcagttccctcatggtggacattcaggatattttctgtcattctccacaatttatgctagtatgtccatcttggtgtgtgttcatcagtaggatacaaatctagaggtgagcctcctgggcagatgggatgtgcatttaa

SEQ ID NO: 374700 - DNA, 615 bp, Homo sapiens
ggaggccagggtgcttgcaaattgaaatgcatgttgaagctatagggatggctaattaatttagtttgtatgcctataagatttttcattgtttccagttaaaaaaaaattctcttttgaatagaaaacgtgtgcatatggtaaaaaaaaaaaaaaaattaaacagtaccagaaaaagtatacagtgaaaattaagtttgttttccatcccaaccaccagttcttcttctccaaggtcacaagtgttgctggcttctcttgaaastttccagagatacaatctttatatagaaaaacatatgtatatatgtctcctcccggttttataaatgatagcccattgtacatattacactgcatcttgacttcattcaacaatatatctttgaggtttttgcatagcagtccatatagacattccttattctttttatcagctgtgtagtattccagtatacggatgtgtataaattaatcagttccctcatggtggacattcaggatattttctgtcattctccacaatttatgctagtatgtccatcttggtgtgtgttcatcagtaggatacaaatctagaggtgagcctcctgggcagatgggatgtgcatttaa

SEQ ID NO: 374701 - DNA, 607 bp, Homo sapiens
agtttcaacatgaattttggaggagacacrttcaaaccttagcattccctttccgtaaatgacctcagctggataaaccagtatattcgtttcttgattaatttagccagagttagatttctgggcatgcaaccaaaagctcttactaacagttattgtggtgggatagggatgaggggaagggagattgggattgagagagagattgccctgggcctaagagctttctctccttattacatcccagtgcctgagatttaagttgctagaaggaagatgagtttatggtggaaatttgtaaccgaccattaactagaatggcgcagctaagcccctgtgcctgaccaattgttaggacttaaagaaatagcaataaggaaagagcttttagtttcggagcttaattagccattcttttccttcctgacttttagttttatgactctagcttccaggatagaattttattgtagtcagatacaaattaaacccaaacaaggactctcccgtgtttctgtttcttcaatttaaatttattctttgtagggtgacactaagtaccacagtatatgtcacatgtaagaacagtaaatttttaaaaaagaga

SEQ ID NO: 374702 - DNA, 570 bp, Homo sapiens
gcctgggcagcgagagcgagactcggtctcaaaaaaataaaaaaataaaaaagcctctcttgtgtccttgtccccagccttccagctctcctctgagggaaccagttttcaagatggcccgcaacaatccctgcctgctgccattcacaccttgtttagtcccctcccacgctggaaagatccatgttggggctcgtgtgtgaccaatgccgcagaagtgatgttatgtcacttccgcgattacgtcatgaaagactgcagcttccattgttggctctttctttctctttcttggatcagtcgctttggaggaagccagctgccatgttttgaggacactaaggcactttayggagaggcccacgtggtgaggaattgaggtttctgtctaagagccagtaaggaatagagacaaccacacagtgagcctggaagcctagtcttcagccccagaaacgctcagatgactgcagtcctggctgacatcttacctgcagcctcattggagaccctaagccagagcacttagctgagttggcttgtgggttccaaatccagacaattagatga

SEQ ID NO: 374703 - DNA, 637 bp, Homo sapiens
aaataaagcaaagttatcaaatagagatgtgtgagctgctgaatggaacagaactcactgggtttatggggctgtgtcaggcacctctgacaatgccagatatttactttgcagatgaatgacttcattgcttgccccaaatgcatcactggtgggtaatatttatgcagattggaagcattctccctcctttatwtggtcctgggctgtttgtaaccattggatttttttaccttttgacttgacgttgttcttcacgggaccgtggtatgggatgcatttcaataaacaataccaaaggacagatttcggctttaaataaaattgtgttccgtaaagtgggagacaaaggcttataactcactgtcggctgcagacattttggcaaaaattatctttcaggctttgatctccactgtatcattttactgagtggccccatgtgctctatcaatcaaacccactgaagatgcaggagaatcacatttaaaatcaaatacaaattgtagattcatctgcccaggaggaagagaaatgtgtcatgaatcctgccttcagtcttctatgattacaacggaattagtttttgaaaactccagaggatggttttccacttcccaactttcatattattatt

SEQ ID NO: 374704 - DNA, 637 bp, Homo sapiens
aaataaagcaaagttatcaaatagagatgtgtgagctgctgaatggaacagaactcactgggtttatggggctgtgtcaggcacctctgacaatgccagatatttactttgcagatgaatgacttcattgcttgccccaaatgcatcactggtgggtaatatttatgcagattggaagcattctccctcctttatatggtcctgggctgtttgtaaccattggatttttttaccttttgacttgacgttgttcttcacgggaccgtggtatgggatgcatttcaataaacaataccaaaggacagatttcggctttaaataaaattgtgttccgtaaagtgggagacaaaggcttataactcactgtcggctgcagacattttggcaaaaattatctttcaggctttgatctccactgtatcattttactgagtggccccatgtgctctatcaatcaaacccactgaagatgcaggagaatcacatttaaaatcaaatacaaattgtagattcatctgcccaggaggaagagaaatgtgwcatgaatcctgccttcagtcttctatgattacaacggaattagtttttgaaaactccagaggatggttttccacttcccaactttcatattattatt

SEQ ID NO: 374705 - DNA, 508 bp, Homo sapiens
taagtacaataaggaaggaggaccgcaatccagtcttgtctcccagagccttggcacagaaagatggtaaccaatgctttgtcttggamaatccctcctacctgctggggagacaaaggagcaaatccagcagaagatggaggggaagtgctggttgagttgcttggcaccccttgccttttttcaccctcttcctcagctccctgatcaccatactctccctgtgtcttttggctcctgagatcagttgttgatgaaatgctgggctgcgctcactcccagagtgggaggaaatggatgtgggaaccctcttggggagatgggcagttaccggggcccagagaaccaatgagggctttatcctgcagtcagagttcaacaccagcccttcccagaatcaatcacaccctcctttccactatttcactgtctgccgtgaactaacagacattggttgtgttgccctcagattcataggctgaagtctaacccccaatgtgatggtatc

SEQ ID NO: 374706 - DNA, 508 bp, Homo sapiens
taagtacaataaggaaggaggaccgcaatccagtcttgtctcccagagccttggcacagaaagatggtaaccaatgctttgtcttggaaaatccctcctacctgctggggagacaaaggagcaaatccagcagaagatggaggggaagtgctggttgagttgcttggcaccccttgccttttttcaccctcttcctcagctccctgatcaccatactctccctgtgtcttttggctcctgagatcagttgttgatgaaatgctgggctgsgctcactcccagagtgggaggaaatggatgtgggaaccctcttggggagatgggcagttaccggggcccagagaaccaatgagggctttatcctgcagtcagagttcaacaccagcccttcccagaatcaatcacaccctcctttccactatttcactgtctgccgtgaactaacagacattggttgtgttgccctcagattcataggctgaagtctaacccccaatgtgatggtatc

SEQ ID NO: 374707 - DNA, 508 bp, Homo sapiens
taagtacaataaggaaggaggaccgcaatccagtcttgtctcccagagccttggcacagaaagatggtaaccaatgctttgtcttggaaaatccctcctacctgctggggagacaaaggagcaaatccagcagaagatggaggggaagtgctggttgagttgcttggcaccccttgccttttttcaccctcttcctcagctccctgatcaccatactctccctgtgtcttttggctcctgagatcagttgttgatgaaatgctgggctgcgctcactcccagagtgggaggaaatggatgtgggaaccctcttggggagatgggcagttaccggggcccagagaaccaatgagggctttatcctgcagtcagagttcaacaccagcccttcccagaatcaatcacaccctcctttccactatttcactgtctgccgtgaactaacagacaktggttgtgttgccctcagattcataggctgaagtctaacccccaatgtgatggtatc

SEQ ID NO: 374708 - DNA, 583 bp, Homo sapiens
caaatgtcccctgaggggaggaggaggaatcacccctggatgagaaccatggcccttttttaagggcactgttgaatccttccttctgataccatctgggggtaacttgagtacttggttcatgttctggaaggaaaaactccacatagtgcttctgggttcatttagccyatgtaagcttcgtttttctgtttcttagaccagtatctcactttttgcagggagaggtgggacctctcctccattctcagcccatgtgttttgggtgactcgagagactgggtttggcagatgggagaatgccattctcctggctgttgtgattgattcagaaacctgcctttaaggtggttcaaagagcatcagtggcaggacttctgttaggtggatagggaaagaggggttctctttttgctggggttgcaaacctggtagggtggaaaccgggagctgctggtggtcatctcatcaccctgggggagagcctgcctgagaaggaaatcacaggagagccgagctgagagaggagaaggaaagccgatcacactgtctaacagcctgtatcccctccaacctgatgaca

SEQ ID NO: 374709 - DNA, 583 bp, Homo sapiens
caaatgtcccctgaggggaggaggaggaatcacccctggatgagaaccatggcccttttttaagggcactgttgaatccttccttctgataccatctgggggtaacttgagtacttggttcatgttctggaaggaaaaactccacatagtgcttctgggttcatttagcccatgtaagcttcgtttttctgtttcttagaccagtatctcactttttgcagggagaggtgggacctctcctccattctcagcccatgtgttttgggtgactcgagagactgggyttggcagatgggagaatgccattctcctggctgttgtgattgattcagaaacctgcctttaaggtggttcaaagagcatcagtggcaggacttctgttaggtggatagggaaagaggggttctctttttgctggggttgcaaacctggtagggtggaaaccgggagctgctggtggtcatctcatcaccctgggggagagcctgcctgagaaggaaatcacaggagagccgagctgagagaggagaaggaaagccgatcacactgtctaacagcctgtatcccctccaacctgatgaca

SEQ ID NO: 374710 - DNA, 460 bp, Homo sapiens
ggatggcagcaggcaaaaagagagcttgtgcagggaaactccctgttataaaaccatcagatctcatgagacttactatcatgagaatagcatgagaaagacccacccccatgattcaattacctcccaccrggtccctctcacaacatgtgagaattcaagatgagatttggatggggacacagccaaatcatatcagtgggacaggatggaagctgggctcagagcaacttctctccctttccatgtcatctcagagtctctccaggtttccctccagcaaaagccctcagatttctcacacagtggctcaggggtttaaaaccaagagttccaagaggtgtaaggcggaaactgcatgatcccttaaatgccaggaccagaaccatcatggtgtcacttctatggcaatctattcgtcaaagcagtcacaggccagcccaggctcaggaaaagggaa

SEQ ID NO: 374711 - DNA, 460 bp, Homo sapiens
ggatggcagcaggcaaaaagagagcttgtgcagggaaactccctgttataaaaccatcagatctcatgagacttactatcatgagaatagcatgagaaagacccacccccatgattcaattacctcccaccgggtccctctcacaacatgtgagaattcaagatgagatttggatggggacacagccaaaycatatcagtgggacaggatggaagctgggctcagagcaacttctctccctttccatgtcatctcagagtctctccaggtttccctccagcaaaagccctcagatttctcacacagtggctcaggggtttaaaaccaagagttccaagaggtgtaaggcggaaactgcatgatcccttaaatgccaggaccagaaccatcatggtgtcacttctatggcaatctattcgtcaaagcagtcacaggccagcccaggctcaggaaaagggaa

SEQ ID NO: 374712 - DNA, 460 bp, Homo sapiens
ggatggcagcaggcaaaaagagagcttgtgcagggaaactccctgttataaaaccatcagatctcatgagacttactatcatgagaatagcatgagaaagacccacccccatgattcaattacctcccaccgggtccctctcacaacatgtgagaattcaagatgagatttggatggggacacagccaaatcatatcagtgggacaggatggaagctgggctcagagcaacttctctccctttccatgtcatctcagagtctctccaggtttccctccagcaaaagccctcagatttctyacacagtggctcaggggtttaaaaccaagagttccaagaggtgtaaggcggaaactgcatgatcccttaaatgccaggaccagaaccatcatggtgtcacttctatggcaatctattcgtcaaagcagtcacaggccagcccaggctcaggaaaagggaa

SEQ ID NO: 374713 - DNA, 602 bp, Homo sapiens
gcgctgttgcacaccaacctgggcaacatagcaagactcggtctcaaacaaacaaaaaaaaggggaggggcggggctttagacagatccaagctcaaccctgcaagttgccgrgactccgtttctttatctgtaacatggagatcacgatgttcacctcgcagagtagattaagcagctggcatgtgtgaagtgcccagcactgtgtctagcatatgctaggtacttggcatgtgtttctttctttccctcccttgttcaaggccacatagtccatgactggcagagctagaagccttctcatttacccacaatcaaagaacttctacaaaatagaaacagccccctgccccctcctgcccccgcccacctgctaccttaataggttgtttcccagttattcaatgcaagagacttagcccagctaaagttattcaaaatcgaccttgagatcaggaacaaattggctacagcagtcagcgattggcaaatgcaatctaaatgccccaggcggcattagagccttccacgttgacaggaagagtcaatgtgcatcttggaaaaatctgagaaaaaaaaattaaaggtcaccgcgtttgtagg

SEQ ID NO: 374714 - DNA, 576 bp, Homo sapiens
cgcccacacacacacacacacacacgcaaacacacaccggcacacagcaccgcgcggctgccaatttctcctttccaaattctccctcctcctggcttccctcctggcggctgggaagggagtgcttattccagaaagccccttgttagggaagcccgttgatgtacttacatgacattagctggatgatggaggttaggacaaacctctctccctgcttcaggcggaagagctggagcacgaagatgaagaaggcgatgcagcagagaatggtggagaggatcatggtggcctggaccgcctgcagcgtggagtactctgcgggaaaaggrcaggggcgcaggactgaggaccttggccagccggcactgtggggtacacagcgaccgcagcagctccagagtaggtgtgacaggaggcaaacaggaaggggttcaggcggtcgtctacatggtctgagcacaagggcagccaaggcgtcttccagaccccctgcccctcacctccagtgtccatttgactggacaatcctcgaccccttatctggaagacgaggcaagaaccacctgctctgca

SEQ ID NO: 374715 - DNA, 576 bp, Homo sapiens
cgcccacacacacacacacacacacgcaaacacacaccggcacacagcaccgcgcggctgccaatttctcctttccaaattctccctcctcctggcttccctcctggcggctgggaagggagtgcttattccagaaagccccttgttagggaagcccgttgatgtacttacatgacattagctggatgatggaggttaggacaaacctctctccctgcttcaggcggaagagctggagcacgaagatgaagaaggcgatgcagcagagaatggtggagaggatcatggtggcctggaccgcctgcagcgtggagtactctgcgggaaaagggcaggggcgcaggactgaggaccttggccagccggcactgyggggtacacagcgaccgcagcagctccagagtaggtgtgacaggaggcaaacaggaaggggttcaggcggtcgtctacatggtctgagcacaagggcagccaaggcgtcttccagaccccctgcccctcacctccagtgtccatttgactggacaatcctcgaccccttatctggaagacgaggcaagaaccacctgctctgca

SEQ ID NO: 374716 - DNA, 417 bp, Homo sapiens
ccactttaaaagctatattttcttacaattgtgtttttaggttcctgagtcctttgagcacctgccacctctcccagaaccaccagcaccactacctgaattagtagacaaaacccgagacacacttcctccccagaagcctgagctcaaagtgaaacgggttttcagaccmaatggcattgccctgacttggaatataaccaaaatcaatcccaagtgtgctcctgtagaaagctaccacctcttcctgtgtcatgagaactctaataataagttgatttggaagaagattggagaaattaaagctttaccactccccatggcctgtactttatctcagtttttagcttccaacagatactattttactgtccaatcaaaagatatttttggacgatatggaccattctgtgatat

SEQ ID NO: 374717 - DNA, 566 bp, Homo sapiens
caggcacggtggctcatgcctgtaatcccagcattttgggaggccaaggagggtggttcaactgaggtcaggagtttgagaccatcctggccaaggtggtgaaaccccatccctactaaagatactaatattagccaggcgtagtggtaggcgcctgtaatcctagctagtcgggaggcagaggcaggagaactgcttgaacctgggaggcagaggctgcagtgagtcgagatcacaccactgcactccagcctgggcgacagastgaaactctgtctcggaaaaaaaaaaaagagtttaattcatgcagagctggctgtgtgggagaccagagttttattattactcaaataagtctcccccaaaactcagggatagagatttttaaggagaatttagtgagaagagggtcagggaatggggagtattgattggtcaggtttgagatggaatcagggagttgaagctggcctcttgcactgagtcagttcctgggtgggagccacaagaccatatgagtcaatttattgacctgggtggtgccagctgatccatcaattgcaggg

SEQ ID NO: 374718 - DNA, 566 bp, Homo sapiens
caggcacggtggctcatgcctgtaatcccagcattttgggaggccaaggagggtggttcaactgaggtcaggagtttgagaccatcctggccaaggtggtgaaaccccatccctactaaagatactaatattagccaggcgtagtggtaggcgcctgtaatcctagctagtcgggaggcagaggcaggagaactgcttgaacctgggaggcagaggctgcagtgagtcgagatcacaccactgcactccagcctgggcgacagactgaaactctgtctcggaaaaaaaaaaaagagtttaattcatgcagagctggctgtgtgggagaccagagttttattattactcaaataagtctcccccaaaactcagggatagagatttttaaggagaatttagtgagaagrgggtcagggaatggggagtattgattggtcaggtttgagatggaatcagggagttgaagctggcctcttgcactgagtcagttcctgggtgggagccacaagaccatatgagtcaatttattgacctgggtggtgccagctgatccatcaattgcaggg

SEQ ID NO: 374719 - DNA, 566 bp, Homo sapiens
caggcacggtggctcatgcctgtaatcccagcattttgggaggccaaggagggtggttcaactgaggtcaggagtttgagaccatcctggccaaggtggtgaaaccccatccctactaaagatactaatattagccaggcgtagtggtaggcgcctgtaatcctagctagtcgggaggcagaggcaggagaactgcttgaacctgggaggcagaggctgcagtgagtcgagatcacaccactgcactccagcctgggcgacagactgaaactctgtctcggaaaaaaaaaaaagagtttaattcatgcagagctggctgtgtgggagaccagagttttattattactcaaataagtctcccccaaaactcagggatagagatttttaaggagaatttagtgagaagagggtcagggaatggggagtattgattggtcaggtttragatggaatcagggagttgaagctggcctcttgcactgagtcagttcctgggtgggagccacaagaccatatgagtcaatttattgacctgggtggtgccagctgatccatcaattgcaggg

SEQ ID NO: 374720 - DNA, 625 bp, Homo sapiens
ttggtcaggtttgagatggaatcagggagttgaagctggcctcttgcactgagtcagttcctgggtgggagccacaagaccatatgagtcaatttattgacctgggtggtgccagctgatccatcaattgcagggtctgcaaagtatctaaagtactgatgttcggttttaccatagtgacattatcccctggagcaatttggggaggttcagaatcttgcrgcctccggcagcatgactcctaaaccctaatttctaatcttgtggctaatttgttagtcctgcaaaggcagtctagtccccaggcaggaaggttgtttattttgggaaagggctgttatcatcttttgtttcaaagttaaaccgtaaactaagttcctctcaaagttagttagtcctacaaccaaatcaactttgaacaagacagcctggaggttagaagcaagatagagtcagttacatcagatctccatcaccttcataattttctccgttataatttttgcaaaggctgttttaataacagccagtcgttcatgtttccttgtgccacgtgattattttgtacagtcaacattaagagacaggcacttgtaaatgttgagatgccaagggggaaagaatt

SEQ ID NO: 374721 - DNA, 588 bp, Homo sapiens
gcagggcatacagagggtttggtgtcctactgtgacgattttgccttttaatcagcctgaaatgggatataaagtcttagatggatgaaataggaataacttttctcgtttccttcctcgtctgactaaattaacagatgaaggaattgtcaaaatacaaaaccttcttccttactgaacccactgacctggcagggcttgtaaggaaaagaatttgtttctagaagagctatttaaatgtcctggacctcttcgaaccagcagaaataggaaccagttaacttaacaggcaaagtaataagactatacagaggaaacacattttcctrctttatgccttaattttaagtagagttacaagatttcctgtaggaattcagagtgttatcttattttatgccccaaactagaaagagcgttccactgggtttgccaagctgttaagatgaaaatatctgtttgagcacagcataatagatgaggtgtttaaggcattttcctttagatttttggttaatcttcttttagttaattttctgagataaaatccagttataaataacctgagggtaccctaactgggctgtt

SEQ ID NO: 374722 - DNA, 598 bp, Homo sapiens
gagggctgtgtgcacttcttgcgtataaacttgtgttggtgactgtagtccaggcaattgccaaataagaatagaatccataaaaaccattttgagtaggaaaracaggttgcagtctggatgcttggaaaagtaggcactttctgactgaagataatcagaaccaactctcggactttccttgatccccttctaacccctaagtgtttcatttccagcagggtgacaggatagagatctgcttcagggaggcttggaccccacccaccacagagtccacagaacatgaataagtcagctgatggttgactaaaacgtatatacaattttaattacatatactagtgtatttaaaatttcattctaaactaatgtaatcaaaactaatgtaaataaacatacagtggttatctctgaatgataggactacaggtgatttttattttcttcctttaaaactttggcctttgtgactttttacagatcgcatgcatgtgtgtgtgtgtctgtgtgtacatgggtgtgtatggacgtttgcacgcaggtgtgttttaatggaaaaaggggggaaaagtgcaaatttctaagggatgcaaag

SEQ ID NO: 374723 - DNA, 598 bp, Homo sapiens
gagggctgtgtgcacttcttgcgtataaacttgtgttggtgactgtagtccaggcaattgccaaataagaatagaatccataaaaaccattttgagtaggaaaaacaggttgcagtctggatgcttggaaaagtaggcactttctgactgaagataatcasaaccaactctcggactttccttgatccccttctaacccctaagtgtttcatttccagcagggtgacaggatagagatctgcttcagggaggcttggaccccacccaccacagagtccacagaacatgaataagtcagctgatggttgactaaaacgtatatacaattttaattacatatactagtgtatttaaaatttcattctaaactaatgtaatcaaaactaatgtaaataaacatacagtggttatctctgaatgataggactacaggtgatttttattttcttcctttaaaactttggcctttgtgactttttacagatcgcatgcatgtgtgtgtgtgtctgtgtgtacatgggtgtgtatggacgtttgcacgcaggtgtgttttaatggaaaaaggggggaaaagtgcaaatttctaagggatgcaaag

SEQ ID NO: 374724 - DNA, 411 bp, Homo sapiens
ggagctcaaatatttatgagaaatttacatctgggagaccttccctcttcttatccctgcttccaaagggaaatccataaagagaakataaagagcaaagcttagtcctcaacatctacaagcctaagaagtctgactcactttgagttttaggaaagaagaaactgtttggttgctacatatactttgtactgccataaaataggctgattccataggtcacatagaaaaattaaattcactattcataatttattgcccttgggtgtttgctctggttattcattgctctgtaggaaacaaccccaaacatacacctttaaaaaatagcaattgtttattctgcccatgaatcttcagtttggacagggccttgaggtggggaatgggaagtaacttctttctgatttt

SEQ ID NO: 374725 - DNA, 555 bp, Homo sapiens
gaagaaggtctaagagtgtcaggttccctggctgacaagtctagggggatctctgtggttctagttatcccaatgatctgtgactcttttgcagggtagctggggaggggttgatgatgagggtgggaactaaagcaaaactgatctgttttacagtcatgattttcctgagaaaagtaagaaagaaatgayaaaaattatcaactcaggccaggcccagtggctgatacctgtaagcccagcactttgtggggccaaggtaggtagatcacctgagctcaggagttcgagaccagcctgggcaacatagtgaagccttgtctctaccaaagatgcaaaacaattatctggccatggtggtgcatcctgtggtcccagctgctcatgaggctgaggcaggaggatcgcttgggcctgggaggcagaggtggcagtgagctgagatcgcaccaccgcactccagtctgggcaacagaatgagaccttgtctcaaaaaaaaaaaaaaaaaatcaactcagaaagaatgaactgaaatgtacctgagatgtgggactt

SEQ ID NO: 374726 - DNA, 555 bp, Homo sapiens
gaagaaggtctaagagtgtcaggttccctggctgacaagtctagggggatctctgtggttctagttatcccaatgatctgtgactcttttgcagggtagctggggaggggttgatgatgagggtgggaactaaagcaaaactgatctgttttacagtcatgattttcctgagaaaagtaagaaagaaatgacaaaaattatcaactcaggccaggcccagtggctgatacctgtaagcccagcactttgtggggccaaggtaggtagatcacctgagctcaggagttcgagaccagcctgggcaacatagtgaagccttgtctctaccaaagatgcaaaacaattatctggccatggtggtgcatcctgtggtcccagctgctcatgaggctgaggcagsaggatcgcttgggcctgggaggcagaggtggcagtgagctgagatcgcaccaccgcactccagtctgggcaacagaatgagaccttgtctcaaaaaaaaaaaaaaaaaatcaactcagaaagaatgaactgaaatgtacctgagatgtgggactt

SEQ ID NO: 374727 - DNA, 609 bp, Homo sapiens
atttgagcttcagagaagtttyataaaatataaataaaaagacacctaacatttcctttaatgaatatcctgggcagcattaaagaggaaatgaatcatcccagatttcttgagaaaactgttaaatcagtggctgcattgcaattgatcaggaatgttttgtcagttttgaattgttcttttgtccagcacacattcccagcaaatgtgtgatgacttttactaaaatccactggagtgatgcacttacccttctctgctttttttgagacctttatttctaaactcacctcttctcttgctccatgcttattcctgagccttcactgaagtagaggggttttccttgttaggattatcatttggatggtgcattttttcctaagcattttttttttggtattttctactatggataagtaggaagctgtaaatctacagattttaccttctttaaagatttccttttttatttttttatgtatatatatttatatatatatttattatactttaagttctagggtacatgtgcacaacgtgcaggtttattacaacatgtgccatgttggtgtgctgcacgcattaacttgtcatttacattaggta

SEQ ID NO: 374728 - DNA, 592 bp, Homo sapiens
ctgacaaaatatatctttattttctaaaactaccttatttatttattcttttttaamatttgggagtgtttattttggctcatgcttttccattcctaaatggtagctctcattggtctctcagagaacaagtgtgtctgtgagacttcttttctcacttgcattaacaaccatatgccttggtaaagagagtggtagtacagggattcctctgaaggtttcccattaaaatggaagatgtagtagagaaaaaaaagagcaagttgtcagtaataatgttttatcttaatgttgtcaagtgacttctggagttatcccctggcacatttgtgaatatttgcctcaaccacagagtctgctttacaaaatccttttgtgctagaagagactatttaaaattgtactcatggtgctgtctccaggcaggaatctgttattagcagtagtgataatgaaggctgcagacatgtcatgacattggttgccctcaggataagagcagatcaaggctttgggaggaaaggacagagagggagaattactcctcgtcactgccagattttgtggctaccagcaaaggatcgttttaagc

SEQ ID NO: 374729 - DNA, 360 bp, Homo sapiens
ttttaaatcagatagaaaaagttataaataaaaatacatttatactgattttatataacctatgcagttacctttactggtgatctatatttcttcatgtggatttgagttatcctttagtgtcctttcatttcagtctgaaggattccctttattacttcttgtaggccagtctgttagtgatgaattctttcaggttttatttatctgagagtgtcctggtttatccttcatttttaaattgttccccaaaatcggcagaataatgggaactatttakaaatagttttactagatataaaattccttgttgataatttttttttttcagcacgttgaatatgtcatcacactgtcttc

SEQ ID NO: 374730 - DNA, 460 bp, Homo sapiens
atttgtctattaagtccaacatctgggctccctcagagacaacttctattcattgcttttttccccatatatgagttatatgttcttgtatcttttcatggctcatatttttttagtcrgaaactggagatttaaaataataaatgtggcaactgtgaaaatcagatcctccctcccccagggttggttactgttgttactcttagtttgtttagtaactttttcagtaaagtctatattcttatttatgcatggccaataaagtttctgctcagttagtttaatggtcagcttatgattgaacagagattcccttaaatgcctggaaccaataagtctcccagcttttgctgaggggctgtgtgtgtgtggcaggacatgcctttgacactcaggcaggcagttgccaattctgctttatctttcctgggacccaaaggttagtcagaggtaagagctt

SEQ ID NO: 374731 - DNA, 395 bp, Homo sapiens
atctacatacattctggggatagagctgctcttgcagtgtttctgttttcctggtctctctggcatttgaagcagaaagactcagctcatattcatttttactactttccccagtcagaatggaagctgagatagatagcaaggtcttcttacacctttacctcatagaagttgatgatgttagtctggttgggagtcaacagagtgatggagcctgtcctgtccttgcacttgatctccacattcatagtgtagccctcggccttgacatttaatgtcacagggtggactttcttttccacattgcagatcaaattaaagttcacatctccttsctgctttggtgtgaagaaaatatcaattgggaacctggttggggaacaaaacagcagatt

SEQ ID NO: 374732 - DNA, 395 bp, Homo sapiens
atctacatacattctggggatagagctgctcttgcagtgtttctgttttcctggtctctctggcatttgaagcagaaagactcagctcatattcatttttactactttccccagtcagaatggaagctgagatagatagcaaggtcttcttacacctttacctcatagaagttgatgatgttagtctggttgggagtcaacagagtgatggagcctgtcctgtccttgcacttgatctccacattcatagtgtagccctcggccttgacatttaatgtcacagggtggactttcttttccacattgcagatcaaattaaagttcacatctccttcctgctttggwgtgaagaaaatatcaattgggaacctggttggggaacaaaacagcagatt

SEQ ID NO: 374733 - DNA, 539 bp, Homo sapiens
  misc_feature (1)...(539): n = A,T,C or G
tggaagaggccctcangcctgacaacacacatacagaaaataagcacatgtaaagatgtccgacattattagtcattaggaaaatgctaattaaaactacaatgaaaaatccctacacatctatcagaaaagctaaaataaaaaattgttgccggttgcagagcctcattcctgtaatcccagcactttgggaagccaaggcgggtggatcacttgaggtcatgagctcgagaccagcctcaccaacatggtgaaaccccatctctactaaaaaaaaaaaaaacaacccttagccgggcatagtggtgcgtgcctgtagccttagctactcgggaggctgaggcaagagaattgcttgaacctgcgaggcgggggttgcagtgagccaagatcacaccactgcactccagcctgggcaacagagcgagactctgtctaaraatagtaataaaaaaattgtgacaccactaaattttggtgatgttgtggagattctggaacattcagagataactagtggaatgtaaaatggttcagcc

SEQ ID NO: 374734 - DNA, 411 bp, Homo sapiens
gattgtctctatggtggacccagctcctggaccttgtcacatttaactagatggcctgggtactgacattatgcagaggtcaaaaccaggtggagagtctacaaatatgttttgtttggtttgggaattgttaaaaaaaaaaaaaaatgaactagctaccagcatgtaaaatagggcttcacatagaactttggaattttggtcaggcgcagtggctcacacctgtaatcccagcactttgggaggccgagacgggcagatcacgaggtcaggagattgagaccatcctggctaacacggtgaaacactgtctctactaaaaatacaaaaaattagctgggcgtggtggcgggcgcttgtagtccsagctactcggaaggctgagtcaggagaatagcgtgaacccaggag

SEQ ID NO: 374735 - DNA, 556 bp, Homo sapiens
gggctgtgtcttattcattgtcctggtccccacagtggcaagagcacgctggcattgggcagggcaggagacccaggaatgcttcgtgaagagaattctcctctgggctatgaagttggcagcatgctgtagggcagacttcaaccaggctgtgggaggagagctcagtggggcacagagaagatgggtgttgtcagtgggggtgttggtgacttgaccacaaaaacccaagagaatgggctcttaccagcctcctctccttccttcayggactgctctatggcagccctgatgcagagctcacgggcccggatccctgggatgttgttgctgttggccacagcttccagcacaatggagtcgatgctcaggcaggctgcgttgtagtacttggccacgctaacggcattggctgactttcctattaaaaagaccagggggttgaatttcacggtgctcatttgctcagtgtcccagagagaaaaggtctcaagagcagaggtccctgcaaagtgatctctctgagtgctctgcctccttcccatgtggctggagg

SEQ ID NO: 374736 - DNA, 556 bp, Homo sapiens
gggctgtgtcttattcattgtcctggtccccacagtggcaagagcacgctggcattgggcagggcaggagacccaggaatgcttcgtgaagagaattctcctctgggctatgaagttggcagcatgctgtagggcagacttcaaccaggctgtgggaggagagctcagtggggcacagagaagatgggtgttgtcagtgggggtgttggtgacttgaccacaaaaacccaagagaatgggctcttaccagcctcctctccttccttcacggactgctctatggcagccctgatgcagagctcacrggcccggatccctgggatgttgttgctgttggccacagcttccagcacaatggagtcgatgctcaggcaggctgcgttgtagtacttggccacgctaacggcattggctgactttcctattaaaaagaccagggggttgaatttcacggtgctcatttgctcagtgtcccagagagaaaaggtctcaagagcagaggtccctgcaaagtgatctctctgagtgctctgcctccttcccatgtggctggagg

SEQ ID NO: 374737 - DNA, 595 bp, Homo sapiens
ggttgaatttcacggtgctcatttgctcagtgtcccagagagaaaaggtctcaagagcagaggtccctgcaaagtgatctctctgagtgctctgcctccttcccatgtggctggaggtgttagcagcaaagagaaggaagacctcagcctggagtcagggctgtgggtctgattctaaccctgccactgatgcgtgcrtgctgtggcaatctgcatcctcgctgggttttccctcagtttaaaaaacagattctttttttctttttttttgagatggagtctcactctgtcacccaggctggagtgcagtggcgagatctcagctcaccgtaacctctgcctcctggtttcaagtgattctcctgcctcagcctcccaagtagctgggattacaggcacccaccaccatatctggttaattttttgtatttttagtagagatggggtttcaccatgttggccaggctggtctcgaactcctaacttcaaatgatccacctgccttggcctcccaaagtgctgggattacaggtgtcagccactgcacagggtctgtttaagaaacaggttctatcagatgatctttaaaatactt

SEQ ID NO: 374738 - DNA, 595 bp, Homo sapiens
ggttgaatttcacggtgctcatttgctcagtgtcccagagagaaaaggtctcaagagcagaggtccctgcaaagtgatctctctgagtgctctgcctccttcccatgtggctggaggtgttagcagcaaagagaaggaagacctcagcctggagtcagggctgtgggtctgattctaaccctgccactgatgcgtgcatgctgtggcaatctgcatcctcgctgggttttccctcagtttaaaaaacagattctttttttctttttttttgagatggagtctcactctgtcacccaggctggagtgcagtggcgagatctcagctcacygtaacctctgcctcctggtttcaagtgattctcctgcctcagcctcccaagtagctgggattacaggcacccaccaccatatctggttaattttttgtatttttagtagagatggggtttcaccatgttggccaggctggtctcgaactcctaacttcaaatgatccacctgccttggcctcccaaagtgctgggattacaggtgtcagccactgcacagggtctgtttaagaaacaggttctatcagatgatctttaaaatactt

SEQ ID NO: 374739 - DNA, 595 bp, Homo sapiens
ggttgaatttcacggtgctcatttgctcagtgtcccagagagaaaaggtctcaagagcagaggtccctgcaaagtgatctctctgagtgctctgcctccttcccatgtggctggaggtgttagcagcaaagagaaggaagacctcagcctggagtcagggctgtgggtctgattctaaccctgccactgatgcgtgcatgctgtggcaatctgcatcctcgctgggttttccctcagtttaaaaaacagattctttttttctttttttttgagatggagtctcactctgtcacccaggctggagtgcagtggcgagatctcagctcaccgtaacctcygcctcctggtttcaagtgattctcctgcctcagcctcccaagtagctgggattacaggcacccaccaccatatctggttaattttttgtatttttagtagagatggggtttcaccatgttggccaggctggtctcgaactcctaacttcaaatgatccacctgccttggcctcccaaagtgctgggattacaggtgtcagccactgcacagggtctgtttaagaaacaggttctatcagatgatctttaaaatactt

SEQ ID NO: 374740 - DNA, 595 bp, Homo sapiens
ggttgaatttcacggtgctcatttgctcagtgtcccagagagaaaaggtctcaagagcagaggtccctgcaaagtgatctctctgagtgctctgcctccttcccatgtggctggaggtgttagcagcaaagagaaggaagacctcagcctggagtcagggctgtgggtctgattctaaccctgccactgatgcgtgcatgctgtggcaatctgcatcctcgctgggttttccctcagtttaaaaaacagattctttttttctttttttttgagatggagtctcactctgtcacccaggctggagtgcagtggcgagatctcagctcaccgtaacctctgcctcctggtttcaagtgattctcctgcctcagcctcccaagtagctgggattacaggcacccaccaccatatctggttaattttttgtatttttagtagagatggggtttcaccatgttggccaggctggtctcgaactcctaacytcaaatgatccacctgccttggcctcccaaagtgctgggattacaggtgtcagccactgcacagggtctgtttaagaaacaggttctatcagatgatctttaaaatactt

SEQ ID NO: 374741 - DNA, 599 bp, Homo sapiens
  misc_feature (1)...(599): n = A,T,C or G
ataaggtaggggaaatcaaattctcttttctgagtggttacgaagtttagatagacaaatggatgggaaggagctctgtgaactgcaaattactatacaaayaagattttttttttcccaatgtaggtgattctgctcctttgggtttatggtaaagttagcacatgtaattttggaggtaataaaggattctcgttaaaaaatcctttctttatcaagggctcatcccttgactggtttatggttaggaaaatattccttgagaatatttagcatgtgatggaagtttcttttcaatgaggattcacactgcaggtatggttataattgtgaatgccaacagtcatcatagtaataataatgataacatcaacagcttttcgtttgagtatttactatgtgccaagtattgagataagcattttatataaatgttctcattaaattctcatgactaccctataaaacacacagcgccaatacgcactntacggaccgggaaaccgaccccacacaatttagttaattttcccaaaagcacacaactattaacgtatattcactaccctatgcagttcttcaaataagtcattagtatt

SEQ ID NO: 374742 - DNA, 599 bp, Homo sapiens
  misc_feature (1)...(599): n = A,T,C or G
ataaggtaggggaaatcaaattctcttttctgagtggttacgaagtttagatagacaaatggatgggaaggagctctgtgaactgcaaattactatacaaataagattttttttttcccaatgtaggtgattctgctcctttgggtttatggtaaagttagcacatgtaattttggaggtaataaaggattctcgttaaaaaatcctttctttatcaagggctcatcccttgactggtttatggttaggaaaatattccttgagaatatttagcatgtgatggaagtttcttttcaatgaggattcacactgcaggtatggttataattgtgaatgccaacagtcatcatagtaataayaatgataacatcaacagcttttcgtttgagtatttactatgtgccaagtattgagataagcattttatataaatgttctcattaaattctcatgactaccctataaaacacacagcgccaatacgcactntacggaccgggaaaccgaccccacacaatttagttaattttcccaaaagcacacaactattaacgtatattcactaccctatgcagttcttcaaataagtcattagtatt

SEQ ID NO: 374743 - DNA, 644 bp, Homo sapiens
  misc_feature (1)...(644): n = A,T,C or G
cttcccataaggtaggggaaatcaaattctcttttctgagtggttacgaagtttagatagacaaatggatgggaaggagctctgtgaactgcaaattactatacaaataagattttttttttcccaatgtaggtgattctgctcctttgggtttatggtaaagttagcacatgtaattttggaggtaataaaggattctcgttaaaaaatcctttctttatcaagggctcatcccttgactggtttatggttaggaaaatattccttgagaatatttagcatgtgatggaagtttcttttcaatgaggattcacactgcaggtatggttataattgtgaatgccaacagtcatcatagtaataataatgataacatcaacagcttttcgtttgagtatttactatgtgccaagtattgagayaagcattttatataaatgttctcattaaattctcatgactaccctataaaacacacagcgccaatacgcactntacggaccgggaaaccgaccccacacaatttagttaattttcccaaaagcacacaactattaacgtatattcactaccctatgcagttcttcaaataagtcattagtatttgccatgaccacacagctgatgccgccactctggaagcc

SEQ ID NO: 374744 - DNA, 475 bp, Homo sapiens
ccggttcttggccaggcggccttctgcagaaatgtcaatgcccaggtggcgagcgattgctttgctcactgggttgttttccacctctccaacttcctccatggagtggctgtcaatgctctgaagcttgtcagctgcaaatttaaaatatatgtgtgtgcacacatggcatgcatgctacacagccggaatttacatgggtactgatggaaatgggaatggatatttctttttaaatgctgttttttttaaatggcaaatattgcagcagtccccacttgtagtgtacgastaggcccttttgggctaataatttgtttatagctactaaaataaaaaaacagattttttgaccccactttcattttggggaatctctcttgctgaaaagtagaaaggacatttgtgtggagaggaggatggcttacagtgcaaaatattagaaactagtgaaatctgcagcattaagggaaat

SEQ ID NO: 374745 - DNA, 475 bp, Homo sapiens
ccggttcttggccaggcggccttctgcagaaatgtcaatgcccaggtggcgagcgattgctttgctcactgggttgttttccacctctccaacttcctccatggagtggctgtcaatgctctgaagcttgtcagctgcaaatttaaaatatatgtgtgtgcacacatggcatgcatgctacacagccggaatttacatgggtactgatggaaatgggaatggatatttctttttaaatgctgttttttttaaatggcaaatattgcagcagtccccacttgtagtgtacgacwaggcccttttgggctaataatttgtttatagctactaaaataaaaaaacagattttttgaccccactttcattttggggaatctctcttgctgaaaagtagaaaggacatttgtgtggagaggaggatggcttacagtgcaaaatattagaaactagtgaaatctgcagcattaagggaaat

SEQ ID NO: 374746 - DNA, 455 bp, Homo sapiens
acaggccaaatctgtcctgctgcttgttttcgtaaatcaagttgtattggaacatagccaygtcctttgattacatattgtctttgtcatcacagccaccctccaaaggcagggttgagtagttttggcagagactgtatagccttcaaagccccaaatatttactgtctggccttttatgggaaaagtttgccaaaccttgatttatcaaatgcattggcctagaggaacgtctagaaaaaagcaagctgcaggatcatatgtgtattaattgtagagtagtgtgcagccagatacatatagtcatcccaaatacattcagtgttttaataacaaaactaggatgacactctgaattttgctctgtaacttgcttttcacataatatatcttggacatctttccatttacttaaatacaggtctagctcattctgtttttcttttttttcttga

SEQ ID NO: 374747 - DNA, 455 bp, Homo sapiens
acaggccaaatctgtcctgctgcttgttttcgtaaatcaagttgtattggaacatagccatgtcctttgattacatattgtctttgtcatcacagccaccctccaaaggcagggttgagtagttttggcagagactgtatagccttcaaagccccaaatatttactrtctggccttttatgggaaaagtttgccaaaccttgatttatcaaatgcattggcctagaggaacgtctagaaaaaagcaagctgcaggatcatatgtgtattaattgtagagtagtgtgcagccagatacatatagtcatcccaaatacattcagtgttttaataacaaaactaggatgacactctgaattttgctctgtaacttgcttttcacataatatatcttggacatctttccatttacttaaatacaggtctagctcattctgtttttcttttttttcttga

SEQ ID NO: 374748 - DNA, 622 bp, Homo sapiens
ttgctccatttcagcctgggcatttcacctgtggaaatatgttttcttcttgttttaaaactaatatacactcttttcctttyttccccatgacaaaatttcagaactccattatctaccttgagtgacaattcattcttaccaacaatattgtggttagcaattttacattaagcaagggtgtggtctcataaacagaggatccaggggaaaaaaagaggtaaaatagtattaagtacgtgtatgtgtgcacatgtgtgtgaatgtgtattagggctgccagataaaatacaagatgcctagttaaatttgagtttcagataaacaatgaataactttttagtataaatatgtccagtgtaatatttgagacatactaaaaaatatttgttatttatctgaaattcaaatttaactagacagcctgtatttttttctcctaaatctggcaatcctagtgtgtatgtgtatttataagacacagcaaaattaagttttaaaaagcatttacttcttctacaacctgatttattggtatcaaaaatctgttttgttaggtaacccttcttcaggatccccatttttagttatttgaacaccactgctaataagctccatgtaa

SEQ ID NO: 374749 - DNA, 496 bp, Homo sapiens
cacctgtggaaatatgttttcttcttgttttaaaactaatatacactcttttcctttcttccccatgacaaaatttcagaactccattatctaccttgagtgacaattcattcttaccaacaatattgtggttagcaattttacattaagcaagggtgtggtctcataaacagaggatccaggggaaaaaaagaggtaaaatagtattaagtacgtgtatgtgtgcacatgtgtgtgaatgtgtattagggctgccagataaaatacaagatgcctagttaaatttgagtttcagataaacaatgaataactttttagtataaatatgtccagtgtaatatttgagacatactaaaaaatatttgttatttatctgaaattcaaatttaactagacagcctgtatttttttctcctaaatctggcaatcctagtgtgtatgtgtatttayaagacacagcaaaattaagttttaaaaagcatttacttcttctaca

SEQ ID NO: 374750 - DNA, 622 bp, Homo sapiens
ttgctccatttcagcctgggcatttcacctgtggaaatatgttttcttcttgttttaaaactaatatacactcttttcctttcttccccatgacaaaatttcagaactccattatctaccttgagtgacaattcattcttaccaacaatattgtggttagcaattttacattaagcaagggtgtggtctcataaacagaggatccaggggaaaaaaagaggtaaaatagtattaagtacgtgtatgtgtgcacatgtgtgtgaatgtgtattagggctgccagataaaatacaagatgcctagttaaatttgagtttcagataaacaatgaataactttttagtataaatatgtccagtgtaatatttgagacatactaaaaaatatttgttatttatctgaaattcaaatttaactagacagcctgtatttttttctcctaaatctggcaatcctagtgtgtatgtgtatttataagacacagcaaaattaagttttaaaaagcatttacttcttctacaacctgatttattgrtatcaaaaatctgttttgttaggtaacccttcttcaggatccccatttttagttatttgaacaccactgctaataagctccatgtaa

SEQ ID NO: 374751 - DNA, 471 bp, Homo sapiens
caacaagtggtactagaacaattggatatccatgtacaaaaaatttttgatccatatctcacactatatacagaaattaactccgaatagactgaagacctaaacacaaaacttatgttcggartatataaagagctctagaaactttaataagaagaccaacgacctaattaaaaataaacagaagacttgaacagacactttaactaagacaatacagggctggcaaataagtactcgaaaagttgcttaacatcattagtcatcaggaaaataaagcctccatgagatacctctacatactgattagaatggctgaaatttaaaacaactgactatcaactgttgatgaggatgtgaagtaagtggagatgtcagacattgctggtggcattgtaaaaggacacaaccactttggaaaatagtttggcagtttcttacaaaggtaaacatacgcctaccacatgaccc

SEQ ID NO: 374752 - DNA, 471 bp, Homo sapiens
caacaagtggtactagaacaattggatatccatgtacaaaaaatttttgatccatatctcacactatatacagaaattaactccgaatagactgaagacctaaacacaaaacttatgttcggaatatataaagagctctagaaactttaataagaagaccaacgacctaattaaaaataaacagaagacttgaacagacactttaactaagacaatacagggctggcaaataagtactcgaaaagttgcttaacatcattagtcatyaggaaaataaagcctccatgagatacctctacatactgattagaatggctgaaatttaaaacaactgactatcaactgttgatgaggatgtgaagtaagtggagatgtcagacattgctggtggcattgtaaaaggacacaaccactttggaaaatagtttggcagtttcttacaaaggtaaacatacgcctaccacatgaccc

SEQ ID NO: 374753 - DNA, 550 bp, Homo sapiens
gctgggctaggacagaaatccttctgggactgtggtcttaactgttccctgcactgcttcytggttcagatcctgggggatggcgacaatcccttcccgtgagagttgcctctgttctgggtggcactggtatcccatggccctgtgtggtcctccctctgtggttgggcactcgcttatctgtgaaatgggttggtagcagtcttggtctcatagaactgtagttggattaaatgatgtgtgccatgtcaaggcaggaaacaggcatggactaaatatcttctgttatctcaactgtagtaatcatagtagcagcaatcaccccagtgaggccactgctgtcacatcttgagggaagcagggggatgtagaagggagaggacagaagtaaaaagtgattgcacttgcagaacaagtccagggcagatacagggacagcagcctctggggcagcctcagggtgggagacactgctcccttaccttgcacccacatcgcctgtgttcatcatgaggatgcgacgtgtggcttgcgtctgatacaccacggg

SEQ ID NO: 374754 - DNA, 550 bp, Homo sapiens
gctgggctaggacagaaatccttctgggactgtggtcttaactgttccctgcactgcttcctggttcagatcctgggggatggcgacaatcccttccygtgagagttgcctctgttctgggtggcactggtatcccatggccctgtgtggtcctccctctgtggttgggcactcgcttatctgtgaaatgggttggtagcagtcttggtctcatagaactgtagttggattaaatgatgtgtgccatgtcaaggcaggaaacaggcatggactaaatatcttctgttatctcaactgtagtaatcatagtagcagcaatcaccccagtgaggccactgctgtcacatcttgagggaagcagggggatgtagaagggagaggacagaagtaaaaagtgattgcacttgcagaacaagtccagggcagatacagggacagcagcctctggggcagcctcagggtgggagacactgctcccttaccttgcacccacatcgcctgtgttcatcatgaggatgcgacgtgtggcttgcgtctgatacaccacggg

SEQ ID NO: 374755 - DNA, 541 bp, Homo sapiens
cttcgaccgtcagcacacctgttttcctctctgctctggcttcagctcttctcacaggctttgaagatgttctcaagaatcacccacctttaaaatgaaaaaaaaaaaagttttcttcaaccctggtgcccccgacaagcaccccatttctctccttcccttcatgcttgtctccacttgctggctttgcctcgtcacccctcatttctgcctccccgtttcctaccctgattcctgtctccaccactccctcgaatccaaggctccagcctctccatttccagatctaatgggcatgggttaggccttgacttgcttgacgtcctcctccatgagcttcacactgtggatcgtaccctccttggatcgctcttstttcctagcatcctggtccgccctttctggctttcctccttctccctggtttctttctggacccgcctccatccatccttagtcactctgcaggtttccagcgtcagcctttgtgtcttcctgcttggtctaaggctgacccccatcccatgcgtgacttcagtgc

SEQ ID NO: 374756 - DNA, 541 bp, Homo sapiens
cttcgaccgtcagcacacctgttttcctctctgctctggcttcagctcttctcacaggctttgaagatgttctcaagaatcacccacctttaaaatgaaaaaaaaaaaagttttcttcaaccctggtgcccccgacaagcaccccatttctctccttcccttcatgcttgtctccacttgctggctttgcctcgtcacccctcatttctgcctccccgtttcctaccctgattcctgtctccaccactccctcgaatccaaggctccagcctctccatttccagatctaatgggcatgggttaggccttgacttgcttgacgtcctcctccatgagcttcacactgtggatcgtaccctccttggatcgctcttctttcctagcatcctggtccgccctttctgrctttcctccttctccctggtttctttctggacccgcctccatccatccttagtcactctgcaggtttccagcgtcagcctttgtgtcttcctgcttggtctaaggctgacccccatcccatgcgtgacttcagtgc

SEQ ID NO: 374757 - DNA, 541 bp, Homo sapiens
cttcgaccgtcagcacacctgttttcctctctgctctggcttcagctcttctcacaggctttgaagatgttctcaagaatcacccacctttaaaatgaaaaaaaaaaaagttttcttcaaccctggtgcccccgacaagcaccccatttctctccttcccttcatgcttgtctccacttgctggctttgcctcgtcacccctcatttctgcctccccgtttcctaccctgattcctgtctccaccactccctcgaatccaaggctccagcctctccatttccagatctaatgggcatgggttaggccttgacttgcttgacgtcctcctccatgagcttcacactgtggatcgtaccctccttggatcgctcttctttcctagcatcctggtccgccctttctggctttcctccttctccctggtttctttctggacccgcctccatccatccttagtcactctgcaggtttccagcgtcagcctttgtstcttcctgcttggtctaaggctgacccccatcccatgcgtgacttcagtgc

SEQ ID NO: 374758 - DNA, 409 bp, Homo sapiens
tgttaatgaggtgaacctttaaaaaaaaacatgctggttggccactgaactcctcttcaggattttatttaaacatcccagcaaggccttccctggccactctatttaaaattgaataagacaaaagcaaaaacaaaacaaacaaacgaaaaccaacaaaaaaaaaaacccacttcttagccccttccctgtcttcttagcactcatcaccatctcacataccatagatttttatgtgattttgtctgcctacctgcccctgcaaaatataagcctcatgaaggctgaggcttttgtctgttttgatcacttaatgagtctcccacctggcagaaaggtgctcaaamatatttgttttatgtgtgggtatgtttttgtttattttttatttctttattttttgagacag

SEQ ID NO: 374759 - DNA, 560 bp, Homo sapiens
  misc_feature (1)...(560): n = A,T,C or G
gacctctacagtctctctgctaaaagtacaaaaattagccgggtgtggtggtgcatgyttgtaatcccagctacttgggaggctggggcatgagactctcttgaacctaggaggtggaggttgcagtgagccgagattgtgtcactgtattctggcctgggcgaaagagcaaaactctgtccccctcanaaaaaaaaaaaaaaaaaagataaactataaatttggtaaggatatttgcagacaaataatatgaacagaagagtttataaaaaataaaacaactcacacaaaatataagtatcataattgaaaaatgagcaaaaggcatgaaaaggcattcctgcaagggataacttgtatgactagtaatcatatgaagaaatactcagccttatttgtgatcagagatcaggacaatgcaaaataggctcgtaatgagaccatttcccattcattcaaatgataaaaatcaagaagtctgacaatgccaagtgtcggagaggacatggatcaataagctctctgctgtaggagtataaattggtacagctactctggaa

SEQ ID NO: 374760 - DNA, 560 bp, Homo sapiens
  misc_feature (1)...(560): n = A,T,C or G
gacctctacagtctctctgctaaaagtacaaaaattagccgggtgtggtggtgcatgcttgtaatcccagctacttgggaggctggggcatgagactctcttgaacctaggaggyggaggttgcagtgagccgagattgtgtcactgtattctggcctgggcgaaagagcaaaactctgtccccctcanaaaaaaaaaaaaaaaaaagataaactataaatttggtaaggatatttgcagacaaataatatgaacagaagagtttataaaaaataaaacaactcacacaaaatataagtatcataattgaaaaatgagcaaaaggcatgaaaaggcattcctgcaagggataacttgtatgactagtaatcatatgaagaaatactcagccttatttgtgatcagagatcaggacaatgcaaaataggctcgtaatgagaccatttcccattcattcaaatgataaaaatcaagaagtctgacaatgccaagtgtcggagaggacatggatcaataagctctctgctgtaggagtataaattggtacagctactctggaa

SEQ ID NO: 374761 - DNA, 560 bp, Homo sapiens
  misc_feature (1)...(560): n = A,T,C or G
gacctctacagtctctctgctaaaagtacaaaaattagccgggtgtggtggtgcatgcttgtaatcccagctacttgggaggctggggcatgagactctcttgaacctaggaggtggaggttgcagtgagccgagattgtgtcactgtattctggcctgggcgaaagagcaaaactctgtccccctcanaaaaaaaaaaaaaaaaaagataaactataaatttggtaaggayatttgcagacaaataatatgaacagaagagtttataaaaaataaaacaactcacacaaaatataagtatcataattgaaaaatgagcaaaaggcatgaaaaggcattcctgcaagggataacttgtatgactagtaatcatatgaagaaatactcagccttatttgtgatcagagatcaggacaatgcaaaataggctcgtaatgagaccatttcccattcattcaaatgataaaaatcaagaagtctgacaatgccaagtgtcggagaggacatggatcaataagctctctgctgtaggagtataaattggtacagctactctggaa

SEQ ID NO: 374762 - DNA, 560 bp, Homo sapiens
  misc_feature (1)...(560): n = A,T,C or G
gacctctacagtctctctgctaaaagtacaaaaattagccgggtgtggtggtgcatgcttgtaatcccagctacttgggaggctggggcatgagactctcttgaacctaggaggtggaggttgcagtgagccgagattgtgtcactgtattctggcctgggcgaaagagcaaaactctgtccccctcanaaaaaaaaaaaaaaaaaagataaactataaatttggtaaggatatttgcagacaaataatatgaacagaagagtttataaaaaataaaacaactcacacaaaatataagtatcataattgaaaaatgagcaaaaggcatgaaaaggcattcctgcaagggataacttgtatgactagtaatcatatgaagaaatactcagccttatttgtgatcagagatcaggacaatgcaaaataggctcrtaatgagaccatttcccattcattcaaatgataaaaatcaagaagtctgacaatgccaagtgtcggagaggacatggatcaataagctctctgctgtaggagtataaattggtacagctactctggaa

SEQ ID NO: 374763 - DNA, 523 bp, Homo sapiens
ccactttctctgtttgcttctgaaaccagtttggctcagcgcagtctgctagtgttttcacacctgctgaagtcagtggagaggaagccctcgggaattacaagrgcagcgtgaagacatcggtggaaataaattagtctcattatcatggaaaaaaaatccatgggttgcatctgtcttgttgattgctggaaaccctggtgcctggaaactggttactgtgggactaaataaatatttgtttaataaatgagcgaagtggcttgaatttattttttttttctgcttccgagagttctttagttttaacaaaaagaaaaaatcacacttgtaatcctggtcgtgaatactcacctgcttcggagtggggctcgtaggtttgaattcgggcccctcccaccatttacttacagacacaggcaggattagtggcactccagggagaaggttgtctggagaagactggtggtcagtcagaaccttgaactcaaagccaactttccccatgttcgtcagcgtgatt

SEQ ID NO: 374764 - DNA, 515 bp, Homo sapiens
ccaccatgcccggctaatttttgtattttttgtagagatggggtttcaccatattcccagggtggtctcaaacatctgggctcaagcaatctgcccacctcaacctcccaaagtgtggggattacaggcstgagccacagtgcccagccggctgattttcacaataaggggttgatggaaagtttttcttctttatcttttcaatttgaaatgtcaccagggactctctgcttgggtgaggcatgcccaccgacgctactgatctcagatgttgatttccttcttccttgtaaactgaggtttggggtagtctctatccccaatttacatgtaagcaggacttataggtgaagttacgagctctctttgctgatgtgcatggtttatagaaggctgtgtgcagagattcaaattgtggaccacccttctcctctgggaataaaaaaaccttctataattttaaatatacacacttgctgcatattattggtcaaatttatttttcttgtgattta

SEQ ID NO: 374765 - DNA, 485 bp, Homo sapiens
agggtggtctcaaacatctgggctcaagcaatctgcccacctcaacctcccaaagtgtggggattacaggcctgagccacagtgcccagccggctgattttcacaataaggggttgatggaaagtttttcttctttatcttttcaatttgaaatgtcaccagggactctctgcttgggtgaggcatgcccaccgacgctactgatctcagatgttgatttccttcttccttgtaaactgaggtttggrgtagtctctatccccaatttacatgtaagcaggacttataggtgaagttacgagctctctttgctgatgtgcatggtttatagaaggctgtgtgcagagattcaaattgtggaccacccttctcctctgggaataaaaaaaccttctataattttaaatatacacacttgctgcatattattggtcaaatttatttttcttgtgatttattctattaattgcatatattttcttcta

SEQ ID NO: 374766 - DNA, 530 bp, Homo sapiens
catggtcaaaggtggccgcttcaccgggtaggagacgattgagaataaggcgggaggcgggatgggtggtccggaggcacccagacccaagatgtctaggatctaaaggaaaggcccattgtgaatttcctgtgcaaaaccctatgcctctcttaccatagcctttgttayactttatggcaattgtttaattgtctgcctttgcaactgggctgtaaactccattaggatggttagcaggtggatatggcacacagcctagcacatagcaggcaatcaataaatctctgtttaatatgaagaggccagctcttaatgttctaatatctagagtacagagtttttccatctattttcagattccatgttaatttttctttttgcgttaaatgttccttccttccaaggtgaaagaaagttgggataggagcaagtcaaatgcagcaaagaaaataataaagcaaaggttctgggactggggatgagaatgggaatgaagagagaagtgaaaaataacctgagagagaaaa

SEQ ID NO: 374767 - DNA, 530 bp, Homo sapiens
catggtcaaaggtggccgcttcaccgggtaggagacgattgagaataaggcgggaggcgggatgggtggtccggaggcacccagacccaagatgtctaggatctaaaggaaaggcccattgtgaatttcctgtgcaaaaccctatgcctctcttaccatagcctttgttatactttatggcaattgtttaattgtctgcctttgcaactgggctgtaaactccattaggatggttagcaggtggatatggcacacagcctagcacatagcaggcaatcaataaatctctgtttaatatgaagaggccagctcttaaygttctaatatctagagtacagagtttttccatctattttcagattccatgttaatttttctttttgcgttaaatgttccttccttccaaggtgaaagaaagttgggataggagcaagtcaaatgcagcaaagaaaataataaagcaaaggttctgggactggggatgagaatgggaatgaagagagaagtgaaaaataacctgagagagaaaa

SEQ ID NO: 374768 - DNA, 601 bp, Homo sapiens
ctctactaaattaacccaaataattataasattaaaatcttctatatctttttctgtttaatttttctaagactcaagagtggtatataaaacttttgtccatttctctattgttttctacaaatacatacacctttttgtttataccctttcgtttctgtgttgacacagaagatctcatgactattaagtgttcatcatggactgtgtgttctgtctaccttcaattgccttcttgttccctttgaatgctcttctttgaattcccctttgtttggtcttaatattgtgattgctgctttctttttgccttacataatttgcccatagtcttatttcattttgttttaggcttatcattcataaaacatacttatttggattttattttttaatcttctctgagagtccttaagtttcaataggaacatttaacacattcttatgattagcaaaactgaaatgcttgctattatttctttcatcgtatcttgtctattttttaaatttactcagtgttttctttctattcgatctttttatcataattgctatgttttccttgccctttttctaaagatttttaagcatttgaatttac

SEQ ID NO: 374769 - DNA, 568 bp, Homo sapiens
aagtccaacgtgcaagtgaaattcatgccaaaagaagaggtgagctttaaagaaatatggcttcatttagattctctggacctctttgagctttactcaaagtccatgcttgtttgggtctcaagggaagcttcgagtgacctgtgccttgcttttctgaatatggcatctcaagcacttctggttcacataggagctgtgtggyctggtggtctggaatcattggactaacacatcagtttttatcagaaggcctgggttagtagccttctgcctctgcacacttacatgctgtgtgtctttgaggaaattacttagcctcattcagtctcagttcactcatagataaaagaaaaaatagtcatgttgcatatcagaagtccttattgaaattctgaaacccagtaagatccaaaactgggggtggggggtttgagatttcataagcttcgcactaaaactcatttggcataaaaatctcatctgaactgacatgacaccatttaacctttatttgtacaacttagttttcagagtcaaacattgccaacaactgttaatgtgtttg

SEQ ID NO: 374770 - DNA, 568 bp, Homo sapiens
aagtccaacgtgcaagtgaaattcatgccaaaagaagaggtgagctttaaagaaatatggcttcatttagattctctggacctctttgagctttactcaaagtccatgcttgtttgggtctcaagggaagcttcgagtgacctgtgccttgcttttctgaatatggcatctcaagcacttctggttcacataggagctgtgtggcctggtggtctggaatcattggactaacacatcartttttatcagaaggcctgggttagtagccttctgcctctgcacacttacatgctgtgtgtctttgaggaaattacttagcctcattcagtctcagttcactcatagataaaagaaaaaatagtcatgttgcatatcagaagtccttattgaaattctgaaacccagtaagatccaaaactgggggtggggggtttgagatttcataagcttcgcactaaaactcatttggcataaaaatctcatctgaactgacatgacaccatttaacctttatttgtacaacttagttttcagagtcaaacattgccaacaactgttaatgtgtttg

SEQ ID NO: 374771 - DNA, 568 bp, Homo sapiens
aagtccaacgtgcaagtgaaattcatgccaaaagaagaggtgagctttaaagaaatatggcttcatttagattctctggacctctttgagctttactcaaagtccatgcttgtttgggtctcaagggaagcttcgagtgacctgtgccttgcttttctgaatatggcatctcaagcacttctggttcacataggagctgtgtggcctggtggtctggaatcattggactaacacatcagtttttatcagaaggcctgggttagtagccttctgcctctgcacacttacatgctgtgtgtctttgaggaaattacttagcctcattcagtctcagttcactcatagataaaagaaaaaatagtmatgttgcatatcagaagtccttattgaaattctgaaacccagtaagatccaaaactgggggtggggggtttgagatttcataagcttcgcactaaaactcatttggcataaaaatctcatctgaactgacatgacaccatttaacctttatttgtacaacttagttttcagagtcaaacattgccaacaactgttaatgtgtttg

SEQ ID NO: 374772 - DNA, 643 bp, Homo sapiens
taacagacgtgtatgacacataattgaagtctgagaaggagatagagaaaatggaacaggaacaatactggcaacaaacaattgcagaatatcatctgattcttctcctttgttgtttatgttgttcaatgtgtgaattacattacttttttaatgttaaaacagcattgtgttcttagaatagaccccattgcagtagatcagcaactctccagtctcttcagcccagctctttcctcttgtagttcttttcctaggtcaacacattggaactatcatccctcagctgtttcccaagctggagtccctgatctttcaacatgggcctccccatcccattactgcctctctgatgatctaaaaaccagggacttggccacactcactaggtatcttctgtaatgagtagaatttttctgttgtcatgttactgctctgggatgtggccttttgaatacctacctacaaagcagctcttcattttcagacagccctaagtactatacgtttttatttatttagsgctaaaatttggttatctctagatgacaacctaatttggggctgaagctattcagaatagtctattactttaaatttcacatgattctttttgtaatgaattaatttatttttattgata

SEQ ID NO: 374773 - DNA, 514 bp, Homo sapiens
tccaagccaggacacctttaacagtgaaagcagccactattaataattacttcagaacwataggtatgattcatatctatcctggatatatatggtcatgcccattccacatccatctaatgtagtaaagcggaactctgattctatacagccctgaaataaaatctttactaactcattgcagcttgtcaaacagatttgatacttccttaacacagcatttaagaactcaaggctctggctgcagcctgccatcctagcatggtttctttccacccttcttcctgcctctccactccagccaaactcagggacctatgccctatctcttccaaaatttgacctttgccttcaccttccatatattccactcccaaccaccgctggtctcccaatatccaaatcctatctaattatcaagctctaccttaaaggccacctcttctggaagccattcttactctcaacatggcaggctctgaaatcaagctgcctggattaagttcctggctgt

SEQ ID NO: 374774 - DNA, 516 bp, Homo sapiens
cagaaacctaaatttaagaaccatgagaatattaaagtgctttatgatagtttatctcaaaatttttcaagtaaaattattcacttgccaaaatatgtcaacrtagtatctcaaataccaagaaataacattaaattcaaagactgatattacttttaaaattattgagctgtaagttatataaaattcattcaatttaagttgtacaatttgagatttgatgaatgcatacacttatttaactagccatcaccacaatcaagataaagaacatttccattagcccagaatgtttcctcatgcccttctgcagtcattcctcccatcccatctctaactccagccaatcactgatttggttaagtaataagttttctttatatattctgggcatttctgaattgtcagatacacatactgcaaatgttttctcccattctgtgttacggcttttattttcataatggtatcttttgaaaagcatacttttttttaatttagatgaaatccaagtca

SEQ ID NO: 374775 - DNA, 562 bp, Homo sapiens
tagaaacgtactttgaaatagcagcattttacctttttgttgcacttagttttcgtaactaagaggaaatcattgaagagaaacagataaacatctaggaatctygtgctttctgaggaaaaaaagagaagctgaaatggggacctgaaactgttaagtagaagagtttttctttccctttctttctttctttctttctttctttctttctttctttctttctttctttctttctttcttctttctttctttctttttctttctttcttttcattctctctttccttccttccttccttccttctttctttctttctctcttttttttaatcaatgaattccttagaaaacaaaactgggtgagtattacggcaccccaggggctccaatcatgtaggtcagaaagctgcctgcctcaatgttgaattgatttcttcctaaagcagagacttgatgagaggccaagcttccaacattaaagacattgaatttatgatgcgtctcatttgactctaagataactcagatgttatttgtaaagaaacaactcagccgagggtaa

SEQ ID NO: 374776 - DNA, 431 bp, Homo sapiens
gccaccccctacatcaccaawcactggaatatatatataagctgatatgactctttcatgaaaagattaccacactggcttccaccaactctccccttatacactcagccccaggaacacttgcccagtcttaggagcaaactttaagttgaatttaaaaggcttcaatcaggactctcttaagttctgacaaatatctgatggagggcagtgagaatttcctgagaatgcagacttaatttataccactgcaaaaataataggataaagagattatgaaaaccaaataccatcctcaaggtgcattcagtgttctggaaggaccaaacagagcactacactgagcattctcagattaaagtcaaagctctattaagttcagtttccttgcatgcatggtagctttgggtggtctgctccattaggcctgt

SEQ ID NO: 374777 - DNA, 418 bp, Homo sapiens
cacacccactgtgacagtaagagtcacatcccgctaggatattacagataatatcacatagtgtataaccacataacatccccataggayattacgaataatattacagagtgtaaacacatgttgtacacccagtgtgacattaagagtaatatttttcttggatactaagagtaatatcacagattgaacatgcatggtgtacatatactgtgacattggaaataaaatcgccgtaggatattacaaataatatgacccaccaggctattgcaagtaatatcaccctctgcccccatggatattgcaagtcatagcacggggcggggtgtacatcccacttgctatggcgagtaatatcaccctctcccccctggatattacgaaccatagcgcaggggttgtacacacaatgtat

SEQ ID NO: 374778 - DNA, 536 bp, Homo sapiens
ctcaaaacccttacataaaatggcatagtatttgcacacaacctatgcacattcttgtatatactttaaatcatctctagattacttataatacctaacagaatgtaaattctatggttagattgtaatttttataatttttttcttgctgttattgtttttttctgaataygttcaatgcatggagggccatctgtagtgtccttatttaaaatttgatattttgttcatcattggatttttgcattgcttttgattttttaagtcattgccttaaaaatatcatttatctcgactacccccttaaattttgtgcccaagaggagtgcctcacttacgtcaccctgttcctagccctgagatgggaagatatcacagagaaatggtgatgtctgagctgttacagttgcatatacaagcatcatagcaacattctgggatgtatgatcttcatcagggtgtttaactcttggttttcccaccatgagatgggggcagtaaaagtacttactttacagggttatactgaggattaa

SEQ ID NO: 374779 - DNA, 460 bp, Homo sapiens
tactgccagatattcctgtctattccattataaggtaaaatctgatccccatgaagggtggtactgagataaacacatcttatttcaaagtaataatttcttattwtttctaagtaatagttttgaaaatttcagctattactgtccaggctcctcaaataaacagttataatatgtaggtaataagtatcaactaattgagatattgtccataattttccatagctctgtgtggctaaatcacaagaattcattttatcaagtctttgaagttggacatcagcttccaggatgtaatgtctctttgatttcacctgagaatgtctatgctatgctactggcacagtaatggggcatgatttgtctctttttctttttcttttttttgagatggagtctcactccagctctgtagcccaggctgcagtgcagtggtatgatctcagctcactgcaacctc

SEQ ID NO: 374780 - DNA, 561 bp, Homo sapiens
aaaaacattttatattaaaaaaataaaaataaaatgcctgttacataatggcttcatttaactctaaaatccatcgtgttatagaactagaaacttctagagggtttgcttcattggttcccaatttttcagaaatgtgggacccctctgtaacagtgaagtccgcctctccgtatcatggtaataaaactgtctatctgcttcatttaaatgagatatgggctgaaagaaagatgctaaacacatagcctctgtggaattagattaaattttccatttaacctgctgagattatgaaaacagtctgacccacagggctgagggagttgcagcaattaccatcccattaagagttacaaaaacagtgggatttttgcaaaatcattgccccaggctttatatcaccagctttcgaactatgtcccagaaagatkaagtacttacttaaatttaagggactacttaaagaaaccacaccctcctacttcttgactcccacttagcctcactatgcaagggtgaagggagagtctgcagccaggttgagtaatatttttctca

SEQ ID NO: 374781 - DNA, 548 bp, Homo sapiens
agctttctttttttatgttattaataaatgaggatatgatactttaagttttaaagaataagcattttatttttggtacatatttattgatcaagaactacgtggwgacaaaagtgctataaattttagtgattgtagatgaatttgtatttcattcattccaacaatctctatctgcttgggaaattagttaccatgtcattcatttaatatttaaacagtatgtagaatgttatgggtttgaggcttcttgcaattaattattatgcccccccccaccaggggtccttgggtcatgattgacatattctgatcaaaccaaaactacttgttctagattagaaaattggactttaaagaggacaagtgactgggccaagggcacagaacttgttgataacagagtggaggcatgcacctggtccttccatctttccattcacaatctttgccactatagcttctgcccttataaggtgaagatactagaaaaaaaggtgattacatcaggactggtgggagagttgtaaatgctatgaagaggagtt

SEQ ID NO: 374782 - DNA, 548 bp, Homo sapiens
agctttctttttttatgttattaataaatgaggatatgatactttaagttttaaagaataagcattttatttttggtacatatttattgatcaagaactacgtggtgacaaaagtgctataaattttagtgattgtagatgaatttgtatttcattcattccaacaatctctatctgcttgggaaattagttaccatgtcattcatttaatatttaaacagtatgtagaatgttatgggtttgaggcttcttgcaattaattattatgsccccccccaccaggggtccttgggtcatgattgacatattctgatcaaaccaaaactacttgttctagattagaaaattggactttaaagaggacaagtgactgggccaagggcacagaacttgttgataacagagtggaggcatgcacctggtccttccatctttccattcacaatctttgccactatagcttctgcccttataaggtgaagatactagaaaaaaaggtgattacatcaggactggtgggagagttgtaaatgctatgaagaggagtt

SEQ ID NO: 374783 - DNA, 531 bp, Homo sapiens
aaatcatacagtgggtgaagaatatggactttggagtcagatgtgtccagacaattgttcaggttccacttcttgctaactgtgagatcttgaacacatcagttaacttcctggtttcttcatctgagagatggggatgacatagaacttaatgattagaagtactgaatgagataaatcacataaagcactcagcactgagccagacacaaaaaaggtgctcacttggttggaacagctacaacttctggtaatatttctactctaccatcatctcctgagagctgtttaaatccactaatatgcagagcaggtttttgtttcatayacagcgacaaagaaaaatctgggttgggggaagtactaggggatgaagcagaaagtgttaggtttgtctctcagcaggcatcatgcactgagtttgagactgtacagtcataggggtgacaggcagacagaatccttgtgtcttttttctgtttcattttgatttatttgtgtatttatttatttttttacatgtgaggcttg

SEQ ID NO: 374784 - DNA, 614 bp, Homo sapiens
cagacctaagtgatatacagtagtgagaagtgctctctaagaaaagatgcttaggtcaactcagtgcactgaaccgatcctcctgttgcacgaggaatagaagggtgaaacgtaaaaacaacaaaacaagtatatacatagtagagcttgcaagggatccccagatgtctagaaacaaagagggccacaaaatctaaatagacatgatgccatggtgaccttttggataatgagaggctggargttagaagtaagcccaaaacaaaaatactggagccttcaaatattcttctttctatgagtaaaagactagaaaaattaccctgttggcctaatattgcaccatataaaactataagggagttataggtggagaaatagttacacatagaaagagtaaaacccacagactaaatcacatgatcagatgtagggtccaaattaacctatgaaatgagaatctcaagctgagaaatgaacataaacataaatatagaaaagtgcaggagaatcaagtgtttaactggtccacaggaatatttttataatccaggacataaagaacttgcaaagaagttcccaccccccatctccaatgataagcctaattttta

SEQ ID NO: 374785 - DNA, 600 bp, Homo sapiens
gtgctcacttggttggaacagctacaacttctggtaatatttctactctaccatcatctcctgagagctgtttaaatccactaatatgcagagcaggtttttgtttcatatacagcgacaaagaaaaatctgggttgggggaagtactaggggatgaagcagaaagtgttaggtttgtctctcagcaggcatcatgcactgagtttgagactgtacagtcataggggtgacaggcagacagaatccttgtgtcttttttctgtttcattttgatttatttgtgtatttatttatttttttacatgtgaggcttggcaacatttcagctcaaagcagaatcgcagttcctaggataaatggggagwctccgggtgtgaacagggtggccttgaggtctgagcgacaaaatgtgacaggctatggaggagaggctcttttcaccacttcatggtgcccccctatactctgtcacccctgctgctgacagcctgaggaacacacagaagcagacttgttggagttgtcaaggtggatcctgaagactggaagtttccacccagtggttgggcactaagtgctgggagagctgggtgatggggg

SEQ ID NO: 374786 - DNA, 595 bp, Homo sapiens
aatcacctcttaaatactgttacattggcaattaaatttcaacatgagttttacagggtcattcaaaccatagcacttaatatttatagcagtggccatctttctttagaacatcacgaccgcccagtaggtcgggaccctggaggaaataggattggttacagtctatctattttggaataggctaagacatctagcccaggtaattgatctgtagtattaaaatgacatttaaagaaaaacaatattaatgtggacaccaattgcttttcacatgctgttcaggatagcagctttgtaaaatgtgaagttatttataaatgtcaataatgttatctaatcactggtttagcaaataataattattagcaagtccagccctgtgctaagcactctacaagcattttctcatgaatccctacaaataactttttaatgtaggtgtgtgtatacatataaatttcagtataaattttaaatatggatgagtaagctaagactcagaaaagtttcttgcccgggrtttcagagaataatggaatagggactcatctcagatctgcctgatgattttaactattctttaatgtgcaga

SEQ ID NO: 374787 - DNA, 560 bp, Homo sapiens
tggtgtaaggcaggacacagtggtgcacgcctgtagtttcagctcctcaggagcctgaaacgggaggattgcttgagcctgggaggttgaggcagcagtgagccatgatggcgccactgcactccagcctgggcgacagagtgagaccctgtcttaagaaaaaaaatgccgagcactgtggctcacaactgtagtcccagtactttgggaggctgaggcaggtggatcacttgagtctaggagttcaagaccagcctgggcaacatagtgagaccccatctctactaaaaactttaaaaaaaagaagaagaaaaattagccaggtgtagtggcrtgtgcctatagtctcagctactccgaaggctgggatgggaaaatcgcttaagcccaggaattcaaggctgcagtgagcccataattgtgccactgcactccagcccgggtgatagagcgagaccttctctctaaacaataaaataataataataatagattggaaggctacacaaccaattcatgttggagtttgtctgggtattgaagacaaaagcatgaagata

SEQ ID NO: 374788 - DNA, 558 bp, Homo sapiens
gtgcctgttcagcaaatcgggcctctgggtagagaagattaaaccagccctccatcaccaaaaagttccatttccgctccaagtaataaccaccctgtctccagcagaaattcgtaagagcagaaagtaaaccacctcaggccatgctcaaccccatttgaacccaaatacatctttgagatgtaaaggttatatatattgacctgagtggggaaaaaaatacaaaacttaatcatagatgccttagccacagcagccaagaaaaatcctgtaatcaggcagctgagagrcagccgggaagagggagagagagggcgggtgcctccctgaatgcctgcttgcttttctctatctttccttcacaacttcaggggaaagagcaggaactggggaccaacgacaacacccagtcaacctccccagcgtcagttatgcccccttccaaaaccatccaaatgggcatgagtggcataggcagatgggggggctgtgggcagatgatgggtgaagctctacagtgagcatttcacaagcccttgagataaagaagagagagtt

SEQ ID NO: 374789 - DNA, 437 bp, Homo sapiens
tcacaggtgatgctgtgctgaactcatttaactctgacttagaagcaatgggttgctggcatcagggagctggagtcagagctgttgaaattgactcagcctcagggagtaatttgtgttttcgcctcatcccttagggagcgggtccacctcacctctcactccagaagcccttctccagctctcattagggctgacagaaaayaggagagaggagagagtgagaggacagaattttggaggcttgaaggactttttctttcctgtcctgttctgtccttcctcttactgtcccttctccatccctcacttttcctattttaaattataaaagtaatctgtgctggtgtaacaaatgcaaactacacaaatgtagatagagtaaaacagtgaaagcccccattccctcctgccccaattttagtcccaaagtcatt

SEQ ID NO: 374790 - DNA, 613 bp, Homo sapiens
cattaccagcttctccttccacactgaaaacatgcttttccatttgcctgcttggccagagacagcggtaggtgggatacaatcttagtggctgcagctatttggaaagttgagtttccataactaaagactgttgatacgaaagacttttcaggggcacctgcagctcaggaaccattcaccaccaagacatgaatatgcatttgttccatccacgaatatgaatatgaaatgccctccccaatttcagataatcttgaagattataggtcttctattggaaccccataggaagcagtgcacagatcaaataatgccctgaaaataaggctaagctcttacccagaaattgcccaaatgctttctgtttatgttaatgcatcccagttgtgggtatgtgcttttgccctttttctccccagtttctttgcaaagtaaagagacttgctgatttcatcctgttttatttacactgcatggagagggggtaatttcagggctcacagtccatacctcatgmagttggagttctcagcatcctgattgggaggacgtatgccccggcagagcaggtctggaagagattggtatttatggagtctgtttgccttaa

SEQ ID NO: 374791 - DNA, 563 bp, Homo sapiens
ggctttcttgtgaataaatgttttctttactgcggttaatagcgtcttcaccaagttaagcacatacagaggcaggaaggcaattatagcacaggcagactttatatatctccgtagcatccgtgaagcatcattatttttcagtgacttattatttttttataataaccaaacttgtcctgtgcaggaaaaatacatgaggaaggcaattyggtgctcactgttggttgcacttcatgttcattaaggaccttgttctactacaatgctgtggtcagatcatggctggataggcaaagtggtagatggacaatgacctccctgtcacatggaatgcgtaggtgaggctgaacaagggagctaggcaggtggttgagtctgtgggctccaggatctgaggtcctgttgtcagatcctgcctccaccaccctgtagctgtatagccttgggtaagtcccaaccattctgtgtcccctctgtaaaatgaggataacaatacagtcatgggccacataaccacgttttggtcagtgacagactgcatatacgatggtggtcctgta

SEQ ID NO: 374792 - DNA, 563 bp, Homo sapiens
ggctttcttgtgaataaatgttttctttactgcggttaatagcgtcttcaccaagttaagcacatacagaggcaggaaggcaattatagcacaggcagactttatatatctccgtagcatccgtgaagcatcattatttttcagtgacttattatttttttataataaccaaacttgtcctgtgcaggaaaaatacatgaggaaggcaatttggtgctcactgttggttgcacttcatgttcattaaggaccttgttctactacaatgctgtggtcagatcatggctggataggcaaagtggtagatggacaatgacctccctgtcacatggaatgcgtaggtgaggctgaacaagggagctaggcaggtggttgagtctgtgggctccaggatctgaggtcctgttgtcagatcctgcctccaccaccctgtagctgtatagccttgggtaagtcccaamcattctgtgtcccctctgtaaaatgaggataacaatacagtcatgggccacataaccacgttttggtcagtgacagactgcatatacgatggtggtcctgta

SEQ ID NO: 374793 - DNA, 561 bp, Homo sapiens
tccacatctgaagcatggccaktatggcggtggtgagtttccttcatctgtcagttttggccaaaagttggcaggatttaggaactgtgctttggaaatgaggagtaaacacttcagagtatcccatatttctggccagaggaccaggaaaggaagatctgtgagtaggagagtatgggcagaatccttggggtttttatgtgtgtgtgtcttttttctatcccagccatgtcccaaaatcagcccagacacaaaactgcactcatatgacacagaaacagcacaggcaccaaagcccccaaaagatatcccattcctttggactgagaagctcagaatagaggccaatgttatgtgaataaggtaaggaagagtacatgagaattttttttaattttttaataattttaacttttgttacggattcatgggtacatgtgcaggtttgttacaggggtatattgtgtgatgctcaggtttggggtatgaataatccccatcactcagtgatatggcttggctgtgtccccacccaaatctcaccttgaattgtcataatcc

SEQ ID NO: 374794 - DNA, 545 bp, Homo sapiens
agtcatccctcccattctagttgtgttttgggatcatcactcatacattaaagaggtggcctttctgtgtccatcagctgaattaggcacaattttagcagttaccacctcacgaccagggttttacctattaactcagggtgggatgcacctgggggtagagagagaactgtggcacctcaggggatctgagcttgacaccagctttgatttcacctttttttttttaatagtatttattgatcattcttgggtgtttctcggagagggggatttggcagggtcataggacaatagtggagggaaggtcagcagataaacatgtgaacaagggtctctggttttcctaggcagaggtccctgcggccttccgcagtgtttgtgtccctgggtacttgagattasggagtggtgatgactcttaaggagcatgctgccttcaagcatctgtttaacaaagcacatcttgcaccgcccttaatccatttaaccctgagtggacacagcacatgtttcagagagcacggggttgggggtaagttcac

SEQ ID NO: 374795 - DNA, 588 bp, Homo sapiens
gttggtcagaaaattcctttatggccagcttttgcatacccaagtgagggatggtctgaatgaccctcttgtttctgcagctttctcaattctcaaggtgccatattttgcagtatcgtgttctgaaccctggcagctcgtacacagtcaaactgtacatatatccatgtacatacacacatagatacacatacacacacacatatatacacacatggaaagacacatacataactatttgtatattttacaattcatccagatttttttaaatccttcatgcaaaatttgcggtaattaaaatattacaaaaaggaaatgttcattaacaatgacaaacaactatactgyttaaaaacctttcatcttttctcctagcaggctggggaaaatttctttccagatgcctcagaaaaagggcttctgtttcttacagctccatccagggtcaaatggtgttgaaagtcagtgctgaaatgcatgatgctgcaggagtttgagagcctttgacctctgtccaccctttggtcttgcttgtcaatggcttggttatgtgtatgtatttttaacaggggctttgtacggggt

SEQ ID NO: 374796 - DNA, 580 bp, Homo sapiens
ttaccttttcactttgaaattatttccaacctaaataaaaatgtcaggccgggcccagtggctcactcctgtaatcttagcactttgggaggtcgaggcaggtggatcacctgaggccaggagttcaagaccagcctggccaatgtagcgaaaccccatctctactaaaaatgcaaaaaattggcctggtgtggtggcaggcacctgtaatcccagctactcaggagactgaggcaggagaatcgcttaaactggaaggcagaggttgcagcaagccaagattatgccactgcactctagcctgggcaacggagggagatcctatctcaaaaaataaataaataaaaataaaaaattcaagaacagtacatatacccttcacccygattcttcattattattttactacaaactattctgctttttttttttttctttttttgagacagggtctccctctgtcacccaggctggaatgcagtggtgcaattatggctcactgcagcctcgatctcctgggctcaagtgatcttccccacctctgcctcccaagcaactaggaccacagctgtgcaccacc

SEQ ID NO: 374797 - DNA, 603 bp, Homo sapiens
cctggcacattatctgacattagaggtgctcgataaatatttggagaagttaatatacagcatagaaaatcaggctgaagcattttatttaccgtggttagtaacaaggaagtgctgaaggacttagtgtagagcaaggaaatgaccaaagcagtaagtatggatcattactctggtagcaaaatgctgggcccctattccaggccctagctcccagatgacatttctagccacaccctgggccaaaaggaaccccactgccttaaagggaaggacccagcactggtaggattcatcacctgctgactaaagaccctgaataacaaccagaaatatccagggagtatgccatgggccctgagctctgagacatgctggcttcaggggagatccagcatattcccagctgtagtggctacggtaaaagactcattctgtatyagagcagacggaatctagaaagacagccatcatctacaagttgggtttaattcaacatttattgaaaaagaaaaggcagaaaactaaccatggattctcaataaatgtttgtttaatgaattagtaagtttggtgggaatggagggtgggcggcagacaaga

SEQ ID NO: 374798 - DNA, 591 bp, Homo sapiens
attgtgtgtaactagatgcattcttgagtcttggaattgaaccatattgatatatgttgggaagctcaaaatttatgacagaagaataagaagggaaaggagacagatgagaaactggaaaagaaagaggaaggagactatgggacctataaaatgagaagaggccgtgagaaaattatgcctaagcttttaacagcttagataaattayggtaagaacatttaaatacttcattttcaattcatatttaatatagaaactatatgcaagtgattcgttacaagcttagaaacacaaaagtgtttggtctaaaatgagaataaaaatacattagaagttcctttgtttttgcaaggctgttagatactttaggacttatagtaaatatatactcaattagaccttcctgcagaaaagcatgaggcttcagataagctttcctataagtaaactaattagctggagagaccttttgcagtgaaataacttttttatgcttaaaaaaattaagtcctctattaggtgattaaacattttaaatacatttttaaaaaccaattaaaggcaataactgaaaattgtcatctgtta

SEQ ID NO: 374799 - DNA, 537 bp, Homo sapiens
tgcatccaggcctagccgccatatacttttgagtttctggcttctaaagccacttctgcacttcgataggaagccacactgtgaagattgtatctggctcccagatcaactgccaaggaagctgcatgaaacaatgcagaagttatctccttgtagggtgaactgtgatcaatgtaataggagatgggaagacaatgtcccacacctcttccctttcacaaactgttccaaaacataattctccatatggcctgtgcacatgtggccatatggatgcacctgctaagcaaccagctatatctctgaaataccagaaacagtgaccaayccatgaatatatttccttgcatttcttcctagtattccctgcctcatgttctttctttctcactctcactgtctgggatggtacctcctaataaagcaccagcactcaatcattgcctcgtgctccatttttcttgagaaactggcttaaggcaaaaaccattgctacagtccaaccctctctgtatggatgtctacaacacaaacttg

SEQ ID NO: 374800 - DNA, 569 bp, Homo sapiens
gtgttcaggggcctacagagaaagaagtacactccataaacaatgaagatttagcttgctcaagatagtcatttattacttttacttattttcagaatcaaagttctggggagctcattgagggagtggggatgggcagaataccacggcaaaaagaaactttgcaaactatgaaattctgatgctctccaaggtaacttctgagtcacttgctgctctgtttaaaaagtttgcttcctctgtatagcaaatctctcaaatatgtggtccacagaccagtggcattgatgtcacctgggaactttttagaaactcaaatcctctgaccccatctagactaacagcatcagaaactctgggagtggagccaggcattctggtttaaccagcctgccaggtaattctgatacacactctagagtgaggattcttgctttgaaagttatgtggtgcatgygcactggcttctctttgttctaataactattaatacaattgtagacattaacgtgaatattatttatgctatttaaagtccttttttagtcctgcttctaaatttactgatt

SEQ ID NO: 374801 - DNA, 558 bp, Homo sapiens
tccctcagttgaaactgtaggaaaggattggatatgcaggaaaatagtgaaaagtagtagaaacctagaaataaacagtctctagctggggtgaaaggtatattcccttattgaactaccctaaagacttaaagatcatgtctgaggtaacctgcatctgtactttgacaataccccttcccccggaaaacctagtcataaggaagcgtaaggatgccaaatttggaatcagaaaagttgagtggtagtctggctcttccacttgtctatatcctttacaattcacttaaatttggctgaaccacagtctcctcactttaaattaagtgggttgaactaattatttcttgggtaccctccagttgtaactgttgctatgattctagatgaaatagatagtatttctgcggactcaaagtgagtgggctatcagttcaatgggtgtttaagcaccaataggttcacaaaggagaaatrgatccttccctgatttttaatcttattatttgctcttctcccaagtaggagaaaacaagaagaaatagccctttcctgtcc

SEQ ID NO: 374802 - DNA, 583 bp, Homo sapiens
gggaagaaattgccaaagtatgaaatctgaggaccttgattcagaaactatatgactctgaggttagctcaatgggaaraaaagaacttgtttgactactccaggcactgaaggctgtgacaagcaaactaccaagggtagctattctgttggataatcaatacaatcttacattatcagactgccacagctgtatattcgtttatcatattgccttctatgtctctaaaatatttaagtgtagaatcacaaagagaatacagatgctgtcctcttcccaaatcattgctgatcaggatacttggctaagactccagaacaaagaaatagcatttatgcacataacatgccaaacattgattttaacacccacatatgctacctatgtacagcagagaaacattagctccaggcatataggaaatggctcctaactgagctacctacagtttctacaacaaaattgttttttttttttttgagacagtatcactctgtcacccaggctgagtgcagtggcacgatcacagctcgctgcagccttgagctccccaggctcaagtgatcctcctgcctcagcctc

SEQ ID NO: 374803 - DNA, 631 bp, Homo sapiens
atttgtgggaatgagcacaataacgtaaaatgaaactatctttaaaagtaataaaattactatatacagaaaattcaggtgaacacctgtagtcttagctacttaggaggctgaggtaggtgatcgcttagcccaggagttcaaaactgcagtgcactgtgattgagcctgtgaatagccatagcactccagcctgagcaacacagtgagaccttgcctcttaaaaaaaaaaaaaggtgatacaaaatggatcatagaactaaaaccataaaacctctagragaaaatatttgtggccttggggtaagcaaggtatttattcacagacacaacaccaaaagcattctctctctctctctctctctctctctctgtataaatgtctgtgtgtgtgcgtgcgtgtatatataatgtatatttaaaaatttggcctcattaaagttaaaaacatttgtgctccaaaagacaccattaagaaaatgaaaagataagccacacatcgagagaaaataattgcaaataatatatctgattaaggacttgtattcagagtatgtagagtacttaatacgaagacaaaaaccccgtttaaacaatgggaaaaagatttaagtagacatttcaccaaata

SEQ ID NO: 374804 - DNA, 522 bp, Homo sapiens
tttcttttgcgtaaagaatacccagcacacaactatggctactttgagtgattatgggactctgatgcctgaattgctatattttattatatgtatccttctattctttcaatattcaatcaaatgtttactttttgtataggattgtgcatgttatgtattaaagtactcagttctrattactagaatttatgactttttttttgtggaaataaggtatgtgaaagctaaataagatcatgaataaataatacctcaaggtcatagggcaatatggcatgctgttttaaagtatgggctttggagtctatatagaactcgcttctaatttcggcctttgtttgtgactttggacaagttgctttgtcctcatctgtgaaatgtgaatgacagaacctacctaatagagttgtcatgaagaagaaatgagataacgcacatcaagtcctcagcatagtgctgagcaaataattccatgcacatgggcgtacacaaacacatacaactgagtattactctgtg

SEQ ID NO: 374805 - DNA, 626 bp, Homo sapiens
ttcagaactagaactggcataattttctccaagaaacaaactctacttcctgtgacaatgaacctgttcttaaaattctgaatgggatacagctcaatttgcaggtgttcaggtataaaggtcaaagggcatttgaccccccaactggcaattgttgctgtggtaggtaacttcagtctgctagttatatcattctattagataagctgccagagttttcagctctgaattaccgaggtaggctcaagtgaatcaataatttatacagatatatctcattcattctgatggtataaagatacatactaacagcctgctgcagccccrgaacaaagccagaaagacattatttaagaagaaagagggaaaaggaaacctattatctatgtgaacaaaaccatgacgtaatcgtgacttaatggcttgttaatgttatttttcaactgctttaacaaacaccatgatgagataaacaagctctttgtgaatctcaataacgtttctctgatgaatgttaagacaacatttaaaactctcagattaattttaaaatagaatgatattttacataacaatataatataaaccaccggaaaaaattcacacacctaagaagtttccatgag

SEQ ID NO: 374806 - DNA, 494 bp, Homo sapiens
gggtattggcagtattactcrcttttatatataattcatatatccggactgttgcaaaatatgaacaaaaagtaatgaccattttggagtacttcagagaaaaattttttttggacttagaagttacatagttaatagactttggtaaagagaaattaatttatagaggacccattttaactgtttataactttcctttggtctctgcttcattgtcaggagtagatactaacatgattaagaattcagctgtctcctcaaaagaggagagtcctgcctatgtgttggatggaacattcaatttaccacttttttttcatgcccttcaaaaggcttaagtattttattacagtaaaaatgtaagagagcatttttttcctaaatatctcttttcatagtaatgaccccaaaacaaacactgagtgagccatacaaaggtgtctaacattaatatgcaatactaaggagatccaaatatgcccagtgttcagctg

SEQ ID NO: 374807 - DNA, 542 bp, Homo sapiens
gtacagacaggatttgatgatagattaattatgaggggtaaagaggaatcaagtcatgtccctgagtttctattcgagaaacagagatggagaagtctaagcatgaatcaggtttttggggagaaaagcaaagttctctttgggtgatgatgtctatgtggcatctaaatggaggtatcaaacaggcaattgagcatatggagctgattctcagagaagagctacagactgaggatgcatattcaggagtcaccacatatggatagtctttaaaatcatgggaatgaataagaatgtagagaaaggcaaagggggcccattacagatcccaaatgtttggagaccagatggaagagaaggagtcagcagggaaattataaacaagtgctcagggaggatctactgtatttgggtcatttaggtgtctttggttaatgcccttagccaaagctgtttttatggaaatgtttttcaaaagggggcctatatggaatggtgtaaatcsggaagtagagatggtgcatgcagacaaatctttagtg

SEQ ID NO: 374808 - DNA, 541 bp, Homo sapiens
ctttccccatttcttgtttttgtctgacctccataatcaatttctaagtataagcatgtattcagttttttttctaaaacagaaaataaaatgtacccatagatttatgaagttatttttattctgtgcactttaaaaaatcctcctgtgcatgggcttctttaacttgttttttgtaaaatgtatcttggtaaattttcatagtagtatatgggtgcttgttattttttatctgctgcataatattctaatacataattaccagattctattaactattktattttttatgattgacatataatttgtacacatttacagggtacaatgtgctgttttcttacatgtgtacatgtgtaaagatcaaatcagggtaattagcatatctatcaccttacacatttatcatttctttgtgatgagaacattcaaaagcctatcttctaagtacttgaaacatgcaatccattactgttaactctagtctctactatataatagaacacagaacttattcctatctaagtgagtttgtaaccat

SEQ ID NO: 374809 - DNA, 594 bp, Homo sapiens
  misc_feature (1)...(594): n = A,T,C or G
agacaagctaaaatttagtggtgttttgcttgttggcttgttttttcacaggccccacagaatgggaaaatcataatcagatcttaggttgagatacaaaaagcaaaagatgaagcattgtttgcagatcagagtttggcatgtggatctcatggctgctgcaggagaatgcagcaatcctgccgtaagagtttagaatcttctggcctacagaatacagagggaaagcaaatctgagaacatcccaaacagaaagtagctgaataatagaacctgtggtagaaagagatwagatcctgtagctgggaacccagtgaaactctctggagaaggtagaatgtgtgcattgcacctcggcagagggtgtgtaaagtacagattcacagggaaagaagcagggctctccaaacatggacagcgtgagcaagaactagagatgggcgtgtgcatatgtattcaagagtgaggataagaaggaaatgcattcgatggactgaactgagggaatagtaaacaactagataaataaagctggaccacccttagagggtcttgagtgcctggctcagacattantatggacaccataaacag

SEQ ID NO: 374810 - DNA, 565 bp, Homo sapiens
gagaagaaagccgtcaaggaaggcgaaggcattataactggcctgtagtgtccagctgtattgataccacagagctttggagccaattcaagactggtcaaccccaaagtgggaaattaagtttcagggctgccagacatccctgtttgcagatgtaaatgtaagtgataggataggtggtyttcaaaataaccatgctaccatgaaggtcagagtccccagcacaaatgtgaggccggggataaggttcagcacttttggagatggcattaatttgtagcccctaaaagcactttagctcctctcaaagtgtagcttacatattgcaaggatctgagtataatataccttaattaacagtgctgatcaaatgttccttcctaatttgcagaacacttacaatatcacgggtgttgaactacaggggatcatttggctttttttttttttttttttttttttaagtatcagatacatagcagtttacatcattggattttatcccctggtttagatccaaagacattattggccagtcttaatgcttgcttgttagtaatactgt

SEQ ID NO: 374811 - DNA, 565 bp, Homo sapiens
gagaagaaagccgtcaaggaaggcgaaggcattataactggcctgtagtgtccagctgtattgataccacagagctttggagccaattcaagactggtcaaccccaaagtgggaaattaagtttcagggctgccagacatccctgtttgcagatgtaaatgtaagtgataggataggtggtcttcaaaataaccatgctaccatgaaggtcagagtccccagcacaaatgtgaggccggggataaggttcagcacttttggagatggcattaatttgtagcccctaaaagcactttagctcctctcaaagtgtagcttacatattgcaaggatytgagtataatataccttaattaacagtgctgatcaaatgttccttcctaatttgcagaacacttacaatatcacgggtgttgaactacaggggatcatttggctttttttttttttttttttttttttaagtatcagatacatagcagtttacatcattggattttatcccctggtttagatccaaagacattattggccagtcttaatgcttgcttgttagtaatactgt

SEQ ID NO: 374812 - DNA, 565 bp, Homo sapiens
gagaagaaagccgtcaaggaaggcgaaggcattataactggcctgtagtgtccagctgtattgataccacagagctttggagccaattcaagactggtcaaccccaaagtgggaaattaagtttcagggctgccagacatccctgtttgcagatgtaaatgtaagtgataggataggtggtcttcaaaataaccatgctaccatgaaggtcagagtccccagcacaaatgtgaggccggggataaggttcagcacttttggagatggcattaatttgtagcccctaaaagcactttagctcctctcaaagtgtagcttacatattgcaaggatctgagtataatataccttaattaacagtgctgatcaaatgttccttcctwatttgcagaacacttacaatatcacgggtgttgaactacaggggatcatttggctttttttttttttttttttttttttaagtatcagatacatagcagtttacatcattggattttatcccctggtttagatccaaagacattattggccagtcttaatgcttgcttgttagtaatactgt

SEQ ID NO: 374813 - DNA, 547 bp, Homo sapiens
tttggaaaatactgtatcttatctactgtcttggagaatcctcatgcacattattatatcaaagrctgtgagaagtccttcagtaaagaaactgatttaactttctctcatctagcttccttcaaatatatttgaatctaagcatgcccctcctgtatgcctgatgaccatctacagaactatagcaatctgtagaaaacatgttgggacaccaacaatgccacttcctttttcacaggggacactttgtgttttggccacctgcccaaacagtgcctgggaggactctggaagacttgttcttggttgagttggaaaattagccccagtctcctgtatttgtgtttgctgcccttaagtgaggccatagcatagagtcaggtaggatgggcaggcacaattccccacagcgcttttcacaccactacagcccagtcttggttcttggaacaggaaagggacaaggcatttgaactagacacacatggatggttgcatgaagccccagaattcctggtcagggagttcttacagaccctggtcctgg

SEQ ID NO: 374814 - DNA, 554 bp, Homo sapiens
agcctaaagaggcaccaagaagggtttccatggctccaaggtgctggattccttgctgattgtcctctctgggctttattttctcacctaaaaaacaagaagtgaggttagttaaggcaacagggcacatttttcagatgaaactttactaagactcctaaatagaggaatgaaatgatgccctggttgctgtctgttgtcccctctagccccttctgatgcaatagacamccccgaggagctccagagctccctgggccacagtttgcaaactgtaggagcccctttagaggctttccagcccagcctccaagggtcctggaccctggggatagccaaggcagcctccctctttatccctcagggacctgtttcttgttccttttaaatatcctgttagccatttgtgattgaagtcagcaagcatctattgaatacctactggatgcatgcagaggggctaacactttctgagcaccagctgtgtgctaggtctgaagtgggctcattttatcaggctatttccccatcacaactggctgtcagctcatttt

SEQ ID NO: 374815 - DNA, 593 bp, Homo sapiens
gcactaagccagcacattggaagatgtgacaaagaccattacattgaaatagaggccacttctctaataaggcaactttcctttaaagttaaattgagaaactaagtgactggatgatatccttttaatggctgctgagcgtaaatgcattttgagagcaaatgctccttcaggaatgatcatttctaatgttctttcaagtcgtcaatttggagggtgaagaggaatgtgattagaagaccaaactaacaaagaattttgagaccagcaaaaatgttgactgcacggrcgtataatttaaactgccaaagtgctagcacatttttcatgcaaatatacttaatcagtaataatcctgttcctcaagaaggcttctaatatgttttattgcctttttagatttttcccccttcattttctaaaatataatcatagttcagcaactccatctgtgaacgatccagcgatgaattctgggtggtaatgatgtacaacgagtgaataacaattccttaatcacgctgtttcctctgttgtcgcctcatttgaattcctggttttcagaaaattcaattatagttgcaatttcatca

SEQ ID NO: 374816 - DNA, 501 bp, Homo sapiens
gctatgtttgtgtcagatattatgttccttgttgttaaattccatcagcctggaatattgttttaataaaaaaaaaaaaagacagcattaagcccaaatctagctccaaagcatgggtgagtaatgtgtactttgactgtggttttcatggagagactgaagaggaccttgtatcctatctttcgcactgtggcaaagccccttaagcatagctgctctggctgtcacgttccttaccctcaggtggctgccacgacatccccacaagtccttccaccaaccctgcgtttcccagcctcctcccrtttccagtttacctccttattcttttttcttatgtagagcaaatttaggcttctctcaacttcactgaggaacacagatgttgtccctgggacacacccacattagaaggggaggagtggaaggaaacaggtgggcagggaatagttgagcatggttttgaagtatgaataggagctcaccacgtggaggagagag

SEQ ID NO: 374817 - DNA, 563 bp, Homo sapiens
gaatgatggattgagatgggcaagaatggaggcaggggagtcaggaggctgacacagtgaacaggggagagaygatggggatttggactaggaaaaggagtccaaatcctttggatcagtatctaccctgccccacccctagccccagccgaaaggattctgcagttttctgagtcttggtctggtcttcactgctctcatcattgctaaaaggcctgaggtgtgtggagcctcggggtgggatgcaccctttgttctcgggcagccttgtgtgagttgccaaggctcagacacacctgagttcacatacaggctgtattccctactctgggggcagctcacttcatttccataggcctcagcatccctatctataaaatgggaacagtaatgcctccttgtgggaaggatgaaatgtgacaatgccagcccaatgggacatgtgcaaagtaggccttcgataaatggcagcttcgtgcctgctcttcattcctcatccctccctcagtctcctgctaccccgcacttgggtaaggacagggaacccaagagcatgtctgaga

SEQ ID NO: 374818 - DNA, 586 bp, Homo sapiens
cctctcgatttggaattaagttacattacagagaaagtgtgggtccgtgtttttctctctgwttgggaaaaggtgggttggacagaggaaggatggcccagggttataagcttggctccagtacagccgggagacccccaggcagcatgagtcggtgggactggacctgcctggctggtgtccagaggggcccgtagccagtgggacggtgctgcacgtggtcgtgcctcaagccctccactgcaccgggcgccctggccaaccctgccaggaagtaaggagaccggggaggccactgagggcctggacctggctgggtagtcagaagtgggggcaagtcttggctggcagcccctgagatgtgtagaatgtttgaaaattcgcctgtgggttgacctgaacccaccgggcttgaaaccaacggtccaaagtttggagtgtggtcttaaggaaggagaccactactactcctgctgccttcctcccaccaccttgcctagttcacaagacaggaggagagaaaatgcaaaaagttggaaaaaaaatgcaaaagtaagataaacagacaaccttggcaccaccaccc

SEQ ID NO: 374819 - DNA, 526 bp, Homo sapiens
tcttctgctttgcaaactccggacagtcagtgtgcaraggtttgtgggatttttttaatagacattgggggtttaaaaccatttgactaattagaatggattgatgtgggaaaaaatgtcaacctaggaaggcacaccagagaaattccaaatggggtttaaaatggaaatagaaaagttgaatcaggctacttgttttcaggtgctttctcttcacagtcattagtttgatctgaactacatcaaaatggccttaatggccctagtcacaagagctattacaggttgtctaacttggttaaattcttttctgctctaaattgttaatgattcagcatttcatggcttgagtcaggtgttctcagtgggcaccctccataaaggtcagttgctttccagatatcagcatccaagtttaaggtcgcagattctgctcagtgaccttgagagaataatactttattacgcacaggctcagaaagcacagtttcatggagggagacctctggttggcaatgacaggaaa

SEQ ID NO: 374820 - DNA, 618 bp, Homo sapiens
atcaagtatctttgtgtttttcaaaagtattttagccttaattatactttttaggagaaaattatacttttaggagaggaagtttattgaacttgccatagtctccaaatttaccagggaattaacaaaagtggcccaaggtgctctctattaaaataatttaatacaaatagaatttttaaaagatataatttccatttgttgacagtggtgaaaacaggaagtttgtgtctgttgattctggggtttcactttgagtaccatggctaagtaacagatgagagccaaaattaatcatcaataaaaaaaatgactaaaaatataaagcatgcctcttcaacagtttttcataagatataaatatcttgaaaccactaaaatgaaaataaaacattacagagaaaaaaaagtcatgtaaaatcccaaacctctattttaaaaaataaatcagtgttatgrggataatgaacttaatacttactatttaattaaactttaagctaattagtctaattaattcatctgataagcatcttaatattgccagcattaagctgaatcttctagaatgtggttttaaatttggagggagtaatttaatgatgcttaatattggtt

SEQ ID NO: 374821 - DNA, 603 bp, Homo sapiens
caccccttgtcttctgccatctttctctttgtcccctttttcctctgtctttagtcatcctctctttctttcccattcccgaggatattttgccttcttttccaaggctaagacctctgtgtctagaaagaagttgaaattgagagctcttcagtcagatttaccagttcctggtgactttaggcaagtccctgggcttcttcaagtctcagttttcacacctatataaagrggggtaatagcccctctttgctcacagctgcaagctctgctgttgtgttttctccctagtgaatggggcttatattctcctggaagtaggaagacaaaaactaaacagtaacataataaaaaatgcttacaaaaatatacttaacgcttcttcattcttcaaaaagaagtgagtttatttgactttgactctgcatcttaagccatacttgcttttttttactttggctacattgcaaaagaaaaataaaatccttattttctttctcagtgccctcaccacccattaattcactccttaacctgctacaaaccccttttttccttcctttccttaatttccaaattcaacaccctttgttcatttttctt

SEQ ID NO: 374822 - DNA, 589 bp, Homo sapiens
tgcatggggcaccttttcgagaagaaatcagatgaaattattcagagtcctctgccagtggagtcacactgaatgcacttaattccctcaacaactaagtgtgacaatatgtgtgaaatgttgccaaccagaggaactttttttattgaggctggccacgtaggcagcctgtgcctgggatataccaaaatcccagattcccagaaggaaaacacatgttcagcataaaccctattgtcgaggaatagcttgccatttttatcctttctgagaatkctgagaaactttccaaaatccaacttcccaaactccagcgaaagccaaccttataagcaaccctttcaaaggacagcagtcaggcccaatacgttaactcttttcttgcccattttgttttcattatctgtcagtgcactgaaagctggtaattatgttttcatttttaaatgagaaaaccaagaatttaagtaacttaccccaggtcacagttcagaagaggagtcaggatgtacccctaagcttcctggaaaccagcctcctttttaaactgccttcaagaattgatgttctctctgctataatttcagct

SEQ ID NO: 374823 - DNA, 589 bp, Homo sapiens
tgcatggggcaccttttcgagaagaaatcagatgaaattattcagagtcctctgccagtggagtcacactgaatgcacttaattccctcaacaactaagtgtgacaatatgtgtgaaatgttgccaaccagaggaactttttttattgaggctggccacgtaggcagcctgtgcctgggatataccaaaatcccagattcccagaaggaaaacacatgttcagcataaaccctattgtcgaggaatagcttgccatttttatcctttctgagaatgytgagaaactttccaaaatccaacttcccaaactccagcgaaagccaaccttataagcaaccctttcaaaggacagcagtcaggcccaatacgttaactcttttcttgcccattttgttttcattatctgtcagtgcactgaaagctggtaattatgttttcatttttaaatgagaaaaccaagaatttaagtaacttaccccaggtcacagttcagaagaggagtcaggatgtacccctaagcttcctggaaaccagcctcctttttaaactgccttcaagaattgatgttctctctgctataatttcagct

SEQ ID NO: 374824 - DNA, 581 bp, Homo sapiens
atggtcttaccaccttactcctctaagctggaggagtaaggtagtaagtcattgtggttttgatttgcatttccctgataattagtgatgttgagcattttttatgttcattggccatttgtatatcttgagaattgtctattcatgttctttaattattttttgatgggattatttgtttttattcttgctcatttgagttccttatagattctgaatattartcccttgtcggatgcattgtttgcagatattttctcccacactctaggttgtctctttgctgattatttcttttgctgtgcagaagctttttagtttaattaggtctcatttatttattttggtttttgttgtatttctttggtgttcttagtcatgatttttctgcctaagccagtgtctagaagaattttcctgatgttatcttgaagaacatttatggtttcagctcttagatttaagtatttgatccatcttgagttgatttttgtgtaaagtgagagatgaagatccagttcattcttctacttgtggcttgttagttgaataaggtgtcctttccccactttatgtttttg

SEQ ID NO: 374825 - DNA, 538 bp, Homo sapiens
cattcaagagcagattatttaatttccatatatttgtatagttttttgtgggttctatttgtgggtgatttctagttttattccactgtgatcagagaagatacttgatgtgattttgattttcttaaatttattgagtctttttttgtgacttagcatatggtctatcttagagaatattccacatgctgatgagaataatgatattctgatctgctcaatccatttcttctaggatatagtttaagtccattgtttctttgttgastttctgtcttgatgattgatctagtgttttattgaagtcccccagtgttattatgttgctgtctatctcatttcttaggtctagtagtaattgttttataaatctgggagcttaagtgttcggtgcatatatatttaggactgtgataccttcctgttggacaaattttttaatcattatataatgtccctcattgtctttttttttttttttttactgttcttgctttaaagtctgttttgtctgatctaaaaatagctactccagctc

SEQ ID NO: 374826 - DNA, 485 bp, Homo sapiens
tcccaaggaatttgactcacggctttgctagtgtaggattctgttccttatctctgatgctgtagaaccttaggagttataatattgtggaagctaaaagggcccttgaagatcatccaatccactcctgtgatggagatgaccagatgtaaagaggcttgcctaagattacaaagcacgttaatgacagagactaaatcagaatccacatttccgtgtgagtccattgcctttcctattatatcatgctcctgctgcagtggctaaatttaccctgtgaagaagcaaaggtattcttgctctggtaccttgaaggaaatgtccaaactctctggttttataaagatttagaaacaaatcaaatttttgatagttgacatgtaaccacccctcccagagacmcctcctttatagctaaccaactcagccaagtctgatacatggaaaggtgctcatgaaagtgtcagggtgctgattatttcaag

SEQ ID NO: 374827 - DNA, 436 bp, Homo sapiens
gcatttgggttgtttctgctttttagctattataaataatgctgcgatgaacaacatttgtgtacacatttctgtatggcatatgtttttaattcccttaagcatagagtggaattgctgggttatatggcaactccaggtttaacttattgaggaactgctgtactattttytgttatggctgtactatttggcatctccaccagcaatataaaagggttctagttttttcacatcctggccaacacttattattcatcttttttattattgccatcctagtgggtgtgaagtggtacttcattgtgttttgatttgcatttccctattgatgaatgataattgagcataatttcctgcacttattggccatgtgatatacctccttcagagaaacatctattcaaatccttttctccttttttaaaatcagttt

SEQ ID NO: 374828 - DNA, 551 bp, Homo sapiens
cttttcatcagggtagatgagttaacttggcaaggatacttggtagtagtttgacactcagcatcagtattccactttctccagtagcccttcagtgcttcaggaataaggaaacatttmaaaactgcattcctcagattcccatgtacgacatgtgcctgtatgtttttaaacaaatacatatataacgtatatatagatttactatattttcttaatggtgacatagttttaatttattcttcatgcattcaacacatatttattatacaccctttatgtaccccatactgttctggaaacatggtctctgcattcatggcacttacaagctctctgttatgaaaacagacaataagtacattttaaagtgtgtaataaaatatgtataaataataaaaatgtatacattagctagcaaaattaataacaatattgatatagtaataatccaaagcataaatgtaccaatatttacataacatccctctagtgataaacatttaggtttttttcagatttttgcttttaaaccacaaaatgatgagcat

SEQ ID NO: 374829 - DNA, 569 bp, Homo sapiens
taggtgattctcctgtctcagcctcccgagtagctgggattagaggcacgcaccatcatgcccagctaatttttgtattttcagtagagacagggtttcaccgtgttggccaggctgatctcaaactcctgacctcagatgatctgcctgccttggcctcccaaagtgctgggattacaggtgtgagtcactgcacccagccttctaccttcttattgactgtttccttttaacgtatttgagactaacatttcaaaagatagtaacaatttcacaaactcttgatagcagacacaggttttggaaatagttttgccaacatgaatagcracagcatcatgtgattctgcagcgtttccaccccaggaatcctcagagtgtgtctctctcactattgtctgggactgtgggtgttagaagttggactgagctgattaaaagctgaactcatgatcatctattgaagtttggtttgcaggtctatgttttattccagcctgggtcactgctaattgggtgtaattaacaccctcatgacatgtaaagactccaggattaggagcaacggg

SEQ ID NO: 374830 - DNA, 583 bp, Homo sapiens
accattatgccctgtgcctgaaagaaagttgagaacacagaaaggatgttaaacagatctagacaggattctaaggatgggataacacaggtcrttaaaggtctgcagggaatttcacggcgttttattgggaattctgtagaattacagaacagattcttcagtgagattaatttacactccttctacttaccatcaaatcattccttaaatctgagctgggaaggtgtgatttggagcacaccgtttctgtacagatagaaccatataaaatttctaatcagtgactattttggatgcccagaaatggaagtttctgtagcattcaatctaatacaatataacacacaaatgagtgcttatttgctattctgagaacacagcagtgtggccaggaataattcatacttcctgaatcccctaaccaaattttccagtcctgctgtggccatgttgccttaatcaaaattcatctttctcctataatcttggtgtgcctcatagaatataaataccctattgggaaacctaggtgtttaaaaatctgataatggaaacatattttaaaagtcacagtgttctc

SEQ ID NO: 374831 - DNA, 583 bp, Homo sapiens
accattatgccctgtgcctgaaagaaagttgagaacacagaaaggatgttaaacagatctagacaggattctaaggatgggataacacaggtcgttaaaggtctgcagggaatttcacggcgttttattgggaattctgtagaattacagaacagattcttcagtgagattaatttacactccttctacttaccatcaaatcattccttaaatctgagctgggaaggtgtgatttggagcacaccgtttctgtacagatagaaccatataaaatttctaatcagtgactattttggatgcccagaaatggaagtttctgtarcattcaatctaatacaatataacacacaaatgagtgcttatttgctattctgagaacacagcagtgtggccaggaataattcatacttcctgaatcccctaaccaaattttccagtcctgctgtggccatgttgccttaatcaaaattcatctttctcctataatcttggtgtgcctcatagaatataaataccctattgggaaacctaggtgtttaaaaatctgataatggaaacatattttaaaagtcacagtgttctc

SEQ ID NO: 374832 - DNA, 526 bp, Homo sapiens
gtactgaaccctatacagatgctcctcaagtttccatggagatacctcccaacaaaactatcatacgttgcaaatattataaattaaaaatgcattcaatacacctaacttaccaaacagcattgcctgyggatacactgacaaagggatgattcatgcaggatagagagggacattgtgaaatttcatcatgcttctcagaatggcacacaatttacaacatatgaattgtttacttctgttattttctatgtaatctttttggactgcaattgactgtgggtaactgaaaccacagaaagaagaaccatagacgaggggactactgtgtgttttttataaattgttttctttgaaagagattgtaaactccttgggagtgtcatctgtatcagtggctctcaaactttaatatacaaaagaattacccaaggactttattaaaatgcagaatttcaggcttcaccctggggatatggtgattcattcgatttggcattgatccacggaatctgttttaaggagc

SEQ ID NO: 374833 - DNA, 466 bp, Homo sapiens
gggctcctttcacccagccaggagttgagctcagyctcagacctcaagggcagtcactgatggcgttaatgccccaccaatgaggttcttttgagatcaggcacctgtgcaggtggctctgctccccctgggctactctgagccacacgcatctttgtgagacctcttgcgattactgagttgagctttcagtcctgaaaggaatccatggagctatcctactcagcaattctgtcgcttggtgtctgtgtttaagcagtttgggggaaacaacaggccctccattcaccttctacatctggctgaatcattctccagttgacttttttttgtttttgagacagagtctcgctgtgtctcccaggctggagtgcaatggtgcaatctcagctcactgcaacctccgcctcatggtttcaagcaattctcctgcctcagcctcctgagtggctgggattacaggtgt

SEQ ID NO: 374834 - DNA, 466 bp, Homo sapiens
gggctcctttcacccagccaggagttgagctcagcytcagacctcaagggcagtcactgatggcgttaatgccccaccaatgaggttcttttgagatcaggcacctgtgcaggtggctctgctccccctgggctactctgagccacacgcatctttgtgagacctcttgcgattactgagttgagctttcagtcctgaaaggaatccatggagctatcctactcagcaattctgtcgcttggtgtctgtgtttaagcagtttgggggaaacaacaggccctccattcaccttctacatctggctgaatcattctccagttgacttttttttgtttttgagacagagtctcgctgtgtctcccaggctggagtgcaatggtgcaatctcagctcactgcaacctccgcctcatggtttcaagcaattctcctgcctcagcctcctgagtggctgggattacaggtgt

SEQ ID NO: 374835 - DNA, 528 bp, Homo sapiens
aaaaatcattaggggattcatcagagcagcgcagtcagtttatcgaagtcaggttgaatatgtgtttctgtgaaaaggtttgcctctccagctatcagaaatgatcactaataatgcaaaacaagagctaatccatctgtctattttgggagggttcgaggtgcctttggacatccgcattgccgtgtttccctttgttgcaggttccacctgctgcaggtgagacacgtgccatgtcccccagcctgttgcctctcacactgggtttgattgcccagttgggytctcttggcagagctgtctccatgagtgccagaatagaaatatacagatggcatagaggaacaattttgacctgcaggatctgttctgatccacaggctgaagtgcatttatgaagacaggatggggaaaagtacccattttccacttggtcattcaaccccctgtgtggcatccatactgaacgtgttgaggtatacagcacaatagcaatggcagacagaagaagctgcaggaggctgaaat

SEQ ID NO: 374836 - DNA, 457 bp, Homo sapiens
gagagcgattgtgctaccctgccaaggaaaccaagatttacccacatatctgtgcaacccatggatcagaagatacccttgtgagcccacgccaccagggtcttgggacccaagaacagagctgtgcagactctcagcagctgctcgagtygtggccagcagcagcatgctgaagactgcctgagatgaccaagtttccagaggggaaggggagctgccatcactgtgccccagccgttttcccctgctggtgccctggagactaggtggtttggatgggaaagaagtccccacagtgcaacacagcagctgtagcagattgtggccagactgcttctttaggtgggactgggctccatccctcctcaccaggcagggcctccctgtgggaatttcagcaactgcagccagaggtttacagaccgaactctaatccacctggaatggacccccaggg

SEQ ID NO: 374837 - DNA, 609 bp, Homo sapiens
gcccttaagagcatccatcgtcgtgttcagtgtttgtccaaaagagaaccaactaggctttttattcctgagactgaactgaatctccaacacagtgaaaaaataatacaatggcaaactcagtgtgttagtggtttcatgggactgaagatcagaagaaatgctcttagttctttcctacagatgaataaattacaaatttgggcttttaaataaacatgtctttagttcaatttttttttcctgacatttttcagatatccagcatttgttccaagtaatctgttttgtgttttgattctaactgtaagaatgttactgcctgattaagtccgtaggatctagacactggccccttgggtcccactttctgactttatgccatcggttttttaagtgacatgtccatttttttatcctgcaaaaaatataaartgcaggaaattattttttgcccccatggcctcctagcacagaaatgggcacattattggcattaggtaaattatttgattaaatttcactgattaaaacaaggagttagagtccttgttagctcctctatttcctctgcaatggaattttcctaaatgtgttctacagaagatt

SEQ ID NO: 374838 - DNA, 373 bp, Homo sapiens
tttccttgcctaattgctctggctgtgacttccagttccacgtgaaatagaagtggtgaaagcaagtcttcttgccttgattctaatcttatagmaaatgcttttattcttttaccattgagtatgatattcactgtgggtttttcatatgtcttttatgatattgagatagtttccttctatttttagcttgttgaatgtttctgtcatgaaaaggtgttgaattttgtcaaatgctttttatgtatcagttgagatgatcatgtggttcctcctgcttcattctgttaatacgttatatcaaattgttgaattttgatacgctagattattcttgtattccaggaataaatcccacttggccatagtttat

SEQ ID NO: 374839 - DNA, 600 bp, Homo sapiens
tataccattttaaaaaatcctttacactgtatttttactgtacactttctatgattagatatgtttaggtacataaattcttatcattgcattacagttgcctgcagtatttggtacaataacatgctgtacaaatttataacccaggagcagcaggttataccatgtagcctaggtgtgtattaggctctatcatctaaatttgtacaggtgcactctatgatgttcgcacaatgacaaaaccacctaatgatttaatgatactaagtatttaaaactgtgaattattaggtaaatttttattttttttatttccataggtttttggggaacaggtggtgtttggtwacatgagtaagttctttagtggtgatttgttagattttggtgcgctcatcacctggacagtatacactgtacccaatttgtagtcttttatccctcaccctccacctatcctttcccccaagtccccaaagtccactgtatcagtcttatgcctttgcatcctcatagcttagcttccacttacgagtgagaacatacagtgtttggtttgccaatcctgagttacttcacttagaataatggtctccaatt

SEQ ID NO: 374840 - DNA, 563 bp, Homo sapiens
caacataaatctatttagccagtctatgtcttttaattggacagtctattccatttatattcaatattattattgataagtaaggacttgctcctgccattttgttatttatwttctagttctattattgtcgtctcttacttccttctttctttcctttcttccttttagtgaagaagattttctctggtgatatttttaaatgttttactttttattttttgtgtatgtgttgtaggtttttatatttgagattacaatgaggcttgcacataacaagtttaacccattattttaaactgatgactacttaatgattactgtaaaaagaaacaaactaacaaagagaaaactagtaaaaactttatgctttaactttactactcccctgctttataacctttgttgtttctctttatatcttattatactgtctatgttttgaaaagttgctgtagttattatttttgatatgttgattttcgtcttttcactcaagatttgagtagtttaaatacctcaattacaggggttataatagtctgtatttgtctgtgtgctta

SEQ ID NO: 374841 - DNA, 406 bp, Homo sapiens
tcagaacacagacttcttgatatttggaagacaggctcctttttgccggtcctggctcctgaaagctatgtgcaagctactccatgaacatcccgccagtgtgctgagtagtcaggggatgggtagctgctactgtgttaagagctgaaattgaccaaaattaaccacagtttactgttcaaccctcccctggaaatagcaagcctttagtagactccaaaataattacatcaggcagattctttcagtgaaattattgtctagttgaggagaaagatttctggtgcttcttaccttaccatcttcccataatcatctttctctatttatttttgtgtgaatgaatgaacagattatttgagtgcttgrtatgtttcagacacttactatgcaatccagtgttcaa

SEQ ID NO: 374842 - DNA, 638 bp, Homo sapiens
tcttctctgctccatgtttgctgacatcatgttagttatttgaagttagcaaatgctacaaacagagcttttatattttttatttttttcttgagagccagtktattgacctatagttacaaatgaatgtaaagtaacagttccatgccatagctagctaagggcatgagtaggaaaagaaaacagatcttctgacccctattccagggctgtttctgagatacccagtatcacaggaaggcaaaggaaatttgcacttgttgcatgcctacacgtaccaaaggtactcatgtaggttaggtggttttattctcacaaagactctgagaagttagaattctgtctccatttttcaggtgtagacactagtcagaaaggaaattttttggtcccaaaacatttatttattgagtggcagggccacagttctcagatacatagatccagctttttcccttctaccatactgacatttattttgtgaccttgaatgtcacttccttgaacataaatttctttactgatatacttagaaaaaggtaatccttagctaccacatagggattctaaaacccaagtgaaacactgtgtgtgtgaatacattttataaattacaaagtgctattaaaattacatta

SEQ ID NO: 374843 - DNA, 638 bp, Homo sapiens
tcttctctgctccatgtttgctgacatcatgttagttatttgaagttagcaaatgctacaaacagagcttttatattttttatttttttcttgagagccagtgtwttgacctatagttacaaatgaatgtaaagtaacagttccatgccatagctagctaagggcatgagtaggaaaagaaaacagatcttctgacccctattccagggctgtttctgagatacccagtatcacaggaaggcaaaggaaatttgcacttgttgcatgcctacacgtaccaaaggtactcatgtaggttaggtggttttattctcacaaagactctgagaagttagaattctgtctccatttttcaggtgtagacactagtcagaaaggaaattttttggtcccaaaacatttatttattgagtggcagggccacagttctcagatacatagatccagctttttcccttctaccatactgacatttattttgtgaccttgaatgtcacttccttgaacataaatttctttactgatatacttagaaaaaggtaatccttagctaccacatagggattctaaaacccaagtgaaacactgtgtgtgtgaatacattttataaattacaaagtgctattaaaattacatta

SEQ ID NO: 374844 - DNA, 621 bp, Homo sapiens
gaataatgctgcaaagaacatgggagggtaagcatctcttcaagatagtgatttttcctttggatgtatacacacaagtgagtttattggatcatatgatagttctatttatatattttttaggaattcccatgctgtttttaataatgatcataccaatttactttcccatcagcaatatgcaagggttctcttttctgtacatccttgccaatgcatatatatattttttgtctttttgatagtagccatcctaacagatgtgagataactcattgtgcttttggtttggatatccctgatgattaatgactttgagtatgttttcatgtmcctgttagccatttgtatgtctttgggaaaatattcatatctttgcccatttttattcagattttttcttaccaagttttatgagttcttaaatattttggatattaaccccttatcaaatatatggttttctagccagagcaattaaggaagaaaaaacataaaagtcatccaaatcagaaaggaagaagtagaactgtctctgtttgaggagtgtattaacttatacgtagaaagccctgaagacttcatcaaaaaaactgctagaactaataaatgaatttcata

SEQ ID NO: 374845 - DNA, 527 bp, Homo sapiens
gttcaaaaccatttatgtcatgaagcactttgtaccatgtctcttttgatttgacatttaaaaatggttttgacattaaaaaattttgtagatggagtctcattctttcactcatgctgggtgaagtagcctgatcatagctcactgcagcctccaactcctgggcttaagctatcctcctgccttagtctcccaaatagctgggattacaggcacacaccaccagaaccagctattgtttaaatattttgtasagaaggggctatgtttcccaggctggtctcaaactcctgtgctcaatagatcttcccacctcagcctcccacagtgttgggaatacagctgtgacgccactggccccactgtttttttttttttttggtagaatatcatttctttattaaaattgtattaagatgacagagaaaaaataaaaaataagttagttacactcatcttggcaatgacttatcctgagagaaagctcagcatgttgggtctccggacgctttgaaaaattgaaagaa

SEQ ID NO: 374846 - DNA, 541 bp, Homo sapiens
atgaggtattaagcactgttacgttggagaaagagaaaaaaatcaatgagatggcagtaaagcagtttatgcagagatttaaaaatatatgtaggggaagtcctagccagagcaatcaagaaagagaaagaaataaagggcatcsaaattgggaaagaggaagtcaaactgtctctgtttgccgattacatgagcatatacctagaaaactctaaaggctcctccaaaagactcctagatctgataaactaaattcagtaaagtctcaggttacaaaatcaatgtacacaaatgagcagcactgctatataccaacaatggccaagctgagaaattaagcactcaatctcttttataatagctacaaaaattttaaatacctaggaagatacttaagcaaggaggtaaaagatctctacaaggagaaatacaaaacactactaaaagaaatcgtggaagacacaaacaaatggaaaaccatcccatgctcatgaattgaatgactcattatcatgaaaatgaccatagtgcccaaagcaat

SEQ ID NO: 374847 - DNA, 540 bp, Homo sapiens
caaaagagatacctagaacataaaacccattagcaaacagattggcctctgtgcttgataattctgacctgccggatccaaggctttctagcggtttttcggaaaccagcctgaggcaaagctccaatttscctccctgagcacaggcagagcaccctggcactgtgatactacatgttctgatgccttcttcacttttccttttccagtcccatcaagccagctgcagggacagcaactgatacacacttctgcaagaatgaaactggtttttttgataaaagtttaggcctactggtagatataaccatcaccaagtaaattgacaaagccaaatggcatatgatagaatttccatctacacaatttgaccaaggcaaatttaaaagttcacattataattcaatcttttaggctgtcttttttttaacttttaggttcagaggtacatattcaggtttgttatataggtaaacttgtcataggagtttgttatacaaaatatttcatcatccaggtataaagcttagtacccaatag

SEQ ID NO: 374848 - DNA, 531 bp, Homo sapiens
gatcatgtagacaatcatttagcacaagtggttattaagtgacaaaactacaaaaggcttaggagtcatcagtggatggcatgatatcttatcccagtacttgtaaaattagatgaaataggaaccttaggagtyacctcatcagacatccttattctacagatgttggaaccaaagtagatagcaaagttttctgaccagcttgagcaccccagctgctctggaaacttctctcagtagcagggattattctctatacatttttgtagccctgctcaatgcctgctattcagtaggctttcaacatgtgttaactgtagattgccttttgcagaccacacaaaggagataatggatatcaagtatctgatcatgttgctgacatggtaggacctcagtaaatgatagctacctatacctgtagtatatagatctcctgatttctattttagtttctattcgttaacattacaaaatccaaactgttgtcacttgtgatcatgtaagaaatgaatttccatttatttcata

SEQ ID NO: 374849 - DNA, 530 bp, Homo sapiens
tagtttttgcctattaagaataaagctgctatgaacatttgtgcacaggcttttatgtgaacataaatttctatttctttggggaaaatgcccaagtacgcagttgctgggtgacgcaataatggcatgtttaattttataagaaactgctaagttttgttcagagtggtggcatcattttatattcctgtcagcaacatgtgagtgatccagttttctcacattttttgccatcatttggtgttatcactatttttcgttttagctgtcatgatagtattagtctgggttctccacagaaatggaaccaatagaagatatatgtatgtrtaaagatttattgtaagaatctggcacacacattgtggttttaatttgcatttccctaatggctaatgaagttgaattcataccatagattactgcttagcaataagaaggaatgaactattaatgtaaatagttcatcatgaagcaacagcttgggtgaatcacccaaaaattatgctcagtcagtggaaaacgccagt

SEQ ID NO: 374850 - DNA, 567 bp, Homo sapiens
gcttctttccctgtttttatattttagtctttgcacttatcaattcccccaagccatgaaacccaggattttctgtccttcagagccctgtgctaccctggtgagaactctggttgagattcaagaaacctgtcaactccagtcaggaatccaactctcatacaagctcactatgtggtcttaagcaattttctttatctacaaaataagacaattgyaccatatgggtagttctcaaagtggtctacagaccatgagtaccagacgttaagaattcacatttctgaggccatgcctcacactcactacatcagactctaggagtgaggctctgggacctgcattttacatgctttttagggctccttatgtgcactagggcccgaggagatagcctcttgggaccccctctcagctttgctagtccctggtgggaggaccactggctgaacaggaagtccatttcccagtgtcattgccctacctaggggttagacaagctgaaaaagaagagttcttggagcaatacgagaaaacaacaaaccaaatatttgttagactttctga

SEQ ID NO: 374851 - DNA, 586 bp, Homo sapiens
tttaattcaggtctgtctgacatgaaagcccttgctcatcccagtctacccagtagcatgctgcagacatctcgaggggaggcagagggccagtggcttccttggctgctcagagttgctgggttacatcacatgtggcctccaatcctagctcagcacctatcagtgatgtgactttggagcctccrtttcctcatccgcaaaatggggagcactgtactcatcaggaagtagtgtcatgcttgtcaaactagagaaggcacctgactttgggcatgtacccagtcctggggcaccgtcacattgtttcattggtgagaaggcttcgcaggacagaacttctcagcacccaaggctcacaggagaaaccacccaccctctcttgcaaaccttcactctcatagcccatgttctattacaggacctggatgtgggcagacaaggggttaagaggaaagttgcgacagctggcagtttcctcctacgagcacagtgatgaatagcaacgaacagacttattaggaagcattagggcaagatgattaatgaatcaaacaggcacccacgttttaatgaggcagtgttt

SEQ ID NO: 374852 - DNA, 586 bp, Homo sapiens
tttaattcaggtctgtctgacatgaaagcccttgctcatcccagtctacccagtagcatgctgcagacatctcgaggggaggcagagggccagtggcttccttggctgctcagagttgctgggttacatcacatgtggcctccaatcctagctcagcacctatcagtgatgtgactttggagcctccgtttcctcatccgcaaaatggggagcactgtactcatcaggaagtagtgtcatrcttgtcaaactagagaaggcacctgactttgggcatgtacccagtcctggggcaccgtcacattgtttcattggtgagaaggcttcgcaggacagaacttctcagcacccaaggctcacaggagaaaccacccaccctctcttgcaaaccttcactctcatagcccatgttctattacaggacctggatgtgggcagacaaggggttaagaggaaagttgcgacagctggcagtttcctcctacgagcacagtgatgaatagcaacgaacagacttattaggaagcattagggcaagatgattaatgaatcaaacaggcacccacgttttaatgaggcagtgttt

SEQ ID NO: 374853 - DNA, 578 bp, Homo sapiens
tttcggccattactgttcttcgcagaatcctcgagagagacagacacaaagaacggtaatcaaatggaccacagcatgccggtttctacttgccaaacagggccctctaaagaagctgggctggagtggaatgtctgacatttggcctttaccatcccctttaccaagccacatgaagaaagaagacagaagatggatgctctgtcccaaggggccatttctagccccgcctgctctcacagcctcatggaagagaaaagtggaagagggagatgccagtgaccaaaggatcatcagctttgctcactacctctgagatgtggagcaaaacaggaggccactgagagggaacagggccargaaaggcccaatgcacagagactctgccctgataaatatcttgcaataactgagcagatcagccacctcttccccttaagggaaggacactggaaaggtgtggcaagaaaggcaggcagatgaggaaatgacttctcctagagtgatggtaacacaattacacaattgccatccatgcatgtactatgtagtgtgcatttaaaacaatttcatatgca

SEQ ID NO: 374854 - DNA, 551 bp, Homo sapiens
gagggagcagtgctactgacatctagtgtgtagagatctacgatgcgcaaggaatccccccaaaacaaagaattccagagcccaaagttgcactaataccactactgaaaaaccttgatatagaaaaggacttacatatgaaatacaaatctttaaaatttttagatgtcaatgaacaaaaacttaaaacacaatataggaaatatacttcttatcatagaacaggaaataaagttytaaataagactaacatgtgcaaaatctaaaagaagaaattataaatttaactacattaaaatgaagaataactgtttatcagacaacattacaaaagagtcaaaggaaagccactcacttggagaagatgttagcaacacatataagtgataaagtgcttagatcgaatgcatcaagattgttaacgaaccaataagaaaataacaaacaacccagcaggaaaaaaaaaaaataggcaaagatcagaaaggtatttcacaaaagcataaacacaaatgatccattaacaagtgaaacaatgatttgcattagca

SEQ ID NO: 374855 - DNA, 380 bp, Homo sapiens
tagaaaaagaaataacaaacaaatgcaatgagtagatgtaattatatgactgatatgtattartatatcaataattactttaagtgtgaataaactaaaaacttcaattaaatgaattaaatgacagagattgtcagagtgggtaaaaaaaattacccaactatattgtctgtaagaatttctttttaaatataaaacttatatctgttaaaagtaaaaggatgaggatacatgatgctaacatgaatcaaaagaaagctgaaatagctatattaattttagataaaccaaacttcagaacaaggaaaactattagggataaataggggaattccataatgataaaggggtcagttctccaaaaagacatcataatccta

SEQ ID NO: 374856 - DNA, 583 bp, Homo sapiens
aaatgaattaaatgacagagattgtcagagtgggtaaaaaaaattacccaactatattgtctgtaagaatttctttttaaatataaaacttatatctgttaaaagtaaaaggatgaggatacatgatgctaacatgaatcaaaagaaagctgaaatagctatattaattttagataaaccaaacttcagaacaaggaaaactattagggataaataggggaattccataatgataaaggggtcagttctccaaaaagacatcataatcytaaatatgtgtgcacctaataacgtaacatcaaaatacatgagccaaaagctgaaaggaccaaacagagaaatatataaatccactcttatatttggaaacttcagcttctctctgtcagtaccttctagctcaagcagacagaaaatcagtaagaatataattaaacagcaccatcaatcaactttatctaactgacatttacaggatattccattgaacaacagcaggatgctcattttattgaagctcacacagaacaatcactaacatacaccacactcaaggtaatagaaatcttaaatagatactcaa

SEQ ID NO: 374857 - DNA, 583 bp, Homo sapiens
aaatgaattaaatgacagagattgtcagagtgggtaaaaaaaattacccaactatattgtctgtaagaatttctttttaaatataaaacttatatctgttaaaagtaaaaggatgaggatacatgatgctaacatgaatcaaaagaaagctgaaatagctatattaattttagataaaccaaacttcagaacaaggaaaactattagggataaataggggaattccataatgataaaggggtcagttctccaaaaagacatcataatcctaaatatgtgtgcacctaataaygtaacatcaaaatacatgagccaaaagctgaaaggaccaaacagagaaatatataaatccactcttatatttggaaacttcagcttctctctgtcagtaccttctagctcaagcagacagaaaatcagtaagaatataattaaacagcaccatcaatcaactttatctaactgacatttacaggatattccattgaacaacagcaggatgctcattttattgaagctcacacagaacaatcactaacatacaccacactcaaggtaatagaaatcttaaatagatactcaa

SEQ ID NO: 374858 - DNA, 609 bp, Homo sapiens
aaatagatactcaagagacatcttaaatgtaaaagaatagaaactgtacaaaatatatattcaaatcacaatggagttaaactaatcaataacagaaagatacctgaaaaatatccacatattaggagagtaaaataaacattccccaaaaaaatgcaagggtcaaagaagatatctcaagagaaattatcaatttgttggatgcagcaaaagcagtccttcaagagaaatttataccattaaatacatatattacaaaagaagaaagatctaaagtcaatatcctaagcttaggaaactagaaaaagaaagcaatttaaacttgcaccaagcagaaggaaagaaataataaaaattagagcagaaatcaatataactgaaaacatgaaaataaaagaaaacctaaatctaattctttgaaaaaaattaataaacttsaaatacctctagccaagttgagagagagaggaggaagtaacaaatcactgatatcagaaatgaaagcaggattatcactagtgattccatggacattaaaaagataataaagaaatgttatgaacaactcaatgcctataaattcggtggtaacttagatgaagtggactg

SEQ ID NO: 374859 - DNA, 613 bp, Homo sapiens
tgaaatatatatatgttcatcaatgtacatatytgaagtattctttttctagacggaggagaaatagaatattgtaactgtaaaaagaaaaccgggggaatccctgctttcatgaaccaaggcagaagacaaaatgtgaagcagccttgacatgctatttctttcctccctattatccaattgtcctttaagcagagaataggaaatctagaagcgcttttgaaggttgtttttttttatgacagtttaacattctaaaaaatcattattgaagaacaaattatagaagcatttgtctgctgctagctggggtctttgaaaaaaataaagctcaaggttattttaactgacaaaaggaaaaaaattatcttcaaaagaaacgcatatacttcatataactgagtactggttacacttcctcagagaaatcaaacacttgatctaagccacaatctgctaatgaattgtcactgcttctcatcatttgagggctactgtaattctacattaaaacaacatctcaaatgagcaaaaggaggtgaatctatcattttgctcattttgtacacttgcccaccagaccctagaatacatatagatatgtttactgatt

SEQ ID NO: 374860 - DNA, 613 bp, Homo sapiens
tgaaatatatatatgttcatcaatgtacatatctgaagtattctttttctagacggaggagaaatagaatattgtaactgtaaaaagaaaaccgggggaatccctgctttcatgaaccaaggcagaagacaaaatgtgaagcagccttgacatgctatttctttcctccctattatccaattgtcctttaagcagagaataggaaatctagaagcgcttttgaaggttgtttttttttatgacagtttaacattctaaaaaatcattattgaagaacaaattatagaagcatttgtctgctgctagctggggtctttgaaaaaaataaagctcaaggttattttaactgacaaaaggaaaaaaattatcttcawaagaaacgcatatacttcatataactgagtactggttacacttcctcagagaaatcaaacacttgatctaagccacaatctgctaatgaattgtcactgcttctcatcatttgagggctactgtaattctacattaaaacaacatctcaaatgagcaaaaggaggtgaatctatcattttgctcattttgtacacttgcccaccagaccctagaatacatatagatatgtttactgatt

SEQ ID NO: 374861 - DNA, 550 bp, Homo sapiens
ctggcattatcctgattctcttttctgctgtccctacctggtgctggcttcttgaccctgccacggaattttacctcaatgacaaaacctagctccttcctggtggaagatggcctcaaagaaccatcaaactctgtgatatgagtagacctgaaagattatttatcaagtccagtggttatttttcaagccttttttctccccataggctctttgtgacacaaaatctcatgttgcacactaatgtcaaaagaggcaatttaaatctttatcactgttgaaaataactatttgtgggctcttgaagcaccagagtttctcagaatacaaggtgaaattcactgattttatgtcaatgatttattttaatagaagaggaaatccagacgacagggtttggtgacagcctgagggtggttctagtactggtttcccatggctgctataacgaattaccacaaactgagygtcttaacataacacgaatttattgtcttagaatgctggaggtcagaagtcctagatcagtttcactgtgctcgtgtcaagg

SEQ ID NO: 374862 - DNA, 572 bp, Homo sapiens
ctaagacccctgagtcgtactttgagggggtcagaatcactgttcctttttgccagagtatataaaagacaggattatattttatatgcctgttttaaacaacttgcttgctgtacatttagtgctcaaaggggttaaatacttgkgatgagttaaaaaaaaaaattcgtccacaaatcaaattgtctcagataataaattgtactgctggctttaaaataatagtctccattatcctgaaaaaacatcagtgcttctctgggctccttcttgttgccttgactttattcttctttgcaaggatatcatcatgccccttcattcattcattcattcagggtttcagctgttccctaaaaacgggagtctctttgttctgcaagtcacttattccttcgcttattgtttattgagcattacatactaggcataggactaactcttaaaaacagaacaatgaaaaaggcagactcaacctctccttttacgtaacttacaggctataggaggaggaggacagctgagtagacagttataacgcagggaggggtgttttaggaaatatgcaaagt

SEQ ID NO: 374863 - DNA, 572 bp, Homo sapiens
ctaagacccctgagtcgtactttgagggggtcagaatcactgttcctttttgccagagtatataaaagacaggattatattttatatgcctgttttaaacaacttgcttgctgtacatttagtgctcaaaggggttaaatacttggratgagttaaaaaaaaaaattcgtccacaaatcaaattgtctcagataataaattgtactgctggctttaaaataatagtctccattatcctgaaaaaacatcagtgcttctctgggctccttcttgttgccttgactttattcttctttgcaaggatatcatcatgccccttcattcattcattcattcagggtttcagctgttccctaaaaacgggagtctctttgttctgcaagtcacttattccttcgcttattgtttattgagcattacatactaggcataggactaactcttaaaaacagaacaatgaaaaaggcagactcaacctctccttttacgtaacttacaggctataggaggaggaggacagctgagtagacagttataacgcagggaggggtgttttaggaaatatgcaaagt

SEQ ID NO: 374864 - DNA, 572 bp, Homo sapiens
ctaagacccctgagtcgtactttgagggggtcagaatcactgttcctttttgccagagtatataaaagacaggattatattttatatgcctgttttaaacaacttgcttgctgtacatttagtgctcaaaggggttaaatacttgggatgagttaaaaaaaaaaattcgtccacaaatcaaattgtctcagataataaattgtactgctggctttaaaataatagtctccattatcctgaaaaaacatcagtgcttctctgggctccttcttgttgccttgactttattcttctttgcwaggatatcatcatgccccttcattcattcattcattcagggtttcagctgttccctaaaaacgggagtctctttgttctgcaagtcacttattccttcgcttattgtttattgagcattacatactaggcataggactaactcttaaaaacagaacaatgaaaaaggcagactcaacctctccttttacgtaacttacaggctataggaggaggaggacagctgagtagacagttataacgcagggaggggtgttttaggaaatatgcaaagt

SEQ ID NO: 374865 - DNA, 572 bp, Homo sapiens
ctaagacccctgagtcgtactttgagggggtcagaatcactgttcctttttgccagagtatataaaagacaggattatattttatatgcctgttttaaacaacttgcttgctgtacatttagtgctcaaaggggttaaatacttgggatgagttaaaaaaaaaaattcgtccacaaatcaaattgtctcagataataaattgtactgctggctttaaaataatagtctccattatcctgaaaaaacatcagtgcttctctgggctccttcttgttgccttgactttattcttctttgcaaggatatcatcatgccccttcattcattcattcattcagggtttcagctgttccctaaaaacgggagtctctttgttctgcaagtcayttattccttcgcttattgtttattgagcattacatactaggcataggactaactcttaaaaacagaacaatgaaaaaggcagactcaacctctccttttacgtaacttacaggctataggaggaggaggacagctgagtagacagttataacgcagggaggggtgttttaggaaatatgcaaagt

SEQ ID NO: 374866 - DNA, 589 bp, Homo sapiens
gaaagaacataagcagagactagttaaatccaaggtctacaaaccttacagtaatgtttgcaaacctttaaaagttatggaacttatttattttctttgagtatttctgactgttgtgttttgaatgtgtcccctccaaaattcatgttttgaaacttaataaccaatgtgatggtattaaaaagagcagctttttaaaggtgattagatcatgaaggattctcccctaatgaatggaattaaggcctacataaacagggcttcaactagcctttcattcttgcccttctgccttccaccatgtgaggacataccatttctctccccttctgaggacgcagctcttaccagacaacctagcctaccagcgtcttcttcttggatttctgagcctccatcattacaagaaaacatatttctgtttctcataaattatccagtctataatattctgttacaggagcacaaagcatactaaaaagacactgactttccaatcctatgactgaaaaagtaaaagtttccaatcctatgastgaaagaataaataaaaggaattataacagcttcaatcatcagaaatgaagaa

SEQ ID NO: 374867 - DNA, 523 bp, Homo sapiens
tacgtggcttttatttggtgtgggggaagccgactccatcttggtgaatatgaacacggaagcacttagtagatcagctagcagccatgttttgaatacaaaaggagagcctaacagggaacagaggcaagggtaagaaaaaaggactgagagtaaattgagtactggttatatttctagaacccataatcaagcctatcttgcaactagaacatcaattgcacgaagaaatgacatagaaattccctttattttaaatagtctgaataagtataattttctattacttataatagaaatactcctattacctgtattaccttcttgctttgtaaatgagactgtcaaaatatagaggattatattttttatattttgtcagtaattttatttgtcactattatagaatctcccccttactacatatgactaaataaaagctcrtttcatttactttggtaatttacagtgttgtgtggaggggcaagcaataaaatgagaactataaaatcactccataaat

SEQ ID NO: 374868 - DNA, 570 bp, Homo sapiens
tgggcaacatggtgaaaccctgtctctactaaaactacaaaaattagccaggtgtgggtggcatgcacctgtagtcccagccactcaggagtctgagtctggagacttgcttgaacccaggaggcagaggttgcagtgagccaagatcatgctactgcactccagcctgggtgaaagagcaagamtacatctcaaaaataaataaataaaaataaaataaaatcttgttgtttgtatatgtgcatatgtgtttattcttaaattagattataaactgtgtaagagctcaaagagtgattagtatgtattactttcttacaaaatagttatggaataaatgacttgatctgaaatggaatattgtcggtacttaaagctatatttgattaatttctattctttgtggcaatacacactcttttaaaagacttccagtagtaaaaggctatatttacaggaaccaaccctagcaattcttagtttaatcctgggattattggtgtgaattattgttcaagaatttaaagactacaattttttgcatattaattttttatattactaagggag

SEQ ID NO: 374869 - DNA, 570 bp, Homo sapiens
tgggcaacatggtgaaaccctgtctctactaaaactacaaaaattagccaggtgtgggtggcatgcacctgtagtcccagccactcaggagtctgagtctggagacttgcttgaacccaggaggcagaggttgcagtgagccaagatcatgctactgcactccagcctgggtgaaagagcaagactacatctcaaaaataaataaataaaaataaaataaaatcttgttgtttgtatatgtgcatatgtgtttattcttaaattagattataaactgtgtaagagctcaaagagtgattagtatgtattactttcttacaaaatagttatggaataaatgacttgatctgaaatggaatattgtcggtacttaaagctatatttgattaatttctattctttgtggcaatacacactcttttaaaagacttccagtagtaaaaggctrtatttacaggaaccaaccctagcaattcttagtttaatcctgggattattggtgtgaattattgttcaagaatttaaagactacaattttttgcatattaattttttatattactaagggag

SEQ ID NO: 374870 - DNA, 620 bp, Homo sapiens
gtctggattctattttatgataaattctgagatacagattcataatttactgactggaactagatattacttcatagtaactgttggccttgatgaacttttaatcgtcaaggttttcctgaccagtattttccacttctagataatttttaattgatacagaatattctcaggctacctatctagtaatttcttttgcatttaaaatggattacttctgcaaagcaaaggacaccaattatctgcttaacagtgaaatgatttccatttaaagtaactgtcaataatattttttttaaaaaaacaggattataaaatgtktaaaataactaaagtgttaaaagaatgtgccttctaaaaccttgattttacacaaaaataatttttagactgaaaaattgtaatatactcaatcagtttttagagcttttaagttttaacatttctttctatattttgtattatttttggaaagatacaagaagggtaaattttaaaaacaccttaaataacaatcaaacttgaattattgctgtgccctctgaatattcacaaataccttatcagattaaatgagaatgccatatgtaaaagcaataaaaggtatatttatccgctag

SEQ ID NO: 374871 - DNA, 620 bp, Homo sapiens
gtctggattctattttatgataaattctgagatacagattcataatttactgactggaactagatattacttcatagtaactgttggccttgatgaacttttaatcgtcaaggttttcctgaccagtattttccacttctagataatttttaattgatacagaatattctcaggctacctatctagtaatttcttttgcatttaaaatggattacttctgcaaagcaaaggacaccaattatctgcttaacagtgaaatgatttccatttaaagtaactgtcaataatattttttttaaaaaaacaggattataaaatgtttaaaataactaaagtgttaaaagaatgtgccttctaaaaccttgattttacacaaaaataatttttagactgaaaaattgtaatatactcaatcagttkttagagcttttaagttttaacatttctttctatattttgtattatttttggaaagatacaagaagggtaaattttaaaaacaccttaaataacaatcaaacttgaattattgctgtgccctctgaatattcacaaataccttatcagattaaatgagaatgccatatgtaaaagcaataaaaggtatatttatccgctag

SEQ ID NO: 374872 - DNA, 599 bp, Homo sapiens
agttctttgatgtttatttcattgttttcttgataatttttgcttctctattttggaccaagaagtagactacactattagtaatactattatcctttttgtgtttactgacaactgtgttttggaagccttcaaagrtagggtgaaaaatcactcataattttttttttttgagatggagtctcgctctgttgcctaggttagagtgcagtggcatgatctcggctcactgcaagctctacctcccaggttcatgccattcttcagcctcagcctcccaagtagctgggactacaggtgcccaccaccatgcccagctaatttttttgtattttttagtagaaacggggtttcactgtgttagccaggatggtctcaaactcctgacctcgtgatccacctgcctcggcctcccaaagtgttaggaatacaggcataagccaccacgccggccaaaacctttttttttaaatagagatggcttctcactatattgctcaggctggtcttgaactcctggccttaagtgatactcccatctcagcttcccagagtgctgggattacaggcatgagccaccacacctggccactcataat

SEQ ID NO: 374873 - DNA, 510 bp, Homo sapiens
atgggagaacattataaataagatacaaagcatataatatgtaggctgtatgcaaaatgtttatcttatgaaaacataaacaaatatgacatataaagaaatcaccttgtacttaagtaacttattctgtagtttgataccaatgtattgcctttaaaaaagaatgccattatcaaaaattctttattaattayaagaattaggaataataaagcatgatatttgatgtgacacatatcatgaagggacttttaataagttgtgttccatggtgaggatccacattttgttatctcttcatttctttatttcatctttgtgccctagctgcatgcctttggttcttagtattgtcccttgcagagtgaatacttatgtatactagctgaagcaacataaaaagctgccaaggctgttgttagagtcagattctacattacagctgtgtctcaccatcaaagttggctgacaaacatgatttaggtttatgtttccatcgatagcaggccc

SEQ ID NO: 374874 - DNA, 534 bp, Homo sapiens
acccaggttggagtgcagtgatcacagctcactctagccttgacctcccaggctcaagtgatsctccaacctcagtttctccagcagctgggactagaggcacacaccaccacaccaactaatttttattttcagtttttgtagagacaagtatcttactatgttgcccagtctggtctcaaaactcctgggcttaagtgatcctcctgccttggcctcccaaagtgctgggattacaggtgtgaacccccatgcctggccctgatattttccactctccttttaagtgaactttgaagtcaaaattctatggctctaaattatatggctcacctgaaatgtaaatacttaccagcacagaaagaagtaatgaggttttgatggaagtattcctatctcagagttaactgtggatatttgttgtacaaaaattcattgttttctaaaagtgagatacattgaaaggaaaacattaggagcctattaaaaataaagcttaaatcaccatttgttttaattttcttcaaaaatttg

SEQ ID NO: 374875 - DNA, 545 bp, Homo sapiens
cttttgacttccaaatataaaaaatttacctcctgggagactcattgcaaaaagacaacaccaaggcatayagtcaccaggctatctaaagtcaatgtgaaggaaagaattctaagagtagtgagacaaaagcatcaggtaacctataaaggaaaagctctcagactaatagcagacttcttagtagaaaccgtacaagttagaagagattggggtactacctttagtcttcttaaacagagtaactgtcagccaagaattttatatccagcaaaactaaattccataaatgaagaagacataaagtctttctttgacaagcaaatgctaagggaatgtgtcactcaaggatagccctacaaaaaaatgctaaaaggagttctaattgttgaaacaaaagattgatacccaccagaatagaaactcctgaaagcataaaattcacaggacttataaaacaataacacaatgcaaaaaacaaagtcactaggtaccatcaatacgatgactgaaacagtatctcacatctcaacattaatgttgaa

SEQ ID NO: 374876 - DNA, 640 bp, Homo sapiens
caggaattcaataagtgttgcagaagtatttcctggaaaatgtggatgcacacaattaagcagaaaggagcagattcagtccaagagcaatgtagaaacctggaactaatgactagttaggttaaaacactggatctggccacactgttacactgatcacatggcacaactcgtcagccatgcatggcagactttggcacaggaacctccatgccaagtcagtaaatctcaacactgtcaatacaggagccacctgagctctgatcattttattacaggaaaacatacatggtccatggtcccacttcataatttgsggttttttgtttttttttttttttggagacagagtcttgctcattcgcccaggctggagtgcagtggcgcggtctcggctcatggctcactgcaagctctgcctcccaggttcacgccattctcctgactcagcctcctgagtagctgggactacaggcacccgccaccatgcccagctaatcataatttgggtttataaagaatcattctttcctgtctagcttacttaatgagttgttagttagtacttatcgtgtagaatacaatgagtagttaagtattcactgagaaattctaattataaaaatcagtgcaaagatac

SEQ ID NO: 374877 - DNA, 532 bp, Homo sapiens
gtttctcaggtcaggttggccctagttaaagaattacacagtgtcagtcargcactccctgctcttggccctgtgcccagctcctcttagaaatggaagttcctttcatgtgtcctttttaggtaggttataacttcctccaagaccgtggctatttctttggattcagttattgtctaaggaagcacagtattttctgcctgtaccctctgtttctccttaaatgcctctggatttcacaatgaaattatttttctcaaagtcacctgaactcccgctacatagtatctctgtgcacacctcacagaattctcagaactggctgttctttcagcgaacacagcgtctcttgcttactcccttgcatttcatctgaatacacaaacactctttctctttagtcagctcttcgaaaagtcccaaacgcttataggactcctctttttaaagcccattaaggataactataataaatcctataagaatcaatatctaagatcccaaggcagaagctaaaagttgctgcaagcaa

SEQ ID NO: 374878 - DNA, 595 bp, Homo sapiens
tataatagtgggatttctgaaggaaatatatttgaatatctagggtcacagaataaaagtaattcaatataaaataatattcagaaaatgatttaaatgtgcttatacattcattgggaatatcaaatatatgattgtattattatttcattagcagaatacaagaaatatgaatttatgctcatcaaaaggtaagtttattttggtcaatttccaaaaatctcctgaggtctgggcttaactgtgtctttgraaagatttctgtcttgataaaacagaaggggttattcactactactctttttgctgttgtttttgttgttgtttgaatgttcctttaatttctttatcttttttttcttgaacttttaagttcaggggtacatgtgcaggagtgcagatttgttagaggtaaacgtatgccatggtggtttgctgcacaaatcatcccatcacctagatattaagcccagcatccattagctattcttcctgatgctcttcctccccacaacaccgcccctcccacaggccccagtatgtgttattccccccatgtgtccgcgtgttctcatcattcagctcccatttataa

SEQ ID NO: 374879 - DNA, 572 bp, Homo sapiens
agtttataggtgattatttaaagcatgagctgaaacatgattgcaaaggtcatactgtgtagcataggtggggaaaagggaagtgtcaaagatcaagtcctggaacattccaacactgaaaggtgatggatacaaggggaagaacagaaattggaatcttttgaatagggtgtgattacacgtataaaaatttgtgccaagcacagtaatctggtagtgagaaaacctgagtttgagtttaggctttattctaatgaagtagttggccatgggcaaattacttagtctaaaggaactcctcactggttcttcacgtagctagtcagatccggttatcttttagggtcaacttaaacgtcccttctccacagagktctcccctgtgcatttttaacaatcacccaggcaagttattccctactaacactcttgtttatttcatttgctgtacataattacagtctaaatttggcctatgtgtttacttatttaatttaattgtatgtctcctctctcaccaccagaacagaaatgtttactttatataggtgagctttttgcatctttcatta

SEQ ID NO: 374880 - DNA, 572 bp, Homo sapiens
agtttataggtgattatttaaagcatgagctgaaacatgattgcaaaggtcatactgtgtagcataggtggggaaaagggaagtgtcaaagatcaagtcctggaacattccaacactgaaaggtgatggatacaaggggaagaacagaaattggaatcttttgaatagggtgtgattacacgtataaaaatttgtgccaagcacagtaatctggtagtgagaaaacctgagtttgagtttaggctttattctaatgaagtagttggccatgggcaaattacttagtctaaaggaactcctcactggttcttcacgtagctagtcagatccggttatcttttagggtcaacttaaacgtcccttctccacagagttctcccctgtgcatttttaacaatcacccagscaagttattccctactaacactcttgtttatttcatttgctgtacataattacagtctaaatttggcctatgtgtttacttatttaatttaattgtatgtctcctctctcaccaccagaacagaaatgtttactttatataggtgagctttttgcatctttcatta

SEQ ID NO: 374881 - DNA, 613 bp, Homo sapiens
gtaataggaataaacacacctcttctcacacctctttaaaaatgctgttatgtggtagaaatgtggccaccttccccaaattacagtcacccgacctctgtgttttagactctgaaaaaaatagcacagatgtctagaattagtgtgagtgtaatttaaatgatgtttgatattgtttcaagaagagaataaaaggagaatagaaaaactgtatgactattctttgcttctttatgccctgaaatatccatccttattgctcattttaaaagagaaaagtaaatctggcttagagaagagcattattcccgatttagtcaaaacccaaaaattgtgaatcccaactccatatctaagactccttcattctgcactgtggagatatatatatatattctccatatatatgaatgtgtatatatattgttaaatgcctgaggctgagcattttgtccatttttgtgcactattgtataacatccccagagttagtagagtgcctagggcacatggtagttaatcagtgcttttaatgaaagaatgaatctatccaatttgctctgcccagtrggatatcatcttataggcaccttcaatttctcatcattaaaac

SEQ ID NO: 374882 - DNA, 581 bp, Homo sapiens
tttttgttttgtttttttttgttctgctctctaatgtatctcaaacacatagaccagtgcttggcaaatagatagctgctacatcattcatttgttagataaattaatgaataggtaaatagtaatgtgctgttcctgtcactttatttagatatatattaaagaagttttgccttatttattaagtaaattgggtcagattactaaataactcaagatgatttcattcttatccctgaaacatgctttaccattattataaccaattcttgttctttcactttcgaaacaggacctacatcttggttaagatggtaattaaggaaggtaattaataccttccaaagctgcttaaataattcactcctctctgcctttcctgctgtaactgtaatgcaagtcatcccatgcatttgcaccatctaactacttttcttctttgtcaccttactctttatcgtggtctccttcaacccatgcagtcagggtaatcttcaaaacgtaactttgtaatcaaagtttcccttgtcttaaaattttcaaaatgactttttatggtstatagaattgatgattagcat

SEQ ID NO: 374883 - DNA, 537 bp, Homo sapiens
ttcattattgtaagtgggatattaaagtcccataaattattttatggctgtcaatttcctacttcagatctgtcaatatttgctttataatttaggtgctctgatagagtcatactaattgtcatatcttcctggtgaattgactcctttactatgtaatgatctttttttttttgtctcaagagatagtttttgacttaaaatctaatttgtctgatataaatttagcaacccctgctttgttttggttaccatttgcatggaatatcagtttctgtcccttttctttcatcttatatgcgtctttaattgaaagtgagtgcctraagaacagatgcaattgttttgttcatgtttgcctattcaggctgtaatactattaaaatgtataattcatgaacatatttgtattaaatgaacaaattatcggcattactaaaagttcctttgtgtgtgtgcatatatataaacagcttagatagatagatggatagacatatatagatataaatatagatatacaggacttagtagtcc

SEQ ID NO: 374884 - DNA, 537 bp, Homo sapiens
ttcattattgtaagtgggatattaaagtcccataaattattttatggctgtcaatttcctacttcagatctgtcaatatttgctttataatttaggtgctctgatagagtcatactaattgtcatatcttcctggtgaattgactcctttactatgtaatgatctttttttttttgtctcaagagatagtttttgacttaaaatctaatttgtctgatataaatttagcaacccctgctttgttttggttaccatttgcatggaatatcagtttctgtcccttttctttcatcttatatgcgtctttaattgaaagtgagtgcctaaagaacagatgcaattgttttgttcatgtttgcctattcaggctgtaatactattaaaatgtataattcatgaacatatttgtattaaatgaacaaattatcrgcattactaaaagttcctttgtgtgtgtgcatatatataaacagcttagatagatagatggatagacatatatagatataaatatagatatacaggacttagtagtcc

SEQ ID NO: 374885 - DNA, 591 bp, Homo sapiens
agccatcctatagaaaggcaagagtggaaaaatatggaattcttaataatctcccaaagccagtgaaccaaacctaggmctattcatatacatgataagtaaatgacaaaaaaaaaatatttccttgtgtttaactcacttttaattggatattttattatttatagctaaaaacctcctaaatgataaggacacttaacatattagtttctctgagccacactgctactgtatatcatctggatgtatatactcatagtgataccctttaagaatctttcaggcgggttctatcagcaatccgtccactttgaataaaccaatcaaatgtttcatcagcaattttcaatctaaaataacattgccaccaaaaagctcactaacttttcatagcttcattttatacttgttttctcagcttagcacagttttcccatctccttgcagatcatcatataatttccatcacattctctcagagatttggcagcccaaattgaaaaacatgactgttttcaaactgggctcttcagtgtcctaggtttctgtggaggtgtggccaatcagtgcattgttgcttttagttagttt

SEQ ID NO: 374886 - DNA, 585 bp, Homo sapiens
tatgcacttcaaatggttacaatagtgaattttatggtacatgtatttttttttttgagatggmgtcttgctctgttgcccaggctggagtgcaacggcgtgatctcggctcactgcaacctccgcctcccgggttcaagcgattctcctgcctcagcctcctgagtagctgggattacaggcgtgcgccaccacacctggctaatttttttgttttttttaaatagagacagagtttcaccatattggtcatgctggtctcgaactcccaacctcatgatccacctgccttagcctcccaagtgctgggattacaggcatgagccaccgcgcctggccttttacgtgtattttaccacgctaaaaaaaacaatgggggaatagtatgtctttgggacctacaagcctttactatttgttctcttttcagagctttagcttatttagcacacaatttcgacaattaaaggttacatttaatctatcttgtatgcaaagtcttgcatcccctgaagcctgaggaaggaaaaaatgccatcctatgatcatttcattatataacacttcatgcaacacccgggagga

SEQ ID NO: 374887 - DNA, 585 bp, Homo sapiens
tatgcacttcaaatggttacaatagtgaattttatggtacatgtatttttttttttgagatggcgtcttgctctgttgcccaggctggagtgcaacggcgtgatctcggctcactgcaacctccgcctcccgggttcaagcgattctcctgcctcagcctcctgagtagctgggattacaggcgtgcgccaccacacctggctaatttttttgttttttttaaatagagacagagtttcaccatattggtcatgctggtytcgaactcccaacctcatgatccacctgccttagcctcccaagtgctgggattacaggcatgagccaccgcgcctggccttttacgtgtattttaccacgctaaaaaaaacaatgggggaatagtatgtctttgggacctacaagcctttactatttgttctcttttcagagctttagcttatttagcacacaatttcgacaattaaaggttacatttaatctatcttgtatgcaaagtcttgcatcccctgaagcctgaggaaggaaaaaatgccatcctatgatcatttcattatataacacttcatgcaacacccgggagga

SEQ ID NO: 374888 - DNA, 585 bp, Homo sapiens
tatgcacttcaaatggttacaatagtgaattttatggtacatgtatttttttttttgagatggcgtcttgctctgttgcccaggctggagtgcaacggcgtgatctcggctcactgcaacctccgcctcccgggttcaagcgattctcctgcctcagcctcctgagtagctgggattacaggcgtgcgccaccacacctggctaatttttttgttttttttaaatagagacagagtttcaccatattggtcatgctggtctcgaactcccaacctcatgatccacctgccttagcctcccaagtgctgggattacaggcatgagccaccgygcctggccttttacgtgtattttaccacgctaaaaaaaacaatgggggaatagtatgtctttgggacctacaagcctttactatttgttctcttttcagagctttagcttatttagcacacaatttcgacaattaaaggttacatttaatctatcttgtatgcaaagtcttgcatcccctgaagcctgaggaaggaaaaaatgccatcctatgatcatttcattatataacacttcatgcaacacccgggagga

SEQ ID NO: 374889 - DNA, 623 bp, Homo sapiens
ctgttttaaggcatcagggcattaacttgattgtactttacagatattatcattcccttctgtccacttgcataaaatctgaagtatgtcaaaggttttttttttttaaataaaagtacattattaaaaaaaaaataaagtaaaaataaaaatagaagtaccatatgatccagaaattctacttctgggtgtagacccaaaagaattgaaagcagagtcttgaagacacatgaacatatccatactcatagcagcattattcacaatagccaaaaggtggaaacaactgaagcggccactaatggatgaatgaataagtgaaatgtggcatatccatatratggaatgcgagtcagccttaaaatggaaggaaattctggccatgtgcagcggccacttgtaatcccagcactttgggaggcccccaggtggactgcttgagtcaaggagttcaagcccaacctgggcaacatggcaaaactctgtctctacaaaaagcgtttttaaaaaattagcccggtgttgtggcatgcgcctacagtcctagctacttgagggggctgaggcaggagaatcacttgagctcaggaggttgatgctacagtgagctgagatcaggccac

SEQ ID NO: 374890 - DNA, 623 bp, Homo sapiens
ctgttttaaggcatcagggcattaacttgattgtactttacagatattatcattcccttctgtccacttgcataaaatctgaagtatgtcaaaggttttttttttttaaataaaagtacattattaaaaaaaaaataaagtaaaaataaaaatagaagtaccatatgatccagaaattctacttctgggtgtagacccaaaagaattgaaagcagagtcttgaagacacatgaacatatccatactcatagcagcattattcacaatagccaaaaggtggaaacaactgaagcggccactaatggatgaatgaataagtgaaatgtggcatatccatataatggaatgcgagtcagccttaaaatggaaggaaattctggccatgtgcagcggccacttgtaatcccagcactttgggaggcccccaggtggactgcttgagtcaaggagttcaagcccaacctgggcaacatggcaaaactctgtctctacaaaaagcgttttwaaaaaattagcccggtgttgtggcatgcgcctacagtcctagctacttgagggggctgaggcaggagaatcacttgagctcaggaggttgatgctacagtgagctgagatcaggccac

SEQ ID NO: 374891 - DNA, 620 bp, Homo sapiens
aattcaacaaataattgaacatcaagtcccaggcattatactcgctatcagtaatatgaaaatctaagatggggtcccttgtagtctagttcaggggccagaaaactagatacagctcatgggccaaatcctgtcagctgcctatttttctaagtaaggttttattggaacacagccatgctcattcatctatgtactgtctatggctgtttttgcactaaaatggccgaaccaaatagtctcaacagactatacggcccacagggcctaaaatatttcctatctagtcttttatttttaaaaagtttggctgggcacagtcactcatgcctgcaatcccaatgctttgggaagacgaggcgggaggatcacttgaggtcaggagttcaaggttgtaatgagctatgatcacaccactgcactccagcctgagttacagagtgagacactgtctcacacacacamaaaaaagtttgccaacttctgctgtagacacatatcacttaatataacaacaataaaaaaaatagtaattatctttcaaaaccaccaatgtatctggaaaagaaacattacagactgaatgtttgtgtaccccccgaacttcgtatgttgaaatc

SEQ ID NO: 374892 - DNA, 565 bp, Homo sapiens
gattaataaatgtataattggggttctgaaaagaggagactagaaagaatgagtaaaatgtgatattcaaagggattaatggacgtgaatgttccagaatgtctacaagacaagaatccttaaattcttaaagcataatgaattccaagcaggataaatctaataaaccctacttctaagcacatttccatgaatctgaaaaatattaaggacatagttattttaaaaattgtaaaagagaaagaaaaaataaaagacagacttataattgtcatcttgacacaaaataaaagatggggaagagtagaataatatttctttaatttttttattattattttaatagtttttggggaacaggtggtatttggttagatggataagttcttcagtggtcatttctgagtttttggtgcacccatcaccagggcagtgtacactgtacccaatgtgtagtcttttatccatcactcccctcccaaccttcctcccaagtcctcagagcacattatatcattcttatgcctttgtrttttcatagttcagctcccacttgtgagagcat

SEQ ID NO: 374893 - DNA, 487 bp, Homo sapiens
  misc_feature (1)...(487): n = A,T,C or G
atacacacacacacacatacacacagagacactccatacatatgcatataaatggaacaaggttttataaaagaatatttnnnnnnnnnnnnnnnnnnnnnnaagcataaatatcaaatattttattactacatatagatatggaaaaagatcataaaatgaacaacacaaatgcagacaaacagaaaatactaggtaaggcccacaaaactagttttaccactcactaattggtagcaatatacagtttgaaaagtatcattgaatttgaccttattggctctcawctttatttttttttctgctgtcactgtcattgttgttttcacataaattattattgattcttaaataaactatcaactgtgagcctacctcttcatttttccatacctcccaaaatgcacactttcattatgtgattccctgctgtagaatccttcactctttgggccaagatggccaactagaaacagctctggtcaaa

SEQ ID NO: 374894 - DNA, 580 bp, Homo sapiens
tttctaactttttgaggtagacatttagtgccataatctttccttttaacactgcttttgctgtatctcagaaattttgttactttatgtctctgttctcatttatttcagatttgttttgatttttgcattaatttcattgtttacccaaaagtcatttaggtgcaagtcattcatgagaggaggtttcactcttttgatatactgtaattaccaaaataagttcaatttaaatcatattttcacatactattgcacttctaaaaacaagcttatgtattattcatattaaaataatrtttgaagaggctgaagattctactgcctagataagaaccatggaattatctactctagtcttccttgtccatttctacacaacaaaaaactgaaacacaatgtagttttatcagtaggtaacttctgcacacttaagagcaccagggttacactcatcatttgtgtattcacttattcagcaagtatttgttgtgtgcctactctgtgacatgccctgtcctgggccctggtaatatgattatgctatccttcttaatgcttacaatctagtgggggagac

SEQ ID NO: 374895 - DNA, 625 bp, Homo sapiens
tcactttctaatatgtgttgtatttttctcttaactttgaagtaactcctgaaacataccacatagcctgtatttcagaatctcagctctagtccaatttcttcaattcacagttgggcaaattgtgacctagaatgctttcgtgasttgtccaattacatcagcaaatgtgggtggagcagaagtagaacctgcatctcttgagaccaaacctcaagcccagttatcttttcactaaggaactgtatccgagtggcttcaggttttcaatgtgaaatgataacacactgtttgaaacttacttttggataaaagccaaagttaaaaccaaacaaaattttgttaaaccagtagttgaaaagaatattaatttcctgctaagttagtatttatttcagctattggggtggtattatcacaggaaaaattgtgcttttggtttaattaattttatcagatgtcagtgaggataaagtacatttttttctcaagattctggtttaaactcttttgtaacaatttattgaggctcaaatcaccttctgtttggacagagaacagatgacagtctggaaatcatgacttatgaaatagaagtcaccaaataaccactaaataataagaa

SEQ ID NO: 374896 - DNA, 545 bp, Homo sapiens
aaggttgtgatcattttgaactgaattaagcagtggagtcttaagatatccattcagtgttcaggagaccaataaacaggaggcaataaacatatgtttaattttttcacataaactaaaactcttgggcattgtgagatattttttctttctagaagaatcagaattttcatgttttcaccagttaacagcttctatgttaactcaggaagttctgaaactcattgctttagtgctaataacaccagttcacagcatttaagtggaaaaaaagtgttcttattcctctgactataattgtttttgaaggcatcccttagccaatacacacacacgcaaacacacaaccttctccttgtgggggaaataaacttttcaaatgttagtgtttaagtggtatagttggtgctaaagttcaaaggaagaactagatgaagaactaataaatacaaaggtgggggacaaaaatgttgaaaaataagaaaatcaaacagtttcatgtactgtctgtwcataggcatgagttcacaggcagagtgttttat

SEQ ID NO: 374897 - DNA, 533 bp, Homo sapiens
tggctaatattatgatccagttattggctaataggatccaagccttctgatcattaagccttcaatcatcagaaatttagatgaagagggttaatagtgatgatctgtcatatttgagacctggaattcaagaaggaaaatatttgataaattaatttactacaagtttatttaactaataagtaattatacactattcacaatgtagcaggcattgttttcaatgttttagaaacataaattaatttaacctttataacaaccctgtaagacaggatgtagtatttttaacctcattttaaacaatgtgaaactgagggaactaaggttaagmaaagtactaaatatgacaaatcatgtaatgtggtgattatccttactccacaagccatggtcttgatcactatggtatactttcttgagataagccaaaagagggtttcgcgtgctttgaaatgtcttaaactcccctgaatttggacccagaattttgtacaactacacctgtaagtatttgatgggagtgaggttga

SEQ ID NO: 374898 - DNA, 603 bp, Homo sapiens
gaccaggctgacccaacaggcttaggcaccttgaatatgtttattgcttcagtgacactgtatttctaaaccaacagattttcgaaaacacagaagctctawgtagaaaaagcagtatccctagaggaatcatggaaggaatcaaacagtagttcagtgcccagtgttgaaacaagaaaatccttggattgcttaagactgataattccatccctacataattatttttatggggggaggtgggggtcagtactccctcaatgcaggacatatttctacatttaaaaagttaattggaagctatggtatcataacagcagtattgtacaaatagtttcttcatctataaaatgattgcctggttgctggggtcctatctaattttaatagtctctctgagttctacatttcagtttattcttgctactttcttgctatgaaagtaaaatattctcctacttccttgataataatccatttatgaaatgttcaaaatcacattctgagtagaaattattcttcgagggtaaggataacaaagctgtgtggccaaaggaaataaccaaaaagggtaggctttaagaagccattgtgcattggcac

SEQ ID NO: 374899 - DNA, 603 bp, Homo sapiens
gaccaggctgacccaacaggcttaggcaccttgaatatgtttattgcttcagtgacactgtatttctaaaccaacagattttcgaaaacacagaagctctaagtagaaaaagcagtatccctagaggaatcatggaaggaatcaaacagtagttcagtgcccagtgttgaaacaagaaaatccttggattgcttaagactgataattccatccctacataattatttttatggggggaggtgggggtcagtactccctcaatgcaggacatatttctacatttaaaaagttaattggaagctatggtatcataacagcagtattgtacaaatagtttcttcatctataaaatgattgcctggttgctggggtcctatctaattttaatagtctctcygagttctacatttcagtttattcttgctactttcttgctatgaaagtaaaatattctcctacttccttgataataatccatttatgaaatgttcaaaatcacattctgagtagaaattattcttcgagggtaaggataacaaagctgtgtggccaaaggaaataaccaaaaagggtaggctttaagaagccattgtgcattggcac

SEQ ID NO: 374900 - DNA, 632 bp, Homo sapiens
gctgtcctgggatcctaaacagaatagcagaaacctgggggtgaacacactgcagaggccaggaacagagtattttatgaggccagttctttgcaattctcrttctgttgaaatggaggaaagggtgtgtggagaggaatgattgcatccaaacagtactaattaggaaatgctgagttgggggaggagtggatttctatgtgacttacggcttggagaacttcacagaggtgatctttaaagttgagtctgccacagtgccaggcactgcagaggtctcatatttaattgatccaattaatcctcttttgcagaagatagcccaatgtggtagtaacacccttcctggagatttcattcattctcagaattgagctttgatctacctcatgtagaatggtccattcctcactgcctccatttatgcgtgatagcagttgaaggggctgaaaatgggataacctccaggagacgggagaagcagtgatgataaataagggccacctgctttttcacagaggggaagggcataggggctattagtacaattccagtgccaggggcattgactttggcaatggcgacatgcacaggggccaatctggataacaaagtggacaattttccctgct

SEQ ID NO: 374901 - DNA, 549 bp, Homo sapiens
gactgatagtgcctgaaggaacaggctgctattacttttcaaggtaagagaccctgtgtaaatagggagcctcctgaggaagcaaggattccctgccctgtgtacctgtggtgcttatcacctccctggcagggaagctctgcccaggtagggtagtttgagaacatcattatctgggcagctacaaaagtgatacaccaaatgaaactttgaacttayccaatgtgctgtattttagggctcatctgggactattcctgtgaacctgactgttaagtcagaatcaccagtgaagcttgatgcaaattgagaacccctagcctgggagacttatgtgactcattttcctgtcttgttctagaaagaagcttattcaggcagcagctagctgtagggatttttttttaattttttttttttttttggcagtggaaagagctcttgaaagtacagagtggctttaaagtttaaagaagattaaaatgaacacaacatataaaataaacacaacatataaaatgaacacctatgtacccatcttaagaaata

SEQ ID NO: 374902 - DNA, 549 bp, Homo sapiens
gactgatagtgcctgaaggaacaggctgctattacttttcaaggtaagagaccctgtgtaaatagggagcctcctgaggaagcaaggattccctgccctgtgtacctgtggtgcttatcacctccctggcagggaagctctgcccaggtagggtagtttgagaacatcattatctgggcagctacaaaagtgatacaccaaatgaaactttgaacttatccaatgtgctgtattttagggctcatctgggactattcctstgaacctgactgttaagtcagaatcaccagtgaagcttgatgcaaattgagaacccctagcctgggagacttatgtgactcattttcctgtcttgttctagaaagaagcttattcaggcagcagctagctgtagggatttttttttaattttttttttttttttggcagtggaaagagctcttgaaagtacagagtggctttaaagtttaaagaagattaaaatgaacacaacatataaaataaacacaacatataaaatgaacacctatgtacccatcttaagaaata

SEQ ID NO: 374903 - DNA, 535 bp, Homo sapiens
atactgttcagccttaaaaaagaagaaatcctgtcatttatgacaacatggatgaacctgtgagaacattatattaagtgaaataagccaggcacagaaagacaaacaccacatgatctcactcgtatgtgtgtaaaaaagctgaactcagaaatgagtaaatggaggtgactagaggttgaaggttgggggatggggagatgttgctcaaaagacataaaatttcaattagacaggaggaacaagttcaaaaggatctactgtacatcacagtagcagcagttaataacaatctattgtayatttgaaaactactagaagagtagatttttcagtattggcaccacatatgaaaaaaaagggatgtgacgtaatgcatgtgttaaatggcttgatttagccattccacaacatgcatatatatcaaaaatcatgttgtacacacatgtatatacagtttttagttgtcaattaaagtaaaatttaaaaacaaaattaaaaaggactcctgccattggtgacaacacagatgaac

SEQ ID NO: 374904 - DNA, 558 bp, Homo sapiens
agtctcctttctttatattgattctatcacttacagcattcctccttagtttgcagctttctgtgccttactaggatagcttccaggggacagtaaccaagttttttttttttttttttttgctttttttccccagctttactgagatataattgacacataaaaattgtatatattcaaggggtagaatgtgatgatttgatgtgtaatgattaccacagtcaagttaattaacacatccttcatcacacatagttaccgtgtgtgtgtatgtgtggtgggaacacttaaaatctgctctattagtaaatttcaagtaaacaatacagaattattaactatagtcgccgtgctgtatattagatctccagaacttactcatcttataactgaaggtttgtatcaacaactccccattccccaccctccaaacccagcccctggcagctgctgttctgctgtctgcttctaggaagtaactcagttttgttatctctagaactcatctttgtgcccrtgttctcagtaaatatgtgttaacgaatgacttcattttta

SEQ ID NO: 374905 - DNA, 621 bp, Homo sapiens
tgttaggtttgtaagagaaggactgtgctaggctgtacttagccataacttcaagagaagacctgtattgggctggaaacctcttttaaagattggagaattcagaagaaatcttgtcaaataaaaacttatgaaatgctatcagtttctggggctgaggcagggtgcctggcacaaggggattctaccaggttcaagctgcttagacatggctgactgacaccaaatcctgtacrtggctgctgtttattattgccagcctcttcctcctgttcccatcactaattcttgccttgctccaatgcccatttaccacctctgacactttgaagctgctcttgccctgggataagttaggaaagccagagtgggagaaaagtccgaggtagaagtgaggcgagatctctctatatttttggcagtattttctaaaagccagggctgggatcagaattcaggctgccagctgttactactttcacactactaagtccttaaagttaaaaataaattacaaaatcattcaaaaccattatgaagtcagtccaagacacagcttcaccaacgatttcattaagtttaaaaattctctcatcattcagtcaactaatgattactaaa

SEQ ID NO: 374906 - DNA, 621 bp, Homo sapiens
tgttaggtttgtaagagaaggactgtgctaggctgtacttagccataacttcaagagaagacctgtattgggctggaaacctcttttaaagattggagaattcagaagaaatcttgtcaaataaaaacttatgaaatgctatcagtttctggggctgaggcagggtgcctggcacaaggggattctaccaggttcaagctgcttagacatggctgactgacaccaaatcctgtacatggctgctgtttattattgccagcctcttcctcctgttcccatcactaattcttgccttgctccaatgcccatttaccacctstgacactttgaagctgctcttgccctgggataagttaggaaagccagagtgggagaaaagtccgaggtagaagtgaggcgagatctctctatatttttggcagtattttctaaaagccagggctgggatcagaattcaggctgccagctgttactactttcacactactaagtccttaaagttaaaaataaattacaaaatcattcaaaaccattatgaagtcagtccaagacacagcttcaccaacgatttcattaagtttaaaaattctctcatcattcagtcaactaatgattactaaa

SEQ ID NO: 374907 - DNA, 565 bp, Homo sapiens
atcaaactacttttcttcctgaagtgtcagtttcttctgaacatgttctttgtttttggagaaaatcctggagagcactgataattcccaaattaggcaaacaaccaggaaaacctctataatctgagcccagtaactccatatggcaaatttgacagaagtctgctctgaaagtcctgcctgaaaccattggcctgcgccaagttatagaaaaatcatggcaatgccaattcctctgctccaaaaccactaagatcaaatactattttgagcttctcagcacagcttttttactgkgaatatcataaatacaaaaatatatctgctatgcggggcaggaaggttcaagtatttcattatgtttcttatttcataacatataattgagatcttcatgattacaatgggatatttctaaatccattggtgagcattataaagagcaattcttcaaaagaaagcaaggcttagctgaactgtgaacatgtttttgacgataaaatctggctggttttatccctaaagctatttttttattttaaaagctttaaaaaataagagtcac

SEQ ID NO: 374908 - DNA, 452 bp, Homo sapiens
catgtgggattgaaatcaaatcacatctctaacgatctaggaatattttatgtttcttaaaaacccaataacttagggagctacaaaatgcatccagaaaaaaaaaaatggagactggaatgattctttttgtttcctatgattactattaggtcaattttaaaagtttattctgtttccctgcccccctggttgctccattttaagttccaattccttgycttttaaatgtttacagaaaagtgtactctgaggttctattcacagaaggacagggtcaaccacttggtccatctttcctgttagcatgcccacaacaattcaatgacacataagtgctatgacttcatcaaaaaatgttagacaaatatttgaatttgaagaatcaggatatgattattcttattctcataatttttaccaatataaaagtttttgtcactttacatcat

SEQ ID NO: 374909 - DNA, 556 bp, Homo sapiens
gacaaactaacaggacagaaaaatattggactagatgtactgttggtaagaagatgtataaggcaactgaaggccagacaggtgctcttcaaacattgatggacctacaaatcacctggagaccatgctaacataaagattctgattcagtacatctggggtgaggctcgagctcctgaatttccaaagctcccatgggatgctattgcctgtccatagattgctccatatgtatcttggccttagattatgtaggtattgatggctaatgaatacagcaaaagaaggcaattaacttggacacaggtgatcctatttctttatattcargcatttgtgtaatgtttaaattcactgctgatattataataaatcatgcaatttctaaaataacttatataacagtattacataacaaaatcataaaccatttttttcaaaagcgcatatacactctaaaagattccattctagaagcaaactttgctatattaaatccacactttttagatgagacaaaaaaaagaagttgaaataaactcttttgcaggtgttg

SEQ ID NO: 374910 - DNA, 570 bp, Homo sapiens
catatgaatattacaccaatattataaaggcatatattctagttaggctaataaccaccatttatatcctgtaattatataaacattgcataagccaactagtaattatttaatcaatcagttataagggaaatcaacctatgacaaagaaatcctcttgatacacccctggtgaaaacacttcagtctaaacagcagttgcctcatgattcttgtactttaaatgctgggaatatagtaagtgttcaatagacactagacacaggtagaaaaggaaggaggaaatgattttgccgtttgttttactattttttatgcttttagatagttaacaggctaaaaaggtagggtgttcaaatcaatttatactgatctatctactaaaattctacattgttttagaaatccttttgctaggccagtgcagtggctcacacttgtaatcccagcactttgggaggccaagttgggccaatcacctgagrtcaggaatttgagaccaaactggccaacacaatgaaaaccgtttctattaaaatacaaaaattagctgggcatggtggcacatgc

SEQ ID NO: 374911 - DNA, 587 bp, Homo sapiens
tgttttggtttggatttgccctatgtctttgcatatttcttatattcccaatcgttataaataaattttaaawgtttcccacaaattgtatataatgatttgtgtgtgcatgtgttttggaatgacaggctactgtttatttaatctgatactgacgaaaaattggtctatttatatatgatataatatggattttactttctttttgttatttatatgttattagaaagggcatatataattaaactttatactcaaagaattagagatagggaaacccagttttatgaacatccaagtaaatgcagacaattctcttcattgaaacaaacatgcttttatgatcttggatgagtagaactattgtaatttttaaattttgttttctatatacttttcacagtgaaggtagatagattaatctcactttgtattggaggtaatgatttttaaggagaatttttattatactagaatttgttatatttcattttatttatattttatgtaacttccccttttttaaaccaatgtaatatcttagcttttagaaaaagtgagtagagagggaaagagtagaccatgaa

SEQ ID NO: 374912 - DNA, 474 bp, Homo sapiens
aaactaagaatgagaaaaaaaaacaaaaaaaaaaaaaaaaaattactatttttactactatatatatatatctttctctcatgcaaacagaaaccmaaagaaagctgaagtgactatattcattactatggtctgaatgacctctccaaaactcatactgaaatttaattgccattgtaactaacggtgttgagaggtaggacctttaagaggtgattacattatgaaggctttgccctcatgaatggaacaatactgctattaggggggtgggttagtcatcacaggagtggcctcctgataaaaggataagtttggtctaatttcccctctctgtctcacatgcttgtttgccctctaactttccatcctggaataacatagcacaaaagcccttgccagataccagagccaagttcttggactttccagcctccaaaactgtaagtcaaataaacttctattgcttataaa

SEQ ID NO: 374913 - DNA, 605 bp, Homo sapiens
atgtgtgagacaggaaagggggagcagttctgagctaaaccaaagccagstgaaggtcttttatggaattctaaagccagaatgatttcacatcccacttaggacaaatagtggcaaggaaatgaacaaggtacaatgaagagagcacaaaatggaagagggagaaggtagtaaactaggctttgaatgtgaaagaaaaagatcaactacaatctactgtgattttgaaagaaaaatctatagtccttgaacaggagacgtgacagaaccatgaactgagagaaataagacatctgaagtgcaatgtgagacagagtgaaagtgaaattacagcatgagtagagggaatcatgaacaagtaagaacagttctcaaaatctgtcctgcattaggatcacctcaggcatttgttaaaatgctaattctcactctcaaaaattctgattcagtgagtctaaagtgaggaccaggaatatgcatttaacaagtagccctattaattctgatccaactcatccttggtataattcactttgagaattactgtcctagagtgtgaggaatcgtgttagaagtgtgtcttggagtgaacatacaaaaggcca

SEQ ID NO: 374914 - DNA, 605 bp, Homo sapiens
atgtgtgagacaggaaagggggagcagttctgagctaaaccaaagccaggtgaaggtcttttatggaattctaaagccagaatgatttcacatcccacttaggacaaatagtggcaaggaaatgaacaaggtacaatgaagagagcacaaaatggaagagggagaaggtagtaaactaggctttgaatgtgaaagaaaaagatcaactacaatctactgtgattttgaaagaaaaatctayagtccttgaacaggagacgtgacagaaccatgaactgagagaaataagacatctgaagtgcaatgtgagacagagtgaaagtgaaattacagcatgagtagagggaatcatgaacaagtaagaacagttctcaaaatctgtcctgcattaggatcacctcaggcatttgttaaaatgctaattctcactctcaaaaattctgattcagtgagtctaaagtgaggaccaggaatatgcatttaacaagtagccctattaattctgatccaactcatccttggtataattcactttgagaattactgtcctagagtgtgaggaatcgtgttagaagtgtgtcttggagtgaacatacaaaaggcca

SEQ ID NO: 374915 - DNA, 580 bp, Homo sapiens
actctcatttaacctactttctaaatagcataaactattttattcagcatatttctaacatttattttgttaaagtgtcatatttttgcttttggtatttttaccattccctctttttttcatagattctatcatataactcaatcgtatatatatttgacaggtttttaccaaatacctgctatgcactagcactgccactggaggaacaattggttgcttatactcaaatgcaggctcttaagttttgcccctatcaaattctatcttgttataatcttctatttatttgtcttttaaagcttttttgataagtaatctgtaaagtaatgaatttgctcttactcccattttcatgttatccacaaacttgagaagagtaccatatcttatatcaataacaagttggctgggtgcagtggctcacgcctataatcccagcactttggaaggctgargcggatggatcacttgaggttcgcagttcctggccaatgtgatgaaatcctgtctctactaaaaagcaaaaacaaaaaccaaacaaaccagtcaactactggaactataatagagaagtggt

SEQ ID NO: 374916 - DNA, 452 bp, Homo sapiens
ggaagaagctagattgaaagtagatatcagctaagtttggtgttatataagtcagggctttacagagaaacagaatcaataaggtgcrtgtgtgtgtgtgtgtgtgtgtgtgtgtgtagagagagagagagagattgatttcttttaagaaattggctcacatgaatgtgagggctggcaagtgcaaaacgtacaaggcaggctggcaggctggagatctcaagaagaactgatattgtagtcgtgagtccaaagacagactgaggcagaaatccttctctcttcaaaggacctcttaaggccttcaattgattggagggcaatctgctttactcaaagtctactgatgtaaattttagtcacatctaaaatataccttcacagcaacatctagactggcatttaaccaaacaagtgggcatcatagcctagccaagttgacataaatataa

SEQ ID NO: 374917 - DNA, 452 bp, Homo sapiens
ggaagaagctagattgaaagtagatatcagctaagtttggtgttatataagtcagggctttacagagaaacagaatcaataaggtgcatgtgtgtgtgtgtgtgtgtgtgtgtgtgtagagagagagagagagattgatttcttttaagaaattggctcacatgaatgtgagggctggcaagtgcaaaacgtacaaggcaggctggcaggctggagatctcaagaagaactgatattgtagtcgtgagtccaaagacagactgaggcagaaatccttctctcttcaaaggacctcttaaggccttcaattgattggagggcaatctgctttactcaaagtctaytgatgtaaattttagtcacatctaaaatataccttcacagcaacatctagactggcatttaaccaaacaagtgggcatcatagcctagccaagttgacataaatataa

SEQ ID NO: 374918 - DNA, 584 bp, Homo sapiens
ttattaccagtagaaaggaatgtctgggttaagataaggggatgtgaagaccaaggttttattatgcaggtgaagcttccaggtagcaggctttagagaaaatatattgtaaatgtttcttatcagacttmaggtctctgttgatgctaatgctggaggggcataataaggcatgtctgacctcagcttccatcatggcctgaaccagtctttcaggttaaattttagagtgcattggttgaggagggagtccattcagatggttgcagggggccctttgaattttatttttggtttacactttcttctagtagttttaaagtttcaggacttacatttaagtctttaattcattttgagttaattttttgtgagatatgagataaaagtccaattttattcttctacaggtagatatccagttttcacatcagtattcattgaagagactttccccattgtgtgttcttggcatatttatcaaagattaattacccataacatggatttatttctggccttacattatgttccatttgtctatatgtctgtttttaagccagtatcatgctgttttgattact

SEQ ID NO: 374919 - DNA, 584 bp, Homo sapiens
ttattaccagtagaaaggaatgtctgggttaagataaggggatgtgaagaccaaggttttattatgcaggtgaagcttccaggtagcaggctttagagaaaatatattgtaaatgtttcttatcagacttaaggtctctgttgatgctaatgctggaggggcataataaggcatgtctgacctcagcttccatcatggcctgaaccagtctttcaggttaaattttagagtgcaytggttgaggagggagtccattcagatggttgcagggggccctttgaattttatttttggtttacactttcttctagtagttttaaagtttcaggacttacatttaagtctttaattcattttgagttaattttttgtgagatatgagataaaagtccaattttattcttctacaggtagatatccagttttcacatcagtattcattgaagagactttccccattgtgtgttcttggcatatttatcaaagattaattacccataacatggatttatttctggccttacattatgttccatttgtctatatgtctgtttttaagccagtatcatgctgttttgattact

SEQ ID NO: 374920 - DNA, 621 bp, Homo sapiens
agagtaaagtgaaagcaagtttattaagaaagtaaagaagcaaacaatggctactccataggcagagcagtggcatggtctgctcgactgagtatacttatagttacttcttgattatatgctaaacaagatgtattagtctgttttcatgctgctgataaagacatacccgagactgggtaatttataaagaaaaagagatttaagggactcacagttccctatggctggggaggcctcacaatcactgcaaaaggcgaaaggcatgtcttgaatggcagcagacaagagakaatgggaacaaagcaaaaggagtttccatttataaaaccatcagatcttatgagacgtattcactaccataagaacagtatggtgtaaactgccctcatgattcaattatctcccacctggtccctcccacaacacatgggaattatgggaggttcaattcaagatgagatttgggtggggacacagtcaaaccatatcacaaggggtgaataattcatgagttttctcagaaaggagtgggcagttcccagaactgagggttcctccctttttaggccaaataaagtaacttcctgacattgctatggcatttgtaaactgtcatga

SEQ ID NO: 374921 - DNA, 592 bp, Homo sapiens
actgctcacatggtgcctggatatggttcagagacagagttgggtatgtgaagaatcttgtctgagaactggggcacgattactcccactgcattctattgacaaaagtcacattccagtccagattgaagaagtggacaattggccacctcttgatggatggttaaaaaaaaattgcaaaacgtgtggatgtgaaaaagagttatatggtcatttttactattatctttatataaaggggataatatggcatgtgctyttttgtgtcttctggcgtttttttctgctaacataaaatttttgagggttatccatattgttaagtcagagtgatttaaaacaacagaaatgtattatctcatggttctagggactggaagtctgaaatcaaggtgttggcaaggccatgctctctccatcggctctaggagagaatacttcctgtcctcttctagctttggtgtgaagactaaactctgacctttttttcttaatcttatcttgctcaaattccttcttaaggggtttggtgagcacgccctacaaaccctaaagtctcatcagaggagttttatttaaccctgtataacat

SEQ ID NO: 374922 - DNA, 551 bp, Homo sapiens
cttattttacccagcccctatttaagatggaatcactctggtttgagtgcctctgacacgtcagcagactattttgggactgctcacatggtgcctggatatggttcagagacagagttgggtatgtgaagaatcttgtctgagaactggggcacgattactcccactgcattctattgacaaaagtcacattccagtccagattgaagaagtggacaattggccacctcttgatggatggttaaaaaaaaattgcaaaacgtgtggatgtgaaaaagagttatatggtcatttttactattatctttatataaaggggataatatggcatgtgctcttttgtgtcttctggcgtttttttctgctaacataaaatttttgagggttatccatattgttaagtcagagtgatttaaaacaacagaaatgtattatctcatggttctagggaytggaagtctgaaatcaaggtgttggcaaggccatgctctctccatcggctctaggagagaatacttcctgtcctcttctagctttggtgtgaagactaa

SEQ ID NO: 374923 - DNA, 592 bp, Homo sapiens
actgctcacatggtgcctggatatggttcagagacagagttgggtatgtgaagaatcttgtctgagaactggggcacgattactcccactgcattctattgacaaaagtcacattccagtccagattgaagaagtggacaattggccacctcttgatggatggttaaaaaaaaattgcaaaacgtgtggatgtgaaaaagagttatatggtcatttttactattatctttatataaaggggataatatggcatgtgctcttttgtgtcttctggcgtttttttctgctaacataaaatttttgagggttatccatattgttaagtcagagtgatttaaaacaacagaaatgtattatctcatggttctagggactggaagtctgaaatcaaggtgttggcaaggccatgctctctccatcggctctaggagagaatacttcctgtcctcttctagctttggtgtgaagactaaactctgacctttttttcttaatcttatcttgctcaaattccttcttaaggggtttggtgagcaygccctacaaaccctaaagtctcatcagaggagttttatttaaccctgtataacat

SEQ ID NO: 374924 - DNA, 528 bp, Homo sapiens
tttagagaaattgtctcatatgattgtgagagctggcaagttcaatatatgtagggcaaactggaagcctggaacatgagataagaattgttcttgcagtcttgagttcaaaatctgcagagcaggccagcaggccaggaactcaggaaggacttctatgctgcagttttgaggcagaattgctgctgcttcagatagctttagtctttgttcttaaggccttcaactgatttaataaggcctacccacattataacaggtaatgcactttactcaaagttaaatgattataartgttaatcacattgacaaacatcttcacagcaacatctacactagtgtttgaccaagcaattgggcatcacagcctagccaagttgacatataaaataaaccatcacacccacttgcaaattaactagaagttactgccaaactctatggccccctttgactctattattctataattttatttttttatgattctttcttatttatatagctgctcaaaatagcaaaaggagg

SEQ ID NO: 374925 - DNA, 568 bp, Homo sapiens
aacattgtttaggatgaatatctctcttgttctgcctctctaattctcagttttgtttttggttttgcgaacaaggaaaaattgaacagtatctgaaacataatttgttctactaggacttttcttgatgaatcraatcctcgactattgttattcaatgtaaagtgttatatatgctattttaccattcacaaagtgtcttcctatgcacacatatgcttttcccacattctaacaataatcttctaaggccttgggactcagagttggttcagggaccaacatcatcagcatacatgtgggcttggtagaaatgctgcatctcagactctgcacatcacacatcagatctatttaattacaatctacattttaacacaatccctagatgatttatatacacatttaaagtttgagaaaactgctttagtgtatctctaaagagggcttttatgtaaatgtcagaggcaaatttaaatatacattttttactaggccctttctattgcaccatgcagtctatacatgtttccaattttataatcaggcttaaagccagaacaccata

SEQ ID NO: 374926 - DNA, 540 bp, Homo sapiens
gtctcaggctatacacccatgctgccatttagaggaggaagaagagtaggaggaagataaccatagctgccttagagggaagttagccctaaacacacacctatgtgaccygtcctggccctttctcaagaaaagaaaggttgtcaggggatgtaaagctcctgccatgaatgctgctagagaagaaggctgcagaatgtgaagttttgtttagtcttcatcaccctttcatgtcctcatttctctgctgataaagccaaatttcttggtccagcatgagattcacacctttggagatgatcttaatgttctcgtctcactttttctgtcctacgtacctggaaaaccccaattcagttaaactcaactttctaactattcagatcccagaaaacttcaatggatgaacattgttggagagaaattacgcggtttgggtgactggactcactggaaatttctgaccataaattttaaatgggtgttcaatacaggcagagagacttactacacttccttagtaaattcatttcttgttct

SEQ ID NO: 374927 - DNA, 597 bp, Homo sapiens
ggtgccggtggtcatatgggctgagtagcagagttgatgcaactggaaatggatatctcaagaagggactgattgatagttggagagcagcgggtgcaccagatcaggtgggcaaactcttcgttggagaacagatgtgggaagacaatgggaagggattagaagcccacactgatctgatagatcattggcagcctctggtggaagtgtctgaagaaataggagtggaaaaaagggagcacggaggacttgtttgtccacagttgaggatgactgagctggcaaatgttgagtctatctggtctctatgaccttgtcagtaaccagatgtgttagtccatttttacactgctgataaagacatacctgagaccgggtaatttataaagaaaaagaggtttaatggactaaaagctccacgtggttgggaggcctccaattatggcagaaggcaaaaggcacttcttacgtggttgcaggcaggagagagaatgagagccaagtaaaagggatttccctttakaaaactatcagatctcatgagacttattcacaaccatgagaacagtatgggagaaaccacccacattattcaat

SEQ ID NO: 374928 - DNA, 574 bp, Homo sapiens
atacccataatctaattttagaatattttcatcacccccaaagaaaccttgtacccattagtagtcacaccccttaacccttggygaccaccaatctattttctgtctctaaatttttcttttctgggcatttcatgtaaatcgtatcatagaagacatggtgatatggtttggctgtgtcccacccaaatctcatcttgaatctgttgtggaagggacccactgggaagtaactgaatcatgggggaaggtctttcccgtgctgttcttgtgagaatgagtaagtctcatgaaatctgatggttatataagggggagttttcctgcaaaagctctcttttcttgtctgccaccatgtgagtcgtgcctttcaccttctgccatgattgtgaggcctcacccagccatgtggaacgtgtaatgtccaataaaccccttatcttattgtaaattgcccagtctcaggtgtgtgtatgtctttatcagcagcgtgaaaatggactaatacatatggtcatttttgactggcttttttcacagagttcatccatgctttagcatttatcagtacttc

SEQ ID NO: 374929 - DNA, 549 bp, Homo sapiens
gcttctgtagtctttttctgcctgtggtataaatatttcyatgtaagccttttatagtaagtttgatcatgttacatggcatgtggaggtggtcagcatattgaaatataaacacgagtcactcttgtgaaacatttcataaaacaggctataaataaaattattggtgctttaagggataacatttgaaggattttggttctacaaacctttctttcacatcagagaataggatttgcaggagaaattctttgctaatgtcagttctactgtaaaattatctccaggaaaaacaaacaagaagttaatttgcagcatctatttcttttctccagctgcaagaaaacattatgaccatctgagaggttccttcaaccaaaacccaggcaggttgccttaatattattgaggctgacagtgtgagtctgcccagtctagctgacagaccttttaacatgtatatatctgtgtgtactggaacatagctattcatgtaaatgagaatgatctcctctagacagtgtctttaaaaaagctcagagttctttt

SEQ ID NO: 374930 - DNA, 450 bp, Homo sapiens
aatactgtagcacacagtctactcctgtggttgctgtcctccagttggagctcttgaagctggcagggcacaggacaggtacctgggggcagaacttcctctaatcatgayaacatgagaagttgaaatccagattgaaagttcctgcaaaatctttgattgaactagaacaagggaccagactcatctaggagctagtagaaaattataaacatgcctttgaggtagaaacattgtattaacattgcctctgactttcagaatgcctaacaatcccatgtggaactggttagcagtggtatgtgggctctgtacatgacagtggagagcacagggtgaggaataagttgctatttcacatttcttgtccatgatgttttttaaagggttcctgccatgatggattattggaaacagtgtcttaaattaagacttaaaggttctatttct

SEQ ID NO: 374931 - DNA, 593 bp, Homo sapiens
ctataaagattttctccctggccaatgtctttttctgagccattctaaatgccaaaattgattcaaaaaatatggatggagagattgtatgaacactgcatacaaaatgattcagttcagtaaacattttggcatgtggattctgtgcttggaactgtgctgagcagagggtgagggagacaaaatcacagagcagttaaaaatgtgagcttgaattggatggttttgattccactgttcactgaatatgtaacctagggcaaattgctgtctttttgcattggtcttctaatacataaaaaggggataataatggtatcaacctaaaagattattttaactattacatgaactaaggcatgtggcatggtgagaacaatgccttrtacatagtgttggtcatcatcatcgtcatccttatttaaaagcactgcagagtctgcacactgctgaagggcaaggattgaggcgcctccacctttgcatccccccagtgcctagcacagtacctgggccacagtagctattcccatttttaaaaattattcagatgtagtgaaatgcttcaaattgcttactatatcctattagaa

SEQ ID NO: 374932 - DNA, 615 bp, Homo sapiens
tacttgcttttagggataaatattagctatgtggaaagtttgttaatatagattagaattattttatgatccttgagaaattttggtctgatatgtttgtttccctaattataaataattagatttggctatgatccttaaggtcactgccagcctaaaatcccattattttagcaatctaatttcatcctcacaataatttataaaaagaaactaaatataaagaggttattttcttagaaacatacagcaagttaggaaggcaaatttagaatctaggccccttgttatcagttggttttcagtaaatagaagacactcttatttactgaataactttttcacaggaaaatttttttctggtgatttcagacagcagaataattttatcaacaatagcaacagcaaatgcttatgcagtacgtattatatgtcatgcactattctaagtgtttaacatataataagacatttaatctttacaacaactctatgaaacaggccttgttactctcatatttcctagatgttgaaactgaagcccagagaggttgagcagcttgttcacrgtcacacagcgagaaagtgatagagtcagaatttgactccaaatca

SEQ ID NO: 374933 - DNA, 548 bp, Homo sapiens
ttgagcatcttttcatgtgcttattggccatttgcatgtctttggagaaatgcctatttaaatccttttcatatttttaaattgggttatttgtattcttattcatgagttgtaagagttctttatgtattctgaatactttatcyttaccacatatatgatttgcaattattttcttctattttgtagtttgtcatttcattttttaaaggtaatctttgacacacacaagtttttaattttgatgaagtcttatttatcaattttttcttttgttacttgtgtttttgatgttgcgtctaaaaagtaattgcctaattcaaagtcacacagtgcacttatgtttccctctaagaatttcacgatttatgtcttacatttaagtcacaatactttttgagttaatttttgtatatggtgttaggttggggtccaaagtcattcttttgcatgtagatacccagttgtctcagcaccattctttgaaaagactattttttctctactgaatgatcttggcaccctcgttgaaaattatttgactatag

SEQ ID NO: 374934 - DNA, 580 bp, Homo sapiens
tttttatttcagtaattgtacttttcaactccagagtttatttttataaattctataaattgatactctctgttgacattgtcttttcttcatttatttagatatgatattctttagctcttgaacgttttaagtatagccagtttaaagtttgtgtctagtaaatttaacatctatgctttccttgggccccttcctattagttgctttttaccctgtgaataggtcttactttcttatttcttcgcatgccttttttatttttttattgaaaactggacattttaaatacaataatgctggaactctgggatttagatctcgccaaactgttttggcagtccttagccttcattcctgcttgtacaragtggtaagatcagccagaggtgagatttaaggccttctaaagtctttcttgagcatgcacacagtcatgggcaagcacatggccttctggatttccagaaatatatgtgagtttttcatagtccttatggacatctcttttcccaatcctttcttctaagctttttgattattctgttgtttgcctcagttgttatctgttgcctcacac

SEQ ID NO: 374935 - DNA, 617 bp, Homo sapiens
agtttatttgctatcagaagtatgaaatccaaccctatacctatctactacaatactcaaatcagaggtgaagtgcaaggagacacctccaggatttaataaccagttctttaaaagtaaacttcttagactggcatttaatcaagtctcaataaacattcctagcctcatatccttcttcctatgaaaatgaataatgcttctctgagaagaagactatgaaaatcagagatgcggtatgcctttagagaagaaaatcagctctatttaataagcaactacttcaattttgtttatccaggtgcagtacagtatattccaaatatatatattgactgggaaaagttaaccccttggttagatttattaggccatgtcagttgtccaaaccagatcatgttttttcataattcattctttctagcatgaagtctcaacacttacttttctgacacttgaagttcaaaaataagatgccataaggaattaaaaagtccatatctaacaggcaccttaagaatgataggtattcaatacattatctcataataatatttacttggaacatgcagtaggtctaagctgcaataktaagactagccaaaaggcactattat

SEQ ID NO: 374936 - DNA, 433 bp, Homo sapiens
gctcccacttatacatgagaatatatgatatttgattttccattcctgagttacttcatttagaataatggcctctaactctgtctaagttgctgtaagggccatkatttcattctattttatggctgagttgtattccatggtgtatatataccacatttcctttgtccacttgttggttgataggcatttaggtttgttccatatttttttaattgtgaattgtgctgtataaacatgcatgtgcatgtgtttttcatataataacattttcctctgggtagatacacagtagtaggattgctggatcaaatggtagttctactttacgtatttaaggaaactccatgctgtttttcacagtggttgtactggtttaccttcccaccagcagtgtaaaagtgttctcttttcatcacatccacaccaacat

SEQ ID NO: 374937 - DNA, 501 bp, Homo sapiens
ttgcatttatcaagactgtcatgaaatatttacttatgcaattatattttaatgattgtgtttttgctaaaaaatgtatattccaaagggtgargatcaaatatattttgttttctacccatcacagtgcctaacacattaggcactcgatgcctcatatgaatgaatgaatgagtcaagcatagtggatactgggggaagaaagataaataaacccttatataactcttggagaacacacaatataacaaagaagagcaggtactcatacaacagttaagttttagggctagcttttctagaaatgttttaaaataaagactattcacttaggagaggatttatagcattcctgacttgtgaagatcactttgtcccacaacatataattcaagctacttactataagcctgaatggttgcactacaagatctacttgcagattttaaagaattatgaattgaatgcctttgatagagtaaatgcatttgaagcacagta

SEQ ID NO: 374938 - DNA, 501 bp, Homo sapiens
ttgcatttatcaagactgtcatgaaatatttacttatgcaattatattttaatgattgtgtttttgctaaaaaatgtatattccaaagggtgaagatcaaatatattttgttttctacccatcacagtgcctaacacattaggcactcgatgcctcatatgaatgaatgaatgagtcaagcatagtggatactgggggaagaaagataaataaacccttatataactcttggagaacacacaatataacaaagaagagcaggtactcatacaacagttaagttttagggctagcttttctagaaatgttttaaaataaagactattcacttaggagaggatttatagcattcctgacttgtgaagatcactttgtcccacaacatataattcaagctacttactataagcytgaatggttgcactacaagatctacttgcagattttaaagaattatgaattgaatgcctttgatagagtaaatgcatttgaagcacagta

SEQ ID NO: 374939 - DNA, 641 bp, Homo sapiens
agtgtatatgtatcactttctttattcaatccaccattgacgggtacctgagttgattccatgtctttgttattgtgcatagtgctgcaataaatgaatgcaggtgtctttttggtagaataatttattttcctttgggtatatatgcagtaatgagattgcttggtcaaatagtaattttatctttacttcttcgaaaaatcttcaaactgctttgcacaggggctgagctaatatgtatttccaccaacggtgtataactgttcccttttctctgcaacctcaccaatatttgttatttttttacttcctaataatagccatcctggctgatataagayagtatcttattgtggttttgatttgcatctctctgatgattagcgataagcattttttcctatgattttggtcacttgtatgtcttcttttgagacatgtctgttcacagaggacacccattttcaatctgggttcatacaaagtcagtcattgtttggtgactttgttgtagcagcagctgccacaggcatatgtctccagctggagattggagcacttgacttggagtgagaaagggctcctacagccagaattgagcaataagtgtggagtgtgccatagacataggcattggaatt

SEQ ID NO: 374940 - DNA, 554 bp, Homo sapiens
cagaccctaggacagcgcctggaacacactcatttttctactagaattcatgaaatgaattgctggatgttaagagttatgacaggggtaagcacagagctctatttggaagtacataggagagagagttgacccagtctttgatggcatgtcatatggtttccaggaggaagtgacatccttcagcaccggcagactgttcatcattaggggcagaggtaaaaagayaggaattccaggaagcaagagggagggaaaatatgcatttaatcctcataatggcagtttaagatgggcatttttatccccattatctgaagtgagaaaaagaaactgagagtgagctatgtgaacttgcccagagtcccagagttagtacatgtcagggataagattaaatcattccactgcacttacctgcaaagaataggactgtacgagcctcaaaatcagaaatgatatctagtgcctgaaattgttcttcatagaccccattcactcagaaatgttgctgtgatgtttttcctgtgctatgaagagtatcacaacatgtc

SEQ ID NO: 374941 - DNA, 346 bp, Homo sapiens
attttttcaaatacaacgacwataaaaacacttgaggctgagtaatttataaagaatgatttggatcatggttttgtaggctatacaagaagcacaacaccattatctgcttctggtgaaggcttcagggatattccactcatggtaaaaagtggaggggagcaggcatcatatagcaagagaaaaggaaaagtggaggaggggaggtgccagactctttttagcagcacatctcatggaaactaagagtgagagctcactcattccccccagaagaacatcaagccattcatgagggatctgcttccatggcccaaaagactcctaactaggacccattccaaca

SEQ ID NO: 374942 - DNA, 572 bp, Homo sapiens
tacctgaccctttctttcttcaactgactatcccttatctgctgagcattacatgtctttcgcagagctaccaccttgatttcaagttgattaagatttgaaattagtccaaagtgcagactttttctgcactttggtaaatattttcgaaagaacaaacacaacagctttcttcagcactatgaaattcctgctttctcccaagtattgtttttttttctttcctattcacctttgttggtttttttccttgtgttcaactgtatccacttgagatcaggagtcaaacattgttgtttagtacatgaatcgatgggtacttcacttggtttcctaatgagaattcactcaagtctaggatagaattttgaaagccacctgctgttaaaattatttgcaaaagtctaagtagttccctttcagtaaagtttaayagaactcctaaaaatgctgggaaatttttcattaatagttatgatggagaaaacttgtagcattcctagtatatgcctaataaggccaccagaaatgatgcaatggctttttctccttatttcttgatgtttgggcaa

SEQ ID NO: 374943 - DNA, 567 bp, Homo sapiens
gtggtagaaggtttaacgttcagttcagagtgtccctatagaaacacttacaagtcactctaaagatgatcttaaactctacaagcctggcatggattacataaaactgaccacatactataacaaattacaaaggttcttaaagagtttaatttctctctacatagaatagatttcttacaatattgtacccggaaactccatgttgaaattctagaaattttgcctattttagaactgcagcttctttctacatatggtgtagagtggtggcaataaattcygccttttgtttagtttctgtttaattaattaaaacaatgtttatatttactcctcactctccttacacagtctaaaagtaaatggccaacttacatatttttagtttccagagcaaatcaattgggctaccttgggttccgaataccacttcagtgtttgttgttgttggctttgattcatacttcttatcagtttccaagtagagacatcactgctgaaagatcaactgaaaagtgctatctttgtcttctttcttatctaatttggcttatccccatgata

SEQ ID NO: 374944 - DNA, 528 bp, Homo sapiens
catgtaatactttattacattattcagtaaaagacgaattgagtagaatttatgtcctatgggaaatattttaaatctgtatttccaagctaaaaatattttatcctacaaagtatgtttacaaaacatttacagagaatgcygtctgagactttaaaatcaataatagtttctatttcttagcaagaagcacatctcagagcagtttttctcacattttaaaaggaattcctccataaatcaaacataaatgtatatccagtttttaactttttgagaacagctaattaaatctgtttttcacccccagttgcctctggtttaggcacgctgtgtgtggcacttcccatggtttgtcattttgctttaatggcagggggaggaagccagccaggctcagtaagcacgctgcatatcaaaatgtcgccatggcagcgtttgtccacttgtcagagtccttctgaaatgactcagccattcattttgttgaatcaatattgaagcttttgagatttattacttgaggtt

SEQ ID NO: 374945 - DNA, 576 bp, Homo sapiens
agggggttgtctcacccttcctgttatttaggtgagggaagtgagccacctagagtcaggccccaggaaatgttttccctggctcgaggagtcaagggagtcaacaaattgtaatctaacttattttggtttgaaaattaactgagtcattggtagtcaccattggactctatggaatattagcttrttaaataaactcatgacttcatacatgatttttatcacaaatgtgttaaatgagtatcataatgtgtttgaatttatgtatgactttggcaaaagccgcaactacttttgcaccaacctaattaatgaatgtaaagcattttaatgagtctgatgtctctcagtgttgatattagagacgttgcactttgacaaccatgctaactgttacgacaatatccattttaggcacaaatagctggggtgcagggtgcagagcagtgcttttcagaatgtctgaatatttatacattagaaagcctttgaagcttggttttaaattgtttttcaaagagtatgtttttggttttctggtaagtgcctctgcaaaggttaggagttttgcattgc

SEQ ID NO: 374946 - DNA, 556 bp, Homo sapiens
aaacacctctaggtgtttagagagaaaatttagtgctagaaatgaaggtaaagttcaaagattagaagttggcttattttaggaacagtgttgaaaggaaagaagaagaaagggtgaagaagaggagcagaatgggactgagttgaaagagaaaaagaacttggccactgagtgctgcctgtacaagtgagtttaaaaatatagcactagggatgggagatggagagcagacagtcgtcatccatactccagagcttagcagctagaggagaatcaatatccaaacaaatgtttagctatgctcaggacaactgcagttggctcccactataggggcagaatttcagtggcattactgaaaaaaattcacattcccagtgataatctactacacycaacaattggaagtgttctatttgcagttcacataaaagcaacacagcacaaaactctggacaatttctcaagagaagaactttaataactcttcctaaattagagtcaaaggtcagagacagtctggcagttaccaagaaaacagttctttcccagagtt

SEQ ID NO: 374947 - DNA, 631 bp, Homo sapiens
tttttcaattctaaaaaaatggccagtaggattttgataggaattacattgaatttgtagatatttgtaggaagtattgtcatcttaatgatattaattcttccaatccatcaacacatcatgtctttccatttctttagatattctttattttcccacagcattattttgtagttttcagtgtacaaatcttacatctcttgataagagtatattcttaagtattttttgatgctattacaatcttagtttctttttcagattgttcattgttagtgtacagaaatactagtgatgttgtgtgtgtgtatcttgcatctttcaastttactgaagtcatttattagctgtaatgaccagtaaattcttgtatttgctccgaattcagtctgttgttatatgtggttttggctgaagtagatgaaaaaaatctggcctcatgcagatacatagttggaatagggaaaagtactttaatagtttttcagacaattgtgaatattcttctttgatattataccaagactcagtgatagcttcttaaaggtaagttgcaatgtagcatttgaagctctgaaggaaaaaatgaatttcaggaccccaaactcactatgcccaaggcaaagttaag

SEQ ID NO: 374948 - DNA, 659 bp, Homo sapiens
tgtaacattagagtactttgcttttagaaagttagtaaatttaaattactgttattaggttatgggagagggcaaagatcattttttttttggtggtgcttgccaaatacaaataagacagattaagaatgcttagaagctgaataattgatgataggaatgatgaagcttctcttgttccacaggagtaattctatagttttagaatgccccttagtagatgtaatagaattcaagtaattctaaacttgaaaaccttgttcctttcaggatcatattttcagtattaattacctggtggtcacaccatgggaagatgcttgctatggcattgacaaggtaaaagatgaagctaataaggtcratgcgttcattcaattctgcactagtaatgtttgtcttttcaggcccttgtcccatcactcatagatactgtacagttgtttattctgaaatgtaaagagatagagtcaactttcaaattgagggaaggttttatttttaatcgaagtcgattaatgcaaaattaattgaattatgactttctttcattgtcttctattgggtcctaattctcatttattttactctcttccttattctactccgtttctatatagttattgagacatagaaaaaaagactctttgactctttcc

SEQ ID NO: 374949 - DNA, 493 bp, Homo sapiens
caaatgttaattaagcagcaactgtgtttcaaatcctgctttaataaagcaycagggacatgcaatgaacaaacaaacccaaatctttgccctcttggagcttatgttcttgtgatgaaagataaaaacaaaataaataaatgaaattgtgttagatggtgataagtgaatggaggaacactgaatagggtaggagctgcagtgttttgggttgggggagagtctccaccctatgaaaattctctatccctgagagaggaactgtgcctagagtattggaggaacaacaaagataccagcatggctggagcagattgccgaagcagcgagcagtaggagaagaggtcagatagagccaaatgggaaaggactctgtcagccactgcaaggacttgggctttcaccctgagcaagatgggaaacgattggagggttctgagcagaggaggtcatcatctaccctttaaaaggatcccataggaaagtggaggca

SEQ ID NO: 374950 - DNA, 277 bp, Homo sapiens
tttagccaaaggagacgattagaaagcactgaccgcgcacttacattgggacgcscaggcagaggcaagactcgcgcgctcctaagccgaggcaggtcagcctaggcgcctggctgctggaagagtccattagggatggccaaggcagggtgttcccgacgccagagcgcggacctggctgcccgctgcggagagcagagtgcgcagcccggggcggccacccccgctccgctggtcaggtgagcgctgccccgggagccatgggtcctattggagc

SEQ ID NO: 374951 - DNA, 277 bp, Homo sapiens
tttagccaaaggagacgattagaaagcactgaccgcgcacttacattgggacgcccaggcagaggcaagactcgcgcgctcctaagccgaggcaggtcagcctaggcgcctggctgctggaagagtccattagggatggccaaggcagggtgttcccgacgccagagcgcggacctggctgcccgctgcgsagagcagagtgcgcagcccggggcggccacccccgctccgctggtcaggtgagcgctgccccgggagccatgggtcctattggagc

SEQ ID NO: 374952 - DNA, 504 bp, Homo sapiens
acattagctccacatttgtttttaattttgaattgcatctaaacatattctgtgaccaccatgaacacctttgttgtaattcctggactttggctggctggagtctgtcttctagcaattttatcaataaggactttgaaggacaacattttctggattccagaatgttcaagactttttgtttgtaccctttatatttgaagaatagtttggctgtatataaaatctttagctcacatttctttccttgagaatattacaggtgttactttaagaattttggcattggatgaaggtatggagaagtctgaggaacacctatacattttttcctgttgtaaattatctgaygattttgtctgcgattctttctttatctttacattcagtatacttactggatgggtcttggtgttaactgttctgggttattattcctggacacagagtgtactctttcagtatgtgattgtaggtcatcttttacattaggaaagttttctt

SEQ ID NO: 374953 - DNA, 504 bp, Homo sapiens
acattagctccacatttgtttttaattttgaattgcatctaaacatattctgtgaccaccatgaacacctttgttgtaattcctggactttggctggctggagtctgtcttctagcaattttatcaataaggactttgaaggacaacattttctggattccagaatgttcaagactttttgtttgtaccctttatatttgaagaatagtttggctgtatataaaatctttagctcacatttctttccttgagaatattacaggtgttactttaagaattttggcattggatgaaggtatggagaagtctgaggaacacctatacattttttcctgttgtaaattatctgatgattttgtctgcgattctttctttatctttacattcagtatacttactggatgggtcttggtgttaactgttstgggttattattcctggacacagagtgtactctttcagtatgtgattgtaggtcatcttttacattaggaaagttttctt

SEQ ID NO: 374954 - DNA, 597 bp, Homo sapiens
taccatatattgggtggcttaaacaacaaacatttatttctcacagttctggaggcttccaagtccaagatcaagataccagcagatctagtgtctgatgaggacagtttgcagacagctatcttctccttgtagccacacctggtgaagaataaaagctctggtccatccatctcataagggcactaacccattatggaggctccactcccattacttaatataaccctgatktcctcccaaagcccccaccttcaactactatcaatcaccttgggggttaacactttaacatatgactgctggggaaacacaaacattcagcacatagtacttgctgatctgagatataaaagaagacttctcacaatatatgcattgctcatttgtatgccttggtacataaattgctcattttgcccctgttttctgttgggttgttcatatcattcttttttatttataaaatcatttttaaaaaatattagaaatatgagctctttgtgtcttgtatgttaccacagttcactattaatagtttttccattctaaaggatcttaaaaggtcttccttatttatgacttacatttaaaata

SEQ ID NO: 374955 - DNA, 500 bp, Homo sapiens
taactaattaacttctctcttcctgagagcagaatctcaacaaagtgctcactgagacctgccctgacaaatctcccaggaaaggcagtgtgacgtggagcaaggaacaccacagtaggagtccaaagggcaacttgtttgtcttagctcttctactggtcatatgatcatgtatggatctccttccccgtagagtgatgataatacacgtgccctgccaagagcacaggccaatgtgtggcataaatcagatcaagaatctgcaagtactttgtaggtcataatgtgttgggcaaatgtaagataccactgatrtttgattccatgtaggccctgccctaacatagctgagtctctctatgctgcctacccaagtatctggtctcttaccatgaatggaacagcaggagccccacccttggtagccagaaggcagagtcatcctctgttggatgtttcattcaaacagctgtttcactcacacagttcatttctcccac

SEQ ID NO: 374956 - DNA, 500 bp, Homo sapiens
taactaattaacttctctcttcctgagagcagaatctcaacaaagtgctcactgagacctgccctgacaaatctcccaggaaaggcagtgtgacgtggagcaaggaacaccacagtaggagtccaaagggcaacttgtttgtcttagctcttctactggtcatatgatcatgtatggatctccttccccgtagagtgatgataatacacgtgccctgccaagagcacaggccaatgtgtggcataaatcagatcaagaatctgcaagtactttgtaggtcataatgtgttgggcaaatgtaagataccactgatgtttgattccaygtaggccctgccctaacatagctgagtctctctatgctgcctacccaagtatctggtctcttaccatgaatggaacagcaggagccccacccttggtagccagaaggcagagtcatcctctgttggatgtttcattcaaacagctgtttcactcacacagttcatttctcccac

SEQ ID NO: 374957 - DNA, 500 bp, Homo sapiens
taactaattaacttctctcttcctgagagcagaatctcaacaaagtgctcactgagacctgccctgacaaatctcccaggaaaggcagtgtgacgtggagcaaggaacaccacagtaggagtccaaagggcaacttgtttgtcttagctcttctactggtcatatgatcatgtatggatctccttccccgtagagtgatgataatacacgtgccctgccaagagcacaggccaatgtgtggcataaatcagatcaagaatctgcaagtactttgtaggtcataatgtgttgggcaaatgtaagataccactgatgtttgattccatgtaggccctgccctaacatagctgagtctctctatgctgcctacccaagtatctggtctcttaccatraatggaacagcaggagccccacccttggtagccagaaggcagagtcatcctctgttggatgtttcattcaaacagctgtttcactcacacagttcatttctcccac

SEQ ID NO: 374958 - DNA, 572 bp, Homo sapiens
gatcatgagggcgtttcctaaaaagtgtcctttaagttaaaactaggatgtatgccgttgtttaagtgaaaggctgctaggattatcttttcataaaataaaataccacttgctctagaggcggagagactacacaaaacacaaagacgtgaatgtgatcacttggcagccggacagaagttaggaaaagatacctgtgctctaaaataaagaatattctgtgcataccaaaaaatgtaaactatgtagactcttgtcattccttatcaaaatatactggaagatacaagaactgcaagactttatttcctcttcagtaaccacttgrgtttcattttgaagaagagggagagaaccttccacaaaataactttgtcattgttgattactcgccagatcccagatatgattcattcctttatttggaatcggaaaagagccacacaagactgtgagtacatataaaaccagatagaccagtgaggtcaatgttgatttgtgcaattagccagacctgggagctctcagtagaaactgctttgatttttgacttttagaaagttattctacca

SEQ ID NO: 374959 - DNA, 565 bp, Homo sapiens
aaacagaaaagactggaataaataatcctttaatgcaaagacattagacatatatccacaagggaaaaatgccctctctaaatggacaaaacaaggaaccagtgctgaccctaacaagatggcagtatgtgagctctctcaccaagaattcaaaataccagttttattctgtgtaatctccaagataacacagaaaagcaattcataaatttatcagagtcttctgcgtggtcatgtcaagccgtgcctgggcctggaactgagctgcagcccctcagctttgcccatcacctcccaaccatggacccccgcaaagtgaacgagctttgggcctttgtgaaaatgtgtaagccagatctgaccattctgcacaccaaggaaatgcacttcctgagggagtgggtggagatcrtggggggtaaagtaccacctgctactcagaaagctaaatgagaagaaaataccaaggggaaaaaaaaaactgatagtaagaaggtggaggaagacttaaaggcagatgaaccattgttagaaatagataatcagtgccatgaagaaaagtcag

SEQ ID NO: 374960 - DNA, 536 bp, Homo sapiens
taaacctcttttcttaatagagtgccagatctcaggtagttctttatagcaatgtgagagctgactaatgcagcctataaaaaaattactagtctggagccagtttaccactgagatagatgtgaaaaataaaggataaaacaagaaagttgatgtgttatgctcatttataaatataatcagatattataaatgttttgtttttaacttaataattttcaagacacttttcatgttacctcatttggytcccatatttaagaaaattgatataactttcatattctggaaagaaaattgttcagaggaccaaggttacatgacaagtgtgaagccaattagcagtaaaaataaatgacaatatgcagaaaaggccttcagtaaaattcaacatcgcttcatgttaaaaaattctcaataaactagttagttacagaacatatctcaaaataataagagctgtttatgacaaacccacagccaataccatactgaataagcaaaagctggaagctttccctttgaaaaccggcaca

SEQ ID NO: 374961 - DNA, 503 bp, Homo sapiens
tgccttcgtgactgaattacctctacatggtccctcccatgacatgtggggattatgggagatacaattcaatatgagatttggggggggacatagccaaaccgtaacacccccatttaaaacacacctcactgtgacaattgattccatgtrttcaggactagaatcacagcatcagtgaagaagccaagtatctgccagagaatttggccctcaaatgaatttctccatggacttttaaataaattatttttcttacctcatggcaaatgtttaaagaagattttacattaatctttagcattaaaaattaatcaagataaatgaaggactcattactggagctgaagtagactgttttatcagaaagtcaccaatctcagataattacacagaattttaaacagaaggaaagaaagtggagcttgtttgggaggtgcttacttgccaccctatgtttaaaggcaagagcgtagagattgtttttccactttaaatattat

SEQ ID NO: 374962 - DNA, 448 bp, Homo sapiens
cggcctgataatatgtgaagaggcaagattcagcaggtaacagaagatattttctttttcatcgatgtgggctctttttattcctaatctccctcttaacatgcagtacacttgacagtaaaaatgcagtwagctgtgctgcatctttaaacattaataaacttatatttaaatagtgctttggactctaagtgtttttgcaacccacagactcttcaagtgttggcaaatgcataactaacatccctgaactccccaagaacaattaagagagaaattgtagagagcttaaaatacagtcttcgacagatatccatgcctaattttaaaatgcatttcatacagattatacaactttgagcaatgccatatttacttaatactgcatcataagcattgtcaattattattaaatattttctagatacaccaaaacaacacaaaaagt

SEQ ID NO: 374963 - DNA, 612 bp, Homo sapiens
aaatctttatacctacaagtcacttaatatcatctcattgaaaaaagctagtaacaaaacaaaatattttaaacaggacattgagataaattaaccttgttaggtaaaatgtggttttgcagctaaagtgtaaattttctttgaattccattgattgagtatcctacagatcaatatatgagttattagcttctggggttttaaaagtttcttttagttcttggcataaataaatcataattcaagcaattcatctgttaggttttctaaagtaaagttgattctacaggccagaaatggtaaatagtagagcttaagtttgctaatatgatctctcaactttgtaattacatttctcttctcagaacatcattccccgccccctgcaaaaaaaaatgttattttcttgcttgctctacatgctatgttaaaagccctccagctgactcaaaygggcagccagtgctggaagcaatgaatagtgtttgccatcaaacattgccttgaataagcccaggtgttgctgaagaagcacaagtcagacttactgaatactcattatcattttacttaagccttgtttaatgcattattaaaaaaaatagtaattgt

SEQ ID NO: 374964 - DNA, 612 bp, Homo sapiens
aaatctttatacctacaagtcacttaatatcatctcattgaaaaaagctagtaacaaaacaaaatattttaaacaggacattgagataaattaaccttgttaggtaaaatgtggttttgcagctaaagtgtaaattttctttgaattccattgattgagtatcctacagatcaatatatgagttattagcttctggggttttaaaagtttcttttagttcttggcataaataaatcataattcaagcaattcatctgttaggttttctaaagtaaagttgattctacaggccagaaatggtaaatagtagagcttaagtttgctaatatgatctctcaactttgtaattacatttctcttctcagaacatcattccccgccccctgcaaaaaaaaatgttattttcttgcttgctctacatgctatgttaaaagccctccagctgactcaaatgggcagccagtgctggaagcaatgaatagtgtttgccatcaaacattgccttgaataagcccaggtgttgctgaagaagcacaagtcagacttactgaatactcattatcattttacttaagcctkgtttaatgcattattaaaaaaaatagtaattgt

SEQ ID NO: 374965 - DNA, 597 bp, Homo sapiens
atatgaaaatgttttccatttatgattcagtattaggtaaatattttcttaaaaggcagaagataaaaagagctttcttgtatatacaaagaggaaatttcttacatctgttttaaacaaaacaaaaaaacgtacgtattttcagtatttgcagcacttcttagtgtttgcaacatatcttaaaagcatgtataaatcattgactctgctgtgaagattwaaagttttgtgtctgtgtgtaaaatacatacacaaatacagcaccttagaatggtagaaaattttaaaatattatattatcatgatgtagcaacaactataaacaagttgcttgagttaataaacgattattcctaagacacctgtaaaatgaaccttcatcatctggggatagatatttagcatgtcacaaaagctattttaatctggccattgcttatgcctccatcattattgtctgccttcagccctcctgcagccctagttctctctgtggagtctttgctgtctattgaatctgtcaacttccctttctgtgtagttccttgctccctgattcccctcttctcctctttgcctgactagctgccctacacc

SEQ ID NO: 374966 - DNA, 523 bp, Homo sapiens
ttcttgtatatacaaagaggaaatttcttacatctgttttaaacaaaacaaaaaaacgtacgtattttcagtatttgcagcacttcttagtgtttgcaacatatcttaaaagcatgtataaatcattgactctgctgtgaagattaaaagttttgtgtctgtgtgtaaaatacatacacaaatacagcaccttagaatggtagaaaattttaaaatattatattatcatgatgtakcaacaactataaacaagttgcttgagttaataaacgattattcctaagacacctgtaaaatgaaccttcatcatctggggatagatatttagcatgtcacaaaagctattttaatctggccattgcttatgcctccatcattattgtctgccttcagccctcctgcagccctagttctctctgtggagtctttgctgtctattgaatctgtcaacttccctttctgtgtagttccttgctccctgattcccctcttctcctctttgcctgactagctgccctacacc

SEQ ID NO: 374967 - DNA, 539 bp, Homo sapiens
ttaaacgacgcacagctcttcatatgtaatgttgtttctaccacaataattctggcatttggaaaaaaatagagacatttgtatcagaacttattcattttttaattaaaatagaacaaaatcaaaactctggcaataaatctaattttgaacttataattacaaagtttaaagttcatcattttgtcagaaataatatctgataaatgtattccaaagtgaaataaccacattaagctagggcttaaattaaggacagtgatttatatgaaatattcatgaaatgttatttttgagttggaatgatatgtaaccatttttctattccttttaagtgccgaaagctcttgataatatgacttcaaagtttgagtaagctgagttgctcagatttaatagtgttcctactcctttttctatagaaactctattgggaagtaagaaccagacggcttagtaaagctaaaaaagttccaaacatccttatttttcgaacagtgtatatattaraatttattgtgacagtggtattttaaaag

SEQ ID NO: 374968 - DNA, 482 bp, Homo sapiens
ttgtttccaatgcacccctttatgaacaacacttcttcatatacacatttgtatacatgtcttcagtattcatacacattcctgtagtgagcctctaaggacagaattgctgggccataagatatactgatgttttgtttatattacaarataacgttatgatttttaaaagcacctctactaacttacttcaaccagcatattgatacctatcgtcactaagatcttgacattttcagatgttttgttttccaaactaatggtggtaaggtatctaattgtgggtttaattagcattcttagttactaagttacttggttgtaagtttaagcatttttttctacattatgataggaaaatcatgtttatcttttcaaaaatatcttacccattattggttcttcatccttcaatgtacaacaaaaaagtagctcatcaagtttttcaaaaaacacttttgggattttgattggtgttttat

SEQ ID NO: 374969 - DNA, 583 bp, Homo sapiens
tcttgacattttcagatgttttgttttccaaactaatggtggtaaggtatctaattgtgggtttaattagcattcttagttactaagttacttggttgtaagtttaagcatttttttctacattatgataggaaaatcatgtttatcttttcaaaaatatcttacccattattggttcttcatccttcaatgtacaacaaaaaagtagctcatcaagtttttcaaaaaacacttttgggattttgattggtgttttattgaaccaatgaatcttttttccttttttttttttttttttagaaatgaaagctttatcatttttcagctttccgtccttaagcaagttatagctccccatttatacagatttttctaaatatctttcagtacaaatttacatgtttttacataggctgtatacatatttgktaatttattcctagatataacatctcttactgttttaaaattatatcttttggaaagttgcatgttctaaattatatttactaatgtatataaatgtgattggcttttatgtattgctattgtatatttattaaatttgagacacttgctcatg

SEQ ID NO: 374970 - DNA, 516 bp, Homo sapiens
tcctagaggaatcaaatgtgtcatcctatgtgactccacagggagagaactctaggaaacttgctcctggtttcctctggacttcacttcatgtgccttttctctctgctgaatttgctttgtatcctctcrctataataaactgtaggcagaagtatggctatatgctcagtcctgtgagtatacttagcaaatcatcaaacctgggggtggtcttggtgatcaacaacacagtgatattttcccagaaaatttttcatttaatttctattttctaaattattgtcataagtgtgttcatactacttgtgttatattttataatttaagaacaaaaactgttgttcctttttacatttaatatttcatgttaaatgtttttatttagattttttcttattagcctatattattttgtccatttctttagtattttaaaataaacttcttttagatacattgattttctctactgtatctttgttttctatttcattgttatttaattttatctta

SEQ ID NO: 374971 - DNA, 522 bp, Homo sapiens
gtctacaaagtgtattttgcggtacagtattttgatttctttcattacataaagggttaagttccaatttaacttttaaatatctttattgaacttaattgaattcagtaccctacattgtcttttgttgtcccaaccactaaaggtaagagcaaatgcaaattaaacatgaaagggttaattaattcaccctataaaaaataaagggagagmgagctccttcttctacttcttagagcattcattttagaaaactcaagattatagcttccttctctgtctctttgagatgcatgtaaattttttacaagctaaatacatctttttgccagttttatattccagtaacatctctctcaaaaaactgggagccatccctttgaaatataattatcaaagataacactcttatctccaattatctgtgggagggtaggagcctaacttctgtggacacctggctcccagttgtataactacttcctgtcataaatatatgaatagtttatttttcctttgaat

SEQ ID NO: 374972 - DNA, 522 bp, Homo sapiens
gtctacaaagtgtattttgcggtacagtattttgatttctttcattacataaagggttaagttccaatttaacttttaaatatctttattgaacttaattgaattcagtaccctacattgtcttttgttgtcccaaccactaaaggtaagagcaaatgcaaattaaacatgaaagggttaattaattcaccctataaaaaataaagggagagcsagctccttcttctacttcttagagcattcattttagaaaactcaagattatagcttccttctctgtctctttgagatgcatgtaaattttttacaagctaaatacatctttttgccagttttatattccagtaacatctctctcaaaaaactgggagccatccctttgaaatataattatcaaagataacactcttatctccaattatctgtgggagggtaggagcctaacttctgtggacacctggctcccagttgtataactacttcctgtcataaatatatgaatagtttatttttcctttgaat

SEQ ID NO: 374973 - DNA, 670 bp, Homo sapiens
ggctgttcccttaataaaacagcaataacatatgagacagttgcaaaaaaattgcttttaatttaatctactgattttttttatttttcagtaatagtaatagaataagaatcatacaacctctaatggtgatttagcagttttatggaaagctaaagataaaacaattctaaaatagaaatgaagagggggccactaaattcagtcttcttcccaactgagatccagggtaaggaggaagtggattagcaagcaaatgacaacctcatcattagagctctaactagagtttcatagtctctgcaagcctgtaactaagccctggaacagatgaaaaaattctgaagagagaagcatgatacagttcattatttaatgaagagaagattctctttctcygtgtctttaggaaaaaaatgacatataagttcaatgtcctccattccctaaatcagagtttctagtgtgtggtccctagatcaacatcagcatcacttggtatttttgaaatgtaaatctcagctcttccccaggcctattgaatcagaaactcagggaagtttcagcaatctgtgctaataagccttccaggtatttctgatgctcgggaaagtttgagacccatttccttaaagcgtgcgtattttccattttaaagcctttatcaaga

SEQ ID NO: 374974 - DNA, 670 bp, Homo sapiens
ggctgttcccttaataaaacagcaataacatatgagacagttgcaaaaaaattgcttttaatttaatctactgattttttttatttttcagtaatagtaatagaataagaatcatacaacctctaatggtgatttagcagttttatggaaagctaaagataaaacaattctaaaatagaaatgaagagggggccactaaattcagtcttcttcccaactgagatccagggtaaggaggaagtggattagcaagcaaatgacaacctcatcattagagctctaactagagtttcatagtctctgcaagcctgtaactaagccctggaacagatgaaaaaattctgaagagagaagcatgatacagttcattatttaatgaagagaagattctctttctccgtgtctttaggaaaaaaatgacatataagttcaatgtcctccaytccctaaatcagagtttctagtgtgtggtccctagatcaacatcagcatcacttggtatttttgaaatgtaaatctcagctcttccccaggcctattgaatcagaaactcagggaagtttcagcaatctgtgctaataagccttccaggtatttctgatgctcgggaaagtttgagacccatttccttaaagcgtgcgtattttccattttaaagcctttatcaaga

SEQ ID NO: 374975 - DNA, 670 bp, Homo sapiens
ggctgttcccttaataaaacagcaataacatatgagacagttgcaaaaaaattgcttttaatttaatctactgattttttttatttttcagtaatagtaatagaataagaatcatacaacctctaatggtgatttagcagttttatggaaagctaaagataaaacaattctaaaatagaaatgaagagggggccactaaattcagtcttcttcccaactgagatccagggtaaggaggaagtggattagcaagcaaatgacaacctcatcattagagctctaactagagtttcatagtctctgcaagcctgtaactaagccctggaacagatgaaaaaattctgaagagagaagcatgatacagttcattatttaatgaagagaagattctctttctccgtgtctttaggaaaaaaatgacatataagttcaatgtcctccattccctaaatcagagtttctagtgtgtggtccctagatcaacatcagcatcacttggtatttttgaawtgtaaatctcagctcttccccaggcctattgaatcagaaactcagggaagtttcagcaatctgtgctaataagccttccaggtatttctgatgctcgggaaagtttgagacccatttccttaaagcgtgcgtattttccattttaaagcctttatcaaga

SEQ ID NO: 374976 - DNA, 570 bp, Homo sapiens
acagttcattatttaatgaagagaagattctctttctccgtgtctttaggaaaaaaatgacatataagttcaatgtcctccattccctaaatcagagtttctagtgtgtggtccctagatcaacatcagcatcacttggtatttttgaaatgtaaatctcagctcttccccrggcctattgaatcagaaactcagggaagtttcagcaatctgtgctaataagccttccaggtatttctgatgctcgggaaagtttgagacccatttccttaaagcgtgcgtattttccattttaaagcctttatcaagaatgtgtgcggtggaaattatcgtagaagtggactggatgcattcacgcttccataggctttctgtttcttggcttatttggaactataaagctaagggtagacggacacattcctaatacaagaatgttggtatttgcacaatgaggtcccgggagactttttaacacattaaaaaaactggtatgagaagtaagagggagttacagcattaactattgtcctgttttccaggatgaagaagatcttccaggacttttct

SEQ ID NO: 374977 - DNA, 570 bp, Homo sapiens
acagttcattatttaatgaagagaagattctctttctccgtgtctttaggaaaaaaatgacatataagttcaatgtcctccattccctaaatcagagtttctagtgtgtggtccctagatcaacatcagcatcacttggtatttttgaaatgtaaatctcagctcttccccaggcctattgaatcagaaactcagggaagtttcagcaatctgtgctaataagccttccaggtatttctgatgctcgggaaagtttgagacccatttccttaaagcgtgcgtattttccattttaaagcctttatcaagaatgtgtgcggtggaaattatcgtagaagtggactggatgcattcacgcttccataggctttctgtttcttggcttatttggaactataaagctaagggtagacrgacacattcctaatacaagaatgttggtatttgcacaatgaggtcccgggagactttttaacacattaaaaaaactggtatgagaagtaagagggagttacagcattaactattgtcctgttttccaggatgaagaagatcttccaggacttttct

SEQ ID NO: 374978 - DNA, 565 bp, Homo sapiens
acagtgactatcattatctagatgacagtaggtttaaggaaaatattcatttactggttttcaaacttcatgaaagagaaagcatgaattgcagactcagtgtttaaaaatcawatgcattattcagaatcaaatataaaagccagatgccacaaattactcccaaattcacatttttttgagatatgattgattaaagttctatttgaggatgcattttcctaagtgacttttggtttaggagtcttcttcagataatcttttcctaagaactaaatgaaagaaatttatttgttatccaagaattgtcattactgtttcttcatttcagcactcatttatttattcacaggtcgcatgctgtctgacctgtcctggttggtgggagggatggagcctggcttcctgtgtagggtgcccaaggactggctgtggaggctgctgggcctaaatgctttccccctacttttttccatggactgacttctgtatcccaaatgattgacatatttattattgaccttctctgacaaaagacaaagaattacggatctacatttttctc

SEQ ID NO: 374979 - DNA, 565 bp, Homo sapiens
acagtgactatcattatctagatgacagtaggtttaaggaaaatattcatttactggttttcaaacttcatgaaagagaaagcatgaattgcagactcagtgtttaaaaatcaaatgcattattcagaatcaaatataaaagccagatgccacaaattactcccaaattcacatttttttgagatatgattgattaaagttctatttgaggatgcattttcctaagtgacttttggtttaggagtcttcttcagataatcttttcctaagaactaaatgaaagaaatttatttgttatscaagaattgtcattactgtttcttcatttcagcactcatttatttattcacaggtcgcatgctgtctgacctgtcctggttggtgggagggatggagcctggcttcctgtgtagggtgcccaaggactggctgtggaggctgctgggcctaaatgctttccccctacttttttccatggactgacttctgtatcccaaatgattgacatatttattattgaccttctctgacaaaagacaaagaattacggatctacatttttctc

SEQ ID NO: 374980 - DNA, 565 bp, Homo sapiens
acagtgactatcattatctagatgacagtaggtttaaggaaaatattcatttactggttttcaaacttcatgaaagagaaagcatgaattgcagactcagtgtttaaaaatcaaatgcattattcagaatcaaatataaaagccagatgccacaaattactcccaaattcacatttttttgagatatgattgattaaagttctatttgaggatgcattttcctaagtgacttttggtttaggagtcttcttcagataatcttttcctaagaactaaatgaaagaaatttatttgttatccaagaattgtcattactgtttcttcatttcagcactcatttatttattcacaggtcgcatgctgtctgacctgtcctggttggtgggagggatggagcctggcttcctgtgtagggtgcccaaggactggctgtggaggctgctgggcctaaatgctttccccctacttttttccrtggactgacttctgtatcccaaatgattgacatatttattattgaccttctctgacaaaagacaaagaattacggatctacatttttctc

SEQ ID NO: 374981 - DNA, 543 bp, Homo sapiens
tcgcaggaacagacctcaggaaactgaatctctctactgccttctttctcctaccctaaagcaggactttaatcttctctcacctttctgattatggatcttaagaaatttccctgagagggctccgccctgtaccctatacttggggaaggaatgctgatgtcacaaagcttccataaaaatccaaaaggactgggttcagagggcttttggagagctggacatgtggaggccgacaggaaggtgaagaagtcatctgcgtgctgtgagggtggygcaccccaactccatggggacagaaggtcctgcatttaggacccttccagacctcacacctatgtatctcttcatctggctgattacttatatcctttcaaagacgcttcttagtaaactggtaaatgttaagtgtttctctgagttctgtgagccactctagcaaattaatcaaacccaaagagggtgtcttggtgacctcaacttgaagccagttggtcacaagatttggaggcccaaacttacaactaggaggaagaaaggaac

SEQ ID NO: 374982 - DNA, 543 bp, Homo sapiens
tcgcaggaacagacctcaggaaactgaatctctctactgccttctttctcctaccctaaagcaggactttaatcttctctcacctttctgattatggatcttaagaaatttccctgagagggctccgccctgtaccctatacttggggaaggaatgctgatgtcacaaagcttccataaaaatccaaaaggactgggttcagagggcttttggagagctggacatgtggaggccgacaggaaggtgaagaagtcatctgcgtgctgtgagggtggcgcaccccaactccatggggacagaaggtcctgcatttaggacccttccagacctcacacctatgtatctcttcatctggctgrttacttatatcctttcaaagacgcttcttagtaaactggtaaatgttaagtgtttctctgagttctgtgagccactctagcaaattaatcaaacccaaagagggtgtcttggtgacctcaacttgaagccagttggtcacaagatttggaggcccaaacttacaactaggaggaagaaaggaac

SEQ ID NO: 374983 - DNA, 503 bp, Homo sapiens
gtggaggagaaacacagtttgagagttgtttttctgatacgaaatgaaaatataatttaaatacatctggaaaatagatatgtctttattaacaccattctcaatttgtcaaatttccgatgaaagaaaggtctattttgtgaatttaaggatttaagcacaggcaataacagatttaaatacaaaagtatagaggtgtcattattatacattttcttcctaagtgagtatgatgaactttatcggttgaaagattgctgctgagagtcagtggcactgagtcatattttaaccttttcaatatgacagaataaaccattagctgyaatcttattcatattgtttctgtggttgtcagagtctgccacaaagtcccagcactcccttcgtcattccaaagcatcacaattagtcttaatttctactcccacttcatctgagataggactcttttgtctgtgctaacactgacaggttttcaaactgtctttttaaacattaga

SEQ ID NO: 374984 - DNA, 646 bp, Homo sapiens
cagtatccatagtcttggaatcatatagtatccacgctcttggaatcacattgaaaaagcacatagtatccaagcccttggattcaaattgaaaaggttttgtaaaactagacagaaaaggtggtttttgtggaatactctttggaattaagctgaggaagaatgttctaaagaggacgatccaggaggacacagggcagcagaaatgaggcacagagatgattagagratacaaagatagaccttggaaactgttccgtctccaatttcttcattaaggcatgtgtaactgcagccactggcctccatctctgggatcacattcctctgctccaatgtagcactgtgagattagcaggtttcatctgaatttcagatgttctaggcacattcctatgctccagtacagcaggcttcatctgaattttagatgttctgggcactttgtcataagtgaatttgtcagcatagagaagtaaagctttgattatctcaagaaagggggattctacatataataaaacacttgctactcagatgtgtctgtgggtacataacaattgctgcaatcatatctcagtcctgtggaaagaagtgggtggtatggaaacataaaccaagcaaaaaaaaagaaaaaaaaaaaaga

SEQ ID NO: 374985 - DNA, 571 bp, Homo sapiens
gcactccagccttggtaacagagtgagacccggtttcaaaaataaataaaaataaataaataaataattttttctgagcgaaagatagagatttcctatatatctccttttcccacacatgtacagcctcccccatgatcaacgccccccccccccactggggtggtgcatttgttaaaattgatgaacctccattgacatctataatcacccaatgtccacagtgtacattagggttcgctcttggtgtatatatttaaaaaaaaaaaaaaaaaagtccaggcactctggcttacacctgtaatctgggctatagggaagacctgagacaggaagatcacttgaggccaggaatttgagaccagcctgggaaatatagtaaaacctgtctctaaaaaacaattttttttttaaacgaaccaggcgtggtggtgtgtataatgacacaccaaatgtayaatgacatgtatccatcattatcatacagagaagtttcactgccctaaaaatcctctgtgcccatttttccctttttccctccaacacttggcacccagggatcttcttactg

SEQ ID NO: 374986 - DNA, 545 bp, Homo sapiens
ctgccaatttccaacttggtttccatcttctaatttgggaagtgttgaaatgagaaaggcaaagagatggtctgggtgtatgtggctttaggctacctgacaaccyccaaacctcaaaattaccaaaaatacagactatagggtgatccttctcttctaccaatgagtcacttttggtctctttaaggaccaagttcctctgctgcatgtaaaatatagttgggttgattctacaggaagagatcctgaaagaaagggaaggcagatctagagtcccaagtcaacagctgtcatggcctgactcgtggtacagggacctcatggtgcagggctgacaatgtgccctgctgaggccatctgtggagtcacagtgtggctatccagtgaggcacccatgtgcttaacgaaggcaatctgggcagatgggcctacaagggacagcaaagacaacagaagaagtcacaaaggggtatgccctgctgcaaggaacagttgccatgtccatggagggagaatgttgctatcttgttcccccgtcaccaagg

SEQ ID NO: 374987 - DNA, 545 bp, Homo sapiens
ctgccaatttccaacttggtttccatcttctaatttgggaagtgttgaaatgagaaaggcaaagagatggtctgggtgtatgtggctttaggctacctgacaacccccaaacctcaaaattaccaaaaatacagactatagggtgatccttctcttctaccaatgagtcacttttggtctctttaaggaccaagttcctctgctgcatgtaaaatatagttgggttgattctacaggaagagatcctgaaagaaagggaaggcagatctagagtcccaagtcaacrgctgtcatggcctgactcgtggtacagggacctcatggtgcagggctgacaatgtgccctgctgaggccatctgtggagtcacagtgtggctatccagtgaggcacccatgtgcttaacgaaggcaatctgggcagatgggcctacaagggacagcaaagacaacagaagaagtcacaaaggggtatgccctgctgcaaggaacagttgccatgtccatggagggagaatgttgctatcttgttcccccgtcaccaagg

SEQ ID NO: 374988 - DNA, 545 bp, Homo sapiens
ctgccaatttccaacttggtttccatcttctaatttgggaagtgttgaaatgagaaaggcaaagagatggtctgggtgtatgtggctttaggctacctgacaacccccaaacctcaaaattaccaaaaatacagactatagggtgatccttctcttctaccaatgagtcacttttggtctctttaaggaccaagttcctctgctgcatgtaaaatatagttgggttgattctacaggaagagatcctgaaagaaagggaaggcagatctagagtcccaagtcaacagctgtcatggcctgactcgtggtacagggacctcatggtgcagggctgacaatgtgccctgctgaggccatctgtggagtcacagtgtggctatccagtgaggcacccatgygcttaacgaaggcaatctgggcagatgggcctacaagggacagcaaagacaacagaagaagtcacaaaggggtatgccctgctgcaaggaacagttgccatgtccatggagggagaatgttgctatcttgttcccccgtcaccaagg

SEQ ID NO: 374989 - DNA, 563 bp, Homo sapiens
atcaggtttctgactgtgtctgaaattccagtgcatacaggaacagcaggttgcttaatctctaaattcagagccaaccccttttctaaataygaaagtgctgcccagctcccatggtagattaaaggacccacccctcccagctctgacaacctggctcatcaagcgtacaggcgccatcttgttttccaggccctacctctggtggggcgccatacttttcatattttcatccttcctcacttgttttgtcaaactgggccccacccccattcttctctactgacaacatccaatttccaaatataggaggaaagatggttgaaatgtcccggtagtaaacaacaatctcctgtgagatgctttcctgtgtttctgcaatggacaaaaagctacttacacaagatggctccataccgaggcctgaagtttcgacacaagttaaacatgaacaaggtcaccagattttcctcttcctttattagaaatgacataacaatgaaatactgtgctgggtagaggagcactgcatgttcagaggtaaggttggagggcctacagta

SEQ ID NO: 374990 - DNA, 225 bp, Homo sapiens
gataaacatacacatgcagctatccttttgatacaatgacttctttccctttgcgtagatacccaatagtgagattgctgggttgaatggtggatctacctttagttttatgagaaatctccatactgtttcctatagaggttgtactttacattcccaccattagtgtataarcattcccccttaaccacatccatgccaacatctattgtttttttatttttt

SEQ ID NO: 374991 - DNA, 459 bp, Homo sapiens
gataaacatacacatgcagctatccttttgatacaatgacttctttccctttgcgtagatacccaatagtgagattgctgggttgaatggtggatctacctttagttttatgagaaatctccatactgtttcctatagaggttgtactttacattcccaccattagtgtataagcattcccccttaaccacatccatgccaacatctattgtttttttattttttaataatggtcattctgactgggttaagatgktatctcattgtggctttaatttgcattttcatgatgcttaatgatgttgagtattttttttcatatatttgttgagtacttgtatgtccccttttgggaaatgtctattcatgtgattttccactttttgatgatacgatttggttttgttttcttgctgatttgcttgagttccttgtagattctggatattagtcttttgt

SEQ ID NO: 374992 - DNA, 459 bp, Homo sapiens
gataaacatacacatgcagctatccttttgatacaatgacttctttccctttgcgtagatacccaatagtgagattgctgggttgaatggtggatctacctttagttttatgagaaatctccatactgtttcctatagaggttgtactttacattcccaccattagtgtataagcattcccccttaaccacatccatgccaacatctattgtttttttattttttaataatggtcattctgactgggttaagatggtatctcattgtggctttaatttgcattttcatgatgcttaatgatgttgagtattttttttcatatatttgttgagtacttgtatgtccccttttgggaaatgtctattcrtgtgattttccactttttgatgatacgatttggttttgttttcttgctgatttgcttgagttccttgtagattctggatattagtcttttgt

SEQ ID NO: 374993 - DNA, 472 bp, Homo sapiens
agcatgcatgtgcttgagggtatatacgtatatatgcttttccagatggcagaaaaggctgggctttaattaattaattaaaaacttcaccaaatatccactgaagacttgttatgccacaggactaatgcttggtgccagggagacggagattaaggactcagwtcctatgcaccagcagttttgctgctcggaggggcagacaggcaagacaatgaaggcacagaggggagagcagagcctcacacaggagcacccccaacctgctccactgagagtcagaaaacatgacttggaagaagtgaaacccctactccatcttggaaaataaataggaatgaatgaggcttgatttggctggggagggaggaaaaaagccattggctagtgtgtgcccagacaccaaaggatgccttggtagtggtctgggaagcaaaggctaactgtaccctgaaaatggtgggtgtaaaac

SEQ ID NO: 374994 - DNA, 472 bp, Homo sapiens
agcatgcatgtgcttgagggtatatacgtatatatgcttttccagatggcagaaaaggctgggctttaattaattaattaaaaacttcaccaaatatccactgaagacttgttatgccacaggactaatgcttggtgccagggagacggagattaaggactcagttcstatgcaccagcagttttgctgctcggaggggcagacaggcaagacaatgaaggcacagaggggagagcagagcctcacacaggagcacccccaacctgctccactgagagtcagaaaacatgacttggaagaagtgaaacccctactccatcttggaaaataaataggaatgaatgaggcttgatttggctggggagggaggaaaaaagccattggctagtgtgtgcccagacaccaaaggatgccttggtagtggtctgggaagcaaaggctaactgtaccctgaaaatggtgggtgtaaaac

SEQ ID NO: 374995 - DNA, 591 bp, Homo sapiens
gtatcatgtggcttagactatctttgatggatccaattttttttgtcctcaaataaaaatgtttgactaaaacaatgtaatcgtatcaaggaacacataatggggcatgcaaatgaaaaaataggccactcttctgatccacttgaattattatattttgtcttatttcattgtgtatgttaatatgaacttccttaaggtctttctaaagatagatattgtacgagtcaacaratcaaacaacaagtaaactgtaagccatgagcagctaggtgtatcctgtttgaatctaaatttttggtgctacaaatctatttatattaatgactgaagtatcaatattgtcatgctaccctgaagggataaacatatataagtagaaaatatttcaattggaacagcattagcattcagctctgatttactagtgaggaagaaaatcacacagaatgaattttctgagtttgtccccatgttatacataataacttatacagaagcatatattataatgctaaagatatattttgacatagtaatatataattttatgcaaaaattttcttaatgagaaaatgcttttattccaat

SEQ ID NO: 374996 - DNA, 658 bp, Homo sapiens
ccaaacttttccagcctctgcccattagcctttttcaaaatcacttccacattttcaggtatctttataacagtgcccctctctcctgataccaattttctgtattattccattttcacactgcaataaaaactatgtgagactgggtaatttatgaagaaaagaggtttaattgactcatagttctgcaggctcttcaggaagcatgtctaggaggcctcaggaatcttacagtcatggtgggaggaaaagaggaaggaagtatgtctyaacatggtggagcaggagaaagagagagagaaagtgaaggggaaagtgccacacttttaaaccatcagatctggtgaaaattcactcactatcatgagaacagcaaggtgataatcctcccccatgattcaatcacctcgcaccatgtccttcctcctatatatgggaattatatttcaggatgaaatctaggtggggacagagccaaaccatatcatctagtaagaaagaaaatatgattcagacatagaactcttgctttcctatatccaactcgtcacactaattaaatctgcttctatttttacatttgattatgatcaaactagaatatgattacaaaggcaatgcagtaaaatctttctgagtaagtcctgtgtgatcatgt

SEQ ID NO: 374997 - DNA, 567 bp, Homo sapiens
ggtttgacatttgacttggggttttatatgctggcatgtttccaggaagttgcatctcttctcccctgattctttccctgrggtgggctgtctgcatgtgcagtggcctaccagcacacgggaggggctgcatgcccaatgtgtttgctgaagttgtatgcgtgcttacttgagatgttttcttttatcagttgagtgtcaccagttaaactctgccatttcacctcttagtgcacatgcttgagcccactcacctaactcctgagatcttatcaggagctgctgatcatcagttttaggtttctttttttttttttaatcttttgggcgacttcctttccctggcaccagttgtgaccaattattattctagacagatagtttaacaaccgactgaccatcacctgatggtctccttacattcctggtggggtgggagatggaggactcttttgccttgcttatgtctgactacctacctgctgtaacagttagacatctaagtggatctcttaaataggcaatctgatacctaagagggggagttccgtgaagagatgtgaattt

SEQ ID NO: 374998 - DNA, 567 bp, Homo sapiens
ggtttgacatttgacttggggttttatatgctggcatgtttccaggaagttgcatctcttctcccctgattctttccctggggygggctgtctgcatgtgcagtggcctaccagcacacgggaggggctgcatgcccaatgtgtttgctgaagttgtatgcgtgcttacttgagatgttttcttttatcagttgagtgtcaccagttaaactctgccatttcacctcttagtgcacatgcttgagcccactcacctaactcctgagatcttatcaggagctgctgatcatcagttttaggtttctttttttttttttaatcttttgggcgacttcctttccctggcaccagttgtgaccaattattattctagacagatagtttaacaaccgactgaccatcacctgatggtctccttacattcctggtggggtgggagatggaggactcttttgccttgcttatgtctgactacctacctgctgtaacagttagacatctaagtggatctcttaaataggcaatctgatacctaagagggggagttccgtgaagagatgtgaattt

SEQ ID NO: 374999 - DNA, 412 bp, Homo sapiens
tcaatcagattatcacgaaagcatggacttcagtccctcaacaactttgagaccacagggcttgcagaatttgtggcttgaacatcaaacagccttaagaaagtcaaacagaagatgcagaaaactaaattgcaataagagtaaaccctcgggaaataacaaatatttatttaaaaccagatttctgtgtatttgatgagaaatgtcttaggagttccttccttctctcctggcactaatgggtatgtggtagtgagtgtggtgggaggatgggagtcatagaattatctgtttattctcttctcctgcmattgaatctgaaccaattttgccagaaactaattttgtttgtttattttactatcatcaatccctgggcacagatccctaatctttcctccaaaaacaaaaa

SEQ ID NO: 375000 - DNA, 595 bp, Homo sapiens
ttaatgattggatctatgtttattgtgattagtaatatttggactcaattcctaatgcttttttgtccyactttattcatattaaaaaatccttctttcttgacctatttttattgttccatttttacatgtttatttttaaatttcattttacccctttactggtatgtaaattgtatgcttggttttcattactttaatgactatcccttcaattttgtaaactgcatttaacgatgtctagaagcaatcaatatctgaaccttccctcctgaacagtaagatgagcttaggaaacattaaccgttcattttccttcccacacctcaacttacatgctgtattaggccattctcacattgctataaatacctgagactgagtaatttacaaagaaaagaggtttcactggctcatgattctgaaagctatacaggaagcatcatgctggtatctgctcagcttctggggtggcctcaggaaacttacaatcatggcagaaggtgaagagagaacacacatattacatggccagagtaggagcaagagagaggagggaggtgctatacacttttaaaaaaacagatctcacaat

SEQ ID NO: 375001 - DNA, 586 bp, Homo sapiens
ccatgttggccaggttggtcttgagctcctgacctcaggtgatctgccccccttggcctcccaaagtgctgggattataggcatgagccaccatgcctggcctggatcattatttttaaatgaataatcaatactactaaggtcaaagagagaataatctgaattgagagacaaataaaaaggagggagggaggagagagagagggagaagagaggaagagagagagggagaaaggaagagggaggtgggagagagagaggaagagagagctagagggaggtaagagggaggtaggagagagagagagagagggaggcagggggagwgagggagaggtagagagagagaagagagacataatgttaacatacaggaaatgccatattggtttgctgccataattaaaaacaaacaaatgtaaaaataaatcatttgcacaaggaaagacttacactgcggtctaatgccacgaagacttgtttatatgtgtgggtccacgtgaaagttgatgttaacacagagaccacaaagacaatagtgttttagttgctgttgctcaattttacttacctggatgccagtatg

SEQ ID NO: 375002 - DNA, 541 bp, Homo sapiens
aagtaccataggtttcttttcctatcccatgtctgaccctgcacacccacagatctgtttccgccaaagcctctcccaactcgttctccaggaaaacaaaaactgtagttgctctggctggacaccctgatgagcctgattgctctctcccctgcacacctcgtacctactccagcaacacatctagtcagctttgcattccaaatatgtcaatcatctatctgcttctctcatgtcagatgctaattacatggtccaaacgagtctcctgcggcatctggaccatttctacagcttcctaggataccttgccctccattcctgcttccacccaacattgtcaatctgagaagcaacattaccttcctaaartgtaaatcaaaactgacaagtcactgtcagttcaattaatttcacattacagcttctacagaagccagcactctttgcatttgcatagtcttaaaggagccatgcaacctcacctgtctacctgattgtttgaaagcatcccactacctgttgtgacctgccagctgtg

SEQ ID NO: 375003 - DNA, 546 bp, Homo sapiens
ttgaaagcatcccactacctgttgtgacctgccagctgtgggtttcctttctgtcttaaatcatgcccagctccatcctgcctaaatgttcttgttcttgccattccttccaatgaacttctcttcctccatatatgcacagttctgccttccctcatcaatcatattgcaactcaaatgtcccactctcagatgggtcttgccggagtgccccagctgaagcatttcccttgccactgcatgttttggttggagaaatgagtgtaactcttggtcctgctattycttgctgctttgtcatggagctggccttgagtactttcctctatcacttttccttgaagaatcctctatatagtattctaatacatggatgttaggtcttaagtgattataagggatttaatcacaataatctatgatagctctaacacacaggtatggtgagataccttgtgttttcttcttgattaataacccaggaagagtagtcaagtagctcatagcccccgaattaaaggcctggcccctaactggcaagacatg

SEQ ID NO: 375004 - DNA, 546 bp, Homo sapiens
ttgaaagcatcccactacctgttgtgacctgccagctgtgggtttcctttctgtcttaaatcatgcccagctccatcctgcctaaatgttcttgttcttgccattccttccaatgaacttctcttcctccatatatgcacagttctgccttccctcatcaatcatattgcaactcaaatgtcccactctcagatgggtcttgccggagtgccccagctgaagcatttcccttgccactgcatgttttggttggagaaatgagtgtaactcttggtcctgctatttcttgctgctttgtcatggagctggccttgagtactttcctctatcacttttccttgaagaatcctctatatagtattctaatacatggatgttaggtcttaagtgattataagggatttaatcacaataatctatgatagctctaacacacaggtatggtgagataccttgtgttttcttcttsattaataacccaggaagagtagtcaagtagctcatagcccccgaattaaaggcctggcccctaactggcaagacatg

SEQ ID NO: 375005 - DNA, 574 bp, Homo sapiens
ctcacccccaacctcatcacattctagttctcttccctacttcatttttttccccgtagtacttrccactagagtaattgtatataagagttaactatcgctgtgtaacaaatcaccccaaaactaagggacttcaaacaatacgtacttactctctcactgtctttgtgggccaggaatccaggcacaggttagctagggggctttggttgtctcaaagctcattatgagtcattgaacgaagagctccattcctcaccagctgctggttgggggtgaactcagttccatgccacataagcttctcattaaaatggacaagcctagaaggcaagagagagtgctagtaagacgggagtcacagactttgtagcctaatcttggaagtgatatcccatcactttgcctatattttctttgttagaaggaagtcactaggtctagcccatagttagaggtgattacacaagggtgtgaataccaggaagcaggcatttgggggagccttgtcagaagctgcctaccacatcatgctccccaggctaaatgggacagtccccgttaacaaacactg

SEQ ID NO: 375006 - DNA, 515 bp, Homo sapiens
tggagaaaacacagctttctaagcaagaaatccagttggtataaagtctttatttcactgggaaaatttttaccatttgaatcacagtaatcctaacacattcttttagaaagggcaaagcggtgggataagaagtaaaacatttcccctccaaaataaatgtggaaggaaatataataagctgtgtatatgtgtgtttaccctttttaaaaacccaaagtcttccaatcaatgatggagaatgtttctagtttgatgtattggctatctactgctagataacaaattaccccaaacttgggtgacttacaacaacagcactattatctcatggtttttgagggycaggaattggcactgcttggcgccagctgcatcacaaggcagcagtcaaggtgttgtctgggactgcagtcatctcaaggctggaccagggaaagatccacctgacctcactcacgcagttggtggcaggatgcagttctttgcaagttgatgggtttagggctttagtt

SEQ ID NO: 375007 - DNA, 535 bp, Homo sapiens
ttaatgagaagaaaaaatttcaggagcccataaagaccttcctgcaaataactgagaagggaaagagctttcaacagacttattataagaatgttggtggtaatgaccaaagatatgaaactcatctttaatgctttttaaagatacacacctaagaaaatgtcgccaagtatttcctcagggtctttgatgcagaaatttgtccctggtactgagaattagtatcaagattaactggcctttggaatatctgttggggaagtctacctggtaaccacactatgatccaactcaggttctcagcttggtcagctcaattttttttttttcttccagcatatagggaatggtcctacttgggacagccttctgttgtctaagctcacaagaatataatcaatttattttttacacgaagaaataaatrattaatagtactgtacaaacactggatccagaaatatcctcatcttaaacctgaggttacaggacagcatctctaaaaacaaaagtccattattagggtaagaaaaag

SEQ ID NO: 375008 - DNA, 562 bp, Homo sapiens
tcaaattgtgatggctctgctaatcaccctgatctgatcattatacattatatgtatcaaaagatccctgtgtaccccatgaatatgtacaattattatttgtcaacttaagaatttttattaaattaaattaaattaaaacaaacaggttagaggacagtgccattaattcattcaaagaaatccagtacagaggtggcagaactcttttatctttctatcttctgccctttcacaatataaaaatcagaattgtagttaatggctttctttttatgtaacttttggagagtacttttttatagcctatggtaagggaagggaagaaataatggttatttcagggatctaagtgtaaggttgacaccatgaaatacagcactgttagtataccttacaatagttactacattttgaggcataagataagagtatctctaaatcttygtagctacatttttctatttttcttactttttatcagtaaagtcataagactactgcaagcatcatttttcttagcaactctaatttaaagatgtcgtcttgtgttttgataggt

SEQ ID NO: 375009 - DNA, 549 bp, Homo sapiens
agtcatggtgttgtgtgcatatggtcccagctactcaagggaggctgagatgggaggatcgcttgagcccagaagtttgaggctacagtgattcgtgactgtgccactgcactccagcctgggtgacagatcttgtctcaaaaaaattttttttccaaaacttagagaattttttaataatggaagaaattatcagtggcctagatgcaatctacagaattccatactggattgctgctgtttataatatcgtagggagggggcrtataaatgaagtgtgtggttgatatggttctatgtaaactactctacttggaacagggggatgagtgaaaggagaatatattcactggatgccccggtcaacttaagcaaatgaatagaagaaaggaaagatctggagagcataaatgttcactgttgttccatgttcttagattccctttccttcttttgcacatggatcctatttacatatattttattacattttttattactgctgtagcaaattaccacaaatttaatgacaaaaaaaaaccccacaag

SEQ ID NO: 375010 - DNA, 549 bp, Homo sapiens
agtcatggtgttgtgtgcatatggtcccagctactcaagggaggctgagatgggaggatcgcttgagcccagaagtttgaggctacagtgattcgtgactgtgccactgcactccagcctgggtgacagatcttgtctcaaaaaaattttttttccaaaacttagagaattttttaataatggaagaaattatcagtggcctagatgcaatctacagaattccatactggattgctgctgtttataatatcgtagggagggggcatataaatgaagtgtgtggttgatatggttctatgtaaactactctacttggaacagggggatgagtgaaaggagaatatattcactggatgccccggtcaacttaagcaaatgaatagaagaaaggaaagatctggagagcataaatgttcactgtkgttccatgttcttagattccctttccttcttttgcacatggatcctatttacatatattttattacattttttattactgctgtagcaaattaccacaaatttaatgacaaaaaaaaaccccacaag

SEQ ID NO: 375011 - DNA, 560 bp, Homo sapiens
cataaatgttcactgttgttccatgttcttagattccctttccttcttttgcacatggatcctatttacatatattttattacattttttattactgctgtagcaaattaccacaaatttaatgacaaaaaaaaaccccacaagcctctttttttacagatctggaggtcagaagtctaaatcaaggtgtcagcaggactgttctcctcctgaggctttgagagcagaatctgtttctttgatttttttttcagcttccagaggctacctgtattcctttcctatgatccttttctcaccttgtcattcaaacttctactactgactgaccctcttcctcccctctaacaaatacttttgtgattacattgggtctaccgggataatccaaaataactttctcctctcaatactcttaacttgatctacacgttccattttaccagggraagaagcatattcccaagtttcaggaattcagacatagacatctttggtggagggtgggggggctaccatatatattgatgtagatatggttttatgttttagattgtact

SEQ ID NO: 375012 - DNA, 475 bp, Homo sapiens
attctcctgcactccattcattgtgaatctttgctttgaacacaggggagcttctggacctacaggtacaactataatctgattatgtgtttttctacttgaagagactacgtttttaactagtaaggcttaagacagatttcagtttttattaattctcaagattaagaacagatagcggcaacatgtcatgagtttcattaatgcaaaatgggaaccaaagttttgttcttatttttaaaaataatagtgataataataatataactaggcagtaaataaataaaaaatctgaatccagagccctttgttaagtaaarcataacagaaagaaatcagggtagatgccggccaacattcggattaataaagtgtgaacgtaccactcttgcatgcagattagcaagaattagcaatcatatagatgagtatagtaagttttaacctatttgctgttaccctcccaaatcctatt

SEQ ID NO: 375013 - DNA, 548 bp, Homo sapiens
gtttttctacttgaagagactacgtttttaactagtaaggcttaagacagatttcagtttttattaattctcaagattaagaacagatagcggcaacatgtcatgagtttcattaatgcaaaatgggaaccaaagttttgttcttatttttaaaaataatagtgataataataatataactaggcagtaaataaataaaaaatctgaatccagagccctttgttaagtaaaacataacagaaagaaatcagggtagatgccggccaacattcggattaataaagtgtgaacgtaccactcttgcatgcagattagcaagaattagcaatcatatagatgagtatagtaagttttaacctatttgctgttaccctcccaaatcctattttgctcagggcacacctccattttacaactagttaataaagaatactataatttaaagttcatgtttctatggtaacarccaattataaatgcaatctgaagagatggaaggaagctgccaaaactcttaaggaaaaaaaacatgatctgggttggcaacc

SEQ ID NO: 375014 - DNA, 589 bp, Homo sapiens
attttaccttataatatattgattatatattcacttcaggcactcatctaccatatataacacaaagttcacttgaattatttgcattttggaaaagcaaaaaaaaaaaaaagaaaaaagttgagagagtcctagatgaaagtattcaggtmcgtcatgcttcagctgtatacctgctgaggtttttcacaggctcatcattgcctaacacattgagctttacctaggaaataaactctttttgacttcttgtttggatttcaaataataaaggtgagatgtgaaaactaagggatgaagccttctggacccaggaacatctttgcagtacaaagatgccatcccctggagtcatgggttaagtctggaaggtagagagcaaagcattatccaggagttcactgcaaaaattgtctctgttgagataaactggtggagggaataggatggcagaagtagtagtaatgaggacaaacttaactcttaagtcattgattatttggatcaataagtatattgaacaaaataattaactcccacttagcaaaatgtcaaatgggaaatattgcagaaacctgtaataggctaa

SEQ ID NO: 375015 - DNA, 574 bp, Homo sapiens
aagaaattatctttagtcaactttgttgcttttctcttagctagtgaataaaaaccttatttactgataattgtcattacagtagatgacatatacgcttaggatgggtatttcatcttgagcagagtagacaagccatgccattaaacatgtaaaagagtggctttaaaaaaagtggatctcatggagttggagagtttcagaatggtggttaccagaggctgggaagggaggtgaggaaggagggatgaaggtaagttagttaaggagcacaaaaatagttagatagaaggaaaaagttctagtacttaataggacagtagaaaatttatagttaaatataatttattatatatttcaaggtagctagaataagaattgtaatgttccaaagataaagaaaatgtttgaagtaatgactattccagttaccctaatttgatcattacatattgtatacatgtattgaaatatcacatgtaccccaaaatatgtacaactrgagtacataaatgaaattttttaaaaagctatcaaaaaaagaaatggaaaagagtgacttagcagcagttat

SEQ ID NO: 375016 - DNA, 592 bp, Homo sapiens
gtagaaaatttatagttaaatataatttattatatatttcaaggtagctagaataagaattgtaatgttccaaagataaagaaaatgtttgaagtaatgactattccagttaccctaatttgatcattacatattgtatacatgtattgaaatatcacatgtaccccaaaatatgtacaactagagtacataaatgaaattttttaaaaagctatcaaaaaaagaaatggaaaagagtgacttagcagcagttattatcttgtctccaagaggtgacttttcagagttgtggttcggttcacagtcattggtttccatgcctttccgagttctaaggaaaatcagccgtggcccattaaaaaacccttcatatcactttgataaaattttacatggattaaaataattttgagcatatttttrggcagtttaaagtcttttagatacagtcagcaaattaatggcaatatagtaagtttttgatttatagctttggcctaaaagtcgtcatggaaaatctattctgtggcagaactcaatgagcactttatttcaaaaagcaatttcattttgaagatagaaccacttactc

SEQ ID NO: 375017 - DNA, 580 bp, Homo sapiens
taatctaccgcattaattttttgagtaggtaatttcctttttcctctctttaaaaataattgtttatggctgtcttggtgccaaaaatatcataatcccgtgttcaggaaggagattgccatgaacagggactctggactcccaaagatgttctcctgccctgtgtctgggcttcccaattctttacaaccttgaacttggagaaggtaggaaacaaaagatttattagtttcagcccattgaatctcttcacttccagaactacacctttatttatttgccttttttcctaaaaatatttaaaastcaatcctagttgtaaattattatttatttatttttttgaaacagggtctcactccggttgtccaggttagagtgctatagcacgatctctgctcactgcagcctccatctcctgggctcaggtgattctcccacctcagcctcccaagtagctgggactgtaggtgtactccaccacacccagctaagtttttgtatttttagtagagatgggattttgctattttgcccaggctgggtctcaaactcctggactcgagtgatctgcccactt

SEQ ID NO: 375018 - DNA, 528 bp, Homo sapiens
ggatacttattattggatttggggcccatttggataatctagatgatcrtattccaagatcatcattttaattatatctgcaaaaaacgttttccaaataaggtgacgttgctaggttcaagaggttagaacatgaacatatctttatggaggcaacccactgtgggtaggaacacaaaagccctgggtgcaaaggtgttttaggagtttagtgcactgtatagtaacttaagttcagacctgcctagactgatttcttatgataataatttgttcatttattcaacaaatacttgagtgcctcttaagccagattctaacagacactgggtatagaacagtgaagaagatgaatttgatatctgccctgattgtggcagagttagagtttctgcagtgtgttgtcttacataaaaacacagcaacaacacaactacagcatgaaactttaacgactttaaatccctagccatgtgcgcctctcccatgttatcctgcccacactatgcacacacttcatcctgtttt

SEQ ID NO: 375019 - DNA, 634 bp, Homo sapiens
gtatatatttttgctggctttaaaaaataccaattatttgtagatagtctgaacgacaaagtaagtttcaaaaaaatgtgacatagctgagtgaccatcttggctcttgctatgtgtatagctttgaaagtgattcagttttgccttgttggttaatctccttgctgtgaaaacagaggttgggcacagcatacaagactagggtgaccaataaaataggtcatcaagtcccaacatgcttaactatgaaagtaccactagaactaattaaaccaggtcaacagctgtaatgtaggaccctcccagaggaacgtgatatgtggtctctctatataaacatgtgacacctgtttctgcctgtggtttgaaagtgcttggcttcagaactgggctagaacatacagaacctttgtgagaataggaagaaggtactgctttctgagaccagttagcaataggatctcccatcttctgggctgatgctctcttgttccataggacrtagctcacagagtggtagaatgaatctcaattccccaattgggccccctggccaaatgtctggcagggcacaaccatatgtggctgttcagcttggcaccacacaatggtaatggcattgaaaataggtttg

SEQ ID NO: 375020 - DNA, 459 bp, Homo sapiens
acctcttcacctttgccagattctgttgggtgggggaatgccttgtagggtgggggaatgcctgggagcaggatgaagggatcactaagatccatgttggaaatccacatagcacagccattttcttaatgagcagttccagtctaggtttttaatttactcagagtagatttaaagttctgtattcatatcccagctgggctacttaatattattagctctgtgacctcgggtgtattatttaacctcccctaagcctcactttcttcatttgtaaacataaatctgtaaaaagaggataaaagcaatgctctctcttagagttgttttgaaagttaattaaattctkgcaaaacagcgtactgctgagagaatgaaatattttcaattgtctaagtttttcagaatgctgaaaggcttataaacttgtttataagtaatttttaatttaacattttg

SEQ ID NO: 375021 - DNA, 626 bp, Homo sapiens
atgtccatgcctttgaacttgcagactccttcaggggttaccattccacttgcttaattaggaaatgatcactgtggttaaaagcacagaacccgggacccaacagacctggattgaaatcctaattgctttccctccctaaaatatatttctttctacaaaaagtaagagagaagaccaataatagaattaacttcatagggttgttaggtggaataaatttgataggggatacgtaaggttttggcactgagcctaatatagagtggacattcaataactattagcctttagtattatcaccagagtctcaaagaactaatcgttattaaaataatcattcrtgcacataaatgctttatactcctagaaagcacaaatcaatttaaagaaaaaaaaaagctttaaacattttgatagaccagtgatagtcagtttacagcaaaagagggagtaagattatttagttaaacaggaaacagaactctgaggcactaagctaaatggaaggacaaaagatgagaaaagacaacttgaaaataactttgattttgcatacattaataaatgttaacatgcctgtttgaaacacagtatctgagagttatgatattttatcagccaaa

SEQ ID NO: 375022 - DNA, 585 bp, Homo sapiens
ttaaacattttgatagaccagtgatagtcagtttacagcaaaagagggagtaagattatttagttaaacaggaaacagaactctgaggcactaagctaaatggaaggacaaaagatgagaaaagacaacttgaaaataactttgattttgcatacattaataaatgttaacatgcctgtttgaaacacagtatctgagagttaygatattttatcagccaaagctgcaaatcctgacatttttccctaatgtgtaaatggcagatgtcatttatatgtgcaacattcacatgtgaatctggattcctagaatttctttggaaaacacaaaatattttgctcaatatttcagcaagtataactctaatctattttggtggggtattcatttctttaaactttaaatacatatcaagaataaaatcagacaacaatgatcctttttttcaatttatgtgaaaaataatagaagttaaaatattcaaaattgaagtctatttcttatttttatttttttctagttctttctcaccacaaataatatcaagaaggtgaataaacatgtgccattgaataatcatcagtg

SEQ ID NO: 375023 - DNA, 559 bp, Homo sapiens
tagtccttttgggctgcctataacaaaataccataaactaggtggctttttgatatgatttggctgtgtccccacccaaatctcatcttaaattgtagctcctacaattcccacatgttgtggaaaggacycggtgggaggtaatttaaccataggggcgggtctttcccatgctattctcatgatagtgaataagcctcatgatatctgatggttttataaagggcagttttcctgcacaagttctcttctcttgtctgccctcatatgagacatggctttcaccttccaccatgattgtgaagcctccccagccatgtggaactgtgaattgattaaacctctttcttttgtaaattgcgtcagtctcgggtatgtctttatcagcagaatgaaagcggactaatacacttataaacaacagaaatctacttcttatagttctggaaggtggggagtccatgatcaaggtcccagtagggctcagtctctggctgagagatggcaccttcttgctgtgtcctcacatggtggaaggacaggaaagctctctggggtc

SEQ ID NO: 375024 - DNA, 580 bp, Homo sapiens
actgcttaataaaagaagaaaaatctgcttactcttttacaactaaatggttacattgattacatttagttacaacttttatttttttacttgggctatgaataaaccatttttgtccagagtaaaatataaaatttctgtaggatatcttctgtctttatgtccttctcttgttgcatttttataaattatttcttaggctgaaatgacctaagctttcaagtacatgctgtaggagcaatactgacatttgttccatcccagtctttcctcggagaaagtgtcacaatgtaaatatcctagaagacctcaggctgcaaaggaaaaaccttcaagtgtgccttgaaaagtcttttttatgtgctttttattctgtctcactgatctatttttctatccctctgccaatatcacacagtcttatttactcaaactcagtagtaagttatgacacctgttrgtaaaaacccctcctcctcattcttttccaagttaagaatagagcttagctttactctttcatatgaattttggaatcagtttgtcaagttccacagataatttcattgggattttgatt

SEQ ID NO: 375025 - DNA, 580 bp, Homo sapiens
actgcttaataaaagaagaaaaatctgcttactcttttacaactaaatggttacattgattacatttagttacaacttttatttttttacttgggctatgaataaaccatttttgtccagagtaaaatataaaatttctgtaggatatcttctgtctttatgtccttctcttgttgcatttttataaattatttcttaggctgaaatgacctaagctttcaagtacatgctgtaggagcaatactgacatttgttccatcccagtctttcctcggagaaagtgtcacaatgtaaatatcctagaagacctcaggctgcaaaggaaaaaccttcaagtgtgccttgaaaagtcttttttatgtgctttttattctgtctcactgatctatttttctatccctctgccaatatcacacagtcttatttactcaaactcagtagtaagttatgacacctgttagtaaaaacccctcctcctcattcttttcyaagttaagaatagagcttagctttactctttcatatgaattttggaatcagtttgtcaagttccacagataatttcattgggattttgatt

SEQ ID NO: 375026 - DNA, 583 bp, Homo sapiens
tgattggttttgaaatgtgaggacatgagatttgggagggtcccagggtgtaatgatatggtttggatgtgtccccacccaaatctcaccttgaactgtaataatgccctcatgttaagggtggggccaggtggagataatagaatcatggaggcagtttcctccatattgttctcattgtagtgattaaatctcacaatatctgatggttttataaatagaagttcccctgcacaagctcttgtttgccactatgtaagacgttattttgctcatttgccttccaccatgattgtgaggcctcccagctacgtggaactgtgagtcaattaaatctcctttctttataaatttaaattacccagtcttgattatgtcttttttagcaggaggagaacagaataatacaaagctgtaccacattttattactacctatcattggcaaagttttacctttgctacaaatataaggttatatacaaatgtacaaatacgaggttgtatacaaataacaggttatattttgaaacatctttatatcargcttatgtttttaggtgattctctatataattttcagg

SEQ ID NO: 375027 - DNA, 685 bp, Homo sapiens
ccttgagtttttgtaagttgctgtattgtaattatcatatggaaactttgatgcattgcttgatgtatgtttatatttttaaaaattgacaattctgaaataatatattgttttcgttttgagacagtgtcttgctctgttacccaggctggagtgcagtggcctgatctcagctcattgcagcctcaacttcctgggctcaactgattctaccacctcaacgtcctgaatagctaggatcacagatgtgagccaccatacctgackaatttttgtacttttgttttactttgtgtgtgtgtgcgtgtgtgtgtgtgtgtaaatgggtttttgccatgttgcccaagctggtcttaaactcttgagctcaagtgaaccacctgtctcggcctcccaaaatgctgtgattgcagacatgagccactgcacctggtctgaattcattttcttggagcatactggaaaacttcttcattgtgcagttaattcttctgttttaaaaatgtgcacagaaaggcataattaataaatttttatataaaaatatttttgacatatgtaccaaatatattccaaaaactaattacatctgattaaatttaactacccatttaatacaaaaaccctatttttagtaccttatgtagtttagaggatgaaataaatgattttaaacaccatagat

SEQ ID NO: 375028 - DNA, 531 bp, Homo sapiens
tgcctatggggctcattgtacccactcagcccagcaggctgcgctctgctcacactaccagcccagatcccaagcctgccaaggctgaaccaggtgcgcagtagtgaagggtttgtgagtgagtgtagggtctggccactgtgcacagccaggcacatcagttgcagtggggcgggcagctccagacgctggcacagacaccggctcctgacgaggtggtggctggaccaggcataccacaggcggcttccactgcaggcactggggaacaggatggtggtcagaagcttggatacaccaggaaccgcagatccccaaagagagtgtcacagccctccctcaagaagctcctatcaccatcaatggcggctggctgttgcaccaaggggtgagtgcgggccagttccgagctgcctcagcaccccaataccctccccaccatgcctccctcctgtgcttatcagygcccaaagtcttgaggggcagagatggcagaggggatcttgtgtgtcagtgctgcctgagcacacg

SEQ ID NO: 375029 - DNA, 552 bp, Homo sapiens
tttgaggaactgctgaattgtttgtgaaagtgcctgtgccatttttacattctcrgcagcaatgcaggagagttacaatttctccacacccttaccatccttgccagactggtttttctttgtttgtttgttttttgttgtttagttgtttttattttttcttatttttttttttttttttgaaacagagtctcactttattgccaaggctcaggtgcagtggtgctatcttggttcactgcaacccttacacccctgcctcatgagttcaagcaattctcctgcctcagcctccagagtagctgggattacaagcactcacaaccatgcccagctaatttttgtatttttagtagagacagggtttcacccatgtttgccaggctggtctttaactcctagctcaagtgatccgcctaccttgacctcccaaagtgctggaattacaggcatgagccaccatgcatagcctttgccagactaatttttgtctgtctctttgattacagtcactttgatggttactaaataatatcttatggtggtttggtt

SEQ ID NO: 375030 - DNA, 552 bp, Homo sapiens
tttgaggaactgctgaattgtttgtgaaagtgcctgtgccatttttacattctcggcagcaatgcaggagagttacaatttctccacacccttaccatccttgccagactggtttttctttgtttgtttgttttttgttgtttagttgtttttattttttcttatttttttttttttttttgaaacagagtctcactttattgccaaggctcaggtgcagkggtgctatcttggttcactgcaacccttacacccctgcctcatgagttcaagcaattctcctgcctcagcctccagagtagctgggattacaagcactcacaaccatgcccagctaatttttgtatttttagtagagacagggtttcacccatgtttgccaggctggtctttaactcctagctcaagtgatccgcctaccttgacctcccaaagtgctggaattacaggcatgagccaccatgcatagcctttgccagactaatttttgtctgtctctttgattacagtcactttgatggttactaaataatatcttatggtggtttggtt

SEQ ID NO: 375031 - DNA, 552 bp, Homo sapiens
tttgaggaactgctgaattgtttgtgaaagtgcctgtgccatttttacattctcggcagcaatgcaggagagttacaatttctccacacccttaccatccttgccagactggtttttctttgtttgtttgttttttgttgtttagttgtttttattttttcttatttttttttttttttttgaaacagagtctcactttattgccaaggctcaggtgcagtggtgctatcttggttcactgcaacccttacacccctgcctcatgagttcaagcaattctcctgcctcagcctccagagtagctgggattacaagcactcacaaccatgcccagctaatttttgtatttttagtagagacagggtttcacccatgtttgccaggctggtctttaactcctagctcaagtgatccgcctaccytgacctcccaaagtgctggaattacaggcatgagccaccatgcatagcctttgccagactaatttttgtctgtctctttgattacagtcactttgatggttactaaataatatcttatggtggtttggtt

SEQ ID NO: 375032 - DNA, 561 bp, Homo sapiens
ggtcggtacataaaacccacaaatgtacagttaggaaaggaagagtctgtactgtaattgtccaaaaagcagtgcgtggcagttgttaaatgaagtatttttattggatatttctatactaagaagaagacaagattgcagttttcatttagtgaatggaataaattcaacccttgtaatttcccattcacttgaagatctttgttgccatagtgccattagagtgatactccacattgatttgtattactgcagctgaacmtcaccaggcttttaggagctacataagtgcttagctgactctgtttcatatttgtatatttacaattataccatagcttctttttatctaggataagtgagaaagactgtatcaggctactaatgaagagtattaacatatattatacattgtagttaaaagcaaaggctttcaagtatttggattcaaatcttgctcaaaaggtgcaatcatgggcaagttcaagggcaacttacctgatctctacaggattcagattcttcagcctttacgacaagtaaaaattaagggcatggcta

SEQ ID NO: 375033 - DNA, 600 bp, Homo sapiens
ttattctgggtgtggcctatagttgaatttaaaataagcatctttatatcattggattttctagtatatgaatgtaagatacattcttatgtttactttgctcctctttaatttctctcatcaatgttgtgtaattttcaggtactgacctttcattttattttggctgtttaaggcttggtgttttttgtagaactgtaaattgtattatttaaatttttaatatttaaataatatattgtataaacataaaattaaatataaataatatttaaatatttaatattgtttgttttcaaaatatagcttaataatctttttgtgttttgagtataaaggtttgttaaatattgtatgagatttatgtcttcttcctgtttgtgtgtatggtttcttgatgctactgtaatagtaatttttttagatttaaatttctgatagccactgatatataaaaatacaactgkccaggctcggtgactcatgtctgtaatctcaacacttttggaggctgaggcaaggttgcttgagcccagaagtttgagaccaatgtgagcaacaggtaaaatcctgcatctaccaaaaataacaaataaaaga

SEQ ID NO: 375034 - DNA, 588 bp, Homo sapiens
catagacattttgagtgttaagtcataaggttctggatttagctaaagcttctattttacttttagctgtttctgcaccacccacccccccccccagcccaccaccacatctttggctggggaatgaggggtgcacctatttagtgygaggtctggtagaaattcaggttgcccactcagtctccatagagacttgagcaggtggaattctggctactgttggataagcggggagttctggctctcactaggcctccacagatgcttccctgactgagagggacaagagtgccttgctactgctttccatataaccttcactgaaaccatggaggggtgttgtcctcaccattactgggccataatggaagccctgactctactaggtatccttggatgccactcatgtctgaaagggtactttcagacatgaagtataaagggtacttcatgtctgccagatgagaatgaagtataggctccccacaaggtctgtggcatgggcttgtcaaggatagagtgattattacctaaaacttctctttcatgctaagctgcctttttcttggttctttgactacagagaac

SEQ ID NO: 375035 - DNA, 588 bp, Homo sapiens
catagacattttgagtgttaagtcataaggttctggatttagctaaagcttctattttacttttagctgtttctgcaccacccacccccccccccagcccaccaccacatctttggctggggaatgaggggtgcacctatttagtgcgaggtctggtagaaattcaggttgcccactcagtctccatagagacttgagcaggtggaattctggctactgttggataagcggggagttctggctctcactaggcctccacagatgcttccctgacwgagagggacaagagtgccttgctactgctttccatataaccttcactgaaaccatggaggggtgttgtcctcaccattactgggccataatggaagccctgactctactaggtatccttggatgccactcatgtctgaaagggtactttcagacatgaagtataaagggtacttcatgtctgccagatgagaatgaagtataggctccccacaaggtctgtggcatgggcttgtcaaggatagagtgattattacctaaaacttctctttcatgctaagctgcctttttcttggttctttgactacagagaac

SEQ ID NO: 375036 - DNA, 562 bp, Homo sapiens
gtttattgatttgcatatgttgaatcatcttgcactctctaggatgaatcctacttgctcatcatggtgtatgatttttttaacgtgctattgaattcagtttgctagtattttgttgaggatatttgcatctggttcatcaggaatattggcttgtagttttctttttgttgttgtttccttgtctggttttggtatcagggtagtgctggcctcataaaacaggtttggaagaattccttcctcttcagatttttagaatagtttgaaaatagtttgcaaagcacagatgttatgatgctttgatggtctttaaaaaggaatacctatgcaaatcatttttatccctttatgtaacatttaaagatattaccatgaaagaataagagtgtmatttcataaaagttgaaaatgtgctcaatgttttaatgtatttttaaaggagagaatggagaaagcacagaggctactttatattctaatatgctttggtttttggtcatttatattagaaagaaaaagatcccctagattcctttattcattaaatcacataaaattt

SEQ ID NO: 375037 - DNA, 601 bp, Homo sapiens
aaagttgggaagaaaaacaggatggtgaggctcatcagagagtggtaggaggagaccactagggaagatgaccgcaagagatcactacagtcccttggggctggaatgacacgggaaagggatggtatgcagcagaatccaaatatcagggaaatcttacaggttctagaaccatgtcaggagttgctctgtaggagttagggccacagaaataggacatgtctggtaaagagctgcaaccatggagaagatatggcaactgctaaaaagtgcccacacaagacagagaggagaggagaaggaaagagagataagggaataggagggaaaagagagaagagggaaggggagacrgggaagggagatggggtagaagggaggagagaagaagggaaataataccttgattctctttctctttctcttcctcaaatccaaccagcgcttccattagtcaaacctaatccggaaggtagttggcatagggacctgtggataatgcagcctaaatggtggaagaatgaggaatggacttgagagcaaacaaaacacaatggcctatgtgtatatcctgtcaaatgcatagtgctgttagacattt

SEQ ID NO: 375038 - DNA, 466 bp, Homo sapiens
agcaagggccacagaattggtaaattagaagaaacaggagatgtgcaaaaaactaaatgtgagcatcaagatataaaagccaagggaataagtgcagaagctagcagatcaagagcaagtctaaaaaattaaaaaataatacctaaaagaggttatcataagactatcataacagaaaatatatttactattcaatgagtggaattggatcaccataaaggtcttaatcctcatccttttcattctaagtaggctgaggaggaggagggagaagaggggttggtcttgctgtcttagaggtggcagaggcagaagaaaatccacttatgagtgggccctcgcagttcaaacatgtgttgttcacggggcagctatagacgtaatacacagaaatacaytgagtacaacattacctaattcaagtgctccagagtgtacattaaaaacatacaaacacataacctct

SEQ ID NO: 375039 - DNA, 578 bp, Homo sapiens
tctttgcagtacaattaatttaaaagttttctaggtcatggactaaatttggaaaatgacaagatttaagtagctactgctttaagatttagtaccatactttctactatcccaaaatagtttgttcttaacctttaccttctacctctgaatatgttataaacagtccacttacattttcaaaattaacagctatcatgagtacattaaaagggcaccattgtgaagtttgttttatgtttctttccattaaaatgtattattttcaacttcttgctgttttacttcttttccctggtgtggaacacaattaccaccrtattcttatgagtgctttaaagccctctttctagctaaaagccacactatattgttaactccacgaggtccaataacattttcccaaacatgctgtgactgtcaccactggagagaaaggcttttagggaaaaatgtggagttcttatgcagcacattcctttctttcttttatgctttcctaatttcaggtaattattgagttgaagtttattagctaattgtatacatgctgtggtattcaagtactttcatttatg

SEQ ID NO: 375040 - DNA, 583 bp, Homo sapiens
  misc_feature (1)...(583): n = A,T,C or G
gttcatttggaattctacttccctcaattatcttagccttctcaacctctacgtgctaaatagtgataattyttgttcataatgataactccaaggaactctaagattccagtatattttctggttctttgaagaaataatacgtttaacagagtttagcactgaactaattttattatgctcccagactgttcaaatggctaatccgtatattctctaggaaatatagtaattaaccangatttctcataccccttatagcattctatgtaattgaatttactgtatggagaattaatttgaactctgtggaaagtaagactcaatgttcttttatttttaaaacacgctttgggcagtttcacttaacttctgttctgattttttttttcacttataaagttataatactgatatgcagttgctgtgttaaggtgtctgacacacaacaggaatctataaatgagtttcattattatagttgttacacctgccactctacaataccagttcattttgtaacccttattagtagagaaaaggaaaacaagattagattgttttttcagctagtctgtattca

SEQ ID NO: 375041 - DNA, 609 bp, Homo sapiens
gatttttgtataagggttcaattttattattttgcctgtgcattattttatatgtatattcttttgcagtttccttggcaccatttgttgatgagactatgctttcctyattgcatattcttggtacccttgtcaaagatcagttgaccatatatgcaacagtttattttgcgctttctattcatttccttgggtctatatgcatgtcttaatgccagtaccatactattttgattactgtagccttgtaatatattttgaaatcattatgtgtgatgcctctaatgagttaaggtcatgaatagacatgtccaaagaagatgcattagtccattttcccactgatataatgaacttactgatgctgggtagcttataaaggaaagaggtttcattgactcacatttctacatggctggggaggcctgaggacatgtacaatgatggtagaaaggaaagcaggtacatcttacatggtggcaggtgagagagagcgtgtgaaggaggaagagttgaacacttataaaactatcagatctcgtgagagcccactcactatcacaagaacagtatgggagaaactgctcctatgatccaatcacctcccac

SEQ ID NO: 375042 - DNA, 609 bp, Homo sapiens
gatttttgtataagggttcaattttattattttgcctgtgcattattttatatgtatattcttttgcagtttccttggcaccatttgttgatgagactatgctttcctcattgcatattcttggtacccttgtcaaagatcagttgaccatatatgcaacagtttattttgcgctttctattcatttccttgggtctatatgcatgtcttaatgccagtaccatactattttgattactgtagccttgtaatatattttgaaatcattatgtgtgatgcctctaatgagttaaggtcatgaatagacatgtccaaagaagatgcattagtccattttcccactgatataatgaacttactgatgctgggtascttataaaggaaagaggtttcattgactcacatttctacatggctggggaggcctgaggacatgtacaatgatggtagaaaggaaagcaggtacatcttacatggtggcaggtgagagagagcgtgtgaaggaggaagagttgaacacttataaaactatcagatctcgtgagagcccactcactatcacaagaacagtatgggagaaactgctcctatgatccaatcacctcccac

SEQ ID NO: 375043 - DNA, 585 bp, Homo sapiens
aaataacaagcagcgagaatgaattagtaatttaaaaactgccaacaaaaaagttcaagaccggatggattcacagctgaattctatcagacattcaaaaaagaactgatactaatcctgctaaaattattccaaaagatagagaaagagggaatcctccctaagtcattctatgaagccagtactagcctaataccaaaaccaggaaaaggcataacataaaaagaaacctacaggcaaatatccctgatgaacatagatgtaaaaatcctcaacaaaatgttagctagctgaatccagcagcrtatcaaaaagatcaagtgggtttctgccggggatgcagagatgatttaacatacacaagtcaataaatgtgatacatcacataaacaaaattgaaaacaaaaatcatatgatcatctcaacagattcagaaaaagcatttgacaaaatacaacctccctttttgatgaaaaccctcaataaaattggcatagaagggacatacctcaaagtaataaaagccatctgatatggttttgttctgtgtcccctcccaaatctcatctctatttgtaatcccca

SEQ ID NO: 375044 - DNA, 620 bp, Homo sapiens
tgagaactggaataagacaaagatatccactttcctcacttctattcaacatagtattgaagtcccagccagagcaataagacaagagcaaaaaataaagggcatccaaattggaaaagaggaaatcaaacagttgctgttcaccaatgatataattgtatacctagaaaaccctaaagactcactcataaagctcctaaatctgacaaacaaattcagtaaagtttaaggatacaaaatcaatgtatataaatcagcagtactgctatacatcaacaacgaccaagctgagaatcaaatcaagaactgaatcycttttacaacagctgcaaagaaataaaatacttagaattatagttacctaaggaggtaaaaggtctttacaaggaaaactacaaaacactgctaaaagaaatcacagatgacacaaacagatggaaacacatcccatgctcatgaatggttagaatcaatatagtgaaaatgaccatactggaaaaagcaatctacagattcaacacacttagaatcaaaataccatcatcattcttcaaagaactagaaaaaaaaatcctaaaattcatatggaaccaaaaaagagcctgcatagccaaagcaat

SEQ ID NO: 375045 - DNA, 526 bp, Homo sapiens
ctttgtatgaaaatatctccttttggaatgaaaatatctcctgaatgcctgtatcaccattgtaccttggaagtaaataacttgtccttgatttcacaggctcataagtggaaagcgttaagtctcagatgagacttaggactttggacttgatgctggaacaagwtaataccttgggggactattgggaaaggatgattgtattttgcaatgtgaaaaggacacgatatttaggggactgggtggaatggcgtggtttgggtgttttcctcctccaaatctcatgttgaaatgtaattctcaatatgagatttggagtagtggccagtattggatcatgaggacaaatccctcatgaatggcttagcacgatccttgtggtgatgagtgagctcttacttagttcatgtgagaactggttgtttagaagagtctgggacctcccccttctctctctctcagtcctgctcttgccctgtgacatgcctactccccctttgccttctgccatggctagaagtttcct

SEQ ID NO: 375046 - DNA, 524 bp, Homo sapiens
aataagcatgaccatgtcctatatgccaggacttgttctgaacaataacaacaaaaattatgaagcacacaaaaagatagcagaaatcaattatgagaaacagggtcagacacgacatagatataggactgacatggtaattacaataactatgcttaatatattaaagcctttaatagaaaagagagccccagagagataattccagccacaaaatggaaaccataagaaaaaaatcaagtagaaaatatagaaatcagaacaatgtgtagaaatgaagatcttcaataaactcrtaagtagactcagcatagttgaggaaaaaatcagtaatgttgaataaacaatgattaaacagcccaattaaaatgaaaagaaaaaagagaaacaaaaaaaattctagatcttggcacaatataaaatattctaatttatgcataattggaatttttaaagaagaaatgtttaatgaaataatgggtgacacatttgcagaagtaatgccaagctgcaaacttgttcta

SEQ ID NO: 375047 - DNA, 524 bp, Homo sapiens
aataagcatgaccatgtcctatatgccaggacttgttctgaacaataacaacaaaaattatgaagcacacaaaaagatagcagaaatcaattatgagaaacagggtcagacacgacatagatataggactgacatggtaattacaataactatgcttaatatattaaagcctttaatagaaaagagagccccagagagataattccagccacaaaatggaaaccataagaaaaaaatcaagtagaaaatatagaaatcagaacaatgtgtagaaatgaagatcttcaataaactcataagtagactcarcatagttgaggaaaaaatcagtaatgttgaataaacaatgattaaacagcccaattaaaatgaaaagaaaaaagagaaacaaaaaaaattctagatcttggcacaatataaaatattctaatttatgcataattggaatttttaaagaagaaatgtttaatgaaataatgggtgacacatttgcagaagtaatgccaagctgcaaacttgttcta

SEQ ID NO: 375048 - DNA, 524 bp, Homo sapiens
aataagcatgaccatgtcctatatgccaggacttgttctgaacaataacaacaaaaattatgaagcacacaaaaagatagcagaaatcaattatgagaaacagggtcagacacgacatagatataggactgacatggtaattacaataactatgcttaatatattaaagcctttaatagaaaagagagccccagagagataattccagccacaaaatggaaaccataagaaaaaaatcaagtagaaaatatagaaatcagaacaatgtgtagaaatgaagatcttcaataaactcataagtagactcagcatagttgaggaaaaaatcagtaatgttgaataaacaatgattaaacagcccaattaaaatgaaaagaaaaaagagaaacaaaaaaaattctagatcttggcacaatatmaaatattctaatttatgcataattggaatttttaaagaagaaatgtttaatgaaataatgggtgacacatttgcagaagtaatgccaagctgcaaacttgttcta

SEQ ID NO: 375049 - DNA, 647 bp, Homo sapiens
gctttccctaatgtaggtgggcctcttccaatccatcaaaggcctgcctagaacaaaaaggctgagcctcctgcgrtaggaattccttctgcttcatggccttcaaactgggacacaggctttgttcttgcctccagtttggaacagaaatatagaaacattggctcttctgggatcttgagcctgcctaccttctgactggaactataccatcaacgtcaactttcctgggtcttcagcctgctgccttattctgcacatattaggccttgtcagcctccataatcacatgagccagttccttacaaaaaatttctctttctaaatatacatatgtgtgtgtatgtttatatatatatatatattttcctctggagagccctaatgtactacctcatgcatcaaaaagactattgcaaactttctcctcttggtcaaagcatctttattttcttcactttctattgatagtttttctatatatctaattaaaaaaactctagacacaatacaaataagatattttcatctgtatctaccaatcaacctgcatctatattatgttcattcctagggtaagggactgaagcacacagctgatagaaactagagagggaaaataagaaactgaattaaatgtgttttaa

SEQ ID NO: 375050 - DNA, 647 bp, Homo sapiens
gctttccctaatgtaggtgggcctcttccaatccatcaaaggcctgcctagaacaaaaaggctgagcctcctgcgataggaattccttctgcttcatggccttcaaactgggacacaggctttgttcttgcctccagtttggaacagaaatatagaaacattggctcttctgggatcttgagcctgcctaccttctgactggaactataccatcaacgtcaactttcctgggtcttcagcctgctgccttaytctgcacatattaggccttgtcagcctccataatcacatgagccagttccttacaaaaaatttctctttctaaatatacatatgtgtgtgtatgtttatatatatatatatattttcctctggagagccctaatgtactacctcatgcatcaaaaagactattgcaaactttctcctcttggtcaaagcatctttattttcttcactttctattgatagtttttctatatatctaattaaaaaaactctagacacaatacaaataagatattttcatctgtatctaccaatcaacctgcatctatattatgttcattcctagggtaagggactgaagcacacagctgatagaaactagagagggaaaataagaaactgaattaaatgtgttttaa

SEQ ID NO: 375051 - DNA, 546 bp, Homo sapiens
accaagcccagctttttttttttcttttaatttttacttctaggagagataaactcttaccatattgcctaagttagtctcaaactcctgggctcaagcagtcatcctgcctcagcctcccaaagtgctgggagtactggcatgagccactgtgtctggccaatagtcatgcctttaaaaacaagaacaaaatgtaatcattgtaaggggaaacatctctagaagggtggcataataatgtccgaaaacctgctctttcacaaaagtaataacactggcaaaaaaaaaaaaaagtcattgtcaatgttttcagaactctttttcagacttttattttagattctggggatacatgtgcagtttcatttcctgggcatattgtgtgatgttcacccaggtactgagcatagtacccartacattttcaacccttgtccccttcccccagtcactcttctagtagctccgtgtctattgttgccatctttatatccatgagtacccgatgtttagctcccacttataagtgaaaatgtgtatttggtt

SEQ ID NO: 375052 - DNA, 578 bp, Homo sapiens
tttttaaagcaatgacattttaaggttaatctcaatatattgcttattaaacaggattacagtttttcctcctcctttagttggtcttgcagaacccctgtgaagctaccgggtttagtagaagcagagatgtcaggacagcataaatgtcakataaatgccatggagggtggaatacttgatcatgtcacttaagtgagtcatatgacctggttaggtgtgaccttgatagtgtcactttataaggtggatggctgtggtgctttcctgaccttatggcccaatggatctgttaataaattgcttatgatgggaagcttcaggtgtcctttggtcaagcactctatttttatgagtgtacagaaacaaaccagggaatattttggaaaagggaatgattcctctgccagaataaaaacatgacctttctcaccctagcattgttcctgaaactcttctattgtgtcataccagagactttggcatgccattctgattcaacagagatatacttggcataaatggctcagcaatgtcacctgcctgagcagtagggcagattacatctagttggtact

SEQ ID NO: 375053 - DNA, 542 bp, Homo sapiens
agtacaaccattttgcaaattaatcttgtaaatttgaatattagcataccctgcaatctggcaattccatttgtaggtatatgtacctaagacaaatgcttgcaaatgcrtgtaagttatgaagaagaatgcttgtagcagctctgattttaatagcaaaaacctggaaacatcccaaaggcccatacagatctgaatctattcatataataaactattatacagaattgaaaaggaatgaactacagccagattcaacacatggatgcatcatagtaacataatgttgcatgagaaagcaggtctcaaaagactcatataatatgatattcttttatatagttttaaaaactgcgataagaacacttaaaatgagatctatcctcttaacagattctgaaatgtacaatacaatgttgttaactatagacacaattccacactgtagatctctagaatttaggcatcgtgtataactcaaacttcataaccatcaaataacaacttcccatttccctcttcccccagcccctgggggttgc

SEQ ID NO: 375054 - DNA, 542 bp, Homo sapiens
agtacaaccattttgcaaattaatcttgtaaatttgaatattagcataccctgcaatctggcaattccatttgtaggtatatgtacctaagacaaatgcttgcaaatgcatgtaagttatgaagaagaatgcttgtagcagctctgattttaatagcaaaaacctggaaacatcccaaaggcccatacagatctgaatctattcatataataaactattatacagaattgaaaaggaatgaactacagccagattcaacacatggatgcatcatagtaacataatgttgcatgagaaagcaggtctcaaaagactcatataatatgatattcttttatatagtttyaaaaactgcgataagaacacttaaaatgagatctatcctcttaacagattctgaaatgtacaatacaatgttgttaactatagacacaattccacactgtagatctctagaatttaggcatcgtgtataactcaaacttcataaccatcaaataacaacttcccatttccctcttcccccagcccctgggggttgc

SEQ ID NO: 375055 - DNA, 542 bp, Homo sapiens
agtacaaccattttgcaaattaatcttgtaaatttgaatattagcataccctgcaatctggcaattccatttgtaggtatatgtacctaagacaaatgcttgcaaatgcatgtaagttatgaagaagaatgcttgtagcagctctgattttaatagcaaaaacctggaaacatcccaaaggcccatacagatctgaatctattcatataataaactattatacagaattgaaaaggaatgaactacagccagattcaacacatggatgcatcatagtaacataatgttgcatgagaaagcaggtctcaaaagactcatataatatgatattcttttatatagttttaaaaactgcgataagaacacttaaaatgagatctatcctcttaacagattctgaaatgtacaatacaaygttgttaactatagacacaattccacactgtagatctctagaatttaggcatcgtgtataactcaaacttcataaccatcaaataacaacttcccatttccctcttcccccagcccctgggggttgc

SEQ ID NO: 375056 - DNA, 542 bp, Homo sapiens
agtacaaccattttgcaaattaatcttgtaaatttgaatattagcataccctgcaatctggcaattccatttgtaggtatatgtacctaagacaaatgcttgcaaatgcatgtaagttatgaagaagaatgcttgtagcagctctgattttaatagcaaaaacctggaaacatcccaaaggcccatacagatctgaatctattcatataataaactattatacagaattgaaaaggaatgaactacagccagattcaacacatggatgcatcatagtaacataatgttgcatgagaaagcaggtctcaaaagactcatataatatgatattcttttatatagttttaaaaactgcgataagaacacttaaaatgagatctatcctcttaacagattctgaaatgtacaatacaatgttgttaactatagacacaattccacactgtagatctctagaatttaggcatcgtgtataactcaaacttcataaccatcaaataacaacttyccatttccctcttcccccagcccctgggggttgc

SEQ ID NO: 375057 - DNA, 534 bp, Homo sapiens
gtttccttagctgtgcagaaacttctagtttgatgtagtcccatttgtctacttttgcttkcattgcttgtgcttttggtgtcatatccatgaaattattgccaagacacatgtaataaagttttaagcactgcattctgtcgccaggctggagtgcagtggcaagatctaagctcactgcaacctccacctcccaggttcaagcgattctcctgcctcagcctctagagtagctgggactacaggcacatgccaccatgcccagctaattttcctctgttttcttctaggagttttataattccatgtcttacatttaagtcttaagttcattttgaattgatttttttaatggagtaagacaatggtttaatttcattcttcttcattgagttatgcagttttcccagcacatttgttgaagagactattctttctccattgtatagtttggacactcttgacaaagatcagttgactgtataggtggagtttatttgggattctctactctgttccactgatttatatgtc

SEQ ID NO: 375058 - DNA, 534 bp, Homo sapiens
gtttccttagctgtgcagaaacttctagtttgatgtagtcccatttgtctacttttgcttgcattgcttgtgcttttggtgtcatayccatgaaattattgccaagacacatgtaataaagttttaagcactgcattctgtcgccaggctggagtgcagtggcaagatctaagctcactgcaacctccacctcccaggttcaagcgattctcctgcctcagcctctagagtagctgggactacaggcacatgccaccatgcccagctaattttcctctgttttcttctaggagttttataattccatgtcttacatttaagtcttaagttcattttgaattgatttttttaatggagtaagacaatggtttaatttcattcttcttcattgagttatgcagttttcccagcacatttgttgaagagactattctttctccattgtatagtttggacactcttgacaaagatcagttgactgtataggtggagtttatttgggattctctactctgttccactgatttatatgtc

SEQ ID NO: 375059 - DNA, 533 bp, Homo sapiens
tttaaatggtctaacttttttccactctagcacacaatattggtgatacctagtggtatctctcaaaagagattcaaagtgattttttataaaagagtagagtggttttcctaagaagaggtacaacctatttgtatgaaagtggaatgcctgagtagtcttattcaaagagggacaagtgatgaactctatttcagtttcaacaatgcttattagtctaccatttgtaccacttcttattgctgaatatctcatcactccaaacttagtgacttaaagcaaaacaataattttatcattatttttactcatattattccccttcctcctcctttagggagttcactgagctcagctggctgggccctgcttggggtctcttccgtgattacaatcacatgataattacgggcaagcaccgtctcaaaggcttcctcacttgcacgtctggtggctggtgctggctgttagttaggacctcagckgaggctgttgtccagagaacttccgtgtggcctctccatgtagcctgg

SEQ ID NO: 375060 - DNA, 533 bp, Homo sapiens
tttaaatggtctaacttttttccactctagcacacaatattggtgatacctagtggtatctctcaaaagagattcaaagtgattttttataaaagagtagagtggttttcctaagaagaggtacaacctatttgtatgaaagtggaatgcctgagtagtcttattcaaagagggacaagtgatgaactctatttcagtttcaacaatgcttattagtctaccatttgtaccacttcttattgctgaatatctcatcactccaaacttagtgacttaaagcaaaacaataattttatcattatttttactcatattattccccttcctcctcctttagggagttcactgagctcagctggctgggccctgcttggggtctcttccgtgattacaatcacatgataattacgggcaagcaccgtctcaaaggcttcctcacttgcacgtctggtggctggtgctggctgttagttaggacctcagctgaggctgttgtccagagaacttccgygtggcctctccatgtagcctgg

SEQ ID NO: 375061 - DNA, 542 bp, Homo sapiens
aagctgtgaggcttcacaaaaagtcagatacttagaccaggaaatcacagaaaggccactgacaagattccaatgtgaagatgcccctgaccattgacttgtcctcgatatctaaacaaagagcacatccctaacagggggaccaagatttcttatgcacacacacatctgtctgtcgcaggccttggagacctgggatcagtcagatccccaatgagagcacaaaatggaaatcacatctccaaaccacttttgtttcactaaaatcaaactgatgtttcagtcaacaaaacataaagagtttcagtgcctcrtgaaatttcactgacccaaaaattacttttgtcaacccaaacatagctttcttttctcatttaatgtgatcgcagttgtgctcaccaagtccagttgagtacagagtgggatgcccgtgaatatgccaggagctgagagctgaacagtacctgacatttcacccatttaaattatagacttttcctactccagaagattcaggacatctatagcatgtgtccaaatgt

SEQ ID NO: 375062 - DNA, 587 bp, Homo sapiens
cttggggaacaaagccatgtcattgtaatttctctgaccttccttcctttaatggtctgtcctcagcattaggagacagggcagggccaattctgagctgtaggggtgacaaatggaagaaatctggtggaaaaggtgaaggaagtgggtgaaaggaagagtctgtttctactgacagagtttattatgtaacatcaggcagattaagtgtagggctaacgcctttcaattattcagatttccttcatctttttttcctcctcttctaccaggtggctcgggtagaacttcagtccttacttgytgtttcctccatgctgggtagattgccttgtctgctaaggagagttactgtctgccatcctcagccgtgcaggaaagaagacggggaaggtgacatggccccaggttcacagcagagagaatcaagaaacctgggccatttcttaccctcctcattttatttcagggaggttgtgatcaatttgcatcttcttagctactggtgaaagaactctgtgtactccagaatgtaaaaataggagaaatctaacctgaagggattgggagtagttggtcaaggaata

SEQ ID NO: 375063 - DNA, 596 bp, Homo sapiens
tctataaaacatgaaacaaacgtttaggtggaattcacattcctgagcaagttgcctgcatgccgtaatgcgaaaatgagatgctattttcttctttaggccttggtgcccatcttggacgatgaaagacctgacaggtcattgggactgattcaggaggatttaaaagtcttctttttcatgtgttcaaagaagcgaacattctaaaatgactccagarcattcactaggtttaagccagaatagaacatcagagtttgtcttccaaggcaaaacgcaattggcttggcccagatcattgtataccatgtaaaacagtgacactagggcttaggtatctaaaataagtgaagtcacagagagcccaatatgcacattggattggcttgcacgggtttatactaatcttctttccattactgagttgaaggagcacatcctttcatttctcttttctgagtgtgtagctagaaaattctaaaaatctactgcctgttctgtttttaggaaaatatttttctgaacaatttaaccaattgccatttcactaataattcattgtgaatttcacagttagccaacttttatgggataaa

SEQ ID NO: 375064 - DNA, 571 bp, Homo sapiens
ggttacgtttgctgtcataagtggcctgtgtttaagtaaygcccattctcctgtaaaccattcccatgacaatttgagaaatgtttttggccactgtcctgtcactggataattttatttccagttttcctgaggacctgcccaccttccccaatgtctccttcactcttgactgtctaggagcccaatgcctggccacctgactttgtacccatagctaggagtaaggattttgttttgtctcctgccaatacttgttatgcatacatttcactggatgggaaatatggaatggtacacattatgaacgaaacaccagagattgttaatggatggtacaggaatgctttgccatggtaatgaagtatctttatacaagaaaatgcaggatgagcatctctaatctaaaaaactaaagtccaaagtgatccaaaatctaaaacattttcgagtgccaagatgataccacaggtggaaaattctacacctgatctcatttgatggattgtagtcaaaatgctgtcaaaacattgtttcatgcataaaattattaaacatattgtataaatca

SEQ ID NO: 375065 - DNA, 416 bp, Homo sapiens
tgattaacaagcattaaagtaatacaggcctgtaaaaataactataatccaagctgttagcaaacctcaaaaagaacaggagtgctgtgggagtcaagggagartacgactgctacagagaaggatctatgacgggtccatgcaggggctcaaatctgagtgtaatgctggaggataaagaggatttcaacagatggaggtttctggaaggacgttccgtccccagggaggaggatgaaaaggcacattggaggggcaagaggaagaggtacgcaacatgttttaggaatggtgtgctgtactcgatctaggaagtttaaagggaagtattgggaagagcttacagagtaggttaagatatggaaggcaaactacactaaggtgtgaggtctttattttcaggcaacaagctacca

SEQ ID NO: 375066 - DNA, 594 bp, Homo sapiens
aaactacactaaggtgtgaggtctttattttcaggcaacaagctaccatagtacattaatgttagaagatcttattaatattaataagaccattatcacaatagtgtacctaggaaactaggcagatgagaacatagaaatggagaagtcagtttgaagccattacaattgttaagaagagaaataaatgaagcagtgactttgagggtttcaatgtgaatcaaaaggcaaacatagtacacaataactgtgggtaatggaaactacrgcaaattagagatggccacagattcgggcattcctcccattgagagctggatctatgttctccacctggaatctgggttggctcagtgactgctctgctcgctctgctcattttaatacaacagaagtcatgttgtgctagtttccaagcccaggacctaaaagcctggcagttgctacatcctgtagcttagaacacattctttaagacactgagacactaggtcagaagtccaactaccctgagatggccatgctagagagaacacatttaggtgctatagttgatgggtcacacatgagcccaactctccagccatgagtaaa

SEQ ID NO: 375067 - DNA, 410 bp, Homo sapiens
gattgtcagctgctgcccagtaaatagttctgcgtattgaaaaactcagtattcagcttctgcctttcaaaaaaaaatcatgcttttagaggaatagctgagaatgagctccttcttaatctgtctccactactcacactgcaagaccttccctgtggtccctctcaccttkccagggtcctcagaggcagccttgcacactcagtagtcacatctgcacccttgctgatgtcatgagcccctcatctgtctagtcctcccactgctcctggtgcagactgtcttccgtggtcacaccatggtggctgacaccagccacagcggcagctcctttccagaaacccagatgggacattagagtgcctgccacaccactgcttccacgtgaaaggttgccttggagagaccca

SEQ ID NO: 375068 - DNA, 622 bp, Homo sapiens
cctctctaccttacctctgtacctctttacaatattagcacttccattaaaatgccatccaagttcccttttcttctatgactctgccattcrttgtcacagatgttttatccctcttttaaaattctcttaacatctggtccaaatataaagattcccatggttttgaaaaatgtcctttctaaatgtcataattgtccaattaatggtcaaagggatgaagggattactatagccagacagacttaaaaaaaggggggtcccctgggcctggaaacatgaaagcagacggaagatatcaccaaatgtatgaaccctgagggggtcagataagttattccagcacagataattcactggaaccacttgaaatgtcaaaggacaaaaaaggaggatattataattcacaccagaaagaaacttactgaattaataattttaggttaagaaatacaaataccttaaaatattatcagataaatttacagtaaatagactgctaataaacttagataaactatttagcagaaaggcttctgatctgatgttttcagattttagtcaggaataacacggtgtatatctgatgaaacctttcaaatccaatggattagacatgtca

SEQ ID NO: 375069 - DNA, 578 bp, Homo sapiens
tggatattctatctttctgtttattcaactctatctacatatattacatatatgtgtgtaaatatatatatgtgtgtgtrtatatatatatatatatatatatatattcaactctatctatctatctatctatctatctatctatctatctatctatccatccatccatccatccaattgacccagaattgtggtcacagcaaggcagatactcttaaacattagtgctgtcctctggacatgtacatccagataactatgttacaggaaatacaatttcagtcttctgagcttggctcaccccacaacctgacagtcatgctgtgctgcgctatttttatgtttaatatgtactccttgaagatgatactatgaaattccactgtaacactgatagtgttcaaatgctcactttaagaaaggttagatgccaggaaggaagtgataccgaatcctacagtgcaggaaagcagctacattggtttcggtcttggtgctatttgaatacctcaccttccttttctgttctcttctacatctcatagataaccattaataagaaacggactttagaagga

SEQ ID NO: 375070 - DNA, 592 bp, Homo sapiens
ttgctaacgatttatagaactgtgattttggggaacataactattttgtgatctgaaatcctgttttgacagcacgtcccacattatattcctgtgctttggcaatggtggaatgagggtgattcttttaggagctgagaagaggaccacacggggatgctgagtcmttgtaattgcacaggtgtcataagattgaggcctcacattacgaggtggcacatatggcctttgggatagttctgagattctagaaggacatgtttaataattaagggtggacaccatgggaaacattgtctttggctgacatgtggcactagaccctttgtcttcactgaaacttaacacactgtacagtaaaatatgcaagcacttgtgatacatagtggaagaaataggtccaggcagtgtggcgcgacttttatggatactgctcatccaccttcatgctcactgggtcttccagcttgctcttctctttgggaatgaccagtactgaaaaagttttctttagctatttgccttaattgcttgaacagtggaaaaaaaattctgggaaaagaatggaaatttttaataaacaagttggagt

SEQ ID NO: 375071 - DNA, 592 bp, Homo sapiens
ttgctaacgatttatagaactgtgattttggggaacataactattttgtgatctgaaatcctgttttgacagcacgtcccacattatattcctgtgctttggcaatggtggaatgagggtgattcttttaggagctgagaagaggaccacacggggatgctgagtccttgtaattgcacaggtgtcataagattgaggcctcacattacgaggtggcacatatggcctttgggatagttctgagattctagaaggacatgtttaataattaagggtggacaccatgggaaacattgtctttggctgacatrtggcactagaccctttgtcttcactgaaacttaacacactgtacagtaaaatatgcaagcacttgtgatacatagtggaagaaataggtccaggcagtgtggcgcgacttttatggatactgctcatccaccttcatgctcactgggtcttccagcttgctcttctctttgggaatgaccagtactgaaaaagttttctttagctatttgccttaattgcttgaacagtggaaaaaaaattctgggaaaagaatggaaatttttaataaacaagttggagt

SEQ ID NO: 375072 - DNA, 607 bp, Homo sapiens
gatcagctcagtgggttccctgaggatggagtgggatgatgtctggatcagttaggagaaaatgagtgtcttgctggtactacaagacgcactttcattacaaatgcacatgtcaaaagctaacatgatgaaaaccgttggaaggtttgctgttttgccagatatttcttaacatgtgtcttatgagcagaagctctcttgtcatttggaaagaatatcacttcagaggccccatggggatgacatccgccccaccatcaggatcaatatgtagtgaatttatgaaggagcaagttcaagccatgcgctgcatttaataatgcattataataacataaaatgagctgaggattaatcaaaactttataaactggtgctaaattgacttagyaatttacatctggctctgtgtggttggcccattgacaataacttatctccaaaaagttgcatagccatttcttcttaattgcatatgttgcgctgtagggtgatatagaagatattaaaatatgagtaacagatggatactggctaatggagcttcagatctcatatattttcttattgttttctatttatttatgaacctattgctgtaaaataa

SEQ ID NO: 375073 - DNA, 590 bp, Homo sapiens
attgcagggagtaagcttgattgcctttctatggcagatatgagctaatatgatccatcaaaaaggctgtgttttgagacagctttcactaggaagtatacattttgtgccaggctctgaattggttttgataatgccctatgtcgcttgcaatgtgaactctattttcaaaagtggataggattcccttcctcatgcttctgtaacatgtatcaaatttctgataatgcaacagatgaccactgagtatatctttgatctatctgctaaaacaatgtgtacaatgcatctttaatataagtccataggaaaggagtatttaaagagtcgttttagaaatcatcaccagcagttcaacattacatcttatttaccttttctattaccaaaagagaaaagaagcaaggattaaagcaacatattttcctttgctttattaggttaacaagcaaggattaaagcaacwtattttcctttgctttattaggttaacatagcagataacctgaattccttggcttagtgtttgtagagtttaaaaaaaaatctttaaatccattataattaatgacctcaatagggcagaatag

SEQ ID NO: 375074 - DNA, 601 bp, Homo sapiens
ctctgttagacttgaattcatgcttcttcgatgtatttccagattctactttttaaaaacaacatggttctttctctttttttctgactttgcgcattcatgccttgaaaaatcaacccctctaacactgtattagtatgtttccagtrggatagaaagcaacttgtgtgtccatgccaccaactttacctgggaacctaatacaatctttattttgtactgttttaaatactctaactagctttctttactcacaatgcatttattttttattttttttacagcggataacactcaggatttttgtgacatcataggcttttaacagaaaatatgtaaggcgatcatcgctgtttctttgatttaatactctctaggcattcctcccggcctgcatgatctctacatcaacaaatactagaaagatagatgacttcattttcttgtgtttatagcatcttttattatggcatcttttgaatgctgcctcttaaatgaaaaagccccaatgaatgccataaacccagtcatgtgaaaagccaggcacaacgcgtgtgtgatctctttcacttggaatgaaaaccacatgacaggaaagcca

SEQ ID NO: 375075 - DNA, 506 bp, Homo sapiens
aataacttgttccatctatgataattgatgtaaatggatcatagcccaatatctaaaaccaaagaactcctagaagcaaacacatgagaacacctgtggggtcttaggttaagcaaaaattttytaaataaaataccaaaagcaccatccataaaataaaaaaaacaattaaaatgaattaatcaaaataagaagtttctgccttttaaggatcactgttaagaaaattaatgatgagctatatagtctgagagaaagtatttgcaaatcatgtatctgataaaaagacttgcacccattatgtattttaaaagttaaaactagagtataaaaactaactaatagaaaaactgctgaaagatatgtataggcatttcaacaaagatatgtgatggcaaaacaagcgtatgtaaacttagaaaaaggtaaattgaaaccacaagtaaaccactacacatgtattagaatgactaaaattcaaacaacagaaaaaacaaaagccccca

SEQ ID NO: 375076 - DNA, 596 bp, Homo sapiens
cattcctttttataacagcctaaagctcaggagaataagaaaatcagtgctgtcactggaaatctttattacagaggctgtgatttgtgggcattttgcttccataaacttacatctcaaatgagaagatccatctatttattttattgtctcactgtaatgcctttaaattctcactctctgagagcaaaagccaggaattcagatatctttttcctrgcaaatatcttgcaatgagaggagtaactacttttagatagaagcaaatgcctgtcctttgggaaacgtttccttctcaagctaacaattgaaatcggtgaccttgagcagaggcatctgccttttatttctaatcttccatttttaaggggaaaatgtttaaacatactataagtgcttgagaacatgatgataatttgtacagattttaagagttcttatgaggaactttggaagcattgaatacataacaaaagtctaagcgagactgtgttatttaagattaaggtttcagcaggactgtcatgaatttgcctttacaataatgcatggggacatttaccccagattctttgaaggacaaaaaaaaaaaagtg

SEQ ID NO: 375077 - DNA, 592 bp, Homo sapiens
atgttcataaaatccttagcccattgattctgtattttaatggggaaaattgtctaaaatatccacctcctttaacactgttggtaggtractgagtttccagtgactacctaagacagaaagagttgattcttcattagggttgatgtcttgaaaacaattttcttctctgagttcactcagaagcgggctaatcagtctaaactgtgatgctctctgctcactcccaagttcattgttctgtgttataagcaggagagcccaccaaggtctgcccaggggttctactcccttcaatccttaacctagttcctccactttctcatctataaaatgggatagaaagaaagtcatccacaatgctaattttgaagtgttaagtgagataatgtgtttatagtgattagcatagagcctgttctatatggcatctttacacggagccctggaagcaaatatcagatgcagaccacaaaagcatcagggattctccaaaatgaccactggagaaatcatcctttcttcctagaaaatgcagatggtcacaataccccataattatcctactaggaatatccacagcagggtgcat

SEQ ID NO: 375078 - DNA, 592 bp, Homo sapiens
atgttcataaaatccttagcccattgattctgtattttaatggggaaaattgtctaaaatatccacctcctttaacactgttggtaggtaactgagtttccagtgactacctaagacagaaagagttrattcttcattagggttgatgtcttgaaaacaattttcttctctgagttcactcagaagcgggctaatcagtctaaactgtgatgctctctgctcactcccaagttcattgttctgtgttataagcaggagagcccaccaaggtctgcccaggggttctactcccttcaatccttaacctagttcctccactttctcatctataaaatgggatagaaagaaagtcatccacaatgctaattttgaagtgttaagtgagataatgtgtttatagtgattagcatagagcctgttctatatggcatctttacacggagccctggaagcaaatatcagatgcagaccacaaaagcatcagggattctccaaaatgaccactggagaaatcatcctttcttcctagaaaatgcagatggtcacaataccccataattatcctactaggaatatccacagcagggtgcat

SEQ ID NO: 375079 - DNA, 580 bp, Homo sapiens
ggcctcaaacctgaaacagacagttctccactaatctgaatgctgccaatgtgtttcacacaatgcctaagaaactactcatggagcagctactttatgccaggcactgagaatgtcctgaggatgcaatgatgaaccaaagagacagggcacctgcaaccggggagtttggaatctcaagcgattttccaagagtctccattcrtccctcatacagaagggcacaggaaagccccggcatcaccaacttcctctcactttgtgttcaccagtgactttaccctaagatagttacgagagcatgatttataatgtaaagctgtgccaagcaaatatctgtcctccactgagatataaatgaaatgtctgcaaagtgccaggcttgtaaaacctcctttggtaataggaggcctgttgtaagtagttatgtagaaagcttatcatttttaccttcagtgcttaggctgggagttaattcagattcctctcaaaccaaggaagcacaagctgagaagctcacagtaaactcacagtcacccctactcagaggcctctgctacacaaacagcagtgctaaagc

SEQ ID NO: 375080 - DNA, 580 bp, Homo sapiens
ggcctcaaacctgaaacagacagttctccactaatctgaatgctgccaatgtgtttcacacaatgcctaagaaactactcatggagcagctactttatgccaggcactgagaatgtcctgaggatgcaatgatgaaccaaagagacagggcacctgcaaccggggagtttggaatctcaagcgattttccaagagtctccattcgtccctcatacagaagggcacaggaaagccccggcatcaccaacttcctctcactttgtgttcaccagtgactttaccctaagatagttacgagagcatgatttataatgtaaagctgtgccaagcaaatatctgtcctccactgagatataaatgaaatgtctgcaaagtgccaggcttgtaaaacctcctttggtaataggaggcctgttgtaagtagttatgtagaaagcttatcatttttaccttsagtgcttaggctgggagttaattcagattcctctcaaaccaaggaagcacaagctgagaagctcacagtaaactcacagtcacccctactcagaggcctctgctacacaaacagcagtgctaaagc

SEQ ID NO: 375081 - DNA, 611 bp, Homo sapiens
tttttctcctaagccagaaaggaggctccttgagaaagtttactgtatccatctacatgggttcccttgcaccaattctttacacacagtatgwagtcaacatgttttcattgactaaatacatagatgaaagatctgaaaattctgcaaagtatagtaccacagacatgaatcagtcattgaagtcattgagaattttcttttcttccacatgcaaaattatttcaaatgaacagtatcatgtgagatcacaccaagcattagagaaattaatgatcaaagatgatgcatgtaacaggcagagtttctttcttcctcttcagtttcagacgtcaaggccttattactgaaagctattagcagttgcaagaagataagagaaataaaccaattaaatgagcttcataatgaaaactgcccagcaaatgtcagaggctcctctaaatgtctggattccatctgtctgcctctgccattttgtatctctctcttttgagtttgagaggcttattgttccagagcttctgactttatgtgcggagcccgaataattttataagacagatttcacagtccttctttcagtcactgtcatttttctcacacaatga

SEQ ID NO: 375082 - DNA, 611 bp, Homo sapiens
tttttctcctaagccagaaaggaggctccttgagaaagtttactgtatccatctacatgggttcccttgcaccaattctttacacacagtatgtagtcaacatgttttcattgactaaatacatagatgaaagatctgaaaattctgcaaagtatagtaccacagacatgaatcagtcattgaagtcattgagaattttcttttcttccacatgcaaaattatttcaaatgaacagtatcatgtgagatcacaccaagcattagagaaattaatgatcaaagatgatgcatgtaacaggcagagtttctttcttcctcttcagtttcagacgtcaaggccttattactgaaagctattagcagttgcaagaagataagagaaataaaccaattaaatgagcttcataatgaaaactgcccagcaaatgtcagaggctcctctaaatgtctggattccatctgtctgcctctgccattttgtatctctctcttttgagtttgagaggcttattgttccagagcttctgactttatgtgcggagccygaataattttataagacagatttcacagtccttctttcagtcactgtcatttttctcacacaatga

SEQ ID NO: 375083 - DNA, 621 bp, Homo sapiens
ggcaatttcgtgggattaggatagactgaaacagatgtggaaaacactttacatcatgatagaagcaagatgccaaataatagtgtgtgggatgttactttctcatgcagcacggcttataaaatactgtaggaatgtgacatggaatgtgaagagtgttctttgcaactcttccttccacagtagaacctcacgagattctgcaagtcaaatagatcttgaaaaaaaaatatgccatggagggaaatgaagggacaagtgttcagaaatgacagttactgtggcacactatcaggccacagagaaaaccagctatttatttacttatattgacatattttgaaggcttctaaatataaccttgtattcctctttagaaatattaacaaactaacacaaaaacagaaaaccaaacactacatgttctcactcataagtgagagttgaacagtgagaacacatggacatggggaggggaacatcacacactgaggcctgtcggtgggggtctggggctgggaagggatagcattaggagraacacctaatgtagatgatgggttgatgggtgcagcaaaccaccatggcacgtgtatacctatgtaacaaacctgcacattc

SEQ ID NO: 375084 - DNA, 660 bp, Homo sapiens
ccatgctgtgacaaatcacaggatctcatttttaaggctgtataatattccactgtgtgtgtgtgtgtgtgtgtgtgtgtgtgtgtgtgtgtgtcccacagcttctttatccattcatctattgatggacacttaagctgtttccaaatgaaatggcaacctacatgttgggaaaaatatttgcaaagtatacatcagataagggattaatatccaaggtatataaagaactcatacaacatgataaaaaaaatatatatgacccaattaagaaatgtcaagggacttgaaaagaaatttctccaaagacataaaaatagccaaaaggtacatgaaaagctgctcaacatcactggtcatcaggaaaacacaaatcaaaaccactatgagatgtcaccttaygcctgttaggacaggtactctctatgatgaaaaaacagtagacttttcatcatagagaggaaaaacgagtaactatgagagaaggtggatatattaatttgttccactatagtaatcatatgactatatgtaccttttaccatcatgctgtatatcttaaatatacacgataaaatttactttaaaaagaggggggaaaaagcatactgtgaacagtagcatcaacacaccaaaacaatgtaaataaaagacaggtac

SEQ ID NO: 375085 - DNA, 534 bp, Homo sapiens
aaggctgccagctagtgggcagcagctccagcttcactctcgacactctgtgtgcagagaaagaaagggccttccygtcctgtatctctctctatggagaagagagaacctttccagaaaaatgacttttctttcatgtgtcccaggcaagaattggtccacacaatggagaagccgtgtgctaaataaatatgcctggcagaaagtggagtgccatctggcctaataatgggtatccatggctatgcgatgactgggaagttctcaccagtccatgggacctgtaaggcaggagggctccagattgtgtttaaccccaattattggactgcagcctcagaaatcctgttcttattggtccattctactatggtcaggatttgttttcacaaagccaggtgtagatgtgcttttggggccgcacagcccctcagcctcctgtggtcccagctgcgggcaaaatggtggtcagttctttgccagacacatccacctggggcacacacttcccttcctgtggctttccatgttggg

SEQ ID NO: 375086 - DNA, 583 bp, Homo sapiens
ccaatggacttgtcagaaaaataggatgaacacaattaaaaacttcacaccctggctcattcaacaatggtcaagattttcacgatgtcttatttcaatttttgttgcttttaaagacgtgtatttttggcagcaatgggacactctggtggcttgaaatgcacttgaaatgtatccaaacttcgactctgaagcctcagaaacatgggcagtcatggggcacaggccttgaggaactggggatttacaagaagccaaaaacatgaaagctgttagtactcatcataattattgagatctgtaaagtaggcattagaataggtcttcccagtgagatgtgggttgaagtatttgtttctttcctctaggatcaagttgtttttgttaaatgcctggaaaatatattaaaaaaaaacaggtttaagaatgctgagtagcatttcagaaataatataacaaggatgactattatgttgaatttgagctctctgctaagactccatattttaaaatatgttttcttatttatttgcttccccagattatttgccycatggaggacttgcctaattaccagaataag

SEQ ID NO: 375087 - DNA, 615 bp, Homo sapiens
accagcctgtgtctgattttcctctatctatggacttgcctgaagagaaacagaaacaaaaacctctaacttctataggcatcacgttaacattcttattacagaacaatcactatgattttttttggaacatgtaaaaattaaagtgatgttagtttctagaaggctaatactgaagtcacctctcttctgagcatatgttgtacctattctggttctacatccccagtgagggcaaaaatcayatctgaagatgatgtgcttcttggtcattttctattcctgagttcaaagagacataggagaataattttctttaaagtaaatccaatcaatcttctccttctaattagaccaataatatccacatgaaatgataaatgatcatcttaaacaaggcactagcaactttttctaggaaattaaactaccgcacttacagagagggaagaaaatgatgctctcattttagcaacatgataaaatagttccgatttttcagagtccagattttgctctcagcttgtatttatcaaacatttgaatcattttattactgccattcatctaacatttggaatatttggcattaaattgccaaaaggctgagaaaga

SEQ ID NO: 375088 - DNA, 531 bp, Homo sapiens
tttgtacatgataaatatttacaaatttcatcaaaaataaattagttattgaaaaagacaaaaacacaattagaaaaacaggcaaaatatttgaatagacatttctataaataagatacactaatgtccactaagcacatgagaagatgctcaacaatattagtcactaaggaaattcaaatcaaaaccacaatgagataccagttcatacctactaggatggataaaattaaggaaaaacaaaagtaaataagaagaatgcagagaaattggaactctcatgcrttgctgttgggaaagaacattggtgaagtctctttagaaagcagcatggtgtttcctcaaaaagataaacatagaattaacatccaatgcagcaatttcactcctagatatacagtatacacaaaaaagttaaaacagggacttaaatggatactcatatgccaatattcagtacagcattgacaatagtcaaaatattgaaaatataccaagtgtccactgatgaaaataatggataaacaaaat

SEQ ID NO: 375089 - DNA, 526 bp, Homo sapiens
ggactatgaaatttcaaaaagaaacgtgtgttgttttgagccacaaagtttatggaactaccactacacagcaggaggaaactagcacagataataacatttgcatcttgataatatttgcagwcgtccatttcttccttttgttagtagcctctctgggagttggtgcttctactcagttcctgctactccagaaaatcttttcaaggaaatgtcagaagagaaaaagaaactgtctatacattttaaagtacatgtaaaaattaagctagagttatttttcagaaaaaaaaattatgtaaatacttctgagatttttgttgcaacaaagctcccattgaataattccacacactggagatgtcccagatgaaaaatcactaactataaacctaccattaacttagggaatcttttgggaagatcaattcattatcttgtggctacccaggatttcttgagggttgatggtgtttaaataaatatgatatacatgtatcaattattttgtatgcctagttcttag

SEQ ID NO: 375090 - DNA, 526 bp, Homo sapiens
ggactatgaaatttcaaaaagaaacgtgtgttgttttgagccacaaagtttatggaactaccactacacagcaggaggaaactagcacagataataacatttgcatcttgataatatttgcagacgtccatttcttccttttgttagtagcctctctgggagttggtgcttctactcagttcctgctactccagaaaatcttttcaaggaaatgtcagaagagaaaaagaaactgtctatacattttaaagtacatgtaaaaattaagctagagttatttttcagaaaaaaaaattatgtaaatacttctgagatttttgttgcaacaaagctcccattgaataattccacacactggagatgtcccagatgaaaaatcactaactataaacctaccattaacttagggaatcttttgggaagatcaattcattatcttgtggctacccaggatttcttgagggttgatggtgtttaaataaatatgatatacatgtatyaattattttgtatgcctagttcttag

SEQ ID NO: 375091 - DNA, 553 bp, Homo sapiens
tgggagggcaactcacatcaataacgtgagttggttggcaccatgctggactaactctccataaagcatgtcctggrattcaagaagttgtatgattagttccattctgtcacccatcaactgagggaagttggggctcttactcacttctctgagacagtttcttattcacatatgtatgagggattcagtgttgccattatgtcatgggaatgaattatcatttatatttgtgtattacatgtttaatagttaattcttattttcctaataaacaaatatttagtaaagaaaggtcactcactcatgcaaccacatgggccctgaatattgattcagactaaacacagagcctcataacatatgttaaggtggcagaattttgatccctaaactgcagaaattccaatctgaggaacgtgtccaaggaaataatctatgtcagcaaaaatgagtcatttctatagacatgaggtggccactacactttatttactaaaatacacaattgaaattgtaaatcatatcttataaagcagctttaaagttgtat

SEQ ID NO: 375092 - DNA, 558 bp, Homo sapiens
ttttgatttttcataatgatcactgagctggygacgcttccagcactgggtgggcagaggctggggaggctgctaaactttctacagtgaacaagacagcacccatcaggaagaattatctagcccaaaatgcccataacgcccaaggtggagagacgtggatgcagaggtagaaagctcatgtacatagctaggctgatatttgtgacagtatcaagtatccagtttgatttcttctgacacgagatgttcataacactcagactggcataactttgcaaaaatgtccacatgtgttatcagttaatttcacatttatctattcatggttggatattctttgcttaaatttttccaaaaattccacacaatctcagctattttactttgtcagtgttgaatatctgaaagctctgcatcacatgaaaaatacctaaatatttcgtttcactgttgctttcaatttgaaacctgggaagcacagcatgaaggtgtgagaagttggagagcagccttattagagctgaagtcctgcacagactggaaaggcggtgactc

SEQ ID NO: 375093 - DNA, 558 bp, Homo sapiens
ttttgatttttcataatgatcactgagctggcgacgcttccagcactgggtgggcagaggctggggaggctgctaaactttctacagtgaacaagacagcacccatcaggaagaattatctagcccaaaatgcccataacgcccaaggtggagagacgtggatgcagaggtagaaagctcatgtacatarctaggctgatatttgtgacagtatcaagtatccagtttgatttcttctgacacgagatgttcataacactcagactggcataactttgcaaaaatgtccacatgtgttatcagttaatttcacatttatctattcatggttggatattctttgcttaaatttttccaaaaattccacacaatctcagctattttactttgtcagtgttgaatatctgaaagctctgcatcacatgaaaaatacctaaatatttcgtttcactgttgctttcaatttgaaacctgggaagcacagcatgaaggtgtgagaagttggagagcagccttattagagctgaagtcctgcacagactggaaaggcggtgactc

SEQ ID NO: 375094 - DNA, 558 bp, Homo sapiens
ttttgatttttcataatgatcactgagctggcgacgcttccagcactgggtgggcagaggctggggaggctgctaaactttctacagtgaacaagacagcacccatcaggaagaattatctagcccaaaatgcccataacgcccaaggtggagagacgtggatgcagaggtagaaagctcatgtacatagctaggctgatatttgtgacagtatcaagtatccagtttgatttcttctgacacgagatgttcataacactcagactggcataactttgcaaaaatgtccacatgtgttatcagttaatttcacatttatctattcatggttggatattctttgcttaaatttttccaaaaattccacacaatctcagctattttactytgtcagtgttgaatatctgaaagctctgcatcacatgaaaaatacctaaatatttcgtttcactgttgctttcaatttgaaacctgggaagcacagcatgaaggtgtgagaagttggagagcagccttattagagctgaagtcctgcacagactggaaaggcggtgactc

SEQ ID NO: 375095 - DNA, 558 bp, Homo sapiens
ttttgatttttcataatgatcactgagctggcgacgcttccagcactgggtgggcagaggctggggaggctgctaaactttctacagtgaacaagacagcacccatcaggaagaattatctagcccaaaatgcccataacgcccaaggtggagagacgtggatgcagaggtagaaagctcatgtacatagctaggctgatatttgtgacagtatcaagtatccagtttgatttcttctgacacgagatgttcataacactcagactggcataactttgcaaaaatgtccacatgtgttatcagttaatttcacatttatctattcatggttggatattctttgcttaaatttttccaaaaattccacacaatctcagctattttactttgtcagtgttgaatatctgaaagctctgcatcacatgaaaaatacctaaatatttcgtttcactgttgctttyaatttgaaacctgggaagcacagcatgaaggtgtgagaagttggagagcagccttattagagctgaagtcctgcacagactggaaaggcggtgactc

SEQ ID NO: 375096 - DNA, 628 bp, Homo sapiens
ctttggaaaattaaacagaaaattgtttttctgaagacaacatctgcttaaaatcctttaattaccagttgacagagtggctgatcctaggaaattcattrgacatggggtcaagaggaccttggtctaacttagatttttttttccacctgtgcaacataacactggtcttcaggagttactgccttgtaaacctgagtgtatagatagatgatcttctgaaaaacccttacaactccatgagtgtctatttatctatctagacacacacacacacacacacacacacacacacacacacacacacacacacatatatatatatcccttctacactggctggctgtaattcctcctaaacccagagtcagctgcaagccctcccaaaggtgcctgtggagaccccgaattgggaatggtgagtattggtacatagatgtacccccaaacaagtgtcaactcttgggacaatgtctcaatgcttttgccagagactttggtgacacatttgttagtgtttatgctttatttaaaagaaaaatcacaactgtactttagtattgtgtagctaatttgtatgtatcactgagggccaagccaggacccccaagaatagaccaggaacgag

SEQ ID NO: 375097 - DNA, 628 bp, Homo sapiens
ctttggaaaattaaacagaaaattgtttttctgaagacaacatctgcttaaaatcctttaattaccagttgacagagtggctgatcctaggaaattcattagacatggggtcaagaggaccttggtctaacttagatttttttttccacctgtgcaacataacactggtcttcaggagttactgccttgtaaacctgagtgtatagatagatgatcttctgaaaaacccttacaactccatgagtgtctatttwtctatctagacacacacacacacacacacacacacacacacacacacacacacacacacatatatatatatcccttctacactggctggctgtaattcctcctaaacccagagtcagctgcaagccctcccaaaggtgcctgtggagaccccgaattgggaatggtgagtattggtacatagatgtacccccaaacaagtgtcaactcttgggacaatgtctcaatgcttttgccagagactttggtgacacatttgttagtgtttatgctttatttaaaagaaaaatcacaactgtactttagtattgtgtagctaatttgtatgtatcactgagggccaagccaggacccccaagaatagaccaggaacgag

SEQ ID NO: 375098 - DNA, 528 bp, Homo sapiens
tgtgattgcctaaaaatgagtctaagttattattttcagatgtaagagataatattatatttcacattactttcccaaatatttgtataaaataattctcaaagtatcccataagtattgcttataatttgctatttctctgttacataatatccrttaaagtcatttagtagccatagccttaagaaatgccttgagagttttatcatttagggaatatttaaacaaagaacaaatgcaagtgctaatgcaacaaccgagcttaaagttgtaattaaaataaacttagaactagtgattggatctattaagttagacattgatagatgggagcagcggaaccttacaatttggaaaaggttaatataataaagaacaaagtcttatcaaggttttaggtataacttctttgtaatatatactctaaaatatttttaaacttagtaaaatagtaaaaatacaaatatttgaagtaaagataagaaaagcagaatctgatataagaatgacttcatgtattagttgtga

SEQ ID NO: 375099 - DNA, 544 bp, Homo sapiens
atttggccacattacaacgtgctttcagttatcatgtagttttttaaaaacttctactcacacagcatcagtcttttgataaagtgagaagaaaattatttctggctgaaaataaaaacaagccaaatataatgacacacttcctgcaacatgagaatcwttaaacaacctagggttactctataacctaaagttttatataaaaaggactacctcctatcaatccccaacatcattctcagattaaaaattatttattgtaattaactgaagtacagaattaaggaaagagtactgtgtccagtaaaattttgatttttaatttaataaaattgccaactgaagacagttaagagtccaggaacaacacagtggataagattcacggggcagaaggaagaggtgagagagtgacatttgcattgcgtgaacgcatggcagatggacagccgtgccctctgagtactcggcagtatctgtgcatggggtgaggaaactaagcacagagaaataaactatccaagaggaaaacagaaaataatac

SEQ ID NO: 375100 - DNA, 544 bp, Homo sapiens
atttggccacattacaacgtgctttcagttatcatgtagttttttaaaaacttctactcacacagcatcagtcttttgataaagtgagaagaaaattatttctggctgaaaataaaaacaagccaaatataatgacacacttcctgcaacatgagaatcttkaaacaacctagggttactctataacctaaagttttatataaaaaggactacctcctatcaatccccaacatcattctcagattaaaaattatttattgtaattaactgaagtacagaattaaggaaagagtactgtgtccagtaaaattttgatttttaatttaataaaattgccaactgaagacagttaagagtccaggaacaacacagtggataagattcacggggcagaaggaagaggtgagagagtgacatttgcattgcgtgaacgcatggcagatggacagccgtgccctctgagtactcggcagtatctgtgcatggggtgaggaaactaagcacagagaaataaactatccaagaggaaaacagaaaataatac

SEQ ID NO: 375101 - DNA, 633 bp, Homo sapiens
ttcttcatgctgttctcatgaaaatgaataagtcttttgagatctgatggttttataaagggcagttccctgggacatgctctcttgcctgctgccatgtaagacgtgactttactccttggtttgccttcccccgtgattgtgagaactccccagtcatgtgtgactgtgagtccattaaactctttttcttcataaataatgtagtctcggatatttcttcatatcagtataataatggaccaatatagtgttgttccagctctttcattctggatttgtcaactcttttatttgagtaaagaacagtgggcacaggtgaacattttccatcaggtcggggctcttggctgtagggaaatcctctgggtggtgtccagcaacattctgtggagagcctcagctgctcagaatgtgagcagcattcatttttgcagcatccctagcgtattagatgagctacacctggatccaatgcctgacctgcacgatggtgaggtgaagcagttacacttttcagttcaccagggtcacaggagaaagagggtggaatctggagaactcacaagtgtcccaytgaccatcttgttctgcaaacaacacagtgcattttctgtctatgccacaaacacc

SEQ ID NO: 375102 - DNA, 374 bp, Homo sapiens
tgagcttcttcttccagaatctcacctgttcctcctscttctataataatttgcctgaaatattgctttaattttgaaggactgcctgtcttgagtgcacaccttttaaagtcagctctatattgctgaaggagagtatatagatacacacacaaacacacacacacacacatcacatatgtgtatgcgtattacatgtataatatatagatattatacatgtattatatacacatattaatatacaatatataatatacatatattacatgtatattagatagatatatgtatattagatagatgatagagatatgtagattagatattttaatgcatgttcaagcacttacagccctgctgagtaacttcca

SEQ ID NO: 375103 - DNA, 272 bp, Homo sapiens
gctgcaaaggccaagtaagcacagacctgggaatggatgtggagggagaggaaccgggaggacatcaagtaggatggccctggaaggtgctggtgtggatgtaattctccctggagtcggggagaggacagcctagctgagagtgatggacaaacaggccaagagtgggcctctcccctagtgggtgtgcttgtatggtccctgcactggacgctggagtctgggtcatagkatacaatgggctggctggagcagggaggggggttagggtc

SEQ ID NO: 375104 - DNA, 498 bp, Homo sapiens
caatccttctcttgtacacacacacccacacccacacagtgtgttcaagtcaactcccacttagattgcgataaacgacatgaacgaattatagacattaaagcttttctttccaaggtttttgctttcaaaatatttgtttttgcttttcaaaaaaggtttgcttttcaaaatatttgttttcccatgtttggtgtgagaaccacccttttcttattaaagaagaggctcattctagagagtgactgcaaaagcctccctcccaccatcaccacctgataccccacatcctaagggtcaaaggtcagatatgttacacaacgaattgtgtcttttaaagggagcacractgaaatatttctggatagaaaaggcagaacattcttagaatatcttgactgttaacatttgttcctaatctatcaaaattctcttactcatgtttgcagagttgctgagtattttctgaagccttttcagagttggaaatcagtcaaa

SEQ ID NO: 375105 - DNA, 579 bp, Homo sapiens
  misc_feature (1)...(579): n = A,T,C or G
acagtgacacctccaagaaataggaacactcttaagtggcaactgggagatggaagcagcagcgaagggcaanccctggatgtaccatgtggataatgagatgtgttggtcatgagcttaggggcagcacagtgactctcctgtgctctgggtgtgtgtgctctgggaggaagtctctgtgtgtggtgaggcaactgggtcacatcccgagagtggtggtttctatgtaaagcagatgggagctggaggaggtgggagaaatgagctgtgtgagtgaaacagctgtttgaatgaaacatccaacagaggatgactctgccttctggctaccaagggtggggctcctgctgttccatttatggtaagagaccagatacttgggtaggcagcatagagagactcagctatgttagggcagggcctacgtggaatcaaatatcagtggtatcttacatttgcccaacacattatgaccyacaaagtacttgcagattcttgatctgatttatgccacacattggcctgtgctcttggcagggcacgtgtattatcatcactctacggggaaggagatccata

SEQ ID NO: 375106 - DNA, 599 bp, Homo sapiens
ttttctattacatgtgactgagagcatgctaaaagatacagaaatattctgaatttatgcacacaagtatgttaatgaagtcattgccatctaaaatacgtattaagagtttggggcgtctttgaatgaatcacttagaattaggatcaagtttctgacatttacatttgttgttactgtattttaatcctaaataggggggatgataaaatcaaaaggagacaaggaaaaaacaaagtatttattgttaactatgactatttcatcaaatatgatcataatttagtttttggcatacattcaagggaatggatctaaccataaataaaaaggaatcctctaacctctatgaatcaatgtaagacyatataatttttaaaaatcttataaattcatgttgattaaagtttgaaagctaaaatgccctagaacattgatttccattccttttgaataatgtcaaatattttcacaaagcaatgccttactacctcatctaaaattataatgctattttagctatttgttgagcaagaaaattcataatggaattcagtacagctttttagtaaatatttaaatttatttcttattacagc

SEQ ID NO: 375107 - DNA, 520 bp, Homo sapiens
cttgagaaagagcaattatttcttgaaatgatggtggtcataagcagttttattttcagacataatcttctggtgctgggagatttcagtttctttgataaggcaatctgttatagattttaaatctgttttagacacacaaacctgaagacatttctgttttcaataagatgcaagacaagtaggaaaatgcatgtgttcagacaccatttaacacttaatacsaactaagaagtatggtttcgtgaaaaaaaactgtacaaatctttcactaggaacgttatggttattcttctaaccgggtggaacagatgataatagggataacccactgttgtaagagctttacatgcattaattcattttatcctcaaaacaagattgtgaaatatatgtttttatcatcccaattttgtggatgtggaaactgagacacagaagttaagtaacttgcacaagttcacccagatagcaaggggagagttgttaagtgttcccaggcagactggctctaccacac

SEQ ID NO: 375108 - DNA, 565 bp, Homo sapiens
caatctgttatagattttaaatctgttttagacacacaaacctgaagacatttctgttttcaataagatgcaagacaagtaggaaaatgcatgtgttcagacaccatttaacacttaatacgaactaagaagtatggtttcgtgaaaaaaaactgtacaaatctttcactaggaacgttatggttattcttctaaccgggtggaacagatgataatagggataacccactgttgtaagagctttacatgcattaattcattttatcctcaaaacaagattgtgaaatatatgtttttatcatcccaattttgtggatgtggaaactgagacacagaagttaagtaacttgcacaagttcacccagatagcaaggggagagttgttaagtgttcccaggcagactggctctaccacacttcatattgtcagtcggcaaattatcaaatgatkatagggcaaagatttttgattcctagaatctctttccaattctcccagcaagattctttgtcaagtttctatttctgtagctttcatatgattataatgtgaacattagagagt

SEQ ID NO: 375109 - DNA, 578 bp, Homo sapiens
acccagtctattttctttaactaatttattttctttaactaattattaattgtattggctagaacatctaaaacaatattaaataataataatttacaatccttatcttgttataaactttaatggtaagtttctagtattttgcaagtaatgatgactgtctgaaacagttatttatggcaaagacatgggtcaccctaaatgttcatcaatgatagactggataaagaaaaggtagtacatatacaccaaggaatactatgcagccataaaaaagaacaagatcatattctttgcagggacataattggagttggaggccattattcttagaaaactaacacaagaacagaaaaccaaatgctacatttctcacttataagtgggagctaaatgatgagaacacatggacacagaggggaacaacacatattggggcsctttggagggtgggaggagagggagatgatcaagataaatacctaagaggcactactaggcttaatacctgggtgatgaaaaaatctgtacaacaaacccccatgatacaagtttacctatgtaacaaacctgcactt

SEQ ID NO: 375110 - DNA, 507 bp, Homo sapiens
catgtctgcagagttgaaggatcttggctggcatttgagactttctactcttttccactttctaatagtcaataaactttgctcagacctgccttcttggtattttacacccatataaagatggtacagagtgccctcctagtaacactgcatctgtgcattggggagaagagaagggttatacctctcccactgaaacaggcctaaggaggtcttggacatttttcaagtggaccatttcccagacacagaaatgctgagwaagagcaataacttcacagtgtattatttcactgttgacaaatggaagaaacaggcatgtaagataaaaaattgagacttaaaaacttgcagttaaaaaacagtttctcaacacttacagtagaatagaataataaccttttaaaagccgtcttcaataagctgattgcaacactgcacaagctcagcctgctaagacacagggtcactgcttttgtcttaccatccatctcatctttatcactt

SEQ ID NO: 375111 - DNA, 543 bp, Homo sapiens
gtagttttatctagaatatcagtaaatggttaagctttggagtccttgcagcaccagctacccaggcatagtgataatactcctgaatagtggctgaatgtggatgtgtacaagagttctaatctctgaacacaagtgtgttcaattatgagactctagagcttctctctaggtatgtggctcatgggaagaatcatctaaatagagaacaagattcattasagtgtgttggagcttttttcaatagtggtatgttgccccacaatagagctaagtactactaatagaaaataaatctaatttaccagatatttttctgtcaggaattttcaagcaggactagttccttcagccttacagtccagttgctggaaatctgttcagaggtttagggtagaaaccacaaaaccaccaaattctttcttctcatttttatcatgtagctagaccatatttgccagccaccttgacattcagtgtggccctgtggccaagttctctcaaatacaatgtgtgcaactaacacctctttcacttccactt

SEQ ID NO: 375112 - DNA, 648 bp, Homo sapiens
atgcatgctatcctttttttttttttttttttgagacggagtcttgcactgttgcccaggctggagtgcagtggtgcggtcttggctcactgcaagctccaccgcctcccaggttcacaccattctcctgcctcagcctcccaagtagctgggactacagacgcccaccaccacacccggctaattttttgtatttttagtagagacagggtttcaccgtgttagccaggatggtctcgatctcctgacctcatgatccacccgccttggcctcccaaagtgctgggattacaggtgtgagccaccccgcccatcggatgaatgctattctttatggtctaaaaggcatttctttgagaattggggttaaaaaacaaatatctgttaatagaaataaaaacgtaatatgggtgagaagtgttggttagtgtaaaygggtgaatttgttcttcatctaaatgtgagggtggaaaagaggatatctttggaaaaattgtggggatgtagtgctaggaatgaaggcgtggaggatgatggaatcttccagttccctgtttttcccaacaggcacattattccattatatggaaatagagtggtctaggactgctcattttgtgcttggcagaataagcactggtgtgcaga

SEQ ID NO: 375113 - DNA, 648 bp, Homo sapiens
atgcatgctatcctttttttttttttttttttgagacggagtcttgcactgttgcccaggctggagtgcagtggtgcggtcttggctcactgcaagctccaccgcctcccaggttcacaccattctcctgcctcagcctcccaagtagctgggactacagacgcccaccaccacacccggctaattttttgtatttttagtagagacagggtttcaccgtgttagccaggatggtctcgatctcctgacctcatgatccacccgccttggcctcccaaagtgctgggattacaggtgtgagccaccccgcccatcggatgaatgctattctttatggtctaaaaggcatttctttgagaattggggttaaaaaacaaatatctgttaatagaaataaaaacgtaatatgggtgagaagtgttggttagtgtaaacgggtgaatttgttcttcatctaaatgtgagggtggaaaagaggatatctttggaaaaattgtggggatgtagtgctaggaatgaaggcgtggaggatgatggaatcttccagttccctgtttttcccaacaggcacattattscattatatggaaatagagtggtctaggactgctcattttgtgcttggcagaataagcactggtgtgcaga

SEQ ID NO: 375114 - DNA, 607 bp, Homo sapiens
gcagaattttgcttctcacaatctgaagttaaaagcagcatttctttaattacagagtgtgagagattarttgaagggtaaaaagtttcattcagttagataggagaaataagtactggagatacattgtacagtatagtgatcataattggtaatgtataatatacttaaaattgctcagagtagatttgaaatgttctcattaaaaaatgataaatatgtgaggtcatgaatatgattattagtttgatttaatcatcccactatgtttatgttcctatgtttgtatgcatataaatcaaaacatcacattgtataccaaagatacgtaatctgtaatttatcaattaaaaataattattttttaaaaaatataattcccaattactatgctacattcgtgaaattagaaatagtggtccatctactgcctctagaattagcttaccctgtgaaggacaatgtctaggttttagtgtccttttaacgaaaatgacacttaattggtgaattatatacccttctctcaacaacaccttaaaaatcctctaatattacatgtagaaattggtaacctcacagacaaaaagaaaaaattagtatagcc

SEQ ID NO: 375115 - DNA, 520 bp, Homo sapiens
gaccttcatatattttcctttccactatttttctttcatcaacataacctcaaatcaatattattatttttcttcttttacctcactgcagaccagactttcccttgtggcaccatttcctgcttctggaaaatgaaaacagacacatttctacatttttatatgatttgtccctaacattgctcctggcttctccaatactgctattttagcatctgtaagcatttggcttcatcattctaaaaaacaaaacaaaaaacaaacaaaaacacacttcatgtctttytaaactatgcagaggttatcaaggtacaacaatgttacatctgctgtgattctaataaattctaaattaagagtatgaaatccagaatgtctcttgttggtagcccatgccatgccaaaaaaaaaaaaaaaaaacaaaaacactggctgtctttgcttctcttgactactttccagatcccctcatgaagtaaatttgaatgaaaagaaaggatgaaaggaacactgttcaacc

SEQ ID NO: 375116 - DNA, 613 bp, Homo sapiens
taagtaaactcccaaatatgcaaaggctcaaacacaatagaggtttatttcttgcaaaagagtcttaggtggcaatccttaatgcaacagtgcagcaatgaggttcttgaccatgcaactttcccaggccttgtgtgccaaacatgcatcttaatccagacaaaagagagagagcaggtatgcagaggcacctgccttttaaaatgcttaggcctaaaagcaacatacatcccttctacttatattggtgagaattatgcatgtgatcatgcatagatacagggagtttgggcaatataattcgtgactgtacagacacctcccagcagttactctatattattgtagaggaagcatgaacttgggtggacagccarctttttctagcttgcctcatcaaaaacaaatcattgttttggcttctgtgtatcttttgttatgagagtaacaacaaaaacaaaaatgattataataatgtcagataaaatagtcaatatttattcagaaactccagtataccagatatagaagtaaggacttttagtcatgattttattttaaatagataaattggcatttccagtattagtaaggatttgtaaaaggtattttg

SEQ ID NO: 375117 - DNA, 613 bp, Homo sapiens
taagtaaactcccaaatatgcaaaggctcaaacacaatagaggtttatttcttgcaaaagagtcttaggtggcaatccttaatgcaacagtgcagcaatgaggttcttgaccatgcaactttcccaggccttgtgtgccaaacatgcatcttaatccagacaaaagagagagagcaggtatgcagaggcacctgccttttaaaatgcttaggcctaaaagcaacatacatcccttctacttatattggtgagaattatgcatgtgatcatgcatagatacagggagtttgggcaatataattcgtgactgtacagacacctcccagcagttactctatattattgtagaggaagcatgaacttgggtggacagccaactytttctagcttgcctcatcaaaaacaaatcattgttttggcttctgtgtatcttttgttatgagagtaacaacaaaaacaaaaatgattataataatgtcagataaaatagtcaatatttattcagaaactccagtataccagatatagaagtaaggacttttagtcatgattttattttaaatagataaattggcatttccagtattagtaaggatttgtaaaaggtattttg

SEQ ID NO: 375118 - DNA, 613 bp, Homo sapiens
taagtaaactcccaaatatgcaaaggctcaaacacaatagaggtttatttcttgcaaaagagtcttaggtggcaatccttaatgcaacagtgcagcaatgaggttcttgaccatgcaactttcccaggccttgtgtgccaaacatgcatcttaatccagacaaaagagagagagcaggtatgcagaggcacctgccttttaaaatgcttaggcctaaaagcaacatacatcccttctacttatattggtgagaattatgcatgtgatcatgcatagatacagggagtttgggcaatataattcgtgactgtacagacacctcccagcagttactctatattattgtagaggaagcatgaacttgggtggacagccaactttttctagcttgcctcatcaaaaacaaatcattgttttggcttctgtgtatcttttgttatgagagtaayaacaaaaacaaaaatgattataataatgtcagataaaatagtcaatatttattcagaaactccagtataccagatatagaagtaaggacttttagtcatgattttattttaaatagataaattggcatttccagtattagtaaggatttgtaaaaggtattttg

SEQ ID NO: 375119 - DNA, 529 bp, Homo sapiens
attcttcatggtatacatctcgttagcaaaccaaagcccaaaatatgagttgttaggaaaaaagataatctttaactagcctatttgttcttttttggagggakaaagagcctaggggattgtacatcagtgctgtaaattaaaagggaattaaaaatattatcagagttgcacacttgctgtcagcttagaagtgaacaaagctccctgttaaatgaagtgtgcttgttcttacttctttctgtgaactgaatcacgttaatagaagtaacagtttggtaggtaggagctgggctattgattgtttctccacagcgttgattgcaaactttgaaaatttggcctcatttcttcagttcactggggaattgatattatctaacccttttaccaagttcatatatgaatgttgtaaataaggtcatcataaattttattatctctctattttttgaaatagtaaatttaaatctcaaagccatgtctgagaaggtgaaactgcttcttaaaactgagtaaatttggttat

SEQ ID NO: 375120 - DNA, 529 bp, Homo sapiens
attcttcatggtatacatctcgttagcaaaccaaagcccaaaatatgagttgttaggaaaaaagataatctttaactagcctatttgttcttttttggagggagaaagagcctaggggattgtacatcagtgmtgtaaattaaaagggaattaaaaatattatcagagttgcacacttgctgtcagcttagaagtgaacaaagctccctgttaaatgaagtgtgcttgttcttacttctttctgtgaactgaatcacgttaatagaagtaacagtttggtaggtaggagctgggctattgattgtttctccacagcgttgattgcaaactttgaaaatttggcctcatttcttcagttcactggggaattgatattatctaacccttttaccaagttcatatatgaatgttgtaaataaggtcatcataaattttattatctctctattttttgaaatagtaaatttaaatctcaaagccatgtctgagaaggtgaaactgcttcttaaaactgagtaaatttggttat

SEQ ID NO: 375121 - DNA, 619 bp, Homo sapiens
ttttaggtattaaaaggtcattgatttttggggggttgcatacactagacactcaatatatgttttaataactcactacaattttccaactagtgctatgatacacaaccatgtttaaatctttagttctaacaaaacaagtggagtgtaggttacatgccttgcctgctttaattattttttctttccaacattcacatagtacattgacatcactgtggattctcataaattttaaaactatggctgtactgcaaatttggatcacaaactcctccaagaaacacttaaatagctttctaattatatagaaattatacacaacttgtattattgcatgattttccttgacctgtaatgtttgaaagtaggcgtgaattgaaattctgggaaaaacatattctttaacttcaaagtccttcaggtatgcctacagcagcccttcactccagggactctattgaaagattgcatgggcaatggaactgtcakgaatgtttgtctcctttaagcaaagttttggattctattcacttgacacatgaaccaagtaggtagagatcaatccagttgcatctgaaccactggaagtctcattaaatgataccatttactaacc

SEQ ID NO: 375122 - DNA, 570 bp, Homo sapiens
atttctatttgctttgctttaggataatttatatttctttagtatagagggcctagcaccatcatgctyggcttaaagcaaacacattttcctgcatctataccatgggagtatatagaatttttccaagaaaacttcaaaagaaactcttgaatgaatacaaacatatctgaaatgctatttttacctcattgcctgaacattgaacaataatcaaagcttatgaaattctgctatacttgtgttcactaattacctcctcctcttcaatttctaatttcagttgaagagtttcaaaaataagaagaaaaatagcagaacagtatgagaagacagatggctcagctgatgacaaaatccatttgacttttaccacattgggagatggagagcttgattaatagttggtcagccaatgagacaatttaacaagaaaagctacttggcaaaatatgtcttaaccagatacagctatgttataactgttataacttaaatgtttcttgtggaatcaccattttgcatcagacctcttaaatatgcctgtttgaataagctcaaaccaacata

SEQ ID NO: 375123 - DNA, 501 bp, Homo sapiens
caagtaagaatgaaataaattgtttcagaaaatgtagaacccaatattcacattgcatttcttacagagaaggtgctcacaaagcagaaagcataattttgaaacttcgagagagtcaaattctggaatgcaaggyttggacagagaaaatctgaaagaacaagaaagagaagcagagaaagtgccagcttgagatggatatagattattaaataaggttgtggctgtgttgagacttgagaagcagttagacatcctttgctagtttggggagtctcagtgagagaaaggacagaaccaaagagagagagaagagagaaggagatggagagagggagagagagagagagagatggggggagagagagagagagagagagacaacaaagaattaaacttaaggagaataaaaacaagaaaagggaatgatgatgggattggtacaacagcacaaagccaagactagtttcctattatctgagctagtgggtgcctggcaac

SEQ ID NO: 375124 - DNA, 559 bp, Homo sapiens
cctctaacaatcacaattctactctctacctctatgagatcatttttttttagtttccacatatgagtgagaaaacatagcatttaattttttatgcctgacttatttaacttaacataatgtcctccaggctcatccctattaagatgaatgatggatttaattcttttttatggctgaatagtattccatatatatcacatttttaaaatccattcatttgttgatataaacttaggttgattaaatatcttgggtattgtgaatagaactgcaataagcatggggtcgcaggtgtgtcctagatatactgattttggataaacacctagtagtgggattgcaggaatttatggtagttctatttttagctttttgaaaaacctttatacttttccataatggccatactaatttttattcctaccaacagtgtataagagttctcttttctctgtatcctcaccagcattttttatatattgcctttttgatgacagccattataactagaggtaatatctcaytgtggtttgaatttacatttcgctgataatta

SEQ ID NO: 375125 - DNA, 610 bp, Homo sapiens
gattttttttttttgtctagatgatctccccaatgctgagtagaaatagggtattgaagttccaaactatcatcttatttgagtttatctctccctttcaatctaataatatttgctttatatatccgagtgccgtagtttttagtgcatatgaatttataattgttttgttctcttgtgkaattgatccctgtatcattatataatgactttctttgcctcttttacgattttcgcctaagattaggttatggtttggccgtgcccccacccaaatctcatcttgaattgtagctcccataactcccacatgttgtgggagggacctggtgggagataattgaatcatgggggcggttcccccatactattatcatggtagtgaataagtctcacaagatctgatggttttttaaggggtttctctttttgcttgcttctcattctctctttgcctcccaccatctaagaggtgacttttgcttcccattatgattgtgaggcctccccaccaatgtggaaccgtgagtccattaaaccttttcccttataaattacccagtctcagttatgtctttatcagcagtgtgaaagcagactaatacagatt

SEQ ID NO: 375126 - DNA, 369 bp, Homo sapiens
gtttcattctttgaattcttcagttccaggatttgtatttggttcctttttatgatatctctttgttgagtttttcattcagattataaattgttttcctgatacttttgtattttctacttgtgttctcttgtattttactgtttccgtaagattattattttgaatttatttttaggcatttcatcgatttcctttcacttgggktctattattggagaattattatgttcctttgaatgtgctgtgtttcattgctctttcatgtttcttctctctttatgttgacagaatatatctgtgcatatggtgtaatggtcacttcttccaattgtattgagtagcttttggaaagaaagatattttcct

SEQ ID NO: 375127 - DNA, 576 bp, Homo sapiens
tacagaatatagtctctgacaacacaagaaattagaaattagtaacaataaagtatttagaaaagcccccaatatctgaaaatgaataacatacctctaaatagctcatggatcaagaagaaactacaagggaaattagaaattatactaaactaaatgataatgaaaacatatcaaaatttgtgagaggcagttaagattattaatacttttcttgttttttttctccttaaactttaggcagaagaaggagtaaagaaagcataaattctgtatctgtgtttgggtaaatatatttttattaggtatgcccagcacagagatttacttgtagtaaagagcaatgccagatacttaaatattgcttcccacttcgtgattstaattttataaatatttctatcaatctgttggtatctattttaaccagccctcatggttaagtctctgaacatgacaaaagtctttgaactactctaccaagagtgacacagtctccatcaagctctggagccatgtagtcatggcagagcaaagagtatttagctcactggggattggaattcagcatcgtta

SEQ ID NO: 375128 - DNA, 576 bp, Homo sapiens
tacagaatatagtctctgacaacacaagaaattagaaattagtaacaataaagtatttagaaaagcccccaatatctgaaaatgaataacatacctctaaatagctcatggatcaagaagaaactacaagggaaattagaaattatactaaactaaatgataatgaaaacatatcaaaatttgtgagaggcagttaagattattaatacttttcttgttttttttctccttaaactttaggcagaagaaggagtaaagaaagcataaattctgtatctgtgtttgggtaaatatatttttattaggtatgcccagcacagagatttacttgtagtaaagagcaatgccagatacttaaatattgcttcccacttcgtgattctaattttataaatatttctatcaatctgttsgtatctattttaaccagccctcatggttaagtctctgaacatgacaaaagtctttgaactactctaccaagagtgacacagtctccatcaagctctggagccatgtagtcatggcagagcaaagagtatttagctcactggggattggaattcagcatcgtta

SEQ ID NO: 375129 - DNA, 595 bp, Homo sapiens
gcacaccactcccgtgccctcccacctccttcccagtctttccttcttccacctgagttgacacttttgcccttgagagattctcctgattactcaagacattccgtccactttaagtacaggccacaggtcccatggcaagagcatttgtctcttaacatgtaggagtctttatacattccagtctctaatgatgacaggcttgcagtgggctcttaattcttaatttcttacggaagttttagttttctaaaggcagtctaggccttgcagcatctcttctgaattctatgacacatgaaaagtgctcaaatattatgccagccctcatgatttcacagttcaaactttatcccatcattctcacttcacaaaatgcttccatccaccagaaaccccatttctgtgaagaaatgagaaatatatttaccctctaactggcacactacgtattttaagtgctgaccacacaatcttcaaaccattttggtaagacatgcagtragagcatagttagagctgaagattttccttattaaaaattgctgattgcttttcctttcagcataagaatgtgcaccttatatacaaagcc

SEQ ID NO: 375130 - DNA, 629 bp, Homo sapiens
ctaccatcttcttagctttgccaatggaccaccctattttaattaatcgatgagtagatactgtagaggtaaagccatttcaagaaaaaaaatagtaattgaatgttataaaaacaagctattttctctttgccaaataaattctcatcaattaagggagccagctctatttccttgaaatagaaaacattttagaagcatttaagataaaattataytaccaaagacttgactgataagttttctgagaaaggaacactcatagttatagtgtctaccatgtgccttgactggtgcgtggtacttcatgcaagccatcgcattaaaacgtaggtgctcctgttatacctgacacgtaacgaagctgctcagagcagtgcaggaacttgctcaaggacatacagctggttagtggttgaataagaactcacctctacattgggttcctgaagtctgggttcttccctctccattctgttgactatacttataggtctagatcttgcttctaaggctgggcccatccatctctcatcccatccattccacacaggatagattgcattctgggctggtcctaaacaaaactaaggaaatacagtttgtctttgataacactcccaagtcta

SEQ ID NO: 375131 - DNA, 508 bp, Homo sapiens
gagttcccacatctcaggacacgcaacaggctgggcacagccactgctgggtaaaggctgccactgatattatttgtattattttgtttttattatagttgtcatcttgttgcttgtctgtgcttctgaaattacagttaagtgagcatccaaaggctcttctcaatcccaaagcccacccctccgcttctgcccttcargtggtatcagtggagcactgcgtggttaggactttcggcgtaagagacaattaatcaaagttaatggacacttctttgttacacaacacgactaatgtcaatggcaaacaaatcactgaaaaacaatgaccaataaacccaactgaaaggtttttccattgaaaataaaatcaaccatgcctaatctacttggatttcaaatgaagtcataattgctttttgctgaaactactccagttacccaataccctgcaccagtaatgattaaacaaatctatgaacttaaacttgggaattagtgaagggct

SEQ ID NO: 375132 - DNA, 508 bp, Homo sapiens
gagttcccacatctcaggacacgcaacaggctgggcacagccactgctgggtaaaggctgccactgatattatttgtattattttgtttttattatagttgtcatcttgttgcttgtctgtgcttctgaaattacagttaagtgagcatccaaaggctcttctcaatcccaaagcccacccctccgcttctgcccttcaagtggtatcagtggagcactgcgtggttaggactttcggcgtaagagacaattaatcaaagttaatggacacttctttgttayacaacacgactaatgtcaatggcaaacaaatcactgaaaaacaatgaccaataaacccaactgaaaggtttttccattgaaaataaaatcaaccatgcctaatctacttggatttcaaatgaagtcataattgctttttgctgaaactactccagttacccaataccctgcaccagtaatgattaaacaaatctatgaacttaaacttgggaattagtgaagggct

SEQ ID NO: 375133 - DNA, 564 bp, Homo sapiens
atgggggtggtttcccctaagctgttcctgtgatagtgagtgaattctcaggagatctgatggtttcataagcatctggcattttccctgcttgtactcactctgtcctgccactctgaagaaggtgcctgcttctcctttaccttctgacatgattgtaagtttcctgaggcctcctcagcaatgcagaactgtgagtcagttaaacctccttcctttacaaattatccagtcttgggtatttcttcatagcagtgtgagaacgaactaatacattgcccatttaaaatgttgagttagttatctttcacctctgstatatttttaaaattattggttgtatttaatttgttctgctgtgctctccagaaccagctggctgtatgttgactttctaacttaggatgttaactgttatttcagatattcctccagatgttgcagtgggccatttttagagggaggctctttcatggggcactttttcatgggcctccccctaactctgcaggtagcatttagtatttattaccaaatgggatgcacttggttctgctttctgtc

SEQ ID NO: 375134 - DNA, 566 bp, Homo sapiens
ggtcgcgccaatgaacaagcccagaattaaaagtgacacttttttacatgtgaatagctttagagccattttccagctcttgaaaagtgtactgttagctccaaaaagtcactctctcctgatgaataattcttgaggtcatttgctgccatcagtaactgaactattaaagcctctcttatctcttcaccagcaggcaaatagagaagttattggaattgtgagtgcttctcttctgacagcatgtgctgtttactctgcataattktaatctaagctgtatagccaggctcccggtaaaaagaactcataagcagagaagtgaacctggaaggcatgttatccatattctaggggaactttgttttgcagatttcttttctagtacaggctctcaatcaccaacaaccacctcccatgggaaaaataaatgttatcgtctaaatgtaggtattgcactccatcaggaagcaaaatttaaagcagaaagggtatagatgctgaaacagaatcccaacttcattattcatgcaacaagcatgtattgtccgtgttgcaggttcagt

SEQ ID NO: 375135 - DNA, 566 bp, Homo sapiens
ggtcgcgccaatgaacaagcccagaattaaaagtgacacttttttacatgtgaatagctttagagccattttccagctcttgaaaagtgtactgttagctccaaaaagtcactctctcctgatgaataattcttgaggtcatttgctgccatcagtaactgaactattaaagcctctcttatctcttcaccagcaggcaaatagagaagttattggaattgtgagtgcttctcttctgacagcatgtgctgtttactctgcataattttaatctaagctgtatagccaggctcccggtaaaaagaactcataagcagagaagtgaacctggaaggcatgttatccatattctaggggaactttgttttgcagatttcttttctagtacaggctctcaatcaccaacaaccacctcccatgggaaaaataaatgttatcgtctaaatgtaggtattgcactccatcaggaagcawaatttaaagcagaaagggtatagatgctgaaacagaatcccaacttcattattcatgcaacaagcatgtattgtccgtgttgcaggttcagt

SEQ ID NO: 375136 - DNA, 527 bp, Homo sapiens
gtacaggctctcaatcaccaacaaccacctcccatgggaaaaataaatgttatcgtctaaatgtaggtattgcactccatcaggaagcaaaatttaaagcagaaagggtatagatgctgaaacagaatcccaacttcattattcatgcaacaagcatgtattgtccgtgttgcaggttcagttctcctggaagtagagtctgagatggagatgtgtatgtaggacatttataaggatgtcttggaattgacaccaataggagggagaggraggaggccagactgggcagagggagaagctgagtggtgacgcagtcccaaaaatgttcttggcaaaccctatagggtactctaaagatgagatggtccttcaagttgtcccaagttgggggaagagggtcatacatttacccctcgacattgagcagtcgtgggatatggctgtccttggaaggaggcaattcccaaagaggactgaaaatggtgggctgtctctatggcagtatgcccaggggctgggggaagtca

SEQ ID NO: 375137 - DNA, 530 bp, Homo sapiens
tgtggatggacaccatttctttatctcatttactgtgaataccactttactgtttacttgaaatttggtaagacagmagattttatgtgtcctcatcatcacacacataggaagagtgcatacaaatcatcacattgtacaccctgaatatatacaattttcatcaattagatatcttacaataaaaagtttaataattaaataaaaaacatttcctgcattgtaatgtctctgggaccagcacagagcatggcttagggagaagctcatgtaaaacacttatggattgaaacagaattcatcaggtgcaacataaaactggtgaagagataaacaagtaatgctttccattttctgctctcacttggaaaacactagtgagagggccagacaatgacatgaaatataggaactgccctggtggaaaaggggcctcaaataatcattcatttatcatccattccatttaccattttatccattccattgccatttcataataggaaattctgtagaaacagaaagtaatt

SEQ ID NO: 375138 - DNA, 530 bp, Homo sapiens
tgtggatggacaccatttctttatctcatttactgtgaataccactttactgtttacttgaaatttggtaagacagaagattttatgtgtcctcatcatcacacacataggaagagtgcatacaaatcatcrcattgtacaccctgaatatatacaattttcatcaattagatatcttacaataaaaagtttaataattaaataaaaaacatttcctgcattgtaatgtctctgggaccagcacagagcatggcttagggagaagctcatgtaaaacacttatggattgaaacagaattcatcaggtgcaacataaaactggtgaagagataaacaagtaatgctttccattttctgctctcacttggaaaacactagtgagagggccagacaatgacatgaaatataggaactgccctggtggaaaaggggcctcaaataatcattcatttatcatccattccatttaccattttatccattccattgccatttcataataggaaattctgtagaaacagaaagtaatt

SEQ ID NO: 375139 - DNA, 530 bp, Homo sapiens
tgtggatggacaccatttctttatctcatttactgtgaataccactttactgtttacttgaaatttggtaagacagaagattttatgtgtcctcatcatcacacacataggaagagtgcatacaaatcatcacattgtacaccctgaatatatacaattttcatcaattagatatcttacaataaaaagtttaataattaaataaaaaacatttcctgcattgtaatgtctctgggaccagcacagagcatggcttagggagaagctcatgtaaaacacttatggattgaaacagaattcatcaggtgcaacataaaactggtgaagagataaacaagtaatgctttccattttcygctctcacttggaaaacactagtgagagggccagacaatgacatgaaatataggaactgccctggtggaaaaggggcctcaaataatcattcatttatcatccattccatttaccattttatccattccattgccatttcataataggaaattctgtagaaacagaaagtaatt

SEQ ID NO: 375140 - DNA, 400 bp, Homo sapiens
tgggctgaccatttctcagtaggcagaacttggctcaattccttccctctcagatatcactaacaatgctccacaatatcttcaacagagaagtgtaggggaagaaagactctcatcattgaatttttttaaagtaattactgtggactaattatacarttgtttagtgccttagtttttccctcctcagcatgtgtggatttatattggtgctaattgcatccaggtgttctaaacaccacagttaagcacaggcaaagagaaactagaaacacttcaaaatctgaaggtatattggggcagaattcattgaacattttctattgttgttggcttaaatggctctgtcttcagacttgagtgttttttaatgttaataactgaaaaatgttttcttttt

SEQ ID NO: 375141 - DNA, 498 bp, Homo sapiens
aaaagaacatgtctgtggattcttgggatttcttagaaacagattttgcccatgacattaaaatggtagaatgaagttttataatgtttattttgtttgccaataattaatgtgtcatgtggtgcttcttgcatgctttttattttctttttgttcttagaagttttctaggaatcccttttaggaaactctatagatttratgtttagccttgagttattacttagtacaatgtcttttcaaatagtacagataaaatgacatgtttaaattatttttaaaaatctacctacccttattgagttaaaagatacacattgtgcttcctctttgttttacaaaggccatcaagtgccttagaaaatgccagtactgaaagttctatgcactccaaggttgcagagaaaggcagagaacctgcaatatgcctagaggatgtcctgcatcctctacagccagcgttccctgcttccgtaggaaagcagaatagcacgttgc

SEQ ID NO: 375142 - DNA, 605 bp, Homo sapiens
gtgtctgatttacgtagggcccccatattggttccaccaggtgtgacattgacatggtgctcagggaaggcttgtcgccccagcctaatcttattatgcaaatgggctttctgcttggccagtgccatcttccctgctccttgctgtacatgtggctggcaaaaagagaaaatggagccaccattttgaacatgcctagccgcaggtagtatattcctattggcacaactgccaacattcttctgtgcaagcttccagcttgcttgtctatgtctgcagctcaattttacaggctgctctttgttagaaaagaaaatgacttgggggctgctttttattgaaaggaaaaccttactgaggactctgtaccctcattatctgcctaagtactttcttcttagctcctgtatcatcttcatttccaaacacacgtagaagttagcatacatatgagaaaataaaagtgcagagcatgcttattcaagggacacaaacaamaaaactgaatgggcttttcatgtctcagaacaattcttaaagctctgctttcatagactgaagaaacagaatacagaccccagaaatagacacatacagacatgctc

SEQ ID NO: 375143 - DNA, 515 bp, Homo sapiens
tcacctatactatataaggattcactcacttttctctacattctcatcaatacctgatgygttgtgacttttaaaaaatagccattctgactagtataaggtggcatttcattgtggttttaatttttatttctctgatgatgagattgagcattatttcatatgtttgctgtccactcgtatgtcttggcttttgagaaatgcctgtttatgtactttgtccactttttaatggggttatctattttgttgttgttgagttgtttgaatttcttgtctattctggatattagtacttagttggatgcatagtttgcaaatattttctcacattcttcaggttatctctttcctcagttatttcttttactgtgcagaaacttttttgtttaattaagtcccatttgtctacttttgtttttgctaaatttgcttttgaggtcttagtcacaaattttttgccaaggccaatgtctagaagagtttttccatgttttctatgactatttttatag

SEQ ID NO: 375144 - DNA, 515 bp, Homo sapiens
tcacctatactatataaggattcactcacttttctctacattctcatcaatacctgatgtgttgtgacttttaaaaaatagccattctgactagtataaggtggcatttcattgtggttttaatttttatttctctgatgatgagattgagcattatttcatatgtttgctgtccactygtatgtcttggcttttgagaaatgcctgtttatgtactttgtccactttttaatggggttatctattttgttgttgttgagttgtttgaatttcttgtctattctggatattagtacttagttggatgcatagtttgcaaatattttctcacattcttcaggttatctctttcctcagttatttcttttactgtgcagaaacttttttgtttaattaagtcccatttgtctacttttgtttttgctaaatttgcttttgaggtcttagtcacaaattttttgccaaggccaatgtctagaagagtttttccatgttttctatgactatttttatag

SEQ ID NO: 375145 - DNA, 515 bp, Homo sapiens
tcacctatactatataaggattcactcacttttctctacattctcatcaatacctgatgtgttgtgacttttaaaaaatagccattctgactagtataaggtggcatttcattgtggttttaatttttatttctctgatgatgagattgagcattatttcatatgtttgctgtccactcgtatgtcttggcttttgagaaatgcctgtttatgtactttgtccactttttaatggggttatctattttgttgttgttgagttgtttgaatttcttgtctattctggatattagtacttagttggatgcatagtttgcaaatattttctcacattcttcaggttatctctttcctcagttatttcttttactgtgcagaaacttttttgtttaattaagtcccatttgtctacttttgtttttgctaaatttgcttttgaggtcttagtcacaaattttttgccaaggccaatgtctagaagagtttttccakgttttctatgactatttttatag

SEQ ID NO: 375146 - DNA, 308 bp, Homo sapiens
cagctataaaaaataaaataatttcacttgcagcaatatggaaggataattttacactttatgtcttagtctgtttgtgctgctgtaacaaaatacctgagactgggtaatttataaaaaatagaaaattattttctgatagttctgtaggcaaggaagtcaatgatcaagataccagcaygtaatgagggccttctgttgcactctcagatagcattaatttaaagggcaagagaaaggcagaactctatttgagagggctgttgcaaccttacagcatgatacattttgagaaatatggttttgaa

SEQ ID NO: 375147 - DNA, 308 bp, Homo sapiens
cagctataaaaaataaaataatttcacttgcagcaatatggaaggataattttacactttatgtcttagtctgtttgtgctgctgtaacaaaatacctgagactgggtaatttataaaaaatagaaaattattttctgatagttctgtaggcaaggaagtcaatgatcaagataccagcacgtaatgagggccttctgttgcactctcagatagcattartttaaagggcaagagaaaggcagaactctatttgagagggctgttgcaaccttacagcatgatacattttgagaaatatggttttgaa

SEQ ID NO: 375148 - DNA, 308 bp, Homo sapiens
cagctataaaaaataaaataatttcacttgcagcaatatggaaggataattttacactttatgtcttagtctgtttgtgctgctgtaacaaaatacctgagactgggtaatttataaaaaatagaaaattattttctgatagttctgtaggcaaggaagtcaatgatcaagataccagcacgtaatgagggccttctgttgcactctcagatagcattaatttaaakggcaagagaaaggcagaactctatttgagagggctgttgcaaccttacagcatgatacattttgagaaatatggttttgaa

SEQ ID NO: 375149 - DNA, 611 bp, Homo sapiens
aacagagcagataccagtagtctcagcasagactgacttccactaacctattgttattgagttctcagatatataagcatagaccagccagatttggctcaatcatgagaaataataaatacttattgttttaatctgctaagttttgatgtagtttttactcagcaatagctaattgatggagtatgtcttattgattccccccatatggacacttcttccaaaagttattgtagggagtcattacatactgaaattacagaactacatttacgtattatcgtgtttactatggttaaccaacctataaattataggtaaacttaatgcattctaaattcttcttattaagaagatgtattatactatattatatattatcaagttattagatatgtctaattccatgttgcacagaaatattttttcatattttatgttcatctccacttgacttctttgtagtcaagtttttttctgtctggaagcttattttttgtctttaacttccttaacattaacatcgataatgtagaggcgttttgtttgttttattttaatctattgtcttttcatcatttgtatttaatcattaaaaattattgactatt

SEQ ID NO: 375150 - DNA, 611 bp, Homo sapiens
aacagagcagataccagtagtctcagcagagactgacttccactaacctattgttattgagttctcagatatataagcatagaccagccagatttggctcaatcatgagaaataataaatacttattgttttaatctgctaagttttgatgtagtttttactcagcaatagctaattgatggagtatgtcttattgattccccccatatggacacttcttccaaaagttattgtagggagtcattacatactgaaattacagaactacatttacgtattatcgtgtttactatggttaaccaacctataaattataggtaaacttaatgcattctaaattctycttattaagaagatgtattatactatattatatattatcaagttattagatatgtctaattccatgttgcacagaaatattttttcatattttatgttcatctccacttgacttctttgtagtcaagtttttttctgtctggaagcttattttttgtctttaacttccttaacattaacatcgataatgtagaggcgttttgtttgttttattttaatctattgtcttttcatcatttgtatttaatcattaaaaattattgactatt

SEQ ID NO: 375151 - DNA, 550 bp, Homo sapiens
agatcaggagatttcctcctgtgcctggctcagtggggccagtcccacagagccttgatcactgctagtgcaacagtctgggatccacctggtaggctgcagcgtgcctgggggagggacgtctgccattgctgaggcttgagtaggtaaacaaagtggctgggaagctcaaactgggcagagcccactgcagctcagcaagtcctactgtctctatagaccccacctctgtgggcagggcatagctgaacgaaaggcagcagaaacttctgtagacttaaacgtccctgcctgacagctctgaagagagcagtgattctcccaggatggcatttgagctctaagaatggacagactgcctccttaagtgggtccctgacccccatatagcctaactgggagacacctctcagtaggggcygacagacacctcatacaggtgggtgaccctctgggacaaagcttccagagggaggatcaggcagcaatatttgtcatcctgcaatatttgctattctgcagcctccgctggtgatacctaggcaaacag

SEQ ID NO: 375152 - DNA, 619 bp, Homo sapiens
cctaacaaatacataaaatgtttgtgtcaattaaaaataataaaagcagaaaaagaagtagatttagtattatataagatacaactcacaaaaacctttacatyataccatgataaaataattgaccaagtctgtcaatgtgaaaaaatagaaatctaaaccaaatagagattaactgaaattatctaccagtagaaaacaatattactaacataatgttaagattatataattcatatttaagcatattcttttgtgtttgtggatttacataaattagttatacttcaaaattaaagttggtaggaataataatgacctccttgtaagatctacatgcaatatcctttattttgtgaataccttcacttgtatggcaaaggtgattaagatatagatgagcttaagtttgataattcattgattttgaaatagattatcctggatttttcagtgggcacaatataattataaggatccttaaaagtgaaataggggaccagaagcagagactcaaaggaagatttgatgatggaaaaagcataacaaaaacaccaggggttaggtctaggtcctgttgctaactgcacagaaggccaatcactgagacaatgcatat

SEQ ID NO: 375153 - DNA, 398 bp, Homo sapiens
gtttatggcttgctatggtttaaatgtttgtcctttcaaaaagtcatgttgaaattaaccaccaatgcaacagagttttggaagctggggcctaatggaatgtgtttaggttatgaagkctctgctttaatgaatagattaatgtcattataaaaagggctttcaagagtgagctctctgcttttctcccatctgctatgtgatgacacacataagaaggccttcaccatatgccaacaccttgatataggacttcccaacctccagaactatgagaaaataaatttctgttcattataaattacccaatctcaggtattctgttatagcagcacaaaatgggctcagacactgatataaccaatgatttctcaaatgtgacatagcttctccataac

SEQ ID NO: 375154 - DNA, 398 bp, Homo sapiens
gtttatggcttgctatggtttaaatgtttgtcctttcaaaaagtcatgttgaaattaaccaccaatgcaacagagttttggaagctggggcctaatggaatgtgtttaggttatgaaggctctgctttaatgaatagattaatgtcattataaaaagggctttcaagagtgagctctctgcttttctcccatctgctatgtgatgacacacataagaaggccttcaccatatgccaacaccttgatataggacttcccaacctccagaactatgrgaaaataaatttctgttcattataaattacccaatctcaggtattctgttatagcagcacaaaatgggctcagacactgatataaccaatgatttctcaaatgtgacatagcttctccataac

SEQ ID NO: 375155 - DNA, 576 bp, Homo sapiens
aaacgtcaggcatatcatgagaatggtctatggattatggtagccccaggcgctcaggggatcattctgcaactcctctaagggacttctggtgtctagtatcctctatatcaaatttgggtatcatggatgtgctggtttcaaagttgagttgaggagtattccctctttatttagcattgatctggcaaagccactttaataaattttctctgcgataagrtttgtgcttaaaaattaaatttctctaataatataaggctaatcagattttctattttgactgttttggtacttttttttaaagttactgaaattgtttcccaaattttataaatgtttgcattaaatatgttatcactttattaactttaagttgtttgtaaattttcatgattatacttttaacgtctgaagaatcagtaataatgtctgcattcattcctattattagtaacctgtgtgcatgtatgtttttacacttctttaatagttttgaaggcttgtaatttactaactttattaatcttttcaaataactacactttgctctttgctctttttaattttttctaa

SEQ ID NO: 375156 - DNA, 558 bp, Homo sapiens
gagcaagagagaaagagtacccggtagagttaccacacacttgtaaatgacagatctcatgtgaactcagaaggagagctcacttatcaccatggagatggcccaatccattgatgagggatctgctcccatgttccaaatacctycccccagggcccacttccaacattggagattacaattcaacatgagatttggacaggaacaaatattcaaactatatcaagccagaagatgggaatattggagggtggggaatgtttttagaatggtgtctactagaggaaaacaaaattatgcacacacatgcaaacacacatacatacacgtactcacagaccttcacatatatccctcaacagagttagaattcatcagtgtttggccagtggtataaactattggcataaataatttgtaaatgatgcctctccagatccacaagagagagaggcatgtgccaactccgggaacactaagtgcaggtatggagaataggattaggaaagaaaaaaaaacagaatccaaataaaagcaggtgatcaaacagggaatgtt

SEQ ID NO: 375157 - DNA, 512 bp, Homo sapiens
tcccgctgtggtaagctagaattatcatgttcttgttagaacatggttggttcaactgtccttttatgttcactgtgcttggaagcatcctgaagcatcccaataatatctctgaattctgataaaatttttcctccctagcacacatattaaaagcaaatgtactttctcataataacaagagtgaataaacattgctcttatattggtatgagtattcaaatgttataggaaataastataggttaggagaaactttatctgtcccctagtagaagtatctactcctgggaaccagaatctccagtccaatacagcccacagttacaagcatgggacatatacaaatcgtccacatgtttcattggagatgatgatggaagcagttacacctattttagtttcagttcccaaactcaagtattctaactattgtggtctcagaaccacatgatgcccatcagtttgaagtttatgcctcatcctgaggatcgcattcaaacctttcagga

SEQ ID NO: 375158 - DNA, 512 bp, Homo sapiens
tcccgctgtggtaagctagaattatcatgttcttgttagaacatggttggttcaactgtccttttatgttcactgtgcttggaagcatcctgaagcatcccaataatatctctgaattctgataaaatttttcctccctagcacacatattaaaagcaaatgtactttctcataataacaagagtgaataaacattgctcttatattggtatgagtattcaaatgttataggaaataagtataggttaggagaaactttatctgtcycctagtagaagtatctactcctgggaaccagaatctccagtccaatacagcccacagttacaagcatgggacatatacaaatcgtccacatgtttcattggagatgatgatggaagcagttacacctattttagtttcagttcccaaactcaagtattctaactattgtggtctcagaaccacatgatgcccatcagtttgaagtttatgcctcatcctgaggatcgcattcaaacctttcagga

SEQ ID NO: 375159 - DNA, 640 bp, Homo sapiens
ttcccttcccaacttggagcatgtacatgtgcaccctgctgtgccactgcaaccagtgtgcatgtgagtgcattctggctatctccccccaccacatcccactacttctgccagcatctttctcctgcaccaaaactgccatcagaccaaagtaggcatggagaaaagcaatcttgctcccaccctgagcaaccacctccacccatgggaacatgcacacagggtgcaaccaccaccaccagcrtgaactagcacacagttaccagcaaagcagggggtgtgatccccctagctgtgctgtcaatgccagccactgctgtgaagggctgtgtgaaggccagtgccccctcacccactaggatcctgctgcagtctaggagcatgcaccaacaccttgctgcagctgtagctgctacgtgcacatgcaaatgaggatgatttctgccgccagtaatctacaaagtgccttgggtggcatcacccatcacagtgttgtgacgagtagtctggaagcacctcggctcttccagcatagcaggttcattacattgagaaactatagaactaagcaggaggggagcagggcagaggtgatacaagtcccccagagttagagcatgcagtccaggagtcctgaact

SEQ ID NO: 375160 - DNA, 640 bp, Homo sapiens
ttcccttcccaacttggagcatgtacatgtgcaccctgctgtgccactgcaaccagtgtgcatgtgagtgcattctggctatctccccccaccacatcccactacttctgccagcatctttctcctgcaccaaaactgccatcagaccaaagtaggcatggagaaaagcaatcttgctcccaccctgagcaaccacctccacccatgggaacatgcacacagggtgcaaccaccaccaccagcatgaactagcacacagttaccagcaaagcagggggtgtgatccccctagctgtgctgtcratgccagccactgctgtgaagggctgtgtgaaggccagtgccccctcacccactaggatcctgctgcagtctaggagcatgcaccaacaccttgctgcagctgtagctgctacgtgcacatgcaaatgaggatgatttctgccgccagtaatctacaaagtgccttgggtggcatcacccatcacagtgttgtgacgagtagtctggaagcacctcggctcttccagcatagcaggttcattacattgagaaactatagaactaagcaggaggggagcagggcagaggtgatacaagtcccccagagttagagcatgcagtccaggagtcctgaact

SEQ ID NO: 375161 - DNA, 364 bp, Homo sapiens
gaggaattcaagctagctgctgaaatttgcctaagtaacaaggagctgaatgttaatagttaatgttaatggagaaaatgtctccagggcatgtcacagaccttcatggtagcccctctcatcagatgccagcagccctaggagggaaaaaatggctttgtgggctgggcccagggccctattgctctgtgcagcttcaggacttggttcgctgctcccagacactccagctccagtcatggctaaaaggagctaaggtatagcttgagccgtcgtttcagagggwgcaagcccaagtcttggtggcttccatgtggtgttggacctgctggtgtgcagaagacaaaagttgagattttggagc

SEQ ID NO: 375162 - DNA, 428 bp, Homo sapiens
ctgcaaactacacatatatataatcattaaataygataacttctactttttaatatgaccatggactgctaaaatggcatagtttccatgggtctaataaaaaaagtaattgagtaacattttattatcaatttttttggaacattgtgtatgggccaggaacctttgccaactctttcatcaatgcatgaagttaaataactgtaacattaaacataataaatttctgccaggaaactactaaacttgtctatcctgattcctagtttactcactcccaataaaataatatagttcaaaaatgctagtgttattcgctcaatgcttttatttagtttagctctctctctctctctaccatcatattttctttatttctttctcttttagaattatggatatcgcaaacattgaggagatgcaaatta

SEQ ID NO: 375163 - DNA, 452 bp, Homo sapiens
ggaacctttgccaactctttcatcaatgcatgaagttaaataactgtaacattaaacataataaatttctgccaggaaactactaaacttgtctatcctgattcctagtttactcactcccaataaaataatatagttcaaaaatgctagtgttattcgctcaatgcttttatttagtttagctctctctctctctctaccatcatattttctttatttctttctcttttagaattatggatatcgcaaacattgaggagatgcaaattagcgtatgttgtcatctacaataaaggaagaagatatgcaaagggtgcatttttaggtgagatgataaagaaatctatctctgaagaggtacgartttgagatgtgattaaaggtaaaaaagaacatgttggaatatcttagagaaaaccgtttccagaagtctgaagaacaagtgcaaagac

SEQ ID NO: 375164 - DNA, 578 bp, Homo sapiens
acacaacgatgcatgagagtgataagactttgctgttcattctttccagcctacaaatatagaagctgttatttctcttcttcctgctgcttgactgtcattccaagataaaaagttctaaaggtattaagaaaaaatactattttgagtaagaaacacgggaatcctctcgtaatatgacttcataacctgaaagggaaggacacattgaactaaagaaagagactaataaaaacaataaaaatagataattaacccagaaaatacaattaaaatatgcaaacaaacaaaaagcttcaaaactcagaactatgtaaagaatgtttcyaatttttgaattaaaattaactgcaatagaaacaatcatttgtaagaaataaatatattttccaaaatataaactgaataaaaatattttagaattgaaaacaaagtaagaaagaactggaaatcatattcaaaaaaatcagacacatggtcatgtaaggtgtaaataaaaatatcaaaaacatataagaataaaaaagagaaaagaagacataaagcaataaaatatttctgagaataattaatacttt

SEQ ID NO: 375165 - DNA, 573 bp, Homo sapiens
gattgcatagcaattatgttaaatttaaagaagattgctattttaaagtggttgagccttccaatttattaacatgtctctccatttatttaaattttcttcactatatcttaacaatatttttaggtttcagcatgcagaacttgagtagattttgtgtaatttatctatagctatgtcatgttttcaattttttcaaaatggtattctaattcacatttgtcctttggtatcatatagaaatagtctcaatttttaattgacaagcaataattacatatatttatggtgtaaatataatattatgatacatgtacatattgtagaatrattcagttgatctaattaggatatccatcaccacacatattttttcctttgtggtgacaatatttaaagtctactctgaacaattttgaagcatgatctcacttatatatgtggaatctaaaaatgttggacttgtagaattgtggttaccaggaatggggtatatagacagaggaagaggaaatgttattcacagagtacaaactttcagttagataagaaatagatttatgtgagctatta

SEQ ID NO: 375166 - DNA, 479 bp, Homo sapiens
tttaacatacatggcacttccccacgctctctctcttgttcctgcttttgccatgtgatgcacctgctcccccttcaccttcttccatggctgtaatcttcctgaggccctcaccagaagcagatgccagcaccatgcttcctgtacaccctgcataactgtgagccaattaaacttttttctttataaattacccagtgtcagatattcctttatagcaatgcaagaacagcctaatatagtaccttatataaatgaaatcacacagtatttggttttttgtgtctggctaatttcacttggcatgtcttcaargtttatccatgtaatatatgtcagaatttccttcctttttaaggctgaaataatattccattgttatgtatatgcaacattatctattcatcaaacattcaggtcaaatcttgaatgctctgttgcttaaaaatttcttctctcagattccctaagtcattact

SEQ ID NO: 375167 - DNA, 479 bp, Homo sapiens
tttaacatacatggcacttccccacgctctctctcttgttcctgcttttgccatgtgatgcacctgctcccccttcaccttcttccatggctgtaatcttcctgaggccctcaccagaagcagatgccagcaccatgcttcctgtacaccctgcataactgtgagccaattaaacttttttctttataaattacccagtgtcagatattcctttatagcaatgcaagaacagcctaatatagtaccttatataaatgaaatcacacagtatttggttttttgtgtctggctaatttcacttggcatgtcttcaaggkttatccatgtaatatatgtcagaatttccttcctttttaaggctgaaataatattccattgttatgtatatgcaacattatctattcatcaaacattcaggtcaaatcttgaatgctctgttgcttaaaaatttcttctctcagattccctaagtcattact

SEQ ID NO: 375168 - DNA, 606 bp, Homo sapiens
ttactatttggccctttgcagaaaaagtttgccaatgcttttctaaaagaagacttgaattaaccaatatgaggagcaactaagtctcaatggaagtgatatttgagctgagatctgcaggatgagtaggattttgccaagagatagagaggcttgtgccaagcaaagggaacagcatatgtgaagatgtaattatctgatgatttcttcttgtccacttcccagaaaagccaaacactgaaaacagtaggagttgyggtagagaagagtttaataattgcatagacagccaagttgaaggatggaggatgtttcttaaatccacctccccaggaaatcagagactagagtttttcaaggatgctttggcttccaaggggctaaggaatagtaaatgctgattggtttggctggggatgaaaacatgggttgaagctgtcttcttgtgttgagtcaactcctcagagatcacagaactagttgagttagtttcttggtatcagttactgatctgggtagtgcaagctggtccatcagaatgcaaggtctgaagaacacctcaaataccagacttagggtttaccataatgatgtaatctataggag

SEQ ID NO: 375169 - DNA, 606 bp, Homo sapiens
ttactatttggccctttgcagaaaaagtttgccaatgcttttctaaaagaagacttgaattaaccaatatgaggagcaactaagtctcaatggaagtgatatttgagctgagatctgcaggatgagtaggattttgccaagagatagagaggcttgtgccaagcaaagggaacagcatatgtgaagatgtaattatctgatgatttcttcttgtccacttcccagaaaagccaaacactgaaaacagtaggagttgtrgtagagaagagtttaataattgcatagacagccaagttgaaggatggaggatgtttcttaaatccacctccccaggaaatcagagactagagtttttcaaggatgctttggcttccaaggggctaaggaatagtaaatgctgattggtttggctggggatgaaaacatgggttgaagctgtcttcttgtgttgagtcaactcctcagagatcacagaactagttgagttagtttcttggtatcagttactgatctgggtagtgcaagctggtccatcagaatgcaaggtctgaagaacacctcaaataccagacttagggtttaccataatgatgtaatctataggag

SEQ ID NO: 375170 - DNA, 606 bp, Homo sapiens
ttactatttggccctttgcagaaaaagtttgccaatgcttttctaaaagaagacttgaattaaccaatatgaggagcaactaagtctcaatggaagtgatatttgagctgagatctgcaggatgagtaggattttgccaagagatagagaggcttgtgccaagcaaagggaacagcatatgtgaagatgtaattatctgatgatttcttcttgtccacttcccagaaaagccaaacactgaaaacagtaggagttgtggtagagaagagtttaataattgcatagacagccaagttgaaggatggaggatgtttcttaartccacctccccaggaaatcagagactagagtttttcaaggatgctttggcttccaaggggctaaggaatagtaaatgctgattggtttggctggggatgaaaacatgggttgaagctgtcttcttgtgttgagtcaactcctcagagatcacagaactagttgagttagtttcttggtatcagttactgatctgggtagtgcaagctggtccatcagaatgcaaggtctgaagaacacctcaaataccagacttagggtttaccataatgatgtaatctataggag

SEQ ID NO: 375171 - DNA, 606 bp, Homo sapiens
ttactatttggccctttgcagaaaaagtttgccaatgcttttctaaaagaagacttgaattaaccaatatgaggagcaactaagtctcaatggaagtgatatttgagctgagatctgcaggatgagtaggattttgccaagagatagagaggcttgtgccaagcaaagggaacagcatatgtgaagatgtaattatctgatgatttcttcttgtccacttcccagaaaagccaaacactgaaaacagtaggagttgtggtagagaagagtttaataattgcatagacagccaagttgaaggatggaggatgtttcttaaatccacctccccaggaaatcagagactagagtttttcaaggatgctttggcwtccaaggggctaaggaatagtaaatgctgattggtttggctggggatgaaaacatgggttgaagctgtcttcttgtgttgagtcaactcctcagagatcacagaactagttgagttagtttcttggtatcagttactgatctgggtagtgcaagctggtccatcagaatgcaaggtctgaagaacacctcaaataccagacttagggtttaccataatgatgtaatctataggag

SEQ ID NO: 375172 - DNA, 330 bp, Homo sapiens
gtaggattttgccaagagatagagaggcttgtgccaagcaaagggaacagcatatgtgaagatgtaattatctgatgatttcttcttgtccacttcccagaaaagccaaacactgaaaacagtaggagttgtggtagagaagagtttaataattgcatagacagccaagttgaaggatggaggatgtttcttaaatccacctccccaggaaatcagagactagagtttttcaaggatgctttggcttccaaggggctaaggaatagkaaatgctgattggtttggctggggatgaaaacatgggttgaagctgtcttcttgtgttgagtc

SEQ ID NO: 375173 - DNA, 374 bp, Homo sapiens
aagatgaagtcagctatgtcagatttccctcagtgtcataatttttccaaaggcagtttcaaagccacagaggagggaaacttgaaaattataaaagaacytaaaaggatatctatgtgcctgaagtccaggccataaaagaaagtagtggcaatagaatgaacatgtagaggtggccaggtgctaaactggcagtgccttgtggtccttggtaagagttgtggacatttatccagtggtgaatgggaaatgattgatggattgagtgacactcaaaccattgatgcattgagtgacactcaaaccattgatgcactgagtgacatgatcatcctctgtttggatggtcatattggatgctcaatagggaatgg

SEQ ID NO: 375174 - DNA, 623 bp, Homo sapiens
agggaaaacccaagagatggctgatataccaagtttctgggctcttctttccacctcttgtatctctaagagaggctgatcaagggcagaggwctttccatgtgttgatagcatggaaagaccttgatagtccttccaaaagccgatagcaagactggctggattaatgattttctctgtcaacatgtctgaaatccctctagcaggggcacatatgataggaaacttgaagggataacttcagcttttcctttctaatgccatggtctttaaggtagctgtcatggaaataaacaccatcatgcctgcttttaaaggctcaaaatcaggacactggagatgtccaagagatatgtaggtgcttccagggaatagaagagaatgccaagaaagtacttggaaaacttgtattaattccacccctcctgtccacttggtgtcatgccagagctcttcacaacaattagattagcatttattgagttcttactaagcaatttgctcatttctttggtggtagagataactctataagacttgatctcactttttttgcagatataaagtcagacacagagacgttaaataagtagtttaaggttgcattgataacaaagtgtgaa

SEQ ID NO: 375175 - DNA, 561 bp, Homo sapiens
aaaggacttgaactggtttttattaagttccaccattaaaaaaatgaaaacagacataaaattataaagcccattgggaaaatttaggttggaggtgtagggtggaaaagactaaggaaattaaggagaaatatagcaaatgagtatgtagttacaagctgagcttctagtaaggcaaagcaataaggaatatgggatcattttcatagcttatatctgtgtatcaagcacacttgaaggaaattattgcatgatactcacatttgtcattttttctagaccttttgcttaaaccattgccatggtttgaatatttgtgccccccaaaactcatgatgaaacttgtaaaccaaaaataaaatcctaaggccccatcccgccagccatctgaatggacttcctccttagccagggttcttttaaaatttaacctgagagactgtttcaggccatgayaggaagtgggagtgggacatgcctcattatacctctctggtattaacatcaatacagactttaagtctgattaaaaaaaaaagattacaacctgttctgtctaaa

SEQ ID NO: 375176 - DNA, 367 bp, Homo sapiens
aggcatcttctctggctatgtggtgagaaactgtgctcctcctcctctgttccccagtgaggatgggagcactaaacgggatgagggaggacaaatgttctgaaacttccaagaggcaytagatgtggagacaaagactgtccagttttcaagaatgtatgctttgccagtggaagaaaagtggctattcagccttgccatcctcagcctatcactgtgatctcattggaagacttatttttcttcagttagcccttagactcctcaagaactctctgtttcatgcccaaaatattattgaccctgaactatacacagcaccattcccccaagggctgcctttccctctcccctaggtatcatcccc

SEQ ID NO: 375177 - DNA, 367 bp, Homo sapiens
aggcatcttctctggctatgtggtgagaaactgtgctcctcctcctctgttccccagtgaggatgggagcactaaacgggatgagggaggacaaatgttctgaaacttccaagaggcactagatrtggagacaaagactgtccagttttcaagaatgtatgctttgccagtggaagaaaagtggctattcagccttgccatcctcagcctatcactgtgatctcattggaagacttatttttcttcagttagcccttagactcctcaagaactctctgtttcatgcccaaaatattattgaccctgaactatacacagcaccattcccccaagggctgcctttccctctcccctaggtatcatcccc

SEQ ID NO: 375178 - DNA, 367 bp, Homo sapiens
aggcatcttctctggctatgtggtgagaaactgtgctcctcctcctctgttccccagtgaggatgggagcactaaacgggatgagggaggacaaatgttctgaaacttccaagaggcactagatgtggagacaaagastgtccagttttcaagaatgtatgctttgccagtggaagaaaagtggctattcagccttgccatcctcagcctatcactgtgatctcattggaagacttatttttcttcagttagcccttagactcctcaagaactctctgtttcatgcccaaaatattattgaccctgaactatacacagcaccattcccccaagggctgcctttccctctcccctaggtatcatcccc

SEQ ID NO: 375179 - DNA, 510 bp, Homo sapiens
ttcagcttctttcattctgggacagagaactgaggcacagaggttgacaaggcaggagaacccagttattggatttgggtcccagataggagcttgtcccagagaaagaaaaaaaattgagtytagggtagaaggtgagagcaactatgctgagcttagagtcccttagattcttatgtagcccagatgccacctgcctttcctcagcacaggctaattgtcataggtcttctgagaagcaggccatggggaaagaggttaccacgcaagaggcttattagggagtgttttggaatcaacccctgggggaagggagaggaagggaaagaaaggagcagaactgagcagacggtgaggttgcactgtgacttagtctcaatgggaactccagccaatcccatgggagttctggagctagtataacctttcagtgttgtcctaaggcaaggtgaggaagggaagggggtctttacagtcacaggtggatcaggtatagatgtgtaggctgcc

SEQ ID NO: 375180 - DNA, 510 bp, Homo sapiens
ttcagcttctttcattctgggacagagaactgaggcacagaggttgacaaggcaggagaacccagttattggatttgggtcccagataggagcttgtcccagagaaagaaaaaaaattgagtctagggtagaaggtgagagcaactatgctgagcttagagtcccttagattcttatgtagcccagatgccacctgcctttcctcagcacaggstaattgtcataggtcttctgagaagcaggccatggggaaagaggttaccacgcaagaggcttattagggagtgttttggaatcaacccctgggggaagggagaggaagggaaagaaaggagcagaactgagcagacggtgaggttgcactgtgacttagtctcaatgggaactccagccaatcccatgggagttctggagctagtataacctttcagtgttgtcctaaggcaaggtgaggaagggaagggggtctttacagtcacaggtggatcaggtatagatgtgtaggctgcc

SEQ ID NO: 375181 - DNA, 510 bp, Homo sapiens
ttcagcttctttcattctgggacagagaactgaggcacagaggttgacaaggcaggagaacccagttattggatttgggtcccagataggagcttgtcccagagaaagaaaaaaaattgagtctagggtagaaggtgagagcaactatgctgagcttagagtcccttagattcttatgtagcccagatgccacctgcctttcctcagcacaggctaattgtcataggtcttctgagaagcaggccatggggaaagaggttaccacgcaagaggcttattagggagtgttttggaatcaacccctgggggaagggagaggaagggaaagaaaggagcagaactgagcagacggtgaggttgcactgtgacttagtctcaatgggaactccagccaatcccatgggagttctggagctagtataacctttcagtgttgtcctaaggcaaggtgaggaagggaagggggtctttacrgtcacaggtggatcaggtatagatgtgtaggctgcc

SEQ ID NO: 375182 - DNA, 572 bp, Homo sapiens
gtacattatatgtatttttgtattgtttttcaccgcttaaatacctttattatttttaaaaaatcatttggacatggatagctctgcaaaatacttcttccatcccaaaacttcaaatcctttccacatgtcctccataaagaaacaaaatatttatacttcatgcccatttgagtttaatttttaaaaacatttaagattaaaaatcaaatattatttttctttccagaacttgttaggaawtttaaaccacaatgcaacatacttaacggcatttctttttaaaaattagcttattagatgattttatgagaaaaaatcaattcaaggcctcagggagaatattatattctctgtttctgaaagtaaaggacattgaaaaacccttttgctcctctggagtttgtgatttcaacataaccaacaaacacagcacacagattgactacttacttaatattaggcattgttttgttacttttggaatgcagctgaaatgctatctaaacttgaaaagggtgggtgagtggaagtccagcacagaagagggtcaaggctggggacagctgaat

SEQ ID NO: 375183 - DNA, 484 bp, Homo sapiens
ccggggtacaaaggatgctatccagaaccctakcaactcaggctggagggcagtgaccccaacccaccacatggaaggcatgtacaacacgcaggcagccaccttgcgagtggagcaagcaggctggcttgtggtcagaacctgagttctagcgcaaggcacagcccaccttcaaatctcagctctgcctcttactagctgtatatgacctgagcaaatgatctaacctctgggtttctgttttcccacttcaaaaatggagaaaataacggtacctaagccatagggctgctgggaggattaaatgggataacgtctgtgcagcattgggcactgtgccggcacagggtaactgcccccataataatgtcagggctgtcatctgctagaacagtggcccaaccaaccgagtgggggtcgatgccacaactcaaacagtcctgctctacatggtgctctacatggtgcaatctacccccttgac

SEQ ID NO: 375184 - DNA, 484 bp, Homo sapiens
ccggggtacaaaggatgctatccagaaccctagcaactcakgctggagggcagtgaccccaacccaccacatggaaggcatgtacaacacgcaggcagccaccttgcgagtggagcaagcaggctggcttgtggtcagaacctgagttctagcgcaaggcacagcccaccttcaaatctcagctctgcctcttactagctgtatatgacctgagcaaatgatctaacctctgggtttctgttttcccacttcaaaaatggagaaaataacggtacctaagccatagggctgctgggaggattaaatgggataacgtctgtgcagcattgggcactgtgccggcacagggtaactgcccccataataatgtcagggctgtcatctgctagaacagtggcccaaccaaccgagtgggggtcgatgccacaactcaaacagtcctgctctacatggtgctctacatggtgcaatctacccccttgac

SEQ ID NO: 375185 - DNA, 446 bp, Homo sapiens
cccaagggcaccacagtagccctgcgaggagctcctgctaaaacacttcaccggacagggccttggaggccccgcccccacagggatggagggggctacacagggaggtaggaacgggctcaatcttaagactcccagctgtcctgggataatccccccaagctgtggagactgatgggcaacrtccagcagcctctggacaagggctgctgcagaaagcccttcaaaggagcacccgaacacatcctgttaagagaaagggtgtttgcggccatctctgaagtcctggggggcttccagttccctgtgtgagtcaagatcctcaacaatggacaagaaggggctcaaagaggccagagggcccttagagggcgcctgcttggtggcagcaggtctaagaccagctctcactattaaccatggttcctggggtgcattaagaagga

SEQ ID NO: 375186 - DNA, 577 bp, Homo sapiens
cagaagaagcagacactaaccccagtaaaatctatatcttcggcaactctgcagaaaggtgactcctctcctccatctttccctaataaaaacatgatgatgatgatgatgtgtaaaataggacaatgagtgtgaaacacttgaagttttctttgttttgttttggtttattttattttttaagacaggttctcactgtgtcattcaggctggagtgcaatggtaacatcttggctcactgcggcctcaaactcctgggctcaagggatcctcctgcctcagcctcctgcgtagctaggaccacaagcacgcaccattactcctggttaattgttatatttttctggccaagcgtgggagctcacacctataatcccagcactttgggaagcagatcacttgaggctaggagttcgagaccagcctggccaacatggcaaaaccctgtctctacaaaaaatgyaaaaattagctgggcatatggatgcacacttgtaatcccagctacttgaaaggctgagatatgagatgcacttgaccctgggaggcaggggttgcagtgagcagagattgtgcc

SEQ ID NO: 375187 - DNA, 585 bp, Homo sapiens
ctctgctccaggccaagtgggcagaccctctggttcctacagaaacatctgcagggcaccatggtctgcccagcctgcgcccagcgctgccctctcggacacggtctctattgggcttctatcgagtgaccagtggtgagagtccagcagacccatcagcctggccagggggagcctgcgattgcacatttatatcagttccaaacctttaaatcagaggccaattttcaaacaacatcatctgctaaagccccaggtataraacagacttttaaggtgaatcgctccgactggactggacatcagtgccccctcagtctgacaggccccagtactcacttcctacaccccaaacacaccacaccatagccccagagatacctctgggaacacagttcgaaaaccactgcacaatggaagggtgtggaggcattccaggtagggaactgttttgaataatacatacgcaattcccggtggtttatcccatcattgagtaatcctaagaaccgaagacctgggggaaagtaactcctcacacatctaggaaactatcccaggctgggtcatgcctttaccaggcgg

SEQ ID NO: 375188 - DNA, 545 bp, Homo sapiens
tcaacaccagtctggccagcatggtgaagccccatctctactaaaaatacaaaaaytagccaggcgtggtggcgtgagcctgtagtcccagctacttgggagactgaggcaggagaatcacttgaacccgggaggcagaggttgcagtgagccaagatcatgccactgcactccatcctgggcaacagagcaagactctgtctcaaagcaaaataataataatcagaaaatctcagggggtgataaatgcaaggcaagtattgaaacaaaggtgataggaggctaggcgcggtggctcacacctataatactagcactttgcgaagctgaggtgggaggattgcttgagcccaggagtttaagaccagcctgggcaacatagcaagaccctgtctacagaaaaaaaaaaaaaaattagccaggcgtggtgatgtgcacctgtagtcccagctacttggaaggctaaagcaggaggactacttgatcccaggagttagaggctgcagcgagctgtgactgcaccactgcactccagcctgggcaac

SEQ ID NO: 375189 - DNA, 545 bp, Homo sapiens
tcaacaccagtctggccagcatggtgaagccccatctctactaaaaatacaaaaactagccaggcgtggtggcgtgagcctgtagtcccagctacttgggagactgaggcaggagaatcacttgaacccgggaggcagaggttgcagtgagccaagatcatgccactgcactccatcctgggcaacagagcaagactctgtctcaaagcaaaataataataatcagaaaatctcagggggtgataaatgcaaggcaagtattgaaacaaaggtgataggaggctaggygcggtggctcacacctataatactagcactttgcgaagctgaggtgggaggattgcttgagcccaggagtttaagaccagcctgggcaacatagcaagaccctgtctacagaaaaaaaaaaaaaaattagccaggcgtggtgatgtgcacctgtagtcccagctacttggaaggctaaagcaggaggactacttgatcccaggagttagaggctgcagcgagctgtgactgcaccactgcactccagcctgggcaac

SEQ ID NO: 375190 - DNA, 528 bp, Homo sapiens
taaatgtgattttgagatcatgtccctccatgttgctagaaaattcacctttcatttacttgttggatggggctcaggaaattttttccctgctgtctaaattggtataagaatcctaacacttccatctgggaaatggagatataatttacatatgcctttagttcatcgtagttacctcaataaccttatgttcaggctcacatgttcactagaagtcaaatatttccaagccctccatgccaggcttgcaaatggaaatcactgacaagactggattcctgatacttcatatgcagcttcctcaaggcaccccataggtccttctatctcccaaaatagctgctaaatatcyagctatggtttcctgttacttgaggtatatactaacttctatcccctttctattctggaggaatctctttccttggtggcattcttctatattccttccctctacaaaaatttctcaatgaatttagacttttagaggaaaaaaaaaacaagaaagaaattagaaaaaggttg

SEQ ID NO: 375191 - DNA, 601 bp, Homo sapiens
ttatctgtgaaactgcttttaaggtgtcaattcatttcactgagttgaatctttcttttgacacagcaggttgggtagcctctgattggagaatctgtgaagggacatttgggaacccattgagacctatggggaaaaacaaaataaccccaaacaaaaactagaaataagctatctgtgaaatggctttgttatgggtggatcatctcacagagttaaacctttcttttgattatagaggttggagacactctttttaaagaatcagcaaaaagatattttggagcccttttgaagcatttggggaaaacaaaatatccccagataaaaactagaaagaagctacttgtgaaactgctttgtgttgtgtrgattcatatcacaatgttaaacctttcaattcagcaggttagaaacacttattggggaatctgtgaagggacatttgggaacctcttgaggcctatgggaaaaaaacaaatatcgttagataaattctagaaagaatgtgtctgtgaaactgctttgttaagagtggattcatctcacagtgttaaacctttcttttgattcagaaggttggaaaaactctcattggata

SEQ ID NO: 375192 - DNA, 545 bp, Homo sapiens
tagtgagtggaaatttggaactcattgaagcctatagcaaaaaagcaaatttctcaggataagagctagaaggaagctacctgagaaaccactttgtaatgtgtgcattcatctcacatagttaaacatttcttttgatttagcagtttgaaaacatagtttatgtccattctgtgaatggacattttggaggtcattgaggccaaaggcaaaatactgaagattccagataaaaattgggaggaaggtatctgacaaaccacaatgtgttgcatgcattcatctcacagagttaaatatttcttttccttcagcagtttggaaatattgcttttgtccatcctgcaaaagaatattttggagctcctggagrccaatggtgaaaaagcaaatatccaaggttacaacctcaaaggaacctagctgagaaactgctttgtgatgtgtacattcatctcgcagtgataaaattttcttttctttcaccagtttggaaacactgtttttatagaatctgagaagagatatttgggagcacattgaca

SEQ ID NO: 375193 - DNA, 335 bp, Homo sapiens
tgtttttgaagaatctgcaaagggatatttgggagcacattgcagcctatggtgaaaaagaaagtataytcaaataaaaactagaaagaagcatgctgagaaactgctctgtgttgtgtccattcatctcacacagttaaatgtttcttttcattcgacagtttggaaacaccatttgtgtccattctgtgaatggacatttgggagcagattgagaccaatggcgaaaaggcgagtatcccaggagaaaaacaagaaggaaactattagagaaagtgctttgtgatgtgggcttccatctcatggagataaacctttctttcattcaacagttt

SEQ ID NO: 375194 - DNA, 607 bp, Homo sapiens
  misc_feature (1)...(607): n = A,T,C or G
tgatgtgtgcattcatctcacagagttaaacttttcctttgattcaacaattttgaaatactgtttttgtccatyctgtgagtgaatttttgggagctcattgaggccaaaggcaaaacagtgaatgtccttaaataaaaattagaaggaagctgtctgaataacaggtttgtgatgtttgcattcatctcacagattcaaacttntgctntgattcagtatttttaaacactgtttttgtctattctgtgaatggacatttgggagcttcttaaggccaatggcaaaaaagtgaatatcccaatgtataaactagaaggaagctgtctgagaaactgctttctgatgtgcacatgcatcctgccaagttaaacctttctttgattcagcagttaagaaacactgcttttgtcctttctgtgaatggacatttgtgtgctcattaggccaatggtgaaaaagctaatatcccaggatacaactagaaggaagctagctgagaaactgctttatgatgtgtgcatgcatctcacagcgttaaatgttgcatttcattcagcagtttggaaacactgtttttgtagtatctgcaaagggatatttggga

SEQ ID NO: 375195 - DNA, 524 bp, Homo sapiens
ctagaaggaagctgtctgagaaactgctttctgatgtgcacatgcatcctgccaagttaaacctttctttgattcagcagttaagaaacactgcttttgtcctttctgtgaatggacatttgtgtgctcattaggccaatggtgaaaaagctaatatcccaggatacaactagaaggaagctagctgagaaactgctttatgatgtgtgcatgcatctcacagmgttaaatgttgcatttcattcagcagtttggaaacactgtttttgtagtatctgcaaagggatatttgggagtgctttgagaactatggtgaaaaataatatatgttcagaaaaaagaaggaagactatttctgagaaattgctttgtaatttgtgcattcaactcctagagctaaacctttcttttgattcagcagtttggaaacactgtttttgttgattcattgaatggatatttgggagcgcatgaaggaaagtggtgaaaaagagaatatccaaggacaaaaactagaaagaagc

SEQ ID NO: 375196 - DNA, 524 bp, Homo sapiens
ctagaaggaagctgtctgagaaactgctttctgatgtgcacatgcatcctgccaagttaaacctttctttgattcagcagttaagaaacactgcttttgtcctttctgtgaatggacatttgtgtgctcattaggccaatggtgaaaaagctaatatcccaggatacaactagaaggaagctagctgagaaactgctttatgatgtgtgcatgcatctcacagcgttaaatgttgcatttcattcagcagtttggaaacactgtttttgtagwatctgcaaagggatatttgggagtgctttgagaactatggtgaaaaataatatatgttcagaaaaaagaaggaagactatttctgagaaattgctttgtaatttgtgcattcaactcctagagctaaacctttcttttgattcagcagtttggaaacactgtttttgttgattcattgaatggatatttgggagcgcatgaaggaaagtggtgaaaaagagaatatccaaggacaaaaactagaaagaagc

SEQ ID NO: 375197 - DNA, 634 bp, Homo sapiens
ttttcacttggcagtttggaaaaagtgttctgtccattctgtgaatggacctttgggagctcactgagtccaatgttgaaaaagcaaatacccaaggataaaaattagaaataagctatccaagaaaccgctttgtgatatgtgcattcatctcacaktgttaaacttttcttttcatttagcactttggaaacggtttttttgtccattttgtgaatggacatttgagggatgattgaggtgaatggctaaaaagcaaatatcccagcataaaaactagaaagaagctatctgagaaaccgctttgtgatgtgtgcattcaattgaggagttaaatctttattttcatgcagcagttggaaaacattttttggtagaatctgcgaattgacatttcacagctgactgaggcctattatggcaaagaaaatgtcttcaggtaataactagaatgtatctttctgagaaagtgctttgagatgtatgcattcatgtcaccgagttaaaattgtcttatgattcagcaccttggaacactgtttcagtccattctgcgaatggatatttgggggcactgtgaggccaatggtgataaggtgaatgtctcaggattaaaactgagaggaagctatat

SEQ ID NO: 375198 - DNA, 634 bp, Homo sapiens
ttttcacttggcagtttggaaaaagtgttctgtccattctgtgaatggacctttgggagctcactgagtccaatgttgaaaaagcaaatacccaaggataaaaattagaaataagctatccaagaaaccgctttgtgatatgtgcattcatctcacatwgttaaacttttcttttcatttagcactttggaaacggtttttttgtccattttgtgaatggacatttgagggatgattgaggtgaatggctaaaaagcaaatatcccagcataaaaactagaaagaagctatctgagaaaccgctttgtgatgtgtgcattcaattgaggagttaaatctttattttcatgcagcagttggaaaacattttttggtagaatctgcgaattgacatttcacagctgactgaggcctattatggcaaagaaaatgtcttcaggtaataactagaatgtatctttctgagaaagtgctttgagatgtatgcattcatgtcaccgagttaaaattgtcttatgattcagcaccttggaacactgtttcagtccattctgcgaatggatatttgggggcactgtgaggccaatggtgataaggtgaatgtctcaggattaaaactgagaggaagctatat

SEQ ID NO: 375199 - DNA, 634 bp, Homo sapiens
ttttcacttggcagtttggaaaaagtgttctgtccattctgtgaatggacctttgggagctcactgagtccaatgttgaaaaagcaaatacccaaggataaaaattagaaataagctatccaagaaaccgctttgtgatatgtgcattcatctcacattgttaaacttttcttttcatttagcactttggaaacggtttttttgtccattttgtgaatggacatttgagggatgattgaggtgaatggctaaaaagcaaatatcccagcataaaaactagaaagaagctatctgagaaaccgctttgtgatgtgtgcattcaattgaggagttaaatctttattttcatgcagcagttggaaaacattttttggtagaatctgcgaattgacatttcacagctgactgaggcctattatggcaaagaaaatgtcttcaggtaataactagaatgtatctttctgagaaagtgctttgagatgtatgcattcatgtcacmgagttaaaattgtcttatgattcagcaccttggaacactgtttcagtccattctgcgaatggatatttgggggcactgtgaggccaatggtgataaggtgaatgtctcaggattaaaactgagaggaagctatat

SEQ ID NO: 375200 - DNA, 566 bp, Homo sapiens
tgctttgtgatgtgtggatttacctcaggaagttaaacttctcttttcattcagcagtttggaacactgttattgtagaaactgtgaagggatrttttggagctcattgaggcctttagtgaagaagcaaataactccagataaaaactagaaagaagttatctgtgaaactgctttgtgatctgtggattcttctcacagggttaaaactttcttttgattcagcaggttaaaaatagtctttttgtagaatctgtgatgtgacatttgggagcacattgaggcctatggtggcaaacagaatatactgagataaaaactaaaaagaagctatctgtgaaactgctttgtcatgtttgaattcaactcagagagttaaaactttcttttcctttagcagtttgaaaacactgtttgcatagaatccacgaagggacatttgggagcttattgaggcctatggtgtaaaagaaaatacatccagacaaaaactggaaggaagctatctctgaaactgctgtgtgatgtttggattcaactcacagaattaaacttttcttttgatt

SEQ ID NO: 375201 - DNA, 566 bp, Homo sapiens
tgctttgtgatgtgtggatttacctcaggaagttaaacttctcttttcattcagcagtttggaacactgttattgtagaaactgtgaagggatgttttggagctcattgaggcctttagtgaagaagcaaataactccagataaaaactagaaagaagttatctgtgaaactgctttgtgatctgtggattcttctcacagggttaaaactttcttttgattcagcaggttaaaaatagtctttttgtagaatctgtgatgtgacatttgggagcacattgaggcctatggtggcaaacagaatatacygagataaaaactaaaaagaagctatctgtgaaactgctttgtcatgtttgaattcaactcagagagttaaaactttcttttcctttagcagtttgaaaacactgtttgcatagaatccacgaagggacatttgggagcttattgaggcctatggtgtaaaagaaaatacatccagacaaaaactggaaggaagctatctctgaaactgctgtgtgatgtttggattcaactcacagaattaaacttttcttttgatt

SEQ ID NO: 375202 - DNA, 566 bp, Homo sapiens
tgctttgtgatgtgtggatttacctcaggaagttaaacttctcttttcattcagcagtttggaacactgttattgtagaaactgtgaagggatgttttggagctcattgaggcctttagtgaagaagcaaataactccagataaaaactagaaagaagttatctgtgaaactgctttgtgatctgtggattcttctcacagggttaaaactttcttttgattcagcaggttaaaaatagtctttttgtagaatctgtgatgtgacatttgggagcacattgaggcctatggtggcaaacagaatatactgagataaaaactaaaaagaagctatctgtgaaactgctttgtcatgtttgaattcaactcagagagttaaaactttcttttcctttagcagtttgaaaacactgtttgcatagaatccacgaagggacatttgggagcttattgaggcctatggtgtaaaagaaaatayatccagacaaaaactggaaggaagctatctctgaaactgctgtgtgatgtttggattcaactcacagaattaaacttttcttttgatt

SEQ ID NO: 375203 - DNA, 566 bp, Homo sapiens
tgctttgtgatgtgtggatttacctcaggaagttaaacttctcttttcattcagcagtttggaacactgttattgtagaaactgtgaagggatgttttggagctcattgaggcctttagtgaagaagcaaataactccagataaaaactagaaagaagttatctgtgaaactgctttgtgatctgtggattcttctcacagggttaaaactttcttttgattcagcaggttaaaaatagtctttttgtagaatctgtgatgtgacatttgggagcacattgaggcctatggtggcaaacagaatatactgagataaaaactaaaaagaagctatctgtgaaactgctttgtcatgtttgaattcaactcagagagttaaaactttcttttcctttagcagtttgaaaacactgtttgcatagaatccacgaagggacatttgggagcttattgaggcctatggtgtaaaagaaaatacrtccagacaaaaactggaaggaagctatctctgaaactgctgtgtgatgtttggattcaactcacagaattaaacttttcttttgatt

SEQ ID NO: 375204 - DNA, 527 bp, Homo sapiens
gaaacactgtttttgtccagtctgcaaatggacatttgggagctcattaagatcaaaggtgaaaaagtraatatcccaggataaaaactagaaggagactatctgagaagctgctttgtgatgtgcacattcatctcatgttgttaaacctttttttttttttcattcagcagtttggaaacacagtttttgtacaatctccaaatgcatatttcagagctcactgaggaaaatggcaaaaaagccaatatcccaaaatataaagtagaaggaagctatctgagaaaccactttgtgatatgggcattcatttcacccagttaaaactttcttttgattgaagagtttggaaacactgttattgtacattctgcgattggacatttcagagtgcattgaggcatattgtgaaaaacaaatatctactgataaaaagtagaatgaagctttctgagaaactgctttgtgatgtgttcattcaactcacatagttaaaactttcttattattcagcagtttgcaaacac

SEQ ID NO: 375205 - DNA, 554 bp, Homo sapiens
artgaaatgatgaaattaaatgatgaaacgaaatgatgaaataaatgaactgaaatgatgaattgatgaaatgaaatgatgaaatgatgagatgaaaagatgaaatgatgaaatgacaagatgaaaagatgaaatgatgagatgaaatgatgagatgaaatgaaatcatgagatgaaatgaaatgaagtgaaatgatgagatgaaatgaaatcatgagatgaaatgatgaaatgatgaaatgaaagaatgaaatgaaatgatgaaatgagatgaaatgaaatgaaataatgagatgaaatgatgaaatgaaatgatgaaatgatgaaattaaaggatgaaatgaaatgacatgatgaaatgaaatgatgaaatgatgatgaaatgaaatgaaatgatgaaatagatgaaccaaaaatacttattgatttttttcttggcatccttctaagagtattttagtgagtttaatttctaaaaataaattgctattcaatggctatacagatggcctttgcaccacaagggtttgaactgtgcaggtccacttagcaaa

SEQ ID NO: 375206 - DNA, 554 bp, Homo sapiens
agygaaatgatgaaattaaatgatgaaacgaaatgatgaaataaatgaactgaaatgatgaattgatgaaatgaaatgatgaaatgatgagatgaaaagatgaaatgatgaaatgacaagatgaaaagatgaaatgatgagatgaaatgatgagatgaaatgaaatcatgagatgaaatgaaatgaagtgaaatgatgagatgaaatgaaatcatgagatgaaatgatgaaatgatgaaatgaaagaatgaaatgaaatgatgaaatgagatgaaatgaaatgaaataatgagatgaaatgatgaaatgaaatgatgaaatgatgaaattaaaggatgaaatgaaatgacatgatgaaatgaaatgatgaaatgatgatgaaatgaaatgaaatgatgaaatagatgaaccaaaaatacttattgatttttttcttggcatccttctaagagtattttagtgagtttaatttctaaaaataaattgctattcaatggctatacagatggcctttgcaccacaagggtttgaactgtgcaggtccacttagcaaa

SEQ ID NO: 375207 - DNA, 554 bp, Homo sapiens
agtgaaatgatgaamttaaatgatgaaacgaaatgatgaaataaatgaactgaaatgatgaattgatgaaatgaaatgatgaaatgatgagatgaaaagatgaaatgatgaaatgacaagatgaaaagatgaaatgatgagatgaaatgatgagatgaaatgaaatcatgagatgaaatgaaatgaagtgaaatgatgagatgaaatgaaatcatgagatgaaatgatgaaatgatgaaatgaaagaatgaaatgaaatgatgaaatgagatgaaatgaaatgaaataatgagatgaaatgatgaaatgaaatgatgaaatgatgaaattaaaggatgaaatgaaatgacatgatgaaatgaaatgatgaaatgatgatgaaatgaaatgaaatgatgaaatagatgaaccaaaaatacttattgatttttttcttggcatccttctaagagtattttagtgagtttaatttctaaaaataaattgctattcaatggctatacagatggcctttgcaccacaagggtttgaactgtgcaggtccacttagcaaa

SEQ ID NO: 375208 - DNA, 554 bp, Homo sapiens
agtgaaatgatgaaattaaatgatgaaaygaaatgatgaaataaatgaactgaaatgatgaattgatgaaatgaaatgatgaaatgatgagatgaaaagatgaaatgatgaaatgacaagatgaaaagatgaaatgatgagatgaaatgatgagatgaaatgaaatcatgagatgaaatgaaatgaagtgaaatgatgagatgaaatgaaatcatgagatgaaatgatgaaatgatgaaatgaaagaatgaaatgaaatgatgaaatgagatgaaatgaaatgaaataatgagatgaaatgatgaaatgaaatgatgaaatgatgaaattaaaggatgaaatgaaatgacatgatgaaatgaaatgatgaaatgatgatgaaatgaaatgaaatgatgaaatagatgaaccaaaaatacttattgatttttttcttggcatccttctaagagtattttagtgagtttaatttctaaaaataaattgctattcaatggctatacagatggcctttgcaccacaagggtttgaactgtgcaggtccacttagcaaa

SEQ ID NO: 375209 - DNA, 574 bp, Homo sapiens
tttttgctcattgagggcttttttgacaaagcaaatattcccagattaaaaatagaaagttttctgtgaaactgctttgtgatgtgtggattcatctgacagagttaaacctttcttttgattcagcacattggaaacagtcctttcatggaatctgtgaagggacatttgggactgcattgaatcctattgtgacaarctgaatatctccaaacaaaaactagacagaaggtatctgtgaaactagtttatgatgtttggactcatctcacagacttaaaagtttcttttgattcagcagtttggaaacactatttgtgtagaatctgtgaagggatatttgggagctcattaaggcctatgtttaacaagcaaatagttccaggtaaaaactagaaagaagttatctgtgaaactgctttgtgatctgcagattcatctcacagagttaatcctttcttttgattcagcagtttggaaacactatttttgtataatctgcaaggggacattcagcagtgccttgaagactatggtgaaaaagagaatatccacagataaaaaatagaaagaa

SEQ ID NO: 375210 - DNA, 259 bp, Homo sapiens
tattttccttatgattttctttttcttttctctggcatgtttgttaagaatacagtatataagacatataacatattaaatatgtgttaattggctgcttgtgttatttgcaaggcttagtataggctattagtagttattttggggggagtcaaagttatagtggattttctactgtgcagggggccagcaccycaacctccgtgttgcttaagggtcagctgtacatgttatttcctttcctgtaagagaaaaatga

SEQ ID NO: 375211 - DNA, 573 bp, Homo sapiens
actgtgtattcccaattttcttgtagacagaatcaaaagcacatagaattatagaattttaaggaatcacaggaacaattaaaataacctctagtacttcaacctgtgttaaaccttctggtcaagtgtttctctagatagagaacatgagactcaaagagattaggatagtttttttatatatataggaagtggcagaaaggagatttcaactcattttaaagctcagtacttgtctttctttttttttagcctattggcatgtttttctgtttgttttttgtttcattttgtttttttgagacgagcctcgctctgctgccaaggctggagtgcagtggcacaatcttggctcaatgcaacctctgccacccgagttcaagcaattctcctgcctcagcctcctgagtagctkggattacatgcacttgccacaacatccaggtaacatttgcactttaagtagagatggggtttcagcatcttgggcatgctggccttgaactccagacctcgatccactcatctccaccacccaaagtgctgggatcacaggcatagccatgatgcccc

SEQ ID NO: 375212 - DNA, 524 bp, Homo sapiens
aaggccagccggtttgatgacatgtgtgctaattggggccagccaccctcatagaggccatcccaggtattgacaaccatccacactgggcccagcccaggggtccacacctgtcccctttgagcttaaccttggtgttcatggcttttgtcacaggacttctgccagttgtttccagcagtttccgtggtcccaggcaagggcttcacagacgtcctcaatggggacagcccgtctgttcaccgttgtcttaattaggcctggtgcagacgttcacagctgtccttcttcrgctcagccaaaatgaacaaaactcctgagcacacaccagcggtttctagctgtccacgttggggtcagcccagttgttcatagccctatattctgggtccatcccagttattccaagctgtacttttgggcctagcccaggtgtccacagccatcctccttggtcactgcacaggtgttcacagctatcttccttggccctaggccagatgttcacatttgatctcactggg

SEQ ID NO: 375213 - DNA, 552 bp, Homo sapiens
tctctatgtccagcaaggatgagtgtgaggcccggagcgtcgggcattggggaaaccatatcagatgttcctctcaagcaggtgcccattgcagtgcctgccacggccagagggcactgcctgagctaaatcccccatctcaccttcctagaccttcamctggtttcagggctcctcagccacccgcatgtcactgaaatatagaagagcttgtgaggaagcttctggggcaccagccttctagaggaggctgagggcagctgtggatggttatttatggggatgtttttggcctaggctgcaagaagatgggtaagtggcacagggatggcagctcaaggtgccctggcttctctgcatgtctgtcactgggtggagaaggccgggcctgccaccaggttccatcctagctttttctctgtatcctcagttggggtacctacctgtctctgcctcagtttcctcctctgtgagacagggatcctaataggccctacctctgacagtggttttgatgaagtacatgatgtgggtgaagcacctggagcaggc

SEQ ID NO: 375214 - DNA, 552 bp, Homo sapiens
tctctatgtccagcaaggatgagtgtgaggcccggagcgtcgggcattggggaaaccatatcagatgttcctctcaagcaggtgcccattgcagtgcctgccacggccagagggcactgcctgagctaaatcccccatctcaccttcctagaccttcacctggtttcagggctcctcagccacccgcatgtcactgaaatatagaagagcttgtgaggaagcttctggggcaccagccttctagaggaggctgagggcagctgtggatggttatttatggggatgtttttggcctargctgcaagaagatgggtaagtggcacagggatggcagctcaaggtgccctggcttctctgcatgtctgtcactgggtggagaaggccgggcctgccaccaggttccatcctagctttttctctgtatcctcagttggggtacctacctgtctctgcctcagtttcctcctctgtgagacagggatcctaataggccctacctctgacagtggttttgatgaagtacatgatgtgggtgaagcacctggagcaggc

SEQ ID NO: 375215 - DNA, 537 bp, Homo sapiens
ccttttcctcctgtaatatttgtttcatacacacagaataatactctktgtctgggattcagtttttgaaatgaaacatggagtctgagtgaccccttgttgatgtgacaatgggttggtcaggatcacagcagttgggccccatattgtgacatgtatgcttgtgaaaattctactgtgacatgtcactgacatgatctgatgatgtaggtcttgcctttcattttaactgccactctggcaactgaactttggcagtaaacacagcttagttgtctcagaggattcacaatgggaaatgtttgtagttgctgcctcagaggtatgtatgttcatttccatcttctgaccacaatttcttcagatgtgccagtttttctgtatgttaaatgtcattctgattattttttattttcccagctcctatttgtccacagatttctaaatatgttttagagttttattactcaatttgtattttttaattcttctatcaagatttttgcctcaaatgatttttttctagaaaaacgcact

SEQ ID NO: 375216 - DNA, 537 bp, Homo sapiens
ccttttcctcctgtaatatttgtttcatacacacagaataatactctgtgtctgggattcagtttttgaaatgaaacatggagtctgagtgaccccttgttgatgtgacaatgggytggtcaggatcacagcagttgggccccatattgtgacatgtatgcttgtgaaaattctactgtgacatgtcactgacatgatctgatgatgtaggtcttgcctttcattttaactgccactctggcaactgaactttggcagtaaacacagcttagttgtctcagaggattcacaatgggaaatgtttgtagttgctgcctcagaggtatgtatgttcatttccatcttctgaccacaatttcttcagatgtgccagtttttctgtatgttaaatgtcattctgattattttttattttcccagctcctatttgtccacagatttctaaatatgttttagagttttattactcaatttgtattttttaattcttctatcaagatttttgcctcaaatgatttttttctagaaaaacgcact

SEQ ID NO: 375217 - DNA, 537 bp, Homo sapiens
ccttttcctcctgtaatatttgtttcatacacacagaataatactctgtgtctgggattcagtttttgaaatgaaacatggagtctgagtgaccccttgttgatgtgacaatgggttggtcaggatcacagcagttgggccccatattgtgacatgtatgcttgtgaaaattctactgtgacatgtcactgacatgatctgatgatgtaggtcttgcctttcattttaactgccactctggcaactgaactttggcagtaaacacagcttagttgtctcagaggattcacaatgggaaatgtttgtagttgctgcctcagaggtatgtatgttcatttccatcttctgaccacaatttcttcagatgtgccagtttttctgtatgttaaatgtcattctgattattttttattttcccagctcctatttgtccacagatttctaaatatgttttagagttttattactcaatttgtattttttaattcttctatcaagatttttgcctcaartgatttttttctagaaaaacgcact

SEQ ID NO: 375218 - DNA, 562 bp, Homo sapiens
cttgaactccttacctcctgatccacctgccttggactcccaaaatgatgggattacaggcatgagccacagtacttggacattttatttttttggcagagtctcgttctgtcacccaggctggaatgcagtggcatgatctcagctctctgcaacctctgcatcctaggttcaagcagttctcttgcctcagccacccaagtaactgggactatgggtgcctgccaccatgcctgtctaatttttgtatttttagtagagacagggtttcaccatatcatcatattgaccaggctggtctcaaactcctgaccttgtgatctgccagccttggcctcccaaagtgctgagatacaggggtgagccaccacacytggcatttttcccccacattctttcatagactagatacagaagaaaccactgaaaaacaaactggggtgccacattttcagttaattcccattaattgcttgttcagaatgtttcagttgaagggaagttgattcttggcacagccatcaagtggtagttagtttggaatgtcctacattccaaatta

SEQ ID NO: 375219 - DNA, 588 bp, Homo sapiens
tgaatttgttcctcagagaggcttcatttgcaggaaagtgccacattttagcactggagttaaaatgtagagacaggagttttgttttgttaaatgatttgagkttttttctggagtcaccacctctttaatacaccaaccttcccgaaaggcccttggtgcaggaggattgagaaagggagaggaaagagctccaggttcagggtccaggccatgatttagaggcctcagatgttcagggatctctgtccccagaaaaccaaccaaattcttgtcccagatctatcattcatcagtgttgtgactctaggcaggtcgcttcaattctcttcatttcacttccctgaaccatcaactcttgagtggcagcccctgctctgcctatctttctggggtgatgtgggcatcacaggaaatttgaatggaactttttcacgagttctaaagcatgagatccatgtcaagaatgaagctaattttaccctccactgccctggagtctcccagtggcttctctattaatcactaccaagggcctggcttattcttccagatgtgaaataactgaacactttatggtacttagga

SEQ ID NO: 375220 - DNA, 588 bp, Homo sapiens
tgaatttgttcctcagagaggcttcatttgcaggaaagtgccacattttagcactggagttaaaatgtagagacaggagttttgttttgttaaatgatttgaggttttttctggagtcaccacctctttaatacaccaaccttcccgaaaggcccttggtgcaggaggattgagaaagggagaggaaagagctccaggttcagggtccaggccatgatttagaggcctcagatgttcagggatctctgtcyccagaaaaccaaccaaattcttgtcccagatctatcattcatcagtgttgtgactctaggcaggtcgcttcaattctcttcatttcacttccctgaaccatcaactcttgagtggcagcccctgctctgcctatctttctggggtgatgtgggcatcacaggaaatttgaatggaactttttcacgagttctaaagcatgagatccatgtcaagaatgaagctaattttaccctccactgccctggagtctcccagtggcttctctattaatcactaccaagggcctggcttattcttccagatgtgaaataactgaacactttatggtacttagga

SEQ ID NO: 375221 - DNA, 588 bp, Homo sapiens
tgaatttgttcctcagagaggcttcatttgcaggaaagtgccacattttagcactggagttaaaatgtagagacaggagttttgttttgttaaatgatttgaggttttttctggagtcaccacctctttaatacaccaaccttcccgaaaggcccttggtgcaggaggattgagaaagggagaggaaagagctccaggttcagggtccaggccatgatttagaggcctcagatgttcagggatctctgtccccagaaaaccaaccaaattcttgtcccagatctatcattcatcagtgttgtgactctaggcaggtcrcttcaattctcttcatttcacttccctgaaccatcaactcttgagtggcagcccctgctctgcctatctttctggggtgatgtgggcatcacaggaaatttgaatggaactttttcacgagttctaaagcatgagatccatgtcaagaatgaagctaattttaccctccactgccctggagtctcccagtggcttctctattaatcactaccaagggcctggcttattcttccagatgtgaaataactgaacactttatggtacttagga

SEQ ID NO: 375222 - DNA, 588 bp, Homo sapiens
tgaatttgttcctcagagaggcttcatttgcaggaaagtgccacattttagcactggagttaaaatgtagagacaggagttttgttttgttaaatgatttgaggttttttctggagtcaccacctctttaatacaccaaccttcccgaaaggcccttggtgcaggaggattgagaaagggagaggaaagagctccaggttcagggtccaggccatgatttagaggcctcagatgttcagggatctctgtccccagaaaaccaaccaaattcttgtcccagatctatcattcatcagtgttgtgactctaggcaggtcgcttcaattctcttcatttcacttccctgaaccatcaactcttgagtggcagcccctgctctgcctatctttctggggtgatgtgggcatcacaggaaatttgaatrgaactttttcacgagttctaaagcatgagatccatgtcaagaatgaagctaattttaccctccactgccctggagtctcccagtggcttctctattaatcactaccaagggcctggcttattcttccagatgtgaaataactgaacactttatggtacttagga

SEQ ID NO: 375223 - DNA, 598 bp, Homo sapiens
tgtgcagattttaacatgaacataatttttaaatatagctgggtaaatatatagaattttgatcacttgctggtaagactatgttttctgttgtgttaggcagaattcaccagtataattatgtgggcatgtttttttaaagttattacttactgattaaattctataataatagaggcctacccagattatctatctctcctttgggtggttatgataatttctccctttgaatgcatttgtccatttcatctaagctaggaaatttgtggacatagacacttgaatctcacaagtttcctgcttggttcttgtcaaaggctactgtgcttcctgtcattcctactctaaaacttttcaataacctttcactcctgcacttaaaaaattgcaggcataaatttgttgaaagtattctgttattattttcttartgttcatgggatcagcagggataattcctcttctattcatattatttgtacattgtgttgtttctttgtgattagcctggctggaggtttaccaattctattgatcttttctaagaagcagcttttggttttgttaagtttctttgtttattatttgtattaca

SEQ ID NO: 375224 - DNA, 542 bp, Homo sapiens
ggggtgatgggacactgtcatgaaatcagctgtgcatttgtatgctgccctgtgtgaactctgcctattttgtagcggtgagggttgcttagccagagaaccaggccctaacttctgtgcctttcctgatggtctcatttgccttccctcatcacccaggatggtgtcccagtggcagccaagtttctgcccttaacccacctcctttacacacaccagccccctgcccccagcacccaagtttgcctaagggattccttcagtggaaccaatatgctgacagttactctgtgtttcctagatcacgatgagcacgtggcacaggaaacttcttctgaggatgtcccagscgttcacatggtaagttcttctttatgtttctaagatggaaattttgttgctcttggttttttattttatttgaattgagatatgaaaatcttaccatgtacattatagatgacttacagaattttttggtgggaaaatgtgagggttcattaccaggtaagaaatgatctcagatggtattcttagatggc

SEQ ID NO: 375225 - DNA, 267 bp, Homo sapiens
ccaaaaatcaacccattcattcctcatgacagctgtagctggaggttaagtttgatatrcccagtcctcacgtggagatgatgtagagatgaatttttcaggcttttgttctcctaagtggaaatggcatagatgaactcgggaatgggtggaagggtgatgctgtgggctgctagtctgaagttatcacatggccctggtgtaacttgtcaccatgtcacagagtccttagcatctatgtatatatgtgaagtatgttggcctata

SEQ ID NO: 375226 - DNA, 498 bp, Homo sapiens
agccaattggctgttagcctggttcccatctcctctgctggaatcttctgcacagctggctaacagaaggtcagcatccccacctattgccacccatgaagggctgtcccagtcctggagccagtgtgagtatgagcaacagcgggccccatgacacacacacacactgtgttaacagaaagagcagaaggacaaatatcacaggccaagtaggggtcatctttaaatggtaggataattgagtattttcaaatcttggtttagtcttctttaaaacagaaggttaatgaatacacagaatattttggctagaactaaatctcctgytgaagaaaggtagctttttatcttgtacaaattgtggccaggcacggtggctcacgcctgtaatcccagcactttgggaggccaaggagggcagatcacctgaggtcaggagttcaagaccagcctgaccaacatggagaaacccagtctctattaaaaatacaaaattag

SEQ ID NO: 375227 - DNA, 564 bp, Homo sapiens
cgttaccagcattgaggctctaagaattcacagagtgctgtccagtgggttctatgagagagacagtaggctacagccttggcctgggcctgaaaaggaacacgatttggaagagcagaaggaaggcatgagggcaacaaagccacagggggaagccaargtgcaacatcagcagagacagttctgcatcatcacctgggcatggccgggatgttcatattacaactgacggagaatgggtcaagctccaacttcatagctggttttagcactgttggcctgtcttcctaagagcctgaagagagaagctactttcttgtttcttgtcttctctatttcctgtatgttgatggcaatggcaccaccagaaattaatgagaggcagagaacacaagtgagttcttgaaacatccaattttgcccagagaggacatgatcagcagggatggatttcagggtcaagccagatacaaagtatttcccaggcctggtctctggctgggacagagatcagctcttatttttcacctgcttctgggagtcacctgacagctggtccttgtg

SEQ ID NO: 375228 - DNA, 564 bp, Homo sapiens
cgttaccagcattgaggctctaagaattcacagagtgctgtccagtgggttctatgagagagacagtaggctacagccttggcctgggcctgaaaaggaacacgatttggaagagcagaaggaaggcatgagggcaacaaagccacagggggaagccaaggtgcaacatcagcagagacagttctgcatcatcacctgggcatggccgggatgttcatattacaactgacggagaatgrgtcaagctccaacttcatagctggttttagcactgttggcctgtcttcctaagagcctgaagagagaagctactttcttgtttcttgtcttctctatttcctgtatgttgatggcaatggcaccaccagaaattaatgagaggcagagaacacaagtgagttcttgaaacatccaattttgcccagagaggacatgatcagcagggatggatttcagggtcaagccagatacaaagtatttcccaggcctggtctctggctgggacagagatcagctcttatttttcacctgcttctgggagtcacctgacagctggtccttgtg

SEQ ID NO: 375229 - DNA, 448 bp, Homo sapiens
actctgccaggaatcaccaggggggagagtcacatcttcctcatctttgggtttagacctgtgcattccagtgtggtcctgagtggcatatgtgcccattcatatttaaataaatgaaaaaattcaaaacctcctcacaagagccatgctagaagttcccagttgccaaatgtctactcttaagagaccatctccattctcccagaatcacctgggaagcagctgctgggagtctggcccaggttctgttcagtgcacccacctaactcagtgcatgtgcatcaaggcttaatctcaggttctcagattggaggtaagagatgctatgagccagtgtcggtgaacagttgaaagggattatttcaggtcctctgtctcacctgaaggygcacagctgtgagcagtgccttcataaagtcccctgagttcacagagcccagggagaatc

SEQ ID NO: 375230 - DNA, 511 bp, Homo sapiens
ttcagcagcatggaaacatttcttttggagaatcagcaaagggacatttgagagcttattgaggcctaggtggtaaattgaatatcccccaataaaaactagaagcaatctgtgaaactgcattgggatgtctggagtcatctcacagagttaaatctttgttttgattcagcaggtttgaaacactctttttgcagtatctgagaagggacattttgaagcccttagaggcctatggtgcaaaacagaatagtccatgaataaaactagaagaagctatttgagcaactgcttcataatgagtggattcatctcacaaagttaaacttttttttgattcagcagattggaaacactcttttcagaaaatctgtgagcccacaagggcctgaggggaaaaatcaaatatccccagatacaaagcrgaaagaaactatctgtgaaactgctttttgatgtgttgattcctctcacagaattaaacctttctttttatttagcatggtggaaa

SEQ ID NO: 375231 - DNA, 656 bp, Homo sapiens
gcatgttatgtgtgcattcaaatcacataggtaaacctttctttattctgtagtttggaaaccttccttttgtagaatctgtggagggacattttggagtgcattgaggcgtgtgctgaaaaagaacatatcttcagataaaaactagaatgaagttttctgagaaacttctttgtgatgtgtacattcatctcatagagttaaagctttcatttgattcagcaatttggaaacactgtttttgcccattstacgaatggacatttgggagctcattgaggccaatgatgaaaaagcaaatgtcccagtataaaaactagaagtaagctatgtgagaaactgctttgtcatgtgtgcattcatctcaccgagttaaaccttttcattcagcagtttggaaacactgtttttgtagaatctgtgatgggataatgtgggagctcattgtggccaaaagcgaaaaagagaaaatcccgagacacaaactagaaggatgctgtctgagaaactgctttgtgaagtgtgccttcattttgcagaattaaacttttcttttgattcagcaatttggaaacactgtttctgtccattctgtgaatgaatatttgggagctcattgtggccattggtgaaaaagggaatatccctagagtaaa

SEQ ID NO: 375232 - DNA, 381 bp, Homo sapiens
ctcttttccagttttttatctggaaatattcaatttttccccttagttttcaatgggttcccaaatgtcctttcacagaatctccaaaaagagtgtttctaacttgctgaatcaaaagaacagtttaactctgtgagatgaagctgcatgccacaaatcgtttcacagatagcttctttgtagttttcatctgaggatattgtgaggatattctgagggagcctaaatgggctcctaatgtcactttgttgattctccaaaaagartttttccaacctgctaaataaaaaaaaatgtttaactctgtgagatgaatccacacatcacaaagcagtttcagatatagcttctgtctggtttttatctgggaatatttatttt

SEQ ID NO: 375233 - DNA, 563 bp, Homo sapiens
gggctcccaaatctcccttcacagtttttacaaaaagagggtttccaatctgctgaatccagggaaatatttagctttatgagaggaaccccaacatcacaaaggagtttcacagatagcttatttctagtttttatctgagtttattcacttttycctcaaaagccttgatgggctctcaagtgcccctttgatgattctacaaagagtatttctggcctactgaatcaaaagaaagttttcactctatgagatgaatccacatatcacagatcagtttcactgataatttcattctcgtttttgtctggggatattcagtttttccctttgggcctcaatgggctcccaattgtcccttctcagattctccagaaagagtgtttcccagctgctggagcaaaagaaaggttaaactgtgtgaggtgctccacatatcacaaaacagtatcagagatatcttctttctagtttttatctggagatattttgttttccccataggcctcaattggctcccaaatgtccctttgcagattctacaaaaagtgtgtttccaagaa

SEQ ID NO: 375234 - DNA, 626 bp, Homo sapiens
ccattctgtgaatgcacatttgggaactcattgagaccaatggtgcaaaagrgaatatcccagtgtaaaaactagaaggaagctatctgagaaaccacgttgtgttctgttcattcatctcacagagttaaatctttcatttctttcagcagtgttgaaacactcttttttagaatctgagaagggatatttgggggcacattgaggcctatggtgaaaaaaaataagctcagataaaaaccagaaagaagctttctgagaaagtgctttgtgatgtgtacattcatctcactgagttaaaccttccttttgatttagcagtttggaaacactgttttgtccattctgtgaatggacacttctgagctcattgaggcctatgctgaaaaagggaatactgcaggataaaaactagaaggaagctatctgagactctgctttgtgatgtgtgcattgatatcacagagtgaaacataacttttcattcagcagtttagaaacactttttttgtagaatctctgaagtggtattcaggagctcattgaggacaatggcggaaaagtcaatatctcaagatataaactggaggatagctatcttagaaaccggtttgtgatgtgtgcat

SEQ ID NO: 375235 - DNA, 626 bp, Homo sapiens
ccattctgtgaatgcacatttgggaactcattgagaccaatggtgcaaaagggaatatcccagtgtaaaaactagaaggaagctatctgagaaaccacgttgtgttctgttcattcatctcacagagttaaatctttcatttctttcagcagtgttgaaacactcttttttagaatctgagaagggatatttsggggcacattgaggcctatggtgaaaaaaaataagctcagataaaaaccagaaagaagctttctgagaaagtgctttgtgatgtgtacattcatctcactgagttaaaccttccttttgatttagcagtttggaaacactgttttgtccattctgtgaatggacacttctgagctcattgaggcctatgctgaaaaagggaatactgcaggataaaaactagaaggaagctatctgagactctgctttgtgatgtgtgcattgatatcacagagtgaaacataacttttcattcagcagtttagaaacactttttttgtagaatctctgaagtggtattcaggagctcattgaggacaatggcggaaaagtcaatatctcaagatataaactggaggatagctatcttagaaaccggtttgtgatgtgtgcat

SEQ ID NO: 375236 - DNA, 435 bp, Homo sapiens
atctgtgaaactgctttgtggtgtgtggaacacatctgggagcacattgaggcatatggggaaaaactgaatatgcccatataaaaactagaaagaagttatctgtgatctactttgggatgtgtggatttatctcacagagttcaatttttcttttgtcttagcaggttggaaacactccttttggagaatctgcaaagagatatttgggagccctttataacctatgggtgaaaatctaatatcccaagaaaaaaacgaaaataagtctatctgtgaaactgctttttgatgtgtggattcatctcacagagttaaaactttctcttgattcagcaggttggaaaagctccttttggagaatctgcaaaggaacaatttagarcccattgaggcctacagggaaaaatccaatatcctcagatataaactaga

SEQ ID NO: 375237 - DNA, 574 bp, Homo sapiens
aaaactagaaagaagctatctgtgaaactgctttgtgatgtgtggatttatctcacagagttaaaatgttctttttattcagcaggttgaaaacactttttttgtagaatctatgaagggacatttggtagccaatggaggcctatggggaaaaacagaatatccccagataaaagctagaaaaaaagctatctttgaaactgctttttgaggtgtgsattcatctcacatagttaaacctttcattttattcaaaaggtttgagatactcttttgggaaaatgtacaaagggacatttacgagcccattgaaatctagtggaaaagtcaaatatccccagatataaactagaaagaagctatctgtgacacagttttgtcatgtgtggattcatcttacaaagttaaatctttcttttctacagtaggttggaaacactctttgtagaatctgcaaagagacatttaggagctcattgaggtctatggggagaaaactaatatccagataaaaactagaaagaagctatctttgaaactcctttgtgatgtggggattcatcttacagggtaa

SEQ ID NO: 375238 - DNA, 550 bp, Homo sapiens
tgagcaattatctgaaactttcaaaggataaaatgactactgggcatttggctaagtaggtaaaattaagtggagacaggaggaactgtacagagcataaaacttacataatyaaaaagtttggggccaggcgcagtggctcaaatctgtaatcccagtcctttgaatatttatctgactgggccagtgcacctaaataattaataaatatcctcctgaaccccactgttctctctgattccttaaaaatcccgctacaaataactacttgtgttaggcacacaagtcctaaacaactcttgaacacaaaatttttaaaccagataagttttatcctttataaaactggaataatttatcagagggtgaagggtgagaggaggaagaggatcaggaaaaataactaatgggcactaggcttaatacctgggtgatgaaataatctgtacaacaaacccccatgacacaatttacctatataacaaagctgcacatcatatacccctgaacttaaaagttaaatttttaaaaagtaagtttttaaaaatgt

SEQ ID NO: 375239 - DNA, 550 bp, Homo sapiens
tgagcaattatctgaaactttcaaaggataaaatgactactgggcatttggctaagtaggtaaaattaagtggagacaggaggaactgtacagagcataaaacttacataatcaaaaagtttggggccaggcgcagtggctcaaatctgtaatcccagtcctttgaatatttatmtgactgggccagtgcacctaaataattaataaatatcctcctgaaccccactgttctctctgattccttaaaaatcccgctacaaataactacttgtgttaggcacacaagtcctaaacaactcttgaacacaaaatttttaaaccagataagttttatcctttataaaactggaataatttatcagagggtgaagggtgagaggaggaagaggatcaggaaaaataactaatgggcactaggcttaatacctgggtgatgaaataatctgtacaacaaacccccatgacacaatttacctatataacaaagctgcacatcatatacccctgaacttaaaagttaaatttttaaaaagtaagtttttaaaaatgt

SEQ ID NO: 375240 - DNA, 316 bp, Homo sapiens
tacctgttaggctgcattgtgttgtgtggattcatctcacattgtyaaacctttgttttgattcagcagtttggaaacactgatttgtagtatctgcagagggatatttgaaatctctttgaggccaaaagtgaaatactgaatatctccagataaaaactaaaaaaaaaaaaatctgtctgttaaactgctttgtgatgtgtcaacttatctcatagaattaaacctttcttttgattcagcagtttggaaaaactgtttttgtaaaatctgtaaaaggacattgggagtgaattgagtcctgtggttaaaaagg

SEQ ID NO: 375241 - DNA, 326 bp, Homo sapiens
ggcctacaaagaaaaatagaatatcaccagatagaaaaacgaaagaagctatctgaaactgctttgtgatgtgtattcatctcatggagttaaaattttcttatgattctgcaggttggaaatactctttttggaaaatatgtgatgggacatttgaaagcccatttaggcctgtgaaggaaaacagaatatctccagataaaatctagaragaagatatctgctttctgatgtgtggattcatcccatagcattatatctttcttttgattcagcagactgtaaatgcacttcctggaaaatatgcgatgggacatttgggagcc

SEQ ID NO: 375242 - DNA, 569 bp, Homo sapiens
taaacctttgttttgattcagtaggttggaaacactctaattggagaatctgaaaactgacatttgtgagcccactgaggcctctggtgaaaaacagagtatccccagataaaaacttgaaagaatttatctgtgaaacggctttgagatgtgtggtttcatctcacagtgttaaaactgtcttttgtttaagcaggatggaaacaytgtttttggagaatctgtgaagtgacacttgggggcccattgagactcagggtaaaaacagaacatccctagataaaaactagaaacaagctatttgcaaaaatgctttgtgatgtgtggattcatcttagagagttaaatgtttcttcttattcagcagtctggaaacactcattttgtagtatctgtgaagggacattttggggcctttgtaggcctatgggtaaaaacagaatattaccagataaaaacataaaaggagttatctgtaaaacagctttgtgatgtgggggattcatctcacaaagttaaacatttcttttggttcagcatggtggaaacactctttttggagaatcttc

SEQ ID NO: 375243 - DNA, 316 bp, Homo sapiens
tacctgttaggctgcattgtgttgtgtggattcatctcacattgttaaacctttgttttgattcagcagtttggaaacactgatttgtagtatctgcagagggatatttgaaatctctttgaggccaaaagtgaaatactgaatatctccagataaaaactaaaaaaaaaaaaatctgtctgttaaactgctttgtgaygtgtcaacttatctcatagaattaaacctttcttttgattcagcagtttggaaaaactgtttttgtaaaatctgtaaaaggacattgggagtgaattgagtcctgtggttaaaaagg

SEQ ID NO: 375244 - DNA, 316 bp, Homo sapiens
tacctgttaggctgcattgtgttgtgtggattcatctcacattgttaaacctttgttttgattcagcagtttggaaacactgatttgtagtatctgcagagggatatttgaaatctctttgaggccaaaagtgaaatactgaatatctccagataaaaactaaaaaaaaaaaaatctgtctgttaaactgctttgtgatgtgtcaacttatctcatagaattaaacctttcttttgattcagcagtttggaaaaactgtttttgtaaaatctgyaaaaggacattgggagtgaattgagtcctgtggttaaaaagg

SEQ ID NO: 375245 - DNA, 476 bp, Homo sapiens
aaagaagctatctgtgaagctgytttgtgatgtgtggattcctttcacagatttaaaaaattcttttgattcaccatgttggaaacactttatttggagaatctgcaaagggacatttgggagctttttgtagcctatgagaaaaaaatgaatatccccagacaaaaactaaaaacaagctatctgtgctatctgtgaaagtactttgtgacatgtggattcatatgaaagacaaaactttcttatgattcagcaggttggaaacagtctttttggataatctgcaaagggacacttgggagcccattgaggcctgtggggaaaaaacgaatatccccaaataaaaactagaaagttggtatctatgaaacttctttgcaatgtgtggattcctctcgcagagagaaacctttcttttgattcaccagtttggatacactctttctgtggaatctgagaaggctaatttgggtgtc

SEQ ID NO: 375246 - DNA, 587 bp, Homo sapiens
aaataaaaactagaaagttggtatctatgaaacttctttgcaatgtgtggattcctctcgcagagagaaacctttcttttgattcaccagtttggatacactctttctgtggaatctgagaaggctaatttgggtgtcaattgaggcctaatgggaaaacctgaatattcccaggtaaaaactagaatgaagctatctttgaaactccctgagatgtgaaaattcatctcataaagctaaatcttccctttgattcagcagttttggagcattatttttgtagaatctgtgaagggatgtttaggaacctcttgaggcctatggggaaaacagaatatccccagataaaagctagaaagaaacggtctgttttctacatacggctagccagttttcccagcaccatttattaaatagggaatcgtttccccattgcttctttttctcaggtttgtcaaagatcagacagttgtagatatgcagtgttatktctgagggctctgttctgttccattgatctatatctctgttttagtaccagtaccatgctgttttggtaactgtagccttgtagtatagtttgaagt

SEQ ID NO: 375247 - DNA, 427 bp, Homo sapiens
accccttcacagattctacaaaaacagtgtttccaaactgctgaatgaaaagaaaagattacctctacaagatgaaggcagacatcacaaagctttttctcagatggctttcttctagtttttaccctgggatattcactttttcaccattggcctcaatgagctgccaaatgtacattcacaaaatggagaaaarcagtgttcccaattgctgaatcaaaagaaaagtttaactgtgtgagatgaaggaacacatcacaaagcagtttctcacaaagcttctttctagttttatgctgaagatattttctttttcaccagaggctccaatgccctcccccaaatatctcttcacagattcatcaaaaatagtgtttccaaactgctgaaggaaaagaatggtttaactccacgagatgaatgcaaa

SEQ ID NO: 375248 - DNA, 427 bp, Homo sapiens
accccttcacagattctacaaaaacagtgtttccaaactgctgaatgaaaagaaaagattacctctacaagatgaaggcagacatcacaaagctttttctcagatggctttcttctagtttttaccctgggatattcactttttcaccattggcctcaatgagctgccaaatgtacattcacaaaatggagaaaaacagtgttcccaattgctgaatcaaaagaaaagtttaactgtgtgagatgaaggaacacatcacaaagcagtttctcacaaagcttctttctagttttatgctgamgatattttctttttcaccagaggctccaatgccctcccccaaatatctcttcacagattcatcaaaaatagtgtttccaaactgctgaaggaaaagaatggtttaactccacgagatgaatgcaaa

SEQ ID NO: 375249 - DNA, 579 bp, Homo sapiens
gcattcgtgtcacagatttaaacctttcttttgattcagcagttttgcaaacactgtttttgtccattctgacaaaggacatttgggagcccattgaggccaaaggtgaaaaagtgaatatcccaggataaaaactaaaggaaggtatctgagaaactgcttggtgatagargcatgcacttcacagagttaaatctttcttttcattcagcagtttggagacactgtttttgtcccttctgcaaattgagagttaggacgtcaatgagcccaaaagcgaaaaagcaaatattccaggataaacaccatgaggaagctatctgagaaaccgctttgtgatgtgtgcattcatctggcagagtaaaaactttcttttcattcagcagtttggaaacactgtttttgtccattctgcaaatggacatttgggagctgataatgaccaatagcaaaaaagcaaatatcccaggataaaaactagaaggaagctatatgggaaactgctttgtgatgtgtacattcatgtctcatagataaacctttcttttgactcagcagtttacatacactgtttttgtc

SEQ ID NO: 375250 - DNA, 591 bp, Homo sapiens
tttgggaacttattgagacctatggtgaaaaagaaaatatcttcaaataaaaactaggaagaaatttcctgagaaactgatttgtgatatgtgcattcatctcacagacttaaatttttcttttgattcaacagattggaaacgctgtttttgtccatttggagaatggatattttgatgctyattgaggccaatagcaaaaaattgaatattccagaataaaaactagtaggaagctctctgtgcaactgctttgtgatatgtgcattcatctcacagagttaaacgtgactttgcattcagtaggttggaaacactctttttgtagatctgcaaagggatatttcagagcacactgaggcctatgtagaaaaataaaatatctttagataaaaactagaaagaagctatctgagaaactgctttctgatgtgtacattcatctcactgagttaaagctttcttatgattcagcagtttggaaactctttttgtccattctgcgaatggacatttgggagctaattgagaccaatggcaaaaaagcgaatatctcaggataaaaactagagggaagctgtttaagaaact

SEQ ID NO: 375251 - DNA, 591 bp, Homo sapiens
tttgggaacttattgagacctatggtgaaaaagaaaatatcttcaaataaaaactaggaagaaatttcctgagaaactgatttgtgatatgtgcattcatctcacagacttaaatttttcttttgattcaacagattggaaacgctgtttttgtccatttggagaatggatattttgatgcttattgaggccaatagcaaaaaattgaatattccagaataaaaactagtaggaagctctctgtgcaactgctttgtgatatgtgcattcatctcacagagttaaacgtgactttkcattcagtaggttggaaacactctttttgtagatctgcaaagggatatttcagagcacactgaggcctatgtagaaaaataaaatatctttagataaaaactagaaagaagctatctgagaaactgctttctgatgtgtacattcatctcactgagttaaagctttcttatgattcagcagtttggaaactctttttgtccattctgcgaatggacatttgggagctaattgagaccaatggcaaaaaagcgaatatctcaggataaaaactagagggaagctgtttaagaaact

SEQ ID NO: 375252 - DNA, 534 bp, Homo sapiens
gataaaacctagaaggaaattatcttaaaaaaactgcttagtgatgtgtgtattcatcttgcagagttactcctttctttcatcgatcagtttggaaacaccatttttgtagaatctatgagggaatatttggagcacaatgaggcctatggtgaaaaataaaatatcttcagttaaaaactagaaagaagctttctgagaaactgctttgtkgtgtttgcattcatctcacagatgaaaactttcttttaattcaggagtttggaaacaatgtttttttccatcctgaaaatggacatttgggagctgtttgaggtcaatcaggaaaaagtgaatatcccaggataaaaactggaaagaagctatctgagaaactgctttgtgatgtgtgcattcatctcacacagttaaacctttattttgattcagcagcttggaaacactgtttttgtccattctgcaaatggatatttgagatctaatttaggccaatgaggaaaagcgaatatcccaggataaaaaacagaaggaaac

SEQ ID NO: 375253 - DNA, 559 bp, Homo sapiens
acaagatagtggatctccctgacgttacccccagacccagggctcatacgccataggggaggagtggttcacaaaggatgtgtgtgacaattgaagtgcaataccaccaagattgtttgaccaaagggcaggatttatggtaagtccatgcccttatgcaagaaacaataaactggaaatcttggaatccttcttgaaagatgggttaatcagaagctgatgtcgtggattcatgtccgagatggagctccttttgctgccacaccaagcaaactcctaccccaaacttaagcattgttcgtggtatctttcttccaagaagagtttcctttctggactgccactggcattagtttaaatgtaytcagaatatatttaaactaggggatgggctccttctgtttcatgcctcagttccactgtgcacatgtggccatcctgcaccaccaatgactttgctattactctgtcttcccgccttccgcactagactctgagcagtctgagagtaaggaaactgttagatttcttatcatcctgaataagcatcatgcttgac

SEQ ID NO: 375254 - DNA, 582 bp, Homo sapiens
ccctgttcagcacccttctctgttgtcacagtgcataatctccgagaatgccctaatttctctcattctctaagcctgccatcagggctgagacaggctcatccctctgaacagatgagattagtcgatcatgtaaagtcaaaagggggattatgatgcttgtaatacactgagtcaaattaaatgcattttgtttgcacatcagaagatcctgttgctaggcttcggtgtcttccagtgggtataataaattgccaataaaacacaagtatataggggaaaaagccctcaagcagagagtaggaagagagtaaagatggtggttgctttctttttttttttttccttgtctgttcaacctagtcaatgagatgcttcattccaacagygcctctcatttttaatatcaagtgggagataaagcaccaaagagctctgttctgaatggctggttctggctttctgtctcatggtacttcgcactcagcatcctgcctatatatagcatgcgtcttaaaacatccatcattagagacctgcagagactgtttggaagtttgtgggcccacaaatatagcattc

SEQ ID NO: 375255 - DNA, 627 bp, Homo sapiens
gaagttctgatattccagaataggaaggtgactatgcttggcaatattatattgtatgttgccaagtagtcagaagagaggattttcagtgttatcaccacatatgataaatgcatgagaaggtggatattctaagtaccctgattcaattattacagaatgtattcatatattgaaactgaaccacagataggtmcaacatcatgtgtcagttaaaaacaaaataaaagacaattattttctgtgttcagaatgaaaaccgagtcttaaaaggagctacatattcattaaaagtcaatgttctcagcttcaagggatatatgatacagggggctggtgctattgagggctttaaggaaggtttttaatattcaacctttggatgtagacacttttggccaagaataaaaagctattgactaaaaggttacagtgcaactgagatttcattagcttcaccatctttgcaatagaaaaatctgtttgttatgcatatttctactttgctttttttgttttttaatttaatgtgtctatgcttattatattaaaacatagtcatttgcaccaacgtctacgcatcaatagaacagtgtgatgcactgtgaaatgttgccgagacaccac

SEQ ID NO: 375256 - DNA, 581 bp, Homo sapiens
agcatccaaaaggaaatgggatataaggagcatcatactggaaggttccagggccgacgtgttcttctgacgcttatgtttctcttgctattttctctttccaaggaagataaattacactgtgtggatagacgtgcaggaaacccagtggagagaagcctagagaaggaggtgtgggccaggtaaggggagcaggtgtgagccaggtaaaggctgcactttgcccattaattaatatcttgagccatgctttcccaagaaatactgttttctattaatatgggtacctgctacctctctatttcctttttgtgagtttctgctttttctctgagaatgaatttgagcattatctcaaagatatatttctattctgctaaattacaagcttcttgattgaatcagagttatcattgcatgtttgatgtttactaaacactcccaacaaatgtgtttttagtgaatgagtagaaagtgggacaaaacccagtttagktgcaaacaatgttgagtgttctttgggtttaaataatccaaggagtcagcatatgagatgggacaaggctcaatcttttatacat

SEQ ID NO: 375257 - DNA, 502 bp, Homo sapiens
actgtaagaaatacatgtctattgtttataagccactcaatctatgggattcagcagcccacaaagactacgacagaaataaatcccaagaagtagaggtactgctataccaaatacccaaaaacgtggaagcagctttgcagtggtaatgggtagaggctggaagcattttgagatgcgtgttagaaaaagcctggaaggccatgaatggactcctaaaggtaagtctggtgaaactgcagaaaaaaaaagaggagaactgtagaaaaccttccatcttcttagaraacatctaaatagacaagaacagaatgttggtagaaacatgaacagtaaaggccattttgatgagtcctcagatgaaaatgaggaacacgttactagaacctggaggaaaggccatctttgtcatcaagtggcagagaacttggctgaattgtgtgttctagagttttatgaaaggcagagattttgagtgatgaaattgtatatttagcggata

SEQ ID NO: 375258 - DNA, 567 bp, Homo sapiens
cccacgaatgagggtctatgctgatgacatctgtctcaatttcttggatattttaggtaaatgtacgtcaggacgattttgttccctttctatttctctttgtaatatgcgactgatcttcgtgtccttcagggcrttaatagctacagctctgacatcttcattctgcagggctggcccgagggggattgattgagaggtgcgtgattggtagttaacaggtgtggcgcctgagctcctgtccatgcgcgggaagcggcaccatgctgaaagccaacccgcgtttgctgggaagagatgcttttgcagggtgctgaagggcggttcttaaaaccaggtccacacagtcaacaggaactcagacattctgatgcagcttatgagggcatttcctagcctggaagccgaagctctcatttacttcccttttcaactggaaattctggtttatgcctttcgcgggtggatgaaagttctcatttctttcacaatagccttagctagatggaatagggctgatcagatcaaatgggaacatttgtttcctgtgcaatcaagaaaccctgt

SEQ ID NO: 375259 - DNA, 624 bp, Homo sapiens
tatatacaattatgtttggggaaactaaataataaaaacattgttgggtaaaaatcagagttttttataacctcatctgctgattcactgacgaagcttctcttcaatacggccctaggacttcccatcccgtgatgggaacccacactatacgtatataccaaatactctatgtacagacatgcatcacgccatgatgcggatacctcctgagaagtgcattgttaggcaattttgttaccgtgtgaacatggtagagagcatgtacacagacctagacggcatggtccaggcacccctaggctgtatggygtagcccattgctcctaggctagaaaccagcacagcacgtaactatactgaatactgtggacagttaaaatacagtgatgagtatttgtgtatataaacagatctaaacacaggaaaggtgcagtgaaaacatcgtgttgtcatcttctgagaccaccctcgtatgtgtggtctatgaaatgtccgcatgtggtgcacgatggtatttggccacttcacgaagagaggaatgaaagctgtgggcttacaatttgttatttcagaatttttatacaaaaacacatctttgaaagctcatgcagacaatgagta

SEQ ID NO: 375260 - DNA, 624 bp, Homo sapiens
tatatacaattatgtttggggaaactaaataataaaaacattgttgggtaaaaatcagagttttttataacctcatctgctgattcactgacgaagcttctcttcaatacggccctaggacttcccatcccgtgatgggaacccacactatacgtatataccaaatactctatgtacagacatgcatcacgccatgatgcggatacctcctgagaagtgcattgttaggcaattttgttaccgtgtgaacatggtagagagcatgtacacagacctagacggcatggtccaggcacccctaggctgtatggcgtagcccattgctcctaggctagaarccagcacagcacgtaactatactgaatactgtggacagttaaaatacagtgatgagtatttgtgtatataaacagatctaaacacaggaaaggtgcagtgaaaacatcgtgttgtcatcttctgagaccaccctcgtatgtgtggtctatgaaatgtccgcatgtggtgcacgatggtatttggccacttcacgaagagaggaatgaaagctgtgggcttacaatttgttatttcagaatttttatacaaaaacacatctttgaaagctcatgcagacaatgagta

SEQ ID NO: 375261 - DNA, 587 bp, Homo sapiens
aataccttacacctttgtcccaaatatgccaaatcagggcaagaacaatgccaccaaggatatagtagcacagatactttcatacaggggtgtcttttgaaaacattyatcacatcagcccatcttgtggtaaaattacacttatagtgttatcacactcctcctttcaatgtgatatattaattcaagatcagagcaatgctggccatgctgggaatactggtgtgagatgtgtatatgcacagtagacctttgtccttgccccctgtggtttctaagtcatgcctcacgttcagttttgatatcagttaaaagctacgggaaaatggtacagtacagacaggcaggtccatgagcataaactctttgtctctgagtttgtgtcatatcaactctcctgttctaaaaaagtaaagctggaattttctttgacactaaaccatatttggagaaattcattacaatgctgaaaatcagacgactactccctgtagaacaatgtaggacgcctgttagagattaggaggatattagcagcctgtttgcccaaaggcaagcaagtgaatcacatccgagccaaagcacag

SEQ ID NO: 375262 - DNA, 587 bp, Homo sapiens
aataccttacacctttgtcccaaatatgccaaatcagggcaagaacaatgccaccaaggatatagtagcacagatactttcatacaggggtgtcttttgaaaacattcrtcacatcagcccatcttgtggtaaaattacacttatagtgttatcacactcctcctttcaatgtgatatattaattcaagatcagagcaatgctggccatgctgggaatactggtgtgagatgtgtatatgcacagtagacctttgtccttgccccctgtggtttctaagtcatgcctcacgttcagttttgatatcagttaaaagctacgggaaaatggtacagtacagacaggcaggtccatgagcataaactctttgtctctgagtttgtgtcatatcaactctcctgttctaaaaaagtaaagctggaattttctttgacactaaaccatatttggagaaattcattacaatgctgaaaatcagacgactactccctgtagaacaatgtaggacgcctgttagagattaggaggatattagcagcctgtttgcccaaaggcaagcaagtgaatcacatccgagccaaagcacag

SEQ ID NO: 375263 - DNA, 594 bp, Homo sapiens
acttactgtttgtgagatattactttatgcagaagtagatctaggttttgaagtcttgaagcttatacaactgagaggggaggttgtttaacaacaagaatacaaaattaggtacaaaaaatacttgtttagaataagagaataaaaatacaaatttgaaaacaaatcagaataaaacaacattttcattaaataattgcataacacattcctaaaacattttttcctgtgtatttcggctgcagatcctttaattgtatcttaaatagcaaatggcrgtaattttataactttatgtagaaaaatatattcttccttctaacatgttttatcaaaataggttttaactattattgaccgaatacataaaacatgaaaccttacaaatacattaacttatatataaacacttaacatatataaacactatagatattatagatagctacatattcaattaatctgcctctagtattaagtgctaagatacaagaaaaacaatatagaaacagcgactgcttttctggagtttgcattctgaggaaagaaagaaaatacataaagaaacaaatttaagactctacgctatgattt

SEQ ID NO: 375264 - DNA, 580 bp, Homo sapiens
tgcaaaactacctcctgccttgaaggaagtttaggtttcctttgggtaagccaattagtaagcatatttagactactatctactcctcaaccccccaaaatatccttgctttaaaaattctccagctctttgtttgagtggagttgggttcaaactgagtattaatcattcttgtgttgcaatagtcttggagaatcttccttgcctgttttactttrccaagtgcaagttttgttttgacagaataaatgtttgtgtcataggatagtgagttttgggaaggtttgttatgcagcattattactggaataggtgactatgaaatttggttgattagttgattcatttatgcctacatcctgcattatttaagatgattttaaaataaaattttaaaaaaactaggaaagaatgatatggacaggaaaataagagttgagaggtaaagtcaaagaaaggaacctaatgcaaaaaatccaagaagaattattatagttaagcattaaatttaggtcagaattcactttcctggcagtgatggcttaaagaaaaaataaatcctataataatcattatgtat

SEQ ID NO: 375265 - DNA, 580 bp, Homo sapiens
tgcaaaactacctcctgccttgaaggaagtttaggtttcctttgggtaagccaattagtaagcatatttagactactatctactcctcaaccccccaaaatatccttgctttaaaaattctccagctctttgtttgagtggagttgggttcaaactgagtattaatcattcttgtgttgcaatagtcttggagaatcttccttgcctgttttactttgccaagtgcaagttttgttttgacagaataaatgtttgtgtcataggatagtgagttttgggaaggtttgttatgcagcattattactggaataggtgactatgaaatttggttgattagttgattcattyatgcctacatcctgcattatttaagatgattttaaaataaaattttaaaaaaactaggaaagaatgatatggacaggaaaataagagttgagaggtaaagtcaaagaaaggaacctaatgcaaaaaatccaagaagaattattatagttaagcattaaatttaggtcagaattcactttcctggcagtgatggcttaaagaaaaaataaatcctataataatcattatgtat

SEQ ID NO: 375266 - DNA, 567 bp, Homo sapiens
tgataagagaaagtactaagtcgaattatacctactccatagcacatggctggttctgagcctggtgcgtcatgatacagagtaactaaggggcagcctctcttgtcaggtcccaccatgaactcagcagtttgattagccctcctatcctgtctgcctacccatcgttttagctccttcaagtcttctcccacaagaaccactctttcaggcacatggcaatggcattactgcaattctactgcttctactaaccagggcctctgggaatatcagggctccatcctttatattttggtaataaaaataataacacaaagaatgaaccctactataaactatggaatttatttaataataataatgcaccaatattgactcatcawttgtaacaaatgtagcacacaagatgctaataataagggaaactggggtggggggttgtataaggaaactatttgtactttctgctcatagttccttaaaactaaaattactcaaaacataaagtctgttagttaaaaaaacactaaagaaagttatgctctgcctcaaaattatgtgtca

SEQ ID NO: 375267 - DNA, 567 bp, Homo sapiens
tgataagagaaagtactaagtcgaattatacctactccatagcacatggctggttctgagcctggtgcgtcatgatacagagtaactaaggggcagcctctcttgtcaggtcccaccatgaactcagcagtttgattagccctcctatcctgtctgcctacccatcgttttagctccttcaagtcttctcccacaagaaccactctttcaggcacatggcaatggcattactgcaattctactgcttctactaaccagggcctctgggaatatcagggctccatcctttatattttggtaataaaaataataacacaaagaatgaaccctactataaactatggaatttatttaataataataatgcaccaatattgactcatcatttgtaacaaatgtagcacacaagatgctaataataagggaaactggggtggsgggttgtataaggaaactatttgtactttctgctcatagttccttaaaactaaaattactcaaaacataaagtctgttagttaaaaaaacactaaagaaagttatgctctgcctcaaaattatgtgtca

SEQ ID NO: 375268 - DNA, 575 bp, Homo sapiens
tgtaaactttctcgttgctccctaagagaactatacatctagctaactactactaatcactacacaggcaacaaacatgaaaacatttgtgtaacacaaatgtgcatcttgactcatttcataagattgtacattctttagtattttcagatacctataaagataaagaaaaaaacatttatgctaaaaagattttttaaaatatatttttaaattttcagtcagtttgtatgtaagtaatataaaaagatttcatgatagataatcctagagtgcatggcacagcagtctctccctttcttttcattttacatcaatctggrtatctgaatgacggaagagtaaaaagtatggctttacttgtaaattttaatgataaaatatctatttgaaaaggaaagaactttggaaatatgcgtagcttgcaacatgagactttctttcctagtggcaagcaaatcagaaataatttcaaaaactaccctggatctaggtagtatcttgactacacacacacatacgcacacacacacactcacaatcctaagagaacaggaagattctgtaatgcagat

SEQ ID NO: 375269 - DNA, 500 bp, Homo sapiens
aaaacgacatatagtgaagcctttagaagtcacttaaggatccaataaccttscaaacttgtagtggctacataggcagctcctcttaggggattgcactctggtcataggatgacaacttcacagaggaaaattgctgcaaaggagaggctcattttcctttcccactgcctgtgattactatgcctggagaatcatttataaaactcatatgtgcaaagtctatgggtgatttatgaatctggggctgttgtgcagcgcccagagattcatcattcctggattcatgttagcaagaatgaattccagccaatgttcaaagtcagaatgcggcatcctccaagtggcctgagaaggttctggccctctggctgccatcatctcttcactttttatcatagtctaatcacacattctcttttttcttcccttaggattgaaagaaaatgtactccgtagaataataataataaaaaaaaaatcttagccaccaggttctg

SEQ ID NO: 375270 - DNA, 637 bp, Homo sapiens
tatgtgaatatcaagtctacagatacacctctacagaagattgagcagactctgacacatctttgaatttgtgtgcatattcttaaaatcaaatgtataacctgtttgacttatggaaactgatttgtcaggaaaatgttttttatttaactgaagtttctggtaatttgaatctgaccctttaaaatttccttatgctatatatttggattttattttaaacactagsatgaaggtgaatcagaagcactgtatgactcaggtcctctaggcattgagctataaaagtggggtcccatttataattggaactaaagtagttttgcttgtagtttaaagtcttttggaaggaactgaattgaaaagtaaatggcctaagcactctgaaagcagatgatagaagacagtttgacaagaaaaggcagataaaaagacaggcaaaatgattttactttataccaggaaagacatttggtactttctatttaaaaggctctttgtgaccattaattagttaatcctaatatcctcctggtagaacacatcagcattattatcacttgctgcagcaaaacttgaaatactgaaagattaaggggctttagcaagaattgaaagctaatgaatggcacagtaa

SEQ ID NO: 375271 - DNA, 566 bp, Homo sapiens
gagcattctcgttttccctcagcaattgtggtttttgccattacttttaataaatcagttggttgtgtgtgtgtgtacccatatatgtgtgcatatgtgtgtacaggaacacatgcatatctatgtgtgwggtggagtacctggccacaagcaatgagggcaaacttttcatctctaaactattatgaatataatcattatagatttcttttgggatgtaattgtataacaacagtgattatgaccactctttctctttgtgaccagtgacagtaaatgagtgattttgtgtttttacctatttattcctaaaaattcctagtaaatgctttatcatttttatagcaacaaaaccttggctcattttacaatttctaatagcatctacctgattatcctttattcctttacctataggaacaggcatttaattggttagcatgcctgaaacggacgccttcttgttctatttcagggatcatttctctcatcattcattaggcctagaaatctaatgttgtaagaagtaccttttcctcctgatttcctagatgagaggttttgac

SEQ ID NO: 375272 - DNA, 546 bp, Homo sapiens
ggtttttgatcatgctcaaagtttaatattgctgcagcaataacatctgtatttactttgaggaaaagaacaatcatccagcaattgaaagactatactatgcggaggataaccaagaaccttcttagagttgcagagtgttatgtgttactaaaagagagggatgtttatcgcaactaagtgaagtcttcagattcagcagccttgtgaatttgtggtgtataaaattacaaagctccttttgtggaaagatggtcactctcaaatttatgtcctttgtttacagattatgtatgactttaacaactctttgagttatttagcctttgaaatattgagatagtctaattctatgtggttcaaattagttagatgcgttagctgggttggtttttttgtttgtttttttggtgggggactcgttttttatttaactaaattccccaaagtgcacaaatgacaaaactgattgacycatttatttctctagaagagaataacagagaattattcttttaaaatataaaaggctgcagaaaatatcaa

SEQ ID NO: 375273 - DNA, 622 bp, Homo sapiens
tctttaaatcatgcatagcaaaatgtctcgatcgatagtaattggacactatttgtcaaaatgacaaatgcatacattcttctttacattagcaattcttgtcctgggattatttccacaaatatactggcatgtttaacaaagctacatctaaaagaacattcattttagcatggcttataaatacaaaatattggagagtaaatacaaaatattggagagtataactgtctttccaaaaaggactgattaatttttggtatgcaattggagataaatacagcagtttaaaaaatgaggcagcttgatgttacagattgatttaacttgtgaattagggaaaattacagtgtagaacaatagatgtagtatgttatctcttaggtaacgaagatgaagatggaaacaaaaaaagatataaaaacagtcctataagaacatataagaaatcagtaattgtgattcatctcgtgagaagatagtgaacaaggaaactggagtgagagtgttattgtccatcatataatttttggaacagcatataatttcagagaattaaaagttctygttatatatgtattacttcattcttgttatatatgtattacatattaaaatgaat

SEQ ID NO: 375274 - DNA, 490 bp, Homo sapiens
gcagctggcaaagagagaataaaagtcaagtgaaaggggttgccacttatacaaccatcagatctcaagagacttattgactaccatgagaacagtataggggaaaaacacctccatgattcaattatctcccaccagatccctcccacaacacatgggaattataggagctataattcaagatgaaatttgggtggcgacacagagccaagctatatcaaatattgtgtttaaaaaatctgccataaatcttgttattggctgagtgatgtctacttaaaattcatacattgaaatcccaatccccagtacctcatagtgtaacgatattggaagagaaagtctttaaagagaaggttaagttaaaatgaggatcyaatagacttgtgtctttgtaagaaaggaagagacatgaaaggtgcatgcacacacagtggagagaccatctacaaacaaaggagaaaagtctcaggagaaacaatacctgcta

SEQ ID NO: 375275 - DNA, 618 bp, Homo sapiens
agtatacccagtttagtgttatgtgtttatggtgagttgactttaccagatattttgctgataaatttacctcttgagccaaccatatgacataggtactactttctccattttatagatggagaagtaaaccaaggagttggcagagtggctcatgcctgtaatcccagcactttgggaggccaagctgggyggatcacttgaggtcaggagtttgagaccagcctggccaacatggtgaaaccacatctctactaaagatacaaaaaattagcggggtgtggtggtgtacacctgcagtcccagctactcagaaggctgaggcaagagaatcacttaagcctgggaggcagaggttgcagtgagccaagatcgcgccactgcactccagcctaggcaaaagaatgagactccgtctcaaaaaaacaaaacaaaacaaaacaaaacaaaaaaaaaaactaaaccaaggacctgggattagaattggtaaaaccatgatttgggcccagacatttaaatcccagagtcttatttttcaccattgtgctgtattatgttccttttaaaaatacctttaacagaaccaagaccacggtggaatacctgagacttatatgc

SEQ ID NO: 375276 - DNA, 616 bp, Homo sapiens
atattagtttccattatctttttctgtttatgtttagatgatttatttcttcatttggtttataatacatattcataagctcctgaaacctaggaatgtgatacagggcaacatrttttctatgcaaaatttcactgcaacaaaataatgcaggtgggccatgaagttggtcttgtttgtgcttctttgatccttacgtttccctgtaattcatcaattcctgagtacaattgccctgttcccgagaccactgagataagtagatttgataccaaatgattatatcagacttccagaaatcaggttggtggggtgagctgcctcagtattaatgtttgcgttaaaataaaactaccccatccctagtttagataatactaaatttgtattttttgttacataaaattaaaatgataggtaaatattatttataaaaatatttgatgtttttcacaatgaatgtctcaatggcccattttttttccttttctcatattgagatatcattaagttatccctaaagtgttctttagagactttcgatgagaaaataactcttctgtgtagcatccatctttttgcagtttttttacacacttttcacttaatgttgaat

SEQ ID NO: 375277 - DNA, 616 bp, Homo sapiens
atattagtttccattatctttttctgtttatgtttagatgatttatttcttcatttggtttataatacatattcataagctcctgaaacctaggaatgtgatacagggcaacatattttctatgcaaaatttcactgcaacaaaataatgcaggtgggccatgaagttggtcttgtttgtgcttctttgatccttacgtttccctgtaattcatcaattcctgagtacaattgccctgttcccgagaccactgagataagtagatttgataccaaatgattatatcagacttccagaaatcaggttggtggggtgagctgcctcartattaatgtttgcgttaaaataaaactaccccatccctagtttagataatactaaatttgtattttttgttacataaaattaaaatgataggtaaatattatttataaaaatatttgatgtttttcacaatgaatgtctcaatggcccattttttttccttttctcatattgagatatcattaagttatccctaaagtgttctttagagactttcgatgagaaaataactcttctgtgtagcatccatctttttgcagtttttttacacacttttcacttaatgttgaat

SEQ ID NO: 375278 - DNA, 558 bp, Homo sapiens
ccctggcctttgctaataggaacaagcctaattttagccaccaggatgtccctcactatggttttaacctttgcaggggattttttttaaacatttagcaacaaattttaaaatcaaatttccttattttagcaaaatgtcacacagatggtctggagccccaccttttgatgaggggacagcagatgccatcattttcaaagttcattttggtgtcaggaaaatgaagaaagtacagagggaagcaaaaatattttccaaagcctgctccaggggaagtctgaagtattcaggatgcttttcaaaaccaccttaccccagtgctcctagcaaaatttctgaactttataacgaaacctgggcaactggaatcgtaataaccttaacttctatttatatggaaacttcctcagaattggatkgcaatcatgaaaagcacgttatcaattattttcccaatttaatttgatgggaagggagtgtagcatttttttttaacaaatgtatggaaggagaggtgataacatttgccaatgtcatttgatgaaatggccaagg

SEQ ID NO: 375279 - DNA, 558 bp, Homo sapiens
ccctggcctttgctaataggaacaagcctaattttagccaccaggatgtccctcactatggttttaacctttgcaggggattttttttaaacatttagcaacaaattttaaaatcaaatttccttattttagcaaaatgtcacacagatggtctggagccccaccttttgatgaggggacagcagatgccatcattttcaaagttcattttggtgtcaggaaaatgaagaaagtacagagggaagcaaaaatattttccaaagcctgctccaggggaagtctgaagtattcaggatgcttttcaaaaccaccttaccccagtgctcctagcaaaatttctgaactttataacgaaacctgggcaactggaatcgtaataaccttaacttctatttatatggaaacttcctcagaattggatggcaatcatgaaaagcacgttatcaatyattttcccaatttaatttgatgggaagggagtgtagcatttttttttaacaaatgtatggaaggagaggtgataacatttgccaatgtcatttgatgaaatggccaagg

SEQ ID NO: 375280 - DNA, 558 bp, Homo sapiens
ccctggcctttgctaataggaacaagcctaattttagccaccaggatgtccctcactatggttttaacctttgcaggggattttttttaaacatttagcaacaaattttaaaatcaaatttccttattttagcaaaatgtcacacagatggtctggagccccaccttttgatgaggggacagcagatgccatcattttcaaagttcattttggtgtcaggaaaatgaagaaagtacagagggaagcaaaaatattttccaaagcctgctccaggggaagtctgaagtattcaggatgcttttcaaaaccaccttaccccagtgctcctagcaaaatttctgaactttataacgaaacctgggcaactggaatcgtaataaccttaacttctatttatatggaaacttcctcagaattggatggcaatcatgaaaagcacgttatcaattattttcccaatttaatttgatgggaagggagtgtagcatttttttttaacaaaygtatggaaggagaggtgataacatttgccaatgtcatttgatgaaatggccaagg

SEQ ID NO: 375281 - DNA, 620 bp, Homo sapiens
aatttgcagcattgtttgcattagctttttacactgggaattaatgacaacttgagtaattgtcagttcctagagaaaggcattttgtggcaatcatagtttcaaaagctacattttccctagggtctatgttacagtttaggtgtcattaagggcatcatttatatgcacagggaagctcattagcagtactggggctttgtgatattattgggtgccttcctgtttcctgagtactcagcctctttgggaacaaaatctaccacaaagctggtgaggctattcatttcactgtccccagctattttggaagcaaagtgttgtctgtatcaatatgtaacttttatccagcttatattcattttctctccaattgtcctttggatatagttttaggaggttttgttttgttttgttttgcacagaatactatagacaatttagtggttttccttgttctggcaattaaagttcatggttataaattcctcaccaaggggctcctttrgaatacctgaaatgggtttcccacacttccccactcattctaaaactgacataactgggtacataccagagtggatagaggaagtctgggactagaaaccagccagaattgc

SEQ ID NO: 375282 - DNA, 503 bp, Homo sapiens
tttgcatttatgagcttacagaatgatctgaacaattctgcaagcagaaaaataaatccatgtagataataacatccagaatgatgcagaaagtatgaatgtattgtttccattaactcaactgaatgtgatacaataaccactggaataatagtggtctggctgtcactttgggtaaaatgccttcakaaagcaccaaagactgtcttaattaaagacagtctcttcatttccattttatcagagagatgactgacactaacctaaacagagttataaaaatgcatctgcagcaaatcagggttaattttcacataattgagtggtcagaaataatgataatgttgataatgggtagatgtctaatggtttctccaaagtttaggaaggcagagcaaagacctttttacatataatgtcataattatcatttaaaagtaatttaaattagtttctgacaaaaaattgaggagttccaaaattgtgtgaatattgataattct

SEQ ID NO: 375283 - DNA, 548 bp, Homo sapiens
ctaattaagttggtccctgttcattatagctcaaactatcaggagaaaatatggtccagaggaagagtggtcaggttcgctatttgaacacagcgttctttctgaatagtgtgttgtctgcatgtcctcatcctgcctggatctcctatagtggtatagacttgggcagagttcctaaaggttggggaagaatttccccctactaggagttctgcaatgacttaactgcttttattcccatagtttgcagctctgtacctagaaattgagatgttgtgaactgcatcaaatcatcaagcctgggggtgacttgggctgaagtacggctctcactctttaaaccatgggtcctgtgtctgtgaacctgaagccaccyggaggaggttccagttctaattcccacagaggctctctggagttaatctacggcccagaatgttttcctaatcatatacctgtatgtatttactgctggagtatataattctagtttcctctcttagcttttaattgagggatggcaagggaaatatttctcatgctccttt

SEQ ID NO: 375284 - DNA, 627 bp, Homo sapiens
ctgtaaaaaaacctaacagtcttaagtatttagttactcttatttaacttgatgccattcttaaagagaggcgtgaaatatgtacaacatatatkttcataagacagatctttactgttcataatgctcagtttcctgctgcctctttcccgcttaatgtcataatcttactgtgacatcacaattaattcctgcagagatgattatagttacactgagaggattaagatttcaggaaagtgataaacagcagggacagaataaggtcctttttttgttgttgtttcccaaggattattagtttggtaagagggatagcacccaaatcgagtcacaacttaactgtctaaatcaaacaaacaaaaaacaggcggggggggaggtgtgggtggaagaaaaacatgcctgcagatattataaaacaagataaaactgtagatttgtttctttcgtgaaaggccattgactctttaaatagttttctgttgattgcactagcttaattacttacttaaacagtgaatgttttgtcagctcaatcaaatattttattagtattgcttagtattaagattccaaatgtacattgtgatttagattcaccagcatcattattgtagttattga

SEQ ID NO: 375285 - DNA, 521 bp, Homo sapiens
aaggaaaagtaaaatctttaaaataataaaatacaatttccaactataaatcaaagatatagaagaattcagcaacaccaaactgaaaataattacagaaagatagcaggaaaatatttaaacacttggaaactaatcaatgcgtcaaagagaaagactcaaagaaaataataatttaaaaagtagaaagagcttaatgaaaatataaatgcaatatgtcaaatatatgmgaaaaagctaaagtagtgttgaggaaaatttctagcagtaaattaacaatctaagctctcatcttaagaatgtagaaaaatgagagcaaaatagaaccaaagcaagcagcagaaaaggaacaaaaatccatgagaagaaatcaatgaaatctaaaacaaaactttaaaaattactgaagaatatcaacaaatcaataagccagttcctttaaaagatcaattaaattgccaaacatctagcacgaatgacaaagaaaaaagagagacgatgcaaattaccaatatccagaa

SEQ ID NO: 375286 - DNA, 521 bp, Homo sapiens
aaggaaaagtaaaatctttaaaataataaaatacaatttccaactataaatcaaagatatagaagaattcagcaacaccaaactgaaaataattacagaaagatagcaggaaaatatttaaacacttggaaactaatcaatgcgtcaaagagaaagactcaaagaaaataataatttaaaaagtagaaagagcttaatgaaaatataaatgcaatatgtcaaatatatgagaaaaagctaaagtagtgttgaggaaaatttctagcagtaaattaacaatctaagctctcatcttaagaaygtagaaaaatgagagcaaaatagaaccaaagcaagcagcagaaaaggaacaaaaatccatgagaagaaatcaatgaaatctaaaacaaaactttaaaaattactgaagaatatcaacaaatcaataagccagttcctttaaaagatcaattaaattgccaaacatctagcacgaatgacaaagaaaaaagagagacgatgcaaattaccaatatccagaa

SEQ ID NO: 375287 - DNA, 644 bp, Homo sapiens
tctctttgtagagttctttcacctcctgagttagatgttcccttgggtattttattttattatatttttgttgctattttaaataggatgtgttgttgatttggctctcagcttgaacattattagtgtgtagaaatactactgatttttatacattgattttgtatcctgaaactttactgaagtcaaaaataatgtcttaatatcaaataaccactcaaaattcaaatatctaattgtctcatgagtataagttttttttmatcaatctatgtgaaatccacacatataattgtttgatgtttccttaagtctctctcataagctctgcctagtttctgtctttcttgtggtttatttattgaagatactgggttgtttgccttgtacattttctgtgctctatatattgttgattatattcctctgctgcagagtaatatgttcctctgtgaattggtagctgtttatagaggcttgatgagaatctattttgtttcttcttttgtcaagactgcttcagttgaaggttttgctgttaggaagcacacaatgcccaactgtctctcatttttatattaacagtagttgatgatcagtgccaagatttaatagttcatacaaaagttgcaaaatgattattt

SEQ ID NO: 375288 - DNA, 556 bp, Homo sapiens
actcaaaattcaaatatctaattgtctcatgagtataagttttttttcatcaatctatgtgaaatccacacatataattgtttgatgtttccttaagtctctctcataagctctgcctagtttctgtctttcttgtggtttatttattgaagatactgggttgtttgccttgtacattttctgtgctctatatattgttgattatattcctctgctgcagagtaatatgttcctctgtgaattggtagctgtttatagaggcttgatgagaatctattttgtttcttcttttgtcaagactgcttcagttgaaggttttgctgttaggaagcacacaatgcccaactgtctctcatttttatattaacagtagttgatgatcagtgccaagatttaatagttcatacaaaagttgcaaaatgattatttctaattttatgatatcttctttatcagataaaaacatctataaggagaaaaytcccttcatctaatgtttagtctatcaattgtatagatagtatcaaaacagcaatataaatgcttgtttttttat

SEQ ID NO: 375289 - DNA, 549 bp, Homo sapiens
gaatgaaacagtaggtatcactttttttttatttttatatgtacataatatgtggatawatttatgggacacatgacatttttgatataggcatacaatacataataatcatatcagggtaaatgggtatctatcacctcaagcatttatcctttctctgtattacaaacaactaattatattcctttagtgatttgtaaatgtacaataaattattgtttactgtagtcacccattgggctatcaaataccagatcttcttcattctattcaactatacttttgtatccattaaccattcttatttccctcaccaccctcgccccactactttttcagtctctagtaaccattattctgctctctatttccatgagttcaattgttttaatttttagctcccacaaataagtgataacatatgtaatttttcttgatgtcttgcttatgtcactacacataatgacatccagttccatggtgttgttatgaatgacaggatctcgttctcttatatggttgaataatatcattccattgtgtacacgt

SEQ ID NO: 375290 - DNA, 441 bp, Homo sapiens
catttgcctaactgagaatctatttcctgccaacaccagcatcttgcacattgccctaatgtgccaggggragccaattgcactgtgtccaggaggtgctgaattttagatagattttattctttcaaattaacccattcttgcctctttgagcaagttgtattctaatgaatgcaaactcatccaccttggtcagctttttgtggggtaccaccttgatccactctttcacatgacttttcccatgagcggttgcagtccacaggcattcctccttcctgctgcaggccctatgtcctacatgatggtcaaccagtcatcttctatttcatatctatactcaagattctcaattcatccttcctcccgaaatcccagctcatcttatatgtcacatctatactaaagattcgtgcttcctctccaaatctcttaacacct

SEQ ID NO: 375291 - DNA, 441 bp, Homo sapiens
catttgcctaactgagaatctatttcctgccaacaccagcatcttgcacattgccctaatgtgccagggggagccaattgcactgtgtccaggaggtgctgaattttagatagattttattytttcaaattaacccattcttgcctctttgagcaagttgtattctaatgaatgcaaactcatccaccttggtcagctttttgtggggtaccaccttgatccactctttcacatgacttttcccatgagcggttgcagtccacaggcattcctccttcctgctgcaggccctatgtcctacatgatggtcaaccagtcatcttctatttcatatctatactcaagattctcaattcatccttcctcccgaaatcccagctcatcttatatgtcacatctatactaaagattcgtgcttcctctccaaatctcttaacacct

SEQ ID NO: 375292 - DNA, 652 bp, Homo sapiens
cttgcatatactttgtctgtcttaagctcatgtctgaagtccatagatctagaaagttgattcacttaaatttagaaaatctcatatccctactcattttatctttccattttttttttctaactaccaatatacaggatgggaaagaatgctaacctggtctgggtaagggaagggagaggaaagatgatgcaggttactgagacagattatgtatatagaatgatagagcacccagctcttttgggtacaaaatgtcacccatcccaacctggtattattcagtctgmctcctgtgttattgtcctttatattatttttttaataaagtggacatctgatgtaatctgagcaccatttcctcattcttccaaagagggtattctgcagtttggagaactggctatggtccagagaaatggctgaggatgaagctgcagcagaacagcagtgccacacaatttggggtgggtccctgatccatgagactttcaagataaccacagtgttctgttctcaagtattagattattacctgacctgcacatctgcaaagtcatgatggccggtgtaccttgctgcacttctgacacagtttattgactcttctgtatagtacaaaatagttaacatgtgtttggtcaaggtgaca

SEQ ID NO: 375293 - DNA, 527 bp, Homo sapiens
gggattggttcctaccactgaatcagccatttcaggtagctcagtattgttggtggctagaataatcttattatcagccaagtttgagccatgtgtcttcctggaaaaccaatcaactctgctcaggaaaaaaagattaggttgtaatatggctgcttctgtggcaataataagaatggataggagaaatgtaaatcttaraaaaagagaagctgggggcatactaaactacacgcatatgttgtgtatctttccctcgtgtccgtctccttttccctttttcacattacatattataaacccccagcatttctttctagatgcacaattgtcagtgcagcctccccacacttacccatgctgctgacctaagtaactggaaattaccatctacagaaaatattaagataatttgatgccataggtaatacaacttgtaatttcctcttagtacatataaaaaagaaataaatatactgccagaatttttattattgaaactttgtaaaaattaaaagaaataattt

SEQ ID NO: 375294 - DNA, 323 bp, Homo sapiens
catcagttgctgtggggaaaaggtgtaatgaaaggttttatgactagaacaagcagtttgaattcccccttgattggcagagctggtccctgagaaggagacagaccaatttgtatgtataggggaatgacagaacacaaaaccagaaatgggaggggagaaatccagattgattcgggcctagaacaaggcctacttgttcatggaagaggctggatattgccccwatgtggctgacggggagtccttttgaagataggcaccctggtaccataggtgggtttgaggtttgttggaggtgatggttaattttatgtgtctac

SEQ ID NO: 375295 - DNA, 575 bp, Homo sapiens
gttaaaatgatatagtccagtttatttattttcaaagttcaagcctgggtagatgactaaacttgcctataggctcttaactaattaacgataaatttggaactcaggcaaaagtttactgacttctagttcagaaagtgtttagcagatcacactgcctgttcaatgacactgactctttagagatatgtagagagtttacagagcatgtaataactttactttgcatttatgccccatctatttctacacttaatcaggttttgagatgactaacaaaatctaaacataagtaaaacaacacttgggttgagaaatagacatatctttctgagtaatgaattaagcggctatattatcttgtgttatttcataaggaaaatagtataatatgtgttctaaactgtgcctttgcaatrgactaatataatttgaatgagcatttcaaaaacacacctaaactttacctcattttataaaaatatagtacttttatgttgtctttaatgaactaaatgtattgattgggggaaggctcatttaaatgagtttcttgcaaatcatttggcattata

SEQ ID NO: 375296 - DNA, 575 bp, Homo sapiens
gttaaaatgatatagtccagtttatttattttcaaagttcaagcctgggtagatgactaaacttgcctataggctcttaactaattaacgataaatttggaactcaggcaaaagtttactgacttctagttcagaaagtgtttagcagatcacactgcctgttcaatgacactgactctttagagatatgtagagagtttacagagcatgtaataactttactttgcatttatgccccatctatttctacacttaatcaggttttgagatgactaacaaaatctaaacataagtaaaacaacacttgggttgagaaatagacatatctttctgagtaatgaattaagcggctatattatcttgtgttatttcataaggaaaatagtataatatgtgttctaaactgtgcctttgcaatggactaatatartttgaatgagcatttcaaaaacacacctaaactttacctcattttataaaaatatagtacttttatgttgtctttaatgaactaaatgtattgattgggggaaggctcatttaaatgagtttcttgcaaatcatttggcattata

SEQ ID NO: 375297 - DNA, 625 bp, Homo sapiens
aatcagttggggccttataaagttgtaaatgacagttaatcacagcagaattaagaggcatttctgtaaatgatggatttttatcctcccaggtttttttctgaaggaaatcatggggaaatggattgtagtttcaaaaaatgttcacataataaatgtttctgtttatataggtatgttatattccttgttaaaaaaaacatatatttgcagatcatctaccaatgtttctcaagttatattttcctccttattagtacatagttcacagtggcaaagacagaaaaataaaaccaacaaccataaagggggyctccacagccactgcatatgttacatctcacagtcataataatctttgtttaaattctttaaaaactaattttaaaagttcactggcaatgttaaaaaaagagcatattcattctctactcactcagtgtatttggagaagcctgatgacatcttcttgcgttcatgaatgttcccacttctcatgtatattgctgagaagaagaataaccaatctgttttaatattcataacctctaactctccctgcttgagccgtgttgaaccacacatgtggcacttaccttattttgtgcagtccatttctggaaca

SEQ ID NO: 375298 - DNA, 625 bp, Homo sapiens
aatcagttggggccttataaagttgtaaatgacagttaatcacagcagaattaagaggcatttctgtaaatgatggatttttatcctcccaggtttttttctgaaggaaatcatggggaaatggattgtagtttcaaaaaatgttcacataataaatgtttctgtttatataggtatgttatattccttgttaaaaaaaacatatatttgcagatcatctaccaatgtttctcaagttatattttcctccttattagtacatagttcacagtggcaaagacagaaaaataaaaccaacaaccataaagggggcctccacagccactgcatatgttacatctcacagtcataataatctttgtttaaattctttaaaaactaattttaaaagttcactggcaatgttaaaaaaagagcatattcattctctactcackcagtgtatttggagaagcctgatgacatcttcttgcgttcatgaatgttcccacttctcatgtatattgctgagaagaagaataaccaatctgttttaatattcataacctctaactctccctgcttgagccgtgttgaaccacacatgtggcacttaccttattttgtgcagtccatttctggaaca

SEQ ID NO: 375299 - DNA, 587 bp, Homo sapiens
gaaatggattgtagtttcaaaaaatgttcacataataaatgtttctgtttatataggtatgttatattccttgttaaaaaaaacatatatttgcagatcatctaccaatgtttctcaagttatattttcctccttattagtacatagttcacagtggcaaagacagaaaaataaaaccaacaaccataaagggggcctccacagccactgcatatgttacatctcacagtcataataatctttgtttaaattctttaaaaactaattttaaaagttcactggcaatgttaaaaaaagagcatattcattctctactcactcagtgtatttggagaagcctgatgacatcttcttgcgttcatgaatgttcccacttctcatgtatattgctgagaagaagaataaccaatctgttttaatattcataacctctaactctccctgcttgagccgtgttgaaccacacatgtggcacttaccttattttgtgcagtccatttctggaacagggcaaatcacacacatgaggawgttgggtcataagggataaggttcgtgttcaattcatctttgcgccaagttcccac

SEQ ID NO: 375300 - DNA, 417 bp, Homo sapiens
tctgccctcatgattcagttatctctcaccaggtccctcctctaacattggaaattacaactcaacatgagatttgtgtggggacacaaatccaaaccatatcattctgcccctagcccttctcaaatatcatgcccttctcacattgcgaaatacaatgatttcttttcaacagttccccaagttttaactcattttggcattaactcaaaagttcacggtccaaagagtcatcagggacaaggcaagatccttctgcctatgagcctgtaaaaaaaaaaaaaaaacaagttagttacttccaagataaaatgggaggrcaggcattgggtaaatacaaccatcccaaaaggaagaaatcaggcaaaacaaaggggctacaggccccatgcaactccaaaagcccacagggcagtc

SEQ ID NO: 375301 - DNA, 621 bp, Homo sapiens
aagggtttgagggaagaggttttacttttgccatagtaaaagtcactcaccagacatgcatcatgatggcagcatgaagttggactttccagcctctagaagtataagaaataaatgtttgttctttataaattacccaatctgtggtattgttatagtagaacaaactaactgatatggtttggctatgttcccacccaaatctcatcttgaattcccatgtgttaaggaagggaccctgtgggggcagttctttcctgtgctgttcttgtgacagtgactaagtctcacaagacctgatggttttatttaaagtataataactttactagaattaatcttagaattggctggttttgaccartttcccaaaccacatggtgtatccctatttaaagtaatttaaaatcctcttcaatttaaacaaaaataaataaatttcaagttttagtgtgaattttgatccattgatgtttcttcttttctgaagatccctgtcatacaaatgtgttatcttctttgcttatattgtatatgtatcctttctcaaggccttttcaatttgttctttgatttgttttgatttaaacaattttttaatagttcatgttgcactaaata

SEQ ID NO: 375302 - DNA, 621 bp, Homo sapiens
aagggtttgagggaagaggttttacttttgccatagtaaaagtcactcaccagacatgcatcatgatggcagcatgaagttggactttccagcctctagaagtataagaaataaatgtttgttctttataaattacccaatctgtggtattgttatagtagaacaaactaactgatatggtttggctatgttcccacccaaatctcatcttgaattcccatgtgttaaggaagggaccctgtgggggcagttctttcctgtgctgttcttgtgacagtgactaagtctcacaagacctgatggttttatttaaagtataataactttactagaattaatcttagaattggctggttttgaccagtttcccaaaccacatggtgtatccctatttaaagtaatttaaaatcctcttcaatttaaacaaaaataaataaatttcaagttttagtgtgaattttgatccattgatgtttcttcttttytgaagatccctgtcatacaaatgtgttatcttctttgcttatattgtatatgtatcctttctcaaggccttttcaatttgttctttgatttgttttgatttaaacaattttttaatagttcatgttgcactaaata

SEQ ID NO: 375303 - DNA, 602 bp, Homo sapiens
ttttaaattaaaatagcaccaattatctatggaataacattggatggtcttctacataagtaattggaattatagaacaaaagaaagaaaataatagtagaaaaatgaagaaataayccagaaaatttttcaaatttcaacaaatatgtaatactacatattcaaggacatcaataaatcttaggaataaaatattgcacatacaattaggatacatagctcaacatactattgtcaaactggaaaagaaagaaaaaaagaaagttctattaacataaagagtaacaaacaaaaaaaagaatgacaaatgactcctcatcagaaatattgcaagccaaaaacaaaacaaacaaacaaacagaaaacacaaaagagaaagggaatctttaactttgagtctgatattaggcaagattatatttataaaaggaagccaaaaaagtgtttctcagaaaaaccatgagaatttgtctcttagagactctcactgtgaaaaatgagtgatagtcaattttatgtgtcaacttagctagactctggtgaccagcagtttattcaaccactagtctagatgttgcttgatatggtctggctctgcatcc

SEQ ID NO: 375304 - DNA, 602 bp, Homo sapiens
ttttaaattaaaatagcaccaattatctatggaataacattggatggtcttctacataagtaattggaattatagaacaaaagaaagaaaataatagtagaaaaatgaagaaataatccagaaaatttttcaaatttcaacaaatatgtaatactacatattcaaggacatcaataaatcttaggaataaaatattgcacatacaattaggatacatagctcaacatactattgtcaaactggaaaagaaagaaaaaaagaaagttctattaacataaagagtaacaaacaaaaaaaagaatgacaaatgactcctcatcagaaatattgcaagccaaaaacaaaacaaacaaacaaacagaaaacacaaaagaraaagggaatctttaactttgagtctgatattaggcaagattatatttataaaaggaagccaaaaaagtgtttctcagaaaaaccatgagaatttgtctcttagagactctcactgtgaaaaatgagtgatagtcaattttatgtgtcaacttagctagactctggtgaccagcagtttattcaaccactagtctagatgttgcttgatatggtctggctctgcatcc

SEQ ID NO: 375305 - DNA, 602 bp, Homo sapiens
ttttaaattaaaatagcaccaattatctatggaataacattggatggtcttctacataagtaattggaattatagaacaaaagaaagaaaataatagtagaaaaatgaagaaataatccagaaaatttttcaaatttcaacaaatatgtaatactacatattcaaggacatcaataaatcttaggaataaaatattgcacatacaattaggatacatagctcaacatactattgtcaaactggaaaagaaagaaaaaaagaaagttctattaacataaagagtaacaaacaaaaaaaagaatgacaaatgactcctcatcagaaatattgcaagccaaaaacaaaacaaacaaacaaacagaaaacacaaaagagaaagggaatctttaactttgartctgatattaggcaagattatatttataaaaggaagccaaaaaagtgtttctcagaaaaaccatgagaatttgtctcttagagactctcactgtgaaaaatgagtgatagtcaattttatgtgtcaacttagctagactctggtgaccagcagtttattcaaccactagtctagatgttgcttgatatggtctggctctgcatcc

SEQ ID NO: 375306 - DNA, 481 bp, Homo sapiens
gatggaattatctgggttttgtagatttttaaatattagctacttacaaatgttttggatrcttgtctaatcaccttttttatactctgaatttataaggaatcactttagcatgttaaaactcgtaatgttaaagctgaaaatggctgctactatttttttcatgtatatgtatctatttactttggagatatctggggatatttactcgtaggatacccactggcctcccataaagtgcaaagaatcagtaaacactgaaacaattactgtgtaagtgttggaccaaatatgctaaaatattgattactctggtggtttttataacagaggattcaatatggccattttgaatatattaaaatttaataactacagcttatcagttgaaatgctgttggtgattcattagtgtggattcagccacacattcggaaaatacttaaagcttagaaaaacatacaaaaaatatgatactgat

SEQ ID NO: 375307 - DNA, 556 bp, Homo sapiens
attattgcctgttctttgagtctctgggtcacaggatatatctatgactagaggacatggtaaaactaagtggcctcttctggaactgaactagtgacaggcacatctttggggcactatcctaaacaactacagtgacaatatttccatcagtaaactgtgaatgcataaaatttatgaaataattatctagtttacttcctaaactcaaggaaaatcacttgartggatcacattttgagggtaatagtaatcctggaaaattggatcccagccattgaagacctagtgctgctctagctactacatttcacctcacactgaaatttagccttgccttttataggatctccaaataccacacaaacatatttatgacagcagagaatgcagctaactttctccaaacacttgtaccagagatccttccatttgcagggggctaaaaatccacacacaacagcaaaacttttcaaatcatgttgtcttggacagactacaaagacctcatcacagttcccttgtcatttttctccttttaggaaatataacttta

SEQ ID NO: 375308 - DNA, 614 bp, Homo sapiens
aggcacatctttggggcactatcctaaacaactacagtgacaatatttccatcagtaaactgtgaatgcataaaatttatgaaataattatctagtttacttcctaaactcaaggaaaatcacttgaatggatcacattttgagggtaatagtaatcctggaaaattggatcccagccattgaagacctagtgctgctctagctactacatttcacctcacactgaaatttagccttgccttttataggatctccaaataccacacaaacatatttatgacagcagagaatgcagctaactttctccaaacacttgtaccagagatccttccatttgcagggggctaaaaatccacacacaacagcaaaacttttcaaatcatgttgtcttggacagactacaaagacctcatcacagttcccttgtcatttttctccttttaggaaatataactttaaactacttttgaattatgtgagagkagatagtgtatattttctagtttaaaagcaatttaaggtagagttctctggcacaaaggcaattcaaaaataactgaagcttaagagttgaaactcccccttgtctggtgtatatattgaagagagttatt

SEQ ID NO: 375309 - DNA, 567 bp, Homo sapiens
tcagagatgccaccagaactgtcagtctggaaaacatagctgaagcatatcttaaaatggcatacctaaaaacaggctgcttaagaaattatatttattaaaacatttgttctatatatgtcacaatttgaaagatctgaaacttaagacttatgctcaattataaagtaaaccttgagtttaatattayctttgtagtcagcaggggaaaaatatcatagtgatttccttgaggaacactttgcctctctctgcttttatctgccgctgatcctaaaaccacaatttgggcacccattgagtaaaacgtttgctcaactttaatttttcagtcagaattgtgtaagctgaaacagttgaaatgactgtggtatgggttattgtttgtgttgttaatcataggtccccttcaattagggcacgaacaagattttttttttcttttgaattgatgtgcatggtctgcctctgtgggcttcgtcttcaacatcaactccttccttctttaatgagttatctattcataaattgctaatttcttgaggtattttcaccataaactttcat

SEQ ID NO: 375310 - DNA, 567 bp, Homo sapiens
tcagagatgccaccagaactgtcagtctggaaaacatagctgaagcatatcttaaaatggcatacctaaaaacaggctgcttaagaaattatatttattaaaacatttgttctatatatgtcacaatttgaaagatctgaaacttaagacttatgctcaattataaagtaaaccttgagtttaatattatctttgtagtcagcaggggaaaaatatcatagtgatttccttgaggaacactttgcctctctctgcttttatctgccgctgatcctaaaaccacaatttgggcacccattgagtaaaacgtttgctcaactttaatttttcagtcagaattgtgtaagctgaaacagttgaaatgactgtggtatgggttattgtttgtgttgttaatcataggtccccttcaattagggcacgaacaagattttttttttcttttgaattgatgtgsatggtctgcctctgtgggcttcgtcttcaacatcaactccttccttctttaatgagttatctattcataaattgctaatttcttgaggtattttcaccataaactttcat

SEQ ID NO: 375311 - DNA, 647 bp, Homo sapiens
aatttgaaagatctgaaacttaagacttatgctcaattataaagtaaaccttgagtttaatattatctttgtagtcagcaggggaaaaatatcatagtgatttccttgaggaacactttgcctctctctgcttttatctgccgctgatcctaaaaccacaatttgggcacccattgagtaaaacgtttgctcaactttaatttttcagtcagaattgtgtaagctgaaacagttgaaatgactgtggtatgggttattgtttgtgttgttaatcataggtccccttcaattagggcacgaacaagattttttttttcttttgaattgatgtgcatggtctgcctctgtgggcttcgtcttcaacatcaactccttccttctttaatgagttatctattcataaattgctaatttcttgaggtattttcaccataaactttcataaagcatcaatgattttatgattcttccacrctagcttcaccaaaaatttaacatttgttcttgtttcaattttagcagaattcatgttgctctgatagggactcttttcaaactgatgtcttacccttcttagtgcctccagctagtttcttttcatgacatgtcataacaagttagtagaagtttattttggtgcaaaacat

SEQ ID NO: 375312 - DNA, 589 bp, Homo sapiens
gtcaattcttacgttttgtttttgagtcataagaaatttctgtctaaccaaagactatatttatctgtaataaatatatttatatttttactgtaggtaatgatatacacactatatttacctatagtatatagcatttactatgccatatttacccatggtatatagtatttactatactatatttacctatagtaaatacatttgcagcctttgytggaaatttctagaagttatatagcattacattttacacttaagtttatgttctatttcaaattgacttttgtgtactgtgtaggtacaatagaggttacttttttttattctcaaaagaattatccagaattaataatccagaatgatttattgaaaagaacttctttaccctatttcatgtttttgataccttcctaaaagataaatttatcatgtaagtgtgggtctatttctggactctacattctgctacattagtataaaaccaataccacactgtttcaattactataatttaacataaattcaattcatatcctggtactctttttagtgattatttttgctattctaggttctttatatttct

SEQ ID NO: 375313 - DNA, 589 bp, Homo sapiens
atctcttgtatgaggctactcatctctgtgtggacagttttccttccagtaaattgtatcacagcgaaamgtgatctctctagtggttctctgtgtttttcacactgcttggtgcaatatccatgaatgttgaataacactgtgggacacacacaaaagttctactagtgatgctggaagggctcccaggaagcactcttaacattacagaaaaaagtagaacacttgatatacacagtagattaaggtctgcagcctaccactaagatggatgattcctcttgtaaacagaatgtgtaaatttacagaatgggtagtatagtacagtcctgtaaatgaactttccttccttatgatttgcttaataattttttctttgctgtaacttactctttttgtaaaaatacagtatataatacacatacaaaatacatattaatcgactgtttatgttatcagtaatgtttctggtcaacagtaggctattaggagatgagtgttggaggagtcaaaaattacacatgagcttttgactgtgtggggagccaatgtcactaacccctgcgttgttcaagggtcaactatataa

SEQ ID NO: 375314 - DNA, 589 bp, Homo sapiens
atctcttgtatgaggctactcatctctgtgtggacagttttccttccagtaaattgtatcacagcgaaacgtgatctctctagtggttctctgtgtttttcacactgcttggtgcaatatccatgaatgttgaataacactgtgggacacacacaaaagttctactagtgatgctggaagggctcccaggaagcactcttaacattacagaaaaaagtagaacrcttgatatacacagtagattaaggtctgcagcctaccactaagatggatgattcctcttgtaaacagaatgtgtaaatttacagaatgggtagtatagtacagtcctgtaaatgaactttccttccttatgatttgcttaataattttttctttgctgtaacttactctttttgtaaaaatacagtatataatacacatacaaaatacatattaatcgactgtttatgttatcagtaatgtttctggtcaacagtaggctattaggagatgagtgttggaggagtcaaaaattacacatgagcttttgactgtgtggggagccaatgtcactaacccctgcgttgttcaagggtcaactatataa

SEQ ID NO: 375315 - DNA, 589 bp, Homo sapiens
atctcttgtatgaggctactcatctctgtgtggacagttttccttccagtaaattgtatcacagcgaaacgtgatctctctagtggttctctgtgtttttcacactgcttggtgcaatatccatgaatgttgaataacactgtgggacacacacaaaagttctactagtgatgctggaagggctcccaggaagcactcttaacattacagaaaaaagtagaacacttgatatacacagtagattaaggtctgcagyctaccactaagatggatgattcctcttgtaaacagaatgtgtaaatttacagaatgggtagtatagtacagtcctgtaaatgaactttccttccttatgatttgcttaataattttttctttgctgtaacttactctttttgtaaaaatacagtatataatacacatacaaaatacatattaatcgactgtttatgttatcagtaatgtttctggtcaacagtaggctattaggagatgagtgttggaggagtcaaaaattacacatgagcttttgactgtgtggggagccaatgtcactaacccctgcgttgttcaagggtcaactatataa

SEQ ID NO: 375316 - DNA, 589 bp, Homo sapiens
atctcttgtatgaggctactcatctctgtgtggacagttttccttccagtaaattgtatcacagcgaaacgtgatctctctagtggttctctgtgtttttcacactgcttggtgcaatatccatgaatgttgaataacactgtgggacacacacaaaagttctactagtgatgctggaagggctcccaggaagcactcttaacattacagaaaaaagtagaacacttgatatacacagtagattaaggtctgcagcctaccactaagatggatgattcctcttgtaaacagaatgtgtaaayttacagaatgggtagtatagtacagtcctgtaaatgaactttccttccttatgatttgcttaataattttttctttgctgtaacttactctttttgtaaaaatacagtatataatacacatacaaaatacatattaatcgactgtttatgttatcagtaatgtttctggtcaacagtaggctattaggagatgagtgttggaggagtcaaaaattacacatgagcttttgactgtgtggggagccaatgtcactaacccctgcgttgttcaagggtcaactatataa

SEQ ID NO: 375317 - DNA, 360 bp, Homo sapiens
agttctgtaacaactgacatccacatgcaaagaaaataaatctagacatacatagactcaatacttttcacaaagataactcaaaatggatcagagaccaaaatgtaaaatgcaaaactataaaattcctagaagatatcaggaggaaatctaggtaatcttgagcataataatgacattttagatakaacatcagaagtacaattcatgaaagaaataaataataatctgaactttattaaaattaaaaagcttctgcttcatgaaaaatatggtcaagataattaaaagataataaacatgaaataaaatttaaaagaaagccccagaatgagataaaatatttgcaaaagatacagt

SEQ ID NO: 375318 - DNA, 560 bp, Homo sapiens
agtttttttttaaggttttaaatctctagcataaacagacagctcatatttgtattttgaaaatactagagtggtctcaagctaaatgttacaatgtgacttyagatgattgatttttgacttgattaatagtctttccacagagacaactcacaggctataaagtgcttaacatttccttggcttcagaaggcactagggaaggaggtaagtatggaccaattagcaggtgggcacttcaagtgtacttctagttatttatatgaattgtgaaggtctttaatatcctctttgaacttttgacgcagaaaacaagatttgtctacttgtatctagtttaaaccaatttatttagaacaaaaacaagatacatttctggatgaatctcttatttgggttttacattcttagcaaaaacatagaatccatgaacctctgtttatgaaactataaactgtaagaagctgtactgcacactaagcaaacgtagacatttgttccccaaaatggaagggatggtttgatccttcatagttgaaaaatatttcttacctcttagg

SEQ ID NO: 375319 - DNA, 527 bp, Homo sapiens
tttgaggattgtcactggtgatattctgagacgttattgttttctgtaggctatactttcatttttgcaaatgcttatgcagatggattgtttctgagatctggttccaaagcttacattaaatattttgtaaatattacatgtaaatgatgatggtagtaacacctgattaagaataagccaaataccgtgacgtttcctattttgcggaaagattaaattatgattactcaaagaaaagtgaactttaactagtttctccatggattgtcaactttgtagcrtaattatgagtatttatgtgtcatcacctatcttttgtgactcaaccaatgcaatctagtttaactagtcttgatatctctgtcatgcttttacttattggaagatatgcttgtaagtactagatctaaagtttgtgaaagagatgaacaaggttagtcctcagctcatctttctgtggcaaataggctatattaaaaatataaattccagtccatgaagccaggtatccaacatattgaaca

SEQ ID NO: 375320 - DNA, 575 bp, Homo sapiens
tttacgtacagtatcaggtcatatgataataaaagcaatcttagmttttccttttcaatctgaatcccttttatttcatcatcttttattgctgctgcccatttgtctgtttgcccaattgcactgcctagatttccaggcctatattagtatctattgatgtcttttttccccttagtgatagaattaatagttgcctcatggaataggaagttgtgagaacagacatccttgcctttttctgattttaaaaggaagcatatggtctttcaccaaacttatgaggatattgtacaatttttgtagatatcctttattggtttaaagaagactccttctattcttggtgtgctaaatgttataataaaaaatcatgctgaaaactgggtttttcagataacattttgcagcaactttatattctgattcattttatcagagtagatatttcttttttcttttttattttcaattgacatttattaattgtacatatttatggagttcagtgtaatatttgatacaggtatacaattgtaatgatcaaattagggtaattagaatatcaatcacta

SEQ ID NO: 375321 - DNA, 575 bp, Homo sapiens
tttacgtacagtatcaggtcatatgataataaaagcaatcttagattttccttttcaatctgaatcccttttatttcatcatcttttattgctgctgcccatttgtctgtttgcccaattgcactgcctagatttccaggcctatattagtatctattgatgtcttttttccccttagtgatagaattaatagttgcctcatggaataggaagttgtgagaacagacatccttgcctttttctgattttaaaaggaagcatatggtctttcaccaaacttatgaggatattgtacaatttttgtagatatcctttattggtttaaagaagactccttctattcttggtgtgctaaatgttataataaaaaatcatgctgaaaactgggtttttcagataacattttgcagcaactttatattctgattcattttatcagagtagatatttcttttttcttttttattttcaattgacatttattaattgtacatatttatggagttcagtgtaatatttgatacaggtatrcaattgtaatgatcaaattagggtaattagaatatcaatcacta

SEQ ID NO: 375322 - DNA, 626 bp, Homo sapiens
tcacatgataatatagataatgtgagagtaacaaatggaaatgagcaatggctcaatgagttaaaaaaaaaaaaaaaccttggtgaattttcacatttcagaggtgccattaaaatgaagaacatttggagcactgggatatccatcatcaattgccacggcttcaggtctgtgaactctaaactcayactcacttagtgcaaagcctgagccacgtcttatagttctaagaatggcagtaaaggatttctctctacatccttcagtttattctgctatataagggttacatttgagtgcggattaaatgagatattttctataaagcatctagcaaagtgcctggctcacagaaaagacccagagaatctgggatatcagtattattaaaagatcgagtgttagaagacagacatttctaaatcctgtcttaatatttacaaacctggaaatcccacacacagcagtgttgctttgaacttcaaatctgtaaattgttagataaattaaaattactttgaatttcttctgagttctcagattagaagaaataaacatttaaataatgtcacctcagttctcaaattgaagaaataaattaccataaaagtattgtgttgcactgg

SEQ ID NO: 375323 - DNA, 626 bp, Homo sapiens
tcacatgataatatagataatgtgagagtaacaaatggaaatgagcaatggctcaatgagttaaaaaaaaaaaaaaaccttggtgaattttcacatttcagaggtgccattaaaatgaagaacatttggagcactgggatatccatcatcaattgccacggcttcaggtctgtgaactctaaactcatactcacttagtgcaaagcctgagccacgtcttatagttctaagaatggcagtaaaggatttctctctacatccttcagtttattctgctatataagggttacatttgagtgcggattaaatgagatattttctataaagcwtctagcaaagtgcctggctcacagaaaagacccagagaatctgggatatcagtattattaaaagatcgagtgttagaagacagacatttctaaatcctgtcttaatatttacaaacctggaaatcccacacacagcagtgttgctttgaacttcaaatctgtaaattgttagataaattaaaattactttgaatttcttctgagttctcagattagaagaaataaacatttaaataatgtcacctcagttctcaaattgaagaaataaattaccataaaagtattgtgttgcactgg

SEQ ID NO: 375324 - DNA, 611 bp, Homo sapiens
cagtattattaaaagatcgagtgttagaagacagacatttctaaatcctgtcttaatatttacaaacctggaaatcccacacacagcagtgttgctttgaacttcaaatctgtaaattgttagataaattaaaattactttgaatttcttctgagttctcagattagaagaaataaacatttaaataatgtcacctcagttctcaaattgaagaaataaattaccataaaagtattgtgttgcactggcattggggttgaaaaataatatggttaattaaatatatggataattcacatttatcatgaacatgttatatttttctttcattaatgttgtggaaaataattttagtctttgttattatttcagtagatacagccaagtaagcactaccaaaactttcttgaatgaatcattatcttatagggcaacaacagatttcctctaaggaactcaccaaagagaaacagcattgctacaggggaggtcagatattcaatgaatacacactttgtgatatatgaaaatacacytaaaaatcctgagaaaaaccttagtgagattattaatatattcagagaaagaatattttagtcataaaaaagaga

SEQ ID NO: 375325 - DNA, 611 bp, Homo sapiens
cagtattattaaaagatcgagtgttagaagacagacatttctaaatcctgtcttaatatttacaaacctggaaatcccacacacagcagtgttgctttgaacttcaaatctgtaaattgttagataaattaaaattactttgaatttcttctgagttctcagattagaagaaataaacatttaaataatgtcacctcagttctcaaattgaagaaataaattaccataaaagtattgtgttgcactggcattggggttgaaaaataatatggttaattaaatatatggataattcacatttatcatgaacatgttatatttttctttcattaatgttgtggaaaataattttagtctttgttattatttcagtagatacagccaagtaagcactaccaaaactttcttgaatgaatcattatcttatagggcaacaacagatttcctctaaggaactcaccaaagagaaacagcattgctacaggggaggtcagatattcaatgaatacacactttgtgatatatgaaaatacacttaaaaatcctgagaaaaamcttagtgagattattaatatattcagagaaagaatattttagtcataaaaaagaga

SEQ ID NO: 375326 - DNA, 469 bp, Homo sapiens
aataccatgttctcacttagaaatgggatccaaacatcaggtactcgtggacataaaaatggcaacaatagaaactggagactactagaggtggggmgagaggaaggggcaagggttgaaaaactgtggggtattacgctcagtacctgggtgatgggatcatttgtacttcaaatttcagcattttgcaatatacccatgtaagaaacctgcacacgtatcccttgaatctaaaataaaacttgaaaacaaaataaaataaaaaataaaaatagaaaaaaatacattattgctaatttatcttaggtgtgattaaaacaaatgttttcccattttcttgaaattctggtcgaaattatatgatatctgatattttcttcactattcaggtcctctaccttccctcaaaattcttctataacaactaacactttgagtttagcttgtgtttgtcagaagcagggcctgg

SEQ ID NO: 375327 - DNA, 469 bp, Homo sapiens
aataccatgttctcacttagaaatgggatccaaacatcaggtactcgtggacataaaaatggcaacaatagaaactggagactactagaggtggggcgrgaggaaggggcaagggttgaaaaactgtggggtattacgctcagtacctgggtgatgggatcatttgtacttcaaatttcagcattttgcaatatacccatgtaagaaacctgcacacgtatcccttgaatctaaaataaaacttgaaaacaaaataaaataaaaaataaaaatagaaaaaaatacattattgctaatttatcttaggtgtgattaaaacaaatgttttcccattttcttgaaattctggtcgaaattatatgatatctgatattttcttcactattcaggtcctctaccttccctcaaaattcttctataacaactaacactttgagtttagcttgtgtttgtcagaagcagggcctgg

SEQ ID NO: 375328 - DNA, 580 bp, Homo sapiens
aaaataataaaatacaatttcaagccataagtctatattcaaagaaaatacactttaaataaacaggtgaaataaagctattcacagataaacaacactatagtatttaccacctatagtcccatgataaaataataataataataataggagttcttaagatttcaagataataattataggcaggaaatacaagttgatggcaatgttctacttcagggttgctggtttcayaacatatttaataaaaactatttgaatggccaacatattcttagaacaaataagtaactatagcaagattgtaggctacaaaattaattcacaagggtcaatcatgtattcatatgtctgaaataaaaaactagaatttgatactaaaaacacaatgccatttatattagcacctttcaaaatgaaatacttatgtataagtccatcaaaatacgtgcaaaaagtatataaagacaaccacaaagctctcataaatcaaagaactaaactaattgagaaataatccatgtttattgatagagactaaaaattgtcaaagaaatcataaatgtttgaagtgatggat

SEQ ID NO: 375329 - DNA, 580 bp, Homo sapiens
agaacatcactattcacacactgaggtcttctactttctctcaaaatctctctctagtaattaaccctttgtgcttagtttgtgtttgccagaagtggagcctgagatragcactgtgtgcaagtgatttactgagcaagaactctctgcagagacccataagggtgtggaatgaagggagtaaagaagccaagggagataaagtctcagcctcagccagtttcttcaggggagcctaggagtggtacttcagagagtttttcaactggagacatgggaaacactcaaagagtctgaaaataggagacctgtgggaatactgaggaggcagtcagcttggttgtcacagagatagagcggggtgaagagtaccacctctgaagtcagaggcctgaagattaaattttaaatcctggctcctctgccttagcattctgatctggaaaaggggaaaaaaatagcacccacctcatagaattataataaggattaagtgaaacagtacatacaaatcatttagaacaaatgttaggattgattggtaatggatgcattaattaatagatgtcctgaagcacta

SEQ ID NO: 375330 - DNA, 560 bp, Homo sapiens
gcctttctgcacttggagcctaaatccagtgaaacagccatcatcttggtgtctgagtccatgtggtgccttgcctcccaaggaacagttggacaattggtccttcccatgggaaagctgagtccaaactggcacttctttggcacataaaacagctcaccatcctctcacctcaggagccccacccaagatgctggaacagctacacaaattccagcagcctaggccactgaggcaatctcaggcattgctgacattgactacaactgaagaaacttcatggagactacactactgtgtctactttaaatgaaagccaaagcacactacctaaccaacaccataggacacatctataggtaaaagtctttctctacaaaagccacttcataaaattagaargaaaaccattctaccagatgcacagatatgaatgcagggatacaagaaacataaaaaagcaaggaaacaagacatcaccaaagaaacacagtaattattcagtaactgactctgaataaagaaaatttacaagctccctgaaaagaaagtgaaaataa

SEQ ID NO: 375331 - DNA, 594 bp, Homo sapiens
atccccattagactatacgcaggtctcccagcagaaatctttcaggctagtaaagaatgggatgatatattcaaagtgctgaagggaggaaaaaaaaaccctgccattctgcaatattatatccagcaaaactgtccttgagaaaagatggagaaagaaagtctcttctagaaaaggaaaagctgagggaaattatcaccagcagacctgccttgcaagagatgcttagggagtgcttcagctggaagcaaaagggcaatcattactatcatgaaaacacgtgaaaagatagtctcactggtagaggaaaattcattarcaaattcaaaatactttgttactataatggttattatataaactttcaagtatgtagtatgaaggttaaaagtcaaatggtcagtgataactatttatagtaagttgttaagaaaaaacaatataaaaagatataaacaaagaaacaatttataaattgggaggggaagttaaaagtgtaggatatacacatatatgtacatatataatatgtgtaacaaaacttaatttattattggcttagtttattttatctaaaatattttcatgtaaggc

SEQ ID NO: 375332 - DNA, 594 bp, Homo sapiens
atccccattagactatacgcaggtctcccagcagaaatctttcaggctagtaaagaatgggatgatatattcaaagtgctgaagggaggaaaaaaaaaccctgccattctgcaatattatatccagcaaaactgtccttgagaaaagatggagaaagaaagtctcttctagaaaaggaaaagctgagggaaattatcaccagcagacctgccttgcaagagatgcttagggagtgcttcagctggaagcaaaagggcaatcattactatcatgaaaacacgtgaaaagatagtctcactggtagaggaaaattcattaacaaattcaaaatactttgttactataatggttattatataaactttcaagtatgtagtatgaaggttaaaagtcaaawggtcagtgataactatttatagtaagttgttaagaaaaaacaatataaaaagatataaacaaagaaacaatttataaattgggaggggaagttaaaagtgtaggatatacacatatatgtacatatataatatgtgtaacaaaacttaatttattattggcttagtttattttatctaaaatattttcatgtaaggc

SEQ ID NO: 375333 - DNA, 591 bp, Homo sapiens
tggcaaagacccacccccatgattcaattacctcccattgggtccctcccatcacacatgagaattatgggagctacagttcaagatgagatctgggtggtgacacagctaaaccatatcaatggttcaacatatgcatatcaataaacatgatgcactaacagaatcaagagcaaaaagtatatgattatgccatctctgatttctttgagcagaggtgtgcggttatccttatagagatctttcaccttccttgttagctgtattcctargtattatactctttctgtggcaattttgaatgggagttctttggaatttggctctcagcttaagtgttgttggtgtacagaaattctagcaaattttgcacattgctgctgtattctgagatttgctgaagttgcttatcagcttaagaagctttggggctgagacaatggggttttctagatatgagatcatatgatctgcaaatagggatagtttgacttcctctctccctatttaaatgccatttatttctctcttttccctgattgccctcgccagaacttccaatactacattgaataggagtgatgagaaagg

SEQ ID NO: 375334 - DNA, 564 bp, Homo sapiens
gagattgctcatgttcctattagtctttctcattttacacacacacacacacacacacacaaaaacactgtccttaactgcagaaaaaaatattaaagttttgcagtaactcctttaatgattcatggatatgtcttaaacgcattagtctcctgttttcctttgcatttaacatataaatatctggagtgttagaatgttctgaattcaaaagggctaatgcattagaagttactgaacctgatacttttaaacttagctgactattttcctagcatgaccgaagttctcatgttacaggaagtgaaacccaagcatgaaaaatttacgtgattatttaagattgggtgtgcattaytcaacaatgtatttaaaactcattttatcaaagtataaaatatttatttcaattacagtaaatcctcatttcaccttacaaaatatgtaatattcttatctcttattaaccaaaaataaacatctaaaattatgatgaaatgtttaaaaatgtgggcaattttttgagagtaaatgaaagcaaaacatgttgaagtctcctgttgc

SEQ ID NO: 375335 - DNA, 619 bp, Homo sapiens
taatttgaatcatttagctcaagttgtccaggtaattttctcacctaacacttcactttgtgatagagactattaattgttacaactctgggtagctggagagataagagagatgtactgagacaaggacaggcataaaatagctcattaaaacccactcacctgcccacacccagagtggtgggaggctcaggagcttttattatgcatcaatgtgattctcactgatgctaacccgggctgccaggaacccacagcacagtcctctctcaactccctctgagctttggataggatttttcatttcacacatcattcaactcctcgctccagtgactctgaagagccaagaacccacctgcttgtgagtgcacattagcactaatcatttaaatttatagtgtagggaggtggagatgatcatacaaattctcaaaaagcataygcactggggactttgagagtgaattcccttagaaataatctcagaaaatgatgaaatgtggagccagaaagtagaattccttaatttagctcctgaccacccttcacacatacagtaatgtttcttttgtggagcttctgttacatgtttataatatgtaattatacttgagtt

SEQ ID NO: 375336 - DNA, 600 bp, Homo sapiens
tagggaggctgaggcaggagaatygcttgaacctgggaggtagaggttgcagtgagccgagatcgtgccattgcactccagcctgggcaacaagagtgaaactccacctcagaagaaaaaaaaatgtatacataaatgataatacataaaagtaaaaaaattaattttcctccaaggataaaaccatgttgatattcacagttattccatctaattctgatttgaagacatagtgctgtaattctaatgaaagatgataattaacataaccctttaatgaatgaatgcagcactttttgattttaaatgttttaattactgtattttactatagttatattacaaaatgtgttgagctatgggagaaaaaaatgaaataaattctgagcagataactaacatgttataatgccatagcctttccatcttccttgtgttttttatcttgttttcacgtcatttgctgtaaatatttttagagttcactatgtgtcagttactattgtatgacttgtgtaactaaatgaacaaacatataaacaatgtaatttcaagcacaataaataacagaaggaccgatggtgtatgacgaaggtaaat

SEQ ID NO: 375337 - DNA, 600 bp, Homo sapiens
tagggaggctgaggcaggagaatcgcttgaacctgggaggtagaggttgcagtgagccgagatcgtgccattgcactccagcctgggcaacaagagtgaaactccacctcagaagaaaaaaaaatgtatacataaatgataatacataaaagtaaaaaaattaattttcctccaaggataaaaccatgttratattcacagttattccatctaattctgatttgaagacatagtgctgtaattctaatgaaagatgataattaacataaccctttaatgaatgaatgcagcactttttgattttaaatgttttaattactgtattttactatagttatattacaaaatgtgttgagctatgggagaaaaaaatgaaataaattctgagcagataactaacatgttataatgccatagcctttccatcttccttgtgttttttatcttgttttcacgtcatttgctgtaaatatttttagagttcactatgtgtcagttactattgtatgacttgtgtaactaaatgaacaaacatataaacaatgtaatttcaagcacaataaataacagaaggaccgatggtgtatgacgaaggtaaat

SEQ ID NO: 375338 - DNA, 600 bp, Homo sapiens
tagggaggctgaggcaggagaatcgcttgaacctgggaggtagaggttgcagtgagccgagatcgtgccattgcactccagcctgggcaacaagagtgaaactccacctcagaagaaaaaaaaatgtatacataaatgataatacataaaagtaaaaaaattaattttcctccaaggataaaaccatgttgatattcacagttattccatctaattctgatttgaagacatagtgctgtaattctaatgaaagatgataattaacataaccctttaatgaatgaatgcagcactttttgattttaaatgttttaattactgtattttactatagttatattacaaaatgtgttgagctatgggagaaaaaaatgaaataaattctgagcagataactaacatgttataatgccatagcctttccatcttccttgtgttttttatcttgttttcacgtcatttgctgtaaatatttttagagttcactatgtgtcagktactattgtatgacttgtgtaactaaatgaacaaacatataaacaatgtaatttcaagcacaataaataacagaaggaccgatggtgtatgacgaaggtaaat

SEQ ID NO: 375339 - DNA, 607 bp, Homo sapiens
tacaatactgcactgtcaatttaaagacttattttaaaagaagataattctgaattatatttttgtctctatgctgtgacagcctaaactgagtatgttctttgcttttcattctaaaaattagacctatgccagttcatccaaggagagaagaatgggaatgggaactatcacagggagtttaggactatattatagtctaaattaaatacccaatttacctgtaacgtgagccatggttttctagctgcacagatatataattcagctaaagcagaagctaattgccctgctctgttcctggaatgctaaaggaagaacattcagcgctacatcaggcaatactcccataaagctaatagatttagcagaattgaaaggtaacatgacccctggaattgaaagacttgctggcaaggtagaaataccgtaaccctgggatttctcagtcttggtttcatagccagctcataggagtttggagctgcagtggaccacctggtcagacacagcttttccagartacgaatccaggactcataagctttatcattcagtcaggctcacggagtagtctgtgggactacagataactgagtaaaaggag

SEQ ID NO: 375340 - DNA, 570 bp, Homo sapiens
atgtgggtttaggttatttggcaactgagaacataactaataatttcaattatttaaaaaaatggaactatattttatgaccaaacatctgagactttgctggtaaatattggagtgcctgatttaacaagrtggattatttgaatctgcttctctaatgacaacttctagatgacaatttgtttttcttaaaaagcctttgtgttattcatacagatatataaaatttttggctatgcttatgatatttcttgtgataaatatttgacattagagcagctaattattatgatatgcctataagtaaatatatacatatacacatatattttgtcatcatgtgtaaaggaagaggatattagtaataaaataagtgtgctataataaaatattagcataataatagaatacagacattagatatggttaaaattactaacgatcattctctaattttttaaagttttaaatgtattactaactgtgccttaattaggatacataaactgcaggtagcttaatattgaaatgcagaaataaatgcacgtacatatacacacatacacatga

SEQ ID NO: 375341 - DNA, 525 bp, Homo sapiens
acaagcctgggcaacaaagcaagacctcgtctctaaaaagaaaaaaattaaagtaaaaaagttaaaaaaagacgcaatgggctgacaccttgacttaaatstggtgagattctgactggaggactcaactaagctgcacctgactcttaaccctgagaagctgtgagatagcgattttgtgttgtttgaagctattttgtggtaatttgttatgtagcaatagaaaacaccatggtcatctgaatacatttcccagtatttctcctggatagacatagagaagtggatttgctggagttcaaatatatgcacttttaaatttttaataagtatcttcaaattgttccataaaatgttgtatcaatttgaatacccatgaggacaaaagtaagtatctattttcccaaacccttacaggctgattattataagttttaaaagttttgtcaatctgatgggtaaaaatgatttctcatttttgtttaaatttttgcttccttcaatattattgaatgtgagtttctt

SEQ ID NO: 375342 - DNA, 525 bp, Homo sapiens
acaagcctgggcaacaaagcaagacctcgtctctaaaaagaaaaaaattaaagtaaaaaagttaaaaaaagacgcaatgggctgacaccttgacttaaatgtggtgagattctgactggaggactcaactaagctgcacctgactcttaaycctgagaagctgtgagatagcgattttgtgttgtttgaagctattttgtggtaatttgttatgtagcaatagaaaacaccatggtcatctgaatacatttcccagtatttctcctggatagacatagagaagtggatttgctggagttcaaatatatgcacttttaaatttttaataagtatcttcaaattgttccataaaatgttgtatcaatttgaatacccatgaggacaaaagtaagtatctattttcccaaacccttacaggctgattattataagttttaaaagttttgtcaatctgatgggtaaaaatgatttctcatttttgtttaaatttttgcttccttcaatattattgaatgtgagtttctt

SEQ ID NO: 375343 - DNA, 525 bp, Homo sapiens
acaagcctgggcaacaaagcaagacctcgtctctaaaaagaaaaaaattaaagtaaaaaagttaaaaaaagacgcaatgggctgacaccttgacttaaatgtggtgagattctgactggaggactcaactaagctgcacctgactcttaaccctgagaagctgtgagayagcgattttgtgttgtttgaagctattttgtggtaatttgttatgtagcaatagaaaacaccatggtcatctgaatacatttcccagtatttctcctggatagacatagagaagtggatttgctggagttcaaatatatgcacttttaaatttttaataagtatcttcaaattgttccataaaatgttgtatcaatttgaatacccatgaggacaaaagtaagtatctattttcccaaacccttacaggctgattattataagttttaaaagttttgtcaatctgatgggtaaaaatgatttctcatttttgtttaaatttttgcttccttcaatattattgaatgtgagtttctt

SEQ ID NO: 375344 - DNA, 575 bp, Homo sapiens
cagtatttcataaggatgtaggttctagggtcaacatggcatccacctcgccagctgtgtgacatgtgggtcaagttgcttacctctctagtttcagttttcccatctataaaatgggagccaatacgatactcactttatggggtagttataaggcttatgcaagtgatataagttaagggcctagaccagaaccaggcccagagtaagcaccaatatgtgattactatcgttatttttattttttatttatttatttttgagacagagtctcacactgctgcccaggctggagtgcagtggctcactgcaacctctccttcccgggttcaagtgattctcctgcctcagcctactgagcagctgggattacaggcaggcaccaccacwcctggctaagttttgtatttttagtagagacagggtttcaccatgttggccaggctggtctcgaactcctgacctcaggtgatccatgcaccttgccctcccaaactgctggggttacagacgtgagccaccatgcccagccactatcattattttattgtctttgcaatttactttcttactgc

SEQ ID NO: 375345 - DNA, 553 bp, Homo sapiens
aacaagccccagcctatgtacatactatgattgctaacacctacctgctgayctcccctttgatgaaccctgtcatctacagtgtgaaaaccaaacagatacgtagagctgtgataaaaattctccattccaaagaaacataaaattgtagaattctagcactagatggacccctcaagatggtatacttcaggtcatgtttccaattaaaaacaaaaaacaaccaaagaactggtgcccattgaagctaagcacataatcatttaaagttaaagctggaatgtatctagaacatcagctagtttgactactttattttccagatgaggaggtgaagacatgggatggaagagatgaacagcctaaaattagccttatatataaaatttctccttctcacaccactgttgggtccaaactgttgttgccttctgtccctgccaacaccctttctgttattatctcatctacttcatagcctttagaatgacacattacagaaaagtcactcctttgtgagaaataggtagtattttccaactgttctagtaat

SEQ ID NO: 375346 - DNA, 553 bp, Homo sapiens
aacaagccccagcctatgtacatactatgattgctaacacctacctgctgatctcccctttgatgaaccctgtcatctacagtgtgaaaaccaaacagatacgtagagctgtgataaaaattctccattccaaagaaacataaaattgtagaattctagcactagatggacccctcaagatggtatacttcaggtcatgtttccaattaaaaacaaaaaacaaccaaagaactggtgcccattgaagctaagcacataatcatttaaagtyaaagctggaatgtatctagaacatcagctagtttgactactttattttccagatgaggaggtgaagacatgggatggaagagatgaacagcctaaaattagccttatatataaaatttctccttctcacaccactgttgggtccaaactgttgttgccttctgtccctgccaacaccctttctgttattatctcatctacttcatagcctttagaatgacacattacagaaaagtcactcctttgtgagaaataggtagtattttccaactgttctagtaat

SEQ ID NO: 375347 - DNA, 531 bp, Homo sapiens
taagaattatgtcaaatcctcagcctgtttgacaacaacatttcagtttcaattattgttactcttcatctttatatgttgcaatgtcctgggactttgttctcagacctttttgctttgtcataatcccttccttggtcatcccatccagtatcatgtctttaagtaccatctctatgctgacaaartccaaattaatatttgtagttcagacttatcccactgcctgtgtatcaatatcactacttgaatgtttcataatcatcttagaatcaacgtctaatatatactaatatccccatcaaggaaaaagcatgctcacccacagtcttctctaactcagtaactctaccttccaatgtgttgagacaaagcacttggagttatccctgatgcctttctatcaccccgatgctacatctaaccttttagtaaatcctggtgaccctttcttctagatctctctgatattgatgtctaaaatcaagtcaatttataccatctctactgctaccactgtgatgcaagcca

SEQ ID NO: 375348 - DNA, 600 bp, Homo sapiens
gatgcaagccatcatcttggacctgaattattataacagctttctggtggtccttccttcatccacgtttgctttacagtctatttccccccacagtgaagttagactgattagtttaatgcacaaggcagatcaagttcaatataccccaagggcatcctgtcttacccaggaaaaattcacagtcactataaaagcatataaatatctatatgatctatatttcctccatcagcccaatatcatcttctactactctgccagtgattcactctatgtcacccacactagcttccaaatattttcttaaactcatcaagcatgcttcaacatcagagttcacacatgctattctcacaacctggaatgytcgtcctccagagacccacgtgacttacacctcactttagacagatctctgctcaagtgcaccccattacagggcccttgatgttataataataacaacaacaacacctctccctcaattcctcctgaattcactctcatctttatctgccttatttttaatttttagcatttttataccccagtatatcacatatatgttatttattttctagtttcattactacaaca

SEQ ID NO: 375349 - DNA, 530 bp, Homo sapiens
agggagaagcccttgtgtcccatccacagctttatgggctgggaagaaatgtcccagagtcttagctaacaatcaggaaaggcaagtgagaatgaatgcaacagtcacattcggacccaaagagaaactgaaattgggtttagcagggagtctactttagkcaggatgccaggcaacatgggaaggtgacgtgaggtctttcaggacaggtattttgggaaatgagatgatagcctaaagtcctatactcgagtaagcatgtgcaggtaccagcaaggcagaaaatatgctttgcagagagagggcttaagaaagtacccagctctgggtccaataaagactcttgttatctgtcagcactgcatgtggtagcatgggcaaaaggcattaagaaagtaaatatacgtccctgtgttccccttgctctccctccatgcctgctcttttcttcaccctgggtcccatttctctggaacacagtggtctagtgatctgacctctcttcagggaaggttccttagttctgtccc

SEQ ID NO: 375350 - DNA, 624 bp, Homo sapiens
ttctgacccctgtctccagtatgagtgtcctgcacccatcttcctctgtcctatcactctttctttcgtgcccttatcttcaactgaaattttatttgtttacttctcattattggcctcgtgttatatgagcwccataaaagccatcatcttgtctgatttatctactgtttcatctccagtttttgacactcaatatgtttttgttgtctaaccgaatgctgctgtgccccaccccattaactgcctgtgtcactgccccattacctgcctgcagcaggtcccgccactgccatggcttaaatgtcacctcctcagggaagcccttggaacctaaaaagcttgctgagctattgttgtctttgcttctgaggcccttttgcttccccttgtcccagaatttatcataatgtgctgtgatggctgcatatttgtctcaatttctccccatccttggaaggctggaacgatatctctggtactcagtggagtctggcacagaagtccgtcaatgattattgaaaaaatgagtacactgatcaaaatcccactttgggcatttcccttgccttacatttgcttgcagccagaatagctctacagggaactggtaactaggtgcag

SEQ ID NO: 375351 - DNA, 624 bp, Homo sapiens
ttctgacccctgtctccagtatgagtgtcctgcacccatcttcctctgtcctatcactctttctttcgtgcccttatcttcaactgaaattttatttgtttacttctcattattggcctcgtgttatatgagctccataaaagccatcatcttgtctgatttatctactgtttcatctccagtttttgacactcaatatgtttttgttgtctaaccgaatgctgctgtgccccrccccattaactgcctgtgtcactgccccattacctgcctgcagcaggtcccgccactgccatggcttaaatgtcacctcctcagggaagcccttggaacctaaaaagcttgctgagctattgttgtctttgcttctgaggcccttttgcttccccttgtcccagaatttatcataatgtgctgtgatggctgcatatttgtctcaatttctccccatccttggaaggctggaacgatatctctggtactcagtggagtctggcacagaagtccgtcaatgattattgaaaaaatgagtacactgatcaaaatcccactttgggcatttcccttgccttacatttgcttgcagccagaatagctctacagggaactggtaactaggtgcag

SEQ ID NO: 375352 - DNA, 624 bp, Homo sapiens
ttctgacccctgtctccagtatgagtgtcctgcacccatcttcctctgtcctatcactctttctttcgtgcccttatcttcaactgaaattttatttgtttacttctcattattggcctcgtgttatatgagctccataaaagccatcatcttgtctgatttatctactgtttcatctccagtttttgacactcaatatgtttttgttgtctaaccgaatgctgctgtgccccaccccattaactgcctgtgtcrctgccccattacctgcctgcagcaggtcccgccactgccatggcttaaatgtcacctcctcagggaagcccttggaacctaaaaagcttgctgagctattgttgtctttgcttctgaggcccttttgcttccccttgtcccagaatttatcataatgtgctgtgatggctgcatatttgtctcaatttctccccatccttggaaggctggaacgatatctctggtactcagtggagtctggcacagaagtccgtcaatgattattgaaaaaatgagtacactgatcaaaatcccactttgggcatttcccttgccttacatttgcttgcagccagaatagctctacagggaactggtaactaggtgcag

SEQ ID NO: 375353 - DNA, 521 bp, Homo sapiens
tcatattataaaaacaacaaaatcagggttaaaggtgacctcattgttctcttgggtcagaagagatagggctaataggctaatggtacacctttggagtaccatctcactaagttctaattactaacagctgctcaagctggaaggccatctggaagtcttctgtccctctgcctgtcttgtggagggactatggaacattgggatgcttcagggctggccagtctgaagggtggcacttgggccctctggctggcttcctctccatcccttcatttctctcctgctgtctggtttatctctctgactgctttttcacgggtctatgagaaggagttctagggaagaatgtgaggatgggctggtgaggggggctgggctggcattaggagacagagttctgaagcccgggggaaggaagggagaggactgaaggcctccacgtggatttccagtctttacagctgggagctcctgttcycctattcctgagaaaaggttaagatgtccttcatagttcc

SEQ ID NO: 375354 - DNA, 549 bp, Homo sapiens
cccttatgtcaggcagccactggcctctagatgtgcatcatgggggcacagtgtaaccttcctgggtgaggtgcctcccatttgaccaaggacaatcctctggaaagaaggggagctgtgagcccttagcactcaatgctcagtgcagatgggagatggttacattggctttgtgaatggggtctggctgggatacsaacggtatccactagagccatcattctttatttgaaataaactgagtagtctggacaagtgtaaagctttgggtggtcatttggacaagaaggtaatgtagagttagagttcaggattaatttagtgtcagttttttattggattacggtttatcataataaaatagaatatgaattgtgacttgaatatcatcaattcgatctttaagattgaaatggttattaaaaggtcaaatattaagttatgttaaagttagggttaagtctagaattggggagatcattagattaatgctggggttaggtttcagtattaatctgttactactagtgttgttacacttggactgga

SEQ ID NO: 375355 - DNA, 597 bp, Homo sapiens
tattttcttctttgttttcttgctacatataattattaataccctgactaggttgtggttggagggttattacttttcattttaccatgcagtccaaatctaaactgcttctactgatggtttacagcattctgagataagaatggtacatctagagaacatttgccaaaggcctaagcacrgcaaaggaaaataaacacagaatataataaaatgagataatctagcttaaaactataacttcctcttcagaactcccaaccacattggatctcagaaaaatgctgtcttcaaaatgacttctacagagaagaaataatttttcctctggacactagcacttaaggggaagattggaagtaaagccttgaaaagagtacatttacctacgttaatgaaagttgacacactgttctgagagttttcacagcatatggaccctgtttttcctatttaattttcttatcaaccctttaattaggcaaagatattattagtaccctcattgtagccatgggaaaattgatgttcagtggggatcagtgaattaaatggggtcatacaagtataaaaattaaaaaaaaaagacttcatgcc

SEQ ID NO: 375356 - DNA, 597 bp, Homo sapiens
tattttcttctttgttttcttgctacatataattattaataccctgactaggttgtggttggagggttattacttttcattttaccatgcagtccaaatctaaactgcttctactgatggtttacagcattctgagataagaatggtacatctagagaacatttgccaaaggcctaagcacggcaaaggaaaataaacacagaatataataaaatgagataatctagcttaaaactataacttcctcttcagaactcccaaccacattggatctcagaaaaatrctgtcttcaaaatgacttctacagagaagaaataatttttcctctggacactagcacttaaggggaagattggaagtaaagccttgaaaagagtacatttacctacgttaatgaaagttgacacactgttctgagagttttcacagcatatggaccctgtttttcctatttaattttcttatcaaccctttaattaggcaaagatattattagtaccctcattgtagccatgggaaaattgatgttcagtggggatcagtgaattaaatggggtcatacaagtataaaaattaaaaaaaaaagacttcatgcc

SEQ ID NO: 375357 - DNA, 572 bp, Homo sapiens
ttttatgttccctgtcatataaatcactctgttggccatgtcaaaaatttagaaatcatcatccctgcctyctccccatctctctctcaccttcctctccaaccacatccaatcagtcaccaagttctgttcattttatctactagatatctattttgtgagtctgattatctttctccatcttttttgccttttcttcattccaagccaagacagtcttttgcctagatcatcagaataacttgttcactggtcagactcacagaagaacttccctaccaatctgttgtctatgctgtggccagtgtgatcttccaaacacatatcagttcatggcaattctccattgcctttagaatgaacagttgaattccccattgcctgtagaatgaacacactcctgaacccaactcataggaactccataagccatctcagtgcaactctccatctccatctccaaccattttacctccctttttgcatacataagtcctattggacccgaaatatttccacatcttcaatgtgccatgctctctctcacccttcagccttcacatatatttttc

SEQ ID NO: 375358 - DNA, 244 bp, Homo sapiens
aagtatggaaaagaacttgtggatctatggtcccatgaaaaaagcaagataacagtgtgaggatcaattctagtctagaattgaggtcataagggatcctgaacaaactaagagtaatctcaaggaccaaaacatccaggaacccaagaaaacacttaggaacytaagaaagtatgtagtaagagggaccgtgtatacctataaggacaaagtaagaatcgagttgcaagctttgttttgtttt

SEQ ID NO: 375359 - DNA, 418 bp, Homo sapiens
taagcagcttccctctgatggggaatattttgagttggcaggaaagtagcccacaaccttccctatcaataatggtaaggccagttcttaagaggagattgtgcccgacttataagtgaagcttgagccaaccagagggtttcccctccccccccaaaaaaaagacaacaaaaaagccacacagagaaaaaaaaaaaaaaaacaaacacggagtttcacccttgttgcccaggctggagtgcaacggcacaatctctgctgaccgcagcctcttcccccaaggttcgagcgattttcctggctcagcttcccaagtagctgggattacaaggcatgcgccaccgtgytcgactaattttgtatttttagccgagatgggttttctccatgttggatcaggctggcactcgagctcccg

SEQ ID NO: 375360 - DNA, 581 bp, Homo sapiens
aatagtatgtatatcttgatttgttcctacataggtgtgttcatgtgttcacattgtaattattcatctaactgaacatttgagatttgtgcattttccagcatgtccataatrgctcaaaaacaaaaccagaaagtgaaggaacaggcagttgtgtgagatgttttggtaaaacaggaagaaaaagagtcactggcaacagatccttgatggagatgacatttgatcttagccaagaaattttcagtagcaatacattgagtaaaataaatattttaaaaagaaacagccaacaaaatcaaatatcctgttctttgaaaagattactaacaattaaatctctagcagtgctaattaagaagaaaagtaaatgaagaattaaaaaaaaacccaccactctcgaaggcatgaaaggtatgcccagttagtttccagggctggtgagaggagggatgaggcaagcatcagctgaggctgcctcctgaagaaaggtgaatttacacagggcagccagggtaggaatatcctggatcagaggtgagtggggaagaggctgtttggatcctcaagctttctgcagc

SEQ ID NO: 375361 - DNA, 581 bp, Homo sapiens
aatagtatgtatatcttgatttgttcctacataggtgtgttcatgtgttcacattgtaattattcatctaactgaacatttgagatttgtgcattttccagcatgtccataatggctcaaaaacaaaaccagaaagtgaaggaacaggcagttgtgtgagatgttttggtaaaacaggaagaaaaagagtcactggcaacagatccttgatggagatgacatttgatcttagccaagaaattttcagtagcaatacattgagtaaaataaatattttaaaaagaaacagccaacaraatcaaatatcctgttctttgaaaagattactaacaattaaatctctagcagtgctaattaagaagaaaagtaaatgaagaattaaaaaaaaacccaccactctcgaaggcatgaaaggtatgcccagttagtttccagggctggtgagaggagggatgaggcaagcatcagctgaggctgcctcctgaagaaaggtgaatttacacagggcagccagggtaggaatatcctggatcagaggtgagtggggaagaggctgtttggatcctcaagctttctgcagc

SEQ ID NO: 375362 - DNA, 580 bp, Homo sapiens
atagtatgtatatcttgatttgttcctacataggtgtgttcatgtgttcacattgtaattattcatctaactgaacatttgagatttgtgcattttccagcatgtccataatggctcaaaaacaaaaccagaaagtgaaggaacaggcagttgtgtgagatgttttggtaaaacaggaagaaaaagagtcactggcaacagatccttgatggagatgacatttgatcttagccaagaaattttcagtagcaatacattgagtaaaataaatattttaaaaagaaacagccaacaaaatcaaatatcctgttctttgaaaagattactaacaattaaatctctagcagtgctaattaagaagaaaagtaaatgaagaattaaaaaaaaamccaccactctcgaaggcatgaaaggtatgcccagttagtttccagggctggtgagaggagggatgaggcaagcatcagctgaggctgcctcctgaagaaaggtgaatttacacagggcagccagggtaggaatatcctggatcagaggtgagtggggaagaggctgtttggatcctcaagctttctgcagc

SEQ ID NO: 375363 - DNA, 392 bp, Homo sapiens
ttaggaaacaccatcatcgtgactgcaatctggatggattccactcggcatgagcccatgtattgctttctgtgtgttctggctgctgtggacattgttatggcctcctcggtggtacccaagatggtgagcatcttctgctcaggagacagctcaatcagctttagtgcttgtttcactcagatgttttttgtccacttagccacagctgtggagacggggctgctgctgaccatggcttttgaccgctatgtagccatctgcaagcctctacactacaagagaattctcaygcctcaagtgatgctgggaatgagtatggccatcaccatcagagctatcatagccataactccactgagttggatggtgagtcatctacctttctgtgg

SEQ ID NO: 375364 - DNA, 535 bp, Homo sapiens
actgtgttgtatggaatggatgtttgtcttatattacaaatggagaaatacactcagattatgaatactacacttttaacatagtactggcacatactgtgttaataataaagtgcttaactttctaaaggataaagctttcttgtttggaacatcttggttatcaggaagagggagttagttgtattaaagaaccataacaacttattggggagggggggtcatctataaggtaaccctaagattttccttgtagtaatttaatctattaactgaaccaaagtgaataggatccagggtaaatttagagaaggtaaggattatatttatttatagataatttataatcacctgtaaaatgtgataatgttattctctaatggttttattttactgaacttactaacgtayttcatgaatcacaagaatgctgaatttatgttttgtctatgcaatatgctgagcatataaaatgtgatgtttgttttcaagaagttctggtttcaacatttagtaacagcacacacagataaga

SEQ ID NO: 375365 - DNA, 612 bp, Homo sapiens
tgtcagtctctgcacccaggtttaggagtgagatcctagttgactatgctcaatggagccagtagtggtagttccatcagagtggacctatggggtaatttgatgatgttcctgcatacatcatcaatggactaccaaatgttctttaataagtcctttttatgcttaaaataggtttctggcattttcaactcttgtttttagtaggcattttgattgactggctcttctctcagttgtctgctattcacgtggcaatgagttaggccaaatccctacaaacacattttacactctgataagaagactatataatttagtattttccactatagagaatatgccttctcttccagtaccttctgaacaattatataatgcaattatatagttggccacaaaacagtttcccaaatgataagttataatggcattttttaaactcttattgcattgtggttataaaatgctaacaaacctaaataaattatatatakagagagagaatttcaatttaattaagtaatttcaagagaaaagcaaatttgaaactgtgcttaataatttttttaataacaaatgataacgaaagcaccaagatgatttatggta

SEQ ID NO: 375366 - DNA, 516 bp, Homo sapiens
ttttgcctcacatatcttgatctattgtgggttcatacacattaaaaatttgtcttttcatagacttgacctcattatcatacattcctttttatgcctgatatttatttctctggagtttgctttgacttgagttaatatagctattccagattgattcttttaattttttaatttttaatttttgtgagtacatagtagggtacatattttaataaggtaaataagatgttttaatacagacatgcaatacgtaatacatcatggagaatggggtatccaatscctcaagcatttatcctttgtgttaaacaattcaattagttactttaaaatgtactattattgttaactagtcaccctgttgtgctattaaataatgtattttattcatcctattttttttacccattcgccatccccaccttcatcctacccctgctgtaaccttcccaatcccacagataattaagaacatacaatatctgtctttctgtgcctgtcctctttcaccat

SEQ ID NO: 375367 - DNA, 516 bp, Homo sapiens
ttttgcctcacatatcttgatctattgtgggttcatacacattaaaaatttgtcttttcatagacttgacctcattatcatacattcctttttatgcctgatatttatttctctggagtttgctttgacttgagttaatatagctattccagattgattcttttaattttttaatttttaatttttgtgagtacatagtagggtacatattttaataaggtaaataagatgttttaatacagacatgcaatacgtaatacatcatggagaatggggtatccaatgcctcaagcatttatcctttgtgttaaacaattcaattagttactttaaaatgtactattattgttaactagtcaccctgttgtgctattaaataatrtattttattcatcctattttttttacccattcgccatccccaccttcatcctacccctgctgtaaccttcccaatcccacagataattaagaacatacaatatctgtctttctgtgcctgtcctctttcaccat

SEQ ID NO: 375368 - DNA, 516 bp, Homo sapiens
ttttgcctcacatatcttgatctattgtgggttcatacacattaaaaatttgtcttttcatagacttgacctcattatcatacattcctttttatgcctgatatttatttctctggagtttgctttgacttgagttaatatagctattccagattgattcttttaattttttaatttttaatttttgtgagtacatagtagggtacatattttaataaggtaaataagatgttttaatacagacatgcaatacgtaatacatcatggagaatggggtatccaatgcctcaagcatttatcctttgtgttaaacaattcaattagttactttaaaatgtactattattgttaactagtcaccctgttgtgctattaaataatgtattttattcatcctattttttttacccattcgccatccccaccttcatcctacccctgctgtaaccttcccaatcccacagataattaagaacatacaatatytgtctttctgtgcctgtcctctttcaccat

SEQ ID NO: 375369 - DNA, 568 bp, Homo sapiens
gcacgacaggacacattaataaacttgttttcttgataaatctgttcactgttacaggagtctgtcccaaccatgaccttaccagggttgagaaattttcttctccagtgaaacatagcttcctactcagactgcaacctctatgccttgagtcctattgaataactttggctaaaagcttagsgttttacaagtagattcatttacctcaaaaaaaaaaaaaaaaagtcagtattcgtctgtaatacagaatccattacacaaatgccacaaacatggacgaatcttagaagggcctattagaatcaaagttgaacatacagggttaagagcagcttttaaagactgagttctaagcatccccaaaactttctaggtgtgaggtttgtggcaaactagcgtaactgctagctcctttttaccaaggtcagtctgagaagtaccacctgtacaaaaacacaaattagacttcgaagaaggctgggctgaagagtaatggtaagtttttgaggtgtagccttggccagaaacaggagatattcaagcacagctatgggaagatgcaata

SEQ ID NO: 375370 - DNA, 568 bp, Homo sapiens
gcacgacaggacacattaataaacttgttttcttgataaatctgttcactgttacaggagtctgtcccaaccatgaccttaccagggttgagaaattttcttctccagtgaaacatagcttcctactcagactgcaacctctatgccttgagtcctattgaataactttggctaaaagcttagcgttttacaagtagattcatttacctcaaaaaaaaaaaaaaaaagtcagtattcgtctgtaatacagaatccattacacaaatgccacaaacatggacgaatcttagaagggcctattagaatcaaagttgaacatacagggttaagagcagcttttaaagactgagttctaagcatccccaaaactttctaggtgtgaggtttgtggcaaactagcrtaactgctagctcctttttaccaaggtcagtctgagaagtaccacctgtacaaaaacacaaattagacttcgaagaaggctgggctgaagagtaatggtaagtttttgaggtgtagccttggccagaaacaggagatattcaagcacagctatgggaagatgcaata

SEQ ID NO: 375371 - DNA, 567 bp, Homo sapiens
gctaacatttggttgaatttgaggtactttttctctaggatctttgtgttttgagtgctatactggtgaactatatggggatatgagagtcattaactgcaaccttgaaaccattttaagtgtcactttttgtatcccttctgttacataacactgtttactgtcttgtccagagaaagggaagtttcaaaggyttctatctggctttccccactgataccacttgcctcataggccaaagttataagtagacatatctattctgagtatacatttggggaaaatgatcaccaggtgcattccagaatcaggatcagctatgagctggctattcattatactccactgtgaactaaaatctattacctggcctcctattcccccactgactagggagccataatgaattttgggttgctggttatcagtgttctctaaagcttatgtcaaacattctccaaatggttggttattcttttttccagtgtaaaactacctgaacgaatagccatagatccccctaggggaaggagtaggggaatcactatcaaactagtagcaagctgt

SEQ ID NO: 375372 - DNA, 624 bp, Homo sapiens
caaatcaatgactgcagtatggtgattattaaatcagatgctgattcaggtgttactgtgctgtggcagagataccatatctggcagagcagcttaattggggctaacatttggttgaatttgaggtactttttctctaggatctttgtgttttgagtgctatactggtgaactatatggggatatgagagtcattaactgcaaccttgaaaccattttaagtgtcactttttgtatcccttctgttacataacactgtttactgtcttgtccagagaaagggaagtttcaaaggcttctatctggctttccccactgataccacttgcctcataggccaaagttataagtagacatayctattctgagtatacatttggggaaaatgatcaccaggtgcattccagaatcaggatcagctatgagctggctattcattatactccactgtgaactaaaatctattacctggcctcctattcccccactgactagggagccataatgaattttgggttgctggttatcagtgttctctaaagcttatgtcaaacattctccaaatggttggttattcttttttccagtgtaaaactacctgaacgaatagccatagatccccct

SEQ ID NO: 375373 - DNA, 561 bp, Homo sapiens
ctgggactcgctcttcagggcagtgggctcccctctggcccaggacaggtccagaaatgtcatctccatcaagtcctgaaattggggaccccaagagcctactttgtactctaccccctcccaccatgtctgagctggcacgctttactttaccttctgcttttctcaaatgggagttttgccccatagctaccacagctggtaatgggctgagtcttacctgaaggcagcatgtctgaggttcaaagtcccttgacatagtacctgggtattgctgctgtttattcagggcccaagggatcttcagttagcaggtgataaatgctrccaggactggttcctttaaggtagcatgttcccttctggccgagggtgtatctaaaaatgtcatccaggagctaaggccttatgactctgaccagtaccctattctactgtggctgagctggtatccaaaatgcaaaacagtcctccccacccttttttctttcctctccaaacagaaagaagtggtctgttgtcgctgtgagctgtgcagcctgggagagaggagtgatgcaa

SEQ ID NO: 375374 - DNA, 594 bp, Homo sapiens
cggtgatccttgaggtggcactttatcagggtgaatgtgtgagtctggatacgttgaggttcctctccatcctctcttttgtcaacacttactgtcagccacccagcaccctttcttttcctctgaagaagttaccctgcaactggctctctctcattgattgagccctctgcagccacaaccctaatctctgtttttccctagacccccgtcttcaactcaaccatacccatctatctacctttctgcaattctcyactctatgaaaaaagaaatgtgatgtttgcaataaagttatatttttccctccgaaacaaaacagtaacattcaattaggtatctcctaagaagtatgtcttaacaaaatagagagattctgttctggagaactagtcttccagcagactgaagagagaactgtgttggaacgtggcagcacattatatcaggtgggggcagcctcctgtcttcctaagcctggtgggaggtctgtgttctaaccatctcttccaaatatgatgccgggtatcatattgtaagggtttctttaatggttagatgctgaagccatttatttgtcacttcctatgtgtt

SEQ ID NO: 375375 - DNA, 561 bp, Homo sapiens
ctgggactcgctcttcagggcagtgggctcccctctggcccaggacaggtccagaaatgtcatctccatcaagtcctgaaattggggaccccaagagcctactttgtactctaccccctcccaccatgtctgagctggcacgctttactttaccttctgcttttctcaaatgggagttttgccccatagctaccacagctggtaatgggctgagtcttacctgaaggcagcatgtctgaggttcaaagtcccttgacatagtacctgggtattgctgctgtttattcagggcccaagggatcttcagttagcaggtgataaatgctgccaggactggttcctttaaggtagcatgttcccttctggccgagggtgtatctaaaaatgtcatccaggagctaaggccttatgactctgaccagtaccctattctactgtggctgagctggtatccaaaatgcaaaacagtcctccccacccttttttctttcctctccaaacagaaagaagtggyctgttgtcgctgtgagctgtgcagcctgggagagaggagtgatgcaa

SEQ ID NO: 375376 - DNA, 632 bp, Homo sapiens
aacactaagcattagttctttattctgttgagactaacatgcaaagccaaaaatgttcaaacttcaaaagactctggaatgtctatctccaggaagctgtggtgcttgggagggtgactgctgtaagtctgacattatcccataaaacctctccataagctgggctcaccttcagattctcaaagattatgacaagtagacataatgttggcaataactgcaaaatagggaaaataaaaaggctgagtcattggggctgggaaggaaaggagtacacaggaagtggcctgtgaagtcatcaggtagaatggagtgatggatttagttggaaggaggtggcttggcttccttaacctatattctggttgttcttcayttgcactctccatttgcatagatccctgttctatgtctcagatgctatattttactcatgggctgtatcacccagattcccttgtcctctattttccaggtgggctcagtcaatgtgaggcactaacaggagatatgagggtaaaaccagagattagagacctactctctagttcccttcctaccagctatgtttggcagtgtcttggtcttctaccaaaggccccagctcctgaagtgaccctttgtgttttctg

SEQ ID NO: 375377 - DNA, 632 bp, Homo sapiens
aacactaagcattagttctttattctgttgagactaacatgcaaagccaaaaatgttcaaacttcaaaagactctggaatgtctatctccaggaagctgtggtgcttgggagggtgactgctgtaagtctgacattatcccataaaacctctccataagctgggctcaccttcagattctcaaagattatgacaagtagacataatgttggcaataactgcaaaatagggaaaataaaaaggctgagtcattggggctgggaaggaaaggagtacacaggaagtggcctgtgaagtcatcaggtagaatggagtgatggatttagttggaaggaggtggcttggcttccttaacctatattctggttgttcttcacttgcactctccatttgcatagatccctgttctatgtctcagatgctatattttactcatgggctgtatcacccagattcccttgtcctctattttccaggtgggctcagtcaatgtgaggcactaacaggagatatgagggtaaaaccagagattagagacctactctctasttcccttcctaccagctatgtttggcagtgtcttggtcttctaccaaaggccccagctcctgaagtgaccctttgtgttttctg

SEQ ID NO: 375378 - DNA, 571 bp, Homo sapiens
ccactactcttccctgccattccttcgctgctcaattcttctcactttccactattgccattgcaaatcttggtggcttacctaatagggtggccccaatcctttaytcttgaggggactgacacgttaatcatacccttatctggggaatgatccacatgtatgcccatagtcacaatgggtcaaggaagcaccagaaaatgtccaaatggatcatctggcttcacatattttacatatctcttccttcatacattgtataaaggcaaccctctcttcccgctaatcaagatcaattacttttgccagtatggcaacttctcctcacctgttggtcccaggtcatagtagtccaaggtatcctgatggcagctgtaagttgtagctcaatgggaccttgcccatagtgaacccgttttgggaatcagaatctccaaccctgcagagccaagacttccagagatgggaagtaagtctcctagtggactattagaaatgactacataaggatattcctgtttttacccccttggcttctggtatatggtatttctcctattggagactcagc

SEQ ID NO: 375379 - DNA, 571 bp, Homo sapiens
ccactactcttccctgccattccttcgctgctcaattcttctcactttccactattgccattgcaaatcttggtggcttacctaatagggtggccccaatcctttattcttgagkggactgacacgttaatcatacccttatctggggaatgatccacatgtatgcccatagtcacaatgggtcaaggaagcaccagaaaatgtccaaatggatcatctggcttcacatattttacatatctcttccttcatacattgtataaaggcaaccctctcttcccgctaatcaagatcaattacttttgccagtatggcaacttctcctcacctgttggtcccaggtcatagtagtccaaggtatcctgatggcagctgtaagttgtagctcaatgggaccttgcccatagtgaacccgttttgggaatcagaatctccaaccctgcagagccaagacttccagagatgggaagtaagtctcctagtggactattagaaatgactacataaggatattcctgtttttacccccttggcttctggtatatggtatttctcctattggagactcagc

SEQ ID NO: 375380 - DNA, 571 bp, Homo sapiens
ccactactcttccctgccattccttcgctgctcaattcttctcactttccactattgccattgcaaatcttggtggcttacctaatagggtggccccaatcctttattcttgaggggactgacacgttaatcatacccttatctggggaatgatccacatgtatgcccatagtcacaatgggtcaaggaagcaccagaaaatgtccaaatggatcatctggcttcacatattttacatatctcttccttcatacattgtataaaggcaaccctctcttsccgctaatcaagatcaattacttttgccagtatggcaacttctcctcacctgttggtcccaggtcatagtagtccaaggtatcctgatggcagctgtaagttgtagctcaatgggaccttgcccatagtgaacccgttttgggaatcagaatctccaaccctgcagagccaagacttccagagatgggaagtaagtctcctagtggactattagaaatgactacataaggatattcctgtttttacccccttggcttctggtatatggtatttctcctattggagactcagc

SEQ ID NO: 375381 - DNA, 630 bp, Homo sapiens
atggcagctgtaagttgtagctcaatgggaccttgcccatagtgaacccgttttgggaatcagaatctccaaccctgcagagccaagacttccagagatgggaagtaagtctcctagtggactattagaaatgactacataaggatattcctgtttttacccccttggcttctggtatatggtatttctcctattggagactcagcaccatattgatctaattaaacacacataatgtattctgaaggctaacattctgcttccgtgaagtgttttctgagatgctgctttagttgggttcttagaaggtagcctcaatattctgaggccagctgcttctggtagtcgagataatgtcatactactaataaaatcccatggtcagcagccctattctatcctgcatatcctttgctgtgaaacatgtctactcctttgatcttgtgccatgtggggtcccttgcctatagacaagggattttggaaggcttcaaagcagtactaatagccaaggctctgtggacaagaaaggcaaaaacccatgcccaaaacaaacataaytggaagtagaaaccactggcccttccagaataaagaggctcaatgtagttctgaactgccactgagtgg

SEQ ID NO: 375382 - DNA, 629 bp, Homo sapiens
gtcatgttgctgctcaaaaacttttggattttgaccctttttaaaaaaatttcttaattttttttttgtgggcacatagtagktgtttatatttgtggagtgcatgagatgttttaatacacgttttggatttttagatgaggaatgctcaacttgtaatagagagaatggtgaaaagtaattctgataattctgtgccctcatcatcttgtctttatgctttttctgaatatcatatagttaacaaatatttatagtactctaataaaaaaagcatcttttcagcattggatgtatcctcacaagcaaggaagggagaataaatatctcagtaatctgggattatttatttaaacagtacaaataatttatattattaaggacaaaatttacgttcaaattatctgaaaaatgttttcttcatatacctataatagatataattaaaaagaaatgctaactaacttcagtgttgctgaaagagacttgggaagttcttgctgtgatcagtctctgaactctggcatgtgcctctccattctagtgcatcctatgcagggctgccctatctcaaaagacctatttttgacataataagtgggatttgtgctgctcagaaatgtcagtgc

SEQ ID NO: 375383 - DNA, 629 bp, Homo sapiens
gtcatgttgctgctcaaaaacttttggattttgaccctttttaaaaaaatttcttaattttttttttgtgggcacatagtaggtgtttatatttgtggagtgcatgagatgttttaatacacgttttggatttttagatgaggaatgctcaacttgtaatagagagaatggtgaaaagtaattctgataattctgtgccctcatcatcttgtctttatgctttttctgaatatcatatagttaacaaatatttwtagtactctaataaaaaaagcatcttttcagcattggatgtatcctcacaagcaaggaagggagaataaatatctcagtaatctgggattatttatttaaacagtacaaataatttatattattaaggacaaaatttacgttcaaattatctgaaaaatgttttcttcatatacctataatagatataattaaaaagaaatgctaactaacttcagtgttgctgaaagagacttgggaagttcttgctgtgatcagtctctgaactctggcatgtgcctctccattctagtgcatcctatgcagggctgccctatctcaaaagacctatttttgacataataagtgggatttgtgctgctcagaaatgtcagtgc

SEQ ID NO: 375384 - DNA, 629 bp, Homo sapiens
gtcatgttgctgctcaaaaacttttggattttgaccctttttaaaaaaatttcttaattttttttttgtgggcacatagtaggtgtttatatttgtggagtgcatgagatgttttaatacacgttttggatttttagatgaggaatgctcaacttgtaatagagagaatggtgaaaagtaattctgataattctgtgccctcatcatcttgtctttatgctttttctgaatatcatatagttaacaaatatttatagtactctaataaaaaaagcatcttttcagcattggatgtatcctcacaagcaaggaagggagaataaatatctcagtratctgggattatttatttaaacagtacaaataatttatattattaaggacaaaatttacgttcaaattatctgaaaaatgttttcttcatatacctataatagatataattaaaaagaaatgctaactaacttcagtgttgctgaaagagacttgggaagttcttgctgtgatcagtctctgaactctggcatgtgcctctccattctagtgcatcctatgcagggctgccctatctcaaaagacctatttttgacataataagtgggatttgtgctgctcagaaatgtcagtgc

SEQ ID NO: 375385 - DNA, 584 bp, Homo sapiens
aggtgagaaggagcaattagggatggtgtatatcagggaacttctatccacatcaacaaagctcacggtcctaccttcacaatccaggaataatcctactgtgtctgtaggtcttggaacatattgcattacaagtggggaggtggtaaagagactgcagtgagtgtcctccttaacacatccaagaagaaagagtcccacctctccatctatcatgtcattctgtctcttctctttccaataattgtkacagacaccaaaagcccaattccaagagtgccccatgttaaactcccaataaaatttgccagatatgaaaaaatcagccccccattgaagaaaacattcagatttatcagtgatattgggatcatgttgagggtcacatccaaccttcatgcttctcaaatctccatgcaggaagatatgactactggctcttgcatgctgcagagtaagataaactgcaaaaataattttaaaaaagtatagatacatgtaattaacagaaattagaattcttgagggaaaagttgttctaccaagaatttactttgccaagaaatttgaagttacaaggacag

SEQ ID NO: 375386 - DNA, 542 bp, Homo sapiens
aggccagggtgttgaaacgtgctccaggcagggagatctgcctttaatagttgaggttctctggaggcctacacggttcaaacattccaaatagtttgtttcatctatttttcagaattatatatttaaatataaactagaaatcatcaacacttttcactgctaaaatactttccccccctcccccctggcttcccctggtttactttgtagccaygtagtaaatgcaatattttctcttgcaaatatgaaggcttttgagcaataaaaaggaaattaggaatagagatgctcacttcctttatttctttcatttatttattttttgttctctttcttttttatttatttatttatttatttatttatttttggttttgcagaactttcattgaactgcttaataaaatcactgagtatggcaacaaaatagatgactacatggggtgggggatggagaaagtacaaccagcacaaggtagtatcaatatctgaatcacttataccttcaatatcaaagttcctgcttgatatttgtggaa

SEQ ID NO: 375387 - DNA, 542 bp, Homo sapiens
aggccagggtgttgaaacgtgctccaggcagggagatctgcctttaatagttgaggttctctggaggcctacacggttcaaacattccaaatagtttgtttcatctatttttcagaattatatatttaaatataaactagaaatcatcaacacttttcactgctaaaatactttccccccctcccccctggcttcccctggtttactttgtagccatgtagtaaatgcaatattttctcttgcaaatatgaaggcttttgagcaataaaaaggaaattaggaatagagatgctcacttcctttatttctttcatttatttattttttgttctctttcttttttatttatttatttatttatttatttatttttggttttgcagaactttcattgaactgcttaataaaatcactgastatggcaacaaaatagatgactacatggggtgggggatggagaaagtacaaccagcacaaggtagtatcaatatctgaatcacttataccttcaatatcaaagttcctgcttgatatttgtggaa

SEQ ID NO: 375388 - DNA, 688 bp, Homo sapiens
gttgccatattcaggtttctgtgattttcacacatttttctccataaagactgcatttttcttaggagctcctcctgcaaaagagccatgaattgaagcacaagtgaagacaataaagtatcattcacactctgatatacgaaggacccaaaatgagagacaaattagcccacagaaaatagagtttgctttgtttctcctcatgtctgtcaaatctgagaggtgtgaagtcaaggaagctcataacagacatgtttaaggggrcacagagatggcatcatccaatctcgaaggaaataggctgacaagaattccatgtgtcctgtatagaaatagatcttcagaggcatcacttacccggcgttcctcagcagcccactcagtgggacagtgtctgtgattccggtgctcctgagagttggagcacagcaaacagagcaggctcttgtccacttcacagaacatctcctttgtctctctgtgcgtcccacatatttgctcctcagagctaaggaattgccggaggctggcttttctggcaatggaagccatgttcttcaaacaaatgttagttttgaggtttctctgccgtgttgtcttcttgcatttagagcactgagcaagaactgccatgtcttgccagttgaggtagaaacagggccggcaaaagctgtgcccacagtctatg

SEQ ID NO: 375389 - DNA, 528 bp, Homo sapiens
acaattaaaccagtctaggctcactaggagataaaataaataatgaaaaatattgggtttttcttatggcttaaattaacttcttctttgggctactcaaactatgaactgacatatagtcagttttttaaaaactgaaatatatataatyatattactgtggtattacagttaattataggtgttgacttgactggattaaataatacatggagaattggtatagcattatttctgggtgagtctgtgaaggtgtttgcagagagacatgtaagttggtgagctgagtggggaacagcaaccctcaatgtgggtggacactatccaatcagctggtagctcagactgaagataaagggcagagagaaggcagtttcctctttttctcctgaagctgattctaactcagccaggatattggtatctccaggacactagcttaatgacagcctgtgttcaacttctcagactccataatcaagggaacaaattctcctagtggacttcctctcctgtacagtgtcatgt

SEQ ID NO: 375390 - DNA, 528 bp, Homo sapiens
acaattaaaccagtctaggctcactaggagataaaataaataatgaaaaatattgggtttttcttatggcttaaattaacttcttctttgggctactcaaactatgaactgacatatagtcagttttttaaaaactgaaatatatataattatattactgtggtattacarttaattataggtgttgacttgactggattaaataatacatggagaattggtatagcattatttctgggtgagtctgtgaaggtgtttgcagagagacatgtaagttggtgagctgagtggggaacagcaaccctcaatgtgggtggacactatccaatcagctggtagctcagactgaagataaagggcagagagaaggcagtttcctctttttctcctgaagctgattctaactcagccaggatattggtatctccaggacactagcttaatgacagcctgtgttcaacttctcagactccataatcaagggaacaaattctcctagtggacttcctctcctgtacagtgtcatgt

SEQ ID NO: 375391 - DNA, 528 bp, Homo sapiens
acaattaaaccagtctaggctcactaggagataaaataaataatgaaaaatattgggtttttcttatggcttaaattaacttcttctttgggctactcaaactatgaactgacatatagtcagttttttaaaaactgaaatatatataattatattactgtggtattacagttaattataggtgttgacttgactggattaaataatacatggagaattggtatagcattatttctgggtgagtctgtgaaggtrtttgcagagagacatgtaagttggtgagctgagtggggaacagcaaccctcaatgtgggtggacactatccaatcagctggtagctcagactgaagataaagggcagagagaaggcagtttcctctttttctcctgaagctgattctaactcagccaggatattggtatctccaggacactagcttaatgacagcctgtgttcaacttctcagactccataatcaagggaacaaattctcctagtggacttcctctcctgtacagtgtcatgt

SEQ ID NO: 375392 - DNA, 536 bp, Homo sapiens
acctgcagttacaacatctacagccataaaataaataaaaatcactatttctatttaaaagacagctcatgagaatcctctgaatccacaaatttgattattcaaaaattattacttcttttttggaattaatttctatttatagtttcccaattttaaagcatagtgggagagcctgagtcagaattcmgtctgatctttctttttttctgccccacatgtgtaaggttccttagccttatggccttgagaatatttggaaatgaaattctgagttccacttcttggcagactcccctgacatctttgtctgaaatagcggggttttgggaagactgctgcatctgctgcttccttttcaagataaagaatgtgaaacttgttccaggcagctagacctgccttttagaaacaagcttccctagagacttatacagttctaacactccacagttttttcaacctatttttcaggactgttaactgatttgtatataggtatgaacaataaatcatcaactttttgactgctaaaa

SEQ ID NO: 375393 - DNA, 536 bp, Homo sapiens
acctgcagttacaacatctacagccataaaataaataaaaatcactatttctatttaaaagacagctcatgagaatcctctgaatccacaaatttgattattcaaaaattattacttcttttttggaattaatttctatttatagtttcccaattttaaagcatagtgggagagcctgagtcagaattccgtctgatctttctttttttctgccccamatgtgtaaggttccttagccttatggccttgagaatatttggaaatgaaattctgagttccacttcttggcagactcccctgacatctttgtctgaaatagcggggttttgggaagactgctgcatctgctgcttccttttcaagataaagaatgtgaaacttgttccaggcagctagacctgccttttagaaacaagcttccctagagacttatacagttctaacactccacagttttttcaacctatttttcaggactgttaactgatttgtatataggtatgaacaataaatcatcaactttttgactgctaaaa

SEQ ID NO: 375394 - DNA, 536 bp, Homo sapiens
acctgcagttacaacatctacagccataaaataaataaaaatcactatttctatttaaaagacagctcatgagaatcctctgaatccacaaatttgattattcaaaaattattacttcttttttggaattaatttctatttatagtttcccaattttaaagcatagtgggagagcctgagtcagaattccgtctgatctttctttttttctgccccacatgtgtaaggttccttagccttatggccttgagaatatttggaaatgaaattctgagttccacttcttggcagactcccctgacatctttgtctgaaatagcggggttttgggragactgctgcatctgctgcttccttttcaagataaagaatgtgaaacttgttccaggcagctagacctgccttttagaaacaagcttccctagagacttatacagttctaacactccacagttttttcaacctatttttcaggactgttaactgatttgtatataggtatgaacaataaatcatcaactttttgactgctaaaa

SEQ ID NO: 375395 - DNA, 592 bp, Homo sapiens
atgttaaacaacccaaaatatattattgacttagatggggaatagttattggggctgttaccttgaccattccacagagttttgtggctggtggataaagtaggagggacctttggcctggtagaatcccttggcggggctatactctcccaataaagtagcattagttatgcgaatgtgtttttggaaacacatcatggaaataaaggttgggagatggatttcagccatgaggaatatacttacacatgtgaatagtgaaaaacctgaaacyacattgtgagtttgtacctgaagtagctccacatctggtttatggcacatttccttcagctcctcatacattcctcttaaaatctccctcctatgagccattttggctttacttaaatgaagttgatgaaaaatatctttccccttctttttcagcatgtgcaaattatgtttttcttcttcatggtgaaatgcagccatcttctcatactcagctctaattgcttctagccttaaattcacgtaatcctgcagtgataatgggttagtcaaaagagaaatgtatttattcatctcctattaaatctcactgattctt

SEQ ID NO: 375396 - DNA, 566 bp, Homo sapiens
ctcacaaccctttatactcttatttcctgtatgtaacataataccartctattcaatttcccgttttctgaatgttgatctggaaattgggtttgattctacatgacctagaataaattgtagttgttcctattcttctttcacgtaactgctgagtaggaaagactgggaaaaactaccttggccaaggaaatatgagaagatggctagagggttctacgacatatttttagagacacaacagtggggcagcaaaccactatggcacatgtttacctatgtaacaagcttgcatgtcctgcacatttatcttaggacttaaaataatataaaattaaagtaaaataaaaaaccaaaccaaaacaaaatagaaaaaccaatcaaccaaccaaataaacaaaaaaccagcaattaaatcaattttggtttaatagaagagaaaaacataattaaagatattgggcctttttattttctcgtggattaaattaacttctcctagggatacccaaactctgaactaacatatagtatgatttttgttaaactcagagaggtgtgattac

SEQ ID NO: 375397 - DNA, 566 bp, Homo sapiens
ctcacaaccctttatactcttatttcctgtatgtaacataataccaatctattcaatttcccgttttctgaatgttgatctggaaattgggtttgattctacrtgacctagaataaattgtagttgttcctattcttctttcacgtaactgctgagtaggaaagactgggaaaaactaccttggccaaggaaatatgagaagatggctagagggttctacgacatatttttagagacacaacagtggggcagcaaaccactatggcacatgtttacctatgtaacaagcttgcatgtcctgcacatttatcttaggacttaaaataatataaaattaaagtaaaataaaaaaccaaaccaaaacaaaatagaaaaaccaatcaaccaaccaaataaacaaaaaaccagcaattaaatcaattttggtttaatagaagagaaaaacataattaaagatattgggcctttttattttctcgtggattaaattaacttctcctagggatacccaaactctgaactaacatatagtatgatttttgttaaactcagagaggtgtgattac

SEQ ID NO: 375398 - DNA, 496 bp, Homo sapiens
ttttgatttccaaactaggaaattttggggagctttctcatttttttcagtttcactattttgcatctctcatcattaccttactaatttaaagttatgactaaaagctgaatgaatgaattaacattcattaatgtcttctcaattcaattgtttaatattaatgcactcattacacatatatttacacacacttatgtgtacatatatgtattaatatcaactccatatattcattatgcatacrtatctgttgcagcaaacactagatatttcaatttttttgaaacaatattgaagaatgatagaaaacacaaaataacaacaattagtaccctaataattcataaaatctatagcaagaatatgaattacaatggtatcattgtgtagatttaagataatgagttatttttaacactctaatttattattttgtaaaggaaagaagatataattttatcaatataagtttcactcaccactggtttctttg

SEQ ID NO: 375399 - DNA, 496 bp, Homo sapiens
ttttgatttccaaactaggaaattttggggagctttctcatttttttcagtttcactattttgcatctctcatcattaccttactaatttaaagttatgactaaaagctgaatgaatgaattaacattcattaatgtcttctcaattcaattgtttaatattaatgcactcattacacatatatttacacacacttatgtgtacatatatgtattaatatcaactccatatattcattatgcatacgtatctgttgcagcaaacactagatatttcaatttttttgaaacaatattgaagaatgatagaaarcacaaaataacaacaattagtaccctaataattcataaaatctatagcaagaatatgaattacaatggtatcattgtgtagatttaagataatgagttatttttaacactctaatttattattttgtaaaggaaagaagatataattttatcaatataagtttcactcaccactggtttctttg

SEQ ID NO: 375400 - DNA, 587 bp, Homo sapiens
ccactggtttctttgaatggttcccacaatgattcttcgagaaataattctgttaagtactcctcaaggtcaggagctcattcaccgcagtactgacttttagaggtcaccaaaatacagctccytctaagtgcgctccttctcctttggataaaactgagcttgtctcttctatgtccttttataagaatctgtgaagaccacacccacctctttaagtgggtggagtattgagaaaggtagagaataagatgattaggtttatgcagtatttagaacacacctttgcaccgctgattaaattatcatcactccttcattccaaaaaaccgtgactgaagtgaataatatgtaacataaatcctatgagattagacatacactagaaattaactaagatgcattttatactgtttattgagtttcatccaagatgcaggcattcctctaagggcacatttatttattctagagaaactgtctccttgtggagtgcagtggtacattcacagctcactgcagccttgaattccaaggctcaagggatcctcttgcttcagcctcccaagtagctaggactacaggct

SEQ ID NO: 375401 - DNA, 620 bp, Homo sapiens
tatgagattagacatacactagaaattaactaagatgcattttatactgtttattgagtttcatccaagatgcaggcattcctctaagggcacatttatttattctagagaaactgtctccttgtggagtgcagtggtacattcacagctcactgcagccttgaattccaaggctcaagggatcctcttgcttcagcctcccaagtagctaggactacaggctcacaccatcccacctggctaatgttttttaaaacttttcatagagtcagggtatggctctgtagcccaggmtgttctccaactcctgtcttcaaatgatcctctggtcttggacttccaaagtgcttgggagtacaggcataaaccacctcttccagtcctaaatgctgctttagtacatttataggctattcccagagaagtccaacaggaagataaaacttttttttattttctaccactctaagagaaatcactgattaaccaaataaccccactaatttgaggtctcttattgaatttacaaaactttgccaatctcatgggtgaaatataagttattgttttaaggcttttctccacatagtgcatgatgttctatgatgactagaaatgca

SEQ ID NO: 375402 - DNA, 553 bp, Homo sapiens
atgtgtatgtcggtgttggtatatatatatagatagatatatttgaggaatatatatgtaaacacacagatacacgtatatmttcctcatacatcatatatacctatatttgagaaatatatatatgagtacatatatgagaaatatatatatatatgaaaataattctaggcatagaaaacagcatgtgcagtaatatttaatttgcatttatttgggggtttgaggaaccacaaagaagtccatgttgcagattagggtgagtttggaagagaataaatgaaaccttattagaatatgttatgctgggtgaaatgcattgagttgacaatgctagtctgggtcatgtcatcatttgtcatataatggttttacataacttgccccaattctccaaaatagaaataatggtttcttacctagtcaatataactcgatagtttgattcttaagcaagaactgtgttttctttctataaatgtggtgtggaagagagaaatccatctttatataactgtcatagaaaacattttatcattaatcaagtaaatgt

SEQ ID NO: 375403 - DNA, 553 bp, Homo sapiens
atgtgtatgtcggtgttggtatatatatatagatagatatatttgaggaatatatatgtaaacacacagatacacgtatatattcctcatacatcatatatacctatatttgagaaatatatatatgagtacatatatgagaaatatatatatatatgraaataattctaggcatagaaaacagcatgtgcagtaatatttaatttgcatttatttgggggtttgaggaaccacaaagaagtccatgttgcagattagggtgagtttggaagagaataaatgaaaccttattagaatatgttatgctgggtgaaatgcattgagttgacaatgctagtctgggtcatgtcatcatttgtcatataatggttttacataacttgccccaattctccaaaatagaaataatggtttcttacctagtcaatataactcgatagtttgattcttaagcaagaactgtgttttctttctataaatgtggtgtggaagagagaaatccatctttatataactgtcatagaaaacattttatcattaatcaagtaaatgt

SEQ ID NO: 375404 - DNA, 553 bp, Homo sapiens
atgtgtatgtcggtgttggtatatatatatagatagatatatttgaggaatatatatgtaaacacacagatacacgtatatattcctcatacatcatatatacctatatttgagaaatatatatatgagtacatatatgagaaatatatatatatatgaaaataattctaggcatagaaaacagcatgtgcagtaatatttaatttgcatttatttgggggtttgaggaaccacaaagaagtccatgttgcagattagggtgagtttggaagagaataaatgaaaccttattagaatatgttatgctgggtgaaatgcattgagttgacaatgstagtctgggtcatgtcatcatttgtcatataatggttttacataacttgccccaattctccaaaatagaaataatggtttcttacctagtcaatataactcgatagtttgattcttaagcaagaactgtgttttctttctataaatgtggtgtggaagagagaaatccatctttatataactgtcatagaaaacattttatcattaatcaagtaaatgt

SEQ ID NO: 375405 - DNA, 520 bp, Homo sapiens
agatggataaaacatttctattttgactaattgtcactgcaggattatgtgagtttaaggatagaagcaatcagagctgaatatcagaagatgcctgcatttctccatgaagaagagcaacatcacttggagaggctgcgaaaggaggrcgaggacatttttcagcaactcaatgaaagcaaagccagaatgaaacattccagggagcttttaagaggaatgtatgaggatctgaagcaaatgtgccataaagcagatgtggagctactccaggtacggactgaccgtggggtatcatggtgttgaacattcacatacatgggtgtttttcctctctcctgaaatccatctcccccttcacttccatgatttgtttccaaaaacatgattcaataactaatgctccttggttgggagggtgtatcctctccttgtgattctaccagaccgaaggtccctcctactttatccaccagcaacaaaactttgtagaatggctaaggtaacaaatagccccaag

SEQ ID NO: 375406 - DNA, 520 bp, Homo sapiens
agatggataaaacatttctattttgactaattgtcactgcaggattatgtgagtttaaggatagaagcaatcagagctgaatatcagaagatgcctgcatttctccatgaagaagagcaacatcacttggagaggctgcgaaaggaggacgaggacatttttcagcaactcaatgaaagcaaagccagaatgaaacattccagggagcttttaagaggaatgtatgaggatctgaarcaaatgtgccataaagcagatgtggagctactccaggtacggactgaccgtggggtatcatggtgttgaacattcacatacatgggtgtttttcctctctcctgaaatccatctcccccttcacttccatgatttgtttccaaaaacatgattcaataactaatgctccttggttgggagggtgtatcctctccttgtgattctaccagaccgaaggtccctcctactttatccaccagcaacaaaactttgtagaatggctaaggtaacaaatagccccaag

SEQ ID NO: 375407 - DNA, 520 bp, Homo sapiens
agatggataaaacatttctattttgactaattgtcactgcaggattatgtgagtttaaggatagaagcaatcagagctgaatatcagaagatgcctgcatttctccatgaagaagagcaacatcacttggagaggctgcgaaaggaggacgaggacatttttcagcaactcaatgaaagcaaagccagaatgaaacattccagggagcttttaagaggaatgtatgaggatctgaagcaaatgtgccataaagcagatgtggagctactccaggtacggactgaccgtggggtatcatgrtgttgaacattcacatacatgggtgtttttcctctctcctgaaatccatctcccccttcacttccatgatttgtttccaaaaacatgattcaataactaatgctccttggttgggagggtgtatcctctccttgtgattctaccagaccgaaggtccctcctactttatccaccagcaacaaaactttgtagaatggctaaggtaacaaatagccccaag

SEQ ID NO: 375408 - DNA, 636 bp, Homo sapiens
ccttggttgggagggtgtatcctctccttgtgattctaccagaccgaaggtccctcctactttatccaccagcaacaaaactttgtagaatggctaaggtaacaaatagccccaagaaatatttcccatcaaaagtcagtgatttatttaggatttttgaaagtggataaaatgagaagtgatccattggcatttaggctaatttggagacatggcaggatggagaagttggggaatctaggatcaccctaatattattttggggtccactcactttggtaacaaggyttagggaagatgactgagtagcttctttatggttacctcagagcatagactctgtaggcctcctctcccttcacttgaaaagagaatgtcttcaagacttagactttgtcaggacattaattcatgacatatcatagactgggattttcatgagaaaagaaacagaaaatgctttccaggagggaacattgtaggaaaataatatcttcagaaactgtctccaaatctcacactgaacttagtggaagatgcatcttgtggaaagcactaagcctttcaattttttttttttttattttacaggctttgggagacatattacacaggtgagtacataccaagatttta

SEQ ID NO: 375409 - DNA, 636 bp, Homo sapiens
ccttggttgggagggtgtatcctctccttgtgattctaccagaccgaaggtccctcctactttatccaccagcaacaaaactttgtagaatggctaaggtaacaaatagccccaagaaatatttcccatcaaaagtcagtgatttatttaggatttttgaaagtggataaaatgagaagtgatccattggcatttaggctaatttggagacatggcaggatggagaagttggggaatctaggatcaccctaatattattttggggtccactcactttggtaacaaggtttagggaagatgactgagtagcttctttatggttacctcagagcatagactctgtrggcctcctctcccttcacttgaaaagagaatgtcttcaagacttagactttgtcaggacattaattcatgacatatcatagactgggattttcatgagaaaagaaacagaaaatgctttccaggagggaacattgtaggaaaataatatcttcagaaactgtctccaaatctcacactgaacttagtggaagatgcatcttgtggaaagcactaagcctttcaattttttttttttttattttacaggctttgggagacatattacacaggtgagtacataccaagatttta

SEQ ID NO: 375410 - DNA, 568 bp, Homo sapiens
aaaaataaccccacttttccagacagtgatttcaggaatttctggagaggcctggaacccagaatttcatttttgaatattctcccagtsttaagactaatgatccttactaatttggagcaataccaagaaagatctgaatgaattctcagtcagatagacttttccatcgtgtttgaaaatgaggaactgtgaataagaatgaatttgaaaaagaaaatgataattttggaattagcaaatgtgtgggttaaagggattctcatgaaatgtcttttaaataaaagtggtgatttttatgtattttttttttggctgcagatgtggaaagggtatgtttctccttgcaggtatgagtccctgttgctgcaagcatctgagcctgtgaatccagagctcagtgcagggcccatcactggactgctggacaggctcagtggattcaaaggtaagtgtcagcccattggcagaattcccacagtgtattacttcttgttagaatcatgggggtaatattttacccttcatcaaatctttatttcatttcagcaggaagtgaaccatatga

SEQ ID NO: 375411 - DNA, 568 bp, Homo sapiens
aaaaataaccccacttttccagacagtgatttcaggaatttctggagaggcctggaacccagaatttcatttttgaatattctcccagtcttaagactaatgatccttactaatttggagcaataccaagaaagatctgaatgaattctcagtcagatagacttttccatcgtgtttgaaaatgaggaactgtgaataagaatgaatttgaaaaagaaaatgataattttggaattagcaaatgtgtgggttaaagggattctcatgaaatgtcttttaaataaaagtggtgatttttatgtattttttttttggctgcagatgtggaaagggtatgtttctccttgcaggtatgagtccctgytgctgcaagcatctgagcctgtgaatccagagctcagtgcagggcccatcactggactgctggacaggctcagtggattcaaaggtaagtgtcagcccattggcagaattcccacagtgtattacttcttgttagaatcatgggggtaatattttacccttcatcaaatctttatttcatttcagcaggaagtgaaccatatga

SEQ ID NO: 375412 - DNA, 568 bp, Homo sapiens
aaaaataaccccacttttccagacagtgatttcaggaatttctggagaggcctggaacccagaatttcatttttgaatattctcccagtcttaagactaatgatccttactaatttggagcaataccaagaaagatctgaatgaattctcagtcagatagacttttccatcgtgtttgaaaatgaggaactgtgaataagaatgaatttgaaaaagaaaatgataattttggaattagcaaatgtgtgggttaaagggattctcatgaaatgtcttttaaataaaagtggtgatttttatgtattttttttttggctgcagatgtggaaagggtatgtttctccttgcaggtatgagtccctgttgctgcaagcatctgagcctgtgaatccagagctcagtgcagggcccatcactggactgctggacaggctcagtggattcaraggtaagtgtcagcccattggcagaattcccacagtgtattacttcttgttagaatcatgggggtaatattttacccttcatcaaatctttatttcatttcagcaggaagtgaaccatatga

SEQ ID NO: 375413 - DNA, 534 bp, Homo sapiens
agattggataaaaacaggctggtcttatattcaactctcgatttttaagatttcaataaattttcaatgtctgtttttagggttttgttcttcttatagagaatattaatcatccttatactttattaaatgttgtagtcacaattctcctgtccttgtaacttcaaatttcctggtaaagtaaactcttggtagaactactattccctcaagaattctaatttctgttaattacatgtatctatattttttaaaaattatttttgctgttgattttactgtgcagcctgaaagagccaatagtcatatcttcctgcatggagatttgagaagcatgaatrttggatgtgaccctcaagaagatcccgatatcactgcaaaatctgaatgttttcttgtatggggggctcaggctttcacatctggcaaatattattgggaggttcacgtgggggactcttggaattgagcttttggtgtctgtaacaattattggaaagaggagacagaatgacaagatagatggagaggagg

SEQ ID NO: 375414 - DNA, 592 bp, Homo sapiens
gcagaaaaaagtcagaaatgtgtctatatgctctgggaacctgtttatcacagaaagccctctttttcacacctcatcaaacaggacaaataagttatatttaatgtctttacttgcattctaatgtcatcaaaactcatttatagtgtttctattaaatatggtgaaaacatwgcaaccatgtgtattggttcctttttaagtcatttttggaaaatcattacccatgatgtatggcatagaatatattctctggtttttaattatttctgaatgtcacaaagtgaaataatagatgacagagttgtctaaatgaagttaaaatcaatggaagaaagtagagatcttgggcttcatgaaaaaacttggagtaaaaaagactcaatggtaacctggaaatattttctttctcttcatctaacaatattatacttctccatgtgttttatttatgaacctatactttgaggtaatcttatttgacctcttatgctgtgcttatctttgtaaatctcatcttatatacaaaatgctcatgcattattagagtgctgttctacagtgaaatttacaaggggatcaggacaatgct

SEQ ID NO: 375415 - DNA, 592 bp, Homo sapiens
gcagaaaaaagtcagaaatgtgtctatatgctctgggaacctgtttatcacagaaagccctctttttcacacctcatcaaacaggacaaataagttatatttaatgtctttacttgcattctaatgtcatcaaaactcatttatagtgtttctattaaatatggtgaaaacatagcaaccatgtgtattggttcctttttaagtcatttttggaaaatcattacccatgatgtatggcatagaatatattytctggtttttaattatttctgaatgtcacaaagtgaaataatagatgacagagttgtctaaatgaagttaaaatcaatggaagaaagtagagatcttgggcttcatgaaaaaacttggagtaaaaaagactcaatggtaacctggaaatattttctttctcttcatctaacaatattatacttctccatgtgttttatttatgaacctatactttgaggtaatcttatttgacctcttatgctgtgcttatctttgtaaatctcatcttatatacaaaatgctcatgcattattagagtgctgttctacagtgaaatttacaaggggatcaggacaatgct

SEQ ID NO: 375416 - DNA, 657 bp, Homo sapiens
attctaatgtcatcaaaactcatttatagtgtttctattaaatatggtgaaaacatagcaaccatgtgtattggttcctttttaagtcatttttggaaaatcattacccatgatgtatggcatagaatatattctctggtttttaattatttctgaatgtcacaaagtgaaataatagatgacagagttgtctaaatgaagttaaaatcaatggaagaaagtagagatcttgggcttcatgaaaaaacttggagtaaaaaagactcaatggtaacctggaaatattttctttctcttcatctaacaatattatacttctccatgtgttttatttatgaacctatactttgaggtaatcttatttgacctcttatgctgtgcttatctttgtaaatctcatcttatatacaaaatgctcatgcattattagagtgctgttctacagtgaaatttacaaggggatcaggacaatgctggatsaattaaatattcaaatggacataactgaatactgacccctacctcaaaccatacacagtgcatttccacatggattcatgttctgaaggtgaagggaacacagtaaattattctcacacagaaagatttcctaaccaggacaaaaaaggaacaattaagaagaaaaatttagttagt

SEQ ID NO: 375417 - DNA, 657 bp, Homo sapiens
attctaatgtcatcaaaactcatttatagtgtttctattaaatatggtgaaaacatagcaaccatgtgtattggttcctttttaagtcatttttggaaaatcattacccatgatgtatggcatagaatatattctctggtttttaattatttctgaatgtcacaaagtgaaataatagatgacagagttgtctaaatgaagttaaaatcaatggaagaaagtagagatcttgggcttcatgaaaaaacttggagtaaaaaagactcaatggtaacctggaaatattttctttctcttcatctaacaatattatacttctccatgtgttttatttatgaacctatactttgaggtaatcttatttgacctcttatgctgtgcttatctttgtaaatctcatcttatatacaaaatgctcatgcattattagagtgctgttctacagtgaaatttacaaggggatcaggacaatgctggatcaattaaatattcaaatggacataactgaatactgacccctayctcaaaccatacacagtgcatttccacatggattcatgttctgaaggtgaagggaacacagtaaattattctcacacagaaagatttcctaaccaggacaaaaaaggaacaattaagaagaaaaatttagttagt

SEQ ID NO: 375418 - DNA, 489 bp, Homo sapiens
attacttttattagtcctcagaataataaaaattaatccataagttgaactacaggcctccmtaaaaagtagcaaaatgtaaagacacataatattgtgtgttgtgaaagataaagaatcaatgaaagttattcatggctggagggatgtaaactgaaatactttttggtaaactgactatgagcattccttatgggctagatattctcattctaaaatatattccacagactgcctatgtgtatttcaagataaacgcaatgttgatcattgcagcaatttttatagtagctcaaaattggagacaaaataaatattcatcaacagtagaattgctaaataaattgtgatctcatcatacaaaagaattttacaaaacagagataacaccaaaatgcaacaaattaattaatctcaaagagaagtttaagaaaagaattgaaacacacaaatgttatattacagtgttttatttagataaattgtgaa

SEQ ID NO: 375419 - DNA, 537 bp, Homo sapiens
tgtatttcaagataaacgcaatgttgatcattgcagcaatttttatagtagctcaaaattggagacaaaataaatattcatcaacagtagaattgctaaataaattgtgatctcatcatacaaaagaattttacaaaacagagataacaccaaaatgcaacaaattaattaatctcaaagagaagtttaagaaaagaattgaaacacacaaatgttatattacagtgttttatttagataaattgtgaactccattaattgatgatagaagttagaatattgaataatgttttggaaggtaatggttaggaaacttaaraattaaccaggataagatataggaagcattgaaatcaaggagagaaaatataagcatttttcatgcagaagagaatcatatatatatatgtgtatatatatatatggtattttaacgtataaaataagtttgaaataaatgatttgatgttttgcctaatttttcaaatgcatatatatataatttaatttatgataatttaacatcaacattaagac

SEQ ID NO: 375420 - DNA, 544 bp, Homo sapiens
ggggattgtttggcttcctgaattcaattcatttgcttactctgaaaaaattatcaaacattatacccttgaatatgtactgtcctcttctctacttagctctactgtgtgctacagtcaatcacacattatgctgtttataaagaacatacatgatactctcatcctcctaatgtcactatcactctcctagtttacctctatttgtccatctgtgaagcyttcatgacatagctttatatctattatccaattcacactttctgcagcttcatttcacttgctaaacaaagttttcactaaacagcaaattttacttatttcacttttaccaatataaattagaatttatatggtaaaagaatttcttaaatgactgccaaatgtgaaaaaattcatgtatatattatatatatttacatatgtatgtgttatatagacatacacaaaattgctattggtaacgacggttttcacaggagtctataactactgaagattttatttttcctaaaagatataatatttccttaaagatattctg

SEQ ID NO: 375421 - DNA, 469 bp, Homo sapiens
cacatcagggctgtgactcactcctcaaagcaggcttgggtccccagggtaagagtgaagagacagactccccacatcatgtagtgtggatggcagggctgcaggggwtgtagtcctcttgccggtgggctgccagagacctggcagccagacccacttcttagtgagggcacattcatttcctctctgggatgcatttcatcatattcactttgtacccacgattcttcctgacagcctgaaacagcaggctttgcatccttttcaggcctggggtctggccttaccccaggggcttctctttcacccacaacagactcgcgtccacactggagacctggtcactgctgacagcagggagagaagaaggcagaggagtccagcacggccctcctgcattcataaatcctattttccaacgaacatcaagaactcgcggtctcctgctcccaggaggagcctcgggtct

SEQ ID NO: 375422 - DNA, 469 bp, Homo sapiens
cacatcagggctgtgactcactcctcaaagcaggcttgggtccccagggtaagagtgaagagacagactccccacatcatgtagtgtggatggcagggctgcaggggttgtagtcctcttgccggtgggctgccagagacctggcagccagacccacttcttagtgasggcacattcatttcctctctgggatgcatttcatcatattcactttgtacccacgattcttcctgacagcctgaaacagcaggctttgcatccttttcaggcctggggtctggccttaccccaggggcttctctttcacccacaacagactcgcgtccacactggagacctggtcactgctgacagcagggagagaagaaggcagaggagtccagcacggccctcctgcattcataaatcctattttccaacgaacatcaagaactcgcggtctcctgctcccaggaggagcctcgggtct

SEQ ID NO: 375423 - DNA, 469 bp, Homo sapiens
cacatcagggctgtgactcactcctcaaagcaggcttgggtccccagggtaagagtgaagagacagactccccacatcatgtagtgtggatggcagggctgcaggggttgtagtcctcttgccggtgggctgccagagacctggcagccagacccacttcttagtgagggcacattcatttcctctctgggatgcatttcatcatattcmctttgtacccacgattcttcctgacagcctgaaacagcaggctttgcatccttttcaggcctggggtctggccttaccccaggggcttctctttcacccacaacagactcgcgtccacactggagacctggtcactgctgacagcagggagagaagaaggcagaggagtccagcacggccctcctgcattcataaatcctattttccaacgaacatcaagaactcgcggtctcctgctcccaggaggagcctcgggtct

SEQ ID NO: 375424 - DNA, 469 bp, Homo sapiens
cacatcagggctgtgactcactcctcaaagcaggcttgggtccccagggtaagagtgaagagacagactccccacatcatgtagtgtggatggcagggctgcaggggttgtagtcctcttgccggtgggctgccagagacctggcagccagacccacttcttagtgagggcacattcatttcctctctgggatgcatttcatcatattcactttgtacccacgattcttcctgacagcctgaaacagcaggctttgcatccttttcaggcctggggtctggccttaccccaggggcttctctttcacccacaacrgactcgcgtccacactggagacctggtcactgctgacagcagggagagaagaaggcagaggagtccagcacggccctcctgcattcataaatcctattttccaacgaacatcaagaactcgcggtctcctgctcccaggaggagcctcgggtct

SEQ ID NO: 375425 - DNA, 471 bp, Homo sapiens
aaatgtgctcttcagtaatgcagtagaaggtctgagtttccacatagaagtatccttgaatgcctggagaattttaaggcataagaacgtactgatmctatgaactatatgttatgtaaaatctcaggttatgtgaggtgtttggacaaattaagcgtcagggtgatatccactattgagacagaaaatgagtctaaagaattaagacctcaaagtccagaatgagaaaaaattgttttgcttagagcctccttataattgtcttacttgttttgtagatataagcactagaggacaagctctacctgatatagctggcctagacatatgcagatttattaattgtagaagaaagaattatacctttcaagtaaaatggccaccaaaaataattagttgctgtttttgagacaagttctcactctgtcactcaggctggagtgcaatggcacaaacagaactcactgcaga

SEQ ID NO: 375426 - DNA, 471 bp, Homo sapiens
aaatgtgctcttcagtaatgcagtagaaggtctgagtttccacatagaagtatccttgaatgcctggagaattttaaggcataagaacgtactgatactatgaactatatgttatgtaaaatctcaggttatgtgaggtgtttggacaaattaagcgtcagggtgatatccactattgagacagaaaatgagtctaaagaattaagacctcaaagtccagaatgagaaaaaattgttttgyttagagcctccttataattgtcttacttgttttgtagatataagcactagaggacaagctctacctgatatagctggcctagacatatgcagatttattaattgtagaagaaagaattatacctttcaagtaaaatggccaccaaaaataattagttgctgtttttgagacaagttctcactctgtcactcaggctggagtgcaatggcacaaacagaactcactgcaga

SEQ ID NO: 375427 - DNA, 471 bp, Homo sapiens
aaatgtgctcttcagtaatgcagtagaaggtctgagtttccacatagaagtatccttgaatgcctggagaattttaaggcataagaacgtactgatactatgaactatatgttatgtaaaatctcaggttatgtgaggtgtttggacaaattaagcgtcagggtgatatccactattgagacagaaaatgagtctaaagaattaagacctcaaagtccagaatgagaaaaaattgttttgcttagagcctccttataattgtcttacttgttttrtagatataagcactagaggacaagctctacctgatatagctggcctagacatatgcagatttattaattgtagaagaaagaattatacctttcaagtaaaatggccaccaaaaataattagttgctgtttttgagacaagttctcactctgtcactcaggctggagtgcaatggcacaaacagaactcactgcaga

SEQ ID NO: 375428 - DNA, 553 bp, Homo sapiens
tttcatttccaaatattctcaaggccataaggctaaggaaccttacacatgtggggcagaaaaaaagaaagatcagactgaattctgactcagactctcccactatgctttaaaatttggaaactgtaaatagaaattaattcygaaaaggaagtaataatttttgaataatcaaatttgtggattcaaaggattctcatgaactgtcttttaaataggaatagtgatttttatttattttatggctgtaggtgttataactgcaggtttttccttgcaggagtgagtctgtgctgctgcacatgccccagcctctgaatctagagcttagtgcagggctcatcactggactgagggacaggctcaaccaattctgaggtaagtctccacccatagccagtgctcccactatctaaatattattattgttaggaccacataggtaatatttcaccctttatcaaatattttacttccttatagacataagtgaacaacataatcatgcaacccttttgtatctgtgtctgtatagtcagatttatagcattaa

SEQ ID NO: 375429 - DNA, 553 bp, Homo sapiens
tttcatttccaaatattctcaaggccataaggctaaggaaccttacacatgtggggcagaaaaaaagaaagatcagactgaattctgactcagactctcccactatgctttaaaatttggaaactgtaaatagaaattaattccgaaaaggaagtaataatttttgaataatcaaatttgtggattcaaaggattctcatgaactgtcttttaaataggaatagtgatttttatttattttatggctgtaggtgttrtaactgcaggtttttccttgcaggagtgagtctgtgctgctgcacatgccccagcctctgaatctagagcttagtgcagggctcatcactggactgagggacaggctcaaccaattctgaggtaagtctccacccatagccagtgctcccactatctaaatattattattgttaggaccacataggtaatatttcaccctttatcaaatattttacttccttatagacataagtgaacaacataatcatgcaacccttttgtatctgtgtctgtatagtcagatttatagcattaa

SEQ ID NO: 375430 - DNA, 598 bp, Homo sapiens
ttcagaggtcacctgaatgcagttaactctatgtgctgtcctcctttggagaaatatgagcttctctcttctgcatacttttatgtgaatctttgaagaccacacccacctcttcagagatatttagggtattaagaaaggtggagacagagatgattagctttctgcaatatttagtacatgccttttcatcactgattaaattagcatcacactatcattgtaaaaaccactgcctgaatgaggcatatctatcatcaatcttatcagagtaaacatatgctagaaattaactaaaattgattaatactgtttcttgagtttcttcccaaggtgcaagcattcctctaagtgcacatttatttatttataccaaagaaagtttctccatctggagtgcagtggcagaatcttagctcaccgcagccttgaaatccaggattcaagtaatcctcccacttcaactttcaaartaaaaaagactataggtttatgccattgcacctagctaatttttcatttattcatcaaaaatatttttgaaattcttaggtgattacatgtgttacagtgaccagctggattagaattagattag

SEQ ID NO: 375431 - DNA, 524 bp, Homo sapiens
aggaacattctcagaaacttctttgttatgtgtgcattcaactcaccgagttgaacctttattttgatacagcagttttgaaacactctttttgtagaatctgcaagagtatatttatactgctttgaggccttcgttggaaacgggaatatcttcctttacataaatactagaccgaagaattctcaggaacttctttgttatgtgtgcattcaactcacagagttgaaccttctttttcatagagtcgttttgaaacactttttttgtggaatttgcaagtagatttttggaatgctttgaggtctatggtagaaaagaaatatcttcacaaaaaaactagacggaagckttctcagaaacttctttgttatgattgcctacaactcacagagttcaacataccttttcatagagcagttttgaaacactctttttgtagaatctgtaactggatatttggattgctttgaggacttcattggaaacaggaataccttcacataaactacagacagaaacat

SEQ ID NO: 375432 - DNA, 560 bp, Homo sapiens
tttccacttgtgttgtagtataaacccagcttgcctgtatttaccacatctaggtctgtactgggcttaagttaacaggtagattgaacagagctgaagcagacaagaactagccacgggcccttccccctccatgtggtcaaaacataatattctcacttaaatttttctgttttaaatttccagaaacatggattcagacacactgcaaaccttccagagggagctctgttgctttatctgcaggaactacttaatggacgcagtcaccattgactgtgggcatagcttttgcaggccctgcctttatctatgctgggagraaggccaagctccagcggtctgtcctgtgtgtgggaaaatcccctagaagactgacttcaacacaaatattgttctcaagaagttggcttctcttgcaaggcagcgcagacctcacaacatcaacagctcagagaagcagatctgtgtgctacatgaagaggaaaaggggctcttctgtgaggcagaggagagactcctctgtgggccctgctctgagtcaccagagcatgaggctt

SEQ ID NO: 375433 - DNA, 605 bp, Homo sapiens
ggctgcctcaggatcctcagcgccagagctgacaggctgaaagtagactcctttggtttgaacaaaagttcaaaacctttagtgtcagtgggcattccctgtaagaccctgactgcatcactgatgacaactaccgactgaggtcccaaaggctttggctgagttttcttctctcagcaagwatcccaggatatctgtatactttgaagaggccggagggggagagggaggaaatgacactcagtacttttaaattaggatcatgtatgagagaatggagaaattggactttaacatgttaaatttagataaaagtaacattgctatatcctcaatacagttgaataaaatgtatactgaatttaacaaaaaagggagatttctcaagaaatatcttggatgaaaatctgaaatatttgtatgactgtgtgattatgcctgggcctgaaagtgtaactgaggttgttctttgcaggacagagttggtgcaaatggaaaagccccagccagtgaacccagaactcacttcctggcacatcactggagtgttagataagctcaacaaattcagaggtaagagccagctgcttggcagtacagcctca

SEQ ID NO: 375434 - DNA, 547 bp, Homo sapiens
gaaaattaagaactttaccaggtttggacagagcaagctgggatggcgtggtaggtattgaaattagctgtggatacagaaacttgtacttggagaatagtggtatttgttgtgagtttccaaaagacaatattgaaccaaggtcatacatcccaggttaaacgtttgtaaatagattattttacaggactctccctgaaaagtgtaacttygaagaatgacctgttggtggtattaggaaagaaatagaggccatagtgagggaaggaaggagggatgaagggagctggcatgtgaactggcatgccagacagattaaaaaataatgaaaacaaaagcaaaaattacagattccatacatttctcaaaggaagacatttatgcagccatcaaacatatgaaaaaaaggtcataatcattgatcagtagagaaatgcaaatcaaagccacaatgagataccatctcatgccagttagaatggcgatcatgaaaaagtcgggaaacaattgtggcaattcctcaaggatctagaaccagaaataccgt

SEQ ID NO: 375435 - DNA, 552 bp, Homo sapiens
ccaagaccactgaggcagtacgagtctgctggcgtcacagtgttactgggcttggggtaccacctaatacattccctttgaatacttagaaaaccttctcaartagaataggcacaattgagcccagactgcaaagattacaataaatatctaactcttcaatgcccagacatagatgaacattgacaagcatcaagaccatcccagaaaacatgacctcaccaaatgaaccaaatgaggcactaatgacaaatcccaatcacatatctcaggacagatatatgtaacctttcagagatctcaaaatagctgttttaaaagagctcagtgaaattcaagataacacagagaagaaattcagaattctattagcattattatatgccaacagtgaacaatctgaaaaagaaataaaaactaatccaatttatgacagctataaaataaaatacctagaaataaacataaccaaagaaatgaaaaatctctacaatgaaaactataaaatactgatgaaagaaattgaaaagaatgcaaaacaatggaaacaca

SEQ ID NO: 375436 - DNA, 552 bp, Homo sapiens
ccaagaccactgaggcagtacgagtctgctggcgtcacagtgttactgggcttggggtaccacctaatacattccctttgaatacttagaaaaccttctcaaawagaataggcacaattgagcccagactgcaaagattacaataaatatctaactcttcaatgcccagacatagatgaacattgacaagcatcaagaccatcccagaaaacatgacctcaccaaatgaaccaaatgaggcactaatgacaaatcccaatcacatatctcaggacagatatatgtaacctttcagagatctcaaaatagctgttttaaaagagctcagtgaaattcaagataacacagagaagaaattcagaattctattagcattattatatgccaacagtgaacaatctgaaaaagaaataaaaactaatccaatttatgacagctataaaataaaatacctagaaataaacataaccaaagaaatgaaaaatctctacaatgaaaactataaaatactgatgaaagaaattgaaaagaatgcaaaacaatggaaacaca

SEQ ID NO: 375437 - DNA, 614 bp, Homo sapiens
aattccaccctagaaatcagaaatgaagttccagtaaatttttaaatggcagattctccagttttaacagcaacacggcaaatataataattactatatctgctatattaatatcaaacatcaatagaatactttgtttccattattctttttattactactactactactattagaaatacttgggatactagtatctatagaagactatctctgagyatgaatttttaattataatttagtaaaagtgtatcttattagaatattcttacagtagtatgaatatgtttctatgtaaatatattataatgtttactctgggttcataaaaatgtaagacagttgaatatttatcacttgttcataactttactaatttcttaaaatcatttgctaaatttaaacctttaaaaatactggatttttattataccaagcttacaagtagtcatcatctctattttataataatgttctaggctgggtgcagtggctcacgcctgtaatctcagcactttcagaggctacagcaagtgaatcaacttgaggtcaggagttcaagaccagcctggccaatatggtgaaactccatctctactaaaaatacaagaaat

SEQ ID NO: 375438 - DNA, 491 bp, Homo sapiens
aatcaaaacaaaatagtgccacaaaatcttcgagagagaagaatcttaaaagtaggaagggatcaatagtgttgaacatcaattggagaataacaaattgacacaggttttgaagattaatcagtcaatggrgcagtagggagagcagtctcagtagactgctgggggcacaaaccagattgaattaagtttaggacagatgtgtgccgagtgaattgaaaatatacgtgtgagtctggaagctgtagtgtctacataaagatggttgacttgtgcatgttttacttacactagcattcttactgaaatgacaggaaatatatttacaagtagaatttatggcggtgctaaaaaaaataagtatactcaaacttttgtcttatttgggttgaaagttataggggttaatacattatcaatgttgtgtgaatatgtttgttaaaatgttaatagtcatttcactgcaaatccatatctgcatctatacattt

SEQ ID NO: 375439 - DNA, 622 bp, Homo sapiens
acttgtaattgaagtgctcagaactttcctgttttcagcacagaaattagagattctccaaaaccaatctgaaaatatcctgtattggttcagaggaatccaccattgctttttcccacagtacattttagtacctggtttttgtttttctgtaaatttgtagcctaaatataacagagccccaatagatgttcattcacatattaatcatttgcatatatttagaagattggaggggaagtaaagtttcatgaatttaatcagaatgattttgtagaaccacctggttttctttatttactgtagtgattttattgttgtcgagccagccagcagcattaaaactcaaaaactctaaacataacatatcaaataggctcaacaggactactgcatttcttccatctcaggccawctggttcttcatttagcctagattctactcatttatctacagcgtcaaggattgtgacaaactacattctattgtataaaaaagtgaagcaaatcaaagacaccatgaatcagtttatttgaaataatttcaaccttttctggagttatcaggttattcactggtaggaacaatcaagtttacttgaagcatcttatttattagata

SEQ ID NO: 375440 - DNA, 557 bp, Homo sapiens
actccctgatgtatccaaattcttggtcttctacttggtaacccaacctaagacagtggggatatctaaacaatttgcaccattagcactgaggttataaatcaaccaaaacatggtgtttactctgaagagggaacagaggtggaaaagcataatacatatacagagtctggcactgagcagcaattatattatttcttttaaaatagaggaataaagaaacaaaaaytagtcaaagactgttatggttatgttgagaggcaataacatccaacattaagaactcaggctctgcagcagacatctgaattcaaatataggtgcctccattgtctggtgggctgtccttgaataagtccctgaacttctttgttccttagttttctcattcaaatattgaggataataacagaacctacttcacagagttgttacgagtattaaatgagttataaatgtaaattttggcatagtgtatagtacaaagtaactactcaacaaatgaagtttttacaatatcatacacatccagaaaagtccttatcaaccaccattgt

SEQ ID NO: 375441 - DNA, 557 bp, Homo sapiens
actccctgatgtatccaaattcttggtcttctacttggtaacccaacctaagacagtggggatatctaaacaatttgcaccattagcactgaggttataaatcaaccaaaacatggtgtttactctgaagagggaacagaggtggaaaagcataatacatatacagagtctggcactgagcagcaattatattatttcttttaaaatagaggaataaagaaacaaaaactagtcaaagactgttatggttatgttgagaggcaataacatccaacattaagaactcaggctctgcagcagacatctgaattcaaatataggtgcctccattgtctggtgggctgtccttgaataagtccctgaacttctttgttccttagttttctcattcaaatattgaggataataacagaacctacttcacagagttgttacgagtattaaatgagttataaatgtaaattttggcatagtgtatagtacaaagtaastactcaacaaatgaagtttttacaatatcatacacatccagaaaagtccttatcaaccaccattgt

SEQ ID NO: 375442 - DNA, 520 bp, Homo sapiens
ggtaggtcaaaggaaacgtttgtttttagaagatatgagggacctgattgtctttatatactaagtgggaagagttaagggaggcaagagctgacagatcttcattttctttttgtcactgtgcaaaatgaaacaaccattttttccattgataataygtaaaggacagattcagtcctagtatatgcaattggccagaatctgccctgcacagcagctattcttcttcttcttcttcttttttttctttgagatggagtctcagcctaggctgtagtgcagtggcacagtctcggcacactgcaacctctgcctcccagttcaagtgattctcctgtctcagcctcccaagtagctgggactacaggcatgtaccatcatgcctggctagtttttgtacttctagtagagacagggtttcaccatgttggccaggttgatcttgaactcctgacctcaagtgattcatcatcctcagcctcccaaattgctgggattacaggcatgaggcaccatgcct

SEQ ID NO: 375443 - DNA, 520 bp, Homo sapiens
ggtaggtcaaaggaaacgtttgtttttagaagatatgagggacctgattgtctttatatactaagtgggaagagttaagggaggcaagagctgacagatcttcattttctttttgtcactgtgcaaaatgaaacaaccattttttccattgataatatgtaaaggacagattcagtcctagtatatgcaattggccagaatctgccctgcacagcagctattcttcttcttcttcttcttttttttctttgagatggagtctcagcctaggctgtagtgcagtggcacagtctcggcacactgcaacctctgcctcccagttcaagtgattctcctgtctcagcctcccaagtagctgggactacaggcatgtaccatcatgcctggctagtttttgtacttctagtagagacagggtttcaccatsttggccaggttgatcttgaactcctgacctcaagtgattcatcatcctcagcctcccaaattgctgggattacaggcatgaggcaccatgcct

SEQ ID NO: 375444 - DNA, 551 bp, Homo sapiens
ctctaggcatattgaaatatgtgtatgcctcttgctgtttcatatttgtgttttgatctagccccgtttcctacctggcaaaattgtcctagtgttttcaggctcagctctcatgacaactttttaaggaaattgtataaattcccctagttgtaacagctaacatctccctatgtgttttctgaacacttcttaatagtaagagcttccattatgcatcagggactgggtttgatactgttgaaagaaaaacttcagccaaattaaatttaagggagtttaattgagcaatgaaygattcacgaatagggtagcccccagaatcacaacagattcagagagactccagggatgcctcgtggtctgaacaaacttacaggcaaaaaaggggaaatgacgtgtagaaataggcagtgaggtacagaaacagctggattggttatagcttggcgtttgtcttatttgaacacagtttgaacactcagcagtgtatgagtggttgaagtatggctgctgagattggccaagactcaactattattacaggagca

SEQ ID NO: 375445 - DNA, 563 bp, Homo sapiens
tcaactattattacaggagcatactcctaagttaggtttccaatcttgtctacctattaagttaggatatggtttgtccacaaggtctcaaatatagaagtatggagtccttctcaggtcatatttagttctctttaacaagaccagtatcactaatccccaaggctactctaccaagtagatatgattacacctttttatcaaatatgataactgtccaagtttactwagccagtaagtggatgggccaggattttacctcgacctgtcatctctatgtcactagtctagtgtatgtgtctggctccccaactatattgtgcatttgaggacaacaatcataccctattagtttcgttttccctaccctggcaccaaaaaaaaatcacctatattatagttaaaactgcttgtggaacttcactgaagtaatttcaattaggctccttaacaggaagcataacatcacattatgaactgaacttcatccccacaaaattccttagctgaagtcctagcccttagtacctcagaatgtgactgcatttggagataggcccttt

SEQ ID NO: 375446 - DNA, 563 bp, Homo sapiens
tcaactattattacaggagcatactcctaagttaggtttccaatcttgtctacctattaagttaggatatggtttgtccacaaggtctcaaatatagaagtatggagtccttctcaggtcatatttagttctctttaacaagaccagtatcactaatccccaaggctactctaccaagtagatatgattacacctttttatcaaatatgataactgtccaagtttactaagccagtaagtggatgggccaggattttacctcgacctgtcatctctatgtcactagtctagtgtatgtgtctkgctccccaactatattgtgcatttgaggacaacaatcataccctattagtttcgttttccctaccctggcaccaaaaaaaaatcacctatattatagttaaaactgcttgtggaacttcactgaagtaatttcaattaggctccttaacaggaagcataacatcacattatgaactgaacttcatccccacaaaattccttagctgaagtcctagcccttagtacctcagaatgtgactgcatttggagataggcccttt

SEQ ID NO: 375447 - DNA, 509 bp, Homo sapiens
aaaaaattagtatcaagatttatagcaaggtattcagttcaaattctgtcatctctgctgactttccaagtagcatggagcaattaactcattgtatcatgtaaagtctttcttcatctggaaacgattagtgagttccttatcagacctacctgagaaaggaaagacttaatcccattctatttacaatcttcagctacataacaatgtgtcagtcaacatgaactgcatatacaaggattgtttcataagattgtagtaccatatttttactgtaccatttctatgttaagatatgtttagaaacacaaaaatatttactcttgtgttacaattgcctacagtatttggtacagtaacatgctgaacatgctgtacaggcttgtagcctataagcaacaggctatgtatactatataacytaggtgagtagtaggctctaccatctaagtttttgtaagcatactctatgatgtttgttcacacaatgacaaaatcgcctaatgact

SEQ ID NO: 375448 - DNA, 563 bp, Homo sapiens
gacaaatggacttgaatacacatttcttaaaacaaggtatataaaagggccaaaaagcatatgaaaatatgaccagcatctctaatcattagggaaatgcaaatcaagtccacaataagatatcaactaatagttgttatgatagacgctattttaaaaaaaaacaaaaatgaaaaataataagtgttagtgaagatgtaraaaaaattgaatccttgtgtactattggtggaaatgtataataaaatggtgaagttactgtggaaaacagtgtggtgattcccgagaaattaaaaacagaattactatatgatccagaaattccacttttgagaatatatccaaaagaatcaaaaacaggatctcatacagatatttgcacacccgtgttcatggcagcattattcacagtagccaagaagcaacctagatggtagcaacctaaatgttcatcaacaggtgaaggataaaaaaaagtgatatatatatatcatgttatatatatcacatatatatctcacatatataacatatatcacatacatatatcacatacaccccat

SEQ ID NO: 375449 - DNA, 563 bp, Homo sapiens
gacaaatggacttgaatacacatttcttaaaacaaggtatataaaagggccaaaaagcatatgaaaatatgaccagcatctctaatcattagggaaatgcaaatcaagtccacaataagatatcaactaatagttgttatgatagacgctattttaaaaaaaaacaaaaatgaaaaataataagtgttagtgaagatgtaaaraaaattgaatccttgtgtactattggtggaaatgtataataaaatggtgaagttactgtggaaaacagtgtggtgattcccgagaaattaaaaacagaattactatatgatccagaaattccacttttgagaatatatccaaaagaatcaaaaacaggatctcatacagatatttgcacacccgtgttcatggcagcattattcacagtagccaagaagcaacctagatggtagcaacctaaatgttcatcaacaggtgaaggataaaaaaaagtgatatatatatatcatgttatatatatcacatatatatctcacatatataacatatatcacatacatatatcacatacaccccat

SEQ ID NO: 375450 - DNA, 572 bp, Homo sapiens
tcataactggataaactcctggccgtggcagaagttacagtgtatggcctccaaggctagtcataaaagagtatataccttcagcacagctttgtagaagagcttgcttttggaccacagtctcttttccatgaggaagctgtatcagatggagtggactgtgtggagagaaaccaatactgtacactctatggccccagctgagtgtggtccaaccatcagtcagcaactaccagatatgaatggtgagycttcagataattccagcccttggctgtcaagttatccatagttttcctctcaccacagctaataatgctgcataaaacaaattcaagctctccctgatgggtctcacctacattagagatttctgaacaaaattaatgattggggtgatatgtttcacagtaaataattaacggacaagacttatctccattttgtatatggggcaactgaagttcatagtggatatatgatttaactagtaacacagcactattaaattatagagactgagctcaagttctattcactttctctatatagagttcttttgaagtttgttc

SEQ ID NO: 375451 - DNA, 637 bp, Homo sapiens
ttgtcacatgcataaataaataaaacacaaatgattgtcattgrttacatgctagctaacttgccaaatccaaacatgatggatttatttttggttactagatggtgaccaaaatcctatgtagtaagtctatataattggctaatatttcccttaatttatagtatagaatcaagatgtagtgtgaggatatacagttattttcttttcatagttcatgtcacatctctttttctttaaaataaaatatgttttgcactttccttttgtttggtgacaccatttattcaacctgctttaatatgggatagaataatatttctttaattttgtcctttaagtcttgtggactttcaaataatgactgcaaaattaatgacagtaactaataaacattcacctccatgaggtgattttgtaggctcataaggagcctacaaatgaacaagcctgatgttattacactttgggacattttgcaacaaatattattctgtggctacttgtagattgttcagtccatcagtaaaattttttctgaaataaatatataactcatggtaagtactaaaacatttacttgtaagaggttttatttcatgctttgagtttgttcatgaacatatgctactattag

SEQ ID NO: 375452 - DNA, 645 bp, Homo sapiens
attttgcaacaaatattattctgtggctacttgtagattgttcagtccatcagtaaaattttttctgaaataaatatataactcatggtaagtactaaaacatttacttgtaagaggttttatttcatgctttgagtttgttcatgaacatatgctactattagaaagattgataatcgcccaacattaaaatggctacaaattcattctcaatttaaaaaatcagatatttctggccctccataaaaataaacacaggaaattactattgtcaaaagttatctctaactaagrtgttcattaatataatcttagcaaaatcataccacttcagacaaaaccaccagaaataggcatcccatgtttaataaaaaaaggcttctttcttacagaaaaagtaaagatactgtgtcaaagaaaaaatgatatataaagaagttaatagggtaactgcataaatgggtccttaaaataaagaggtccagtaaaatactgtaatattttatttttttaggtctatttataaaacaacaaaagccaaaattgacaaatgggatctaattaaactaaagagcttctgcaaagcaaaagaaactaccatcagagagaacaggcaagctacagaatgggggaaaatttttgcat

SEQ ID NO: 375453 - DNA, 505 bp, Homo sapiens
atgataataaactgggacaacttagtaagatctgtttgttggaatttctcacggcatctctgtgtctttggctcctttcctccagataaagggagcgcatttctcaaatgaggatcctgtgacctgctctgggggagcagagtgaggaaaggtcagaaaattaccttcctaggttttgtgacctgcctcacaggaaaaaagcacagcaaagctaagagtagcyttcttgcttctactgttttctcaaatgccaaggtgccatatttgggataatgtgtcctgaagctcttcagaagcaaactatgaatggtttaaaaatgatccataatggttttgcctttagagtcaaccatagataaagctgatgggctgcagaggtggggaaaaaagctttcacacatcttttttccgatacatagtacaaagaactgaaagctgtgaaagtacttgatattatttcagaaatagcctccacacccaaacaaaccaaaagggtaaagttccc

SEQ ID NO: 375454 - DNA, 606 bp, Homo sapiens
ttttacatgatgtgagaaacttcgtaaggaaagaaacaccaaagaaataggtaaacttgtttttatgcttaaatttgattaaaagtgagcagtcatggaacaaaatggtatgatctaatgataataaactgggacaacttagtaagatctgtttgttggaatttctcacggcatctctgtgtctttggctcctttcctccagataaagggagcgcatttctcaaatgaggatcctgtgacctgctctgggggagcagagtgaggaaaggtcagaaaattaccttcctaggttttgtgacctgcctcacaggaaaaaagcacagcaaagctaagagtagccttcttgcttctactgttttctcaaatgccaaggtgccatatttgggataatgtgtcctgaagctcttcagaagcaaactatgaatggtttaaaaatgatccataatggttttgcctttagagtcaaccatagataaagctgatgggctgcagaggtggggaaaaaagctttcacacatcttttttccgatacrtagtacaaagaactgaaagctgtgaaagtacttgatattatttcagaaatagcctccacacccaaacaaacca

SEQ ID NO: 375455 - DNA, 579 bp, Homo sapiens
gaaatcaatctaagtgtctgtcaacagataaatggataaagataacgtgatatatataaacaatgggatactattcagccataaaargaaggaaatcatgtcatttgtgacaacatgagtgaatctggagaacattatattacatgaactaaacaaggcatagaaagataaatacctgaagacctcacttacgtgtgaaatctaaaaaagttgatatcatagaagtagataattgaatggtggttactcattcaacaattttttattaaatgtataccatgtgatcagagttaaaaagtgttgaggacagagtagtatgccctttgggacactaattgtgtttgataaagtctgagccagcaatcaaacccttttagagactcaccacttaaagtaatcatgcttgttctaatttattagttttccttcttccctatcaaaagaattgtatggaagcctttattttgttggaaatataaattataaatgtcttctctgctaaaatccgctggcttcagtcaagtctacttttaagtacatactaatcaacctgtgacaatcaattttattctggaaaac

SEQ ID NO: 375456 - DNA, 579 bp, Homo sapiens
gaaatcaatctaagtgtctgtcaacagataaatggataaagataacgtgatatatataaacaatgggatactattcagccataaaaagaaggaaatcatgtcatttgtgacaacatgagtgaatctggagaacattatattacatgaactaaacaaggcatagaaagataaatacctgaagacctcacttacrtgtgaaatctaaaaaagttgatatcatagaagtagataattgaatggtggttactcattcaacaattttttattaaatgtataccatgtgatcagagttaaaaagtgttgaggacagagtagtatgccctttgggacactaattgtgtttgataaagtctgagccagcaatcaaacccttttagagactcaccacttaaagtaatcatgcttgttctaatttattagttttccttcttccctatcaaaagaattgtatggaagcctttattttgttggaaatataaattataaatgtcttctctgctaaaatccgctggcttcagtcaagtctacttttaagtacatactaatcaacctgtgacaatcaattttattctggaaaac

SEQ ID NO: 375457 - DNA, 569 bp, Homo sapiens
cactatatatcacaaacatttttttcctgtgtgtgtgtgtaattgtgtttggaacaatatttttaaacccaaataacaattactgtgaaatgtatgtagaaatggttgataatactctgcttttcaattctctgagtatcctcttttcttcattttgtacaactttattaatkaagtcaccttcatcacatgtttgaaatatgtgacagtgtaaattaaagtgagaaattaaaggtcaagctgcataaagatgtcataatccgtagtcaatcatgagcatcaattggcaatgagggaagattctattattataggacaacttttcttttcttctgcttagcattcataagaagctgttctcgccttttgatgccgagcctaaccttccattttattgaataagagtttaaagctatttgtttagttattcttatctatgtttgaataataattagattttaggagtgaagtcattttactgatttgatgtataacccatcagatggccagaggaaaatttgttagtttcctacatttgactgcaatgaagagtaaattcaagctctctc

SEQ ID NO: 375458 - DNA, 569 bp, Homo sapiens
cactatatatcacaaacatttttttcctgtgtgtgtgtgtaattgtgtttggaacaatatttttaaacccaaataacaattactgtgaaatgtatgtagaaatggttgataatactctgcttttcaattctctgagtatcctcttttcttcattttgtacaactttattaatgaagtcaccttcatcacatgtttgaaatatgtgacagtgtaaattaaagtgagaaattaaaggtcaagctgcataaagatgtcataatccstagtcaatcatgagcatcaattggcaatgagggaagattctattattataggacaacttttcttttcttctgcttagcattcataagaagctgttctcgccttttgatgccgagcctaaccttccattttattgaataagagtttaaagctatttgtttagttattcttatctatgtttgaataataattagattttaggagtgaagtcattttactgatttgatgtataacccatcagatggccagaggaaaatttgttagtttcctacatttgactgcaatgaagagtaaattcaagctctctc

SEQ ID NO: 375459 - DNA, 562 bp, Homo sapiens
atccacagcaccctgggtggtacacaaagcccacttttctctgtccctcattggttaagggcccctgtttcctcaattggcttacactggttttacatatasataaagatagaagggaatgaaaacaatttatacaactgcacaatcgctcatcactctgtaaaatcctctattttaccgaaatgtactattgaatatgagaaagaacatgatcctctcatgcatggattccatattacaaacattccagtttctaataacttgccactgatgtttaccatgtcatggtctaatgaataaaatgaaagtgttatttattataccatatgtatatgtaggtaagtaatgtaggatagcatcttttggatgtcacccctcataattccagttcatatcaaaataacaattgacagtgtgtttttgaaattaagtacaaataatataacatcaaatatcccctccttaataacttaaattggacaatagagagtaaatttccagtagtttgctttctgtatccagaagccctcatagggttgctttgaggacttcttaccactca

SEQ ID NO: 375460 - DNA, 542 bp, Homo sapiens
aactagttggtttgaaagacaaaagctaaaaacagaatattagaaaaggttaaactatgatcacaagctggtgctgtggtccgtgttaccccaatctgttcagatatcatcctaaaactgatcctatgcctccttccgccccatgaacagtaatctggggactggtccgattcgtcttttgtcccagagaagcccatctaatgggaagtaaaatctgaccagtgatgaggatagtctaactggctctgtcctttcatcagggccataagactgtggctactccttcctttcttttactttttgttcgtaaaaatcaaataaytgagtccttttttaagtatctgatttacagatttcttaggcaagaaaaaacatgcctgtaggattgagagtactgaaacagtcatctgtaaagaactcaagctgaccgagtcaatattagcccgtttcttaatttgaaaagaaaacataaatttaatttaatttttaatgtttgattttatgtatttaaccatgactctttataaacatccatatgggta

SEQ ID NO: 375461 - DNA, 562 bp, Homo sapiens
atccacagcaccctgggtggtacacaaagcccacttttctctgtccctcattggttaagggcccctgtttcctcaattggcttacactggttttacatatacataaagatagaagggaatgaaaacaatttatacaactgcacaatcgctcatcactctgtaaaatcctctattttaccgaaatgtactattgaatatgagaaagaacatgatcctctcatgcatggattccatattacaaacattccagtttctaataacttgccactgatgtttaccatgtcatggtctaatgaataaaatgaaagtgttatttattataccatatgtatatgtaggtaagtaatgtaggatagcatcttttggatgtcacccctcataattccagttcatatcaaaataacaattgacagtgtgtttttgaaattaagtacaaataatataacatcaaatatcccctccttaataacttawattggacaatagagagtaaatttccagtagtttgctttctgtatccagaagccctcatagggttgctttgaggacttcttaccactca

SEQ ID NO: 375462 - DNA, 558 bp, Homo sapiens
caacaagtaaaccttgacctaattcctgaatagagacagcccagattaataaacctgtcatcaccaaacctttatagaagtcatgatttcactgagattctggaaggatgacttttctttatatatatataatgatgtcaatatcatctatatctatattcacatctatatccwtatctacatttatctgtatatttgagaagaaaaaacaaacaagtcttagaggcttttaaataaaatataaagaagagaaatctacagataaatattttctaacatcagggctttataattcagtagaaagagaaccaccagaaactttttcatgtcaggtgtaactagagtctgatattgggaaaatgggaccaaccacatgagtagggagccagttctgttgtgatttttaaggtctattttaaagacctccgtgccctgaaatagctcccacactggtacttgaaacccctgttagatatcttaagccctaaagactttggtcctcatatttccctattaaattgaaattgctttacaggatgtaacaccataggaagcacc

SEQ ID NO: 375463 - DNA, 566 bp, Homo sapiens
agaaaatttagtatgtagaggtttgggcactgaaagagttgatggaatctataaaagtggaatccttctcactggtaggatcaatgtttgttttggaagttttatttaaataaacgttatttatctgataagaggtaggattatgtaattattggggatttgttctactctggtgaatctaaaagcagtgtttttcccacacaaaaattactataacaatgataataacaaaaataatagagagggttcggcttatgattgtgattctatgatctctagactcattttatatgcccccttactattaagatagtatttatcggaatggatttcgttagactgctgtcttccttctgggggtagaagctgcattacagactattgactcacagagggtgaggcaaactgacaggagatggaggrtatagcaaaaggagggagtgaaagggcactatgggaattatagaggatgcaataggaattcaaccagcaccctaaattcagggagaggtgtatccaattttcattatggctgctaggctgttagagagttgtccctttaaaat

SEQ ID NO: 375464 - DNA, 494 bp, Homo sapiens
gagcaggaaaagaaatgttttctacttcagctctttatattaaatgaargtaatctctcatcacactaaaggaacatatttaagttcaatctatgcactgtgcaaagttgtgtgtgactatcaatgataatagtaacacctatattactgttataatataaaatgattttcattccactaactttaatattaccaagagagagcatgtcagactgggtgcggtggctcacacccataatcgtgcactttgggaagccgaagttggaggataacttgaacccaggcgttcaagaccagcctgagcaacatagtgagaccttgtctctaaaaaaggaaaacaaaaaattagtggggtcacctattcacgaggttgaggtaggaggatcactggagcccaggagttagaggctgcagtaagccatgatcacatcactgcattccagcctgggcaacagaatgagaccctgtctctaataataataataatagataat

SEQ ID NO: 375465 - DNA, 494 bp, Homo sapiens
gagcaggaaaagaaatgttttctacttcagctctttatattaaatgaaggtaatctctcatcacactaaaggaacatatttaagttcaatctatgcactgtgcaaagttgtgtgtgactatcaatgataatagtaacacctatattactgttataatataaaatgattttcattccactaactttaatattacyaagagagagcatgtcagactgggtgcggtggctcacacccataatcgtgcactttgggaagccgaagttggaggataacttgaacccaggcgttcaagaccagcctgagcaacatagtgagaccttgtctctaaaaaaggaaaacaaaaaattagtggggtcacctattcacgaggttgaggtaggaggatcactggagcccaggagttagaggctgcagtaagccatgatcacatcactgcattccagcctgggcaacagaatgagaccctgtctctaataataataataatagataat

SEQ ID NO: 375466 - DNA, 494 bp, Homo sapiens
gagcaggaaaagaaatgttttctacttcagctctttatattaaatgaaggtaatctctcatcacactaaaggaacatatttaagttcaatctatgcactgtgcaaagttgtgtgtgactatcaatgataatagtaacacctatattactgttataatataaaatgattttcattccactaactttaatattaccaaragagagcatgtcagactgggtgcggtggctcacacccataatcgtgcactttgggaagccgaagttggaggataacttgaacccaggcgttcaagaccagcctgagcaacatagtgagaccttgtctctaaaaaaggaaaacaaaaaattagtggggtcacctattcacgaggttgaggtaggaggatcactggagcccaggagttagaggctgcagtaagccatgatcacatcactgcattccagcctgggcaacagaatgagaccctgtctctaataataataataatagataat

SEQ ID NO: 375467 - DNA, 419 bp, Homo sapiens
ttctttctgtgcctggcttatttcaattaaagttatgttctccagtttgatctatgtcgttgtaaacgacaggattttttttctttttttaaggctgagtagtattycattgtgtatagtatcacattttctttatccactcatcttttgatggacacttaggttgattctgtttcttggctattgcgaataatgctgcaaaatcatgggagtgcaggagtcttttaaacataccaattttctttttctttggatatatattaagtagtgagattgctttttgaatgaaagtgcatattgtaattcttagataattttcctgggtcataaaagatcttattcttataagatcattatatcttataatcgattattccgtatctggagttgttctttaaatgctttatttcacacttgcc

SEQ ID NO: 375468 - DNA, 400 bp, Homo sapiens
tgttgatgcaacaggcaggttcccatggtcttaggcagctctgcccccgtggctttgcagggtacagccactatcccagctgctttcatgggctggtgctgagtgtccgcagcttttccaggtgcatggtgcaagttgtcagtggaattaccattctgggttctggaagatggtggtctgcttctcacagctttcctaggtggtgcctcagtaggaactctgtgtgggggctccaatcccacatttcccttttgaactgccctagcagaagttctccttgagggctctgcccctgcttcaaacttctgcctagacatccaggcatttccrtacatcctctgaaatctaggctgagattctcaaacctcaattcttgacttctctgcacccacagtctcaa

SEQ ID NO: 375469 - DNA, 564 bp, Homo sapiens
aggcagaaaggcagaaatcctgagttaagggcctggaagtgccatttacaacaaaataatctcagacaagtcacttgccacctctgagcctcaattccgtctttctaaaatggaaataatatccagagggctattttgagaattaaacagaatcaaatacaytgcagtattctatgaaaattcataatgtgatgcatcatctgcaatatttgtattattcagagaaacaaagtaaggcagaggggcttttccatttctcgtttgacagcacagtcatccaagaatgcagtgtagacaaaggacatacctttactcacaaacacgttctgaggactggcacagagccacaggggtgagcaggaagcaggcaagtgttttggagttgagtaaaatggacacagtcagtatgcagccagcacacagagactcacactcaggagatttgggagctttctgagagctcagctcctctggctgttcaccaatgaagtggtttataatcataaaaacaaagactaaaacctggcatttgttcaaaaatgcctctcacaaagcagaaaacac

SEQ ID NO: 375470 - DNA, 553 bp, Homo sapiens
agcccctaagtctatgctcttgagcrctgtactgcatcaccatgcctctgggaaggaatgcctgttacagtctgtctccctgcaaccaggtggcatcctaccttgcattacttgtttgtgcagagttggacattgatgcttcccaggtataagtgaggtgtgtggtacatgtgggttttgggctttgccctcacctagcactaagttgaaagtgattcagatttgaatactgtggttctattgagcttagtttgatgctagtttgaatagaatactggaacttatgtacaaagtctctgttaaaatatgtttatagtttctaaatattagattggattttcattcttcattacttgaaatttggttctatttttgtaagggaattgatcctacccacagttccctctctatagctagaatactatctcttgcattatttctttgtgcagagttggacactgaggcctccaagggataaatgggatatgaggtacatgtgtgtttggggctttgctgtgatctatcactaatatggttaaagcaattcaacttt

SEQ ID NO: 375471 - DNA, 478 bp, Homo sapiens
aatcactaagaatctaaatatattcaggaagacatctagctggttggaaaatccaatacaagcctgagttcaatgaatgaaatgtaagctgaaaatgcttagtgggatgaacctaaaagtacaatcatgttttcctcagatctattgtaacatataattttcgtatcataggaaataaaaagtagaaattctaattttcagaaaatayattaataaattagttaacattcctagcatatacttatttgcccacccctagtttttcttcccaattaacatccttagctcttcaatcccactgtttcttcctcagactgggatctgtacttcagatcccttcttaaggaatgatacagagccaatttcagaatataagttttacactaagtgttattcaactgccttaacactttgaacactgatatacaatttatataaaataaaatgcatacatcctatgtttatttcaatgagtttt

SEQ ID NO: 375472 - DNA, 478 bp, Homo sapiens
aatcactaagaatctaaatatattcaggaagacatctagctggttggaaaatccaatacaagcctgagttcaatgaatgaaatgtaagctgaaaatgcttagtgggatgaacctaaaagtacaatcatgttttcctcagatctattgtaacatataattttcgtatcataggaaataaaaagtagaaattctaattttcagaaaatacattaataaattagttaacattcctagcatatacttatttgcccacccctagtttttcttcccaattaacatccttagctcttcaatcccactgtttcttcctcagactgggatctgtacttcagatcccttcttaaggaatgatacagagccaatttcagaatataagttttacactaagtgttattcaactgccttaacacttkgaacactgatatacaatttatataaaataaaatgcatacatcctatgtttatttcaatgagtttt

SEQ ID NO: 375473 - DNA, 469 bp, Homo sapiens
acttcatataatatgcattaagtatttttatgtctatcttctttctctcaacataattttaagcacatttgaattaatttttaccaataaaaaattagttacaaaaagaggcggcctctatacaaaataaggatgctttttttttccattcacaaagagaatccactgacatatcttgccttgccaagtcraaactcaaatagcttgtttcggtataattattccagaaagataatccagacaatctctcaatataatttctaagattcgttcacattgtatctttcagtagtttcttcatttttatggttattacttcattgtgtgaatatacttcaatttcattatctatttgcctaatgatgaatatctgggttgtttctaagttttattatgaataaagctgctatgaacacttttatacaaatcttttggtggatatatgttttcatttcttttggggcaatac

SEQ ID NO: 375474 - DNA, 497 bp, Homo sapiens
tataattaaagtgcaagaatttcttaaaacaagcatcctatagccaaataatctcaagaaaaatttagaacagataggcttatacattaaacaggttgctacctcaattacctaggatgctagtatgcactaygattttcccaaggaagtatttagtatacagtttttcccaaacctgtttgaccttagaagcagttatttcactgaattttgaatatcagggaagaaatctcaatggagttaatacataatgggaaaacattaaaaacaaaacagaacaaaatcttcaaatatattaaacacagcaattaaaaactcaaatgccttcacaggcaaggcaacacacaaacaaaaagaacacaaagagggtcaagaataaaaaaacagatacttatttgtactgaaaataagtctagttgctttccattaaaaaaagaaatacatctagatcttctagtttgctacctttgtattaagagataattatatccaactcc

SEQ ID NO: 375475 - DNA, 609 bp, Homo sapiens
ggataaaccttttaaattttttacagataaaaaaattacaaaacagaagacaggtaagaaaatatacagactgacatacaaaaggatggacaatacacgaagaaatataatcaatacacaggttacagtaaaaaggtttaacatatgtgtagctggattaccataaagaaataagagagaaaatgaacaaatgcagtatttgaaaacacaataacgcagaacttactaatacattaatctagacttcagaagtggtgaaagtaccaagcaagatgaaaactaagaagactatacaaaagtcaaatccataatagtaaaacttctgaaaatcatagataaaaagaaaatagtagaagtagctgggtacagggaatgatggcacaatgtatgttcaaaggagtaacaagctgatcaacaacagatttcccaagagaaacaacagaagctaaaggacagtggaatcataactactgcaaaggsctgaagtaaaataactgctggcctagcaaaaataccctttcaaatggcaggtgaactaagaatacattcagacaaacgaaaatagagataatttgtcataagcatatccacacaaaagaaaatatgaat

SEQ ID NO: 375476 - DNA, 609 bp, Homo sapiens
ggataaaccttttaaattttttacagataaaaaaattacaaaacagaagacaggtaagaaaatatacagactgacatacaaaaggatggacaatacacgaagaaatataatcaatacacaggttacagtaaaaaggtttaacatatgtgtagctggattaccataaagaaataagagagaaaatgaacaaatgcagtatttgaaaacacaataacgcagaacttactaatacattaatctagacttcagaagtggtgaaagtaccaagcaagatgaaaactaagaagactatacaaaagtcaaatccataatagtaaaacttctgaaaatcatagataaaaagaaaatagtagaagtagctgggtacagggaatgatggcacaatgtatgttcaaaggagtaacaagctgatcaacaacagatttcccaagagaaacaacagaagctaaaggacagtggaatcataactactgcaaaggcctgaagtaaaataactgctggcctagcaaaaatamcctttcaaatggcaggtgaactaagaatacattcagacaaacgaaaatagagataatttgtcataagcatatccacacaaaagaaaatatgaat

SEQ ID NO: 375477 - DNA, 580 bp, Homo sapiens
taaactaagattagaaataacatacaataagcgactgacatttcctatttgtgaagccttgatcaaacgttatagattatgctagatataactgtggattayataatgaattttaaaagaaatttaaaaattgcacataaatcattatattctatactgtatttggttgatataaacacaaaggttttctcagagggtttaaaaataacaattacaaccttaatctcctattccactatacaaatttatatacatatatataatatacacatatccaatataaaatcatccatatgcccctgtctatatttcaggggtttctactattttgaaacctccaacattagcatgttaaaaattatatactggtaatttttaccttggtgacatatacacagatatttcagcccattaaccaccattcataatttaaccatgcctgtgtttatacctgtcaacttcctatctcatatatttctttcccaatcctttcttctttctgctcaaagcacagccgaaatgtatctttccttgtaatctttatcttttaactttatagcatgtagattgctttaaatta

SEQ ID NO: 375478 - DNA, 580 bp, Homo sapiens
taaactaagattagaaataacatacaataagcgactgacatttcctatttgtgaagccttgatcaaacgttatagattatgctagatataactgtggattatataatgaattttaaaagaaatttaaaaattgcacataaatcattatattctatactgtatttggttgatataaacacaaaggttttctcagagggtttaaaaataacaattacaaccttaatctcctattccactatacaaatttatatacatatatataatatacacatatccaatataaaatcatccatatgcccctgtctatatttcaggggtttctactattttgaaacctccaacattagcatgttaaaaattatatactggtaatttttacyttggtgacatatacacagatatttcagcccattaaccaccattcataatttaaccatgcctgtgtttatacctgtcaacttcctatctcatatatttctttcccaatcctttcttctttctgctcaaagcacagccgaaatgtatctttccttgtaatctttatcttttaactttatagcatgtagattgctttaaatta

SEQ ID NO: 375479 - DNA, 541 bp, Homo sapiens
gagaagaaaataactgaaaaacaattagttgtcattatgcaaataaaacagttgactgactgaatcttttatttatttatttwtttttccagctgttctgctgtgaagtaggggggcataagctttgaattctataaaggaagggatattaaactgatggattatttcttgcaaaagcagctgttggttttaaactacttgtactcaaatatgtatctctgcagacataaaatattttaaagtattatttttggttctacataggattttgaccatattttaaatgaaaccataatctttttagaaaaaagattccttaaaacttactaaataaaatcctgatattttagatctgaggacattgaagtccaatgactaaacaattcatttgccattctaaggtcacacaatttgttgatggctgagaaaggattctcaattcttatacttttattctggtaatcattctattaagctgcttctctcactgtactaactccataatatatatggtgcattaatacaagtgttagtaagatga

SEQ ID NO: 375480 - DNA, 602 bp, Homo sapiens
ttagaaggagtattttaggaccgtattaaccagacattaagaagttatagggtaaagaatcaagcatgatcaaatagatttatgaagtaaataaaataataaggatcaccttcatcagttaataaacctatgggacagatactccccacatggcatgttttgatacacatcattattttcctagatcctctgttacaaaaagaaaatttagtttccaaacttttaagtagttaacttgttttctaaaaaccttggttttggctatagtaattgattagcaaattcagagaagaaaataactgaaaaacaattagttgtcattatgcaaataaaacagttgactgactgaatcttttatttatttatttatttttccagctgttctgctgtgaagtaggggggcataagctttgaattcyataaaggaagggatattaaactgatggattatttcttgcaaaagcagctgttggttttaaactacttgtactcaaatatgtatctctgcagacataaaatattttaaagtattatttttggttctacataggattttgaccatattttaaatgaaaccataatctttttagaaaaaagattcc

SEQ ID NO: 375481 - DNA, 464 bp, Homo sapiens
gaaagcacacttagcatgtaaaaggctttcaaaaaaacctgtttaaaaaaaaaaaaaaaaaaaaaaacaaccttaatcatttttgtccagaacaacagtacacaaatctgatgaaattaaatcagtggcacatgttagtgacaggttcttcatccctgttttaaaaattttccaatagccatacaagtaagaaaaaaataccacttgtatcagtattacacaaacacagaagagatgccctgcttaaaattatttgctaataaattatayaacaaggtgaattatcaatacagataagactaccttcctctttccactaagtattctccaggactttcttcttcaaaactctaactctccaggacgttccttgatctccttgattttgtttattccacttctacaatgcaaagaatcctccaaagaaaagcagtggcaatactgaaagacccagattcaaaaca

SEQ ID NO: 375482 - DNA, 605 bp, Homo sapiens
ctggaatagatgactaaagcaatctgcatgtgcccactaaggatttcatttactgatgttaccttgatcactaattaaccataattaagttgaaaatattgtacctgattaggtgttttcttagggaactatcggtttaactatgytatatagttaactatggtaataagggagttaaaagctctgcttccatatagaatctgaatcttctttatgaaatgggcaaacaatgtctacatataattttgccataaattaaactaatatggctatgttgtaagaattttagaagtttatgtgtaagggaatgagggaggatagaaattttaaaaatatttcagtattagcatggtagatcagacacaagtatcttgggagaaacttgctcagcaactaattacatcccactccaaaataatatttagacccatttttctctaagaaacttaatttgaattatttgctgtctacctaacaattttatctttaacttagatggtctttattgaaagtaaaattgaaggcttctattttgtgcatcaatagaaataagaactaagaatttattagcttcaatgatgctaaatccccaaatatctccaaac

SEQ ID NO: 375483 - DNA, 564 bp, Homo sapiens
ttaaaaatatttcagtattagcatggtagatcagacacaagtatcttgggagaaacttgctcagcaactaattacatcccactccaaaataatatttagacccatttttctctaagaaacttaatttgaattatttgctgtctacctaacaattttatctttaacttagatggtctttattgaaagtaaaattgaaggcttctattttgtgcatcaatagaaataagaactaagaatttattagcttcaatgatgctaaatccccaaatatctccaaactaataattgaagacactgcttaaatgtgtcttcaagcagaaccttacctttagtcccacaagttttgctgatatctccaaatcagaatctcttaaaaatatttgtaatatactttgggaggctgaggagggcgggtcgcctgaggtcagtagttcaagaccagcctggccaacgtcrtgaaaccctgtctctacttaaaatacaaaaattagccgggcacggtggtgggcgcctgtaatcccagctactcaggaggctgaggcaggagaattgcttgaatccagg

SEQ ID NO: 375484 - DNA, 625 bp, Homo sapiens
gattcaccacattaaagagttccttgttcctgagygatgtgctgtagatcattaattctataaacatgcaagtagctgccatgtttttggtggatctgtgtcatatcactgccacagtgataaaggaagctgaagaagctccaacacatggaaaataaaccagatcactgcacaggctcatttatatggaacagaggactaagttggatgttaaacattttaaagatttcccattgcttctctttcctttgtcgggggtgtattttgcagaatgtatatgaaaataacttctaagtgatataaaagcttgcatcttaacttctaagtgatataaaagcttgcattttatatggggaaaatacatgtattcagactatttttaaccacttgaattttgcatctcttcctttttttttttttttttttttttgagacagggtttcgctctgtcatccaggctggagtgctgtggcacggtcatagctcactgcagcctcaaactcctgggcttaagtgatcctcttgtctcagcctaactcagagtagttaggactacaggtgtgtgccaccacacccggctccttccaattttttattgataacttttacttcccatgtcacacag

SEQ ID NO: 375485 - DNA, 575 bp, Homo sapiens
tcctttaaataattttcattaatgttttgcttaaattgtgcttgtcttttttcattaatatactttctatttttgaatggcagtacaaatttgaaaatacatatttttgataattgttaagaaggttaaaattaaaggagatatagttagcacttaaagataaaggcttgattcacattgttacttgaatagcttgtgatttgctatcctgtcttggccttttgcttcataccttagagaggttttttccttctattttttcttttgaaagtgagctagagaggaatctttgaaagtctacagtttagggaaaaaaatacatatctgaaagctagagttaaatatggcacaacttttaatttctcattcccactttgtctgcaaaaccrtttttgacattctactcaggatccctccttctcttacttggattacttgggtcagcagggtaaggaaataagtttttagaacgctttgtagtgtgacttcacacctgaaagtggcagaggacaaattaagtctggaagcctcaattggtatgtcagttttgctttaatgtataggacagatgtgct

SEQ ID NO: 375486 - DNA, 582 bp, Homo sapiens
tataagtgctaaagactctgagggagaactataggaggattaaggcctgtccactcttagaaaatggccaagacagatttctgctgaatcaacattatgtatgtcacacatgtaaatgatatcctttgatttgtaaccaggtctgtcattgcaataggcctggaggccttgagaaggattgcaccattgcccactcgtggagagccagggtggtccatttgccatcactgcatcccagcttctcagcattgsaccaggtgagtttcagcactgtaatttggaatgcacattttgttgcccagaaataacttttccttatacacctagagagtaaatcccaattaccaagatgcccagtttgggaacctatgtgtgcatctgtatgtataacaacaaacaagatacagggacacatctcttactattacaggcttttgttttatcttaatacctgttgtgacgttgcttcacaaaaggaagttgctttgccaacagttcactgtggaatatagattgttcataatgctgtcagctcataaaccccatactgtcctcattggggactgctgaacatgaaaagta

SEQ ID NO: 375487 - DNA, 582 bp, Homo sapiens
tataagtgctaaagactctgagggagaactataggaggattaaggcctgtccactcttagaaaatggccaagacagatttctgctgaatcaacattatgtatgtcacacatgtaaatgatatcctttgatttgtaaccaggtctgtcattgcaataggcctggaggccttgagaaggattgcaccattgcccactcgtggagagccagggtggtccatttgccatcactgcatcccagcttctcagcattgcaccaggtgagtttcagcactgtaatttggaatgcacattttgttgcccagaaataacttttccttatacacctagagagtaaatcccaattaccaagatgcccagtttgggaacctatgtgtgcatctgtatgtataacaacaaacaagatacagggacacatctcttactattacaggcttttgttttatcttaatacctgttgtgacgttgcttcacaaaaggaagttgctttgccaacagttcactgtggaatatagattgttcataatgctgtcagctcataaacmccatactgtcctcattggggactgctgaacatgaaaagta

SEQ ID NO: 375488 - DNA, 590 bp, Homo sapiens
tacatgtgtcattataatcaatgccaaatatataaagaccataccggcttgtatgtttggctgtttataatgctttaaatactaattcatctttttaattttcttctatgtattttgtttgtgaacaatcataatattccatgcgacctagataacaggagtatgcaatrgtgactttgttgggagtttaagcagagttcagtagctataaaggatttcactaataggaaaagaataagacaaactctctgttgacctttgtttcacattaaaatgaccgaagtttaacaccaaaatgacagctggttaaaacagcttgagatttcaaagtgcttcagtatatataaatattatgactgatcccataagtgtgttggaagacactttaagaaaggtccttggtttaacagttttctaccttctcccattttggttgaagggaagtatcactcaaaaaaagttttttgtcttctgaatttagagaaatagaataatttaaaacatgtagctgaactcaacagaaccaagattagaaggttaatactgtggatggaaattactactttgtggagaaccctaagcttcagatt

SEQ ID NO: 375489 - DNA, 536 bp, Homo sapiens
atccttccagaggtactctacgcatggacaagcatttatgtkcagttcttccttttttttttttttttttacccaaaaagtagcattctatacaatgcttccactttttacataggtggcatgcaaggcataccattctacactgtgcattcctaaccaaatagagtatagacttcattcctcttaattcccttttaagagccacattatatgcagatgtgcctgtctccagctgatggacatttaaggtatttggtcctggacagagaacttggaggttgtaggacaggaataagagggagataatttttaatgtatactactttcttgactttgataatgtgtatgtagtttgcatattcaaggggaaaaacattcgaagagtcaaaatatagtcacatgccccctttgcttaactaccttctgtaaatttttttactgtgaggataaacccagtccagacctacatggcctgcttgggcgggcctgtctgtctccccagagccttttggggactttgccctggtccccacact

SEQ ID NO: 375490 - DNA, 536 bp, Homo sapiens
atccttccagaggtactctacgcatggacaagcatttatgtgcagttcttccttttttttttttttttttacccaaaaagtagcattctatacaatgcttccactttttacataggtggcatgcaaggcataccattctacactgtgcattcctaaccaaatagagtatagacttcattcctcttaattcccttttaagagccacattatatgcagatgtgcctgtctccagctgatggacatttaaggtatttggtcctggacagagaacttggaggttgtaggacaggaataagagggagataatttttaatgtatactactttcttgactttgataatgtgtatgtagtttgcatattcaaggggaaaaacattcgaagagtcaaaatatagtcacatgccccctttgcttaacwaccttctgtaaatttttttactgtgaggataaacccagtccagacctacatggcctgcttgggcgggcctgtctgtctccccagagccttttggggactttgccctggtccccacact

SEQ ID NO: 375491 - DNA, 589 bp, Homo sapiens
aaagcaagcgcttttatgtcagagcaacatagattatggaagcctgtacagctaacatgtacgtgagaaaggaagaaagtggtaagtgctacagccattgaggtacccagaagccagatttttattttaagtgtgataaactgaagggtttcgggcaaaggaattgtactgactattggtagaaaagtcgaacattctatttamctgtttccatttggttttctagtttaaacaccactcacttactcactgctgtttcaaattcctccccagatgatctcctctttaacacctagagtagcaccctttttcctactttcctaatcctgacttctttctcaacctagcccagcttctttctcaactgcttcttagatgaagagcagggctgaaaaaatgtaatggtaagacatgaataacatttataatttaactctcctcaacagtaaaaaaaaaaatgtcttaaagcagttacaaggagagagctattgtttggaatacttgtggggatacacatctaatctacatgacgaggttaaagattaaatttaaaagactgtaaacaaatccacacctggaggaggaccgc

SEQ ID NO: 375492 - DNA, 515 bp, Homo sapiens
tggttctcatttaaatttctttagacatctcaatattatttttcataatggttgtaccaatctataaccccaccaagaatgtaccagggctccctgttctccacaactccaccaaaatttgtcttttgtttttttgataacagccatcctaatgggtgtgaggtgatatctcagcggttttgatttgcattctcctgatgattaatgatgttgggtgccttttcatatatctgttggccactttyatgtcttatttggagaaatgtcgacaagtgttcttttcccactttaaaatcaggctatttgctttcctattattgagttgtatgagttctttattaattttggatattatccccttatcagacacatggtttgcaaatatttttcccaatcaataggctgtcattttattttgttggttatttagtttgctgtgcaaatctttgtagttcaatgtagtcccatttatttatttttgcttttgtagcctgagctttttttttttccatttt

SEQ ID NO: 375493 - DNA, 591 bp, Homo sapiens
tcatatcttggctattgagaatagtgctgcaatgaacatgggagtgtggatgtctttacgaggtgattatttcatttactttgggtctatgctcagaagaaggactgcttgatcagatcatgatggttctcatttaaatttctttagacatctcaatattatttttcataatggttgtaccaatctataaccccaccaagaatgtaccagggctccctgttctccacaactccaccaaaatttgtcttttgtttttttgataacagccatcctaatgggtgtgaggtgatatctcagcggttttgatttgcattctcctgatgattaatgatgttgggtgccttttcatatatctgttggccactttcatgtcttattyggagaaatgtcgacaagtgttcttttcccactttaaaatcaggctatttgctttcctattattgagttgtatgagttctttattaattttggatattatccccttatcagacacatggtttgcaaatatttttcccaatcaataggctgtcattttattttgttggttatttagtttgctgtgcaaatctttgtagttcaatgtagtcccat

SEQ ID NO: 375494 - DNA, 486 bp, Homo sapiens
aataggctgtcattttattttgttggttatttagtttgctgtgcaaatctttgtagttcaatgtagtcccatttatttatttttgcttttgtagcctgagctttttttttttycattttttggtgtgatatccaaaaaattatttccaaggccaatgtccaggagctttttgtgttctctttaaggaattttatagttttaggtcttatattttataaattttgcatatatgtggaaattcaattttcccagcactatttattgaagagcctaaccttttcccactgtatcctcttggtgtctctgtcaaaaattagtttactgtatatgtttgaatttatttctggactccattctgtttcactgtgtctgtttttgagtaagtactatactgatttgtttactatagctgtgtaatataattttaaatcaggaagtatgatacctccgcttttttttttcagaagacaatttttagtgaaaaaa

SEQ ID NO: 375495 - DNA, 560 bp, Homo sapiens
taggatttgaacattttttaacaacgtttgagccttaatcgtaagaaaataaacagaagttaatatgagccaagcaatatagacctcttctttggagcattcttgtgcttcggtgtttaagatagtcagtgtctggtaggtaactaaagtcaaaaagaaaaatagggrgattatctttcaaaaaataatcatgaactgatttgtcataaaatttagtatgtaatgccagagaaaaagcagaactatgtataattcacggttgtatacttccgtttgttctttgccacttcttaggtagagaggagtatataaattctctaaaacatgcaaattaactcatttatgtaattgattacttatagttaataattatgtaaccatttattttaaaagtatactgtacccacttctgaaaaggcttcggggcagtttacatattaacccatagttcaaaggcacattatcatgtctcagtactaaatgaattagaccctggaaaacataaaggaggtgatgctctcaaagactggttatggtcagagttttttgaatggctccca

SEQ ID NO: 375496 - DNA, 611 bp, Homo sapiens
ttgtaatagagatttcaaaaactgtggagctggttttggtagggtatgtattacagagtgactgatactccagttatctggttcctgggcagcccaaatgctcaggtaactatcttaggaaaaccaaagacttgactgagggctaccactttctgaaaaatgctgggagtccaacggtttgttaggcacctaggggtgtcttctcattcccctcctgacagcaagatggcttcagtagctgtggcatcacatccctatgcaacaacacttaagagtcaaacaaaggtctgtttctctcttgtgtttctttgttaaaggggcaacaaaaatcctttcccaaactcctcccccatctgtactaccagaatatttttctccagtctcacagccaaaaccaggtcacattccaaacctctaaactggttacagaaatggggaatgggggcagaccaataaggatttacttcaatcacttaagggtctagggcactagtacacaattaaggtctgtcctcaaggacacrgaaggaaatggctgttgaacaggcaactctcagtctttgctaaaacgagtgtcatagtagaacaaatattggatttagagtcaggca

SEQ ID NO: 375497 - DNA, 510 bp, Homo sapiens
tctctgttatgttggtaagaaaatggctttgaagcaattgactaattaatgttattgaatacagkaaacacagattttaattgtttgatacaaatgaaaacattaaatgactgcaatcaagtttagagacgggcaaaaatgtttttgataagcaaaagcacacatatatgtgcagagttgcctttgtcctgcttcttgcattggccagatcttcgaagagatgtgtgagtgaagcacttggtagatctatgaatggaagaaaattgaagacatataccaaaaaataaaaagatggtcctatggagtgtggttgttctaacactgaagtgacagagagcagcttagctggtcaaagttagacagtccctttttggaggaatcttctctcagcacactaggtaaaagacatgtttctttagccctccaaaaatacctaacatttataaggcgtaattgcgtgttttgcttaagaaaaaaagtccaatttttaggtaaagccaataataaagt

SEQ ID NO: 375498 - DNA, 399 bp, Homo sapiens
cattttaatagatgtatagtggtatttcaatgttttaatttgcatttccctgatgacatacaatgtggaatatcttttcatatgcttatttgccctctgtataacttytttggtgagatattgcttagttctttggcccattttttaaaaattgagttgttcattttcttttgttgagttttaagatttctttgtatattttggataacaatacctttatcaaataggtcttttgcaaatatttttctcccagtctgtggtttatcttcttattttcttgacattgtctttttcagagcagaagtttttaattgtaatgaaactcaatttatcaattatttctttcaagaattgggcctttggtgttgtacctaaaaagtcaccaccatacccaaagtc

SEQ ID NO: 375499 - DNA, 569 bp, Homo sapiens
aactgatgtcttgacaattttcagttttcctatacttgaacatggactatctctccatctttttatttcactgatttctttcattgcagttttgtggtttttcttatatagatcttgtacgtattttattaaatttatacctaagcatttaatttttggagaagataatataaatggtattatgtttttaatttcaaattccacttggtctttgctagtgtaaagaaaagcaattgatttgtgtatattaaccttctacaccgtaactttactataatctattaatttgttttgttgttgttgtcatttttgtttttttgctttttagagacgggtcttgctctgttacccaggttggagtgcagtggcrcaatcatagctcactgcagcctcaaattcctgggctcaagtggtttttctgcctcagcctctcaagtagctgggactacaggtgcacaccactgcacctgggtaattttaaaaattatttttgtagaaacaaggtcttgctttgttgcccaggctggtctcgaactcctggccacaagcaatcctcctgtctcagcttc

SEQ ID NO: 375500 - DNA, 540 bp, Homo sapiens
caagccaaaaatcttcctgttatccctgactgctctttttttttttttttctcatgccctggatacatgatagctgtgcccgtatcttcaaaataagccaagcatctgactacttcttatcacctcctctcttgctactctggttctagctgccatcatctctggcttgaatgactgtgataatctcttaactggtatccctgtttctacttccctaccatcactcattctcaaaagagtgattcgttaaacatgtaagccaggtgatatcattcctttgttgcaaatcctcagtattacctagaataaaagccaaagtccttacagtgatttaraaagctctgcccagtctctgaccctctcccaggcactcaggctccttctgccctgctggcctctttttcccagcacccattgccttgaggtctgtatgtgctcttccctcccactcacatgctcatcaccccctccctcacttcaaatcttagctaaaagatcacatgttcaaagagaacaacatgactaccctatttaatagtg

SEQ ID NO: 375501 - DNA, 609 bp, Homo sapiens
tttggggaaggaaaaggggtaaaggatgtaatgtttgtcaataatatattatttccaaagtgtgataatatattactttctctaattattacaacaaattttcaaagcagttggcattatgcctattatgcagaagatgcttctaatttcacctcgttctgggaactggcagagttaaggggttaaaccaaagacactacctccaaaaaaaaggtctttgcctgtgaaaggggtgattatgtttgttcccattttcctcctacaaaggtctctcctgttctttattgactcacagaggsggcctctattgctggaatcttggtcccatttgttaaaattacctctattgaggacacggcttgtattgagggaccacatttcttccctgtggagcacagtcctgccataatttagcctctccactgcataggtcttgatgacttgggttatgtaggataagggtcatgatcaatgaaaagttcagtttatgaaaagtctgcaggactttatggacaactgataactcacttcttccagaataagatgatcagaatatctgaaacatgaacacgtgagataaaatagttgaaaatctggcaggaaacactg

SEQ ID NO: 375502 - DNA, 609 bp, Homo sapiens
tttggggaaggaaaaggggtaaaggatgtaatgtttgtcaataatatattatttccaaagtgtgataatatattactttctctaattattacaacaaattttcaaagcagttggcattatgcctattatgcagaagatgcttctaatttcacctcgttctgggaactggcagagttaaggggttaaaccaaagacactacctccaaaaaaaaggtctttgcctgtgaaaggggtgattatgtttgttcccattttcctcctacaaaggtctctcctgttctttattgactcacagagggkgcctctattgctggaatcttggtcccatttgttaaaattacctctattgaggacacggcttgtattgagggaccacatttcttccctgtggagcacagtcctgccataatttagcctctccactgcataggtcttgatgacttgggttatgtaggataagggtcatgatcaatgaaaagttcagtttatgaaaagtctgcaggactttatggacaactgataactcacttcttccagaataagatgatcagaatatctgaaacatgaacacgtgagataaaatagttgaaaatctggcaggaaacactg

SEQ ID NO: 375503 - DNA, 526 bp, Homo sapiens
aaaacgttcattttcctctttcaatgttagagtacctctttttacctccttcttaggactttcccaagagagtgaagttgctaatttatcagtcagagcccaggacattccttatgcattctaacatttgtacaggtttccattccttgaatgcaacatatgttgtaatctctcttccatatgtaccaccaacttgagagtcggcttcacttatgttatgggagattctgccaactcccttaacaagcccaactttcatttgtccagggttgatagggggaggaaagatctcaggggtaatgtggstgcacctcacagccgggggcccatatgtctgctgagattggccttcccattagagatggcactaaccaccactgcagtcactactcttgcctagaagtactgcttcttcaatgccatggcccaaaacatgactcagggtccttcacttgggtcaccaaagcaccccttgaggaagtcttctcactcactctcagtggggacagtgtgggcccatttagag

SEQ ID NO: 375504 - DNA, 593 bp, Homo sapiens
atttttctaacacttgttattatgtgtcttctttactatagccattttagtgagtatgaagtgaaattagcaattctctgatggctaatgatattgagaatttctcatataactggccatttgtatatcttgtttggaaagctgtctattcaaatactttgccyatttttaattatttacccttttattattgaattgcagtacttttttatatattcttgatagtagactcttcagatatatgaactgcaaatatcttctccaattttgtggtttatcttcatttatgtgataatgtcctttgaagcacgaaagtttttaattctgttaaaatccaattcatctatatttccttggttgcttatgcttttgttgttatatttaagaaagtattacctcattcaaggtcacaaagatttacacctatgatttcttctaagagttacaaaactctctgctctgacatttaagtctttgattcacttttagttgacttttgtacatggtgtgaggtagtggtccaacttcattcttttgcatgtggttatgtcccaccagcacttgttgaaagactattcttttccccattgaat

SEQ ID NO: 375505 - DNA, 593 bp, Homo sapiens
atttttctaacacttgttattatgtgtcttctttactatagccattttagtgagtatgaagtgaaattagcaattctctgatggctaatgatattgagaatttctcatataactggccatttgtatatcttgtttggaaagctgtctattcaaatactttgcccatttttaattatttacccttttattattgaattgcagtacttttttatatattcttgatagtagactcttcagatatatgaactgcaaatatcttctccaattttgtggtttatcttcatttatgtgataatgtcctttgaagcacgaaagtttttaattctgttaaaatccaattcatctatatttccttggttgcttatgcttttgttgttatatttaagaaagtattacctcattcaaggtcacaaagatttacacctatgatttcttctaagagttacaaaactctctgctctgacatttaagtctttgattcacttttagttgacttttgtacatggtgtgaggtagtggtccaacttcattcttttgcatgtggwtatgtcccaccagcacttgttgaaagactattcttttccccattgaat

SEQ ID NO: 375506 - DNA, 527 bp, Homo sapiens
gcacctcccttaaaatgccaagcccatcataacgctatgcctttgccactgcagtgtcctctgcctgcaatgctcttccttctaaaatgaatttctacctatacgtaagactttgcccaacatgtatctcctcttggaggttttttatgaaaaaagttaatatctccattctctctgcttccccagcactagtgcattgtaattatttatttccatgtgcatcttttcaactacaatagctaatagccatgtgtggctactgttattttaattaattaaaataaaattaaatgtaaaattgtattattcactcacactaactatattcttagtgcccaacagctacttatattagacagtacaaagaacatttctgttaattgcagaaaattytactggacaatactgttttaaattgtgaatgcttcaaaggcagaaatgtatgaattttttaagcctctttccaacttgtactgatatgcagtagtatttttgaataaacgatttaaaaagtcacaaaaaaaaaa

SEQ ID NO: 375507 - DNA, 590 bp, Homo sapiens
aaacttcctttaatttgtgattcaagcctgaaaatctcatgagaacagatgctcttgtaggttttctttacttcctgcttccattgtgggaaacaggtttccacagaaatttttacatgcattaagtctgaatgcatgatgcctagggacttttatccattcaaattcaaattcgatattgtttttacccagttgaaatttcagttcttatctgaacttatcttctcatctgaagaaagcttagtatctctattatgttctagtagttttggtcgctgttctctccttgaagctctttctttgttaatcctctgtggcattggtttttctcaataytccatctagaaatacttcatctcttgatgctccagttgcagttacatcttatcaatttttgctttgacctttgtttactctgaatgatcctgcattatttggtattttccggacttttcatccacatagtacatgtacattgagcacattttgtgtgcctggcactgttacatgcaccgaattcaaagcaataaacaaaggaagaaaaccccaaatcctgctctcatgaaacacaactcgtattgggagtaagc

SEQ ID NO: 375508 - DNA, 466 bp, Homo sapiens
aatatattttgggatggcatgtcctgtgccctgagctccttcaacrgctagttttgtttaagaagaaattcaagtataattgttaagaatgaggaaattaggtggacattatgggatacattagtcctcctttagccaaggttttgctttctgtggttttagttacccaaggtcaactgcagtctgaaaatattaaataaaagattcccaaaataaacaaattataaattttaaatggcctgccattttgagtagcatgatgaaacctcatgctgttctgttccagcccacccaggatgtaaatcaccccttagttcagcataaacaggctgtatgcattacctactggtgagtcactttgtagccatttcaatgatcaaatcaactaactgttttcatatcacagtgctagtgttcaagtaaccctaattttacttaatagtggccccaaagggcaagagtagtg

SEQ ID NO: 375509 - DNA, 456 bp, Homo sapiens
  misc_feature (1)...(456): n = A,T,C or G
ctagctataggtcttggagtcattctcaacttttctcttccctaaccctcagcatttaatcagagataaaatatattctatgtctgaaatatcttgactccatcttctcctttcaagccccatctctcagctgattcattttaatagccattttactaccctcttcctttccctccttaattcactgtccacatttccaccagcattgttatgttcacattcccctcctatccctgatccctgccccattttctatagaaaacaaatkcttattcatagtttcaaagtctccacaatataaccagagcctaccctcacaatcttgcttacttcccacaatcattcttatctcttctttttcacactcatctacacagccatacatgcctgcactataatctagacgatacagatttgttagatacttgttaatccnnnnnnnnnnnnnnnnnnnnn

SEQ ID NO: 375510 - DNA, 498 bp, Homo sapiens
tttggagggctaaggtggaatacagtggattgaatgtttgtgcccccatcacaaagttaatatgttgaaatcctaacccccattgtaatggtattaagaggtaggctctttgagaggtactcaggtcattagggtggaacacttattaatattaatgtcctttataaaagggaccccagagacctttttctctctcttcctgccatgtaagaacatagcaagaacaagctgtctatgaaccaggaagcaggccttcaccagacaccaaatcttccagtgccttgatcttagactttctgagcctttagaactatgaaaaataaatttatgttgtttatgagacactcagtttayagtattttgttataccaatccaagctaactaagacactgccattagttggcatctaggcagttatggtccttgaaatatatgttctgattgagtccagtcctattggagagatgattatgtcatggaaacctcattgttggagc

SEQ ID NO: 375511 - DNA, 563 bp, Homo sapiens
tttaaaatatttgagagaatacagcacaccagggagaatactattatggctctctggataataatattaggagtttggagtttgtcacttagctaggatccccataaactaaaccaacaaaaatcaaataggtgaaagaatgaaccagatgaggaatctacccattttagccaagcagcctgtctcttctacttattcatgtgcaacaagaagtgtcagctactgtgcagattccttcctgttcagccagtaggtagcgattccattatctagtatcccatgacttggttacgttamagcagggagtcagagcaagtgggtccagaggtctgactcgataaaaaggggccactggtacaagtcaaaggataattgcattggagatattgctacagtttacccactgagtgggctaaaaagtcacttagttcatgtaaagatctgggtttggcatgacagatctgacattttgtcaaattgcctgcataaactactgattctgaaattttaaccacagcattatcctgccaagtgagaaagataggcataagcaagggaacatt

SEQ ID NO: 375512 - DNA, 620 bp, Homo sapiens
ttcacttaacatagttgatttacagttccatctataatggtgcaaatgacagtatcttttttaggactgaatagtacttcattgtgcacatataccacattttctttatccatttgtctgttgatggacacttaggttgcttccaaatcttgctttcctgcagtattggtgaacagtgctgcaataaatatgaaagtgtagatatctcttcaatatactgatctcctttcatttgggtatatacctatcaatggattactcaagcatatggtagttttatttttaatttttgaggatcctccgtactattctccacagtggttgtactaatttacactctcaccaacagtgttacaggtttcccttttctccacatcctccccagaatttgttattgcctttcttttggataaaagtcattttaactagggtgagacaatatctcattgtagcttttcttyatatttttctgatgatcaatgatgttgagtacctttttatatacctatttgccatttgtatgtcttcttttgagaaatatctattctgatcttttgcatatttttgattagattattagattttttccttttgagttgttcaagctgcatatgtattct

SEQ ID NO: 375513 - DNA, 584 bp, Homo sapiens
tagtttgtttggtgaggtctgttttcctggattgtcctgatgcttgttgatgttcatcaatgtctgggcattgaagagttaggtatttattgtagtttttgcagtctgggcttgtgtgtacctctccttcttgggaagagtttccaagtattcaaagggaattgagtgttgtaatctaagtttttggtcactacagctatatatgcattagggagcaccctaaacttagtaatgttgtggttcttgcagactcaattaggtaccactttgggggtcttagatataatctaagagaattccttggattaccagacagggattcttgttctcctccctattttcctccaaacaaatgaagtctctctctttgtgatgagctgcctggatctggaagaggggtgacacaagtacccctgtggtcactactactggaacagtgcttgstttaacctgaagccactacagcactgagtttcaaccatggcccataggaatcactccctggctaccatcaatattcactcaaggcccaagggctcttcaaacagtacatggcagacctagccaggcttgtgtccttcccc

SEQ ID NO: 375514 - DNA, 543 bp, Homo sapiens
gtcttacccaaggctcacggtgaatactgcttggctactattggtgtttatttaaggcccaagggctctttagttagcagatgatggatcccaccagaatgtgtttcttcccttcaaggcagtgtgctccctcttggcccacagtatgtgtagaaatgtcattcaggaggtagtgcctggaatgggggcctcaggaatccaccttgtgccctattctactgtggctgagctggtatccacgttgcaaagataaattcctctttactcttctctcttctctctcaagtccaaagaaggtatcactcccaaagctgcattgcctgtggtgggaagaggcatgatgcaarcactttgttggccactttagcttgcatctcactaggtcatgtgtaccccaagattattggatcccagcccagcacaacttcaagacttgcctaggaattacagcccttgttgcctagactgcctttgaggtttatttatgtccccagaacaatgtagccggtggtggtggcattaacaggagctcaggttctgacc

SEQ ID NO: 375515 - DNA, 519 bp, Homo sapiens
attgtttacttgttttagtgcttgctttataatttgtaaaaaaaaaaccctaatccaagtccacttttaaataacagtataccattcacagttagtgtgagtgctytatgttaaccagatacatttaatgcccccattctttgtatgattcttattattcatttcatttgtatgcaaacatgcatatatatgtatatgacatatacgtaagcatacctaattgaatacattgttgctatgactcttttaaataagttgttatctgttagaacaattaagaataaaaaagcttttattttaccttaacttatttcttctttaatgctttcttcatgtagaccaagtttctgacctataagattttccttctcgctaaagaattttgtttttaacatttcttgcaaagcatgtctactgtcaaaaaatattttcatttgggtttgtctaagaaagactttatttctctttcacttttgaagaataattttacatgatatagaactatagtttggcagtttt

SEQ ID NO: 375516 - DNA, 651 bp, Homo sapiens
gatatctgatgtctcagaataaggtttattattcttacacctgtgattttataacacatttgccaaattgcataaaactkgttgttttggtttattttcatgttaaaagtattataattattttcatgctttgattgaaaaagttttttaaagtatgagtaaattcaactattctcaatattctcaaacaaaataaagtactaataattcacacacattcacaaaaaacatttctttgttaattttttctgactttttcagacaacagagttaacattaggagtattacctatcatcataatgaaaatctaagtttcaggcatctatttccactatatttactcattatttactcaataatgaaggtaaatgttcaggcaagaagacaacagatattttcaatttaaaacttcaaggctagaggagtctttttcaagataacatcatttcctgcaaaattatgactgagatttttattgtgattaagttttcagtcctttacacatttgcattcaccacatctaaacctaagacaagatcaatattcaatcatataactatattatttgtctttgtttttttctcttgattttctcctttagaatcttgtcataacatatatatatatgattacatcccattgttttctct

SEQ ID NO: 375517 - DNA, 651 bp, Homo sapiens
gatatctgatgtctcagaataaggtttattattcttacacctgtgattttataacacatttgccaaattgcataaaactggttgttttggtttattttcatgttaaaagtattataattattttcatgctttgattgaaaaagttttttaaagtatgagtaaattcaactattctcaatattctcaaacaaaataaagtactaataattcacacacattcacaaaaaacatttctttgttaattttttctgactttttcagacaacagagttaacattaggagtattacctatcatyataatgaaaatctaagtttcaggcatctatttccactatatttactcattatttactcaataatgaaggtaaatgttcaggcaagaagacaacagatattttcaatttaaaacttcaaggctagaggagtctttttcaagataacatcatttcctgcaaaattatgactgagatttttattgtgattaagttttcagtcctttacacatttgcattcaccacatctaaacctaagacaagatcaatattcaatcatataactatattatttgtctttgtttttttctcttgattttctcctttagaatcttgtcataacatatatatatatgattacatcccattgttttctct

SEQ ID NO: 375518 - DNA, 513 bp, Homo sapiens
ttctcaattaaaacttaagaatatatgaatatttgtggcttctagagtttgacctctcagtacctaagctattcctgatttatacttggcaatctgtatttattcttcagttcatagaatattagggtcagaaagaaaggtttaaaatcacccattgaatatctggaaggcttaaagagtagcagttcaagaatcaggcagagctggcttgaattctggtttcacagtttacaggctgtgtggtattgaataaagtgcttcaaatattgaatccccagttttcctatctgttaaatgaggataataaataacacttcctgaggagagaaacagaagattaaataaaataaagcaaaaagtaatatgctgtaattccctcagaagcattgtgtttcacagttgtcagaattctgagttytaagcaacagaaactgactttggttacattaatcagaaaaggaatgtattggcaagatagcaataacttagagaattaatcaacagttgagaatt

SEQ ID NO: 375519 - DNA, 577 bp, Homo sapiens
gcttaaagagtagcagttcaagaatcaggcagagctggcttgaattctggtttcacagtttacaggctgtgtggtattgaataaagtgcttcaaatattgaatccccagttttcctatctgttaaatgaggataataaataacacttcctgaggagagaaacagaagattaaataaaataaagcaaaaagtaatatgctgtaattccctcagaagcattgtgtttcacagttgtcagaattctgagttctaagcaacagaaactgactttggttacattaatcagaaaaggaatgtattggcaagatakcaataacttagagaattaatcaacagttgagaattagactctggcagaaaaataaggaaagcaggttatgagcctgaagtctgcttaggacataggaattgatactgctgctactggattcttgctgccacaccagtagtctctcaaaccttccacattggctgggaaaaatctctaaccctcattattcaaagctacaggcaagagaatcttactagataaacttgagacatgtacctgtatgctattgtccagaggataaataaga

SEQ ID NO: 375520 - DNA, 548 bp, Homo sapiens
agttttgctgttttgtaagaattcaggacctttaagtttgtttctagtttttctttcatgaatggacagggggaatgcataaaagaaatcattttatttatctatgacaaaatgttaaattacctaaagctgaagctgaagcattttgtgcaatgtgtatatattgtttatatatatatrtgtgtgtgtgtgtgtgtgtgtgtgtgtgtgtgtgtttctctctctctgaatgatgcaacagatgaaaactaaccaatagagaggatatggtttgatgcttaagaatgagccaaacaacaaacgggaaactgtgtactgtctgcgtgacaaatgcaacttcatttaactgttatcatttgaaaataccaagtatactaatcttgttcattgtttttgtttcttttttgagacagagtcttgctctgtcacccaggctggagttcagtggtgagatcttggctcactgcaacctctgcctcggggttcaatcaattattgtgtctcagccaccggagtagctgggattacaggcatgcgccatgatgctc

SEQ ID NO: 375521 - DNA, 548 bp, Homo sapiens
agttttgctgttttgtaagaattcaggacctttaagtttgtttctagtttttctttcatgaatggacagggggaatgcataaaagaaatcattttatttatctatgacaaaatgttaaattacctaaagctgaagctgaagcattttgtgcaatgtgtatatattgtttatatatatatgtgtgtgtgtgtgtgtgtgtgtgtgtgtgtgtgtgtttctctctctctgaatgatgcaacagatgaaaactaaccaatagagaggatatggtttgatgcttaagaatgagccaaamaacaaacgggaaactgtgtactgtctgcgtgacaaatgcaacttcatttaactgttatcatttgaaaataccaagtatactaatcttgttcattgtttttgtttcttttttgagacagagtcttgctctgtcacccaggctggagttcagtggtgagatcttggctcactgcaacctctgcctcggggttcaatcaattattgtgtctcagccaccggagtagctgggattacaggcatgcgccatgatgctc

SEQ ID NO: 375522 - DNA, 552 bp, Homo sapiens
aacttaattacatttcaaagtagtacagtaacatgaaaggaacaaaacatttttgttcaacagtttgcctaccagatgggatctctaaatataggtaatctaaaacctttgcttgtcctataaacaaatacagatgaaaggaatagcaacaatagctaagcatttaaatcactggaaataaaatagcactttggttaagtgtggaagaatctggctcattctaataatgaatctgggaaggctggagttctcagtgaaattcagaatacagaaggttgcttctggtatttaccacctgcttatctacctgtttaaactggtagaatagttggaagaacaaatcaggaactaatagcagtagacttgggaaaaactaaagaagcacaggaacacctaataaatagagactctaaagggccacaatacaaattccagacttttgtttttgaaataasagttgcgacatgcccttgcttcatttctgtgcactcatgtgtaaatgtgggtaatagttaagaacctatgctctggagtcaagcccagcatgtgaat

SEQ ID NO: 375523 - DNA, 329 bp, Homo sapiens
tagtgtttttcattatcagctactagtgatttttcagtcgtaattgcccattgctttttccaggctcccatactaatgtagacaattgagattcacagttaacttagatactgttwacagattatctcttttctgtaagccactgtgccatggctggagtgctttctctcactttcctttttgctgcttctctttccttcctttccctttcccgcctgtgtcattaaacttccaagatagactacaggggcaggacccccagggacaggcatcttccactacctgcccttagtaacgtgtgcttaatgctgtatcgttacttaacactc

SEQ ID NO: 375524 - DNA, 547 bp, Homo sapiens
gcacacaatttataatgatgtaatttcatgacatcaacaattgaatggggtaagaattgagctattaaagaagtagagtttttgtatattattgaagtcaactggtataaattcaaatcagagtgttacatcattaggatgttaaatataayatccctggcaattacaaagaaaatagctatagaatatatacaaaaggaaacgagaaagaagtttaaacaaaaagtcaactaaatacagaagaaggcagcaatgcatgaaatgggtgacacaaaagctacaaaagttacatagaaaacaaatagcaaaattcagaagtaaattctttctcatcaataattactttaaatataaattgattagatttttcaatcaaagggagattggcaaaatggattaaaaaagagcatgcacaatctaactatatgctgtctacaagagactcactttagatccaaagacacacaaaaattgaaattgaaaggatggaaaaagacatttcatgcaaatagtacatagagcaagtatggctactctaataccagac

SEQ ID NO: 375525 - DNA, 531 bp, Homo sapiens
acatctcatctttgtattattaccaactagcataattcttctgatagagtaaggggtactatacacatttatttaaggagtgaaggaaagaaaacaagaatgggaaggaagcagtgtgacatagaatccagggataaatacaaggatgaacttcaaaaggggctgagtaacggccatagcrttattacacttgagacaaaacagtcagcatatgtaagtgaagcttcacttatgggtttaaacttcaggacttctaagtctatatttaaagttcttgctaagatgctatctgaaccctcaaccattttcagatgccaatggtgtgatattgggtttatattcctaaataagatactctgctaacaggaaagtagtagcagagttctctgcgctatttgcattactaggtctcatggaatacacctcatactatttttcaagtcaattagtttttataacatgtctacagggggcatgacactgcatatggtgtggatccaagtatgctgtgtcaagggaggtcaaagattt

SEQ ID NO: 375526 - DNA, 572 bp, Homo sapiens
ttttctttcttctttaaatcccttttcagcttatttctatcttggttttgtcttgcttctagatgtcacttttatcctctttccctccttgcttttactctgtctttgctcccttaaatacagttgacaagacctagaaacaacacagttcagtaagttgtcatgtgtattgttcataatggacagtccacatccaggagcagtcaaggccagctcttttttgatcctcagggactaaagccawcaatacagcaacaaccccttatgtccattacagaaaagacagatgccagctaactacattcacagcagaaaactgaaaaatatgatctttgatctccaagaacttagagaaaatatgcttttatcaagttgatgtaataaaaaagtgaaatagtttactttgaaaactgtcagagagacaaatataggatctggtgctgaaatgatccataaccatcgtttcttccctctgtgttaaaaaccgttagagagaaatccattcatatccatttcaacccatgaggcatctttttggagctgaaaactctcccatgctctgacatttattt

SEQ ID NO: 375527 - DNA, 522 bp, Homo sapiens
ctttaagtctgggtgattataggcatacaatatttgtggattagaggtaggaggaaagggaagtctgcacatgcacatgtaattggaatcctattcttattcttttaatttggaaaatagatataaggtagcaatagtagttctgtagtttaacttttgaaaacacttttatgccagagaaacacaatctgagtaaagttttgagtggctctgtgataaatgggggtgtgrgcagcttgttttgagaaagcgggactttgatttggagggagggtgagggagagagttgggcaactgtctctgtaactattctttctgtcttctttctgggacccagtgggaagcaacccatttttaacttagtacaatggttcatagtgcttgctgtgaaagtaaaaatgaatccacctaaggaaaaagtccagttatgacaagcctgtagctagaatatgattcagaataattttcagccatgagcttagatcacccagttatctcaatagctgtctaaagagttctgag

SEQ ID NO: 375528 - DNA, 538 bp, Homo sapiens
ttacattgccattgaaaataatgctaaagaactaatttaatggatggtgaaatttacaatatgtcaattttaggaagcaggttactaaagagtattaacatatggtttgattttaattttattaaaaacaaatataacatgaagaaacattattacatctgaatgttgggattatattgcttagtttattttttgtgcytttatggatttcataaaataaatatacattactttggtaatctgaaaaaacataaatgaattaagtgatactttctctctgctgaaaattatagccagtggcagagtaacgaagcaggttgatattcattatcattagctttgagtggtatattactctgccatttagcaagccacagttctcttttgaatctcaattttctcatcagtaaaatgaagataatactattcctacctacttcacagagtgttgggagggcctaagataatgcgtagtggacttaagacaagtggttgcccaacttcagcatgcacaaggaaaacccgaagtgtttgttca

SEQ ID NO: 375529 - DNA, 569 bp, Homo sapiens
tggaccatgccagcagttaacaaaaacatcgtgcatagaaatatggctcagatcagtagatgcaccgtctggaagactaaatgtaagtcttcattattagcagtcaataatgactcagctaataagagctaattctgactcagttctgattctctgtgcaccacaaagggcactttgcataaagctctgtattaccatttctatctttaattcagatagtcttaacactcagttacaaattggaatttggtggctgggrgagtgaattacattgaaggttaaaacaccacatttgttatgaagaaaagatgatctagtaactcatttatgaaacaagaaaaaagcataatatgcaagtatattttgttttatcataggaatgatagatttgtagagtacagtggaaaaattcttaactagaagtaggaagatattcattctctcattcattcagtcatttgttcattcatttaataaatatttactgatcccctactctgagcctgttccaggcactgaggacagaaatagtagtgaacaacacataaaaatccttgccctcaagcaat

SEQ ID NO: 375530 - DNA, 513 bp, Homo sapiens
caggaaatacagctattatacaaataaaagcatgtatggccaccctcaagagtttcyctcatttggcatataaatttctgcaatcatctccttactggtctcgttgcttccactcttgcctcaccatggtctattctcaacacagggactagggcaatcattatatctcatctctttgctacccaaagccctacattgcctccctgtttcattcagagtaaaagcttaggttttataataatctgtaaggctctgcccccttcataaattctatgacctcatctcctactattttttcctttactcagtacacccatccacaccaagctctcagccacttcttcaacacactcttatgttataaggcctttgctccagctgtacccactgtctggaacttttccttcatcttaactgtctaactccattgcttccaagtgttttcttagatattttccccaaaagagccctcctgctaatactgccattttcactccttgccctaccatggca

SEQ ID NO: 375531 - DNA, 439 bp, Homo sapiens
aagaataggatcatcagggactttatacagaactcatcttcatgtacctgggtaaactgaagtctagtatcagtcattgttcaaagaaaaatacaatttctccaactacaattttgatttattggagacagttgccatgtcttattttttcccttcctacctatctactaggtcataaattgtgaaatgtattcatgatgaatttgttctgttccatttacttagtgactggtggaaatcttctataatatggctatctagaagtaagagaatcattttggggcagaaagataagaaaaataactggccatccccggagcccataatgctgtagtcattatcactatggtctaattatctctaggagtttgtgatgccttaygtcatccagacttctattccagctccccagtgatctgtgggccattatttggaatca

SEQ ID NO: 375532 - DNA, 528 bp, Homo sapiens
ctttattatgcatcatatagttacatgcatctatcttgctccactagtgtttttcgtactcttccctgaaccacattttttttgtgctgctacattcaaggacccatatagaagttaggaaaacaaagatgagttagacatagttactattgtaaaaagttcatactttatcagagggaaagggccaggtaaataaaacacagaatggtaggtgctatatggaagataagtatgtgtgtgtatttataggtgtgtaaacacacacatgtacacacatgatgggtatgaggaacacatargaagaagtaagtaattacatctggggaagataataaaggttataaatgatactaaagctgatttttaaaaaggaggtgcagttgtccaggactcagtaccaggaaaggaaacagaatgtgcaaatttacaggatttgatagtctagggatgggcacattatttgatatgtttagaatatagtgttaaccaagaaacttgggtggagatgaatctgagaaactaaattgg

SEQ ID NO: 375533 - DNA, 528 bp, Homo sapiens
ctttattatgcatcatatagttacatgcatctatcttgctccactagtgtttttcgtactcttccctgaaccacattttttttgtgctgctacattcaaggacccatatagaagttaggaaaacaaagatgagttagacatagttactattgtaaaaagttcatactttatcagagggaaagggccaggtaaataaaacacagaatggtaggtgctatatggaagataagtatgtgtgtgtatttataggtgtgtaaacacacacatgtacacacatgatgggtatgaggaacacataagaagaagtaagtaattacatctggggaagataataaaggttataaatgatactaaagctgatttttaaaaaggaggtgcagttgtccaggactcagtaccaggaaaggaaacagaatgtgcaaatttacaggatttgatagtytagggatgggcacattatttgatatgtttagaatatagtgttaaccaagaaacttgggtggagatgaatctgagaaactaaattgg

SEQ ID NO: 375534 - DNA, 528 bp, Homo sapiens
ctttattatgcatcatatagttacatgcatctatcttgctccactagtgtttttcgtactcttccctgaaccacattttttttgtgctgctacattcaaggacccatatagaagttaggaaaacaaagatgagttagacatagttactattgtaaaaagttcatactttatcagagggaaagggccaggtaaataaaacacagaatggtaggtgctatatggaagataagtatgtgtgtgtatttataggtgtgtaaacacacacatgtacacacatgatgggtatgaggaacacataagaagaagtaagtaattacatctggggaagataataaaggttataaatgatactaaagctgatttttaaaaaggaggtgcagttgtccaggactcagtaccaggaaaggaaacagaatgtgcaaatttacaggatttgatagtctagggatgggcacattatttgatatgtttagaatatagtgttaaccaagaaacwtgggtggagatgaatctgagaaactaaattgg

SEQ ID NO: 375535 - DNA, 588 bp, Homo sapiens
ctgccaacctgacatctccatcatgcttctcaacaataacatctcaaaacagaattcttaatctcctttttgaaatttgtttcttctggcttccacagcttaacaaataggatcacacaccttttctctcttttattcaccactgtccctcccctcccctgacatcaactccttcagcaagctctctctggttttccttcagaacagaacgggtcccaaatatgccctttcatccttactaccctagtccaagttataatcatcaggtctcccccaacccccaacccaatttattatyttcacaaaagtcaggacatctgaaatcttacgtttaagacggtggtccaagtattctagtacaattttaaacatttgaattaatgcaataattaaagatccaaatgctagggatcctgtgtgatatctgcacaaaaataaaatgagaataagttaaaacttaatactattatttaaggggatgctaattgaataattttcacaagtaaaaggtatctgcagaaggattaacagcaaagagacttttgcactctcttatttagattgataaaagtctctatagaggatttt

SEQ ID NO: 375536 - DNA, 650 bp, Homo sapiens
agtacaaaatgatattttgatatatgtatatagttagcaatgattaaatcagggtaattattacattatcacctcaaatatttattatttcaatgtattgagaacttcaaaatcctcttgtctagctatttggaaagattctatacattattgttaactatagtcatcctacagttctgtagaacactagaacttattcctcctatccatctgtaactttgtattcattacccaacttctcattttcctcccctatccactatccttctcacaatgagagatcatctcaccagagttagaatggctattaaaaaaagacaaaaaataacaaatactggtgatgatagggagaaaagggaactcttatacactgttgatgagaatatacattagtacagccakatggaaatcagtatggaggttcctcaaaaaaccagaaatagaactaccctatgatccagcaatccaactattaggtgtttaaccaaaggaaagaaaatcagtgtatcaaagagatagctgcatccccatgcttattgcagcactattcacatagccaagatctggaatcaacctgagttcatcagcagatgaatggataaagaaaatgtggcatatatacacaatggccataaaaaataatgaaatcc

SEQ ID NO: 375537 - DNA, 546 bp, Homo sapiens
gtttttttaaactgtccagtctgtggtatttygttatggcagcctgagcagaccagcaaacctggtcatcaaatggggcgaagagcctttattcagatgtcagctttttcatttgtatccttaaaaggtccatctaactgcctaaaactcaaactcatgatctttttttttttttttccaacttttattaagttctggggttacatatgcaggatgtgcaggtttgttacatgggtaaacgtgctgcacagatcaacccatcaccttggtattaagcccagcatccattagctattcttcctgatgccctccctccccagcacccccaatagggcccagtgtgacttgttccccctgacgtgtctgtgtattctcatcattcagctctgttagcctcaccaaactgacacaggaacagaaaaccaaacacggcatgttctcacttataagcggggagtgaacaatgagaacaaactcagattttacactttgctgttcattctcaatttgcagaacctggtttctttccaatattctttttctctg

SEQ ID NO: 375538 - DNA, 546 bp, Homo sapiens
gtttttttaaactgtccagtctgtggtatttcgttatggcagcctgagcagaccagcaaacctggtcatcaaatggggcgaagagcctttattcagatgtcagctttttcatttgtatccttaaaaggtccatctaactgcctaaaactcaaactcatgatctttttttttttttttccaacttttattaagttctggggttacatatgcaggatgtgcaggtttgttacatgggtaaacgtgctgcacagatcaacccatcaccttggtattaagcccagcatccattagctattcttcctgatgcyctccctccccagcacccccaatagggcccagtgtgacttgttccccctgacgtgtctgtgtattctcatcattcagctctgttagcctcaccaaactgacacaggaacagaaaaccaaacacggcatgttctcacttataagcggggagtgaacaatgagaacaaactcagattttacactttgctgttcattctcaatttgcagaacctggtttctttccaatattctttttctctg

SEQ ID NO: 375539 - DNA, 546 bp, Homo sapiens
gtttttttaaactgtccagtctgtggtatttcgttatggcagcctgagcagaccagcaaacctggtcatcaaatggggcgaagagcctttattcagatgtcagctttttcatttgtatccttaaaaggtccatctaactgcctaaaactcaaactcatgatctttttttttttttttccaacttttattaagttctggggttacatatgcaggatgtgcaggtttgttacatgggtaaacgtgctgcacagatcaacccatcaccttggtattaagcccagcatccattagctattcttcctgatgccctccctccccagcacccccaatagggcccagtgtgasttgttccccctgacgtgtctgtgtattctcatcattcagctctgttagcctcaccaaactgacacaggaacagaaaaccaaacacggcatgttctcacttataagcggggagtgaacaatgagaacaaactcagattttacactttgctgttcattctcaatttgcagaacctggtttctttccaatattctttttctctg

SEQ ID NO: 375540 - DNA, 546 bp, Homo sapiens
gtttttttaaactgtccagtctgtggtatttcgttatggcagcctgagcagaccagcaaacctggtcatcaaatggggcgaagagcctttattcagatgtcagctttttcatttgtatccttaaaaggtccatctaactgcctaaaactcaaactcatgatctttttttttttttttccaacttttattaagttctggggttacatatgcaggatgtgcaggtttgttacatgggtaaacgtgctgcacagatcaacccatcaccttggtattaagcccagcatccattagctattcttcctgatgccctccctccccagcacccccaatagggcccagtgtgacttgttccccctgacgtgtctgtgtattctcatcattcagctctgttagcctcaccaaactgacayaggaacagaaaaccaaacacggcatgttctcacttataagcggggagtgaacaatgagaacaaactcagattttacactttgctgttcattctcaatttgcagaacctggtttctttccaatattctttttctctg

SEQ ID NO: 375541 - DNA, 601 bp, Homo sapiens
atacagttacaagccataaaaaggaattgaatgtattttaatagttgaaaagattccatttttaatataaaaatatatatccaaagtttgagaggggaaggggacacccaggtcaaagctgtggcctctgcactctgtagtcttcatttcacattaaataatttctctctcacaattatcaatgccaggcctcctatatatcatctatcactgtggcttcaaagcagtgcagttaatctaattaggcaatattcaattacctttgttagggaaaaaatatatactttctctttctgccagagtcataataattaaatggagaagggttagaaagagcatccataagyccagattttcaggctttttgagccaagattaaagtagagtttggacaaaaagttgattcttgcatttcttctacttggtggatttaatatttgcaaatcaccagtgtcagggaactgcttactttggaggaatcacttgctaatttgtgatgcaattttagccctaaactgacattacactctatgacctgtggattggtgtagaaatagcaaatatggagacgtgaaaattagcttggcttatggaactttgc

SEQ ID NO: 375542 - DNA, 461 bp, Homo sapiens
caagttttataactcctctgtgctttaagttccttatctacaaaatgagaattttagaataaatattccctaaggcttctttctgatttataattctataattctattgtacctggaaaatgaaaaycaagcatgtctcttattgccatagctctgaggtatgaggatatattttatacaatttgtgggccccaaaatggggccatctcaatcaggctgtaagaaggtttgcagaagggggtggggagaagggggtccattcatccaagacctgactagcaaatgtgtatttaaatctgtgctgtgctcctggaaaacaaattgtctccccttctaaaatattaaaattaaaaatttttaaacagaaaatattcccagagtcttttcagtggaacatttacattttttttcaaattttaagtgggatattgaagagtatactttctaaaagcctacaggac

SEQ ID NO: 375543 - DNA, 423 bp, Homo sapiens
ccaaatggcttgttaatttagagttttaattttaaactatgtcctcacaatatcaaactgtatactcacaacagacattgagaaatactgaggaaattaaacaccaaaaacgtagtggacagagtaaacttgattggaaagcctcagagacattagggatggattcattaccatgttatttttacttcatgacctggccttgatcacttctaagaacacagtcagaaagattcaataggtttagaatacttgacacccaggacttaagctgggggcagaaatattttgtagcacatagttcatcttggtggccactttttgtgaactatgtaccttcctcctgctttctaaaaaatctccctttttccttatttccttttagygggggtaattatatccttaacatagaaggaacttgtgtag

SEQ ID NO: 375544 - DNA, 545 bp, Homo sapiens
atatacttcgtatgtctcagagcagctatctcactggaatccattcaaagccagcatgtgacaaaaaggtttaaaattaaaagtaaatgtttttaaaaaattaaagagagaagtatgtttgaaatataaaaattataatgaggttagaactaagagaawatggaaggaaattagaacccagttctttgtgacatcttttaagactgggattctatctgttaggaatcatttctacactggcttcagtagcagcttgcaaatataatttttaaagaagaataaatagctagggtcagtattaagttttaatcatttaattcacataacttgacatgtccataaaacaagtggatagaatcataaactgatgcattatgtttatgatgtattgttttccagcctttttcttatgcccaaaggaagtttttaaagttttattttcccttatttgaacaataccatgacaaaagtacaggtgaataaaaagtgagttactggaacagacacaaacacgggcagcaataaacagctgattagatatgtgg

SEQ ID NO: 375545 - DNA, 599 bp, Homo sapiens
gcttgaaagaaaatatttttgtgtgttatcaaaaaggagtagatttcagaccaggatggtgaagtaagaagtyttgggccccaattccccttacagaaagttcaactaccaactatttgtggactagaacattctttcaaaaaccggaacacctggaaacaagtctgagacaccagcgtgctatgtagaaatgaacaatatctgaattagaaaggtaagaggactagtctcactctgaccatgctctctgtcccccaagtcagcatagtgtcagacagagaggattttcctggactcagtttctacaatggggaaagaggactggggcaagtcactcagcttccttagcattccaaggtacttctaggaagccaagtctgatctcactccatggggaacactaagataaatagcatggcttacctgtccttggattaaatagaaacaaagaaatgtgaccagtgcacaaatcttggtggtagctcggtgttcctgccaactgaagcactcagagatatcagctaaacttatagtacactggcaaagctgagctgcttgactttagaaggatgatggaaatcataatctagcgtgagcca

SEQ ID NO: 375546 - DNA, 599 bp, Homo sapiens
gcttgaaagaaaatatttttgtgtgttatcaaaaaggagtagatttcagaccaggatggtgaagtaagaagtcttgggccccaattccccttacagaaagttcaactaccaactatttgtggactagaacattctttcaaaaaccggaacacctggaaacaagtctgagacaccagcgtgctatgtagaaatgaacaatatctgaattagaaaggtaagaggactagtctcactctgaccatgctytctgtcccccaagtcagcatagtgtcagacagagaggattttcctggactcagtttctacaatggggaaagaggactggggcaagtcactcagcttccttagcattccaaggtacttctaggaagccaagtctgatctcactccatggggaacactaagataaatagcatggcttacctgtccttggattaaatagaaacaaagaaatgtgaccagtgcacaaatcttggtggtagctcggtgttcctgccaactgaagcactcagagatatcagctaaacttatagtacactggcaaagctgagctgcttgactttagaaggatgatggaaatcataatctagcgtgagcca

SEQ ID NO: 375547 - DNA, 588 bp, Homo sapiens
aacaaaacagataaacaattattaaagagggaatcttttacttacagcaaatttgatctaacaaaaattatcaagaactctctcaaatagacttctaaattgagaaaagtttttccttcttccacttcttttctgtctgtggtaggcaaaatggtcccccaaagatgtccatggctaatctctgaaatttaagaatatgctacattacgtggcaaaagggactttgcagatgtaatcaaggttatggaccttaaataagaaagaatattctgaattatccagatgggcccaatccaatttcatgagtccttaaacgcagagaatgttctccagctggaaaaagaagaggaaagcaaaggaaagttcaagcatgagaaggattcaatgcacccttgctgctgctgagatgcaggaactcatgtgcatggacagaraggggcctattgcaactaagggcaggccttcgctgacagccaacaagaaaaaaaagaaccttagcatttcaaccacaaagaacttaattctgtcaacaatatgaatgggcctggaagtggaatcttcccagagcctcccattaagagtccagag

SEQ ID NO: 375548 - DNA, 575 bp, Homo sapiens
caaagacatataatagtgtgtttctacccatctacatatccttactaccatacacttgccccagtacagagtaaataggaaaatggtagtattacatacagcatacatagggaatcgggaccatttaaatatttgccacacaaaaaattcaaccaacttcaaaaaaccccattgttgaaacatttgagtaaatattcagaagtaagaatgtcttctaagagtattagaaagtggtccttgttaatacttttcttatactgtcaagggagaaacttccttcctgaaagcttaacaaaattgttatgttttacattttaccttgcttaaacaaacaaagctgtgtcaaaacttgatggatctttcataatgcaatgctaaaaagcttaaatggaatcattggaaaattgcagaaatttcagactttcctaaaaactcaagtttgtttttaagtgktttgtttttgtctctcacaaaagctgggatttgaatgccacattttttttctagttataacccatgaataagttgcattattttataaaaccttacatgaggaagacaaagaacagcacaag

SEQ ID NO: 375549 - DNA, 563 bp, Homo sapiens
acttctaatttttttgagaacctccattccattttttatagctgttgcmtcattctctttatataggatagatattaaccctttatgaaaatataattaaaatactttctagtttggtgtttgtcttttgtacatgactttttttaattaaaatactttctagtttggtgtttgtcttttgtacatgactttttttaatttaagacatttattttttaatatagtcataccagtctttttctttatggattttgcctttcgtatcatgtgtggaaaggctttccccagcataaatttgtatcagtagactcagattttcttctggtcttttcatttatactttaattgatttgtaatttgttttggcctaagattggaggtttgaatataactttattttcaggaaattgaatttatttactttcacattattttcttcactaatttgaagtacttatattgtcacttattggatttttaaattcttatatatggaatctgtcccttctattgatacattgtgtagttttgcaggaatatcgcaatattataacttcataata

SEQ ID NO: 375550 - DNA, 563 bp, Homo sapiens
acttctaatttttttgagaacctccattccattttttatagctgttgcatcattctctttatataggatagatattaaccctttatgaaaatataattaaaatactttctagtttggtgtttgtcttttgtacatgactttttttaattaaaatactttctagtttggtgtttgtcttttgtacatgactttttttaatttaagacatttattttttaatatagtcataccagtctttttctttatggattttgcctttcgtatcatgtgtggaaaggctttccccagcataaatttgtatcagtagactcagattttcttctggtcttttcatttatactttaattgatttgtaatttgttttggcctaagattggaggtttgaatataactttattttcaggaaattgaatttatttactttcacattattttcttcactaatttgaagtacttatattgtcacttattggatttttaaattcttatatatggaatctgtcccttctattgatamattgtgtagttttgcaggaatatcgcaatattataacttcataata

SEQ ID NO: 375551 - DNA, 637 bp, Homo sapiens
gcaacctctgctttccgggttcaaatgattctcccgccacagcctccggagtagctaggactacaggtgcatgccaccacacctggctaatttttgtatttttagtaaagatgggttttcactatgstggccaggctggtctcgaacccctgacctcatgatccgcccacctcagcctcccaaagtgctaggattacaggcatgagtcaccgcacccggccagctacagctctttcagttggtctccctgtttctatgatcaccccttcagttctaccctctacatgattccctatgtgatttttctaagagacaattatttcatttctaccctctacacagctccccacgtgatttttctaagagacaattatttcatttcaggctcagaaaacttaattctcctatcaatagtacttagaatttcccctgaactccaaggtgcagatggattcctagccaagtagaaagtgattatacatttctatttcatttctatttctattacatttctatttctattacatttctatttcattctatttccataaatcatacatgcctatattttatgtaatatttaatattcgaattaagttttacacttaccaatacatactacaaatatcacaaccgt

SEQ ID NO: 375552 - DNA, 535 bp, Homo sapiens
agggctctacccctgcaggtagcagtgtcctgaggctttgtagggtagcaaggtcatgcgcctgggcttgggcctggtcctggcccatgaaaccattctttttttcttctgcctggacatcaaggcattttcatatatcctctgaaatctaggtggaggcttccaagcttcaactcttgccttcttcgcacccacaggaccaataccacatggaagccaccaaggcttgcggcttgcatcctctaaagtaacagcctgagctccaccttggccccttttagccatggccatagctgaagcagctaggatgcagggtgccatgtcccagggctgcacagagcagcaaggccctggatytggcccacaaaactatttttccctcctaggcctccaggcctgttacaggatgggctgccatgaaggtctcttaaatgccctggagggattttccccattgtcttggccaataatattcggctgttctttacttatgcaaatttctgcagccttgattcctccccagaaagatgggttt

SEQ ID NO: 375553 - DNA, 501 bp, Homo sapiens
gaatttctcttcagaaaagtttttttttttttttcctcctacatggtcaggctgcaaatttttcaaacttttatactctgcttccttttgaaatgtaagtttcaatttcagaccatctctttgtgaatacatatgactgtacactgttaggagcagccaggccacatcttgaatgctttgccacttcgaaatttcttctgccagataccttaaattctctctctcaagttcaaagttccatagatttctacagcaggagcaaaatgccaccagtctctttgctaaagcatagcaagagtgacctttactacagttctcaataggtttcttatctccatttgagaccacttcagcctggacttcactgttcatatcactatcagcattttggtcataaccactcaacaagtctttaggaacttccaaactttcccccatcttcctatcttaaccctctaaactcttscaacctctacccattacccacttccaaagtcactt

SEQ ID NO: 375554 - DNA, 614 bp, Homo sapiens
cagacgagcatgtattttatgcactcatttatgcattaaatccrttcatcatacaatattttttggtgcatgttatggtccaagcagtctattagggtttagagatacaaagatgaaaaagatggtttacatccacagaaggcatatagtaccttataatgcctattccaatgcaggactgctaattgttgcttgaatttaaaagcaggcattactggctacaaaaagagaatctctgtgtgtgtgagtacatttgtgtatgtatgtgccatttgtgtttcaagagcaagtgctggcaaaataactattagtgtgtacaagcaccagtcctttccacagagcctacccatgaatgctatccttcagatggtagtgcaaccaccattatcagaagcatgattggagtctgattcacaaatagccttccttcgtttaaactacacacaaagatagaataattactagtcccactgacacaaatcatttgaagccatgattccatttgtgctaacagcaatattcttgtttattctgttttaacttaatttaactaattattgtattagagttatccagagaaacagaacctataggagatacaaacatataactga

SEQ ID NO: 375555 - DNA, 468 bp, Homo sapiens
tgtacaagcaccagtcctttccacagagcctacccatgaatgctatccttcagatggtagtgcaaccaccattatcagaagcatgattggagtctgattcacaaatagccttccttcgtttaaactacacacaaagatagaataattactagtcccactgacacaaatcatttgaagccatgattccatttgtgctaacagcaatattcttgtttattctgttttaacttaatttaactaattattgtattagagttatccagagaaacagaacctataggagatacaaacatataactgaggtgcatacatacatatatttacatacgtgtgtgtgtgcgcatgtgtgtgtgcggagagagagagtwtaaggaattggctgatgcaattatagaagctgagaactcacaaaatctgtagttggcaagatggaaactcaagcacatggatggtatggttccaggccaa

SEQ ID NO: 375556 - DNA, 468 bp, Homo sapiens
tgtacaagcaccagtcctttccacagagcctacccatgaatgctatccttcagatggtagtgcaaccaccattatcagaagcatgattggagtctgattcacaaatagccttccttcgtttaaactacacacaaagatagaataattactagtcccactgacacaaatcatttgaagccatgattccatttgtgctaacagcaatattcttgtttattctgttttaacttaatttaactaattattgtattagagttatccagagaaacagaacctataggagatacaaacatataactgaggtgcatacatacatatatttacatacgtgtgtgtgtgcgcatgtgtgtgtgcggagagagagagtataaggaattggctgatgcaattatagaagctgagaactcacaaaatctgtwgttggcaagatggaaactcaagcacatggatggtatggttccaggccaa

SEQ ID NO: 375557 - DNA, 496 bp, Homo sapiens
agtacaggaaaaaaaaaccacccatattagattctttttttttttttaaataaaggacaaacatagtccactgtggaagactgcagtttatctcacagtggccatctcatctagacattctttggcctaggcatgaatgtgttaggctttcagttctgtgttcatgaagacatttttgaccactccaataatatatctagagatgtgtctctttctctcacaagtttaatgaaaaacaacctgtgyactatctgtgcttgttagaatggagttgttactacaacctttcctcccatgtgaaggattacaggattatctatcttgcttactcttgctctgcctcttgtattccatgtctaacattcctgtttcagatctaccttctcatgcttggctttgcctttattccccagtcacatcttcttcaagttcaatggtagaaaaataatggaagaaccagttattaagtacattcctagaagatctctggaagacc

SEQ ID NO: 375558 - DNA, 448 bp, Homo sapiens
caaggggattcagaagtgaagtactccatgtgtccacaagtagagaagaaagatattggtaaaatctagaaatgtttataatcaaccttaaaataatataatggataacacacacaagagtggattatcaaaactgggttgctctacatttaagaaaaagattaatcctagagacttacatgtgctatctaggccagtgaagggaatagaccattaaaccagatggaggactcagtcagtgacatttgaccctgacaatcaccatcayacataatttgtatttacagaaaaaacttagtactttccaaaaataacattatctttctggccccttaaaaacaacactatcatgtgggtaaggtcagctagtattttatccattttaaatatagacattatatattcataaaaattaatagacttgcccaaccttacacaacaagtcaac

SEQ ID NO: 375559 - DNA, 276 bp, Homo sapiens
gattcaacacaataagatgacaattataaggaagcttgtttgttagcttttgatgatgaccaacatatatcatcttgtttgrtgatgattaacataatcaagcactaaagaataagctacctaacatccatccttgaactttgtatgtaaactggagtcttctcaatcctctagaatttgtctgggtcactgccattccagaatctactcatggtaccttctgtatcaggcaggttttattctctgaggtttgggctctagtttccacccacattc

SEQ ID NO: 375560 - DNA, 656 bp, Homo sapiens
gggctctagtttccacccacattcacaaacaatgggcacagtcatggaggctctgaatgcaaagctgtggactcttctcagcatttttgtggttgtcttggacgttcatagggatccaaatggaccgagtactttgasttagcaccagtctctacttttaaactattcaaaacagccctgtaaaacttagaaatggctcatgactagggttgttttaattaaccttgggtttttaataaattctgtttgttagcattttacaattcaagaattccactaccttatgtctcaaaataaagttaaattttaagaaagtattttccatcttgagtagcctaccagttactgttgatgtcaatgatgccaaatttttagtgacttgtttcaggtttgatgaagctcatgatgacagctgtcttttgtggcttgtagaaaagcaaaggaaatgcagaaaaaagacatctgatctgaaattacttggtgggtaaatgtgaatttgatatctgtgagaagcaagtaatattccagttgtcttcaggttattttctccagcaattttgcaccatcgctacatctctaatatcactgtaggttgtctttctcagtgtgaaaaataaataatgaaaatctctaggttggactaaagcaaaggacaa

SEQ ID NO: 375561 - DNA, 656 bp, Homo sapiens
gggctctagtttccacccacattcacaaacaatgggcacagtcatggaggctctgaatgcaaagctgtggactcttctcagcatttttgtggttgtcttggacgttcatagggatccaaatggaccgagtactttgagttagcaccagtctctacttttaaactattcaaaacagccctgtaaaacttagaaatggctcatgactagggttgttttaattaaccttgggtttttaataaattctgtttgttagcattttacaattcaagaattccactaccttatgtctcaaaataaagttaaattttaagaaagtattttccatcttgagtagcctaccagttactgttgakgtcaatgatgccaaatttttagtgacttgtttcaggtttgatgaagctcatgatgacagctgtcttttgtggcttgtagaaaagcaaaggaaatgcagaaaaaagacatctgatctgaaattacttggtgggtaaatgtgaatttgatatctgtgagaagcaagtaatattccagttgtcttcaggttattttctccagcaattttgcaccatcgctacatctctaatatcactgtaggttgtctttctcagtgtgaaaaataaataatgaaaatctctaggttggactaaagcaaaggacaa

SEQ ID NO: 375562 - DNA, 582 bp, Homo sapiens
aatttattaatctgaacaagtggacattttttaataggtgaataacttctactgataaaaccacattcatctatgattaaagaacaaaaagccccttttcctagtttatgttttcttatgtggagggatataaactcctgttaataatgtgctgctacagagagccttctttctaggatatctaagacctgggatttctctaatcatgggtgttcctacctaggcttgacctgcatttagggaaacaaactggcagttttatgttaacaaatataatgtcaatctgtctgtcttcaaatatatttttagctaatcagcaggacttccgcaggacatatcactttcaaaagaatggcctgcatctgattccaatttgaaatcttgtattttcctgtgaaatcactccagcagtatccttcaaagcccatttcctaccatgttgccattccctgtttgcctgtgacccctctactagactgcaayctcttcgatgacagcccttgccttgtccactgccatatccctggcacctcgcataggcagtctccccttgaaggttttcagcctaggtcatgagtgttc

SEQ ID NO: 375563 - DNA, 570 bp, Homo sapiens
aaatgcaggctgttcttgtgactcttcaaggtcaaagagccaaatgctcacagaggctgggctgggagagcacatgggtgcaggaacaagcagcgtgcaggggtacctctgtttcagatcaactggcccaagcaggagcatggcctgggttgccagatccctcacagtttttcaagagaaaccagaaacccagatttttacagggaactacagtcatttaaaaatgtgaagaagtaattcagatttttacaagccacaaggccagctaaagaaaatgcctgtgtgggctaaaattggcccaggaatcccacctggggactgctggggctccacatgctactgatagaaaaagtgagatcagcaaatgcaaaggatttctttcaagcacagcctgcaggtggattttggcagtttcctatcagcgtttttccatctatggaaaacagctgctggtgtgagccaatgcttcaggagcactcctcctgcctctgtctagcctgaggcaaccccacaatcagtctcagataccaacatgagcatgaaacakactccacaaaggagctgttcaac

SEQ ID NO: 375564 - DNA, 461 bp, Homo sapiens
tttttacttcatataattttctatctttatttttcccaacagctgtttattacgttttattaaagtattttttaaaaatctcagtgaagagctgtgaaatgccaaattaaacaaattatgttgcctatatattgcttggcagcactgaccctccccagcatctagcacaatgactgrcgcatagcaaatattcaagcaatattctctgattagatgataaatgaataaatgaaggattgaaacctgaaggattcagccctgtatctatttttctctcattctaaagccattttactgttattaagtttgagaaaagccaattctcaaataaaatgaaaacacatttatcatcatttatgttttaaagaaagtgcggctctcaaatccaagctcttatgtattcatttttaaaaaatatttttgatcctgtttgggttcccttgctcacaaacccaggtcag

SEQ ID NO: 375565 - DNA, 461 bp, Homo sapiens
tttttacttcatataattttctatctttatttttcccaacagctgtttattacgttttattaaagtattttttaaaaatctcagtgaagagctgtgaaatgccaaattaaacaaattatgttgcctatatattgcttggcagcactgaccctccccagcatctagcacaatgactggcgsatagcaaatattcaagcaatattctctgattagatgataaatgaataaatgaaggattgaaacctgaaggattcagccctgtatctatttttctctcattctaaagccattttactgttattaagtttgagaaaagccaattctcaaataaaatgaaaacacatttatcatcatttatgttttaaagaaagtgcggctctcaaatccaagctcttatgtattcatttttaaaaaatatttttgatcctgtttgggttcccttgctcacaaacccaggtcag

SEQ ID NO: 375566 - DNA, 588 bp, Homo sapiens
agaattaaaacagcttttaaccacagaagagttattgtaaccttaaatttctggataaaattcagagtgaaatatgtgcaaaacaaaattgagatcattcctgaataaccaagttaagccttttgaggcactgaaagcaaaaccctctctgtgtgtctttatctctccccctccctttcatacacactcttcaaaccaatacaaaaaaattacttaaagaaaatataggcatgtaaatatayaaaataaactctaagtaaatctagagtgtaggaaattttgagagtacaaaaataaggaatgcacaaaatttaagcaaatttctacccccattgcccctccaaatgtagttttacaatctgcctgcaaatgtttatcagtaagaagagaatgcctaatggatcagaaacctgataaaaacatattcaagtagaaaaaatgttttcctctaactaaatagtactgtatcctagggatcaaacaaacaaacataaagatagtacacagcagaggctaaatgccgccgccctgtttgttagttgatgacttcctgatctcagttaagaaaagtcagcttgtgctgctatg

SEQ ID NO: 375567 - DNA, 588 bp, Homo sapiens
agaattaaaacagcttttaaccacagaagagttattgtaaccttaaatttctggataaaattcagagtgaaatatgtgcaaaacaaaattgagatcattcctgaataaccaagttaagccttttgaggcactgaaagcaaaaccctctctgtgtgtctttatctctccccctccctttcatacacactcttcaaaccaatacaaaaaaattacttaaagaaaatataggcatgtaaatatataaaataaactctaagtaaatctagagtgtaggaaattttgagagtacaaaaataaggaatgcacaaaatttaagcaaatttctaccccyattgcccctccaaatgtagttttacaatctgcctgcaaatgtttatcagtaagaagagaatgcctaatggatcagaaacctgataaaaacatattcaagtagaaaaaatgttttcctctaactaaatagtactgtatcctagggatcaaacaaacaaacataaagatagtacacagcagaggctaaatgccgccgccctgtttgttagttgatgacttcctgatctcagttaagaaaagtcagcttgtgctgctatg

SEQ ID NO: 375568 - DNA, 465 bp, Homo sapiens
aggtctcactggcctcaacttagacttagctccagagtcagctaatatctctcccaggaagagaaacttggacaagattcagcataaacattatcctggaccttgctgggcattcttctcttaacagagttcatctgagccttcaaagcattcatattgctggaaagttgccattgtagcctcctgtaagccttctcataatgaaccagacagccatatggaagagagtggatcatcaagttggagwgacaagcacggacttcatcatcaaagatccacctaggcctttgctcagtgctctatcaaaatgtaggatttggataccaaagtgcaccaaatggcaaggactgggggttctgaataataggtcttggtctagacaagcccaatggagcaggcgtggcctctaccataagctctcaacttggctcagacttatagacctaacttcaccctgacatcttc

SEQ ID NO: 375569 - DNA, 465 bp, Homo sapiens
aggtctcactggcctcaacttagacttagctccagagtcagctaatatctctcccaggaagagaaacttggacaagattcagcataaacattatcctggaccttgctgggcattcttctcttaacagagttcatctgagccttcaaagcattcatattgctggaaagttgccattgtagcctcctgtaagccttctcataatgaaccagacagccatatggaagagagtggatcatcaagttggagtgacaagcacggacttcatcatcaaagatccacctaggcctttgctcagtgctctatcaaaatgtaggatttggataccaaagtgcaccaaatggcaaggactgggggttctgaataataggtcttggtctagacaagcccaatggagcaggcrtggcctctaccataagctctcaacttggctcagacttatagacctaacttcaccctgacatcttc

SEQ ID NO: 375570 - DNA, 608 bp, Homo sapiens
gcaactttttccacccagagatatttgtcaatgtctggagacatctatggttgtcacagctgagggaatattaattaatagcacctagtgggtaaaggtgaggaatgtcattaaataccctacaatgcagagggtaaccccccaccaacagagtactgtccagccccagctgttcacagcrctgagtttgaggagccctactctacctagtcccagggatgaggcatgggaacccatgcacaaactgagtcaagctttcctttactgccctattgtgttctccttgtcggtttgatttcagcctggtgtacctgcttcaggctctggttttccctgctgagtccagagtctcgcctagggccttgcctgtttgtcagataccttggtttatggcagacccctcacctggatctccaattggagttctatctatatagatccacaaagccataattcatttaattttcagtattcttgctgcaagaaccctttccaccaatccctacttacctgaccatagtccaggaacaaaaacagtgaagtcagcctgatttccagtgctttgggatataatattctggacttctgactgcttttctcaggggtca

SEQ ID NO: 375571 - DNA, 617 bp, Homo sapiens
ggttttaaaaacaattatatgctatcgacttatttcttaataaactataatttatttagcacataccctaagagccagtgcctaactaaacattcccattgattgcctctttaatattcagaacaacttagaaaggyaggcattactatctccagtttacagataaggacatcaacattcagagaattaactagccaaggaatccacagcccaggattaaagcccaggcctttctgattcctgcacttctgcttgtaagacagtaattgttatatgtgaacatggtgctggttctatatacctgctgggccttcgggacttagtaagatgctatcttgcccagaaggaagacagtctgatgaaaaagagagagagacacatacacacacacacacacatttttgcaaacaagtatattacaacatggcatgagctttgaggacacaccataaaacttggtataatatttttctccatgaaaaatttatagttagttggtatttggctcagtgcctctattaggtagaaatggacaaaattgagagccaatgttggtgagtagcttatgtgtgccaagtattgtgttaagtgctttaaatacatcaatttagcttaat

SEQ ID NO: 375572 - DNA, 582 bp, Homo sapiens
tgctttttataatttcacacttggctttttaaaaattctatgacttggaaaaggggccttaggctttaggacataatatttcaaccccgacagataattacagcttgtccagtggtagctttatatggactgttttttatatgtagttgtttgttttatagattgtgacagcctaaagcaagattccattgccctcaacaaagacgtaacactcagggaaaataccaggacaattcagctttgacaaagtagtggctgggggactcagaaagcctggggctcagccaagtcacatgtgcrggaatgtcatcagcagacaccaattgcacgagacttagaaaaggcctgccttaagtggatgcagggaatctcatggtgaagtctttcccctaaacagtacaagccacttgtcttatcacacacatgctagtgattcagggacctcagcctatgctagtaggcagcaaggccacatatttagttagtggctgagcagggatctgaatacaggctggatttgccccagaatacaagctctcaatcaactgtattattagttttcttttgctgctgtatcaaatt

SEQ ID NO: 375573 - DNA, 582 bp, Homo sapiens
tgctttttataatttcacacttggctttttaaaaattctatgacttggaaaaggggccttaggctttaggacataatatttcaaccccgacagataattacagcttgtccagtggtagctttatatggactgttttttatatgtagttgtttgttttatagattgtgacagcctaaagcaagattccattgccctcaacaaagacgtaacactcagggaaaataccaggacaattcagctttgacaaagtagtggctgggggactcagaaagcctggggctcagccaagtcacatgtgcaggaatgwcatcagcagacaccaattgcacgagacttagaaaaggcctgccttaagtggatgcagggaatctcatggtgaagtctttcccctaaacagtacaagccacttgtcttatcacacacatgctagtgattcagggacctcagcctatgctagtaggcagcaaggccacatatttagttagtggctgagcagggatctgaatacaggctggatttgccccagaatacaagctctcaatcaactgtattattagttttcttttgctgctgtatcaaatt

SEQ ID NO: 375574 - DNA, 537 bp, Homo sapiens
ctgcctttagcctgtcattgaagtaccttctactaccagggcaagcttttaagtgagggtcttgataagagcattcctctgagatgatcactctaagacttggagtaggaaaggaaatgaaatcccaagttgccttatccacctcctacccctcctcttggttcatcatagtagacttctatctcccccaatttttttacacacatgaacagggtctgtaaacataagttgtcgcctcctacattcctttgacaatcaccatttcctctaggaaaaactcttcctgytccacccaggtagggttaggtgagcctcctctataccctaacagcagcctgcatgtatttctattatgtcatttgttaaactaccatgagtttgttttttataaattataagaagcttttcattaatatcgataaatgtgcatatattatgggctttatacctttgatgataccatgttcttctattatgtggtggtttagagattcataaaattcattcttacctatttaaatttgtcaagaaatgtgc

SEQ ID NO: 375575 - DNA, 609 bp, Homo sapiens
tctattatgtggtggtttagagattcataaaattcattcttacctatttaaatttgtcaagaaatgtgcccttggttgacggtaggtaaagaggttgcaaacttggtatcagtaaggcataaaatctggtttgttctgaccgctgtattatatttctgctgttgaataacaaattatgcaaacaaggcaaacttgaaacgatagccacttattattgcacacaattccaggtaagcttagctaattcttcactcagagtctcacactcaagatatcagccagctgccattcccatctgagtcttggggacttcttccaagctcattggttgttggcagaattcattttcttcttaccctttccatgtgggttctccatcttcaagccagcaatggtagtttgaattattcttatgcttcaaatctctctgactccctcgtctgctgccagccagagaaaaatctctgcttttaaaagcatgattagttttgcctacctggacaatttccctttcaccctaatatgggcataatatcaagttcaggggccttggaagtcatcttaaaattrcgccttttacaaccatgactctggcacttttgatcaaat

SEQ ID NO: 375576 - DNA, 468 bp, Homo sapiens
aatgtataaaatattccattaattatatatacatatatacacatattttactattttatatattaaaagatatacagcattatactatgttggttatctctggggatcagattacaggttgtttttacttgcttccttgagatttttttctgtaatatctgaattttattcctttctttccaaatttggggaaaaaaataaggtttytgaaaattaaaaaaaatagataatatatcaagtttggactgcaaaccagagctttcagcagaacatagttgagtctttgccatagacaccaactcatttccttcctttctgtggcattcattccactatcatgcattttttcccaaatgagatgacaaaatggaaagaccatttctacaccaagcattgagccataggaaagcggaatgtcagtcagggcatctgcagatcaggaaatcatgtcacagaaaacaggacctg

SEQ ID NO: 375577 - DNA, 553 bp, Homo sapiens
atacataaagcgcttatatttgaacatataagatgttacagatattttttctgtcccttgccccatctttcctagtataataaagttatgctacaagttagtcacttacgaattccaatttgaggattcagtttgtgacttttgctggttctgagaaatcaagaaatactgagccattgcatgaacagtgtcactaagtataagaacctgagaagttcaacttcaacaaytcttaaagtctcccttgagtagaaggtgaatgaactgtcataattgggcaagaagtgagtttattctgattgcaacagtaggcagctattaagagacgagtgtaactctggatagaagtttctatggtttctgccttcagccttgtcatgttcaacattctaatcaagacctagatcaaaggagaagttgatgagcttagtattcagctgagagagatgggctatgttggctagaaattaagcaatgagctcaatctagaagatacaagttctgaagttggactcttagaagcaactgaggctcaagcacttctgtaggcact

SEQ ID NO: 375578 - DNA, 583 bp, Homo sapiens
tgatgactacttcttaatgtgtatttggagtttgaatgactaaatatacataaagcgcttatatttgaacatataagatgttacagatattttttctgtcccttgccccatctttcctagtataataaagttatgctacaagttagtcacttacgaattccaatttgaggattcagtttgtgacttttgctggttctgagaaatcaagaaatactgagccattgcatgaacagtgtcactaagtataagaacctgagaagttcaacttcaacaattcttaaagtctcccttgagtagaaggtgaatgaactgtcataattgggcaagaagtgagtttatkctgattgcaacagtaggcagctattaagagacgagtgtaactctggatagaagtttctatggtttctgccttcagccttgtcatgttcaacattctaatcaagacctagatcaaaggagaagttgatgagcttagtattcagctgagagagatgggctatgttggctagaaattaagcaatgagctcaatctagaagatacaagttctgaagttggactcttagaagcaactgaggctcaagc

SEQ ID NO: 375579 - DNA, 584 bp, Homo sapiens
tgcttgaacccttgctttgagctaagtgttctgtcaattccaacatatacacctgtaataaaactgctgaaataatgttaaagactctttaaagccaggatctttaccatattaattttcgtactcccaatgtctagcgtagtgcccagcacataaggaatttccaataaattatcggctgttgctagaataaaaattcaaaagtaggcagtgttgagttggcaacttaattttctaaaaagtattaattgcctgcctatatggacaatagaaacaacaacaacaagaatatcctgccaataaatcaggctttttggctggtgccttgtagtgccttgtaaatattagtaagcatgtttcctattctaaagtaggtttaaaaaaaaaaaaacttaaattcagtaacttcgtttcaccttcttgaagaacctgcatttcctttayatttataaccattagagtgaggcatgttaaataattcaaatgagaaatcctagtttccacctttatgtatctctcgggttttcctttgttcacccagtctcctgcaaaaatcatcaaatgttcaaatttatagtttgtga

SEQ ID NO: 375580 - DNA, 521 bp, Homo sapiens
ttttattccaaagtttgcccttatgtgtatatgtgaaattagctcatatttttttttagtctgtattttcttggtcagattttagaataaagattatattagctttgggaaatgattttgaaacttttggaagtgatcaaggagcccaaatacaagaaaggacataaatatttgaacgacatattctacacactcaatctaatagatttgtacacagaactcacatcatatgagttaataaaatagatttctgattgtccatggaatattaataaaatataaatcacraggttaaaatgaacacctttttttaaaagtagatattttgataggatataatcttagatcgtaagcaaataaaattgattttaaataaagcaatagctagtaaatcttatctacttgaaaaataagaaacatcctttataatagctgtaagattcatgagaaaagcaaaattaaaatcataagctatctagtattaataaaaaagagaatatgttccatccaaagttatgaaa

SEQ ID NO: 375581 - DNA, 620 bp, Homo sapiens
atagatgtgaaacctagaaaaaatggatgatttcttagcaaaacagaaattaactgacccaagaggaagcactaaaatgtaataagaagagacagaaatggtgattaaaagtctatcatttaaatggggggaagaagtatcaggattacataatttcacagctgggttccatttaactcttaaagaacagataattccaatgctatttaaactagtctagcccattgaaaaagacgaaaacctcctgagtttattttatgaattatatagatcagtggttctcayagtatgtttcctggatcagcaacatcagcatcagcatcatatgggaccttgttagaaaggcagattatctgtcctcccctgagacctactgaatcagaaactctggggttgggcatccaggactctaagatgattcaagtgcatgctaaagtgtgaaaaccattgctgtagaggtagctggcctacattttatatacaaaaggctacaggttgggtaggggtggtggatgtagcaccaacaccctagggttgggacttcctctagcaatagaagttgcatgtgtagggtaaggtcaagggggattacaattacagtattaatgttagcagctgct

SEQ ID NO: 375582 - DNA, 620 bp, Homo sapiens
atagatgtgaaacctagaaaaaatggatgatttcttagcaaaacagaaattaactgacccaagaggaagcactaaaatgtaataagaagagacagaaatggtgattaaaagtctatcatttaaatggggggaagaagtatcaggattacataatttcacagctgggttccatttaactcttaaagaacagataattccaatgctatttaaactagtctagcccattgaaaaagacgaaaacctcctgagtttattttatgaattatatagatcagtggttctcacagtrtgtttcctggatcagcaacatcagcatcagcatcatatgggaccttgttagaaaggcagattatctgtcctcccctgagacctactgaatcagaaactctggggttgggcatccaggactctaagatgattcaagtgcatgctaaagtgtgaaaaccattgctgtagaggtagctggcctacattttatatacaaaaggctacaggttgggtaggggtggtggatgtagcaccaacaccctagggttgggacttcctctagcaatagaagttgcatgtgtagggtaaggtcaagggggattacaattacagtattaatgttagcagctgct

SEQ ID NO: 375583 - DNA, 636 bp, Homo sapiens
taattcaaccttgcaaacaaaaggagaaaaattggtcaaagaatcagcaaattgggacattgagaggctatatgagctttttctttaagctttgccactggattcctgtatctctcattttacaccttttctttgttgccttgaataagtcacttttgtaaattaccattaaacctgttatctagctgactgtggaaagtcccttatttcatagactcatggaattttgccactagaaagagccctagaaggtctctcttctcagtgtacagggaggaggagggaaggtaagagattggcccaagacacagctttttaacaaggagccaggactatcaattttcagctatcaaatgttgactctctcactagaaagttacattgtgggtcacagtgtagcatgtgtgctaacttgagcatctaaggctctatcagaactattgttgttaataatccagaactaaaacacttctgaatttcaccatatcaggtttgcaaaatccttttgacagagctaaatccaagggcacaaatgaaatcaccacagccacatctctatttccccatccctagaacagactcacttcctgtagyacacataatgccatcagcccctcacccttacatcacttagct

SEQ ID NO: 375584 - DNA, 571 bp, Homo sapiens
ggaacggtaaccatgagtaattctgacactgccggcatttctacagaggcttttagatgaaatctaaaggaaacttcccaaataatatggtttacaggtaaattattattattaataagataatacataaaatctccatcaagtatacttcaaggaatgtgatattctttacctgaagacatggtaggaatcatgtctgaaacataatgttatgtttaatagttgtattttcaattataacctttctcttttatgtggacctatgctctggatgatgttacctaggttctagaattcttgggtaaaaatatcttcataagtattgcaaaggacaaacctatacctttttgggaggagtgctttaatcttaagytaagtttgtcagtttggatgtctgcctaatgtagataggtgttctaaccactctattgctcagaaatatactatacaggttaagagaatggatttaggaatcagaactgtcttggagatccagctctgttgcctgctggtttcctgacttggtgcaagtttcttattctcctcaaacctctgtttcttcatccataaa

SEQ ID NO: 375585 - DNA, 580 bp, Homo sapiens
atcagaactgtcttggagatccagctctgttgcctgctggtttcctgacttggtgcaagtttcttattctcctcaaacctctgtttcttcatccataaaatggggtaaataatagtttcccttttctacagctcttttgaaaattacctgcaaacagagcttaattaatgttaggctattaacctctttaaagaatgagtcaaagggtgatttggcctaaattcaaatgacgacttcagytgggatcttgaccagcaatgccattgtagtgaagctggagccagagtagccaaagctaaaatcaaacagtctcctagcttggggagcccttgtgcccatctgaatttgtcagaagtaaagccagcattgataagtgagtagtgatatagtgcccgaagtgtggcattgtgcctggtgtgatcccccagcattccctatcattatccattttggtttagaagactgtccccagactagtgagggtcactactagagaatgttctgaaatagtggagcattgatcctcccaggaagtcactccatagatgattatctccttggagtgctgtatttgatactg

SEQ ID NO: 375586 - DNA, 562 bp, Homo sapiens
gctgtatttgatactgaggaacattctcctcttgcttctttgtgcacactcatgtgcacacctcatacacactcatgtgcacacctcacacacgtcctgccatgatcatcttgacacaataccacagtaaagccagtgacagaggggcacaaaggggaccccacggtgctrtgaagtaagggagtatgccagaaagaaaagccatccacgtatttttttcaaaataaagatttcagggcagtgacataccatgggcaggatggtgagaatggtctgtccaaggcactgcagacaataaaggggacaagttatctgaaaataattttacaacaatgataaaatggacaaaaatgtcagctgactttttattattataatgccccgttctaagcagtctcagtcgtaaaatatccccctaaaaaatgtgttgtgttgatttaagttctaaacaactgctgcagttactgttgagttttagtaacatatatttcatctccaaactagcatcttttaatacttatcttttaataaacacaaatttacatgaaagtcaatttggagg

SEQ ID NO: 375587 - DNA, 488 bp, Homo sapiens
tttgtgagaaaacaattcagaaaaagccaaagaaggaaggaccaaaattatttttgcagaaattatwaaggtacatgtcaaaatttaaaaattacacttaatttcttactgataaagtgggcatctccttgctcaaaatacttgtcaaggtgaataaaatagtgatggaacacagaagctgatgccattacccttaatcagaaataacttaaggctgggtactgtggcttatgcctgtaatcccagcactttgggaggctgaggtgggaggattgcttgagtccaggagtctgagaccaactgaggcaacatggtgagattctgtctctacaaaaaaaaaaaaaaaattaaaaattatccaggtgtagtggcacacacctgtagtcccagctacttgggaggctgaagcaggagcatcacttgagcccaggaggttgaggccatagtgagatatgatgggtgtcattgcactccagcctggacaacac

SEQ ID NO: 375588 - DNA, 539 bp, Homo sapiens
tatgtaagaaattttctattttmtttttaagatgtcacttttataaaatataataatgtatattgcttaattatttatataatagaatgtagcacttcctgttaaaatttaaatataacataaaatgtaagaaataaagcagaaaataactcaaagctttaacacccagagataacaggcacaaacatttgaagaacattctttctagattatttatccattcataggtataaaataggagaaaacaaggagaaaggaaggatgggtaaatagaaatagttttataaatataggatcacattataaatgccattttaaaatgtgtttaattttacttgaatttgtcaggagaaaaactaaaaggaaattgaagaaattgctgaatttcagttaaatgttcttcacccaagggatgttaagtttcaaaagatccccataaaattaaaagatttttctaaatgaggtcttttttaatctactgtttcaacttgaaacaatattaattaactacagcaattttttaaaggatctcatttctt

SEQ ID NO: 375589 - DNA, 596 bp, Homo sapiens
ctgtcttgatcagtgccctttggctttttcttcagagttcaaagtagcatagtgattcagtgaacaaactccaggatcagaaaggcctgggagctgctcattacttgcatgatctaatgttccctcctcacctctttcttcactttctttcactgcccttctttctgtcccccaagtagaccaagaccatgtccaatttggtccctcctattttttccagtgtaatactcttccccccagtctactgatggctaacccttttttatccaaaggtcagttctccactcagttaatgttcccattaactttcccctcgaggcattctctgtctaattactctgctttattttcttcatagtatgcgttatcactcaaaagtatcttaataatggctcccattgatggtattattagcttacctcatcacccacaattcccttccacccacctacggttctggggccctctgctgtaaggaggactgccctcttgtggacttttaggatattgctactaaaagcacaaagtcyagttttttttttttttgcaacaagattgctgttttagggggttctctaagtgtcaaatatttgaaa

SEQ ID NO: 375590 - DNA, 492 bp, Homo sapiens
tatcactcaaaagtatcttaataatggctcccattgatggtattattagcttacctcatcacccacaattcccttccacccacctacggttctggggccctctgctgtaaggaggactgccctcttgtggacttttaggatattgctactaaaagcacaaagtctagttttttttttttttgcaacaagattgctgttttagggggttctctaagtgtcaaatatttgaaacattgattttcaggtttattctttttttgattaattgaagtttttaatctacctggarcaagaataacttaaaatgtgaaatgaccttggtaataacgatagttctgtttaatgaatgttttgtcagtagcaaccactgtcctaagtgatttttcatatattatctcatttagtttacgcattgtcagctgggaaaacaaggagataatttaagacatataaagaaagcttttccaagtgtcagggtaaagctgattccct

SEQ ID NO: 375591 - DNA, 492 bp, Homo sapiens
tatcactcaaaagtatcttaataatggctcccattgatggtattattagcttacctcatcacccacaattcccttccacccacctacggttctggggccctctgctgtaaggaggactgccctcttgtggacttttaggatattgctactaaaagcacaaagtctagttttttttttttttgcaacaagattgctgttttagggggttctctaagtgtcaaatatttgaaacattgattttcaggtttattctttttttgattaattgaagtttttaatctacctggaacaagaataacttaaaatgtgaaatgaccttggtaataacratagttctgtttaatgaatgttttgtcagtagcaaccactgtcctaagtgatttttcatatattatctcatttagtttacgcattgtcagctgggaaaacaaggagataatttaagacatataaagaaagcttttccaagtgtcagggtaaagctgattccct

SEQ ID NO: 375592 - DNA, 562 bp, Homo sapiens
aaggggaggggatatagacctttatctcttgatgagagaatgccaaagaatttgtgaccatgtttaaaaaccaccattccttctaatagtagaaaactagacaattttctcattagtttaacaactcyagacttttctacaatcttttttctacttccctcacttctgtcactggaaacattgccatgattcaaaactataagtattttatttttaaaaacacattttcagttgagttgtattctttgcccatgtgcgtggggacagccatggccctcagcatgactttggctttatctgtccattctttctgctacccacttctggccactttacagcttgctggtgcctccaccagagggtggcaggagcagagaaagtgaactcaaatttgtccgtttaaaaaaacttgttatttggcagcagttttgcataaaggcagaaagcaaattaaaactaaaagtacatattttgaagattaactgtgaaactcaaccactcattacaaagaacaccagagctggctattctttctattaatccaaggccttatttcaaagac

SEQ ID NO: 375593 - DNA, 483 bp, Homo sapiens
acaaatgtgtgctaaacactagctggatggcagggactgatctggtatacaaatggtcagagttactaccttcaaagaactttcagcataggctggaagcaggacgtggagatgtttcacagcaattagaagtagggacagaggtcaaygaatacactgaagagggattgagcatttgtacatggcaagagatcggggaagccttcaaagtcagactggtggttaaacattcagtcaatttagagtaagggatggtaaaaacccttttatgtatcaaacctctttggtttagaaattacagacagggtagcaaaccctgtggtctttatcaaccacactgggattagcagcgacatgaaataacaattccttaggcttatttcctcaatggatacataccaacattcaggcttgatatactgggttactgcacagtctagtaagctagcctttgggttctgggctcagtttgaccaggttcaa

SEQ ID NO: 375594 - DNA, 545 bp, Homo sapiens
gcagacccacacctgctccatgagcatccaataactcttccataaagatttatcaaaaattcgaggatggagcatcagtctcgacagaatttattttcaggtgctgcaaggcaagactctacatgggcttgggattgttcctacacaaagacaagctggccaagttgaatgattcaggagttgctttaaatcaccagatacatgaagcaagtaggtggcggcatttttytaaacagggacaagttacacatttcaactacggcatggaaaagagtgtccttccctaagcttagagcaaaaacgttcatgcaaaagtgaaaccatggacactattagtgctcagacacaaagctgacagaagcagaaatgaacatgtttttaacagtgtatgtgtatgctgctttgacgagagaggaacacaccgccttaagactcctgggagcatacgttttgaagggtcagaaagaattcagctttgaaaagtagaattaacagccactttggtccaagtttttcacaacaaagcactacaaagtgggaattag

SEQ ID NO: 375595 - DNA, 574 bp, Homo sapiens
gagtttgggtttggacatttggagtttgaggtatttatggaacatttatgtggaggcgtcaaatgctcatggatatttcctgggctgcagacttcagtttggataatatctagatattaatcacttgtatttatatattattataaatattgctgcagtaaatatacttatatatacattttgtcttaacttctgattatttccgtaagaagtgtttctaaaataaaggctattgataaatataggaaaattattttacaagacgttgtgtcattttatgcttccattagcattgtagaagaatgtctgcctccctatggcctcgccaacrttatttaatcttaacaaactagaaaccccaatagtgaggctgctttaatgtgtactttactgattatttgtaaggttggacatttttcactttttgttgaacttcattaaaggattatttgttgatgtcatgcacccatttcctatagggtattgattttttttaatgatttttaagaactctttttttctttattaaggatattatctctttgtccatctcatgcattgccaatgtgttgtt

SEQ ID NO: 375596 - DNA, 545 bp, Homo sapiens
gcagacccacacctgctccatgagcatccaataactcttccataaagatttatcaaaaattcgaggatggagcatcagtctcgacagaatttattttcaggtgctgcaaggcaagactctacatgggcttgggattgttcctacacaaagacaagctggccaagttgaatgattcaggagttgctttaaatcaccagatacatgaagcaagtaggtggcggcatttttttaaacagggacaagttacacatttcaactacggcatggaaaagagtgtccttccctaagcttagagcaaaaacgttcatgcaaaagtgaaaccatggacactattagtgctcagacacaaagctgacagaagcagaaatgaacatgttyttaacagtgtatgtgtatgctgctttgacgagagaggaacacaccgccttaagactcctgggagcatacgttttgaagggtcagaaagaattcagctttgaaaagtagaattaacagccactttggtccaagtttttcacaacaaagcactacaaagtgggaattag

SEQ ID NO: 375597 - DNA, 580 bp, Homo sapiens
aattaattgagagtgaaccaattactttctttcagtgctgtttttcttcctttgagaggaagcatttaatatgacaggcatcatgccagccattagttatcaatgttaacagggtctgaggcagcaatgatgaactacctaccaatctagggaccaccatgtagtaataagcttaacctttctcccccagcaaatctttcatgagaatgattaataaataataatttcatctgatagactatgtgttagacttctttctcttctgctgcttcttcttattggctgtaaaattataaaagacagacagccaaaagcaagaarcaagaatttaatacacagtctgaagagatagaccctgactacataagagcctgctgaaattatcgattttattcattttattttgatgttcccatttaatccaaaatcctatcatacatattttataattctcatgtaatcttaaatagtataatacatatttttcagcaagtagatacagcattgaatctgctcattgtaagagcatttacctacttgattttctggaaatcaggaataagaaacaaagatttgagca

SEQ ID NO: 375598 - DNA, 370 bp, Homo sapiens
ctaaacaccaataggccttctgctatagatttttgaggaacagaatgggagtgaatgggaaacaagtgggcatgaatgtaatgctcataagaaaaatgctcttatggccaaattcactcatgagctctgtatctgtaccgatctgggactgatacatttattagcacccaaatygtgtttgtgttacaaaaggtggcaggatattaggtaggagagatggagctaatcttttctgtgaaagattagatgattagatgcaggaccatgcaataaaatgaacatgggactattctcatatattgatcagccatagaaaatacaagcttctgtaacaagaaatgacttccagtagaaggatctagatgaacca

SEQ ID NO: 375599 - DNA, 404 bp, Homo sapiens
tttggatgcagacctgcttcttctagctgtgtgtcttcagacaaatcattaaaccctgccaaatatctgtgaaatggagrtaaaaatctatcattaggtgattgggctagttaaatgacagcaggtgtataaaacgcctatctcagtactacagtagattatgaacaaaaatatacttttcttagtacttctcaaaggtcatgaatcgaaaagaagaacaagaaaaagcctaattcctgcctctgcataagttcttcatgattatgttccctttttactgttaagaatattatagacagcattctagctttgtgtgggaagctacaataaatgtctaattccaaatttgcatcagatttatatttctgaaaaactttaaaaatgaactgaaaggtgatattatg

SEQ ID NO: 375600 - DNA, 604 bp, Homo sapiens
atacagccaggttcagagcaaacataatgggtctttgtttttgcctcttccagcacagtttgaattcttggtttcctgttcagtcaaggccaaaagcctctaactttggtatttaacrttttagctactcatatcttggaacaaatttccctatgctgaggatcacggttttattaaaaatagagctcattatattgtcatcaatgtcagcagaatttccctcagattatctaggaagtgatgcttaattccagacagataaaatattgtattaaggtacttttttacttccttctttaagaattgtattttttttcttgtttctgctgaggttggaaggaatcgcatttttcaatgaatgatttcatatagtcctaatttcaaattaggtggcgtaaagcagtgagaaaattttggcaagacctgactctactgtagcttatattaagtaacctcaaaaaataaacaattattcattcgagttagtgcaaagtacataaatttaataagcattgcggttgaaagagcctacaaaaaacatgcctcatttatctgaaaatgctgacctgttctgtttgaggaaaatagattccatattaactac

SEQ ID NO: 375601 - DNA, 636 bp, Homo sapiens
tgtaaagcagcgtgggtgattctgatgccccagccaagattgagagccacttaggtttagaggccctaaagtagcctctgaagtagtatccaggggtctcctgcatctgcccttgccccttctcatctctgtttaaaatggcattccaacagktaggatacgattccgctcctgtcacccctctgctcaaaatcccactgtggctcccacaaggatctgccccatctgcctctctgtctctcctctcccagtttcagcttcaccaactccttcctcttcctcgaacgtgtcatatgtgccccctacaagagggccttttgcgtcaggatttttccttgcctgaaatgctcatgcctccaacacctgcttgggtccctccctcacctccattaagggttgaacacctgaagttctcgggatgcctatttgaacatcccagtgctgtcacctgccccttccctgggcacggcgcttcccaataccccttatcttcctctcctgtctctctttgccatagtacttagtgtcttttaacatgctgtacattttacttctgtgctttgctgctgctgttgttgactgttttttctccctctgctaggaagtcagctttacggggacagggatctttttcat

SEQ ID NO: 375602 - DNA, 604 bp, Homo sapiens
cattattataacaacacagtttcagtttatctctgcatataaggttgtgtcagaactttcctttctgtgtttattatttttagcagtttaaaaactatggaaaaatggctttttggtaataaggtgacattcaggcttggtcaggatctggcagagtctatagaaatgctcactggctgcgggagccaggccttttgaatgctgtctttgtgcctcctcttgcccatggcctctggcctattgtcgaggcgcctgggttggggtggtgctatctgattgtaaccagtgctagtattacagcactcagtgcccaggccctcccttggggccccctgtctggctgcctctgtctcccagccctccctagagaggaccagccatagttctcatatcaaaaaacactatttgtaatttatagaatgttcaagaaaaagagatcactragaatcttcaagacctatggttctctaagtgtttttcatctttacaaatagccctctccttttcccattggaaatcttccagtggcccccaatttgtaaagcatggaaaaggacagctgttctgtttaaagatgagaaggctcctgcaaccccagtcccca

SEQ ID NO: 375603 - DNA, 616 bp, Homo sapiens
atgacagggcttacaagttctgctgtgtttgttttcaaacccaatctcatttctttagagatctgaactgatcatctacctggccagccttggctagcaagatgtgttttatttggccaacgtagtggttttctttaaaaattgagtcaggattgaaaaaccaggagatttccagtacaaatctgaatttcttatctccttggaaaatctgaagatctggcaaaactctttccacagccccatgtgacaattccgtcctggagcagagtatctgctgcctcctgtatgaaagagacagttaggccagcagctctcaactgctatcattgtctgtcctgacctcactatttaaatactgtactcccagtgcactttgctgctkcttattccatgtgacatttatttgtttaattgcctgtgtcatctccctctagaccaaaagctcagtgagggcagagattttttttcctgtgtttgttcaatgctgtatctccattgtctggggtatggctggcacttgatgcctatctgttgaatgaattaatgtctagcccctgtaagcagtaaagtttgcaacctttgctctagagttgcactttgtagaaaagaagactaa

SEQ ID NO: 375604 - DNA, 616 bp, Homo sapiens
atgacagggcttacaagttctgctgtgtttgttttcaaacccaatctcatttctttagagatctgaactgatcatctacctggccagccttggctagcaagatgtgttttatttggccaacgtagtggttttctttaaaaattgagtcaggattgaaaaaccaggagatttccagtacaaatctgaatttcttatctccttggaaaatctgaagatctggcaaaactctttccacagccccatgtgacaattccgtcctggagcagagtatctgctgcctcctgtatgaaagagacagttaggccagcagctctcaactgctatcattgtctgtcctgacctcactatttaaatactgtactcccagtgcactttgctgcttcttattccatgtgacatttatttgtttaattgcctgtgtcatctccctctagaycaaaagctcagtgagggcagagattttttttcctgtgtttgttcaatgctgtatctccattgtctggggtatggctggcacttgatgcctatctgttgaatgaattaatgtctagcccctgtaagcagtaaagtttgcaacctttgctctagagttgcactttgtagaaaagaagactaa

SEQ ID NO: 375605 - DNA, 616 bp, Homo sapiens
atgacagggcttacaagttctgctgtgtttgttttcaaacccaatctcatttctttagagatctgaactgatcatctacctggccagccttggctagcaagatgtgttttatttggccaacgtagtggttttctttaaaaattgagtcaggattgaaaaaccaggagatttccagtacaaatctgaatttcttatctccttggaaaatctgaagatctggcaaaactctttccacagccccatgtgacaattccgtcctggagcagagtatctgctgcctcctgtatgaaagagacagttaggccagcagctctcaactgctatcattgtctgtcctgacctcactatttaaatactgtactcccagtgcactttgctgcttcttattccatgtgacatttatttgtttaattgcctgtgtcatctccctctagaccaaaagctcagtgagggcagagattttttttcctgtgtttgttcaatgctgtatctccattgtctggggyatggctggcacttgatgcctatctgttgaatgaattaatgtctagcccctgtaagcagtaaagtttgcaacctttgctctagagttgcactttgtagaaaagaagactaa

SEQ ID NO: 375606 - DNA, 574 bp, Homo sapiens
tacaacaatctataccatatatacttttcattttcctttttatattatttattttatgcctctattatgttattgcatttcatctccacagcaattttgtaaaacgtacattatctctgagtgttacctcaaatttttctacctttctttctttcccccacctttatttgtattcactgtattgtattgtattgtattgtattcatttattctttttgaatagataccaaatcctatacatgatccagaatctaaaatgtatggaaaggtctgcaataaacctcatcccttaaccatccaggtcccctcctcataggcagtgttgttagtttctttgtgtcyatccacagatactctttggatacccttttatattcttctttctctttgtatatatggatgtcacataccgtgtacactgctatgcactttgcttttctcacttaaccatatttcttaaagattatttcatattattctataaatgttctcttattctttttttacatttatacagcattccagttggtgatttattcccagatggtttatttaactagttcctgttgatgga

SEQ ID NO: 375607 - DNA, 550 bp, Homo sapiens
tgctctctatatccatgtgcagtaaagatatttaaggaagtaaaatttgccaccagggaaggttagtgtcagaaatttttcatcatattattacattttttcccattttctgtaggccagaccctcaagtccctataaattgaatagaaaaaatatatataatatacataaataattaaccagctgtactccaaagaatttaagttcatcattctatcattagggctcttaatttgtcccacacctaaagcactatctgctttccttcatcggttcttattgccaacttgggactstactgaagccctttacaaaacttctatttgtaagattcccttctttttttttttttctttttgtaggccatcagaggtagaaggtggtaaaaacagagttgccactctcggtgtggccacgtgagcacgtcccacttaagtaacagggtgtccctcaggtcagcttgtgataaaacccaagtcaaacaaggctgaatcctgggtgttttatgtcctaaggatctgaaaagtgttcacggccagccctgaccctc

SEQ ID NO: 375608 - DNA, 508 bp, Homo sapiens
tgtcaaacatgcaaaaaagaaaagaagacaatattgcaaaatccaaggacatgctacctcarttaatcaaattgtatcattttgccataatgctgaatgtagtgtttatctgtcccatgaacatttttattctgttacaaaggtacagtaatctattcttttaccaactaaaactttcaataaaatgaggccagatgaattcagttcattcaaatggaatttgggtatagggtataatttcctgagcatggcctgattacattcccaaaggccatctagggtagggaggcttaactaaaataggctgtgtccaggttgtgatcagtgcggcaaagcagatgccattgtggcggctgcagcatcaagtttagtttagactcactgttaattacccaccctactcagactctttcttaccaaccatcttgttttccttcagagtctgaaaatgcctggtacttggatttccagtgtggtagattgtttccacaaatggctgcaataatca

SEQ ID NO: 375609 - DNA, 508 bp, Homo sapiens
tgtcaaacatgcaaaaaagaaaagaagacaatattgcaaaatccaaggacatgctacctcaattaatcaaattgtatcattttgccataatgctgaatgtagtgtttatctgtcccatgaacatttttattctgttacaaaggtacagtaatctattcttttaccaactaaaactttcaataaaatgaggccagatgaattcagttcattcaaatggaatttgggtatagggtataatttcctgagcatggcctgattacattcccaaaggccatctagggtagggaggcttaactaaaataggctgtgtccaggttgtgatcagtgcggcaaagcagatgccattgtggcggctgcagcatcaagtttagtttagactcactgttaattacccaccctactcagactctttcttaccaaccatcttgttttccttcagagtctgaaaatgmctggtacttggatttccagtgtggtagattgtttccacaaatggctgcaataatca

SEQ ID NO: 375610 - DNA, 527 bp, Homo sapiens
tgaatcttggaatacataccttacttccaacagtctactgctaacctctttgaataacaggctttcagtcttcaagacgtttgtttttctgcatttcctcttcctacagtgaagtcactgggggcagatgaaatataaaatgctggagtttgcctctctggcgagctgcagaaaggaatttctgcattattgtgatcatctatttcattgtagcacttagttgcttttacaaagcagttctcctgtccttgcccctgccatttagaaatttacaggctaaaaagatggtgatgacccagacgagttatgaaggccctataaacaaatgcatactcattacagaaacatatagtaagcacttgycttacgtggcatccacaggccagggaaatggtgggatgctggcggcttcgtcttgaggcagttaaatgatgtgaggttccctcactgttctcgcctgctgttaagtagctacaacagacttccaaactccttccctctgttttagagagctgttccacacttga

SEQ ID NO: 375611 - DNA, 614 bp, Homo sapiens
ctattccaggtgttgcgactcaaaagaaaggaatttttttcacttaaaccctcaaacatggattcttgcatgatctaccaaccactctggccatgataaaacctaatactcatccatccatgtagttctcgaatctctatgcatacagtatataatatccatgatacacgtgcaccacatttatttcccaactattccccaatttctgggcattcgcttggtttccagattcttctttccctccctacaacaatgatgcaataaaattcctgtacacagaatcttgcatatcaatgcttttatttttatgggctagcttccaaaagctgggtcatatatgatatctccctgtgttttttattaatagagtttgccagattgcttttcaaaagttcaaagaccacaggaatgtattagactccccccatctcttcatctaactgcagtggtggatattatcgctcctttgaaatatttgctaattattttttaaayctgtaatacatatatttggtagatttgtatttggaatatattacaagcttgtatatgtcaatgaaaaaagttaaaattttactaatttgatgggaggggtatctcattgtagtgactga

SEQ ID NO: 375612 - DNA, 551 bp, Homo sapiens
tttccccattttccctactgattcttatgaatgctgtggcaaagcagacattaacactttgccacatgttgtaagacacctatctagcctgtattttttagtttgtttatgatatgtttggtcatgcaattaaaaaattacatggtacagtatgcttatctttttatctatcccttattaattagctctgtattgattataaacatttccctgacacttggggtataaaattattctcccaaattttctctaaaatgtttgtggtaggcacaaagatggttccccaaaaagtccatgactttattgccgaatcctgtaaaaatgctatcttacatggcaaaagggactttgcagatgtgattaagggtacagattttgagatggggatattattctggattatccaggtaggcccaatctagtcaccygaatccttgagcggcagatgtcactatggaagaagggttggagagatgcaacattgttgactttgaagatggaggaaggaagccaaggagtatggctgacctctgagaatggcaagaaagttg

SEQ ID NO: 375613 - DNA, 517 bp, Homo sapiens
ctgcagtgagctatgatcacgccacggcagtctggctggggcgaaagggcaagaccttgtctctaacgaaaaagaaaaagaagtagatgacagatagacagatggatataggtagatacctacggagaaatagatagacagctagatcaatatatgagacagagagaaagagagcsagcgagcaaaacagagagagagtgtatgtgtgcgtttgaagctaagacagggtttctcagcctcagcactgtggacattcgggtctggatcactttctgaggtgaggccatcctatgcactgtatgggaagcccctgaggccatgggaataggctcggggctgcggtaaggaacggatccaccactagagcctccagaaggaacccaccctgcccacaccttgatttcagacttctgcttccaaaactgcgacagaatgaatcccagttgtaagccacctggtgtgtgatggcttgctacagcagccctgggaaatggatacaagggagatgagacacatt

SEQ ID NO: 375614 - DNA, 603 bp, Homo sapiens
aacaactatattgccataagaatactcacaggtagggtccaaatcctagaggaaccaggcagagagaaacaaacgtgcttcaaatcttgattatgagagcatatactttacttaattatttaaggccataaatacttaaaaataagtttccttgactctgaaaaacaaagcatggattagcaatattccaaacagtagtcaaaaagtttgattcaggttgctgagttcagttcatttagttaactsttgttttgcttactatttgtgaacatttcagctcttcatgagtcctgtacattttcctttattccaatgttatcatctctgaagttatcaaaagcctgcatttgagagaacttgttaaaattctatagctcattataaaccatctttgaaaatgattaaaacaagacaacaactatctgtgaatagcaaaatgttcagggcaagtacagttagaaacacaattgacaaacaagtttggttatctctgtggtttataataacttagcattaacaaccttaattatgattgacagcttatacttagacattagaactttagaaatctcatgcaattttggaacatatataagcattatt

SEQ ID NO: 375615 - DNA, 603 bp, Homo sapiens
ttatttactaagatacaacctaaagaagactgaacatcattttggcaagcccatgtacctgaacatggcaaataatcctgtttacctctcttttttggacacttcagaggccctctgaagtattcaaaaagccaggtgccagggaagacaattttgaaactgaagtttgattttgggaaggctgttaaatgttcgaggttttaaacacttgatattataaaatagaattccagattaccgtaagttatttattttgccaaaatgattactcagaaatttaagaagcaaaaaccttttataaccytttacaaattttgccaaagagcagattagtgccttaggaaaagcttgttatgcttttatttcaatgctcaatttacagaaaaaaaaacatataatacccttttttgaatttggtcaatatgttcacacaaagaacctcttctgcaagattaatttccgcaatgcttcctccacttgtttgaactttcagcttttcctaatttaaattaaaacaatcctttaatcctaggccaaagtattcccatgccttcttataaccttttacaaacacacacacacacattttactgtttttacata

SEQ ID NO: 375616 - DNA, 564 bp, Homo sapiens
tgaggccaaacttttccttcttagttaagggtgtggttagttccatatgtcctcaggtctaatcagttttgaagcaggcaagacagactgtcttcaaaacccaaattcagtttgtaasctcaaaacactagcaaaccttgcatctcacctgcattttaccaagagtctttagggctctttttatttctcaaagattgaaatcacgaaaactgaaaggtaccacaacttttatcttccctttaaaaaatattagatctaagcgattgtctttctttgggccaaattaattagaattctttttacagacatcacacatagtgcacccacagacaggcagaagagaactcctcccttgttttctgtaaccgagatgtacagtaaagggcaactaagtcacaggctctgttcttgaagcattaacaaattcattcaatcagtaaattatatatacatggaaaatttcatatattaagtaaaatatcacatagacattgtattaaatggttgttaaaccattaaatgagtgttcatagtaggaagccagatatatgtctataggtagat

SEQ ID NO: 375617 - DNA, 564 bp, Homo sapiens
tgaggccaaacttttccttcttagttaagggtgtggttagttccatatgtcctcaggtctaatcagttttgaagcaggcaagacagactgtcttcaaaacccaaattcagtttgtaagctcaaaacactagcaaaccttgcatctcacctgcattttaccaagagtctttagggctctttttatttctcaaagattgaaatcacgaaaactgaaaggtaccacaacttttatcttccctttaaaaaatattagatctaagcgattgtctttctttgggccaaattaattagaattctttttacagacatcacacatagtgcacccacagacaggcagaagagaactcctcccttgttttctgtaaccgagatgtacagtaaagggcaactaagtcacaggctctgttcttgaagcattaacaaattcattcaatcagtaaattatatatacatggaaaatttcatatattaagtaaaatatcacatagacattktattaaatggttgttaaaccattaaatgagtgttcatagtaggaagccagatatatgtctataggtagat

SEQ ID NO: 375618 - DNA, 584 bp, Homo sapiens
ctgttgttatagcatgccagcactcatacaaaatacataaagtgaacatggctgtgttccaataactttatttaccaatataggcagtagtctgggtttagttcctgagctatagtttaatgacttctgtatgagggaataaagaaaaacaatcttaaaatagaaagaggttagaggtggcaatcttcrtggagcactgcttttgggaaagagataagtaacctggaaaggagaaatactcctaggattattggtggtgaaaaaaaagaaagaagcaagaattggatgacataacaactctatatcctccacaagataatccatctcttacactgaatgtattaaaccaatagaagagggtgctgttgatgtcagaaattataagcctcctgaatctctcacctttgtctgcatacaactgtcatttctagctcaggaaaataatttattttaagcagtggaagaaaacatcgaaacatagattgtatgcaaagtttatgtaatgtgaaatttagaatgccataatttgaggcttggcaaatttagtggcagccttaacagatacaatttgtggtgcattgtac

SEQ ID NO: 375619 - DNA, 614 bp, Homo sapiens
cctcctgaaatgacttatataattattatatttcttttaacatcaggatttatacaggactatattacataattacttactagtgaaattatgtaaaataagggaatttgccagaaagcatcagagtgaacatatattatttatgttcacatcaaaaacataaaagcaaatttagaagcaattacttatttacaggtggcttggaaatctcgaattctgacatttcttgcaaaaaacaaagctacgtatttattgyccacatttcataatttttgtgtgacaaaggaagaaagttggagtgtttcaagtgaaaattaaactaattgcaaagtagatatgaaacttgcagagcttggaataaattttcctaaaggaaaacaactttttggcaaccactcataaaacgagaagtgtagggttagttacaataaatctatagtctagttttcaagaaaatatgtgcttggaatgtattcgtaaaaccatatcctccaatcttccaaactgaaattatattcagagataaaatttttaatattagatcatagacttcgatttttactgagcttacttagtacaaaaattattttgataaaattggttgtattgtcaac

SEQ ID NO: 375620 - DNA, 614 bp, Homo sapiens
cctcctgaaatgacttatataattattatatttcttttaacatcaggatttatacaggactatattacataattacttactagtgaaattatgtaaaataagggaatttgccagaaagcatcagagtgaacatatattatttatgttcacatcaaaaacataaaagcaaatttagaagcaattacttatttacaggtggcttggaaatctcgaattctgacatttcttgcaaaaaacaaagctacgtatttattgtccacatttcataatttttgtgtgacaaaggaagaaagttggagtgtttcaagtgaaaattaaactaattgcaaagtagatatgaaacttgcagagcttggaataaattttcctaaaggaaaacaactttttggcaaccactcataaaacgagaagtgtagggttagttacaataaatctatagtctagttttcaagaaaatatgtgcttggaatgtattcgtaaaaccatatcytccaatcttccaaactgaaattatattcagagataaaatttttaatattagatcatagacttcgatttttactgagcttacttagtacaaaaattattttgataaaattggttgtattgtcaac

SEQ ID NO: 375621 - DNA, 542 bp, Homo sapiens
gacaagttcattttcttcaattactgatgccacttttgtatagaagttgtatttgttttcaggtttcttattttacacaattagtgacattattatttatgatcaggcattttacacttcagagtgcatgacatgtttgagagtaatagggttccygctttgaggggattctaattcatcatcctttaattgcctgcttggagcaaagtcaaaccaattcccttcttgcctgtccaaagcagcattccttttggccttgaacacctgactctcacttctctttataacaaaactcatgtcaatttgagaaacgttcactataaaaagagggtgaggaaataaaacatgttgaaatgatttttattaatgtcattgttagcaccattttcaggcttgtgatatgtgacaaaataagacctcatagtgtcctcaaatatccttaaagccctacatgcggaactcaagttagaatagacttgggcatgaaataacgttcaagtgatgaaaagcagaatatagtatgtaggaaaatactttttcca

SEQ ID NO: 375622 - DNA, 552 bp, Homo sapiens
ttctgtaacaacaaattcaggaacttgttggctaattcttaaccataaaataattggattacagcaaagtcaaatcattcatttaaatctaagtgataaaaaaccagctaaataactctgacatctcaaaaatccagagtttcttcttatatccaagtcactgcactagtttcccagcaatagtttggaaccaggctaaaatggctgaaatgatagaaataggattcagaatattgatacaaaatgaagaacatcaagcttcaggaaaaagttgaaacccaatccaagaattctaaggtatacagtaaaataatacagaagttaaaagaaaaaaatttccgttttaggtaagaacsaaactgaccttatagaagtgaaaaactcacttcaagaatttcagagtacaatcacaaatattaacagcaggattgaacaaactgaagaaagcatctcagagctcaaagaaagggtctccaaaataactcagtctagcaaaaataaagaaaaaatttaaagaagattgaacaaaacctccaagaaatataggattgt

SEQ ID NO: 375623 - DNA, 427 bp, Homo sapiens
agttaaaagaaaaaaatttccgttttaggtaagaaccaaactgaccttatagaagtgaaaaactcacttcaagaatttcagagtacaatcacaaatattaacagcaggattgaacaaactgaagaaagcatctcagagctcaaagaawgggtctccaaaataactcagtctagcaaaaataaagaaaaaatttaaagaagattgaacaaaacctccaagaaatataggattgtgtaaagggactaaatctatgacacattgtcatccctgaaagagagagagagaaagcaagcaactttgaaaacatatttcagtttatcatccatgaaaatttatcttgagtgaccaacattcaaattcaggaaatgcaaaaaaaaaaaaaaaccctgtgaaacactaacaagaagatcatccccaagacacatag

SEQ ID NO: 375624 - DNA, 427 bp, Homo sapiens
agttaaaagaaaaaaatttccgttttaggtaagaaccaaactgaccttatagaagtgaaaaactcacttcaagaatttcagagtacaatcacaaatattaacagcaggattgaacaaactgaagaaagcatctcagagctcaaagaaagggtctcsaaaataactcagtctagcaaaaataaagaaaaaatttaaagaagattgaacaaaacctccaagaaatataggattgtgtaaagggactaaatctatgacacattgtcatccctgaaagagagagagagaaagcaagcaactttgaaaacatatttcagtttatcatccatgaaaatttatcttgagtgaccaacattcaaattcaggaaatgcaaaaaaaaaaaaaaaccctgtgaaacactaacaagaagatcatccccaagacacatag

SEQ ID NO: 375625 - DNA, 587 bp, Homo sapiens
tatcactgatgccacagaaatacaaaaaaccctcaaagagaatgtcaaactattcatttttgtagatgatataattctttttttatattactttaagttcttgggtacatgtgcagaatgtacaggcttgttacataggtatacatgtgccatggtggtttgctacacccatcaacccatcatctacattaggtatttctcctaatgctatccctcccctagccccccgcccccagacaggccccagtgtgtgatgttccccactctgtgtccatgtattctcattgttcawttcccacgtatgagtaattctatacctcaaaaacccaataatctgtatccagaaactccttgatctcataaacaactttagcgaaatttcagtatacacaatccatgttcaaaaatcagtagcattcctatacaccaacaacatctaagctgagagcaaaatcacaaacaaaatcctattcacagtagccaaaaatataacatacctaggaatacagttaacctaggaggtgaaagatctctacaataagaattacagaacactgctaaaagaaatcaaagatgacacaaacaaa

SEQ ID NO: 375626 - DNA, 471 bp, Homo sapiens
aatatttcccatcatcactgactactcttaagtatgatttatttttctcttttccaaatgttccccttcctctcaaatcttctctagtgtatgctatggccaatcactttactatctcatttctgaagtttaagttaaaaaatctgatttataattttatgacttaggaaaatagaacatccttttgtacattttaattccttgcttcattttagaaaaccaatatatttgactccttattaagaatgatttacagttgatgcaagcatataaaagaaactatgtattttgtctattgctagtccraatacttgtggtttatgacatttctgtagaccactgaactacatggtgtttgatatagttaggctttgtgtccccactcaaatctcatcttgaattgtaatccccagatgttgagggagggacctgataggcggtgattagatcatagggatggtttcctccaag

SEQ ID NO: 375627 - DNA, 471 bp, Homo sapiens
aatatttcccatcatcactgactactcttaagtatgatttatttttctcttttccaaatgttccccttcctctcaaatcttctctagtgtatgctatggccaatcactttactatctcatttctgaagtttaagttaaaaaatctgatttataattttatgacttaggaaaatagaacatccttttgtacattttaattccttgcttcattttagaaaaccaatatatttgactccttattaagaatgatttacagttgatgcaagcatataaaagaaactatgtattttgtctattgctagtccaaatacttgtggtttatgacatttctgtagaccactgaactacatggtgtttgatatagttaggctttgtgtycccactcaaatctcatcttgaattgtaatccccagatgttgagggagggacctgataggcggtgattagatcatagggatggtttcctccaag

SEQ ID NO: 375628 - DNA, 471 bp, Homo sapiens
aatatttcccatcatcactgactactcttaagtatgatttatttttctcttttccaaatgttccccttcctctcaaatcttctctagtgtatgctatggccaatcactttactatctcatttctgaagtttaagttaaaaaatctgatttataattttatgacttaggaaaatagaacatccttttgtacattttaattccttgcttcattttagaaaaccaatatatttgactccttattaagaatgatttacagttgatgcaagcatataaaagaaactatgtattttgtctattgctagtccaaatacttgtggtttatgacatttctgtagaccactgaactacatggtgtttgatatagttaggctttgtgtccccactcaaatctcatcttgaattgtaatccccagatgttgagggagggacctgataggcggygattagatcatagggatggtttcctccaag

SEQ ID NO: 375629 - DNA, 536 bp, Homo sapiens
tgagtccaggaccgctctatactgtgcagccttgggatttaatgccctgtatcccagctgctctagttccagcagtggttaaaaggggccaaagtacagctcagactgttgcttcagaaggtccaagccccagycctgtggcagcttacatgtggtactgggcatgcagatacaccgaaaacaattgagatttaggaggaagggaaatgtgggttcagagcccccacaaagagtctccacggggacattgcctagtggagctatgagaagagagtcactgtccttcagacccagaatggtagatccacacactgacagcttgcatggtgcacctggaaaagtcacaggcactcaatgctagcccatggaagcagccaggagaggagctgtaccctgcaaagccacaggggtggggctgcacaagaccatggagagctcacctcttgcatcagtgtgacctggaagtgagacttagagtcaaaagagattatttatcagctttaagatgtaatgactgtccctactggatttcagac

SEQ ID NO: 375630 - DNA, 582 bp, Homo sapiens
gccaatgctattctaacagatcggtgtctttagaacagtaatgtgaaaatttagacatatagacgctctatgaaaaataataacttccctatggctgacttttaacatgtrttctttttcattatagcggaagaattcttcatattacctaataatgatcttgagatcaatggcctagcattttattcctcatacagttatactattctattacataattcctaaacaattaggagaagattcataatgattttcatcctaaagccaaattatagtgaaagtgttgtaagttgtatatttattttatataagctaaataaataactctgcagcaattctgtgatgctgtaatgatgtttagatgttatccattaagtcatggcttcataaataaccaagtttccttgaatttcctagagccagggactttctatgaattccaaacaaagataattgaaagaaaagaagttattttaaataaaattaatatattaaagaatattcataaagaacaaataaacttttgttaactaattatttaatgtcttactatgtatcaggcactgctgggcatacaaaaca

SEQ ID NO: 375631 - DNA, 568 bp, Homo sapiens
tcatattacctaataatgatcttgagatcaatggcctagcawtttattcctcatacagttatactattctattacataattcctaaacaattaggagaagattcataatgattttcatcctaaagccaaattatagtgaaagtgttgtaagttgtatatttattttatataagctaaataaataactctgcagcaattctgtgatgctgtaatgatgtttagatgttatccattaagtcatggcttcataaataaccaagtttccttgaatttcctagagccagggactttctatgaattccaaacaaagataattgaaagaaaagaagttattttaaataaaattaatatattaaagaatattcataaagaacaaataaacttttgttaactaattatttaatgtcttactatgtatcaggcactgctgggcatacaaaacacatcagtgatgaaaatattttgcttcctttatggggtttacattctactatggtggagaaaaacaacacatattaaaaaaatcaataagtacatcattatttacttattgtataaaatataaatt

SEQ ID NO: 375632 - DNA, 568 bp, Homo sapiens
tcatattacctaataatgatcttgagatcaatggcctagcattttattcctcatacagttatactattctattacataattcctaaacaattaggagaagattcataatgattttcatcctaaagccaaattatagtgaaagtgttgtaagttgtatatttattttatataagctaaataaataactctgcagcaattctgtgatgctgtaatgatgtttagatgttatccattaagtcatggcttcataaataaccaagtttccttgaatttcctagagccagggactttctatgaattccaaacaaagataattsaaagaaaagaagttattttaaataaaattaatatattaaagaatattcataaagaacaaataaacttttgttaactaattatttaatgtcttactatgtatcaggcactgctgggcatacaaaacacatcagtgatgaaaatattttgcttcctttatggggtttacattctactatggtggagaaaaacaacacatattaaaaaaatcaataagtacatcattatttacttattgtataaaatataaatt

SEQ ID NO: 375633 - DNA, 541 bp, Homo sapiens
tagttggttggggaattcatttgttcccagagaagttacattaggattccatccagttccttataatgtatccagatgcaagaaatttaatttatgctttaaatatagtaaatattctagattaaggactgagtgcctgccaaattttaagctcagctgttttattttatttttttgcttaagatatgaaataatgtcttgaactatataaaaccaagctattcacttcctaattttttgaatgtgctgatttgtatcaaattttgtagtgatcttgccaggcaggcttagagcctatatattaaaatgtagcccaaaggatttgttttaaaaatcagcttctatgagattgaaacttaactaaacttattgccrtgtgcatctaactttgctttgtaaaatgacttcattaagcacttacacttttaatttgctataatgtacaaaaaaaatcagtatatctgacaaatggagaaaattaagcatttcttttctgttctggtatatttatacatatgattaatgttttaaataatgcata

SEQ ID NO: 375634 - DNA, 653 bp, Homo sapiens
ttttctgttcctgtgttagtttactgagaaggatggcttctaacagctggatatttctataagccaatgagggcccaaggaaaaagaaaaatgttctcttaatgtattgtaaacttttgcttagaaaagcatctcataccataaattcttccatttaacgtaattgaagagttaacratgactttctcagaaagcaagcttctctttacttcttaggcatgtatatttctatatttctatgagactattgatgcctacttgagaaagcaacatctagtaagttctcagtgtttgcttacgaactctctttttctgtcaaacttattcattttctgagtgtcctctcctcattgcttatttttgttgattttgttgaagatcagatggttgtaggcattaaaaacatacatcagtataatagccatctatgacaaacacacagccaacatgaaagagttaatgatgaatcttttttagaaagtaagcttccatttatttctaggggtgtatttttctttttaccttttctttaataatttcaactattattttagattcaggggatacatgtgtaggtttgctacatgggtatattgagtgaaactaaggtgtgaggtacaaatgatcctgtcacccaggtagtaagcatagta

SEQ ID NO: 375635 - DNA, 653 bp, Homo sapiens
ttttctgttcctgtgttagtttactgagaaggatggcttctaacagctggatatttctataagccaatgagggcccaaggaaaaagaaaaatgttctcttaatgtattgtaaacttttgcttagaaaagcatctcataccataaattcttccatttaacgtaattgaagagttaacgatgactttctcagaaagcaagcttctctttacttcttaggcatgtatatttctatatttctatgagactattgatgcctacttgagaaagcaacatctagtaagttctcagtgtttgcttacgaactctctttttctgtcaaacttattcatttyctgagtgtcctctcctcattgcttatttttgttgattttgttgaagatcagatggttgtaggcattaaaaacatacatcagtataatagccatctatgacaaacacacagccaacatgaaagagttaatgatgaatcttttttagaaagtaagcttccatttatttctaggggtgtatttttctttttaccttttctttaataatttcaactattattttagattcaggggatacatgtgtaggtttgctacatgggtatattgagtgaaactaaggtgtgaggtacaaatgatcctgtcacccaggtagtaagcatagta

SEQ ID NO: 375636 - DNA, 653 bp, Homo sapiens
ttttctgttcctgtgttagtttactgagaaggatggcttctaacagctggatatttctataagccaatgagggcccaaggaaaaagaaaaatgttctcttaatgtattgtaaacttttgcttagaaaagcatctcataccataaattcttccatttaacgtaattgaagagttaacgatgactttctcagaaagcaagcttctctttacttcttaggcatgtatatttctatatttctatgagactattgatgcctacttgagaaagcaacatctagtaagttctcagtgtttgcttacgaactctctttttctgtcaaacttattcattttctgagtgtcctctcctcattgcttatttttgttgaytttgttgaagatcagatggttgtaggcattaaaaacatacatcagtataatagccatctatgacaaacacacagccaacatgaaagagttaatgatgaatcttttttagaaagtaagcttccatttatttctaggggtgtatttttctttttaccttttctttaataatttcaactattattttagattcaggggatacatgtgtaggtttgctacatgggtatattgagtgaaactaaggtgtgaggtacaaatgatcctgtcacccaggtagtaagcatagta

SEQ ID NO: 375637 - DNA, 561 bp, Homo sapiens
caataatttaaaaaacagaataaatgctagaattaattgaaaaatataaacacatatgtaaatctatgaagtcatcattatttaaaaataggagaaagtcaacataatcagactaaccatgtattttcaccatttgatgtgactattgtgccacatttttacacagaataatgttaactgaaagaagtaactgaaaagtcccatgcctataatctcagcattttggaaggctggccatcacttgagcccaggagtttgagaccaacatgggtaacatagtgagaccctacctctacaaaagattgaaaataaaaaaaaaacagcaaagtgtggtagtgtacccctgtagtcccagctacttgggaggctgaggtgaggtgagaggattgcttgaactcagraaatcgaggctgcagtgagctgtgattgcaccactgcactatagcctgggtgacagagcaagaccctgtcacactcacacataaaaaaaaaagaaagaaacaaaaaaaaattaattattcatttctagaaaacactatatttttcagtaatcatataact

SEQ ID NO: 375638 - DNA, 529 bp, Homo sapiens
cttaaaacttgggtcaaaaactaaaatgtcatttgtgcttcttgtccaaagcaaggattgaaaggagacataagcatgaaaagagaaaataactataatagtggttaacaactcaaataaatatcaagttgatataaacaaagaggaaattgactctggctatgagattaggggcacactaataatgaacttaatagataattaaacatttaatttaatagactattgtctacattacctacatataccttctgtctatatttctttargcattcatttgaagagaacatttctatccattcattttttttgacacgatcagaaatatatgtgggtttgtgcatgcatgctcatatgtgtattgcatgtatgtatatattttatttcactgataatacaggcaaaccttagaaataatgtggattcagctccagaccacagcaataaaataaatagtgcaataaagtgagccacatacattttttggtttcccaaaaccaaaatacatgtaaaagttacatttacactc

SEQ ID NO: 375639 - DNA, 548 bp, Homo sapiens
cttaatattgttattttcccctgctcccatgaatcacaaatgttcttaatggcacctagaatggtggatcctttccaaaaaattttcratgtactttgcccataaccatcagaggatcaactatctgtgatcgctatagccttacaaaatgtatttcttaaataataagacttgagagtcaaaattgctccttaatccatgggctaaagaatggattctgtgttagcaggcatgaaaacagcattgatctccttgtacatctccatcagagctcttggatgactaagtatagtgtcaatgaacagtaatattttgaaagtatttttttttctctgaacagttggtctctacagtgggcgtaaaatattcagtgagccatgctgtcaaaagatgtgctatcgtctaggctgtgttgtcagttttatagagcacaggcagaatagatgtagtataattcttaaaagccctaggtttttcagaatggtaaatgagaattggcttcaatttaaagtcaccagctgcattaacccctaatgagagagtcagcc

SEQ ID NO: 375640 - DNA, 639 bp, Homo sapiens
gtaatatagggatccattttcttctatattaccagatagtacatatctaaacatctctaccacctatatttcatgaagatctctgggaatagtgctagactctgttttagtcaacatattacccaatcaaatcaattattaaattttgtcaattatacctcctgaatagctcctctccaatcctaatgcaagcagtttagtttatatattcaccatctctcacttggccatttatagtttcctcaattatctctcttccactagtgayagctctcatctcttcctgcatctatgtcactgctggagttagattcctgaaatgaaaatcttgatacatggatacaatgctgacactttacaatagttcttataaccttcagataggagttcaagcttcttcatattgtgtgtaggccctgctatcagaatcctgcctgccacttcaattatatatcttaccacatgctcccatcacttgggtcccagagaatcagattcctagttgttctatgtctgtatcatgtgattttgtggctctgagctttgtcttaaacactctaggtgtctgaaatccccttaaattcctcatgtaaatggtaggcttttctccatcaataacaattatacttaggaactgct

SEQ ID NO: 375641 - DNA, 593 bp, Homo sapiens
aatggtaggcttttctccatcaataacaattatacttaggaactgctaactatttgcacaattcctaacttcctagatatattagtccattctcaggctgctaataagaacatactcaagacagggtaatttataaagaaaaagaggtttaatggactcacagttctatatggctgtggaggccttacaatcatggcggaaggcaaaggaggagcaaacgcacattttacatggtttcaggcaaaagagtgtgcaggggaactaccctttataaaaccatcagatattatgagatttattaactatcacgagaacagcacaggaaaaacacacatgattcaattacctgccactgggtccctaccacaacatgtgggtattatgggagctataattcaagatgagatytgggtgggggcagagccaaatcatattattagacaaatatatttacagccttctctctctaggcgttcaacttacttctactatggcctgagttttattataattatttgtttatttaattttcactgtactgtagtgtaagccattgcattagtctgttctcacactgctataaagacatacct

SEQ ID NO: 375642 - DNA, 562 bp, Homo sapiens
ggctgtatagagcagctaggctctaggcctgacccatgaaaccaatttttcctcctaggcctccaggtcttgatgagaagggctgctgcaaaggtctttgaaatgccttgaggcattttgtccgttgtcttggctattaacattcagctcctttttacttgtgcaaatttctgcagccagcttgaatttcttcccccaaaatgggtctgccgtttctaccacatggctgggctgcaaattgctaattttctaaacttttatgctctatttcccttttaagtataagttgcaggttcaggtcatttctttgtttttccagatgagcttagacttttagaagtagccaggctgcatcttgamcactttgctgcttggatatttcttccactagataccctaaatcatctctctcaagttcaaatttccacagatctttagagcaggggcagaatgccacctgtccctttgttaaagcatagcaagactagcctttactctagttctcaatgtttctcatctgtatctgagacttcctcagcctggacttcactgtccatatcac

SEQ ID NO: 375643 - DNA, 619 bp, Homo sapiens
accgtgaatttggctagattttaatgctagaataagaagcctactgtcgaggaaaatttccaaccttagcaaacataactataagttgctttctcttctctctgagtttttacttctaactcagtgtttttggtgtgtatgctaccttctttattcagccagagagtcatggtgtcaaactccctgaattatgaatgtagaaactctcagaaagtcacaaacaatagatcaccgaaagaaagatgttttccatttgaacctatacttaacagtaaagtgcaaactaattatcttaatatttaacataaaacaaaataaaataaagtattatctggtaaaattcattttggcatgataatattagagattaagttattatctgtcagtcttsgtgatataaataaaaaaatgataggcaggttcactcccccaccaatatgttaaaaaataaacaaacagtaaagcaatctgcaattacaaaacattaaaatttatctgtaccaatatatgatttactaatttttaaaataaattactcaagtcactcattgaggatagaattggcctgtcacacatttatagaaacaaatgagaaagactgacagaaaagtgtcagttt

SEQ ID NO: 375644 - DNA, 513 bp, Homo sapiens
tggtaccaatcctactgaaactatcccaaaatattggaaaaggaaggggttttccttaacacattctatgaaaatagcatcagcctgatasaaaaatctggctgagacagaacaaaaaaacaaaataaaatttcaagccaatacccctgatgaacatagatgcaaaagtcttcaacaaaatactactagattgaatccatcagcacatcaaaaagttaatacaccacaatcaagtaggctttattcctggcatgcaagcctggctcaacagatgcaaatcaacaaatgtgattcaccatataaacagaattaaaagcaaaacccatatggtcatgtcgatagatgcagaaaaagcttttgataaaatccaccatgccttcatgatagaaaccctcaacagactaggcattgaaggatcatgtcttaaaatagtaagaacaatctaggacaaactaacagttaacatcatactgaattagtaaaagctgaaacaattcttcttgagaactggaa

SEQ ID NO: 375645 - DNA, 497 bp, Homo sapiens
ataaacagaattaaaagcaaaacccatatggtcatgtcgatagatgcagaaaaagcttttgataaaatccaccatgccttcatgatagaaaccctcaacagactaggcattgaaggatcatgtcttaaaatagtaasaacaatctaggacaaactaacagttaacatcatactgaattagtaaaagctgaaacaattcttcttgagaactggaaccagacaggaatgattattctcaccactcctcttcaacatggtgctggatgtcctagccagagcaatcaggcaagagaaacaaataaaaggcatccaaataggaaaacaacagatcaaacttttgctcttcattgatgacataattatatcctacaaaaccctaaagactccaccaaaaggttcccagagctgataaaagacttcagtaaaattttaggatataaaataaaggtacaaaacagtagcattttcatacacctataaagttcaagctgagagtaa

SEQ ID NO: 375646 - DNA, 591 bp, Homo sapiens
cacagtaaccaagtaatcaacattttcatgacaaataatgggacacaattagtgtgacatgatactctgggaagatatcacttttttggtattcctgccaaaaatagytgacttgaatctaatcttgggaaaataattaatagttacaaactgaggaacattctccaaaacatttggcctgttctcctaaaaaagaaagtcagcttaagaaagacaaagaaactgtgcatgattaaagaaaacttaaaaggcataaaataaatgcagttcatgatcctggactgtattgtggatcagaaaaaaaaatcgtacaaattgtgaatggaggcattgtaaaaattttaatatgaattacatcaaataatatgttattaaacttaaacttgaatttaataattgtacaaaattagggaatatgatttctttgttctaagtttgagagatgtgaggttacaatgcccactaattatttcagctggctcataaaaattataatagtattaacaatttgtaaatttaggtaaaagtgtatgccgtttcaatgttttagtcttataaatttttggatggaatatttttaaaaattaaagt

SEQ ID NO: 375647 - DNA, 589 bp, Homo sapiens
cagtaaccaagtaatcaacattttcatgacaaataatgggacacaattagtgtgacatgatactctgggaagatatcacttttttggtattcctgccaaaaatagctgacttgaatctaatcttgggaaaataattaatagttacaaactgaggaacattctccaaaacatttggcctgttctcctaaaaaagaaagtcagcttaagaaagacaaagaaactgtgcatgattaaagaaaacttaaaaggcataaaataaatgcagttcatgatcctggactgtattgtggatcagaaaaaaaaatcgtacaaaytgtgaatggaggcattgtaaaaattttaatatgaattacatcaaataatatgttattaaacttaaacttgaatttaataattgtacaaaattagggaatatgatttctttgttctaagtttgagagatgtgaggttacaatgcccactaattatttcagctggctcataaaaattataatagtattaacaatttgtaaatttaggtaaaagtgtatgccgtttcaatgttttagtcttataaatttttggatggaatatttttaaaaattaaagt

SEQ ID NO: 375648 - DNA, 605 bp, Homo sapiens
aatgcccactaattatttcagctggctcataaaaattataatagtattaacaatttgtaaatttaggtaaaagtgtatgccgtttcaatgttttagtcttataaatttttggatggaatatttttaaaaattaaagttaagctaagcacagtggctcacgcctgtaatcccagcactttgggaggccaaggtgggtgaatcagctaaggtcaggaatttgagacctgcctagccaatatggtgaaaccctgtctccactaaaaacacaaaataggtagatacataatacaaatagaagacagatagataattgtttatttaacattattgtatttgttgcaataaccaacctttttacttaaaaaccatttaacaaaatatttaaatttaggaataaaattaaaatcttaaaaccccaaaacaaaattaaaaatcaccttgcaagcagttaaactgaatgaaaacaatgaataatgggaaaaaatagaaaaaaaaatatttcttctaggatccaaaggaaaatgtaaaagatacatatrttcaaataaacattgaaaacaatggacacaaagactatagttaactatagttatagccaactagtt

SEQ ID NO: 375649 - DNA, 582 bp, Homo sapiens
aaagaccaataaatgttcttggcacctttgtcaaaaatcagttggctataaatagattaatatggggcttttgytccattgacctatgtgtctatttttataattatgctgttttggttactatagctttgtagaatattttgaacacagataatgtgatgccttcagctttgttttccttcctcaggattactttgactatttggtgtcttttgtggtttgtacaaattttaggattgtattttttctatttctgtaaagaatgccactggtattttgataggggttgcattgaatctgtagatcactttgagtagtgtggtaattttaacaatatttccccttccaatttatgacatgagatgtcttttcatttttgtgggtgtccccttcagtttctttcatcattgttttatagtttccttgatggacatttttcatctcctttgttaaatttactcctaggtattttatttattgggtagccattatacatgaaattgctttcttgaattcttttttcacctagttcattactggtatacaaaaatgctactaatttttgtatgttgattttgtata

SEQ ID NO: 375650 - DNA, 582 bp, Homo sapiens
aaagaccaataaatgttcttggcacctttgtcaaaaatcagttggctataaatagattaatatggggcttttgttccattgacctatgtgtctatttttataattatgctgttttggttactatagctttgtagaatattttgaacacagataatgtgatgccttcagctttgttttycttcctcaggattactttgactatttggtgtcttttgtggtttgtacaaattttaggattgtattttttctatttctgtaaagaatgccactggtattttgataggggttgcattgaatctgtagatcactttgagtagtgtggtaattttaacaatatttccccttccaatttatgacatgagatgtcttttcatttttgtgggtgtccccttcagtttctttcatcattgttttatagtttccttgatggacatttttcatctcctttgttaaatttactcctaggtattttatttattgggtagccattatacatgaaattgctttcttgaattcttttttcacctagttcattactggtatacaaaaatgctactaatttttgtatgttgattttgtata

SEQ ID NO: 375651 - DNA, 582 bp, Homo sapiens
aaagaccaataaatgttcttggcacctttgtcaaaaatcagttggctataaatagattaatatggggcttttgttccattgacctatgtgtctatttttataattatgctgttttggttactatagctttgtagaatattttgaacacagataatgtgatgccttcagctttgttttccttcctcaggattactttgactatttggtgtcttttgtggtttgtacaaattttaggattgtattttttctatttctgtaaagaatgccactggtattttgataggggttgcaytgaatctgtagatcactttgagtagtgtggtaattttaacaatatttccccttccaatttatgacatgagatgtcttttcatttttgtgggtgtccccttcagtttctttcatcattgttttatagtttccttgatggacatttttcatctcctttgttaaatttactcctaggtattttatttattgggtagccattatacatgaaattgctttcttgaattcttttttcacctagttcattactggtatacaaaaatgctactaatttttgtatgttgattttgtata

SEQ ID NO: 375652 - DNA, 565 bp, Homo sapiens
actggaaaatctcactgtttgcttgcatgctgtccacacagtgaaggacatggttgaaggcatagaaagaatatggtttactatgtctccatgatggaaagtaggttttcatatcctttaccatcctcacaagttcttcagaaagcttttttttttttttaaattgtgctttttccttctagtgtactttagttatttccttcaatttcctataactcctcattctaaattgttgagtctccactacacttttccgtggctgctgccacactctatgttactctgccrtttgtattctggcttcacaatacatcagattattcctgaaggaactcaataccactggattgtggtccattatgttattagggtcatttctgctggaatcattttcacaagatttattgtttggtatctgtagatcttcagattagaccatcctttcctctccagcccttgattctgttgtctgcttcttttttattttagaatcattcactgaatccatttggtcaatactgtttgattagggaaagttattaagtcatcatacactgacaattaa

SEQ ID NO: 375653 - DNA, 565 bp, Homo sapiens
actggaaaatctcactgtttgcttgcatgctgtccacacagtgaaggacatggttgaaggcatagaaagaatatggtttactatgtctccatgatggaaagtaggttttcatatcctttaccatcctcacaagttcttcagaaagcttttttttttttttaaattgtgctttttccttctagtgtactttagttatttccttcaatttcctataactcctcattctaaattgttgagtctccactacacttttccgtggctgctgccacactctatgttactctgccatttgtattctggcttcacaatacatcagattattcctgaaggaactcaataccactggattgtggtccattatgttattagggtcatttctgctggaatcattttcacaagatttattgtttggtatctgtagatcttcagattagwccatcctttcctctccagcccttgattctgttgtctgcttcttttttattttagaatcattcactgaatccatttggtcaatactgtttgattagggaaagttattaagtcatcatacactgacaattaa

SEQ ID NO: 375654 - DNA, 618 bp, Homo sapiens
aatactatgcagaataaatttaccatttcagagatttgcaggtggtaggaagaacaggtttggcagaggagatcaagagtttcattttggagatttaagtttcaggtagttacaggtctttggataataaagtatcacagctaatcctcttttctgagtattattaagatacagtttacctgtctatgaagaaatttcaaaggttatatggaaaatattgacagtcactacattaagtgtaattatgtcggaagaataccttttagggtggtcctggctgactattaggtatctatccttcagtttctttttcttcttagaaatttaaacacaaattaaacttaatcaaatataacattttaaaatcatttaaataaaataactagaaaatkttgtacatctctttattcatttcaatatgaatatagaaagataattgaaatgatagtcaagaaatatcagtaacatttagtaaccaagggctggaaattgtggttgtacatttatttatttatttttatggaactgatttttaaaaaacatttctatattttttccatttttttataatgagaacatgttacttttacaatactatatatactaaaatgtaaagaa

SEQ ID NO: 375655 - DNA, 621 bp, Homo sapiens
tgggtgctctttttcaatgtatgatctacacaactgtatgctgtttatacagaagcctgagctatttacaataaaaactattcgataataggtgaaaaactgtaaggtcacatttagacaaggcaaaattgatctttagagaagactccaaaaccgaggtcacctaatttcatagaacatgatatgccagagaataaattcacgtaggaaattgcaaaatacacaaggagaaagaaccaacagatgcaacgtttgggagtatttaagccccaagtactacagaataaaataatcttaagagatttaaaaataagtatatggaactgaaactttcagagctaataargagatattgaagttataagacaaacaaaaagaagtatgagaaaaatgcagtaatgtaccatctataaacaagtagtatagccatggcgtgtggaacagatatggtaagtagccagattaatattgttataaataaaataagtgaattggaagataatctaaagaaatagctcaaaagagaggcagaaaatatcaaagagaaggcaagagatacagaagattaggaaaatttcaagatttatttaatactatttttagaaaaggaaaatggataaa

SEQ ID NO: 375656 - DNA, 390 bp, Homo sapiens
cccacaatgaaatcccagggttgtttacgaaagtatatgtctattgctacttattataactttgtccctaaggcacttttagttayaagtgatgctcaggagcagataatgttggtaaaattgtgggctggttcaaatatatataatgtcttactgagatctctggaaattgcaaatgccagagatccagctgctggttttatttctgagtgtatgtttgcatctattaaagacagtgacatgtaaaaagaagagggaatagaaagcacagaatagccatgagcccaccagaaaacttataagactgtggtttttatatgggagaggaaagtgtaatagaggagttaatctaagttcaagagtcaaaaataaattaaatagaatgatttc

SEQ ID NO: 375657 - DNA, 413 bp, Homo sapiens
aagcaaacatcatacatattggtagaaaattgggtctttttctaaatgattaaaaaactgctctgaccagttgtaagtaacattgtactagaggtttagctactgcagtaagatgaaaaaaataaataaataaataaataacatgaatattgggtagggaaatgtaaaactatctttataaaaggcatagttggtctttgtaaaaaagattagtaaggtattttttaaaaatccacttgaaatagtgggtttttaaagtttgtaagataataggttaataacaaaaataaatcatagatgtaaatactagcagtgagtaaccagaaattaaaatatatttaaamattatccataataaatgtgcaagagcaattctctaaaagtacaaaatagtgctagaaaaatgtaagcag

SEQ ID NO: 375658 - DNA, 584 bp, Homo sapiens
gtgctaaaataagttattatgttactacttctcttttgatctatttatattccttctttccattgtggatcctcagaaaatgcacagaaagaaggctagctgattggatgagtggttggatggcttcaggaatcttttcataaataatcctccttgagtgaaacccttcataaaatgtttttgtaatatcaaccattaatactcagattatcaacacagattctataaattaaaatttctctataatccgttagaacactgtcattttactttatgctggtctctagaagccatgctatgacctgattaagtattatattgtcatattctggccaggagagctcaactggactttgcctttatttttctttgtttttctgtaaaaagtaaagaggctagaaaattaaagaaaataaaaaattaacacattgaaagtcacacctagatttttcagaytgtaacattttactgtatttgcttcagatcatttataagaggaataacacattgcaattgcagttggcgatttcatcttactccctcaattctaattccagttttacattttctgccaaaatgtaacc

SEQ ID NO: 375659 - DNA, 574 bp, Homo sapiens
tgctataaactctttcttatgtccgatgtcagacttttttaatttttgccaattttatgattataaaatagacttctatctttaatttttattttcatgatttatgaaattgaaaatcttttaaattattttaataacatgacttcttaaagttttcttgaatgtattgcttatgttatttacctgtttatatttatacgttcatttttttackttttaaattcatttaaatattctttatattcttcttttgtcagtttattcattgaaagtatttttcctcagactggcttgcttttcctttttttttgtttttgttttttctcacaacaatgattgagcaagataatcacacataaacattattagcaggtgctgacaaatatatattacctctattttgtggctttacataatacaaatttttaaaaaaattaattatattgatcttcccaacaggaagaaaatgtcattgtagagaatttaaagctacagagaagaatatgacacttttatgtaattaatgacacaattattgttgacattttgggcttcactttgttttgaaattttc

SEQ ID NO: 375660 - DNA, 574 bp, Homo sapiens
tgctataaactctttcttatgtccgatgtcagacttttttaatttttgccaattttatgattataaaatagacttctatctttaatttttattttcatgatttatgaaattgaaaatcttttaaattattttaataacatgacttcttaaagttttcttgaatgtattgcttatgttatttacctgtttatatttatacgttcatttttttactttttaaattcatttaaatattctttatattcttcttttgtcartttattcattgaaagtatttttcctcagactggcttgcttttcctttttttttgtttttgttttttctcacaacaatgattgagcaagataatcacacataaacattattagcaggtgctgacaaatatatattacctctattttgtggctttacataatacaaatttttaaaaaaattaattatattgatcttcccaacaggaagaaaatgtcattgtagagaatttaaagctacagagaagaatatgacacttttatgtaattaatgacacaattattgttgacattttgggcttcactttgttttgaaattttc

SEQ ID NO: 375661 - DNA, 562 bp, Homo sapiens
tcaggaactcgggatttcttcatcttgttgcctcrtggtcttcaccatatggctaccatggttctgctgacactgatatcagctggctgaaagaggaaagggtatggtgctgtgcccttgagaagattttacgcacctgatcttaaagggcaaacatttctactctcattctattggccagaatgtagcatggtagtcaaacctaactataaagaaggctgggaaacatacttttgctctactctcaggaaggaaaaatcagtttggtcaataactaaacaaactttgcaggtaatattttgaagtaccttttttagacatcatttatatatatatatatatatatatattttttttaatattactttaattaatttatttatttttgagacagggtctcactctgtcacccaggctagagtggaatggtgatctcagctcactgcaatctttgcctcccacactccagggcacctctcaggctccagggtgcctcttgggcttaagcaatcctccaaacttagcctcccagtagccgggactacaggtgtgtgccaccatg

SEQ ID NO: 375662 - DNA, 562 bp, Homo sapiens
tcaggaactcgggatttcttcatcttgttgcctcatggtcttcaccatatggctaccatggttctgcygacactgatatcagctggctgaaagaggaaagggtatggtgctgtgcccttgagaagattttacgcacctgatcttaaagggcaaacatttctactctcattctattggccagaatgtagcatggtagtcaaacctaactataaagaaggctgggaaacatacttttgctctactctcaggaaggaaaaatcagtttggtcaataactaaacaaactttgcaggtaatattttgaagtaccttttttagacatcatttatatatatatatatatatatatattttttttaatattactttaattaatttatttatttttgagacagggtctcactctgtcacccaggctagagtggaatggtgatctcagctcactgcaatctttgcctcccacactccagggcacctctcaggctccagggtgcctcttgggcttaagcaatcctccaaacttagcctcccagtagccgggactacaggtgtgtgccaccatg

SEQ ID NO: 375663 - DNA, 562 bp, Homo sapiens
tcaggaactcgggatttcttcatcttgttgcctcatggtcttcaccatatggctaccatggttctgctgacactgatatcagctggctgaaagaggaaagggtatggtgctgtgcccttgagaagattttacgcacctgatcttaaagggcaaacatttctactctcattctattggccagaatgtagcatggtagtcaaacctaactataaagaaggctgggaaacatacttttgctctactctcaggaaggaaaaatcagtttggtcaataactaaacaaactttgcaggtaatattttgaagtaccttttttagacatcatttatatatatatatatatatatatatwttttttaatattactttaattaatttatttatttttgagacagggtctcactctgtcacccaggctagagtggaatggtgatctcagctcactgcaatctttgcctcccacactccagggcacctctcaggctccagggtgcctcttgggcttaagcaatcctccaaacttagcctcccagtagccgggactacaggtgtgtgccaccatg

SEQ ID NO: 375664 - DNA, 562 bp, Homo sapiens
tcaggaactcgggatttcttcatcttgttgcctcatggtcttcaccatatggctaccatggttctgctgacactgatatcagctggctgaaagaggaaagggtatggtgctgtgcccttgagaagattttacgcacctgatcttaaagggcaaacatttctactctcattctattggccagaatgtagcatggtagtcaaacctaactataaagaaggctgggaaacatacttttgctctactctcaggaaggaaaaatcagtttggtcaataactaaacaaactttgcaggtaatattttgaagtaccttttttagacatcatttatatatatatatatatatatatatttwttttaatattactttaattaatttatttatttttgagacagggtctcactctgtcacccaggctagagtggaatggtgatctcagctcactgcaatctttgcctcccacactccagggcacctctcaggctccagggtgcctcttgggcttaagcaatcctccaaacttagcctcccagtagccgggactacaggtgtgtgccaccatg

SEQ ID NO: 375665 - DNA, 554 bp, Homo sapiens
attggtcaaatgtgatctggtctggaattgcctcagttcctcacttttgttgcaacgcagaatctatttcactacctcttttactcactaggcttgacactaaaagtaattagattttagtaaattggactckcgattagtataatattattggatatttttgtataatatatatggatgtttttcatttgtttttccagactcatcttccactctctatcctgctccatatgccaggaagctgacctatgcaagccacatcaactggctcccttgccttttggcttccagttatgttgtgctaataggaggcaccagtcacagattggcccataagggaaaacgaagatttgctaggtttttctactgaatgccaaagcttttttttattcagtcctcttcatgcaattacactttcattaagcaaacctcccagtcctctttgccctagggtcactggtctctcactactgcagctacatagaaagggatggtatttgccaacaccctttatcagtttctgtaagctcttttaaaaacactggaagtaatat

SEQ ID NO: 375666 - DNA, 559 bp, Homo sapiens
caatatatttaatacaaatgtttaataattgcttgacataagctatagagtagacataaggtatttatataaaatctccttgttgtataatatctactctagcagtgttcagtataacagaatcaatcttgtggtataacagctattcttccacaactgcatgtgtttgaatttacaagccatcaaaataaggggtgaattagagtccattttattacctcatataattgcagtacrataaaacattggcaaaatatgagtttcagaattttctaagcaatcaccttctctatttttattagggaagcagtatctcaaaagtcaaataatttctgtaattgaagaaagagatgaatggctcttgtgaacctccaaaaggataaaatgttatgatcttctgtaaaacatgaataaatattttagatttgcctaagtaattagtgggattttattttaagatagcacttattgtgattgttaagaaaacacacatgagcatgtatttcatttccatttaaatgaattatctttccttaattctgaagctatcatttctatg

SEQ ID NO: 375667 - DNA, 554 bp, Homo sapiens
gagcagccaaaggtagactaatgtttttgaacagcagcattgcatcttctcacatgtttaacggaatactagattgaagtccccgatccatgcattataaccaagagacaacgttatctgaatttttgagaaaggagttgttgtattttctatctctaccttaattctctccaaaaaaaattcctccacaattttatagaaaaattgatacagagctgaatgagctcagatgagagttgtctaataaaaatacttggttgttkattttgacataaatgtcaatcattgaagaaacataggcacaccgtctggcatgtaataggtattaaatattaactgaatctgaattaatatggacctcatttttctgaatattaccagccaaattatagtatattcggaatcattcacaaaaataattagtttttctcattcatacattctttgcagaggacagcaagaatcctgaatgtataacacttcatattatttagatactagttataaatgaatgagtctgaggaaacaattttgtttataacatttagaactgg

SEQ ID NO: 375668 - DNA, 602 bp, Homo sapiens
tctaaaatgtatacgcattcaaatatcttttaaataaagattagatattctagaagacrtttagtaatcacataaaatagtttttaaaatagtggatttttttttatagcttttaaagaggtttggattttaagagaaaggcaattttttgagtgtttaccaggtgacagaaattgggcacctttcctgttgtcataggcaatcttcacagcagcattgtttaagagctcttactatccctattatgcacataaggaaaagagagatcaagttggtgaagttatttgcccgaagtcacatgtctagaacccaggccaattctgtcttctcctaagccagttcactcttcagttccagcctcaacagaaaagcctaactatttttatatttttagggttatatttcagcattttacatacatgcatagaggctcaattttcaaagttcagagttatataagataatgactcctaagatgaaagaaggaccataaatattgtatccactctgtgaaatctataaacttgcattgtaccaacaaaatcgtattattctctattaattatattattcttcttaaactgtcaaccacaggaaggcaa

SEQ ID NO: 375669 - DNA, 601 bp, Homo sapiens
tagtcttggtgggaaactctttttaggtaggagtatcattcccagggccttagatcaagatctagaagctataaagggttatagtggtgttgtagaactttgtctttagttgagctaaaaacggggttctcgtcacacaaccatgacaaattaggctcacagacactttgaagggtgaccaggacagggtttattggatgaaaagggaaagaaggactatcagcaaagcgagaagccggctagccagttttccacctcgcacactgaattccaggttactatgctgcaacaggagaggccaggctcctccccactgcaaaaggcrtgaacttcctgaggctccaccccagtgcgcattcctcccagtgctcaggcctgtgggagcttctgccagggagccctttttacttggctgtctcagtagtagtgacagtgatgttaatagtatgttcgtggttcctcaagcacactaacattttccttagatagagccctcgtaatattttctctccttgaaacactaacctattctccttttgccattgtcccgtgtgcctcgcggtattagcattgtggacactgaaacctagtctaaactagc

SEQ ID NO: 375670 - DNA, 611 bp, Homo sapiens
ctctttggctttctctaaacatacacctgtatgcaccataaatatatttattgtgaatatgaaagttcctcaaggttmctgcgtgtttatatctaacatcactgatctataaggcatatattaaactttagtgcttctttagtaataatgatgcgcttgtaccaccacctatccacactctcacacaatcaccccttttgaagtaaagcctatattttaaaaataaccattacagattgtgagtgcagtctaggatcacatagcagaactaaaagctaactggcccacccacaaagtaaatgtgagacagagggctcggggtagccatactctagccaagtagtactgacagataccaatagatataatcaaatgttacacatttgtgtttgcaaacgggataaatattttcctgaccaatctatacttttgatgattcaagctacaggataagttttaaaaatgtcttttgcacttatctacattacttaatagtatcttcttgtcatagacaactgttttacaccattttagtaggaaatcaatttgtcattcaattccattttctaatgcagtagtccaacccaacccagaatgcattattgatatgg

SEQ ID NO: 375671 - DNA, 611 bp, Homo sapiens
ctctttggctttctctaaacatacacctgtatgcaccataaatatatttattgtgaatatgaaagttcctcaaggttcctgcgtgtttatatctaacatcactgatctataaggcatatattaaactttagtgcttctttagtaataatgatgcgcttgtaccaccacctatccacactctcacacaatcaccccttttgaagtaaagcctatattttaaaaataaccattacagattgtgagtgcagtctaggatcacatmgcagaactaaaagctaactggcccacccacaaagtaaatgtgagacagagggctcggggtagccatactctagccaagtagtactgacagataccaatagatataatcaaatgttacacatttgtgtttgcaaacgggataaatattttcctgaccaatctatacttttgatgattcaagctacaggataagttttaaaaatgtcttttgcacttatctacattacttaatagtatcttcttgtcatagacaactgttttacaccattttagtaggaaatcaatttgtcattcaattccattttctaatgcagtagtccaacccaacccagaatgcattattgatatgg

SEQ ID NO: 375672 - DNA, 468 bp, Homo sapiens
gtcatttaagattttgcatttcagcttttcctcatttaaagtaacacatttctctttccagcctcttcaacttggccattatattactaaggaggaaaatcatttactctctctgaaccattcatttttcattggtgaatgagggctatttcttttattctagagagcacagcagagtctagagcagagtttttttttttaataagacagacctgggtttgagttataactgcacatgagttattataccattttaataacatcagctgaatttcacctgtcttatgtaaaattatttgttgtatgtttttgaaagttagcaatcacatgaagctctgaatataatttagaattatacacacaaaagrgagctaaattttaatataatgccaagtacacaatatatgctcaacaaatggttactaaaataattttagtaatattaatgtactgtgcactagaacacaa

SEQ ID NO: 375673 - DNA, 574 bp, Homo sapiens
acagtatataatcgcacatctggccatttctcctcccatgcaaggtgcacaaccaggtgtactgctcaaagttctgcccactgggaaaattttccttcactgctgtccttcagggttatcctagaaaggagctgtagtgctacagctgtccactttcaggtagtgcttgcatattgtgcagaaccatctgtgaaccaagccctagtcttttcttcctctgtcaactgatcatagggaactcaccatgaagccattggtgcaggctggggaagaggaggagggtagcaggagtggagaccatgggcatttgagccacttcctcatgtaacttacrtgtgccttcaggacctgcttgagcccagtcacgtatataccacttccgtttggtgatggaatgctgatttttatgacccactttatggcttgatgggtcagaaagcacccagttcatgataggcaattcaggtcacatggtgacttgatgacctatggtcaaatgttcagtttccaccaaagcccagtaatagtccaagagctgtctctcaaaaggagaatacttatctgcagaacatgg

SEQ ID NO: 375674 - DNA, 427 bp, Homo sapiens
ttttacagccattgcctgcagtcttttaatttgtcagcctgagatccatcacagctgaattaggtttcttaagccgtttatttgcaataaagtgtaatcttccagttagtttgcaaacactgttgaatttttctgtcataaacatgaagattgcagctacacaaacgattcttttttatctctcttttaaaaataatatattgtggaacaccttgtagggtagtagttataatgtgtgtgtgtttgtgtgtgtgagtgtgtgtgtgtgtgtatatatatatatatatatatatatatatattccacaaacatggaatttaagaacaacaattctattcttcctttgcatttacaacattccctcatrtagaaattcactcctgaaatttaactgccagatgttttcttaggaaaatccatattggtt

SEQ ID NO: 375675 - DNA, 609 bp, Homo sapiens
atggaaaaacaatcattttacttgaaacaatgaaaacgaaaaaagaaacctatctcctttgctttaggaaatttagattgctttaattccgactacccaatatatgattttgtgttgtgaaataaataatgggcctttctttaactttgaaaatattatttgaataaactttaagtaaatacaatatacttgatttaatctctaattataaccaaatgtcatcaattgctatgggattccagatgtgattttaacaattattgaaaaagggtgcaaggtagtaattataaatgataaagatgtatgatacattttcaaagagcctaaattctcgtgagaaaatatatacatraatactcttaatacattaaaataaaatatatttaatataaatgaaatatatttaagtataacttaagtgtattttttatcaagtacactatcttaaaataaatgagctgcattcctgatgtcaatttcctaaacaaatacatcagttgtaaatctgtttttatcacttagcataacatcatacacacacacacacacacacacacacacacacagagtcattcctcagtatctgaggtattggtaaatccatggata

SEQ ID NO: 375676 - DNA, 627 bp, Homo sapiens
ccctttgtttgggtcttgtcttgataatctgcctggtttttgccattgctccttggatgaaggaacttaactcataaatcttctccggggactacagcttatctttcaaagcagacacttttgagagtaatattgaatgccattagtaactgtgccaggataattgacatcagctgaaactgtccagggcagactttatgtcatactgatcttgaatcccaatccaggaaaaaatgttaaccatacttcagactggtggcagatggttatccacttctgaattctccatcccagtactattctgagatagaaaactcctacaggagtttcaaggcagatctctagctgtcactgctgtgctttactaccttcattccacactcttccttcattctattttctagcagacatgatactcttagtgtctggcggtgaaaatgagtctgtcttctaagacccagcactactgtggcagtaagttttttccmaaagcatcccaaagtggttcctcaagctacagataattgggatatgaaagaccatatgcatatacaaggcaacattaaattgaggtggctgttttaattatccatatttgaaagatccatatatttaatgtctcattgt

SEQ ID NO: 375677 - DNA, 616 bp, Homo sapiens
taatttctgattttcatgtttagaaaaagaaatcacattaaaaatatgcttttttaaaattttgagataggatacactataatattattgtagtccagaaaatctgtatactataattcctagggaaaaagagaaaattattagtgtcaaaatacctataattcccacagttacgatatacatttttaaaaattgtttaaatacacaaacaatgatgatgctgtcctactagaaatgacagagcagagcttttactctcttcaaaatgcattaacactttcatattcctagttcaaattaatattctttttttttttttaagacaaggtctcactctgggctgaagtgyagtggagtgaccaagactcactgaatcttcaacctcacaggctcaagtgatcctcccacctcagcctcccaaagtgctggtattatagttgagagccaccacacccagtccaaattcatattccaaatactccatgatctcaaattattttcaggcccttctttcttctatagcaatggtccccaacctttcgggcatcaggaactggtttcgtggaagacaatttttccacagacagaatagggaagatggtttcaggatgagtta

SEQ ID NO: 375678 - DNA, 616 bp, Homo sapiens
taatttctgattttcatgtttagaaaaagaaatcacattaaaaatatgcttttttaaaattttgagataggatacactataatattattgtagtccagaaaatctgtatactataattcctagggaaaaagagaaaattattagtgtcaaaatacctataattcccacagttacgatatacatttttaaaaattgtttaaatacacaaacaatgatgatgctgtcctactagaaatgacagagcagagcttttactctcttcaaaatgcattaacactttcatattcctagttcaaattaatattctttttttttttttaagacaaggtctcactctgggctgaagtgcagtggagtgaccaagactcactgaatcttcaacctcacaggctcaagtgatcctcccacctcagcctcccaaagtgctggtattatagttgagagccaccacacccagtccaaattcatattccaaatactccatgatctcaaattattttcaggcccttctttcytctatagcaatggtccccaacctttcgggcatcaggaactggtttcgtggaagacaatttttccacagacagaatagggaagatggtttcaggatgagtta

SEQ ID NO: 375679 - DNA, 616 bp, Homo sapiens
taatttctgattttcatgtttagaaaaagaaatcacattaaaaatatgcttttttaaaattttgagataggatacactataatattattgtagtccagaaaatctgtatactataattcctagggaaaaagagaaaattattagtgtcaaaatacctataattcccacagttacgatatacatttttaaaaattgtttaaatacacaaacaatgatgatgctgtcctactagaaatgacagagcagagcttttactctcttcaaaatgcattaacactttcatattcctagttcaaattaatattctttttttttttttaagacaaggtctcactctgggctgaagtgcagtggagtgaccaagactcactgaatcttcaacctcacaggctcaagtgatcctcccacctcagcctcccaaagtgctggtattatagttgagagccaccacacccagtccaaattcatattccaaatactccatgatctcaaattattttcaggcccttctttcttctatagcaatggtccccaamctttcgggcatcaggaactggtttcgtggaagacaatttttccacagacagaatagggaagatggtttcaggatgagtta

SEQ ID NO: 375680 - DNA, 495 bp, Homo sapiens
gatggagaggtactagctcagatacatagctctctgatacggtggcttaatttgggyaaagctttaaaaaatggagaaactacctagactttagctaacatgccgtaaatgtcacttctctcggacaataagtttttatagttttgaaagtggcatgaaatttaaaaatatatttctgggtaaataacaggtatatagttattctctattaacagctaaatttgaaatgatatactaaaatcacataaggggagttaagaaattaggtaaaatgaaaactttatcaaagttgattttaactggctaatttaaatcattatatgtaaatttaaaatgtaaatcctaaaataattactttctcagctagaatttccccaatcaatctatgaatttgggttcaagataagtaattgtccagttctgagaccaatatatctggaaaatgaaggtcagaaaatatatttgaattctccgaaaaagatagagagataaata

SEQ ID NO: 375681 - DNA, 608 bp, Homo sapiens
atgaattagcttgtctttggagttggcagaacatgaacttgtstggcactgccttatctaaaagagtcatatcagataggcctaagtgctaacattgtaagatacagtgttgggaaaaatgctttggcaatctttccaaaacacttgactctctcctcatggaaataataacacatttcatttttgtagagatttgatatgcagataaatgccaaaggaagaaaaatgcagttatattttgcctttaatttaccaaatcttcaacgtataaattatgacctatataattgattatagttatttcagaagtgtccatgttttctaagacttccgttattctctgctgcttttagtaaataattacaactttgataagtgatttcaaaatattcctaactttgtaatttcaaaaaaaagggcattgggaatcactaatatacccaaaatgaactctgaggaaatgacagatattggagtgttggatggaatagaaatagtgtgactttatttaattgttacacttccttatacaactctttcctttcagatctgaagaactaatccaggttgagcatcccttattcaaaatgcttgagaccagaactgtt

SEQ ID NO: 375682 - DNA, 608 bp, Homo sapiens
atgaattagcttgtctttggagttggcagaacatgaacttgtgtggcactgccttatctaaaagagtcatatcagataggcctaagtgctaacattgtaagatacagtgttgggaaaaatgcyttggcaatctttccaaaacacttgactctctcctcatggaaataataacacatttcatttttgtagagatttgatatgcagataaatgccaaaggaagaaaaatgcagttatattttgcctttaatttaccaaatcttcaacgtataaattatgacctatataattgattatagttatttcagaagtgtccatgttttctaagacttccgttattctctgctgcttttagtaaataattacaactttgataagtgatttcaaaatattcctaactttgtaatttcaaaaaaaagggcattgggaatcactaatatacccaaaatgaactctgaggaaatgacagatattggagtgttggatggaatagaaatagtgtgactttatttaattgttacacttccttatacaactctttcctttcagatctgaagaactaatccaggttgagcatcccttattcaaaatgcttgagaccagaactgtt

SEQ ID NO: 375683 - DNA, 608 bp, Homo sapiens
atgaattagcttgtctttggagttggcagaacatgaacttgtgtggcactgccttatctaaaagagtcatatcagataggcctaagtgctaacattgtaagatacagtgttgggaaaaatgctttggcaatctttccaaaacacttgactctctcctcatggaaataataacacatttcatttttgtagagatttgatatgcagataaatgccaaaggaagaaaaatgcagttatattttgcctttaatttaccaaatcttcaacgtataaattatgacctatataattgattatagttatttcagaagtgtccatgttttctaagacttccgttattctctgctgcttttagtaaataattacaactttgataagtgatttcaaaatattcctaactttgtaatttcaaaaaaaaggkcattgggaatcactaatatacccaaaatgaactctgaggaaatgacagatattggagtgttggatggaatagaaatagtgtgactttatttaattgttacacttccttatacaactctttcctttcagatctgaagaactaatccaggttgagcatcccttattcaaaatgcttgagaccagaactgtt

SEQ ID NO: 375684 - DNA, 605 bp, Homo sapiens
aataataaaaaaaatgcacattgtcaagacttgcaataaggctgactttagataatctgcattgacactgtgttctaatgagtaaaaatatgatcccactttgaaataaaaagcaagcaaggtgcaaatggaaaatgacctgcacacatatctccatggagcagggaagggctattattatcagctagtgggtattactggctgaatcatatccccctccaaattcatgtattgaagccctaatccccagtacctcagaatgtgattgtacttggagattctacttggagtatgtacttggagcctttaaagaggtgattaggttaaaatgaggccattagggtgggtcctaatcaaacctgacaggtgtccttataaggagaagaaattagggcagagaccctaggratgtgcaggcaccaaggaaagaccacaggaagacacagaaagaaggtagctacccacaagacacaagaggggcctgagcagaaatcaaaactgccaatgccttgatcttggacttgtagcctccagaactatggtaaaataaatttatgttgtttaagctacccagtccatggttaagctacccagctgttgttatg

SEQ ID NO: 375685 - DNA, 570 bp, Homo sapiens
tcatgctaaccacgtttcaagtgtttaataaccacaatagctattggcaagaaggtagtcatttttttgtctttctacactttttccactaatggagcatataatcaaagcatgtataaacatcttcgttgctatgtattatactgagwtaatcatgttgctaaggtcatacattgcaaatgaccctcacataaatgaattagcacagtgtcatcttttcaaacacagaaagactttataaaacaatggtaataaatcaacctaaatgtctatcagtggtagactggataaagaaaatgtgatacatatacactgtggaatactatgcaaccataaaaaagaaggagatcttatcctttgtggcaagatgaatggagctggaggtcattatcttaagcaaactaatgctggaaaagtaaaccaaatagcacatgtcctcatttataattgggaactaaacaatgagaacatatagacaaaaagaggaagacaacaaacactggggcctccttgaaaatggagggtaggaggagggagaggatcagaaaagtacctatcaggtactatcct

SEQ ID NO: 375686 - DNA, 597 bp, Homo sapiens
actttaaaaatagattcgaagtataagcggtgtacaaagttatttaaatatattaaattattataggtaaattatggtaaataggcaaaaggtaattcagcagaaatatacaataaaaataagcttgttttatcaagctcaatatttaaaaacatgtcacctttctttttcccatattcattttatgaaaatgtacgtttgcccacagagaagcccagacactgaaaatggtctcatcaacacaaccaacattttcctttgactaacctccttcgawctgttttaacactgtagagtgcagaaacgtagctttctatcaaagacatagtgtgctgccctccactgtgtgggagacttgaaattgttcagccccacggtcacttggttactacattacactgcaagaatatagtaggtaaacacagtgtggtgtggggggacaaagtatcctttctgagcagggaggtttagataatggtcaaacaataatggatttcatggtgtcggattcatttgatttccactggcctcacccagaatcatctttagattacttttgaacatcgtgtattcattgctctcctatttgtcaaagta

SEQ ID NO: 375687 - DNA, 556 bp, Homo sapiens
ataatagccagaatcttgtgttgtttttttttttctgtcatgtaaatacattttcctttagtcctkttagtgagaaaatctatagttaatgtttatttcacttttctcttgcctatggagtgttaagaaggaacgtgatcaggaactggaggatcagagtacattttctctaaatgctttatttcttatttgttcactattaccaagaagaagaagaagtaaaaaaaaaagactgtacttgaaactgcatttcattcccctaagaaagtaggtaagggatttggtaggctatatgctggcagccacaggaaaaaaataaaagtatgactgcgtaaatctgcctggtagatgtacccagtaatcggcctggtagatttacccagtcagaacatatcagactttttccatcccgcaaacctggaaccctaatccgtaattttccctcacctcagtacaatgccatcacttttacttgcttagatttgtccactggttgctttaagattcagaaacaactgctttggggctgtatggaggaaaattccacccacttatc

SEQ ID NO: 375688 - DNA, 556 bp, Homo sapiens
ataatagccagaatcttgtgttgtttttttttttctgtcatgtaaatacattttcctttagtcctgttagtgagaaaatctatagttaatgtttatttcacttttctcttgcctatggagtgttaagaaggaacgtgatcaggaactggaggatcagagtacattttctctaaatgctttatttcttatttgttcactattaccaagaagaagaagaagwaaaaaaaaaagactgtacttgaaactgcatttcattcccctaagaaagtaggtaagggatttggtaggctatatgctggcagccacaggaaaaaaataaaagtatgactgcgtaaatctgcctggtagatgtacccagtaatcggcctggtagatttacccagtcagaacatatcagactttttccatcccgcaaacctggaaccctaatccgtaattttccctcacctcagtacaatgccatcacttttacttgcttagatttgtccactggttgctttaagattcagaaacaactgctttggggctgtatggaggaaaattccacccacttatc

SEQ ID NO: 375689 - DNA, 433 bp, Homo sapiens
tttaataacaaactttaaataaatgctcatttaaataaaagtttatttttctcctggccaaatatttggtgaattacttacaaagatactttcaatgattagattccttagcttaaaaaaaaattcatttgaatacgctttagcccaaaagctccttacatattttcgcatcacatggagacagagcatctcatatcacagtgatgggtatgttttttaatttctatagaaatgctattttatataaacatagacgccctcagtccctaatgcataaccctttktaccaaccagggctttgattttcatgctgtcccaaagttgcagacatgttcacgacacagctgcgtttgttccttcatcttgttcagcaacctttggtaagaaactaccatatttaagattggtattctagatccaaaagaaaaatgca

SEQ ID NO: 375690 - DNA, 589 bp, Homo sapiens
ttacttattttgtcaacttttaagaaaatataatctytaccaaatcaaggatttttcactactttgtccatgattgttttccaatgattagagcatgtattgaaatcaattaaaaggcaaatgaaaaacaggacctcactgtcattttgtaacccaggttgtctgttctttggtctatctctgttgctatcaccttgagggatggcctttcctgaaaggaggtggaatcaaaatttcaatggtcataataaaatactaatttttttaggcttgttaataaagataaacagaattttataatttacaaatgccattttagacaataattgtaaatgccttttcttccagagtgtaatattaaaaaacagtcagcaattttatgtttctgtgaaatatattactggttgcaatttgcttttaagttacttgtaatatgattaaatagtaaatagttaggatcatggtgttatacaacttttccagccaactgtgaatcagtttatgtctaaaactttaatgggtgctctctctatatataatgtgatcagaggtgcattctgctaagtgttaagtaacttgacttctgtaa

SEQ ID NO: 375691 - DNA, 564 bp, Homo sapiens
aatttacaaatgccattttagacaataattgtaaatgccttttcttccagagtgtaatattaaaaaacagtcagcaattttatgtttctgtgaaatatattactggttgcaatttgcttttaagttacttgtaatatgattaaatagtaaatagttaggatcatggtgttatacaacttttccagccaactgtgaatcagtttatgtctaaaactttaatgggtgctctctctatatataatgtgatcagaggtgcattctgctaagtgttaartaacttgacttctgtaaatatagccttaaattttctaattttaaggcaaaattagatttcaatatgtctaaatatcaccaacagcaggaattagcagttatattagctcactgcaaattagttgataaggatcaaattagatttttaaatcatcattgcaaattatgaagctctattttcaagaaacacatttaacatcattaataacccacagaagttgtgaaaggtgaaaactcttttaaagaacgacttctgagagacaatcctttagtttgcccattcactgaaga

SEQ ID NO: 375692 - DNA, 545 bp, Homo sapiens
tttaacatatttaaacgtagttttatcaacctgtcagacatctttgacaaagagtactagaaaaagtattttctctyttctttccagaatcactgggtgcatgaattgcaaatcttccatatataaacagaaacaatactatattccttaactttttttttttttttagacaaagtctcactctattgcccaagctggaatgcagtggtgcgatctcagctcactgcaaccttcacctcccaggttcaagcgattctcctgcctcagcctccccagtagctgggactacaggcatgcaccaccatgcccagctaatttttgtatttttagtagagatggggtttcactatgttggccaggctggtctcaaactcctgacctcatggtctacccgcctcggcctcccaaagtgttggaattacaggcatgagccaccatgcctggctatattccttaacttctataacttactgtggtgacgcactaggaagttggcaatttgtcttcttttccactgagaagacagactaatttaagacaatttc

SEQ ID NO: 375693 - DNA, 576 bp, Homo sapiens
agatatcctagtaatatttaatgatacatcacaaaataaatatttttaaatgtttgtataaatcattcctacacctatgaaccatttcaggctaatagagacaggtgttgtttatatgtttttgctctaaatatatatatttttaagcccaaagccagaaataatataaacaaaatattttaggatttttgagattcccaatcatagcacatttctgttctcttccttcctacatgaatgtttgctggtttaattttctttatccaaccatctacactatctttcagatatttccaaccccttctttacagactgttccaaattttgttatatattacttgcactgttatcacacagagtatcctctcagaaatggataacccccaagctttctaygaaggtgataataagcttcatttcatgttaattgctttcttgctgattgtcctgtgatatctctagaattaataccattaaatcactacctatcactctattggcataatttggcttaattacttctacatctgttatctttaatactcacattaaaatttattcaacattgtttaagca

SEQ ID NO: 375694 - DNA, 580 bp, Homo sapiens
tctattgcttgtcttcatcacaacgcaaaatatggaactatagcacatttgatttgattcaaaattaggacctctattggcctaagacaattaaccccttgttgaccttaaatcctataagatccaagcttcctttgcctagctctgaaagcctgtcttaaaaagatgcctggccaggcrcggtggctcacacctgtaatcccagcactttgggaggttgaggcgggcggatcacaaattcaagagatcaagaccatcctggccaacatgataaaaccccgtatctagtaaaaatacgaaaaattagctgggtgtgggtggtgtgcacctgtagtcccaggtactcgggaggctgaggcaggagaatcgcttgaacttgggaggcagaggttgcggtgagccgagattgcaccactgcactccagcctgggcgacagagcgagactccgtctcaaaacaaaaacaaaaacaaaacaaaacaaaagcctgaccacatcttttgagctatgtccagctgtctgtagttctttatacactacattttactttcttctccatgccattgttcatgctcatacca

SEQ ID NO: 375695 - DNA, 580 bp, Homo sapiens
tctattgcttgtcttcatcacaacgcaaaatatggaactatagcacatttgatttgattcaaaattaggacctctattggcctaagacaattaaccccttgttgaccttaaatcctataagatccaagcttcctttgcctagctctgaaagcctgtcttaaaaagatgcctggccaggcgcggtggctcacacctgtaatcccagcactttgggaggytgaggcgggcggatcacaaattcaagagatcaagaccatcctggccaacatgataaaaccccgtatctagtaaaaatacgaaaaattagctgggtgtgggtggtgtgcacctgtagtcccaggtactcgggaggctgaggcaggagaatcgcttgaacttgggaggcagaggttgcggtgagccgagattgcaccactgcactccagcctgggcgacagagcgagactccgtctcaaaacaaaaacaaaaacaaaacaaaacaaaagcctgaccacatcttttgagctatgtccagctgtctgtagttctttatacactacattttactttcttctccatgccattgttcatgctcatacca

SEQ ID NO: 375696 - DNA, 544 bp, Homo sapiens
taggaaagaggtgcctgagacaatccttctgttgttctattgtgctacatgctttctctggtgatgcaaccttcatttcaacccagttgcccctcacatgtaaatctaactggctttgtagatatgaatagctgcgccctgtagcaactagacagaaatgaaaggaaygtatgcttaagtctgcagtatagtattttactacatggttgatgttcggctatacttaaatgttggaaaatatcggaacattacttcagatactagagttaataatatttgaagtggtgaagttttaaaaatatatgttttctagttttgctataatttatttgtgtagcactgttaggttattaaaaaacactattaaagataaactaggtgtgtgtcaattttaatactaagttaaaatttaataactaatgaaaatagagctactcttttaatccacagcaacttactgatgactatataatttgatttttattgcatcaaaacatatgaggacaggtggtcatagctgattataaagaggcccttacatagg

SEQ ID NO: 375697 - DNA, 544 bp, Homo sapiens
taggaaagaggtgcctgagacaatccttctgttgttctattgtgctacatgctttctctggtgatgcaaccttcatttcaacccagttgcccctcacatgtaaatctaactggctttgtagatatgaatagctgcgccctgtagcaactagacagaaatgaaaggaatgtatgcttaagtctgcagtatagtattttactacatggttgatgttcggctatacttaaatgttggaaamtatcggaacattacttcagatactagagttaataatatttgaagtggtgaagttttaaaaatatatgttttctagttttgctataatttatttgtgtagcactgttaggttattaaaaaacactattaaagataaactaggtgtgtgtcaattttaatactaagttaaaatttaataactaatgaaaatagagctactcttttaatccacagcaacttactgatgactatataatttgatttttattgcatcaaaacatatgaggacaggtggtcatagctgattataaagaggcccttacatagg

SEQ ID NO: 375698 - DNA, 588 bp, Homo sapiens
ctcactgttaataattgctaaacatctcagtgtttcctgatagtgtgagtacctccatctctaaaacaggatagtcagttattttaatgctcaatgcagggctctttaccttatcaacttggacaaagaacattggttctattgagacttttgaagttctatatgcagatggcatatagaacagtattctgttcaaagcagctcttctgtcttcctcagagagagagagaggtgcataatgacatttcagccaacaatactgcattaatgacggtagtcccataatattataatggagccaaacaatttctattgcctagtgtcattgtaaccattataatgttgtggcaacaccatgcgtgctattacccgtgaagaccttccaatgggacaagatgtggtggtagaaaacagtgatattgatgatcctgatcctgtgtaggcctaggctaatgtgtgtttgtgtgtcagtttttaacaaaaaaaaattaaaarataaaaataggaaaaagcttatagaagaaggatataaagaaagaaaatatttttgtacagctgtacaatgtgcttgtgttttaaagtaggtag

SEQ ID NO: 375699 - DNA, 616 bp, Homo sapiens
agaaacgttctaaaattagattctgatgttaattgcacaattaagtcataaaaattattggattgtacacttaaaaagcatagattttatatgtaaagtattcctccaaaaagttattttttaatttttgaaaaaaaaataaggcatagatactctttctgctttaatcacccctttaattctcarattgggcctaatgatttagtatttgtcatctaaatccaaaacagttttccagttaacaaatgaccctaaaatctagtgtcttaaaacaactttaaaaaaaaaaaaagtcacaattcacaatttgtacagggctacactgggcatttcttccatttctcaagtcatttaggaaactcagtggtactcatctggcagatgggttggtttgatggattcaagatggcttcaatcatgtttggaacctgggctctgagggttcaaagactaggactactagcaaggagcatgtacctgaggcctttctgtgcagcttagcattgccagaaggctatggcctcatagtagtcaaactactaatgcagtggctcagagctccaagtgtaaatgttttagtgaacaaagtggaagttgcatcatcttttattaccca

SEQ ID NO: 375700 - DNA, 561 bp, Homo sapiens
gaacattttaaatctttccaaacttcagtcattttagtactacctctatgattttacagtatcacgtaagagctatatattacaaggtgccttaagcagtggcaccaaaggcaatgtcaacaaaacaatatccatgtacaataagttaagcaggggagaagatatagtgaaggttctttcatctctctcccaacaattctgtgtctacagcccagaagttaggtacagacagatgaaataaagacaatgaaataaagacagatgaaataaaattgtgttttctcaatagtttgcctgcttcttattcattctttgaacatatgggaagggacttcaaaactttcatggaaaaatgaaattrgaagataaaaatataagctttgcttcttgataatctccgtcaaggtcaagacacttttgtaaatgatgataccagacatttagtccattcctaaaaaactgagggtcctaggaatttaagaatgtcaatgcagtctttcttacatcattaactgaagaaaatgagtgtcctttaaagatattttaaattagtaaacaaaa

SEQ ID NO: 375701 - DNA, 170 bp, Homo sapiens
caggttctcaacaagaacagctgatccaagaaaaaaataggtccttcgcaaaagttctttcttagaagagctatractatatacacatcgttggtagtaaaatatatatattaatatcttgaaacattagaaaatatcatctatcttaattctatagtaaatcaacagaa

SEQ ID NO: 375702 - DNA, 560 bp, Homo sapiens
gccctttcaatattcagacagaccaagtaactctccaataatcacactgttagaaagtaagtaagcactagctttgaaaggaacacactttcaacagtgtttcactacttctcaagatttgccttagatagtgtgtacaagtccttgctgagataggctcaaatttacagatgagtaaaatgaggccagaacacgtaaaagactgcytcgagattattctgctagtggttatgttgcaagaaatacagctggaatacctagctcatcagcatacaaaattaaatattctgcctcacttctacgtttgcaataaaatgtatctctaactttatcaggttttccattaactcaaccaaattatgaagacttgatctttaatacacaaattcagctatgacaaatgtaccgtctccaaacttactatctagaagacatccattggttatgaattaatggattctaggatatacctttctccccatgaaaaaaaaatctacacattcaggttactaaggtatgaaattctgctgctatagctttggtattttaatttaacactg

SEQ ID NO: 375703 - DNA, 560 bp, Homo sapiens
gccctttcaatattcagacagaccaagtaactctccaataatcacactgttagaaagtaagtaagcactagctttgaaaggaacacactttcaacagtgtttcactacttctcaagatttgccttagatagtgtgtacaagtccttgctgagataggctcaaatttacagatgagtaaaatgaggccagaacacgtaaaagactgcttcgagattattctgctagtggttatgttgcaagaaatacagctggaatacctagctcatcagcatacaaaattaaatattctgcctcacttctacrtttgcaataaaatgtatctctaactttatcaggttttccattaactcaaccaaattatgaagacttgatctttaatacacaaattcagctatgacaaatgtaccgtctccaaacttactatctagaagacatccattggttatgaattaatggattctaggatatacctttctccccatgaaaaaaaaatctacacattcaggttactaaggtatgaaattctgctgctatagctttggtattttaatttaacactg

SEQ ID NO: 375704 - DNA, 525 bp, Homo sapiens
aagataaaggctgacaaatggggaagggtagatttctgttggaaaggcaaagcaaatatctctaattcttactgatctgtaacgaaactgattttttttgtaccatgctcatactgccatatggtaatattgttggcagattaaactcccttgtgtaaataagtcttataatactgattgatgattatatgtattgtgaaattgagttgaagcctcctcaggatataatacctatggaaagtgactggcytgaggaggaactggatctcactatcagctgatttccatcctgaatagttctgcacaaggtacaaataacagtagatcaagggaaaagaaagctggtacaagatgataaagatgtttctaatggcttctgtcaacctaaaggaagaaactaaggcacaaaatacaattttaaagaatttatttgcaccataatgaggacagctgcccagcagactcagatccaagtggatttgagctccatttggcccttgttacaaacaggtttttaaaggccaa

SEQ ID NO: 375705 - DNA, 590 bp, Homo sapiens
agctggaggagaggaggctggggacacacaaagcctgctgtgtgataaggtgaccatgtaatttatcatccagactagaatgcattgaaactgaaaggtcgctctcctaataatattgttgggatgacggtcactctacttgtaggtcagggtaaagagtttgagttttagtctcaggaatatgggaagccactggggcctcaaggaaagagagatgtgacctagtttgcacccggaggggcctgagatggggctataggactcagaaacctcctaccagccttcccatctgcatggaggagacacctgaagaagatttggagagtatcagaagtcttggggtaaatgagcgaggcagccaggagcccagaaatggcctttgtaatcctgtgggacaggtgatgagcacrttactgtcgagtgtgccgcctggttcctgcctgcttcctgacagatgctcctcctagcaagtgaatctgcccccagctgaataggaaggagacagtgataagaacttcctcatgagtaccacgactgggggatgctctgtcatgccccagctgcagatggaggtgggaagggaacaaccc

SEQ ID NO: 375706 - DNA, 411 bp, Homo sapiens
tctgccgctgcattcatcaccattatcctttacaagtgtgaagactaagaataacatttattacaagtgtagatacggttagaaactccttaatctttgtaaatacaaagaggactcaataaaataataacaacaacaatttaaaggctactcactatcagataggcttcttattgcattgtgaaattgtgaaakccaatgggacttttctgaggaaaaagtaataagtatgaaaaagcagcatcagaaattattttaaaaaataaactatcagtgtaatggataaagaaaataatggcacatatacacaatggagtaatattcagccataaaagagaataagatcctgtcatttgcaacaacatgaaggaactggaggtcattaccttaagtgaaataagctgagcacaa

SEQ ID NO: 375707 - DNA, 579 bp, Homo sapiens
agagtactataaccttgcttctgaatctagttctcttaatgatgtcttttatgacttacgtaattcatttcacctagccaccttatcttcttcatttggaaaaggaaattaataacatctgccttatatatcgctcacttcagagagttctatgagaaaagaaagtagagtggaagtatgatacaaagggagtgtaatagttctacagatctaaagggagcctcctgagctacatcccgttcagtggtacaggacactcaattatgtatagctgatagtggtggctataacaagaagggaagagaaagaacaggagtggaaaaaaaagatctattctgttgggggtcttttttattttttattcctttagacataaatatggaacagtggaagtgtggcctttgaaaagttttgaaccccagcttaccatttactataacttaattaatatattttaatgtctctgaaccccacttgctcctctaaaatacagttaatttttcctcagtttaattttttgaaaatcaagatatttkttcatccacagtgtgcttttaaggtagtactaattttcacctc

SEQ ID NO: 375708 - DNA, 603 bp, Homo sapiens
cttctattattcacccacatgcacttacattttatttaagtgccacattctctctgcatcttcactttaggtaatgtttttcctatttctgaaaggtactcttccatacccaataaccctttcatggcaaattcttcccatatttttaatagaaatattacattgaatgtcaatagactaaatttttatttaagtattttatgtgcattgtctcatttaatactcattataattactgaggtgaagtttaaraggtttgtacaggtttacaaatcataaagtgtaaaattaagacttgaaatcagacctgatttcacatctacaccttaaaatgtaaaatgtattttccaataagatgctaatccagaagataaaaaaattacatactctaaaaactctcttacatggccattctcattttaatttccatgccactttgtacatattttctcatactatactgccatgatgtgtttgcttatctttcccactatgctatgagatctttaaagatgaaaactttttcttgcattttgtttgttcatcttttgttttactttgcttccagaacttgacagcataactgagtatcaaatatacaat

SEQ ID NO: 375709 - DNA, 585 bp, Homo sapiens
tggttacccagtgcaaataaaagttatatttacactatactgtgtctattaagtgtacagtagcattatgtctgaaaaaacaatgtgcatgccttattttaataatactttatgactaaaatatgctgacaatcatctgagccttcagtgagtcataatcttgttgctggtcgagggtcttgcctcaatgtcaatggttgctaactgataagggtagtggttgcataaggtagggtggttgtggcaacttcttaaaacaggacaacaatggagtttgctacatcaattgacccttcctttcatgaaggagttacccgtagcatrcaatgctgtttgagagcattttacccacagcaaaatttctttcaaagttagagtcaattttctcaaaccttgctgctgctctaccaactaagtttatgtaatagtctaaatcctttgctgtcatttaaacaatattcacagcatcttcatcagaaggagattccatctgaagaaaccactgtctttgcttatccataagaaacaactactcatttgataaggtttaataatcagatggcagcaattcagttacatctttag

SEQ ID NO: 375710 - DNA, 565 bp, Homo sapiens
atgatgttggctgtgggtttgtcatagatggttcttattattttgagatgtattcctttgatgctttgttcattgaaggtttttatcatgaagagatgttaaattttatcaaagctttttctgcgtctattgcaatgattgcattgttttgtttttaattctgtttatgtgatgaatcacatttattgatttgcttatgttgaactgagcttgcatcctaagaataaagcctgcttgatcatggtgaattaactttttgatgttcttattttttagttattttgaaacctttrctaaaagcttttagacatttttgttctgctatttcctgatatataaaataagtgatagtttattacacatgattaaattgagccatttatctaaatttacagtatcagtatacattactcagacatatgctaatggaatttgcagtttttccaatatctaaattcactgattaataccccaacaatgctatatacagttaaacctgtgatttttttgtcatttggatttattttaatcttaagatatttctagacagtcttaacaaagctta

SEQ ID NO: 375711 - DNA, 575 bp, Homo sapiens
cttttgcagcaacatggttgcagctggagtctattatcctaagccaactaatgcaggaacagaaaaccaaatactgcaagctctcacttataagtgggagctaaatattgggtattcatggacataaaaatggaacaatakatacaggggacacactttattagtaaaggggaagggagtaggacaaggtttgaaaaactacctgttaggtaatatgcttactatctgggtggcaagatcattcacatcccaaacctcaggattaagcaatatacccatgtaacaaacctgcacatgtagtccctaaacctaacataaaagttgaaattattttaaaaaatcagcatgattctctactgactcaaatattcatgtatgtccatcatttcttattaattttattcttaggtatattgcctagaactaggttggcagaaagcaaaagaaaatcaaaatggcagtcactcaaacatgaaagacatttagttctctctcacatgacagtatctcacaaacagctagtatgatagttctgtcacacagtcttcagggccccaggtgccttctgtattttc

SEQ ID NO: 375712 - DNA, 575 bp, Homo sapiens
cttttgcagcaacatggttgcagctggagtctattatcctaagccaactaatgcaggaacagaaaaccaaatactgcaagctctcacttataagtgggagctaaatattgggtattcatggacataaaaatggaacaatagwtacaggggacacactttattagtaaaggggaagggagtaggacaaggtttgaaaaactacctgttaggtaatatgcttactatctgggtggcaagatcattcacatcccaaacctcaggattaagcaatatacccatgtaacaaacctgcacatgtagtccctaaacctaacataaaagttgaaattattttaaaaaatcagcatgattctctactgactcaaatattcatgtatgtccatcatttcttattaattttattcttaggtatattgcctagaactaggttggcagaaagcaaaagaaaatcaaaatggcagtcactcaaacatgaaagacatttagttctctctcacatgacagtatctcacaaacagctagtatgatagttctgtcacacagtcttcagggccccaggtgccttctgtattttc

SEQ ID NO: 375713 - DNA, 473 bp, Homo sapiens
ccagggcccttccatatttatacattagggaagcaatggcattcatcacaggagatagagaatggtcgggtatgagaaaaactagggaagtgtggtgctccagaagccaagtgaccaactgaggcaatacaagaaaaaacaagtgaatgtctaaaatgttcccaggaagtcaaataagatgaagacatggaaaatgaaacattagaagtaaygaggaggtcattgattaactcgacaagagctgttttagtaaagtggctgagatgaaatcctggatagaagcgagttccagactcactatttggagacaaatcacacagtgagtgtgaaaatagaatcagtgagtgtgggaaactgaagtttttctttaaaagagagtagaaaaataaggaaatgatctcaagagaatattttttaagatggaagaagcaacagcacatttgtatgcttacaacaagatccagtaaagagag

SEQ ID NO: 375714 - DNA, 473 bp, Homo sapiens
ccagggcccttccatatttatacattagggaagcaatggcattcatcacaggagatagagaatggtcgggtatgagaaaaactagggaagtgtggtgctccagaagccaagtgaccaactgaggcaatacaagaaaaaacaagtgaatgtctaaaatgttcccaggaagtcaaataagatgaagacatggaaaatgaaacattagaagtaatgaggaggtcattgattaactcgacaagagctgttttagtaaagtggctgagatgaaatcctggatagaagygagttccagactcactatttggagacaaatcacacagtgagtgtgaaaatagaatcagtgagtgtgggaaactgaagtttttctttaaaagagagtagaaaaataaggaaatgatctcaagagaatattttttaagatggaagaagcaacagcacatttgtatgcttacaacaagatccagtaaagagag

SEQ ID NO: 375715 - DNA, 473 bp, Homo sapiens
ccagggcccttccatatttatacattagggaagcaatggcattcatcacaggagatagagaatggtcgggtatgagaaaaactagggaagtgtggtgctccagaagccaagtgaccaactgaggcaatacaagaaaaaacaagtgaatgtctaaaatgttcccaggaagtcaaataagatgaagacatggaaaatgaaacattagaagtaatgaggaggtcattgattaactcgacaagagctgttttagtaaagtggctgagatgaaatcctggatagaagcgagttccagactcactatttggagacaaatcacacagtgagtgtgaaaatagaatcagtgagtgtgggmaactgaagtttttctttaaaagagagtagaaaaataaggaaatgatctcaagagaatattttttaagatggaagaagcaacagcacatttgtatgcttacaacaagatccagtaaagagag

SEQ ID NO: 375716 - DNA, 500 bp, Homo sapiens
tggctctcctgggtctccagcctgctagcccaccttgcagattctggactagtcaactttcataatcacatgagccaattcctgtaataaatctctttctgtatatacacatcttgttggttctgtttctctgaaccacaactaatgcaagagggttttattgaaatctcaaccattagattgctccattagcaactagcaatcatttatattttgtcttaatacatttaattcctgttgaatatctttctaaagagtaaaaatattttactctttctaaaaatattggtacatggagtaaaatatttacatacttcactcagatgtgcagttttttttaaaattatgaagttcctcttgttaatgagccaccactacactaatggagttgggctagaggtagaagagctaaamcttgccagttaaatttacctcaaacgcttcaagtttagactagcttctttaaggtcttctccatttgttttggataataataaaat

SEQ ID NO: 375717 - DNA, 509 bp, Homo sapiens
agtttccccaataattttctgatttggaggacaccagtcatcacatcgggatacagacctcagaatcttccttgtatgaacatagattgtctattacacttgttatcagaattctaacaaagtcagttgtgtctagagtaggactccatcttaagaaaggaacatggtatgcttattttgacacttaggcaaaaacacggttttccagactggattcacaataagaaaaaatgatgaagaggagaagcctgctgtaagtggggatccagatatccatgttctatcccagctcacagaatactgcatcatcttgtctcagaccaggaattctcattakgtgaggcttcccaatgtattcattctcctggtcactttaggctcaatgtctgtatggaattggcctccaaatgaaaggcaaagagaatggcagataaacggagcagaagcagccaggattgaaaatagagttttaaggaagtttactgatttaaaaagagttcaaaactgtc

SEQ ID NO: 375718 - DNA, 503 bp, Homo sapiens
gctgtaataataaagtataaacatttatcagctgagatttgtttaataactgatgtgttgaccactaaaaagttagtattatatattcycttaagatgatttagattatttaatttttaaaataaaccctctcatcacttttaaatctacaggtgggataccttgctataaagggagatctgcaataagtgtgcttccaggagatatgtttacctttacaattaaatacataatccaaatatcagatgaaacattcttccactagaaaatgacttgttttggaaagaaaagtgtatatagaaactatgactacctgatataaatactcaatataaacagattgttaatgacaaaactagctattgacactttcagaggcttttcatatgcacttactcatttgatcttcgcagtttaagagtgaggaaaatggtgcagatattaccattctattttacagatgagaaaatgagagtgagagttgaagtgcattttttttaagg

SEQ ID NO: 375719 - DNA, 550 bp, Homo sapiens
tagattatttaatttttaaaataaaccctctcatcacttttaaatctacaggtgggataccttgctataaagggagatctgcaataagtgtgcttccaggagatatgtttacctttasaattaaatacataatccaaatatcagatgaaacattcttccactagaaaatgacttgttttggaaagaaaagtgtatatagaaactatgactacctgatataaatactcaatataaacagattgttaatgacaaaactagctattgacactttcagaggcttttcatatgcacttactcatttgatcttcgcagtttaagagtgaggaaaatggtgcagatattaccattctattttacagatgagaaaatgagagtgagagttgaagtgcattttttttaaggctctacaagtaatgcagatgtattagttctccctctcttgctccaatcctctagtgtgtacatgggctctatgtgtgtgagggggaatgttaaaagcaggagattcagtcttggcatcactgaagctatgtcagtcatgtgtaggtct

SEQ ID NO: 375720 - DNA, 595 bp, Homo sapiens
atcttcgcagtttaagagtgaggaaaatggtgcagatattaccattctattttacagatgagaaaatgagagtgagagttgaagtgcattttttttaaggctctacaagtaatgcagatgtattagttctccctctcttgctccaatcctctagtgtgtacatgggctctatgtgtgtgagggggaatgttaaaagcaggagattcagtcttggcatcactgaagctatgtcagtcatgtgtaggtctacagtagtctgcagttgctggtcagtgatggtagcttcattcactatcctcaaagatggagttgaagggcttagaggtctttcagtatcatcttgcttaaaaacttgcaagaggggccaggtgtggtggctsacacctgtaatcccagcactttgggaatccaaggcgggtggatcacctgcgatcaggagtttgagaccagcctggccaacatggtgaaaccccatctctactaaaaatacaaaaattagcttggcatggtggcaggctcctgtaatcccagctgctcatgaggctgaggcaggagaatcaattgaacccgggaggcagaggttgcattgagccag

SEQ ID NO: 375721 - DNA, 549 bp, Homo sapiens
ggaagggtcattcccaaaaagttagcaaatctagccccctcactaatatattcttttcttcttaatattttttgagtaattcacaataaaaactggttcaatctaaaaacaatacatttcttactctaaagtaattgataatgcattgaagtaatgccctagaatagaaaaatcaaataaaatgttccttggatcagactgacagggccagtctgaaagcacagtctgtaccatttacagtttttactggtcatggaaggctgcacccatattcttaggataacatccaattgtgctrtgattatgcagacccactagaatatcacaaaaatatgtgtgttgtgtttttctatattcctgtatttaggtcaaaatttacaaattaaaaaagtgaatggctcgactgtgagaattagagacaaagagacaattaaaaatcaacttgcttttgcatacttcattatcataaaacaaacatgacaggaacaactaaaactgactggctaaatatgaacaggtcatttttagaaaattgtttttagtcctata

SEQ ID NO: 375722 - DNA, 506 bp, Homo sapiens
atagtcttgtcttgtgtatggaacagagccatctatacagtgtgtgaccaggctaaatgccaccactgcagtgggactttcagaaggttcaactttcctgcctggtaaggcttttaactgtgtgattctctagataggcctaattccaacttggtctataatttattcagtatatttagacatacttctgaatacatacattctagtcccttttctctgtgatgtttttattcctaagcaatttgacatattcagggtaaggtacatgttactgtggatttatgatcataaaaaattgattaaatgacttcttrtgatgaactggatgaacatttgtctttcttcaacttatggtcacttttgcccttatacgaggggtcttcaaaaagttcatggaaagttcacattataaaacaactatgtatggaattcacattttttttatgccaaaataaactcatactgcctgttacaacatgtctgaacaggatctagtttaaggcacc

SEQ ID NO: 375723 - DNA, 476 bp, Homo sapiens
tagtgtcttctaaactaagatctgaatgttcagaaaagctaaagtatggggacagtggtagcagcagatgaggcagaacagaaaggtagatgtttattctatagataagtgtttcataaggaaatgataagatcattcatatctttaaagatccattaagagcttcttgcaatgaaacaggtgaggtgtgcatcaggtgacagctacagagatgaagaaaggtggaacactgmgcgagctgtttgtaggctagagttgtcagttctgtacactagggcttgatgtttgatcaatcaggatggggagaaagaacaacatgtcaaatgtgatgcccagacccagcactggggagctgagtggatggtgtgtttattaacctagaaagcacagaagaacagaaagtttgaaactaaggatataagtaagatgctttcaaagcacccaaaaggagatgttcagtaggcagtttgatatcc

SEQ ID NO: 375724 - DNA, 476 bp, Homo sapiens
tagtgtcttctaaactaagatctgaatgttcagaaaagctaaagtatggggacagtggtagcagcagatgaggcagaacagaaaggtagatgtttattctatagataagtgtttcataaggaaatgataagatcattcatatctttaaagatccattaagagcttcttgcaatgaaacaggtgaggtgtgcatcaggtgacagctacagagatgaagaaaggtggaacactgagcgagctgtttgtaggctagagttgtcagttctgtacactagggcttgatgtttgatcaatcaggatggggagaaagaacaacatgtcaaatgtgatgcccagacccagcactggggagctgagtggatggtgtgtttattaacctagaaagcacagaagaacagaaagtttgaaactaargatataagtaagatgctttcaaagcacccaaaaggagatgttcagtaggcagtttgatatcc

SEQ ID NO: 375725 - DNA, 560 bp, Homo sapiens
gcttcatcgatcattcccccaacaaagacaccattttaacaactatctacacaaaaaacatcttcataagaagcaaaaatgaggtgaggacccacagtacctggttttaagctcatacagctaaaagaagcactgaagcgggcagaaaaagtattgaattgccaatgacactcctgtcctatcccccagtagaggctgcatggtgcagagagagaatttgtgtgcttgggagagggagaatgcagcaattgtgagacattgcattacactcagtgctgccctgccagagtagaaagcaaaaccaggctgaactcagctgatgcccaccatggagggagtatttaaaccacctctagccagaggggaatcacccatcccagcagttcaaacttgagttctrgcaagactcccctccataggctaaaatgctctggagaactaaataaacgtgaaagtcagtctaggccacaagaaatgaaactcttagacaagtcctagtgctcaactcagctcagagctaatgcacttggggtccataagacctacagagacaccagcag

SEQ ID NO: 375726 - DNA, 585 bp, Homo sapiens
ttatagaacaccaagtagatttaatccaaagaagaccacctcaaggcatttaataatcaagctcccaaatatcaaggataaagaaaggattctaaaagcagcaagagaaaagaaataagtaacataaaatggagctccaatgcatctggcagcagacttttcagtgccagaagagagtggtgtgacatatttgaagtgctaaaggaaaaaaacttttaccctagaatagtatatctggcaagaatatcctgcaaacatgaaggaaaattaaagactttcccagacaaacaaaagctgagggatttcatcaacaccagacctgacctaccagaaattgtaaaggcagttcttcagtcagaaaagaaaaggacattaatgagcaatgagcaatcatctgaaggtacaaaactcactgttaatagtaaatacacagaaaacacagaatattataacatcatcactgtgatgtgtaatctatcttaaatagattaaaagatgaatcaatcaaaaatgrtaactataaaaactttccaagacatagtacaataagatataaatagaaacaacaaaaagttaaaaagcagg

SEQ ID NO: 375727 - DNA, 581 bp, Homo sapiens
acttttacataccattatctgtaaatacatatttagtgagctaccttaacatgctttggattttttaagtgcagtaaaaaaatataaaagacaaggagaaaggaaatgaaccagttcaaaaaactgtaaaaaaaatatgttctcaaacacagaatctatcagctcaataaaaaacatttacttaaaataaaaagaaagaaacttttggaaagaatcacatagcctaaaggagaggacatttttttttcagggaagcaaaaataaatgtttcaacaaatatttagcaaaacaacagcatacttgtcttaaatactccaaatgtttgcctttttaattgtgggggaaaaacatatccactgggaaatacatctaatcagtttcaaaacattaaatttttcttctttcactctcaattaaagattgattgtgcatattatagygtatttacagagacaaaactgctgcctctttctttccctgtataacataacagtggtttcagagccagttgaagattttcatcaggactgttctcaaagcttccgactccattaaaatgaaaaatgacattaaaatggata

SEQ ID NO: 375728 - DNA, 570 bp, Homo sapiens
catttgctcctgtcctctcaaatagtatgggttgattacctttagtagttaccaaaaacaaaagtcaagtactcaactttcttgttttttaagaaagcagaagtgtgttaaatttccattcaacaaagaggggggamaaagcccattaaatagaacaccttgtacttgttgatgacaagcaacatgtaatttctaagtttctagttggcagcatgggcctttctaaactatttttttttaactttcatcaatgtagagttgcccatgattacaaacatagagatcttagtatcctaacttaacgacacatggaagagatgacaccttgtttttcaaaggtacttctgcctccaatttattgacccttctgggcaggtgacgtaatccctcttttaatctgagcgagcaaaaaaagtcaatcaagttcactgcagtaaggaatacagaaaccatgaaaattggactataggactgaaaactgctaaaacatgacagcaaaggaatgaacaaatgaacagagcagatataaaagtatctgtagtctcttactgtcaaaactttatcatgcag

SEQ ID NO: 375729 - DNA, 570 bp, Homo sapiens
catttgctcctgtcctctcaaatagtatgggttgattacctttagtagttaccaaaaacaaaagtcaagtactcaactttcttgttttttaagaaagcagaagtgtgttaaatttccattcaacaaagaggggggaaaaagcccattaaatagaacaccttgtacttgttgatgacaagcaacatgtaatttctaagtttctagttggcagcatgggcctttctaaactatttttttttaactttcatcaatgtagagttgcccatgattacaaacatagagatcttagtatcctaacttaacgacacatggaagagatgacaccttgtttttcaaaggtacttctgcctccaatttattgacccttctgggcaggtgacgtaatccctcttttaatctgagygagcaaaaaaagtcaatcaagttcactgcagtaaggaatacagaaaccatgaaaattggactataggactgaaaactgctaaaacatgacagcaaaggaatgaacaaatgaacagagcagatataaaagtatctgtagtctcttactgtcaaaactttatcatgcag

SEQ ID NO: 375730 - DNA, 495 bp, Homo sapiens
ctgcagcaaaatttactttgggacaaacaaattaacagagatacagaaaatcacttactaataaaagattccatttcctaggacattaaaacaatactaagcttatatgcaccaaataagattgcttcaaattatattaagcaagtttttaaaaaatgattgcacctcaagaagaaactgacaaatctagtagactaagagattttactacagctttttcagtaatttatactaatttctttaaataaatgcttcatttttaaattttaaaatgtaaaacgyttttaatataatttatggtttcctagctaaaaattagttagctaagtgtcacacttaatcactttaaaaagaagcagaattaaacccaaataaattaagaataaaataataaagttaaaacttaaattaaacagtaaataatcaaataaagaatcaaagccaaaagctggttcttagaaaacataaatatagttgacaattataattggtgag

SEQ ID NO: 375731 - DNA, 438 bp, Homo sapiens
tagacttctcaaaaagcaaacaaataaagaaaacagaacaagaaaatgggtgcaaagtaagaaggctgacggtgccaaaacaagcaattcacttcaaaatttgcccaaaatttgctgaaaaattatgtcatattggctgtaagattgcagtccaaggaakagtgattcaaatcccttttgcctgaaatccatgcattagaataaatttctcaatcaagggccatttatatattttatatataattaccatcatatgatcatttaattggtccattagtaaagaaaaggaacacaaattttatatagaatctattatactaggtgttcatgcataacatttatttaatctttatttttacaggtaaacaatttagaattaaagagattaaatcagtagcctgaggtcacataggtttccatacccctttacttgattta

SEQ ID NO: 375732 - DNA, 605 bp, Homo sapiens
atactaggtgttcatgcataacatttatttaatctttatttttacaggtaaacaatttagaattaaagagattaaatcagtagcctgaggtcacataggtttccatacccctttacttgatttatacattgatttcttttcattcagcactaacagcccagttatttggagggtttagcatcattataccacactgaagaacaacagtattaattcactgtaaatatartttcattttaaaaaagtaaggataattttatatagaaattgatatatacaattatatttggaagaaatatatggaaattaacaattgtaaaataagttagcttattgatgaatagtgtcagaaatggcatgacaattgcataaattattaaaatttgtacaactcttaaaaagatatcaatcagaacatcaaaactttttacctcttcaaattggaaaggccatatttctagtttattattcccctaatagaatacattgagttagttccctcatttttaattaaattttagctcactgataggccattactgacaaaatgggtataatttattgttttatagggaagaataaaatattcaagtttgtcttcaatg

SEQ ID NO: 375733 - DNA, 605 bp, Homo sapiens
atactaggtgttcatgcataacatttatttaatctttatttttacaggtaaacaatttagaattaaagagattaaatcagtagcctgaggtcacataggtttccatacccctttacttgatttatacattgatttcttttcattcagcactaacagcccagttatttggagggtttagcatcattataccacactgaagaacaacagtattaattcactgtaaatatagtttcattttaaaaaagtaaggataattttatatagaaattgatatatacaattatatttggaagaaatatatggaaattaacaattgtaaaataagttagcttattgatgaatagtgtcagaaatggcatgacaattgcataaattattaaaatttgtacaactyttaaaaagatatcaatcagaacatcaaaactttttacctcttcaaattggaaaggccatatttctagtttattattcccctaatagaatacattgagttagttccctcatttttaattaaattttagctcactgataggccattactgacaaaatgggtataatttattgttttatagggaagaataaaatattcaagtttgtcttcaatg

SEQ ID NO: 375734 - DNA, 588 bp, Homo sapiens
cttgaagaattgtcatgtaactgtattatttttgccatggagcatacattcctagttcttatgataatttgctgaatcgtatttgaagatctgctaatgcccatcattagtccacataactgaatggaaattcccttccccttcaccctcattcaggagaggatacatgacccagacttggacaagtattgcatttccctagtcacaacgattaggttaagctacgtgataaaatcagattcaatagaattaattctgggatgcaggtggatctkccccaaggcttttattttattttactttgtttatacttgtccttggaatatgaaaacctgatactgctggtagtcagttaccactgcttagagagaaataaggccctgatgacatcactagagtcagaatcaagctaactctcagtctatctctggactttttagttacataaaccaatacttttgtactgctctttctgctttagccaatttaagtgttttctctctcttggaagacaactcttgtatctagctgatactatgtaatttaatgttaacaaaacacataaagaaacttgagaaagttaaccaa

SEQ ID NO: 375735 - DNA, 509 bp, Homo sapiens
agattcccatttgacacattagcatggatgaagggtcaatgttgaggtcattacagtccaacctaataagtccatgaaataaaataaatatagaaactaatctaaaagctaagaaatgcagagatattttactaacatgaaagaggagaggagctttttgttggatttatttttattcttcctrcacctataatttacatcgctccatgtttccaattcttttcaggagcaagttgaaaatcttacatatgcagctttatgaagaaatctgatcagtcagatgagaatgttctgcctgccttttttttttttttttggtccaattcatttttagcccttatttccccaggagaaagaaaataggagtttcttcctttcatcctcagctagaatctcacaactggtgctgccaatatttctgcaatgaagtgtcttaacaaagatgaattaactccaacactgttctccttgattttttctctcattagctgcttctttgctgagcctag

SEQ ID NO: 375736 - DNA, 634 bp, Homo sapiens
tgtgcattttcttgtacatcaggctgtcaggcctggtggaatctccattctgttaataagaaggaatcagagggaggggataaaagtgtaatgtaaaatgtaaatagggtatatcctcatctgttttctgttacttataacagaatacctgaaattgggtaattaataaagaaaagatatttacagttatagaggctgaaaagtccacggtgaaagagccccatatcatcacagccttcttgctggtggagacccttcaaagtctcaaggtggtkcaggatatcacatgctgaatgggctgagtttgctaatgtgctagctctcttcctcgtcttaggaagccaccagctcctctcccatgataacccattaatccattaagctattaatccattaattcacaaatggattaatctattcaggagggcagagcctcttaaaggtcacacctctcaatactgccacattggagattaaatttcaacttgagttttggaagggacattcactccatagcattctcacccttgcctccgaaaacttgagtttttctcacatacaaatacattcattccatccccatagcccaaagtcttaacttgtttcagtattaactcaaaagttcaaagcccaa

SEQ ID NO: 375737 - DNA, 567 bp, Homo sapiens
gccccacagtactcacagtctcaaccagtgtagggagctgtctagagtccttgtgactgcattactccagggaggaaaactcacagtgttccccccacactccccaggatccaggctactgcaacatggtactgttttgaagtaagaaccactgccagagtgcatcctccacaaaagcccaattgcccctacatctccacatctctgcggcacttcactcatcccaccatacccacaccagaaggctgcagggccatggcctgagctagayccaatggtgcatctgtgaaccaggcacctgaacccaggcagcaccctacatgctcgggaacaggtggtacggtgcagcagggaggtcacccaaaatagagagtgagccacatgtgtccttcccagaccacccagcctgccaccacctgtgaccccttctactttaacagctgaatcatcatctgcctatgaaccctctcaaggatgctgagaactgaaccacctgaggcctgctgccacaagtgaccacaactactctagctgtagaagagtgaggtgccatcactagaacccaag

SEQ ID NO: 375738 - DNA, 619 bp, Homo sapiens
ggcctgctctcaccagtgacccttcccacttcagtgatacagatgccatgcaactgtgtaccctccaatcacacaaaggctcactgcagtggcaaccttactcactccagcaatggaactgccatgtaccctactyaaggacttgagaacctgctcacctggggtccacctttgctggcaatcttgccccctccaaagacaaaattgccatgccctgtgcccactcttgtaagtcccaaagactggcccacttgggaccattgctaatggtaactctgcacttttgaccagaagagctgtcatgcgcctttccagggcctaagactaggcccacctggtagacaccctctgccactgccaccaaagccatgacgcggtctccataaacacactcaatctacgccacttatgcactcacaaacactgctgacatagattacagccaaagatgtcatatggagactgcactattgtgcccaacaaaaaccaaagccaaagcaccctaaccaactgacattatgagaaaaatccacaggaaaaaaaagtctttccatacaaaagtcagaagggctttctaaaaactagaagacattactgttcagaaacattaaaaaaaaaa

SEQ ID NO: 375739 - DNA, 619 bp, Homo sapiens
ggcctgctctcaccagtgacccttcccacttcagtgatacagatgccatgcaactgtgtaccctccaatcacacaaaggctcactgcagtggcaaccttactcactccagcaatggaactgccatgtaccctacttaaggacttgagaacctgctcacctggggtccacctttgctggcaatcttgccccctccaaagacaaaattgccatgccctgtgcccactcttgtaagtcccaaagactggcccacttgggaccattgctaatrgtaactctgcacttttgaccagaagagctgtcatgcgcctttccagggcctaagactaggcccacctggtagacaccctctgccactgccaccaaagccatgacgcggtctccataaacacactcaatctacgccacttatgcactcacaaacactgctgacatagattacagccaaagatgtcatatggagactgcactattgtgcccaacaaaaaccaaagccaaagcaccctaaccaactgacattatgagaaaaatccacaggaaaaaaaagtctttccatacaaaagtcagaagggctttctaaaaactagaagacattactgttcagaaacattaaaaaaaaaa

SEQ ID NO: 375740 - DNA, 619 bp, Homo sapiens
ggcctgctctcaccagtgacccttcccacttcagtgatacagatgccatgcaactgtgtaccctccaatcacacaaaggctcactgcagtggcaaccttactcactccagcaatggaactgccatgtaccctacttaaggacttgagaacctgctcacctggggtccacctttgctggcaatcttgccccctccaaagacaaaattgccatgccctgtgcccactcttgtaagtcccaaagactggcccacttgggaccattgctaatggtaactctgcacttttgaccagaagagctgtcatgcgcctttccagggcctaagactaggcccacctggtagacaccctctgccactgccaccaaagccatgacgcggtctccataaacacactcaatctamgccacttatgcactcacaaacactgctgacatagattacagccaaagatgtcatatggagactgcactattgtgcccaacaaaaaccaaagccaaagcaccctaaccaactgacattatgagaaaaatccacaggaaaaaaaagtctttccatacaaaagtcagaagggctttctaaaaactagaagacattactgttcagaaacattaaaaaaaaaa

SEQ ID NO: 375741 - DNA, 486 bp, Homo sapiens
taatagctagatcaagataaagaaagaatttctgaacttgaaaacagaagtcttttgaaataactcagtcagaccaaaaaacgacagaagaatagaaaagaataaggaaagcctgcaagacttatggaacaccactaagaaaacacattcttgcatttggaagtttcagatgaaggaatagaaaaaagtatagaaaacctatttaatgaaataatagctgaaaatgttataagtctataaagagatgtggacatccagatccccaaattgattcaaccctaaaaaatgttctctctgagacacagtacagtgaaactggcaaaaagcaaagacaaagaattttagaaasagcaagtgaaaagtgttaagtcaaaaataacaaaatatctatcagacttacagcagatttctcagatttccctcttacaggccaggatataatgagattatatactcaaagtgctgaaagaaaataacttccagtga

SEQ ID NO: 375742 - DNA, 586 bp, Homo sapiens
aaataatagctgaaaatgttataagtctataaagagatgtggacatccagatccccaaattgattcaaccctaaaaaatgttctctctgagacacagtacagtgaaactggcaaaaagcaaagacaaagaattttagaaagagcaagtgaaaagtgttaagtcaaaaataacaaaatatctatcagacttacagcagatttctcagatttccctcttacaggccaggatataatgagattatatactcaaagtgctgaaagaaaataacttccagtgaagactaatatacccagcaaagctatccttcagaaatgaaagagaaataaagtctcttccagacgagaaaaaactgaaggaaatcatcaccactaggttggttctgcaagaaatgcctaaagagagtcctacctctacaagtgaaagtacaagaactactattatgataatacagtaaaatataaaactcactgacagagcaggtatacaaatgagaaagaaataaatcaaattatattactaccaaaaarcccacaaagataaataataagagagaaataaagaaacaaatgatgcacaaaacaatca

SEQ ID NO: 375743 - DNA, 570 bp, Homo sapiens
aaaacaaaagtttagagcaggagtagctttacttacataggataaaatagaatttaagtcaaaaactataaagacagacaaaaaggtagttatataattagaaagggatcaatttcacaagaaaatataacaatagtaaatatatatgtacacaactccagagcacccagatatataaagaaaatattattaaagctaataggagaggttgggaaccttaccacccagccctcagcattggacagatcgacaaagaaaatcaacaaagaatcggattttaactgcactatagaccaaatgggcctaaatgacatttacagaacattttatccaacagctgtagaatacaccttcttttaatcagcatgtggaactttctccaagatagacmatatgttgggcgacaaaacaagtatcaacaaatttttaaaactcaaaaccatgtcaaatatattttcagaccagaatggaataaaactaaaaatcaataacaagaacaactttggaaattttacaaatgcatggaaattaaacaacatgcctctgaatgaccaatgaaacaataaagat

SEQ ID NO: 375744 - DNA, 623 bp, Homo sapiens
gatagttcaacaaatgcaaatcaataaatgtgatacctcatatcaatataatgaaggaggaaaatcacgatcatctcaatagatgcagaaaatgcatttgataaaatttcacatctccttatgctaacaactctcaaaaaataggtataaaaggaatgtatatcaacaaagtaaaagtcaygtatgacaaaaccacagctaacatcataccaaacagggaaaaatttaaagcttttcctttaagaactttacagaacatttcatccaacagctgtggaatacacatattatacacatacaagagaaggatacccacttttgccacttttattcaacataatactggaatcctagccagagcaattaggctaagcaatagaaataaatggcctcaaaatttgaaaagaagtcaaattatctctgttgcaaatgacatagcttacatttagaaaaacctaaagactctaccaaaaaaacttcagagctaatgaatgaattcaatgaagttatggaatacaaaacaaacatacaaaaatgagtagcatttctagacactagtaacaagctaactgaaaaagaaattatgaaactgattcatttacaatagttataaaaaattaaaa

SEQ ID NO: 375745 - DNA, 595 bp, Homo sapiens
tacaatgttgacagtaatgtaaattagtatagccattatgaaaagttctcaaaaaactaaaattataactattatataatctagcaatactacttctggatatttatccaaaggaaaggaaatcagtatatcaaagagatatctgtacccttatgtttactgcagccctattcacaatagccaagatatggaattaacccaagtgtccattcacaaatgaatgaataaagaaaatgtggtatatgtacagaatgaaataatattctaccacaaaaataatgaaatcctatcatttacaacaacatgggatattatgtggagtggaataagtcaggcacagaaagayaagtactacatctcacacattgatgctataaaatttgagctcatacaatataatagaatggtggttactagaggctgggaagagtggcaggaagggggatagaaagggcttgcttaacagatacaaaatcatagctagatgggaggaataagtcctggcattctatagcactgtggggtggttatggttaacaataatttattgtatattttcaaatagctagaagagaggattttgagtgttcccaac

SEQ ID NO: 375746 - DNA, 584 bp, Homo sapiens
gattgagggaaaaagacacaatgggtattcagtaagtgataaggaaactcttgtagaagcagagttaggaaaattgctcaaacctgcaagctgttttgcactcagcaaagccttaaagtacttacagaatcaggaaggagccgtctataccaattctaagttaatatggactgaacagatcttattaatagcaaagaataattgaaatcccaaacttacaaggttttcaacaaaagtaaagttggctgaaagttaacagtgtaacatgtattatcctaacttctaatcttgtggccttagacagtctagtccacaggcatgaaggaagttcrcattggaaaagaatggttatcatcttcgaggaaaaaaaagggggtggggggagaatttatgtaaaaagggatattatatggtaaattcttgtcctaaaataaattaactggttgtttaaagaaaggggtgtttgcaacaagtcagaaaattgaggcatgttgaagaattatctgtgaaagtcatgaaaaaaaagttttaaaagggaatttatgcaagaagtgttgtataatttaaaagtaattaggcctcct

SEQ ID NO: 375747 - DNA, 445 bp, Homo sapiens
atggactgaacagatcttattaatagcaaagaataattgaaatcccaaacttacaaggttttcaacaaaagtaaagttggctgaaagttaacagtgtaacatgtattatcctaacttctaatcttgtggccttagacagtctagtccacaggcatgaaggaagttcacattggaaaagaatggttatcatcttcgaggaaaaaaaagkgggtggggggagaatttatgtaaaaagggatattatatggtaaattcttgtcctaaaataaattaactggttgtttaaagaaaggggtgtttgcaacaagtcagaaaattgaggcatgttgaagaattatctgtgaaagtcatgaaaaaaaagttttaaaagggaatttatgcaagaagtgttgtataatttaaaagtaattaggcctcctgaatgtaaaactattgaagaaacagt

SEQ ID NO: 375748 - DNA, 421 bp, Homo sapiens
ggcaacaacttgtgcttgtgattagcatctgaagcatgargcagtcttgtgggactgagcccccaagctatgggatctgacgctatctctacgtagatattgtcagaactgaattgaggtaggggacaccaagctggtgtccattgaagaatctgccagagaattgctttgtggggagaaatccctgcacacttcttggtgaccagaggcgaagtactgtgttgagtatagttggatgtaggataaactaagtttttttttctatatctttagaatagccaaaaaagtgaaccaacccaaatgggtgaatggatagacaacctgtggtacatgcatatcacagactactcttcagctataaaaagtgttgacctaaaaggaagaggctgaggcacaaaatataatttaaagagtttgcttg

SEQ ID NO: 375749 - DNA, 608 bp, Homo sapiens
atggctgcccagtccccaaagaataaagcctgaactccacagacaggccatcaaggaccttcatgatccagcccctgtctctcttgtctcatctccaccccatccttcacacatgccaggctgcagaacacacttagcacctccagcccttcgggcctttctccaggcttacctcagctcaaaacgcccatcctccccactctctgtcaaaatccttctcaaaygccacctcctctgtgaagccctccccaggcttccaagtcagatgtgatcactcaggcctctgtgcccctcaaagatgttgctgcaactcaaagaagtccccgctgggcatttctgagcctgtctttccactatacacagagctccagaaagaggaaatttgagacaagaccagggtcagtgtgcagggagaagagttaaggttcatggggcctggggacatttggaaccaaagatggggctgagggtcccggaggagtaatgagagtagagtgagaagacccagacatgagggccagccacatgggcagaggtaggacctgcctggacaggattcctggttcctttctcagcatccccagccctactcctgccgttttaccagg

SEQ ID NO: 375750 - DNA, 535 bp, Homo sapiens
cagctgtgccagcgccaatagacctggatgatgcggacagcgttgagcaaacgacagtaacgctggcggacacaccacatgcggacccaggactgcagcctgactgctgcccattcctgctgcacatagaactccaacaccatcctccgcctctttgccagcagcttctacagcacctgcctccaccagcactgaatgatccaagccctgagggctgcatgcagcagtgtgcgtcgcaccagcatgccccgccaccaggccctggatgaaaacagctgcagacctttctgtcatgatggtcttctcttctgggccttacaagagaaaacagacacactcagggtatgcyaggaaggggccctgatcctctatcaatgatggctccttcctctaaagttcagcactgggcagggcaacagctgaacccaggagaccaggtaggtgtcccccctctgccacccacaggttagtggatgtgctcacctcacttgacctctgagtttcaatgtccccatctgcaaaataggtgtacatc

SEQ ID NO: 375751 - DNA, 548 bp, Homo sapiens
acagggtaggctacagtaatgtgatctcagctcactgcaatttccgcttcctgggttcaagtgattctcatgcctcagcctctcaagtagctgsgattaaaggtgtccaccaccacgcccagctaatttttgtatgtttagtagagacggggtttcaccatgttggccaggctggtcttgaactcctgacctcaagtgacccgctcaccttggcctcccaaagtgctgggattagaggtgtgagccaccgtacccagccttatagtattttcttatagcagcctggacaaactaagacaggggactagaacaacagaagtttaattggctcacagttctggaggttagaaacccaaaatcaatgtgtcagcaaggccatgctcctgaaacctgtaggaaaaggacctttcctttcctcttcctagctttgggggatgtgctggcatcccccatggtgttccatggcatgtagacacatcgctccaatcctctgtcttcacatggcattctccctgtgtcttcacatattcttccccctgtgcacatct

SEQ ID NO: 375752 - DNA, 579 bp, Homo sapiens
gcagtggtgcaatcttggttcactgcaacctctgcctcttgggctcaagcaatcctcccacctcagcctcctgagtagctggaactacaggtgtgtgccaccatgccctggctaatttttaaattttttgtggagatgagattttgccatgttgcccaggctggtcttgaatacctgggctcaaatgatccacctgccttggcctcccaaagtgctgggattataagcatgagctaccaagcccgacctttctgttttcataaaagactgtatcaggaaagaactgtgcacggaccacacagaggagaacttggtaagtgatgggattcaggtttcacgtatttttacttacacccctatcctatctttgacaggagggaaacagacaastgttgcattcctgtccacagagcctctccctgaagaagactcaattatgcggccagcatcctaaccctgggctgtagtcactttcgatctcatgatttttcatcacttttacccatgcctggtgactgaaccatctagaaacaagctttgggcatttgccattgtataggaaacatagccatatctacc

SEQ ID NO: 375753 - DNA, 606 bp, Homo sapiens
gacggttgccttcatctcatacatgtttgcagaaagaaagtgggccaaggragtgaggtagtgcaggggagagatgataattaaccatggaatctgcactaggtaaagaaacatgcaagagcatgtcaggggtggtggctgtaaaaaaatgatagcatcaataaactggaagaccttatcatatctgaagaaatattggggttattgaaaaggtgaactgaaagaagaaagtaatcaaagaatggaaaattagaaaaagcaatttgagcaatagtacaattattggtgatgatgaggtctagagcatcattgtccaatgattatttaaatttaaataaaataaaaaattcaactcctcagttgcactaggcacatttcaggtgcaccacaactatatgtggctagtggctactatgttggacagcatagagagagatttccatcatcacagaagttccatagaatagcattgttttggtatgactgtgggagtgaatagctgaggagaagagcagaaaaggtttgaggttagaatggaggagattgtagggtcatcttgaccaatgataaaatcaccaataattgagataagagtaggggtggggg

SEQ ID NO: 375754 - DNA, 606 bp, Homo sapiens
gacggttgccttcatctcatacatgtttgcagaaagaaagtgggccaaggaagtgaggtagtgcaggggagagatgataattaaccatggaatctgcactaggtaaagaaacatgcaagagcatgtcaggggtggtggctgtaaaaaaatgatagcatcaataaactggaagaccttatcatatctgaagaaatattggggttattgaaaaggtgaactgaaagaagaaagtaatcaaagaatggaaaattagaaaaagcaatttgagcaatagtacaattattggtgatgatgaggtctagagcatcaytgtccaatgattatttaaatttaaataaaataaaaaattcaactcctcagttgcactaggcacatttcaggtgcaccacaactatatgtggctagtggctactatgttggacagcatagagagagatttccatcatcacagaagttccatagaatagcattgttttggtatgactgtgggagtgaatagctgaggagaagagcagaaaaggtttgaggttagaatggaggagattgtagggtcatcttgaccaatgataaaatcaccaataattgagataagagtaggggtggggg

SEQ ID NO: 375755 - DNA, 576 bp, Homo sapiens
gacacttgggcctatctggtcaggtaaggatctggttgttgtagccttgggtcttgttttccttctggcctgggtgggaaaggccaacactacgcagtggggttggtgaaggtrgtgcctttatgccactagccacagtgacctggcccctgtctgcccagatccaggccccagcctcagctgacattcgcgttttacgggggcaccagctctctatcacatgtttggtcgtcacccccgatgactcagccatcttctctgctgccaaagactgcagcatcattaagtgtgagtgagtgcctgggtggggctggagcccccatggcggatccgggagggctggtcaggggagtgggagtggtcatggcaggctgagccctgaagtggggaagtctctggaggcaggtttgctgccctaggagtgctctctgggtgacagtgaaagctgctgcccggcagtggggcttatgagctccctgtcccaagagacctttgggcaaagacaggatgatgatttaatgggaattaatgctgcaggtaggtggttggactagaagacatttgaggctgtgcagt

SEQ ID NO: 375756 - DNA, 587 bp, Homo sapiens
ttgtgctttggcatcctagctaataactcattgccaaatccaagatcatgagaatttacctgtgtgttttattgtaagggttttgtagttttattggttccatttagatattagatcaatattgaattcacgtttgcatatgttgaggaaagaatccaacttcattctttgcatggggttatccagttgtcctagcacctgtgttggagactattctttcccctgggtcttggcacccttgttgaaaatcaattgaacatagrtgtacaattgatttttatttctggtctctcaattctagtctgtcaatctatatatctatcctaatgccaggatagatatcacactgtcttgattatggtagttttgtagtaagttttgaaatggaaagtgtcagtcctccaactttgtttttcgttttcaagatcattttgtctattcttagacccttgcaattccatatgaactttaagattagctagtccatttctgcaaagaaagacagtgggaattttgacagggattacagtaaatctgtagattaatttggggagtagtcttccaacacacgaagacggagtatcttt

SEQ ID NO: 375757 - DNA, 562 bp, Homo sapiens
ggattacagtaaatctgtagattaatttggggagtagtcttccaacacacgaagacggagtatctttccattccatttacatctttaatttctttctatggtgttttgtagttttcattgtatatgtctttcacctgctttggttaaatttattcctaagtattttattctttttgatgctattacaaatggaattgttttcttaatttcatttttgaattgttcactcctagtgtgtagaaatacacatgatttttgtatgttgatcttatatcctgcaactttgaagaattagttttttagccctaatagattttgttgtggattctttaggattttctttatgtttttatgtatgtaaggtcatgttayctgcaaacagatagttttcttttctttcttttttttttttttttgtttttgagacagagtctcactgtgttgcccaggctggagtgcagttgtgcaatctcagctcactgtaccctccgcctcctggaagcaatcctcccacctcagcctcctgagtagttgggacgtgccactatgcttggctaatttt

SEQ ID NO: 375758 - DNA, 569 bp, Homo sapiens
agtactctatataggttcgataagtctagttgctgtgtagtgatgtacaaatattctatttccttgtttatcgtttgtctaggtgatcatctattcattattgaaagtgggatgttgaagtctccaaccattgttgttgaactgtttatttccccctttatctgggtcagtttttgcttcttatactttggggctcttattaggyacatatatgcttataattattatgtattaatggattgactcatcattatacaatgcttttgtctattggaagaattttttgtcttacattctattttgtctaatattagttattctctagtgtcctttcatttccaccagagggacttcctttacccattcttaaagggcaggttgtgtaagatcaagccaagtgaacgggtcaaacattttacccagagccagagaggaaatgttataaaactgggtaagctcacaaaatacctgtacttgttgggccatggcctttagattggtttatacgtggtcagagttatttatatacatgcaataggttgctccttagatggcgcagactccctccc

SEQ ID NO: 375759 - DNA, 478 bp, Homo sapiens
ctgccagaaaaagaaataaagatatacagattggaaacaaaaaaataaaactacccctattcataagcaacaggattgtccatgtaggaaatcccaaggaatctacaaaatgaaagccagaaatcttctagaatagataagataattgagcaacattgcgggaaacaaagttaacacaaaattcagtcatgtttctgtatactaacaattggaaacttaaawataaaaagcagtcctgtttacaatagttccataaaatgaaattcttaagtaaatctaacaaagcgtgtaaaaaatctatatttggaaaactaaaaaacactgacaaaagaaaccaaagaaggcctaaatcaatggagaaacatactgtgttcacagattgaaagactcaacaaagtaaagatgttaattatacacaaattgatctatagatttaatgtaattccaatcaaaatgccagaaagatttttatagatat

SEQ ID NO: 375760 - DNA, 478 bp, Homo sapiens
ctgccagaaaaagaaataaagatatacagattggaaacaaaaaaataaaactacccctattcataagcaacaggattgtccatgtaggaaatcccaaggaatctacaaaatgaaagccagaaatcttctagaatagataagataattgagcaacattgcgggaaacaaagttaacacaaaattcagtcatgtttctgtatactaacaattggaaacttaaaaataaaaagcagtcctgtttacaatagttccataaaatgaaattcttaagtaaatctaacaaarcgtgtaaaaaatctatatttggaaaactaaaaaacactgacaaaagaaaccaaagaaggcctaaatcaatggagaaacatactgtgttcacagattgaaagactcaacaaagtaaagatgttaattatacacaaattgatctatagatttaatgtaattccaatcaaaatgccagaaagatttttatagatat

SEQ ID NO: 375761 - DNA, 553 bp, Homo sapiens
ttttccctttaacttcaggtttaattcattaaggaacataaagactgcagcaaaaacttatttctagtgctattcagtgctggataatagtagttaaaggcagtttttctcattcagaaaaatttcaatctcgacctttaactttaaagttctcagtaaaaccttaccattgctaagctatggaactgctgtgtggttgggcaagtcagcaaattcagcttctatttctaaaaaaagttcatggaactgatgatggttgagtcaatgatgccatgtgaagtctaccattgacactactggttcagtaacagkattgattccaatgttttccacaaagtacctacagatgaatgatacaatgaataaccataggctttaagcacctacattttcataaactttgttttttcaactaagcctttgttcggcctcacacatattttcactactatcagatttatcacatcttggcagattccatttcaggctgtgttgaattagcattttctcaatttcttcaacaaatattctcatccatgtttgtttcatacac

SEQ ID NO: 375762 - DNA, 556 bp, Homo sapiens
tgttttattttgtttgcttttgttttgttttattcttattttttgagacagagtctcactctgtcacccaggctggagttcagtggcatggtctctgctcactacaacctccacttcccaggttcaagcaattctcatgcctaagcctcccaagtagcttggattacaggcatgttccaccatggctggctaatttttttgtatttttagtagacatggggtttcaacacattggccaggctggtcttgaatgcctgatctcaagtgatccacctgcctcagcctcccaaagtgctgggattacagatgtgagccaccacacatggccattgttgttttaatttgcattttttctaacaacaaatgattttgtttatctttatagrtgactattgccatctgttcagattttttttaatatttaagaaattgggtcattggttttcattattgctgagggttaagagttctttgtatattttggttataagttctttatctaatatgagttctcaacagacagtttagtaaacgtgaattattgtctaccaaggaa

SEQ ID NO: 375763 - DNA, 556 bp, Homo sapiens
tgttttattttgtttgcttttgttttgttttattcttattttttgagacagagtctcactctgtcacccaggctggagttcagtggcatggtctctgctcactacaacctccacttcccaggttcaagcaattctcatgcctaagcctcccaagtagcttggattacaggcatgttccaccatggctggctaatttttttgtatttttagtagacatggggtttcaacacattggccaggctggtcttgaatgcctgatctcaagtgatccacctgcctcagcctcccaaagtgctgggattacagatgtgagccaccacacatggccattgttgttttaatttgcattttttctaacaacaaatgattttgtttatctttataggtgactattgccatctgttcagattttttttaatatttaagaaattgggtcattggttttcattattgctgagggttaagagttctttgtatattttggttataagtyctttatctaatatgagttctcaacagacagtttagtaaacgtgaattattgtctaccaaggaa

SEQ ID NO: 375764 - DNA, 568 bp, Homo sapiens
tttaattataactggaaaggtttattgtttatgcacctggtacatgaagtatggaacagctgtctctacagtatctttgtattttaaattggtgctattctgtcttcttttaaatataaaagcatttgtttttaatccaatagctattttaaaactaataactacactgaatatgaaataattatccatggctattaataaaacagtcacatttattatttattgtatacaacttttaaagaatgtataacatatctctctgcgtatgtgtgtaatatcttttcacatgtatttaaaacatgataaattamgaggatagagaagcattaaacagttctcaatttatgcattttggcatgacaggatgttgtacatagtaagggaaatgacttacaatgtaatatggcagactttgctatgtggaaagagattataataatataaaataacattaacaaaatataataatatatgacattgtttctagaatgaatatagattaatgatatatatatacccaatttataatataaataattataatctggagttaagtcaatgtcaacta

SEQ ID NO: 375765 - DNA, 590 bp, Homo sapiens
tttatctagtgacctgaaaggctgtcagttttgagtgggatccagaacaggagaaggctctgcaacaggtccaggctactgtgcaagctgctctgccacttgrgtcatataacccaacagatccaatggtgtttgaggtgtcagtggcagatgggaatgctatttggagcctttggcaggacccaacaggtaaatcacagtagaggcctctaggatttttgagaaagtccctgccatattctgcagataactactctccttttgagagacaacacttggcctgttactggactttggtggaaactgaatgcttgactatgggtcctcaagtcaccatgtgacttgaactgcctatcatgaactgggtgctttctgacccatctagccataaagtgggtggtgcacagcagcatttcatcatcaaatggaagtggtatatatgtgatcgggctctagcagatcctgaagtcacaaataagttacatgaagaagtggctcaaatgcctatggtctccactcccaccaccctgccttctcttccccagcctgcactgatggcctcatgggtagttccctatgatcagttgaca

SEQ ID NO: 375766 - DNA, 590 bp, Homo sapiens
tttatctagtgacctgaaaggctgtcagttttgagtgggatccagaacaggagaaggctctgcaacaggtccaggctactgtgcaagctgctctgccacttgggtcatataacccaacagatccaatggtgtttgaggtgtcagtggcagatgggaatgctatttggagcctttggcaggasccaacaggtaaatcacagtagaggcctctaggatttttgagaaagtccctgccatattctgcagataactactctccttttgagagacaacacttggcctgttactggactttggtggaaactgaatgcttgactatgggtcctcaagtcaccatgtgacttgaactgcctatcatgaactgggtgctttctgacccatctagccataaagtgggtggtgcacagcagcatttcatcatcaaatggaagtggtatatatgtgatcgggctctagcagatcctgaagtcacaaataagttacatgaagaagtggctcaaatgcctatggtctccactcccaccaccctgccttctcttccccagcctgcactgatggcctcatgggtagttccctatgatcagttgaca

SEQ ID NO: 375767 - DNA, 590 bp, Homo sapiens
tttatctagtgacctgaaaggctgtcagttttgagtgggatccagaacaggagaaggctctgcaacaggtccaggctactgtgcaagctgctctgccacttgggtcatataacccaacagatccaatggtgtttgaggtgtcagtggcagatgggaatgctatttggagcctttggcaggacccaacaggtaaatcacagtagaggcctctaggatttttgagaaagkccctgccatattctgcagataactactctccttttgagagacaacacttggcctgttactggactttggtggaaactgaatgcttgactatgggtcctcaagtcaccatgtgacttgaactgcctatcatgaactgggtgctttctgacccatctagccataaagtgggtggtgcacagcagcatttcatcatcaaatggaagtggtatatatgtgatcgggctctagcagatcctgaagtcacaaataagttacatgaagaagtggctcaaatgcctatggtctccactcccaccaccctgccttctcttccccagcctgcactgatggcctcatgggtagttccctatgatcagttgaca

SEQ ID NO: 375768 - DNA, 536 bp, Homo sapiens
caacctctactcttttctgttttttgtttgcctaatatatttttttccaactctatactttgagcctctgggagtcattgcatctgcgatgggtgtctcaaggcaacacacaattttttatccaacttgccactctgcctttccagtggagtgtttagctcatttacattcaaggtcaatattgacgtgtggatttgaccctgtcatcatattgctagctagttattttgcagacttcattgtatagttgttttgtagtgtcagtaggctatgtatgtaagtgtgtttttgtggtggcaggtattggtctttcatttccatgwttagcactcccttaaggatgtcttataagcaaggtcttgtgataacaaattccctttgcatttttgcatctgtttatccaaaaagtgtttatttctctgtttataaagtttggtttggctggatatgaaattcttagttggaattcattttttaagattgctgaatataggccctaaatcttttctggcttataaggtttctgctgagaggtt

SEQ ID NO: 375769 - DNA, 576 bp, Homo sapiens
tatatatattatatatatagtataggtataaatacagataattgatgaagtattaataatatgacagtagaaacaaggagtctgtattttctatgattacttggctataatgtcaatatttagtagaattgaacaggagaattcagtatgaatgtcaagaacagaaggtacaagaaaaatgataacacagtacttaatggtatttaaggtaatggtttacattatgaaagaaatagaataccacttctatgatagaaaagcaaatatttttatggttcatagaaatttaaaagcatcctttttacaaaaatgccatatttgggcatagctgtaaagaactgcttttacagttcagaaaaaaagtgacacagattacacaagcattgtacttttatcatactatcctttsaggttgcaattaataccttttgtaatcacttcatcaatgttttgttttctggtgttaagcatgtgttttcatcaagtaaaaatagcatatacactatactttacttgtttaaaagtaaactcttaaaaatcactccttccattatgttgtgccttgaatttggcaga

SEQ ID NO: 375770 - DNA, 576 bp, Homo sapiens
tatatatattatatatatagtataggtataaatacagataattgatgaagtattaataatatgacagtagaaacaaggagtctgtattttctatgattacttggctataatgtcaatatttagtagaattgaacaggagaattcagtatgaatgtcaagaacagaaggtacaagaaaaatgataacacagtacttaatggtatttaaggtaatggtttacattatgaaagaaatagaataccacttctatgatagaaaagcaaatatttttatggttcatagaaatttaaaagcatcctttttacaaaaatgccatatttgggcatagctgtaaagaactgcttttacagttcagaaaaaaagtgacacagattacacaagcattgtacttttatcatactatcctttcaggttgcaattaataccttttgtaatcacttcatcaatgttttgttttctggtgttaagcatgtgttttcatcaagtaaaaatagcatatacactatactttacttgtttaaaartaaactcttaaaaatcactccttccattatgttgtgccttgaatttggcaga

SEQ ID NO: 375771 - DNA, 588 bp, Homo sapiens
aaaaatctgtaatttcatgaccatgataaaatactggcaacattttsgtaaaaaatatttttctatatcattctatgtttaagtaaataaatgttttttctatatagtaatttgattttgatgcttaggtaattttgcagcctgctattcttaattttagcttatttaattatccattctttttttcattttgtaaggttcagttaggttacaagggctaggcatagcatttactgagtgctaaacgtatgccagtcactctttatccagctgcagatacagcagtgaataagagaaacagtttctgcccttgccaagtttattttatcataaggaagattggcaataaacacataaagagataatgaaaaaatcaaatagtaaaaggagttatacagcacacaatatgaaataaagaatgtaattttctataggatggtgaggaaagacatttctgaaagggtgacttttaagtagaaacataaataaaatgtagaagctatggggatatcggagttatctaactatcctaggcaaaagtattctaaatgaagataagagaaaattcaaagtttctgatgttagaat

SEQ ID NO: 375772 - DNA, 619 bp, Homo sapiens
tgtccaagtccaagttcaagatctcatctgagacraggcaagtcccttctgcctatgagtctataaaatcaaaagcaatttagttacttctgagataccatgagggcacaggcattggataaatacacccacttcaaatggtagaaattggataaaacaaaggggctgcaggccccacgcaagtccaaaatccaaaagggaagtaattaaaccttgaagttccaaaataatcctctttgactccatgtctcatatccaggtcacactgatgcaagaggtgggcttccagggccttgggcagctccacctctgtggctttgcagagtacatcccccttcctggctgctttcatggactaatgttgagtctctgtggcttttccaggggcaagctgtcagtggatctacaattttggggtctgaaggacagtggccctcttttcacaactccactaggcagttccccagtggggactctgtgtaggggctccaaccccacatttcccttccttactatcctagcagaggttatccatgaaggctctgcacctgcagcaaacttctgactggacacccaggtgtttccatacatccttctaaatgtaggcggagattcccaa

SEQ ID NO: 375773 - DNA, 581 bp, Homo sapiens
taggtctagaagcaaacagtggtgttgggggtggattctgaagagaatcagcattgtcttgcatggcaactgcctcaagagaggccatctctgttgcctcaagcagtgcatagttaatctcctcacacaaaaatggaaaggccaatggcaatggcagcgtggtgggagaggggatgttgccaccattgggggtggggagtctgtttcctctgacaaaaaagcctcatcagaatttaagagcttagtgcccccggcttcattagggtcctcccacacatccccattccaagattcagggtcccattcttttccaatcratgccctcagtttaacagtagacaccggtgaggctgtgtctgcacctttcattgcaggccagccactcacataataagagcttgtgtctgatttttcacaatttcagctctttctctacacgagataagactttcacttgggccatcttagaatatttgaggctcagtgtgtgcttctggagccaagagttagaatcgctgagtttatcgttttcttccatcactttttccagtgaacttaggagcaactagccaacttcatta

SEQ ID NO: 375774 - DNA, 581 bp, Homo sapiens
gctgaaactgaaatcagttgtgtgccagagggctttaacatgggccaccaaatgtatctgctacaactcacttttaatattctaagggtttggttacctgactagtctattatctcttttcccattcgctgtctttctgggtaaatgcctttttgattcctttaattttatattgctcaggaattctggagtgagtagagataattgctcatttcactggagatactaaagaagcatatcttactgcctattttttttaaaaaggtactttgagtaaatcattaaataatttgcacagtcataaaataacattcaaatgcagttaattatcaaagaccaagatttacaatatagattatgctgtcaaaaaaatcaaataacacattcaatttgtttacacgcccaaccttaatatatgttacctctcagaattaaagtacacagaaaataatttagatatttcactgrtgtacttttctatctgaaaatatagtgctatcataaaataacattcaaatgcagttaattatcaaagaccaagatttacaatatagattatgctgtcaaaaaaatcaaataac

SEQ ID NO: 375775 - DNA, 574 bp, Homo sapiens
atgtcagagtgtgtaagaattcaggaaccaagtatctgttgccttcaacagactcacctaacacataagatcttacataaaacttttccacctaaaggggtggaaaattatattccatgcaaatggacaccaaaagtgaacaggaatagctattcttctatcagactttaaagcaacaacagttgaaaaaggcagagaaggacattatacaatgataaaaggactagtccaacagaaaaatatcacaatcctaaatatatatgcacctaacactggagcttccaaatttataaaacaattactaccagacctaagaaatgagatagacgacaatacaataattgtggggtactttaatattccactgacagcattagacagtttatcacaacagaaagtcaacacagcaacaatggactgaaactataccatataacaaataaacttgacaaataattacagaacattctmcccaacaactgcagaatatacattctattcatcagcatatggaatattctccaagatagaccatataataggccacaaaataagtctcaataaatttaaagaa

SEQ ID NO: 375776 - DNA, 444 bp, Homo sapiens
gaaatgagttaaaactttgggggactgttgggaaggcatgattggttttgaaatgtgaggacatgagatttgggaggggycaggacagaacaatatggtttaatgtgttcccacccaaatctcatcttgaattatagctcctgtagttcccacatattgtaggaggaacctggtcagagacaattgaatcacgggggtgggtttttccatgctattcttgcaatagtgaataactctcatgacatctgatggttttataaaggggagtttccctgcacaatttctcttcccttgtctactaccatgtgagacgtgcctttcacctttcaccatgattatgaagcctccccagtcatgtggaactgagtcaatttaacctctttcttttgtaaattgcccagccttgggtatgtctttatcagcagtgtgaaaatggactagtac

SEQ ID NO: 375777 - DNA, 585 bp, Homo sapiens
ctaacaaccaaggctgaatcaatttgggcaacaaataatgttggtattaaattttaacttataaaataaaatatttataagtatatattgatataaatattgaatacataaatagaaggaaaaaagamggataaggataaaatatatggtgggcatattcttactccagttagaatggatattacaaaaaagaaaaagtaacacatgctggtgaggatgtgaagaaaggggaactcttatacactgtacactcattacagaaaatagtatggggattcctcaaaaaactaaacatagaaacactatataatccagcattgccactactagatttatatccaaaaaaatcagtgtgttggagagctacctataccttcacgtttattgcagcactactcacaatagccaagacacggaatcaacttaagcgtccatcagctgttaaatggataaagaaaatactatatatccacaaggaaatattattcagccataagaaggaatgaaatcctgtcattcctggcaacatggatgagcctgcaagacattatgttaagtgaaataaactaggcacagaaagacaaa

SEQ ID NO: 375778 - DNA, 571 bp, Homo sapiens
aaaaatgactttctttccatttccttgtacagaataatagcacaattgacatgagtgaaatgttatagaaacagacacattttgtttggagacaagtatgaaatatttcaaccttaaaggtggactttttagaaaatggtgaacagagtaaaaacaacagtgttaatgggagagcagttataggatcatctatattgttaatgtaaattatattgccatagaattkttccatctttttcgaaacaaaatcaagagcattttatcataacaaaagtctattcttttccaactcagtaggaaatagccagtagtggaattctcgttaaaatgcacatgataaaatatgcagctcagatgtgtcttgtaaatgtacaggttaaaagaaacttttttataaatgagctgaccttcaaaacagtaatatcacacctaaaacaaatgcctgctatttgtgtgccatgggactttgacatatataagtaaagagataaaacatatattagcacaatgtgggaaagtaccatctttgaaataaaataaatctccaactttataaaaatacctggacaaa

SEQ ID NO: 375779 - DNA, 611 bp, Homo sapiens
caaacctaaaatgttaaataagaaaaaataaaactaattacagcaataaaatccaatccagactagaatcagaaagacaagattcttagcaagtttacatggcaaatagtcaagtacttaattatccaaatagtactaactcttatttatttaaaaaatatatatattataaatgtatgaatcttaaatatacaatattcataatgtattaatgtaaaaatattagaaccataactcactaaccacaagttaggaatcatcaagatctcaattatttttgttctcttttgacttgtttaaaatttccattccatggaatctcttctgtctcctgttctctcattttctccttcatttattgtctgtggaataggtggtttctcccaaggctaaacccattgcatttattttaggtggccatctttagtgtttcagagaagctttagctatcctttctaatgtcttcttcgaagcaatctctacaatggaaatcatcaattaattttttaaattactgaagttatgtaaatgattgrctcttcctttttggtattctcttacatttctagtgctcagaaatcccctgccacacactaaaaaagtgaccaaaa

SEQ ID NO: 375780 - DNA, 645 bp, Homo sapiens
tgggtgcagtcattacaatgagtggcaagttcagagcggtagtcatgcagctacgggtgtctaatacactagacatatagaaatgcttaatatgaaatggattgatttgtggcaacatagatgttcacacaacaaggtgtagaactaaaagcaattaaaggtagatgatcaagaggttaaaagcagctactccaacaaaaagtcatgattctgtgcatatgttctgaacctgagccagttttcagatgtgaaatattttgtctgaaaaagaagacagattcccatgaaaatgaatgctgggtttctatggcaataatgagttcccaagtccttttttaaatggacctatggtcatttactcaattacacagagaagatgatatatgaaaataaagacctcttgatgcagagtttgggttcacactgatacctgacgtctgagcactctgatgagtcccctttcagaaggagcatgtgttcaaaaggtttaaaaaaaaaaaagagaagatttcctagcccaagtctgcttcatagatrgcccacttagactataggacaaatgctattataaggtggaggagacgaagaaaaggccctagaaagtattctaccttggccaaaaaagtaaataaaaaattaatacta

SEQ ID NO: 375781 - DNA, 441 bp, Homo sapiens
taaaactctccttagattaacacgtaaacaattatgatttcaagttctaatgtttcttaraaaacaaggttgtaggtcccttaatattcacaagacttgggattctgaaaaggaagtagtatagttcagtggggaaaaatcaaacaaaaatgttatctaatttaataatcagataccttttattctagttcaaatcttatatgaataacatatctcaatctcaatccacatttaaaaaagctatctgtcacatagagtagtactctcaggtctgaatttctataacagatatttccaagttattctgccttcctttcccacaaactcaagcagttttatgtatttgtggtatgaaagttttagttccattatttagcacaacctgcaaggtatttacatatgttgcgattgtaaccatctaacgatgtaggtctgttgcgt

SEQ ID NO: 375782 - DNA, 581 bp, Homo sapiens
atgtatcaggaacaaatagtttaaaaatcaggtctgagacctaggtattaaggtgataaatgctttatggttgagttatgagtgtcagctatgtctctgcttgccttaattagacacctcaccaaatctgcaggtggagcttgcgtcactttatcaacagactcatcctcttgtgaatgataygggccaatggcaccctgctcatccctgtgggtgtgagagaaggtctgggagggtgtgtgtgtgtgctgtgtgctccccatgtaaggaatggtatgtgaacatcagctatggaaattaacaggtttggggtaagctgggtcaaggacatgacagacatacacaaaatgctctcttagacaagaataaaacatgctagaaatgtgtaggacaggaagcagggtgagctttttgctacagtgatcaacaaaacatgttactaggtatttttgtcaggagaatcttaaacttcccagacccctaagcacttagctaattgatatcagtttatgacactgatggtaattttagtgaagtgacatgataaggtgaacagcaattcatatctcttagaccactac

SEQ ID NO: 375783 - DNA, 601 bp, Homo sapiens
aggaatgggaattgaggtgaagtctagccagcctctgttctgcccatgacagacctgagttccagtacacacaagctttagttgtgagtgccagaagagtcagctgctttcaggaagactagggytgtcatcctaaaaatcagaggaccctgatcctttccttctgccatgaggttaaccaactgctctcagcatacatcttggcatactgctgtcccaagttcatgagaggctctgctcattatttttttcagtcatgcctctctttgtgcttcagtatatataatttattttgactatcttcaagtttactaatgttttcttgtattgtatccaatccagtatgaatcttattcaatttttttttactttggatatatattttttcagttttaaacttcttatctgttcatttttgaacagtattcacatatgtcctgaaatttcctaatctcattatattcaacttttccttcagattctcttgcatatttgttagggttaccttaaagttgtctattaatactaagatctggtttgttttagtatattaactattcttcctctcttgactatgggtcatctatttctctaattgttc

SEQ ID NO: 375784 - DNA, 595 bp, Homo sapiens
actattattgagcataacacaaatttttatctttatgacccagaattacttccattaaaggagtactttcgtcaaatgttgaaaaattcagtcacaacattggctggttattacacaattaatgtggcaatgtgaacagaacattgtcctgaactctttccttctatttatatttaattaatacttattgaatgcctagcatgtaccagtgacaatgttaaacacttaacatgcagccttttttaaaattctcacatcaaccctatgatgtcagtagtgttatcatcttattttacagataaggaaactgaggtccaaggttatacagcaacaaagtagtggttccaggattctgcctcccctgtttagtttctcgctgttctaatctgcttcccaatatcccycactgtttcccaaaggagagttttgtgcagtgtcaggaactgagctttggatgggccattttatcccattttagctacaactataaaaggatttgttcacctccagctgttcacatttcttgtgacctgagaaaattgggatgttccagatacaacagtaaacttgggctactccatcaagagcctagcag

SEQ ID NO: 375785 - DNA, 595 bp, Homo sapiens
actattattgagcataacacaaatttttatctttatgacccagaattacttccattaaaggagtactttcgtcaaatgttgaaaaattcagtcacaacattggctggttattacacaattaatgtggcaatgtgaacagaacattgtcctgaactctttccttctatttatatttaattaatacttattgaatgcctagcatgtaccagtgacaatgttaaacacttaacatgcagccttttttaaaattctcacatcaaccctatgatgtcagtagtgttatcatcttattttacagataaggaaactgaggtccaaggttatacagcaacaaagtagtggttccaggattctgcctcccctgtttagtttctcgctgttctaatctgcttcccaatatcccccactgtttcccaaaggagagttttgtgcagtgtcaggaactgagctttggatgggccattttatcccattttagctayaactataaaaggatttgttcacctccagctgttcacatttcttgtgacctgagaaaattgggatgttccagatacaacagtaaacttgggctactccatcaagagcctagcag

SEQ ID NO: 375786 - DNA, 521 bp, Homo sapiens
tgatatgggaggggggcagggaagtgctgggtagagaagggcgggtccttggctaggactccacccccgggcctgtacccacggacttaggtgaggacaggcatttctgttttcgtgctcaaatgttgcattttccaagaccaccctggcctgccacgtccccattctgtgcctataaaacccctgagaccctagcaggcagagtcacaagcagctggacatcgagaggaacacaccagtgaaagagcacactgacaggcaccggcagatgccaggaggccactgaccagcggaatgatrcagaatttggctcgggatggtcagaggagaacgtggctgctgggtggcctgactccaggggaaagccaccttcccactccatcccgcttctggcctccccatccacctcgccaagagctactaccactcaataaaaacccttgtactcactctccaagcccatgtgtgatctgatttttccagtacactaaggcaagaacccaggatatgtaaagccctct

SEQ ID NO: 375787 - DNA, 558 bp, Homo sapiens
aaagagagagatagacctcaatacaataatagctggagacttcaacaccccaccttcagcactgaacagatatttcagacaagaaatcaacaaagaaatattggtcttaatctgcagtatagaccaagtggacctaacatatatttacagaacatttcatccaaaggctgcagaatacacatttttttctcagcacatggattattctaaaggatagaccatattttaggtcacgaaaaagtcttaaaacattttaaacaattgaaattatagcaagcatcttctctaaccacaatggaataaaaccagaaatcaataacaagagtaattttggtagctatacaaaaacatggaaattaaaawatatgctcccgaatgaccagtgggataatggagaaatttttaaaaatgaaaaatttttttgaaaaaaatgataatggaaatactacatttcaaaacctatgggatacagcaaaagtagtactaagagagaaatttacagcaataagcacctgcatataaaaagaagaaaagctttaaataaatgttaggttggtg

SEQ ID NO: 375788 - DNA, 558 bp, Homo sapiens
aaagagagagatagacctcaatacaataatagctggagacttcaacaccccaccttcagcactgaacagatatttcagacaagaaatcaacaaagaaatattggtcttaatctgcagtatagaccaagtggacctaacatatatttacagaacatttcatccaaaggctgcagaatacacatttttttctcagcacatggattattctaaaggatagaccatattttaggtcacgaaaaagtcttaaaacattttaaacaattgaaattatagcaagcatcttctctaaccacaatggaataaaaccagaaatcaataacaagagtaattttggtagctatacaaaaacatggaaattaaaatatatgctcccgaatgaccagtgggataatggagaaattttwaaaaatgaaaaatttttttgaaaaaaatgataatggaaatactacatttcaaaacctatgggatacagcaaaagtagtactaagagagaaatttacagcaataagcacctgcatataaaaagaagaaaagctttaaataaatgttaggttggtg

SEQ ID NO: 375789 - DNA, 625 bp, Homo sapiens
acagactagaagaaatgtgtggtatgagatcaataaagaagtaactaaaagtaaaagactcttaatgattgtaaatgaagctgagaacaaaaacttagatctcaataacctagagttatgactctagggctatggtctgttaacatctgcttcttgggtaggaatgtttttctttcaaaataacagtgctacatgaatcaacagcttccaaaggaactatttcatgccatccaaccttaggtctcagacctgaaaaagctcattgatctttggtaaaatctcagttacataagtaggaagttatttttaaagccataccagatgctacagttcctcctcattgctcccacatggatgttcactgtttattcagaattgagccaaaagccctgaaataagaaagttaagtatgattccctgacaaaccaagagaacagagttgcatgcaatggatmtgtaaatatttattttagttttattatttggctgatggcttttgagctggccactcttgcacaaacacacacacacacacgcgcacacacacacacaaactcagagattttccttaggaggctcatggttttccttctgcaactgacaggagaatttcttcctaatttaa

SEQ ID NO: 375790 - DNA, 625 bp, Homo sapiens
acagactagaagaaatgtgtggtatgagatcaataaagaagtaactaaaagtaaaagactcttaatgattgtaaatgaagctgagaacaaaaacttagatctcaataacctagagttatgactctagggctatggtctgttaacatctgcttcttgggtaggaatgtttttctttcaaaataacagtgctacatgaatcaacagcttccaaaggaactatttcatgccatccaaccttaggtctcagacctgaaaaagctcattgatctttggtaaaatctcagttacataagtaggaagttatttttaaagccataccagatgctacagttcctcctcattgctcccacatggatgttcactgtttattcagaattgagccaaaagccctgaaataagaaagttaagtatgattccctgacaaaccaagagaacagagttgcatgcaatggatatgtaaatatttattttagttttattatttggctgatggcttttgagctggccactcttgcacaaacacacacacacacacgcrcacacacacacacaaactcagagattttccttaggaggctcatggttttccttctgcaactgacaggagaatttcttcctaatttaa

SEQ ID NO: 375791 - DNA, 619 bp, Homo sapiens
gttgcaggccttctatgttattttgaatccattgcttccactttgtgcctttactgaaagaaaaatttagaaacatggsgagttttcttggcatcttattattttcatattttctctttccgtaaaagatgtttcatcccagcaaataaaatgcaatacagttttcaaagtcaaacaaaacccagcatattcacatatggtatttcctttctaaatatttcttgtctcctttaacttggcattctggttgggtcggtgctgagattcatcaatattattttgtgtgatttgacgaaacccatttccttagctcctatcccagagataatttttgttttgtttttctttgtgctctgaacaggcaaagccttcttagctgtcatataatctttagggatgctattgggctcttgggagaaatattcctttattcaaagaaacgatctgtcagggtaggctagactcagcagcaaaccctggtagtgtttgacccatcacatcaagaaacttagcagcacttgtatgattgggaaggagaagaaggggatgtgaaataattgtattatcagggtctctagcctctctgctcctgtgctaaaaagatactagatgagtagcc

SEQ ID NO: 375792 - DNA, 619 bp, Homo sapiens
gttgcaggccttctatgttattttgaatccattgcttccactttgtgcctttactgaaagaaaaatttagaaacatggcgagttttcttggcatcttattattttcatattttctctttccgtaaaagatgtttcatcccagcaaataaaatgcaatacagttttcaaagtcaaacaaaacccagcatattcacatatggtatttcctttctaaatatttcttgtctcctttaacttggcattctggttgggtcggtgctgagattcatcaatattattttgtgtgatttgacgaaacccatttccttagctcctatcccagagataatttttgttttgtttttctttgtgctctgaacaggcaaagccttcttagctgtcatataatctttagggatgctrttgggctcttgggagaaatattcctttattcaaagaaacgatctgtcagggtaggctagactcagcagcaaaccctggtagtgtttgacccatcacatcaagaaacttagcagcacttgtatgattgggaaggagaagaaggggatgtgaaataattgtattatcagggtctctagcctctctgctcctgtgctaaaaagatactagatgagtagcc

SEQ ID NO: 375793 - DNA, 426 bp, Homo sapiens
atagttgtactctccaaaggctctttccatttttctccataaaactctagagggaacagtgagaaactgaaaatctaatgatactttttttccttttatccagaaagacatgtgcattcaagaggaaagcagaaaagtctctgggtaggcaggacccaggtggtctggatggcagaaactgttctgaagggctgtttggagataaraatatagtaatatacaagtatgtcccatatgatttgtaagaatattattttttggggaaaagctggaaggattccccttgaaaactggcccaagacaaggatgccctctctcaccactcctattcaacatagtattggaagttcttgccagggcaatcagacaagagaaagaaataaagtgcatccaaataggaagagaggaagtccaattatccctgtt

SEQ ID NO: 375794 - DNA, 555 bp, Homo sapiens
gctttttcttctaccacacatttgattgagtaaaaagcctttcgtataacatatggtcctcaaactacaacataaattgcagagataactggtgaactggtgaaagcaattgccaagattcccgaagcaggatcctgccatctttacagctgatctcaggcaatcagaattctaaatcccatggctagagactagcatgtttaggaatttagcctggggcaaaatcccaaggagtacaagtttttgacctgatagattcttattytctattcatgcaagagtaggggtgactataaaataattttagctaattcacacaagttgaatacctttaattttaccagtgagagcccgattttaacattcatcatggtagtcaacaggctgctatttttatcactaaaagcccttttctgacatttagtatgctaattagcaaaatggaagttatagagcaagatacacataacagaaatgcttgtaatagcttttctggagtattgacttcttgatgagaatgccagcaggctactcctgtgttcgttaaccactact

SEQ ID NO: 375795 - DNA, 555 bp, Homo sapiens
gctttttcttctaccacacatttgattgagtaaaaagcctttcgtataacatatggtcctcaaactacaacataaattgcagagataactggtgaactggtgaaagcaattgccaagattcccgaagcaggatcctgccatctttacagctgatctcaggcaatcagaattctaaatcccatggctagagactagcatgtttaggaatttagcctggggcaaaatcccaaggagtacaagtttttgacctgatagattcttattttctattcatgcaagagtaggggtgactataaaataattttagctaattcacacaagttgaatacctttaattttaccagtgagagcccgattttaacattcatcatggtagtcaacaggctgctatttttatcactaaaagcccttttctgacatttagtatgctaattagcaaaatggaagttatwgagcaagatacacataacagaaatgcttgtaatagcttttctggagtattgacttcttgatgagaatgccagcaggctactcctgtgttcgttaaccactact

SEQ ID NO: 375796 - DNA, 555 bp, Homo sapiens
gctttttcttctaccacacatttgattgagtaaaaagcctttcgtataacatatggtcctcaaactacaacataaattgcagagataactggtgaactggtgaaagcaattgccaagattcccgaagcaggatcctgccatctttacagctgatctcaggcaatcagaattctaaatcccatggctagagactagcatgtttaggaatttagcctggggcaaaatcccaaggagtacaagtttttgacctgatagattcttattttctattcatgcaagagtaggggtgactataaaataattttagctaattcacacaagttgaatacctttaattttaccagtgagagcccgattttaacattcatcatggtagtcaacaggctgctatttttatcactaaaagcccttttctgacatttagtatgctaattagcaaaatggaagttatagagcaagatacacataacagaartgcttgtaatagcttttctggagtattgacttcttgatgagaatgccagcaggctactcctgtgttcgttaaccactact

SEQ ID NO: 375797 - DNA, 576 bp, Homo sapiens
attacatgtgttgaccactgtgcctggctcatgttctattttgaattatagttggttatgaatctgtctttttcrtgaatcagttactgcctaacagtatatttcacagatggtttggtagttgctttgggttgaatttgggagtgcaggctacattctattagcttatttaatgcagaagccaatagaatgtagtgttttactttccatagagccaggaatcagtgcaaagcccaattcaggataaaagtcataacatttctcttaaacctcactatgactttttaacatctgtcatggcaagaacaccctttatacaatactgcaatttttcctttttcctcttacatgctttctgcacctcctaacctaacattttgacctgatctcccctcactcatattttataatttctatctcattctgcttatttatacacctctttctatactgtggtgggcaactttggcttttgctttgtagtgttattctctcttcattaatagcagaaactgatttttctttggaggagggctagcattaggatttaggcatgtgatccagttctattgaatt

SEQ ID NO: 375798 - DNA, 576 bp, Homo sapiens
attacatgtgttgaccactgtgcctggctcatgttctattttgaattatagttggttatgaatctgtctttttcatgaatcagttactgcctaacagtatatttcacagatggtttggtagttgctttgggttgaatttgggagtgcaggctacattctattagcttatttaatgcagaagccaatagaatgtagtgttttactttccatagagccaggaatcagtgcaaagcccaattcaggataaaagtcataacatttctcttaaacctcactatgactttttaacatctgtcatggcaagaacaccctttatacaatactgcaatttttcctttttcctcttacatgctttctgcacctcctaacctaacattttgacctgatctcccctcactcatattttataatttctatctcattctgcttatttatacacctctttctatrctgtggtgggcaactttggcttttgctttgtagtgttattctctcttcattaatagcagaaactgatttttctttggaggagggctagcattaggatttaggcatgtgatccagttctattgaatt

SEQ ID NO: 375799 - DNA, 576 bp, Homo sapiens
attacatgtgttgaccactgtgcctggctcatgttctattttgaattatagttggttatgaatctgtctttttcatgaatcagttactgcctaacagtatatttcacagatggtttggtagttgctttgggttgaatttgggagtgcaggctacattctattagcttatttaatgcagaagccaatagaatgtagtgttttactttccatagagccaggaatcagtgcaaagcccaattcaggataaaagtcataacatttctcttaaacctcactatgactttttaacatctgtcatggcaagaacaccctttatacaatactgcaatttttcctttttcctcttacatgctttctgcacctcctaacctaacattttgacctgatctcccctcactcatattttataatttctatctcattctgcttatttatacacctctttctatactgtggtgggcaactttggcttttgctttgtagtgttattctctcttcattaayagcagaaactgatttttctttggaggagggctagcattaggatttaggcatgtgatccagttctattgaatt

SEQ ID NO: 375800 - DNA, 596 bp, Homo sapiens
atttacttataaattggcttttttggccaggatatcatctattagtatgtcctgcattactatttgtctgaatgacttttctatttgtttgacagtgcattccattttacaaatgtataatataaagtttgtgtctgttgagtctctcttgggagatgcataccaaaaaaaatcacagaataccatttgtaactatcactggttcacaatatttgtactgtgaatctttatatgccttttaggtgtctaagaagactatttctttcactttacaaataaagaaacatgtaaaagtattatttctcagggtaatatattaatgggaatggaacataartctctagatttctaatacaagaagtgaataattgcctcctaaataatttcagtataattgtttcttagtataatattgttttgacttggagttaagttccctgagttccagtttttgctctgacattgattaactggataattctgagcagaccatggatctatcgaccacagtttccttgtctgtaaatgaagagtttatactctacatttaatgcacctttcaaccccaaaattctctgaattcatttcaaaggatg

SEQ ID NO: 375801 - DNA, 481 bp, Homo sapiens
taccatcatccagcacagtaatcaggaagagggtttggtgactgagacagagaccactgaaactatctccttgtgctagagaaaggtwaggagaggggcatttaccttttcaagaattactactggtggatctgttagacatcacacacttgtccagaactggtaaggcctctgagacagatgaggattttgcttgaatctcccttctgaggtacacccaggctatgtatcatttggcagccattctgagtcagagctcttttcccaaaattagctcttggacaaacacacacaaaagatttattttttctgggtccaggttaattaaatacagccaaagtgaaatcaattctgtcttaagagtgacaggcctgctgcctatcagaagagctgcaacaattagcttagacctaacaattgaaaacatttatttgactactggatcacctgtaccagcaattcagtaaattcaatatctata

SEQ ID NO: 375802 - DNA, 481 bp, Homo sapiens
taccatcatccagcacagtaatcaggaagagggtttggtgactgagacagagaccactgaaactatctccttgtgctagagaaaggtaaggagaggggcatttaccttttcaagaattactactggtggatctgttagacatcacacacttgtccagaactggtaaggcctctgagacagatgaggattttgcttgaatctcccttctgaggtacacccaggctatgtatcatttggmagccattctgagtcagagctcttttcccaaaattagctcttggacaaacacacacaaaagatttattttttctgggtccaggttaattaaatacagccaaagtgaaatcaattctgtcttaagagtgacaggcctgctgcctatcagaagagctgcaacaattagcttagacctaacaattgaaaacatttatttgactactggatcacctgtaccagcaattcagtaaattcaatatctata

SEQ ID NO: 375803 - DNA, 481 bp, Homo sapiens
taccatcatccagcacagtaatcaggaagagggtttggtgactgagacagagaccactgaaactatctccttgtgctagagaaaggtaaggagaggggcatttaccttttcaagaattactactggtggatctgttagacatcacacacttgtccagaactggtaaggcctctgagacagatgaggattttgcttgaatctcccttctgaggtacacccaggctatgtatcatttggcagccattctgagtcagagctcttytcccaaaattagctcttggacaaacacacacaaaagatttattttttctgggtccaggttaattaaatacagccaaagtgaaatcaattctgtcttaagagtgacaggcctgctgcctatcagaagagctgcaacaattagcttagacctaacaattgaaaacatttatttgactactggatcacctgtaccagcaattcagtaaattcaatatctata

SEQ ID NO: 375804 - DNA, 458 bp, Homo sapiens
cttttcccaaaattagctcttggacaaacacacacaaaagatttattttttctgggtccaggttaattaaatacagccaaagtgaaatcaattctgtcttaagagtgacaggcctgctgcctatcagaagagctgcaacaattagcttagacctaacaattgaaaacatttatttgactactggatcacctgtaccagcaattcagtaaattcaatatctatatggaaaggtagatagatgtaaatataaattatatatatatatttatatatgtagacgtatagacatgtttttaggaacagaattgtgttccccaaaatttatatgttggagtcctaacccccaatgtgaatgtagagataggaactttatcaaagtaattaaatttaaatgaggtcgtgagggtggggccttaatcygataggactggtgaccttataagaagagaaagagacac

SEQ ID NO: 375805 - DNA, 571 bp, Homo sapiens
aatgtttacaataaagtagatatgttagaagaaaaatattttgtgtgccatgtaaaattatctcatgaccaccagtagtatgcacattggattttatgaaacagttaatgaagttttcatgaaaactctgctatacatgattctgagacccacaagcactgcagttatgctggaatgtcctacaatccccacaaaatgtgtagtaggtttcagtttattatttgcgattgcatgtctcccagatcttcctagcaggcatattatatcttattggkccccaaaagaacacactgtagtacattttaatagatgctcttgccctacatgggagtttgttatgtcatgagtcttcagtctttcaaaattcgagggttttattccagctactaggtaatttgattattttttatttgcttggcccaaccaccaacactttatctggcttctgtttttattgttgaatcagccaatcaatcttaattaattcagctatctgatccacttgtagatttttatgctacaaagctcaaatttaaaaacctaatcaagactttatgaaattaaaaatagt

SEQ ID NO: 375806 - DNA, 571 bp, Homo sapiens
aatgtttacaataaagtagatatgttagaagaaaaatattttgtgtgccatgtaaaattatctcatgaccaccagtagtatgcacattggattttatgaaacagttaatgaagttttcatgaaaactctgctatacatgattctgagacccacaagcactgcagttatgctggaatgtcctacaatccccacaaaatgtgtagtaggtttcagtttattatttgcgattgcatgtctcccagatcttcctagcaggcatattatatcttattgggccccaaaagaacacactgtagtacattttaatagatgctcttgccctacatgggagtttgttatgtcatgagtcttcagtctttcaaaattcgagggttttwttccagctactaggtaatttgattattttttatttgcttggcccaaccaccaacactttatctggcttctgtttttattgttgaatcagccaatcaatcttaattaattcagctatctgatccacttgtagatttttatgctacaaagctcaaatttaaaaacctaatcaagactttatgaaattaaaaatagt

SEQ ID NO: 375807 - DNA, 571 bp, Homo sapiens
aatgtttacaataaagtagatatgttagaagaaaaatattttgtgtgccatgtaaaattatctcatgaccaccagtagtatgcacattggattttatgaaacagttaatgaagttttcatgaaaactctgctatacatgattctgagacccacaagcactgcagttatgctggaatgtcctacaatccccacaaaatgtgtagtaggtttcagtttattatttgcgattgcatgtctcccagatcttcctagcaggcatattatatcttattgggccccaaaagaacacactgtagtacattttaatagatgctcttgccctacatgggagtttgttatgtcatgagtcttcagtctttcaaaattcgagggttttattccagctactaggtaatttgattattttttatttgcttggcccaaccaccaacactttatctggcttctgtttttattgttgaatcagmcaatcaatcttaattaattcagctatctgatccacttgtagatttttatgctacaaagctcaaatttaaaaacctaatcaagactttatgaaattaaaaatagt

SEQ ID NO: 375808 - DNA, 533 bp, Homo sapiens
gaaggctgcagaagagtgcagtggggcacctcagtgagaggactgaatgtgccgccgtggatttttccttaagggtacttatccaccttaagctgggagcttaacggttgtaaaatgagtttcagcatggcattccagagatgtatagaaatgytagttacttataaaagttgaaagaggcctgaaaccagatgccaatgaagtggtctttgctcccttctaaattcctcagagaaagagtttttgtcgccagggactgttcaatggttaccaggtcatttttgccctcctcattttgcccctgacaaatattttggtcaaatctttgaccctttttaccccaccatgcccatgtctacctgctgcctattgggttctcaagaaagagaaaacacccgcaattaagaggggcattgagtttgtctggctacttccttctgaaaggggatattgaagggacaggttgtatttttcccttcttgctctctgtcgtaaagggaatgaaggatcttgaaaccccattcatggagggg

SEQ ID NO: 375809 - DNA, 533 bp, Homo sapiens
gaaggctgcagaagagtgcagtggggcacctcagtgagaggactgaatgtgccgccgtggatttttccttaagggtacttatccaccttaagctgggagcttaacggttgtaaaatgagtttcagcatggcattccagagatgtatagaaatgctagttacttataaaagttgaaagaggcctgaaaccagatgccaatgaagtggtctttgctcccttctaaattcctcagagaaagagtttttgtcgccagggactgttcaatggttaccaggtcatttttgcyctcctcattttgcccctgacaaatattttggtcaaatctttgaccctttttaccccaccatgcccatgtctacctgctgcctattgggttctcaagaaagagaaaacacccgcaattaagaggggcattgagtttgtctggctacttccttctgaaaggggatattgaagggacaggttgtatttttcccttcttgctctctgtcgtaaagggaatgaaggatcttgaaaccccattcatggagggg

SEQ ID NO: 375810 - DNA, 533 bp, Homo sapiens
gaaggctgcagaagagtgcagtggggcacctcagtgagaggactgaatgtgccgccgtggatttttccttaagggtacttatccaccttaagctgggagcttaacggttgtaaaatgagtttcagcatggcattccagagatgtatagaaatgctagttacttataaaagttgaaagaggcctgaaaccagatgccaatgaagtggtctttgctcccttctaaattcctcagagaaagagtttttgtcgccagggactgttcaatggttaccaggtcatttttgccctcctcattttgcccctgacaaatattttggtcaaatctttgaccctttwtaccccaccatgcccatgtctacctgctgcctattgggttctcaagaaagagaaaacacccgcaattaagaggggcattgagtttgtctggctacttccttctgaaaggggatattgaagggacaggttgtatttttcccttcttgctctctgtcgtaaagggaatgaaggatcttgaaaccccattcatggagggg

SEQ ID NO: 375811 - DNA, 519 bp, Homo sapiens
aattattattctgttacctcacatttaggaaaccctagcattatgaatamaactaatttgagacctttgagcaactgttgattttgaaatacttttctttcctataacaaaacaatactttttagggcatatttttcccatgagttttaaaaatctatcttgatgaactaaacaacaataatttgacagtgaagacatttaaatcatgcactttagtgtaattcccagagctagagaagacaggccactgtgattgaagcaatggattgaatctccgctgccagatgacagttgaaatataatgggcttacagccgtcagccacagctagaagtttatatgcaaagagtaaagcttttcagtgatggaaaatggaaagctgggtggttacttgaaattcttgcattgttcctagtagcttataaaggatatgggaaaactccatccatgcaaattctgtttaggatagtatttgtaatggagctgcataaacatacttcttgcatcctggtactattgc

SEQ ID NO: 375812 - DNA, 519 bp, Homo sapiens
aattattattctgttacctcacatttaggaaaccctagcattatgaatacaactaatttgagacctttgagcaactgttgattttgaaatacttttctttcctataacaaaacaatactttttagggcatatttttcccatgagttttaaaaatctatcttgatgaactaaacaacaataatttgacagtgaagacatttaaatcatgcactttagtgtaattcccagagctagagaagacaggccactgtgattgaagcaatggattgaatctccgctgccagatgacagttgaaatataatgggcttacagccgtcagccacagctagaagtttatatgcaaagagtaaagcwtttcagtgatggaaaatggaaagctgggtggttacttgaaattcttgcattgttcctagtagcttataaaggatatgggaaaactccatccatgcaaattctgtttaggatagtatttgtaatggagctgcataaacatacttcttgcatcctggtactattgc

SEQ ID NO: 375813 - DNA, 598 bp, Homo sapiens
ttagaatatttaaaacacattatattttgttatcaaaatctaaatgacaagccgagcataaactacaaaatatttcaagtaatagttcagtaaaatagaaaatggagttgagaaacagcagcaaaatatatgtttatgtcaactcaagttcgaaatgttggtggtcttagcaataggcraccacgttcattgtgtcatttttctgatacctatggaagacctcatgtgaagattgattacaaaaatggccctgattcttcatacctctgtgagtatgcaccctttgcagtacgactttgcagtttttcccatcagtaggtggagtataatcgtctaccccttcaatctgttctgacatcacaactgccttttgctgatagaacatggcagactgttgacatgccagttctgagcttaagcctccaaagacctttgtattttgactttttttcattaagttctgccacaaccatacaaataagctctgaatggcattagttgtgtggccccattgccaccactgccccaactgccagccatccatccaaaagacatgtgagtgtggcttttcatgaccaaccagactccagccaatctg

SEQ ID NO: 375814 - DNA, 598 bp, Homo sapiens
ttagaatatttaaaacacattatattttgttatcaaaatctaaatgacaagccgagcataaactacaaaatatttcaagtaatagttcagtaaaatagaaaatggagttgagaaacagcagcaaaatatatgtttatgtcaactcaagttcgaaatgttggtggtcttagcaataggcgaccacgttcattgtgtcatttttctgatacctatggaagacctcatgtgaagattgattacaaaaatggccctgattcttcatacctctgtgagtatgcaccctttgcagtacgactttgcagtttttcccatcagtaggtggagtataatcrtctaccccttcaatctgttctgacatcacaactgccttttgctgatagaacatggcagactgttgacatgccagttctgagcttaagcctccaaagacctttgtattttgactttttttcattaagttctgccacaaccatacaaataagctctgaatggcattagttgtgtggccccattgccaccactgccccaactgccagccatccatccaaaagacatgtgagtgtggcttttcatgaccaaccagactccagccaatctg

SEQ ID NO: 375815 - DNA, 583 bp, Homo sapiens
ttggggacatgcacccatgacacagcctcaggaggtcctgacgacatgtgtccaaggtggtaagagaatagtttgrttttatacattttagggagacatgagacatcaatcaacatatgtaagatgaacactggtttggtctggaaaggtaggacaactggaagcaaaggcaagatgactggaagcccggaggaggcttccaggtcataggaagataagagacaagtggtggcattcgtttaagtttctgattagcctctccaaaagaggcaatcagatatacatttatctcagtgtgcagagaggtgacttggaatagaacgggaggcaggtttgctctcagcagttcccagcttgacttttccctttagcttatttttgggccccaatatttatttttctttcacagtgtctagcaaaacagccatatcctaggtctagtaacatattccactgagaaatggaaataaaatagaagaagaaatcatctagtatgttgatgttttgagacaggagaggactactgtctgagtccattttgtgctgctaaaacagaatacctgagagtgggtaattgataaat

SEQ ID NO: 375816 - DNA, 574 bp, Homo sapiens
gcactcataatgagacaggtgaaaacaccaactaattaactgtaaaatgaagtttcatcatttttaatgggaagactcaagcttctgtttggtgactcttcttcttagtaccaagttaccctcccccaaacaaragaatcacaaaatatttatttagcatatgagtttagcaaagcaataatgtattttgctatcaagttctttctctcccacagtagaaaatactcatttagaaacaaggatattcttagctcactgtcctttagacagcgctgtataagcgctgaacaattctaaatgtttttttccccatttttatccccattcagaccactactcttctgctgagacacactattttcttatggcttcaaggaagggattgtttttcagcattacagcattagtttcctttcaaaccttagtccttctaattccctatcaacaacacatttaactaccacgatttaggatagattattatcataattggtccacctcttctttaggctgtagcttatactgctttacctcggagagggtacagtcaacatcagctccaagggaagaaaat

SEQ ID NO: 375817 - DNA, 369 bp, Homo sapiens
aaataacttgacggaaagtctcaggatacaaaaattaacacataaaaatcactagcattcctatacaccaacaatagtaaagctgagagggaaatcaggaatgcaatctcattcacaatttccacaaaaagaataaaatacccagaaatacagctaaacagggagataaaagtcctctatgaggagaattaaaaaacacttcttggctgggtgcagtgkctcatgcctgtaatcccagcactttgggagcctgaggcaggcagatcaccaggtcaggagttcaagatcagcctgaccaatatgctgaaaccccatctgtactaaaaatacaaaaattaaccaggaatgatggcatgcacctataatccc

SEQ ID NO: 375818 - DNA, 597 bp, Homo sapiens
gaataaaatacccagaaatacagctaaacagggagataaaagtcctctatgaggagaattaaaaaacacttcttggctgggtgcagtggctcatgcctgtaatcccagcactttgggagcctgaggcaggcagatcaccaggtcaggagttcaagatcagcctgaccaatatgctgaaaccccatctgtactaaaaatacaaaaattaaccaggaatgatggcatgcacctataatcccagctactcaggaggctgaggcaggagaatccctcaaacctgggaggtggaggttgcagtgagccaagatcgcaccactgcactccagtytgggtgacagagcaagactctgtctaaaatatttaaaaaaaaaaaaaaaaaaaaaacacttctcagaggtatgaaagatgacacaaacaattggaaaaaaaaattccatgctcatggataggaagaatcaatatcattaaatggccaaactgcccaagcaatttgcagattcagtgcattcccatgaagttaccaatacactaagcaaaaagaacaaaagtagagtcatcatgctacccagtgtcaaactatactacaaggctacagta

SEQ ID NO: 375819 - DNA, 536 bp, Homo sapiens
atctctatgatgtatattttatgattctaattatataaaattatagaaagaggcaaaactatagtgacagaaatcttctcagtagttttcatgggctaggatgggggaaggggtaaaaatattttatgattgtgttggtgttggttacatcactgtacatattttttcaaccccattgaattgtacatttaatattgataaattttatatcaattatacttcaacatgattgtttaaaaaggcatgataaaaggacctacaagtattgttactttgtcctaggtaaaaatatataatctacttggaaaagcaatatatagtttttaaaaatcatcaagtaaagcagtaagggtacgtggtgtatcaatgcaggytcatagaatgaagcagttatgaaggtaaggggaacagaaaacgttttgtgaaccaggacacattttgtgaacatgaatgcactgtgtaaaatatattttaaaataaataacattcagtgatgtagataacaagaacacaccacagtgaaaacgtaactggta

SEQ ID NO: 375820 - DNA, 536 bp, Homo sapiens
atctctatgatgtatattttatgattctaattatataaaattatagaaagaggcaaaactatagtgacagaaatcttctcagtagttttcatgggctaggatgggggaaggggtaaaaatattttatgattgtgttggtgttggttacatcactgtacatattttttcaaccccattgaattgtacatttaatattgataaattttatatcaattatacttcaacatgattgtttaaaaaggcatgataaaaggacctacaagtattgttactttgtcctaggtaaaaatatataatctacttggaaaagcaatatatagtttttaaaaatcatcaagtaaagcagtaagggtacgtggtgtatcaatgcaggctcatagaatgaagcagttatgaaggtaaggggaacagaaaacgttttgtgaaccaggacacattttgtgaacatgaatgcactgtgtaaaatatattttaaaataaataacattcagtgatgtagataacaagaacacaccrcagtgaaaacgtaactggta

SEQ ID NO: 375821 - DNA, 564 bp, Homo sapiens
ggacagtttaaatcctgaaaacagaattgctggttccagacaaagtctatgaccagagtgagaacttccatccctgtcttacccactctctctcaactggtttcttctgaatgatgacttttacccaactgaatattgctttgtccaaacccactcccccattataaacccatatgaaccttggattcagacacagatggctatctgctttcaggttccctctcaatgctgagagctttctttctgtcactcagtaaaattctactctgccttaattactctccagtgttcacataccttattcttattggtcatgggacaagaacctggaacttgccatactgtgcaagcaaaagagctgtaatgctcctgcttgctgagctgtgggtggtgggaataaaagagctgtaatattccctcctgctaatcaaacaatgggaaagaggaagacactggccatcayaccctcccactcatcaagctacaagaataaagaagctgttgggtgccactttcttctacttgctgaactataggagcaaaaaagctgcaacacttccatac

SEQ ID NO: 375822 - DNA, 515 bp, Homo sapiens
actcagtacctgttttaagaaaaacaacaaggaagtaaaaccaaagacaggcagcctggcaccaggcctgaaaccaggcctgggcctgcctsgcctaaatccagtagttaaaaatcaattcataacttagaaaccgatgttattcatagattccagacattgtatagaagagcattgtgaaactccctgccctgttctgtttctctctgaccacccgtgcatgcagcccctgtcacgtaccgcctgcttgctcaaatcaatcacgaccctttcatgtgaaatctttagtgttgtgagcccttaagagggacagaaattgagcattcggggagcgcggattttgaggcagtagcttgccgatgctcccaggtgaataaagcccttccttccataactcggtgcctgagaggttttgtctgcagctcgtcctgctacattctcatttgggtaagctctgtcagagggaaggtctagggctgaagtctgttgttcagactcttttgtcccatggggta

SEQ ID NO: 375823 - DNA, 553 bp, Homo sapiens
agacaaaaggaccaacaggctacttctaccttctaccctatcacgtagctctcctgaatcaaggaagtgcccagccaggtatctgcatgaaggggaggacaaaaaataaaaaatgcgtcaattaacatctcaacatatatcataaaccacacatatagatacacagagacggattcctgcctatctctcatattatagagaagagcacataatccagagccttggctgtggagtttttattagctatgaatatgctcccaggtttmtgaaggctgattcaatgcagaaatgctgctagaccgcagggtgagcacatgaaatcctaacccggagtgtcctctctaggcctctgctgagtgaatcagacagccaggcagtcctgccagcaggattaggaccaaaactgccaccccggatacagatggtaatcaatccaatttgctcacctcctgaagttatctgccccctgccactcctccttgggaagcagaaatgaagccccctcatgagtcaccagcatgatggattcttcagtaactggtagcgacaggaa

SEQ ID NO: 375824 - DNA, 592 bp, Homo sapiens
aactaataacagaaaaaccctgctccaaataaggagaaaacaaacagctaattccaccatcygcaacatcctggctaaccagaggtcctgaatcttgtccatgtgacaacttcactgctagaataatcagcattcaagaaaaccagtgcactaaacaaaactacaaccaaggactcccacagagtccacttcactcctctgccacctccactggagcaggtgctaatatccatagctcggggacctgaagacagatcacataacaggacactttgcagacatcctccagcaccagcccagggcctgatagccccactgggtggttacacccagaagggcaataacgatcactgcagttcagctcttaggaaaccccatctctaggggaaaggagagagcaccacatcaaggcatcacctcatgggacaaaagaatctggacagcagcctttgagttccagatcttaccactgaaacagtctaaccaaatgataaggaaccagaaaagtaattctggtaatatgacaaaacaaggttctataacacctgcaaaagatcaactagctctccagcaatggattcaaaccaagaag

SEQ ID NO: 375825 - DNA, 546 bp, Homo sapiens
aactctttatgcttttattagattaaaaattaattttttaattgacaaaataaaaatttatggtgcacaacatgatgttttgaagtatgcatacattgtaaaatttcaaaatctagctaattatcatacgttgtgttacctttcatatttatcatcttttktgatgagaacatttaaaatctactctcttagcaattttcaaatatacaatatataccccacaccactctcccactccacctagccctggtagccaccattctattctctgcttttatgaatttgactttttaagatttcacagtgggctgggcatgatggcttatgtctgtaatcccagcatttgggaggccgaggtgggaggatcgcttgagctcaggagttcaagaccagcctaaatgactgttcaagaccagcaacacagtgaaaactcatctctactaaaaatagaaaaagtagcccagcatggtggcacaagcctgtagtcccaactacttgagaagctgaggtgggaggaccgcttgagccccagcagttcaagggtgc

SEQ ID NO: 375826 - DNA, 546 bp, Homo sapiens
aactctttatgcttttattagattaaaaattaattttttaattgacaaaataaaaatttatggtgcacaacatgatgttttgaagtatgcatacattgtaaaatttcaaaatctagctaattatcatacgttgtgttacctttcatatttatcatcttttttgatgagaacatttaaaatctactctcttagcaattttcaaatatacaatatataccccacaccactctcccactccacctagccctggtagccaccattctattctctgcttttatgaatttgactttttaagatttcacagtgggctgggcatgatggcttatgtctgtaatcccagcatttgggaggccgaggtgggaggatcgcttgagctcaggagttcaagaccagcctaaatgrctgttcaagaccagcaacacagtgaaaactcatctctactaaaaatagaaaaagtagcccagcatggtggcacaagcctgtagtcccaactacttgagaagctgaggtgggaggaccgcttgagccccagcagttcaagggtgc

SEQ ID NO: 375827 - DNA, 380 bp, Homo sapiens
ctatttctgccacctcatgccctagcactctccacctcattcttttgaaccattatccagccaccttgccccacccacctggaatgtcctgctttagacattggatccccaagcccccttagttctctacatcctcagtccaagccccatctcctctggaggccttccccaacacagacataggcacatttcctcctaaaacttttcaatacctgatgctttatttgttgatttattgtcacacttctactatacgttaagttctgcagtgcaagcacctcacctgttttattcacaactctgcatccagttcttaraactgtacctaacactctaatggttctcagtgtttgtttattcatttatttattgatttaaaa

SEQ ID NO: 375828 - DNA, 561 bp, Homo sapiens
tgtctgtttttcctttcactttttcaaggcataagctatcttcttagaacctccttcctattctctggtcaaggtttgaataatacccacttgtttctagaaatgtccctcatacacacttccatgcttggagcagctggtagctttttacaacagttgattcttcccattcaatactgagcatatgggttggagtctccttctaaaaactgagcgtctgggttttcagaagttccaggaaatctgtaatgtaaggcagaagcacaaactctttgtgaagaatgaaggaaataaatggatcttgtataagaagtttcaggaaatatctgtatggatgaagcatttgaggaaaaaagatgatactcttgaaataagattttattttaagcccrtagaaaatctaaagatagtgttaaagttctggaagggttttgatgagaattgtctgatgggtctcatcatattgcataatgaattaaacaagttttgcaccaacttcatttattgacatacatagtccttaagactccttctcaaactcagtgagtaagaacttcttta

SEQ ID NO: 375829 - DNA, 461 bp, Homo sapiens
taaatattctttataaaaacaatgctacaataaatatcttttaaacatatgtgcaagtattttctcacaatcgtgcaagatctagtttatgtactttgtcaaatgtacttggtcatagttttctgctgggcgtgaaagaagatagcctggcactgactacattcttattggccccagaggggagcttgatcartgccaaacaggggatatgagggagctggctgataaattactctccctccacccgataagttgttatgagacacagtgtttccaatgccccttcaggagatgggctgtgtaggtgagcaaccagatatggtttctaatgagaccacaaccaaattaattatataacattttgtattttatttttgcctttctttgcctcattttcttttttccttactctagcttccttgcgattatactcctcataagactttctatgtaaatattgt

SEQ ID NO: 375830 - DNA, 586 bp, Homo sapiens
aatcagtgcctttcccaatgcagctgtttgagcactgaatgcttgcagccaacccttcttgtattcaccctgagttatcttcttgagggtctttgtcagggctttatctgcagaacacctagacactatctctgacaaacaggctgggtagaaaccattgtagcaggaagagtgacattactgtctccttaattattattgatcagctttaattgtcttcaaggaagctttatactataagagactagaagcaacatgtggctacacttggcccattttcactcggcatgattttttctctacattttttggtatatatattagaactgataaaatatatgtataataaaatttaaaactcaagccaaagcttatattagtagcttctttcctcttaagatatttattgcacaatatcaagatcaactctagtgaagaaatattttagcctgaaaacacatggattttgttcagtgccattaacaggaaatatatcttayatgtcagtcccttgctatccatgactgctatgccaagtgctttaaaatatatgttacttttgacttcacaaaaactctgtaagtgt

SEQ ID NO: 375831 - DNA, 596 bp, Homo sapiens
atagtcatattacacattttgtctctaatcctcaccacagcctttaagagatatatttttactgccattttacagataaggaaacttttctttaaggctgacagtggcttaatagctgtccccaaagttacatagctatgaaatgttagaaccagaatttgaaatcagggcactaagtctgcaagttctgtatgcttccattatagctaacttcttgttctgcataacaattaccccaaaatccaatgcttaacacagccactattttattatatgacacaattttgcaagtcgtgaatttgggcaggcatggctaggcaattctccttctccacgtggtattagctgggcagtttacatggaactggagtatccacttccaagatagctgactcaggatcacaagttagtgctggctgttggctgcaagctcagctgaggctgtcctcagttgagggccttagttctttttacctgagactcttcactggaataattgagttttctcacagcatggaaactgagttccacaagtraatatccaagagacaggaagaagcagcttatagtctcctcaagcctaagccataaaactg

SEQ ID NO: 375832 - DNA, 661 bp, Homo sapiens
taaaacaaaattaagacctctgcttttcaaaacataagcagaggtcttaatttcattttaatatgaaagagaatgaaaaggcaagtcacagagtgggagaaaatatttgaaacatttttaagtaacaatctactttggttttatgtccaaaaggtttgaaggtatgagtactaggagacatggatgaaaatatccacaatagtattattaataagtaaatactggggacgagttaaatatccatcaacagcaaatagttaaataaatagtggcatgtttatatartggaatatcagacagcattggaagttaacaaactactgcttcctgaaacaccataggtgaatctcacaaacataaaattgagtgagagaaaccaaacatgaaaaaatgattccatttatacaaaatgttaaaacacagtcaaactaatcacctaaaaatgcagagggctacagaaaaaacataaagaaaagaaaaagaagagattatcataaaattggacacagttatatttattaggggaaaagaaggttggaattgggaagaagcatagatgggctgagggtgctggataagttctgtttcttgacctcagtggtggttaaatgggtgttcacatttacaaaaatttgttaacgtgaagctgcatatttacatt

SEQ ID NO: 375833 - DNA, 577 bp, Homo sapiens
aatagtggaagttcactactgtaccctaaaagctattgaaactaaaaaatatcaatgaatgcttgtccacaagaagagaaaacaccattcaaattgaaaaccagtatgggttgttctggaaaatattcgttaaacaaagaccctcacagagtgagaattgtaaatacgaatagattaaaaagtgctgcagtaagtcggggcctttgaaaattatataatcaacacgtattctcttccagaaggataaagtcccattttgcgggaaaaaaaaaatactggaaacaaaaatcamattgagcagaggagagggccactgatggtaaagaagagagagaaggctccatagttaggggaggaaagtctttgaggaggcagattcaaggaaggaagtactctcagcaaaacaaagtctaaagcagagagcactaaccaaggcccaaacaggttgagcctggagcacacaaagctagaggcaggaaatgttactgggtctaacttggccacacagagaggccatgttttaagtttttcatggtgataacagagaagagttactgagctctgaagctgggaaaga

SEQ ID NO: 375834 - DNA, 577 bp, Homo sapiens
aatagtggaagttcactactgtaccctaaaagctattgaaactaaaaaatatcaatgaatgcttgtccacaagaagagaaaacaccattcaaattgaaaaccagtatgggttgttctggaaaatattcgttaaacaaagaccctcacagagtgagaattgtaaatacgaatagattaaaaagtgctgcagtaagtcggggcctttgaaaattatataatcaacacgtattctcttccagaaggataaagtcccattttgcgggaaaaaaaaaatactggaaacaaaaatcacattgagcagaggagagggccactgatggtaaagaagagagagaaggctccatagttaggggaggaaagtctttgaggaggcagatwcaaggaaggaagtactctcagcaaaacaaagtctaaagcagagagcactaaccaaggcccaaacaggttgagcctggagcacacaaagctagaggcaggaaatgttactgggtctaacttggccacacagagaggccatgttttaagtttttcatggtgataacagagaagagttactgagctctgaagctgggaaaga

SEQ ID NO: 375835 - DNA, 520 bp, Homo sapiens
cattctaatgtttgataccagagtaaggtgactacaggtaacaacaatgtattatatatttcaaaatagctggaagggagaatttgaaatgttcccaacacatagaaatgataaatacttaaagtgatgtataccctaaatatcctgacttgatcattacacattctatgtatgtaacaaagtatcacatgcacctcatgaatatgtacaaatatgtatcgttttaaaagaagttcagcaaacaagagagcacaaaaaacagtttaaaaaattaggaaacaataaaagaacaaaattataagctcaacaaaatgatagaaaacattaraaaataaccaaacagaaattttggagctaaataatacaatgactgaacaacagaatggaatagagagcttgaagaagaatagatcatgcagaagaaataataagcaaactagaagacagattgttttatatcatatagtaagagtagaaaaaagaaaaaaaggaatgaaaattttatgtgatatataaaaca

SEQ ID NO: 375836 - DNA, 618 bp, Homo sapiens
atgtaaattggtgtagctattatgacgaacagtatgaaagttcctcaaaaaattaaaaatacaactatcacatgtcccagcaatccctcttctgggtatacacccaaaggaaatgaaatcagtactttatcaagatamctgcattcccatgttcacttcagcattattcacaatagccaagataatggaaacaatctacgtgttcatcaacagatgaatggaaaagaaattgtggtgtatatacatatatgtgtgtgtacatatatacacatacatatatatacatatacgtacatatatacatatatatgtacgtagagatggggtatatacgtatacgtacatatatatacatatatatgtacacagtaaaatagtatacagtaaaatagtatacagccttcaaaaaaggagaccctgctatttgcaacaacatggatgaacctggagaacattatgctaagtgaaataagccaggcacagagaggcatacactgtatcactcttatatgtggaaactaaaaaacagtcaaatacatagaaacagagagaggaatgctggttaccaaagttggaaggtggggagaaatggggaggtgaaggtcaaagggtaaagag

SEQ ID NO: 375837 - DNA, 618 bp, Homo sapiens
atgtaaattggtgtagctattatgacgaacagtatgaaagttcctcaaaaaattaaaaatacaactatcacatgtcccagcaatccctcttctgggtatacacccaaaggaaatgaaatcagtactttatcaagatacctgcattcccatgttcacttcagcattattcacaatagccaagataatggaaacaatctacgtgttcatcaacagatgaatggaaaagaaattgtggtgtatatacatatatgtgtgtgtacatatatacacatacatatatatacatatacgtacatatatacatatatatgtacgtagagatggggtatatacgtatacgtacatatatatacatatatatgtacacagtaaaakagtatacagtaaaatagtatacagccttcaaaaaaggagaccctgctatttgcaacaacatggatgaacctggagaacattatgctaagtgaaataagccaggcacagagaggcatacactgtatcactcttatatgtggaaactaaaaaacagtcaaatacatagaaacagagagaggaatgctggttaccaaagttggaaggtggggagaaatggggaggtgaaggtcaaagggtaaagag

SEQ ID NO: 375838 - DNA, 464 bp, Homo sapiens
tgaccttggcttagtcacccaatgaggctaattctctatttccttaccgtaatcagaagaaattattgttctgtaggctttatagcaatgttcttaaacttaaaggggctagcggtcttgttaaatgtgaattctagctcagtaggtctgtgtggggcatttctaacaagattcgggtgatacagatgtgctggtttgtatcattttatrtaacaaggccacactagattgaagaggagactaaatgaggtaagggatagggaaaagctttataaactgtaatgcattttttttaaaagtgattttatgattagcaataataaaaacaggtgctttctatttagtacagcatttcctaggattgtttgccccccacactaccctgaagatctgaacttctttttaagggcttccccaccctcccccgcctctcagttagttctcaatatggttggttccagccc

SEQ ID NO: 375839 - DNA, 558 bp, Homo sapiens
ctagtctataagtttcaacgctagaattttagagagttgagagccaaaagtgaacagaaatgaaactcattgttccattaagcaagagaagtgtgttagcagcagagactggcaaaaatcagagtgaaatactgggtcactgcatttcttctggccctgacagtgttcttgtacgtatatcttgctttgcacagtagatgtgttcttgaaaagctagtgaataattaaagctttgtaagtagaattgtattctagaagacctaggaatctaattttttaaagatgattacagtagtcaatgtttttgaaatgtaaatgaaatcatcacctacattacataatttgtaacaggcttccacaatttgcttccaacctttcttccttatatgattcatcatctactgtgtcctgtcccaacccttacatggttcatgaggaaagagtgtcagtactatattcagcacctaaaacagtgtccagcacaataaatggacactggatgaatgaactaagcaatccattaawcttctcctggctactacatgtatatcaatgtct

SEQ ID NO: 375840 - DNA, 498 bp, Homo sapiens
gtgtcctttgggacttctgcctaggtgccatcagcagcatcgcagcagttaaataccacggcctccctgggtgggagtctcacattcccaaagacaaggagacagagactatttcaaaaagtaactggagagatgagaaagctaaaattagaactattgacatagatcctwaaaaaatcctaccgtgctctgcatgcaaggatgctaataaggagatgaggaagatgatgctggggaaaatggcatgtcatcttagcctcaaactcttgccatctattttgcatatctattttcaatcccaagtctgtagtacagaaatgaaatctctcttctacacacactctcttaacactaaagagggtggtaataaaagacaaggcccaggcagtagaagtcctatagtgctcctgataaagaacacatgtatgtgttatagtttcctagtaaccatcttggagcttatcgatggattcataattgaggacatacatcatcacc

SEQ ID NO: 375841 - DNA, 458 bp, Homo sapiens
ggtgatcatctctccttgagaataataatcttattctccagaagtccagaaaactctgttatctgaaatggttaaggaaggagatgtgcagattagtcacatactctacttcatgaaagatccttccacagtaggcttctagtcccaattttcaaaacattgaaatataataaaatgtactcccaacaagaaacctggagttgtatctaatttaatctttttctggtgattcagagggcatcctttgatttttccaatgcctgagggccatgattacaaatattaaccacggatggttcagccagacatggacattattartggaggactcccactaatgaactgctgtgggtcagcaacgcctggatccattcagcatttaggagtatcggattgcagaggccacaacctagggcctactaatttttaggttctccaactgtatgccaaagtacgtg

SEQ ID NO: 375842 - DNA, 458 bp, Homo sapiens
ggtgatcatctctccttgagaataataatcttattctccagaagtccagaaaactctgttatctgaaatggttaaggaaggagatgtgcagattagtcacatactctacttcatgaaagatccttccacagtaggcttctagtcccaattttcaaaacattgaaatataataaaatgtactcccaacaagaaacctggagttgtatctaatttaatctttttctggtgattcagagggcatcctttgatttttccaatgcctgagggccatgattacaaatattaaccacggatggttcagccagacatggacattattagtggaggactcccactaatgaactgctgtgggtcagcaacgcctggatccattcagcatttaggagtatcggattgcagaggccacaacctagggcctactratttttaggttctccaactgtatgccaaagtacgtg

SEQ ID NO: 375843 - DNA, 458 bp, Homo sapiens
ggtgatcatctctccttgagaataataatcttattctccagaagtccagaaaactctgttatctgaaatggttaaggaaggagatgtgcagattagtcacatactctacttcatgaaagatccttccacagtaggcttctagtcccaattttcaaaacattgaaatataataaaatgtactcccaacaagaaacctggagttgtatctaatttaatctttttctggtgattcagagggcatcctttgatttttccaatgcctgagggccatgattacaaatattaaccacggatggttcagccagacatggacattattagtggaggactcccactaatgaactgctgtgggtcagcaacgcctggatccattcagcatttaggagtatcggattgcagaggccacaacctagggcctactaatttttargttctccaactgtatgccaaagtacgtg

SEQ ID NO: 375844 - DNA, 583 bp, Homo sapiens
aagcttagaaaggtttggttaacttgccaagaatgcacagacaataagcagtggcacctagattcaagcccatatcttcccataaaacaactgtgttggaatctgtctatcttaacatgtcatggaaatttccacattacccagaaacaagttattgttaatattctccctgtaactagctttaagatacgataaattcgatagtatcattacagctaagccttttaaaatataacacattttaacctccaggccaaagttgtaagtgttcctcacggaattatgtcctgaatctgattctggtgtattcttaattgaaaaacattgtgcttagactaaaagtaaaaaagtaaatagtaagaaggggccaagatggctgaataggaacagctccacctgcagctcccagcaagaccaamgcagagggtgggttatttctgcatttccacctgaggttcccagttcatctcactggaactggttaggctgtgagtccaacccacggagggagagcagaagcagggtggggtgtcgcttcacccaggaagtacaagaagctggggacctccctcccccagccaag

SEQ ID NO: 375845 - DNA, 343 bp, Homo sapiens
gcactatgatgactggctaattttttgtaattaatgacacttttcgtctattttattttctgtggtgtttcattatgaagacataaagggccataggaaaaatcggctcaatacaagtcaactaatattgatgactctcttagagggacaaatggagtcaccaatggtagttgattagattgagtagttatacaaattgagtagttgtrtgggtgtacaatcccttatctataattctgaagtccaaaatgctctgaaatatgatagtttttctgtaaatgtatagcaaatgctcttggtcacaaaacttgtcctgtccttatatgaagttgtttatactctt

SEQ ID NO: 375846 - DNA, 559 bp, Homo sapiens
gtcttcttccataactaattgaattgaatatcctgaattckgttttgagtgctggtcccacatgtgagaccttagataaggcatattctttttttaaaaattttactttaagttctgggatacatgtgcagaacatgcaggtttgttatatgtgccatgtggtttgtatacatgtgccatggttgtttgctgtacctatcaacccatcatctaggttttaagccctgcatgcattaggtatttgtcctaatgctctccctccccttgccccccacccccaaaaggcccccgtgtgtgacgttcccctccctgtgtccctgtgttctcattgtttaactcctacttatgagaacatgcggtatttggttttctgtccttgtgttagcttgctgagaatgaaggttttcaacttcatccatgtccctgcaaaggatatgaactcattcttttttatggctgcatagtattccatggggtatatgaaggcacatcctttattgatttcaggtttatcacttatggtaatggcatagcaatctgttctctcgcttcgacttat

SEQ ID NO: 375847 - DNA, 559 bp, Homo sapiens
gtcttcttccataactaattgaattgaatatcctgaattcggttttgagtgctggtcccacatgtgagaccttagataaggcatattctttttttaaaaattttactttaagttctgggatacatgtgcagaacatgcaggtttgttatatgtgccatgtggtttgtatacatgtgccatggttgtttgctgtacctatcaacccatcatctaggttttaagccctgcatgcattaggtatttgtcctaatgctctccctccccttgccccccacccccaaaaggccccygtgtgtgacgttcccctccctgtgtccctgtgttctcattgtttaactcctacttatgagaacatgcggtatttggttttctgtccttgtgttagcttgctgagaatgaaggttttcaacttcatccatgtccctgcaaaggatatgaactcattcttttttatggctgcatagtattccatggggtatatgaaggcacatcctttattgatttcaggtttatcacttatggtaatggcatagcaatctgttctctcgcttcgacttat

SEQ ID NO: 375848 - DNA, 595 bp, Homo sapiens
aaaccagaagaccatatgagtattctcagtttcatttagcattaagttaaaataaaagcatgactcagttcttcctcccctcttgcgatgagtgcttggaatctgttggagcaacccctggcccagctcacatcactacaagacaaaaaagtaagtaagatggtatcacccaacatcacacttcctagacagaacaggagaacttcagagaaagagctgcagagtcctaggagcatagagttgaatgaaatctaagagaacaacaccaactcctctctttatgaaatggaaagaggccttaaaatcgtgtctgagtcacattgcaaattagtggtagagctggcaaattagaggtagacctcaagcttcctgttttgtggtccacagtgctttctaactctttccatgtaataatgtacrcaagtgaattagaatggattcattatatgtgagtttgtgggttgtactgtgtctccccaaaattcatatgttgaattcctcacctacagtaactcaaaatgtaaccatattttgagatagggcccttacacaggtaatcaagttaaaatgaggtcattagggtgggctttaatcc

SEQ ID NO: 375849 - DNA, 584 bp, Homo sapiens
ctgctcccttcttaggctacaaaaatggagcagatgaaatggtggataatgaacacagggttttaaggatgagagccatatgtctctgtttatattgttttggggtgataattaatgatatccccttgtactctcaaaaatgtctgagtgtgcataataaattatataatcctcttatatcataaaataatgaatgtaaggattcttggttttatcatttatgtcactatgtaaattatcttaaattttgttttcttagcctcacttgaaaaaaaaagtaggacttttttttttttgcttactttgaaggacagaataagagttttatacccacactctttcacgtaattgmtgtcattggccacagtgcatcccaggcaggccctgttgccgcagtgtactgggaccatccaggtctagccagtgctcaggccatctacaggctttagtcactcaactgatttgctcctaccacttactctatccctaagactgtctccaaagtgatactggtttctgcatttgcccattttctttctgcacctaaagacaagtactgaagcccagtctatttataggattaa

SEQ ID NO: 375850 - DNA, 545 bp, Homo sapiens
tttattataatacttaactgatttgtctctgtattacagtgttctttacgtttttcttgccagcaccacaggcctctttgtggttgcccctttctaatgctcctcaagacaacctgctaatataagcaaagagtaaatgagtgaggagagcaccttctcatgtcaggaagcctatggagttagatcacctggatttgctcatttcctggacaaaaactgcccttttaatcctcaatttcctattaaggactggttcaacattatcatttcccagggagagtcttcaacttgaagtgatcactcaatcactaaaagcctccaacttgaagtgattgcaaaaccactrcagctgcacctttcttatgcatttcttttattgccttttggattggactttatgccttatttttttctccatttccaagtgtgtcttgcctagaatgtagcacacagtaggagctcataaaatatccactgaaattgagttgaacaggagagataaggcaaggaaactcagtggatcaaggccagctcttgccaagagt

SEQ ID NO: 375851 - DNA, 592 bp, Homo sapiens
tgtaagtttcctgagccaccgtccaccaagtcattcagaactgtgagtcaattaaacctcttttctttataaattgctcagtttcgggtatttcttcatgcagcatgtgaatgaactaatacagggactttaggaaaaacctcaggcttgatctcttaaggttccctcttcctcatccttccttctttcccttctcctctctccttccccctcctcctcttcttttctcctcattcatcaccatgtcttcatcctccttcttttccatttttcttgtctctccttttcgtcccctccctctcttcctcatcctcctgtttatcttcctcctccttttcctccttttcttctcctttctttcaccctctcaaaactttcaccagtaatgcaagtttcccttggagctcaggaatcagctcctcaaacctgagagatggcctaagacattygaggtcagggaagggggtcagatcccctggaagaagcctcacctccctctaaacagacaccatgctggctttctttgtaattctttttctcttcaagcattcctctggctggaagattctctttttgtcttctcaccacctca

SEQ ID NO: 375852 - DNA, 599 bp, Homo sapiens
tactaaatcttataccacagaaatacaaaaaatcattaaaaactattataaacaactatgcaccaacaaattgaaaaacctagggggaatgaacaaatctctaggcacataccacatagcaagactgatccaagaagaaatagaaaacccaaatcaactaatgaaattaaatcagtaataaaaagtatcccaacaggctgggtgtggtggctcatgcctgtaaccccagcacyttgggagtccaaggtgggtagtttgcttgaggtcaggagttcaagaccaaactggccaagatggtgaaaccccatctctactaaaaatataaaaagtagctgggcttggtggtgcacacctgtaatcccagctacttgagtggctgaggcaggagaatcgcttgaacccaggaagtggaggttgcagtgagctgagatcatgccattgcactccagcctgggttacagagcaagattctatctaaaaaaaaaaaaaaaaattatcctaacaatgtaaatccagatagctttaccactaaattctacctaacatcttagaagaactaacaccaactgtcctcaaactatgccccaaagttgaagaga

SEQ ID NO: 375853 - DNA, 592 bp, Homo sapiens
aaaattccaagtttttattgggtatttactatgtgccagtcactgttgtagaagatgcagaaattagtaattcattgccactgcttcaaaaacacataatgccatttaagtgaaaggggacagtaaaatgttcatatgaccattgtgttagttcgctagggctgtgccataacaaaataccacagactctgtggcttaaacaacagaaattgagtttcttatartcctggaggccagaagtctgagaacaaggtatcagtggggttgggtcttctgaggcctctctccttggcttgctgtttagatgactgtcttctccgagtcatcagattctgaggtactggaaggacttcaacatataaattttgggggaaaacaattcagcccgtaacatccaggaaataaaaagatcatttttaatcgagacagtgaaatcgtagtgctataggaatcaaatgaaagatgacaaaatcagggcctggaggtattcctggaaagctttctaaaggtggtgtgcctggtgccagatcttgaacagtcatgacagtttgaatgggctggttggcaggggaggtgcatccaagatactgag

SEQ ID NO: 375854 - DNA, 489 bp, Homo sapiens
gcatttttgttttttaaatagagtttatattttagagctgttttaggtttatagagatattgagctgaaaatacagcaagttcctatatcccctgtccttctgcatgcatttcccctgctgttaatatcttgcatcgatgtggtgcgtatctactatgctgtgaatgttcgtgtctcctacaaattcatatgttgaaattctaaccactamggtgacggtattacaaggtgggaagttatttgggaagtgattaggtcagaggggtggagccctcaggaatgggattagtgcccttataaaaggggcctgagagaggccccttgcccttctaccatgtgagcacacaacaagaaggcatcatctatgaacaaggaagcagacacttttccttgatggaagagtgggaagggcatctgcttgatgcccttcttaagatctttagatttgccatttaaaatcaagatctttagcttttcccagctactgga

SEQ ID NO: 375855 - DNA, 489 bp, Homo sapiens
gcatttttgttttttaaatagagtttatattttagagctgttttaggtttatagagatattgagctgaaaatacagcaagttcctatatcccctgtccttctgcatgcatttcccctgctgttaatatcttgcatcgatgtggtgcgtatctactatgctgtgaatgttcgtgtctcctacaaattcatatgttgaaattctaaccactaaggtgacggtattacaaggtgggaagttatttgggaagtgattaggtcagaggggtggagccctcaggaatgggattagtgcccttataaaaggggcctgagagagrccccttgcccttctaccatgtgagcacacaacaagaaggcatcatctatgaacaaggaagcagacacttttccttgatggaagagtgggaagggcatctgcttgatgcccttcttaagatctttagatttgccatttaaaatcaagatctttagcttttcccagctactgga

SEQ ID NO: 375856 - DNA, 569 bp, Homo sapiens
acaataatgaagtttgctgcatcgattgactcttcctttcacaaaaagatgtctctgtagcatgtgatgctgtttgatagcattttgctcacagtagaacagctttcaaaattggagtcagtcttcgcaaatctagccactgcttcatcgagtttatgtgatatcctaaatcctttgttgtcatttcaacagtgttcatagcatcttcaccaagagtagattccrttgcaagaaaccactttctttgctcatccataagaggtaactcctcatccattcaagtttgatcatgagatggtagcagttcagtcatgtctttaggctccacttctaattctagttctcttgttatttccaccacatctgcagtgacatcctttactgaagtcttgaactcctcaaagtcacccatgagagttggaatcatcgtcttccaaactcctgttattgctgatgttttgatctcccatgaatcacagatgttcttaatggcatctggaatggtgaatcctttttagaaggtttgcagtttactttgcccagatccattagaggaatcgctatctatg

SEQ ID NO: 375857 - DNA, 569 bp, Homo sapiens
acaataatgaagtttgctgcatcgattgactcttcctttcacaaaaagatgtctctgtagcatgtgatgctgtttgatagcattttgctcacagtagaacagctttcaaaattggagtcagtcttcgcaaatctagccactgcttcatcgagtttatgtgatatcctaaatcctttgttgtcatttcaacagtgttcatagcatcttcaccaagagtagattccattgcaagaaaccactttctttgctcatccataagaggtaactcctcatccattcaagtttgatcatgagatggtagcagttcagtcatgtctttaggctccacttctaattctagttctcttgttatttccaccacatctgcagtgacatcctttactgaagtcttgaactcctcaaagtcacccatgagagttggaatcatcgtcttccaaactccygttattgctgatgttttgatctcccatgaatcacagatgttcttaatggcatctggaatggtgaatcctttttagaaggtttgcagtttactttgcccagatccattagaggaatcgctatctatg

SEQ ID NO: 375858 - DNA, 569 bp, Homo sapiens
acaataatgaagtttgctgcatcgattgactcttcctttcacaaaaagatgtctctgtagcatgtgatgctgtttgatagcattttgctcacagtagaacagctttcaaaattggagtcagtcttcgcaaatctagccactgcttcatcgagtttatgtgatatcctaaatcctttgttgtcatttcaacagtgttcatagcatcttcaccaagagtagattccattgcaagaaaccactttctttgctcatccataagaggtaactcctcatccattcaagtttgatcatgagatggtagcagttcagtcatgtctttaggctccacttctaattctagttctcttgttatttccaccacatctgcagtgacatcctttactgaagtcttgaactcctcaaagtcacccatgagagttggaatcatcgtcttccaaactcctgttattgctgatgttttgatctcccatgratcacagatgttcttaatggcatctggaatggtgaatcctttttagaaggtttgcagtttactttgcccagatccattagaggaatcgctatctatg

SEQ ID NO: 375859 - DNA, 622 bp, Homo sapiens
catgtaacaaacctgcacatgtaccccttaatctataataaaaaattgaaattgtttgtttttaaaaagacaagtggcattttactaattgctgcctgaatgtttcagtcaggaagagcaaaggagcttggaaagtttgagatccaagtagtctggaatgatcaaggggcttttaaatcagaaaagaggccttggaataaataattaaagaatgggcatcaagtgaagaggctgggatgggggaagggaaagagcaacaacatgaacaaaagtacagaaagagagtgcagcatggaatagatcatggcataaagttagatgacgtgtaggaggtatcaagtgttccttctctatcaactaccatcaggtcgaaggtgaatcagaaagtgtccctgttcccccatttctttaggtgctgtacaaggagatgtcatcagaaagcagacagacaggactatgtatcatggctytagaattctgatttattttactccatcctgtaccagtaccagttatctaaccttcccatccccaattttgtctgtaaaagaaaaataagcacaattttagagttatttggaaaataaaattttaaaaatgcacataaaggtccttatgatag

SEQ ID NO: 375860 - DNA, 622 bp, Homo sapiens
catgtaacaaacctgcacatgtaccccttaatctataataaaaaattgaaattgtttgtttttaaaaagacaagtggcattttactaattgctgcctgaatgtttcagtcaggaagagcaaaggagcttggaaagtttgagatccaagtagtctggaatgatcaaggggcttttaaatcagaaaagaggccttggaataaataattaaagaatgggcatcaagtgaagaggctgggatgggggaagggaaagagcaacaacatgaacaaaagtacagaaagagagtgcagcatggaatagatcatggcataaagttagatgacgtgtaggaggtatcaagtgttccttctctatcaactaccatcaggtcgaaggtgaatcagaaagtgtccctgttcccccatttctttaggtgctgtacaaggagatgtcatcagaaagcagacagacaggactatgtatcatggctttagaattctgatttattttactccatcctgtaccagtaccagttatctaaccttcccatccccaattttgtctgtaaaagaaaaataagcacaatyttagagttatttggaaaataaaattttaaaaatgcacataaaggtccttatgatag

SEQ ID NO: 375861 - DNA, 555 bp, Homo sapiens
aggtgctaattggagcagttatcttacttgggctcagggtcttcttcccaattcattccagttaattgcagaataggtgccttgcaagtatagtactgatgtgtccattttcttgctatctataggccaggcattgctcttagctcctacagtataaacagtatcaattcatatagtcactactttatctgtgaaagaaacaaagaatacaaagtatgatttcaattcataaaaagcaaagagtaaatttaaatttttaaatccccattttagagagcttaatctttaacagcatgaagtttatgatagaacttactattccaatattagataatgtggacaatgtgtcctattgaattatgtgtgatagctttttctgactgttttcaaggtataggcccattgttgtgtttttcatagttgacttgaaaagagagaaaaaaacacgagagtagagacctcataagaagttcttctarctgaagtgactcaaattctagcactttgggaggctgaagttggtggatcacctgaagttaggagttcaagatcagc

SEQ ID NO: 375862 - DNA, 590 bp, Homo sapiens
tttctctaccctacctgatagcctaagacaaaggacataatctcttgggacctctgtggccctggaaaatgcctgatcctccctctaycaccgcaactatgtgctactgaaggtgacaccttctggctggaagccagcaacataaaaccaatgcacttaacaaaaatacaaccaaggattctcacagagtccacatcactcccctgctacctccaccagggcaggtgctggtatccacagctgagagacctgaagacagatcacattacaggactctttgcagacactctccagtaccagccaggatactgctatctagatccagatgagaaataacaatcactgcagttcgattctcaggaagccccatccctaaagcaagaggtagagcaccacatcaagggagcactatgtgagacaaaagaatctgagcagcaacccttaatccctggattttctctctgacatagtctaccaaaatgagaaggaaccagaaaaataattctggtaatatgacaaaacaacgttctttaacaccaccagaagatcaccatggctcaccagcaatggatccaaaccaagaagatggc

SEQ ID NO: 375863 - DNA, 460 bp, Homo sapiens
tctaatatattatatatattagctatatgtatcttatatataatatattagaatatatatcagaatatataatataatatattgtatagaataatgtattagaatattaataaaaatggtacatagcaaaacttctagaatcctaatatagtgagatgttctaaaaaatttatagcattaaatgcttatgttatattgtagaagaagagctaaaatctaatgattcaaatattcatctcaagagtttgaaaaaaaaagacaaatcctcaaagagaaagaagaaataaatcaaaatgagataattttttaaaagacaagacatataytggagacaaaaattaaacaaaaaagtaaacgatgtaagattgggaagactaaaatgatgaaaatagaaaatgtatacattaatgaaaattttcgacagacaaaataaatataaataggaaacgtataaaaattg

SEQ ID NO: 375864 - DNA, 460 bp, Homo sapiens
tctaatatattatatatattagctatatgtatcttatatataatatattagaatatatatcagaatatataatataatatattgtatagaataatgtattagaatattaataaaaatggtacatagcaaaacttctagaatcctaatatagtgagatgttctaaaaaatttatagcattaaatgcttatgttatattgtagaagaagagctaaaatctaatgattcaaatattcatctcaagagtttgaaaaaaaaagacaaatcctcaaagagaaagaagaaataaatcaaaatgagataattttttaaaagacaagacatatattggagacaaaaattaaacaaaaaagtaaacgatgtaagattgggaagactaaaatgatgaaaatagaaaatgtatacattaatgaaaattttcracagacaaaataaatataaataggaaacgtataaaaattg

SEQ ID NO: 375865 - DNA, 586 bp, Homo sapiens
agcaaaattattttcagtagtaattgtgtcaaatagttaataattgtattttcttgatttattagtttcactatgaacaatttttaaataataaaatttagctttcaaatattattcaattccaatgaaatattttaggtataaacaaagattttcacttaacaaataagtatcacattttgttgtttatactctatttcactgtttttttagagataggagctggctccactacccaggtccccagcctcccaagtagctagtactacagggaaacaccaccatgccaggcttgtttgtttgtttgtttttgcaaagatgggggtctcattatgttgccaggttgttctcaaactcctgacctcagggaatgctcccatattggcctcccaaagcatttgaattacaggcatgagccattacacttcrccttatttcactgttttaaatattaaaaggaaaatcaccaagtggataaaaagaatgatagaactgaaggaaattaaatctcctcctcccctttacagtgttctttttttccaaatctttcacatagaactgtatgtgttaatagggtttgaagaga

SEQ ID NO: 375866 - DNA, 512 bp, Homo sapiens
aaatgttgctgaggagaaatccaagttgaacctgattttttttccccttacagatggcttgttcttctctgcctcaatgcctaaaggattatttatctgaagtcctttcattttacttggatatgtgtggttttcaaactttgtgtgttaaattttcctacaacagtgtgttctttcactcttcaaatcttttcatcttctttgatttattctttgttttttgacttacatatttwaaaaaatcttaatttgtttctcataattagagataccaaacacctatgatagagctcctttgtctttagtatcagtcattttctctcttttgttttttaaaagttttttcacttttctcatttctatctcatgtgtcccttcctttgtttccaacagtcttactttcttgagttcatttccatctttttctggtatctgaccaacttttctaaactcttgtatatttgctttgaatatctatttattaatgccatcaagtcctggcaatgaatttt

SEQ ID NO: 375867 - DNA, 549 bp, Homo sapiens
aagggggtactttaagaatgtgtgagacacaagaggtcataatttttaaaaatttaataattaaaggtgcaagcttcccaaaataattttcatgattaaaggataaaagatctaggcatgctcagtgatgaaaaaaaaaaagaaatgactgaggaggcagtattatatctgtcacggktagggaggacaggcctcaaaaaaccattagggtagccaaataagaaatgataaagttaagatacagtaaaacaagtttaagcaaaatattaagaaaaactgcatggtgaatctttaaaattgtatctaaaagcttgaaaaatgtgacaggggaaattctttattggtagggaaaatagagggatatgcaagttttaaagtaatgaacagaacaagatcacattaggagagcaggcccttacttacaaagacatgtgcattgaacataaaggttgcagtatttctatattaaaaaggcattgtgatctcctaggctctgctcatctctcctctctataagacaatcaatgccaggagcgaaattatatttaa

SEQ ID NO: 375868 - DNA, 545 bp, Homo sapiens
attcaattagtcacattaaaatctaattaaatttaatctaatattggccttcatcctgaaaatattatggctttgtatttgtacggaactcatcatcatcatcacggtcgtcaccaggaagcaataatgtggacagcatattataccaactagtgtacagtatagcatgatttatatgacatcaggaagaacaaacaaaaaaagcctagtttgtatcctaaactattagttggaaagatggacaagcagatcscaaatccagatatggtgaaataaacatttgcagtcatcacagagtattatttttttgcatgttgaattgaggatatacacaaaaatccatgcaaaagatgggactttaaagaggtttctagaggagaaaaagaggcttagaaaagcacaatgagtggaggagctcctctcctaaactagaacatcagagggaatctcacaaaaggctgtaaattaggataaactggtatgtgaagcccccagagtatgactgttactacgctaaaccctttaatacattatattattgaaaa

SEQ ID NO: 375869 - DNA, 464 bp, Homo sapiens
agtcccttcccaaaactaagtcccttctggttggggactgaaaactgcccttgtaaaattaatgaaagaccacagggttaggattatgggaggggcctgaattctgctaaaatgttagtgtagctaaatgataaccagttattttatcctagcttgcttttctataatttcttacttctcaggagtcatgtaaccagaggtcacaagatttgtgacttccccatttgctcctatagataacatcactatcttggtctttgagttatttttcagacttttgcattctagcaacggactgaaaccacccagatccatgactcataccaaggaamtgattcaaccagtccagtggcccctacccagaaactgactcgcacccaagaaattttttgaccaagatccatggtttcatccccaaccaattagcagcacccatttcctagccccctgcccgccaaattatc

SEQ ID NO: 375870 - DNA, 596 bp, Homo sapiens
cttttaaaataactatataatttatataacttattgatataactatatagctatatataggattttttgagaaacctcattgtaaccacaacacaaaaacctatatatagattaaaataaaacagcaatgaattaaaacatactaccagaaaaaaaaataacttaatcacaaaggaagacaataagaaaggaagagaggaatcgcaaaacaaccagaaaataagcaacaaaatgaaaacaacagcagtaagtccttacttactagtaacaacacaggatatatattagtcagggttctcttagagggacagaactatatataaagaacctattagttccctcattttctctctctctmtatatatatatgtgtgtgtgtgtatatatatatgtatgtatatatatgtgtatgtgtatatatatatgtatgtgtatatatgtatgtttatatatgtatgtgtatatatgtaagtatacatatatgtatactttatatatgtatatatgtaagtatacatataggtatactttatatatgtatatatgtatactatatatacacatatgtatactatatatacacatatgtatactat

SEQ ID NO: 375871 - DNA, 597 bp, Homo sapiens
tttgtatccttcaatccaatcaagttgacactcaatattaatcatcacaggatgtaaatagactcaattcttcaattaaaaggcatagagtggctgaatagataaaaaaagtaagacccaactacatactactttcaagaattccacttcacctatatagacacacacagactaaaagtgaaaaggtgaaaaaagatatttcatgcaactgaaaatcaaaaaagagcaggagtagctatacttagataagagaatacaaatcaaagactgtaaaaagagaaaagacagtgactgtaaaatgataaaggcgtcaacttagcaagagagtatataataattacaaatctctatgcacacaacaccagggctcccaagtatataaarcaaacattaaaaatttgaaggtagagatagactacaaaacaataatagtaggggactttaacaccctactctcggtaatgaacagttcattcaagcaaaaataatcaacaaagaaacatcagagttaaaactacacactagatctaatatgcctaactgaaattgatagaacattgcacccaattgctgcagaatacacattctttacatcag

SEQ ID NO: 375872 - DNA, 514 bp, Homo sapiens
caacataatgaaggccatatatgacaaaaccacaactagcattgtactggatgaggagaattgaaggcctttcttctaagatctggaaaaaggcaagcatgctcagtttcaccacttttatttaatatagtactggaagtactggccagagcatttagtcaagagaaagaaataagaaccatccaaattggaaagagaaaatcaaattarcgttgttcacagatgatatagtcttatacttagaaaaacctaaagaacccacacaaaaaatctcttagatcttcataatgaattcagtgaagttgcatgatccaaaatcaatgtacataaatcagtataatgtatataagccaacagtgaacaacctaaaaaaaatcaagaaagcaatcccatttataatatctacaaagaacaaaaaatacctaggaatccatttaaccaaagaaatgaaagatctatataaggaaaactatagaaacactgatgaaagaaattgaaaaagacaccaaaaatg

SEQ ID NO: 375873 - DNA, 595 bp, Homo sapiens
caatacttaccttctgagctgtgcttgtaactaagggtagccattcccagttctgaccaaacagaaatgatcaaagtaatcctgaataggacttccaaaggagcttttcaaaggaacagatttaatcaccatacactttcagtccttttctctccttcttttgtctgcctgtaacatggtcatgatatccaaaagtgaaacagccacatggcaaccaagagataagacaacatactcgacatagtgcataggaaaatgggaaaagactggatccttaacatcactgagccattgcatcaggcttggactggcagcctgctctcagttttcttattgtgtgagacaaataaagccctggttgttttaggcaatgcttgtatggttttgtttggggttttttcactcaaatgcattcttactaaagccctttgctcaagtttccagcaaacaaccaatgtaagcttggcaaagagcgtcttaccatcaaatttakaaaaaatccaaactctttatgtggccctgtatggtctggtccctgcctatctttctgaactcatcttctatcactttccactttgatacactacacattact

SEQ ID NO: 375874 - DNA, 456 bp, Homo sapiens
ttgcatgccccatatatttttgtttatatgggttatatatatgttgatatttatcatattagaagttaaaacagaatttttgaaacaaattaatatacaagagcaataaaactatcattgtacacttaagaaacgctactgggagcatcaggagtgctatcatacctcatatgaacctcatatgaatcttttgggttggttgtctttttaaaaatccacagtgctgtggtttgaatatgtttcccaaagtttatktattgaaaatttaattgccattataacagtattaagaggtagggcctttaagatgtgtttaggccataaggactctacccttgtgaagggattaatgccattattgtgaagtgggttaattatcttgggagtggtttcccgattaaaaaaaggatgagtttgacctgatttcctctgtatcacatgctcctttctcccttc

SEQ ID NO: 375875 - DNA, 572 bp, Homo sapiens
aaaagacaaatataaagtgttagaaacagctgatgatgagggcaaaacccaagagataaaatattaaactcaaactacatggcagtaaatgtcatgttagctgtttaagtaattgcatttaatgtcaaataaaatgattctactcaattatttgcatcatccagcccacacgatagcataatcttgtcatcgtctagtacattctgggaaatttagtttttctcatgcctccatccarttcaatcctcctcactgccagctggcttctaaccattgttctcagctcactggagatttgctactgtcccagactgaaattcccattgcctttattccaccaacactcttcacctaaggccattacatataacatatacaacatatgtttactgaggataattaaagtcgggaataactttatagtgaacattaaacaccagtatctctagcaattcatcggccattccctaccacaggttaattacattggccatttttctaggtaagccctgtcttttctccattctacagggcacatttctctccaggcttatatgcgtatgggtgcaaag

SEQ ID NO: 375876 - DNA, 578 bp, Homo sapiens
cacaaaatctgctgagaatacaaatttgagaaggtttaaaaatgactatttcaaaattgtaaaataataggtcaaaaccagcataataaaatgtattaggaatcaatgtgaagtgctacactgaggatcaaaaraaaaccgtcttggagttcagaatgtggtagatctggcacaagagcaatcaagtggggcagaaaagtaatctatgagcttctcttaattgcaatgtggctatgagtaaaaaaaaatttttgagacagaatctcactctggcacccaggctggggtgcagtggcacgatctccacccactgcaacctccgcctcccaaattcaagcaattctcttgcctcagccccccgagtagctgggattacaggcacccaccacaacacctggctaatttttgtatttttagtagagatggggtttcaccatgttggccaggctggtctcgaactcctgacctaactgatccaccccgcttggcctcccaaagtgctgggatgatacgtgtgagccaccaggcccagccggctatcggtcaaacttctggcagggcactaacatataagatgc

SEQ ID NO: 375877 - DNA, 578 bp, Homo sapiens
cacaaaatctgctgagaatacaaatttgagaaggtttaaaaatgactatttcaaaattgtaaaataataggtcaaaaccagcataataaaatgtattaggaatcaatgtgaagtgctacactgaggatcaaaaaaaaacygtcttggagttcagaatgtggtagatctggcacaagagcaatcaagtggggcagaaaagtaatctatgagcttctcttaattgcaatgtggctatgagtaaaaaaaaatttttgagacagaatctcactctggcacccaggctggggtgcagtggcacgatctccacccactgcaacctccgcctcccaaattcaagcaattctcttgcctcagccccccgagtagctgggattacaggcacccaccacaacacctggctaatttttgtatttttagtagagatggggtttcaccatgttggccaggctggtctcgaactcctgacctaactgatccaccccgcttggcctcccaaagtgctgggatgatacgtgtgagccaccaggcccagccggctatcggtcaaacttctggcagggcactaacatataagatgc

SEQ ID NO: 375878 - DNA, 464 bp, Homo sapiens
ctattctaagtaacatgatgaaatctcaagctgtcctgttccataccacttgggacaggagtcatcactttgtccagtgtagccatgctgtagaggccacccacccactaggcactcagcagctctctttgttatcagatcaactgttgcagtatctgagtgcttgtgttcatgtaacctttattttaattaataatgtccccaaagcacaagagtagtggtggtagcatgttgttatagttgttctatattattattaggtattgttaatctctcgatgtgcctaatttataaatcaaactttatcataggtatgtatgtatagaaaaaawatatagtatatatgggatttggtactatccatgattttaggcattcactgggggtcttgaaacatatccccatggaaaagacgaaactgttatagccagttagtatctgctgcacagaggaagcctattaaa

SEQ ID NO: 375879 - DNA, 588 bp, Homo sapiens
gtatgtatgtatagaaaaaatatatagtatatatgggatttggtactatccatgattttaggcattcactgggggtcttgaaacatatccccatggaaaagacgaaactgttatagccagttagtatctgctgcacagaggaagcctattaaacacacttctaatattctrtcatcttgaacttttataggtccctggatttaatgattaagattttgccacactgaaaattgtggcaatggttgtaacaattccaaattaaattagtgcaaacatagtaaagagaatcgagaagagagctaactagctaatgaataattttatgaagtgtcaaaagcagctgacaagaaaatagtaatattaattaataccaactggcttcttaaaacatatctagcagcccctcttgggatacgtgattactgggtcacagtccacagattcatgtggcatttggagtgagtcctgcatctctcaacattctggactgtgaagaaccctcagatggagcaatgatctcactcagcgtaaatcgtgccaagccttgggtaactcccccatcctgtactctctggagagatgccacct

SEQ ID NO: 375880 - DNA, 628 bp, Homo sapiens
tgctatggtgtaaatgtgatattctttccaaaattcatgttgaaactgaatctccattgtgggtatattaagaattgaggcctttagggaaatgattaagtcatgagggctctgaccttataaatagattaatgcccttataaaagaagcttcagagagtgttcacctctcttactcktccatcttccaccatgtgagagtgccaatgtgagaagacgctatcaatgaaaaaggccctcactagatactgaaccagctggttccttgaccttggaaaaatagatttctccatgagacaaatctttgcttggtgcagcccatgccacagctttcaccaattagagtagggtgcctgaggcttttcagtctttaaaaattactaagtctcaggtattttgttacagcagtacaaatggactaagacaacaaatctgtcacctctttggttacattaataaaattagaaaggaaagaagagacattacaatggatgcctcagtaataaaaattttaaaagatcacaagggactattatgaacaattatatgccaatatattgtataagtgaaaatggatacaactgtggaaatatacaacctatcaaggctgaatcaaaaagaaacagaaa

SEQ ID NO: 375881 - DNA, 568 bp, Homo sapiens
agtaaaaatttaattagttgcacaaacagcgtagtataaggatagtgaccttacagcaactgatttgttgcctggtagccagtgccaattcagggtttgaaagttggcataaagttgtcaaaacatatttatgggatattcaaaaatcaaatgcatatttrgagactctgtaccagaaccttttaccaattgccttctcttagggaatgaatagctgcctgctcatttaatactggttctatctgatttatttttcagttttgactctccaaacctattcttacattttatatttagtccattattcattttgaattttttgtataaggtttaggttgatgttcactttttggtctacagatatccatttgttctagtatcatttattgaaaaggcttactttcattgaattttgcttctttgtcaaaacccagcatattggtgttttgacaatttctgggtgctctactctgttttattgacctatttgtctatgccaatacaacacagccttagtcactgtagctatagagtaaatcttgaaattggatatactttaattcttccc

SEQ ID NO: 375882 - DNA, 568 bp, Homo sapiens
agtaaaaatttaattagttgcacaaacagcgtagtataaggatagtgaccttacagcaactgatttgttgcctggtagccagtgccaattcagggtttgaaagttggcataaagttgtcaaaacatatttatgggatattcaaaaatcaaatgcatatttggagactctgtaccagaaccttttaccaattgccttctcttagggaatgaatagctgcctgctcatttaatactggttctatctgatttatttttcagttttgactctccaaacctattcttacattttatatttagtccattattcattttgaattttttgtataaggtttaggttgatgttcactttttggtctacagatatccatttgttctagtatcatttattgaaaaggcttactttcattgaattttgcttctttgtcaaaacccagcatattggtgttttgacaatttctgggtgytctactctgttttattgacctatttgtctatgccaatacaacacagccttagtcactgtagctatagagtaaatcttgaaattggatatactttaattcttccc

SEQ ID NO: 375883 - DNA, 181 bp, Homo sapiens
gtagcaacatttagtactggtgaccacgctctcctcctctcagtggttgccatgatttgagcctctccttargaattctgttgcctctgctcacctcatatatcaggctccctcttggtccctcctcttctcacctctgcactcactcatgcacactcatcatgctcattgctttaactgc

SEQ ID NO: 375884 - DNA, 343 bp, Homo sapiens
taattctttgcatattttgacaatcaaagtttctatttcatttggcagaatatcatagctcattttggatgtgaatgtatatattatgtgtgtaccaaaaccaactccaattatatttctccaagctttattaatttagcaaagccatcgtaacttgtcattgtgcactaccaaaattcatattaacatcaaaaaacaaataatttaatcttcaacattgaatttttaagctgatgttacatgcatattcacaatactatctgatgtttaattttkacagactaaagacccagaagctttaatttcagtccaagaattagatgaaaaataaaaatcaaacact

SEQ ID NO: 375885 - DNA, 564 bp, Homo sapiens
atgtgcatgctgtcttccttgtcaaaagccatgtttttactaataggtgaaattttgagctttgcagttatatctacttatattacttcccattgctcccttatgtgaatgctgtgcttcaaccaaacatgccatggatgttctcttcattcccatacccacttctcccttctccttcttatttgtttgttttttttttggtcattkttttcccctttcctctttttaccactcactgacttgttccacaaccatgaatgaagctcttaccatgggcaagtcattgtgtaggtcctgaagacagaaaaacaactataaatcagttacaccccctccaggttctagactagtaagtggtactaacaagtgaaaaaatcatgttactaggataaatgacataaccaagttctgttcaaagagcttttagaaatgcagaggtagtaaccaacactgattggtagtgtcagaaagagtcctactgagaatatgacccatcagctgaatgttgaaaccaattttttttcagacaaacaagaggaaagatcattccagtcagaggaaaca

SEQ ID NO: 375886 - DNA, 563 bp, Homo sapiens
cagaaaaacaactataaatcagttacaccccctccaggttctagactagtaagtggtactaacaagtgaaaaaatcatgttactaggataaatgacataaccaagttctgttcaaagagcttttagaaatgcagaggtagtaaccaacactgattggtagtgtcagaaagagtcctactgagaatatgacccatcagctgaatgttgaaaccaattttttttcagacaaacaagaggaaagatcattccagtcagaggaaacaaactgcaattatgagacattatggcaaaattcrgaaattactagatataagaaaaactggagataaagggagatgagaaagaaaaggtaggcagttgtgcagatgatagaacttgtattctctaattctgtggtagatgaaggagaggcagggaagtattgacatagagaatgacacaaccttgtttgtaatttaggaatattactctggctccagtttggaggatgaaaggtgactgataaactggaggctggagaccaataggattccattgcaccagttcgcccaaaagatatatgg

SEQ ID NO: 375887 - DNA, 640 bp, Homo sapiens
ttaatggcagagagataggcatagagctttggaatagaatggagcatccagactcccccactcatggtcaattgatttccacaaagttttcaaggcaatttaagggggggaaaattgcaatcctttcaataagtggttctggaacaatggatagctatacgcaaaataataaatacaatttaaaaattagctttagcttgccgtattaaaaagttaactccagatggatcacagatctaaatgtaagtggtaaactctaaaacctctaaaaaaaatgttgagaaaaatcacagtggctttgagtttggtaaaaattttttaaaggaaccaaatcaataaattagacttcaataaaagtaaaaaccttactcctcagaaaacattgataaaaatggaaataaaagccagcaataaggataaagtatttgtaaacaatatacctgacaaagcctcttgctaaagcttgagtatttgtcccctccacatctcatgatgaaatgtgatccctaatggttttagatggggcagagtgggaaatgtttggatcatgggggtggatccctcatgaatggtttggtgcyctcctcacagtaatgagttaacaggagaggtggttgttgaaagagcctggtacatcctc

SEQ ID NO: 375888 - DNA, 485 bp, Homo sapiens
ttcattacaaacctcccaataattgaacaactgcaattcattatgagcatgctgtaatccagggcttcatgaagaaagtatctgaatgataggaagcagttgaaacaaatcttctgaattcctttacatttctaaaagtaaacaggagactctctggatatggttaagatacagaaaatcagatggagcctaggtcctgagttctttaatattcattgcaataaaaactttggcacactayctaaacttctaaaatacagagaattatgttttaaaactgcaagaccttccaagaggaaatattgaagtacaaatgtctatcaaatactggtcaaataatttcactctaaatgataattcatgttgatagttccatattaaaaatcatgttacaagcctgtaacttcctccccttgaaaacatataattagtcatgctacattggaatcagctttagaaaatgatctcttaccaccagaattatt

SEQ ID NO: 375889 - DNA, 504 bp, Homo sapiens
aagctctctgtattgtgagtgaagcttgactcattgttgactgtattcattgtagaactctccaccttacaggtgtcgcatgctatttcttcacaagtaccatttgatcttcaccctttatttgaaaaaaaagaaaaattagcctatgcaatactaggaaaccattaaccttgcaatattgccagttctccccaaacattcttctcttgaaatatggtgcattttcccccttgatgcmcagtgaattttaattttctataacatgcaagatgtataggaagaaaattcttctgtaacattgacagtatgggacacgttaaagccaagtggcctttatattttcatttttgggtaatgccagttgtgtcatcaccacagttagaatctttacgattactttgaggaagttcttcattccactgctcctttagatggccagggttcttctgctgtagcttggcaggttttcctacctttgaaaaaggaacctgattcaacagcctc

SEQ ID NO: 375890 - DNA, 504 bp, Homo sapiens
aagctctctgtattgtgagtgaagcttgactcattgttgactgtattcattgtagaactctccaccttacaggtgtcgcatgctatttcttcacaagtaccatttgatcttcaccctttatttgaaaaaaaagaaaaattagcctatgcaatactaggaaaccattaaccttgcaatattgccagttctccccaaacattcttctcttgaaatatggtgcattttcccccttgatgcccagtgaattttaattttctataacatgcaagatgtataggaagaaaattcttctgtaacattgacagtatgggacacgttaaagccaagtggcctttatattttcatttttgggtaatgccagttgtgtcatcaccacagttagaatctttacgattactttgaggaagttcttcattccactgctcctttagayggccagggttcttctgctgtagcttggcaggttttcctacctttgaaaaaggaacctgattcaacagcctc

SEQ ID NO: 375891 - DNA, 568 bp, Homo sapiens
ttaaaaaacataaaatttcccctttacaaccaactctccagatacctagcatgttgatatttagattctaaaatttatatcaaaaaacatcattgaaacagatgctggtaatatcattgactgagaatttgcattaaagatgactcttgggtgtgcactcaagcgttcatatgtccattaatagctacttgtggggatattatgacctgtttagaattcttattttttctcaaagtttttaaggcataagagaagattaatagctgctagatgaaaccaaaaggataagcagcaatgcagtgaagagtgttgtgaaatacacacatttgtcatgactcccaagtggcaaataaaatcaaagttgaaaatcaatgtctattgatcaatctattcrttttcatgcaagttctataaactatgtagtactgatgttagtattttattggcatatagaacagacataaactttccttttctcttgagtctttctgctcataaagaatttaaaataatagcatgacatacataaagtaagatttgttcttaggtttcggggaagagcttataa

SEQ ID NO: 375892 - DNA, 568 bp, Homo sapiens
ttaaaaaacataaaatttcccctttacaaccaactctccagatacctagcatgttgatatttagattctaaaatttatatcaaaaaacatcattgaaacagatgctggtaatatcattgactgagaatttgcattaaagatgactcttgggtgtgcactcaagcgttcatatgtccattaatagctacttgtggggatattatgacctgtttagaattcttattttttctcaaagtttttaaggcataagagaagattaatagctgctagatgaaaccaaaaggataagcagcaatgcagtgaagagtgttgtgaaatacacacatttgtcatgactcccaagtggcaaataaaatcaaagttgaaaatcaatgtctattgatcaatctattcgttttcatgcaagttctataaactatgtagtactgaygttagtattttattggcatatagaacagacataaactttccttttctcttgagtctttctgctcataaagaatttaaaataatagcatgacatacataaagtaagatttgttcttaggtttcggggaagagcttataa

SEQ ID NO: 375893 - DNA, 442 bp, Homo sapiens
aattaattataatagcagtatataacatggtgaatccttgtcttgaaaatgtagtcaagagattaggctgaactggggctagtttttcattgaattggaacttaaaagacatactagagaaaagcaaaagcaaaagaaagtcatactgggtggacaaaagggcaagggctagacctaaagagaataaaaacaagcatttgaaaatcagtgaatgaaagacactctacaaaagaacttgctctattttaggtagtacctttcaaagtcacctttcaattttgaaatatggtaaactcaacaattgactataactrttagtaactaaaattattatatctcaagtattttttgaaaaatagttcaaattatcaaaattttgaattctttggagactaaaaaaattaataagttgtcaattgacttcatgcacaaaatgtatgtg

SEQ ID NO: 375894 - DNA, 493 bp, Homo sapiens
tatctgagacagatctcaatcaatttggagagtttattttgccaaggttwaggatgcctcctgacacaacctcaggggtcttgaggacatgcacccaaggtaatcagggtacaacttgcttttatgttttaggaagacatgaaacaataataaatatgtgtaagatatatattggtttggtgttggtggggcttctggattccagatagataagcacaaaatgttgcattcttttgagtctttgatcagcttttcaccaaatgcacaatttagactggctcagtgaatcctcattgttacataaacagtagggcagaggaagcaatggaatgtgcatttgtctcaggtgagcagagggatgactttctgtccagtagctgtgaagataagctgtcagtttacattgccagggtgaaactcaactgttttgtggttaagatcttgaggcccacaaggaatttctctgttggcaaattatgagggaggtatggag

SEQ ID NO: 375895 - DNA, 619 bp, Homo sapiens
ggtggcgtgggaacctagagtgggagagattaagctgaaggaagattttgtggtaaggggtgatcttgtggggttgttagaagaaacatttattgtgtagaattattggtgatggcctggataccgttttgtatgaattgaaaaactaaatggartaagagaaggagaaaaacaggtataaaaggtctaagaattgggacgacccaggacatctgattagagagtgcttaaggagattcagcatagtcctgccagcagagattatttatttacttcaagagttaagagtggcagtttgggaatagtaccaggagatatcagctgtgatggcttgcagaaacagtgtaaaccggcagtgtaaacaagagcagggcatgtatgagtagttgagaacggtgaataggcgtatgactagacagaacatagtagggatgacaagtttttgggggcacagtctaagttgttctggtgtctggaatgagactggggcctaataaaaaggagcatctatacaggagctcaaatgggctgtaccctgtagcattctgaggacaggcctgacttctgagaagggaaagtggtaaaagtattgtccagtcttttttaagttggtggctga

SEQ ID NO: 375896 - DNA, 447 bp, Homo sapiens
acaatcaggctcacaaacttgttattgttgatgttaaaagccaatgacctaaagtctcaactgggaaaatagatgatatataagctgaaagatgaagaattctttttaatggaaggccatgatccatcgtttaccacaaagcccaaacatgaaacaagcacacctgttgacattcaacacggtactcaacaagcccaagagcaaacacttgtttataatctagcagctattttatcaaactgaaaacacattttacaatacggtatcagttatgtaaaactttccagtgtttaaagaagtaacgagaaaacwtaagtgggtagggggtagttattttgaaatatacttggaggttttgataatgggattgtttctcatattctcagctttctttcaaaactgctacttgcaaagtattcctatgtctatttccttagagctatttgg

SEQ ID NO: 375897 - DNA, 578 bp, Homo sapiens
gcgttgataactagacaacagttttctggtcagagttgtgaaaactggaaaagtaaatactgttcctccacgcatttaatgaaggtgacaccatctcctcatatttctgtttcttcctttttcatagatgtcagcagcaaggttggctgtccataaattttagtttctaaaacacagagcrcagcctttaccagggaccaaagtgagtaatgtttccttgggttttaaagcttcccagtgtggactataaaactacaattataaatatatgcttttatagcaacttattttttgacaattgcttagggaataacccacattgtaaaagcagcagcatattttgctattcattcatgttattaatttaacatgatttaattaacgtttataaagttcctacatatctgtcactacactaagccataaatctacagaaattagaggttagaccttgtctgttcagtaaagtcagagatggccttcctgagaaaactacttttaacagacctgaaggatgtgcaggatttaggtacactacaaagtagaaagaacattccccgcagtgaggccatcatgtg

SEQ ID NO: 375898 - DNA, 536 bp, Homo sapiens
atgtacttttaactaattgcataaggaaaagcttcaatgtctttttgggggaaagcaagttaagagtatgttgaatttaacagtttaatggtaacatgttatatatatgtaacatgctgccatttatatatatatatacacacacgtatacacacacagccttttgtagatctgagttctgcatgtggagattcaacctattattgataaaaatatattttaaaaaatttgcatctgtactaaacatgtaccaacatttttttcttgtcattattctctgaacgatacagwataacaacgatttacatagaatttacatcgcattaggtattttaagtaatctagagatgatttaaagtatacaggaagatgtgcataggttatatgcaaacaatataccttttattttgggaacttcagcatccttagattttggcatgcatgagagggcaggggagtcctggagccaatctttcatgaatatcgggggtcaactgtatgtgtgtgtgtaaacatatatatatatagatagatag

SEQ ID NO: 375899 - DNA, 577 bp, Homo sapiens
aatcaaatgtccatcaatgaatgaaatgattataaaaatgtggtatatatacactatgaaatagtattctgccttaaaaaagaagaaaattatgcyatttgcaagacatggatggtattgcagaacattatactaaatgagataagctggcacaataagacagacagcacaagttctcacttacatctaaacaatctaaaacaatcaaactcatagaagcagagagtacaatagtgattacagagacagaggcgtgaccaggggaatgaggacaagatggtcaaagtgtaccatatctcagttacatgggaggaatttgtttagtttttcttttttcttttttttttttagttctattgtacagtgtgcaataattaaactttaatgtgaatttccaaatgacctacacttggtttatgaactgcctataaatatggagatattttctattaaagaaaacatgaaatatcagttcacatgcctaaaaaggaacagtagttttgcatctcacataatagccctttttctataaataccaaagtatgtatggagtgtttggaaagcatttaatactatg

SEQ ID NO: 375900 - DNA, 577 bp, Homo sapiens
aatcaaatgtccatcaatgaatgaaatgattataaaaatgtggtatatatacactatgaaatagtattctgccttaaaaaagaagaaaattatgctatttgcaagacatggatggtattgcagaacattatactaaatgagataagctggcacaataagacagacagcacaagttctcacttacatctaaacaatctaaaacaatcaaactcatagaagcagagagtacaatagtgattacagagacagaggcgtgaccaggggaatgaggacaagatggtcaaagtgtaccatatctcagttacatgggaggaatttgtttagtttttcttttttcttttttttttttagttctattgtacagtgtgcaataattaaactttaatgtgaatttccaaatgacctacacttggtttatgaactgcctataaatatggagatattttctattaaagaaaacatgaaatatcagttcacrtgcctaaaaaggaacagtagttttgcatctcacataatagccctttttctataaataccaaagtatgtatggagtgtttggaaagcatttaatactatg

SEQ ID NO: 375901 - DNA, 587 bp, Homo sapiens
ggacaaattttgtggagctccttttgcattagaatagaattcagacccacctgctccactgtacaaagccaaagctggccttatataagcttgtctcttaggsgcacagtgctctactgtattacagtgaagatgaaagaaagtatggcagattaaacattgtttcaagcatattctaatcaaacactgaaagtttttgtatgatatcaaaaagaatatattaaatgaaggtaaaatgtcagctaattagtatatatcatgaacaatgaaaagccaaaattatataagaataaaatagccacatttaaattacagttggtgatacacagcacaggctggcatacttgacatgggttttacatttttttcatccaataactatctatgtgcacccactgaaatatattgtatagaaaaagtaattgaaatataattttgtagatcttgatactttatagaaaagaagaaggcttatgtaattctgtagctcaaatagatattttaagtcatgcaaacaaagttttctgggtatgccttattatttgaaattatcacaatttcaaaggcaagtgtctgaggttacaatt

SEQ ID NO: 375902 - DNA, 585 bp, Homo sapiens
tattctcgtgatagtgagttcttatgatatgtgatggcttaaaagtgtacrgcacatccccctttgctcactctctctcctgtcaccatgtgtggaaggtgcttgcttctccttccccttctgctatgattgtaagtttcgtgaggcctccctgtcatgctgttaagcctgtggaactgtgagtcaattaaaccttttttcataaattacacagtctcaggtactatttaacagcagtgtgaaaatggactaatacagctagaattttatttattgatatgtatgttggtagctagtaaactaaattcaaccagccattattaggtatgaatgatatacatggatatatcttagatactgaaagggaagttaaaattaagaggctgcttcaagttgattagagtaaacttgaaaagcctgatatgtagaactagtattttaatatggcgctgtcttggaatagtaaactaatatagtcaatgttgattcatggtcactttcttgtctttgagggaaaagggtgtattcgtatcttttttatagggaactgaaataaacatttccaattttgagtgcattttagat

SEQ ID NO: 375903 - DNA, 552 bp, Homo sapiens
tatacagtttagaaacatcaaggtcagtatctcattagtcataacaatgtgataggcactatcattttatttacttacaattgcaggtgtaaatagtttaaataaaatttccaatatcacaaattcaattagtagcagagtttaccaaaactcatagggcttaaagcaaaatttkttattattatacttcattgttttgggattaagagttggaatagggcatactggagaaaatgtgtctttacctaaaatgttcagggtatcagtgctattaattgaatggctgaggactggagcagctggaaggtggctgaataccccttgctttctacacatgaccttttcaagtggctttccaagaggtcagtcttggctttttacagtacaatagttatatttcttaactggagttgagtaatccaagagaaagaatctgtcaactgccagtcctctttaaagctaaacttggaaatggcataacctcattttccactgcattttatttgtggaagtactcacgggctagaccagagtcaaggagaggatacaaaa

SEQ ID NO: 375904 - DNA, 619 bp, Homo sapiens
ttcctttcatccctcagaacttttaataatgccattgtgaactatttagttaagttctttataaatgattgtataaacaatgaaaattattgttgtatcagcaatataatatgtaataacactcaaccaattaagacaaatgatattgtaggtattataattgtcttgtacagaattatattgtgcagttgcaagtcatcaatagatatatgacattaatagtttaattattctaagataataacaaataattatgatcaaagtgtgaaagcaatgcatgcaaagaaacaatgggaattgyagttggaatcctggctcttccagtttgtcacctaaccttgaaaaatcagttagcctctttaagtatcaattttatcagctgtaaattgaagatactgttttcatgttgaagcgtcatcgtaagaattaatcaaaatgatgtattcaaataacatattagaccatcaatagtcagttattatttttataattattagtcatcattaatggcatggtagaaattgaaccagtaagcaaattgtttttctcacaagtatttattttggagcatctgaaagagggtaactctgttacatgatgtttaaaaaaggaacatatg

SEQ ID NO: 375905 - DNA, 585 bp, Homo sapiens
tattctcgtgatagtgagttcttatgatatgtgatggcttaaaagtgtacggcacatccccctttgctcactctctctcctgtcaccatgtgtggaaggtgcttgcttctccttccccttctgctatgattgtaagtttcgtgaggcctccctgtcatgctgttaagcctgtggaactgtgagtcaattaaaccttttttcataaattacacagtctcaggtactatttaacagcagtgtgaaaatggactaatacagctagaattttatttattgatatgtatgttggtagctagtaaactaaattcaaccagccattattaggtatgaatgatatacatggatatatcttagatactgaaagggaagttaaaattaagaggctgcttcaagttgattagagtaaacttgaaaagcctgatatgtagaactagtrttttaatatggcgctgtcttggaatagtaaactaatatagtcaatgttgattcatggtcactttcttgtctttgagggaaaagggtgtattcgtatcttttttatagggaactgaaataaacatttccaattttgagtgcattttagat

SEQ ID NO: 375906 - DNA, 452 bp, Homo sapiens
taatcatttttaacaaaaatttcacgtctactccaaataccacctacttgcacctggcagggttgagaagcttactctagaacagaaaatatgaattataggttgtaagggaagaaacatctgcactgagcatggttagggttaacttttgcctgccttaccagtagtaatatatctaggtcagagcagaggcaacagaatgctgccttaagtcaaataactcacttctttctcttttagatacattgggtgaaggacttgaatgttttcaccacttgtattcacaacagagtgctgacaggaaacaacacacaaagagtgaactgactatagggagatgaatggctgcttaactcactgcctagtccctcagtcctgtctacaaaggmctgaaagctggcatgacaaagactaatagtagattcaggatgaatctcctctggtccacatga

SEQ ID NO: 375907 - DNA, 505 bp, Homo sapiens
tttgaaatgtgtgtgtgcttgcatgtgtgtgtgttttaatattaacactctgcaaatacattatctcccttttaataaataaaatttgaaatatatgtgtgttactacatgcatatctatagactataaaataaatggatacaaaacttgcccttaacaatttatgctgtttaagctaatattatattaacgcaataatattatgatatttttcctctctctttgaacatagcaaacattttctcttccatcaatgactgtttccctttggttgtttttgcaatgatgaaataaaatatcaacacatttcctgaaaaataggcaatatctcaataaaatttactgttagcaaatgatgcccagctttgtatttggcatttgtcccatatgagaaaaaagtcaattgcagaataatatggacagtcttttcaacagtatgacagactcgcaagccatatatatatayacacacacacacacacacacacagacatacacacacact

SEQ ID NO: 375908 - DNA, 500 bp, Homo sapiens
ttcatggaccattattttataaatcagatttctaacatacttaggacctaagttatgtcaatacctccaatcaactactattatcctgttttcatatttgcaatatatttataatagcttcttagtagaggtagctaaaattataattaaaagcaagactgtgcgtttgtcacaggagaagaatgttaaaagatgctgttactattaggattattaataatgctattattttactattattatattcttcaaagcagaggtgtccaatctttttgcttccctgggccacattcgaggaagaaacattctcttgggccacacataatatatactaacaatagctgacgagcaaaaaaaaaaaaaaaaaaaactcacagtgtcttaagaaagtctacccactatgtgttgggctgcattcaaagctgtcctggatcrcatgcagcccatgggccacgggttgaacaagcttgctttaaagtaatagcatagtgcctaataaa

SEQ ID NO: 375909 - DNA, 404 bp, Homo sapiens
gggtctgaaggaaaatgttgttcctgtttggcaacaaattacaaacctgtactttggctaggagaaaaattcatgtacgtttcctgtgatccagaaatgatccatgggagaaagaatctacctgaagcagctttatcttacgagtaagaagawcccctagagaggagcttgaatgcccatatatagtgcttgcatagagcggacttactgaaatccaaaagttgagggaggttcgggcaagcaaaattaaataccatgcctctgcttttgatgaaaccattaacagtatcctctagggaaataatcaaagcaagcagcttattggcccagaaagcaaataatatcttaaaatgtcattgtcaaggaaaactaaacttcatgtactcttactgcctctccaagtc

SEQ ID NO: 375910 - DNA, 404 bp, Homo sapiens
gggtctgaaggaaaatgttgttcctgtttggcaacaaattacaaacctgtactttggctaggagaaaaattcatgtacgtttcctgtgatccagaaatgatccatgggagaaagaatctacctgaagcagctttatcttacgagtaagaagaacccctagagaggagcttgaatgcccatawatagtgcttgcatagagcggacttactgaaatccaaaagttgagggaggttcgggcaagcaaaattaaataccatgcctctgcttttgatgaaaccattaacagtatcctctagggaaataatcaaagcaagcagcttattggcccagaaagcaaataatatcttaaaatgtcattgtcaaggaaaactaaacttcatgtactcttactgcctctccaagtc

SEQ ID NO: 375911 - DNA, 464 bp, Homo sapiens
gactcagggaggaattatgtcatgcttaaagaaaacctcagaaagtacaattccttcttcctctggacattacttgagggtatgaggctgtaatcttccccaggaaccagtcctaggacaaaggctggacatagcagagggtggacctgacagaatcactaaggatcggagccagggtaatgggattaagccaactctgaaacatctctaacaaccattatttcagttttgcraaatctgtacatgtttttgcttctacttttgtttgtaagaatttggtttgttgggtggttatgtgtttgtttttctaacttgtggttaaaagcgttttagcaggcatggaagttttcattgcatgctttaccattacctacaaataattcattattaaaataatattgcaacaacaaataacaaaatggagaaacataaatttcacttttggatggttacaagctaaactg

SEQ ID NO: 375912 - DNA, 532 bp, Homo sapiens
ttacttttcatgtttattgatttttgcagtcaatatcattattaactagtggagaaaaagatttatcatgaagttccaaaatacagagttaaaggaaggagaaagttcagttagttctctatttaaggaaacattatactcacgagctattatcaaaaaaacaaagaattgatagtcaatgttttttaaaaaaagttttctacagtcatgaaaaggtatagattgtgtaaaagaaggttgtgtttatttttaaaaattaatattattattgtgttaatataaaaattttaaatgaagcaagaatgagtaaaacattttttscacttgagtataccaatttatattttctagtattgctcttcagtttcctgaagccctctgacaacctaatagcagtgttactaataacatcgcaaactctttgtgtaaactccacaaagacaggaaccttgtttatctttctcttatcttcacagtgcctggcatatcatagaaactcaataaatattcttgaatgaaggaagaaccagca

SEQ ID NO: 375913 - DNA, 544 bp, Homo sapiens
tcagtaacaagccatataatcatagaattgcacatagaagttgtgccagctacaatatcaygggtggaaagattgatttctattttacgtggcttctcaagaccacgtttattctcaaatgtagaaaatgtactcttgccaagtcaaggtaatgtaagtatttctaataaaaaatgcaggctcagcctggcgcagcggctcatgcctgtaatcccagcactttgggaggccaaggcaggtggatcacctgaggtcaggagtttgagaccaacttggccaacatggtggaaccccgtctctactaaaaatacaaaagttagcctggcatggtggcaggtgcctgtaatcccagctactcaggaggctgaggtaggagaattgcttgaacccaggaggcagaggttgcagtgagctgagatcgcaccattgcactacagccagggtgacaagagcaaaactctgtctaaaaagaaaaagaagaaggaaaaagaaaaaaaaaatgcaggctctgtggagtaaattctcagtcaaatataggtatttt

SEQ ID NO: 375914 - DNA, 412 bp, Homo sapiens
gactctgaaaaaagagtcctcacatataatttgagaagcactgccttagagggcttctagctctgttcttatatcccggtcatggaaatggaacattcacagttttatattatttcagtagagcctcaargcagagaggatacaggacatgtaccacacttcccagggaagagctcgggtatattgtgagcttatttagagatgggcttgaacacgcccttgaagacctatgcacaccttcacatccttcatagtaaccacaagctccagatgggctgtttaccccaacccattcaccagccagatgagagccaagttcagagccggagctggccaccagaggaatccaagcattagtgcagaccacggagtgcatgagctggtttaccaggtaaccggtaaaaagcaaacg

SEQ ID NO: 375915 - DNA, 501 bp, Homo sapiens
acctatgactgctgagatattaaaaaacaaaaaactggactctgaaaaaagagtcctcacatataatttgagaagcactgccttagagggcttctagctctgttcttatatcccggtcatggaaatggaacattcacagttttatattatttcagtagagcctcaaggcagagaggatacaggacatgtaccacacttcccagggaagagctcgggtatattgtgagcttatttagagatgggcttgaacacgcccttgaagacctatgcacaccttcacatccttcatagtaaccacaagctccagatgggctgtttaccccaamccattcaccagccagatgagagccaagttcagagccggagctggccaccagaggaatccaagcattagtgcagaccacggagtgcatgagctggtttaccaggtaaccggtaaaaagcaaacggctgcagtgcagaccaagacaagatagggtggttcgtctcatggacgcttgt

SEQ ID NO: 375916 - DNA, 559 bp, Homo sapiens
gaggcaagacctttaaattttatcttttgaagttatgtaaatttttataacaaataaataatatatatccatgggccaaacaaaaactaaagtaatcacaaattatgagtttcaaaatcaaagcacaattgtatatacaraacaaaatccaaaattaataagaatattctaaaatattttcatagttaagcaaaatgttattggttcatgttgagaaataaatgttggcttctagagtccaggaggctttctaaagttagaaatctttctttctaacgctacactttaacatatctagggatacttcatgagaaatctaatattcatacttaatttttctattaatattataattaatgtttgataatggtaactccaatatactgcaataactttagatattagaacaattcttatcacaaacatatttttataacagggttttcaatcaagggtcaaagaatcacaattcaaatagaaataatttaatgagcacattttatattttacatactttatttacatgaattaaacatgcaaagtgtcttagtttatttag

SEQ ID NO: 375917 - DNA, 363 bp, Homo sapiens
atgaacatgatggctctacttagaaaatattacttgacttggccaggtgcagtgcctgtaatctcagtactttgggaggccgaggcagctggatcatttgaggtcaggaatttgaaaccagcctggatagcatggtgaaaccccatctttactaaaaatacraaaattagcggggcaatttgatgggtgcctgtaatcccagctactcaggaggctgaggcgggagaatagcttgagcctgggaggcagagattgcagtgagcagagattgagccattgcactctagcctcagtgacagagcgagactctgtctcaatttaaaaaaaaaaaaaggaataaataaataaagaaaaaagaaaaca

SEQ ID NO: 375918 - DNA, 559 bp, Homo sapiens
gaggcaagacctttaaattttatcttttgaagttatgtaaatttttataacaaataaataatatatatccatgggccaaacaaaaactaaagtaatcacaaattatgagtttcaaaatcaaagcacaattgtatatacaaaacaaaatccaaaattaataagaatattctaaaatattttcatagttaagcaaaatgttattggttcatgttgagaaataaatgttggcttctagagtccaggaggctttctaaagttagaaatctttctttctaacgctacactttaacatatctagggatacttcatgagaaatctaatattcatacttaatttttctattaatattataattaatgtttgataatggtaactccaatatactgcaataactttagatattagaayaattcttatcacaaacatatttttataacagggttttcaatcaagggtcaaagaatcacaattcaaatagaaataatttaatgagcacattttatattttacatactttatttacatgaattaaacatgcaaagtgtcttagtttatttag

SEQ ID NO: 375919 - DNA, 609 bp, Homo sapiens
tttcattcaattgcttgtcttttctctgtgaagcatgagtcaggttataagttgaaaatacaggtaaaggttagggagaaagaagtggttcacataagagcatgcaagtggattagaagagagcaaaaacattttggaaaaaacaaactagcaaggtttagtagggtcattaggcaatgatagaggcccaaatgtcatgttctgttaaaatgataagtgtagtgttcagatgcaatagggtgacactatctgtagatgattccagaggactcaggctctgccattctacasggaaatcttgagatgagttcatgtatcactaaaactcagattagctcttcactaatcctgaggccaagcagcaggtcttccactccataacaggaaattaaaaaaaaaaaaaaagtccaggtcagacataattacaagattcagtaaagatataagctacactatagcctcacaagcaaagaaatagaaacttagctgctttgagatttatcttactaaagcaaagaaagtcatgaaaagacatggcggaaatataaatgcatattgctaagagaaagaaggcaatctgaaaaagttacatactatgtgatttggaaa

SEQ ID NO: 375920 - DNA, 609 bp, Homo sapiens
tttcattcaattgcttgtcttttctctgtgaagcatgagtcaggttataagttgaaaatacaggtaaaggttagggagaaagaagtggttcacataagagcatgcaagtggattagaagagagcaaaaacattttggaaaaaacaaactagcaaggtttagtagggtcattaggcaatgatagaggcccaaatgtcatgttctgttaaaatgataagtgtagtgttcagatgcaatagggtgacactatctgtagatgattccagaggactcaggctctgccattctacagggaaatcttgagatgagttcatgtatcactaaaactcagattagctcttcactaatcctgaggccaagcagcaggtcttccactccataacaggaaattaaaaaaaaaaaaaaartccaggtcagacataattacaagattcagtaaagatataagctacactatagcctcacaagcaaagaaatagaaacttagctgctttgagatttatcttactaaagcaaagaaagtcatgaaaagacatggcggaaatataaatgcatattgctaagagaaagaaggcaatctgaaaaagttacatactatgtgatttggaaa

SEQ ID NO: 375921 - DNA, 609 bp, Homo sapiens
tttcattcaattgcttgtcttttctctgtgaagcatgagtcaggttataagttgaaaatacaggtaaaggttagggagaaagaagtggttcacataagagcatgcaagtggattagaagagagcaaaaacattttggaaaaaacaaactagcaaggtttagtagggtcattaggcaatgatagaggcccaaatgtcatgttctgttaaaatgataagtgtagtgttcagatgcaatagggtgacactatctgtagatgattccagaggactcaggctctgccattctacagggaaatcttgagatgagttcatgtatcactaaaactcagattagctcttcactaatcctgaggccaagcagcaggtcttccactccataacaggaaattaaaaaaaaaaaaaaagtccaggtcagacataattacaagattcagtaaagatataagctacastatagcctcacaagcaaagaaatagaaacttagctgctttgagatttatcttactaaagcaaagaaagtcatgaaaagacatggcggaaatataaatgcatattgctaagagaaagaaggcaatctgaaaaagttacatactatgtgatttggaaa

SEQ ID NO: 375922 - DNA, 609 bp, Homo sapiens
tttcattcaattgcttgtcttttctctgtgaagcatgagtcaggttataagttgaaaatacaggtaaaggttagggagaaagaagtggttcacataagagcatgcaagtggattagaagagagcaaaaacattttggaaaaaacaaactagcaaggtttagtagggtcattaggcaatgatagaggcccaaatgtcatgttctgttaaaatgataagtgtagtgttcagatgcaatagggtgacactatctgtagatgattccagaggactcaggctctgccattctacagggaaatcttgagatgagttcatgtatcactaaaactcagattagctcttcactaatcctgaggccaagcagcaggtcttccactccataacaggaaattaaaaaaaaaaaaaaagtccaggtcagacataattacaagattcagtaaagatataagctacactatagcctcacaagcaaagaaatagaaacttagctgctttgakatttatcttactaaagcaaagaaagtcatgaaaagacatggcggaaatataaatgcatattgctaagagaaagaaggcaatctgaaaaagttacatactatgtgatttggaaa

SEQ ID NO: 375923 - DNA, 571 bp, Homo sapiens
tttttttagttctctgagaaatctctgtactgttgttcagaaaggttgaactaatttacatttccaaaaacaatgtatatgtgttccctttttcttgcatcctcaccaacatctgttgtttttagactttttaataataggcattttctctggtgtaagatggtatattcttgtggttttaatttgcatttatctgatgattagtgatgttgagaatttgcttatatttttcttgaccatttgtatgtcttcttttgaaaaaatgtcttttcatgtctttcccccactttttaatggggttgtttttgccttgttgagttgtctgaattccttgtagattctggatattagcctttggtcaratgcatagctcacaaatattttttaccattctgtagattatctgtttattgattgtttcttttgctgtgcagaagcaaatacaaaacactgatgaaaggaatcatggatgacacaaacaatagaaaaacattccatgcttatggattggaagaatcaatatcattaaaatgaccatactgcctaaagtaatctacagattcaacacaat

SEQ ID NO: 375924 - DNA, 571 bp, Homo sapiens
tttttttagttctctgagaaatctctgtactgttgttcagaaaggttgaactaatttacatttccaaaaacaatgtatatgtgttccctttttcttgcatcctcaccaacatctgttgtttttagactttttaataataggcattttctctggtgtaagatggtatattcttgtggttttaatttgcatttatctgatgattagtgatgttgagaatttgcttatatttttcttgaccatttgtatgtcttcttttgaaaaaatgtcttttcatgtctttcccccactttttaatggggttgtttttgccttgttgagttgtctgaattccttgtagattctggatattagcctttggtcaaatgcatagctcacaaatattttttaccattctgtagattatctgtttattgattgtttcttttgctgtgcagaagcaaatacaaaacactgatgaaaggaatcatggatgacacaaacaatagaaaaacattccatgcttatggattggaagaatcaatatcattaaaatgaycatactgcctaaagtaatctacagattcaacacaat

SEQ ID NO: 375925 - DNA, 546 bp, Homo sapiens
attatccagtgttttaattaccctgaagctggactttccaaccaaaactcataatctaattaaggaagtccatcatatcaacagcacataaagcaacaagcaattaacattttccaaaaatgaaactgatgcaggagcatttcgatttactctaattatactgtgaatgctgtgcctaatgcaacaatgcctttgcatttaaaaaattgtctttaaaggtctccctccaaattgtaataggcttatatttctcccattctagctgcctgtaatatacataaaartgagaattacaaagaattctcaactcatggatattataaaatatagatgacagaaacttggccctgaatgctcccacaagaacagtttgcagcaatcacactacaaagagttgtaaggatagcactttgatcaatctgcttcattcatctctatgcgcttgaaagaaatgtcttggaaagggctaagagccagcgttcctgaacctccgaatacaggcttgttcttgcaccagatatcgtgcctaccgcagtgcagagctcg

SEQ ID NO: 375926 - DNA, 558 bp, Homo sapiens
gctagggatttcatgcaggtgccatcatttacttaatcaaaccctatttgcaaacaatctargagtttttccttcattttttatgatgatcaatgatgttgaaatggatgtaattttatgtaacagatttttcctccttttgggctatttactgtttatgtgtgacccatgggtggaaattgtttttgctcttgatgcatttacaaatggctctctaaagggattgttcccccttcattattaccagtggtgtgtgaacatccattttactagaactagatattatttaaatacaaattaataaatataaaatatcaatcttttaaatttgaatctcttctttcactaaaaatattatcccattcacttaccatttacaatttctcctttgtggagtggtttatatttttgtcaatttatcccaaagggattttctgattatagactgctcatgttctcaccccaggctctccagctgcatctgtaccagcagggggaaaaggaataaaataggtgataatataatcataaatatttgcaggaatcctgctgtccaag

SEQ ID NO: 375927 - DNA, 592 bp, Homo sapiens
ccacctcttctttcctcgtcttctagcttctggcttttaataaatgtgctatggtaaaaaaaaaaaaaaaaaaagaaagaaaaaagttaatattgcttacagctatgtgtaataatattcagtaattttctcaacaacaaatatcttctayggccaggaatagcataaggccattaagttgctgtgagataggagcagagtgcatctgcaggtgtctgaaggaggagagcagaatgagaatgcactcagagagttcacgcagcccctcgttccctcatttttaggccaggaagtggctcatctggcttatgttttaaatatcattatgattggtctatgccaaatagattttagagaaacaagtggtagaagtaaaatcaggatagaaatgacagaggcttggactagggtagcagtggtggatatgatgagaagcagtataatacaatttctgttttgaaaatgttaatacataaaatcttgtcaactttttaaggggctcaatatgggaaaatgggttatagatacgggtaatggcaagagccactgacaagtttaccagtgacaagatgtgccaaaggtttaggtatgg

SEQ ID NO: 375928 - DNA, 600 bp, Homo sapiens
tatgagccaccacgcccagcctatcatttccatctctttatcagttctaaaaaattatattcacaatagcataaaaagaataaaatatgagggatattttaacaaaagtagtgcagagcttgcacactgaaaaccataaaacatcgctatgaaaaatcagagaagatctaagtgaacagagagatagtccatgtttatggattcaaagactgagtgttgttaagatggcaaattcttaccaaattgatctatagattcaacacaatccctatcaagaattcagcaggcttttctcatttaaaatttttgcagaaattaacaagctggtgctaacatttatataaaaacacaaaggaatcaaattagccacaataattttgaaaaataaaaatgaatttagactacttacacttcctgaatttgaaatttctataaagatacaataatcaagacagtgtggtactgacataagcatggaaatayagatcaataaagtagagtcaggaatccagaaatagctccttacatataaaatcaactaatttttgacaaagctgtcaaggtacttcagtagggaaaggatagtcttttctacaaatg

SEQ ID NO: 375929 - DNA, 600 bp, Homo sapiens
tatgagccaccacgcccagcctatcatttccatctctttatcagttctaaaaaattatattcacaatagcataaaaagaataaaatatgagggatattttaacaaaagtagtgcagagcttgcacactgaaaaccataaaacatcgctatgaaaaatcagagaagatctaagtgaacagagagatagtccatgtttatggattcaaagactgagtgttgttaagatggcaaattcttaccaaattgatctatagattcaacacaatccctatcaagaattcagcaggcttttctcatttaaaatttttgcagaaattaacaagctggtgctaacatttatataaaaacacaaaggaatcaaattagccacaataattttgaaaaataaaaatgaatttagactacttacacttcctgaatttgaaatttctataaagatacaataatcaagacagtgtggtactgacataagcatggaaatacagatyaataaagtagagtcaggaatccagaaatagctccttacatataaaatcaactaatttttgacaaagctgtcaaggtacttcagtagggaaaggatagtcttttctacaaatg

SEQ ID NO: 375930 - DNA, 632 bp, Homo sapiens
ttaaaaagatatatcaatggctaacaaacatgaaaatattctccatgccattaattaatcagggaaattcaaattaaaacatgcatgagaaactatttcacaatcagtaaaatggtaatatycaaaaaaataaaagataataataatacaccccctaccacatgaatcagcagttctactcagaggaatctactcaggagaaataacacacatagccacacaaggacttgtatgcaagtgttcataccagtaagaaaaggcaaatcttataggggcacagagtagattaaattaatggttgcctagggctggggaaagagtgtggattaataaaaatggacacaagagatcttttgggagtgaaagaaatgttctaaaactgaattgcattaatagtagcataagtctataagtttatacacattgatttgtacactaaatctcagagaattttatggtgtgaaattataactgaatagtattgttaaaaaatgtaacgttctttctgcacaaataaagtcaattaatccttaataaaggagaaaagcaattcaatagacagaaaaaatagtcttttcaacaaatggtactggaataattggacatgcatatgcaaatataaaaagtaaata

SEQ ID NO: 375931 - DNA, 632 bp, Homo sapiens
ttaaaaagatatatcaatggctaacaaacatgaaaatattctccatgccattaattaatcagggaaattcaaattaaaacatgcatgagaaactatttcacaatcagtaaaatggtaatatccaaaaaaataaaagataataataatacaccccctaccacatgaatcagcagttctactcagaggaatctactcaggagaaataacacacatagccacacaaggacttgtatgcaagtgttcataccagtaagaaaaggcaaatcttataggggcacaragtagattaaattaatggttgcctagggctggggaaagagtgtggattaataaaaatggacacaagagatcttttgggagtgaaagaaatgttctaaaactgaattgcattaatagtagcataagtctataagtttatacacattgatttgtacactaaatctcagagaattttatggtgtgaaattataactgaatagtattgttaaaaaatgtaacgttctttctgcacaaataaagtcaattaatccttaataaaggagaaaagcaattcaatagacagaaaaaatagtcttttcaacaaatggtactggaataattggacatgcatatgcaaatataaaaagtaaata

SEQ ID NO: 375932 - DNA, 632 bp, Homo sapiens
ttaaaaagatatatcaatggctaacaaacatgaaaatattctccatgccattaattaatcagggaaattcaaattaaaacatgcatgagaaactatttcacaatcagtaaaatggtaatatccaaaaaaataaaagataataataatacaccccctaccacatgaatcagcagttctactcagaggaatctactcaggagaaataacacacatagccacacaaggacttgtatgcaagtgttcataccagtaagaaaaggcaaatcttataggggcacagagtagattaaattaatggttgcctagggctggggaaagagtgtggattaataaaaatggacacaagagatcttttgggagtgaaagaaatgttctaaaactgaattgcattaatagtagcataagtctataagtttatacacattgatttgtacactaaatctcagagaattttatggtgtgaaattataactgaatagtattgttaaaaaatgtaaygttctttctgcacaaataaagtcaattaatccttaataaaggagaaaagcaattcaatagacagaaaaaatagtcttttcaacaaatggtactggaataattggacatgcatatgcaaatataaaaagtaaata

SEQ ID NO: 375933 - DNA, 632 bp, Homo sapiens
ttaaaaagatatatcaatggctaacaaacatgaaaatattctccatgccattaattaatcagggaaattcaaattaaaacatgcatgagaaactatttcacaatcagtaaaatggtaatatccaaaaaaataaaagataataataatacaccccctaccacatgaatcagcagttctactcagaggaatctactcaggagaaataacacacatagccacacaaggacttgtatgcaagtgttcataccagtaagaaaaggcaaatcttataggggcacagagtagattaaattaatggttgcctagggctggggaaagagtgtggattaataaaaatggacacaagagatcttttgggagtgaaagaaatgttctaaaactgaattgcattaatagtagcataagtctataagtttatacacattgatttgtacactaaatctcagagaattttatggtgtgaaattataactgaatagtattgttaaaaaatgtaacgttctttctgcacaaataaagtcaattaatcsttaataaaggagaaaagcaattcaatagacagaaaaaatagtcttttcaacaaatggtactggaataattggacatgcatatgcaaatataaaaagtaaata

SEQ ID NO: 375934 - DNA, 586 bp, Homo sapiens
gtacttatttttacttccttcttggcagcatrtaagattacatatattctaaattattgatagtgaacttctgtctaacccacgtggtattctaaaagacattttaactattcagatacagctgaatatttgtatcagggtaatacaggcataaatatccagtggttaaacctccatgaatgtacaatattttagtccatattttacatagtcattaaatgctttattgaagcagagtaaagtctgaaaactaaagccaaatcctttgacactaaaaataaaaaaaaagcgggtgtccaagcaacataacggtcagtgatttgctacttaacaaatgaaaaacaaagaaacaaaatccaaatcaatgtaaacaatatatacctctctgttgacaatgacaacaggtgctatcaacacagaagatgatataaatgtaagtgctttagtcaacattacagccagatgataataagaacatttcactctgcatttataggacccagtagcagtcggctgttaaagaaaagtaacaataatcaaactgggctaagtattttctatgtgaaggtatcatgaaatttatgaa

SEQ ID NO: 375935 - DNA, 586 bp, Homo sapiens
gtacttatttttacttccttcttggcagcatgtaagattacatatattctaaattattgatagtgaacttctgtctaacccacrtggtattctaaaagacattttaactattcagatacagctgaatatttgtatcagggtaatacaggcataaatatccagtggttaaacctccatgaatgtacaatattttagtccatattttacatagtcattaaatgctttattgaagcagagtaaagtctgaaaactaaagccaaatcctttgacactaaaaataaaaaaaaagcgggtgtccaagcaacataacggtcagtgatttgctacttaacaaatgaaaaacaaagaaacaaaatccaaatcaatgtaaacaatatatacctctctgttgacaatgacaacaggtgctatcaacacagaagatgatataaatgtaagtgctttagtcaacattacagccagatgataataagaacatttcactctgcatttataggacccagtagcagtcggctgttaaagaaaagtaacaataatcaaactgggctaagtattttctatgtgaaggtatcatgaaatttatgaa

SEQ ID NO: 375936 - DNA, 561 bp, Homo sapiens
cctcaacatgtcattctgttcagagcagagtctctctagaagctcagcctgtctggctgtcactacagctcggcccattgggagatgtacatgaagcatgaacacccacatcttcwcccagttgaaatgcatccaaatggaggccattttctaggccaggggttgtcagctccctgggtggcaaaccggtacacatagcaggaggtgagcaggaataaggaagcattcctgcctgaactctgcctcctgtcagattggaggtgggattacattctcataggagcgcgaaccctattgtgaactgtgcatgtgagggacctaggctgtgtgttccttatgagaatcaaatgcctgatgatctgagtgaaatagtttcatcctgaaaccatcctccacccccttcatggaaaaattgtctttcacaaaactggtccctggagccaaaaggttggggaccaatggtctaggtgacatcaaagtgagacagtgggaaccactgtctcagcaacagccctctgacttgtggatgcttccaaagagccttcactttgtgtaaagggt

SEQ ID NO: 375937 - DNA, 668 bp, Homo sapiens
aacctttcattcctcacataacatctccacatgatcctcctgccccattaagaagacggcccaaaccaagtacctcaaatccagtgtcccaagaactgtttttagtgtttgaggttgtgtacctgtctttacttgttcccaaattattctaattctaatcctttcaggtctcattttgatcttcccagctctgatctcccaactctgtgaccccaagcttgatcactaactatagatttatggctttgaattgatctctctctctctctctctgcacagtttgtctcctgtgtgtctgtctctgggagaaaccctctgctctagccatgtgaaaacaaattctgaaccaggccttctgactctgtcctcatccctccctcaccatctcctaaacccttcgaagaggaagccatctttttcttttccacatacagagccttttatctgtacatctattatgaaatttaatactttctactatatattaaatatagttatttatgtagttgttgtaacctcaattgtttcatctttacttaatatctttcaaagcatggaatacagagctttgctctcaagaaagtatattttccgaastgtcccgatagattgaaatatctgttaagtttaagtgaaagggttggttctgctacagtttatttcagtta

SEQ ID NO: 375938 - DNA, 668 bp, Homo sapiens
aacctttcattcctcacataacatctccacatgatcctcctgccccattaagaagacggcccaaaccaagtacctcaaatccagtgtcccaagaactgtttttagtgtttgaggttgtgtacctgtctttacttgttcccaaattattctaattctaatcctttcaggtctcattttgatcttcccagctctgatctcccaactctgtgaccccaagcttgatcactaactatagatttatggctttgaattgatctctctctctctctctctgcacagtttgtctcctgtgtgtctgtctctgggagaaaccctctgctctagccatgtgaaaacaaattctgaaccaggccttctgactctgtcctcatccctccctcaccatctcctaaacccttcgaagaggaagccatctttttcttttccacatacagagccttttatctgtacatctattatgaaatttaatactttctactatatattaaatatagttatttatgtagttgttgtaacctcaattgtttcatctttacttaatatctttcaaagcatggaatacagagctttgctctcaagaaagtatattttccgaagtgtcccgatwgattgaaatatctgttaagtttaagtgaaagggttggttctgctacagtttatttcagtta

SEQ ID NO: 375939 - DNA, 517 bp, Homo sapiens
caggagatgagaagtgagtgacatttcccagcagttaaaaacccttcctgcacaaagccatgcctgactcacattcacccgtgaacatcattctctccctgtaaattctgcatgagaataatcctagggtttctcagttattaccatgaattgttcattagattgcgcacatggtgattttatctattgaacagttgaacctacttgaacaattctatacttctccataacaacccacggtgtaatatcacatttttaaaaaacactaaatgaatgagcttaattgagttgggtattttgtaattgaggaagaggcaaaatacattttttgaagagtaactccttgatgagagatgttaaatgattcatgaatccacatcagtgatggggctagataatgcagkgttttcattcttagatcagaatccttagtctatcattagacccaccagatccaaaagataactttataaagtcaaagaaatgattttgtctacttgacttatagcctggatca

SEQ ID NO: 375940 - DNA, 603 bp, Homo sapiens
acattcctccaaacagtccttctgatcatggctgtacttcaaagtcttaagatgaagctctggccaggcgtgttggctcacayctgtaatcccagcactttgggaggccgaggcaggtggattgcctgagctcaggagttcgagaccagcctaggcaacatggtgaaaccccatctctactaaaatacaaaaaaaaaacaaaaaaataggcatggtggtgggcacctgtagtcccagctatttgggaggctgaggcaggagaattgcttgaacccaggaggcagaagttgcagtgagccaagattgagccactgcaccccagcctgggtgacagagccagactccatctccaaaaaaaaaaaaaagatgaagccccactcggaaagggcagcctctctaggatccggtccaccagccctgagtgctgtgagaggctagaggagtgaatgtctaagggcggctggtaggtccacatttttccaaagatttcccaaccttacaagacttttgatctgcttactataacttcagaacacatctgtaagaaactgggctattgttactttttgctattctggaggaattttttttaatgaattatga

SEQ ID NO: 375941 - DNA, 564 bp, Homo sapiens
gtcactggagttatgtacctaggaggattatgtctgcctctgctgagtcatgcaggttgtcagggaagtgggggaaagccggcagtcacagggctcrcccagctcccacccaaaccaaagggccggtctcactcccaccgtgcaccccccaacagcccccagtccgtttccaggcggagagggatacaggcctgaaaacctgccccaggctacccgcctcccagctgcgagagaaaaaggcttggttcttcccccgcctgtggagtcagcaccccggattcgtgccctgccctagttctggccaggaggattctcacccagttcaaactgttacaacgctcagctagagatttccttctccctgtggagttttaccccctcctctcccgatggatccctgtggtgccagcaggaatgggctgctcggggacccagcgagctccgcgggcctttccgctgcttcctctacccctgtacctcactgggctccccagacggactcagctccaggtaaagttggaaattctcccgcaagcagaccttcagcttccccagtgggggtgt

SEQ ID NO: 375942 - DNA, 564 bp, Homo sapiens
gtcactggagttatgtacctaggaggattatgtctgcctctgctgagtcatgcaggttgtcagggaagtgggggaaagccggcagtcacagggctcacccagctcccacccaaaccaaagggccggtctcactcccaccgtgcaccccccaacagcccccagtccgtttccaggcggagagggatacaggcctgaaaacctgccccaggctacccgcctcccagctgcgagagaaaaaggcttggttcttcccccgcctgtggagtcwgcaccccggattcgtgccctgccctagttctggccaggaggattctcacccagttcaaactgttacaacgctcagctagagatttccttctccctgtggagttttaccccctcctctcccgatggatccctgtggtgccagcaggaatgggctgctcggggacccagcgagctccgcgggcctttccgctgcttcctctacccctgtacctcactgggctccccagacggactcagctccaggtaaagttggaaattctcccgcaagcagaccttcagcttccccagtgggggtgt

SEQ ID NO: 375943 - DNA, 564 bp, Homo sapiens
gtcactggagttatgtacctaggaggattatgtctgcctctgctgagtcatgcaggttgtcagggaagtgggggaaagccggcagtcacagggctcacccagctcccacccaaaccaaagggccggtctcactcccaccgtgcaccccccaacagcccccagtccgtttccaggcggagagggatacaggcctgaaaacctgccccaggctacccgcctcccagctgcgagagaaaaaggcttggttcttcccccgcctgtggagtcagcaccccggattcgtgccctgccctagttctggccaggaggattctcacccagttcaaaytgttacaacgctcagctagagatttccttctccctgtggagttttaccccctcctctcccgatggatccctgtggtgccagcaggaatgggctgctcggggacccagcgagctccgcgggcctttccgctgcttcctctacccctgtacctcactgggctccccagacggactcagctccaggtaaagttggaaattctcccgcaagcagaccttcagcttccccagtgggggtgt

SEQ ID NO: 375944 - DNA, 516 bp, Homo sapiens
ggcttggttcttcccccgcctgtggagtcagcaccccggattcgtgccctgccctagttctggccaggaggattctcacccagttcaaactgttrcaacgctcagctagagatttccttctccctgtggagttttaccccctcctctcccgatggatccctgtggtgccagcaggaatgggctgctcggggacccagcgagctccgcgggcctttccgctgcttcctctacccctgtacctcactgggctccccagacggactcagctccaggtaaagttggaaattctcccgcaagcagaccttcagcttccccagtgggggtgtgtgtttgggagaggagggtctccctctcccacttctgcagttggggcactcacacttttgcgggggtctcccgggtcctgcaggagcagcccacttccttcagagggtctgcgggtcctctcgggactgctggtttcttcctgcagtccatctggagctaaaagtcacaatgcgagccccgcacgctgcc

SEQ ID NO: 375945 - DNA, 564 bp, Homo sapiens
gtcactggagttatgtacctaggaggattatgtctgcctctgctgagtcatgcaggttgtcagggaagtgggggaaagccggcagtcacagggctcacccagctcccacccaaaccaaagggccggtctcactcccaccgtgcaccccccaacagcccccagtccgtttccaggcggagagggatacaggcctgaaaacctgccccaggctacccgcctcccagctgcgagagaaaaaggcttggttcttcccccgcctgtggagtcagcaccccggattcgtgccctgccctagttctggccaggaggattctcacccagttcaaactgttacaacgctcagctagagatttccttctccctgtggagttttaccccctcctctcccgatggatccctgtggtgccagcaggaatgggctgctcggggacccagcgagctccgcgggcctttccgctgcttcctctacccctgtacctcactgggytccccagacggactcagctccaggtaaagttggaaattctcccgcaagcagaccttcagcttccccagtgggggtgt

SEQ ID NO: 375946 - DNA, 516 bp, Homo sapiens
ggcttggttcttcccccgcctgtggagtcagcaccccggattcgtgccctgccctagttctggccaggaggattctcacccagttcaaactgttacaacgctcagctagagatttccttctccctgtggagttttaccccctcctctcccgatggatccctgtggtgccagcaggaatgggctgctcggggacccagcgagctccgcgggcctttccgctgcttcctctacccctgtacctcactgggctccccagacggactcagctccaggtaaagttggaaattctcccgcaagcagaccttcagcttccccagtgggggtgtgtgtttgggagaggagggtctccctctcccacttctgcasttggggcactcacacttttgcgggggtctcccgggtcctgcaggagcagcccacttccttcagagggtctgcgggtcctctcgggactgctggtttcttcctgcagtccatctggagctaaaagtcacaatgcgagccccgcacgctgcc

SEQ ID NO: 375947 - DNA, 512 bp, Homo sapiens
tgaatttgatgaccaagtgtagtgcgtgaagccctgcacactgagagaattccccctcatagctgtctttgaaagctgcacctgagtgagtgaggggccaagcttcctcaacaggcattggaaacagatttcccttaggaaaggattgtgacatcaagagaggcagctctctccaccaacaggcaattccaagagagaggtgaycattgaggactgtcagccatagcactctacgcagctgagggactacatccttgaagactgaagggggacctgggcagaggacagcagctgctacagtctattttatctgtggataatctagggatatgaattgctattgcattattatcttggaagctcaagttgaggatgaatatggaaaagtaccataaagggaaattggaagatggaagaatatttagtaccctgtgaattatttgcatccctactcatttcctcataattcctccttgattgtgcattcctccttgagtttcttacatttaaat

SEQ ID NO: 375948 - DNA, 614 bp, Homo sapiens
ttatatttgcttttgttgcctgaaacttttgggttgtaaccaaaaaatacatatatagccagaaccaatatcaaggagtttttcccttgtattttctrttagaagttgaagggtttgggtcttaagtttaattatttactccattttgagttgatttttctatatggtgtaggataagtgtctaatttcattcttttgcatgtggatgtccagttttcctaacataatttattgaaaacactgtattttcttcattgttttttctggacacctttgtggaaaattagttgaccacatatgtgtgggtttatttctaagctctctattctgctccattgatctatatgtctaatttttatcccaataccatactgttttgattactatatctttgtaacataattggaaatcagaaagtgtaatacctccaggtttgttcttcttgctcaagattgctttagctattaggggtcttttgtggttccataaaaattttagaatcgtttttctatttctgtgaaaaatgtcattgaaattctggtatggaacgcaatgagtctatagattgctttggatagtgtagatattttaacaacatcaatttttccaaatca

SEQ ID NO: 375949 - DNA, 543 bp, Homo sapiens
acttctggcacactgagagcagagaagaaagatacaccatgcacatggtccaaagagaaacaaagcctgccattaggtaaagckggaaggacaggttttttaatccataacgtaccatcgtagtaggaaaaagtccagcatgaattgaactcaagttttatttgtgcagaggagactgggcattttaaagcaagagcgagagaagagagcatgggtgacgggggatcagtctggtcagagaagtggaaaattacaaaaagcaggaaatcggggattggtccgtgtgaaacccacattgttttgttaactggagcttgtcaagatgaggcccttaccctcccacagaggctaggagatgggagccctctctccaggggttggctggagcaaacagtagactccttgggcagcctgcagtgtcctcaggcaggcactgaagccgagccggggtcggggtcgtccctggggatgcagctttcaactgtgagaaacgaacttagtgtttggaggccactacaaacatgtctgtatagaccgaggcca

SEQ ID NO: 375950 - DNA, 542 bp, Homo sapiens
aggggatccctcttggtgttgggtttggttcatggttatgttcatggtggcagtggcactggtgcttaacatgcaggcaccccggctccagtgttggtctcaatgtgcaatgaacagatgcttatggaacagctggaaagccagggtctgaaacaaaggcatgtggatacctatagtttctgtatggtccagggcatgggtgcttctaaagcagtagtggctcttgtgttgtaggcactggcacatgtagagctgttatggaaccggggtccagaatgtgggtttgtgtggagcaaccattgctctaaggtctgtgatgcagatgtgacttctatagcagtgactgtagggtccaacgcctgtgaggtcacagaatggctgcagagctaggatccgaagcatgggcttgtgaagttattattattattattattatttytgacaacacaattgactcaaaagataccactatcctttcaggaatccctaatttcataggcaatttatatgaacaaaactaatgagccttcaaaattccttag

SEQ ID NO: 375951 - DNA, 579 bp, Homo sapiens
gagcaaatgcctgtgggaacaagggcctctgagcagagactggcagtcagctcccagggtagctgcaggcatggattcctaagtgagctacatctcactcacatgtgcaactctgacagcagagctccaggtgggaaagaaacagaaggaactgattgattgatcgattgattgattaatgaatctcctgagcaatgcagtgctggacagcaaagactgaccattgaaagttaacttaggctgaaattattatgctctggaaataatgcagtgaaaataagacatgcattacctttcaaaaaatagataaatatggatttcattcatgcttaacttttgctattctattcattactgcctttgaaacagaactasagaaaggttttttcttcttcacccattcactgaaggttattggtatccaaagttcattttgttcaactttctattcaaatttctagttttcttctccttctggtatcctcactcgtaaccatttctttgcctgttctgaagacccactacaaagaatcccaagactcgttttcttcagcaacatgagatcctcgccaaacctat

SEQ ID NO: 375952 - DNA, 471 bp, Homo sapiens
gtagtaatatcacttacctcattggaatgttgtagggattacatggcttaatttacataaagcttttgaaacaatgtttggcctatatatacagaatacaaatataagctgttattatctcattgtgattttaatttgcatttgcctgatgattagtgataataagcatttttttcacattgttattggccctttgtctttttttgagaaatgtcagttcaaatattttgttcattttttttttaatccagtgatttgttttcttgctattgagttatttgagttccttgtatgttttggatattaatcctttatcaratgtatgtttgcaaatattgtctcctgttctataagctgtctcttcactctgttgactgttgccctaactgtgctgaagctcttcagtatgatgtaatcccatttgtttaagtttgcttttattgcctgtgttttgaggtcatatcaaaaaaa

SEQ ID NO: 375953 - DNA, 431 bp, Homo sapiens
ttgcatttactgagacctgttttatgatctatcttattcaatgttccatgggaaattgaaaagaatatacctcctgctcttgttgggtggagttgctcgataaatgtcaagatggttggtgatgttttcaattcttgtaaatccttactttctctacttgatctattratgattaagaataagttgttgaactttgcaaatacaattgtagatatgtatatctagccactcagttccactaatttttctttcatatatattgaagctgggctatcagatatacacatagactaatcttatgttctctcaaatattttacccctataatatgtgaattcagcctctttatccctggtactattctttgctctgaaatctacattttctgatattaatgcagtcattccagctttcttttaattagtgcgagc

SEQ ID NO: 375954 - DNA, 576 bp, Homo sapiens
gcaaatacaattgtagatatgtatatctagccactcagttccactaatttttctttcatatatattgaagctgggctatcagatatacacatagactaatcttatgttctctcaaatattttacccctataatatgtgaattcagcctctttatccctggtactattctttgctctgaaatctacattttctgatattaatgcagtcattccagctttcttttaattagtgcgagcatattatatatatgtatttatgacattgacttatgagttttactgaatttatgtctttatatctgaagygggtttcttgctgaaagtatgtagttgggtcttacttttttattcaacaatctttgttttgtaattggagtatatagcctatttatatataatgtggttataatatgattaggtttaaatctgtcatcttgcaatttgtttcatttttttcatttttttttgctccctttttctttttcttcccatattctggattgattatattttatcattctattttatctctatttgcttatcatttatagctttctaaaatagtgttagtggttgt

SEQ ID NO: 375955 - DNA, 443 bp, Homo sapiens
tgttaatttatgctgaaatacctgtggtcagaaaatgtaacttttattatttcaaaccattaaattaattgaggtttgtttcatgtcataacatagagccaatgtgctagacaattgttcatgtacatttgagaagaatgtgtattctactgttattgggcagagtattctatagatgcctcttaggtctagttatagtgtttttcaagtcttctatcttctgttagttattttattcattacagaaagtagggcattgaattccycaactattatttataaactgtctctttctccctttaatgctatgtgttatgcttaaacgcattttgagccataatctttttatcgttatgtctttctttatctgtagtaacactttttgttttaaagtcaattttgtctgaattagtatatccactccagctctcttttggttactg

SEQ ID NO: 375956 - DNA, 566 bp, Homo sapiens
aggtttataagcagattgaagatgattttcctgttttcaatattccaaccactctattcaaaattcaagatgatttccctattctcacccatctcaaccaccctatccaaagttttagagagaacagcatcttacagtcagtacctgaagatatccacataatgtaatatagcatatctttaatataatatactatataatatatatatttcccaactatgttatgcttaatcattttggagatatacttttttgttatgtacaacatgaaactctatatagtagcagaagaaatagtgagggaagcaaaaaaatttaaagtttatattttcatgtcaacttgtccatgcaatgactaatcataatggagaatcacgcttccaattattttgagaaatctcctttacctttataatcatagcaacattattggcccataacaggaaataatttccatgtttgtgcctktgaggataaggattacaaagtggtgagacaggagagcttttctcagctttgaccttgacagttctaagcagaatctattggaaatgtggatgtaaata

SEQ ID NO: 375957 - DNA, 566 bp, Homo sapiens
caaactttgcagtcacaacttcatagcacagaacaatacctcacacccaatttgcaaatcacaaaatttgctgtatggtatatactttctggtatatagtctacaggtattgctgagaaacactcttggtattgttaaatgactggtaaaagtaatgcttaggaatttctctcccattatagaattatttgctattcatacaatattatggctcataacaacgtcatttggtattcaagcatgtcatatggtccttcgtaggtgttcatacacacctaaaattaattactcyttttcctctttttgatgataatttaatgtgaaatacatttgcactaacagagcatctacaatccacctggtacgtgggaacaaacaccattctctagcatctggattattaaggcaaagagttgtctttataaaattgtaatctggttatgaggatgagcaaaagcctacagaaaaattgcataccattataattaggattcacttaaattaatatgaactatataagtgagattttgaaatgtaatattgagtgaaataaaacgtgagatgat

SEQ ID NO: 375958 - DNA, 520 bp, Homo sapiens
aaacaatgtgatttcattattttttatggctgcgtggtattccatggtatataggtaccatattttctttatccaatccaccattaatgggcacctaggttgattccatgtctttgctatggttaatagtgtggtgatgaacatacaagtgtatgtgtcctttggatagaatgatttatttttatttggatgcatacacagtaatgagagtgctgggttgaatggtagctccatttaagttctttgtgaaatctccacactgctttccacagtggatgaactaatttatgctcccaccaacagtacataagtgttcccktttctctgcagcctctccagcatctgttgttttttgactttttaataatgccattctgactgatgcgagatggtgtctcattctggtttgcatttgcatttctatggtgattaatgataattagcattttctcatatgttgttggccacttgtaagtcttcttttgaggaatgtctgttcatgtattttgcccatttttag

SEQ ID NO: 375959 - DNA, 596 bp, Homo sapiens
tttatatcattacatttataaaccagcttctccttaataacacaaattaatgtttcatattgtaaaaagccctttcttctataaatcctttgatcactcactaaggcctaaaaagtgagtattatttttatcctcattttattgattagaaaattgagtttcaaaaatagttatcttccccagaattaagtagtagagtatcactttaaactaggtcagcttttccaatggccccttctccattttcatccaacatctttcagcatctggctaacmatattcatactactatacctttactagccttatgtttcctggtaaccagaaacattttcatgagtgtctaacagattggaaggtgttcatggattatcatcattagtggtagagtatatgttttaacagaaacttagaagaagctgaaaatgtatacatgacctactctacagctgaaatgtcaataggggttttgcagttcttatctcataaaatcttctcaaacaaagaaactgagatattagtaagcactgttttacaggaatctaacaatatcaaatgccggtgagatttcagagcaagcagagcaactttcagat

SEQ ID NO: 375960 - DNA, 535 bp, Homo sapiens
tttccttatctcaatatcacaaagacattttctatgcctcttatatgagtttaataattttagattttatgtttaggtctatgatccactttgaattaatttgtgtatatccataatataaaggtcattttttccatacccatatcaagttgctctagcaccgtttgttgaaaaggctagctgctcttcattaaagtaccttagcatctctgttgaaaatcagttggtcrtatgagtctgtcctgttacattgcttaatacgtctatctttacatcaatactgcacagtaataacttttatcttcataacaaatattgaaatcagatattttaaaccctccaaatttggtttttcttcaattaatgtttggctagtatatatgctttgcctttccatattaattttaaaatcaacctgccagttttgtcaaaaatgcttgttaagattttgtttgagagtgcgttgaatatatggatcaacttgtcaatggctgtcatcttgaaaataatgagtcttctaattcatggtgatgat

SEQ ID NO: 375961 - DNA, 575 bp, Homo sapiens
cacaataaaacataaaaaaaatcagaggacattaatttctctagtcccacgggactgattaaaattgatatgcacacatatatacacacagacagctgttaaagccaagcataacgtagaaatatgtatttaaattatctaggaattacagttgttcattttcatcacaagataatcaataacaattgtcatagggtcaaaggagatccttctatcactgctgcctggccatagaatatattcaccattatatttcttcgaatcacttatttcttctgaaattactaccagttcaagcaatkttcaagcttctccatgaaatgctgtctctacaaagatttttataataaaaaatatgtgatcagcagttagcccttcattgctaatggctctgttgtctgagagataacaggtacaatgatagatctaaatctgagacactttctcacatttaagacacttgtaatatccaaaacctttaaatgaatactgagttattccaccaaactgtacacatacaaggcataatgtttattattgtctaaaaagaaaggggagaattattgctaacagga

SEQ ID NO: 375962 - DNA, 551 bp, Homo sapiens
atatactttaggttcatctccaccacatttcgacctttggttatctcaatttacatatttttatattgcctgtctcttaacatgttcctgtagctattgttttctatagatttgctttttaggctttatactggagttatgagtagattacacagcacaattgcaatattagattattcttaggttgtctacttaattttaccagtgggttttatgtttccaaatgtttcctccttgcatgttagttttkctttctttaagattgaataactccctttagcattccttgtaagaagggtctggtgtggtaaattatcttagcttttgtttgtctgggaaatactttatcttgtcttcataactgaagaataggtttgttggataaagcattcttgggtgacaggtttttttttttttcttttctttcagcagtttggaaatgtttttcctccctcctgacccacatagttttcattgaaaagtctgttgccagacaaattggagttcttttatatgttacttgctttttttcttgatgcttttagaatcaa

SEQ ID NO: 375963 - DNA, 387 bp, Homo sapiens
tgtttactggatgttcatacatgaaacaaactacaggataaagtcaaaactccttaagccatgcaaagcattttagagtggcgtcttcgctgtatgccagccttagtctctgctaaatcaagtccgatcgtgccagattgacatcccatccccagacagcattaataatgtttggagtttgtttgtgtgtataatgtacttcatttaaaagtttaatgcaaccggacgtggtggctcacgcttgtaatcccagcactttggcaggccaagttgggaggatcacttgaggtcaggagttcgagaccagcctggccaacayggtgaaactccctctctgttaaaatataaaaattagctgggtgtggtggtacgcgcctgtaatcccaa

SEQ ID NO: 375964 - DNA, 433 bp, Homo sapiens
aagtaatttattgcacgtcaaacagttaggaaatggtaaaactgggccaaaaaactgaaatagtctggctccaaagcccttgctattaatcactatgtagaaagacaatagaggcatacaggcagtaaaatgcaatgaaaaaraaaactcaaagccacaagagatattgtattaaggttaggtttttatttgaagaattttgatctaggttagcttataatatagtactttctcaattatatcagctaattttttatgtgtcaaaatgctctacagagaccccaatggggatggggtgatgttagttttaccatcatcatcacttactattaactttctggctgttaagtttctcagctaaaataaggtgctcacttgtcttgtagataccatgcactatatattttctaagaaattccaaggttttagtaat

SEQ ID NO: 375965 - DNA, 390 bp, Homo sapiens
tgttaaacactccctgcatccctggatgaaacccacttgataatgatgtattatctttctgattgctgttggatttgcttagctagtgttttgttgaagatttttgcatctgtgttcatcagagatattggtctgcagttttatttttttgttgttatgtcctttcctggttttggtattaggtgatactggcttcatagaatgatttagggaggatgccctatttctccatcttttgaaatagtttcagcaggattagtatcaattcttctttgaatgtctggtagaatttagctgtgaatccatctggtcctggactttatttttgttggcaatttytttttgattactgaatcaatctcggtgcttgttattggtctgttcagggtt

SEQ ID NO: 375966 - DNA, 564 bp, Homo sapiens
caacaatggatgcaaaagccatgtggtagaaaattgtcagggaaatattgcctcagaaggtatgcttttgcaataaagaggtctggctgtcactrtctcaatcaggtggtcaaacaacattgccaatagtgagatggtctgacttgatatgcctcttgatgtgaggtgatgtgcttcctaaggggtacaacatcatctataagatgtgagattgtttttatactgtttaactaaattttatcctaaggaagcagtcagacaatctcaggctatgggatgatctgcaggacaatttgactagacacttcaaatgaataaatacgatgaagaaatgaggcaggtggagagtctttcagattaaggtaggtgtaatgattaatactgagtgtcaacttgattgtattgaaggatataaagtattattcctgggtgtgtctgtgagggtgttgattaatatttgagtcagtggactgagagaggcagatccaccctcaatctgggtgggcatcatctaatcagcttcctgcgagactattataaagcaggcagaaaaacatggaacga

SEQ ID NO: 375967 - DNA, 438 bp, Homo sapiens
tgttatggaccttaaagtagtgagattattttggattatctatgtgggcccaatctaaacaccttaacacttcaaagcagataaatttctccagctggagtcacagagctgcagagaagaaggtgagaatggagaaatcagttagaagagaagatgagtgacatttgaaatgggagaggtgctcaacctccattgttggctttgtacgtgaagggggagtaaacgaccagggaatgtgtgtagctttcagaaactgagaacaacccctggctaactgcaaggaaatggagacgtcagtcctaccaccacatggaattgaaytgtgttaacaacctgaatgaggatggaaatagattttgccctagagcctccagaaatgtaggctggccaacaccttgatttcagccttgggagactgagcagggaaacagctaagca

SEQ ID NO: 375968 - DNA, 438 bp, Homo sapiens
tgttatggaccttaaagtagtgagattattttggattatctatgtgggcccaatctaaacaccttaacacttcaaagcagataaatttctccagctggagtcacagagctgcagagaagaaggtgagaatggagaaatcagttagaagagaagatgagtgacatttgaaatgggagaggtgctcaacctccattgttggctttgtacgtgaagggggagtaaacgaccagggaatgtgtgtagctttcagaaactgagaacaacccctggctaactgcaaggaaatggagacgtcagtcctaccaccacatggaattgaactktgttaacaacctgaatgaggatggaaatagattttgccctagagcctccagaaatgtaggctggccaacaccttgatttcagccttgggagactgagcagggaaacagctaagca

SEQ ID NO: 375969 - DNA, 438 bp, Homo sapiens
tgttatggaccttaaagtagtgagattattttggattatctatgtgggcccaatctaaacaccttaacacttcaaagcagataaatttctccagctggagtcacagagctgcagagaagaaggtgagaatggagaaatcagttagaagagaagatgagtgacatttgaaatgggagaggtgctcaacctccattgttggctttgtacgtgaagggggagtaaacgaccagggaatgtgtgtagctttcagaaactgagaacaacccctggctaactgcaaggaaatggagacgtcagtcctaccaccacatggaattgaactgtgttaacaacctgaatgaggatggaaatagattttgccctagagcctccagaaatgtaggctggccaayaccttgatttcagccttgggagactgagcagggaaacagctaagca

SEQ ID NO: 375970 - DNA, 579 bp, Homo sapiens
gccatacactgttaggggcacatttttatgtgagtaaacatttttgatttatgaaaataaaactatgtcttaattcttttaattgggaaattgtcatcctaagagctctcagtgttagraaattttaaacttacccccatgcccaaactaaaaccatttaaaaactcatatttaattgataagaaaattttcaaatctttttcacttaattgaataatatttgttgacctatttctggttcattatatttccctctaaaaagaatttgactctggtcgatctgtcttcattctcaattaaaatggtttgaactgcctctacaactcatatttcaatttttggttggaaatatgaagagataatttgtaagccaattctagaagtatggtgtaagaatgaggacatttcacttgtgtctccttatagacagatatactagctgaataatcatcctgcttttgaggttctttgctagttcccatgaatccattatttcattcaatcatcaagtgtctcctacatgcttagcattttgccacaccatgggcatataaagagaagtcaatcaataaggcatct

SEQ ID NO: 375971 - DNA, 589 bp, Homo sapiens
tgtcttgatagctttcacccttatagagattgagtcttcttgaataaacactctacatcaaggattttaggtcagacccagtggctcatgactgtaatcccagcactttgggaggccgaggcaggtgggcagatcacctgaagtcaggagtttgagaccagcctggccaacatggtgaatcctcatctctactaaaaatacaaaaattagccaggcatgatggcaggcacctgtaatcccagctactcaggaggctgaggctggagaatcacttgaacctgggaggttgcagtgagtggagatcacatcattgcactccaacctgggcaacaagagcgaaattccctctaaaaaaaaaaaaggatttttttctaaggtagccaccacaggttggtgtgagagtgaaaggagccatcatgaaaggtggtcctttctcggatctcttaatagaaaagtaagacaaaacagccgcttcctttagggcttccytcacttcatctaatacctctctggtattagactttctacctagaagagaaaaatcacatgtcaaatgtgtctcaactcctattttcccttactctcattc

SEQ ID NO: 375972 - DNA, 568 bp, Homo sapiens
tttatttaactgttatttgagatgcaggacagagtttccagtgccattttttatagcttttgatttttttctgacctctagacctttctaggccttttgataaattatcttctcctccccccgagctttcccctcaaggagaggatacttcctttaggtcatgatgctaatatgtctgtgctaacatctgaaattcaagttcactgtttttcttcccccatctcacgtagcctgtgtatgtacatatgcctgtggacattacacttacagacacatacaaatttctttctgatcactgkgactttctgagcccttgtcttcagaggtcattttcctgagagcttgtgactagttcggaatacagaggagctcttagatatcttctcatacaagagaaggaagcaatttgcgacctaacaatagggttaatgtcagctggtcatagtttagtgagtttaattactggaatttctatataatattaccccaaatgacatctgggttggaatgaacatgagattccttttgggtgagcaaaataaaacaggccatgcaaaactatgctctg

SEQ ID NO: 375973 - DNA, 588 bp, Homo sapiens
atttattattccataaatttatattacataattcttttattagttaccattcatctctctgactttaaaaagatcgaatgttgctagtcaggttttatttagcattttatctctcatcaccctggttaccttgagtgctgtattagtttacaggctgccataataaatcactacaaactgagtagtccaaagaaacagaaatctattctatcccagttctggactctagaagtctgaagtcaagccatcaacagagacatgctcactccaaaggctstagggaagacttcttctttgcttcttctagtttctggcaatctttggcattcctttggctttggcagcataatcccaatttcttcttcatctttgcatggccttcttctatgggtgcctgtgtgtttctgtatccaaatgtctctcttctcataagcacaccaatcattagacttagagctcatcccaatacaatacatgatgcatctcaacttgattacagattcaaaggccttatttccaaataggaaacagttccagattccaagtggacaagaattttggggagacaccactcaactcagcgtagtc

SEQ ID NO: 375974 - DNA, 582 bp, Homo sapiens
caaatggcctctctttcattctaatcacctttatcattctgttataaaccagcttgctctgaaatatataactagtgaagtataaggtccccaattttttagggaaagaattctaggaaagtttattgtttaatatttatcaatatcatttgatacttgtataatatcttatttcgatgagtaaattatatttttcctttaatcagccttgggacactactgggagtaattaaaacatgtaagataattatcagcaagataaatacaatatcagactcttcctaacaatattttatgtttaakactttcattcagttaaatgggagttttgcctgcacaaggactgctggttgggaagtctatagaagcagccaatatttaagtggatagattaaaaatcaaatgcccctacatgacaagaataagcagaatggtgtttagagtgataggtaccaatggccataacatttctcatatgctaaattcagacttttctaattttatttgtatagaacctctttccagaaatggctccaaagagtgacttgccagtgctgttttagcaggtgctcagaggagatg

SEQ ID NO: 375975 - DNA, 580 bp, Homo sapiens
aagtgggatactaatggtatcagaaacaggaaacctcatttatcaatgaaataaataagtaaagtctgtgtcaggcactgcaatagaattaaytgcatctggaatacatttatgttccaatagctgattccattggtttttcttaatgctagttttcttcatgtgtttatgaattcatggttgcagtgtcattttgaacaaaagccttttggtttgggcttggacagggactttatgtctcctcacacccacatactcttgcactgtccctcgccttgtctctccctctcttgctgtcactctcatgctcacttctcttgctaccaacctctgcctgcttgcctgctttcctctatcgttgcctttacatgccttccacacccagcccaagtccagaccaggtcttctaaaggaggtgtgaggcatatgtcagtttctttttctttttttctctttttgagacggagtctccctctgtcacccaggctggagcgcaatggcatgatctcggctcactgcgacctctgcctcctggattcaagcaattctcttgtttcagcctcctgagtagctgggatta

SEQ ID NO: 375976 - DNA, 596 bp, Homo sapiens
caagattcactaaaggaacactttgttctttgctgtgaagggacaggcagttctctctccttttctcccccctgcatctcccttctgccttgccttcataactcctaaagtgcagctccatgctacgaacaaatgcaccatcaccctgcgaaggaaaggaaatattcgcattggctcatgcccaggggatgctttaaaagccttgaggctgcagatagcctggtgctatctctgtaatcttaatcctgagaccattaaatgccattttcttctcctaagaagagcatccatcatcaggtattcagcatagtagcatctttccctgaaatatgattagctgcaaggccaccagaaattcaggcaggtactgattgctattaaagctctactaggaagcttaggtaagatttcaagagctgtggttcctgtgaaaaggcaatcagattttctgccctagagatataggatcamtcagccctggatcaaagaaaagcatggaaaaagagaatatgaatggaactggaaataaggattttggcatctgttgctcatttcctttggctgtctggagggagaatagcgctgtcattgtccct

SEQ ID NO: 375977 - DNA, 605 bp, Homo sapiens
aaatgagttgatacatgtggcctgcttggaagagtgtctggcacttaggaagcaagcagtaggactagaattttcattacttcatttcatggaatctaactatccatcaatgggaagaaattccattactgtgggacctctaagaaagaaagaaaaatatcctgctaattaaactataacctaagactgccttatcacttagaatttttatattatatttattggaagaatggttttggcttaattaatcatagatttttatcataaattacttttgtgcatacatgaaaaggaaaatgtaagagaaataaactggttaaggtattcctgacatttctctaaaattcagacttaaatcttcatcactttttcactgagtccttaatatccaacttctcctacacaatatcaatccgtgccacgaaaagtgctaatgatgaagttgataataaagtattttctaaaatccatatcaaaaaccaastttactttaggtcttcttaacatagttttgcaatcatgtacagctagtcttctttgactcgctctagaaagattgccaataatctgaacaattggtttctagtggttaaaaagagtgatcc

SEQ ID NO: 375978 - DNA, 556 bp, Homo sapiens
agaaaaataatatattattaatgacattttgtaaaagtagacctttgtgaatgtctgatttatctccmctatatttatatttttaatcttgcaagataattctctttgatggtattattggaggtaaacactagcaaaacatattctagaagaggaacagaaaacccataaaaataggcacatcactataattaaaccttgactgctgaaatgttaacagacattttaaggaagcaatgatagggattttaaaaaatgtactaacccaacccatacttgtattaattatttttcaaatttcttcctttatttaaaagatgtgatagtggaagggataaagtctctgctctctactctttccaattcttgaaggctatagaatatatggaggatctaatatcttacaaggaaaaacaggatttaaaaatcagtccttaatttattaggaatattttcgtcaagagcaatgtctcagattgtggggtttttgacccccaggggatttttgcaatgtctggtgaggttttttattgtttgttacaactggagaggggga

SEQ ID NO: 375979 - DNA, 511 bp, Homo sapiens
tgtggggtttttgacccccaggggatttttgcaatgtctggtgaggttttttattgtttgttacaactggagagggggagctgctggtaatcttccatacattatctagtgggaagaggatagagatatggctaaaaatcctataatttgcagaacagttcttatgacaaagaattatccagcccaaaatgtcaatgttgagaaacgttgatctacagttaaaatttcaawcaacataacgcataaaagacaatatgctcgaattcaactacaattacatatttatggtcagattagttacaatcttgattgtaactagggtagtggtattaggattatcttagattatacgtgttgccacatggtaatacatgaggccaggtaatatttatagaatagaggtttatttagctcatgattcagcgtgctgttcaagaagcatgacatcagcatctgcatctggtgaggccttcaatctgcttccactcaaggcagaaagtgaagtggagcc

SEQ ID NO: 375980 - DNA, 511 bp, Homo sapiens
tgtggggtttttgacccccaggggatttttgcaatgtctggtgaggttttttattgtttgttacaactggagagggggagctgctggtaatcttccatacattatctagtgggaagaggatagagatatggctaaaaatcctataatttgcagaacagttcttatgacaaagaattatccagcccaaaatgtcaatgttgagaaacgttgatctacagttaaaatttcaatcaacataacgcataaaagacaatatgctcgaattcaactacaattacatatttatggtcagattagttacaatcttgattgtaactagggtagtggtrttaggattatcttagattatacgtgttgccacatggtaatacatgaggccaggtaatatttatagaatagaggtttatttagctcatgattcagcgtgctgttcaagaagcatgacatcagcatctgcatctggtgaggccttcaatctgcttccactcaaggcagaaagtgaagtggagcc

SEQ ID NO: 375981 - DNA, 511 bp, Homo sapiens
tgtggggtttttgacccccaggggatttttgcaatgtctggtgaggttttttattgtttgttacaactggagagggggagctgctggtaatcttccatacattatctagtgggaagaggatagagatatggctaaaaatcctataatttgcagaacagttcttatgacaaagaattatccagcccaaaatgtcaatgttgagaaacgttgatctacagttaaaatttcaatcaacataacgcataaaagacaatatgctcgaattcaactacaattacatatttatggtcagattagttacaatcttgattgtaactagggtagtggtattaggattatcttagattatacgtgttgccacatggtaatacatgaggccaggtaatatttatagaatagaggtttatttagctcatgattcagcgtgctgttcaagaagcatgacatcagcatctgcatctggtgaggmcttcaatctgcttccactcaaggcagaaagtgaagtggagcc

SEQ ID NO: 375982 - DNA, 666 bp, Homo sapiens
agttttacttaacattggtataaatatcatattaattttaagtcatgaacaatgtgtataaactgttggcactaaggtaaacttcataatctaaaagtgaaaagaaatgggcacagaaatagaggaaaacatgtagggaaattaagtttactaaaataactaatttttatttcaccttaaaataaaaatacccttagcacttatcattccagtgcttctgttaattttagccccatccatattggcaaatataatattacctgataaaaataatcttagtaggttatttttcaaccatatgttatcaaacgagcctgttgcaacattagatctccattgcagtrcatgatactatggctgttgatatttctgttggaagaaatgcagtatgacagcatttcagtgcttctttgaagaagtgttcattggctatattctggggttttatctttttctgttgaggcagagcattaaggatttaatcattacagttaattttttttcaagatcttactgtttttgagtcaaagttatagagaaaaataaaacactatgttaaatgaatttgttagccatttttatgcattgaaaatcattttttctccacaaatttgagccaagactgaaaatcattcactatacatctatcaatttaatcatacagtc

SEQ ID NO: 375983 - DNA, 666 bp, Homo sapiens
agttttacttaacattggtataaatatcatattaattttaagtcatgaacaatgtgtataaactgttggcactaaggtaaacttcataatctaaaagtgaaaagaaatgggcacagaaatagaggaaaacatgtagggaaattaagtttactaaaataactaatttttatttcaccttaaaataaaaatacccttagcacttatcattccagtgcttctgttaattttagccccatccatattggcaaatataatattacctgataaaaataatcttagtaggttatttttcaaccatatgttatcaaacgagcctgttgcaacattagatctccattgcagtacatgatactatggctgttgatatttctgttggaagaaatgcagtatgacagcatttcagtgcttctttgaagaagtgttcattggctatattctggggttttatctttttctgttgaggcagagcattaaggatttaatcattacagttaattttttttcaagatcttactgtttttgagtcaaagttatagagaaaaataaaacactatgttaaatgaatttrttagccatttttatgcattgaaaatcattttttctccacaaatttgagccaagactgaaaatcattcactatacatctatcaatttaatcatacagtc

SEQ ID NO: 375984 - DNA, 590 bp, Homo sapiens
ttatgaatttccttatcaattaggaaggaaaatttatgtttatatatattcaataattcagcatatacagaaaatttaatcaagaaccaaattcttttaagagtatatgattaaaatagtcattcttatcaatgctcaaatgtggaaagaaagaaaggatgtctcttatgctaaacaaattaacccctcttttacatagataagacacaggatttccctgtgaatgattctttttattgttgttgttctaaggtaactctcaaatgaacaatcttctaggtgtcaaaaattttctaagtaaccactgcaatttgaaatggtcaagtcagtgttaggccatttaaaaagataaatacaayaataataataataacagcaacaataataaaagaacccagcattcttccagaggtagcacaagcttattagtggacgagccaaagcaatactacccaatgggcttattttgggtcagatagcagtcccttagccagcaaatgtgtggccaggagattgatctcaaagcaaatttcacagatccaaaactgaagaaattcctattaaattttgaaaaacaaagcaaaggaagc

SEQ ID NO: 375985 - DNA, 590 bp, Homo sapiens
ttatgaatttccttatcaattaggaaggaaaatttatgtttatatatattcaataattcagcatatacagaaaatttaatcaagaaccaaattcttttaagagtatatgattaaaatagtcattcttatcaatgctcaaatgtggaaagaaagaaaggatgtctcttatgctaaacaaattaacccctcttttacatagataagacacaggatttccctgtgaatgattctttttattgttgttgttctaaggtaactctcaaatgaacaatcttctaggtgtcaaaaattttctaagtaaccactgcaatttgaaatggtcaagtcagtgttaggccatttaaaaagataaatacaataataataataataacagcaacaataataaaagaacccagcattcttccagaggtagcacaagcttattagtggacgagccaaagcaatactacccaatgggcttattttgggtcagatagcagtcscttagccagcaaatgtgtggccaggagattgatctcaaagcaaatttcacagatccaaaactgaagaaattcctattaaattttgaaaaacaaagcaaaggaagc

SEQ ID NO: 375986 - DNA, 505 bp, Homo sapiens
cacgagagataactttaaactctgactgccagtgagctgggtggaacagagacatatttctcttctttcaaaagcaaatgggagaaatatcgctgaattctttttctcagcaaggaacattgctgagaaagagaatgtgtccctgagggtaggcctctgaaatggcagcttcaggggtggccgtcttttatggtcacagctgtagagatgaaataagccccagtctcctrtagcactcccaggcttattaggatgaggaaattcccacctaataaatttggtcagaccggttgtctgctctcaaaccctgtctcctgataagatgttttcaatgacaatgtgtgcctgaaacttcattagcaattttaattttgccccagtcctgtggtcctgtgatcttaccctgcctccatttgccttgtgatattctattaccttgtgaagcatgtgatctctgtgacccacaccctattcatacactccctcccctttataaaatcactaa

SEQ ID NO: 375987 - DNA, 578 bp, Homo sapiens
cagcaaagaacaaattcagcctatactggtttatcctccccctaagacattaaaacaattgtgggcattgcttgggatcaccgrcttttccaaactatggatccccagatagagcgagatggccaggccactctatacgctaatcgaggagaccagagggcaaatactcatctagtagaatgggaaccagaggcagaaacagccttcaaaaccttaaagcagtccctagtacaagctccagccttcagccttcccacaggacaaaactcctctttataagtcacagagagaggaagaatagctcttggagtccttactcagactcgtgggacaaccccacaaccagtggcatacctaagtaaggaaattgatgtagtagcaaaaggttggcctcactgtttatgggtagttgcagcagtggccatcttagtttcagaagctatcaaaaaacacaaggaaaagatctcactgtctggactactcatgatgtaaatggcatagtaggtgccaaaggaagtttatggctatcagacaaccacctgcttagataccaagcgctactccttgagggactggtg

SEQ ID NO: 375988 - DNA, 524 bp, Homo sapiens
tccaaaatatatcaatgccctgtagtgctattgaataccaggacttatttcttctatataaatttttttttattgattaacaaactcctctgcaattctccaccccaccaccttttccatctttggtaaccaccattatatttactatatccatgggatcatgwttttagctctcacatgtgcatgggaccatgcaatatttgtccttctgtgctggcttatttcaattaacataatgttttccaattccatacatgatgagacaaaagaaaggatttcattcttctttatgcctaaatgatactcctttgtatatatttaccacattttctttagacattcatgtcttgatggacactgaggttgattgcatatcttggctttttcaatagttatacaataaatatgggagggcagatatgtctttaatatacttgtttcatctctttttgacatttacccagtggtgggattgctagatcatatggtaattctactttcagtttattaaggaaacactatac

SEQ ID NO: 375989 - DNA, 589 bp, Homo sapiens
caacaacaaacatgaaaataggccatcaaaataagactgaggccttgaaagagttttataactttaagagagttgcatttcaagctattggtgtaagaataatcacagcccggccgatatccattgtctttaatacatattgttgaagggcatattttggcatatttatgtcagtagtccaagaaaaataagctttgattctaaagtgctcatacttttaatttgcatctcactcgtacttttggaggggtcctcaraaagtttactggcatggtcaattcttatataccaacccaaagttttcaactcctttgacaaaaagttaagctatattttccacactttattatctatttgttgacttttcagtcctcacaattttagaggaaatgattttgagaggtgaagccaactggacttcctgggtcgagtggggactttgggaactttcctgtcttacaagaggcttgcaaaattcaccaatcaggatctttcctgtcttacaagaggtttgtaaaacgcaccaatcagcgctctgtaaaatgcaccaatcagtgctctgtaaaatgcacctatcagcaggatttta

SEQ ID NO: 375990 - DNA, 589 bp, Homo sapiens
caacaacaaacatgaaaataggccatcaaaataagactgaggccttgaaagagttttataactttaagagagttgcatttcaagctattggtgtaagaataatcacagcccggccgatatccattgtctttaatacatattgttgaagggcatattttggcatatttatgtcagtagtccaagaaaaataagctttgattctaaagtgctcatacttttaatttgcatctcactcgtacttttggaggggtcctcagaaagtttactggcatggtcaattcttatataccaacccaaagttttcaactcctttgacaaaaagttaagctatattttccacactttattatctatttgttgacttttcagtsctcacaattttagaggaaatgattttgagaggtgaagccaactggacttcctgggtcgagtggggactttgggaactttcctgtcttacaagaggcttgcaaaattcaccaatcaggatctttcctgtcttacaagaggtttgtaaaacgcaccaatcagcgctctgtaaaatgcaccaatcagtgctctgtaaaatgcacctatcagcaggatttta

SEQ ID NO: 375991 - DNA, 612 bp, Homo sapiens
taattgacttatttttttactcacccatgtataaattttaaccatgtaaaactataagaaagattttcattagatacatattaactttataattcatgtagaaaattggtgacaggaarcaatatgcttattttaatagtagaggaattgaaagtcaaacaataaatgtgaacttcatttacagttaaggcagaaatatcagtagaaaattacaatttgtattttgttacctgttaattatatatcagtaaaagagatgtggtatattttaggatatttgggtcttgaagataatgttacagacaatttccaggactttccaataaaatttcagtcaataatttaaatacagatacacatctttctgtacaggtaatgtgatctgacaaaattgcttaaatttcagttcctgtatgtttttgtaaattcttatatttgacatagcaaatggaaaatttttggtaacagataattgcatgtctttttggatatgcatattctacttgccatattttactactaaagtttaaatattattagtttacccatcaatgagaaaaagagaacaattaattgaaatcgccatttacttatttttctctaacattctac

SEQ ID NO: 375992 - DNA, 611 bp, Homo sapiens
gctcatgtatatgcacaaacactggcattcagcagagccctcattaccatgctgcgaagtgtggattcaaattagagctgcatgttagacaatggcttgcataagctaaggcttgttaaaacaatgttaatgagcccccattgtactgagcagttgcactttcagatctttcatatttgttcacatgaggcctgggaagatgctgaactgatcgttggaaayagggctagaaactctctacagagtcactaaggtagagggaattagaaaaatcagaaacaaagagccatatataatatagtttaggttaaaaaatagagttatattaattcccccatgtgtcagaatttttttcaggcatgtttagaaaatctggccaagcaaagcatactcaagatccgtaacctcgcagttactgtcgtttgtattttccagtgtcatttatacagaactttctaaggcttttctgatttgtttgcttcttctacaattattttcttaaccaagaatacttttttatgaggccaggtaaaatgtgttcttgggaaaaaaaaatattttataaagaatgaaaatgatctcgctactagttattcttaatgttactttgt

SEQ ID NO: 375993 - DNA, 615 bp, Homo sapiens
atcccaaagatctctgatataatgccatgttcttcagtctgttctgaaatttgtttcatttaacattagaaattgtatgtatattccttagtggcctactctttgcasatttcctggaattttcttgcatatgtgcagaagacttgagtgatagataattaaggtttgcaaaatagtgattgtgaaactgaggatgctgctaggaagagcaaggcaaatctgacccaagacagaggactcaggccttgtggggtgagctctgtaactaaccagcaaacaataacctaaagataaaaatttgttattttcttgtatttatatatgcatgaataagagcaacccacaggaacacagtgtctgaccaaggcagggatgagattcataaaagcagagggtgctggttaattgagagaagcccatgccttgtcagctcaggattgacaggttacaggagttccacacaggcagatgctttctcctcaagtcctaagcttctagaattctgctagtggcttgcaatcaggctgcccaggccattagatggagttgaagcagtatggtgaagtcacagaccacaaaacattgtaagttgcaaacacaggctgttttgatgcc

SEQ ID NO: 375994 - DNA, 615 bp, Homo sapiens
atcccaaagatctctgatataatgccatgttcttcagtctgttctgaaatttgtttcatttaacattagaaattgtatgtatattccttagtggcctactctttgcagatttcctggaattttcttgcatatgtgcagaagacttgagtgatagataattaaggtttgcaaaatagtgattgtgaaactgaggatgctgctaggaaragcaaggcaaatctgacccaagacagaggactcaggccttgtggggtgagctctgtaactaaccagcaaacaataacctaaagataaaaatttgttattttcttgtatttatatatgcatgaataagagcaacccacaggaacacagtgtctgaccaaggcagggatgagattcataaaagcagagggtgctggttaattgagagaagcccatgccttgtcagctcaggattgacaggttacaggagttccacacaggcagatgctttctcctcaagtcctaagcttctagaattctgctagtggcttgcaatcaggctgcccaggccattagatggagttgaagcagtatggtgaagtcacagaccacaaaacattgtaagttgcaaacacaggctgttttgatgcc

SEQ ID NO: 375995 - DNA, 619 bp, Homo sapiens
taatagaacttcccttttcagaaacaataaaaaaaagacattttgtaaaatgtggtcctgaacaagtcacagtaaaaaataaatatatacttaatgtctacctcctcaaaacagaagttagtttctattcctctgtcttgaaaacaaggtgaaaaatcagcctataagcaactttgggcaragggttgccaaaacaaagctcaagcaattgaacttggacacctcaaaagaatttgagagaatctgaccacaggatccaaattctattaataacagatacaaaggtcaagtggctcctcccaagtagcttagttcatattcccatagggtctatagtgtaacccatttaaataaagaattcacaaatcaaataattgccttgaatattacaatttggaaaaatgtctcttgaaataagctatggggagaaaaaatgtagccatgttgcatttatacaggtgtaaagagcaaagcaaatgctattgctgttgtgtgcaggcagctttccctctgactgtacttagaaaatccatagagatgctggtgtgtggtggggacattttcctttatgcctctcaatgaaaggaaaaagtaatcttcctttgcccccagagaatta

SEQ ID NO: 375996 - DNA, 526 bp, Homo sapiens
caaaacttccatgttacctgatatttttcttcctttcttagtctactcacttctctgccccacatctgtattctctccttcactcgtacctctgagagctaggatctctagccaaccagctactggaagcaatgaacatcaactttgatgagagtaattatgtgaattatcttaattaccctgtgagataggtactgctattgacctcattttataaacaaggaaactgagtcttacagaggtaaagtaacttgcttaaagacaaataggcagcaactggatttgaactcaggtttcattaacccatatccacacgattaaccattaagtgatgttgcctgttggaagttctacatagacactcactgcttcagtaggttgccagcaacctgtcataaatgtactgtcagcctatgcaagtgtaattcttgtaagtcaatcattgcagttccattcagacaaaagawcactcatctttcaaacagttgcattatccatctttacactgtatttttgtcaccccaag

SEQ ID NO: 375997 - DNA, 497 bp, Homo sapiens
cctttgctcgtctttagtttatcttaaaattacattgcatatcttttttttttttttttttttgaracggagtttcactcttttcacccatgctggagtgcaggggcaaaatctcggctcactgcaacctccgccttccaggttcaagtgattctcctgcctcagcctcccgaatagctgggattacacacatctgccaagatgtcccgctaatttttgtatttttagtaagacggggtttcaccatgttggcaaggctggtctctaactcctgacctcagatgatccgcccgccttggcctcccaaagtgctgtgattacaggcgtgagcccccatgccctgtctttccagctatttaaactatgtaactctaaaaaattggttcctgttacataaaaagacacaatatacattgatcatatcatattcaatttcaggaaagtttgagtgtgaatttgatggccatcctttgatgtgggtatgttgataagacttg

SEQ ID NO: 375998 - DNA, 497 bp, Homo sapiens
cctttgctcgtctttagtttatcttaaaattacattgcatatcttttttttttttttttttttgaaacggagtttcactcttttcacccatgctggagtgcagkggcaaaatctcggctcactgcaacctccgccttccaggttcaagtgattctcctgcctcagcctcccgaatagctgggattacacacatctgccaagatgtcccgctaatttttgtatttttagtaagacggggtttcaccatgttggcaaggctggtctctaactcctgacctcagatgatccgcccgccttggcctcccaaagtgctgtgattacaggcgtgagcccccatgccctgtctttccagctatttaaactatgtaactctaaaaaattggttcctgttacataaaaagacacaatatacattgatcatatcatattcaatttcaggaaagtttgagtgtgaatttgatggccatcctttgatgtgggtatgttgataagacttg

SEQ ID NO: 375999 - DNA, 497 bp, Homo sapiens
cctttgctcgtctttagtttatcttaaaattacattgcatatcttttttttttttttttttttgaaacggagtttcactcttttcacccatgctggagtgcaggggcaaaatctcggctcactgcaacctccgccttccaggttcaagtgattctcctgcctcagcctcccgaatagctgggattacacacatctgccaagatgtcccgctaatttttgtatttttagtaagacggggtttcaccatgttggcaaggctggtctctaactcctgacctcagatgatccrcccgccttggcctcccaaagtgctgtgattacaggcgtgagcccccatgccctgtctttccagctatttaaactatgtaactctaaaaaattggttcctgttacataaaaagacacaatatacattgatcatatcatattcaatttcaggaaagtttgagtgtgaatttgatggccatcctttgatgtgggtatgttgataagacttg

SEQ ID NO: 376000 - DNA, 497 bp, Homo sapiens
cctttgctcgtctttagtttatcttaaaattacattgcatatcttttttttttttttttttttgaaacggagtttcactcttttcacccatgctggagtgcaggggcaaaatctcggctcactgcaacctccgccttccaggttcaagtgattctcctgcctcagcctcccgaatagctgggattacacacatctgccaagatgtcccgctaatttttgtatttttagtaagacggggtttcaccatgttggcaaggctggtctctaactcctgacctcagatgatccgccygccttggcctcccaaagtgctgtgattacaggcgtgagcccccatgccctgtctttccagctatttaaactatgtaactctaaaaaattggttcctgttacataaaaagacacaatatacattgatcatatcatattcaatttcaggaaagtttgagtgtgaatttgatggccatcctttgatgtgggtatgttgataagacttg

SEQ ID NO: 376001 - DNA, 611 bp, Homo sapiens
ttggttacatagatatattgtgtaatgctgaggacaggggtacaaatgatcccatcacccaggttgtaagcagagcasccaataggtttttcagcccttgttcctttcactctttccttcctctaatactccccagtatctgtgtcttccatatttatgttcatgtagggtagtctattttttatcactcattttaatattcctttagaacagtgatttaattttatatatctctgtgtactgaggtctgagagcagagctaggcaggtggaactgcacgacatgtgtattaataacataaatagtggccgccaagttgttgatgaataaacatagaacaagaaaggtacatattttgggtattttataaattattaaagcatggttttacaataattaagagtgatagatcttactatttggatcagttcctagctctgctagttatttagaaactatgtgattaggatcaatagcattaattttcattttagtttctccatttataaaaaagagataaggataatgcgtattgttgtattatatgtatactaacattataaaacatctcagtataaatggacctttctaaaccaacgggcctgtattct

SEQ ID NO: 376002 - DNA, 611 bp, Homo sapiens
ttggttacatagatatattgtgtaatgctgaggacaggggtacaaatgatcccatcacccaggttgtaagcagagcagccaataggtttttcagcccttgttcctttcactctttccttcctctaatactccccagtatctgtgtcttccatatttatgttcatgtagggtagtctattttttatcactcatttyaatattcctttagaacagtgatttaattttatatatctctgtgtactgaggtctgagagcagagctaggcaggtggaactgcacgacatgtgtattaataacataaatagtggccgccaagttgttgatgaataaacatagaacaagaaaggtacatattttgggtattttataaattattaaagcatggttttacaataattaagagtgatagatcttactatttggatcagttcctagctctgctagttatttagaaactatgtgattaggatcaatagcattaattttcattttagtttctccatttataaaaaagagataaggataatgcgtattgttgtattatatgtatactaacattataaaacatctcagtataaatggacctttctaaaccaacgggcctgtattct

SEQ ID NO: 376003 - DNA, 568 bp, Homo sapiens
tgaaatttttcctttggcagtattaatgttaacttttctgagtttggtaattgtattatgatatgtagggcaatgtccatgttattaagacatacttaagtgtttaggggtgaagcatcaaataataactatccaatgttttagcaaaatctctctctctcwcacacacacacacacacacactctgtgtgcatgtgcatatgcatacatgcataagtaattgaccaacagtgagagcaaagtgagaatgagagtgagagagagagagaagagagatactggtgaataatcagatggtgaaatggaatgaatggacatggccttatgaaatagtatatacaacatattaccacatctgttatagtgattctgggggcatggtcctcttcatcccttaattataagaaaatctttgtctctatttaggacttgatttttttttctgatggaaaaaatgattaaaaatgcttatgtctaagcattatactctatgattgtattaactttaatctacaccttgaggtgattaattaacatttgaaatacattaacagaatcaatgtaacag

SEQ ID NO: 376004 - DNA, 568 bp, Homo sapiens
gaggatcatgtgagcccaggagtttgagaccaacctgggcaacacagcaatactccctctcttaaaaaaaaaaaagccttaaatttatttgttcatagtcttcaactcaygaatttttctaggaatttaattaatcaggaatataattatttaagagttttatctcatcttgaaatatgtgaaaaattgggaagaaaaccctaaatgttctcaataaggattaataaattatagcatacatgaatagtctgcaaccattaacaattatatttaaggaatatttaatattacaaaaattatgaaatgtgctaagtggaaaaagcaggctatatagctatacattattaatacggtatataaacttatatgctataaaaataaccaacatgttggtttctctttgtagtgcaattgggatttgagggagttctcccttctctgtttaaaaggatctctttaaaaaacaacaaatgtaatacaacttagcacatagatagatattaaataagtgtattatataaagaatcttaaaacttctcccttctccgtccaccccagagctaaccaa

SEQ ID NO: 376005 - DNA, 620 bp, Homo sapiens
gtgcaaactctgatgactacattagtgatatgaaattaaaaccaaaaatatttgcatccttgaagtactagggagactggtttcaatatggcaaaaatcaaaacttctttactaataattaaagaattctgagtggaatctgagacctacaggcaaaatcattttacttgagtttccaatataataacgttttcagtataataatgtttgaaatactggctaaccaaagtcagatgtgagaaaaatagcttcagaaatgccagacaaaagaaaaagaaagattttcaacattctccagagaagacaccaaaatttaatagtwtcactttggtatatatagcaacataaagcttctatccatatatattttctttacatccatgataatatgcccaggagattttttcccctgtatgggctccggctaggagtattgttttcgattctgcagttttataattttgtcttttttgtctcttatctcagtcagctagcataaaattattgtttttgctcatttcttatgttttatcatatgtaattgggataggtactcccgggactgtgggacagctggagttactatgaagttggcgacatcaattttgcagccagcctga

SEQ ID NO: 376006 - DNA, 620 bp, Homo sapiens
gtgcaaactctgatgactacattagtgatatgaaattaaaaccaaaaatatttgcatccttgaagtactagggagactggtttcaatatggcaaaaatcaaaacttctttactaataattaaagaattctgagtggaatctgagacctacaggcaaaatcattttacttgagtttccaatataataacgttttcagtataataatgtttgaaatactggctaaccaaagtcagatgtgagaaaaatagcttcagaaatgccagacaaaagaaaaagaaagattttcaacattctccagagaagacaccaaaatttaatagtttcactttggtatatatagcaacataaagcttctatccatatatattttctttacatccatgataatatgcccaggagattttttcccctgtatgggctcyggctaggagtattgttttcgattctgcagttttataattttgtcttttttgtctcttatctcagtcagctagcataaaattattgtttttgctcatttcttatgttttatcatatgtaattgggataggtactcccgggactgtgggacagctggagttactatgaagttggcgacatcaattttgcagccagcctga

SEQ ID NO: 376007 - DNA, 579 bp, Homo sapiens
tactatgaagttggcgacatcaattttgcagccagcctgacattgatttaaaatgcatttcagactgatgaaaggtggtggattcacagtccctgagactgaagttctctggttcctcgcggaacaaagagcgcccggggaactgcagtgccccataaacttgcttcagctgtgaggtgacattcaccagaaagaggcatgttgggtagctacagctgaaagaactggattttcggaaagccacatatcacttaggtctgcaaagagtagtttaattgttcctgttgttagatgaatcaaattagagtaccttcactatagttcatttaacaacaattttcagtttcttgatcatgtttttttttctcctagatttttccaacatgtgagatttcctggagatttaaatttgtttttattcagaacttttsactaacttcctatgcaaaataaggcaagttccttggtctttctgtgattcagttaatatctctattaaatggtggttaaattagctggtttataaaacaccttccggttctaaaatccagatataggatcccagtttatcataagaga

SEQ ID NO: 376008 - DNA, 579 bp, Homo sapiens
tactatgaagttggcgacatcaattttgcagccagcctgacattgatttaaaatgcatttcagactgatgaaaggtggtggattcacagtccctgagactgaagttctctggttcctcgcggaacaaagagcgcccggggaactgcagtgccccataaacttgcttcagctgtgaggtgacattcaccagaaagaggcatgttgggtagctacagctgaaagaactggattttcggaaagccacatatcacttaggtctgcaaagagtagtttaattgttcctgttgttagatgaatcaaattagagtaccttcactatagttcatttaacaacaattttcagtttcttgatcatgtttttttttctcctagatttttccaacatgtgagatttcctggagatttaaatttgtttttattcagaacttttcactaacttcctatgcaaaataaggcaagttccttggtctttctgtgattcagttaatatctctattaaatggtggttaaattagctggtttataaaacaccttccrgttctaaaatccagatataggatcccagtttatcataagaga

SEQ ID NO: 376009 - DNA, 579 bp, Homo sapiens
tactatgaagttggcgacatcaattttgcagccagcctgacattgatttaaaatgcatttcagactgatgaaaggtggtggattcacagtccctgagactgaagttctctggttcctcgcggaacaaagagcgcccggggaactgcagtgccccataaacttgcttcagctgtgaggtgacattcaccagaaagaggcatgttgggtagctacagctgaaagaactggattttcggaaagccacatatcacttaggtctgcaaagagtagtttaattgttcctgttgttagatgaatcaaattagagtaccttcactatagttcatttaacaacaattttcagtttcttgatcatgtttttttttctcctagatttttccaacatgtgagatttcctggagatttaaatttgtttttattcagaacttttcactaacttcctatgcaaaataaggcaagttccttggtctttctgtgattcagttaatatctctattaaatggtggttaaattagctggtttataaaacaccttccggttctaaaatccagatatakgatcccagtttatcataagaga

SEQ ID NO: 376010 - DNA, 577 bp, Homo sapiens
gtttgatgagtgaactaatcttataatgagaggaagatgtgaaaataagggcctgagagatttaagtagctcctgtggactatggcaaaagtcattgaataagaagaagtaaaatgatttctaaatagtattgaaggtttagctgagactggaaaccatatctttattaagggtctagtcagcaggtgcactgctgtaggcaaggcagtgcaasgaagaagagaagagagtttaagcttatgttgacaacaatatggatgaaataattgtcccagaggtctcagacagtagttgataaatgaagcaacattgaacaattgatcaaggtgagcctgagaccatgagcgttggtctcaaccatggttctgagaccaggaacacaagtaatgttctaggataataatcacataatttccaagtttctcataaaatatatggggatgttagtattataaaactggtggcagaaataccagagaaaaactcgctttgggtctggatttctgactattgaactgagtaaatttataggtggtcagaagcagcatggaaattgtaattcaaagggaaagaatga

SEQ ID NO: 376011 - DNA, 561 bp, Homo sapiens
cctctctcattacactatgctcacttcctagtttaccttatctactcttgtggctgtaattcatatttatcatggataattcccaagtgtatgttttcagattgagtatctcttttaactctagactcaactgagcactttacatttcaactcggatgggcaattgacatctcacacctaatacatccaaaaccacatgcctaatctttcttttcaacctgctcttcctgcaatagttttcatctcagttaatggtaattctgttcttctagttgcttaggttaaagttgttgaataatctttgacctacctcttcttctcacaccccacatttaatcttattgcaaaacctattagccatacttgtcaaatacatctcaagcatgatgacttttaccatccctccactmtcttttctggccaaagctcccaacgtcttccatctaatacattgcagtggccttataaatggtttcttggcttattttgaactatatgcagtatagcagccaagtaagcctgtataaatgacaatcaaaaagcctaatagtcctgtgcccc

SEQ ID NO: 376012 - DNA, 588 bp, Homo sapiens
gtcataaaaaattctgtaattctacaaatatagtacttcttgttgatgcaaatccgttgaaaagattactacatcagagaaaaataggtaagcaggtgaccattctctgatgttagaggagagaagtaaaatatggcatattttttagactaagattagcatgagcattggtaaagtcccctcttcttccattccccaagacaaaaactaaagaatacttcatccaaatctttttttatgaattaaaaacattaaaaaaatttgtggagatagagtctcactatgttacccaggcttgtcttaaactcctggcctcaatcagtcctcctgcttagccctccccaaatgctggagttacaggggtgagtcaccatggctggcctcctttacatcttaaaatagctagcaacatcctaaatgctaatcttgattctgcaactgttgtatttcaatttctcttgtttctactgaatgacgtttacaaaagtgctgtacagaggaacaacrtaagttctctgtttatagacaaggagcaatgtgataaatgctgtcacatttgttttctaagtaactcctgcagtggcttga

SEQ ID NO: 376013 - DNA, 489 bp, Homo sapiens
cattctcaagcattaacagagattgagcaccttctcaggacagttgtgctaaaataaatgggagcctaaatgactcaacttcccaaaggaaccttcatgtacagaacaataccagaggtttaaggcaataaattaatgctttaagatacccccagtttaatttacattatttgtagggtttaaggtaggagccaggtgtcaaaatagataacaaattaatcatccatttgtttatccatttattcaacagacatttgttgcatgctaatttcttatgttcattgtgaaaattgctgggagtataacagtaaacaggtaaagatctgcagtttaatatttcatagtgttgactgcccaacrtctccctttttatgtttggagaatttctcctcttatgagacctgtatcttcaagatagatgtcagaaacttaattttcaaaccttttctttgcaaccagggcccaataatttgatttaggtttctccca

SEQ ID NO: 376014 - DNA, 522 bp, Homo sapiens
gtagaaaaccctcagatatttggaaattaagaactataattccaaatagttcataagtcaaagaagaaatctctgaaaaattagatatttttaacaaaataaaaatctaaagtaaattaaatctgaaatatacatatttaaagaaaaaaggttgataataaattatttatgtaattgttttcattcattttgtgttgctataacagaataccacagactggttaatttataaataaaagaaatttattttttagagttctggagactggaaagtccaaggttwaggggactgcatctgctgagggccttgtggttgtgtcgtcccatgatggaaggtggaagggcaagagaacacaagaaagcccaagagagaccaaactctctcatataatgaatccatctcatgatgacaaacccattcctgcagtaatagcatgaacctatgcatgagggtagcccattcacaagggtagattcctcatgacttaatcacctcttaaagatcctgttaaggttgctgca

SEQ ID NO: 376015 - DNA, 606 bp, Homo sapiens
ggccattgtggtttaatcatgaacacatgaaacactaaaatagccaaaacaacaaaaaaagaagctcataatttcagctgaagaaagcttgtttcaagtttattccaaaaacagaaaaaaatacacatatttttatatatgtatgtaacagagaaagaaacagggaagaaaaatcaaaatagaagcaaatattgaagatattttacacagctaacataaaaactgcagaatttgattcctctaaaagacagtragaatagaacttgtaaatttgaaaaaaatcagttgagacattgttgttcttgctaattaacaaaaagtgttgatgtgacatttaacacttagatgttaactactgaacagatgaaaataaactgggaaagcctggccccaaagtgtaaaaagaccataggaaacatgtagatataataatttatagttctgccacattgcccagctaggcaacttaaccagcaacttccagccccaagctcagatctcatttagctatttagactggggccagttccaggaagtaagttttgattagttcaatctaataatggatagtaatttcatcctcctggctagtaaacaggtttagaa

SEQ ID NO: 376016 - DNA, 606 bp, Homo sapiens
ggccattgtggtttaatcatgaacacatgaaacactaaaatagccaaaacaacaaaaaaagaagctcataatttcagctgaagaaagcttgtttcaagtttattccaaaaacagaaaaaaatacacatatttttatatatgtatgtaacagagaaagaaacagggaagaaaaatcaaaatagaagcaaatattgaagatattttacacagctaacataaaaactgcagaatttgattcctctaaaagacagtgagaatagaacttgtaaatttgaaaaaaatcagttgagacattgttgttcttgctaattaacaaaaagtgttgatgtgacatttaacacttagatgttaactactgaacagatgaaaataaactgggaaagcctggccccaaagtgtaaaaagaccataggaaacatgtagatataataatttatagttctgccacattgcccagctaggcaacttaaccarcaacttccagccccaagctcagatctcatttagctatttagactggggccagttccaggaagtaagttttgattagttcaatctaataatggatagtaatttcatcctcctggctagtaaacaggtttagaa

SEQ ID NO: 376017 - DNA, 421 bp, Homo sapiens
ctgaacactgttgtcccctgaggtgctacaaacagcttgctctatgatgagagagaaaccctatttctgagaataaagaataatgtgatcattgaaatagaaaattaaccagccattgaaccatcctaccacccttcactgcaagataataaatctctaaattgtttatcccagtgattctcaaagtgtggcttccagatcagcagcagcaacatcacctgggaacttgtcgggaatgcaaattctcagamaccaccccaaaactacagaattagaaactctgggcaggtgatcttcatggtcccataaagtttgagaaccactggaaagaatcattttgaattgagttctgttacttttggccaaaactttctatatgaaaccataaatggtaaggagttagataaaagtaaatggtgat

SEQ ID NO: 376018 - DNA, 581 bp, Homo sapiens
acacgaaaagctttataatcaggaatctaaatgcaaacaaaggcagaagacagacatttttacatgtgtgggaattctaattcccataagcccttcttaaggaaactaatagagccaaacaaaagacaaatagagaaactgtaaaggattggttagaatattgaattcgtttaaccccaagactaagaccaaagtgctgataaacttatgggtagaaaagcaaaagaaaatattgcaaaccataaaaataagtcaaaaacatattaaccaaaatgtggatacaaaaggaggagaaaaatggaaagtggtgtaagtactctatttcctcatctttagtagctagtgattaaaatatatttttaaaagactgatataaatgtaatagagatamcatttttaaaaagtatataatggaacaaagtagtaaagcaagaaaaagactgtgttcatctgtaatttgatagtagaaataaagggaaggatggggaaattacaacaattttattattgcacaaaatggagatttaatagttactgcctaacaatgaagagtagtagttagtatattacataaaattatg

SEQ ID NO: 376019 - DNA, 581 bp, Homo sapiens
acacgaaaagctttataatcaggaatctaaatgcaaacaaaggcagaagacagacatttttacatgtgtgggaattctaattcccataagcccttcttaaggaaactaatagagccaaacaaaagacaaatagagaaactgtaaaggattggttagaatattgaattcgtttaaccccaagactaagaccaaagtgctgataaacttatgggtagaaaagcaaaagaaaatattgcaaaccataaaaataagtcaaaaacatattaaccaaaatgtggatacaaaaggaggagaaaaatggaaagtggtgtaagtactctatttcctcatctttagtagctagtgattaaaatatatttttaaaagactgatataaatgtaatagagataccatttttaaaaagtatataatggaacaaagtagtaaagcaagraaaagactgtgttcatctgtaatttgatagtagaaataaagggaaggatggggaaattacaacaattttattattgcacaaaatggagatttaatagttactgcctaacaatgaagagtagtagttagtatattacataaaattatg

SEQ ID NO: 376020 - DNA, 581 bp, Homo sapiens
acacgaaaagctttataatcaggaatctaaatgcaaacaaaggcagaagacagacatttttacatgtgtgggaattctaattcccataagcccttcttaaggaaactaatagagccaaacaaaagacaaatagagaaactgtaaaggattggttagaatattgaattcgtttaaccccaagactaagaccaaagtgctgataaacttatgggtagaaaagcaaaagaaaatattgcaaaccataaaaataagtcaaaaacatattaaccaaaatgtggatacaaaaggaggagaaaaatggaaagtggtgtaagtactctatttcctcatctttagtagctagtgattaaaatatatttttaaaagactgatataaatgtaatagagataccatttttaaaaagtatataatggaacaaagtagtaaagcaagaaaaagactgtgttcatctgtaatttgatagtagaaataaagggaaggatggggaaattacaacaattttrttattgcacaaaatggagatttaatagttactgcctaacaatgaagagtagtagttagtatattacataaaattatg

SEQ ID NO: 376021 - DNA, 504 bp, Homo sapiens
  misc_feature (1)...(504): n = A,T,C or G
aacagttttatctatgtaccaaataccatggtaactaccttcataaagcaaaaactatgagatattcagggaaaaataggcagaaacatactaataggagactttaacatacaagtctctgatcaaatctggtcaagtggacaaagatatgtataaagatacggatggactaaacaacataatcctaatgaggtacatcatacgaataccttatgtaatgttgcaatctgataatagaaaatatacctcattgtagataaaacatgaagcatacacaaaaaygttctgtgtaaccactaggcacaaagaaagcctcaataattttagcatagtccatacaaaagattctctcatcactaggcaatgaaagtagaaagtaacaaaaaagaaaaaaattaaggcctgtccacctggaaatgttttaagtttctattacacaaatcttaggtaaaagagtaaatacaacttaaagtgtggtatttcttaaaaagtagtaaannnnnn

SEQ ID NO: 376022 - DNA, 518 bp, Homo sapiens
gggcttttatggtccctttcacactaggaaaagggttctctgcttagattggtaaaggtagaaagggggctgtggcagagaagagatgggaactgggagaaggggaggagaactgcatttcttgcctctagggagtggtggcttaktgcttctgctggtgcctaagtgttgggatgcctacctaatggagaaaaactaagttaaaaccgggcatttaaggaaaaacatgtttccaaatatttcaagatctccagtgaagtgcaaactgtacccagggttagaagagtgaggttaaagcaagattggagcaagtaacatgcatattaaagaaaaagataataaaaacaataaaaagaaggaaggaaaggcagaaaaaagaaaggaatcacacacactagagaggttaaaaaagaaacaaaagaaataacaacttagaataaggatgttgaagaaaataatgacaatgatgacactattttattaaaactgactgtgtgtcagcctttatcctaggcatt

SEQ ID NO: 376023 - DNA, 595 bp, Homo sapiens
acactcattttcattttcaaagttgaaatttttattagatcctcaaaagtattgtattcaaattcactcaagagaaatctttataagagaaaatataaattgaatttcacgtgctacacctattttagggatttgggaataaaagataaaagaaactaattttctataaatcctggtrtattatcaaaatggtacactaatttttatattaaattatttaactattagcatataataaaattaaaaatgatagttctgttttacagttacaaagcattgaatttgaatataatttaataataatatgtaaaatgcactatcatatgaagttgatctgattaacttcataatttgatatacttataaaatactattaaaaatatattaacatggttccctttaaaacattatttcctctgatatgactatgcccaatgctttaatgcatatgaccaaatgctttaatttattccctaaacattatcttgacactattggtttctataattgttttctagataatttaactataaaacatttcaatatttcagttttatcctgtatgtgatgcatcattaaattgtattgtataaat

SEQ ID NO: 376024 - DNA, 623 bp, Homo sapiens
tattgttatttttgttgttttgtggtaagtaattacagctgcattttagttataggattgggaccatcagtgaaaaagaatagttaaaatacctgttactgggataccataaaacacctatttagtaaatttggcatggaatgtgcttcaccraaaaaaaatgaagccaacacctctgaggttgtgtcgtgctgatggagcccatcagggcagttgactgggtggaggtgcctctgctaccatggcaagatctgactgcttcagcctcttgagcctcctcttagatgtgcagccctcacccactgccctgctccagccacactgcctcctgtcagttggaacagtctaagctctggctttcatcaggtgcctgttgatatctttctcctggcttttcacaggactcatctccttagttctcatttcaagtgtcatctcctcagaaaagcttttttataactattcctctctaaaggaagacgttctttgtatttttaaacctgttctctgctgggttttttttttttctgactgcacacgctaatctgtaatgaccttatttatttggttgtgtaatataacctaatgcccctgagggcctttgtaccccttctgcctaggaa

SEQ ID NO: 376025 - DNA, 623 bp, Homo sapiens
tattgttatttttgttgttttgtggtaagtaattacagctgcattttagttataggattgggaccatcagtgaaaaagaatagttaaaatacctgttactgggataccataaaacacctatttagtaaatttggcatggaatgtgcttcaccgaaaaaaaatgaagccaacacctctgaggttgtgtcgtgctgatggagcccatcagggcagttgactgggtggaggtgcctctgctaccatggcaagatctgactgcttcagcctcttgagcctcctcttagatgtgcagccctcacccactgccctgctccagccacactgcctcctgtcagttggaacagtctaagctctggctttcatcaggtgcctgttgatatctttctcctggcttttcacaggactcatctccttagttctcatttcaagtgtcatctcctcagaaaagcttttttataactattcctctctaaaggaagacgttctttgtatttttaaacctgttctctgctgggttttttttttttctgactgcacacsctaatctgtaatgaccttatttatttggttgtgtaatataacctaatgcccctgagggcctttgtaccccttctgcctaggaa

SEQ ID NO: 376026 - DNA, 571 bp, Homo sapiens
ggagccagtaggacaagactggacttcttagtagtgcaagactagactagactccatgttctgagaaaggcaatctgatcttagccagtctaatcaaggattaaatctctaaaaatccctctaattggggactggtttatgtcagtctatgctggaaaacatcattccttctaatggtaaaaagatgaatamgcaattctagagcagtggttttgtaaacactcaaggggttcaccttgcccactgcctagacagagctgatttatcaagaaaggggaactacaatggagaaagagtttttcaggcagagccagctgtgcagaagaccagagttttattattattcaaatcattctccctgaacatttggggatcagagttttaaagataattcggtggataggtgcttgggaagtgggtagcgtcaattgttgatggaatcatagggggtcaaagtaaatttttgttgctcttggtgtcttctgttcctgggtgggatggcagaactggttgagccagattaccagtttgggtggtgtcagctgatccactgaatgcaaggtctgctaaa

SEQ ID NO: 376027 - DNA, 577 bp, Homo sapiens
tggctggggagctcttccacattgtcaggaacgctggaaaaaggctgaaagagaatgatgagaaaaaacctggagaatggcaaatgcttcactgaagcaatctgctacattcctccttgcagagtgggatgcctggcctgagatgagagaagtaataggactgagaggaagtgaaagaaatagaacccaaggagagcaggacagaaagaaaagatttatagcatggattgtagccactctaatatttgggctcctcctgaacttaatccaacttccacgttactgaaaatttattatttcccttatggatttgtagaaaacagatagcaaatgartaaggaaaatggaaagagacccaaaaaagagacaaaaaatggagaggactgtgagtccaattcctgtttctcctgcttttgtcagaccaagtaaaacacttaaaatcgtcagtggatattggctgaaccttgccattttgaaagtggctattcaaaccttttagagacggagctggtcattgcctcagttattggccaaggtatgacatgaactaatagcacttcagggacaatggcctttc

SEQ ID NO: 376028 - DNA, 540 bp, Homo sapiens
ggctattcaaaccttttagagacggagctggtcattgcctcagttattggccaaggtatgacatgaactaatagcacttcagggacaatggcctttcaatgaccatcaggcatcagtgcttctaaattggccaattttgagtgtcaggaggccagaagacataccatcacataagaaaaacactttaatccagtcattataaagtaggagcaaaacagagtggctgtggtgtttatagctatagctgtaatctcagtctaggtccattcagtcaagaagattgtttccagtctactagaaaacacttccaataagcctgaattacaaccccaatatcattttagttttttagattaacatgtgaaataaagagtttttcttagtcacagttacttttactgccaaaaacccaatgaatatctttccctctggaaccaaatacactgtttaattttaatctcttagctgactgacayaggaacaaaactggttttgcattttcccttttcatttacttttctgcaattgatcactggcctt

SEQ ID NO: 376029 - DNA, 599 bp, Homo sapiens
atctgtgaaatgaatcactgatttcagtgtkggtcaccacaaattatcagtgactagaacagtgaaagccttaaaacactggtcagaaaacagggtcatgtttctcacctgtcattaagttcctgtgttgccctgagaaagttttttaatctttttggacttcacttttattattagtgaaatgaagacctcaaagtctctttttacagttgtaaggcttttggttttataacttttaaattattataagagaggtaacaatgcaagatactaataaggatctttaatatttaatcagtgcttatcatgtacaaagcatacttcaatgcatttcacattactaaatgtcttagtccattttgtgctcctgtaacaagatgcctgagacttagtaatttataaacaatagaagtttatttggctcatggttctgaagactgggaagtccaacatggaggggctgcatgtggcgagggctttcttgctgtatttcccatggaagaaggcagaagggcaaaataatctgcatgagaaagaaaagcaaagatggctgaacccttccttttatcagaaacctcttcctacgataattaacatac

SEQ ID NO: 376030 - DNA, 599 bp, Homo sapiens
atctgtgaaatgaatcactgatttcagtgttggtcaccacaaattatcagtgactagaacagtgaaagccttaaaacactggtcagaaaacagggtcatgtttctcacctgtcattaagttcctgtgttgccctgagaaagttttttaatctttttggacttcacttttattattagtgaaatgaagacctcaaagtctctttttacagttstaaggcttttggttttataacttttaaattattataagagaggtaacaatgcaagatactaataaggatctttaatatttaatcagtgcttatcatgtacaaagcatacttcaatgcatttcacattactaaatgtcttagtccattttgtgctcctgtaacaagatgcctgagacttagtaatttataaacaatagaagtttatttggctcatggttctgaagactgggaagtccaacatggaggggctgcatgtggcgagggctttcttgctgtatttcccatggaagaaggcagaagggcaaaataatctgcatgagaaagaaaagcaaagatggctgaacccttccttttatcagaaacctcttcctacgataattaacatac

SEQ ID NO: 376031 - DNA, 599 bp, Homo sapiens
atctgtgaaatgaatcactgatttcagtgttggtcaccacaaattatcagtgactagaacagtgaaagccttaaaacactggtcagaaaacagggtcatgtttctcacctgtcattaagttcctgtgttgccctgagaaagttttttaatctttttggacttcacttttattattagtgaaatgaagacctcaaagtctctttttacagttgkaaggcttttggttttataacttttaaattattataagagaggtaacaatgcaagatactaataaggatctttaatatttaatcagtgcttatcatgtacaaagcatacttcaatgcatttcacattactaaatgtcttagtccattttgtgctcctgtaacaagatgcctgagacttagtaatttataaacaatagaagtttatttggctcatggttctgaagactgggaagtccaacatggaggggctgcatgtggcgagggctttcttgctgtatttcccatggaagaaggcagaagggcaaaataatctgcatgagaaagaaaagcaaagatggctgaacccttccttttatcagaaacctcttcctacgataattaacatac

SEQ ID NO: 376032 - DNA, 609 bp, Homo sapiens
catgctttcacttataactaagaatatgtgatatttggtttcctgttcctgcattgactcacttatgattatggtctccagctgcatgtatattgctgcagaggacattatttcactcttttttatggctgcatagtattccattgtgtatatataccacatttgctttatccaactcatcattgrtgggcacctaggtggattccatgtctttactattgtgaatagtgtggcagtgaacatatgtgtgcatatgtctttttggtagaatgacttaatttcctctgggtatatacctagtaatgggattactgggtcaaatggaagctatgtttttagttctaaaaaggacatttaatttctgataaacatcttttctttgtatgttttatattcttgaatacacttctactcagctcttaatttcaaatctttagaattttaagtaataaaaattttcaatagtagctatttcatttagaatgcactaaaataacctatcattttatctagtgtttgggttagtgatataaatttactgtatatttaaatatatacacacagaacataaaacctcaccataattctatcccagagatttatacctgg

SEQ ID NO: 376033 - DNA, 609 bp, Homo sapiens
catgctttcacttataactaagaatatgtgatatttggtttcctgttcctgcattgactcacttatgattatggtctccagctgcatgtatattgctgcagaggacattatttcactcttttttatggctgcatagtattccattgtgtatatataccacatttgctttatccaactcatcattgatgggcacctaggtggattccatgtctttactattgtgaatagtgtggcagtgaacatatgtgtgcatatgtctttttggtagaatgacttaatttcctctgggtatatacctagtaatgggattactgggtcaaatggaagctatgtttttagttctaaaaaggacatttaatttctgataaacatcttttctttgtatgttttatattcttgaatacacttctactcagctcttaatttcaaatctttagaattttaagtaataaaaattttcaatagtagctatttcatttagaatgcactaaaataacctatcattttayctagtgtttgggttagtgatataaatttactgtatatttaaatatatacacacagaacataaaacctcaccataattctatcccagagatttatacctgg

SEQ ID NO: 376034 - DNA, 622 bp, Homo sapiens
acttgctgtgtctgattctcttcaccaggttgacagagtcaggatttttgccttttaatgaaatgagttatctcttgggtcctttgaaacctaattggcagaagggctgggtacaaccctgatagggagtgcytttcatagaaggattttttttttccagccttaaaagctaaaaagaagctttgtgccaaaaacctttatgatgtgcagttttctatcactaaaatgaccccgtgttttaattcaacaggttttaaacacacatttcttagaagctaagaagggacatttcagagtttattgggacctttcagaattatgaaaatatccagccctaaatgctaaaaacaagctttgtgccaaaaagctttattatgtcttgatttttttttaatttttaatttttattataagttccagggtatatgtgcgggatgtacaggtttgttacatagataaacgtgtgccatggtggtttgctgcacctatcaaccaatcacctagatattaagcccagcatgcattagctattttccctaatgctctccctccccacccaatcccctgacaggccccagtgtgtgttgttcccctccctttgtccatgtgctttcattgttca

SEQ ID NO: 376035 - DNA, 622 bp, Homo sapiens
acttgctgtgtctgattctcttcaccaggttgacagagtcaggatttttgccttttaatgaaatgagttatctcttgggtcctttgaaacctaattggcagaagggctgggtacaaccctgatagggagtgcctttcatagaaggattttttttttccagccttaaaagctaaaaagaagctttgtgccaaaaacctttatgatgtgcagttttctatcactaaaatgaccccgtgttttaattcaacaggttttaaacacacatttcttagaagctaagaagggacatttcagagtttattgggacctttcagaattatgaaaatatccagccctaaatgctaaaaacaagctttgtgccaaaaagcyttattatgtcttgatttttttttaatttttaatttttattataagttccagggtatatgtgcgggatgtacaggtttgttacatagataaacgtgtgccatggtggtttgctgcacctatcaaccaatcacctagatattaagcccagcatgcattagctattttccctaatgctctccctccccacccaatcccctgacaggccccagtgtgtgttgttcccctccctttgtccatgtgctttcattgttca

SEQ ID NO: 376036 - DNA, 622 bp, Homo sapiens
acttgctgtgtctgattctcttcaccaggttgacagagtcaggatttttgccttttaatgaaatgagttatctcttgggtcctttgaaacctaattggcagaagggctgggtacaaccctgatagggagtgcctttcatagaaggattttttttttccagccttaaaagctaaaaagaagctttgtgccaaaaacctttatgatgtgcagttttctatcactaaaatgaccccgtgttttaattcaacaggttttaaacacacatttcttagaagctaagaagggacatttcagagtttattgggacctttcagaattatgaaaatatccagccctaaatgctaaaaacaagctttgtgccaaaaagctttattatgtcttgatttttttttaatttttaatttttattataagttccagggtatatgtgcgggatgtacaggtttgttacatagataaacgtgtgccatggtggtttgctgcacctatcaaccaatcacctagatattaagccyagcatgcattagctattttccctaatgctctccctccccacccaatcccctgacaggccccagtgtgtgttgttcccctccctttgtccatgtgctttcattgttca

SEQ ID NO: 376037 - DNA, 593 bp, Homo sapiens
tgatatcctttctttcacttggtctatttggctgtttatacttgtgcttgcattgtgaagttctcgtgttgtgtttttcagttccataaggtaatttatgtttctttctaaactggttattctttttaacagctcctgtaatgttttatcatggttcttagctttgttgcaaggggttaaaatatatttctttagctcagtgaagttcattattacccatcttctgaagccttcttctgtcaatttgtctccacctaagcccagttctgtgcccttgctgtgtaagtgttaagatcatttrgaggagaagaggcactctggctttttgagttttcaatgtttttctttgattctttctcttattcatgggtttatctacctttgatctgtgaggctgttgacctttggatgcagtttttgtggggtcttttttttgatgatgttgttgttgctttctgtttgtttttcttttagcagtcaggcctatcttctgtggggctgctgtggtttgccaggtgtccactccagaccctgtttgcctgtgtccctcttgcaccttggggtatcaccaggggaggctgcagaacagcaaa

SEQ ID NO: 376038 - DNA, 534 bp, Homo sapiens
aaaagtttcctattgaagtcagtcagggagtccccaaagtggtaggtttactttgtgagtttttcatatcaattcaaggcgtaaactgattatgtgtgtaaacagtgagtttgtcttgagaagctgtctggaaagtatccagaatcagacagatgccacaatggcatttcttctttcagctagtaggactattggtgaaaggttaacagtaaatcatttggcctcctggatatttgaagaaatagaatgaactgaaataaatctctctccccaaacttctctttcccacctcccacctctcagctaatcatattatgcttgttgaatgagtgaatgtgaatatgagagatttttttttttacttccactcataaaggatatagaacaaagagattaccaatgaagtgagaagttttcatctcmaaaattttaagctcttgagaacacacataatatacactcatcagcatatacatgggaccttgaacagcataaaattccccctgtaagatacacaatacaactaccaattcc

SEQ ID NO: 376039 - DNA, 482 bp, Homo sapiens
cctacatgacttgagtgcagtgggtggccaggttccagagctatgaccattacaaaaaggcgaaggtctggaactcctccacagagtgcactatcccagagcctgcactgcctctttcaggatgtgccacctttatacaaaataccctgaggattacagcatctggatgagcctctgattatcatctgctgtgttccagtcaccgcatctccttattgaggcagttggcatcacctcatggtcctcctctccaccatgactcctatctgtgtccaggttgtatctcactcrattctgagttgacagaaaatattgccaatcatagtgttcttttttatttgtatttttttgagatggagtctcactgtgttgcccaggttggattgctgtggtgcaatcttggctcactacaacctccgcctaccaggttcaagtgattctcctgcctcagtctccccagtagctgggattacaagcatatg

SEQ ID NO: 376040 - DNA, 588 bp, Homo sapiens
atttggtgagcgctactctctctgctgcataagtgaactaagtcattttgcttgctgagatcttgaagctgtattatatgcattggactttacaactggacttagactgttgtaagccagaggatcatggagggattgacaattctcatgcagaagtttctctgaattaggttgttcttgccctctttgcaatgatgcctttgacttcataacaaattaagactagkcatggtcatttttggaaaatttttacacagagaatgtaaagtaacatttggcagcttcgtagatgcttttggagatggagtctcactttgttggcataggatgaccagcttgctggcctgggtagagataagctaaatgtaacagggagaagaaaaattgaaaataataaatggatcagcaagactggcttcttctggagactctgggattgaagccttacactctacctccctttgttaccatttataggtttgccaagaccgcatccattgtgcatcaaggttagccttcattcagccagcctgaggtgcagagcatggggtgggtcggggagggccagccgtgtacttctaacttcca

SEQ ID NO: 376041 - DNA, 578 bp, Homo sapiens
ttcttagcttctttgcattggattagaacatactcctttagctcctttattacccaccttctgaaggctacttctgtcaattcrtcaaactcattctctgtccagttttgttctgttgcttgcgaggagttatgatcctttggaggaaaagaggcattctggtttttggaattttcagcctttttgcgctggtttctcccccatctttgtggatttatctacctttgttctttgatgttggtgaccttcagatggggtctttgagtggtcatgccattcctttctgtttgttagttttccttctaacattcaggcccctctgctgcaggtctgctggagtttgctggaggcccactcctgaccctgttttcctgggtatcaccagcagaggctgtagaacagcaaaggttgctgcctattctttcttctggaagcttcatcccagaaggacacctgccagatgccagccagagctctcctgtatgaggtgtctctcggccctactgggaggtgtctcacagtctggatacacgggggtcagggacccacttgaggaggcagtctgacccttagcagag

SEQ ID NO: 376042 - DNA, 604 bp, Homo sapiens
tcatgccaggaccagcttcccaaagaatcattttacgtggcttgcctaagttccgtaggaatttcagaggcttaagaccttcttttgttctggtttcagtcgttgcatagttgtgttggtcataattacacggaagtttaaatggggttaaatgcccatatgtgtatatatttacatacatgtatataaaattgaatcatcctatgtccacagcagtcatatctaacaaaataatagaatttgaagaaatccargagtcctgcaaatgactgctggtgccctggcacatggaattcagaaagaaaaaggcagcgttattaaaggattcttgaacatttctaggaccaagaaatgttccttggtgtgaaatgtcatgtttctgtttcctgaaaactgtatcctcaatgggaaaattttgattcattttgctacaaaatgctttactaaatcagtgatattatctctaagcaaaattctgttaaattttggtttatgattaattgatgaaagtcaatacatcatagaatgtatcattaatatagagcagtgaaaattaatgttgtaaatcttgatactctagtataacttttgtctccactgaagc

SEQ ID NO: 376043 - DNA, 604 bp, Homo sapiens
tcatgccaggaccagcttcccaaagaatcattttacgtggcttgcctaagttccgtaggaatttcagaggcttaagaccttcttttgttctggtttcagtcgttgcatagttgtgttggtcataattacacggaagtttaaatggggttaaatgcccatatgtgtatatatttacatacatgtatataaaattgaatcatcctatgtccacagcagtcatatctaacaaaataatagaatttgaagaaatccaggagtcctgcaaatgactgctggtgccctggcacatggaattcagaaagaaaaaggcagygttattaaaggattcttgaacatttctaggaccaagaaatgttccttggtgtgaaatgtcatgtttctgtttcctgaaaactgtatcctcaatgggaaaattttgattcattttgctacaaaatgctttactaaatcagtgatattatctctaagcaaaattctgttaaattttggtttatgattaattgatgaaagtcaatacatcatagaatgtatcattaatatagagcagtgaaaattaatgttgtaaatcttgatactctagtataacttttgtctccactgaagc

SEQ ID NO: 376044 - DNA, 604 bp, Homo sapiens
tcatgccaggaccagcttcccaaagaatcattttacgtggcttgcctaagttccgtaggaatttcagaggcttaagaccttcttttgttctggtttcagtcgttgcatagttgtgttggtcataattacacggaagtttaaatggggttaaatgcccatatgtgtatatatttacatacatgtatataaaattgaatcatcctatgtccacagcagtcatatctaacaaaataatagaatttgaagaaatccaggagtcctgcaaatgactgctggtgccctggcacatggaattcagaaagaaaaaggcagcgttattaaaggattcttgracatttctaggaccaagaaatgttccttggtgtgaaatgtcatgtttctgtttcctgaaaactgtatcctcaatgggaaaattttgattcattttgctacaaaatgctttactaaatcagtgatattatctctaagcaaaattctgttaaattttggtttatgattaattgatgaaagtcaatacatcatagaatgtatcattaatatagagcagtgaaaattaatgttgtaaatcttgatactctagtataacttttgtctccactgaagc

SEQ ID NO: 376045 - DNA, 595 bp, Homo sapiens
agatcaatggggtgaatgggggtgggggtggaggctcaaaaaaggcttctctgaaaatatactgaggaaagaccaaagagcaagccatgtggatatctggacaacaaacctttaaggtaaagggaacagttgtgtaaaagccrtgaggcaagatttggtgtgccaaggaagccatgatggctggagatgagtgagcgaagaggagaaaggcagggcatgaagtcagacagcagcagaccagatcatgggctcgtagataggggacttataggccatgataaggatttgggattttacaaagagagagacagtaagcccttagatgattgtgaggtgagacattataaaatcaagcatatgtttgtttaaaaatagggggggggataaatgaacaaaatggaaaaaaaattagtcctgagacacagggctgtaatgatatctcctatagacatggacagggagaatcttttatcaacattcatcttataaagcacaggggaactctgagattcaaatggttttgaaccgattcttgaagggtgactgaccagccatatacagtgacccttcctaattctgcctgtgccccacccca

SEQ ID NO: 376046 - DNA, 595 bp, Homo sapiens
agatcaatggggtgaatgggggtgggggtggaggctcaaaaaaggcttctctgaaaatatactgaggaaagaccaaagagcaagccatgtggatatctggacaacaaacctttaaggtaaagggaacagttgtgtaaaagccatgaggcaagatttggtgtgccaaggaagccatgatggctggagatgagtgagcgaagaggagaaaggcagggcatgaagtcagacagcagcagaccagatcatgggctcgtagataggggacttataggccatgataaggatttgggattttacaaagagagagacagtaagcccttagatgattgtgaggtgagacattataaaatcaagcatatgtttgtttaaaaatagggggggggataaatgaacaaaatggaaaaaaaattagtcctgagacacagggctgtaatgatatctcctatagacatggacagggagaatcttttatcaacattcatcttataaagcacaggggaactctgagattcaaatggtkttgaaccgattcttgaagggtgactgaccagccatatacagtgacccttcctaattctgcctgtgccccacccca

SEQ ID NO: 376047 - DNA, 607 bp, Homo sapiens
taaagaatacaagaatctacatgaatttggaattcagggacgagttgtaaatacaacacaaaagcacaatccatgatagaaaagattgataagttggaccttgttcatttcattttttatattttcactccagtttttataattctgttttcaacaggtataacataaactttatatagtatgtgttctatgttttccaccattagtatatatttttctgtaccattataaaaagaaaacactgttaataatataaagaatttctttttaaagaatggtattttctgtgagatgcattgttcagtgggatactactatggtgggtatattcctttttgggtttgccctacccaaagccactccctataatttgagtaatgctgacccacctctcattagagggaagacaagaaacttgaggttagtaggtaactctgaccatggtggttggttcagggagggcacatgtactatgttaggtcccaggtcattttctggagctattgggactgttagcttccagcttccagtggccagtgggcaagctatgcctgagaaagaagccarccaggagaaagccaaagtgaagaagttgggagaaagagtt

SEQ ID NO: 376048 - DNA, 490 bp, Homo sapiens
gtggaaactgaaattaaaggatgaataccatgtataatctctctaaagaaaatgagatacttargtataaatttaacaaaacatgtacaggaactgtatgctaaaaattccaaaatgctgatgagagaaatcaaagaagactcaactagatggagaggcacaccgtatttgtgggttgggagacttagcataatgaaaacgtcaattatctccaaactgatctataggtttatgccattcctatcaaaattccagtgaggttttttatagacacaaacaaatatattctaaaatatataaggaaaagcaccctagaatagctaaaacaatcttgaaaaggaagaataaagtagaaagaaccactccacttgatattaagttctactatatagctatagcaatcacaacagtgtgtggtatcagtggagggacagataaattgatcaactgaacacagtagcgaattcagatgtagactcacaaaaatatg

SEQ ID NO: 376049 - DNA, 490 bp, Homo sapiens
gtggaaactgaaattaaaggatgaataccatgtataatctctctaaagaaaatgagatacttaggtataaatttaacaaaacatgtacaggaactgtatgctaaaaattccaaaatgctgatgagagaaatcaaagaagactcaactagatggagaggcacaccgtatttgtgggttgggagacttagcataatgaaaacgtcaattatctccaaactgatctatargtttatgccattcctatcaaaattccagtgaggttttttatagacacaaacaaatatattctaaaatatataaggaaaagcaccctagaatagctaaaacaatcttgaaaaggaagaataaagtagaaagaaccactccacttgatattaagttctactatatagctatagcaatcacaacagtgtgtggtatcagtggagggacagataaattgatcaactgaacacagtagcgaattcagatgtagactcacaaaaatatg

SEQ ID NO: 376050 - DNA, 642 bp, Homo sapiens
gattatgtcatataaagacagagataattttacttcttcctttctgatttggacaatttctttcctatacatattaaaaatgaatatgtggaaactgaaattaaaggatgaataccatgtataatctctctaaagaaaatgagatacttaggtataaatttaacaaaacatgtacaggaactgtatgctaaaaattccaaaatgctgatgagagaaatcaaagaagactcaactagatggagaggcacaccgtatttgtgggttgggagacttagcataatgaaaacgtcaattatctccaaactgatctataggtttatgccattcctatcaaaattccagtgaggttttttatagacacaaacaaatatattctaaaatatataaggaaaagcaccctagaatagctaaaacaatcttgaaaaggaagaataaagtagaaagaaccactccacttgatattaagttctactatatagctatagcaatcacaacagtgtgtggtatcagtggagggacagataaattgatcaactraacacagtagcgaattcagatgtagactcacaaaaatatgcctgcattcatctgttgtgtgttgctataacagaataccacaaactgggtaatatataaagaaaa

SEQ ID NO: 376051 - DNA, 517 bp, Homo sapiens
gccaagaaagctctcacctcaaggcctttgatttgccattctctaacttgagaattcttttcccagatattcacataactcatttactcacttaatccagacgcctgttccaataccttccccacaatagcactttccttattgccctttctaaacgaccgtatttgtcattctttgatccccatcctactttatttttttccttgtaatgcttattatcatctgacatcatayagatatttgttcttatttatttatttgttttccccccatgtaaatgtgagcttcatggaaaggcagatactctaatttttttttttcacggctgtatgtccagtgcctggaagagttcctaggacatagtattaagtgaaggaatgaaccacagtggttcagagttgggtcttggataagtgaagaaaagttttgtatagaaactttctttcctactactaacaagctgttttatttaagctggactcaaacacatcatctctgatataagcactaacaaact

SEQ ID NO: 376052 - DNA, 553 bp, Homo sapiens
gccctttctaaacgaccgtatttgtcattctttgatccccatcctactttatttttttccttgtaatgcttattatcatctgacatcatatagatatttgttcttatttatttatttgttttccccccatgtaaatgtgagcttcatggaaaggcagatactctaatttttttttttcacggctgtatgtccagtgcctggaagagttcctaggacatagtattaagtgaaggaatgaaccacagtggttcagagttgggtcttggataagtgaagaaaagttttgtatagaaactttctttcctactactaacaagctgttttatttaagctggactcaaacacatcatctctgatataagcactaacaaactaggctgccagtttgtcagcatagcatctgacaaactcaaacaagcattagtggctgactacataccattaattrgtgaccaaaatactcaataaatataatttatttaaataatgatgaaatgattaaataacagataaaatattaatcagacatgaacttggaagcctcacaagcatt

SEQ ID NO: 376053 - DNA, 497 bp, Homo sapiens
agctggactcaaacacatcatctctgatataagcactaacaaactaggctgccagtttgtcagcatagcatctgacaaactcaaacaagcattagtggctgactacataccattaattggtgaccaaaatactcaataaatataatttatttaaataatgatgaaatgattaaataacagataaaatattaatcagacatgaacttggaagcctcacaagcattargaaatgtctatggtggcctcgttcttaaattctataatttttccaggtttctatattttgtattcatatcactggtttgataaattttcttggatctttatgttaaatcaaaacaacatgaaaaatttaaactattttttaaagtcatagttgttatttggttggcatttatggcttttacagaaattcagctaagcaattcgtttatcatcatttatcatgagtgtccaggtcaatattttttacttcattctgagaatatagtgttatc

SEQ ID NO: 376054 - DNA, 221 bp, Homo sapiens
aatttctggttccatttatttgtaaaagcaaaatgtacttgctgtttgtgggttaaatttaaaaatctgtatcttaatcatctttttttcagtttgtatgatttaatttctattacttaaaaccaaagtgctttawctaagacatatgatttgatgtgaaggagtgaactaatatttaaagatctgtaaaccaagttcaatctgatgtaagatttgttgtt

SEQ ID NO: 376055 - DNA, 534 bp, Homo sapiens
ataacaagcttaaagcagtcctcaaaaatatcaagcagttaccaagtaacagattcatcgcatcacatcacattcattcattcatgtatttctacacatgaaatccaaagatatccagcacccaaaagagaaatatttacaatgcctagcatacagtaaaaaactacaaggcatgcaagaaagcagaaaatatgactcrtaatgtaaataaaaattaataaaaactaacatagaaattacaaagatgactgaatcagtggataaagacaataatacaatcatttagctgtgtttcattggtttaaaaaataaacaaaagattaaacatattaagtaggaataatatatttaaaaatacccaaataaaaacctcgatatagaaattacaatgtttctatattgctaaaaataggtgtatactgaatgggattaacagcacatttgaacctgaagaagaaaaactagtgaacttgaaaacatagcaatagacactatgaacaggaaagtatagagcaacataataatacacaagta

SEQ ID NO: 376056 - DNA, 621 bp, Homo sapiens
gtatggaaaaagcaggggctagtgtactgggtcaaaaaacaccaaataagcggttcagaaaacaaggaaggtgaagagcactagtatttattaggtgtctgtagcatattcaacccattacctcatttaatcttcaaaataaactgtattgactctagtttagaatgaggaagctgggcctctgtaattgtgtctaaggcttatagccagacaaaaagtgggagacctaagattagaatctaaatttctctagctaccaaatagttgtactaaactatgacagcacaaagatgagtcagctgtgaaaaataagacatagaatgggaytggaataacttagcatgcaaaagtgaatggatgggggaacattcatgttttaactacaccaagaatagttgcacagagggtgagaaaaagatgatctccaagagaagctaggagaaggttaaaatggagcatgagggatttgagttagatttgtgaaagaagtcttgcctatgagggctgtaagatgttgtaggagattattgagggcaggggctgcccttttgaaagtctctgtacagaagagattctcacctatttgtgaagatatggttagagacttggggagattacact

SEQ ID NO: 376057 - DNA, 552 bp, Homo sapiens
tttaagaagacctctactaattgctatcattcttcaaggttgactctggaattcttaatgatttaccttttaaagtctgcaatcttaagatgcaagtttttcaaattttggatcaagacataattcctctccaataaattggaayatatatataaagaattgtagttgtagttgtatatacgtagttacatgtacagtttttcatacatacagttatatatagttatcagaacctatggtcagtaaatgtttctgaatgctcatcaatgttccaaacatgcacaaaagtaatcagctaaaaccagcccatgaacacatatgttaactctgtaattgttgagccccgtgctaagggctgggctgagtattgcatggtaaacaaatatttccaatccctgtcctcctaaagctaacagtttagtaggaacattaaaaatataaatcaccaagtaaacccataactctgagctgtgaagataaacagataataattgcagagaatgatagtgaaggctaatttagattttgcggggagggggccatacgacactc

SEQ ID NO: 376058 - DNA, 573 bp, Homo sapiens
ttttctaattatttgcaattattgatgacgtcatcatcatttttctattttctccatctagagctctaacggtttggatgttggactttctgaatatcacacattgtattagtccattctcacactgctataaataaccacctgagactgggtaatttacgacgaaaagaggtttaaycgactcacagttcctcatggctgaggaggcctcaggaaagttacaatcctggtggaaggtgaaggggaagcaaggcatgtcttccccctgtggagcaggagagagagagagtgaagggggaagtgccacacacttatcaaacaaccagatctcctgagaactctatcatgagaaaagcaagggggaagtccacccccgtgacttgatcacctcccagctgacccctccttcaacacatgaggattacaattcaacacgagatttgggtgggacacagagccaaaccatatcacacatatatgagatagaagagatgttacacagacacatgcatacacacagtgtataaatatataaaaaggggaaattatatatacacacacacacacattcaa

SEQ ID NO: 376059 - DNA, 586 bp, Homo sapiens
atccctcaaatcattaaagcgagagaaactgaaggagctgaagaggcaaagcatgggcctgtgagaccctctcgggctcactatgtatgttytaaagccccaggtgcatgctgccctcgtttttctgatggggtaggccctatgagggatgtctgtcgtttggtgggccctagtccagcgtcggaattgccagcagctttcgctggaatgcgtatttttagtacagcctaaacctgtaataaaaagggatttacatgtactagattttaatcacatactgtggacaaactaataagaaagtttgctagacagtaagatgaaacactgccagcatttttgcaaaccggttatacaagagtctgcctaactctggccagacccaggcagcttagtctagaggttcagaggtggcctctggaggcagctgcagcctgggtcccagccctgctgtcctgtgtgggcactgggactgtctctgcacctgagatgccacatctggaagggctgtgaagacgaaggaagtagtacatggagccctcaggccatgccagcccctggggggcaccgagcagaccagcctcctccc

SEQ ID NO: 376060 - DNA, 586 bp, Homo sapiens
atccctcaaatcattaaagcgagagaaactgaaggagctgaagaggcaaagcatgggcctgtgagaccctctcgggctcactatgtatgttttaaagccccaggtgcatgctgccctcgtttttctgatggggtaggccctatgagggatgtctgtcgtttggtgggccctagtccagcgtcggaattgccagcagctttcgctggaatgcgtatttttagtacagcctaaacctgtaataaaaagggatttacatgtactagattttaatcacatactgtggacaaactaataagaaagtttgctagacagtaagatgaaacactgccagcrtttttgcaaaccggttatacaagagtctgcctaactctggccagacccaggcagcttagtctagaggttcagaggtggcctctggaggcagctgcagcctgggtcccagccctgctgtcctgtgtgggcactgggactgtctctgcacctgagatgccacatctggaagggctgtgaagacgaaggaagtagtacatggagccctcaggccatgccagcccctggggggcaccgagcagaccagcctcctccc

SEQ ID NO: 376061 - DNA, 508 bp, Homo sapiens
tatcttcacaacattacattctagtataccatgggtgactattayacatataatccttcaccataaggataaactttccagcaacttgagatgtccacaaacgtgatggaccactcttctaggaggcctctgctcagattctgccttacagaccttcagactttcacaagatatttaatatttttacctctctcaggaaattatgtaaaagtaaataactgtgattatcagtctttattctcaagtaactcacaccacaatatttaacagaaagataaaatcacaaaataatcatgcaacactttcaaagttctatgaactgtttacacagaaagtattcaaacttgttacctgcccctaaagaattttggacttgcctcattatgaggtacatgagtcttcattagccctcaccactgctaatcgcctcaggagaggttccactcaccactatcaccactccactagcacagcccacacatgcaggggtcaaatctccaaaataaga

SEQ ID NO: 376062 - DNA, 508 bp, Homo sapiens
tatcttcacaacattacattctagtataccatgggtgactattatacatataatccttcaccataaggataaactttccagcaacttgagatgtccacaaacgtgatggaccactcttctaggaggcctctgctcagattctgccttacagaccttcagactttcacaagatatttaatatttttacctctctcaggaaattatgtaaaagtaaataactgtgattatcagtctttattctcaagtaactcacaccacaatatttaacagaaagataaaatcacaaaataatcatgcaacactttcaaagttctatgaactgtttacacagaaagtattcaaacttgttacctgcccctaaagaattttggacttgcctcattatgaggtacatgagtcttcattagccctcaccactgctaatcrcctcaggagaggttccactcaccactatcaccactccactagcacagcccacacatgcaggggtcaaatctccaaaataaga

SEQ ID NO: 376063 - DNA, 610 bp, Homo sapiens
tattaagtgataaagtattaaatattagattaagatttcccttcattagtattaactatttttccttaatgttttactataacatctggtgacatatggaaaagtttatattgtacaactaaagtaatgatttaaaatatgtataacctgttataacgacatagcataattggttcaatcrtccgtctactattggaccttgaagttatcctccctttttcattatcctgagagacacatcatagttatttcaacagatttttactctatttttatttattatgttcctgtgttaagccaaggtctttgagaaattaaattataacagttttactgtagtaactaaattgattaattcattcagcaaaaagagagagttctcttatacagactacataattgaagagtttatagaaagaacactgtctttgcattcagattggactttaagttcaaccattccctggcactataacataaggtattatgacttaatattcaaatactgtgccctaatctgcaaaataagagatataataatgtctcttgtaggaagcattaaataatacaacttacataattatccaataagaattctagaatgtaacaa

SEQ ID NO: 376064 - DNA, 610 bp, Homo sapiens
tattaagtgataaagtattaaatattagattaagatttcccttcattagtattaactatttttccttaatgttttactataacatctggtgacatatggaaaagtttatattgtacaactaaagtaatgatttaaaatatgtataacctgttataacgacatagcataattggttcaatcatccgtctactattggaccttgaagttatcctccctttttcattatcctgagagacacatcatagttatttcaacagatttttactctatttttatttattatgttcctgtgttaagccaaggtctttgagaaattaaattataacagttttactgtagtaactaaattgattaattcattcagcaaaaagagagagttctcttatacagactacrtaattgaagagtttatagaaagaacactgtctttgcattcagattggactttaagttcaaccattccctggcactataacataaggtattatgacttaatattcaaatactgtgccctaatctgcaaaataagagatataataatgtctcttgtaggaagcattaaataatacaacttacataattatccaataagaattctagaatgtaacaa

SEQ ID NO: 376065 - DNA, 579 bp, Homo sapiens
tgcaaaataagagatataataatgtctcttgtaggaagcattaaataatacaacttacataattatccaataagaattctagaatgtaacaaataagccatcatagtcattttctatctttccaaaagataagaaaaatgacatcttagggcctggtcatatttaacayacttgaaactccagttttagtattctgatatcgcactaattaattctctgaaactaattttgtttttatttactgaattctctccaaatttcttgtagtttcaatgttaaaaaaaatatgatttcctcccttggaatagaaccacttaagacaattttataccacacttattaagtgttgttttttaattgcacataattccctgagaaaaatctgaatccctgaatcttagatttcacaccataaccttccctaaaggcttattagcatatgcatcaaaaaaacgaatgaactatttcctaatgtccacttcttaccagattaatattacaaaaaggcaattttcattttaccttatatgtcacatattcacgagaatttttcacatatatatttaaaattttgtagag

SEQ ID NO: 376066 - DNA, 579 bp, Homo sapiens
tgcaaaataagagatataataatgtctcttgtaggaagcattaaataatacaacttacataattatccaataagaattctagaatgtaacaaataagccatcatagtcattttctatctttccaaaagataagaaaaatgacatcttagggcctggtcatatttaacacacttgaaactccagttttagtattctgatatcrcactaattaattctctgaaactaattttgtttttatttactgaattctctccaaatttcttgtagtttcaatgttaaaaaaaatatgatttcctcccttggaatagaaccacttaagacaattttataccacacttattaagtgttgttttttaattgcacataattccctgagaaaaatctgaatccctgaatcttagatttcacaccataaccttccctaaaggcttattagcatatgcatcaaaaaaacgaatgaactatttcctaatgtccacttcttaccagattaatattacaaaaaggcaattttcattttaccttatatgtcacatattcacgagaatttttcacatatatatttaaaattttgtagag

SEQ ID NO: 376067 - DNA, 579 bp, Homo sapiens
tgcaaaataagagatataataatgtctcttgtaggaagcattaaataatacaacttacataattatccaataagaattctagaatgtaacaaataagccatcatagtcattttctatctttccaaaagataagaaaaatgacatcttagggcctggtcatatttaacacacttgaaactccagttttagtattctgatatcgcactaattaattctctgaaactaattttgtttttatttwctgaattctctccaaatttcttgtagtttcaatgttaaaaaaaatatgatttcctcccttggaatagaaccacttaagacaattttataccacacttattaagtgttgttttttaattgcacataattccctgagaaaaatctgaatccctgaatcttagatttcacaccataaccttccctaaaggcttattagcatatgcatcaaaaaaacgaatgaactatttcctaatgtccacttcttaccagattaatattacaaaaaggcaattttcattttaccttatatgtcacatattcacgagaatttttcacatatatatttaaaattttgtagag

SEQ ID NO: 376068 - DNA, 605 bp, Homo sapiens
tatgtaaatgtgagagcaatcggcttggagttttatttgccattgtaaaagtggtgctatattttgagcaagatgttaagaaacaagaaccaagactttgaacgatctggcctaggatgcagaggaatgagtgaaagaaacaamatttttaccaatagagggtataagagaatgcgtcaccagctttagaagctagagttactaggagactctgaatgttgacaagaagcccttgcatttcattaggaagaggttggcagaaatctcaataccatttcagtgacaacttgacccaatcaactattcctctctgcctgcctagctcttccatcattcctagtggaatttatgcagcatcaccagcagtattccctataacctaaatcttttccctgaatttaacttcaccttcttgttctaactaaatagtagtttattttctcctatattatcttttgacatggactttttctttggcaggggaaagagtggtagaagagcaacaatatttatttttttctccacagtgtatttggtgataaagatcttaaacggtatctttctttcccagagattaggatgcagttttgtacttcataattaga

SEQ ID NO: 376069 - DNA, 612 bp, Homo sapiens
cttatccttatttgtgagtttaaaacataatgatttctttacttccatagtaataaagtatgagagggagaagaagtaaatgccttccttttgttaccgggggtctttgctcccagagctcccaagatggtggcgggctactcccaggatggtggccagccactcccaagatggtggcaagcctcttgctctctgacctggggtacttggcctcatggattccaaggaatggaatctggggccatgtggtgagtgttatacctctattagaagctgtgggtcatggaaaggaaccgtggaacccaaacgactagtgttcrgctccattaggatgaacccaggcacttagctgcacaggaacaatggtgagccttcagcctgattgggagcagcagtgggcgccttgctggatcagaagtgcagtggacaccctgccggatctggagggttggaggtcaaaatggcgggtctgcaacgacagcaatcagcagtggtggacagcgagccaaagctcagcttgagctggaacaaacagaccagaagagtgtgcagttgcaagatttaatagagtgaaaacagagctcccatacaacaggaggggacccaaaaggg

SEQ ID NO: 376070 - DNA, 612 bp, Homo sapiens
cttatccttatttgtgagtttaaaacataatgatttctttacttccatagtaataaagtatgagagggagaagaagtaaatgccttccttttgttaccgggggtctttgctcccagagctcccaagatggtggcgggctactcccaggatggtggccagccactcccaagatggtggcaagcctcttgctctctgacctggggtacttggcctcatggattccaaggaatggaatctggggccatgtggtgagtgttatacctctattagaagctgtgggtcatggaaaggaaccgtggaacccaaacgactagtgttcagctccattaggatgaayccaggcacttagctgcacaggaacaatggtgagccttcagcctgattgggagcagcagtgggcgccttgctggatcagaagtgcagtggacaccctgccggatctggagggttggaggtcaaaatggcgggtctgcaacgacagcaatcagcagtggtggacagcgagccaaagctcagcttgagctggaacaaacagaccagaagagtgtgcagttgcaagatttaatagagtgaaaacagagctcccatacaacaggaggggacccaaaaggg

SEQ ID NO: 376071 - DNA, 612 bp, Homo sapiens
cttatccttatttgtgagtttaaaacataatgatttctttacttccatagtaataaagtatgagagggagaagaagtaaatgccttccttttgttaccgggggtctttgctcccagagctcccaagatggtggcgggctactcccaggatggtggccagccactcccaagatggtggcaagcctcttgctctctgacctggggtacttggcctcatggattccaaggaatggaatctggggccatgtggtgagtgttatacctctattagaagctgtgggtcatggaaaggaaccgtggaacccaaacgactagtgttcagctccattaggatgaacccaggcacttagctgcacaggaacaatggtgagccttcagcctgattgggagcagcagtgggcgccttgctggatcagaagtgcagtggacaccctgccggatctggagggttggargtcaaaatggcgggtctgcaacgacagcaatcagcagtggtggacagcgagccaaagctcagcttgagctggaacaaacagaccagaagagtgtgcagttgcaagatttaatagagtgaaaacagagctcccatacaacaggaggggacccaaaaggg

SEQ ID NO: 376072 - DNA, 612 bp, Homo sapiens
cttatccttatttgtgagtttaaaacataatgatttctttacttccatagtaataaagtatgagagggagaagaagtaaatgccttccttttgttaccgggggtctttgctcccagagctcccaagatggtggcgggctactcccaggatggtggccagccactcccaagatggtggcaagcctcttgctctctgacctggggtacttggcctcatggattccaaggaatggaatctggggccatgtggtgagtgttatacctctattagaagctgtgggtcatggaaaggaaccgtggaacccaaacgactagtgttcagctccattaggatgaacccaggcacttagctgcacaggaacaatggtgagccttcagcctgattgggagcagcagtgggcgccttgctggatcagaagtgcagtggacaccctgccggatctggagggttggaggtcaaaatggcgggtctgcaaygacagcaatcagcagtggtggacagcgagccaaagctcagcttgagctggaacaaacagaccagaagagtgtgcagttgcaagatttaatagagtgaaaacagagctcccatacaacaggaggggacccaaaaggg

SEQ ID NO: 376073 - DNA, 624 bp, Homo sapiens
tcagattatgttgttagcacagccattcatcacaggaaatgtgtaaaaaagaaatgaatagctacttagaatacattaacatacatttgtatttcaagaatccaaaaaccagcttgctaccacaaagaggctattctactacatttacaatacacattaaatatttaggttgaggagaagtaattacaagttctcagtwtatcacactctatcagatgcttttcatttgattatcaaagaaataataaatgttctgaacatatcatagaaaatttaaagtcctgatttacaccatagaaatcatcattaacattatacccctaacataagctaaaatatagctcatgagggtaggagcattgttgtttttgttcaaagccatatcttcagcaactagtagaaggtgtagcatatactagaaacataaacatggctgcatgaataaatatctgaatgcaagagctaatgagtagtaaatgcatgaaaaagttgaataggcaagaaaaccatcactaacttacatctaaaatactattctgagacaaagtattaagagtgtatgccttgggcaaatgaccttaatagctatttctcaagagaagacatagaaatagtcaacaggta

SEQ ID NO: 376074 - DNA, 594 bp, Homo sapiens
agaggctgatagtatagtagaggttattgtgcacatgttgataactcactacagactaggctctgtgctgcacataggggattcaagaagggatgacatattttccattttcaaagatgatgaagacatgtttctgaataagtgagttgggccatgactttcagtggtggtacattttaatactttacagcatatcacatactaactgggagtatcattaaaatgctaggtgcatccataatttttttcctccttttgattgcctcytcttttgcatcctatctatctacagatcctttcttctgtacttgcaacatacatccccagtgctttcctctccctcctttttttctcgtctggtatttgtgcttctgttcttgattttgctgccactttcttgaattttttctctacatagtagctacagttatctttaaaatgtaggccgtgttctgcttaaagcccttcagtggcttcccagtatacacttggagtaaaactcaagtctttcccatggcttaaatattgcctcctcagagagtcttgtttgttgagagattaatgaatactctgagaactcggaggaaggagcaa

SEQ ID NO: 376075 - DNA, 590 bp, Homo sapiens
gctaagtgaaatcagccagacacaaaagaacaaatattgcatgattccacttgccatgtatatgaggtacctagaatagtcaaattcttagagacagaaagtagagtgatttttgctagaagttgggggagaggggaatgggaagttattgtctaaggagtatagttgcagttttcacaagatgaaaaagttctagagatgaatggtagtgatggttgcatgacgatgtgaatatactcaatgccactgaattgtacacttaaaaatggttaatatggtaaattttatgttaggtatattttaccatagtttttttaacgtaacatctcctagcagaaagtttaargacacccagtgatgtgctttttttctcccaccaaaaggtcaaactcaggaccaattcaagttccctgaccaaagtgttagaaattaaagataagtgcttattacttctctagaatatcttgctgtgttccacttattataggactggcttagccagtaaattatatctttatttctcactcaccaaacagcaggaattataagtggataagtaggatttagtcatatactgaaaatataattgt

SEQ ID NO: 376076 - DNA, 548 bp, Homo sapiens
gtttgaaaaccagaaatattttgtatgaccatagtgcaatagactggatgtttgcatcctcccaaaattcgtatgttgaaatcttaacccattgtgtgatggtattaggaggtgaggacttcgggaggtgattaggcatccttgaatcacaaacttagtgtctcttataaaatctgaatgagaagcgaaagtaagtaagtcagtccattagactacaaatctgtctcctacactcctaataaaactctttagtggagaacacttctaaagagagcaatactctgaatggagttagtgcccttataataaaagagatccaagagctccctcaccctttctaccaggtgaagacaaagtaagaagacaggccgtttgtgaacgaagaagcagtccctcaccagacaccggatctgccagtgcctggatcttgaatctgctggtgccttgatcttgratttcccattctccagaattgtaagtaatacatttctgtttataagccatctggtattttgaactgggtggtattttgttaaagcaacccgaac

SEQ ID NO: 376077 - DNA, 568 bp, Homo sapiens
ggacaaaatggacctgatagaaatccgcaaaactctgcacccaaaaacaacagaatatacattcttctcatcactgcaaggcacrtactataaaatcgaccacccaattggacataaaacattcttcagcaaatctaaaagaaccaaaatcataccaaccactctcctggacaacagcacaataaaaatagaaatcaagactaagaaaattgctcaaaaccatgcaattgcatagaaatttacaacctacttctgaatgactttggggtaaataatgaaattaaggcaaaaattaagaaattctttgaaactaaagagaacaaagataaaccataccagaatctctgccacacagctaaggcagaattaagagagaaatttgtaacactaagtgcccatatcagaaagttacaaagatcacaaattggcaacgtaacatcacaacaaaaagaaccagagaataatgagcatactaatcccaaagctagcagaagacaagaagtaaccaaagtcagagctgaactgaaggagattgagactcagacaaccattcaaaagatcaataaat

SEQ ID NO: 376078 - DNA, 568 bp, Homo sapiens
ggacaaaatggacctgatagaaatccgcaaaactctgcacccaaaaacaacagaatatacattcttctcatcactgcaaggcacatactataaaatcgaccacccaattggacataaaacattcttcagcaaatstaaaagaaccaaaatcataccaaccactctcctggacaacagcacaataaaaatagaaatcaagactaagaaaattgctcaaaaccatgcaattgcatagaaatttacaacctacttctgaatgactttggggtaaataatgaaattaaggcaaaaattaagaaattctttgaaactaaagagaacaaagataaaccataccagaatctctgccacacagctaaggcagaattaagagagaaatttgtaacactaagtgcccatatcagaaagttacaaagatcacaaattggcaacgtaacatcacaacaaaaagaaccagagaataatgagcatactaatcccaaagctagcagaagacaagaagtaaccaaagtcagagctgaactgaaggagattgagactcagacaaccattcaaaagatcaataaat

SEQ ID NO: 376079 - DNA, 568 bp, Homo sapiens
ggacaaaatggacctgatagaaatccgcaaaactctgcacccaaaaacaacagaatatacattcttctcatcactgcaaggcacatactataaaatcgaccacccaattggacataaaacattcttcagcaaatctaaaagaaccaaaatcataccaaccactctcctggacaacagcacaataaaaatagaaatcaagactaagaaaattgctcaaaaccatgcaattgcatagaaatttacaacctacttctgaatgactttggggtaaataatgaaattaaggcaaaaattaagaaattctttgaaactaaagagaacaaagataaaccataccagaatctctgccacacagctaaggcagaattaagagagaaatttgtaacactaagtgcycatatcagaaagttacaaagatcacaaattggcaacgtaacatcacaacaaaaagaaccagagaataatgagcatactaatcccaaagctagcagaagacaagaagtaaccaaagtcagagctgaactgaaggagattgagactcagacaaccattcaaaagatcaataaat

SEQ ID NO: 376080 - DNA, 569 bp, Homo sapiens
ggcaacgtaacatcacaacaaaaagaaccagagaataatgagcatactaatcccaaagctagcagaagacaagaagtaaccaaagtcagagctgaactgaaggagattgagactcagacaaccattcaaaagatcaataaatccaggagttggttttttttgaaaaaaattaataagatataagrctagctagactaataaaaaagagagaagatccaaaaataacacaattagaaatgacaaagaggatgttaccactgacttcaaaaaatacataaataactatcagagactactataaacacttctatgcaaacaaactagaaaatctaacagaaatggacaaactcctggaaacatacaccttcccaagactgaaccaggaagaaactgaatccctgaacagacaataacaagctccaaacttgaatcagtaatagcctaccaaccaaaataagcccatgaccagattctagcagattctagcacatgtacaaagaagagctggtaccactcctactgaaactattccaaaaaattgaagaggagggatgctctcccaattcatt

SEQ ID NO: 376081 - DNA, 659 bp, Homo sapiens
catcttggtccaacattgagttgaatggtgaaattgcaggagctaggagtcacaaaaaggggaagcttttagaactgtaaccctaaaattgaatgaatgaacaaggttgartaaaatatatcttattagaaagtttaactcacacattaagtagctcgactgacaggattggtgaaaggtcctttgatcctagtagcatagtatagctatgattatgaatgtgcgaaagtaaagaaatctaggagtccctgttcccagatctcagactaagtcagaaatattttctgaaggagctagtcttccgtttgatatttccggcaaatctttctctgcaaaaaaaatttcttttacagaagaattaaatattaccccttctattccacaagtgcatgaatagaagactctccagatagctgaggatggagtagagaaagacaccagcaaaggcaaggacagcccccacaataaacctagaagggtgggtttagcaaggcctgtagcagtaaggacttgacccaaaagaacccacagtgagaatattaaaatcccgacaattttcctagcaacaagaaccacaattctctagagtccagcagccagcatttcagaagaaatagatcaagacattgtggaatggatccagaaatcaggatcaagta

SEQ ID NO: 376082 - DNA, 538 bp, Homo sapiens
acattgaagagcatataaataaatggaaagatatactatgcttatggatcagaagaagtaatatttaaacgaccatactacccaaagcattctacagrtttagtataatccctgtcaaaataccaatgacatttttcacagaaataggaaaaatcctgaaattcatatggaactgcaaaagatgccaaataaccaaaacaatgctgagcaaaaagaacaaatctggaggccctaccaaactcaaaatatactacaaatctatagtaaccaaaaaagcatgatactggcacaaaaacagagacatagaccaatggaacagaatagagatctcagaaataatttgcttatccactaaggcactgattttggggaaaagcgccaagaacactcattggggaaaggaatgtctcttcaataaatggttctaggaaatgtaaatatccatatgcagaagaatgaaactatactcccacctctcaaattacacaaaaatgaactcaaaatgcatcagagatctaaatgtaagaaccaaaacaat

SEQ ID NO: 376083 - DNA, 525 bp, Homo sapiens
acacctttgcacgtataaactagaaaatctagaggagatggataaattcctggaaagatacaacagtcatagcttaaatcgggaagaattagatacactgaacagaccaataacaagcagtgagattgagatggtaataaaaaataaccaacaaaaaaaaagtccaggaccagatggattcagagcagaattctaccagacattcaaagaagaattggtacaaatcctactgacactattccaaaagagagagaaagggactcctccctaaatcattctttgaagccagtatctccctaatgccaaaaccaggaaaggatagccaaaaaacaaaactacagaccaatgtccttgatgaaaatagatgtaaaaatccttaacaaaatactagctaaccgtgtccaacaacaaatcaaaaagataatgcaccataatcaagtgggtttcataccaaggatgcagggatgatttatcatatrtaagtcaataaatgtgatataccacacagacataattaaaaacaaa

SEQ ID NO: 376084 - DNA, 569 bp, Homo sapiens
tgaaaaaatccagcaccgctttacrattaaaattctcagcaaaatcagaacacaagggacatacctcgatgtaataaaagccatctatgacaaacccacagccaacataatactgaatggggaaaagttgaaagcattccgtctgagaactggaacaagacaaagatgcccactctcaccacttttagtcaccctagtactggaagtcctagctagagcaatcagacaagagaaagaaataatgggcatccaaattgttaaagaggaagtcaaaccgttgctgtttgctgatgacatgattgtatacctagaaaaccctgaagatttcaccaaaaagctcctagatctgataaaagaattcagcagtttctggatacaaaattaatgtatacaaatcagtagctctcttatataccaagagcaacgaagcagagaatcaaatcaagaactcaaccccttttacagaagctgcaaaaacaataaaatacttagaaatatacataactaaggaggcaaaagacctctacaaggaaaagtacagagcacagctgaaagaaatcatagataac

SEQ ID NO: 376085 - DNA, 569 bp, Homo sapiens
tgaaaaaatccagcaccgctttacgattaaaattctcagcaaaatcagaacacaagggacatacctcgatgtaataaaagccatctatgacaaacccacagccaacataatactgaatggggaaaagttgaaagcattccgtctgagaactggaacaagacaaagatgcccactctcaccacttttagtcamcctagtactggaagtcctagctagagcaatcagacaagagaaagaaataatgggcatccaaattgttaaagaggaagtcaaaccgttgctgtttgctgatgacatgattgtatacctagaaaaccctgaagatttcaccaaaaagctcctagatctgataaaagaattcagcagtttctggatacaaaattaatgtatacaaatcagtagctctcttatataccaagagcaacgaagcagagaatcaaatcaagaactcaaccccttttacagaagctgcaaaaacaataaaatacttagaaatatacataactaaggaggcaaaagacctctacaaggaaaagtacagagcacagctgaaagaaatcatagataac

SEQ ID NO: 376086 - DNA, 519 bp, Homo sapiens
tgattcttgctacgttttagcaaaaagactggcggcattttgctgccctagagatttgtgaactttgaacctgmaagagatgatttagagtatcagggaagaaatttctaagcagcaaagcattcaagaggtgacttgggtgctgttaaaagcattcagttttaaaaggaaatgaaacataaaagttcagaaaatttgcagctggacgatgcaatagaaaagaaaaacccattttctaagaagaaattcaagcctgctgcagaaatttgcataagtaacaaggagccaaatgttaatctccaagacaatggggaaaatgtctccaggacatgtcagagacattcactgcagcccctcccatcacaggcccagaagcccaggagaacaaagtggtttcatgggccaggaccagggcccccctgccatatgcaccctaaggacttggtgccctgcatcccagccactctagccatggctaaaaggggccaaggtacagctcaggccattgcttccaagggc

SEQ ID NO: 376087 - DNA, 400 bp, Homo sapiens
catttggggcctggaattacccatagagtttccatgaaggcctagataattatgtagtaatgcactcactcatattagagatgtgttttaaaaatcttaaggaaacaggccttggacatttctattagacaactctctccctaccttccacctctgccaaaaagtaaaaataaaatccaaaaaataattgtatcaaaatcctctggtttatttcattctcttagtcatggtagagaaagtttacttgatctttmttctcttaccaaagcaaacttctccctcttaagatggctcaattttataaattcatgttttcatattactctaacatccttctaaagtttttatcctattatttttgtgtcgattatgtattcaagttgagaaagaatctccccag

SEQ ID NO: 376088 - DNA, 604 bp, Homo sapiens
atagagtttccatgaaggcctagataattatgtagtaatgcactcactcatattagagatgtgttttaaaaatcttaaggaaacaggccttggacatttctattagacaactctctccctaccttccacctctgccaaaaagtaaaaataaaatccaaaaaataattgtatcaaaatcctctggtttatttcattctcttagtcatggtagagaaagtttacttgatctttattctcttaccaaagcaaacttctccctcttaagatggctcaattttataaattcatgttttcatattactctaacatccttctaaagtttttatcctattatttttgtgtcgattatgtattcaagttgagaaagaatctccccagattctatgtttccatgccaagttaaacataaaaatagcataaaaaagaaatttggtttgttccatttatgttctaattaatgtaaatatgattatgttgattgcttcactagcacaggygcttaatgtatctactcactgatacttaccttaaaagagtgcatttttccttttcacagtcttccttcctgaaagggaacataaatgtctgaggcagatgccagtcc

SEQ ID NO: 376089 - DNA, 555 bp, Homo sapiens
ttagtttagaccctttagtcccagtcaaacagacagataattggagatgcataggtgaaccaggtgaggtcagcagaagaaccagccagctgatcctagccaacccacagaatcacgagtgataacacattgttgtttcatgcctctgactgtgggaggatttgctatgcatcagaatattactgataaacaatctggtgtaacagaaaaacaagtcaattagaagagatacagctgggcagacagtgtcacaaaggtctggatatatttagcagggacatactataggaattagtcctaggaatgagctgggttgagtagaacaggtatcgacacagaagaggaacttaaacacagcagtgggaataagaaccmagttactcaaactggtatataaagtgaggataagaacatcaccaatgtgacttattattgattcacatacatattgcataccggacaagtctcataattcttcccagtcaggattatgactggtccagactcaagtagcaaagtgagcagtcaaaatatccagttactctaaaaaggtga

SEQ ID NO: 376090 - DNA, 544 bp, Homo sapiens
cctttgacttgtgatctttgcttttgccatttgccttgtgatctttgttggacccttatcagaagtttctgattttgcccttagaagcatgtgatcttattctcctttttgccctttgaagcatgtgatctttgtgacctactccctgttctkgcacccccctccccttttctaatccttaataaaacttgctggctttaaggctcaggtgggcatcacggtcctactgatagctgatgtcacccccagaggcccagctgtaaaattcctctctctgtactctctctctttctcagccggccaacacttatggaaaatagaacctatgttgaaatattgggggtgggttcccctgatatcatagattttaaaagtcattgccaaagagaataaaagagagcagggagaaggaaaaggaaatatgaaaggagaacagagagagatggaaagaggaggacccaggactgagatgttaggacctcagttgaagataattcaaaagaggagccaggaggatctccagacccatatatccaaattcctt

SEQ ID NO: 376091 - DNA, 623 bp, Homo sapiens
ggtgcatttaggtgggggagacaataaacagataatcatatatgtcaagaggtgataaatgccaacaataaaaaatagagcaaagcaatgagatcagataatgaatgatgcagtgtgtgctaatttgaataaggtcacctaggaagtcctctttgatagcttgtcatttgagccaaaacttaaagaatcaaagaagaaagtcatacagatatcttgagggaaaatgcttctgacagaaactgcaagtggaaaggctctgaggcaggtgtgtaatcgtcctagtgaaggttcagcaaagaacttggtgtggctgaaggggagttagaaggggtagcatgatagatgcagacaagggaaatgggaggtgggaagatagcagatctaaccatggaggccatgataaaactttcgattttattcaggtcagtcaagtgagatgagattgragactttaaaattgttttaattgacataatataattgcacatatttatgaggtacatagtgatgttttaattacatataatgtatagtaatcagaccagagtaattatcatatccatcatctcaaacatttattatttgggttgggaaaattcaatgttatcttctagctacatgaa

SEQ ID NO: 376092 - DNA, 514 bp, Homo sapiens
attcctaattgtattaggatggtcaacattattaggatggttaacagtaatgaataacctccaaatcacagcggtttaaataatacaggtttatttcttgtacattttcatatctataagggatcagttgaggactggatcatcacaatcatgtagggaccctggtgtatggagcagacccttcttccatgttgttgctccccatgtcagagggaaatgaacacgctctgaagggtctctcaccaataattaaatactcaggtccagaaatgccacttaccacttccgttcacaaatcattaaccasgagtggttaaattgccctacctaaccatatggcaggggcatgaagtacaaaccatatggctacactggggaacaaccaggaaatagtttatcaaacagcactactgactagcacagtaacctacccacagatatttttttcaatccttcatattccatgagaagtgctattatctttccaataatttcctttaattttaatttagta

SEQ ID NO: 376093 - DNA, 616 bp, Homo sapiens
ctggtactgatttctatttttattgcactgtggtctgagaatatgattggtgtaatttcaattttttgactctactgagacttgctttatggttgagcatgtggtcaatcttatagtatgttctgtgcgcagatcagaagaatgtatattctgtgatttatgggtggaataatctgtagatgtccattaggtcaaattggtcaagtatcaaatttaagtcaagcatttcttcttttagttttctgccttgatgatctaatgctgtcagtcggatgttgaagtccccygctattattatgtgactaattctttttataggtctagaagtacttgttttatgattttgggtgctccaatattgggtgctatatatttaggatagttaagtcttcttgttgaattgaactccttatcattatgtaatacccttctttgtcctttttctactgttgttggtttaaagtctgtttgatctgatataagaatagtaacccttgtctttttttgtgttccagttgtgtgatagactttctccaaccctttactttgggcctatggttgtcattataaaatgtcctttttataccttagaaacataattcagctgaggtttcct

SEQ ID NO: 376094 - DNA, 610 bp, Homo sapiens
aattgtcttacttcttctttcccaattgggatggcattattattattattattattgttgttattattattattttacttcttccttcccaattgggatgacttttttctacataattgccctaattagactatccaggtgcaatgttggatagaagtggtgagagtggacattcttgccttgtctctgatcttatctggaaagcattcagcttcaccattaagtataatgtaagctgtgggatttttgtagatgccttttcaggctaaggaagttttcttctatttctaatctgatgaatttttttcataaaaggccactggattatgtcaaatgcyttttctgtgtccccttagatgattacatggttctttttttattacatgcatatggtagattacattaattgattttcagatgcaaaaccaaccttacattccttagacaaattccccttgatcatggtacatagttccttttaaatattgcttttatttgctaatattttcttgtggatttttttgcctatattcttaagcgatattggtatgtagtcttcctttttatgatttatttgtcggtttttgggtatcagggtaattctagactc

SEQ ID NO: 376095 - DNA, 625 bp, Homo sapiens
gggcagcaaacaaccatggcagacatttacctatgtaacaaacctgcacgtcctgcacatgtatcccagaacttaaaattaaattaaatattttaaaaaaattttaaaaatttaaaaaaatgcatcgtatttgcataaaacctatgcacatgctccccatatagtttaaatcaaccccagacttcttatactacctaatataatgtagatgctatgtaagtagttgttattaatgtatttttaggggataatgacaagaagaaaagtctatgcatgctaagtacaattgcaattgtttttccaggtagttttgatscttagttggtttaatccatgaatgtggaacccacagatgcaaagagtcaattgtacctacatttcaagattgccaaaaaaaaattaaatgagtatatatatatatttatgtatacatatatcatgtctggtacataataggaatataatgacaagtattatttttattgttatcgtacaattttgagacttatgcaaaggctagcaattttatagaaaagataatagagtttttcttgaaagaataatgaatgaatgaagacataaaaatacagaagttatataaagaaatgcaggccatgtgccatgc

SEQ ID NO: 376096 - DNA, 575 bp, Homo sapiens
ataatgatttgaggaacagaaattatccttttcacttcctaaaagtatgccaagaggatcgacattctatatttggttttagttttcattttaaacaactcaattataaaggaattgtgaagaatttataatggattgttttagaccattttagacaatcagatactccattacttgcatgtgttagagagcttttcaaaaatcaagtgtcagaggtggaaacctaaaatagcactctgctttcaactagtgatactatacagactgtgctctgactcagcatcatatagaataatctctcaggatgctcttccttgctctagtggcayactcaaaaaagacaccaatgtttatggaaactgggatcagagctagcaacagtctttgcttcaggccatatgttctaaatgcagaagaaaattccaaaagtaaaaattccattccaggatccctggactcagctataattatccgctcttgacaagttctggcctctgacatctggatcaagaatcatatgtgaaagaaaaaaaaaagtcttaaagaaggtgtggttggttttcaagtagaagaga

SEQ ID NO: 376097 - DNA, 432 bp, Homo sapiens
  misc_feature (1)...(432): n = A,T,C or G
nnnnnnnnnnnnnnnnnnnnnnnnnnttggctgctgatagcccacatttgagtcactttcttagaatttccatggatctgccttgtctgatgtccagccctctccccaagggcagcttatatccagtcactagtcaatgtgtggttacagaggggctcctgatatcaaatcaacaccagttggaaggtccatccaagatctaaatttccatgtggaactgaacaatgtatgcctctgttgtaactcaccatgcttcaacttttcccttggaacattcctgctttcctccctctcttacagayattgttccagaggataaaccattaaacttcctgtatgcaaatctccaattcagagtctattttacaaaaaatttgatgaaagatagtagatatgtaaatatattatacatccatggaaatacacaaattt

SEQ ID NO: 376098 - DNA, 567 bp, Homo sapiens
cgctcacaccagctagcaagagcaaattgctaaagtttcaggcattttgcaagagggctgtttaacagtcattgytaaaaattaaattgtatactgggcacagcagctcacaccagtaatcccagcactttgggaggctgaggtgagaggaggatcacttgaggccaggagttccagatcagcctgggcaaaatagtgagacttccatctcttaaaaaatcataatatcaggctgggcaacatagtgagaccctgtctctacaaaaaattttaaacattaacggggtgcggtggcgcatgcctatattctcagctactcaggaggctgaggtgggaggattgcttgagcccaggaggtcaaggctgcagtgagctgtgatcatgccactgcactccagcctggatgacagagtgagaccctgtccccaaaaaatatatatcatcataataaaaattttaaaattaaattgtatacatttacaattaaataaattatattaaaacaaagatattaaaaatcatcacttcctaattattttactatatttcactattatctattctctt

SEQ ID NO: 376099 - DNA, 567 bp, Homo sapiens
cgctcacaccagctagcaagagcaaattgctaaagtttcaggcattttgcaagagggctgtttaacagtcattgctaaaaattaaattgtatactgggcacagcagctcacaccagtaatcccagcactttgggaggctgaggtgagaggaggatcacttgaggccaggagttccagatcagcctgggcaaaatagtgagacttccatctcttaaaaaatcataatatcaggctgggcaacatagtgagaccctgtctctacaaaaaattttaaacattaacggggtgcggtggcgcatgcctatattctcagctactcaggaggctgaggtgggaggattgcttgagcccaggaggtcaaggctgcagtgagctgtgatcatgccactgcactccagcctggatgacagagtgagaccctgtccccaaaaaatatatatcatcataataaaaattttaaaattaaattgtatacatttacaattaaatraattatattaaaacaaagatattaaaaatcatcacttcctaattattttactatatttcactattatctattctctt

SEQ ID NO: 376100 - DNA, 592 bp, Homo sapiens
taatagtttgtcaagtctggtgctaaagctgaaagaagtttctgtttaatgaatatatctgtagaagggtgaaaaatattataacagtaggttgggtgcagtggctcacgcctgtaatcccagcattttgggaggacaaggcgggtagatcacttgaggtcaggagttcgagagcagcctagccaagatggtgaaaccctgtctctactaaaaatacaaaaaaaattagctgggggtggtgatgcacgcctataatcccagctactcgggaggctgaggcatgagaatcacttgaacccgggaggtggaggttgcagtgagccgagatcaagccattgccgcctgggtgacagagcgagactccgtctcaaaaaaaaaaagaaaaatattttaacagtagatcctgtagcacatttaatgacaataartttattaggaaaataattagcagattggtatctatgcaattcaatttcaaattttggttgaattgcaaccataggatggctacagatatgagtttggcaaaaattaatgaaaccattctgccagaatcaattggctgtatggaatttactatcaagtgtttgta

SEQ ID NO: 376101 - DNA, 592 bp, Homo sapiens
taatagtttgtcaagtctggtgctaaagctgaaagaagtttctgtttaatgaatatatctgtagaagggtgaaaaatattataacagtaggttgggtgcagtggctcacgcctgtaatcccagcattttgggaggacaaggcgggtagatcacttgaggtcaggagttcgagagcagcctagccaagatggtgaaaccctgtctctactaaaaatacaaaaaaaattagctgggggtggtgatgcacgcctataatcccagctactcgggaggctgaggcatgagaatcacttgaacccgggaggtggaggttgcagtgagccgagatcaagccattgccgcctgggtgacagagcgagactccgtctcaaaaaaaaaaagaaaaatattttaacagtagatcctgtagcacatttaatgacaataaatttattaggaaaataattagcagattggtatctatgcaattcaatttcaaattttggttgaattgcaaccataggwtggctacagatatgagtttggcaaaaattaatgaaaccattctgccagaatcaattggctgtatggaatttactatcaagtgtttgta

SEQ ID NO: 376102 - DNA, 322 bp, Homo sapiens
acttggctatttgtcctcattggcccgtgtcctctttaatggcaagtactgcctctcctcacttggaatatccagccacagagtcagttcttggcatgtaggagatgctcaatgcacattgttcaaaagagtgaattatttactcccacaggattgtcctacattagacagtctcctcgtcacsagatcatgcctcctttgaacaggtaatcgaaaaatctgctctgtattggtatccaggtggatactggcattgatgaaaggtgctacttttagaagctgacccttcttgggagcagcatccaaaccccagaaaatgggt

SEQ ID NO: 376103 - DNA, 619 bp, Homo sapiens
agctcatgagtcaaagctgaatgcctagttttgacaagggagtccaattaaatatgctcacagcaagcagtgctctgggagatgggtccttgttgaactgccttgagatggataatcagatgctagctaccgagaaatgtccatgtgagtcaaagtccaaccaggaaaacagaaagcaccaagtattttaagcaaaatctattatggtaccttatttttaaaaaccttagaaagtaataaaagtaatataaactcattgtagaaatttcagaaaatatagacataatcactgttgatgtatatgtttttagttatctaacatgtatgagtaattagaactcttccacgtagcattagtccagaggtaatgctaggtcctatttatggtaataattgaagtttcatagayttagtctccttgaatattgggggaccattagcacctcctcttctctacttcttcatagtctcaaatatttttgggatctttgttgggagggggatgctgcaagtgtcaaacatgaattcacaaacaattctcacatatgttgccactgcaggcctatagctgctcctcttcctggaaagaggttagcttgggcttgtgagatggttgtac

SEQ ID NO: 376104 - DNA, 615 bp, Homo sapiens
atatacaaatatatatgtataaatattatatatgtgataaggaacttttatataaaatttatattttgaaatgcttacagattaacaacaaaaaagcaaacaaaccaataagaatggacaagaccttttaatgaacacacagtaaacayataaaaaggtgctcaacatcaatttgccatcaggaaaattcaaactaaaaccacagtgatgtatagtttactagaatgtataaaatataaaaattgacaataccaaatgttgacatggatgtgtagtaactagaactctcatacattccaagtaggagcataaaatggcaaaaccaccctaacaaactgcatggcagcttcttttaaagttaaacatgtacataacctatgatgttatttcatttgtgtgtgtttagccaagggaaatcaaagtagatttgtatgaaaatgttcatagtaggtttatacatctacgtaagccaaaaactggaagcaacctatatgtccattaacagaactgatatttgtagagtttaatactacttagtgataagaaatacaactaatcacacacgaaacaatattaaaaatatctgaagattatttaataaaagacaagagacac

SEQ ID NO: 376105 - DNA, 615 bp, Homo sapiens
atatacaaatatatatgtataaatattatatatgtgataaggaacttttatataaaatttatattttgaaatgcttacagattaacaacaaaaaagcaaacaaaccaataagaatggacaagaccttttaatgaacacacagtaaacacataaaaaggtgctcaacatcaatttgccatcaggaaaattcaaactaaaaccacagtgatgtatagtttactagaatgtataaaatataaaaattgacaataccaaatgttgacatggatgtgtagtaactagaactctcatayattccaagtaggagcataaaatggcaaaaccaccctaacaaactgcatggcagcttcttttaaagttaaacatgtacataacctatgatgttatttcatttgtgtgtgtttagccaagggaaatcaaagtagatttgtatgaaaatgttcatagtaggtttatacatctacgtaagccaaaaactggaagcaacctatatgtccattaacagaactgatatttgtagagtttaatactacttagtgataagaaatacaactaatcacacacgaaacaatattaaaaatatctgaagattatttaataaaagacaagagacac

SEQ ID NO: 376106 - DNA, 522 bp, Homo sapiens
tcttcacatccttgccaatgcttgtggtcttattttttgataattgccatcatgtcaggtatgaggtaatatctcattgtggatttggtttgcatttccctgatgattagtgatgttgaacatttttttttcatacatctgttggccatttgtatgtcttttttggcatacaaatagaaatrtctgttcaagtccttagtccatttttaaaatgggtcattagtatttttactagtgagctgtagaagttccttatctattatggagattagcccttaatcaaatacatggctttaaaatattttctcccacttcttaagttgccttttcactttgttgattgttttctttgctgtgtcaagaagatgtacagatttctggcaacattgtctgaacatctggaactaatcatgcctgaagactgatgccatagacttttcaatccctttagccaaattaaaccagttttagatggatttctaccattgtcaagctgaagaatcttgagtaaaacaagagtgt

SEQ ID NO: 376107 - DNA, 570 bp, Homo sapiens
ggaggtggggactagtgggaggtgtttaggtcatgagggtggatcctcatgaatggcttgctgcctgcctcatgggtatgagtgagtgctcactcgattagttcatacaagagctgattgtttaaragatgctggcacctcctcccctctcttttactcccgttctgtgagtgacacacctgctcccacttcacctttcaccatgattggaaacttttggaggcctcaccagaagtagatgctggcactgtgcttcttgtacagcctgcaaaatcttgagccaaataaacctcttttctttataagcctcatatatcccttcatagcaatgcaaaatagactaatacagaagacttgagtaaagtacattaccttccataatgtgagtgagtctcaactaattggttaaaggccttgatagaaaaaagaccaatctcccttgagtgaattctgctagcagaccaccttcagacttgaattgcagcataaactgttccctgggtctccagcttgctgtcctaccctgaagcttttgaaattttggatttgtcagctttcacaacaatcaga

SEQ ID NO: 376108 - DNA, 627 bp, Homo sapiens
gttttcccaacattatttattgaaaagacttccctttccccattgtgtttacttagyacctttgttgaaagtcactgagatataaacttaaggtcttctcaggcttttttctggcctgtgcctctccctcggcttgttagtgactttctgattttccttgtatatgcagttgcttttgaatatcctagtctttaatgtctgacccccaaaaaaggataagaaggaaaaacaaatgaagtaggggggaaatggtcctggtaatttaaattccctggaagttgcttcagctatagggaaagaaatttgtaatattcggaggtgagggggtacaacaatgactatctgcctttgtgtctgccttccatgatcagaagcaacagtcagcactcagaacacaggttctgctatttggatgacatggttcttattgcctaccctggctcccacaagctgcatgcaagctgctcctgcagctcatgcactgcctcccaccaggctcgtgtgggagatagaaaactgttagccaggtaagagcagaaattaaccaaaataaaccaagtttactgtcaagcattcccctggaagttgcaagccttccacaacactccaaagttcaaaaatatttac

SEQ ID NO: 376109 - DNA, 631 bp, Homo sapiens
ataatttagcattagtaaagcactctgaacagtatctgacacataagtgtttgttaaataaacgaacaaattggaaattctaaaaataacaactttaatttttggcgttcaggattttatgggtgagccgaaaagcagaaagagagaaggcgaagagcatgttaatgagctggaagaacatagaaaatgggatggaggccaggcacagtggctcacacctgtaatcctagcactttgggaggccgaggcaggcaaatcacctgaggtcagaagttcaagaccagcctcgccaagatggtgaaacacagtctctactaaaaatacaaaaattagccaggcgtggtggtacactcctgtagtcccagctacttgggaggctgaggcaggagaattgcttgaacctgggaggtgggaggttgcagtgagctgagatcataccagtgcactccagcccggaggacagagcaagactccaaataaaaaaagaaaagaaaaacaaacagaaaaaaamgacaagcaaagaagaaaagaaaatgggatggaaatggagagtatgaagaaacacaaaagatactagaaggatagacacggaaaaactaaaatgtatctattaaaggtagagaacaaaagc

SEQ ID NO: 376110 - DNA, 519 bp, Homo sapiens
aatttcactctgctcccaggctggagtgcagtggcgcaatctcggctgactgcaacctccacctcccaggttcaagcaattctcctgcctcagcctcccgaagagctgggattatgagtgcaggccaccatgcatagctgatttttgtaattttagtaraaatggggtttcaccatttgggccaggctggtctcaaactcctgacctcaagtgatccacccacttcagcctaaaataagcatttcgagtgctcctatgcagagggcttgaagacttggaagactcaaccccacctctgagagacttcccatctgttagagggaggaagggtggaacagtgaacacatctggggaatcccagtctgtcatttactggctttacaagttgagggaagggagctgatctctctgagccttagttttcttgcctgtaaaatggggatgatgaaatgcctaccccatcaactttatgaattacttagtgcaatacttggcatgtagacaacattcattatcatt

SEQ ID NO: 376111 - DNA, 557 bp, Homo sapiens
taaggagatgctcgaaaaggctatctccatgtagtaggattttactttatttttatgttattctttgtattttcctgtattgtgtatttatacagtaagcatgtattatttttacaaagtttacaaaatgcaccctgtaaaagaatcaatatttttaaattatcggaagaaaatttcagrgatcatttttaataacctcagaataagtaagacctttacgaaaaacatgtacaaacacacccaccacaggtagtcaaaatgtaatactcctaagggacaaaaacactatgaataaagttaaacaatagcaatctttgaggaactatttgcagcatatatcttaaatttttataaatcagtgagaaaaagacaacctaataaaaatggtcaaaaaataaattcatagacgaggcagtacaattaacccagaaatagatgaaattattttcaacctctaattagtatattgttaattgaaacaatagtggcatattacctatcattcataatattggtagatatggctagacacggtggctcacgcctgtaatcccagc

SEQ ID NO: 376112 - DNA, 600 bp, Homo sapiens
agcacagagtccctttgagacagtggggaaaattcatcttcatattgtcacatgcactgtaataggaakgtttagcaaaaaaaaccttccagagaaaggtggtttccaatattacctacaacttgctttgcaatttgatttttgaaaggacctaaaagttgaaaacaggctatcacatcccatttgctttaaagtctcttaaacttacgctctttcgcttcaaatgcataaatgttttatttaagtttgcattgcccactaaggctagacattttttgataaattcacagggttacaaaataccaaacggaaatgagataagtggtataaaccacagaagatataggagaagagaaaaaaaaagaggaaataaagaagacaactcttttcctaagagtctgggtaaaattgaacacagccatattcactgaacaacatgagtgagcttcattaatttaagcacagcaaaactgctttaattaacaagaccagagagaagggagaggagactacatttgtgtgacctaatggttgtgatttcactgtccaagaggacaaagacaaagaaattctgggaaggagaacaacaattatattccc

SEQ ID NO: 376113 - DNA, 600 bp, Homo sapiens
agcacagagtccctttgagacagtggggaaaattcatcttcatattgtcacatgcactgtaataggaatgtttagcaaaaaaaaccttccagagaaaggtggtttccaatattacctacaacttgctttgcaatttgatttttgaaaggacctaaaagttgaaaacaggctatcacatcccatttgctttaaagtctcttaaacttacgctctttcgcttcaaatgcataaatgttttatttaagtttgcattgcccactaaggctagacattttttgataaattcacagggttacaaaataccaaayggaaatgagataagtggtataaaccacagaagatataggagaagagaaaaaaaaagaggaaataaagaagacaactcttttcctaagagtctgggtaaaattgaacacagccatattcactgaacaacatgagtgagcttcattaatttaagcacagcaaaactgctttaattaacaagaccagagagaagggagaggagactacatttgtgtgacctaatggttgtgatttcactgtccaagaggacaaagacaaagaaattctgggaaggagaacaacaattatattccc

SEQ ID NO: 376114 - DNA, 600 bp, Homo sapiens
agcacagagtccctttgagacagtggggaaaattcatcttcatattgtcacatgcactgtaataggaatgtttagcaaaaaaaaccttccagagaaaggtggtttccaatattacctacaacttgctttgcaatttgatttttgaaaggacctaaaagttgaaaacaggctatcacatcccatttgctttaaagtctcttaaacttacgctctttcgcttcaaatgcataaatgttttatttaagtttgcattgcccactaaggctagacattttttgataaattcacagggttacaaaataccaaacggaaatgagataagtggtataaaccacagaagatataggagaagagaaaaaaaaagaggaaataaagaagacaactcttttcctaagagtctgggtaaaattgaacayagccatattcactgaacaacatgagtgagcttcattaatttaagcacagcaaaactgctttaattaacaagaccagagagaagggagaggagactacatttgtgtgacctaatggttgtgatttcactgtccaagaggacaaagacaaagaaattctgggaaggagaacaacaattatattccc

SEQ ID NO: 376115 - DNA, 562 bp, Homo sapiens
ggaaacattctgtttttcaaaagaagaatgtacatattccacttgactgggaagctgtgtggcccaaatcactgtttgagtggaggaatgttttctagagcagtgactggaaggacaaacgtggtgttgcagaacaaaaattccttgcctttggtatggaatggtggtgccttttccatgtgatgagaaatgcttcatagacagtggcatgtgggagagctgaaggaggaggcgtgttccatattccactcattcaaaggacagcttggtgttttcacactttatgcaggttaggggatctgattaatgtttcctttccttacaacagctagagaaaacatctcatcacaattggagacctctacttcctttgmgctttcctactcaatggtaggagataggaatatgttccgcaaagaatgtctactgctcttgtccttggctgtgatccctatacatagtgtgaatttatatccaggtttcccaggatcaatattgacaagacgactttggcatctgaattgttttaatatctttactcaaaaaaacaaaaaaacaaaaa

SEQ ID NO: 376116 - DNA, 562 bp, Homo sapiens
ggaaacattctgtttttcaaaagaagaatgtacatattccacttgactgggaagctgtgtggcccaaatcactgtttgagtggaggaatgttttctagagcagtgactggaaggacaaacgtggtgttgcagaacaaaaattccttgcctttggtatggaatggtggtgccttttccatgtgatgagaaatgcttcatagacagtggcatgtgggagagctgaaggaggaggcgtgttccatattccactcattcaaaggacagcttggtgttttcacactttatgcaggttaggggatctgattaatgtttcctttccttacaacagctagagaaaacatctcatcacaattggagacctctacttcctttgagctttcctactcaatggtaggagataggaatatgttcmgcaaagaatgtctactgctcttgtccttggctgtgatccctatacatagtgtgaatttatatccaggtttcccaggatcaatattgacaagacgactttggcatctgaattgttttaatatctttactcaaaaaaacaaaaaaacaaaaa

SEQ ID NO: 376117 - DNA, 570 bp, Homo sapiens
tgtttttatttttaaataaaagatctaattatattggaaatctgtttcaacaataatcgatgtggtcttttccagtggttctcaagttacaggtttattaatacaataatatttagatttttcaaaaattgccattggaccactaaatttgacttgcacattgtattacttattatttctaggcacccacattttgtttaaagaatttttaaaatttgcatattataaaagttacaaaatgtggtacacaagctgcttaaaacatatgagatatttatttgaaaatgaacaaagaaaataatgaaatagcctaataaattgcctttctttggatccactgatcagagggaatcagcctgcatttgaactgattcatgctccttgactgctgtctacacacacagttttcattttgttcctgactctctcycaagtctcacctcacaagccaagctccaccttctgtcttctttgtcctgccaccaccaaatatttctaggctcctacatggaagcaggaaaaattattttagaccaaaggtattagtaaaaggtataggcaccatgcgtt

SEQ ID NO: 376118 - DNA, 627 bp, Homo sapiens
ggaggctgtttctcatgaggaagacgattttaacaacaccatgtgatatgggtaggctttgagtccctacccagatctcatcttgaattgtagttcccataatcccacgtgtcatgggagggatggaggggaggtaattgaatcayggggacagttacccccatgctgttcttgtgatagtgagtgagttctcacaagatctgatggttttgtaagagactttcccactctcctttgctctgcacttctctctcctgctgccatgtaaagaaggatgtgttttcttccccttctaccacgattgttaagtttcctgaggcctccccagccacgtggaactgtgagtcaatcaatcctcttttctttataaattacccagtctcaggtatgtcttcacagcagtgtgaaaatgaactaatacaccctgagataagatacaggcaattcccctagtccttcccaaaggaacctataaccatttacttgggcaagtgtacaatggggaaggggaatacataatcttttaagaaaaattgtatacaggggccacattgtttctgatttccaggaactactcaaaaaatatcatggcctctgtgttaaggtaggggtatacagaggtcaagt

SEQ ID NO: 376119 - DNA, 641 bp, Homo sapiens
aacctatgaacaatgtatgtctctccatttatttaaatgtctttgatttctgtcatcagtgttttatagtttttagcatgagtcctgtatgtttgtattagattaacacctatttcattttttgagtgattgtaaatggcattgtatatttaatttggctgtccatgtgtccgttgcaaacatatagaaatacagttgatttttgtgtctgttcatcttcaattctgtgattttgctgaactcccttattagttctgggagggttttttgtttttttcttttaagatttctgaggattttctacaaagataatcacagtcatgtcatctgccaacagaagtttgttggtttgtttccttcttaactgtatgacttttatttccttctcttgtcttattgcactaactagaacttctggcattttcttgaataagagtagtgagrgtggacatccttgctttgtttccagtgtttagggagaaaacatccagtctttcaccattaaatataattgtagctgtagttttttggtatatatattttttaaatctagttgatggagttcctattgccatctattcttatttttctgagagttttcatcatgaatggatgttaaagtttgtcaaattaattttatg

SEQ ID NO: 376120 - DNA, 561 bp, Homo sapiens
atcccattcattagggtgaaaccctcatagcccaatcacctcttaaacgtcctacctctcaacactgaaacaaaggcaactaaatttttaacatggggacttttggaggggacaaacattcaaaccatagcatctatctgtctccaaactcctttcccagtagtttatgcaagagaaggcaatttatattcttacacttcactctgtggtcttgttactctttgcttcctgtctatctttcttgtcctgatgaagaataaattcattgtcaaattacatcatgaccaataattttaataaatgtagatgaagaagagaggactgtgtgctgtagtggtcaaggagggcttcatggaggtggtgaagtttgagctgcattttgaggtatcggtatagatggagcaagagtgatgagagaaggactaggtatgccagtcttagatacaatgggacagaggagtgaactcagaaaaataccaggtgtattaatagacacataagcagtttggcttackgtagaaaggcaatcaaaaaaatattaaattaccttatattaaacac

SEQ ID NO: 376121 - DNA, 534 bp, Homo sapiens
tagcgggtcaagaagttaggagatgctctgtatttggtttaactgtgaactatattatccccagctaaactaaaagcagaagcctacttttaaaataaaatacatcactctcaaaagttgatctcagttttttttacaagacatctgtggaragttaatttgggaaagtaattgtttcaattcaatgggaaaaaaaactcaaatgagaatagctcacaaaattacagcagtggacaacattaatgcttattttgtgaatgaaatcaaaatggctattctttcagttctacagtttaaaaagaaaatggttccgtgtgtgtgtgtgtgtgtgtgtgtgcgtgtgatataggcgtgtctctttttgcatgtatggaattagagtaaatgtaggtttaaaattaatatttcatgcatagcagaagaaattagtatgtgtttctataaattattgtgatatgtgagagaaaatgttgtttagttaaaaatgtgtttatccctagaaaaatttggcttttagactattcataataacat

SEQ ID NO: 376122 - DNA, 657 bp, Homo sapiens
aggtttgttcatgtagctatgaacatggtatgtacagacactgttgaaaagtggagggctagaaactttgagatttctgtgggctgcataaaccatccttccagtaaatttccaatgaagagtgccaagtaatagtaccttcatttttaagattatttcttaatgtggttagataaattctcaatataactaattatcagagaagagcatttaaatacgtgcaagrtgttattgtcatttctccttcctaacaagtatttctgattttagaaaaagtcctgtgagcttatacttgttctatatactaaatatttgattcaggtttaaatttaaaaatgatcagttatacttgattgaaacagaagtataagcttttaaacttaatctagattcaggtagctacaaattagtgaacaataatgttttatctaatataaggatatatatgtgtgtgtgtgtatatatatatataaattcacacacacacatacatatttgaatcaatttgaatgcatgtcactaaatatgatcattagtaattttcataaaataaaaagataatagtttatttactcaaatattaataaaattcacttttttaaaacccacaaaatatcctaattagaggatggatttaaagtgaaaaacactaaataa

SEQ ID NO: 376123 - DNA, 635 bp, Homo sapiens
agccaatagatctgagagtaaattcagttattctgatccatgatagctgttttctagaaacattgcttttgtatatctggcacatatttgtgccttgtcagattgatgaaaaaatacaaattttacaatggagtctacaattttacaattgtagactcaggaatactcagaagtcagcagcctagttttttacttgtatcatcatagataactacaaggtatttgattcttttaatcaatgctgrcaaaagttcaaaatggagagcttctaggcatgggccatctgacttggctgtctacctagatcaagtaaaatggttgattgccaaatctctactgtgtttcacaacaaagaaaatcagttaaagcggagaattgtcttaaagaaactacttagaagatcgacactttacaaaggaaatcttgacatttagcagagatcaaaaagaccaaaatattggtgatgacattatataaacacaatcttcaggaaaatatttttgggccattgttaatatttcacatccaagtaactacacaggattgaaaaatagatgacacacttttctgtatggtcatatgagtctgtcttgagattatgtttattggatttattgtttaaaaaaagtttaaac

SEQ ID NO: 376124 - DNA, 556 bp, Homo sapiens
ctaggttctatttgagggtggaggatgggaggagaaagaggagcagaaaagataactatttggtactgggcttaatacctgggtgatgaaataatctgtacaacaaacccccgtgacatgagtttacctatgtaacaacccatcacatgtacccccgatcctaaaataagtttatttacgtatatacacacacaaatctctcaactactgactgaatttcaggtaatctgtgagacagtgaaaaacaatagttaaatccatgrgttttcctcctctttatatttttaacaaactacttcattaccctgatttcacactacaagcagaaagaaataaatgcctgggttttgcaagccctatagttattatcatcaaactcagctagcaccacaaatcatggtatatgttatttgcttaaccaactgatgtataaactggatcttggattttgccatttctatgtattgtagcctctattctgtctttagcatgttctccaaatgacgtgtagattgtgggctgagttctggctgctagctatttctggcaaactgtt

SEQ ID NO: 376125 - DNA, 584 bp, Homo sapiens
aattagtaaccttttcattaaagattgtttcttccttgcctttggtgttcaagtatgatttgcttgaatgttatgttgctatatatgtcattgaaatccaattcttcctgtcattaattaatagaagaaaaagaggctcatatatcaagtaacttttgtgtcacaggccacagacactcacaatacaatatagttcttaatgttatcaataacccaaatttctctgatgtcatttcctcactaatttttaaagtacttccagtgctttacaaaatccattccaattatttcttagagaatgaaggcaatttctcacgtatgtttttaatgcaatgcctgaggtactacctggcatctgccattttcctcttatgaaaaagtcagttcatttaggtggtggtaacggcagtgattscatcagctgattggctctccgaagtcctcaaaaacctaatagggaactttggccccactgttgtcagcactgctaggactcagacaatgctagtctaccaagttatggcactgatgctatcccaaaattgtggtaccaaagcccagttttactgaagaaaagagaccct

SEQ ID NO: 376126 - DNA, 540 bp, Homo sapiens
gtgtgtctgtgtcagtaatcagatatgttcrtatatgtctagaaaaatctagaaagaatagcaggaataaaattagggtggctggtatggggtaacttcatttttgagtaaatacatctgtattctttgaatattttacaataagcatatgttacttttataatctttaaaatgaagaaaagagaagagactacagcataaaaagtaagctccttcagggctccaaggtctaattaaagcagcagaaacctcataagtttctctttcttttggtgcttttaagtagtgcacgagtccacttgagagccaataattataagtttcttcttaggccctgaaaacataatttatccgttaagaaaagctactcagatggggccatatatgataaaaggcccatgctcagagagacaaagaacttactggctcgcctttgtaggcctgatgtcttccggtccaggtccacatggcaagccttaaaagcacaagctcgtcctagttctctttcttgccttcttggattataaatacgtgcattat

SEQ ID NO: 376127 - DNA, 540 bp, Homo sapiens
gtgtgtctgtgtcagtaatcagatatgttcgtatatgtctagaaaaatctagaaagaatagcaggaataaaattagggtggctggtatggggtaacttcatttttgagtaaatacatctgtattctttgaatattttacaataagcatatgttacttttataatctttaaaatgaagaaaagagaagagactacagcataaaaagtaagctccttcagggctccaaggtctaattaaagcagcagaaacctcataagtttctctttcttttggtgcttttaagtagtgcacgagtccacttgagagccaataattataagtttcttcttaggccctgaaaacataatttatccgttaagaaaagctactcagatggggccatatatgataaaaggcccatgctcagagagacaaagaacttactggctcgcctttgtaggcctgatrtcttccggtccaggtccacatggcaagccttaaaagcacaagctcgtcctagttctctttcttgccttcttggattataaatacgtgcattat

SEQ ID NO: 376128 - DNA, 598 bp, Homo sapiens
tcagaatggttatgttccacccttcaggccatgtgattggtcacaaagaggtaacatgaccctaaccaggccagtcatattactttcctgggattcgtctaactgaagccaggaggaagtcactttctgctctgatggttgagttagggagttttgtctttccacattggtctttgctccaatgtcagcttctcaatgacatcacattatttgaggttgcaattccacccccagcatatctgagtcactttacatcaccagagtcaccttacatcacctgagtcacctgacatctgagtcagctctgtttttactcccctggcacttatcacttcttactataatttacttatttactatagccactgtttatgtcaatcactycctcttgagaatgagagctccagaaagttaggaattattgtcagttttgtgcatagagcaatacctggaatatataaattcttgtaggtgaatgaatgaaggaaggaagggtgagtctacagcaagaaagaacaaaatcctcacagaaggaagcagaaatagaagatgtatagagttgatagtggtggagctatgctattcgaaagagtagcca

SEQ ID NO: 376129 - DNA, 519 bp, Homo sapiens
gtctttgctccaatgtcagcttctcaatgacatcacattatttgaggttgcaattccacccccagcatatctgagtcactttacatcaccagagtcaccttacatcacctgagtcacctgacatctgagtcagctctgtttttactcccctggcacttatcacttcttactataatttacttatttactatagccactgtttatgtcaatcacttcctcttgagaatgagagctccagaaagttaggaattattgtcagttttgtgcatagagcaatacctggaatatataaattcttgtargtgaatgaatgaaggaaggaagggtgagtctacagcaagaaagaacaaaatcctcacagaaggaagcagaaatagaagatgtatagagttgatagtggtggagctatgctattcgaaagagtagccactagccacatgtggctattgagaatttgaaaagtctgaattgaatctggattttgaagacagtacaaaagaatgttgacgatatcattaa

SEQ ID NO: 376130 - DNA, 598 bp, Homo sapiens
tcagaatggttatgttccacccttcaggccatgtgattggtcacaaagaggtaacatgaccctaaccaggccagtcatattactttcctgggattcgtctaactgaagccaggaggaagtcactttctgctctgatggttgagttagggagttttgtctttccacattggtctttgctccaatgtcagcttctcaatgacatcacattatttgaggttgcaattccacccccagcatatctgagtcactttacatcaccagagtcaccttacatcacctgagtcacctgacatctgagtcagctctgtttttactcccctggcacttatcacttcttactataatttacttatttactatagccactgtttatgtcaatcacttcctcttgagaatgagagctccagaaagttaggaattattgtcagttttgtgcatagagcaatacctggaatatataaattcttgtaggtgaatgaatgaaggaaggaagggtgagtctacarcaagaaagaacaaaatcctcacagaaggaagcagaaatagaagatgtatagagttgatagtggtggagctatgctattcgaaagagtagcca

SEQ ID NO: 376131 - DNA, 602 bp, Homo sapiens
ttttgaactaatgttaaacaaaattttgcaaaaatcacggaggtgatatatactcttcctctagtttcccctgattaaatgtcccacaatatttttaactgaactacagactttattcaagtttcgctgcatttcctaataatgtcctttctccattccagaatctgatccaggatcctacaccgcttttataaaataatatgtagttgcatagttgttgtgtttccttagtttccatcaatctgtgacagtccctaatttcccccagtcttttatgactgtggcacttctgataaacacttcacagaatgttacttacacgttacttctcggaacatatgagtacttcacagattgtctgttacttcacagaatatctctcaatatgatttgtctgattttttttcccattattagattgaggttatgcacttgtgacaaaaagactacagaagcaattttgtgacctcagtgcatcataccaattacatattatttttccttttgtaatttataaacatttggggcagatatggttaaaatatccagtttctccttaaactttttatgcacygcttagagcatctgttggtaaagagccc

SEQ ID NO: 376132 - DNA, 571 bp, Homo sapiens
cttcttcactgaactgtgaattccttgaggacaatgaatttgtcatactaatcttggtggtcctcagtgtgcctgtgtatttayttcaaataggttagtgtattagaaagaaacagagacccatttaggttacatcaagaaatgagggtatttttggaaggatacatatgaacggagctagaaagtaagaaatacagaggcagctctaggattaactcacctcccgtctctgtcacaggacatgcatcctgctggtttctcaaggtgtctttgttcctctgatactttccttcacctctgaaggaagtggcctccttcttgattcagagttttctgcttccttataattttggcttatatagagttcttcattgcctctttggtcttgactgtacctcatcaatgatgtgaaactctatccctcctttgttcctactctctctagcttcttggtgcaaattccccaaataagaaatcgagttggtctggtgcagctttctacaacaggtcatttcctcatttattaagaaaaaaactattgcatctaataaatatcacagatttacatgtc

SEQ ID NO: 376133 - DNA, 514 bp, Homo sapiens
atttacgaccttggttgaacaaataactaataaaaaagattttcagtttgtaaaaatcttccttcatttgagaacaactaaatatagggaacaacagaagatttacaataaaaaataaagtagttgctatgtcacttccatgtcttgagacctcatcaagataaaattattgtttgctgtcaattttaagcattattttacatatgagattagtaatcactgttctagataattaacaaaattgtccttcataaattttgtttattctcatgcctcagctttctgagtagctgagattacagatgtgcaccaccatgcctggctaatttttgtatttttagtagagacagggtttcaccatgttggccaggcttatctcaaactcctgacctcaagtgatccacctaccttggcccccaaaagtgctggaattacaggtgtgggccaccaygcctagccacaagtccctatgactgttaaagggctttctctcaccgctggaacctgtttggtc

SEQ ID NO: 376134 - DNA, 542 bp, Homo sapiens
  misc_feature (1)...(542): n = A,T,C or G
nnnnnnnnnnnnnnnnnnnnnnntgtgttgtaaacacatctacacataaaaaacgtacagtaaaaatatagtataaagggataaaaaatagtacacttagatagggcagttaccatgaacggagcttgcagcactggaagttgaatgtgaaggcctargacagacattattgtgcactactgtagactttataaattctgtatgattagactacactaaattaatttttaaaatagagtgattatgctaccataacattatgatggctatgatgtcaccaggggataagactttttcagcttcattataatctaatgggaccaccatcatatattgttggtgatccattgctgaccaaaacatccataatggggtacatgactgtactagcatgatctaagcagaaggcttgcagttaaattgaatatgggataactttctcatttgtgttatttaatgctatgtaatggtctgcctgagtagtatcaggagaagtaaatggctcacacttgagaagtggatttcttctgatggttcaaaca

SEQ ID NO: 376135 - DNA, 625 bp, Homo sapiens
atgtttgtcttctaactatgttaataatgctggatttctatattcaatagtggtccagggtcttattcaaaaacacatttatttaaattttaaaaatgacttaatttaaagaataataattgtggccctggtggtaagagcagggaatgaggacgcctgaagaaatctaatgcaagccacaaataggagcrgcatatgtaattttaagctttaaagtagccacagttaaagcaaagagaaattgatgcaattgattatattaatatataacatattaatacaacaaaccccaatacatcaaaattattatttcatataatcaatctaaaattattagtatgccattttacttttttgatactaagtctttgaaacgtgatgtgtattttacacttacagtacatcttaattcataataaccacatttcagtgctcaataaccacatgttactagtgctatcctattggacagcatagttctaatccacaattaacaaatggaagcacatttatatccatggtcaagtgacagtgatgccccttttcctgtttgggttcattaatgccacactttcttttggtagtttggtctgagatggtccaaagctaagccatcccacagctc

SEQ ID NO: 376136 - DNA, 625 bp, Homo sapiens
atgtttgtcttctaactatgttaataatgctggatttctatattcaatagtggtccagggtcttattcaaaaacacatttatttaaattttaaaaatgacttaatttaaagaataataattgtggccctggtggtaagagcagggaatgaggacgcctgaagaaatctaatgcaagccacaaataggagcggcatatgtaattttaagctttaaagtagccacagttaaagcaaagagaaattgatgcaattgattatattaatatataacatattaatacaacaaaccccaatacatcaaaattattatttcatataatcaatctaaaattattagtatgccattttacttttttgatactaagtctttgaaacgtgatgtgtattttacacttacagtacatcttaaytcataataaccacatttcagtgctcaataaccacatgttactagtgctatcctattggacagcatagttctaatccacaattaacaaatggaagcacatttatatccatggtcaagtgacagtgatgccccttttcctgtttgggttcattaatgccacactttcttttggtagtttggtctgagatggtccaaagctaagccatcccacagctc

SEQ ID NO: 376137 - DNA, 600 bp, Homo sapiens
ttttccccgaagttaaatttcattatgattgacatactgcactttttcttttctagactgttcccagaaaactttatcaattaatctgtggtggcttagctgtagaacagataccttctatttcttgttcttaacttttcttgtgaaaagaagatttttagatcccctgcatctctctctttatttcagttacaggcaattgattttataatcttggtgcaagagggaggtattcctggatgtttggtgaactcagaatagatgcaaagtcttcratagctttctgcaatactgtcgtaaatcatatgttaaaaacactcctcaaaacatgatttaattttccattgatcctgcctaatctttttattacaactagcacagacctttcaaagaaagttaatagtaacattagcaaattaagagctgttcaaaataaattaataatattagtagtagcattaatattaatagctctattgattctatgtttactatgggtcaggtgctgtgctaagccctctacattcattattctgcttgatcttcattgagaattttttatgttggtcttattatatacaggtttttagaataggaatt

SEQ ID NO: 376138 - DNA, 600 bp, Homo sapiens
ttttccccgaagttaaatttcattatgattgacatactgcactttttcttttctagactgttcccagaaaactttatcaattaatctgtggtggcttagctgtagaacagataccttctatttcttgttcttaacttttcttgtgaaaagaagatttttagatcccctgcatctctctctttatttcagttacaggcaattgattttataatcttggtgcaagagggaggtattcctggatgtttggtgaactcagaatagatgcaaagtcttcaatagctttctgcaatactgtcgtaaatcatatgttaaaaacactcctcaaaacatgatttaattttccattgatcctgcctaatctttttattacaactagcacagacctttcaaagaaagttaatagtaacattagcaaattaagagctgttcaaaataaattaatartattagtagtagcattaatattaatagctctattgattctatgtttactatgggtcaggtgctgtgctaagccctctacattcattattctgcttgatcttcattgagaattttttatgttggtcttattatatacaggtttttagaataggaatt

SEQ ID NO: 376139 - DNA, 567 bp, Homo sapiens
gtttgactgaggatagctgtaaacaggagattcatgagttctttaatccagctttacctttaacaacacagatattttggtttcttttgggtgtcaattctatggatcacttatttctcaaattattggagggagtatgattgatacctctagtcattcaaaggatgaagacatcatatatttcagctctagaggaaacagaattgcaccaaactctgggcagmcctctctctgtgggtgtctctggtcaaaatgggatgaggaagatcgcgtagtactccatcagtgctgagtggtgcttatatgtttgtgggcaaaggtgatttcttgttgtgagaatgaagtaaagacaaaaccctggccttaattttcctatatgtataagtaaaaaaaaaatgcatcttcttacatacaaactggaagaatagtaagtgtgaataaaccctgactcaaacaacacgttttagtgttagaaacctagtggtttttttaggcaacaatggtaaccgccctgggagttgcagtttcagggtgacatttgagtgtctgttgcagccagagataggc

SEQ ID NO: 376140 - DNA, 548 bp, Homo sapiens
cttcctcttctaaatgatgctcccagactgcacccagaattgctctccatttcttatagatctttctggagatggcccatgaagatgtaagtacatatataatttgtgaattctcaactggaggcaaaatcaactccaaaacagtgaaaattrgttcagatgaaggggagcagaaaaatcttactctttctgtataaagcaatacataaacacatatcttgtatatctgtgatactaaaattttggggggaggccatagggaaaaaaataacttgaaaggctccttagaggaggtattaaaaaaaatctgttgagaaacactgatatgcccactttttaatatacctaagtggtagcttactgtcttgggtatacattgttccaggaagcagtatgaggggagggtgagaacttaggttgggcttcaaacccggtttgaatcctggctccaccacctatgaattataggaagttgaccaagttccttaatgtgttttagttttctcaactattaaatgggtataataattatagctacttcctagaga

SEQ ID NO: 376141 - DNA, 560 bp, Homo sapiens
gtgaaaaaactatgatagccttattgtttaaatgcatttatcttatgagattgagcatgattttgtattttagtaaattcctttatttaaaaataaacagatcaaacaatggctcgtagatactatgccttgcaacaaattgtgtgagctatgtaacattatccctgttttacatatgaggaaactgaggcacacagaaggtaagtaaacctggcaaaaatgagagacatagtagcactgtggttaagaaaactgaccttggagtcagactacttgggtttgcatcacaactccaccccaagtatcagctgtgcggtcttgggaaagtatttaacctctcyatgcctcggtttccttttttgtttaatgagactaacaatagtactcatcctatagtgtgatttgggaaaataaaggagggctttgatgataccagttttaagtggtgaagccacattttgaatctttttttctgatccacagtagaagctcctaaacatcgctgtttcccttagtggcaatgtacgattgttagacattttctattccctggatgaatg

SEQ ID NO: 376142 - DNA, 560 bp, Homo sapiens
gtgaaaaaactatgatagccttattgtttaaatgcatttatcttatgagattgagcatgattttgtattttagtaaattcctttatttaaaaataaacagatcaaacaatggctcgtagatactatgccttgcaacaaattgtgtgagctatgtaacattatccctgttttacatatgaggaaactgaggcacacagaaggtaagtaaacctggcaaaaatgagagacatagtagcactgtggttaagaaaactgaccttggagtcagactacttgggtttgcatcacaactccaccccaagtatcagctgtgcggtcttgggaaagtatttaacctctctatgcctcggtttccttttttgtttaatgagactaacaatagtactcatcctatrgtgtgatttgggaaaataaaggagggctttgatgataccagttttaagtggtgaagccacattttgaatctttttttctgatccacagtagaagctcctaaacatcgctgtttcccttagtggcaatgtacgattgttagacattttctattccctggatgaatg

SEQ ID NO: 376143 - DNA, 560 bp, Homo sapiens
gtgaaaaaactatgatagccttattgtttaaatgcatttatcttatgagattgagcatgattttgtattttagtaaattcctttatttaaaaataaacagatcaaacaatggctcgtagatactatgccttgcaacaaattgtgtgagctatgtaacattatccctgttttacatatgaggaaactgaggcacacagaaggtaagtaaacctggcaaaaatgagagacatagtagcactgtggttaagaaaactgaccttggagtcagactacttgggtttgcatcacaactccaccccaagtatcagctgtgcggtcttgggaaagtatttaacctctctatgcctcggtttccttttttgtttaatgagactaacaatagtactcatcctatagtgtgatttgggaaaataaaggagggctttgatgataccagttttaagtrgtgaagccacattttgaatctttttttctgatccacagtagaagctcctaaacatcgctgtttcccttagtggcaatgtacgattgttagacattttctattccctggatgaatg

SEQ ID NO: 376144 - DNA, 560 bp, Homo sapiens
gtgaaaaaactatgatagccttattgtttaaatgcatttatcttatgagattgagcatgattttgtattttagtaaattcctttatttaaaaataaacagatcaaacaatggctcgtagatactatgccttgcaacaaattgtgtgagctatgtaacattatccctgttttacatatgaggaaactgaggcacacagaaggtaagtaaacctggcaaaaatgagagacatagtagcactgtggttaagaaaactgaccttggagtcagactacttgggtttgcatcacaactccaccccaagtatcagctgtgcggtcttgggaaagtatttaacctctctatgcctcggtttccttttttgtttaatgagactaacaatagtactcatcctatagtgtgatttgggaaaataaaggagggctttgatgataccagttttaagtggtgaagccacattttgaatctttttttctgatccacagtagaagctcytaaacatcgctgtttcccttagtggcaatgtacgattgttagacattttctattccctggatgaatg

SEQ ID NO: 376145 - DNA, 563 bp, Homo sapiens
aaatccaaactcttttagaaagtagattttaaagaactggaaacaggcatattctattactatacagttctgtcaaaaagtcccccaatcaagcagttatttggtcattttctgttattgcttactrtcatttcattattcatgtaataactggcttcactaaatgctcagggtaggcaacttaacagaactcttgctgggtaggaaattcaatatatatgccagattataatgaaataaatagtaatcacttatgcatatagaacaaaatacaatctcctttaaaccactgaaaaggtattatcctgtcggctttggaattgtaaatttccaattctttagtgattaatatcaccataaataaacaaatcctttttgagaaaatgtctaagacacaagaaaacattgtacattttatttaactaggaacagtttgttgaacgtatttatcagctggggataggaaaagtaccctttatcgtcagcacatataatgtcacccgtgtctccaatgctttgcaggtgactgggagattaatcacacaatcttcaagctgtatttg

SEQ ID NO: 376146 - DNA, 569 bp, Homo sapiens
atcctcaaactctagtttggaatgtctgaaactctttcaagggatgcattaaatcaaaattattttcatgataacactaagatgttgtttgtcattttactctcactttctcacaagtgtatagtggagttttacagaagctagatgatgtaagaagcagctattattctgacagttcatggaatgtgcatttgcatatttttgtatttaataaatttattagttatgatttctaatatgataaatatctatggatataatctacaaaaataaaaagytctttgtggtccttaatcatttaaaaaatgtggaggggtcttgaaacctcacatttgagaactgctgatctagatgataaattttgacttccctcaaattacctcattttacttatgcccacttttggtaattcaggtaatatgggatagatggcctgattcaccattttacataggtatttcttttcacttagcaggtatttactgagtatctcctatatgcaagtcatcacactaagcaatagtttttattgtcatcatcattcaaaaagtatatggcaggtgctctct

SEQ ID NO: 376147 - DNA, 404 bp, Homo sapiens
tggctgtctcttccttaattccttaaagctgcctgcctctgcttggttttattctttctctctgcggtgggcaaaatggaagtcygacattcgcaacttaccagctcagtagccctgactagcagaggccatcgttctcccagctccaagagaaaaacttcaaattaggtcacatgttcatctcaaaaacaatcaccaaggccagggaaatagatgtactaattggccaggctgcagtcaggtactatgtatatgtgtgtgtgtgtgtgtgtgtgtgtgtgtgttgggggggggattgtgtgtgtgtgtgtgtgtgtgtgtgtaggagtgataggaggtgaaatttcacatgaacctcactgaatgggttcttcattaaaaagaagggttcaatactaaaaaac

SEQ ID NO: 376148 - DNA, 471 bp, Homo sapiens
tgaatgactaatactaacacacasagatgccaaaatataaactgtaagctacaaagttgtatatttttttcagtgatgcaaaaacttcaaactgaaactgaaacaacagatgtcctggtgcagaggtgaaagcagaagaagggaagaaagaaagggcctttgcttccttgaaactaagcaaatgatgagagcaaatcaggaatctagttaagtgaggcttatttcttccgaatatagttagctaggctcctgtttgtttttatcattcccagggatgatttggttactatagactatacaaacaataaaatcatatttaaaaaagtaagacatagaaagatatattaataatgtgtgagattcatattgaagattatatcagttagctattgccatgataatgcagtgtaattaaccacctccaaactcagtggttcaaaaccaccaccatctattcttgctcttatgctt

SEQ ID NO: 376149 - DNA, 581 bp, Homo sapiens
tcaggatattttcactgtgggcaaggaccatacccttcttttgtggctctgtattgcttggcatgttttgaggatctacattcaataactacttgctgaataactgatgttttgaggacagttttagtatttagataccagagaaggaagttctatgatatgtctgatgagattaattttctatttgcattcctgttaggttcaagtttgggacacacatgcataaaagcctgaacttcctttagaaactcgagcccaggaattaaaacttgtgaaaatgcaccaaaaattgggtttatttataaaaataacttcacacctcccttcatggattctactttgttgtggaatcacccatctattgaatgactaatactaacacacagagatgccaaaatataaactgtaagctacaaagttgtatatttttttcagtgatgcaaaaacttcaaactgaaactsaaacaacagatgtcctggtgcagaggtgaaagcagaagaagggaagaaagaaagggcctttgcttccttgaaactaagcaaatgatgagagcaaatcaggaatctagttaagtgaggct

SEQ ID NO: 376150 - DNA, 471 bp, Homo sapiens
tgaatgactaatactaacacacagagatgccaaaatataaactgtaagctacaaagttgtatatttttttcagtgatgcaaaaacttcaaactgaaactgaaacaacagakgtcctggtgcagaggtgaaagcagaagaagggaagaaagaaagggcctttgcttccttgaaactaagcaaatgatgagagcaaatcaggaatctagttaagtgaggcttatttcttccgaatatagttagctaggctcctgtttgtttttatcattcccagggatgatttggttactatagactatacaaacaataaaatcatatttaaaaaagtaagacatagaaagatatattaataatgtgtgagattcatattgaagattatatcagttagctattgccatgataatgcagtgtaattaaccacctccaaactcagtggttcaaaaccaccaccatctattcttgctcttatgctt

SEQ ID NO: 376151 - DNA, 600 bp, Homo sapiens
tctgcttttattaccccaaggtaatttctgttacttgtaaccttaggactcttggtgatacaaaacctatctctatccctgataattctcagaatctttaaaacaaaaaggactaattgaaatgagttttccatatgcacgtttttgttgcttctttaatctcccaaaaggctcactcctaaattcccttgaaattcttctcttccttctaaattccagaatctcttaagtattccagagctctcttccaagggatttgattaagaccttgtgtaagaggagatagtgacatttgataatgatagaggtaaccattaaattcttctttcatttccatccttcagttcttcaataaatgtctattaaggacacaccataccctgtcccagatsctagaaacacaaaaaccactaggacagagtcttgttccttaaagaacctgcagtctagtaagggagataagatcacagaaataacggtaatgccagagagactgtgctaagtgctataattgaggtataggtcaagtgcaatgggaacacaaaggcgagagattaattcaatgctggaaggattggggaagatttcaggggaggagat

SEQ ID NO: 376152 - DNA, 594 bp, Homo sapiens
gaaatgccatttaatatggatttggaataayagggatactgagagtgctgccaatactgatgggaatatggccctcatcttgaggaggcagctggggttctggcaggcagattaccctatacagtggattttcatagagtcaagtataggggactccctggagatgggccaggacttgtagcctctgaaaacagccacatctaatagctaaacatgaaattaggtgattggaaaacaaatcctgccaaagcccaagatttgattgtcttaatccttaagtcctgcagtaaagttaaagcatgcataactaagaaagagataccaaatttatcctctaacaccagaggctatagtagtgacactgagtgttctggccccacccatatccctctggtcttacagctttagctttctctgaaaaaaagttccaactgtcagttatctgcatttcttcacctgggtttctttttttttttcttccgcgaaagccaaagaagactgctttatgatgtggggaaggccagaaaagccttggaagtcacattccccagaagcagtcctcaattgatgactgacaggagttggtgtataaat

SEQ ID NO: 376153 - DNA, 568 bp, Homo sapiens
tcttgcttaatccctttctcgccatgtaatccctgcaggtgcaggttcccctttgccttccaccatgaatggaagcagcttgaggtcctcatcagaagcagatgttggcacagtcttcttgtacagcctgcagaagtgcaagccaaataaacttctttataaattacccagcctcaggtattcctttacagcaacacaaatggactgagacagctataacacayagtgatggctgtttgctttttggtctcctccattagtggttgttccgtctttgtctctctcacactcagcacagtgcctggcccggcaacacatggttgtccaataaatgactctcagagatgagtgatatgatatacactatgcattatgcaataaataaattcttaacaacaaggtaacaccctaggacctcagaaagggaagaagggaaatggatggcatgcaaccacttatgcaaatgaccaaccccaactcctcccttccctcagtctgcccaaggtagcctagcccactctctctttcctctttcatgatctggctatggattttattgtgaaggaac

SEQ ID NO: 376154 - DNA, 568 bp, Homo sapiens
tcttgcttaatccctttctcgccatgtaatccctgcaggtgcaggttcccctttgccttccaccatgaatggaagcagcttgaggtcctcatcagaagcagatgttggcacagtcttcttgtacagcctgcagaagtgcaagccaaataaacttctttataaattacccagcctcaggtattcctttacagcaacacaaatggactgagacagctataacacatagtgatggctgtttgctttttggtctcctccattagtggttgttccgtctttgtctctctcacactcagcacagtgcctggcccggcaacacatggttgtccaataaatgactctcagagatgagtgatatgatatacactatgcattatgcaataaataaattcttaacaacaaggtaacaccctaggacctcagaaagggaagaagggaaatggatggcatgcaaccacttatgcaaatgaccaaccccaactcctcccttccctcagwctgcccaaggtagcctagcccactctctctttcctctttcatgatctggctatggattttattgtgaaggaac

SEQ ID NO: 376155 - DNA, 594 bp, Homo sapiens
gaaatgccatttaatatggatttggaataacagggatactgagagtgctgccaatactgatgggaatatggccctcatcttgaggaggcagctggggttctggcaggcagattaccctatacagtggattttcatagagkcaagtataggggactccctggagatgggccaggacttgtagcctctgaaaacagccacatctaatagctaaacatgaaattaggtgattggaaaacaaatcctgccaaagcccaagatttgattgtcttaatccttaagtcctgcagtaaagttaaagcatgcataactaagaaagagataccaaatttatcctctaacaccagaggctatagtagtgacactgagtgttctggccccacccatatccctctggtcttacagctttagctttctctgaaaaaaagttccaactgtcagttatctgcatttcttcacctgggtttctttttttttttcttccgcgaaagccaaagaagactgctttatgatgtggggaaggccagaaaagccttggaagtcacattccccagaagcagtcctcaattgatgactgacaggagttggtgtataaat

SEQ ID NO: 376156 - DNA, 558 bp, Homo sapiens
aacaacttcaatccttaagaaaaggaaactggtggataaatatttcagtaggtaatagtgggtaatagtgaataggcttgatgggactattctgagatagagtttacataattctccagaattcttagagttctaggatttctagagttcctggcaggactgaggacccagttgtccacagtggtaacctgttcatgcgtgcttcctttattcactgtctctttcttactttycccccctccatacttgtacttcttgggttctgttctaaataaaccgtctacatccaagcttttatctcagagtttgctttcaggggaacccaaacgaagacacaggtatcaaccaatataaataatttatctccttttttatttatactggtggagtaagttactcggtgaaataaataacttcctatggtattcagcaagattatttctcctttttttatataaaccggactatgacaagttttcggatctgtattctgtgcagtaaagtgtgtaattatgtaattagtactctcttagatttaaagtcctaacagaagtcaaa

SEQ ID NO: 376157 - DNA, 594 bp, Homo sapiens
gaaatgccatttaatatggatttggaataacagggatactgagagtgctgccaatactgatgggaatatggccctcatcttgaggaggcagctggggttctggcaggcagattaccctatacagtggattttcatagagtcaagtataggggactccctggagatgggccaggacttgtagcctctgaaaacagccacatctaatagctaaacatgaaattaggtgattggaaaacaaatcctgccaaagcccaagatttgattgtcttaatccttaagtcctgcagtaaagttaaagcatgcataactaagaaagagataccaaatttatcctcyaacaccagaggctatagtagtgacactgagtgttctggccccacccatatccctctggtcttacagctttagctttctctgaaaaaaagttccaactgtcagttatctgcatttcttcacctgggtttctttttttttttcttccgcgaaagccaaagaagactgctttatgatgtggggaaggccagaaaagccttggaagtcacattccccagaagcagtcctcaattgatgactgacaggagttggtgtataaat

SEQ ID NO: 376158 - DNA, 594 bp, Homo sapiens
gaaatgccatttaatatggatttggaataacagggatactgagagtgctgccaatactgatgggaatatggccctcatcttgaggaggcagctggggttctggcaggcagattaccctatacagtggattttcatagagtcaagtataggggactccctggagatgggccaggacttgtagcctctgaaaacagccacatctaatagctaaacatgaaattaggtgattggaaaacaaatcctgccaaagcccaagatttgattgtcttaatccttaagtcctgcagtaaagttaaagcatgcataactaagaaagagataccaaatttatcctctaacaccagaggctatagtagtgacactgagtgttctggccccacccatatccctctggtcttayagctttagctttctctgaaaaaaagttccaactgtcagttatctgcatttcttcacctgggtttctttttttttttcttccgcgaaagccaaagaagactgctttatgatgtggggaaggccagaaaagccttggaagtcacattccccagaagcagtcctcaattgatgactgacaggagttggtgtataaat

SEQ ID NO: 376159 - DNA, 594 bp, Homo sapiens
tttggttccattaggtacacagagggctgagatggaatttacagtgggagactttgaggcaggaggataatcctgctatggttgattaagactttgtttacaaggatctcccacggggtctgtgatccatggaaggtggatgtagaaggaaaatttgtcttcaccagttcattttaaccctagtgatctgatcatattgagagttctctccttgccaggctggttcttgtactttttgcaatgcaggttcagaaaaatttgtaaagagagattaaattaaagaggcatggggaaagggggagaattcttatgttggggtcagttctcaggttctattttgttctaggagaatctgaataawgaaaacctggggaacaaagagaaggaggaaaaggaagaagaggaggagaagccatcataggagaggctaagttgattatataataaagaggtgagagagaatgaagaaggagaaaaacaaagaacaccctatggactgggcatgacaggaagagagttcaagcttagagggtgagatgctgtgaaataactgtaaggaagagagagtaagatatgagagaaaggagattttaa

SEQ ID NO: 376160 - DNA, 594 bp, Homo sapiens
tttggttccattaggtacacagagggctgagatggaatttacagtgggagactttgaggcaggaggataatcctgctatggttgattaagactttgtttacaaggatctcccacggggtctgtgatccatggaaggtggatgtagaaggaaaatttgtcttcaccagttcattttaaccctagtgatctgatcatattgagagttctctccttgccaggctggttcttgtactttttgcaatgcaggttcagaaaaatttgtaaagagagattaaattaaagaggcatggggaaagggggagaattcttatgttggggtcagttctcaggttctattttgttctaggagaatctgaataatgaaaacctggggaacaaagagaaggaggaaaaggaagaagaggaggagaagccatcataggagaggctaagttgattatataataaagaggtgagagagaaygaagaaggagaaaaacaaagaacaccctatggactgggcatgacaggaagagagttcaagcttagagggtgagatgctgtgaaataactgtaaggaagagagagtaagatatgagagaaaggagattttaa

SEQ ID NO: 376161 - DNA, 479 bp, Homo sapiens
atggtttgctctaagtcaaggagtcatggctggtaggatgaaacagactgggactcacaaattaggagatccacttaagggcagtggcttggaactgaagaattctcacatgagtccccagatcaggaccccaggctctaaactctagcacctaatgcagtacccagcacayagtaggtggtcaataaccccaggggccttcctccctgggctgtaattccacgacccaacacagcacctggaacataattggtagtcaataaatgttggtgaattattgcattcataaatcaataactggatggatagatgtgtggaaggataaatggatgatttgatgaatgttgttaaaccttgactcaaaactatcaagtcaaaaaagtggactcagctccttgcaaggcaattcctttatgggttgaacccttactcttattggcacaaaattctcccactgattgaaccaaaatctaccatat

SEQ ID NO: 376162 - DNA, 363 bp, Homo sapiens
caaattaaaaattaccagtcatgcaagaagcaggaaaagataacccataatgaggagaaaaattaatagaaacagatcaagaaacgatgcagatgatacaattagtagacaaggacatttaaactattattatattttacacgtttcagaaagtaaaggagacatcgagcatgttaagtagagacatggaagatatatataaaaaaasattcaaatagaacatctagagagaaagttagaatgtctgagacgaaaaatacactggatgggattaatagcaaattagatactacagaagaaaagattagttgaattgaagacatagcaataaaaactattcaagatgaattcagagaagaaaaa

SEQ ID NO: 376163 - DNA, 535 bp, Homo sapiens
atataaaaaattgtccactaaaataatctatatactttctatttaataaataataattttcactaaagctagatttatctctaaagctaaaataaattacgtaatctgaactttaaacgttttaatttactattcggctgtttatcaatggtgtttaaaacctgcctaaaaaaataccgcactttacctagcacaatgaaacattctcctgcactcatcactgacaagctgatctaagtccttgccactgacttacaatacccttcccccgttttaaaattatatcccttactttgtcataaatsacttttataatgagagagcagctaggacacgttgccacgtcttccccattctccaaatcttcctacaacgaaatcaaataccatgtggtcaggatagcttctcttcgccatctcctcccccaaacctatcccacccctagatgcaagtctcttggtggcttgccttccccccaaggtgggtgagaaccccagggccttcagcgagaaatgccgacatcattttcccctag

SEQ ID NO: 376164 - DNA, 573 bp, Homo sapiens
gtgctatataatataaatataacacaagccacatatgtaattaaaatacttctaatagtcacattacaaaataaaaataaacagatgaagttaattttaataatatagttcagtaaacccaatatatccaaaatattaccatttcaacatataatcaatgtaaaaattattaagatttttgcatcattttttccatactaagtattcttaatccagggtgtattttacacttactccacacctgatttggataaacccattttaggtacgggtgtctggtagccaccatactgggcagcccatgtacagactgtttccagccccagcaagtaaatgctttacgtcccttgtttaattccacwattctttccaggagccgagtggtatctccggtgatagatgtgattgactggaagactttccagtattacccctcaaaggacctgcagcgtggggtgttggactggaagctggatttccactgggaacctttgccagagcatgtgaggaaggccctccagtcccccataagccccatcaggtgagtccccatttcacacctgctttgccatt

SEQ ID NO: 376165 - DNA, 567 bp, Homo sapiens
tccagttttggtgtttccattcatatgctgcttatcctasgacagtacttctactttaacctttatcctcaaatgtggaatgaaagtcttcctgccgaatgaactccagccgtttgggagtgggagagcagagggaaatttcttgaaatagtaaagactgtgtctcaggaaagcttgcttctgtctctaccacaaacagcttctggtgtctttgtagcacacttcacaagctttgagatattcccggaccactgagatcatctttttccctgaggaagtgtcctttggggaataggggtgctaattcacatgctacatctctctaagtgctggacctgcatgtgtttgaagggcagcatattcaggtagttgcctggggatggccctcttgtccccattttgggacaactacctctattctctccaccctgtcactcccctgcccagaacctccaaatctggaaactctacgccaccctgaggaccataatcatcttcaccattgagtgctcacgatttcctgtgcattttgccagcccctcatagatagggctccctatttcccgc

SEQ ID NO: 376166 - DNA, 605 bp, Homo sapiens
atgaatccctatgtgcccatcacccagtttcaacagttatctactcaaggccaaccttgtttcacctgtatcctcaccaatcccctgctccaactctccatattatgtcctcacattttatagttgaggaaaccaaggtgcaatataaatgaaaaagaatgaacggagtcagttattgtcaatagatgagggtggggtaaaggtggaaagcaggggatgaaggaagtgtatcacgttctttgggktggcatgtatatattttggaaaatgcaaggtcaataatacactctttttttttttttttttttttgagacagagtcttgctctttccccaggctggagtgcaatggtgcaatctcggctcactgcaagctccacctcccaggttcaagccatcctcctgcctcagcctcctgagtagctgggactacaggtgtgcgccaccacgtccagctaattatttgtatttttagtagagatggggtttcaccatgttggctaggatggtcttgatttcttgacttcctgatcaacccgcctcggcctcccagagtgctgggattacaggccgtgagccaccaagccaagccaataatacactgtt

SEQ ID NO: 376167 - DNA, 605 bp, Homo sapiens
atgaatccctatgtgcccatcacccagtttcaacagttatctactcaaggccaaccttgtttcacctgtatcctcaccaatcccctgctccaactctccatattatgtcctcacattttatagttgaggaaaccaaggtgcaatataaatgaaaaagaatgaacggagtcagttattgtcaatagatgagggtggggtaaaggtggaaagcaggggatgaaggaagtgtatcacgttctttggggtggcatgtatatattttggaaaatgcaaggtcaataatacactctttttttttttttttttttttgagacagagtcttgctctttccccaggctggagtgcaatggtgcaatctcggctcactgcaagctccacctcccaggttcaagccatcctcctgcctcagcctcctgagtagctgggactacaggtgtgcgccaccacgtccagctaattatttgtatttttagtagagatggggtttcaccatgttggctaggatggtcttgatttcttgacytcctgatcaacccgcctcggcctcccagagtgctgggattacaggccgtgagccaccaagccaagccaataatacactgtt

SEQ ID NO: 376168 - DNA, 548 bp, Homo sapiens
tgtcagcaaaaaataaataaggcataaagtttattcagttaatatttatggaatccctactacatgtcaggcactgtgctaaatcctggggataaaatgatgaatttgcttacagtctttctctgaaggaactcacagtctaatagtagagagatacaagattaaagactgtaatatggtattgcagtgatggaaatgtgaacaggatattcaggagctcagaggaggagcaggtcaagctggcttctttaaggaaggtgatacttaaagtgagcctttagcaatgaataaagttagccagcttaagagaagtgggatagaaagaacattccaggtaagagcagaaacacagaggtcatggtagttaaagcacagagtttgaagaaaggagagaagagagacgartgttgggaacaagccccccaaaatctggccgtaaactggccccaaaactggccataaacaaaatctctgcagcactgtgacatgttcatcatggccataacgcccatgctggaaggtggtgggctttccagaatgagggcagg

SEQ ID NO: 376169 - DNA, 548 bp, Homo sapiens
tgtcagcaaaaaataaataaggcataaagtttattcagttaatatttatggaatccctactacatgtcaggcactgtgctaaatcctggggataaaatgatgaatttgcttacagtctttctctgaaggaactcacagtctaatagtagagagatacaagattaaagactgtaatatggtattgcagtgatggaaatgtgaacaggatattcaggagctcagaggaggagcaggtcaagctggcttctttaaggaaggtgatacttaaagtgagcctttagcaatgaataaagttagccagcttaagagaagtgggatagaaagaacattccaggtaagagcagaaacacagaggtcatggtagttaaagcacagagtttgaagaaaggagagaagagagacgaatgttgggaacaagccccccaaaatctggccrtaaactggccccaaaactggccataaacaaaatctctgcagcactgtgacatgttcatcatggccataacgcccatgctggaaggtggtgggctttccagaatgagggcagg

SEQ ID NO: 376170 - DNA, 454 bp, Homo sapiens
aattttccaaatcttctaattctgattcttttttgcttagcaatttcttcttcaatttatctctcttctctcacatttaactttaagcaacaaggagaaaccaggctgcactccaacactttgcttaraaacctcagtaaaatatccaaattcattatttacaagttctgctgtccacaaaacactgcaacactatttggccaagttatttgccactttataacaaggattgcctttcctccgattcccagtaacatgttcctagttttcatctgagacctcaccaaaagcacctttaacattcatatttctgccagcattcttcttctcactatgaccatgaagcttctttccaactccgctcttttctttctgagctctcaccagaatcacttaatgtccatatctctagcaacagtctcatcaaggtaatgcaggctttgtctaccatgca

SEQ ID NO: 376171 - DNA, 454 bp, Homo sapiens
aattttccaaatcttctaattctgattcttttttgcttagcaatttcttcttcaatttatctctcttctctcacatttaactttaagcaacaaggagaaaccaggctgcactccaacactttgcttagaaacctcagtaaaatatccaaattcattatttacaagttctgctgtccacaaaacactgcaacactatttggccaagttatttgccactttataacaaggattgcctttcctccgattcccagtaacatgttcctagttttcatctgagacctcaccaaaagcacctttaacattcatatttctgccagcattcttcttctcactatgaccatgaagcttctytccaactccgctcttttctttctgagctctcaccagaatcacttaatgtccatatctctagcaacagtctcatcaaggtaatgcaggctttgtctaccatgca

SEQ ID NO: 376172 - DNA, 510 bp, Homo sapiens
gacactccctattgtccttatcctgcttccttttccttcaaaacacttatctttacctggacatattatatatagcacatctacatctgcctccagatgtaagccatgagggtaaggaccttgttttacgtttactgtggaattcgtactgtcttaatgcagtgcctggcataaaaatcattaaataaatacttgctgaatgaatgcatacacacacacacacacacacacacacacacacacacacacacacwctgtctcttttcaaaggggcagcatagcataggtaacaaacaaggccactggcaaaagaagtgaggtgaatcctgattttccatttatttgctgagtgactctagtcttttttttccctctctttgtatacctcacaagattaatgtgaggattagacaaaatgacgtatgtaaggcacttagcacagtgcttggtccatgttagatactgaataaatgttagtttccttcctactttggttcaggttcaaagaca

SEQ ID NO: 376173 - DNA, 541 bp, Homo sapiens
tgaaaaacaaaaattagctaggggtggtagtgcagcatgcctgtggttccagctactcaggaggctgaagtgagaagactgcttgagcccaggagttcgaggctgtagtgtgctatgattgcacttatgaacagccactgcactccagtctgggcaacatagtgagactctgtctcttaggyggaaaaaaaaagtgtttatctgtccactaagtgagcccaagaaatccagggcagaatggtcacccagcacttgaagatctcatcacacagatagcaaagaccccatctggatgagttgatagataacagaggagctgtctttgacctttgtctcaaaacaactctgtatttatttcctaggtaaaaacataagtgtcgccctcctgttctcacccatttctactttaggctagacagaaagttcttaccttctttgctgggttttttatttaccatgagacacaacaaggcagaaatctctttaacatgcaggcgtgatccccatcctgtcttcagagttggctgagggatcccaggct

SEQ ID NO: 376174 - DNA, 512 bp, Homo sapiens
tggcaaaggtgcattggggacataggagtctgtgccaaaagacaggcaaagggggtgctatgtaagatgttacctccaacaataggctggaaactgtctatagaccacagcacaaacagaaggagttttccaaggtaaagcatagaagtccgttgcttcactagggccrgaggcccctgttctcccaagaagctttggatcataccatgaagagcccagcaatgcaagctgtagaggctggctgcctgagatggtgcactccacatttattatcatcagcaagaaatcctgcatttcagcacccaaaagaaataagaaactcctgtctgattgctgatgagcacatgtacacttctctaggctccgagtccactcctgataaacatcaaagaaccagctgctcttaccaggacctcgtggggtttttacttaccctccaattccagcaatcccaagatgagtcatatgtttttcatgaagagcaaaaagaggtgaatgaaaccacaggccag

SEQ ID NO: 376175 - DNA, 587 bp, Homo sapiens
gtcatcatgagggaggaagccatgcagctatgcaaggaaagaatctttcaggcagaggagacagcaaaggcaaaagtttcagtagatgtgaaaagtacaacacattatgcaaatgcaaactaacagtgttattagaraggaaggtgaaaatcaatattcagtaaaatcttccatttcagaggaaatagaagaagaaaataattttacaccaactgaacacatgacttcattcttttgctccatagagacttttgcctcaccttgcatatcttagccctcaaaaatacaggaaaactacccaaattgtattaaggaaataaaatttcgagtaacattggtaatagggttgttaccccagcaaagcccagtcaatcctgacttatacaagggtgcagagagtaacaagaattgagcaaattgctaaagaaaataaggtttcttttacaaataaaaataatagtaataatatgatcttcaactatctgtaaacatatgaagtagatgtagtctggaatattctggaagttagatacagagttgataagtagatttcaaatcattccaaaataaatgcataaataaataaa

SEQ ID NO: 376176 - DNA, 466 bp, Homo sapiens
agtgctgtgaacacttcagtgtcctagaacttggccgtcgccatctcttcctccctagagttggagtgactgaagctatgtcctgactcatcttcagaagtagagcagggcggaaggagaagagaggacccccgagctcctgccagagaccagctctaaacaataaatgtgaacaacaaacacagcaggagtgaccttgggtctacttatgtgtaaatgagggttggactcatggtctgtaagttccttctcactctaacgctttatgagctataaggccatgagctcaggcaccacrtcatatgactgcctgagtacaaacactatatctctatggccttggcctgtagagaagccaccacaagttcagtcattgaacttcatcaacctaattttatagcttgctcccattcaaaaagtgccttctctgtactccacccatgttcactgaaaaccttccacccac

SEQ ID NO: 376177 - DNA, 466 bp, Homo sapiens
agtgctgtgaacacttcagtgtcctagaacttggccgtcgccatctcttcctccctagagttggagtgactgaagctatgtcctgactcatcttcagaagtagagcagggcggaaggagaagagaggacccccgagctcctgccagagaccagctctaaacaataaatgtgaacaacaaacacagcaggagtgaccttgggtctacttatgtgtaaatgagggttggactcatggtctgtaagttccttctcactctaacgctttatgagctataaggccatgagctcaggcaccacgtcatatgactgcctragtacaaacactatatctctatggccttggcctgtagagaagccaccacaagttcagtcattgaacttcatcaacctaattttatagcttgctcccattcaaaaagtgccttctctgtactccacccatgttcactgaaaaccttccacccac

SEQ ID NO: 376178 - DNA, 466 bp, Homo sapiens
agtgctgtgaacacttcagtgtcctagaacttggccgtcgccatctcttcctccctagagttggagtgactgaagctatgtcctgactcatcttcagaagtagagcagggcggaaggagaagagaggacccccgagctcctgccagagaccagctctaaacaataaatgtgaacaacaaacacagcaggagtgaccttgggtctacttatgtgtaaatgagggttggactcatggtctgtaagttccttctcactctaacgctttatgagctataaggccatgagctcaggcaccacgtcatatgactgcctgagtacaaacactatatytctatggccttggcctgtagagaagccaccacaagttcagtcattgaacttcatcaacctaattttatagcttgctcccattcaaaaagtgccttctctgtactccacccatgttcactgaaaaccttccacccac

SEQ ID NO: 376179 - DNA, 554 bp, Homo sapiens
gaagccaccacaagttcagtcattgaacttcatcaacctaattttatagcttgctcccattcaaaaagtgccttctctgtactccacccatgttcactgaaaaccttccacccacctggggagctttcagatatggaactctgagtcaagtggaaagccactgtgaaaaatccagctctctggcccttgaggagtagagcattgtgttgctcaagggtacattgattccaggcacttctgatttgctgaaaacaatgaccacttgttctgtaattcctcatgcttgttctcagctcaaatttcatctagatgtttcagagttagtagagcatgtgaaagggtgtgtttttcacgcacacacacatttttcatgtgstttttgtgattggataactcaaatatagctttgttttaaaccttcagacatgctgtgatattaatggaagaaggaagtttacaggaaagggagacatcttggcctctatgtgaaagggcagacttgaaggttggctttattttatcaacccaaatgtgacctttgaatgaaagaggtt

SEQ ID NO: 376180 - DNA, 419 bp, Homo sapiens
tcttcttcgtcaatgaatcatataaaaaacatttttagtgactctttcctccttcactcaccagataagcatgtactattgtgcctcccctgacaaaaaaaaaaaaaaaagaaaactgtactaggtatgacaaatgtcttcagatcagatctgcattaaaattacccacatataaaaggatttgtttaacaggtacttactgaatacttatttcataaaagttactccatggatgtcagggaggataaacatattaggtcaaaattcttcctcccctcaagttgctcacagtgcactaaagagaaagcatgtgcaaaaattactataattccggggttttgatcattaggaatcataagagtggtggagatagaacatwataggaattcagatgaagacaatgttgcttacagactgtg

SEQ ID NO: 376181 - DNA, 571 bp, Homo sapiens
gagcccaggtgcccaggtcagaaccgttccatttccccccaaagtcctcaaatgctttggttccaagtgaccattgcactgtggagaatcttagtatggaaagtagcttggcctctcagacatgcatgagcacacatctcagaaccttcattttaaaaataactttattttactgtggtaagaacactgaacttgagagctaccctgctaagaaaatgttaagtatataatacagtrttactaaccatgtatatatatatatatatatatatatatatacacacacacacacacacacacacacacacacaatgttgtactgcagatctctagaacttattcatgttgcataactacaaatttatgccccttgattagaaactcatttccctctcccacatagctcctggcaaccacaatttctctctttgattttatgaatttgactattttagaactttctttttgtgtcaaaattaaaattatgttagtccattttcatgctgctgataaagatatcccagagactgggtaatttatagagaaaaagaggtttaatggactcacagtt

SEQ ID NO: 376182 - DNA, 617 bp, Homo sapiens
tctaagcaggagagaaacgtagagtctgcagcagggtgcagtgggtatggatgggtgtggggagattttcttggcaaattgcccatagctgacctcaaacctggacgccttggtagcagtgggcagagycatcaggcaaagccaactttctctgtttaattcacttgacaatgtagaagagcagaaagaaaacaggtactcaattcttttattttatttttttgagacaggatctcactctcccaccaaggttggagtgcagtgccacaatcacagctcccgcagtcttgacctcccaggttcaagtgatgctcccacctcagcctaccaagtagctggcactatagacgtgctattacactgggctaatttttttcttttgtagagacagaatctccatatgttgcccacaaaggtcttgaacttctgggctcaaggaatcctcccactttggcctcccaaagtgttgagattacaggcgtgagccaccatacccaacctcagtttttataaactgttgcgtgcctaagtgagcatgtatgaacgtaggggtgatcctctgaagccagagataaagcaagagcaggcatctagcaagataagctagccctgcagat

SEQ ID NO: 376183 - DNA, 596 bp, Homo sapiens
atttatccaacatatcctaagagtcagctgggggctgactgaggtctcttctctcttgctgatagaacaataatcatcccgaatattgccagtcacataaacagaacaaagctctgaagagttcacacataggcaactaaatgctccaatatgaaaatgatacataatatttctactcataactccttggycaaaattagtaaagtggccctaactcaaccacaaggaaacacagcccactttctgcctaaggacaaagggctggaaataagtgatgagcagcactgatggacaacccataaagccagcaataacctgaccttaagaagactaaccctgcccttggagcatgacgaccaaccattggtggtcactttctgatgtgtggctttgctggatggccagagtccaacagagctgtcattcattcaaagtgtttgcacaaaagagagcccaaaactttgttgcttatttttgagtatttctagagaagtataaagaactgaataattcttcagatctgtggctaaccatgagtcctatatatcttaaccatcaatatcatatcaataagaatgatactctcctcatgaatt

SEQ ID NO: 376184 - DNA, 596 bp, Homo sapiens
atttatccaacatatcctaagagtcagctgggggctgactgaggtctcttctctcttgctgatagaacaataatcatcccgaatattgccagtcacataaacagaacaaagctctgaagagttcacacataggcaactaaatgctccaatatgaaaatgatacataatatttctactcataactccttggtcaaaattagtaaagtggccctaactcaaccacaaggaaacacagcccactttctgcctaaggacaaagggctggaaataagtgatgagcagcactgatggacaacccataaagccagcaataacctgaccttaagaagrctaaccctgcccttggagcatgacgaccaaccattggtggtcactttctgatgtgtggctttgctggatggccagagtccaacagagctgtcattcattcaaagtgtttgcacaaaagagagcccaaaactttgttgcttatttttgagtatttctagagaagtataaagaactgaataattcttcagatctgtggctaaccatgagtcctatatatcttaaccatcaatatcatatcaataagaatgatactctcctcatgaatt

SEQ ID NO: 376185 - DNA, 596 bp, Homo sapiens
atttatccaacatatcctaagagtcagctgggggctgactgaggtctcttctctcttgctgatagaacaataatcatcccgaatattgccagtcacataaacagaacaaagctctgaagagttcacacataggcaactaaatgctccaatatgaaaatgatacataatatttctactcataactccttggtcaaaattagtaaagtggccctaactcaaccacaaggaaacacagcccactttctgcctaaggacaaagggctggaaataagtgatgagcagcactgatggacaacccataaagccagcaataacctgaccttaagaagactaaccctgcccttggagcatgacgaccaaccattggtggtcactttctgatgtgtggctttgctggatggccagagtccaacagagctgtcattcatkcaaagtgtttgcacaaaagagagcccaaaactttgttgcttatttttgagtatttctagagaagtataaagaactgaataattcttcagatctgtggctaaccatgagtcctatatatcttaaccatcaatatcatatcaataagaatgatactctcctcatgaatt

SEQ ID NO: 376186 - DNA, 596 bp, Homo sapiens
atttatccaacatatcctaagagtcagctgggggctgactgaggtctcttctctcttgctgatagaacaataatcatcccgaatattgccagtcacataaacagaacaaagctctgaagagttcacacataggcaactaaatgctccaatatgaaaatgatacataatatttctactcataactccttggtcaaaattagtaaagtggccctaactcaaccacaaggaaacacagcccactttctgcctaaggacaaagggctggaaataagtgatgagcagcactgatggacaacccataaagccagcaataacctgaccttaagaagactaaccctgcccttggagcatgacgaccaaccattggtggtcactttctgatgtgtggctttgctggatggccagagtccaacagagctgtcattcattcaaagtgtttgcacaawagagagcccaaaactttgttgcttatttttgagtatttctagagaagtataaagaactgaataattcttcagatctgtggctaaccatgagtcctatatatcttaaccatcaatatcatatcaataagaatgatactctcctcatgaatt

SEQ ID NO: 376187 - DNA, 593 bp, Homo sapiens
ctcttctgttgagccttttcacatatattaattaattaaaaaaaatctattcactcagcctggccctatattaaactttgggggatacaaaggataagcccagaaggaatctcagtccttatgggaagatgattattaaatgatcattaaatgatcaaatcaatgatattagaacaagaatagggagaaatataatgctacgagagcttaatgaccttgtcaacyaggttaaaaaaagtctctggtaaagtgatggggatgatcagcattagctagaagaaggaggaagaaggttattcctaaccaaaaaacccccaagatttacaaagtcctattcagcaaggtaaccttataataatgaagaactggaagaaaatcagtgtggctggaatgaataggaggcaagtcagatcatgcaaggctttgtgggctatggtaaggactgtgtatctctgtattaaaggaagttcagagtcacagacacattttaggcagagttagtagaatagaatatttcaagatcattctgtttgcagtgggaattggcagagggaggctgaaagtatttgggtaaagcatttggcagggctgtt

SEQ ID NO: 376188 - DNA, 566 bp, Homo sapiens
gttttggctcttcaggccccttgaatttccaaatggatgtcaaaatcaacttgtcaattcaaaaaaaattatgctgcaattttgaaagagattctctttgtctgtcaatgttggattagtgtcaatgaccatattaagtgttccaatctatgaacacaggatgcctttccatcaatttgaagatttctaaaactttctttcaacactgtttttagttttcagtatacaagtttcacacttcttttgycaaacttatttctaaatactttattcttttgtgctttttaaataaaattgttttatttgctttttggattactcatgaatatacaaaaatacaattaatttttgtatgttgatacttcattctgcaatcttataactcatttttatagctttaaaattttttgtgaatttcttagaattctctacaaaaaaaaaaaaatcacatcatctgtgaatagagttttatttctttcttcccaatcttgatgtcttttattttttatttccttacccaactctcctggctaacacctccagtcaaattttgagtagaagtggca

SEQ ID NO: 376189 - DNA, 566 bp, Homo sapiens
gttttggctcttcaggccccttgaatttccaaatggatgtcaaaatcaacttgtcaattcaaaaaaaattatgctgcaattttgaaagagattctctttgtctgtcaatgttggattagtgtcaatgaccatattaagtgttccaatctatgaacacaggatgcctttccatcaatttgaagatttctaaaactttctttcaacactgtttttagttttcagtatacaagtttcacacttcttttgtcaaacttatttctaaatactttattcttttgtgctttttaaataaaattgttttatttgctttttggattactcatgaatatacaaaaatacaattaatttttgtatgttgatacttcattctgcaatcttrtaactcatttttatagctttaaaattttttgtgaatttcttagaattctctacaaaaaaaaaaaaatcacatcatctgtgaatagagttttatttctttcttcccaatcttgatgtcttttattttttatttccttacccaactctcctggctaacacctccagtcaaattttgagtagaagtggca

SEQ ID NO: 376190 - DNA, 593 bp, Homo sapiens
ctcttctgttgagccttttcacatatattaattaattaaaaaaaatctattcactcagcctggccctatattaaactttgggggatacaaaggataagcccagaaggaatctcagtccttatgggaagatgattattaaatgatcattaaatgatcaaatcaatgatattagaacaagaatagggagaaatataatgctacgagagcttaatgaccttgtcaactaggttaaaaaaagtctctggtaaagtgatggggatgatcagcattagctagaagaaggaggaagaaggttattcctaaccaaaaaacccccaagatttacaaagtcctattcagcaaggtaaccttataataatgaagaactggaagaaaatcagtgtggctggaatgaataggaggcaagtcagatcatgcaaggctttgtgggctatggtaaggactstgtatctctgtattaaaggaagttcagagtcacagacacattttaggcagagttagtagaatagaatatttcaagatcattctgtttgcagtgggaattggcagagggaggctgaaagtatttgggtaaagcatttggcagggctgtt

SEQ ID NO: 376191 - DNA, 596 bp, Homo sapiens
tagttttgctggacatacactcttgattgacagttgttttcattcagtactttgaatatgtcatcccattgcctctggcttccatggatcctgatgagaaattggctgttaatctattaggcatcatttgcaatgcagcttctactttgctgctttaaagattttctgtttgttttggctatcagcagtttaattattttatttctagaagtggctcttttttagtttatcctatatgatgtcattgatattcttggatctatagattagtggtttttatcacatttgggaagttttggccattatttcttcaagtattctttctgctcctttatctttttctctttcatgtttstgtgtttgctctaccggtggttcttatattttgatgtgttttcatgatggtagtttttgttctttctcttctgggtgtaggactcccttatgcatttctcgtaggattgttcaagtgttgatgaattccctcagcttttgcttgtcttgaaaagactttatttcttcttcgtttaagaagtataacttttctggctatagtatccttggccgacactctttttctttcacactttgaacct

SEQ ID NO: 376192 - DNA, 617 bp, Homo sapiens
tgattgctttatggtgtcccatatgtcataaggctttttcattcwtttttatttttgtctgactgggttatttcaaaagacttgtcttcaagttttgagagtctttcttctgcctgctatattctactgttaaagcttttgaaggtattttgtatttcattcaacagattcttcagattttctgtttggttctcttttgtaatatctatttctttgataaatttctcattcatatcctgatttgttcttctaatttctttgtattgcttttcgatatcctcttatctcattgagcttatttagtgtcaaactaaattctttttctgtaatttttaaaaattctttctgatttggatctcttattagagaatccttgtgttccttgtcaactaagtgtgcctgtccctgggccctcgggcagtgtatactggcaacagtgttagcaggttcaggtaggctgattcttgggcctccaggagacttgcttgcatgctgggaatggcagcaattggccaggcaggtagttgagctctcaatctcctgggcagtaggtgtggcataagcaatggaagtaacaatggtgggagtaggacaaccctctgggacccaaactgttt

SEQ ID NO: 376193 - DNA, 617 bp, Homo sapiens
tgattgctttatggtgtcccatatgtcataaggctttttcattcttttttatttttgtctgactgggttatttcaaaagacttgtcttcaagttttgagagtctttcttctgcctgctatattctaytgttaaagcttttgaaggtattttgtatttcattcaacagattcttcagattttctgtttggttctcttttgtaatatctatttctttgataaatttctcattcatatcctgatttgttcttctaatttctttgtattgcttttcgatatcctcttatctcattgagcttatttagtgtcaaactaaattctttttctgtaatttttaaaaattctttctgatttggatctcttattagagaatccttgtgttccttgtcaactaagtgtgcctgtccctgggccctcgggcagtgtatactggcaacagtgttagcaggttcaggtaggctgattcttgggcctccaggagacttgcttgcatgctgggaatggcagcaattggccaggcaggtagttgagctctcaatctcctgggcagtaggtgtggcataagcaatggaagtaacaatggtgggagtaggacaaccctctgggacccaaactgttt

SEQ ID NO: 376194 - DNA, 617 bp, Homo sapiens
tgattgctttatggtgtcccatatgtcataaggctttttcattcttttttatttttgtctgactgggttatttcaaaagacttgtcttcaagttttgagagtctttcttctgcctgctatattctactgttaaagcttttgaaggtattttgtatttcattcaacagattcttcagattttctgtttggttctcttttgtaatatctatttctttgataaatttctcattcatatcctgatttgttcttctaatttctttgtattgcttttcgatatcctcttatctcattgagcttatttagtgtcaaactaaattctttttcygtaatttttaaaaattctttctgatttggatctcttattagagaatccttgtgttccttgtcaactaagtgtgcctgtccctgggccctcgggcagtgtatactggcaacagtgttagcaggttcaggtaggctgattcttgggcctccaggagacttgcttgcatgctgggaatggcagcaattggccaggcaggtagttgagctctcaatctcctgggcagtaggtgtggcataagcaatggaagtaacaatggtgggagtaggacaaccctctgggacccaaactgttt

SEQ ID NO: 376195 - DNA, 578 bp, Homo sapiens
gcaggttcaggtaggctgattcttgggcctccaggagacttgcttgcatgctgggaatggcagcaattggccaggcaggtagttgagctctcaatctcctgggcagtaggtgtggcataagcaatggaagtaacaatggtgggagtaggacaaccctctggracccaaactgtttgcactggtgttggtgatggctgcaatgggctggatgggccagtccccagacccacatgtggtgcatgcacatggatgccagctgtggtggcatcagtagggtgaacgggcccaatctcagaccctgggaggaatgctcaagtgccaacattggtggactcagctgggcaagctccaggcacccagacaatgtagtcaggtactgggaatgtggagcaggtccagtggacccgccctcagaccccccagagttgtgtggcaggaggggtggggtgatccccaggccaccggcagaatgctcaggtagggcagtagcaggtgcacttcaggcctgacacagaagatgacaagcttgcttttagtgggagcagctgtaagcaggtagctgagtggctcaagtttct

SEQ ID NO: 376196 - DNA, 578 bp, Homo sapiens
gcaggttcaggtaggctgattcttgggcctccaggagacttgcttgcatgctgggaatggcagcaattggccaggcaggtagttgagctctcaatctcctgggcagtaggtgtggcataagcaatggaagtaacaatggtgggagtaggacaaccctctgggacccaaactgtttgcactggtgttggtgatggctgcaatgggctggatgggccagtccccagacccacatgtggtgcatgcacatggatgccagctgtggtggcatcagtagggtgaaygggcccaatctcagaccctgggaggaatgctcaagtgccaacattggtggactcagctgggcaagctccaggcacccagacaatgtagtcaggtactgggaatgtggagcaggtccagtggacccgccctcagaccccccagagttgtgtggcaggaggggtggggtgatccccaggccaccggcagaatgctcaggtagggcagtagcaggtgcacttcaggcctgacacagaagatgacaagcttgcttttagtgggagcagctgtaagcaggtagctgagtggctcaagtttct

SEQ ID NO: 376197 - DNA, 648 bp, Homo sapiens
aagaaataaaacataatagacacttagggccacatatcaacagtctcatgaaataaaactgctctataataaacttattcaagttgctcttcataagatgtagaaagaccaattctctcaagttcctttttattcaatttttcaaattatccagtggttcagattaaataaagacacatgtggccaggcaccgtggctcacgcctgtaatcccagcactttaggaggctgaggcaggcagaccatgaggtcaagagatcatgaccatcctggccaacatggtgaaaccgcatctctactaaaaatataaaaattagctgagcgtggtggcatgcacctgtagtcccagctacttgggaggctgaggcaggagaatcgcttgaacccaggaggtggaggttgcagtgagctgagatcgcaccactgcactccagcctgacaacagagtgagactccgtcacgggaaaaaaaaaaaaaaaaaaaaaaaaaaaaaggacccctgggatctttatctttwaaaactgtatttttctggttttactgatgattcaaacaaaacttaattttgattggaattattaaataattcatgaaagtgtattttcctatgttgaagcaccaatacttcttccactttgccttgcagtag

SEQ ID NO: 376198 - DNA, 584 bp, Homo sapiens
atgagcagaggccagacaagccttggaacaatagcctttttcattctcctgctagagagtcctggggctccatccagaacctttcaccccagtatccgtaagccaagtctaaattcaattactgtgaagttaactaagcattaaacaaaaaawcccaatctggaagtcatcactgctaattaactggtttccactcactgctgctgcctttcagcggtcagctgacaaggagagctgtcaagaacttgcctgcggggtgggcttgagctgccgtgacttgatttgaactgacaaggcacagcaagctaatatcagagccctctttaggcatcccacgtgacactggaggggcactcacagagtgagtaaggcactggataaacagactggcccagacccagaacagagacaggttggggaaaggtggggggtgtcaaaaaggaagatgtccctgaaaccaagtggggtgcagaagtgattagttaggctgtgaatgggctgcttttcagcatgatagcctcatcctggtagattcattattttgtcttatagcaagaacaccataaatattggatggatggatg

SEQ ID NO: 376199 - DNA, 514 bp, Homo sapiens
agtacaatccaagatcgaaaacggctagagttcttccaatggcagaaacttgaagagacatatgttaggtcctacctcctcaattcctgaagcagcctcatttctatctctcccaagtcctgagtttttagctttttgtttctttgttctaccctgtgtccttccaaacaattttttctcagtatgataagccagagtctgttgctctttcttgcaacctactactctaatagatacttattcccagtggaaactctgagataagcccgagagatattgctgccttagtaaagctgggggtggtagtggtagcattggtacctttaaaaagctgaaagaaactcttcctggtaagactataaagcacgagatggaatttcatgagagaagacaaaagtacgcagaaaatgaatcacacaggtctttttaaacatgttaaagccaaagggaaaccaytgaaaatattttgtaaagaaaaatgttttagaaagactgctatgatgtcaacatggaa

SEQ ID NO: 376200 - DNA, 604 bp, Homo sapiens
ttaacagccaaacagatacgtcaggtaggtaggtagatatgtaaatttgattctcaggagcagtctgactagaatatataggtttgaatttaggaatcatcaatatgtagctgaaagtagagctaaggctgtaaatgcaatcgcctaaggagagtacatagagtaagcaaagatgataacccagaacagaatccctgtgatgtataaacattttagggatagaagaaacaagaacctgggatagccataaaagtcagagaaaaactaaaagactacaatgttatggaggctaatttttttttaatttccaaaaaaacgatatagataatgctgccragaaagtaagaaaaataaagattaagaagcatcattagatttagcaaggaggctattagaaacattagtcagagcactgggacaaaaactggactgcagtaggttgagaagtgggtggatgaaacagagaccgaagtgtagacaatgcttttagaaagtatagctacaagtgggatgtaaaaagagagagctgaacaaaaagggggcagggaagaaagatttcaaggaatgtgctttaaaggaaagataaacatatcacgagtaggtt

SEQ ID NO: 376201 - DNA, 575 bp, Homo sapiens
gccttctggagtggtgatccaagccacacctggacccacttgagccatagctggggcagctggggagcactatgctggaaattggggagcagagacccaatgcaaccctgagtagtgagccttaagtttctacaagcactctgagcccctccctttaaaccatcctaccctcaaatccccagctctctaggcctgagatgggcatggagcccccagatcttttcaaaatgcctttggggtcattattccattgtcttgaaaatagtacctggcttccttctattcatactaatcagaccatagcacacggtttgtttctataaaattactgattacgtgcacattcaaagcctctgtgagaatataatttttgattccagttctttttcttcttgtttctgcagtctgagcctctacgccatagcaacctttttgtctgtaggatcaatcaagaagcaayaagaaataaaatggtgcaatataagcaatcaagggcagcccctcagtgtgagccttctcttgcctttgagtttctctagctttgtcctgcagtaatttaggaagattttcaccag

SEQ ID NO: 376202 - DNA, 618 bp, Homo sapiens
aattgaaaggcaattccagttatgttgcaaaaacaaccagtaaacataactttcatattatttctccacgtgtcctttgagaaattgttaaatgcctccacaacgatgaaagtcacacaggtgatatttctgaaaattaagcaatgagtgtgagtattgttccttcatagagatgtttccattcctcatcataagcctaatagctcttgggagataactgttttatactaggaaaattcagggtccaaagaattgaaatcactaaacaagttaagtacaggtgttatcaacagaattcccaaagacaatctgagccattccaatgaatttagtcattgaattgatttatctgtaacccatcattatatatttgctttcaggtaagaaaataagattttgagcacttactcaaaaagacgcctttaaccatggactgattaatcataaaatcaaggtaaatagtggactatatttgaagctackgaccttgtcataaaagatatagcattcaaatgaaactggttaatcaatctctaaagcagcatttcctaaactgtgaaatcaatattcacagagaaagagaaaagattaattggttaaaacaaaagttttggaaac

SEQ ID NO: 376203 - DNA, 456 bp, Homo sapiens
gagactgtttgtcctgcaaagtctaaaatatttgccatttggccttttwcagaaaagtttgctgacccccggtctagacatcagtgtccaacagagcttttggcaatgatagaattcttttacatctgtactttccataatggtagcatctagccatttgtggctacggaggacttgaaatgcagtgcaactgaagaactaaatgttttattttgttcttattttaaaagctacatgtggctactgtattaaacagtgcaaaaaacaaatagaaacaggagcagtgacggctctagaggcatctagcattgaattttgattataccttaaagtcttagagaaaatatattggagtatacatttctagacccctgtggcagacatccctcatacatgccaatctcttccttccctgtacattgaggattacaatccctcattcctttgaagttgtgt

SEQ ID NO: 376204 - DNA, 456 bp, Homo sapiens
gagactgtttgtcctgcaaagtctaaaatatttgccatttggccttttacagaaaagtttgctgacccccggtctagacatcagtgtccaacagagcttttggcaatgatagaattcttttacatctgtactttccataatggtagcatctagccatttgtggctacggaggacttgaaatgcagtgcaactgaagaactaaatgttttattttgttcttattttaaaagctacatgtggctactgtattaaacagtgcaaaaaacaaatagaaacaggagcagtgacggctctagaggcatctagcattgaattttgattataccttaaagtcttagagaaaatatattggagtatayatttctagacccctgtggcagacatccctcatacatgccaatctcttccttccctgtacattgaggattacaatccctcattcctttgaagttgtgt

SEQ ID NO: 376205 - DNA, 456 bp, Homo sapiens
gagactgtttgtcctgcaaagtctaaaatatttgccatttggccttttacagaaaagtttgctgacccccggtctagacatcagtgtccaacagagcttttggcaatgatagaattcttttacatctgtactttccataatggtagcatctagccatttgtggctacggaggacttgaaatgcagtgcaactgaagaactaaatgttttattttgttcttattttaaaagctacatgtggctactgtattaaacagtgcaaaaaacaaatagaaacaggagcagtgacggctctagaggcatctagcattgaattttgattataccttaaagtcttagagaaaatatattggagtatacatttctagacccctgtggcagacatccctcatacatgccaatctcttccttycctgtacattgaggattacaatccctcattcctttgaagttgtgt

SEQ ID NO: 376206 - DNA, 568 bp, Homo sapiens
acattactaatgccacaaagaaagaactggcagagatctgatggctgaggcccagcactaatgcagaaaagccttcacaaaagttgtgtcagtccttctttattacaaccatgctttttctttgggagggaaatgttcccagtaacacactgtaataaaccatcatttaaaaaaaaattagaaaaaaatcaaaccygatgacacataacataaaatggaaggagaatcctataagcattttaggaggccacaaaaggttgtagccagtgaggttatcatcaatttttatttgctgctgccccaaatattctaccagatcaagtcgatggcaggtataaggggaaggttattcctcccagtaaaggacatgggagcagtgacaagaaagagaaagaaactaatattggttatgaaactcaaggaaaatctgtgttgaattatttatgtctaagtttgaatgttcctttgctgtttttagctttcagaaagtctaaaaagaaagtcacagaatttcctctctccagccaagaggacagcttctttgaaaaggtggcccttggagatgaag

SEQ ID NO: 376207 - DNA, 568 bp, Homo sapiens
acattactaatgccacaaagaaagaactggcagagatctgatggctgaggcccagcactaatgcagaaaagccttcacaaaagttgtgtcagtccttctttattacaaccatgctttttctttgggagggaaatgttcccagtaacacactgtaataaaccatcatttaaaaaaaaattagaaaaaaatcaaacctgatgacacrtaacataaaatggaaggagaatcctataagcattttaggaggccacaaaaggttgtagccagtgaggttatcatcaatttttatttgctgctgccccaaatattctaccagatcaagtcgatggcaggtataaggggaaggttattcctcccagtaaaggacatgggagcagtgacaagaaagagaaagaaactaatattggttatgaaactcaaggaaaatctgtgttgaattatttatgtctaagtttgaatgttcctttgctgtttttagctttcagaaagtctaaaaagaaagtcacagaatttcctctctccagccaagaggacagcttctttgaaaaggtggcccttggagatgaag

SEQ ID NO: 376208 - DNA, 578 bp, Homo sapiens
aaggtggcccttggagatgaagccctagaagtctcaaggtacagcattgggcacgaggttagtyagggttgaagtttagatgagaagtatttccaggtgcaccaaaaagtcagcactatcaaattgctctgggacaagagtagccaacagaaaattatctgtcatcctgagtagtccttccacgatgcttcagaggccatatgtctctcaatttgtaagatggtcagcaattgtgtgccatcgaccacgttgtctacatttgaaataatgaaagagaccaaagttcaagatagagaggtcaaactgaacctattcagcatcgagggaagttttctacttcttcattaagtggattgcacagattgggtctcagcctaaccaagtgatgtttccctgaactgtggaaggtcatcatgtgctgatggcttggattcagcattcggtgagatgaaagagaagccaaagctttgtgaccatatgcattgctctcggggacctaaaaaggagatttcctgcccccatttattggtgaacaactggatggatggttgaacaaaaaagagcactgtaggttttca

SEQ ID NO: 376209 - DNA, 578 bp, Homo sapiens
aaggtggcccttggagatgaagccctagaagtctcaaggtacagcattgggcacgaggttagttagggttgaagtttagatgagaagtatttccaggtgcaccaaaaagtcagcactatcaaattgctctgggacaagagtagccaacagaaaattatctgtcatcctgagtagtccttccacgatgcttcagaggccatatgtctctcaatttgtaagatggtcagcaattgtgtgccatcgaccacgttgtctacatttgaaataatgaaagagaccaaagttcaagatagagaggtcaaactgaacctattcagcatygagggaagttttctacttcttcattaagtggattgcacagattgggtctcagcctaaccaagtgatgtttccctgaactgtggaaggtcatcatgtgctgatggcttggattcagcattcggtgagatgaaagagaagccaaagctttgtgaccatatgcattgctctcggggacctaaaaaggagatttcctgcccccatttattggtgaacaactggatggatggttgaacaaaaaagagcactgtaggttttca

SEQ ID NO: 376210 - DNA, 574 bp, Homo sapiens
gctggtctcatgatagagttctcttgagatggggttgtttaaaagtgtgtagcgccttcccctcaaccatcccttcttcctgctctggccatgtgaagatgcctgctccgctttgccttctgccatgaataaaagctccctgaggcctccccagccatgcctcctggacagcctgtggaaccatgagccaattaaactgcttttctttataatttacccagtctcgggtatttatttatcgaaatgcaaaaatgaactaatatgccagtcaagctgacatataaaattaaccaycacagcaactatattagaataaatagctaatggccaagctgtgcactaaggacagaagtgtaattagagggcaaaagagggagaagagtgaaagcacaacagtcacataggcttgaggaagaggtgggaactgagcagaaagttgaggaattgatgaaataacttgttgggtagagaagagaggatattccacgtgaagatgacaacatgtgaggggaacagaacatggagggctgcttgactaaagtagagggtgtcggggaggtaggaggagagtgac

SEQ ID NO: 376211 - DNA, 578 bp, Homo sapiens
aaggtggcccttggagatgaagccctagaagtctcaaggtacagcattgggcacgaggttagttagggttgaagtttagatgagaagtatttccaggtgcaccaaaaagtcagcactatcaaattgctctgggacaagagtagccaacagaaaattatctgtcatcctgagtagtccttccacgatgcttcagaggccatatgtctctcaatttgtaagatggtcagcaattgtgtgccatcgaccacgttgtctacatttgaaataatgaaagagaccaaagttcaagatagagaggtcaaactgaacctattcagcatcgagggaagttttctacttcttcattaagtggattgcacagattgggtctcagcctaaccaagtgatgtttccctgaactgtggaaggtcatcatgtgctgatggcttggattcagcattcggtgagatgaaagagaagccaaagctttgtgaccatatgcattgctctcrgggacctaaaaaggagatttcctgcccccatttattggtgaacaactggatggatggttgaacaaaaaagagcactgtaggttttca

SEQ ID NO: 376212 - DNA, 612 bp, Homo sapiens
ctaccgcccacttctccatttcttcctctttgaattattttatgtatctccacacattcaaatatttcttcaaaatttaactttaacttactatattttctttccagtgagtgccttacctatattccccaacaattaagtcataagtttcatttggaaagtttaaagcataygttttcagataaatctatagttataaaatgtacagttgatattaaataattttgaatcagaaaaatacatttcattcattgaatattttcaattgccatcaagtccttgggatataaagataaatataagattattttctttaaaaagctcataaattagtaagaaaaataaacataagagattgtaattaatgcaataagctgtgtacaaggtaaacaggtgttataataccaaggaagatattatgaaatctttacaatgtggatgatctgagccatattttaaaataagaataagagtttatcagaccaagtgagaaagaatacccatggtaaaaccagaaatttgtttccaaagaataacataactaagcatcagatcaataactatattataagtaataattttcttccttcaaaacgtattgttcaaagcaaa

SEQ ID NO: 376213 - DNA, 537 bp, Homo sapiens
cacaactcaaatatattttatagcccattaattccctttgatttgcagttttaaaaatagcatggtgtgtatgctaaaataattcaagctgtttccaaatcttggagtaagagccatgtaattacttctaatagaaacttttccttattattaaaataacacagaattatacctttactrtacaggtatcaaaacagctccagtgtttgttttataaaaattacttttatgtgactccaatatgtatgattgcttcatttcattattcattgtttgatctacaaaatttttcttcaaaatttaaaagaagatagaaaaagactgttatactgtcttggccagttctaatatgaattgggcacattttgccacaattcttttttttctagatcatgtattattcatatctgtaccaattaactagcccctctctttgaacatgtacaatgttcttaaaagggtgtcatataaaattaaaagaaaaagtcttgctctgtgctctgaagaacagttctggaaaataaatgtcagcaatat

SEQ ID NO: 376214 - DNA, 562 bp, Homo sapiens
attatgaataaatatatgctaacaaattagaaaacctagataaaatgggtatattagtggatgcatacaacctaccaagatagaaaacctgaacagaccaataattagtaaaaaaattgaatcagtaacaaaaagcctcctaacaaagaaaagcccaggaccagatggctttactgctgaattctaccaaaattgtgaagaaaaactaaaaccaattttctcgtactgttccaaaataatgaagataaaggaattcttcttaactcattctgtgaggccaacattatcctggtaccaaaaccagacaggaacacaactaaaaaaggaaactagaggccaaaatccctgtaaatatgtgtaaaaattctcaaaaaaaaaataccagcaaactgaaatcaacaacacgtcaaaaagataatacaccatgatcaagtggggtttatcccagggatgcaaggatggtccaacatatgcaaatcaattaatgagatacatcgtatcaacagaatgaaggayaaaaaccatgtgattatcccaacagacacagaaaaggcatttgata

SEQ ID NO: 376215 - DNA, 606 bp, Homo sapiens
ataagtgatgtgggccaagtggagactgtgggtaactggagacagcatgtctaaattaaatgaagctgcagctatttattgctatcagttacttctaatgggagtttactgcccagagtggccagattggttcattttcatcaagggaagtggaagtgtggacttttacttgaaatccgattcttaaaagttagtaactaattcagttatgagatatgcccagtggcttgcacaatgccacacagtgcagcacaatgcccctcccagctggtgtggctgttycatattccataatgtctcctgcctcggtggagtgaattggatgacataaaaattgtagaagcaagttcacggcctttaccattctccactgaaatctagagcaaaaccaatcccaaataatcatttcatgcttcctgtctcctctgtcctgttctaacactgctttgatcttctaagaatacaggcattttccaagtagaaaacacttaccacatcagccacgtgacaggaaaaataggaaaatcaaaagagaaagagattcttatcatcttccccccatccatggctgtgttctacagatatggataagtttttttctagtcc

SEQ ID NO: 376216 - DNA, 573 bp, Homo sapiens
atggcagcaggctgggcagactgatctctaggcccttggcaggtgtacacaggcactggcagcaggtggagtgaccctgtcatcatgcccctggacagtgtgcatgtgcaccagtagtggcagggtggatcagtccccaggctcctggataacayttgtgggtggtggcagtggcagtggcagaaaggtcagacctgtcctcaggttcctcaatggggacactcccaccagtggcagtggctgagggagattggttcccagatcctcagatagtgtgttcaggtgtcagtgttggtgatgacgggtggtgacggccctgtcctcagttatgaatatggcacccatgtaggctcatgcccaggtcccttgaaggtgtgtgctggtacatagtggccctgactggagagggtggggttgttgtcagtagcagcagccctgggcaggtgcctttctggctctaggtaattcacactttggctccctttttcctagaggcagcctccctggtgcactccctgggatgtaaaaccctcatgggcgagagtactaggaacctggccgctctgttgagtt

SEQ ID NO: 376217 - DNA, 573 bp, Homo sapiens
atggcagcaggctgggcagactgatctctaggcccttggcaggtgtacacaggcactggcagcaggtggagtgaccctgtcatcatgcccctggacagtgtgcatgtgcaccagtagtggcagggtggatcagtccccaggctcctggataacatttgtgggtggtggcagtggcagtggcagaaaggtcagacctgtcctcaggttcctcaatggggacactcccaccagtggcagtggctgagggagattggttcccagatcctcagatagtgtgttcaggtgtcagtgttggtgrtgacgggtggtgacggccctgtcctcagttatgaatatggcacccatgtaggctcatgcccaggtcccttgaaggtgtgtgctggtacatagtggccctgactggagagggtggggttgttgtcagtagcagcagccctgggcaggtgcctttctggctctaggtaattcacactttggctccctttttcctagaggcagcctccctggtgcactccctgggatgtaaaaccctcatgggcgagagtactaggaacctggccgctctgttgagtt

SEQ ID NO: 376218 - DNA, 395 bp, Homo sapiens
gcgtcctggagtcggagataaagtgtggatggacgatccaaccctcgtaaagtgaggaaaggcagagttaataggcacagatggaggtaggtggataaatgtgggtgatgactcttttttaaaaaatctcttctgattctattttctgagtaaaagcggaatccaagggaggtgttagaggtttttacttgtctccggatagtgaatggactcaggaattgccrtatgagattgcctggaagctttaagaacccatttggggttgtaggcatgaatgtaaagtgagagcagtctgcaggcattgtgtttttctttgtagggcatgatctgctctacaagggcaggcacaagaaggcagtggattgaatttaattagggtcagggtattgccaatt

SEQ ID NO: 376219 - DNA, 501 bp, Homo sapiens
ccctgccatgcccagtcattaaccaggagcagccagtgaaaagcacagtgttggtacaaatgcactggtagattcagggagcagcgcaggggccatcatgccgctatgctccctgcagcaggaaatctctgcagtaaatttccatagctaccaaagcccaccttggagcagtacagatctaccactccatgaaggtctcgaggtcagcccctccacagttcttgtgrgactctcttcccaaggagaagcctaaaagagggaggttagtgagatgaactagagtctcatcattatagttggctgcagggccacagctggtactcatccttgcctgtctccactttccattctaaatttcttgtaacttcacctattacctcaagaggtctgggtaactactgtgacccaaaaccccctttttgaggggggtgaggactcaataatcatacttttttcagatttcattgctgttcttgttcattcatgatttcaatagggcaa

SEQ ID NO: 376220 - DNA, 600 bp, Homo sapiens
tttgggatggaactatgcccactttacaacttcccttgtaactagtggcaaccatttaacccagttctcctggccaagcagatgtaaggggaggtctgaaaagcttcccagaatatcttttgcattcttggtaaaatgaataatgtgcctggtatcaccactctttaccaactcttcctgctttgaacactaaaatgattcctggagttgccgcagccatcttgagaatatgatatgataggaatgaaaataaaaacagagatgataaaacaggatatgataaagctgatgtcttgtatggtttgtgttagtaaggctatttatcagttgaatatgctgctgtaaccaacaacctcaaaaccccagtgkccaatgaaggctgtgtttctttagactgtcatgtgatatatcaccagtcaccatggcagagggaagggagcttggcagaaacactaactcttcaaggcttctgcccagaaatgccacacatgctcacattccattggccaaagcaactatagctacacctaactttaaggaagaaagaagtataaatctatcatatagaattgtactattctatcatttttccaagaagga

SEQ ID NO: 376221 - DNA, 600 bp, Homo sapiens
tttgggatggaactatgcccactttacaacttcccttgtaactagtggcaaccatttaacccagttctcctggccaagcagatgtaaggggaggtctgaaaagcttcccagaatatcttttgcattcttggtaaaatgaataatgtgcctggtatcaccactctttaccaactcttcctgctttgaacactaaaatgattcctggagttgccgcagccatcttgagaatatgatatgataggaatgaaaataaaaacagagatgataaaacaggatatgataaagctgatgtcttgtatggtttgtgttagtaaggctatttatcagttgaatatgctgctgtaaccaacaacctcaaaaccccagtggccaatgaaggctgtgttyctttagactgtcatgtgatatatcaccagtcaccatggcagagggaagggagcttggcagaaacactaactcttcaaggcttctgcccagaaatgccacacatgctcacattccattggccaaagcaactatagctacacctaactttaaggaagaaagaagtataaatctatcatatagaattgtactattctatcatttttccaagaagga

SEQ ID NO: 376222 - DNA, 650 bp, Homo sapiens
tttgcttctgtcagtatgctgtaccatattgagtatactactcctcaaagagtagtgacatgatgaaatccaatctgctttccaagaaatttcataaaattagcacacatttttctggcatgctttaaacatagatcttacgaagatgaaccgagacctctaggaaattctttcaggcrtggggctcaataataagatagtgcttttagcaatttttattttccctgttaagtaattttttaattagtttacttttttagtgtcatatattatataaaaatgtattttctaagtttatttcacttgtggagaaactggagagtaatagagtgccatgttttaaaaacacaacactatacatgtggctgacatgtgaaagtcagggttacaagctcaaagtgtctgactttcaaatacagcccaatcagtaaagacatgataaatgtacagaggaagcccattataatggtggtttgagtcactgggcaagagaagaagaaagatgacaaaagaacacgggctcacaagtaactattgctcattaattctgactgagatcaataagtgatgttccttgcattcacccacagcaagtatgggtacatttgagataaatgaaagcctcttctgcttaatgtaacagaaaaagt

SEQ ID NO: 376223 - DNA, 650 bp, Homo sapiens
tttgcttctgtcagtatgctgtaccatattgagtatactactcctcaaagagtagtgacatgatgaaatccaatctgctttccaagaaatttcataaaattagcacacatttttctggcatgctttaaacatagatcttacgaagatgaaccgagacctctaggaaattctttcaggcatggggctcaataataagatagtgcttttagcaatttttattttccctgttaagtaattttttaattagtttacttttttagtgtcatatattatataaaaatgtattttctaagtttatttcacttgtggagaaactggagagtaatagagtgccatgytttaaaaacacaacactatacatgtggctgacatgtgaaagtcagggttacaagctcaaagtgtctgactttcaaatacagcccaatcagtaaagacatgataaatgtacagaggaagcccattataatggtggtttgagtcactgggcaagagaagaagaaagatgacaaaagaacacgggctcacaagtaactattgctcattaattctgactgagatcaataagtgatgttccttgcattcacccacagcaagtatgggtacatttgagataaatgaaagcctcttctgcttaatgtaacagaaaaagt

SEQ ID NO: 376224 - DNA, 645 bp, Homo sapiens
atatggaaaaggtgatgggatatgagtcgcctgaatagtctatgtaatagagcaaatgtgatagaatgttactcctgtgaacaattaggactgttaagaaggttttgcaagtttatcagtgccaasgtgaaataattgaaaggatcagaatccagattaaaagagtttattcaagtgtaaagctaagaatagccattcaggtaacagacttcagaggaatgggatcagtactccaaagctaaaagttaaggtccgcttatataggtagaaaacaatgaaattttgtaggattgtaacattttctatacaaggccagtttatgagttataacaatttagctgcagtttgtcttctttttcacacatcttgctttatttttctttctaattcaaaagaatgtttttaacattctctcttaaacaatgtgatactcatgaagtctttgtgggagagaggaaagagagaagataatttgtaattaagaccaataggtaggagggaagaagtcttccccagcacctgtcagtcatttacaatattttataaaacaatgtaagtaaaaatgctaacatataatcagaaaaacaaatgttacagctgcctaggttatagctgcctgtttttgtgactcaggtttcataatta

SEQ ID NO: 376225 - DNA, 574 bp, Homo sapiens
ttttggcaattaagaatgaggctgctgcaaacattaatgtgaagggttttgtttggacatatggtttcagttcatttgggtaaatatcaaggagcacaattgctgaatagtatggtaagagtattgtaagaaactgtcaaaccatattgcaaagtggctgtaccattttgcgttctcaccagcaatgagtaacagttcctgttgctccatatcttcaccaacatttgctggtgttggtgttttggattttagtcattctaaaaggtatgttgtggtattttgttgtttaacttgcaattccataatgtcatataatgttaagtatgcttattttttatctgtatatcttctgtggtgagttgtaaattccagtcttttgccaatttttaaattggattgttttcttattgggttttaagaagtttttgtatgtttcaaatataagccttttatcasatatgtgttgttcaaatatttttctcccagatatgactagatttttcattactagcttttaattttaatgaaattatacttatcaattacttttcttccatggattgactgtgattgt

SEQ ID NO: 376226 - DNA, 587 bp, Homo sapiens
aagttgtatacataagaaatagattttttagtatgatagatgattattgctacacagcaacagaaaaatattatggtggacgtaattgtcttggtagttttcacacatatgcaatgagtaaataaggtgcttgtaacatactccaggggttactaagctgcattttaatttgtagaggcttgatagagggagtgaaaaaggtgtttaaatgacttgacccaaatccccattgtataacagggggagaaccaaattagggtaccagatgtcctgacctcggatattgaaccacatagtagacaaagccatcttttaatttactgaattcaaataggtttacaaaaagtaatgaacagatgtgacttcccttctttcttaacattttctgccctctagaaaattaagtcgaaattagtaacatttaaaactttatattttcatgactcaaagtaaattttgatctcttgaaacttacyttaaaatcatataatgcgaaggtaattcttttgtctacaagtgcagcaaaaatataattgaagaacttgccaaacatatatattaccttattgtaaagaaagaaaaaatga

SEQ ID NO: 376227 - DNA, 292 bp, Homo sapiens
aaacatccaacaattattattttccttctcttcatcccatccaaaaggatagtacattttattttgctttatagcaggagattgccaatggtagctgtagcccttgggcttcatttggtgtaaagacacaatttctttgctctataatataaagttctagaaaatggttgcacacgtgaaggaatgatgaattgactgaaayagggcaacagataactttctggggtgagagacatgttctaaattttgtttggggtggtggttgcatagttgtataaaattgtcaaaaatg

SEQ ID NO: 376228 - DNA, 527 bp, Homo sapiens
tacatgttactcagtgtaatgcctacatggcctcacagaatttctaccccatcttaactctgcttatctttaagaaacaggaagcccacagttagaagttcttggcggtgtggggtgactcacgcctgtaatccctgcactttgggaggccraggtgggtggatcacaaggtcaggagtttgagaccatcctggctaacacggtgaaaccccgtctctactaaaaatacaaaaaaattagccgggcgtggtggcgggtacctgtagtcccagctacctgggaggctgaggcaggagaatggcgtgaacccagggggcagagcttccagtaagccaagatcatgccactgcactccagcctgggtgacagagcaagactctgtctcaaaaaaaattaattaattaattaataaaaaataaataaataagttcatccttgtgaccaaaccagctaaaactggtaggatccaagaaggcagctcacttgaagaatctctaacttcattataattgaatttccctgctaaa

SEQ ID NO: 376229 - DNA, 577 bp, Homo sapiens
aagcaaatgtttggtgtgttaattctatcaacaatggttctaaatttggatagtcacatgagttgatatttctactcattaattcactaacgttttggaggtgtcaatgatgtctatattatatttaatagtatactgtcgtcttttgtgaatggatttcayttttttggaaagtcctaatatatttgaagccaagcccgatgaggtgaagtgacagaaagaaatagtccatgtagttttcagcaaagcaatgaaatttattttcttatccattcctgattataaagacaatacaactgaaatgtttcaaaaatgattcattaatatcttcatcactggaataagtatatagttttccaggatgactacttgtaaaatgtgccttatttgcattaattactctaactcgggtacttggtttttaaaaattacactactttatagttatatctcaatctaaaatgaataatgagttagaattttgttttctgggtattttaaaatattaatatgcataatgaaaaatgttagcaattttgaacctgaataatcaaaatatcacaaaactttaggagtg

SEQ ID NO: 376230 - DNA, 495 bp, Homo sapiens
ttaattggagaactgtgtaatacttttaaatgagactttggcaactatttaaraactttaagttatagatgtatttataagttatatacattttgggggtatattctatggctaatttctgacccagcctatcactatgaaattagtgctatagcacttatttccttccagaactttggtcaattctgatttagtgttgtagaaattaaattatactccatagataggcatagctgggcagtgtttttaattatgagcttctcagaaatggtctttggactgagagtcacttgaatacaaccccaaatgtgcaagtttctggctctgtcatctctatctgcaaaatagagataataaagtttacattgctggtttgagtagagtaataggaagtaaatataaaagtacctggtggagtgaatacttcatgcatagtaccttttgttattagtcatagtattattagaaatgtccttgagtaccattattaagaaa

SEQ ID NO: 376231 - DNA, 490 bp, Homo sapiens
tacaaaacatttttaaaaaattagctctgtgtggtggcatgtgcctgtagtcccagctacttgggaggctgaggctggaggattacttgagccctggaacttgaagctgcagtgagccgagattgtgagctccagcctggatgacagagtgagaccctgttcttaaatatatatatatatacacacatatatgtatatacatattatatagatagatagatagatagaatgtactttaggaaaacttatttcagtatctgatttttaagtgtttgtaaccataagkactcaaaaatgtcttaaagctggaataccatgtatctttcatcagtataatgttatagggtcaccctagctacaagggtgtctggaaagcaagtaattttaaaagaagcacatcatgatggtgaataaaatgaaggttttcttgcttagtgatggtaagcgatcacggctgtctgctagaagcccttaacacagctattggcac

SEQ ID NO: 376232 - DNA, 595 bp, Homo sapiens
acaactatagcctcaaaactcccagagattgttttgttattatactcatttttatcatcacatttagaatactttcccattgaagtaaacacacaaaattaaatttactgtctttccaaggatattttatacttcagccctaatggaaaaggaatatgtttcaggaaagcttaaggttatagttttaattatgaagtgatttaggtcctctataagttgcacctgctctatttattgaggttcatgctgacttcagtattaattgttgctgtatacttttgaccctacaaaccttataccatcaatgagcagtacacagtttccatctcatttgttctcccataatatgtggaatattttctcyttccttttaatagtgattaaaaatgccatgactttttaaaaaatcattgtttaaaatggacactttcaacaaagaaaagcagtgcatacatcagcctgtaaaaattatcataccataaaatgtaaagacccagcctaaagaatgcatactagatgtaacagaaacaaaatattctcccaaaatgtgataataattacactcttcttcgcatatagaacgtctccattttat

SEQ ID NO: 376233 - DNA, 618 bp, Homo sapiens
attacaaacttcaaaacatgcttatttgatgatcagtagtaggtgttatctttgtatacagaatctttgggctgattttcgttaattgtatcaacttgagtaatagttcttatttctgggaaattagaatctaccaaagaacagcttgggaaaaaaaacctgttaatactgggtttcaatacgtgaagctttgtcatttgctgatgatctttattcatcacattcacaattcacaagattatttctaaggtgggtttgatttactgacttttcccatgctccatgagagctgccatatgcctgatgattctgggctgtctcttctaggttttttatccaccccttgatagcaacagttacttcctatatccctgggacaactaagcggaggacagtagttaactaaagtggctttgaacagtggcagaaaaatgtgctgggaataccttatattctaagcaacctccaatttctgtgagctaaaagtgctatgtaatgtgataaagartataacatcaggagttttgtttcaggagaaaaaagtgagataattggctgaaatggacaagttttgaaatttactagccttgagcaatgatgaataactgaaagtgctga

SEQ ID NO: 376234 - DNA, 549 bp, Homo sapiens
ttttcatacaggatgtgataacttgataacaaactcaacagtaatttgcaccatttcaggtaacctactgattaaatttttttatactttatagttattctaacaatgattccattttcagagaggttctctgggctttctgcttcatgcctcctctagccaccctgaacgattatatcctaagggtccgtattctaaaggttttctgacactggccttggttctccatttcatgatctttctgactttagacagagatgttttctaggctttttctatgccttacttctcttacatctttaaatgcatttgtagatacttttagattaaattgtgctcaaacatrttcataaagcagaacaaacagctgacttatatttgggaggacttttacatagtgggagttctagactctaagaacatgccattcaattttaacatcacttctattgaaaaaagagatttatcatgtattgctttgatttaccacatccttactggatgtttgtggacagaatttgtagataggaaatgttctgcagtggatcc

SEQ ID NO: 376235 - DNA, 581 bp, Homo sapiens
taaattgtgctcaaacatattcataaagcagaacaaacagctgacttatatttgggaggacttttacatagtgggagttctagactctaagaacatgccattcaattttaacatcacttctattgaaaaaagagatttatcatgtattgctttgatttaccacatccttactggatgtttgtggacagaatttgtagataggaaatgttctgcagtggatcccatattgaaatttgtggattccatttgagatttacagactaatataaaaacrtagcgatacaaatttaatgacataattctgagtgtcataattgtcatttcgaatttaatgcttattcttatagaatgaaaattgttttatatgtaaggtaaatctaagccttccaaatatattttatgcttaatacaaacatctttttgttccaaattagagtagtccagtaattgaagtaagccagaactaatgtcagtgccatcattctttaatagtaaaatcataggaacgttgctgcaataaggtagtggagagttcaaaatcataatttcattaatggaaatatgctggactatcactaatc

SEQ ID NO: 376236 - DNA, 491 bp, Homo sapiens
caagtaacaaagtcgtttgcagaataagctgtcacattcaacaagctctaattttggctagatctattattttacaaattaaacgaaggtgcaggtctctgccttccccgcaacaaaatcttaaccagactatcacatttaatctgctagatgatttattaacttgccatttaattcatttcattaaaatacgtaattcagtttatagatttgagagctggcagaatcttttacaaatcatttagttttgcccctttcttttacagataaagaaacttgagaccaagagaaattaaatggcatgctcaaagttacatgwcaaatggttgctacagaaaccagctcctctaatttagttctctttccaaatagcatggcaaagacatttgttactatatataaaaaacaatacttgtttaaatgtatttattaatagacatactgatttgttttcataccccaatttacttagaggtatcataatacaatac

SEQ ID NO: 376237 - DNA, 579 bp, Homo sapiens
ccctggccctcgcggctccccctacctattccatcgctcccgctccgaggcggaaaggggaggacgtggaagaagaaaaagaaagagaaggggggtggggtgggagaactggatataaagatcggctggggggatggtggaagatttttggtctcttcggcagcgtcttttcttaagcggcggcggcagcagcagcagcaagagraggagaagcagccccagctatgactgccgcatgttaatagctgccgctgggtccctcggctgctgctggagacagagcctgactccgaagttgtgcaactgtggactgggagagacatttgaaccctcttttcttttcgctccccttttgcccccttggggtgtgtgaagcgaggaacgtaaaggaaggcgaacatttggctctctttttccttcccctttctccgtggctgtgtagcggaagaaagggaagagagactttttgttgttgtttccttgactggggtctccaccctcctgctgctttctctgcgcttcgattctcgttatttgccgcgtgtggttgggggtgtctgcacaggggccggccggtct

SEQ ID NO: 376238 - DNA, 585 bp, Homo sapiens
ttacgcagtatcccccttaatcctcayaaaactaccatgagaaagccactcacttgctcattttaaagatgaggaaattgaaaataacagtgactgctaatcgtgcatagtatccattctctccttttcaattttatttatggggcaatacactcagttaaaagactacgtttcccaacgttttcagctaggtgtggccatgtgattaaattcaagctaatgatacatgagcgttgtgtggaatttcctagaaagctgctgattagctggaaaatgcattccttttgtcactctgtttgtttcctttgtttccttcatgcaatatggaatgtagatgaggtaggtgtagcaccagaagccatctttaatgtgaggtgatccagagaatgaacgccagagtcaaaatgcaggaggaggaggaggaggagggtgaggcaggagctttggtctctccagatcatgaagacaacatagagccatgcatcacttactgctaaacttctttttccaagacagagaaatgtatttctgtactgtctaggcccctaatatgttgggttttctgataaacactgttggacacag

SEQ ID NO: 376239 - DNA, 628 bp, Homo sapiens
acagtgactgctaatcgtgcatagtatccattctctccttttcaattttatttatggggcaatacactcagttaaaagactacgtttcccaacgttttcagctaggtgtggccatgtgattaaattcaagctaatgatacatgagcgttgtgtrgaatttcctagaaagctgctgattagctggaaaatgcattccttttgtcactctgtttgtttcctttgtttccttcatgcaatatggaatgtagatgaggtaggtgtagcaccagaagccatctttaatgtgaggtgatccagagaatgaacgccagagtcaaaatgcaggaggaggaggaggaggagggtgaggcaggagctttggtctctccagatcatgaagacaacatagagccatgcatcacttactgctaaacttctttttccaagacagagaaatgtatttctgtactgtctaggcccctaatatgttgggttttctgataaacactgttggacacagttaatccttatgaatgtgttacctttactgaaagattttgccgaacacaatgttgaaagcttcaaaaaagaaaaagaaatccatttattcctaacagtccacttcactgtaatttctatttcatcctgc

SEQ ID NO: 376240 - DNA, 598 bp, Homo sapiens
gccatagcaaatttagtatgtttagatatattataaaacataaaatatatttctcccaaatatagcaatgttaaacaaaataatggaatataagattcaaactataataagagtcagtggtgtctgaatgtatttctgtgctcacaagtaaaaaggtttatacattaagttgtaaacaagtgataaatattgtgctgcttactaaaatctcaggagtgttaagattaaaaagggatatacgtagaagacaggtcacttccaattcaaactgcacattttgtttctaagtaacctataaatttaataaaaatcaaatatgaaataagaattaatttwtttacaatggcaagcctaaaaataagtaatctttaaaaatatttccaagccatttgtagattagtccagctaacatgggtattgataaaagtagtttcagtatattgatacctaatttaagaatctacatggtgcccaatttcctgataaagtcaaaaatcctatggctatcattcaagatcttctggaatttatattgaaccacatatcctctttcaaaactgtgaccttacatgctcacgaaaactatcacaaacacctt

SEQ ID NO: 376241 - DNA, 628 bp, Homo sapiens
acagtgactgctaatcgtgcatagtatccattctctccttttcaattttatttatggggcaatacactcagttaaaagactacgtttcccaacgttttcagctaggtgtggccatgtgattaaattcaagctaatgatacatgagcgttgtgtggaatttcctagaaagctgctgattagctggaaaatgcattccttttgtcactctgtttgtttcctttgtttccttcatgcaatatggaatgtaratgaggtaggtgtagcaccagaagccatctttaatgtgaggtgatccagagaatgaacgccagagtcaaaatgcaggaggaggaggaggaggagggtgaggcaggagctttggtctctccagatcatgaagacaacatagagccatgcatcacttactgctaaacttctttttccaagacagagaaatgtatttctgtactgtctaggcccctaatatgttgggttttctgataaacactgttggacacagttaatccttatgaatgtgttacctttactgaaagattttgccgaacacaatgttgaaagcttcaaaaaagaaaaagaaatccatttattcctaacagtccacttcactgtaatttctatttcatcctgc

SEQ ID NO: 376242 - DNA, 569 bp, Homo sapiens
tcaaaattgctacagttagttgactcaagctttatgctgtgcacgtagaatacaaccatccaagaaattcgacctattatttacgtagtgacagataaaggaaaaygaggtgtagctcgataaacaagctctctcctaaagcagatttagacactattcattcccttcctttcagtccagaagcctggttaggtggaactgtaaaataaattccagcactctgaacatttcaaggagaaataattttcaaaactggctcggactctatttttcttcactttgaaattgattagatgtgcttttaaaagaaaacttggtgtctcaaggaataaagagtattttagacaaatataagatagctaattttaaatccatttaagattttgcctacatgttctagccattaaccatttcatcccttttgtcagcaacctacaaataaatcatgtcagattataccaaaagacattcaatattataatattaacctagtatttgctgtttagctgagctgattataaaatagcagtgaaatttgttctttaaaacaccttaaataaacaataaat

SEQ ID NO: 376243 - DNA, 502 bp, Homo sapiens
gtttagtgatacttatacattagtacatttttgacgtgcatgcttatgtaagaactgcatattttttatctcaaatgwgctgtgtgttactgacagctgagaagttacaaataactccaggtaaatactggttctgatatttgttacttctgtgctgttggtaaggtcacttaaatgcctaaagacttagtttcctcatctgtaaaatgggaatatttataatactctttttataggttaaatgggagtgttataataaaatcataaatatgaagccttaacagtatatctggagcaagagatcattaaaattattttattactaccgtttctattatggaaattaacttagaaaactagataatttaactagagtgatagtccatttatatgttgctgtataaaaaacttcccaaatctaatggcataaaacaactactgttttattatgctcacaaattatgtggcagaatttggacagggcagtgaaggtgagtgcttg

SEQ ID NO: 376244 - DNA, 502 bp, Homo sapiens
gtttagtgatacttatacattagtacatttttgacgtgcatgcttatgtaagaactgcatattttttatctcaaatgagctgtgtgttactgacagctgagaagttacaaataactccaggtaaatactggttctgatatttgttacttctgtgctgttggtaaggtcacttaaatgcctaaagacttagtttcctcatctgtaaaatgggaatatttataatactctttttataggttaaatgggagtgttataataaaatcataaatatgaagccttaacagtatatctggagcaagagatcattaaaattattttattactaccrtttctattatggaaattaacttagaaaactagataatttaactagagtgatagtccatttatatgttgctgtataaaaaacttcccaaatctaatggcataaaacaactactgttttattatgctcacaaattatgtggcagaatttggacagggcagtgaaggtgagtgcttg

SEQ ID NO: 376245 - DNA, 576 bp, Homo sapiens
gaataataaacctgtaaatatatgaaacatttgaagggtatttgaaacctaacgatggttgttttatattatatggatgagagatagaacagataaaggcaaaaatgaactgtattcattttattattmccttttactaaagtatttaaccaagtgctgttgacatgaaaaaccaagaatgtacatctctgtctgttcttttctctgagcatcgccggattcccgtgttaatgaataatgaaatggatagagtctgtatagtgtagtgcagtttatgccagaaatagagtgtaatggtaagaacaaaggctttggtgttagacaatgcggtattgtatgttatttttgacatttactgcctttctaatgttggaaaagttacttaatgtcactgagtctcattttctcttttagggtggttctaagagttaagtaagataataaatgaaaagtgcctagcagaatgcatggcatagaatatgcatcaatacatagaaatttgaccgtcacttgaattaagagactggtttaggagcattgtaatcttatgcaataaaatcttagtggcctttaaaa

SEQ ID NO: 376246 - DNA, 576 bp, Homo sapiens
gaataataaacctgtaaatatatgaaacatttgaagggtatttgaaacctaacgatggttgttttatattatatggatgagagatagaacagataaaggcaaaaatgaactgtattcattttattattaccttttactaaagtatttaaccaagtgctgttgacatgaaaaaccaagaatgtacatctctgtctgttcttttctctgagcatcgccggattcccgtgttaatgaataatgaaatggatagagtctgtatartgtagtgcagtttatgccagaaatagagtgtaatggtaagaacaaaggctttggtgttagacaatgcggtattgtatgttatttttgacatttactgcctttctaatgttggaaaagttacttaatgtcactgagtctcattttctcttttagggtggttctaagagttaagtaagataataaatgaaaagtgcctagcagaatgcatggcatagaatatgcatcaatacatagaaatttgaccgtcacttgaattaagagactggtttaggagcattgtaatcttatgcaataaaatcttagtggcctttaaaa

SEQ ID NO: 376247 - DNA, 620 bp, Homo sapiens
tttgacatctgccagggtgtgtgtgtgstggtggtaggatatttttcccatggaatttggccaacactataaataaggaatttttattttttcaagagctggtttataggcatagtgctgaataaaagagacaaatgattaaagaaagaataacaataaagtatgctacaaaacataatatagtgttacaatgtcgtctttgcaaggacatctaaaccagccagggaggtcaaggagagcatctcctttcaaaagcagtaacatctaaattgacctctgaaaaatgctaggatttgccatgaaaagagtgaggataaaaatatttgaggcagaaagaaacaatgtgtgtgaagttccaaaactaagacaggattgttctttagtcaactgagttcagtagggttagagcttagacttcaaggggagttagagatgtttgggaacgacgagattgaaatattaagagagaccaaggaagggcttagtaaactatgtttcaaaggtttatttttgagcacaattccatgttgaaggtgctcatcatggaatcaagacttatctctgagcgtcatctttgctatgctcacgttataataatgatttttacattttggcagtgc

SEQ ID NO: 376248 - DNA, 620 bp, Homo sapiens
tttgacatctgccagggtgtgtgtgtggtggtggtaggatatttttcccatggaatttggccaacactataaataaggaatttttattttttcaagagctggtttataggcatagtgctgaataaaagagacaaatgattaaagaaagaataacaataaagtatgctacaaaacataatatagtgttacaatgtcgtctttgcaaggacatctaaaccagccagggaggtcaaggagagcatctcctttcaaaagcagtaacatctaaattgacytctgaaaaatgctaggatttgccatgaaaagagtgaggataaaaatatttgaggcagaaagaaacaatgtgtgtgaagttccaaaactaagacaggattgttctttagtcaactgagttcagtagggttagagcttagacttcaaggggagttagagatgtttgggaacgacgagattgaaatattaagagagaccaaggaagggcttagtaaactatgtttcaaaggtttatttttgagcacaattccatgttgaaggtgctcatcatggaatcaagacttatctctgagcgtcatctttgctatgctcacgttataataatgatttttacattttggcagtgc

SEQ ID NO: 376249 - DNA, 561 bp, Homo sapiens
ttcaacccctaaccatttacttacctgaactaatctttctatagtccattttggtcaccggcattgaccagcaaacrtccttgtatttgacagacacattaaaaccttaattatcaacaaaacatcaactaactttctttattgcactagtttttcagagaaaaagataaatcacgagaaaacacactataaattattattattaagacactgttagcagagtcagtcctggactcaggagacatataacctaaaattataattagaaacttcatattacaaaaaatgatcctcaggcgttataagcctttatcaaagaaggtatatcatttttactgcatcctccatacaaataaatgtgctaaaacattttaggcatatttgtattagaactgaagattgaagtaactggtccacgctttataaatttcaatctcccttcactcagaacacttaactatcgaagaaatcaatttgtcagtgatttcttatacttctgagtatcaaaaatttgcattgttaatagtaacacaggtccactaaagcttttcttttaagaat

SEQ ID NO: 376250 - DNA, 561 bp, Homo sapiens
ttcaacccctaaccatttacttacctgaactaatctttctatagtccattttggtcaccggcattgaccagcaaacatccttgtatttgacagacacattaaaaccttaattatcaacaaaacatcaactaactttctttattgcactagtttttcagagaaaaagataaatcacgagaaaacacactataaattattattattaagacactgttagcagagtcagtcctggactcaggagacatataacctaaaattataattagaaacttcatattacaaaaaatgatcctcaggcrttataagcctttatcaaagaaggtatatcatttttactgcatcctccatacaaataaatgtgctaaaacattttaggcatatttgtattagaactgaagattgaagtaactggtccacgctttataaatttcaatctcccttcactcagaacacttaactatcgaagaaatcaatttgtcagtgatttcttatacttctgagtatcaaaaatttgcattgttaatagtaacacaggtccactaaagcttttcttttaagaat

SEQ ID NO: 376251 - DNA, 458 bp, Homo sapiens
tgatggtagtgcaaaatataaatagaagtcactagtaaatttccaaaggttctctcttgttcatgggtattattaattcctgttcctagtttccttacaagttacatgtgatcacctcctacatttgacaaaaytgagtatttaaagcaaataatttaaaatttttttggaatgaagcctttggagaaagtaaattttaataaaaagctggcctttaagccacttgtccactcctacagaacactgactatacccatttctctcattaatattataatgaaagggtttcaaaatttgtgctcttatttcctcaaattgggaaataagagactgatttaaaatgacaatgcatgcatttatattagaaaaatgactataccgtaatgtaattatatatattttcatacctttattaggaacttatacatacgaatgactaaaactattattgacagcta

SEQ ID NO: 376252 - DNA, 642 bp, Homo sapiens
catttttgctggaaaacacaaaattaaaattataatgtaacaaaaataagaaaaataataaaacataaaatttacattagacttgggtgtcttcaaagccaatattgctaagtttcaacctaaataacacatctaaatttaaatgtatggtaaaaccaaaacaaatttgggtatacaaaaataactcctgtaaatttttaaattttgtcataaatcatctcttttaagaaaccctaatatacagcaacatagcaatgactaaactccccccgatgcttgatataagttctgtcaggcaccatctagctcataactagtcttrttattaatcatcctacagaaagctcttccctgatcacctgttacaagatagatagcagctgggctattttatgtaataagggacttgggctttcaaggcagtgagggaaaagaaccagaagcttggcagctgtgagctaagggccccaccctttcactacataacaaaaatcagctgttgcctcaacagctggcaagtggctgacaaaaatgagatctgaaaagagttgtagattttatgtagaaaagggccatagttaggagacaacagacagtagaaaagaaaagtgatgataagggtgggaaatacagagaaagcta

SEQ ID NO: 376253 - DNA, 642 bp, Homo sapiens
catttttgctggaaaacacaaaattaaaattataatgtaacaaaaataagaaaaataataaaacataaaatttacattagacttgggtgtcttcaaagccaatattgctaagtttcaacctaaataacacatctaaatttaaatgtatggtaaaaccaaaacaaatttgggtatacaaaaataactcctgtaaatttttaaattttgtcataaatcatctcttttaagaaaccctaatatacagcaacatagcaatgactaaactccccccgatgcttgatataagttctgtcaggcaccatctagctcataactagtcttattattaatcatcctacagaaagctcttccctgatcacctgttacaagatagatagcagctgggctattttatgtaataagggacttgggctttcaaggcagtgagggaaaagaaccagaagcttggcagctgtgagctaagggccccaccctttcactacataacaaaaatcagctgttgcctcaacagctggcaagtggytgacaaaaatgagatctgaaaagagttgtagattttatgtagaaaagggccatagttaggagacaacagacagtagaaaagaaaagtgatgataagggtgggaaatacagagaaagcta

SEQ ID NO: 376254 - DNA, 585 bp, Homo sapiens
ctttttttcatttaagtaatttttctactgttttaagagcatattaaagttatcctcaccagacaagtaaagtgcattaaaatggaaatgtcgatatgttagaacaggataggtcacctttaacaacatcatcaaatgtatttttactcttgcaggcgatatcacagcatagaaagagattatattagtattattaaaattagcattactaaaatcctaaagtattcaagaagtcaaatggtcttcactgcagtatccttctatgatatgattacaaaaactgtaaacattgtgtacttggactgtttctatcttggtgtggtaaaacgtattttctactcaagtacagagaatatggaatcttctacatattgaaaatccctactatgaaaaaatcccttatttattggtgatgttaatcattaaacatgagtcagtgaaagctggatactgttttgtttttcttataaactgatagaggcctttgacttccataattactaaaaaatatagatatcctgatwaccaaaaatttaaaaataatttgaaatttgaaaagagaaaatgtatatacaactagtgacc

SEQ ID NO: 376255 - DNA, 630 bp, Homo sapiens
taagctaaatctataatttaatttgttaaaggcttatcaaatttgtccaagtggtaaaaacttttactgtaattagcacccagtgatacgatattttttatgtctgatatactagttggttaaagcattattcaaaataaagccagggtcgtatttttttctttctctacagattaagtagtttctctctcattaygagactccatatccaagtaactacctgtggccaaccatctcacaaatacatacttttggacattaagatcaataagtatattatagaacgattttaaacaaagattggtaacatacatgaaaaaacaaagagcggggcttaagagggaaggataatttgaatgacatgaagaaaggagaggagaaaaggagaaaagaaagtaaggaaaagaggcatgaaaaatatctttgttgatttatatatataaattattttccatttttattttccaccccctcccccacaagataatgcaatttcaccatttgtttattttaagaaagcacacaaccaatcctaaaattttcattaccaatgtccaattattttgatacctagacaaagctttctcataaaaatttaaaccatacttttaaaacacgaacattaaatgt

SEQ ID NO: 376256 - DNA, 630 bp, Homo sapiens
taagctaaatctataatttaatttgttaaaggcttatcaaatttgtccaagtggtaaaaacttttactgtaattagcacccagtgatacgatattttttatgtctgatatactagttggttaaagcattattcaaaataaagccagggtcgtatttttttctttctctacagattaagtagtttctctctcattatgagactccatatccaagtaactacctgtggccaaccatctcacaaawacatacttttggacattaagatcaataagtatattatagaacgattttaaacaaagattggtaacatacatgaaaaaacaaagagcggggcttaagagggaaggataatttgaatgacatgaagaaaggagaggagaaaaggagaaaagaaagtaaggaaaagaggcatgaaaaatatctttgttgatttatatatataaattattttccatttttattttccaccccctcccccacaagataatgcaatttcaccatttgtttattttaagaaagcacacaaccaatcctaaaattttcattaccaatgtccaattattttgatacctagacaaagctttctcataaaaatttaaaccatacttttaaaacacgaacattaaatgt

SEQ ID NO: 376257 - DNA, 484 bp, Homo sapiens
aggcattccagttgcctgctgtaatgttatttcagttctttacccagtggggtgcccttccccagccacgtttttgggcattattaaggaaagagttgaggctaagccttcaacctgggcctgttagtaacgtcccagtagccctggtgcccgtcaagcagtggtgcattcttctgtggactttcctggcacagcaccatcaaccctcccaatgctgcgtctccctccactcttccacccacttgtgcctagccacctccamctacctgtgtctcattatgacaggcagtgacggttaatactgagagtcaacttgaatggactgaaggatgcaaagtattgttccttggtgtgtctgtgagggtgttgccaaaggagattaacatttgagtcagtggactggaaaaagcagacccaccctcagtctgggtgggcactatctaatcagctgccagcacagccagaataaaaacaggcagaagaa

SEQ ID NO: 376258 - DNA, 484 bp, Homo sapiens
aggcattccagttgcctgctgtaatgttatttcagttctttacccagtggggtgcccttccccagccacgtttttgggcattattaaggaaagagttgaggctaagccttcaacctgggcctgttagtaacgtcccagtagccctggtgcccgtcaagcagtggtgcattcttctgtggactttcctggcacagcaccatcaaccctcccaatgctgcgtctccctccactcttccacccacttgtgcctagccacctccacctacctgtgtctcattrtgacaggcagtgacggttaatactgagagtcaacttgaatggactgaaggatgcaaagtattgttccttggtgtgtctgtgagggtgttgccaaaggagattaacatttgagtcagtggactggaaaaagcagacccaccctcagtctgggtgggcactatctaatcagctgccagcacagccagaataaaaacaggcagaagaa

SEQ ID NO: 376259 - DNA, 484 bp, Homo sapiens
aggcattccagttgcctgctgtaatgttatttcagttctttacccagtggggtgcccttccccagccacgtttttgggcattattaaggaaagagttgaggctaagccttcaacctgggcctgttagtaacgtcccagtagccctggtgcccgtcaagcagtggtgcattcttctgtggactttcctggcacagcaccatcaaccctcccaatgctgcgtctccctccactcttccacccacttgtgcctagccacctccacctacctgtgtctcattatgacaggcagtgacggttaatactgagagtcaacttgaatggactgaaggatgcaaagtatygttccttggtgtgtctgtgagggtgttgccaaaggagattaacatttgagtcagtggactggaaaaagcagacccaccctcagtctgggtgggcactatctaatcagctgccagcacagccagaataaaaacaggcagaagaa

SEQ ID NO: 376260 - DNA, 444 bp, Homo sapiens
tccacttgtgcctcccttattacctgaacatgaaataagccatttcataccgctgtggtgtaaatgctgtgtcaccccttctcccaccttattttttaacaactttttttttttttaggttcagagggtacatgtggatgtttgcaacatgggtaaattgcatcagacacatactcttgatagcttacaaagatttttatcattcargtatcctgcttctgtgccccttcttcctggagcgtgagcacagaaggtcaggaaaaaggctgggattcagaggatgatctaaggggtccatacctctcatcccaacaattactggcaacctttggatcaagcttatgcacttagattcttgtttcccataagtctcttcagtggttcgtactcacaggtttctgaaaaccatgcctcagatttgccctagattggaggtcacctgac

SEQ ID NO: 376261 - DNA, 469 bp, Homo sapiens
gggtaatgtaaccatacacgcttttacattttggtttccccagaaatttcagaccaactggataggagggtgaaacttaggaccactcccagggtgagtgcttgtgtctaggaacagggtcagaaagctctaccgccataattgttttcatggttctgccggaagacaaattaatcaggtaaagtggaaaagtgaaggggggagtctaaagaaaaatgtttattgataagctaaggcttgggatctcaaaaaaattakagtgtgatgactgtggggatgggtgagcatttagcataaagctccatgaagcttctcccgggacaagggcactgtgcaggccacagcaagttaccactgctgtgcttaggggagagggtagggggatgctccggtgcaaacccggacaattcggcttcagtatagattgaggtacatgccaggacctaggagcaaaccctgtcttgtgtga

SEQ ID NO: 376262 - DNA, 504 bp, Homo sapiens
atctgttcaatatctccctctaaaagacagaaacctccctggtccacaacatcagggcgcatcctcgcagtgtttaatgagtatctgctttgtttcagctaatcagtaccttttactgtgtttggcaccagctgacaaatggmaagccagaaaaaactactgtttaaatgccagcagaatcccccaatgggttgttagcttaaaaaaagaaaattacctttggtccttctccatatcgttgagcatttgagtcgtttcatcagaatctctaaaggcaccatcctaagtgttattaaagaagagtaagtggaagagagggaaggagatggaaatcactcaggtttggctgtattggtgcacaaagatggctaaagggaatcacgtgacttgcatcaccatcactagctgagtaagtcaggctacagcccgattattgcatacatgtcaaagggcaatctatctgtcctcttatcatgcttatgaaccaattcagagagacgaact

SEQ ID NO: 376263 - DNA, 504 bp, Homo sapiens
atctgttcaatatctccctctaaaagacagaaacctccctggtccacaacatcagggcgcatcctcgcagtgtttaatgagtatctgctttgtttcagctaatcagtaccttttactgtgtttggcaccagctgacaaatggcaagccagaaaaaactactgtttaaatgccagcagaatcccccaatgggttgttagcttaaaaaaagaaaattacctytggtccttctccatatcgttgagcatttgagtcgtttcatcagaatctctaaaggcaccatcctaagtgttattaaagaagagtaagtggaagagagggaaggagatggaaatcactcaggtttggctgtattggtgcacaaagatggctaaagggaatcacgtgacttgcatcaccatcactagctgagtaagtcaggctacagcccgattattgcatacatgtcaaagggcaatctatctgtcctcttatcatgcttatgaaccaattcagagagacgaact

SEQ ID NO: 376264 - DNA, 618 bp, Homo sapiens
ttgtcatggcaatttagatccgagattcacacccaatcctagacactagatctggggctcaggagacagtatgttttccatgctttatttctaatacyggaattatcttcttccagcatccaaaaccctactgatgtagtgtctgtgaggcagagattgtcttttcagattggccaaatagtgttctcggatggtaatcagaaatacaatataaaactttttatattgagaaattcatattggaaaattctatgtatctaaaaccttttagtaatgactgtcttttaatctaatatatagtttgaggtaaatatagggataattttcaagcacattttcctggacaaatgtgtgataccaaactctgagctgttctaaataaaaccctttcattagctagttcaaggctatattttcaacattcagcaaataaaatatacctctcacatttgagaactctgtcaccaaatttaacttagacacatttttcagattcctctttctgacatgattacttataccattgaaaggtacacatatgtcctaaactatttgaattgtgacttctgtacaaataagaagaccactttatcatgagacctttcagaaaggttagag

SEQ ID NO: 376265 - DNA, 571 bp, Homo sapiens
gggaagagaaagagaggggaggtgaaggaaggaaagaaagaaaggaaggaaagaaagaaagagagagcgaagagaaaaaaaaaactgaagaagaaaaaaagtgggtggagagcttaaggcaagcttccaggaggatggaagactctggcgacttcttgaagaaagagaaagatactggggttcaccaaacaagagagtgtgcatcctgaagagtgctccagatgccttctccagctatgatgacagcacctgagggtggaagggaggccctagaaagggaccagagagaaccgggatgccaaaatcatgggacagagggtgtgtctgcagcacagcttggcaggagcaaagagatacagtcagagaggacttgacccacactggcccacaggtggcagcctagggagacccgctgcccatggagagggagccgtcagatgatcaagtttaagttgatggcygaaggaaggcaattactggaagcaaagtgagccagtcagctatcctggagattctgcaaataaagtgcagggtgagatgaggacaactgcctctgcgatttgtcacagct

SEQ ID NO: 376266 - DNA, 614 bp, Homo sapiens
acatcaaaattgtactccccaaagacatcattagaactgcaataaaagtcaataaaccaaaaatatttatcccagcattacttatgagagcaaaacttggaataaagcaaattgcttaacaatagggaaaggttaagtgagctgtgatacccggctttgatggaataagatgcagtcactggggactacactgggggtattctactctctggaggagaggttagagataacttgactttctggcctcttactttttgccaaaacagtctccaaatcccagcagtgggggccagtttggagatgcatgtaggctgcaagtactctcagcagccacagcaggctagacttagagacagggcagcttcctctgtttagtctggtggaatttctgaagaaagagatgttagcacgaggccaggcagtgatggctccaggcgggatggggtgggggtcctgcttcatggaggcttgttyttccctacaagggaagaatctggagcccagggttccaggaccaggcaggtcattagctcgctgaataaatgtgaagaaactagtttaccgcacacctctgccattttctcatctgtgaaaggactgatggaaaagagtgt

SEQ ID NO: 376267 - DNA, 603 bp, Homo sapiens
aaactacaaactccagaggagactggggcaggaatcagtactcagcaactttaaaatatattttatggccagacacggtggctcatgcctgtaatcccaacactttgggaggccaaggtgggcagatcacaaagtcaagggatcgagaccagccttgccaacatggtgaaatcccatctttactacaaatacaaaaattagctgagcatggtggcgcgagcctgtagtcccagctacttgagaggctgaggcagaaaaatcgcttgaacccgggagggggaggttgcagtgagccgagatcacgccactacactccagcctggcaacagagtgagactccatctcaaaaaaaaacctatatatgtatgtatatatatatacacacacacacacacatasacacatatatagtaaaatgtctagttctcaaaaacattagacttgcaaagaaataataaagtgtgacccatattgtaccttaagaggccatgattttggatggatattgaaattacctttagctagagaagaccaaggagcagagataaagcttataagccttaaatattcatgggacccctgcgatgttttaggcacttttat

SEQ ID NO: 376268 - DNA, 659 bp, Homo sapiens
aaagtctgtgtagggtaacatcaagactctgctccctctctccaccctcatagctcactggaatggaaactttactccagatagctgtagccaagaacacagggctccctttcacttcagtcagaggtctgtcttcccagaaatgtagggaccaacagttcttatcctgccttcacctatctattgataagagtaccttccaggcaagtgaagccaagagatgaggactccattcttctgttcaacctacactgcggaatagaaggtctgtgatcagtatggtgttgcctagaatactggggctctgatgtctcttgtcctattttataaggtagaggtcaaatgctggtagacgcaagmtgataatatctgaggcaactggtagtaactacaccaagtgctcagtactgagcggttcacttgccattttccctacccacagctccagagctgtggattgaagatgtttccttgggaggagaagtacacataaaacaacatcttcaaatctcttcccaaaagaattaagagaggatggagaagttcaagcctaaaattgttctcaaaaccaatgggcttgtaatgaaagacaattaagatgagactagtagattcactagagatttaagctaaactatatactggctaattttatgaaa

SEQ ID NO: 376269 - DNA, 581 bp, Homo sapiens
aaaacaaatgacctcagaaaataatgtgaatccactgatttaaaaagagagcatctgtaaagataattatgtaattatattacaaattgcataaatcgcattcttctgtttgtttcttttaaattatttaaaaagcaattgtatcaaacacacatatatatagatacagatagatatagatatatgtacacacacattgtttgactcataacacgtagaaatgtaatatgtttttcaatgacagcacaaasaagatgggtgtaatgttggtaatggcaactttgtagtttctgtcttttaaatctgatatcttgtcatactcagaggctgtttgtttttcttttttattttctagtatgtggttattatttgcttgtcaagtcaaagttgtattgggctaagaggttactgaagatgataactgtaatttataggaataaacagaaattataaatcagtaggtttatgtaatgaaagctacagatatctacttactctcatttctaatctcaccttatttaaaagatggaaacttgtataaagtaaaaattataatgtaatattgggtatgtaacagctac

SEQ ID NO: 376270 - DNA, 427 bp, Homo sapiens
taattcaacaataataggtggagatcttaatacctttctaatatggataggtcttctaggaagaagatcaatgagcaaagaaaaagttttatcaacactataaaccaatccaacctaacagacgtctataaaacactcttcccaaaacgtcagaatccacattgttctcaaaggcatgtggatactatccagtttagaccatatgttaagccataaaacaaacttcaacaaaaaaaaaaaggatagcaataatacagagtttgtactctgaccacaacggaataagtaaacaaaaaaacttctaaataactgaygtgtcaaagaggggaattagaaaatattttcagatgaattaaaataaagacacaatataccaaaacttttgagatgcaactaaagcattgattagaaggaaacttatatctgc

SEQ ID NO: 376271 - DNA, 577 bp, Homo sapiens
tctctgtcttatgtcttacaactacatgtgaatctataattacctaccaataaaaacttgaattaaaaaaaaagtttttagaaaaacaaaagctgaaatatttggtgacagaaaaccagaacaacaagaaatattaaaggaagttttcaaaattaaaaaaagtgaatccctctggaagcacagcaatgcaagaagaaatgaacaactcaagagagagtaaatatgcgggtcaatgtaaaagawtatgttacttaggctgggcccgatggctcatgcctgtaatcccagaactttgggaggccaaggcaggtggatcacttgagctcaagagtttgagaccagcctagccaacgtggcaaaaccctgtctctactaaaaatgcaaaaattagccaggtgcggtggtgggtgcctgtaatcccagctactcggaaggatgaggcagaaggatcacttgaacccaggagtcagaggttgcagtgagccgagattgtgccactgcactccagcctgggcaatagagccagactccatctcaaaaaataataataataataaaataaagattatcagttatt

SEQ ID NO: 376272 - DNA, 500 bp, Homo sapiens
aaatcaatgttttatgggatatataacatgcaaaagtaaaacttttgacaataacaacaaaaagctgtgagagaggacaatggagctaaactagtaagatattcttatatattttatgaagcagtaaaatactgatataaggtaaactggaacattttgtaattttaaagmcaattactaaaaaattatactgagagttattacaataaatctaatatacaaccaaagtgattattaattatttttaaaacatgataaatttcaaagaaaacatgaagtaaggaacaaagaaaatatataaatgaaaccaagaggaagtaattagcaaggtgtcagacttacacccaacgatatcagtacttacattttaatataagtgaatcaaatacttcaaataagcaaaaatgttttcagaactgatcaaaatgcacacacacaaaataattctatgtgcaaaaacacatatgtgctccctccacgctcatcaggtcagcaagatg

SEQ ID NO: 376273 - DNA, 500 bp, Homo sapiens
aaatcaatgttttatgggatatataacatgcaaaagtaaaacttttgacaataacaacaaaaagctgtgagagaggacaatggagctaaactagtaagatattcttatatattttatgaagcagtaaaatactgatataaggtaaactggaacattttgtaattttaaagacaattactaaaaaattatactgagagttattmcaataaatctaatatacaaccaaagtgattattaattatttttaaaacatgataaatttcaaagaaaacatgaagtaaggaacaaagaaaatatataaatgaaaccaagaggaagtaattagcaaggtgtcagacttacacccaacgatatcagtacttacattttaatataagtgaatcaaatacttcaaataagcaaaaatgttttcagaactgatcaaaatgcacacacacaaaataattctatgtgcaaaaacacatatgtgctccctccacgctcatcaggtcagcaagatg

SEQ ID NO: 376274 - DNA, 500 bp, Homo sapiens
aaatcaatgttttatgggatatataacatgcaaaagtaaaacttttgacaataacaacaaaaagctgtgagagaggacaatggagctaaactagtaagatattcttatatattttatgaagcagtaaaatactgatataaggtaaactggaacattttgtaattttaaagacaattactaaaaaattatactgagagttattacaataaatctaatatacaaccaaagtgattattaattatttttaaaacatgataaatttcaaagaaaacatgaagtaaggaacaaagaaaatatataaatgaaaccaagaggaagtaattagcaaggtgtcagacttacacccaacgatatcagtacttacattttaatataagtgaatcaaatacttcaaataagcraaaatgttttcagaactgatcaaaatgcacacacacaaaataattctatgtgcaaaaacacatatgtgctccctccacgctcatcaggtcagcaagatg

SEQ ID NO: 376275 - DNA, 598 bp, Homo sapiens
catacctcctattgagagaagagagaaggaaacagataatctttatgcagagaaaattgatgttaggctttatgtttatcctattttaaaatctaggctacttgatcactttattaatttatcctgaattgtctttcaaacacttaactcaaaattagttaaatttttgrtaatttccttgctgtgggctactggctgtcaataggggccacttgtatcctagagcagaccctcactgttttacccaggactagagagggagggatgctttcctctaggtcttcaatgagtatccagtggcccctttgattcagaaaggggaaaacaggctgctatcttagtctgaaaagagcagggttcttattgttgttaaaaaacattctatattgaaatgcaaatttcccgtgctttttcacagcctagaaataatatcttttgaaagcagagaaagaaaatctatcaagctattgattaaatgtgcaggctcaagccctccctggggaagggaggtccactgaggaatgcaggatggggattttagcttgcagcacatgcctcagctcctcttgcctcagtttccttgctttgtaaagggaca

SEQ ID NO: 376276 - DNA, 578 bp, Homo sapiens
ttgagggtcaaaagtttcagctcaacacagtctccattcagcragggagagtttgcttttgaactgggtgacctatcagcagagatctctatgctggatgtttctaagatgagtctattgtgggctgtgcgtttggataagatgacctcaaatgtcactttgatctttaagatgctctattttttttttctagtcacattccatagatgagaggacaatgatgagcaagacatgaagagatgtgctctgttttttcttccacgttttttaatcaagaagagcagagccaccgaagaattcttaaaatatatacgtaattaatacattcataaccccatgaagaaaatgttttaatcccccgtaatcttactatcctcacataacaactattttaagttctttatattcatataaaacttacaattttcaggatgcttgatttttgtgcaattgtaatcgtgtcgcagagaaggtttggtgagaatcaaactttttaaacttgaattcaggtaatcgggaatagaatcattccttagatctcactttaagtgggtagaataataataccaaatattata

SEQ ID NO: 376277 - DNA, 578 bp, Homo sapiens
ttgagggtcaaaagtttcagctcaacacagtctccattcagcgagggagagtttgcttttgaactgggtgacctatcagcagagatctctatgctggatgtttctaagatgagtctattgtgggctgtgcgtttggataagatgacctcaaatgtcactttgatctttaagatgctctawtttttttttctagtcacattccatagatgagaggacaatgatgagcaagacatgaagagatgtgctctgttttttcttccacgttttttaatcaagaagagcagagccaccgaagaattcttaaaatatatacgtaattaatacattcataaccccatgaagaaaatgttttaatcccccgtaatcttactatcctcacataacaactattttaagttctttatattcatataaaacttacaattttcaggatgcttgatttttgtgcaattgtaatcgtgtcgcagagaaggtttggtgagaatcaaactttttaaacttgaattcaggtaatcgggaatagaatcattccttagatctcactttaagtgggtagaataataataccaaatattata

SEQ ID NO: 376278 - DNA, 651 bp, Homo sapiens
gaaggtttggtgagaatcaaactttttaaacttgaattcaggtaatcgggaatagaatcattccttagatctcactttaagtgggtagaataataataccaaatattatagtgctttctagtaaatgtatataaataatgaaattttgcacacacagttatgaataaatcgtgttaatcttaagatgtgtccatttcctgctagcaatcttttttgcttaatgctctgcactgcatatttttataaatatgtggtccatacatgggcttcagagacactgtgaaaaatgtgaatttgtctatgaatttttgcarggttgtctgtatgctattttttcaccctggcagcaatagatcgagtgttttatcagtttctcaaaagaggctatgacccctaatctcttatgcactattgcacccagaatgaagcccaaacttcttaggtaatgtattcaacacctccacacctctgcacaggcacgtgcacacacactgtgctcattgctgtaatctgtttctcatttctcatctcctcttccttcgttctggctcctttgtagctttaaaaaaattctctctgttcccccaaaaggttatgattttcacaaaaggcatgtttcagagttttaacaaatgattcccctagcctggt

SEQ ID NO: 376279 - DNA, 547 bp, Homo sapiens
gacaatgatagctcttacatttctgtgagtgagacgtgagagagttgtttgagaggcaaacattaatgaatacaaagtgaaggctcgagataagtatataaagaatctgacatttcatttcaggcatttcattcagcatttcaaaaattgctgtatattaaaccctggaggggcatctttggtgaaaaagccagtagtcaattcttctcattggaacttgaaactttttttccacagatcatgctagaattgcaaaggctcagaaatacccccatacatatttaaaatatttttattaaaacattcccacagtcattcctgctgtaagaatatattgtatacttagaccaaaacattttttccacrctacccacccagtgatatttctggatttacggtagtatactatttaaatttaccatctgtttttaagtattagtttattcacacatgagtttttagatacatttttttactacagcatatatacagcaagtgtttgctttacccaatttacttgccttatccagcctcatgtcttcctgaa

SEQ ID NO: 376280 - DNA, 539 bp, Homo sapiens
cctagaatgcacattcatctttaaattctatggtttttcatttttttcacttatttcctaatgtttttaaatgatatgacaatgatagctcttacatttctgtgagtgagacgtgagagagttgtttgagaggcaaacattaatgaatacaaagtgaaggctcgagataagtatataaagaatctgacatttcatttcaggcatttcattcagcatttcaaaaattgctgtatattaaaccctggaggggcatctttggtgaaaaagccagtagtcaattcttctcattggaacttgaaactttttttccacagatcatgctagaattgcaaaggctcagaaatacccccatacatatttaaaatatttttattaaaacattcccacagtcattcctgctgtaagaatatattgtatacttagaccaaaacattttttccacactacccacccagtgatatttctggatttacrgtagtatactatttaaatttaccatctgtttttaagtattagtttattcacacatgagtttttag

SEQ ID NO: 376281 - DNA, 447 bp, Homo sapiens
tagatgtgtgagttcattttttggactctcaagtctattctattgctatatacatctgtctttatgtcagtaccgcgctgtcttgattactgttgccttgtagtaagtttccaaatgagaaagtgtgagtcctacttgccctttttcaagattgtgtgtgtcaatgtgtgtttgtgtgtgtgtgtgtgtgwgagagagagagagagagagagagagactattttggctctcttgcaattctatctgcatttagcatcctctcgtaaatttttacagataagtcatctggaaatctgacagggaatgtgttaaacctatagatcaatttggggagtactgccatcctaacaatgttaggtcttccagcccattaatatgagatattttcatttatttagatttctactttttttaatctgtgttttagagttttaagttttccactga

SEQ ID NO: 376282 - DNA, 522 bp, Homo sapiens
ttccttgcttgtatttttgttaaatgcacttgctttgtgttggttggccacaaattcatgctggccctttcaagagtgcatcagttgcagtagtatagggagaatcaggtggtgggcagggcccttgagctcccaagagattatgtcctttgttttcggctaccagagccagtagagaaagaccatcaggtgggggcagggctaggtatgtctgagctctgtctctctttgggtggggtttgctgcggctgttgtgggagatgggagtgtggttcacaggccagtgcagttatgtttccagagggattatggttgcttctgctatgtcatgcaggtccagggaagtaggggaaagcagcagccacaggactcaccctgctcctacgcagcctacagcccaaaaggttggtctcactcccactgtgctcccccaaaagcaccaagtttatttytaggcagcccatgagcagggcggagaacttgccccaggctacaagcctcccatctgagaaatcaagccaa

SEQ ID NO: 376283 - DNA, 556 bp, Homo sapiens
taaggagcacagatcctctggaatctgtagatgtaaaatcaagagatgacgcctttccttggaatacacaccacacacacacacacacacacacacacacacacacacacacactttaataatcttaacaaaagttttggcagttagaaagataatagatccttcttgtcataattcttagtgaggaartatgttcctgtaattggactggtttcatgagaccatgaactccagggttccatgaatgtattctgcagggtgtagagaatttctttcctttataagggatctttctattattcaaattttagaaacactgtgacacatctgggatggtttattgcagagcttaaaaatacaaacataacttgaaatttgttttttgtttttaatcttatactgtagtccaagactgttctagagcatcagttatagattataaccctcccctgcgaaacctcagaacacctcttcctataacacgtggtacttcctttgtaaactgtaaagtacccccataaatattttctatgggcataaaaaatttgttattgca

SEQ ID NO: 376284 - DNA, 653 bp, Homo sapiens
ttcttagtgaggaaatatgttcctgtaattggactggtttcatgagaccatgaactccagggttccatgaatgtattctgcagggtgtagagaatttctttcctttataagggatctttctattattcaaattttagaaacactgtgacacatctgggatggtttattgcagagcttaaaaatacaaacataacttgaaatttgttttttgtttttaatcttatactgtagtccaagactgttctagagcatcagttatagattataaccctcccctgcgaaacctcrgaacacctcttcctataacacgtggtacttcctttgtaaactgtaaagtacccccataaatattttctatgggcataaaaaatttgttattgcagttatgggcctctactgcaaatctaatattttactgaattacagcaggaattaatcttgatttatcacataggttgtgcaagaaatgtcttgttactatatatatatatatatatatatatatacacatatatatatttcaaatgtcttgttactatatataaatatatatatatatatatttcaaatcgaattaaatcagactccaagtctccatgataggaagatgatggacacatgaaacagcttgactgggctccacccccaatagt

SEQ ID NO: 376285 - DNA, 610 bp, Homo sapiens
attcctataggttattctgtagtgtgagcacttagcctgaattcattttcttttttcctatgctactgttctgggggccctggagccttataattaattaatggttagtgctgcctttgaaattcagattagctttcctrcaggtttacactttagagtctagaaagctttctctttctctttcttttatttatttatttatttatttcttttttttttgcctatgctgctttatcatcaggtcttgaaaatagcaggttggcatttattttctagctttaaagatgagttttgaactgtggtttacttttccgtgggagcctgcaggctttgcatatgtgcgaagcaatcccatgtggttgtagaaccacagtttcaaaggctaccgagctctgttcccagagctcatagctatgaagttgtcaggaaagctcttatagtgaggaagctgtcccatctccttctgtggttgtaggatgaaattaattaattttgaagaaatataaatgtcatagcttaccattataatcaggacaaacattaatatcagcttccttaatcacccctaacctaactctaaagaaaatctttgcagagttgaatttgtggg

SEQ ID NO: 376286 - DNA, 595 bp, Homo sapiens
ccttcacccttatgcactccacagagcagtgaggcagaagagacagaaaaggagcttgatttccctacattccctacctcccttcctctgtgctccattgatccaaaatctttggacccatcttggcaagaactgactgatcagaagtgcagcagcttccctgtcctgaattttaagcctcataacagaggaacagtctcttcttattcccactgtcatcaaaacatggccttagctacgaggacatataattattttaaagaattattttaaaaaacaatttcatgaaaaactaattatgataaaactaggaacccacaagagtccatactcccatgatgccttcataggccatggaccagctctgccctgttagcaaggggcctaacagcaaggatcaatgcctcttttggccccagtcctttgtctgtgggcccttttgccttttcctagtgttactgttgccagggttgattcttagtgttctagcttctgacgtacccaccatatgcagctgccagactgaaagggragaaaaattgatttcagcttccagcttgagaatgttcacgctgctctgaccttgaacagggct

SEQ ID NO: 376287 - DNA, 577 bp, Homo sapiens
cttaatcctgaataactacaaaaaaagcctcacatgtaagaataatatctcagtctgtcagtcccatctgatatagtatctatgttcttgtaaacatgcttttgcctgtgaaaggaaaataaaacctaaggattccaaactcactatgccaaagggaaaagtcaagctgggaactaggtcatgtaaacctgcctcccattttgttcctaaatagatagctacaaagataaaaggctacatatctccctcacaatttgctcaccagaaaattccctgtgaaccccaagatctttatcctaaaacaaatctgtcgaatttcaccctgacaatgtaaattgacagcttattgtcacagccacaggacaaacgagaaaactaaaagtcatccctccgttcaccagagacaagtgcatatctgactgcttcctcaactctttttttatcatatgtaaaaatacagagttactgagcacaagatgaatgcataattgcctrttcttctacccgctcctttcacatataagatgtggattcagtgaacactaattgaagactcaagagaatgcaacagctgccc

SEQ ID NO: 376288 - DNA, 425 bp, Homo sapiens
tatgtggccttgaggataacctgcactgtaatagcctaaacacaactcttatttacttacagccttatgttttcgtwttttcttggtagactatgcaacttttttaaaggacaggaaactgatattttaaagaccaatttgtcctctctagcattttgactagtttttccgccagatattttgaatgcacaaattctgtcacgcatgttcattaattgctacgtaatttggttcttctggaatattttcatgtagctcttggagtacaactgtgaaaattaacgactgctaagtgaaatactttcttttcataattttttccttgacgagccaaagtatttttttcagctggttgttgaatagggttaagtccgcttggattagttgtgaccttctttaatatgttacagaaatgcagtgactta

SEQ ID NO: 376289 - DNA, 425 bp, Homo sapiens
tatgtggccttgaggataacctgcactgtaatagcctaaacacaactcttatttacttacagccttatgttttcgttttttcttggtagactatgcaacttttttaaaggacaggaaactgatattttaaagaccaatttgtcctctctagcattttgactagtttttccgccagatattttgaatgcacaaattctgtcacgcatkttcattaattgctacgtaatttggttcttctggaatattttcatgtagctcttggagtacaactgtgaaaattaacgactgctaagtgaaatactttcttttcataattttttccttgacgagccaaagtatttttttcagctggttgttgaatagggttaagtccgcttggattagttgtgaccttctttaatatgttacagaaatgcagtgactta

SEQ ID NO: 376290 - DNA, 425 bp, Homo sapiens
tatgtggccttgaggataacctgcactgtaatagcctaaacacaactcttatttacttacagccttatgttttcgttttttcttggtagactatgcaacttttttaaaggacaggaaactgatattttaaagaccaatttgtcctctctagcattttgactagtttttccgccagatattttgaatgcacaaattctgtcacgcatgttcattaattgytacgtaatttggttcttctggaatattttcatgtagctcttggagtacaactgtgaaaattaacgactgctaagtgaaatactttcttttcataattttttccttgacgagccaaagtatttttttcagctggttgttgaatagggttaagtccgcttggattagttgtgaccttctttaatatgttacagaaatgcagtgactta

SEQ ID NO: 376291 - DNA, 425 bp, Homo sapiens
tatgtggccttgaggataacctgcactgtaatagcctaaacacaactcttatttacttacagccttatgttttcgttttttcttggtagactatgcaacttttttaaaggacaggaaactgatattttaaagaccaatttgtcctctctagcattttgactagtttttccgccagatattttgaatgcacaaattctgtcacgcatgttcattaattgctacgtaatttggttcttctgkaatattttcatgtagctcttggagtacaactgtgaaaattaacgactgctaagtgaaatactttcttttcataattttttccttgacgagccaaagtatttttttcagctggttgttgaatagggttaagtccgcttggattagttgtgaccttctttaatatgttacagaaatgcagtgactta

SEQ ID NO: 376292 - DNA, 573 bp, Homo sapiens
ataggcatatttctctgatctggccaaccacatccttatctttccttgattcagacttaaatgactcactcactctgaggttactgyttctctttatatataatcctgaacacagagtttttctctattctctatctttagcattgactacaaagactgtcttatgaaggtatgaggagtactttgagaaaaacaagaaagctagagagaaaagaacagaattaaaataaatgttaacacaagagtacttttaaaaagtcttttgtttttagtattctgtcatagaaattcaagatgggttttattctagtttgaggcagcagacatttgaccataagtcaaacaaattttaaaatttggaacaattttaattgaagatgacaaaaatgacaattcatgtttgaatctttttatattatttaataaattttagaacttttaaaagatacaactcttactcagagatgagaggggaatattatttcaaaactaaatttttaaaaatctttaaggtaagtgttaagagatgatgaaaaagggaaggttactagcaaggaattccactctagaaag

SEQ ID NO: 376293 - DNA, 573 bp, Homo sapiens
ataggcatatttctctgatctggccaaccacatccttatctttccttgattcagacttaaatgactcactcactctgaggttactgcttctctttatatataatcctgaacacagagtttttctctattctctatctttagcattgactacaaagactgtcttatgaaggtatgaggagtactttgagaaaaacaagaaagctagagagaaaagaacagaattaaaataaatgttaacacaagagtacttttaaaaagtcttttgtttttagtattctgtcatagaaattcaagatgggttttattctagtttgaggcagcagacatttgaccataagtcaaacaaattttaaaatttggaacaattttaattgaagatgacaaaaatgacaattcatgtttgaatctttttatattatttaakaaattttagaacttttaaaagatacaactcttactcagagatgagaggggaatattatttcaaaactaaatttttaaaaatctttaaggtaagtgttaagagatgatgaaaaagggaaggttactagcaaggaattccactctagaaag

SEQ ID NO: 376294 - DNA, 579 bp, Homo sapiens
tcttagggttctcagtcgaaaagagacagaatctcgcctacttttttttgagacagggcctcattctgtygcccaggctagagtgcagtagtgagatcctggctcaatgcagcctcaacttcccatactcaagtgatccccccacctcagtctcccaagtagctgggagcacaaacacatgacaccatgcccaattaatttatttttatttttagtagacacaaggtctcactatgttgcccatgctgggattgaactctaggctcaagtgacccttctttctgcctcagcttcccaaagtgctggggttacaggcataagccatcaagcctgactctttttaaacattctattacatgtctggtacactctgaaacattacatgtctcatgcataaaacactcattttaaatcatgtgtgtaatggtttttattaattctatagactgcatcatagacttttcagttctggagggtttacaaaggcccatggccaaaaggttttaacttcatttatgagctaactttgggtctatatcaaagacatcatgagtaaaaaaaagaaaaaaaaaggaaatt

SEQ ID NO: 376295 - DNA, 474 bp, Homo sapiens
ggtgaggttcttataagaacagttctttaaaaagccttttctgttctcaaagggttttcacatatattagctcatttgatattcacaacaatcctgggaggtaggtcagrcatatatattattattattacttcagagatgaggaatctgagcgcatagtcacttacctaagatccaaagtaatgacaaaagtgggaggagaatccaggtcttttgactcttagacattattcttttcacttcctctctcatttaacaaagtaaataccataagcagacccataaaggagcaatagaaacacttgaatgggatagtgtgggactgtgtttgcatgtctttgtgttaggggctgggttaaggctacagacatggaaaggcaagttgacagacagcacggtagaagagaaatcaggccagtggtgctaataagaaagcacactcaatttttttcttagtttagaagaatgaagtct

SEQ ID NO: 376296 - DNA, 474 bp, Homo sapiens
ggtgaggttcttataagaacagttctttaaaaagccttttctgttctcaaagggttttcacatatattagctcatttgatattcacaacaatcctgggaggtaggtcaggcatatatattattattattacttcagagatgaggaatctgagcgcatagtcacttacctaagatccaaagtaatgacaaaagtrggaggagaatccaggtcttttgactcttagacattattcttttcacttcctctctcatttaacaaagtaaataccataagcagacccataaaggagcaatagaaacacttgaatgggatagtgtgggactgtgtttgcatgtctttgtgttaggggctgggttaaggctacagacatggaaaggcaagttgacagacagcacggtagaagagaaatcaggccagtggtgctaataagaaagcacactcaatttttttcttagtttagaagaatgaagtct

SEQ ID NO: 376297 - DNA, 537 bp, Homo sapiens
ttcgtggatagatacatcccactgaagtgagaaactcggccgtgagttcgtggatagatacatcccactgaagtgagacactcggccgtgagttcgtgtgccctgctctttcagggtctgatcaccctaggtgaactcatacaggttaygacctgcacagctcaattccacacctatgatcctgcaagccttacctggatcttagctataaaaagcctctttcatggggacttccccatcaagccttctctcctgtaacctccaaacaatctctgtttccaatgaattaaaaaaaaaaaaaaaggttaagaccaccaccactttaccaaatacttaaatttggggcaaaaaaaataaaaataaataaatcaggagtggtataataaattagatatagaaggctgaagattggccctgtaacctgatcacccacttgcaactctgaaatcagcatcctttttcctacaaaaaaatctctgtatctcttccagcgtttttagcttcagtctaacatagggagtctttatttatttattt

SEQ ID NO: 376298 - DNA, 537 bp, Homo sapiens
ttcgtggatagatacatcccactgaagtgagaaactcggccgtgagttcgtggatagatacatcccactgaagtgagacactcggccgtgagttcgtgtgccctgctctttcagggtctgatcaccctaggtgaactcatacaggttacgacctgcacagctcaattccacacctatgatcctgcaagccttacctggatcttagctataaaaagcctctttcatggggacttccccatcaagccttctctcctgtaacctccaaacaatctctgtttccaatgaattaaaaaaaaaaaaaaagkttaagaccaccaccactttaccaaatacttaaatttggggcaaaaaaaataaaaataaataaatcaggagtggtataataaattagatatagaaggctgaagattggccctgtaacctgatcacccacttgcaactctgaaatcagcatcctttttcctacaaaaaaatctctgtatctcttccagcgtttttagcttcagtctaacatagggagtctttatttatttattt

SEQ ID NO: 376299 - DNA, 545 bp, Homo sapiens
tccctcctgtaattactccattcccactgtacgtgaagcctgccacccctctgtctgaaaatagggatctaatgccttactcataaatcacaggcagctacaagtatctttgtactgaacaaaattatattccaatgatagycattaagccttgaaataaaaattaggagctaattattaatataaatattcaaagtaaactataaataccagtgggaagactaaaccaaatatagttttgctaaatattaccacatgtatcctaaattatgattttataacaagtaggtgcctttaaaacattacatagtcataaaaatatgtaatttgacatattttcagatttgttaaattaatatgattaataacaaagatataccaactaaaatacataaaaagctacttaaagcaaggtattacaagacacagcaatacacttcagttcatctgggaaatctagaattaagtgtcaaagataatcaattaaattttaatttgaaaatactcatttcaggtgtaaacatttccatttatacttacattat

SEQ ID NO: 376300 - DNA, 545 bp, Homo sapiens
tccctcctgtaattactccattcccactgtacgtgaagcctgccacccctctgtctgaaaatagggatctaatgccttactcataaatcacaggcagctacaagtatctttgtactgaacaaaattatattccaatgatagtcattragccttgaaataaaaattaggagctaattattaatataaatattcaaagtaaactataaataccagtgggaagactaaaccaaatatagttttgctaaatattaccacatgtatcctaaattatgattttataacaagtaggtgcctttaaaacattacatagtcataaaaatatgtaatttgacatattttcagatttgttaaattaatatgattaataacaaagatataccaactaaaatacataaaaagctacttaaagcaaggtattacaagacacagcaatacacttcagttcatctgggaaatctagaattaagtgtcaaagataatcaattaaattttaatttgaaaatactcatttcaggtgtaaacatttccatttatacttacattat

SEQ ID NO: 376301 - DNA, 545 bp, Homo sapiens
tccctcctgtaattactccattcccactgtacgtgaagcctgccacccctctgtctgaaaatagggatctaatgccttactcataaatcacaggcagctacaagtatctttgtactgaacaaaattatattccaatgatagtcattaagccttgaaataaaaattaggagctaattattaatataaatattcaaagtaaactataaataccagtgggaagactaaaccaaatatasttttgctaaatattaccacatgtatcctaaattatgattttataacaagtaggtgcctttaaaacattacatagtcataaaaatatgtaatttgacatattttcagatttgttaaattaatatgattaataacaaagatataccaactaaaatacataaaaagctacttaaagcaaggtattacaagacacagcaatacacttcagttcatctgggaaatctagaattaagtgtcaaagataatcaattaaattttaatttgaaaatactcatttcaggtgtaaacatttccatttatacttacattat

SEQ ID NO: 376302 - DNA, 545 bp, Homo sapiens
tccctcctgtaattactccattcccactgtacgtgaagcctgccacccctctgtctgaaaatagggatctaatgccttactcataaatcacaggcagctacaagtatctttgtactgaacaaaattatattccaatgatagtcattaagccttgaaataaaaattaggagctaattattaatataaatattcaaagtaaactataaataccagtgggaagactaaaccaaatatagttttgctaaatattaccacatgtatcctaaattatgattttataasaagtaggtgcctttaaaacattacatagtcataaaaatatgtaatttgacatattttcagatttgttaaattaatatgattaataacaaagatataccaactaaaatacataaaaagctacttaaagcaaggtattacaagacacagcaatacacttcagttcatctgggaaatctagaattaagtgtcaaagataatcaattaaattttaatttgaaaatactcatttcaggtgtaaacatttccatttatacttacattat

SEQ ID NO: 376303 - DNA, 552 bp, Homo sapiens
ttcgttcattagcttcttatttttctcttctagcatgtggtctttctttccactctcaataaagcctctttggatattagttactatctctttatgatcctctttctgatgaacatcatctagttgctgttcaatgcacggattttcatgttggagttgacatatcctctcttctacacagctccactttccagtggaattattcactttagcttctgcattttcatacatctctttcatttcctttatttgctgctgtgtttggcttaggtcgtttggagagtttctaaagccaatgacttttttctgagagtatctctgttcttacggaacttatcttttaaggtattgaatttaatttgckttttagaaagttgttcagtaagaaactcattcttctacttcggaaatatcagaactcatttttacttgtacggaaacatcttgtgttcactctaatgcaagttttaggtttctttctgttttcacactttcactgtgcttacttatagcagcagtcagtctagactgatgattcaatttcagcttcca

SEQ ID NO: 376304 - DNA, 552 bp, Homo sapiens
ttcgttcattagcttcttatttttctcttctagcatgtggtctttctttccactctcaataaagcctctttggatattagttactatctctttatgatcctctttctgatgaacatcatctagttgctgttcaatgcacggattttcatgttggagttgacatatcctctcttctacacagctccactttccagtggaattattcactttagcttctgcattttcatacatctctttcatttcctttatttgctgctgtgtttggcttaggtcgtttggagagtttctaaagccaatgacttttttctgagagtatctctgttcttacggaacttatcttttaaggtattgaatttaatttgctttttagaaagttgttcagtaagaaactcattcttctacttcggaaatatcagaactsatttttacttgtacggaaacatcttgtgttcactctaatgcaagttttaggtttctttctgttttcacactttcactgtgcttacttatagcagcagtcagtctagactgatgattcaatttcagcttcca

SEQ ID NO: 376305 - DNA, 552 bp, Homo sapiens
ttcgttcattagcttcttatttttctcttctagcatgtggtctttctttccactctcaataaagcctctttggatattagttactatctctttatgatcctctttctgatgaacatcatctagttgctgttcaatgcacggattttcatgttggagttgacatatcctctcttctacacagctccactttccagtggaattattcactttagcttctgcattttcatacatctctttcatttcctttatttgctgctgtgtttggcttaggtcgtttggagagtttctaaagccaatgacttttttctgagagtatctctgttcttacggaacttatcttttaaggtattgaatttaatttgctttttagaaagttgttcagtaagaaactcattcttctacttcggaaatatcagaactcatttttacttgtacggaaacatcttgtgttcactctaatgcaagttttaggtttctttctgttttcacactttcactgtgyttacttatagcagcagtcagtctagactgatgattcaatttcagcttcca

SEQ ID NO: 376306 - DNA, 618 bp, Homo sapiens
cccatctagttaccacaaatttgaaaaagaaatgttaaaaatataagcaagctacaggattttccccaggacttcttactctacttctagttctctgagagatcacagttacttctgtggtgtaaatgtatcaatacgaaagaaaagttttatttcaaaacaccaatggtaaataagataaaatttatagagctcttcttagaatatcatgagattatttgtgattgcaataatttgtttcctctttatagtattaggtacagtaatcaatatgaaatggcrggaagtacaaggaacaattttactgggaacaaaatctttatcaataggttatcactaagtatatattatggcatattattgttttcaaaagctctttgtaataaaataatatcctatgtggatgccaagatttataataaaaataattgtacctgtaagtgtcatcattcattttttaaaaatgagataacatttctggtttgttttagaccaaaatattatatattaaatcaagaggatattataagtaacattgataaaataaagtttaaaatatagaatttttaccaaagatttatttatctgatttggagtatttcttgtagtcttcggttt

SEQ ID NO: 376307 - DNA, 484 bp, Homo sapiens
tttatagagctcttcttagaatatcatgagattatttgtgattgcaataatttgtttcctctttatagtattaggtacagtaatcaatatgaaatggcaggaagtacaaggaacaattttactgggaacaaaatctttatcaataggttatcactaagtatatattatggcatattatygttttcaaaagctctttgtaataaaataatatcctatgtggatgccaagatttataataaaaataattgtacctgtaagtgtcatcattcattttttaaaaatgagataacatttctggtttgttttagaccaaaatattatatattaaatcaagaggatattataagtaacattgataaaataaagtttaaaatatagaatttttaccaaagatttatttatctgatttggagtatttcttgtagtcttcggtttcatctctagtgattgaatagttggttcaagttgttttgcttcaacttct

SEQ ID NO: 376308 - DNA, 484 bp, Homo sapiens
tttatagagctcttcttagaatatcatgagattatttgtgattgcaataatttgtttcctctttatagtattaggtacagtaatcaatatgaaatggcaggaagtacaaggaacaattttactgggaacaaaatctttatcaataggttatcactaagtatatattatggcatattattgttttcaaaagctctttgtaataaaataatatcctatgtggatgccaagatttataataaaaataattgtacctgtaagtgtcatcattcattttttaaaaatgagataacatttctggtttgttttagaccaaaatattatatattaaatcaagaggatattataagtaacattgataaaataaagtttaaaatrtagaatttttaccaaagatttatttatctgatttggagtatttcttgtagtcttcggtttcatctctagtgattgaatagttggttcaagttgttttgcttcaacttct

SEQ ID NO: 376309 - DNA, 484 bp, Homo sapiens
tttatagagctcttcttagaatatcatgagattatttgtgattgcaataatttgtttcctctttatagtattaggtacagtaatcaatatgaaatggcaggaagtacaaggaacaattttactgggaacaaaatctttatcaataggttatcactaagtatatattatggcatattattgttttcaaaagctctttgtaataaaataatatcctatgtggatgccaagatttataataaaaataattgtacctgtaagtgtcatcattcattttttaaaaatgagataacatttctggtttgttttagaccaaaatattatatattaaatcaagaggatattataagtaacattgataaaataaagtttaaaatatagaatttttaccaaagattkatttatctgatttggagtatttcttgtagtcttcggtttcatctctagtgattgaatagttggttcaagttgttttgcttcaacttct

SEQ ID NO: 376310 - DNA, 562 bp, Homo sapiens
tataagtaacattgataaaataaagtttaaaatatagaatttttaccaaagatttatttatctgatttggagtatttcttgtagtcttcggtttcatctctagtgattgaatagttggttcaagttgttttgcttcaacttctttcttatattgtttccctttcctttctaattcttctctatttttttgyacagcatattaacatttgttttttcttcactttcttgtcttaagatgcatctgcagacaaagacatttatcttaaaattcattttgttaaaaaataaagagatcatcctgtgatctacctctgcagatgctctttatcatcctagtaaaatttctatgttctggattatttttcctttgtagttctcagatatttaatttctcacttcaacatcttcaaacgaatgcatatacttgaaaattagtaaggaaagaatattctgctaaagtttttattactagtcactctagtatgtattatacaaaaagatactggaaataattcagtatagttagaagttcaaaattaccttttcaaatcacacagtcata

SEQ ID NO: 376311 - DNA, 590 bp, Homo sapiens
gtttacacaagttatgttttcctgtgaaatctagtcccagaagtggagttgttgagttaaagggatgtcaggttatttgaaattttgataaacagcactaagttacccttcagaaataatttaccaatttcatataccaacagtgtatgagaatgcctttttcctctcattttcaatggtaggaattactttttcaatatcagcatgactttacaaaatatatcttattttatgttaatttgcatttttctgattactaggcagggctaaatatccctggtaaaactataaaacttgttaatcataatgaacattagtccaattttgaattagtttatagcacaatgacaattatctgctgagaaatactgctataggtggccaggcacggtggctcactcctgtaaacccagcactttgggaggccgaggtgggcagaacacctgaggtcagaagttcgagacaagcctggataacatggtgaaacctcatttytactaaaaatacaagaaattagctaggcatggtggcacatgtctgtaatttcagctactagggaggttgagtcaaaagaatcacttgaacccagt

SEQ ID NO: 376312 - DNA, 525 bp, Homo sapiens
ttacctatcatgcttttccttcagtttcttgggaaattgctgaggataygttttcccaatctttctttctttggttaatctgtcagcagcagcagaagatgtactatgacatacattttctgatagttgtattttttcacttttgtttgtattatttccttctttgacctttaataaaagtaatatgaataataattattattttattcaataaaaaaactttttccctgattttttaacttgattcaggttaactatcaccattttaatgataaaagtattttgtgcttactttaattttatcattatacataataattataagatactcatcattttatcattgaaatttttgtcaagtctgctcatttctgtttgagtgaatggaagaattttccaaaatttcaaaaaggactcttctccattttgtgcttttattcgcatccactctttgctatctgatataaatgtttatgctagttgactggcagaaacagagaaataaaaagacacaggcataacata

SEQ ID NO: 376313 - DNA, 525 bp, Homo sapiens
ttacctatcatgcttttccttcagtttcttgggaaattgctgaggatacgttttcccaatctttctttctttggttaatctgtcagcagcagcagaagatgtactatgacatacattttctgatagttgtattttttcacttttgtttgtattatttccttctttgacctttaataaaagtaatatgaataataattattattttattcaataaaaaaactttttccctgattttttaacttgattcaggttaactatcrccattttaatgataaaagtattttgtgcttactttaattttatcattatacataataattataagatactcatcattttatcattgaaatttttgtcaagtctgctcatttctgtttgagtgaatggaagaattttccaaaatttcaaaaaggactcttctccattttgtgcttttattcgcatccactctttgctatctgatataaatgtttatgctagttgactggcagaaacagagaaataaaaagacacaggcataacata

SEQ ID NO: 376314 - DNA, 525 bp, Homo sapiens
ttacctatcatgcttttccttcagtttcttgggaaattgctgaggatacgttttcccaatctttctttctttggttaatctgtcagcagcagcagaagatgtactatgacatacattttctgatagttgtattttttcacttttgtttgtattatttccttctttgacctttaataaaagtaatatgaataataattattattttattcaataaaaaaactttttccctgattttttaacttgattcaggttaactatcaccattttaatgataaaagtattttgtgcttactttaattttatcattatacataataattataagatactcatcattttatcaytgaaatttttgtcaagtctgctcatttctgtttgagtgaatggaagaattttccaaaatttcaaaaaggactcttctccattttgtgcttttattcgcatccactctttgctatctgatataaatgtttatgctagttgactggcagaaacagagaaataaaaagacacaggcataacata

SEQ ID NO: 376315 - DNA, 627 bp, Homo sapiens
ctatgacatacattttctgatagttgtattttttcacttttgtttgtattatttccttctttgacctttaataaaagtaatatgaataataattattattttattcaataaaaaaactttttccctgattttttaacttgattcaggttaactatcaccattttaatgataaaagtattttgtgcttactttaattttatcattatacataataattataagatactcatcattttatcattgaaatttttgtcaagtctgctcatttctgtttgagtgaatggaagaattttccaaaatttcaaaaaggactcttctccattttgtgcttttattcgcawccactctttgctatctgatataaatgtttatgctagttgactggcagaaacagagaaataaaaagacacaggcataacatatatcttctgtcattgccacatggattttacatgaaatagccagattaagaggatgtaaccttgtaggccttcaagaacagtaaagaagttttcccttttctgcactgagctattcttttccccactgccttttatctcttttttttttttttttgaatcctgggatatcaaaaaagtgaaagttctccctgaactatgggaacca

SEQ ID NO: 376316 - DNA, 627 bp, Homo sapiens
ctatgacatacattttctgatagttgtattttttcacttttgtttgtattatttccttctttgacctttaataaaagtaatatgaataataattattattttattcaataaaaaaactttttccctgattttttaacttgattcaggttaactatcaccattttaatgataaaagtattttgtgcttactttaattttatcattatacataataattataagatactcatcattttatcattgaaatttttgtcaagtctgctcatttctgtttgagtgaatggaagaattttccaaaatttcaaaaaggactcttctccattttgtgcttttattcgcatccactctttgctatctgatataaatgtttatgctagttgactggcrgaaacagagaaataaaaagacacaggcataacatatatcttctgtcattgccacatggattttacatgaaatagccagattaagaggatgtaaccttgtaggccttcaagaacagtaaagaagttttcccttttctgcactgagctattcttttccccactgccttttatctcttttttttttttttttgaatcctgggatatcaaaaaagtgaaagttctccctgaactatgggaacca

SEQ ID NO: 376317 - DNA, 404 bp, Homo sapiens
ttgaaagaagaaaatctctagatttttgtctatctttagaacacagkgtacagaactcaactttctactaaagagtcaaaggttaaatttttagctaagaaattatgcttcttacatgataaaaatcatacatgccaaaacttaccatactttattaaacaacataatgtaaggtctgattcaacagaaatattggagtggtgatttttttaaatatgtggaagtatatatttgttttcaaaatattggaaataaccatgatggaactataaattcaaacagtttgagctaagcagataaacttgcatgcatgaaaacacattaaacagactcatttgtctgggaatattcattgcaactctcaaggctagaagtgtttttgtggctcatctcagtcattgctt

SEQ ID NO: 376318 - DNA, 449 bp, Homo sapiens
taaatgtaattcatctctaaatgactatagtaaaaagaatctagaatctaaagcttatttctttagcaatttctttatgttgatctggttcagaaggtsacatggtatatggctgaattagtttcccagctcatatgccacttggaagactgagagtgagacttaggttgattaatgaacaaacattatgagaacattctccgaaccattgtttagatagcaggactagtctactttgacacataattacacatttagaaaaccccgctgtaactgtacacatgggattttcttgaatagaaaatttgactaaatcaaataattgataaagagaaaaaagaagcagcaagtgaacctctgtctttttgaagttggactttctctttctccaaagccaggaactctacttgtaacatgcctacctcattctttttactattattatactt

SEQ ID NO: 376319 - DNA, 449 bp, Homo sapiens
taaatgtaattcatctctaaatgactatagtaaaaagaatctagaatctaaagcttatttctttagcaatttctttatgttgatctggttcagaaggtcacatggtatatggctgaattagtttcccagctcatatgccacttggaagactgagagtgagacttaggttgattaatgaasaaacattatgagaacattctccgaaccattgtttagatagcaggactagtctactttgacacataattacacatttagaaaaccccgctgtaactgtacacatgggattttcttgaatagaaaatttgactaaatcaaataattgataaagagaaaaaagaagcagcaagtgaacctctgtctttttgaagttggactttctctttctccaaagccaggaactctacttgtaacatgcctacctcattctttttactattattatactt

SEQ ID NO: 376320 - DNA, 449 bp, Homo sapiens
taaatgtaattcatctctaaatgactatagtaaaaagaatctagaatctaaagcttatttctttagcaatttctttatgttgatctggttcagaaggtcacatggtatatggctgaattagtttcccagctcatatgccacttggaagactgagagtgagacttaggttgattaatgaacaaacattatgagaacattctccgaaccattgtttagatagcaggactartctactttgacacataattacacatttagaaaaccccgctgtaactgtacacatgggattttcttgaatagaaaatttgactaaatcaaataattgataaagagaaaaaagaagcagcaagtgaacctctgtctttttgaagttggactttctctttctccaaagccaggaactctacttgtaacatgcctacctcattctttttactattattatactt

SEQ ID NO: 376321 - DNA, 562 bp, Homo sapiens
ttaccatgtaggagctcttcctcagggcaagcagtaattttggagttttcagaacttttaccaatattcagcttgaacttgtttgtaatgaattttaaagaaagtcatgaatatatagatwgattccctttatcacagttcttacccagttctggttcttgagacttttttggggggggtcaggtgcaaaatggaaaacaaatttgcttgttttgtttctcagatgtcttttctgtcagagtgcatgttttaaaattagctttaatcaagtataaacaaagaaatattagaaaataattaaaatttaactgtgaaacttaatctatgtgttgctactcttaaattatgggattgtatctaaaaagtgaaaaataatttgccttggcttaacataggacagaaacatgaaccagcaagctgaactctcagtgtctgtttggactaaacttaatgcatttgtgtaaaatctaccagaaatgaattcaaagatgataggtagtattataaaagcttcctctcttacaaagactttacctcagcataccagaaagagtgagcccct

SEQ ID NO: 376322 - DNA, 562 bp, Homo sapiens
ttaccatgtaggagctcttcctcagggcaagcagtaattttggagttttcagaacttttaccaatattcagcttgaacttgtttgtaatgaattttaaagaaagtcatgaatatatagatagattccctttatcacwgttcttacccagttctggttcttgagacttttttggggggggtcaggtgcaaaatggaaaacaaatttgcttgttttgtttctcagatgtcttttctgtcagagtgcatgttttaaaattagctttaatcaagtataaacaaagaaatattagaaaataattaaaatttaactgtgaaacttaatctatgtgttgctactcttaaattatgggattgtatctaaaaagtgaaaaataatttgccttggcttaacataggacagaaacatgaaccagcaagctgaactctcagtgtctgtttggactaaacttaatgcatttgtgtaaaatctaccagaaatgaattcaaagatgataggtagtattataaaagcttcctctcttacaaagactttacctcagcataccagaaagagtgagcccct

SEQ ID NO: 376323 - DNA, 562 bp, Homo sapiens
ttaccatgtaggagctcttcctcagggcaagcagtaattttggagttttcagaacttttaccaatattcagcttgaacttgtttgtaatgaattttaaagaaagtcatgaatatatagatagattccctttatcacagttcttacccagttctggttcttgagacttttttggggggggtcaggtgcaaaatggaaaacaaatttgcttgttttgtttctcagatgtcttttctgtcagagtgcatgttktaaaattagctttaatcaagtataaacaaagaaatattagaaaataattaaaatttaactgtgaaacttaatctatgtgttgctactcttaaattatgggattgtatctaaaaagtgaaaaataatttgccttggcttaacataggacagaaacatgaaccagcaagctgaactctcagtgtctgtttggactaaacttaatgcatttgtgtaaaatctaccagaaatgaattcaaagatgataggtagtattataaaagcttcctctcttacaaagactttacctcagcataccagaaagagtgagcccct

SEQ ID NO: 376324 - DNA, 562 bp, Homo sapiens
ttaccatgtaggagctcttcctcagggcaagcagtaattttggagttttcagaacttttaccaatattcagcttgaacttgtttgtaatgaattttaaagaaagtcatgaatatatagatagattccctttatcacagttcttacccagttctggttcttgagacttttttggggggggtcaggtgcaaaatggaaaacaaatttgcttgttttgtttctcagatgtcttttctgtcagagtgcatgttttaaaattagctttaatcaagtataaacaaagaaatattagaaaataattaaaatttaactgtgaaacttaatctatgtgttgctactcttaaattatgggattgtawctaaaaagtgaaaaataatttgccttggcttaacataggacagaaacatgaaccagcaagctgaactctcagtgtctgtttggactaaacttaatgcatttgtgtaaaatctaccagaaatgaattcaaagatgataggtagtattataaaagcttcctctcttacaaagactttacctcagcataccagaaagagtgagcccct

SEQ ID NO: 376325 - DNA, 584 bp, Homo sapiens
aaatttgcttgttttgtttctcagatgtcttttctgtcagagtgcatgttttaaaattagctttaatcaagtataaacaaagaaatattagaaaataattaaaatttaactgtgaaacttaatctatgtgttgctactcttaaattatgggattgtatctaaaaagtgaaaaataatttrccttggcttaacataggacagaaacatgaaccagcaagctgaactctcagtgtctgtttggactaaacttaatgcatttgtgtaaaatctaccagaaatgaattcaaagatgataggtagtattataaaagcttcctctcttacaaagactttacctcagcataccagaaagagtgagcccctacagtgcatgtttatttctgaagatgaactagagcactaggcaaacactaaattattaagagctaaactgaacaccaataagaaagagaagcaaaattttaaattctaattcaaatgatatactatgatagtgttatgtatctagatagaatttctgcttatatccacttctaatatattttaagttccggtagtgatagggtttggattttttaaatttt

SEQ ID NO: 376326 - DNA, 584 bp, Homo sapiens
aaatttgcttgttttgtttctcagatgtcttttctgtcagagtgcatgttttaaaattagctttaatcaagtataaacaaagaaatattagaaaataattaaaatttaactgtgaaacttaatctatgtgttgctactcttaaattatgggattgtatctaaaaagtgaaaaataatttgccttggcttaacataggacagaaacatgaaccagcaagctgaactctcagtgtctgtttggactaaacttaatgcatttgwgtaaaatctaccagaaatgaattcaaagatgataggtagtattataaaagcttcctctcttacaaagactttacctcagcataccagaaagagtgagcccctacagtgcatgtttatttctgaagatgaactagagcactaggcaaacactaaattattaagagctaaactgaacaccaataagaaagagaagcaaaattttaaattctaattcaaatgatatactatgatagtgttatgtatctagatagaatttctgcttatatccacttctaatatattttaagttccggtagtgatagggtttggattttttaaatttt

SEQ ID NO: 376327 - DNA, 584 bp, Homo sapiens
aaatttgcttgttttgtttctcagatgtcttttctgtcagagtgcatgttttaaaattagctttaatcaagtataaacaaagaaatattagaaaataattaaaatttaactgtgaaacttaatctatgtgttgctactcttaaattatgggattgtatctaaaaagtgaaaaataatttgccttggcttaacataggacagaaacatgaaccagcaagctgaactctcagtgtctgtttggactaaacttaatgcatttgtgtaaaatctaccagaaatgaattcaaagatgataggtagtattataaaagcttcctctcttacaaagactttacctcagcataccagaaagagtgagcccctacagtgcatgtttatttctgaagatkaactagagcactaggcaaacactaaattattaagagctaaactgaacaccaataagaaagagaagcaaaattttaaattctaattcaaatgatatactatgatagtgttatgtatctagatagaatttctgcttatatccacttctaatatattttaagttccggtagtgatagggtttggattttttaaatttt

SEQ ID NO: 376328 - DNA, 584 bp, Homo sapiens
aaatttgcttgttttgtttctcagatgtcttttctgtcagagtgcatgttttaaaattagctttaatcaagtataaacaaagaaatattagaaaataattaaaatttaactgtgaaacttaatctatgtgttgctactcttaaattatgggattgtatctaaaaagtgaaaaataatttgccttggcttaacataggacagaaacatgaaccagcaagctgaactctcagtgtctgtttggactaaacttaatgcatttgtgtaaaatctaccagaaatgaattcaaagatgataggtagtattataaaagcttcctctcttacaaagactttacctcagcataccagaaagagtgagcccctacagtgcatgtttatttctgaagatgaactagagcactaggcaaacactaaattattaagagctaaactgaacaccaataagaaagagaagcaaaattttaaattctaattcaaatgatatactatgatagtgttatgtatctagatagaatttctgcttatatccrcttctaatatattttaagttccggtagtgatagggtttggattttttaaatttt

SEQ ID NO: 376329 - DNA, 556 bp, Homo sapiens
ctgtggatttcatggattgcaagaggaagaaagcatggtggaactcaggtttctctgattccaaattcacatcctttcatgtctccatgaaaaatagaaaagataaattgggctctattctaacaagagaaacacaattttccrtcagttaaatgaataattcttttttattttattttattttatttttattattatactttaagttttagggtacatgtgcacattgtgcagattagttacatatgtatacatgtgccatgctggtgtgctgcacccagatacctaaatgaataattcttaaacctcaaaaataaaacgtagcaaaacctcaattcaagagtagacataaaggttgtgacatgggtagcagggacatatgtctagtgacagatttcctatgcatatctgaccaaaaatccccctcatgattttcaaatcagatgcttaactacatttaatgagtttcccgaatcattaatatcaggctctgaaaacaggatcattaaaaatgattaagactttcaacaacaaatatcttatctaaatagtaagg

SEQ ID NO: 376330 - DNA, 209 bp, Homo sapiens
tggaaatgcatccccgggggtaaracaatagagttgtgaattagtggaggcgaatcaccaatactggccaactaaagccctctaacataattcaaaggatggagaaattctgtagctgaagataaaatgtctgaaatatattatggtatagtcaaatgagtgtcatttctaatatacacacttatttttcaagagttgataatatgaag

SEQ ID NO: 376331 - DNA, 470 bp, Homo sapiens
tctgataaagccaaaactatttgaatggcagtcaacaaaacagaagaaaaaaatgacactcataacaaggcagaactatggaaatgcatccccgggggtaagacaatagagttgtgaattagtggaggcgaatcaccaatactggycaactaaagccctctaacataattcaaaggatggagaaattctgtagctgaagataaaatgtctgaaatatattatggtatagtcaaatgagtgtcatttctaatatacacacttatttttcaagagttgataatatgaagtaaaaatttagtatgcaaagttcaaattttccatttgttgagtaattcatttttattaaatatttcccaacaattaaactaaagtggtaccagaacagagtagacattctgagctttcactttacaaaagctacacataaatctacataatttttaagggtataaacaaagtcagagtctgtg

SEQ ID NO: 376332 - DNA, 561 bp, Homo sapiens
gaagttaaaaaaatgagggggtgacaataaagtgaaaatctctgataaagccaaaactatttgaatggcagtcaacaaaacagaagaaaaaaatgacactcataacaaggcagaactatggaaatgcatccccgggggtaagacaatagagttgtgaattagtggaggcgaatcaccaatactggccaactaaagccckctaacataattcaaaggatggagaaattctgtagctgaagataaaatgtctgaaatatattatggtatagtcaaatgagtgtcatttctaatatacacacttatttttcaagagttgataatatgaagtaaaaatttagtatgcaaagttcaaattttccatttgttgagtaattcatttttattaaatatttcccaacaattaaactaaagtggtaccagaacagagtagacattctgagctttcactttacaaaagctacacataaatctacataatttttaagggtataaacaaagtcagagtctgtgtgatatttcattaaacaattggagaaaatttttctttaagaatagattata

SEQ ID NO: 376333 - DNA, 209 bp, Homo sapiens
tggaaatgcatccccgggggtaagacaatagagttgtgaattagtggaggcgaatcaccaatactggccaactaaagccctctaacataattcaaaggatggagaaattctgtagctgaagataaaawgtctgaaatatattatggtatagtcaaatgagtgtcatttctaatatacacacttatttttcaagagttgataatatgaag

SEQ ID NO: 376334 - DNA, 561 bp, Homo sapiens
gaagttaaaaaaatgagggggtgacaataaagtgaaaatctctgataaagccaaaactatttgaatggcagtcaacaaaacagaagaaaaaaatgacactcataacaaggcagaactatggaaatgcatccccgggggtaagacaatagagttgtgaattagtggaggcgaatcaccaatactggccaactaaagccctctaacataattcaaaggatggagaaattctgtagctgaagataaaatrtctgaaatatattatggtatagtcaaatgagtgtcatttctaatatacacacttatttttcaagagttgataatatgaagtaaaaatttagtatgcaaagttcaaattttccatttgttgagtaattcatttttattaaatatttcccaacaattaaactaaagtggtaccagaacagagtagacattctgagctttcactttacaaaagctacacataaatctacataatttttaagggtataaacaaagtcagagtctgtgtgatatttcattaaacaattggagaaaatttttctttaagaatagattata

SEQ ID NO: 376335 - DNA, 561 bp, Homo sapiens
gaagttaaaaaaatgagggggtgacaataaagtgaaaatctctgataaagccaaaactatttgaatggcagtcaacaaaacagaagaaaaaaatgacactcataacaaggcagaactatggaaatgcatccccgggggtaagacaatagagttgtgaattagtggaggcgaatcaccaatactggccaactaaagccctctaacataattcaaaggatggagaaattctgtagctgaagataaaatgtctgaaatatattatggtayagtcaaatgagtgtcatttctaatatacacacttatttttcaagagttgataatatgaagtaaaaatttagtatgcaaagttcaaattttccatttgttgagtaattcatttttattaaatatttcccaacaattaaactaaagtggtaccagaacagagtagacattctgagctttcactttacaaaagctacacataaatctacataatttttaagggtataaacaaagtcagagtctgtgtgatatttcattaaacaattggagaaaatttttctttaagaatagattata

SEQ ID NO: 376336 - DNA, 619 bp, Homo sapiens
atttcatggattgcaagaggaagaaagcatggtggaactcaggtttctctgattccaaattcacatcctttcatgtctccatgaaaaatagaaaagataaattgggctctattctaacaagagaaacacaattttccgtcagttaaatgaataattcttttttattttattttattttatttttattattatactttaagttttagggtacatgtgcacattgtgcagattagttacatatgtatacatgtgccatgctggtgygctgcacccagatacctaaatgaataattcttaaacctcaaaaataaaacgtagcaaaacctcaattcaagagtagacataaaggttgtgacatgggtagcagggacatatgtctagtgacagatttcctatgcatatctgaccaaaaatccccctcatgattttcaaatcagatgcttaactacatttaatgagtttcccgaatcattaatatcaggctctgaaaacaggatcattaaaaatgattaagactttcaacaacaaatatcttatctaaatagtaaggaaattatattagatggctccattccctgggcagtctagttaacaattcgacttgttcaaagctataaaa

SEQ ID NO: 376337 - DNA, 470 bp, Homo sapiens
tctgataaagccaaaactatttgaatggcagtcaacaaaacagaagaaaaaaatgacactcataacaaggcagaactatggaaatgcatccccgggggtaagacaatagagttgtgaattagtggaggcgaatcaccaatactggccaactaaagccctctaacataattcaaaggatggagaaattctgtagctgaagataaaatgtctgaaatatattatggtatagtcaaatgagtgtcatttctaatatacacayttatttttcaagagttgataatatgaagtaaaaatttagtatgcaaagttcaaattttccatttgttgagtaattcatttttattaaatatttcccaacaattaaactaaagtggtaccagaacagagtagacattctgagctttcactttacaaaagctacacataaatctacataatttttaagggtataaacaaagtcagagtctgtg

SEQ ID NO: 376338 - DNA, 470 bp, Homo sapiens
tctgataaagccaaaactatttgaatggcagtcaacaaaacagaagaaaaaaatgacactcataacaaggcagaactatggaaatgcatccccgggggtaagacaatagagttgtgaattagtggaggcgaatcaccaatactggccaactaaagccctctaacataattcaaaggatggagaaattctgtagctgaagataaaatgtctgaaatatattatggtatagtcaaatgagtgtcatttctaatatacacacttatttttcaagagttgataatatgaagtaaaaatttagtatgcaaagttcaaattttccatttgttgagtaattcatttttattaaatatttcccaacaattraactaaagtggtaccagaacagagtagacattctgagctttcactttacaaaagctacacataaatctacataatttttaagggtataaacaaagtcagagtctgtg

SEQ ID NO: 376339 - DNA, 619 bp, Homo sapiens
atttcatggattgcaagaggaagaaagcatggtggaactcaggtttctctgattccaaattcacatcctttcatgtctccatgaaaaatagaaaagataaattgggctctattctaacaagagaaacacaattttccgtcagttaaatgaataattcttttttattttattttattttatttttattattatactttaagttttagggtacatgtgcacattgtgcagattagttacatatgtatacatgtgccatgctggtgtgctgcacccagatacctaaatgaataattcttaaacctcaaaaataaaacgtagcaaaacctcaattcaagagtagacataaaggttgtgacatgggtrgcagggacatatgtctagtgacagatttcctatgcatatctgaccaaaaatccccctcatgattttcaaatcagatgcttaactacatttaatgagtttcccgaatcattaatatcaggctctgaaaacaggatcattaaaaatgattaagactttcaacaacaaatatcttatctaaatagtaaggaaattatattagatggctccattccctgggcagtctagttaacaattcgacttgttcaaagctataaaa

SEQ ID NO: 376340 - DNA, 580 bp, Homo sapiens
gtgggtgtagacgggaaagtgagtttaaatggtttcaggagtctgtggaagttgtctttggatgattcagtgttctcagggaagcacaaccaaaaagacattgaggatttctgggcaagtgttagggattagagacaggataagatacaaaactaggtaaattagagaatgaatagattggaacatatgtagtatgattgattgataggcagcactgagattctcattttcaagtgggatatttttcaatttgatccatatagctagttgctmaaatatatgtggggatttggtggaaatttggatataaccagggttattttcctggttatattcagcaaagtgaaagagaaaccaggaagttgaagtttcctgggaatggttggccatggaatttaggcaggagaacaggaaatagagtacatcaagtaggtaagggtcattgtgaatatgataaaataatagtttggaggtctcagagagattgaaaaattttatgtcagcatatgaaagggaatgattaaaggaggagctcagagaatgggatgaataaaattgtgactacagagaagttcctatt

SEQ ID NO: 376341 - DNA, 580 bp, Homo sapiens
gtgggtgtagacgggaaagtgagtttaaatggtttcaggagtctgtggaagttgtctttggatgattcagtgttctcagggaagcacaaccaaaaagacattgaggatttctgggcaagtgttagggattagagacaggataagatacaaaactaggtaaattagagaatgaatagattggaacatatgtagtatgattgattgataggcagcactgagattctcattttcaagtgggatatttttcaatttgatccatatagctagttgctcaaatatatgtggggatttggtggaaatttggatmtaaccagggttattttcctggttatattcagcaaagtgaaagagaaaccaggaagttgaagtttcctgggaatggttggccatggaatttaggcaggagaacaggaaatagagtacatcaagtaggtaagggtcattgtgaatatgataaaataatagtttggaggtctcagagagattgaaaaattttatgtcagcatatgaaagggaatgattaaaggaggagctcagagaatgggatgaataaaattgtgactacagagaagttcctatt

SEQ ID NO: 376342 - DNA, 421 bp, Homo sapiens
gtatgattgattgataggcagcactgagattctcattttcaagtgggatatttttcaatttgatccatatagctagttgctcaaatatatgtggggatttggtggaaatttggatataaccagggttattttcctggttatattcagcaaagtgaaagagaaacmaggaagttgaagtttcctgggaatggttggccatggaatttaggcaggagaacaggaaatagagtacatcaagtaggtaagggtcattgtgaatatgataaaataatagtttggaggtctcagagagattgaaaaattttatgtcagcatatgaaagggaatgattaaaggaggagctcagagaatgggatgaataaaattgtgactacagagaagttcctattataagtaatgacgatgcttcactcagtccgtc

SEQ ID NO: 376343 - DNA, 421 bp, Homo sapiens
gtatgattgattgataggcagcactgagattctcattttcaagtgggatatttttcaatttgatccatatagctagttgctcaaatatatgtggggatttggtggaaatttggatataaccagggttattttcctggttatattcagcaaagtgaaagagaaaccaggaagttgaagtttcctgggaatggttggccatggaatttaggcaggagaacaggaaatagagtacatcaagtaggtaagggtcattgtgaatatgataaaataatagtttggaggtctcagagagattgaaaaattttatgtcagcrtatgaaagggaatgattaaaggaggagctcagagaatgggatgaataaaattgtgactacagagaagttcctattataagtaatgacgatgcttcactcagtccgtc

SEQ ID NO: 376344 - DNA, 421 bp, Homo sapiens
gtatgattgattgataggcagcactgagattctcattttcaagtgggatatttttcaatttgatccatatagctagttgctcaaatatatgtggggatttggtggaaatttggatataaccagggttattttcctggttatattcagcaaagtgaaagagaaaccaggaagttgaagtttcctgggaatggttggccatggaatttaggcaggagaacaggaaatagagtacatcaagtaggtaagggtcattgtgaatatgataaaataatagtttggaggtctcagagagattgaaaaattttatgtcagcatatgaaagggaatgattaaaggaggagctcagagaatgggatgaatraaattgtgactacagagaagttcctattataagtaatgacgatgcttcactcagtccgtc

SEQ ID NO: 376345 - DNA, 232 bp, Homo sapiens
agaacaaaactggaagaatcacatcacctgacgttaaattatactacagagcaattgtaagctaaacagcatgrtactggcataaaacagacacatagaccaatggaacagaatagagaacccagaaataaatccttacatttacaactaactcattttcaatgaaggtgccaagaatatacatgggggagaggacagtctcttcaccaaattgtgctgggaaaactagata

SEQ ID NO: 376346 - DNA, 232 bp, Homo sapiens
agaacaaaactggaagaatcacatcacctgacgttaaattatactacagagcaattgtaagctaaacagcatgatactggcataaaacagacacatagaccaatggaacagaatasagaacccagaaataaatccttacatttacaactaactcattttcaatgaaggtgccaagaatatacatgggggagaggacagtctcttcaccaaattgtgctgggaaaactagata

SEQ ID NO: 376347 - DNA, 440 bp, Homo sapiens
aaaaatcctaaaatttatatgaaatcataaaagacccagaatacccaaagccatccatagcaaaaagaacaaaactggaagaatcacatcacctgacgttaaattatactacagagcaattgtaagctaaacagcatgatactggcataaaacagacacatagaccaatggaacagaatagagaacccagaaataaatccttacatttacaactaactcattttcaatgaaggtgccaagaatatacatgggggagaggacagtctcttcaccaaattgtgctgggaaaactagatattcattggcagaatttttttttttttgagatggagtctarctctgttgctctggctgcagtgcagtggcacgatctgggctcactgcaagttccacctcccgggttcacaccattctcctcctcagcctcccaagtagctggg

SEQ ID NO: 376348 - DNA, 498 bp, Homo sapiens
tgggtagcagggacatatgtctagtgacagatttcctatgcatatctgaccaaaaatccccctcatgattttcaaatcagatgcttaactacatttaatgagtttcccgaatcattaatatcaggctctgaaaacaggatcattaaaaatgattaagactttcaacaacaaatatcttatctaaatagtaaggaaattatattagatggctccattccctgggcagtctagttaacaattcgacttgttcaaagctataaaatatggcaacttaaaaaattatgaaagtttttctaactttgtgcttaaggtagttggccattcttcctcttgggaataagaagggtagattttctgtcgaagcattttkctattgcttttcaatttccttttatggaaaatagataaaatagcaattttttaattataaatttaaagtcaaaatggagataattaagtatctccattaattaagtaaagattaattttttttaaaat

SEQ ID NO: 376349 - DNA, 440 bp, Homo sapiens
aaaaatcctaaaatttatatgaaatcataaaagacccagaatacccaaagccatccatagcaaaaagaacaaaactggaagaatcacatcacctgacgttaaattatactacagagcaattgtaagctaaacagcatgatactggcataaaacagacacatagaccaatggaacagaatagagaacccagaaataaatccttacatttacaactaactcattttcaatgaaggtgccaagaatatacatgggggagaggacagtctcttcaccaaattgtgctgggaaaactagatattcattggcagaatttttttttttttgagatggagtctaactctgttgctctggctgcagtgcagtggcacgatctgggctcactgcaagytccacctcccgggttcacaccattctcctcctcagcctcccaagtagctggg

SEQ ID NO: 376350 - DNA, 561 bp, Homo sapiens
gacaatccacagaatggaagaaaatatttgcaaactatatatctgacaagggattaataaccagaatatataaggagttcaaacaactctataagaaaaaaactaataatccaattatttaaatgggcaaaaaatctgaacakacatttctcaaaagaaggcatgcaggtcaggtgcagtggctcacacctgtaattccagcattttggggagccaagacagttggaccacttgagcccaggagttcaagaccaacctgaaaaacatagcaaataattttaaaacctacctgggcatggtgatgcatgcctgtggtcccagctactcaggaggctgaggtgggaggattgcttgaaccctggtagtcataactacagtaagccatcattataccactgcactccagcctgggtgacagagtgagacactgtctcaaaaaatgagcaaaaacaaaaaagaagatatataaatgtcaaataggtatatgaaaagatgctcaatatcactgatcatcagagaaattcaaatcaaaactacaataagatatcatcttacccccat

SEQ ID NO: 376351 - DNA, 561 bp, Homo sapiens
gacaatccacagaatggaagaaaatatttgcaaactatatatctgacaagggattaataaccagaatatataaggagttcaaacaactctataagaaaaaaactaataatccaattatttaaatgggcaaaaaatctgaacagacatttctcaaaagaaggcatgcaggtcaggygcagtggctcacacctgtaattccagcattttggggagccaagacagttggaccacttgagcccaggagttcaagaccaacctgaaaaacatagcaaataattttaaaacctacctgggcatggtgatgcatgcctgtggtcccagctactcaggaggctgaggtgggaggattgcttgaaccctggtagtcataactacagtaagccatcattataccactgcactccagcctgggtgacagagtgagacactgtctcaaaaaatgagcaaaaacaaaaaagaagatatataaatgtcaaataggtatatgaaaagatgctcaatatcactgatcatcagagaaattcaaatcaaaactacaataagatatcatcttacccccat

SEQ ID NO: 376352 - DNA, 590 bp, Homo sapiens
tgacagatttcctatgcatatctgaccaaaaatccccctcatgattttcaaatcagatgcttaactacatttaatgagtttcccgaatcattaatatcaggctctgaaaacaggatcattaaaaatgattaagactttcaacaacaaatatcttatctaaatagtaaggaaattatattagatggctccattccctgggcagtctagttaacaattcgacttgttcaaagctataaaatatggcaacttaaaaaattatgaaagtttttctaactttgtgcttaaggtagttggccattcttcctcttgggaataagaagggtagattttctgtcgaagcatttttctattgcttttcaatttccttttatggaaaatagataaaatagcaattttttaattataaattyaaagtcaaaatggagataattaagtatctccattaattaagtaaagattaattttttttaaaatagcatttactatattctaatcaatcaattgattgactatttttatccctggctcaatgtaactctctttgacatactcttgtcttaattctaatttaagtcaacaatgtgtaatca

SEQ ID NO: 376353 - DNA, 561 bp, Homo sapiens
gacaatccacagaatggaagaaaatatttgcaaactatatatctgacaagggattaataaccagaatatataaggagttcaaacaactctataagaaaaaaactaataatccaattatttaaatgggcaaaaaatctgaacagacatttctcaaaagaaggcatgcaggtcaggtgcagtggctcacacctgtaattccagcattttggggagccaagacagttggaccacttgagcccaggagttcaagaccaacctgaaaaacatagcaaataattttaaaacctacctgggcatggtgatgcatgcctgtggtcccagctactcaggaggctgaggtgggaggattgcttgaaccctggtagtcataactacagtaagccatcattataccactgcactccagcctgggtgacagagtgagacactgtctcaaaaaatgarcaaaaacaaaaaagaagatatataaatgtcaaataggtatatgaaaagatgctcaatatcactgatcatcagagaaattcaaatcaaaactacaataagatatcatcttacccccat

SEQ ID NO: 376354 - DNA, 438 bp, Homo sapiens
acaatatggaggtccctcaaaaaattaaaaatagaactatcatatgatacagcaatcccactgctgggtatatacccaagggagggaaaattagtatatgaamgagatatctgcattcccatatttatttcagcactattcataatagccaagatttggaagcaacctaagtgtgcatcaacagatgaagggataaagaaaatgtagtacatgtacacaatggagtactcttcagccatgaaaaagaataagattctgtcacttgcaacaacgtggatggaactagggaacattatgttaagtacaatgagccaggcacagaaagactttgcatgttctcacacatttgtgggagctaaaaattaaaacaattgaactcatcaagatggagagtagactgagagtttccagaggctgggaagagtagcggtgttacgg

SEQ ID NO: 376355 - DNA, 640 bp, Homo sapiens
tacattcactatggagaacaatatggaggtccctcaaaaaattaaaaatagaactatcatatgatacagcaatcccactgctgggtatatacccaagggagggaaaattagtatatgaacgagatatctgcattcccatatttatttcagyactattcataatagccaagatttggaagcaacctaagtgtgcatcaacagatgaagggataaagaaaatgtagtacatgtacacaatggagtactcttcagccatgaaaaagaataagattctgtcacttgcaacaacgtggatggaactagggaacattatgttaagtacaatgagccaggcacagaaagactttgcatgttctcacacatttgtgggagctaaaaattaaaacaattgaactcatcaagatggagagtagactgagagtttccagaggctgggaagagtagcggtgttacgggatctttggagtgtcacttttctggacagaaacctctatggctggtggcacctttacctgagttttgcttgggccccgcccactcagcctggcaggctgtgctcagctcatgctaccaggttggatcccatgtttgccaagggagactgcgtggagtggcaaggggtgtgtgagcaagcatgggg

SEQ ID NO: 376356 - DNA, 438 bp, Homo sapiens
acaatatggaggtccctcaaaaaattaaaaatagaactatcatatgatacagcaatcccactgctgggtatatacccaagggagggaaaattagtatatgaacgagatatctgcattcccatatttatttcagcactattcataatagccaagatttggaagcaamctaagtgtgcatcaacagatgaagggataaagaaaatgtagtacatgtacacaatggagtactcttcagccatgaaaaagaataagattctgtcacttgcaacaacgtggatggaactagggaacattatgttaagtacaatgagccaggcacagaaagactttgcatgttctcacacatttgtgggagctaaaaattaaaacaattgaactcatcaagatggagagtagactgagagtttccagaggctgggaagagtagcggtgttacgg

SEQ ID NO: 376357 - DNA, 640 bp, Homo sapiens
tacattcactatggagaacaatatggaggtccctcaaaaaattaaaaatagaactatcatatgatacagcaatcccactgctgggtatatacccaagggagggaaaattagtatatgaacgagatatctgcattcccatatttatttcagcactattcataatagccaagatttggaagcaacctaagtgtgcatcaacagatgaagggataaagaaaatgtagtacatgtacacaatggagtactcttcagccatgaaaaasaataagattctgtcacttgcaacaacgtggatggaactagggaacattatgttaagtacaatgagccaggcacagaaagactttgcatgttctcacacatttgtgggagctaaaaattaaaacaattgaactcatcaagatggagagtagactgagagtttccagaggctgggaagagtagcggtgttacgggatctttggagtgtcacttttctggacagaaacctctatggctggtggcacctttacctgagttttgcttgggccccgcccactcagcctggcaggctgtgctcagctcatgctaccaggttggatcccatgtttgccaagggagactgcgtggagtggcaaggggtgtgtgagcaagcatgggg

SEQ ID NO: 376358 - DNA, 470 bp, Homo sapiens
ttggaagcaacctaagtgtgcatcaacagatgaagggataaagaaaatgtagtacatgtacacaatggagtactcttcagccatgaaaaagaataagattctgtcayttgcaacaacgtggatggaactagggaacattatgttaagtacaatgagccaggcacagaaagactttgcatgttctcacacatttgtgggagctaaaaattaaaacaattgaactcatcaagatggagagtagactgagagtttccagaggctgggaagagtagcggtgttacgggatctttggagtgtcacttttctggacagaaacctctatggctggtggcacctttacctgagttttgcttgggccccgcccactcagcctggcaggctgtgctcagctcatgctaccaggttggatcccatgtttgccaagggagactgcgtggagtggcaaggggtgtgtgagcaagcatggggtc

SEQ ID NO: 376359 - DNA, 590 bp, Homo sapiens
tgacagatttcctatgcatatctgaccaaaaatccccctcatgattttcaaatcagatgcttaactacatttaatgagtttcccgaatcattaatatcaggctctgaaaacaggatcattaaaaatgattaagactttcaacaacaaatatcttatctaaatagtaaggaaattatattagatggctccattccctgggcagtctagttaacaattcgacttgttcaaagctataaaatatggcaacttaaaaaattatgaaagtttttctaactttgtgcttaaggtagttggccattcttcctcttgggaataagaagggtagattttctgtcgaagcatttttctattgcttttcaatttccttttatggaaaatagataaaatagcaattttttaattataaatttaaagtcaaaatggagataattaagtatctccattaattaagtaaagattaattttttttaaaatagcatttactayattctaatcaatcaattgattgactatttttatccctggctcaatgtaactctctttgacatactcttgtcttaattctaatttaagtcaacaatgtgtaatca

SEQ ID NO: 376360 - DNA, 438 bp, Homo sapiens
acaatatggaggtccctcaaaaaattaaaaatagaactatcatatgatacagcaatcccactgctgggtatatacccaagggagggaaaattagtatatgaacgagatatctgcattcccatatttatttcagcactattcataatagccaagatttggaagcaacctaagtgtgcatcaacagatgaagggataaagaaaatgtagtacatgtacacaatggagtactcttcagccatgaaaaagaataagattctgtcacttgcaacaacgtrgatggaactagggaacattatgttaagtacaatgagccaggcacagaaagactttgcatgttctcacacatttgtgggagctaaaaattaaaacaattgaactcatcaagatggagagtagactgagagtttccagaggctgggaagagtagcggtgttacgg

SEQ ID NO: 376361 - DNA, 470 bp, Homo sapiens
ttggaagcaacctaagtgtgcatcaacagatgaagggataaagaaaatgtagtacatgtacacaatggagtactcttcagccatgaaaaagaataagattctgtcacttgcaacaacgtggatggaactagggracattatgttaagtacaatgagccaggcacagaaagactttgcatgttctcacacatttgtgggagctaaaaattaaaacaattgaactcatcaagatggagagtagactgagagtttccagaggctgggaagagtagcggtgttacgggatctttggagtgtcacttttctggacagaaacctctatggctggtggcacctttacctgagttttgcttgggccccgcccactcagcctggcaggctgtgctcagctcatgctaccaggttggatcccatgtttgccaagggagactgcgtggagtggcaaggggtgtgtgagcaagcatggggtc

SEQ ID NO: 376362 - DNA, 438 bp, Homo sapiens
acaatatggaggtccctcaaaaaattaaaaatagaactatcatatgatacagcaatcccactgctgggtatatacccaagggagggaaaattagtatatgaacgagatatctgcattcccatatttatttcagcactattcataatagccaagatttggaagcaacctaagtgtgcatcaacagatgaagggataaagaaaatgtagtacatgtacacaatggagtactcttcagccatgaaaaagaataagattctgtcacttgcaacaacgtggatggaactagggaacattatgttaagtacaatgagmcaggcacagaaagactttgcatgttctcacacatttgtgggagctaaaaattaaaacaattgaactcatcaagatggagagtagactgagagtttccagaggctgggaagagtagcggtgttacgg

SEQ ID NO: 376363 - DNA, 470 bp, Homo sapiens
ttggaagcaacctaagtgtgcatcaacagatgaagggataaagaaaatgtagtacatgtacacaatggagtactcttcagccatgaaaaagaataagattctgtcacttgcaacaacgtggatggaactagggaacattatgttaagtacaatgagccaggcacagaaagactttgcatgttctcacacwtttgtgggagctaaaaattaaaacaattgaactcatcaagatggagagtagactgagagtttccagaggctgggaagagtagcggtgttacgggatctttggagtgtcacttttctggacagaaacctctatggctggtggcacctttacctgagttttgcttgggccccgcccactcagcctggcaggctgtgctcagctcatgctaccaggttggatcccatgtttgccaagggagactgcgtggagtggcaaggggtgtgtgagcaagcatggggtc

SEQ ID NO: 376364 - DNA, 512 bp, Homo sapiens
taagtacaatgagccaggcacagaaagactttgcatgttctcacacatttgtgggagctaaaaattaaaacaattgaactcatcaagatggagagtagactgagagtttccagaggctgggaagagtagcggtgttacgggatctttggagtgtcacttttctggacagaaacctctatggctggtggcacctttacctgagttttgcttgggccccgcccactyagcctggcaggctgtgctcagctcatgctaccaggttggatcccatgtttgccaagggagactgcgtggagtggcaaggggtgtgtgagcaagcatggggtctggccactgtgcagtcagacttcctggctgctgcagtggggcaggtagctccaggtgccaacatgggtgccagctctccacaagtctgtggctggaccacgggcaccgcaagcagcttccgcagctggcacactgggaacacagtggcacccggaagcttggagataccaggaaccacagggccc

SEQ ID NO: 376365 - DNA, 426 bp, Homo sapiens
gtttccagaggctgggaagagtagcggtgttacgggatctttggagtgtcacttttctggacagaaacctctatggctggtggcacctttacctgagttttgcttgggccccgcccactcagcctggcaggctgtgctcagctcatgctaccaggttggatcccatgtttgccaagggagactgcgyggagtggcaaggggtgtgtgagcaagcatggggtctggccactgtgcagtcagacttcctggctgctgcagtggggcaggtagctccaggtgccaacatgggtgccagctctccacaagtctgtggctggaccacgggcaccgcaagcagcttccgcagctggcacactgggaacacagtggcacccggaagcttggagataccaggaaccacagggccccaaagagggaatcacagcc

SEQ ID NO: 376366 - DNA, 426 bp, Homo sapiens
gtttccagaggctgggaagagtagcggtgttacgggatctttggagtgtcacttttctggacagaaacctctatggctggtggcacctttacctgagttttgcttgggccccgcccactcagcctggcaggctgtgctcagctcatgctaccaggttggatcccatgtttgccaagggagactgcgtggagtggcaaggggtgtgtgagcaagcatggggtctggccactgtgcagtcagacttcctggctgctgcagtggggcaggtagctccaggtgccaacatgggtrccagctctccacaagtctgtggctggaccacgggcaccgcaagcagcttccgcagctggcacactgggaacacagtggcacccggaagcttggagataccaggaaccacagggccccaaagagggaatcacagcc

SEQ ID NO: 376367 - DNA, 512 bp, Homo sapiens
taagtacaatgagccaggcacagaaagactttgcatgttctcacacatttgtgggagctaaaaattaaaacaattgaactcatcaagatggagagtagactgagagtttccagaggctgggaagagtagcggtgttacgggatctttggagtgtcacttttctggacagaaacctctatggctggtggcacctttacctgagttttgcttgggccccgcccactcagcctggcaggctgtgctcagctcatgctaccaggttggatcccatgtttgccaagggagactgcgtggagtggcaaggggtgtgtgagcaagcatggggtctggccactgtgcagtcagacttcctggctgctgcagtggggcaggtagctccaggtgccaacatgggtgccagctctccacaagtctgtggctggaccaygggcaccgcaagcagcttccgcagctggcacactgggaacacagtggcacccggaagcttggagataccaggaaccacagggccc

SEQ ID NO: 376368 - DNA, 512 bp, Homo sapiens
taagtacaatgagccaggcacagaaagactttgcatgttctcacacatttgtgggagctaaaaattaaaacaattgaactcatcaagatggagagtagactgagagtttccagaggctgggaagagtagcggtgttacgggatctttggagtgtcacttttctggacagaaacctctatggctggtggcacctttacctgagttttgcttgggccccgcccactcagcctggcaggctgtgctcagctcatgctaccaggttggatcccatgtttgccaagggagactgcgtggagtggcaaggggtgtgtgagcaagcatggggtctggccactgtgcagtcagacttcctggctgctgcagtggggcaggtagctccaggtgccaacatgggtgccagctctccacaagtctgtggctggaccacgggcaccgcaagcagcttccrcagctggcacactgggaacacagtggcacccggaagcttggagataccaggaaccacagggccc

SEQ ID NO: 376369 - DNA, 426 bp, Homo sapiens
gtttccagaggctgggaagagtagcggtgttacgggatctttggagtgtcacttttctggacagaaacctctatggctggtggcacctttacctgagttttgcttgggccccgcccactcagcctggcaggctgtgctcagctcatgctaccaggttggatcccatgtttgccaagggagactgcgtggagtggcaaggggtgtgtgagcaagcatggggtctggccactgtgcagtcagacttcctggctgctgcagtggggcaggtagctccaggtgccaacatgggtgccagctctccacaagtctgtggctggaccacgggcaccgcaagcagcttccgcagctggcacactgggaacacagtggcacccrgaagcttggagataccaggaaccacagggccccaaagagggaatcacagcc

SEQ ID NO: 376370 - DNA, 288 bp, Homo sapiens
gacttctgccaaacattggccaaaattcacctccttggtttgcaggtatggtttgtctaatcctgkaaagtaatttcgatgaactacttcagtgttcagaaacattggagttataaatagaaagaggaaaagtcacataaactaatagacaattacttctcatatgccagcggtcaacacattcataagcccatgggtggttgatccagggaccacacagggtccctgacagactctgaaagttaaggctttggtttactggtaacagagacaggttaaagtacatgt

SEQ ID NO: 376371 - DNA, 288 bp, Homo sapiens
gacttctgccaaacattggccaaaattcacctccttggtttgcaggtatggtttgtctaatcctgtaaagtaatttcgatgaactacttcagtgttcagaaacattggagttataaatagaaagaggaaragtcacataaactaatagacaattacttctcatatgccagcggtcaacacattcataagcccatgggtggttgatccagggaccacacagggtccctgacagactctgaaagttaaggctttggtttactggtaacagagacaggttaaagtacatgt

SEQ ID NO: 376372 - DNA, 328 bp, Homo sapiens
ttactggtaacagagacaggttaaagtacaygtcttcagtcttgagtagagtgtaatcagtctcattttttttttaatgagacaaacatcaggtaaagaccttgacaagaaggaagagaaatcccgagattctataatcataataatcgaattgtaattgctagtttaagtagtccttcaaaaatacatctcattcctgacaggataaaacaagttttaaaaaatatattatattcagattcactagggaacacttggagccaggaaataattcaggattcagcccaaattataggcaaataataaaaactctaaaacaatgatcagg

SEQ ID NO: 376373 - DNA, 328 bp, Homo sapiens
ttactggtaacagagacaggttaaagtacatgtcttcagtcttgagtagagtgtaatcagtctcattttttttttaatgagacaaacatcaggtaaagaccttgacaagaaggaagagaaatcccgagattctataatcataataatcgaattgtaattgcwagtttaagtagtccttcaaaaatacatctcattcctgacaggataaaacaagttttaaaaaatatattatattcagattcactagggaacacttggagccaggaaataattcaggattcagcccaaattataggcaaataataaaaactctaaaacaatgatcagg

SEQ ID NO: 376374 - DNA, 328 bp, Homo sapiens
ttactggtaacagagacaggttaaagtacatgtcttcagtcttgagtagagtgtaatcagtctcattttttttttaatgagacaaacatcaggtaaagaccttgacaagaaggaagagaaatcccgagattctataatcataataatcgaattgtaattgctagtttragtagtccttcaaaaatacatctcattcctgacaggataaaacaagttttaaaaaatatattatattcagattcactagggaacacttggagccaggaaataattcaggattcagcccaaattataggcaaataataaaaactctaaaacaatgatcagg

SEQ ID NO: 376375 - DNA, 328 bp, Homo sapiens
ttactggtaacagagacaggttaaagtacatgtcttcagtcttgagtagagtgtaatcagtctcattttttttttaatgagacaaacatcaggtaaagaccttgacaagaaggaagagaaatcccgagattctataatcataataatcgaattgtaattgctagtttaagtagtccttcaaaaatacatctcattcctgacaggataaaacaagttttwaaaaatatattatattcagattcactagggaacacttggagccaggaaataattcaggattcagcccaaattataggcaaataataaaaactctaaaacaatgatcagg

SEQ ID NO: 376376 - DNA, 402 bp, Homo sapiens
aactctctttgacatactcttgtcttaattctaatttaagtcaacaatgtgtaatcatagatgactccttgccattttgatctctcagttctatgaacacctttgwtctaacaataatgttttccaacagaattatttctactcaaacttctgagatcaaatttgtggattcagtctcaccccaatcaattcttcaactctcaggacaccaaatggtgtcctacaattcaattcaatcctgagtctatctatctggagatagcatagatcccaaaagttcagggctcaggcccacaagactgcccccacaccattagagaggagttgtgggcctcccatactcctgaccaactgtctataaattaggacctccatggattccttcctcaggttctataattt

SEQ ID NO: 376377 - DNA, 555 bp, Homo sapiens
tcattttttttttaatgagacaaacatcaggtaaagaccttgacaagaaggaagagaaatcccgagattctataatcataataatcgaattgtaattgctagtttaagtagtccttcaaaaatacatctcattcctgacaggataaaacaagttttaaaaaatatattatattcagattcactagggaacacttggagccaggaaataattcaggattcagcccaaattataggcaaataataaaaactctaaaacaatgatcagggttggaatctaatagcatatgtcatagttttcttttggaacataaattttctctctagtccatcattttatcaaagacaaatcatagtaggaccaattttgtatgcaaaataagttttagtcttatcatacygggcctgattatttccataaagggcagcaagaatatttattggccatataggcttcttaaaattggccttgttggaaatttttaataaggaatcttttaagagccttgaagctagccaagtcaaagatttgcatcagactgtgtctgtaataatttt

SEQ ID NO: 376378 - DNA, 555 bp, Homo sapiens
tcattttttttttaatgagacaaacatcaggtaaagaccttgacaagaaggaagagaaatcccgagattctataatcataataatcgaattgtaattgctagtttaagtagtccttcaaaaatacatctcattcctgacaggataaaacaagttttaaaaaatatattatattcagattcactagggaacacttggagccaggaaataattcaggattcagcccaaattataggcaaataataaaaactctaaaacaatgatcagggttggaatctaatagcatatgtcatagttttcttttggaacataaattttctctctagtccatcattttatcaaagacaaatcatagtaggaccaattttgtatgcaaaataagttttagtcttatcataccgggcctgattatttccataaagggcagcaagaatatttattggccatataggcttcttaaaattggcyttgttggaaatttttaataaggaatcttttaagagccttgaagctagccaagtcaaagatttgcatcagactgtgtctgtaataatttt

SEQ ID NO: 376379 - DNA, 402 bp, Homo sapiens
aactctctttgacatactcttgtcttaattctaatttaagtcaacaatgtgtaatcatagatgactccttgccattttgatctctcagttctatgaacacctttgatctaacaataatgttttccaacagaattatttctactcaaacttctgagatcaaatttgtggattcagtctcaccccaatcaattcttcaactctcaggacaccaaatggtgtcctacaattcaattcaatcctgagtctatctatctggagatagcatagatcccaaaagttcagggctcaggcccacaagactgcccccacaccattagagaggagttgtgggcctcccatactcctgaccaactgkctataaattaggacctccatggattccttcctcaggttctataattt

SEQ ID NO: 376380 - DNA, 319 bp, Homo sapiens
gacccttgtagacaagacaccaagccagtcattctaaggggctttgcattggtgctataaagtcaagctcaattccttaaagtggtctggttgtatctgccgttcgagttaaagccttgataaaacaaacagtgtctccaattgaatcctgttaccaaaaacagattcttattgaaattatgcaaataattatattgccataatttaggaatgctcacgaatggcttctgaattctggagaaatcagtkagagagacagataaatcgctcaaatttttgttcacaatgtagtttttctaacgtagggcaagttaaaaat

SEQ ID NO: 376381 - DNA, 540 bp, Homo sapiens
tgttcctattcagacatcttgccagctctcctgtaatacttttatgaatgggtgtagtcctatcttctcaaggtccccaaataacttgaggttcctgggcccgtcagaaaatgacattctttacttcttaccacaaggacagcaactttgtaaaggacccttgtagacaagacaccaagccagtcattctaaggggctttgcattggtgctataaagtcaagctcaattccttaaagtggtctggttgtatctgccgttcgagttaaagccttgataaaacaaacagtgtctccaattgaatcctgttaccaaaaacagattcttattgaaattatgcaaataattatattgccataatttaggaatgctcacgaatggcttctgaattctggagaaatcagtgagagagacagataaatcgctcaaatttttgttcacaatgtagtttttctaacgtagggmaagttaaaaatagctgaaaagaaaaaaaattcttgactttggaaaacaaaacataaagagaatcaacaatgtttcca

SEQ ID NO: 376382 - DNA, 508 bp, Homo sapiens
actaaatcttgttctgcttgatttcaaatagcaattctcattcagttttttgtgttttgcttgatttcaattggaaatcctcattcagctttttagagtcctggaagattttcctagtccaatggtatgatccccaaagttatctgaaaccatatttaagagaacttgtcagagtcctttccattaaaartaatttagatgatagctgattgtaaaggcttttttttttgagacatggtctggttctatcactcaggatggagtgcagtggcatgatcttggctcaccacaatttttccctcccaaactcaagccatcctcctacctcagcctccgaagtagttgggaccataggcatgcaccatcatgctggctaatttttgtatttttgtagagacagggttttaccatgttgcccaggatgctttcaaacttctgagttcaagcaattcacccacctcggccttgcaaagtgctgggatttttacacgtgtgagccaccgtgccc

SEQ ID NO: 376383 - DNA, 508 bp, Homo sapiens
actaaatcttgttctgcttgatttcaaatagcaattctcattcagttttttgtgttttgcttgatttcaattggaaatcctcattcagctttttagagtcctggaagattttcctagtccaatggtatgatccccaaagttatctgaaaccatatttaagagaacttgtcagagtcctttccattaaaagtaatttagatgatagctgattgtaaaggcttttttttttgagacatggtctggttctatcactcaggatggagtgcagtggcatgatcttggctcaccacaatttttycctcccaaactcaagccatcctcctacctcagcctccgaagtagttgggaccataggcatgcaccatcatgctggctaatttttgtatttttgtagagacagggttttaccatgttgcccaggatgctttcaaacttctgagttcaagcaattcacccacctcggccttgcaaagtgctgggatttttacacgtgtgagccaccgtgccc

SEQ ID NO: 376384 - DNA, 602 bp, Homo sapiens
aactaaatcttgttctgcttgatttcaaatagcaattctcattcagttttttgtgttttgcttgatttcaattggaaatcctcattcagctttttagagtcctggaagattttcctagtccaatggtatgatccccaaagttatctgaaaccatatttaagagaacttgtcagagtcctttccattaaaagtaatttagatgatagctgattgtaaaggcttttttttttgagacatggtctggttctatcactcaggatggagtgcagtggcatgatcttggctcaccacaatttttccctcccaaactcaagccatcctcctacctcagcctccgaagtagttgggaccataggcatgcaccatcatgctggctaatttttgtatttttgtagagacagggttttaccatgttgcccaggatgctttcaaacttctgagttcaagcaattcacccacctcggccttgcaaagtgctgggatttttacacgtgtgagccaccgtgccctgcaccacgcccagcacygtgccctgcacagcctccagcagcacgcccggcctgtaaagggttttagagaagaactttaaacaatcaacgtgg

SEQ ID NO: 376385 - DNA, 602 bp, Homo sapiens
aactaaatcttgttctgcttgatttcaaatagcaattctcattcagttttttgtgttttgcttgatttcaattggaaatcctcattcagctttttagagtcctggaagattttcctagtccaatggtatgatccccaaagttatctgaaaccatatttaagagaacttgtcagagtcctttccattaaaagtaatttagatgatagctgattgtaaaggcttttttttttgagacatggtctggttctatcactcaggatggagtgcagtggcatgatcttggctcaccacaatttttccctcccaaactcaagccatcctcctacctcagcctccgaagtagttgggaccataggcatgcaccatcatgctggctaatttttgtatttttgtagagacagggttttaccatgttgcccaggatgctttcaaacttctgagttcaagcaattcacccacctcggccttgcaaagtgctgggatttttacacgtgtgagccaccgtgccctgcaccacgcccagcactgtgccctgcacagcctccagcagcacgcccrgcctgtaaagggttttagagaagaactttaaacaatcaacgtgg

SEQ ID NO: 376386 - DNA, 254 bp, Homo sapiens
aaacatattctgtagtctctttgtttttctgcagtttcattcaacactatctggtttatatggatgattacatatataatgctaggatgaaggttcttctgtataactttgaaacttccttgattatcaaccattggtatattcttagaataggattttattttagaattaagatccttgtttcaggactctagactgttaacacacagagccartaattattcagaatggttgggttagttcacattcccaca

SEQ ID NO: 376387 - DNA, 504 bp, Homo sapiens
atctaattcagtaactagcttttgtatcttctaagaatttttatctccagaaagctctaattttcattcctttacaagctttatttctctctcctttccaacaccagactttkctctgtttgttttctatatcttttttagagatgcctacaatagaaaaaaactatgacatattcaatacatctgaaaagtttgcattaccatagataagaatgaattatctgtttataaagaaaaaacaataaaaatatgaaccaagaaagcacagaaggtagtaaccacatttagatgtttatcatggaatcatctttataatccatctgttacaattccacagagcaaattacaagtaattgtgaagtttcccctcattttataggtttggtcttataaggcatacaacacaaattttaattacttttctttttggtatttggatcttaatttggtcaagtggccactgggtagatgatggagcctcttgagacatacagtcttcttcta

SEQ ID NO: 376388 - DNA, 504 bp, Homo sapiens
atctaattcagtaactagcttttgtatcttctaagaatttttatctccagaaagctctaattttcattcctttacaagctttatttctctctcctttccaacaccagactttgctctgtttgttttctatawcttttttagagatgcctacaatagaaaaaaactatgacatattcaatacatctgaaaagtttgcattaccatagataagaatgaattatctgtttataaagaaaaaacaataaaaatatgaaccaagaaagcacagaaggtagtaaccacatttagatgtttatcatggaatcatctttataatccatctgttacaattccacagagcaaattacaagtaattgtgaagtttcccctcattttataggtttggtcttataaggcatacaacacaaattttaattacttttctttttggtatttggatcttaatttggtcaagtggccactgggtagatgatggagcctcttgagacatacagtcttcttcta

SEQ ID NO: 376389 - DNA, 341 bp, Homo sapiens
aacaccagactttgctctgtttgttttctatatcttttttagagatgcctacaatagaaaaaaactatgacatattcaatacatctgaaaagtttgmattaccatagataagaatgaattatctgtttataaagaaaaaacaataaaaatatgaaccaagaaagcacagaaggtagtaaccacatttagatgtttatcatggaatcatctttataatccatctgttacaattccacagagcaaattacaagtaattgtgaagtttcccctcattttataggtttggtcttataaggcatacaacacaaattttaattacttttctttttggtatttggatc

SEQ ID NO: 376390 - DNA, 365 bp, Homo sapiens
aacaccagactttgctctgtttgttttctatatcttttttagagatgcctacaatagaaaaaaactatgacatattcaatacatctgaaaagtttgcattrccatagataagaatgaattatctgtttataaagaaaaaacaataaaaatatgaaccaagaaagcacagaaggtagtaaccacatttagatgtttatcatggaatcatctttataatccatctgttacaattccacagagcaaattacaagtaattgtgaagtttcccctcattttataggtttggtcttataaggcatacaacacaaattttaattacttttctttttggtatttggatcttaatttggtcaagtggccactgg

SEQ ID NO: 376391 - DNA, 341 bp, Homo sapiens
aacaccagactttgctctgtttgttttctatatcttttttagagatgcctacaatagaaaaaaactatgacatattcaatacatctgaaaagtttgcattaccatagataagaatgaattrtctgtttataaagaaaaaacaataaaaatatgaaccaagaaagcacagaaggtagtaaccacatttagatgtttatcatggaatcatctttataatccatctgttacaattccacagagcaaattacaagtaattgtgaagtttcccctcattttataggtttggtcttataaggcatacaacacaaattttaattacttttctttttggtatttggatc

SEQ ID NO: 376392 - DNA, 365 bp, Homo sapiens
aacaccagactttgctctgtttgttttctatatcttttttagagatgcctacaatagaaaaaaactatgacatattcaatacatctgaaaagtttgcattaccatagataagaatgaattatctgtttataaagaaaaaamaataaaaatatgaaccaagaaagcacagaaggtagtaaccacatttagatgtttatcatggaatcatctttataatccatctgttacaattccacagagcaaattacaagtaattgtgaagtttcccctcattttataggtttggtcttataaggcatacaacacaaattttaattacttttctttttggtatttggatcttaatttggtcaagtggccactgg

SEQ ID NO: 376393 - DNA, 422 bp, Homo sapiens
atagaaaaaaactatgacatattcaatacatctgaaaagtttgcattaccatagataagaatgaattatctgtttataaagaaaaaacaataaaaatatgaaccargaaagcacagaaggtagtaaccacatttagatgtttatcatggaatcatctttataatccatctgttacaattccacagagcaaattacaagtaattgtgaagtttcccctcattttataggtttggtcttataaggcatacaacacaaattttaattacttttctttttggtatttggatcttaatttggtcaagtggccactgggtagatgatggagcctcttgagacatacagtcttcttctagctttgttgatgtgaatattactgtgtatttttcattcacttattattttacaaggcatacttcattaaa

SEQ ID NO: 376394 - DNA, 539 bp, Homo sapiens
aatttttatctccagaaagctctaattttcattcctttacaagctttatttctctctcctttccaacaccagactttgctctgtttgttttctatatcttttttagagatgcctacaatagaaaaaaactatgacatattcaatacatctgaaaagtttgcattaccatagataagaatgaattatctgtttataaagaaaaaacaataaaaatatgaaccaagaaagcacagaaggtagtaaccacatttagatgtttatcatggaatcatctttataatccatctgttacaattccacasagcaaattacaagtaattgtgaagtttcccctcattttataggtttggtcttataaggcatacaacacaaattttaattacttttctttttggtatttggatcttaatttggtcaagtggccactgggtagatgatggagcctcttgagacatacagtcttcttctagctttgttgatgtgaatattactgtgtatttttcattcacttattattttacaaggcatacttcattaaa

SEQ ID NO: 376395 - DNA, 422 bp, Homo sapiens
atagaaaaaaactatgacatattcaatacatctgaaaagtttgcattaccatagataagaatgaattatctgtttataaagaaaaaacaataaaaatatgaaccaagaaagcacagaaggtagtaaccacatttagatgtttatcatggaatcatctttataatccatctgttacaattccacagagcaawttacaagtaattgtgaagtttcccctcattttataggtttggtcttataaggcatacaacacaaattttaattacttttctttttggtatttggatcttaatttggtcaagtggccactgggtagatgatggagcctcttgagacatacagtcttcttctagctttgttgatgtgaatattactgtgtatttttcattcacttattattttacaaggcatacttcattaaa

SEQ ID NO: 376396 - DNA, 341 bp, Homo sapiens
aacaccagactttgctctgtttgttttctatatcttttttagagatgcctacaatagaaaaaaactatgacatattcaatacatctgaaaagtttgcattaccatagataagaatgaattatctgtttataaagaaaaaacaataaaaatatgaaccaagaaagcacagaaggtagtaaccacatttagatgtttatcatggaatcatctttataatccatctgttacaattccacagagcaaattasaagtaattgtgaagtttcccctcattttataggtttggtcttataaggcatacaacacaaattttaattacttttctttttggtatttggatc

SEQ ID NO: 376397 - DNA, 539 bp, Homo sapiens
aatttttatctccagaaagctctaattttcattcctttacaagctttatttctctctcctttccaacaccagactttgctctgtttgttttctatatcttttttagagatgcctacaatagaaaaaaactatgacatattcaatacatctgaaaagtttgcattaccatagataagaatgaattatctgtttataaagaaaaaacaataaaaatatgaaccaagaaagcacagaaggtagtaaccacatttagatgtttatcatggaatcatctttataatccatctgttacaattccacagagcaaattacaagtaattgtgaagtttcccctcattttatakgtttggtcttataaggcatacaacacaaattttaattacttttctttttggtatttggatcttaatttggtcaagtggccactgggtagatgatggagcctcttgagacatacagtcttcttctagctttgttgatgtgaatattactgtgtatttttcattcacttattattttacaaggcatacttcattaaa

SEQ ID NO: 376398 - DNA, 539 bp, Homo sapiens
aatttttatctccagaaagctctaattttcattcctttacaagctttatttctctctcctttccaacaccagactttgctctgtttgttttctatatcttttttagagatgcctacaatagaaaaaaactatgacatattcaatacatctgaaaagtttgcattaccatagataagaatgaattatctgtttataaagaaaaaacaataaaaatatgaaccaagaaagcacagaaggtagtaaccacatttagatgtttatcatggaatcatctttataatccatctgttacaattccacagagcaaattacaagtaattgtgaagtttcccctcattttataggtttggtcttataaggcatacaacacaaattttaattacttttcwttttggtatttggatcttaatttggtcaagtggccactgggtagatgatggagcctcttgagacatacagtcttcttctagctttgttgatgtgaatattactgtgtatttttcattcacttattattttacaaggcatacttcattaaa

SEQ ID NO: 376399 - DNA, 504 bp, Homo sapiens
atctaattcagtaactagcttttgtatcttctaagaatttttatctccagaaagctctaattttcattcctttacaagctttatttctctctcctttccaacaccagactttgctctgtttgttttctatatcttttttagagatgcctacaatagaaaaaaactatgacatattcaatacatctgaaaagtttgcattaccatagataagaatgaattatctgtttataaagaaaaaacaataaaaatatgaaccaagaaagcacagaaggtagtaaccacatttagatgtttatcatggaatcatctttataatccatctgttacaattccacagagcaaattacaagtaattgtgaagtttcccctcattttataggtttggtcttataaggcatacaacacaaattttaattacttttctttttggtatttggatcttaatttggtsaagtggccactgggtagatgatggagcctcttgagacatacagtcttcttcta

SEQ ID NO: 376400 - DNA, 539 bp, Homo sapiens
aatttttatctccagaaagctctaattttcattcctttacaagctttatttctctctcctttccaacaccagactttgctctgtttgttttctatatcttttttagagatgcctacaatagaaaaaaactatgacatattcaatacatctgaaaagtttgcattaccatagataagaatgaattatctgtttataaagaaaaaacaataaaaatatgaaccaagaaagcacagaaggtagtaaccacatttagatgtttatcatggaatcatctttataatccatctgttacaattccacagagcaaattacaagtaattgtgaagtttcccctcattttataggtttggtcttataaggcatacaacacaaattttaattacttttctttttggtatttggatcttaatttggtcaagtggccactgggtagatgatggagcctcttgagacatrcagtcttcttctagctttgttgatgtgaatattactgtgtatttttcattcacttattattttacaaggcatacttcattaaa

SEQ ID NO: 376401 - DNA, 576 bp, Homo sapiens
gtcaagtggccactgggtagatgatggagcctcttgagacatacagtcttcttctagctttgttgatgtgaatattactgtgtatttttcattcasttattattttacaaggcatacttcattaaaaatatatcagcatctcattgacaaatcacaaaatttaaaaggcaccagaaaaaaacaatttatttaaaacattcctgtgtaaaagtagtcaccactcttactattcttcaaatatttttattatatttaaacacaagcctagttttatctcgagtgtctgaccttgatgatattgtacactttaaacttagaaaaattgaactctattggaaatttcctacagatcagcttttctagatgccaagtgccttgtttcagccatggtgatgacagcaaattgggttctcagggattctggcctctggcatcatctcagttgtttataattgaagttgggtctgatgagaacgcagcttagatgcatggtgggactgctgggcttaaggctggcctgccaggaggttgcattgaggtgtaactaggcaaagaaagaaggagtttattgaggca

SEQ ID NO: 376402 - DNA, 576 bp, Homo sapiens
gtcaagtggccactgggtagatgatggagcctcttgagacatacagtcttcttctagctttgttgatgtgaatattactgtgtatttttcattcacttattattttacaaggcatacttcattaaaaatatatcagcatctcattgacaaatcacaaaatttaaaaggcaccagaaaaaaacaatttatttaaaacattcctgtgtaaaagtagtcaccactcttactattcttcaaatatttttattatatttaaacacaagcctagttttatctcgagtgtctgaccttgatgatattgtacactttaaacttagaaaaattgaactctattggaaatttcctacagatcagcttttctagatgccaagtgccttgtttcagccatggtgatgacagcaaattgggttctcagggattctggcctctggcatcatctcagttgtttataattgaagttgggtctgatgagaacgcagcttagatgcatggtgggrctgctgggcttaaggctggcctgccaggaggttgcattgaggtgtaactaggcaaagaaagaaggagtttattgaggca

SEQ ID NO: 376403 - DNA, 509 bp, Homo sapiens
ggttggacaaaattaccaacaatcttcaactatgaatttgtatgagtaggggcttcccacaccatcaggcactccaagttggagaaacaagggatgttgaattgaaagtttaattttttaggcttgatagtcagattagggaagttttgggtacacctttcccactctagagccctctccctaactcacggccaatttgggrcatgggctcactggaaaagagtgtcaagatcaattagaaatatccatcatgaacatacgaggcaggcattctggccaaaggggtgcgtcttcccactttgtaatccagagtgcgatttcttcttgctatctgtccctccataaataagcgttgggtgaaggacaagctagttaccattgaggatggaatgaaattctaccagaattgcaaaatgaactgagagccacgaaagttttcctctgtgaaccagcagagagatctgtggaaggcaaaggaagaggagccaagaggccagataacattcctg

SEQ ID NO: 376404 - DNA, 509 bp, Homo sapiens
ggttggacaaaattaccaacaatcttcaactatgaatttgtatgagtaggggcttcccacaccatcaggcactccaagttggagaaacaagggatgttgaattgaaagtttaattttttaggcttgatagtcagattagggaagttttgggtacacctttcccactctagagccctctccctaactcacggccaatttgggacatgggctcactggaaaagagtgycaagatcaattagaaatatccatcatgaacatacgaggcaggcattctggccaaaggggtgcgtcttcccactttgtaatccagagtgcgatttcttcttgctatctgtccctccataaataagcgttgggtgaaggacaagctagttaccattgaggatggaatgaaattctaccagaattgcaaaatgaactgagagccacgaaagttttcctctgtgaaccagcagagagatctgtggaaggcaaaggaagaggagccaagaggccagataacattcctg

SEQ ID NO: 376405 - DNA, 505 bp, Homo sapiens
tttttctatttataaatttatctgggtgctttctcaaaagtttctcagattaaaaacctatggctttgtaaaattaaaacagaagtaataggaattgtgttaaaaaacagaatcaggccaagcctggtggcttatgcctctaatgccaacacttagggaggccaaggcgggaggatmatttgaggtcaggagttcaagaccagcctggacaacatggcaaaactccacatgtattaaaaaaatacacaaattagctgggcgtggtggtgaatgcctttagtcctagctactcaggaggctaaggcaggagaatagcttgaacctgggaggctgaggttgcagtgagccaagatagagccactacattccagcctgggtgacagagtgagatcctgtcttaaaaaaaaggaaaaaagaaaaagaaaaaacagaatcatacaatgagagagattgtatagcccttttaattgtccataaaggatacatttctttttctgtgtaatag

SEQ ID NO: 376406 - DNA, 505 bp, Homo sapiens
tttttctatttataaatttatctgggtgctttctcaaaagtttctcagattaaaaacctatggctttgtaaaattaaaacagaagtaataggaattgtgttaaaaaacagaatcaggccaagcctggtggcttatgcctctaatgccaacacttagggaggccaaggcgggaggatcatttgaggtcaggagttcaagaccagcctggacaacatggcaaaacyccacatgtattaaaaaaatacacaaattagctgggcgtggtggtgaatgcctttagtcctagctactcaggaggctaaggcaggagaatagcttgaacctgggaggctgaggttgcagtgagccaagatagagccactacattccagcctgggtgacagagtgagatcctgtcttaaaaaaaaggaaaaaagaaaaagaaaaaacagaatcatacaatgagagagattgtatagcccttttaattgtccataaaggatacatttctttttctgtgtaatag

SEQ ID NO: 376407 - DNA, 468 bp, Homo sapiens
taaaaaacagaatcaggccaagcctggtggcttatgcctctaatgccaacacttagggaggccaaggcgggaggatcatttgaggtcaggagttcaagaccagcctggacaacatggcaaaactccacatgtattaaaaaaatacacaaattagctgggcgtggtggtgaatgcctttagtcctagctactcaggaggctaaggcaggagaatagcttgaacctgggaggctgaggttgcagtgagccaagatagagccactrcattccagcctgggtgacagagtgagatcctgtcttaaaaaaaaggaaaaaagaaaaagaaaaaacagaatcatacaatgagagagattgtatagcccttttaattgtccataaaggatacatttctttttctgtgtaatagtttatcagcatgaaaattttctttttctgtgtaatagtttatcagcatgaaaaaaaagaatca

SEQ ID NO: 376408 - DNA, 628 bp, Homo sapiens
agttctggcagttatttgaagtctgaggtttgaagtaggaattcttacgggcatttggggaatatattttctgttgagtcctatactagtaagattttcaacacaaggtgactctcgacctcaccttgtaggaagagtgctgagaaaatatttcacctgctctttctccataaagagctgatactgatcattgctattttcttattcgatctgtaaaggtagcaaagacaaatgcttaatatttcatttttccttaaatgattcttaatgacttgcagtttttaaaaacttaccctgagagtaaaccaaattacccactaaatagtgttttcacacagaagatgtgtaagagcatacctgttgtaaggaattataattttaaaatcattctaaagaagcaccattgtttctaagstgatttctactgaacaagcagttcaaacaaagtagacagggaagagaaatggctatcagtgatgtatggctcaacaggtaaaacttcctgccttctaaaatggctctacttggaagattctgaagattccattagaaatacttgtatttaaagggtaataatgtgggaaaatgaatatgttgatttgcttgattataagaaccacttcactag

SEQ ID NO: 376409 - DNA, 555 bp, Homo sapiens
tgtttctaaggtgatttctactgaacaagcagttcaaacaaagtagacagggaagagaaatggctatcagtgatgtatggctcaacaggtaaaacttcctgccttctaaaatggctctacttgkaagattctgaagattccattagaaatacttgtatttaaagggtaataatgtgggaaaatgaatatgttgatttgcttgattataagaaccacttcactagaaataattatatcaaaacatcatgttgtactccttaatgtaggttaagaaaactaaaatgaaagaaaaaaaatctaggaacacttgtgtttagtaaaccagttttagatttcactcttgtacacacccattatctaggaccaattaaacatttggcactgaggaataattcagagcaacaactcctaggggagaactagattgtctggttggtgatcaaaaagaactaaagcatctctgaaggcaattagtccccaacactgtgaccaaggccctggaggtggggcatgttctttctgccttccacacaccgcttcaggctgaacaaggtg

SEQ ID NO: 376410 - DNA, 330 bp, Homo sapiens
gtatttaaagggtaataatgtgggaaaatgaatatgttgatttgcttgattataagaaccacttcaytagaaataattatatcaaaacatcatgttgtactccttaatgtaggttaagaaaactaaaatgaaagaaaaaaaatctaggaacacttgtgtttagtaaaccagttttagatttcactcttgtacacacccattatctaggaccaattaaacatttggcactgaggaataattcagagcaacaactcctaggggagaactagattgtctggttggtgatcaaaaagaactaaagcatctctgaaggcaattagtccccaacac

SEQ ID NO: 376411 - DNA, 511 bp, Homo sapiens
gcatacctgttgtaaggaattataattttaaaatcattctaaagaagcaccattgtttctaaggtgatttctactgaacaagcagttcaaacaaagtagacagggaagagaaatggctatcagtgatgtatggctcaacaggtaaaacttcctgccttctaaaatggctctacttggaagattctgaagattccattagaaatacttgtatttaaagggtaataatgtgggaaaatgaatatgttgatttgcttgattataagaaccacttcactagaaataattatatcaaaacatcatgttgtactccttaatgtaggttaagaaaactaaaatgaaaraaaaaaaatctaggaacacttgtgtttagtaaaccagttttagatttcactcttgtacacacccattatctaggaccaattaaacatttggcactgaggaataattcagagcaacaactcctaggggagaactagattgtctggttggtgatcaaaaagaactaaagcat

SEQ ID NO: 376412 - DNA, 330 bp, Homo sapiens
gtatttaaagggtaataatgtgggaaaatgaatatgttgatttgcttgattataagaaccacttcactagaaataattatatcaaaacatcatgttgtactccttaatgtaggttaagaaaactaaaatgaaagaaaaaaaatctaggaayacttgtgtttagtaaaccagttttagatttcactcttgtacacacccattatctaggaccaattaaacatttggcactgaggaataattcagagcaacaactcctaggggagaactagattgtctggttggtgatcaaaaagaactaaagcatctctgaaggcaattagtccccaacac

SEQ ID NO: 376413 - DNA, 330 bp, Homo sapiens
gtatttaaagggtaataatgtgggaaaatgaatatgttgatttgcttgattataagaaccacttcactagaaataattatatcaaaacatcatgttgtactccttaatgtaggttaagaaaactaaaatgaaagaaaaaaaatctaggaacacttgtgtttagtaaaccagttttrgatttcactcttgtacacacccattatctaggaccaattaaacatttggcactgaggaataattcagagcaacaactcctaggggagaactagattgtctggttggtgatcaaaaagaactaaagcatctctgaaggcaattagtccccaacac

SEQ ID NO: 376414 - DNA, 555 bp, Homo sapiens
tgtttctaaggtgatttctactgaacaagcagttcaaacaaagtagacagggaagagaaatggctatcagtgatgtatggctcaacaggtaaaacttcctgccttctaaaatggctctacttggaagattctgaagattccattagaaatacttgtatttaaagggtaataatgtgggaaaatgaatatgttgatttgcttgattataagaaccacttcactagaaataattatatcaaaacatcatgttgtactccttaatgtaggttaagaaaactaaaatgaaagaaaaaaaatctaggaacacttgtgtttagtaaaccagttttagatttcactcttgtacacacccattatctaggaccaattamacatttggcactgaggaataattcagagcaacaactcctaggggagaactagattgtctggttggtgatcaaaaagaactaaagcatctctgaaggcaattagtccccaacactgtgaccaaggccctggaggtggggcatgttctttctgccttccacacaccgcttcaggctgaacaaggtg

SEQ ID NO: 376415 - DNA, 530 bp, Homo sapiens
gattataagaaccacttcactagaaataattatatcaaaacatcatgttgtactccttaatgtaggttaagaaaactaaaatgaaagaaaaaaaatctaggaacacttgtgtttagtaaaccagttttagatttcactcttgtacacacccattatctaggaccaattaaacatttggcactgaggaataattcagagcaacaactcctaggggagaactagattgtctggttggtgatcaaaaagaactaaagcatctctgaaggcaattagyccccaacactgtgaccaaggccctggaggtggggcatgttctttctgccttccacacaccgcttcaggctgaacaaggtgttattttttaaccgctttgtgaattacacttctttaaattcctgtgataattattccctatttcacaagggtgcctttctgtaacatcttgaatatgttacacaaatagtctttcttgaggcaccctctggtgataatactaaagatcacaatcaaaaacaattgtgcccagagta

SEQ ID NO: 376416 - DNA, 530 bp, Homo sapiens
gattataagaaccacttcactagaaataattatatcaaaacatcatgttgtactccttaatgtaggttaagaaaactaaaatgaaagaaaaaaaatctaggaacacttgtgtttagtaaaccagttttagatttcactcttgtacacacccattatctaggaccaattaaacatttggcactgaggaataattcagagcaacaactcctaggggagaactagattgtctggttggtgatcaaaaagaactaaagcatctctgaaggcaattagtccccaacactgtgaccaaggccctggaggtggggcatgttctttctgccttccacacamcgcttcaggctgaacaaggtgttattttttaaccgctttgtgaattacacttctttaaattcctgtgataattattccctatttcacaagggtgcctttctgtaacatcttgaatatgttacacaaatagtctttcttgaggcaccctctggtgataatactaaagatcacaatcaaaaacaattgtgcccagagta

SEQ ID NO: 376417 - DNA, 568 bp, Homo sapiens
catcatgttgtactccttaatgtaggttaagaaaactaaaatgaaagaaaaaaaatctaggaacacttgtgtttagtaaaccagttttagatttcactcttgtacacacccattatctaggaccaattaaacatttggcactgaggaataattcagagcaacaactcctaggggagaactagattgtctggttggtgatcaaaaagaactaaagcatctctgaaggcaattagtccccaacactgtgaccaaggccctggaggtggggcatgttctttctgccttccacacaccgcttcaggctgaacaaggtgttattttttaaccgctttgtgaattacacttctttaaattcctgtgataattattccctatttcacaagggtgcctttctgtaacatcttgartatgttacacaaatagtctttcttgaggcaccctctggtgataatactaaagatcacaatcaaaaacaattgtgcccagagtagcagtaccactttgcatttaggttgtgatccactgaaaagtaaattaaacacattaatatttctatttagggaaattc

SEQ ID NO: 376418 - DNA, 523 bp, Homo sapiens
gtttagtaaaccagttttagatttcactcttgtacacacccattatctaggaccaattaaacatttggcactgaggaataattcagagcaacaactcctaggggagaactagattgtctggttggtgatcaaaaagaactaaagcatctctgaaggcaattagtccccaacactgtgaccaaggccctggaggtggggcatgttctttctgccttccacacaccgcttcaggctgaacaaggtgttattttttaaccgctttgtgaattacacttctttaaattcctgtgataattattccctatttcacaagggtgcctttctgtaacatcttgaatatgttacacaaatagtctttcttgaggcaccctctggtgataatactaaagatcacaatcaaaaacaattgtgcccagagtagmagtaccactttgcatttaggttgtgatccactgaaaagtaaattaaacacattaatatttctatttagggaaattctgacaagtaattttataacaagatc

SEQ ID NO: 376419 - DNA, 500 bp, Homo sapiens
gataattattccctatttcacaagggtgcctttctgtaacatcttgaatatgttacacaaatagtctttcttgaggcaccctctggtgataatactaaagatcacaatcaaaaacaattgtgcccagagtagcagtaccactttgcatttaggttgtgatccactgaaaagtaaattaaacacattaatatttctatttagggaaattctgacaagtaattttataacaagatcacttcattaattataaagcttcaaaaatacttagtgaaaaaaactaacagatcaggttaattayatgagacttttcaggaaaaaaagccatacaaaagcaaaaaaaaaaatgagaggagagacaaaaactatctttgactaacattttaaaggtaaaattatttactcacgttatttttcaaaattacattgtcaaattagcattcacttccttctaatctcctgaagccatctcactaaaaattatgcttttgaaacaaattaat

SEQ ID NO: 376420 - DNA, 500 bp, Homo sapiens
gataattattccctatttcacaagggtgcctttctgtaacatcttgaatatgttacacaaatagtctttcttgaggcaccctctggtgataatactaaagatcacaatcaaaaacaattgtgcccagagtagcagtaccactttgcatttaggttgtgatccactgaaaagtaaattaaacacattaatatttctatttagggaaattctgacaagtaattttataacaagatcacttcattaattataaagcttcaaaaatacttagtgaaaaaaactaacagatcaggttaattatatgagacttttcaggaaaaaaagccatacaaaagcaaaaaaaaaaatgagaggagagacaaaaactatctttgactaacattttaaaggtaaaattatttactmacgttatttttcaaaattacattgtcaaattagcattcacttccttctaatctcctgaagccatctcactaaaaattatgcttttgaaacaaattaat

SEQ ID NO: 376421 - DNA, 414 bp, Homo sapiens
gatcaggttaattatatgagacttttcaggaaaaaaagccatacaaaagcaaaaaaaaaaatgagaggagagacaaaaactatctttgactaacattttaaaggtaaaattatttactcacgttatttttcaaaattacattgtcaaattagcattcacttccttctaatctcctgaagccatctcactaaaaattatgcttttgaaacaaattaatgagcttaattcattttctatgagtgtatgttttgacttacttagttaatttttttgacatggaactgttagctttcaatgctgctgcaaaggcttccttatattcttctaactcagttgtaacctcttcataagcagttttcattttgtagaatttacawtccacatctttaagtgtgagttccttcttatttagtg

SEQ ID NO: 376422 - DNA, 590 bp, Homo sapiens
aaaaaaactaacagatcaggttaattatatgagacttttcaggaaaaaaagccatacaaaagcaaaaaaaaaaatgagaggagagacaaaaactatctttgactaacattttaaaggtaaaattatttactcacgttatttttcaaaattacattgtcaaattagcattcacttccttctaatctcctgaagccatctcactaaaaattatgcttttgaaacaaattaatgagcttaattcattttctatgagtgtatgttttgacttacttagttaatttttttgacatggaactgttagctttcaatgctgctgcaaaggcttccttatattcttctaactcagttgtaacctcttcataagcagttttcattttgtagaatttacaatccacatctttaagtgtgagttccttcttatttagtgaagctgtatkatatccttgtttaactgctctaattgttttttatattgtgcttgttcctaaaacagaggaaaagaatacacttttaaaacaattataacctaattattatgtttgttgcctttcattttgagtcagcgattcaaagagtatttttgaatatgt

SEQ ID NO: 376423 - DNA, 573 bp, Homo sapiens
ttaaaacaattataacctaattattatgtttgttgcctttcattttgagtcagcgattcaaagagtatttttgaatatgttaaaaaagaggatgaagtttaaaatatttcagcaatatcaaamctaataactgaattcagaattaagtctgatttgtaaaaatttgaaatcataattatgctagtattaatgtaatctggtcatataaaaagtaatagaatccattcatagttttaaaaagtgatcaatgaacactgtagcttaagaccaattcataattatcacataatttctaaaacacaattttttcctatgccaactggtcttaatcatcaaatgactccataatgagaatcattactctgaaagattgattttgttataataataatggaaatttaaatatttaaaagaaaaaacagataccatttttttctagaactctacaaagcagattgctacaagagaggcaatctctttatatatatatatatctccaaaatataatttgcagtgaaataaatgaaagcacattacaagtaaacttacctgatttaaacaactcacctgtaa

SEQ ID NO: 376424 - DNA, 563 bp, Homo sapiens
gtttttcacattcctgttgtacttttttcatagataataactcctgttgaaaaacttgattctctttagccaaattgacacattttgaagatacagcttccttctccgccataagatcatcaaactgcawgaataaaatagtataacttgataatgaagtaggctgagaataatctaatacaaaaccaatagcaaattttgaaatgcatttacttgcaataaaatgttatctgtaatgcagcagattcttcaaatgtgaacccttaaattactcagaattttaagaacaaagttaaagctaccatgagtcataaaaatatattctttactatcatcatctttgccacagaatttttgtacttaattttacttttatttttctgataattcatttttgttcctccttaaatggcacaaagttatctcctagtaaaaagtgtctaacccccttccttcattatcattccccacagtatgtcaaaaaaagtttcagagatatcatattgagttatttaggccaaagtcaataaatgggtctaggaataagactttgaaagtgatat

SEQ ID NO: 376425 - DNA, 563 bp, Homo sapiens
gtttttcacattcctgttgtacttttttcatagataataactcctgttgaaaaacttgattctctttagccaaattgacacattttgaagatacagcttccttctccgccataagatcatcaaactgcaagaataaaatagtatarcttgataatgaagtaggctgagaataatctaatacaaaaccaatagcaaattttgaaatgcatttacttgcaataaaatgttatctgtaatgcagcagattcttcaaatgtgaacccttaaattactcagaattttaagaacaaagttaaagctaccatgagtcataaaaatatattctttactatcatcatctttgccacagaatttttgtacttaattttacttttatttttctgataattcatttttgttcctccttaaatggcacaaagttatctcctagtaaaaagtgtctaacccccttccttcattatcattccccacagtatgtcaaaaaaagtttcagagatatcatattgagttatttaggccaaagtcaataaatgggtctaggaataagactttgaaagtgatat

SEQ ID NO: 376426 - DNA, 563 bp, Homo sapiens
gtttttcacattcctgttgtacttttttcatagataataactcctgttgaaaaacttgattctctttagccaaattgacacattttgaagatacagcttccttctccgccataagatcatcaaactgcaagaataaaatagtataacttgataatgaagtaggctgagaataatctaatacaaaaccaatagcaaattttgaaatgcatttacttgcaataaaatgttatctgtaatgcagcagattcttcaaatgtgaacccttaaattaytcagaattttaagaacaaagttaaagctaccatgagtcataaaaatatattctttactatcatcatctttgccacagaatttttgtacttaattttacttttatttttctgataattcatttttgttcctccttaaatggcacaaagttatctcctagtaaaaagtgtctaacccccttccttcattatcattccccacagtatgtcaaaaaaagtttcagagatatcatattgagttatttaggccaaagtcaataaatgggtctaggaataagactttgaaagtgatat

SEQ ID NO: 376427 - DNA, 481 bp, Homo sapiens
taaaatagtataacttgataatgaagtaggctgagaataatctaatacaaaaccaatagcaaattttgaaatgcatttacttgcaataaaatgttatctgtaatgcagcagattcttcaaatgtgaacccttaaattactcagaattttaagaacaaagttaaagctaccatgagtcataaaaatatattctttactatcatcatctttgccacagaatttttgtacttmattttacttttatttttctgataattcatttttgttcctccttaaatggcacaaagttatctcctagtaaaaagtgtctaacccccttccttcattatcattccccacagtatgtcaaaaaaagtttcagagatatcatattgagttatttaggccaaagtcaataaatgggtctaggaataagactttgaaagtgatattacactctatattaggcatggtggctcatgcctgtaatcctagcactttaa

SEQ ID NO: 376428 - DNA, 586 bp, Homo sapiens
atcatattgagttatttaggccaaagtcaataaatgggtctaggaataagactttgaaagtgatattacactctatattaggcatggtggctcatgcctgtaatcctagcactttaaaaagctgtggcagaaagatcacttgaggccaggaatttaagatcagccagagcaacatagtgagacccccatctctacaaaaaaaaattttttttaattacccgggcatggtggytcatgcctgtagacccagctagttgggatactgaggcaaaaggatggcttgtacccagagttcagggctgcagtgaattattatcactgcacttctgcctggataacagacaaagaccctatatcaaaaaacaacacaaaataatgaaatctatgattaaggattctgatgctataagcctttccttaaactgcaaatgtttcatgctaatttgaattgcattttaagaagtaatgattcttggggtaaagaccatagaatacagcacccagaaataaattcacatatttccagccaactgattttggacgaacattccaagaacatacgctggggaaaggacagcctcttcaa

SEQ ID NO: 376429 - DNA, 572 bp, Homo sapiens
atatcaaaaaacaacacaaaataatgaaatctatgattaaggattctgatgctataagcctttccttaaactgcaaatgtttcatgctaatttgaattgcattttaagaagtaatgattcttggggtaaagaccatagaatacrgcacccagaaataaattcacatatttccagccaactgattttggacgaacattccaagaacatacgctggggaaaggacagcctcttcaaatgaatgacactgggaaaactaaatatccatatggagaagaatgatattagcttcctatgtaacaccatataacaacataaactcagaatcgattgaagactgaaatgtaaggcccaaaattatcaaactactctaagtaaatataaggaaaatgcttgaggacattagtctgcacaaagatttttatgggtaagacatcagaagcataggcaaacaacaaatcatagacaaaagacactacattaagctaaagagcttctgtccagcaaacaactgagtgaagagaaaacctgtagaataggagaaaatattgtcaagctattcacctaatgaggga

SEQ ID NO: 376430 - DNA, 251 bp, Homo sapiens
gctgtgctatgccgggtgttcmcttccactcctggttgcctcagacactctgaagccctaatgctgaaatggctgagttgccccaacagcaaagacaacagtctggtcctccccctgggagctctgactcagggaggcctgaaacctctgtcggccagagaacagcagtgaaggcagctggagaccctggttgaaaggcttcacctgctgattagaaatgtggtcggggactgacttaaacaagagtctgg

SEQ ID NO: 376431 - DNA, 486 bp, Homo sapiens
ctattcacctaatgagggactaatatacaaaatatacaaaaaaactcaaacaacwtcacagtaaaaaaaatctgagtttaaaattgggcaaaatatctaactatacttttttttagaaaaagaaatacaaatagccgataaataaattttaaaatgctcagtatcactaatcctcagggaaatacaaatcaaatctacaatgtgatataatcttgcttcaatttgaataaattgctgtcattgaaaagacaaaaaaaatagcaaatgctggtgaggctccagagaacagtaaactcttacatgctgttggtgggaaggtaaattagtgcagccactatagagaacaacaggaggttttctcaaaaaaactaataatgggactgccgagggatccagcaaccccactaccgggtattcaggcaatagaaaagaaaacaatagatcaaaaggatatctgtcctcatatgtttactgtagcactatcca

SEQ ID NO: 376432 - DNA, 486 bp, Homo sapiens
ctattcacctaatgagggactaatatacaaaatatacaaaaaaactcaaacaacttcacagtaaaaaaaatctgagtttaaaatwgggcaaaatatctaactatacttttttttagaaaaagaaatacaaatagccgataaataaattttaaaatgctcagtatcactaatcctcagggaaatacaaatcaaatctacaatgtgatataatcttgcttcaatttgaataaattgctgtcattgaaaagacaaaaaaaatagcaaatgctggtgaggctccagagaacagtaaactcttacatgctgttggtgggaaggtaaattagtgcagccactatagagaacaacaggaggttttctcaaaaaaactaataatgggactgccgagggatccagcaaccccactaccgggtattcaggcaatagaaaagaaaacaatagatcaaaaggatatctgtcctcatatgtttactgtagcactatcca

SEQ ID NO: 376433 - DNA, 486 bp, Homo sapiens
ctattcacctaatgagggactaatatacaaaatatacaaaaaaactcaaacaacttcacagtaaaaaaaatctgagtttaaaattgggcaaaatatctaactatacttttttttagaaaaagaaatacaaatagccrataaataaattttaaaatgctcagtatcactaatcctcagggaaatacaaatcaaatctacaatgtgatataatcttgcttcaatttgaataaattgctgtcattgaaaagacaaaaaaaatagcaaatgctggtgaggctccagagaacagtaaactcttacatgctgttggtgggaaggtaaattagtgcagccactatagagaacaacaggaggttttctcaaaaaaactaataatgggactgccgagggatccagcaaccccactaccgggtattcaggcaatagaaaagaaaacaatagatcaaaaggatatctgtcctcatatgtttactgtagcactatcca

SEQ ID NO: 376434 - DNA, 486 bp, Homo sapiens
ctattcacctaatgagggactaatatacaaaatatacaaaaaaactcaaacaacttcacagtaaaaaaaatctgagtttaaaattgggcaaaatatctaactatacttttttttagaaaaagaaatacaaatagccgataaataaattttaaaatgctcagtatcactaatcctcagggaaatacaaatcaaatctacaatgtgatataatcttgcttcaatttgaataaattgctgtcattgaaaagacaaaaaaaatarcaaatgctggtgaggctccagagaacagtaaactcttacatgctgttggtgggaaggtaaattagtgcagccactatagagaacaacaggaggttttctcaaaaaaactaataatgggactgccgagggatccagcaaccccactaccgggtattcaggcaatagaaaagaaaacaatagatcaaaaggatatctgtcctcatatgtttactgtagcactatcca

SEQ ID NO: 376435 - DNA, 385 bp, Homo sapiens
tctgtcctcatatgtttactgtagcactatccacaacagcttgtgtatggaatcaacctacatgtccatcaccaaatgaatggacgaaaaactgtggcacacaaacacagtggaatastattcaccatataaaggaattaaatcctgttattcgtggccacgtggatcagtctgacggatgttatgttaagtgcagacacagaaagataaatactgcacattcttactcatgtgtgggagctaaaggaaaattgaaggctgggcaatatggctgatgcctgtaacttcctcgctctttgtaagaccaaagcaagagaatcatttgaggccaaaagttccagagctccctgggcaacatagggagatatctctacaaagtcaaaaa

SEQ ID NO: 376436 - DNA, 385 bp, Homo sapiens
tctgtcctcatatgtttactgtagcactatccacaacagcttgtgtatggaatcaacctacatgtccatcaccaaatgaatggacgaaaaactgtggcacacaaacacagtggaatactattcaccrtataaaggaattaaatcctgttattcgtggccacgtggatcagtctgacggatgttatgttaagtgcagacacagaaagataaatactgcacattcttactcatgtgtgggagctaaaggaaaattgaaggctgggcaatatggctgatgcctgtaacttcctcgctctttgtaagaccaaagcaagagaatcatttgaggccaaaagttccagagctccctgggcaacatagggagatatctctacaaagtcaaaaa

SEQ ID NO: 376437 - DNA, 385 bp, Homo sapiens
tctgtcctcatatgtttactgtagcactatccacaacagcttgtgtatggaatcaacctacatgtccatcaccaaatgaatggacgaaaaactgtggcacacaaacacagtggaatactattcaccatataaaggaattaaatcctgttattcgtggccacgtggatcagtctgacggatgttatgttaagtgcagacacagaaagataaatactgcacattcttactcatgtgtgggagctaaaggaaaattgaaggctgggcaatatggctgatgcctgtaayttcctcgctctttgtaagaccaaagcaagagaatcatttgaggccaaaagttccagagctccctgggcaacatagggagatatctctacaaagtcaaaaa

SEQ ID NO: 376438 - DNA, 385 bp, Homo sapiens
tctgtcctcatatgtttactgtagcactatccacaacagcttgtgtatggaatcaacctacatgtccatcaccaaatgaatggacgaaaaactgtggcacacaaacacagtggaatactattcaccatataaaggaattaaatcctgttattcgtggccacgtggatcagtctgacggatgttatgttaagtgcagacacagaaagataaatactgcacattcttactcatgtgtgggagctaaaggaaaattgaaggctgggcaatatggctgatgcctgtaacttcctcgctctttgtaagaccaaagcaagagaatcatttgaggccaaaagttccagagctccctgggmaacatagggagatatctctacaaagtcaaaaa

SEQ ID NO: 376439 - DNA, 603 bp, Homo sapiens
tgcccataatgccagctgctcaggaggctgaggtgtgaggatcagatgggcccaagagtttgaagctgcagtgaactatgatcaaaccactgtctccagtctgggtgactacagttgcccagagcccagactacactagcaagaccctgtctcttaacaaaaaaaagctcacagaagtaggggagrggaggctggttaatggatacagaattacagttagataagaggagtgagttctggtgttctgtggcattgtagggtgaatatggttaactatgacttattgtatatttttaaaaagccagaaaattttgaatgttcacaattcaaagaaatgaaaaatggttgaagtagtaaatgtgctagttagcttgatcattacacactatatacgtgtataaaaatatcactctatagcccataattatgtatatatgtgtcaattaaaacaaaagagaagctacattcatcccatttaaaaaacagaatatgggccagccttactgacttccttctaatgagtagaatgtagtgaaagggataccatgtggcttccctatctcagactgttttcccttggaacccagccccaattgtgagagc

SEQ ID NO: 376440 - DNA, 395 bp, Homo sapiens
ctacactagcaagaccctgtctcttaacaaaaaaaagctcacagaagtaggggagaggaggctggttaatggatacagaattacagttagataagaggagtgagttctggtgttctgtggcattgtagggtgaatatggttaactatgacttattgtatatttttaaaaagccagaaaattttsaatgttcacaattcaaagaaatgaaaaatggttgaagtagtaaatgtgctagttagcttgatcattacacactatatacgtgtataaaaatatcactctatagcccataattatgtatatatgtgtcaattaaaacaaaagagaagctacattcatcccatttaaaaaacagaatatgggccagccttactgacttccttctaatgagtag

SEQ ID NO: 376441 - DNA, 395 bp, Homo sapiens
ctacactagcaagaccctgtctcttaacaaaaaaaagctcacagaagtaggggagaggaggctggttaatggatacagaattacagttagataagaggagtgagttctggtgttctgtggcattgtagggtgaatatggttaactatgacttattgtatatttttaaaaagccagaaaattttgaatgttcacaattcaaagaaatgaaaaatggttgaagtagtaaatgtgctagttagyttgatcattacacactatatacgtgtataaaaatatcactctatagcccataattatgtatatatgtgtcaattaaaacaaaagagaagctacattcatcccatttaaaaaacagaatatgggccagccttactgacttccttctaatgagtag

SEQ ID NO: 376442 - DNA, 603 bp, Homo sapiens
ggttgaagtagtaaatgtgctagttagcttgatcattacacactatatacrtgtataaaaatatcactctatagcccataattatgtatatatgtgtcaattaaaacaaaagagaagctacattcatcccatttaaaaaacagaatatgggccagccttactgacttccttctaatgagtagaatgtagtgaaagggataccatgtggcttccctatctcagactgttttcccttggaacccagccccaattgtgagagccatcaggccacaaacagagcctgaaagtgcctgtgtcagtgttcatgctgcctgtcccaaccaagtttacagccgatggccagcatcaaccatcaaacaagtgggtgaccaaagcttcagaggattccatttccccaactgatcagctgttcctagggaagctgaagggagcagagcaagctgtcctggccaagtttttcccaaaccacaggttcatgaacaaaataaatgtttttctttcaagccacaagactctgggtaattgttaggaaaataagttttaaaaagagacaacaggaaacataacttatgcagcagaaaagagtctcctttaaagcaggat

SEQ ID NO: 376443 - DNA, 251 bp, Homo sapiens
gctgtgctatgccgggtgttcccttccactcctggttgcctcagacactctgaagccctaatgctgaaatggctgagttgccccaacagcaaagacaacagtctggtcctccccctgggagctctgactcagggaggcctgaaacctctgtcggmcagagaacagcagtgaaggcagctggagaccctggttgaaaggcttcacctgctgattagaaatgtggtcggggactgacttaaacaagagtctgg

SEQ ID NO: 376444 - DNA, 603 bp, Homo sapiens
tgcccataatgccagctgctcaggaggctgaggtgtgaggatcagatgggcccaagagtttgaagctgcagtgaactatgatcaaaccactgtctccagtctgggtgactacagttgcccagagcccagactacactagcaagaccctgtctcttaacaaaaaaaagctcacagaagtaggggagaggaggctggttaatggatacagaattacagttagataagaggagtgagttctggtgttctgtggcattgtagggtgaatatggttaactatgacttattgtatatttttaaaaagccagaaaattttgaatgttcacaattcaaagaaatgaaaaatggttgaagtagtaaatgtgctagttagcttgatcattacacactatatacgtgtataaaaatatcactctatagcccataattatgtatatatgtgtcaattaaaacaaaagagaagctacattcatccsatttaaaaaacagaatatgggccagccttactgacttccttctaatgagtagaatgtagtgaaagggataccatgtggcttccctatctcagactgttttcccttggaacccagccccaattgtgagagc

SEQ ID NO: 376445 - DNA, 603 bp, Homo sapiens
ggttgaagtagtaaatgtgctagttagcttgatcattacacactatatacgtgtataaaaatatcactctatagcccataattatgtatatatgtgtcaattaaaacaaaagagaagctacattcatcccatttaaaaarcagaatatgggccagccttactgacttccttctaatgagtagaatgtagtgaaagggataccatgtggcttccctatctcagactgttttcccttggaacccagccccaattgtgagagccatcaggccacaaacagagcctgaaagtgcctgtgtcagtgttcatgctgcctgtcccaaccaagtttacagccgatggccagcatcaaccatcaaacaagtgggtgaccaaagcttcagaggattccatttccccaactgatcagctgttcctagggaagctgaagggagcagagcaagctgtcctggccaagtttttcccaaaccacaggttcatgaacaaaataaatgtttttctttcaagccacaagactctgggtaattgttaggaaaataagttttaaaaagagacaacaggaaacataacttatgcagcagaaaagagtctcctttaaagcaggat

SEQ ID NO: 376446 - DNA, 603 bp, Homo sapiens
ggttgaagtagtaaatgtgctagttagcttgatcattacacactatatacgtgtataaaaatatcactctatagcccataattatgtatatatgtgtcaattaaaacaaaagagaagctacattcatcccatttaaaaaacagaatatgggccagccttactgacttccttctaatgagtagaatgtagtgaaagggataccatgtggyttccctatctcagactgttttcccttggaacccagccccaattgtgagagccatcaggccacaaacagagcctgaaagtgcctgtgtcagtgttcatgctgcctgtcccaaccaagtttacagccgatggccagcatcaaccatcaaacaagtgggtgaccaaagcttcagaggattccatttccccaactgatcagctgttcctagggaagctgaagggagcagagcaagctgtcctggccaagtttttcccaaaccacaggttcatgaacaaaataaatgtttttctttcaagccacaagactctgggtaattgttaggaaaataagttttaaaaagagacaacaggaaacataacttatgcagcagaaaagagtctcctttaaagcaggat

SEQ ID NO: 376447 - DNA, 603 bp, Homo sapiens
ggttgaagtagtaaatgtgctagttagcttgatcattacacactatatacgtgtataaaaatatcactctatagcccataattatgtatatatgtgtcaattaaaacaaaagagaagctacattcatcccatttaaaaaacagaatatgggccagccttactgacttccttctaatgagtagaatgtagtgaaagggataccatgtggcttccctatctcagactgttttcccttggaacccagccccaattgtgagagccatcaggccacaaacagagcctgaaagtgcctgtgtcagtgttcatgctgcctgtcccaaccaagtttacagccgatggccagcatcaaccatcaaacaagtgggtgaccaaagcttcagaggattccatttccccaactgatcagctgttcctagggaagctgaagggagcagagcaagctgtcctggccaagtttttcccaaaccacaggttcatgaacaaaataaatgtttttctttcaagccacaagactctgggtaattgttaggaaaataasttttaaaaagagacaacaggaaacataacttatgcagcagaaaagagtctcctttaaagcaggat

SEQ ID NO: 376448 - DNA, 525 bp, Homo sapiens
tgatttgaaaaacaactagaaatactgggtgacataggcaaaatcagacatttacctgatttcaattaactaaaattctaaaagaagaagttttgagtatttattaatcaacctagtattcaattttcattttcttttctaaatgaggaaataaggagaatattatggaatgatttttattcttcacagaagtaaaataagcatagtgtgttttgagtgttaagacacaaatgcaacttctcctttaccttactccaagcttgtttgtatggagaagttaagaccatcccatttctatgttatgccacaatgcttctctatarcacacaacttggctctgaaattttgaaagtcaaaatactaatctactatgtgtctctgataaattgcctgaacgttacctgattttgaagtgctgcactcctaagactttttcttggaatgagttaaacgttttattccaagaatcctctactgagctagaaagcagagctgtgcatctctgtttcagtaaaaggaggtcaa

SEQ ID NO: 376449 - DNA, 525 bp, Homo sapiens
tgatttgaaaaacaactagaaatactgggtgacataggcaaaatcagacatttacctgatttcaattaactaaaattctaaaagaagaagttttgagtatttattaatcaacctagtattcaattttcattttcttttctaaatgaggaaataaggagaatattatggaatgatttttattcttcacagaagtaaaataagcatagtgtgttttgagtgttaagacacaaatgcaacttctcctttaccttactccaagcttgtttgtatggagaagttaagaccatcccatttctatgttatgccacaatgcttctctatagcacacaacttsgctctgaaattttgaaagtcaaaatactaatctactatgtgtctctgataaattgcctgaacgttacctgattttgaagtgctgcactcctaagactttttcttggaatgagttaaacgttttattccaagaatcctctactgagctagaaagcagagctgtgcatctctgtttcagtaaaaggaggtcaa

SEQ ID NO: 376450 - DNA, 470 bp, Homo sapiens
atagggaactgtggtttctgagaatgcaagatctgcactaataaaaggattagccacwgtgctacccaagagaaccagctaccaggaggaaagagggtctgtaaactgcaagatgatgacttcacttgatttccactgaggaaagctggtggctcagacttaaacttctccttcctagatggtaaacatctatggaaggttctatgaattataatgagttagtaaaacataatgcactgaatattagactatgtcagcagatcctgtaaccaaaactttctgaaaatataactatagtgggaggcaatggaaaagagactaaaggcttgaatggagaaaaaaagaaattaagtgtgtcttgtaagcctggcgtctgatcatgtcttagaggaagtaaggtataagctggccagagactcctttgtgacacaaaaggtgaagttacagacattccactaaatttaattttt

SEQ ID NO: 376451 - DNA, 636 bp, Homo sapiens
gaaagtatttgaaaagcgtgtatctgataagggacttacatatataggaaatataaataactcttgcaattaataaataacaagataagccaattttaaaaaatgggcaaggattttgaatagatatatctgcaaagaagatataaagatggawaagcacattaatagatgcttaatgtaattagtcattaggaaaatgtaaatcaaaaccacatgtggtatcacttcacaccacaggataaaatctttgttcaagaaaaaagagtgttaggaaaaatgtaaagaaattaaaacccttatctaatgctgctgggaatgtaaagtgatgcagccactttggaaaacaaactggcagctccttaaagggttaagcatgaagttaccatatgacacagaaattccagtcataagtatatactccagaaaaataaaaacatacgcaagcacaaaaactcatacataaatgtttacagcagcattattaatagtagtcaaaaggtggaaagaaccagaacgtctgtcacctttggctgggagagaacccaaaggtccatcacctggcgaatggataaataaaatgtttgatgtatccatacaatggaatattactcagcaataagaagaaattaagtacag

SEQ ID NO: 376452 - DNA, 636 bp, Homo sapiens
gaaagtatttgaaaagcgtgtatctgataagggacttacatatataggaaatataaataactcttgcaattaataaataacaagataagccaattttaaaaaatgggcaaggattttgaatagatatatctgcaaagaagatataaagatggataagcacattaatagatgcttaatgtaattagtcattaggaaaatgtaaatcaaaaccacatgtggtatcacttcacaccacaggataaaatctttgttcaagaaaaaagagtgtyaggaaaaatgtaaagaaattaaaacccttatctaatgctgctgggaatgtaaagtgatgcagccactttggaaaacaaactggcagctccttaaagggttaagcatgaagttaccatatgacacagaaattccagtcataagtatatactccagaaaaataaaaacatacgcaagcacaaaaactcatacataaatgtttacagcagcattattaatagtagtcaaaaggtggaaagaaccagaacgtctgtcacctttggctgggagagaacccaaaggtccatcacctggcgaatggataaataaaatgtttgatgtatccatacaatggaatattactcagcaataagaagaaattaagtacag

SEQ ID NO: 376453 - DNA, 636 bp, Homo sapiens
gaaagtatttgaaaagcgtgtatctgataagggacttacatatataggaaatataaataactcttgcaattaataaataacaagataagccaattttaaaaaatgggcaaggattttgaatagatatatctgcaaagaagatataaagatggataagcacattaatagatgcttaatgtaattagtcattaggaaaatgtaaatcaaaaccacatgtggtatcacttcacaccacaggataaaatctttgttcaagaaaaaagagtgttaggaaaaatgtaaagaaattaaaacccttatctaatgctgctgggaatgtaaagtgatgcagccactttggaaaacaaactggcagctccttaaagggttaagcatgaagttaccatatgacacasaaattccagtcataagtatatactccagaaaaataaaaacatacgcaagcacaaaaactcatacataaatgtttacagcagcattattaatagtagtcaaaaggtggaaagaaccagaacgtctgtcacctttggctgggagagaacccaaaggtccatcacctggcgaatggataaataaaatgtttgatgtatccatacaatggaatattactcagcaataagaagaaattaagtacag

SEQ ID NO: 376454 - DNA, 636 bp, Homo sapiens
gaaagtatttgaaaagcgtgtatctgataagggacttacatatataggaaatataaataactcttgcaattaataaataacaagataagccaattttaaaaaatgggcaaggattttgaatagatatatctgcaaagaagatataaagatggataagcacattaatagatgcttaatgtaattagtcattaggaaaatgtaaatcaaaaccacatgtggtatcacttcacaccacaggataaaatctttgttcaagaaaaaagagtgttaggaaaaatgtaaagaaattaaaacccttatctaatgctgctgggaatgtaaagtgatgcagccactttggaaaacaaactggcagctccttaaagggttaagcatgaagttaccatatgacacagaaattccagtcataagtatatactccagaaaaataaaaacatacgcaagcacaaaaactcatacataaatgtttacarcagcattattaatagtagtcaaaaggtggaaagaaccagaacgtctgtcacctttggctgggagagaacccaaaggtccatcacctggcgaatggataaataaaatgtttgatgtatccatacaatggaatattactcagcaataagaagaaattaagtacag

SEQ ID NO: 376455 - DNA, 552 bp, Homo sapiens
aaaaacatacgcaagcacaaaaactcatacataaatgtttacagcagcattattaatagtagtcaaaaggtggaaagaaccagaacgtctgtcacctttggctgggagagaacccaaaggtccatcacctggcgaatggataaataaaatgtttgatgtatccatacaatggaatattactcagcaataagaagaaattaagtacagataccgtattaggaggagacagcaaaatgcctakgcagatacggaagggtccccggagaatctccaacgagccccacaagtgtttacaccagatgttatgtgcagataagggaacctggacttgtcttgcctggacatgcccacagcagactggaggcccacatgcagtggggggatggggtggagtcaccaggaattcacaccttatgcagaggaggagcctggccgcttcagctcatgtgctcctggtattcaattgtgaggtggaaacctctttgcaggacccctctctttgctgagagctgtgctttcacataataaattctgccctcctcaatgtgtctg

SEQ ID NO: 376456 - DNA, 552 bp, Homo sapiens
aaaaacatacgcaagcacaaaaactcatacataaatgtttacagcagcattattaatagtagtcaaaaggtggaaagaaccagaacgtctgtcacctttggctgggagagaacccaaaggtccatcacctggcgaatggataaataaaatgtttgatgtatccatacaatggaatattactcagcaataagaagaaattaagtacagataccgtattaggaggagacagcaaaatgcctatgcagatamggaagggtccccggagaatctccaacgagccccacaagtgtttacaccagatgttatgtgcagataagggaacctggacttgtcttgcctggacatgcccacagcagactggaggcccacatgcagtggggggatggggtggagtcaccaggaattcacaccttatgcagaggaggagcctggccgcttcagctcatgtgctcctggtattcaattgtgaggtggaaacctctttgcaggacccctctctttgctgagagctgtgctttcacataataaattctgccctcctcaatgtgtctg

SEQ ID NO: 376457 - DNA, 552 bp, Homo sapiens
aaaaacatacgcaagcacaaaaactcatacataaatgtttacagcagcattattaatagtagtcaaaaggtggaaagaaccagaacgtctgtcacctttggctgggagagaacccaaaggtccatcacctggcgaatggataaataaaatgtttgatgtatccatacaatggaatattactcagcaataagaagaaattaagtacagataccgtattaggaggagacagcaaaatgcctatgcagatacggaagggtccccggagaatctccaacgagccccacaagtgtttacaccwgatgttatgtgcagataagggaacctggacttgtcttgcctggacatgcccacagcagactggaggcccacatgcagtggggggatggggtggagtcaccaggaattcacaccttatgcagaggaggagcctggccgcttcagctcatgtgctcctggtattcaattgtgaggtggaaacctctttgcaggacccctctctttgctgagagctgtgctttcacataataaattctgccctcctcaatgtgtctg

SEQ ID NO: 376458 - DNA, 573 bp, Homo sapiens
tcatgtgctcctggtattcaattgtgaggtggaaacctctttgcaggacccctctctttgctgagagctgtgctttcacataataaattctgccctcctcaatgtgtctgcakgcttaatttttcctggtcacgagagaagaacacagatgtagctgaactaaggagcaaaaacccagcatcaatacctgctacagcacagatgcagcatgaaaaattatgctaagtgaaataagccagtcccagcagaccacttgctttttatttcagaggcttataggcaaatctatacaaagaaggtgggtggttccctagggctgagggaggaagggaaaactagtgaagatggctaaatgatgtggggtttgtttttagggtgatgaaaatgttctaaaattaattgtaatgatgacggcataactctctgaaaatactaaagttaatgaattctatactttaaatgagtgaattgcatggcgtgttcattatttctcaataaacctgttaccccccaccccaaattaatttggtactagagatctgcagataggtactgcttggtttcaaatcactg

SEQ ID NO: 376459 - DNA, 611 bp, Homo sapiens
gccagctatcggtggtagtacaaggatgactttgtgctcaactgaaacccagctgaatatagaattgtgtasggaagtgttaatatggtgatagaatagaaacagtagcaaatgaactaaatcatactatgaatgcctacactaccattataactttttgaagaatgataataccacttactttattgccttttgaagtaggaatattttagtggatatcctatagatctgaaaccttataaagaatcccaaagaagctggctggataaagcctgctatggatgtctttatactcaaagactgatgaggcaattcgaatatgtgtccccaccaaatctcatgttgaattatgcttcctaatgttggaggtggatcctggtataaggtgattgaatcatgaaggcaaatttctcatgagtggttcagcaccatccccttggtactgtcctcacaatcatgagtgacttctcgtgagatctggccactgaaaactctatatcactccctactctccgtgatttcctcttgccatgtgagacaattcactctttcattaccttgcacaatgattgaaagatttctgaggccccccagaagaagaagcactaagc

SEQ ID NO: 376460 - DNA, 611 bp, Homo sapiens
gccagctatcggtggtagtacaaggatgactttgtgctcaactgaaacccagctgaatatagaattgtgtaggraagtgttaatatggtgatagaatagaaacagtagcaaatgaactaaatcatactatgaatgcctacactaccattataactttttgaagaatgataataccacttactttattgccttttgaagtaggaatattttagtggatatcctatagatctgaaaccttataaagaatcccaaagaagctggctggataaagcctgctatggatgtctttatactcaaagactgatgaggcaattcgaatatgtgtccccaccaaatctcatgttgaattatgcttcctaatgttggaggtggatcctggtataaggtgattgaatcatgaaggcaaatttctcatgagtggttcagcaccatccccttggtactgtcctcacaatcatgagtgacttctcgtgagatctggccactgaaaactctatatcactccctactctccgtgatttcctcttgccatgtgagacaattcactctttcattaccttgcacaatgattgaaagatttctgaggccccccagaagaagaagcactaagc

SEQ ID NO: 376461 - DNA, 578 bp, Homo sapiens
tggaagcaacttcggaactgggtaatgrgtagaggttggaagagtttggagggctccaaagaagacagacagatgagaacatttttggatcatcttagagactggttaaatggctgtgacaagaatgctgacaaaaacatggacagtgaaggccaggctgagggggcctcagataaaaataagaagctttctggaaaatgtctctcttttggatatggaaagcttacacaatgcctgtaccatcattgtaccttagacgcagtgaacttgctttttatttcagagactcgtaggcaaaagagaatgtagccttgacccagatgagactttggactttgtaactttgagttaatgctgaaatgagttaagactttgggagactgctggcaaggcatgactgtatcttgcaatgtgagaaggacatgagatttgtggggtcagggacagaataatacggtttttctctatgccccttccaaaactcatgtgaaagtacactccctaatgttagagtcggggcctaggtggaaaaagttttaatcataaaggggtgggagtggatccttcacaaatggcaa

SEQ ID NO: 376462 - DNA, 578 bp, Homo sapiens
tggaagcaacttcggaactgggtaatgggtagaggttggaagagtttggagggctccaaagaagacagacagatgagaacatttttggatcatcttagagactggttaaatggctgtgacaagaatgctgacaaaaacatggacagtgaaggccaggctgagggggcctcagataaaaataagaagctttctggaaaatgtctcycttttggatatggaaagcttacacaatgcctgtaccatcattgtaccttagacgcagtgaacttgctttttatttcagagactcgtaggcaaaagagaatgtagccttgacccagatgagactttggactttgtaactttgagttaatgctgaaatgagttaagactttgggagactgctggcaaggcatgactgtatcttgcaatgtgagaaggacatgagatttgtggggtcagggacagaataatacggtttttctctatgccccttccaaaactcatgtgaaagtacactccctaatgttagagtcggggcctaggtggaaaaagttttaatcataaaggggtgggagtggatccttcacaaatggcaa

SEQ ID NO: 376463 - DNA, 578 bp, Homo sapiens
tggaagcaacttcggaactgggtaatgggtagaggttggaagagtttggagggctccaaagaagacagacagatgagaacatttttggatcatcttagagactggttaaatggctgtgacaagaatgctgacaaaaacatggacagtgaaggccaggctgagggggcctcagataaaaataagaagctttctggaaaatgtctctcttttggatatggaaagcttacacaatgcctgtaccatcattgtaccttagacrcagtgaacttgctttttatttcagagactcgtaggcaaaagagaatgtagccttgacccagatgagactttggactttgtaactttgagttaatgctgaaatgagttaagactttgggagactgctggcaaggcatgactgtatcttgcaatgtgagaaggacatgagatttgtggggtcagggacagaataatacggtttttctctatgccccttccaaaactcatgtgaaagtacactccctaatgttagagtcggggcctaggtggaaaaagttttaatcataaaggggtgggagtggatccttcacaaatggcaa

SEQ ID NO: 376464 - DNA, 297 bp, Homo sapiens
gactggttaaatggctgtgacaagaatgctgacaaaaacatggacagtgaaggccaggctgagggggcctcagataaaaataagaagctttctggaaaatgtctctcttttggatatggaaagcttacacaatgcctgtaccatcattgtaccttagacgcagtgaacttgctttttatttcagagactygtaggcaaaagagaatgtagccttgacccagatgagactttggactttgtaactttgagttaatgctgaaatgagttaagactttgggagactgctggcaaggcatg

SEQ ID NO: 376465 - DNA, 297 bp, Homo sapiens
gactggttaaatggctgtgacaagaatgctgacaaaaacatggacagtgaaggccaggctgagggggcctcagataaaaataagaagctttctggaaaatgtctctcttttggatatggaaagcttacacaatgcctgtaccatcattgtaccttagacgcagtgaacttgctttttatttcagagactcgtaggcaaaagagaatgtagccttgacccagatgagactttgsactttgtaactttgagttaatgctgaaatgagttaagactttgggagactgctggcaaggcatg

SEQ ID NO: 376466 - DNA, 212 bp, Homo sapiens
ctgaaaggacaaaggtaaaggaagrgccagagtggctgcagagatggtcacagtctatgggctgcacaggatgaaggaggccagggaacaggcagggtgggcagttggggttcagggagaggcaggtgcatgctgggaggtcagaccctgtgagggctttgggggcgtcaggttgggtaggctccaggcactctcactcacataggattcca

SEQ ID NO: 376467 - DNA, 212 bp, Homo sapiens
ctgaaaggacaaaggtaaaggaagagcyagagtggctgcagagatggtcacagtctatgggctgcacaggatgaaggaggccagggaacaggcagggtgggcagttggggttcagggagaggcaggtgcatgctgggaggtcagaccctgtgagggctttgggggcgtcaggttgggtaggctccaggcactctcactcacataggattcca

SEQ ID NO: 376468 - DNA, 449 bp, Homo sapiens
caggcagggtgggcagttggggttcagggagaggcaggtgcatgctgggaggtcagaccctgtgagggctttgggggcgtcagsttgggtaggctccaggcactctcactcacataggattccagaacactgctacaaggctctgagtgtttgtccctcacgtaggattccagaacactgctgccattgtctgaatgtttgtcccccacataggattccagaagcctgctgctggggtctgaatgtttgtcccccatctaggattccagaacactgctgtgagggtctgaatgtctgtccctcacatatgattctagaacagtgatgctagggtatgtttgcccttaacatatgatttcaaaacactgctcctggattctgaatgtttgtccttcacataggaatacagaacactgctgctggagtctggaagtttgtcactcacatag

SEQ ID NO: 376469 - DNA, 449 bp, Homo sapiens
caggcagggtgggcagttggggttcagggagaggcaggtgcatgctgggaggtcagaccctgtgagggctttgggggcgtcaggttgggtaggctccaggcactctcactcacataggattccagaacactgctacaaggctctgagtgtttgtccctcacgtaggattccagaacactgmtgccattgtctgaatgtttgtcccccacataggattccagaagcctgctgctggggtctgaatgtttgtcccccatctaggattccagaacactgctgtgagggtctgaatgtctgtccctcacatatgattctagaacagtgatgctagggtatgtttgcccttaacatatgatttcaaaacactgctcctggattctgaatgtttgtccttcacataggaatacagaacactgctgctggagtctggaagtttgtcactcacatag

SEQ ID NO: 376470 - DNA, 246 bp, Homo sapiens
tcactcacatagaattccagaacactgctgtgaggatctgaatgtttgaccctyacatgggattccagaacactgctgcgagggtctaaatgtctgtccctcacataggtttcccgaacaatgttacgaggttctgaatgtttgtccctaacataggatttcagagcactcctgctgtgctctgaatgcttctccctcacataggattccagaacactgctacgagggtctgaatgcttatccctc

SEQ ID NO: 376471 - DNA, 246 bp, Homo sapiens
tcactcacatagaattccagaacactgctgtgaggatctgaatgtttgaccctcacatgggattccagaacactgctgcgagggtctaaatgtctgtccctcacataggtttcccgaacaatgttacgaggttctgaatgtttgtccctaacataggatttcrgagcactcctgctgtgctctgaatgcttctccctcacataggattccagaacactgctacgagggtctgaatgcttatccctc

SEQ ID NO: 376472 - DNA, 328 bp, Homo sapiens
caagggtctgaatgtttgtccctcacataggattccagaatactcctgctatggtcttaatgcttgtccctcacataggattccagaacattcatgttggggtctgaatgtttgcccttataggatttcagaacagtgttcctggggtctgaatgtttgtccttcatataggatttaagaacacwcctgctttggtctgaaagtttgtccctcacataggattccagaactctcctgctgtggtctgaaagtttgtccttcacgtaggattccagaacactgctgctgtggtttgaatgtttgtccctcacataagattccagaacac

SEQ ID NO: 376473 - DNA, 328 bp, Homo sapiens
caagggtctgaatgtttgtccctcacataggattccagaatactcctgctatggtcttaatgcttgtccctcacataggattccagaacattcatgttggggtctgaatgtttgcccttataggatttcagaacagtgttcctggggtctgaatgtttgtccttcatataggatttaagaacactcctgctttkgtctgaaagtttgtccctcacataggattccagaactctcctgctgtggtctgaaagtttgtccttcacgtaggattccagaacactgctgctgtggtttgaatgtttgtccctcacataagattccagaacac

SEQ ID NO: 376474 - DNA, 328 bp, Homo sapiens
caagggtctgaatgtttgtccctcacataggattccagaatactcctgctatggtcttaatgcttgtccctcacataggattccagaacattcatgttggggtctgaatgtttgcccttataggatttcagaacagtgttcctggggtctgaatgtttgtccttcatataggatttaagaacactcctgctttggtctgaaagtttgtccctcacataggattccagaactctcctgctgtggtctgaaagtttgtccttcacrtaggattccagaacactgctgctgtggtttgaatgtttgtccctcacataagattccagaacac

SEQ ID NO: 376475 - DNA, 328 bp, Homo sapiens
caagggtctgaatgtttgtccctcacataggattccagaatactcctgctatggtcttaatgcttgtccctcacataggattccagaacattcatgttggggtctgaatgtttgcccttataggatttcagaacagtgttcctggggtctgaatgtttgtccttcatataggatttaagaacactcctgctttggtctgaaagtttgtccctcacataggattccagaactctcctgctgtggtctgaaagtttgtccttcacgtaggattccagaacactgctgctgtggtttgaatrtttgtccctcacataagattccagaacac

SEQ ID NO: 376476 - DNA, 491 bp, Homo sapiens
tatgtgtgcttatacacaagtgaaataaggaacaataatacaaggaatggaatggaaggatgggagggaggaatcaggtgttttctttgttaagcaggtagtcacccatgaagtgggatagtgttatctgaaagtggacttgaattggttgtaaatgtatattgaggaattaggtgtgttctttkttaagcaggtagtcttatttgtgggatagtgggatagtgttatttgaaagtggacttgaatttgttgtaaatgttactgaggaattaggtgttttgttaagcaggtagtcttattcgtgggatagtgggatagtgttatttgaaagtggacttgaattggttgtaaatgtatattgcaaattctgtggcaactacttaaaaaaaagttttaaaaagagaaggacatgctaagaaagacagggaaaatgtagtcatctaaaatcatcaatgaaaactgcaaaaggcagaaaaagagtggtagacaaa

SEQ ID NO: 376477 - DNA, 491 bp, Homo sapiens
tatgtgtgcttatacacaagtgaaataaggaacaataatacaaggaatggaatggaaggatgggagggaggaatcaggtgttttctttgttaagcaggtagtcacccatgaagtgggatagtgttatctgaaagtggacttgaattggttgtaaatgtatattgaggaattaggtgtgttctttgttaagcaggtagtcttatttgtgggatagtgggatagtgttatttgaaagtggacttgaatttgttgtaaatgttactgaggaattaggtgttttgttaagcaggtagtcttattcgtgggatagtgggatagtgttatttgaaagtggacttgaattggttgtaaatgtatattgcaaattctgtggcaactacttaaaaaaaagttttaaaaagagaagkacatgctaagaaagacagggaaaatgtagtcatctaaaatcatcaatgaaaactgcaaaaggcagaaaaagagtggtagacaaa

SEQ ID NO: 376478 - DNA, 522 bp, Homo sapiens
cagttactcactgagcccaaagtcatttttcatgaacccttcacaacactgataasctattgaaaaatgattgaaaacaaaaaagcttattgctttccaagtccttttaaagccttctcatgtgtcatttcatataatccttataacgaatctatggagtatatactgactttatctctgtacagaaaagaaaactgagtcatattcagaataagttgcaaagtttcccagataatcagtgtcataggtgaaatttgatgtcacagtgtagtcaagtgtaatttagggaagcagtacaaatgacggttgaaagcacaggttctggggtaaatagcctgaagtcaaaatctagttcatagcctcagtggctgtgtgatcttgggaaatttcccttaactctctgtgtcttggttttatagtttcatccatttttgcctctcatatgagctggtgagcattacactagtttatgcttctaggacactgaaaacagtacctggctcttgataaatattaacaatt

SEQ ID NO: 376479 - DNA, 522 bp, Homo sapiens
cagttactcactgagcccaaagtcatttttcatgaacccttcacaacactgataacctattgaaaaatgattgaaaacaaaaaagcttattgctttccaagtccttttaaagccttctcatgtgtcatttcatataatccttataacgaatctatggagtatatactgactttatctctgtacagaaaagaaaactgagtcatattcagaataagttgcaaagttycccagataatcagtgtcataggtgaaatttgatgtcacagtgtagtcaagtgtaatttagggaagcagtacaaatgacggttgaaagcacaggttctggggtaaatagcctgaagtcaaaatctagttcatagcctcagtggctgtgtgatcttgggaaatttcccttaactctctgtgtcttggttttatagtttcatccatttttgcctctcatatgagctggtgagcattacactagtttatgcttctaggacactgaaaacagtacctggctcttgataaatattaacaatt

SEQ ID NO: 376480 - DNA, 522 bp, Homo sapiens
cagttactcactgagcccaaagtcatttttcatgaacccttcacaacactgataacctattgaaaaatgattgaaaacaaaaaagcttattgctttccaagtccttttaaagccttctcatgtgtcatttcatataatccttataacgaatctatggagtatatactgactttatctctgtacagaaaagaaaactgagtcatattcagaataagttgcaaagtttcccagataatcagtgtcataggtgaaatttgatgtcacagtgtagtcaagtgtaatttarggaagcagtacaaatgacggttgaaagcacaggttctggggtaaatagcctgaagtcaaaatctagttcatagcctcagtggctgtgtgatcttgggaaatttcccttaactctctgtgtcttggttttatagtttcatccatttttgcctctcatatgagctggtgagcattacactagtttatgcttctaggacactgaaaacagtacctggctcttgataaatattaacaatt

SEQ ID NO: 376481 - DNA, 606 bp, Homo sapiens
ctctctgtgtcttggttttatagtttcatccawttttgcctctcatatgagctggtgagcattacactagtttatgcttctaggacactgaaaacagtacctggctcttgataaatattaacaattttgtttcattgtcttcaccttgagtatttcatggccagatggaaatcaatgtcaatatgaaaaaatgttcataattcagcaggaagaaatacaaaaccatataaacaactttgttttactggcaagtgtattgggaagctatgttaaattgagaaggggaagggaaagcctctaagggcatcgattaatcaatgaccgaaagctgatgagacttgtctggaatttttttttggagactctgatacttaaaattttgacaaaataaggagatgaactgagtagtgtggaacagacattttgtgaagtcagcagagaaaggagagacaaatatggtaaggggaaaatggtatgaactaataatatctatgaagtgctttctaaagtataacacatgtaagttgtgttaaatgtaaactatcatgattatatcattactgtctgactgatacaactatatccacctcagttagccacataaga

SEQ ID NO: 376482 - DNA, 606 bp, Homo sapiens
ctctctgtgtcttggttttatagtttcatccatttttgmctctcatatgagctggtgagcattacactagtttatgcttctaggacactgaaaacagtacctggctcttgataaatattaacaattttgtttcattgtcttcaccttgagtatttcatggccagatggaaatcaatgtcaatatgaaaaaatgttcataattcagcaggaagaaatacaaaaccatataaacaactttgttttactggcaagtgtattgggaagctatgttaaattgagaaggggaagggaaagcctctaagggcatcgattaatcaatgaccgaaagctgatgagacttgtctggaatttttttttggagactctgatacttaaaattttgacaaaataaggagatgaactgagtagtgtggaacagacattttgtgaagtcagcagagaaaggagagacaaatatggtaaggggaaaatggtatgaactaataatatctatgaagtgctttctaaagtataacacatgtaagttgtgttaaatgtaaactatcatgattatatcattactgtctgactgatacaactatatccacctcagttagccacataaga

SEQ ID NO: 376483 - DNA, 579 bp, Homo sapiens
ccatataaacaactttgttttactggcaagtgwattgggaagctatgttaaattgagaaggggaagggaaagcctctaagggcatcgattaatcaatgaccgaaagctgatgagacttgtctggaatttttttttggagactctgatacttaaaattttgacaaaataaggagatgaactgagtagtgtggaacagacattttgtgaagtcagcagagaaaggagagacaaatatggtaaggggaaaatggtatgaactaataatatctatgaagtgctttctaaagtataacacatgtaagttgtgttaaatgtaaactatcatgattatatcattactgtctgactgatacaactatatccacctcagttagccacataagatcaattttcctataccttagagaataccagtaacctccagttcagaaacagcataaatatttatccacagctgagcagacacatacagctagctaccagatgaaatgggctatatcttcaaatactattgttttctgttttttaattgtggcaaaacacactcaacaatttgcatcttaaccactgttaagtata

SEQ ID NO: 376484 - DNA, 606 bp, Homo sapiens
ctctctgtgtcttggttttatagtttcatccatttttgcctctcatatgagctggtgagcattacactagtttatgcttctaggacactgaaaacagtacctggctcttgataaatattaacaattttgtttcattgtcttcaccttgagtatttcatggccagatggaaatcaatgtcaatatgaaaaaatgttcataattcagcaggaagaaatacaaaaccatataaacaactttgttttactggcaagtgtattgggaagctatgttaaattgagaaggggaagggaaagcctctaagggcatcgattaatcaatgaccraaagctgatgagacttgtctggaatttttttttggagactctgatacttaaaattttgacaaaataaggagatgaactgagtagtgtggaacagacattttgtgaagtcagcagagaaaggagagacaaatatggtaaggggaaaatggtatgaactaataatatctatgaagtgctttctaaagtataacacatgtaagttgtgttaaatgtaaactatcatgattatatcattactgtctgactgatacaactatatccacctcagttagccacataaga

SEQ ID NO: 376485 - DNA, 606 bp, Homo sapiens
ctctctgtgtcttggttttatagtttcatccatttttgcctctcatatgagctggtgagcattacactagtttatgcttctaggacactgaaaacagtacctggctcttgataaatattaacaattttgtttcattgtcttcaccttgagtatttcatggccagatggaaatcaatgtcaatatgaaaaaatgttcataattcagcaggaagaaatacaaaaccatataaacaactttgttttactggcaagtgtattgggaagctatgttaaattgagaaggggaagggaaagcctctaagggcatcgattaatcaatgaccgaaagctgrtgagacttgtctggaatttttttttggagactctgatacttaaaattttgacaaaataaggagatgaactgagtagtgtggaacagacattttgtgaagtcagcagagaaaggagagacaaatatggtaaggggaaaatggtatgaactaataatatctatgaagtgctttctaaagtataacacatgtaagttgtgttaaatgtaaactatcatgattatatcattactgtctgactgatacaactatatccacctcagttagccacataaga

SEQ ID NO: 376486 - DNA, 552 bp, Homo sapiens
acattttgtgaagtcagcagagaaaggagagacaaatatggtaaggggaaaatggtatgaactaataatatctatgaagtgctttctaaagtataacacatgtaagttgtgttaaatgtaaactatcatgattatatcattactstctgactgatacaactatatccacctcagttagccacataagatcaattttcctataccttagagaataccagtaacctccagttcagaaacagcataaatatttatccacagctgagcagacacatacagctagctaccagatgaaatgggctatatcttcaaatactattgttttctgttttttaattgtggcaaaacacactcaacaatttgcatcttaaccactgttaagtatacaattcggtgtcattaaatgtattcacaatgttgtgcaagcatcaccaccacccatctccataattctttttgtcttgtaaaattgaaaccctgtacccattaaaagtgactccccattccccacccccccagggcaactacagctttgctttctgtcttgatgaatca

SEQ ID NO: 376487 - DNA, 586 bp, Homo sapiens
aaacaactttgttttactggcaagtgtattgggaagctatgttaaattgagaaggggaagggaaagcctctaagggcatcgattaatcaatgaccgaaagctgatgagacttgtctggaatttttttttggagactctgatacttaaaattttgacaaaataaggagatgaactgagtagtgtggaacagacattttgtgaagtcagcagagaaaggagagacaaatatggtaaggggaaaatggtatgaactaataatatctatgaagtgctttctaaagtataacacatgtaagttgtgttaaatgtaaactatcatgattatatcattactgtctgactgatacaactatatccacctcagttagccacataagatcaattttcctatacsttagagaataccagtaacctccagttcagaaacagcataaatatttatccacagctgagcagacacatacagctagctaccagatgaaatgggctatatcttcaaatactattgttttctgttttttaattgtggcaaaacacactcaacaatttgcatcttaaccactgttaagtatacaattcggtgtca

SEQ ID NO: 376488 - DNA, 642 bp, Homo sapiens
tattgggaagctatgttaaattgagaaggggaagggaaagcctctaagggcatcgattaatcaatgaccgaaagctgatgagacttgtctggaatttttttttggagactctgatacttaaaattttgacaaaataaggagatgaactgagtagtgtggaacagacattttgtgaagtcagcagagaaaggagagacaaatatggtaaggggaaaatggtatgaactaataatatctatgaagtgctttctaaagtataacacatgtaagttgtgttaaatgtaaactatcatgattatatcattactgtctgactgatacaactatatccacctcagttagccacataagatcaattttcctataccttagagaataccagtaacctccagttcagaaacagcataaatatytatccacagctgagcagacacatacagctagctaccagatgaaatgggctatatcttcaaatactattgttttctgttttttaattgtggcaaaacacactcaacaatttgcatcttaaccactgttaagtatacaattcggtgtcattaaatgtattcacaatgttgtgcaagcatcaccaccacccatctccataattctttttgtcttgtaaaattgaaaccctgt

SEQ ID NO: 376489 - DNA, 552 bp, Homo sapiens
acattttgtgaagtcagcagagaaaggagagacaaatatggtaaggggaaaatggtatgaactaataatatctatgaagtgctttctaaagtataacacatgtaagttgtgttaaatgtaaactatcatgattatatcattactgtctgactgatacaactatatccacctcagttagccacataagatcaattttcctataccttagagaataccagtaacctccagttcagaaacagcataaatatttatccacarctgagcagacacatacagctagctaccagatgaaatgggctatatcttcaaatactattgttttctgttttttaattgtggcaaaacacactcaacaatttgcatcttaaccactgttaagtatacaattcggtgtcattaaatgtattcacaatgttgtgcaagcatcaccaccacccatctccataattctttttgtcttgtaaaattgaaaccctgtacccattaaaagtgactccccattccccacccccccagggcaactacagctttgctttctgtcttgatgaatca

SEQ ID NO: 376490 - DNA, 642 bp, Homo sapiens
tattgggaagctatgttaaattgagaaggggaagggaaagcctctaagggcatcgattaatcaatgaccgaaagctgatgagacttgtctggaatttttttttggagactctgatacttaaaattttgacaaaataaggagatgaactgagtagtgtggaacagacattttgtgaagtcagcagagaaaggagagacaaatatggtaaggggaaaatggtatgaactaataatatctatgaagtgctttctaaagtataacacatgtaagttgtgttaaatgtaaactatcatgattatatcattactgtctgactgatacaactatatccacctcagttagccacataagatcaattttcctataccttagagaataccagtaacctccagttcagaaacagcataaatatttatccacagctgagcagacacatacagctagctaccagatgaaatgggctatatcttcaaatactattgttttctgttttttaattgtggcaaaacacactcaacaatttgcatcttaaccactgttaaktatacaattcggtgtcattaaatgtattcacaatgttgtgcaagcatcaccaccacccatctccataattctttttgtcttgtaaaattgaaaccctgt

SEQ ID NO: 376491 - DNA, 466 bp, Homo sapiens
ttgcttagtcttccatttaatgacaatttctatttagtatacaacagtccttccccctgcaatgcaatttcttcactctttaaagctctgagtctggctactggtctctgttatgtactcatccctagagccaagtcttcaaatatttctcagaacttcttcacatctaaaaatctaggattaatgtattgctctctgattatattcttctggtatttcaagtatcctgtataacttcttcatctgcccttgcttttcttctacatcaagatgtcaagttcatggacttcccaattaatcattttaaaaatgtatttcaagcctttatgagtcactamaatatacatatgttctcaggaattatggccctacaatttgtatgtgagaatagttcctgtgtcaggcattatggacataagaggaaataaattctagcccctgcctacaaggagctaattcccagcct

SEQ ID NO: 376492 - DNA, 466 bp, Homo sapiens
ttgcttagtcttccatttaatgacaatttctatttagtatacaacagtccttccccctgcaatgcaatttcttcactctttaaagctctgagtctggctactggtctctgttatgtactcatccctagagccaagtcttcaaatatttctcagaacttcttcacatctaaaaatctaggattaatgtattgctctctgattatattcttctggtatttcaagtatcctgtataacttcttcatctgcccttgcttttcttctacatcaagatgtcaagttcatggacttcccaattaatcattttaaaaatgtatttcaagcctttatgagtcactaaaatrtacatatgttctcaggaattatggccctacaatttgtatgtgagaatagttcctgtgtcaggcattatggacataagaggaaataaattctagcccctgcctacaaggagctaattcccagcct

SEQ ID NO: 376493 - DNA, 522 bp, Homo sapiens
ctggtccaaaaaagaagaaagcaagaaaaaaaggacaaagtatactggttagtatcataacagtgagatagcccccctttgagattagaaaataacagtatactcaaagtaacattaatgagaaccaacataaaatagacaacattcactatctacaaaagtaatctgcaccaattagcaatgtatgagcatgtggttgagaatattttctataatatgkgtactagaacgaagagacctcaagaaaatggtcagagctggaaatgtagattagggaatctaggtcaaagttttgagattttaggagtcctgagagaatttaaaaagagaaatagccaccaggcatggtggccacacctgtaatcccagcactttgggaggccaaggcatgaagatcatgaggtcaggagttaaagaccagtctggccaacaagtttcttatataggtaaacgtgttccatgatggtttgctgcacctatcaatccatcacctagatattaagccctgtgggcattagttat

SEQ ID NO: 376494 - DNA, 563 bp, Homo sapiens
tatgagtcactaaaatatacatatgttctcaggaattatggccctacaatttgtatgtgagaatagttcctgtgtcaggcattatggacataagaggaaataaattctagcccctgcctacaaggagctaattcccagcctaagacagattgcaagccaataatatgcagacttgtaagtctaaggaaactgattgggatgtacctaattckagctgggaatatcgaagaaaaactttttgaaagtcatgagacatgagctgtgcctaaaagagtaaaaaatagagagagaaataagaagaaataaattaaggaatgagatgggtaaaatagtagaaaaaggaaatctctttagataaaacagggtatgagagtatataggaggcttattaactcagtgtggttggagaaaacaggttgaaaggagaaataggggagaaagttacaaagggaatcaaacgtgttagtagttgagggaaaagcaaatattgaatacgacccatagatcttggataacccagtgtttggtagtagcttacataaaaggttgtgacaaaataacca

SEQ ID NO: 376495 - DNA, 522 bp, Homo sapiens
ctggtccaaaaaagaagaaagcaagaaaaaaaggacaaagtatactggttagtatcataacagtgagatagcccccctttgagattagaaaataacagtatactcaaagtaacattaatgagaaccaacataaaatagacaacattcactatctacaaaagtaatctgcaccaattagcaatgtatgagcatgtggttgagaatattttctataatatgtgtactagaasgaagagacctcaagaaaatggtcagagctggaaatgtagattagggaatctaggtcaaagttttgagattttaggagtcctgagagaatttaaaaagagaaatagccaccaggcatggtggccacacctgtaatcccagcactttgggaggccaaggcatgaagatcatgaggtcaggagttaaagaccagtctggccaacaagtttcttatataggtaaacgtgttccatgatggtttgctgcacctatcaatccatcacctagatattaagccctgtgggcattagttat

SEQ ID NO: 376496 - DNA, 541 bp, Homo sapiens
gggtatgagagtatataggaggcttattaactcagtgtggttggagaaaacaggttgaaaggagaaataggggagaaagttacaaagggaatcaaacgtgttagtagttgagggaaaagcaaatattgaatacgacccatagatcttggataacccagtgtttggtagtagcttacataaaargttgtgacaaaataaccagagatatgtggagaaaataataactgagtgttatatttcctctgagtagaaacctaaaaaaaaactgtaatcacacactgatcttttaactgacctccacttatcttgctgcctggattggcatacatattcctctgcctgaaaaattgctcaatacttttgaaaggttgtttctcactgttacacccaggcatttctgctaacaacagctgagttgtaaggggccctccaggagacctaggttgttctccttatcacatacattattttcatttatcaatttacctagaacatctaatgaaatattatggacaccaataacatgaatacaaatatagct

SEQ ID NO: 376497 - DNA, 541 bp, Homo sapiens
gggtatgagagtatataggaggcttattaactcagtgtggttggagaaaacaggttgaaaggagaaataggggagaaagttacaaagggaatcaaacgtgttagtagttgagggaaaagcaaatattgaatacgacccatagatcttggataacccagtgtttggtagtagcttacataaaaggttgtgacaaaataaccagagatatgtggagaaaataataactgagtgttatatttcctctsagtagaaacctaaaaaaaaactgtaatcacacactgatcttttaactgacctccacttatcttgctgcctggattggcatacatattcctctgcctgaaaaattgctcaatacttttgaaaggttgtttctcactgttacacccaggcatttctgctaacaacagctgagttgtaaggggccctccaggagacctaggttgttctccttatcacatacattattttcatttatcaatttacctagaacatctaatgaaatattatggacaccaataacatgaatacaaatatagct

SEQ ID NO: 376498 - DNA, 541 bp, Homo sapiens
gggtatgagagtatataggaggcttattaactcagtgtggttggagaaaacaggttgaaaggagaaataggggagaaagttacaaagggaatcaaacgtgttagtagttgagggaaaagcaaatattgaatacgacccatagatcttggataacccagtgtttggtagtagcttacataaaaggttgtgacaaaataaccagagatatgtggagaaaataataactgagtgttatatttcctctgagtagaaacctaaaaaaaaactgtaatcacacactgatcttttaactgacctccacttatcttgctgcctggattggcatacatattcctctgcctgaaaaattgctcaatacttttgaaaggttgtttctcactgttacacccaggcatttctgctaacaacagctgagttgtaaggggccctccaggagacctaggttgttctccttatcacatacattattttcatttatcaatttaccyagaacatctaatgaaatattatggacaccaataacatgaatacaaatatagct

SEQ ID NO: 376499 - DNA, 560 bp, Homo sapiens
tgttacacccaggcatttctgctaacaacagctgagttgtaaggggccctccaggagacctaggttgttctccttatcacatacattattttcatttatcaatttacctagaacatctaatgaaatattatggacaccaataacatgaatacaaatatagctatagaccctaaaaagtaaattgatgtctcttsaaaggctgtcatgtcttagatgctaaatttggagtatgtatttctaataaataaatagcttgctttaataattctgatttatgaatgtaacataggggagcagcttttatttcacccttaatcttaaaaaacaattagctgggtgtgggtggtgggcacctgtagtcccagctactcaggaggctgaagcaggaggatggtgtgcacctgggaggcggagcttgccataagccgaaattgtgccactgcactccagcctgagtgacagtgtgagactctgtctcaaaaaaaaaaaaaaaagatcatacacggagtaaatgatgatttagcataaaacacaactttagcctaaaacacagatcatag

SEQ ID NO: 376500 - DNA, 560 bp, Homo sapiens
tgttacacccaggcatttctgctaacaacagctgagttgtaaggggccctccaggagacctaggttgttctccttatcacatacattattttcatttatcaatttacctagaacatctaatgaaatattatggacaccaataacatgaatacaaatatagctatagaccctaaaaagtaaattgatgtctcttcaaaggctgtcatgtcttagatgmtaaatttggagtatgtatttctaataaataaatagcttgctttaataattctgatttatgaatgtaacataggggagcagcttttatttcacccttaatcttaaaaaacaattagctgggtgtgggtggtgggcacctgtagtcccagctactcaggaggctgaagcaggaggatggtgtgcacctgggaggcggagcttgccataagccgaaattgtgccactgcactccagcctgagtgacagtgtgagactctgtctcaaaaaaaaaaaaaaaagatcatacacggagtaaatgatgatttagcataaaacacaactttagcctaaaacacagatcatag

SEQ ID NO: 376501 - DNA, 573 bp, Homo sapiens
taataattctgatttatgaatgtaacataggggagcagcttttatttcacccttaatcttaaaaaacaattagctgggtgtgggtggtgggcacctgtagtcccagctactcaggaggctgaagcaggaggatggtgtgcacctgggaggcggagcttgccataagccgaaawtgtgccactgcactccagcctgagtgacagtgtgagactctgtctcaaaaaaaaaaaaaaaagatcatacacggagtaaatgatgatttagcataaaacacaactttagcctaaaacacagatcatagggctcaaactttgttattttatgggattatactaatcagttaataatcaaaatttaccatttcaaaagaagaaatattggtctgggaaaattgccattgcttatacagaagaatggaggaatctttttgagaacaacaattctagtgatcttcctcatcactggttccaaaaccaagcccatgaaaggcctgcatagggataatgtggagaacatgccagagaaatacacatcaccagctcctcaactcagagctccaagggaatggccaag

SEQ ID NO: 376502 - DNA, 573 bp, Homo sapiens
taataattctgatttatgaatgtaacataggggagcagcttttatttcacccttaatcttaaaaaacaattagctgggtgtgggtggtgggcacctgtagtcccagctactcaggaggctgaagcaggaggatggtgtgcacctgggaggcggagcttgccataagccgaaattgtgccactgcactccagcctgagtgacagtgtgagactctgtctcaaaaaaaaaaaaaaaaratcatacacggagtaaatgatgatttagcataaaacacaactttagcctaaaacacagatcatagggctcaaactttgttattttatgggattatactaatcagttaataatcaaaatttaccatttcaaaagaagaaatattggtctgggaaaattgccattgcttatacagaagaatggaggaatctttttgagaacaacaattctagtgatcttcctcatcactggttccaaaaccaagcccatgaaaggcctgcatagggataatgtggagaacatgccagagaaatacacatcaccagctcctcaactcagagctccaagggaatggccaag

SEQ ID NO: 376503 - DNA, 573 bp, Homo sapiens
taataattctgatttatgaatgtaacataggggagcagcttttatttcacccttaatcttaaaaaacaattagctgggtgtgggtggtgggcacctgtagtcccagctactcaggaggctgaagcaggaggatggtgtgcacctgggaggcggagcttgccataagccgaaattgtgccactgcactccagcctgagtgacagtgtgagactctgtctcaaaaaaaaaaaaaaaagatcatacayggagtaaatgatgatttagcataaaacacaactttagcctaaaacacagatcatagggctcaaactttgttattttatgggattatactaatcagttaataatcaaaatttaccatttcaaaagaagaaatattggtctgggaaaattgccattgcttatacagaagaatggaggaatctttttgagaacaacaattctagtgatcttcctcatcactggttccaaaaccaagcccatgaaaggcctgcatagggataatgtggagaacatgccagagaaatacacatcaccagctcctcaactcagagctccaagggaatggccaag

SEQ ID NO: 376504 - DNA, 573 bp, Homo sapiens
taataattctgatttatgaatgtaacataggggagcagcttttatttcacccttaatcttaaaaaacaattagctgggtgtgggtggtgggcacctgtagtcccagctactcaggaggctgaagcaggaggatggtgtgcacctgggaggcggagcttgccataagccgaaattgtgccactgcactccagcctgagtgacagtgtgagactctgtctcaaaaaaaaaaaaaaaagatcatacacggagtaaatgatgatttagcataaaacacaactttagcctaaaacacagatcatagggctcaaactttgttattttatgggattatactaatcagttaataatcaaaatttaccatttcaaaagaagaaatattggtctgggaaaattgccrttgcttatacagaagaatggaggaatctttttgagaacaacaattctagtgatcttcctcatcactggttccaaaaccaagcccatgaaaggcctgcatagggataatgtggagaacatgccagagaaatacacatcaccagctcctcaactcagagctccaagggaatggccaag

SEQ ID NO: 376505 - DNA, 639 bp, Homo sapiens
gagaaatacacatcaccagctcctcaactcagagctccaagggaatggcyaaggaagctgtattgtcctaagaaatttgagactgttttgacttacaataaatcctgctcaatcatatgtatgtatacacacacacacacccacacacacagacggtgttgtcagtgaagcctctaacaatgcatcttgactggacagatttgacaattaaaatggctggaagaaaataggcttcataagtgtcacttactattcacattacacattaaaaggacatctcctaaattaaatcttgtctttgataaaaaggcagaaaatcatgacccaaggctcatttataactgcagaaatgttcaagatagaccaaggcttgctatgtttaggaactgacaagtacaggtctttataatctaccattttgcctcatttgataccaggtgaccttcataatgcaggcaatagagaattgcaagatttgtcagagatttcaggtctttggaaagctatgctctttcacaagaacagccatggaaacaggaataaagtcaattcccacttaaggtaatcagaatttacaaatattccttttttcattgaaatctcaataggcacttcaatattatatttaattaattcttt

SEQ ID NO: 376506 - DNA, 576 bp, Homo sapiens
gttattttatgggattatactaatcagttaataatcaaaatttaccatttcaaaagaagaaatattggtctgggaaaattgccattgcttatacagaagaatggaggaatctttttgagaacaacaattctagtgatcttcctcatcactggttccaaaaccaagcccatgaaaggcctgcatagggataatgtggagaacatgccagagaaatacacatcaccagctcctcaactcagagctccaagggaatggccaaggargctgtattgtcctaagaaatttgagactgttttgacttacaataaatcctgctcaatcatatgtatgtatacacacacacacacccacacacacagacggtgttgtcagtgaagcctctaacaatgcatcttgactggacagatttgacaattaaaatggctggaagaaaataggcttcataagtgtcacttactattcacattacacattaaaaggacatctcctaaattaaatcttgtctttgataaaaaggcagaaaatcatgacccaaggctcatttataactgcagaaatgttcaagatagaccaagg

SEQ ID NO: 376507 - DNA, 639 bp, Homo sapiens
gagaaatacacatcaccagctcctcaactcagagctccaagggaatggccaaggaagctgtattktcctaagaaatttgagactgttttgacttacaataaatcctgctcaatcatatgtatgtatacacacacacacacccacacacacagacggtgttgtcagtgaagcctctaacaatgcatcttgactggacagatttgacaattaaaatggctggaagaaaataggcttcataagtgtcacttactattcacattacacattaaaaggacatctcctaaattaaatcttgtctttgataaaaaggcagaaaatcatgacccaaggctcatttataactgcagaaatgttcaagatagaccaaggcttgctatgtttaggaactgacaagtacaggtctttataatctaccattttgcctcatttgataccaggtgaccttcataatgcaggcaatagagaattgcaagatttgtcagagatttcaggtctttggaaagctatgctctttcacaagaacagccatggaaacaggaataaagtcaattcccacttaaggtaatcagaatttacaaatattccttttttcattgaaatctcaataggcacttcaatattatatttaattaattcttt

SEQ ID NO: 376508 - DNA, 400 bp, Homo sapiens
atacacatcaccagctcctcaactcagagctccaagggaatggccaaggaagctgtattgtccwaagaaatttgagactgttttgacttacaataaatcctgctcaatcatatgtatgtatacacacacacacacccacacacacagacggtgttgtcagtgaagcctctaacaatgcatcttgactggacagatttgacaattaaaatggctggaagaaaataggcttcataagtgtcacttactattcacattacacattaaaaggacatctcctaaattaaatcttgtctttgataaaaaggcagaaaatcatgacccaaggctcatttataactgcagaaatgttcaagatagaccaaggcttgctatgtttaggaactgacaagtacaggtcttt

SEQ ID NO: 376509 - DNA, 400 bp, Homo sapiens
atacacatcaccagctcctcaactcagagctccaagggaatggccaaggaagctgtattgtcctaagaaatttgagactgttttgacttacaataaatcctgcwcaatcatatgtatgtatacacacacacacacccacacacacagacggtgttgtcagtgaagcctctaacaatgcatcttgactggacagatttgacaattaaaatggctggaagaaaataggcttcataagtgtcacttactattcacattacacattaaaaggacatctcctaaattaaatcttgtctttgataaaaaggcagaaaatcatgacccaaggctcatttataactgcagaaatgttcaagatagaccaaggcttgctatgtttaggaactgacaagtacaggtcttt

SEQ ID NO: 376510 - DNA, 400 bp, Homo sapiens
atacacatcaccagctcctcaactcagagctccaagggaatggccaaggaagctgtattgtcctaagaaatttgagactgttttgacttacaataaatcctgctcaatcatatgtatgtatacacacacacacasccacacacacagacggtgttgtcagtgaagcctctaacaatgcatcttgactggacagatttgacaattaaaatggctggaagaaaataggcttcataagtgtcacttactattcacattacacattaaaaggacatctcctaaattaaatcttgtctttgataaaaaggcagaaaatcatgacccaaggctcatttataactgcagaaatgttcaagatagaccaaggcttgctatgtttaggaactgacaagtacaggtcttt

SEQ ID NO: 376511 - DNA, 522 bp, Homo sapiens
ctggtccaaaaaagaagaaagcaagaaaaaaaggacaaagtatactggttagtatcataacagtgagatagcccccctttgagattagaaaataacagtatactcaaagtaacattaatgagaaccaacataaaatagacaacattcactatctacaaaagtaatctgcaccaattagcaatgtatgagcatgtggttgagaatattttctataatatgtgtactagaacgaagagacctcaagaaaatggtcagagctggaaatgtagattagggaatctaggtcaaagttttgagattttaggagtcctgagagaatttaaaaagagaaatagccaccaggcatggtggccacacctgtaatcccagcactttgggaggccaaggcatgaagatcatgaggtcaggagttmaagaccagtctggccaacaagtttcttatataggtaaacgtgttccatgatggtttgctgcacctatcaatccatcacctagatattaagccctgtgggcattagttat

SEQ ID NO: 376512 - DNA, 454 bp, Homo sapiens
ggctcatttataactgcagaaatgttcaagatagaccaaggcttgctatgtttaggaactgacaagtacaggtctttataatctaccattttgcctcatttgataccaggtgaccttcataatgcaggcaatagagaattgcaagatttgtcagagatttcaggtctttggaaagctatgctctttcacaagaacagccatggaaacaggaataaagtcaattcccacttaaggtaatcagaatttacaaatattcctyttttcattgaaatctcaataggcacttcaatattatatttaattaattcttttgttacaatcatgcatcacataacaacattttggtcaaggatagtgcacatgtatttcagtggtgcaataaaatcataacactgtacttttactgtacctcttgtatgtttagacatgtatagatacacttactgtatagata

SEQ ID NO: 376513 - DNA, 454 bp, Homo sapiens
ggctcatttataactgcagaaatgttcaagatagaccaaggcttgctatgtttaggaactgacaagtacaggtctttataatctaccattttgcctcatttgataccaggtgaccttcataatgcaggcaatagagaattgcaagatttgtcagagatttcaggtctttggaaagctatgctctttcacaagaacagccatggaaacaggaataaagtcaattcccacttaaggtaatcagaatttacaaatattcctttyttcattgaaatctcaataggcacttcaatattatatttaattaattcttttgttacaatcatgcatcacataacaacattttggtcaaggatagtgcacatgtatttcagtggtgcaataaaatcataacactgtacttttactgtacctcttgtatgtttagacatgtatagatacacttactgtatagata

SEQ ID NO: 376514 - DNA, 454 bp, Homo sapiens
ggctcatttataactgcagaaatgttcaagatagaccaaggcttgctatgtttaggaactgacaagtacaggtctttataatctaccattttgcctcatttgataccaggtgaccttcataatgcaggcaatagagaattgcaagatttgtcagagatttcaggtctttggaaagctatgctctttcacaagaacagccatggaaacaggaataaagtcaattcccacttaaggtaatcagaatttacaaatattccttttttcattgaaatctcaataggcacttcaatattatatttaattaattcttttgttacaatcatgcatcacataacaacattttggtcaaggatagtgcacatgtatttcagtggtgcaataaaatcataacrctgtacttttactgtacctcttgtatgtttagacatgtatagatacacttactgtatagata

SEQ ID NO: 376515 - DNA, 600 bp, Homo sapiens
aacactgtacttttactgtacctcttgtatgtttagacatgtatagatacacttactgtatagatataagtaagtatagatatacttaactgttgtgttacaattgcctacagtattcagtacagtaacatgctgcmcaggtttgtagcctaggaggaataggctataccacctaacctagatatgtaatcagctatagcatctaggtttgtgtaagtaaactctgtgatgttcatacaataataaaattgtccagcaatgcatttctcagacacacccctgtcattaagtgacacatgactgtattagttaacaccatgggaacttcatgggaaatggacactctagctccaccataaatagaaactgtttatgtcaaaaaacacataaaagcatagttgcaagattacatttccttccagatatttcatttagtatctccacagatcactaacttcctgaatagcattcttgtgtctccactgcctcacatttgatttcaggtcattccatcaattgtcaaagacgcatccaacattaactttccaactactggtttggattgtgtcaacattgtcattctgggccacaacaacacaa

SEQ ID NO: 376516 - DNA, 600 bp, Homo sapiens
aacactgtacttttactgtacctcttgtatgtttagacatgtatagatacacttactgtatagatataagtaagtatagatatacttaactgttgtgttacaattgcctacagtattcagtacagtaacatgctgcacaggtttgtagcctaggaggaataggctataccacctaacctagatawgtaatcagctatagcatctaggtttgtgtaagtaaactctgtgatgttcatacaataataaaattgtccagcaatgcatttctcagacacacccctgtcattaagtgacacatgactgtattagttaacaccatgggaacttcatgggaaatggacactctagctccaccataaatagaaactgtttatgtcaaaaaacacataaaagcatagttgcaagattacatttccttccagatatttcatttagtatctccacagatcactaacttcctgaatagcattcttgtgtctccactgcctcacatttgatttcaggtcattccatcaattgtcaaagacgcatccaacattaactttccaactactggtttggattgtgtcaacattgtcattctgggccacaacaacacaa

SEQ ID NO: 376517 - DNA, 619 bp, Homo sapiens
tgcctacagtattcagtacagtaacatgctgcacaggtttgtagcctaggaggaataggctataccacctaacctagatatgtaatcagctatagcatctaggtttgtgtaagtaaactctgtgatgttcatacaataataaaattgtccagcaatgcatttctcagacacamccctgtcattaagtgacacatgactgtattagttaacaccatgggaacttcatgggaaatggacactctagctccaccataaatagaaactgtttatgtcaaaaaacacataaaagcatagttgcaagattacatttccttccagatatttcatttagtatctccacagatcactaacttcctgaatagcattcttgtgtctccactgcctcacatttgatttcaggtcattccatcaattgtcaaagacgcatccaacattaactttccaactactggtttggattgtgtcaacattgtcattctgggccacaacaacacaaaaggctaactcagtgaggtaacatagacactgatcagtgagattttgctgatggatggtaccattttttaccaagatcaagggtattcataccttcaggcatctagataacattgaaaagggc

SEQ ID NO: 376518 - DNA, 619 bp, Homo sapiens
tgcctacagtattcagtacagtaacatgctgcacaggtttgtagcctaggaggaataggctataccacctaacctagatatgtaatcagctatagcatctaggtttgtgtaagtaaactctgtgatgttcatacaataataaaattgtccagcaatgcatttctcagacacacccctgtcattaagtgacacatgactgtattagttaacaccatgggaacttcatgggaaatggacactctagctccaccataaatagaaaytgtttatgtcaaaaaacacataaaagcatagttgcaagattacatttccttccagatatttcatttagtatctccacagatcactaacttcctgaatagcattcttgtgtctccactgcctcacatttgatttcaggtcattccatcaattgtcaaagacgcatccaacattaactttccaactactggtttggattgtgtcaacattgtcattctgggccacaacaacacaaaaggctaactcagtgaggtaacatagacactgatcagtgagattttgctgatggatggtaccattttttaccaagatcaagggtattcataccttcaggcatctagataacattgaaaagggc

SEQ ID NO: 376519 - DNA, 619 bp, Homo sapiens
tgcctacagtattcagtacagtaacatgctgcacaggtttgtagcctaggaggaataggctataccacctaacctagatatgtaatcagctatagcatctaggtttgtgtaagtaaactctgtgatgttcatacaataataaaattgtccagcaatgcatttctcagacacacccctgtcattaagtgacacatgactgtattagttaacaccatgggaacttcatgggaaatggacactctagctccaccataaatagaaactgtttatgtcaaaaaacacataaaagcatagttgcaagattacawttccttccagatatttcatttagtatctccacagatcactaacttcctgaatagcattcttgtgtctccactgcctcacatttgatttcaggtcattccatcaattgtcaaagacgcatccaacattaactttccaactactggtttggattgtgtcaacattgtcattctgggccacaacaacacaaaaggctaactcagtgaggtaacatagacactgatcagtgagattttgctgatggatggtaccattttttaccaagatcaagggtattcataccttcaggcatctagataacattgaaaagggc

SEQ ID NO: 376520 - DNA, 620 bp, Homo sapiens
gactgtattagttaacaccatgggaacttcatgggaaatggacactctagctccaccataaatagaaactgtttatgtcaaaaaacacataaaagcatagttgcaagattacatttccttccagatatttcatttagtatctccacagatcactaacttcctgaatagcattcttgtgtctccactgcctcacatttgatttcaggtcattccatcaattgtcaaagacgcatccaacattaactttccaactactggtttggattgtgtcaacattgtcattctgggccacaacaacacaaaaggctaactcagtgaggtaacatagacactgatcagtgagattttgctgatggatggtaccattttttaccaagatcaagggtattcataccttcaggcatctagataacattgaaaagggcaggtycatagataaaaagggaaagaggaagggtttttgcactatacatgagctaccgtgtctcctgtttaacctgagtctgaagagattcaaagtgcaggtgccatgaatgcctctttaatagctccatgtcgattgattttctgggctacacttcccagcattcaaattgctaaatgcatataaactactagtg

SEQ ID NO: 376521 - DNA, 620 bp, Homo sapiens
gactgtattagttaacaccatgggaacttcatgggaaatggacactctagctccaccataaatagaaactgtttatgtcaaaaaacacataaaagcatagttgcaagattacatttccttccagatatttcatttagtatctccacagatcactaacttcctgaatagcattcttgtgtctccactgcctcacatttgatttcaggtcattccatcaattgtcaaagacgcatccaacattaactttccaactactggtttggattgtgtcaacattgtcattctgggccacaacaacacaaaaggctaactcagtgaggtaacatagacactgatcagtgagattttgctgatggatggtaccattttttaccaagatcaagggtattcataccttcaggcatctagataacattgaaaagggcaggttcatagataaaaagggaaagaggamgggtttttgcactatacatgagctaccgtgtctcctgtttaacctgagtctgaagagattcaaagtgcaggtgccatgaatgcctctttaatagctccatgtcgattgattttctgggctacacttcccagcattcaaattgctaaatgcatataaactactagtg

SEQ ID NO: 376522 - DNA, 511 bp, Homo sapiens
taaagaccctgcttattccttgagtaatgctacactgacaactgatttagtgaatgccactgtgaaaataataaacctcttggtgaatatatttagacatgtcttgtaacctgtacacatcttaaacagggatgttacttggtctttctatgttcaggagtgtgtggagatagaaaaacatacaggattgtaattgttgcctgtgagactaacagaaaattcaagctagtgaagtatgyttatacatggcacacttctcaacagcaattttaggaagttctacccacaacccatatgtcttttgatatgtgggttaccttggagagagaaaaagaaactctgaacacaagcatgaaatactttcgaattttatctagagttggacttatccgaaagcttttgtataaacttgcttgatgagcaactgttgtccactggtaccttcactgtacaatccacacacaacaaaacttcacaactggacacctaaatttgcactttgtttggtaaa

SEQ ID NO: 376523 - DNA, 511 bp, Homo sapiens
taaagaccctgcttattccttgagtaatgctacactgacaactgatttagtgaatgccactgtgaaaataataaacctcttggtgaatatatttagacatgtcttgtaacctgtacacatcttaaacagggatgttacttggtctttctatgttcaggagtgtgtggagatagaaaaacatacaggattgtaattgttgcctgtgagactaacagaaaattcaagctagtgaagtatgcttatrcatggcacacttctcaacagcaattttaggaagttctacccacaacccatatgtcttttgatatgtgggttaccttggagagagaaaaagaaactctgaacacaagcatgaaatactttcgaattttatctagagttggacttatccgaaagcttttgtataaacttgcttgatgagcaactgttgtccactggtaccttcactgtacaatccacacacaacaaaacttcacaactggacacctaaatttgcactttgtttggtaaa

SEQ ID NO: 376524 - DNA, 469 bp, Homo sapiens
gttgcctgtgagactaacagaaaattcaagctagtgaagtatgcttatacatggcacacttctcaacagcaattttaggaagttctacccacaacccatatgtcttttgatatgtgggttaccttggagagagaaaaagaaactctgaacacaagcatgaaatactttcgaattttatctagagttggacttrtccgaaagcttttgtataaacttgcttgatgagcaactgttgtccactggtaccttcactgtacaatccacacacaacaaaacttcacaactggacacctaaatttgcactttgtttggtaaagttgaatgaaaaatgttgtcttttaagcttatgctctcttatgaaagctgttattagattaattttactccaggatatgccagttaggaaataacttccaatttaatttcaccagctccctgtgggtagactaattactcacacatcacactt

SEQ ID NO: 376525 - DNA, 511 bp, Homo sapiens
taaagaccctgcttattccttgagtaatgctacactgacaactgatttagtgaatgccactgtgaaaataataaacctcttggtgaatatatttagacatgtcttgtaacctgtacacatcttaaacagggatgttacttggtctttctatgttcaggagtgtgtggagatagaaaaacatacaggattgtaattgttgcctgtgagactaacagaaaattcaagctagtgaagtatgcttatacatggcacacttctcaacagcaattttaggaagttctacccacaacccatatgtcttttgatatgtgggttaccttggagagagaaaaagaaactctgaacacaagcatgaaatactttcgaattttatctagagttggacttatccgaaagcttttgtataaacttgcttgatgagcaactgttgtccactggtaccttcactgtacratccacacacaacaaaacttcacaactggacacctaaatttgcactttgtttggtaaa

SEQ ID NO: 376526 - DNA, 511 bp, Homo sapiens
taaagaccctgcttattccttgagtaatgctacactgacaactgatttagtgaatgccactgtgaaaataataaacctcttggtgaatatatttagacatgtcttgtaacctgtacacatcttaaacagggatgttacttggtctttctatgttcaggagtgtgtggagatagaaaaacatacaggattgtaattgttgcctgtgagactaacagaaaattcaagctagtgaagtatgcttatacatggcacacttctcaacagcaattttaggaagttctacccacaacccatatgtcttttgatatgtgggttaccttggagagagaaaaagaaactctgaacacaagcatgaaatactttcgaattttatctagagttggacttatccgaaagcttttgtataaacttgcttgatgagcaactgttgtccactggtaccttcactgtacaatccacacacaacmaaacttcacaactggacacctaaatttgcactttgtttggtaaa

SEQ ID NO: 376527 - DNA, 469 bp, Homo sapiens
gttgcctgtgagactaacagaaaattcaagctagtgaagtatgcttatacatggcacacttctcaacagcaattttaggaagttctacccacaacccatatgtcttttgatatgtgggttaccttggagagagaaaaagaaactctgaacacaagcatgaaatactttcgaattttatctagagttggacttatccgaaagcttttgtataaacttgcttgatgagcaactgttgtccactggtaccttcactgtacaatccacacacaacaaaacttcacaactggacacctaaatttgcactttgtttggtaaagttgaatgaaaaatgttgtcttttaagcttatgctctcttatgaaagctgttattagattaattttactccaggatatgccarttaggaaataacttccaatttaatttcaccagctccctgtgggtagactaattactcacacatcacactt

SEQ ID NO: 376528 - DNA, 447 bp, Homo sapiens
gaaataacttccaatttaatttcaccagctccctgtgggtagactaattastcacacatcacacttactctggtggtgaaatgcctcaaaagaaggtctccagagtgttgctctacctagaaggacaagaatgaagagacataaaaatcattcattaagaaggaagaagattttccttgcctagattttcacttgtaggatccaattaattttatcacttaatattttgtcctggtgggcattcactttacaaatttgtaaggtcagtagaaatggaaacttttggaaatcaaactgtaaatgttctgtagacgttgacagaaatagctatttggagctgtgcttttgccaactagacactctgagaaaatctgtgagaggatattttcaggaagtcattgaaccccctaaaaatcaagtttattgcttttaccataaatataaata

SEQ ID NO: 376529 - DNA, 447 bp, Homo sapiens
gaaataacttccaatttaatttcaccagctccctgtgggtagactaattactcacacatcacacttactctggtggtgaaatgcctcaaaagaaggtctccagagtgttgctctacctagaaggacaagaatgaagagacataaaaatcattcattaagaaggaagaagattttccttgcctagrttttcacttgtaggatccaattaattttatcacttaatattttgtcctggtgggcattcactttacaaatttgtaaggtcagtagaaatggaaacttttggaaatcaaactgtaaatgttctgtagacgttgacagaaatagctatttggagctgtgcttttgccaactagacactctgagaaaatctgtgagaggatattttcaggaagtcattgaaccccctaaaaatcaagtttattgcttttaccataaatataaata

SEQ ID NO: 376530 - DNA, 447 bp, Homo sapiens
gaaataacttccaatttaatttcaccagctccctgtgggtagactaattactcacacatcacacttactctggtggtgaaatgcctcaaaagaaggtctccagagtgttgctctacctagaaggacaagaatgaagagacataaaaatcattcattaagaaggaagaagattttccttgcctagattttcacttgtaggatccaattaattttatyacttaatattttgtcctggtgggcattcactttacaaatttgtaaggtcagtagaaatggaaacttttggaaatcaaactgtaaatgttctgtagacgttgacagaaatagctatttggagctgtgcttttgccaactagacactctgagaaaatctgtgagaggatattttcaggaagtcattgaaccccctaaaaatcaagtttattgcttttaccataaatataaata

SEQ ID NO: 376531 - DNA, 447 bp, Homo sapiens
gaaataacttccaatttaatttcaccagctccctgtgggtagactaattactcacacatcacacttactctggtggtgaaatgcctcaaaagaaggtctccagagtgttgctctacctagaaggacaagaatgaagagacataaaaatcattcattaagaaggaagaagattttccttgcctagattttcacttgtaggatccaattaattttatcacttaatattttrtcctggtgggcattcactttacaaatttgtaaggtcagtagaaatggaaacttttggaaatcaaactgtaaatgttctgtagacgttgacagaaatagctatttggagctgtgcttttgccaactagacactctgagaaaatctgtgagaggatattttcaggaagtcattgaaccccctaaaaatcaagtttattgcttttaccataaatataaata

SEQ ID NO: 376532 - DNA, 594 bp, Homo sapiens
tatcacttaatattttgtcctggtgggcattcactttacaaatttgtaaggtcagtagaaatggaaacttttggaaatcaaactgtaaatgttctgtagacgttgacagaaatagctatttggagctgtgcttttgccaactagacactctgagaaaatctgtgagaggatattttcaggaagtcattgaaccccctaaaaatcaagtttattgcttttaccataaatataaataatttatttattatcaaccactttcaatattccaataagtaactttattgtttatttcattgacatgatctacatagacatrcaatttatcttcttttgcgatacattcagaaaatgtgctgcctggaaaagccatgttttgaaattaccacctgtttgatgatttttttttttatatactttaagttttagggcacatgtgcacaacgtgcagtttagttacatatgtatacatgtgccatgttggtgtgctgcacccattaactcgtcatttagcattaggtatatctcctaatgctatccctaccccctctccccaccccacaacaggccctggtgtgtgatgttccccttcctgtg

SEQ ID NO: 376533 - DNA, 594 bp, Homo sapiens
tatcacttaatattttgtcctggtgggcattcactttacaaatttgtaaggtcagtagaaatggaaacttttggaaatcaaactgtaaatgttctgtagacgttgacagaaatagctatttggagctgtgcttttgccaactagacactctgagaaaatctgtgagaggatattttcaggaagtcattgaaccccctaaaaatcaagtttattgcttttaccataaatataaataatttatttattatcaaccactttcaatattccaataagtaactttattgtttatttcattgacatgatctacatagacatgcaatttatcttcttttgcgatacattcagaaaatktgctgcctggaaaagccatgttttgaaattaccacctgtttgatgatttttttttttatatactttaagttttagggcacatgtgcacaacgtgcagtttagttacatatgtatacatgtgccatgttggtgtgctgcacccattaactcgtcatttagcattaggtatatctcctaatgctatccctaccccctctccccaccccacaacaggccctggtgtgtgatgttccccttcctgtg

SEQ ID NO: 376534 - DNA, 478 bp, Homo sapiens
taagtaactttattgtttatttcattgacatgatctacatagacatgcaatttatcttcttttgcgatacattcagaaaatgtgctgcctggaaaagccatgttttgaaattaccacctgtttgatgatttttttttttatatactttaagttttagggcacatgtgcacaacgtgcagtttarttacatatgtatacatgtgccatgttggtgtgctgcacccattaactcgtcatttagcattaggtatatctcctaatgctatccctaccccctctccccaccccacaacaggccctggtgtgtgatgttccccttcctgtgtgcatgtgttctcattgttcaattcccacctatgagtgagaacatgcagtgtttcatttccacttaagtatctatctctatttgtcctttattttcacttccatcctagctctatcccttgtctccttcgtgtgtctcaggataagtgcccta

SEQ ID NO: 376535 - DNA, 594 bp, Homo sapiens
tatcacttaatattttgtcctggtgggcattcactttacaaatttgtaaggtcagtagaaatggaaacttttggaaatcaaactgtaaatgttctgtagacgttgacagaaatagctatttggagctgtgcttttgccaactagacactctgagaaaatctgtgagaggatattttcaggaagtcattgaaccccctaaaaatcaagtttattgcttttaccataaatataaataatttatttattatcaaccactttcaatattccaataagtaactttattgtttatttcattgacatgatctacatagacatgcaatttatcttcttttgcgatacattcagaaaatgtgctgcctggaaaagccatgttttgaaattaccacctgtttgatgatttttttttttatatactttaagttttagggcacatgtgcacaacgtgcagtttagttacatatgtatacatgtgccatgttggtgtgctgcacccattaactcgtcatttagcattaggtatatctcctaatgctatccctacccmctctccccaccccacaacaggccctggtgtgtgatgttccccttcctgtg

SEQ ID NO: 376536 - DNA, 594 bp, Homo sapiens
tatcacttaatattttgtcctggtgggcattcactttacaaatttgtaaggtcagtagaaatggaaacttttggaaatcaaactgtaaatgttctgtagacgttgacagaaatagctatttggagctgtgcttttgccaactagacactctgagaaaatctgtgagaggatattttcaggaagtcattgaaccccctaaaaatcaagtttattgcttttaccataaatataaataatttatttattatcaaccactttcaatattccaataagtaactttattgtttatttcattgacatgatctacatagacatgcaatttatcttcttttgcgatacattcagaaaatgtgctgcctggaaaagccatgttttgaaattaccacctgtttgatgatttttttttttatatactttaagttttagggcacatgtgcacaacgtgcagtttagttacatatgtatacatgtgccatgttggtgtgctgcacccattaactcgtcatttagcattaggtatatctcctaatgctatccctaccccctcyccccaccccacaacaggccctggtgtgtgatgttccccttcctgtg

SEQ ID NO: 376537 - DNA, 478 bp, Homo sapiens
taagtaactttattgtttatttcattgacatgatctacatagacatgcaatttatcttcttttgcgatacattcagaaaatgtgctgcctggaaaagccatgttttgaaattaccacctgtttgatgatttttttttttatatactttaagttttagggcacatgtgcacaacgtgcagtttagttacatatgtatacatgtgccatgttggtgtgctgcacccattaactcgtcatttagcattaggtatatctcctaatgctatccctaccccctctccccaccccacaacaggccctggtgtgtgatgttccccttcctgtgtgcatgtgttctcattgttcaattcccacctatgagtgagaacatgcagtgtttcatttccacttaagtatctatctctatttgtcctttattttcacttccatcctagctctatcccttgtctccttcrtgtgtctcaggataagtgcccta

SEQ ID NO: 376538 - DNA, 569 bp, Homo sapiens
tatatgtaactccggaggcctgcctggactgttaaataactgtattgaacaagagcaagaaaaagctgttcaaatttcaaacaacaagttgaactgaagagctcatatctttgaatgaaatagacactagtagcctttaaaaattaaacatttctactgttttaaaaaattatagccatcatagtatgaggaaaaatgtaataatcctttttaattcttgccattttattaaccacaaagtccttatgccctgacttcattggtacccctttgagattaaacagaacacttaatttaaaattctgataaataaattaattacaccatttacttgaggtactctttcacctttcaagaaatattttgagaattcattagctaaatattgctataatgcaggctagtaataaatggaaataatgatttcattgtaaagtttaaactaatgatggtttgatctggaatttttgttaacctagaagacataattagctctagaggtgaaatgaaagacrtaatcacttcacatattagtaaaaaacaaataatataactttataagctactgc

SEQ ID NO: 376539 - DNA, 635 bp, Homo sapiens
ttgtacttctatgtatatatacacacatagccacatacatatatgtaactccggaggcctgcctggactgttaaataactgtattgaacaagagcaagaaaaagctgttcaaatttcaaacaacaagttgaactgaagagctcatatctttgaatgaaatagacactagtagcctttaaaaattaaacatttctactgttttaaaaaattatagccatcatagtatgaggaaaaatgtaataatcctttttaattcttgccattttattaaccacaaagtccttatgccctgacttcattggtacccctttgagattaaacagaacacttaatttaaaattctgataaataaattaattacaccatttacttgaggtactctttcacctttcaagaaatattttgagaattcattagctaaatattgctataatgcaggctagtaataaatggaaataatgatttcattgtaaagtttaaactaatgatggtttgatctggaatttttgttaacctagaagacataattagctctagaggtgaaatgaaagacawaatcacttcacatattagtaaaaaacaaataatataactttataagctactgctgttcttttgctattaagaaccaatga

SEQ ID NO: 376540 - DNA, 577 bp, Homo sapiens
tgtcgacaggaaacctaaacagtttaggttaaggaaatgtctgagaaagtcatattaattagcaggttcacaggaaactgacatttattgtataaattccatggtcaaatgtattagggctccatgcacacaactgtgcgccatctatgttaccacacagtgcttacttctttcagtctttattcatttctctcctaatggtctgtatggtattattacatagttctaaaaaccttccatgagrcagaaatttcatttaatgatatagctttgaaaataatgaaaaacagtagaaactttctattttttatgaagcagaattgttgaattttcagtttcatttatttaatgttacaagatgacaaacatatttctttaattccttcttgttatttttgtctaacatcaaccaaagccatttctttcatttgaaggtgaaaactgctcatcaaaatccagtttaagctgagaaacaaagaactaaattttgcatgagagattatacactgcataagtataaaacaggaccagaaacaatggtggattcacaatttttaaaaagacaaaagcaggttat

SEQ ID NO: 376541 - DNA, 596 bp, Homo sapiens
tgagccctgatcctaatgtttgtagagtatttagaaatttgagaattccctccaaataaagagttttttaaaacattgttagacaaaaagtttgaattacaaaatrtggtagtagctcaggtctaactcaaatgcagggaaaaaaaactattaactctaaaaaaaattaaatacacatttgatggtaatgagaaacagaaaacaggcagaaatagtagaatattcaaccactgatgaagtatttgaccactgaataaagaaaattgcaatgatttaaatttgcatcaatgtaacttcacacctgatgacacttcccagtctgtgcaaaattagatgtctaagagtaaagccgtgagttttactagcctgaggaataagagtacagagttccaggctgacagaaaagaagaactgggaaatttgaatgacatgggagaaatctcacacaactgaaagtcacagaggagaatgtcacagagtaaaaatctaaaatcagcacttaaacttcattcagatatatgatggctgctacatttcacattcataaaagagactccatagaatccagcagaaaacaacagctaaattgctagtac

SEQ ID NO: 376542 - DNA, 596 bp, Homo sapiens
tgagccctgatcctaatgtttgtagagtatttagaaatttgagaattccctccaaataaagagttttttaaaacattgttagacaaaaagtttgaattacaaaatgtggtagtagctcaggtctaactcaaatgcagggaaaaaaaactattaactctaaaaaaaattaaatacacatttgatggtaatgagaaacagaaaacaggcagaaatagtagaatattcaaccactgatgaagtatttgaccactgaatamagaaaattgcaatgatttaaatttgcatcaatgtaacttcacacctgatgacacttcccagtctgtgcaaaattagatgtctaagagtaaagccgtgagttttactagcctgaggaataagagtacagagttccaggctgacagaaaagaagaactgggaaatttgaatgacatgggagaaatctcacacaactgaaagtcacagaggagaatgtcacagagtaaaaatctaaaatcagcacttaaacttcattcagatatatgatggctgctacatttcacattcataaaagagactccatagaatccagcagaaaacaacagctaaattgctagtac

SEQ ID NO: 376543 - DNA, 489 bp, Homo sapiens
ttgaattacaaaatgtggtagtagctcaggtctaactcaaatgcagggaaaaaaaactattaactctaaaaaaaattaaatacacatttgatggtaatgagaaacagaaaacaggcagaaatagtagaatattcaaccactgatgaagtatttgaccactgaataaagaaaattgcaatgatttaaatttgcatcaatgtaacttcacacctgatgacacttcccagtctgtgcaaaattagatgtctaagagtaaagcsgtgagttttactagcctgaggaataagagtacagagttccaggctgacagaaaagaagaactgggaaatttgaatgacatgggagaaatctcacacaactgaaagtcacagaggagaatgtcacagagtaaaaatctaaaatcagcacttaaacttcattcagatatatgatggctgctacatttcacattcataaaagagactccatagaatccagcagaaaacaaca

SEQ ID NO: 376544 - DNA, 574 bp, Homo sapiens
aaattgcaatgatttaaatttgcatcaatgtaacttcacacctgatgacacttcccagtctgtgcaaaattagatgtctaagagtaaagccgtgagttttactagcytgaggaataagagtacagagttccaggctgacagaaaagaagaactgggaaatttgaatgacatgggagaaatctcacacaactgaaagtcacagaggagaatgtcacagagtaaaaatctaaaatcagcacttaaacttcattcagatatatgatggctgctacatttcacattcataaaagagactccatagaatccagcagaaaacaacagctaaattgctagtacagagcagagatttcaaccattgcatatagctcaggagtgaaagtttggtgtttgactacagaaagaagactaatgttagaaaagagtcactcttcaaaggaaaataaaagagcctatctctacaaaatatcatacacataatctaagatataatttaacctgcctagacatagaaccaggaaaatatgacacataataaaaaaagtaaacaatggattaagacattgaaatggcccac

SEQ ID NO: 376545 - DNA, 435 bp, Homo sapiens
atgaagtatttgaccactgaataaagaaaattgcaatgatttaaatttgcatcaatgtaacttcacacctgatgacacttcccagtctgtgcaaaattagatgtctaagagtaaagccgtgagttttactagcctgaggaataagagtacagagttccaggctgacagaaaagaagaactgggaaatttgaatgacatgggagaaatctcacacaactgaaagtcacagaggagaatgtcacagagtaaaaatctaaaatcagcacttaaacttcattcagatatatgatggctgctacatttcacattcataaaagagactccatagaatccagcaraaaacaacagctaaattgctagtacagagcagagatttcaaccattgcatatagctcaggagtgaaagtttggtgtttgactacagaaagaagacta

SEQ ID NO: 376546 - DNA, 574 bp, Homo sapiens
aaattgcaatgatttaaatttgcatcaatgtaacttcacacctgatgacacttcccagtctgtgcaaaattagatgtctaagagtaaagccgtgagttttactagcctgaggaataagagtacagagttccaggctgacagaaaagaagaactgggaaatttgaatgacatgggagaaatctcacacaactgaaagtcacagaggagaatgtcacagagtaaaaatctaaaatcagcacttaaacttcattcagatatatgatggctgctacatttcacattcataaaagagactccatagaatccagcagaaaacaacagctaaattgctagtacagagcagagatttcaaccattgcatatagctcaggagtgaaagtttggtgtttgactacagaaagaagactaatgttagaaaagagtcactcttcaaaggaaaataaaagagcctatctctacaaaatatcatacacataatctaasatataatttaacctgcctagacatagaaccaggaaaatatgacacataataaaaaaagtaaacaatggattaagacattgaaatggcccac

SEQ ID NO: 376547 - DNA, 574 bp, Homo sapiens
aaattgcaatgatttaaatttgcatcaatgtaacttcacacctgatgacacttcccagtctgtgcaaaattagatgtctaagagtaaagccgtgagttttactagcctgaggaataagagtacagagttccaggctgacagaaaagaagaactgggaaatttgaatgacatgggagaaatctcacacaactgaaagtcacagaggagaatgtcacagagtaaaaatctaaaatcagcacttaaacttcattcagatatatgatggctgctacatttcacattcataaaagagactccatagaatccagcagaaaacaacagctaaattgctagtacagagcagagatttcaaccattgcatatagctcaggagtgaaagtttggtgtttgactacagaaagaagactaatgttagaaaagagtcactcttcaaaggaaaataaaagagcctatctctacaaaatatcatacacataatctaagatataatttaacctgcctagacatagaaccaggaaaatatgacacataayaaaaaaagtaaacaatggattaagacattgaaatggcccac

SEQ ID NO: 376548 - DNA, 609 bp, Homo sapiens
aaagcaacaagtttgccaaaacttttctttatgttacatgaaaacgttgactattaacagtaagyggactgcgataagcccaggatgtttattacaatccctagagaaccaccacattatatgaagatattcttctaaaatgccaataaaggaattaaaatggaacgctgaatattgttcagttaatataaaaaggcatgaaagaaagaacagaggagcaaaaaatgatggaacaaatagaagataagagcaaaataggctgggcgcggtggctcagcctgtaatcccagcactttgggaggccgaggcgagtggatcacgaggtcaggagatcgagaccatcctggctaacacggtgaaaccccatctctactaaaaatgcaaaaattagccgggcatggtggtgggcacttgtagtcccagctactccggatgctgaggcaggaaaatggcatgaatccgggaggcagagcttgcagtgaggcgagatcccgccactgcactccagcctgggcgacagggccagactccgtctcaaaaaaaaaaaaaaaaaaaaagcaaaaatagtaggcttaactccaaccttatcaataattatttcaaacgtaa

SEQ ID NO: 376549 - DNA, 609 bp, Homo sapiens
aaagcaacaagtttgccaaaacttttctttatgttacatgaaaacgttgactattaacagtaagcggactgcgataagcccaggatgtttattacaatccctagagaaccaccacattatatgaagatattcttctaaaatgccaataaaggaattaaaatggaacgctgaatattgttcagttaatataaaaaggcatgaaagaaagaacagaggagcaaaaaatgatggaacaaatagaagataagagcaaaataggctgggcgcggtggctcagcctgtaatcccagcactttgggaggccgaggcsagtggatcacgaggtcaggagatcgagaccatcctggctaacacggtgaaaccccatctctactaaaaatgcaaaaattagccgggcatggtggtgggcacttgtagtcccagctactccggatgctgaggcaggaaaatggcatgaatccgggaggcagagcttgcagtgaggcgagatcccgccactgcactccagcctgggcgacagggccagactccgtctcaaaaaaaaaaaaaaaaaaaaagcaaaaatagtaggcttaactccaaccttatcaataattatttcaaacgtaa

SEQ ID NO: 376550 - DNA, 540 bp, Homo sapiens
catttattaaagtaattaaattgtcaaatacctgcacataaagacataaaactaaagtaataaaaaaataagcaaactccacatccaaagagttttgctggtgaattctttcaaacgttttaaaaaaataaaatttttaaattatttcagaagaagggggaaattccaaacttgttttatgagtcagaatcctgatagcaaaactwcaaaacccaggaatgcaaaattgatttcaacttaaggggctatcaccattctaatctgtgattctaatgaatttggctatcttagatactttatacaagtggaatcatacagtttgtccttctgtgactgatttactttacttagcattaatgttctctaggttcatccatgttgcatattgccagattttcttgttttaaagctgagtaatattccgttgtatgaatataccacattttctttatctattcatctgccaatagacattaaccttatttccacattttgattagtgtaaataatgctgcaatgagcctgagaatcatcccaatc

SEQ ID NO: 376551 - DNA, 354 bp, Homo sapiens
ttgcccataaactcccacgtttcatccatccatccatcartcaaatctacctatctttatttatttattgtgcgaaatacctgaactttgcctttccttccctgatttctgccacaaactaggcaaggagttctgcctaggggtttttcagagctccggctaccaccgaggttcctaacagggaaattgccagcttgaatgcttggggttgatgtgggagtgcgtgtgaaacgggtgtggggtgaaagggcagtgaactttgtaggtgggtagatagggggtgctgaagggctttcaggtaagaggcacagaggaaactgggagaggcagcgaaagcacttcacgcctcagata

SEQ ID NO: 376552 - DNA, 263 bp, Homo sapiens
gcccaaatcttggtcatcctcagraaaaaaaaaaaagttgattaggttgtatataatctaaatctacttgctaatttaatttctctaaaattacagcttgtatcaactctagaatttattgggcacctcctaggacataaacactggaatttggtgagagacatcaaataggaaagaacctggctctgacataaattcaacacacggagggggacacacgttatgagactgacctggcctcttcatctcataaaaggggttct

SEQ ID NO: 376553 - DNA, 263 bp, Homo sapiens
gcccaaatcttggtcatcctcaggaaaaaaaaaaaagttgattaggttgtatataatctaaatctacttgctaayttaatttctctaaaattacagcttgtatcaactctagaatttattgggcacctcctaggacataaacactggaatttggtgagagacatcaaataggaaagaacctggctctgacataaattcaacacacggagggggacacacgttatgagactgacctggcctcttcatctcataaaaggggttct

SEQ ID NO: 376554 - DNA, 263 bp, Homo sapiens
gcccaaatcttggtcatcctcaggaaaaaaaaaaaagttgattaggttgtatataatctaaatctacttgctaatttaatttctctaaaattacagcttgyatcaactctagaatttattgggcacctcctaggacataaacactggaatttggtgagagacatcaaataggaaagaacctggctctgacataaattcaacacacggagggggacacacgttatgagactgacctggcctcttcatctcataaaaggggttct

SEQ ID NO: 376555 - DNA, 263 bp, Homo sapiens
gcccaaatcttggtcatcctcaggaaaaaaaaaaaagttgattaggttgtatataatctaaatctacttgctaatttaatttctctaaaattacagcttgtatcaactctagaatttattgggcacctcctaggacataaacactggaatttggtgagagacatcaaataggaaagaacctggctctgacataaattcaacacacggagggggacacaygttatgagactgacctggcctcttcatctcataaaaggggttct

SEQ ID NO: 376556 - DNA, 354 bp, Homo sapiens
ttgcccataaactcccacgtttcatccatccatccatcagtcaaatctacctatctttatttatttattgtgcgaaatacctgaactttgcctttccttccctgatttctgccacaaactaggcaaggagttctgcctaggggtttttcagagctccggctaccaccgaggttcctaacagggaaattgccagcttgaatgcttggggttgatgtgggagtgcgtgtgaaaygggtgtggggtgaaagggcagtgaactttgtaggtgggtagatagggggtgctgaagggctttcaggtaagaggcacagaggaaactgggagaggcagcgaaagcacttcacgcctcagata

SEQ ID NO: 376557 - DNA, 602 bp, Homo sapiens
cagatactggtctttaaatcacacaggatttgggcctttgctgctctctgccagcagctgccagtagttctcacactttggctggcatcaaaatcacctggggcagtggtggggaagtgggggagtgttgtaaaaccacaagtgaccaggcaaaaaacacctgtatgttttccaattcagtaagtacagaaatattaattggaaaaaggtggacgtcagacattgatagtgctgtggactgctccagggacgtaagcatgatctttagagaggtgactctcatcagttgagggcaaccactggacagcaagaggtccagaccaaccgtaaacagagacatcattcaaatacactttagcaacctctccaaacaacatgtctcttagtgaaacttaggaggttgaaagttaaaaacataaaatcccgtggcatttatgtatcctaggcacttacatttgtctgaatcttccaagttgcctttgcttggttagagttttgggtagacaagaggtggatttccatgtgccatwgtgagaactttgatacactcatttagacattgacctactatcttgatgtttgaaagctaaaacccaaagaaa

SEQ ID NO: 376558 - DNA, 569 bp, Homo sapiens
tttgtgtacaggctacatcactggtctttcatttgtggctaaataaatgttgtgttagaagagtaaagagttcccagttacatgggatctatagttctacaaaatgaatgtatacataatccatgtaaatattccacttattttaaaacaattttttaatttttaaattaaatttaatttgtgcatgtgtgtgagaccagagatggcggcggtgaggggcggtggtctcaccatgttgcccaggctggtcttgaactccccttgaagtgcccccctcctcacctggcccccctcacctkgcctcctccccctcactcctatgccagtccctgccattccctaccccctctgctgaccgcaagactcaacaagtgacttgctgagcaaaccctgctgagaagaggtctgtttagggacacaggaggccaagtacacaaaaaagcaaaagaactagcatgactttttcaatggatgtctattttacagggctggcttcagattattgttatagctttaaataaaaggaccgttttgtcatctcggcccatggcctacattatttctttact

SEQ ID NO: 376559 - DNA, 569 bp, Homo sapiens
tttgtgtacaggctacatcactggtctttcatttgtggctaaataaatgttgtgttagaagagtaaagagttcccagttacatgggatctatagttctacaaaatgaatgtatacataatccatgtaaatattccacttattttaaaacaattttttaatttttaaattaaatttaatttgtgcatgtgtgtgagaccagagatggcggcggtgaggggcggtggtctcaccatgttgcccaggctggtcttgaactccccttgaagtgcccccctcctcacctggcccccctcaccttgcctcctccccctcactcctatgccagtccctgccattccctaccccctctgctgaccgcaagactcaacaagtgacttgctgagcaaaccctgctgagaagaggtctgtttagggacacaggaggccaagtacacaaaaaagcaaaagaactakcatgactttttcaatggatgtctattttacagggctggcttcagattattgttatagctttaaataaaaggaccgttttgtcatctcggcccatggcctacattatttctttact

SEQ ID NO: 376560 - DNA, 589 bp, Homo sapiens
tactgtccattgccctgggcgcttgactaataatttaacagcaatttttttttaaaattttaaatcatgattcatcgcattgctgtaagagtaattagaggtaaattagggcttgaaactgcytgtagtgggttactttctgagatcttagcataattatcaggtgagagggtgaagttttaattagcgctaagtgggatagaaattcaatgcactgaaactgcagtgtccaattcagtaggcgctagccacctgtaactattgagcacttgaaatcctggctagtcctaattgagatgtgttgtgttaaatatactggattttgtcattggagtgggaagaacagcgtagaatatctgcttgataattttttatattgattacatgttaaaattattactatgattactatttgggacatactgagttaagtatatttaaaattaatttcaccttttaatggggcttactagtacatttaaaattacatatgtggctcacatatttattggacagcacggctctagaagtttaggaagaaataagaaaaatattgagaataggtagcaacagtaggaagtttgacctc

SEQ ID NO: 376561 - DNA, 446 bp, Homo sapiens
atactggattttgtcattggagtgggaagaacagcgtagaatatctgcttgataattttttatattgattrcatgttaaaattattactatgattactatttgggacatactgagttaagtatatttaaaattaatttcaccttttaatggggcttactagtacatttaaaattacatatgtggctcacatatttattggacagcacggctctagaagtttaggaagaaataagaaaaatattgagaataggtagcaacagtaggaagtttgacctcctgtaagactgattccaataaaactaataggtgatagttttaattggctttttcctactagaaaaagtaagtgtactttacatgtctctttgttctccctctttccccttcaatttagtggttagcgtgtatttactatatcaggcttaatattcactaagcagtgtta

SEQ ID NO: 376562 - DNA, 446 bp, Homo sapiens
atactggattttgtcattggagtgggaagaacagcgtagaatatctgcttgataattttttatattgattacatgttaaaattattactatgattactatttgggacatactgagttaagtatatttaaaattaatttcaccttttaatggggcttactagtacatttaaaattacatatrtggctcacatatttattggacagcacggctctagaagtttaggaagaaataagaaaaatattgagaataggtagcaacagtaggaagtttgacctcctgtaagactgattccaataaaactaataggtgatagttttaattggctttttcctactagaaaaagtaagtgtactttacatgtctctttgttctccctctttccccttcaatttagtggttagcgtgtatttactatatcaggcttaatattcactaagcagtgtta

SEQ ID NO: 376563 - DNA, 382 bp, Homo sapiens
aaactaataggtgatagttttaattggctttttcctactagaaaaagtaagtgtactttacatgtctctttgttctccctctttccccttcaatttagtggttagcgtgtatttactatatcaggcttaatattcactaagcagtgttaagaagacttaggtaaatgattccctgatgaacacacttgatttccaaagcactttcctaacccatttttaattggaatagagtcaaaggtagatggcttattaktagtcatctcatttaaacctcatggaattttcctgctaaatctcaaagtaaacaatttgttataggctgttttgtcaagtgcatggaagggacagcataagacatgtggtacttcatttcaaaattgct

SEQ ID NO: 376564 - DNA, 433 bp, Homo sapiens
tgttttaataaaaacagtcatattgaactggaagcagccaaataaaatggtcctttatttcacagttgagaatttgaaattggaaggtaattaacatatgtaaggatgatgtatttgctgcctggcttataggaatgagccaaggtgttttttgagggatgttgttgctgtgtatgtcycacctattttgcttccttaatgaacaatgcaagtttgagacagaaatatttgagaacatttttatcagttgcgacattttgatagtgaacattttatatcttctgtaaacttaaaatgtttgcatcttctgtctgcttaaaatgtttaatttgttatacccaaataatttggctataattgataatttaatttatcaaattaaattgttttttttccctttagactttcttcagtcacatctgaataaatcact

SEQ ID NO: 376565 - DNA, 433 bp, Homo sapiens
tgttttaataaaaacagtcatattgaactggaagcagccaaataaaatggtcctttatttcacagttgagaatttgaaattggaaggtaattaacatatgtaaggatgatgtatttgctgcctggcttataggaatgagccaaggtgttttttgagggatgttgttgctgtgtatgtcccacctattttgcttccttaatgaacaatrcaagtttgagacagaaatatttgagaacatttttatcagttgcgacattttgatagtgaacattttatatcttctgtaaacttaaaatgtttgcatcttctgtctgcttaaaatgtttaatttgttatacccaaataatttggctataattgataatttaatttatcaaattaaattgttttttttccctttagactttcttcagtcacatctgaataaatcact

SEQ ID NO: 376566 - DNA, 493 bp, Homo sapiens
tccatagggagcttatagcttcattgcactgtgtgtgacatttgggtcctgtttggcagcaatgactgcctttctgtttagtgtctgtgtgctatgaagattgcacacaggggtccagatgcatcctgttttgagaatgttaatggatacaccagctgctgctttggatttcacccattggcggtttctataaaaactttagacacagtgagccactcttctcasggaatggtggaaaccctcccaattccaatttcctaaacaccagccaagggccagccttgcatgcaggcctttctaaggatggcagtctcttgcctgttatatgaaatcttttctgcacactttgtataaccccaacttaatttttggtgttgttttaaaatttcattttaataacataatattataagataaggtaacttggtactaatttctgttgtatgatccatcttaagttgcagcgctggttacttttttgactttcagtgac

SEQ ID NO: 376567 - DNA, 571 bp, Homo sapiens
tttagacacagtgagccactcttctcacggaatggtggaaaccctcccaattccaatttcctaaacaccagccaagggccagccttgcatgcaggcctttctaaggatggcagtctcttgcctgttatatgaaatcttttctgcacactttgtataaccccaacttaatttttggtgttgttttaaaatttcattttaataacataatattataagataaggtaacttggtactaatttctgttgtatgatccatcttaagttgcagcgctggttacttttttgactttcagtgacgaacagctatttgtacataagttaccatarcaatttaggtaattataatctgtcctatttatctcatttacctttcagtaaaattgttaaataagcaaaataatttctgagttaaaattagaataaaaattgtcttttatttggattacatgaataatctagttttcatattgtgctaaagccctgcttagaattatgaaataagataaaatattcaatcatttttatcaatattttcttacctaagcatgcaattaaatttatttattttatat

SEQ ID NO: 376568 - DNA, 507 bp, Homo sapiens
aaccccaacttaatttttggtgttgttttaaaatttcattttaataacataatattataagataaggtaacttggtactaatttctgttgtatgatccatcttaagttgcagcgctggttacttttttgactttcagtgacgaacagctatttgtacataagttaccatagcaatttaggtaattataatctgtcctatttatctcatttacctttcagtaaaattgttaaataagcaaaataatttctgagttaaaattagaataaaaattgtcttttatttggattacatgaataatctagttttcatattgtgctaaagccctgcttagaattatgaaataagataaaatattcaatcattyttatcaatattttcttacctaagcatgcaattaaatttatttattttatatacttcaatttgagaaataatgaccacatgttgttactttggtcttcaatgatctctaatttttagggtcgccatgtcttgcttaaatatat

SEQ ID NO: 376569 - DNA, 192 bp, Homo sapiens
tattttatatacttcaatttgagaaataatgaccacatgttgttactttggtcttcaatgatctctaatttttagggtcrccatgtcttgcttaaatatatcatagtaacaggttcagtgaatatctttatttttaattttatttacttatttttttttgagacagagttttgctcttgttgaccaggctgc

SEQ ID NO: 376570 - DNA, 192 bp, Homo sapiens
tattttatatacttcaatttgagaaataatgaccacatgttgttactttggtcttcaatgatctctaatttttagggtcgccrtgtcttgcttaaatatatcatagtaacaggttcagtgaatatctttatttttaattttatttacttatttttttttgagacagagttttgctcttgttgaccaggctgc

SEQ ID NO: 376571 - DNA, 575 bp, Homo sapiens
tatcttggttaactgcaacctctgctttctaggctcaagcgattctcctgcctcagcctcccgggtagctgaaattacaggtgccagctaccatgcccagctaatttttgtatttttattagagatgaggttttgccatgttggccaggctggtcttgaactcctgacctcaggtgatccacccacytttgcctcccaaagtgctgagattacaggcatgagccactgagcccagctgaatattttttttaaatcaataaccttatttcttagagtagttttaggttcacagcaaaattgagaggaaggtacagagatttctcatatatcccatgcctcccacacacgcatagcctcccccattattagtattttccaccagagagtggtccatttgttacaactgatgaacttacattgacacattataatcacttgaagttcatagtttacatcaggcctcactcttgatgctgtacattctgtgaatttggacaaatatataatgacatgacatgtatctattactgtaatattatcgacagaacagtttcactgccctaaaaattctctgt

SEQ ID NO: 376572 - DNA, 575 bp, Homo sapiens
tatcttggttaactgcaacctctgctttctaggctcaagcgattctcctgcctcagcctcccgggtagctgaaattacaggtgccagctaccatgcccagctaatttttgtatttttattagagatgaggttttgccatgttggccaggctggtcttgaactcctgacctcaggtgatccacccacctttgcctcccaaagtgctgagattacaggcatgagccactgagcccagctgaatattttttttmaatcaataaccttatttcttagagtagttttaggttcacagcaaaattgagaggaaggtacagagatttctcatatatcccatgcctcccacacacgcatagcctcccccattattagtattttccaccagagagtggtccatttgttacaactgatgaacttacattgacacattataatcacttgaagttcatagtttacatcaggcctcactcttgatgctgtacattctgtgaatttggacaaatatataatgacatgacatgtatctattactgtaatattatcgacagaacagtttcactgccctaaaaattctctgt

SEQ ID NO: 376573 - DNA, 575 bp, Homo sapiens
tatcttggttaactgcaacctctgctttctaggctcaagcgattctcctgcctcagcctcccgggtagctgaaattacaggtgccagctaccatgcccagctaatttttgtatttttattagagatgaggttttgccatgttggccaggctggtcttgaactcctgacctcaggtgatccacccacctttgcctcccaaagtgctgagattacaggcatgagccactgagcccagctgaatattttttttaaatcaataaccttatttcttagagtagttttaggttcacagcaaaattgagaggaaggtacagagatttctcatatatcccatgcctcccacacacgcatagcctcccccattattartattttccaccagagagtggtccatttgttacaactgatgaacttacattgacacattataatcacttgaagttcatagtttacatcaggcctcactcttgatgctgtacattctgtgaatttggacaaatatataatgacatgacatgtatctattactgtaatattatcgacagaacagtttcactgccctaaaaattctctgt

SEQ ID NO: 376574 - DNA, 575 bp, Homo sapiens
tatcttggttaactgcaacctctgctttctaggctcaagcgattctcctgcctcagcctcccgggtagctgaaattacaggtgccagctaccatgcccagctaatttttgtatttttattagagatgaggttttgccatgttggccaggctggtcttgaactcctgacctcaggtgatccacccacctttgcctcccaaagtgctgagattacaggcatgagccactgagcccagctgaatattttttttaaatcaataaccttatttcttagagtagttttaggttcacagcaaaattgagaggaaggtacagagatttctcatatatcccatgcctcccacacacgcatagcctcccccattattagtattttccaccagagagtggtccatttgttacaactgatgaacttacattgacacattataatcacttgaagttcatagtttacatcaggcctcactcttgatgctgtacattctgtgaatttggacaaatrtataatgacatgacatgtatctattactgtaatattatcgacagaacagtttcactgccctaaaaattctctgt

SEQ ID NO: 376575 - DNA, 585 bp, Homo sapiens
catcttgctctgtgaggtgggtccagatagactctttagcaatggaagaggacaagtgcaaagtgttgtgctttataaaactggaatcacaaagtctttcatacttacattcggttggaaataagaccaggcatgaatgctattaggtaaatacataagttcctcactgatcctcttcctttgagggatgaggttgacaacagcctgtattatgatggcatgactcacctacaactagattctgtcatgagagatgacaagggagttttgctttatgcgaggtgaaaaaawttttttctcctactagggagatgggcaaacattagaacattctggtagtaaaagggcattgatagtttcctttctatatattttttcacatcagataatattgcccggcagcctgccatacctccccagtgtttattcagcttctctctgaatgtggataagctcttaaaggagtgatctttccagtggttctttctgtgggaggtaaaatggcaggtgaatttggggcttgttatacgtaggccagagcaaatagctacaactaaggaaaccacccagcaccttacccagaag

SEQ ID NO: 376576 - DNA, 596 bp, Homo sapiens
acattcggttggaaataagaccaggcatgaatgctattaggtaaatacataagttcctcactgatcctcttcctttgagggatgaggttgacaacagcctgtattatgatggcatgactcacctacaactagattctgtcatgagagatgacaagggagttttgctttatgcgaggtgaaaaaaattttttctcctactagggagatgggcaaacattagaacattctggtagtaaaagggcattgatagtttcctttctatatattttttcacatcagataatattgcccggcagcctgccatacctccccagtgtttattcagcttctctctgaatgtggataagctcttaaaggagtgatctttccagtggttctttctgtgggaggtaaaatggcaggtgaatttggggcttgttatwcgtaggccagagcaaatagctacaactaaggaaaccacccagcaccttacccagaagagtattagccagagtaacacactgatctctcttgagatcttctccactggtggctggaaagtatttgcaaggattcctgtttctggtctgattcctatgttttgttggtttctggcg

SEQ ID NO: 376577 - DNA, 237 bp, Homo sapiens
tttccctatacatacatatctatgacaaagtttaatttataaattaaattaaatctgatgttatctgtagatagggtgtgagaattgaattgtgtcatcagcaggaatgattgcttgtttgttggtggggaaaaactctccacacatttggttacagaagccttctttgttgatgattgttgctgtggtgtgacarcagagaaaaacgtgtcaagtatgtctttctgcgcatatagt

SEQ ID NO: 376578 - DNA, 508 bp, Homo sapiens
gcatgaaaccatgaatattactgaatcacaagctgtttttccctatacatacatatctatgacaaagtttaatttataaattaaattaaatctgatgttatctgtagatagggtgtgagaattgaattgtgtcatcagcaggaatgattgcttgtttgttggtggggaaaaactctccacacatttggttacagaagccttctttgttgatgattgttgctgtggtgtgacagcagagaaaaaygtgtcaagtatgtctttctgcgcatatagtggataaggggtactagtgtatactctgttgtaatggcccctcatattttggtccagaaatcatgctctttgacactgttgactcatcacacctgttctgctaacaataccatttttactcaatctcataggctttggctaggatgacttgtatacttcagttcacttgtagataccaaattttaataaatttattcttctttgcatctaataaatacagagggaagagttctta

SEQ ID NO: 376579 - DNA, 579 bp, Homo sapiens
taagttcccaggcatgctcccaaaggaatgctttgtaacaaarcgtcagtcttatgctttaaaaaaccaaaccaaaccaaaacaacaacaacaacaaaaaacaggatctaaagcatacacacaagtgtgcacaatttttttatgaaggtagagtcttactatgtttcccaagctggtctcaaacttctgggctcctcaagtgatcctcctgcctcatcctcccaagtagtttggattagaggcatgcatcactgtgcattcttatgattttaatattctgtacatttattattgatttaaaatgcattttacctttttctttaatagatgttggaatttctgatgaatctgcagtcaggtaagatttcatagatttaaaaaattatgttaactaagaaaatatagatggaagaaactaatatctgttgagtgttgtattctgggctagacatcctaatatgttctatgcatttatcatctcataaagccatcataacatctgtgttcctataacctactgttaaataaacaactatggattagagctgattaattgcctcatgatcccatagttaacaa

SEQ ID NO: 376580 - DNA, 579 bp, Homo sapiens
taagttcccaggcatgctcccaaaggaatgctttgtaacaaaacrtcagtcttatgctttaaaaaaccaaaccaaaccaaaacaacaacaacaacaaaaaacaggatctaaagcatacacacaagtgtgcacaatttttttatgaaggtagagtcttactatgtttcccaagctggtctcaaacttctgggctcctcaagtgatcctcctgcctcatcctcccaagtagtttggattagaggcatgcatcactgtgcattcttatgattttaatattctgtacatttattattgatttaaaatgcattttacctttttctttaatagatgttggaatttctgatgaatctgcagtcaggtaagatttcatagatttaaaaaattatgttaactaagaaaatatagatggaagaaactaatatctgttgagtgttgtattctgggctagacatcctaatatgttctatgcatttatcatctcataaagccatcataacatctgtgttcctataacctactgttaaataaacaactatggattagagctgattaattgcctcatgatcccatagttaacaa

SEQ ID NO: 376581 - DNA, 612 bp, Homo sapiens
gaatctgcagtcaggtaagatttcatagatttaaaaaattatgttaactaagaaaatatagatggaagaaactaatatctgttgagtgttgtattctgggctagacatcctaatatgttctatgcatttatcatctcataaagccatcataacatctgtgwtcctataacctactgttaaataaacaactatggattagagctgattaattgcctcatgatcccatagttaacaaagtagctggcctacagtttgaccatcagcctgcctgccttccaaatcctttctcttgctcctcagcatagattgatagatatctgtgcagcccttggatcaaagtataggtctgaatcagatcaatcagattcattaatttgattaacttctaaattaatgagagtttaaataccttgaactctcatttaagtttattgttagaatgtggttagtcctaataaatttgacgatttcagtggtaaccagtatcttatttttaccttcaaaggctctagggcagatctgacttagctttggccataggactgtaagttttaccaaagcaagtttaggcaagtcttagagacaaattatttgacttcacagtttggtttt

SEQ ID NO: 376582 - DNA, 612 bp, Homo sapiens
gaatctgcagtcaggtaagatttcatagatttaaaaaattatgttaactaagaaaatatagatggaagaaactaatatctgttgagtgttgtattctgggctagacatcctaatatgttctatgcatttatcatctcataaagccatcataacatctgtgttcctataacctactgttaaataaacaactatggattagagctgattaattgcctcatgatcccatagttaacaaagtagctggcctacagtttgaccatcagcctgcctgccttccaaatcctttctcttgctcctcagcatagattgatagatatctgtgcagcccttggatcaaagtataggtctgaatcagatcaatcrgattcattaatttgattaacttctaaattaatgagagtttaaataccttgaactctcatttaagtttattgttagaatgtggttagtcctaataaatttgacgatttcagtggtaaccagtatcttatttttaccttcaaaggctctagggcagatctgacttagctttggccataggactgtaagttttaccaaagcaagtttaggcaagtcttagagacaaattatttgacttcacagtttggtttt

SEQ ID NO: 376583 - DNA, 343 bp, Homo sapiens
ataatcttgtcctcattttttaaaactttcttctctgtttttcttggtgtttcttttgttctattattttttcaaactctgctgcctatgtattccaagtttttctatagacagaatcaagaggacatagaattacagaattttaaggaatcttggaatgaattaaaataccttctagtatttttctctgcrttgaacattctggtcaagtgattctctagatagagaatgtgaggctcaaagagattacgaagcttttttttagacataggaattggcagaaatgagatttgaactcatggtaaagcccagtactcttgcttctttctatgtcctattggcg

SEQ ID NO: 376584 - DNA, 343 bp, Homo sapiens
ataatcttgtcctcattttttaaaactttcttctctgtttttcttggtgtttcttttgttctattattttttcaaactctgctgcctatgtattccaagtttttctatagacagaatcaagaggacatagaattacagaattttaaggaatcttggaatgaattaaaataccttctagtatttttctctgcgttgaacattctkgtcaagtgattctctagatagagaatgtgaggctcaaagagattacgaagcttttttttagacataggaattggcagaaatgagatttgaactcatggtaaagcccagtactcttgcttctttctatgtcctattggcg

SEQ ID NO: 376585 - DNA, 368 bp, Homo sapiens
gcagaaatgagatttgaactcatggtaaagcccagtactcttgcttctttytatgtcctattggcgtgtgttttaataatacaaacggaagtgagtctgtggatagaatgagaatggaattagctggtgaacccaatggaagtagataagaatggaatgagcaggggaagtccaagtttgaagataaacaacactggattggataggagtacggactcttctacaagagatcaaagtattggggtttatgacaagtttgataaagataaattataaaaatgaaggacacaagatgttgggaattatctacaaaggcacattaaaatagaaggttcaagggagctctaaaaattttgctgctttttttt

SEQ ID NO: 376586 - DNA, 368 bp, Homo sapiens
gcagaaatgagatttgaactcatggtaaagcccagtactcttgcttctttctatgtcctattggcgtgtgttttaataatacaaacggragtgagtctgtggatagaatgagaatggaattagctggtgaacccaatggaagtagataagaatggaatgagcaggggaagtccaagtttgaagataaacaacactggattggataggagtacggactcttctacaagagatcaaagtattggggtttatgacaagtttgataaagataaattataaaaatgaaggacacaagatgttgggaattatctacaaaggcacattaaaatagaaggttcaagggagctctaaaaattttgctgctttttttt

SEQ ID NO: 376587 - DNA, 599 bp, Homo sapiens
ccttgctttctcagacacctagattacagtcctctctcttgaacacctattggtaaggtatccggggatcctttaaatacacgatgattggcagggtttacataggggaaatcagtgcctgacaattcgccttccaggatatggattgtcattccctctctttgtgggccccagtctcctatacataaaagtagagattgtaatactcatttgacttgcagatacctcaccccgaacccacctactataacgtaaaagccaagaatgcaaaccctttcctcaccccgtgaaggtaaagtcctcagagccaaggagagaaggctcaaggatggtacctgggtgtttccaacactaaccatgcattgtagtttttagtgttcaagtttaagcttcttatgttaaagttaccccagctttaattatattgtaacaagatttatttttgtaatyccatttttggattcttgatttcttggtaaagaaatacagttatttttgtataccaatcttatatagtgttacattccaaaatttgttcatgagtcctaacactttttagtaaatttcttatgattttctaaatgcaagatcatgtcatc

SEQ ID NO: 376588 - DNA, 564 bp, Homo sapiens
aatgtgtttaactttggtaactaataaagattggtaagtactgtgacagggtgggagctgaaaaataaatgaactggaaaataagtagtcacaggaaaatcacattaggaaatgctttctccaatagaggaaatatgaactttggttaaagtttatttggataaatactaatactttgacttttaaatcatacgagtgtgactttcttaatatttattcctgtataaaccttcagtggatcaaattgtttgcagtaatcatggaatcctcctggtaatttttagtggcagaaatgttcagcacatagcatatagcttttgttcttggaaacttatsattttggtgtcatatagtttttaggagagattgtttctctacttatattattggttctgtagtgagactaaaaaagtattaaaagttgtagaaaaatagctgagtttggtggtgtacacctgtagtccctgctacttgggagtttgagacagtaagattgcttgaacacaggagtttgagaacagcctgggtaacattgtatctgatttaaaaatataaattgtggaa

SEQ ID NO: 376589 - DNA, 537 bp, Homo sapiens
tataaaccttcagtggatcaaattgtttgcagtaatcatggaatcctcctggtaatttttagtggcagaaatgttcagcacatagcatatagcttttgttcttggaaacttatcattttggtgtcatatagtttttaggagagattgtttctctacttatattattggttctgtagtgagactaaaaaagtattaaaagttgtagaaaaatagctgagtttggtggtgtacacctgtagtccctgctacttgggagtttgagacagtaagattgcttgaacacaggagtttgagaacagcctgggyaacattgtatctgatttaaaaatataaattgtggaaatgtagaaatttaaatttatgttctcaagatttgtattgcaaagggatttttatgtgatttatgagttgtccatgaagagtttatataaaacacttcatctaattgaataacatgtattttcctgcaaataaccagttctagaagcagagactcttaataccaatatggtaagtctttatcatcataattttgtc

SEQ ID NO: 376590 - DNA, 581 bp, Homo sapiens
tccttatatcatattctgaaagtttgaatgtcagaaggttttctatttagttttttaaatgatcattggaactcctgcataccataagctactggaggtcagtaaacatatttgtgtgtatcctggagtacctagaatacagtcttccatgtaagaagcattttacttgttgttttttgagatggggtttcactctgtcacccaggctggagggcactggtgagatcttggctcactcccgatctccatttcctaggctcaggtgatcctcacacctcagccatccaagtagttgaaacaatagagctatgtcaccatagacctgtgtcaccatgctgggctgagttttgtagagatagggttttgccttgttgcccaggctcttctttaaytgttgggctcaaatgttctgctcgcctcagcctctcaaagtgctggggttacagacatgagacattcagccttaatagttgtttaatctgaataaataaacaaatgaatttttatataatggaatgttataagtaatataataaacctaatgtatccaatcattaaatattgtatttaaaatattgctt

SEQ ID NO: 376591 - DNA, 581 bp, Homo sapiens
tccttatatcatattctgaaagtttgaatgtcagaaggttttctatttagttttttaaatgatcattggaactcctgcataccataagctactggaggtcagtaaacatatttgtgtgtatcctggagtacctagaatacagtcttccatgtaagaagcattttacttgttgttttttgagatggggtttcactctgtcacccaggctggagggcactggtgagatcttggctcactcccgatctccatttcctaggctcaggtgatcctcacacctcagccatccaagtagttgaaacaatagagctatgtcaccatagacctgtgtcaccatgctgggctgagttttgtagagatagggttttgccttgttgcccaggctcttctttaattgttgggctcaartgttctgctcgcctcagcctctcaaagtgctggggttacagacatgagacattcagccttaatagttgtttaatctgaataaataaacaaatgaatttttatataatggaatgttataagtaatataataaacctaatgtatccaatcattaaatattgtatttaaaatattgctt

SEQ ID NO: 376592 - DNA, 581 bp, Homo sapiens
tccttatatcatattctgaaagtttgaatgtcagaaggttttctatttagttttttaaatgatcattggaactcctgcataccataagctactggaggtcagtaaacatatttgtgtgtatcctggagtacctagaatacagtcttccatgtaagaagcattttacttgttgttttttgagatggggtttcactctgtcacccaggctggagggcactggtgagatcttggctcactcccgatctccatttcctaggctcaggtgatcctcacacctcagccatccaagtagttgaaacaatagagctatgtcaccatagacctgtgtcaccatgctgggctgagttttgtagagatagggttttgccttgttgcccaggctcttctttaattgttgggctcaaatgttctgctcgcctcagcctctcaaagtgctggggttacagacatgagacattcagccttaatagttgtttaatctgaataaataaacaaatgaatttttatataatggaatgttataagtaatataataaacctaatgtatcyaatcattaaatattgtatttaaaatattgctt

SEQ ID NO: 376593 - DNA, 286 bp, Homo sapiens
atgtgtctgccatacattactctttagaattctggtgaccaattctttttctgggtggaaagttgatggaaagttccagttttctctctctgttataataatgttctttcaggtaatggtagatgaccatatttagctaattgaatgtcttatagtaagaaacactatcacagaagtacttacaaaaaactaattgcagcataaataytaattagtattatcagagttatgaaagaccgaaggctctgttatagatctatttccccatgtactttattgtacttca

SEQ ID NO: 376594 - DNA, 487 bp, Homo sapiens
gttctcattatgttggccaggctggtctccaactcctgaactcaagcaatccacccaccttggccttgcaaagggctgagattacaggtgtgagccaccatgcctgggcaacattgagattgatttaaagaaattgattagggctrggtgtggtggtgcacactgcttatctcaacattttgggaggcagaagtggaagatttgcttgagcccaggagcttgagaccagcctgggaggtataatgaggccttgtctctacaaagataacaataaaaacattagcatgacatgatggtatgcacctgtagttccagctattcaggaagttgaggtgggaagattgcttgaggtcaggagtttgagaccacagtgagccataatcaggcccctgcattctagccctgggttgacagagtgagacccagtttcataaaaagagattgataagaaactcttgatgcaactcattataattttaaatggaaa

SEQ ID NO: 376595 - DNA, 487 bp, Homo sapiens
gttctcattatgttggccaggctggtctccaactcctgaactcaagcaatccacccaccttggccttgcaaagggctgagattacaggtgtgagccaccatgcctgggcaacattgagattgatttaaagaaattgattagggctgggtgtggtggtgcacactgcttatctcaacattttgggaggcagaagtggaagatttgcttgagcccaggagcttgagaccagcctgggaggtataatgaggccttgtctctacaaagataacaataaaaacattagcatgacatgatggtatgcacctgtagttccagctatycaggaagttgaggtgggaagattgcttgaggtcaggagtttgagaccacagtgagccataatcaggcccctgcattctagccctgggttgacagagtgagacccagtttcataaaaagagattgataagaaactcttgatgcaactcattataattttaaatggaaa

SEQ ID NO: 376596 - DNA, 551 bp, Homo sapiens
agctgttcaatgtaggcaggacacctcttgtgctatgctgcctagatgttcatttcaccagatacatcctaaatcatcacccccaagttcatagtttcacagatctccagggcagggtccccatgcagccagcttctttgctaaggccaatcaaatgtaatcttgtctcttgttcataggaaattcctcattttcatctgagaacttttaggtytggacttcagtgtttacacttttgtcagccttcctatcacaagtatttaacaattctctatagtggtccaatattttcctcatcttgctgtcttctaagctttcccaactcttctgacctctgtcttttacccacttctgaacctggttctacattgtcagctatctttatcacagcctggcaatgtggtaaaacagaaaagtccattttcagggggaaagttcatgaaggattcagatatttgcatgaaaagaagctgagtgctggttgccaagacaaaggggaaagggccttgaaggcatttcatggctccacttcatagtactaattttctgca

SEQ ID NO: 376597 - DNA, 551 bp, Homo sapiens
agctgttcaatgtaggcaggacacctcttgtgctatgctgcctagatgttcatttcaccagatacatcctaaatcatcacccccaagttcatagtttcacagatctccagggcagggtccccatgcagccagcttctttgctaaggccaatcaaatgtaatcttgtctcttgttcataggaaattcctcattttcatctgagaacttttaggtctggacttcagtgtttacacttttgtcagscttcctatcacaagtatttaacaattctctatagtggtccaatattttcctcatcttgctgtcttctaagctttcccaactcttctgacctctgtcttttacccacttctgaacctggttctacattgtcagctatctttatcacagcctggcaatgtggtaaaacagaaaagtccattttcagggggaaagttcatgaaggattcagatatttgcatgaaaagaagctgagtgctggttgccaagacaaaggggaaagggccttgaaggcatttcatggctccacttcatagtactaattttctgca

SEQ ID NO: 376598 - DNA, 565 bp, Homo sapiens
ttgctgtcttctaagctttcccaactcttctgacctctgtcttttacccacttctgaacctggttctacattgtcagctatctttatcacagcctggcaatgtggtaaaacagaaaagtccattttcagggggaaagtycatgaaggattcagatatttgcatgaaaagaagctgagtgctggttgccaagacaaaggggaaagggccttgaaggcatttcatggctccacttcatagtactaattttctgcatgatcataaagaaaagaggtttaattggctcacggtccagcaggctgtaaaggaagcacagtggcttctgcttctgggaggatcagatcaggaagccttccaatcataccagaaggccaaggggcaatgagatgtttcaaatggcaggggtagaagaaagactgagagaggaaagaggtgccaccccctgttatataaccagatctcatgagaacacactatcatgaagacagcatcaagaagatgttgcctaaccattggtgaaggatttgcctcccacccccacctcccactgtttccaggcagaagcct

SEQ ID NO: 376599 - DNA, 565 bp, Homo sapiens
ttgctgtcttctaagctttcccaactcttctgacctctgtcttttacccacttctgaacctggttctacattgtcagctatctttatcacagcctggcaatgtggtaaaacagaaaagtccattttcagggggaaagttcatgaaggattcagatatttgcatgaaaagaagctgagtgctggttgccaagacaaaggggaaagggccttgaaggcatttcatggctccacttcatagtactaattttctgcatgatcataaagaaaagaggtttaattggctsacggtccagcaggctgtaaaggaagcacagtggcttctgcttctgggaggatcagatcaggaagccttccaatcataccagaaggccaaggggcaatgagatgtttcaaatggcaggggtagaagaaagactgagagaggaaagaggtgccaccccctgttatataaccagatctcatgagaacacactatcatgaagacagcatcaagaagatgttgcctaaccattggtgaaggatttgcctcccacccccacctcccactgtttccaggcagaagcct

SEQ ID NO: 376600 - DNA, 565 bp, Homo sapiens
ttgctgtcttctaagctttcccaactcttctgacctctgtcttttacccacttctgaacctggttctacattgtcagctatctttatcacagcctggcaatgtggtaaaacagaaaagtccattttcagggggaaagttcatgaaggattcagatatttgcatgaaaagaagctgagtgctggttgccaagacaaaggggaaagggccttgaaggcatttcatggctccacttcatagtactaattttctgcatgatcataaagaaaagaggtttaattggctcacggtccagcaggctgtaaaggaagcacagtggcttctgcttctgggaggatcagatcaggaagccttccaatcataccagaaggccaaggggcaatgagatgtttcaaatggcaggggtagaagaaagactgagagaggaaagaggtgccaccccctgttatataaccagatctcatgagaacacactatcatgaagacagcatcaagaagatgttgcytaaccattggtgaaggatttgcctcccacccccacctcccactgtttccaggcagaagcct

SEQ ID NO: 376601 - DNA, 574 bp, Homo sapiens
gctccacttcatagtactaattttctgcatgatcataaagaaaagaggtttaattggctcacggtccagcaggctgtaaaggaagcacagtggcttctgcttctgggaggatcagatcaggaagccttccaatcataccagaaggccaaggggcaatgagatgtttcaaatggcaggggtagaagaaagactgagagaggaaagaggtgccaccccctgttatataaccagatctcatgagaacacactatcatgaagacagcatcaagaagatgttgcctaaccattggtgaaggatttgcctcccacccccacctcccactgtttccaggcagaagcctgctgcagatgaagctttcttgggaaacctctactagggcagtgcagaaggaaaatatggacttggagcccccatgcagggggccaccaccctccagaccccagatacatagacccaccaacagcttgcaccctccrtgtggaaaagctacaggcactcaacactagtccagtccatgaaagcagccattggggctcaaacctgcaaagccacaggtgcgcttccctagtaggg

SEQ ID NO: 376602 - DNA, 205 bp, Homo sapiens
atggagagcaggcaacatgtggcmgaagggaagacagaggtgcagaggctgatgacgtcagaatcacaggaacaggatttctttggccactttggctgaaattcaccacttccatccaattccagtgagagacatggactcacagatgcagcatttcttgcaacaagagatactactttttcaaaaagtcacccaggaattgata

SEQ ID NO: 376603 - DNA, 205 bp, Homo sapiens
atggagagcaggcaacatgtggcagaagggaagacagaggtgcagaggctgatgacgtcagaatcacaggaacaggatttctttggccactttggctgaaattcaccacttccatccaattccagtgagagacatggactcacagatgcagsatttcttgcaacaagagatactactttttcaaaaagtcacccaggaattgata

SEQ ID NO: 376604 - DNA, 542 bp, Homo sapiens
  misc_feature (1)...(542): n = A,T,C or G
tgctgtggatgtctttatattcaaagattgatgatgcaatttgaatatrtgtccccaccgaatctcatgttgaattatatttcctaatgtggaaggtggatcctggtataatgtgattgaattatgaaggcaaatttctcatgaatggttcagcaccatccccttgtaccatcctcacaataatgagtaacttctcatgagatgtagtcactgaaatctctatatcacctccccactctccgtgttttccccttgccatgtgagacaattgattctttctttgccttccatgattattgaaagatttctgaggcctagaagcagaagcactgtgcttagaaccatgagccaattaaacctctttttcaaaataaatcatacgggaaatggcaaatgaggactggagcgttgctataaagatacctgggaatgtggaagcagctttggaaccaggtaatggacggaggttggaagagtttggagggctcaaaagaagacagatgagaaaacttttggaccatcttagagtnnnnnnnnnnnnn

SEQ ID NO: 376605 - DNA, 542 bp, Homo sapiens
  misc_feature (1)...(542): n = A,T,C or G
tgctgtggatgtctttatattcaaagattgatgatgcaatttgaatatgtgtccccaccgaatctcatgttgaattatatttcctaatgtggaaggtggatcctggtataakgtgattgaattatgaaggcaaatttctcatgaatggttcagcaccatccccttgtaccatcctcacaataatgagtaacttctcatgagatgtagtcactgaaatctctatatcacctccccactctccgtgttttccccttgccatgtgagacaattgattctttctttgccttccatgattattgaaagatttctgaggcctagaagcagaagcactgtgcttagaaccatgagccaattaaacctctttttcaaaataaatcatacgggaaatggcaaatgaggactggagcgttgctataaagatacctgggaatgtggaagcagctttggaaccaggtaatggacggaggttggaagagtttggagggctcaaaagaagacagatgagaaaacttttggaccatcttagagtnnnnnnnnnnnnn

SEQ ID NO: 376606 - DNA, 378 bp, Homo sapiens
ctttaaggaaaaactttaaggattggaaaacagggatgccatatgtccagtaacatgggatagccgytcctaattaaggattgctgtatgtcctgaatgactttctaatgtaatgaaggtgaataacctgctctgtttaattatacaatcccaaatgtaactgcctaagtgtcaagtacttttgcatggttttaatatgccatgaattttgcaagaatgaaactgctatgtatatgagaaaagacggtagattttttcatttagatactcatttcagagtctcaataggaaaaatagaacacacacaaactaagataatttaacatgggtttatttccaaagagactacttacgaaaatgtcaggggagaagggtgaa

SEQ ID NO: 376607 - DNA, 378 bp, Homo sapiens
ctttaaggaaaaactttaaggattggaaaacagggatgccatatgtccagtaacatgggatagccgctcctaattaaggattgctgtatgtcctgaatgactttctaatgtaatgaaggtgaataacctgctytgtttaattatacaatcccaaatgtaactgcctaagtgtcaagtacttttgcatggttttaatatgccatgaattttgcaagaatgaaactgctatgtatatgagaaaagacggtagattttttcatttagatactcatttcagagtctcaataggaaaaatagaacacacacaaactaagataatttaacatgggtttatttccaaagagactacttacgaaaatgtcaggggagaagggtgaa

SEQ ID NO: 376608 - DNA, 378 bp, Homo sapiens
ctttaaggaaaaactttaaggattggaaaacagggatgccatatgtccagtaacatgggatagccgctcctaattaaggattgctgtatgtcctgaatgactttctaatgtaatgaaggtgaataacctgctctgtttaattatacaatcccaaatgtaactgcctaagtgycaagtacttttgcatggttttaatatgccatgaattttgcaagaatgaaactgctatgtatatgagaaaagacggtagattttttcatttagatactcatttcagagtctcaataggaaaaatagaacacacacaaactaagataatttaacatgggtttatttccaaagagactacttacgaaaatgtcaggggagaagggtgaa

SEQ ID NO: 376609 - DNA, 378 bp, Homo sapiens
ctttaaggaaaaactttaaggattggaaaacagggatgccatatgtccagtaacatgggatagccgctcctaattaaggattgctgtatgtcctgaatgactttctaatgtaatgaaggtgaataacctgctctgtttaattatacaatcccaaatgtaactgcctaagtgtcaagtacttttgcatggttttaatatgccatgaattttgcaagaatgaaactrctatgtatatgagaaaagacggtagattttttcatttagatactcatttcagagtctcaataggaaaaatagaacacacacaaactaagataatttaacatgggtttatttccaaagagactacttacgaaaatgtcaggggagaagggtgaa

SEQ ID NO: 376610 - DNA, 470 bp, Homo sapiens
tagcagagagggagttaggcaataacccccaatctcatttcctccttccctttaatctcatgaacatgcatagaaggcaatgagcaagggaaccgatggagatattcaatatggaccattccacttggacaaaagccagtaaataggggagtataacaggggacaagggccaaacagaaagtatctattacatttrccaatgcagatcaatcatgtcaacaatagaaatggcagttttggcatttggttattcaatgaaactatatttgtagctttttatttacaatgtttcaaggtatgggcgaagatatgaaaatttcattatgttctattgtatttgatatgtaaatgttctggcacaattatatacattttggattatatattgacagtaaattatttctcctttgttagcttcagaacaaaattaatattttcaacaacttcaatgcatacattgtgttctcact

SEQ ID NO: 376611 - DNA, 542 bp, Homo sapiens
  misc_feature (1)...(542): n = A,T,C or G
tgctgtggatgtctttatattcaaagattgatgatgcaatttgaatatgtgtccccaccgaatctcatgttgaattatatttcctaatgtggaaggtggatcctggtataatgtgattgaattatgaaggcaaatttctcatgaatggttcagcaccatccccttgtaccatcctcacaataatgagtracttctcatgagatgtagtcactgaaatctctatatcacctccccactctccgtgttttccccttgccatgtgagacaattgattctttctttgccttccatgattattgaaagatttctgaggcctagaagcagaagcactgtgcttagaaccatgagccaattaaacctctttttcaaaataaatcatacgggaaatggcaaatgaggactggagcgttgctataaagatacctgggaatgtggaagcagctttggaaccaggtaatggacggaggttggaagagtttggagggctcaaaagaagacagatgagaaaacttttggaccatcttagagtnnnnnnnnnnnnn

SEQ ID NO: 376612 - DNA, 470 bp, Homo sapiens
tagcagagagggagttaggcaataacccccaatctcatttcctccttccctttaatctcatgaacatgcatagaaggcaatgagcaagggaaccgatggagatattcaatatggaccattccacttggacaaaagccagtaaataggggagtataacaggggacaagggccaaacagaaagtatctattacatttaccaatgcagatcaatcatgtcaacaatagaaatggcagttttggcatttggttattcaatgaaactatatttgtagctttttatttacaatgtttcaaggtatgggcgaagatatgaaaatttcattatgttctattgtatttgakatgtaaatgttctggcacaattatatacattttggattatatattgacagtaaattatttctcctttgttagcttcagaacaaaattaatattttcaacaacttcaatgcatacattgtgttctcact

SEQ ID NO: 376613 - DNA, 483 bp, Homo sapiens
ttttatttacaatgtttcaaggtatgggcgaagatatgaaaatttcattatgttctattgtatttgatatgtaaatgttctggcacaattatatacattttggattatatattgacagtaaattatttctcctttgttagcttcagaacaaaattaatattttcaacaacttsaatgcatacattgtgttctcactaatagtttagaatagtgaaggggtctttgaagaatttcttatgaagtagaggcattgggtcagacagagccgaaaaccattgacttagattaatcactatttatcctagggctgaagagggccaattgaagacacaaatgtccaatccctctataaccttggagatctatgaaccagagaaatagagactggttcttaaggaggtaataagtgtgccttctatggtttataataatatgcattgtcttaacaatcgaatacttaaaagttaatgccctcataatatg

SEQ ID NO: 376614 - DNA, 483 bp, Homo sapiens
ttttatttacaatgtttcaaggtatgggcgaagatatgaaaatttcattatgttctattgtatttgatatgtaaatgttctggcacaattatatacattttggattatatattgacagtaaattatttctcctttgttagcttcagaacaaaattaatattttcaacaacttcaatgcatacattgtgttctcactaatagtttagaatagygaaggggtctttgaagaatttcttatgaagtagaggcattgggtcagacagagccgaaaaccattgacttagattaatcactatttatcctagggctgaagagggccaattgaagacacaaatgtccaatccctctataaccttggagatctatgaaccagagaaatagagactggttcttaaggaggtaataagtgtgccttctatggtttataataatatgcattgtcttaacaatcgaatacttaaaagttaatgccctcataatatg

SEQ ID NO: 376615 - DNA, 483 bp, Homo sapiens
ttttatttacaatgtttcaaggtatgggcgaagatatgaaaatttcattatgttctattgtatttgatatgtaaatgttctggcacaattatatacattttggattatatattgacagtaaattatttctcctttgttagcttcagaacaaaattaatattttcaacaacttcaatgcatacattgtgttctcactaatagtttagaatagtgaaggggtctttraagaatttcttatgaagtagaggcattgggtcagacagagccgaaaaccattgacttagattaatcactatttatcctagggctgaagagggccaattgaagacacaaatgtccaatccctctataaccttggagatctatgaaccagagaaatagagactggttcttaaggaggtaataagtgtgccttctatggtttataataatatgcattgtcttaacaatcgaatacttaaaagttaatgccctcataatatg

SEQ ID NO: 376616 - DNA, 483 bp, Homo sapiens
ttttatttacaatgtttcaaggtatgggcgaagatatgaaaatttcattatgttctattgtatttgatatgtaaatgttctggcacaattatatacattttggattatatattgacagtaaattatttctcctttgttagcttcagaacaaaattaatattttcaacaacttcaatgcatacattgtgttctcactaatagtttagaatagtgaaggggtctttgaagaatttcttatgaagtagaggcattgggtcagacagagccgaaaaccattgacttagattaatcactatttatcctagggctgaagagggccaattgaagacacaaatgtccaatccctctataaccttggagatctatgaaccagagaaatagagactggttcttaaggaggtaataagtgtgccttctatggtttataataatatgcattgtcttaacaatygaatacttaaaagttaatgccctcataatatg

SEQ ID NO: 376617 - DNA, 265 bp, Homo sapiens
ggttcttaaggaggtaataagtgtgccttctatggtttataataatatgcattgtcttaacaatcgaatacttaaaagttaatgccctcataatatgcaaaatttttaataagcacattggtccctgtgttcaagtagttggtaatcaaattagygaagtatggtaagtcttttgaagagcattaaacagcagagaatgtaagaaatttttctctataatagtgtgggccttctgtgtttcctaagggaacattcatatgatcta

SEQ ID NO: 376618 - DNA, 265 bp, Homo sapiens
ggttcttaaggaggtaataagtgtgccttctatggtttataataatatgcattgtcttaacaatcgaatacttaaaagttaatgccctcataatatgcaaaatttttaataagcacattggtccctgtgttcaagtagttggtaatcaaattagtgaagtatggtaagtcttttgaagagcattaaacagcagagaatgtaagaaatttktctctataatagtgtgggccttctgtgtttcctaagggaacattcatatgatcta

SEQ ID NO: 376619 - DNA, 542 bp, Homo sapiens
  misc_feature (1)...(542): n = A,T,C or G
tgctgtggatgtctttatattcaaagattgatgatgcaatttgaatatgtgtccccaccgaatctcatgttgaattatatttcctaatgtggaaggtggatcctggtataatgtgattgaattatgaaggcaaatttctcatgaatggttcagcaccatccccttgtaccatcctcacaataatgagtaacttctcatgagatgtagtcactgaaatctctatatcacctccccactctccgtgttttccccttgccatgtgagacaattgattctttctttgccttccatgattattgaaagatttctgaggcctagaagcagaagcactgtgcttagaaccatgagccaattaaacctctttttcaaaataaatcatacrggaaatggcaaatgaggactggagcgttgctataaagatacctgggaatgtggaagcagctttggaaccaggtaatggacggaggttggaagagtttggagggctcaaaagaagacagatgagaaaacttttggaccatcttagagtnnnnnnnnnnnnn

SEQ ID NO: 376620 - DNA, 322 bp, Homo sapiens
gaaaccagcctgagcaaaatagtgagatgctgactctacaaaaaaaataaaagttagctgaccatggtggtgtatgcctgtaattaacagctacatgggaggctgaggtgggwggatcccttgagagcagaaggtcaaggttgcagtgagctgtgatcatgccactgcacttcagcctgggtgacagacagagacactgtctcaaaaaaatttcaaaaatacattaagatgtcttgtatagacatttatccatttacatttacttatttttgacagtttatctagagtatttgtgagaactgaggtattagacaaagctagt

SEQ ID NO: 376621 - DNA, 322 bp, Homo sapiens
gaaaccagcctgagcaaaatagtgagatgctgactctacaaaaaaaataaaagttagctgaccatggtggtgtatgcctgtaattaacagctacatgggaggctgaggtgggtggatcccttgagagcagaaggtcaaggttgcagtgagctgtgatcatgccactgcacttcagcmtgggtgacagacagagacactgtctcaaaaaaatttcaaaaatacattaagatgtcttgtatagacatttatccatttacatttacttatttttgacagtttatctagagtatttgtgagaactgaggtattagacaaagctagt

SEQ ID NO: 376622 - DNA, 608 bp, Homo sapiens
gggcatggtggctcacacactgtaatcccaacactttaggaggcctaggcaggagtatcatgaaaccagcctgagcaaaatagtgagatgctgactctacaaaaaaaataaaagttagctgaccatggtggtgtatgcctgtaattaacagctacatgggaggctgaggtgggtggatcccttgagagcagaaggtcaaggttgcagtgagctgtgatcatgccactgcacttcagcctgggtgacagacagagacactgtctcaaaaaaatttcaaaaatacattaagatgtcttgtatagacatttatccmtttacatttacttatttttgacagtttatctagagtatttgtgagaactgaggtattagacaaagctagtcatcatttctaggttattttcttgttaaccatgttatagcctgtgaatatcaggagttcacgtaagtgaggacttcaaagttaaatacatgggtattttaccaataactcagaaaattccattatttttgttcaacaaaacatattaaattggtcttatgtatttaaaaaatcacataaacaaatattcttttttcctgtgtttatagctttataaccttcatgc

SEQ ID NO: 376623 - DNA, 396 bp, Homo sapiens
agatttctattttctatttttattttatcaatactttttaaattatttgtatttataaaagaactcttttgtctgggcacagtggttcatgcctgtatcccagcactttgagaggctgaggcaagaggatcacttgagctcaggagtttgagaccagcctgggcaacatagtgagacccaatctctactaagaataagataaaaaattgccaggcatggtggtgcatrcctattgtcccagctactagagaggatgaggcaggaggattgcttgagcctgggaggttgagataacagtgagctatgatcccactactgcactccagtctggggaacagagtgagaccttagagtgagaccttgtctcaaaaagagaaaaaaataaagaattgtttc

SEQ ID NO: 376624 - DNA, 396 bp, Homo sapiens
agatttctattttctatttttattttatcaatactttttaaattatttgtatttataaaagaactcttttgtctgggcacagtggttcatgcctgtatcccagcactttgagaggctgaggcaagaggatcacttgagctcaggagtttgagaccagcctgggcaacatagtgagacccaatctctactaagaataagataaaaaattgccaggcatggtggtgcatgcctattrtcccagctactagagaggatgaggcaggaggattgcttgagcctgggaggttgagataacagtgagctatgatcccactactgcactccagtctggggaacagagtgagaccttagagtgagaccttgtctcaaaaagagaaaaaaataaagaattgtttc

SEQ ID NO: 376625 - DNA, 515 bp, Homo sapiens
gttggttttctgatgccctgttgtttctgttctgaatggtttatttctcattataagagctcagcaaagcaggcagagttaaaaagcagagacatgaaggctttaaaatcatggacttcactcctacactgaatctcaggtccccagaaagacagaaacaccatgggaccacagcaaaggcagaaggaggartgagagagggaggtggacagaacaacaaacaggagttggctctcattttttcacgcgtgccattttctttaggtttttctagtttatggagtctctttgttccagttgagcacacagataaactagagatctcaaggcttttgctgagaacatcaaagcctttaacctctgttgggccaaatatttagaccaaaaatacagacagacacacaaaagccagaaccggaccagattgagtagcttagtggctacagcctttattccctttattctttaggatacgaactcaaaccagattcagggttctaacccaaccaggaccc

SEQ ID NO: 376626 - DNA, 515 bp, Homo sapiens
gttggttttctgatgccctgttgtttctgttctgaatggtttatttctcattataagagctcagcaaagcaggcagagttaaaaagcagagacatgaaggctttaaaatcatggacttcactcctacactgaatctcaggtccccagaaagacagaaacaccatgggaccacagcaaaggcagaaggaggagtgagagagggaggtggacagaacaacaaacaggagttggctctcawtttttcacgcgtgccattttctttaggtttttctagtttatggagtctctttgttccagttgagcacacagataaactagagatctcaaggcttttgctgagaacatcaaagcctttaacctctgttgggccaaatatttagaccaaaaatacagacagacacacaaaagccagaaccggaccagattgagtagcttagtggctacagcctttattccctttattctttaggatacgaactcaaaccagattcagggttctaacccaaccaggaccc

SEQ ID NO: 376627 - DNA, 515 bp, Homo sapiens
gttggttttctgatgccctgttgtttctgttctgaatggtttatttctcattataagagctcagcaaagcaggcagagttaaaaagcagagacatgaaggctttaaaatcatggacttcactcctacactgaatctcaggtccccagaaagacagaaacaccatgggaccacagcaaaggcagaaggaggagtgagagagggaggtggacagaacaacaaacaggagttggctctcattttttcacgcgtgccattttstttaggtttttctagtttatggagtctctttgttccagttgagcacacagataaactagagatctcaaggcttttgctgagaacatcaaagcctttaacctctgttgggccaaatatttagaccaaaaatacagacagacacacaaaagccagaaccggaccagattgagtagcttagtggctacagcctttattccctttattctttaggatacgaactcaaaccagattcagggttctaacccaaccaggaccc

SEQ ID NO: 376628 - DNA, 515 bp, Homo sapiens
gttggttttctgatgccctgttgtttctgttctgaatggtttatttctcattataagagctcagcaaagcaggcagagttaaaaagcagagacatgaaggctttaaaatcatggacttcactcctacactgaatctcaggtccccagaaagacagaaacaccatgggaccacagcaaaggcagaaggaggagtgagagagggaggtggacagaacaacaaacaggagttggctctcattttttcacgcgtgccattttctttaggtttttctagtttatggagtctctttgttccagttgagcacacagataaactagagatctcaaggcttttgctgagaacatcaaagcctttaacctctgttgggccaaatatttagaccaaaaatacagacagacacacaaaagccagaaccggaccagattgagtagctyagtggctacagcctttattccctttattctttaggatacgaactcaaaccagattcagggttctaacccaaccaggaccc

SEQ ID NO: 376629 - DNA, 649 bp, Homo sapiens
attaacaggcatatcaaaagcagccaacacctcaattacagctacaagctccgccttttgagctgaagtatagggtgtctggaaaactttagcttttgatccagaataagaacctttaccattactagacccatctgtgaaacaatgaaaamgcttagcaggctgcaggttgtttactgcaggaattgtaaatgcaaaccgttcacagtcttgctcagctaaaagggtagtaaagaaacagtcttttaaatctgtgactattaaaggccaattttttggaattatagtagagaagggaatcctggctgttatatttccataggttgtataactgaattgatggctcttaagtcagttaacattctccatttacctgattttttcttaattatgaaaactggagaattccaaggggaaaatgttggcgctatgtgcccattttctaattgttcagtaactaatttctctaaagcatccagtttccctttgcttagcagccattattctatccaaattggcttatctgttaaccattttaaaggtataggttctggaggcttaactatggccaccatcaaaaatggtatactaatctttggcaggaactttgtctttccgtttgaagcagttctttcaaaccttgcaattt

SEQ ID NO: 376630 - DNA, 567 bp, Homo sapiens
ttactgcaggaattgtaaatgcaaaccgttcacagtcttgctcagctaaaagggtagtaaagaaacagtcttttaaatctgtgactattaaaggccaatttttyggaattatagtagagaagggaatcctggctgttatatttccataggttgtataactgaattgatggctcttaagtcagttaacattctccatttacctgattttttcttaattatgaaaactggagaattccaaggggaaaatgttggcgctatgtgcccattttctaattgttcagtaactaatttctctaaagcatccagtttccctttgcttagcagccattattctatccaaattggcttatctgttaaccattttaaaggtataggttctggaggcttaactatggccaccatcaaaaatggtatactaatctttggcaggaactttgtctttccgtttgaagcagttctttcaaaccttgcaattttttttctactcctataccagggacatgccccatttcgtgcatcatatgttgactttgagggctgtatacttgttatggaattagaacttgt

SEQ ID NO: 376631 - DNA, 649 bp, Homo sapiens
attaacaggcatatcaaaagcagccaacacctcaattacagctacaagctccgccttttgagctgaagtatagggtgtctggaaaactttagcttttgatccagaataagaacctttaccattactagacccatctgtgaaacaatgaaaaagcttagcaggctgcaggttgtttactgcaggaattgtaaatgcaaaccgttcacagtcttgctcagctaaaagggtagtaaagaaacagtcttttaaatctgtgactattaaaggccaattttttggaattatagtagagaagggaatcctggctgttatatttccataggttgtataactgaattgatggctcttaagtcagttaacattytccatttacctgattttttcttaattatgaaaactggagaattccaaggggaaaatgttggcgctatgtgcccattttctaattgttcagtaactaatttctctaaagcatccagtttccctttgcttagcagccattattctatccaaattggcttatctgttaaccattttaaaggtataggttctggaggcttaactatggccaccatcaaaaatggtatactaatctttggcaggaactttgtctttccgtttgaagcagttctttcaaaccttgcaattt

SEQ ID NO: 376632 - DNA, 567 bp, Homo sapiens
ttactgcaggaattgtaaatgcaaaccgttcacagtcttgctcagctaaaagggtagtaaagaaacagtcttttaaatctgtgactattaaaggccaattttttggaattatagtagagaagggaatcctggctgttatatttccataggttgtataactgaattgatggctcttaagtcagttaacattctccatttacctgattttttcttaattatgaaaactggagaattccaaggggaaaatkttggcgctatgtgcccattttctaattgttcagtaactaatttctctaaagcatccagtttccctttgcttagcagccattattctatccaaattggcttatctgttaaccattttaaaggtataggttctggaggcttaactatggccaccatcaaaaatggtatactaatctttggcaggaactttgtctttccgtttgaagcagttctttcaaaccttgcaattttttttctactcctataccagggacatgccccatttcgtgcatcatatgttgactttgagggctgtatacttgttatggaattagaacttgt

SEQ ID NO: 376633 - DNA, 649 bp, Homo sapiens
attaacaggcatatcaaaagcagccaacacctcaattacagctacaagctccgccttttgagctgaagtatagggtgtctggaaaactttagcttttgatccagaataagaacctttaccattactagacccatctgtgaaacaatgaaaaagcttagcaggctgcaggttgtttactgcaggaattgtaaatgcaaaccgttcacagtcttgctcagctaaaagggtagtaaagaaacagtcttttaaatctgtgactattaaaggccaattttttggaattatagtagagaagggaatcctggctgttatatttccataggttgtataactgaattgatggctcttaagtcagttaacattctccatttacctgattttttcttaattatgaaaactggagaattccaaggggaaaatgttggmgctatgtgcccattttctaattgttcagtaactaatttctctaaagcatccagtttccctttgcttagcagccattattctatccaaattggcttatctgttaaccattttaaaggtataggttctggaggcttaactatggccaccatcaaaaatggtatactaatctttggcaggaactttgtctttccgtttgaagcagttctttcaaaccttgcaattt

SEQ ID NO: 376634 - DNA, 567 bp, Homo sapiens
ttactgcaggaattgtaaatgcaaaccgttcacagtcttgctcagctaaaagggtagtaaagaaacagtcttttaaatctgtgactattaaaggccaattttttggaattatagtagagaagggaatcctggctgttatatttccataggttgtataactgaattgatggctcttaagtcagttaacattctccatttacctgattttttcttaattatgaaaactggagaattccaaggggaaaatgttggcgctatgtgcccattttctaattgttcagtaactaatttctcyaaagcatccagtttccctttgcttagcagccattattctatccaaattggcttatctgttaaccattttaaaggtataggttctggaggcttaactatggccaccatcaaaaatggtatactaatctttggcaggaactttgtctttccgtttgaagcagttctttcaaaccttgcaattttttttctactcctataccagggacatgccccatttcgtgcatcatatgttgactttgagggctgtatacttgttatggaattagaacttgt

SEQ ID NO: 376635 - DNA, 567 bp, Homo sapiens
ttactgcaggaattgtaaatgcaaaccgttcacagtcttgctcagctaaaagggtagtaaagaaacagtcttttaaatctgtgactattaaaggccaattttttggaattatagtagagaagggaatcctggctgttatatttccataggttgtataactgaattgatggctcttaagtcagttaacattctccatttacctgattttttcttaattatgaaaactggagaattccaaggggaaaatgttggcgctatgtgcccattttctaattgttcagtaactaatttctctaaagcatccagtttccctttgcttagcagccattattctatccaaattggcttatctgttaaccattttaaaggtataggttctggaggcttaactatggccaccatcaaaaatggtatmctaatctttggcaggaactttgtctttccgtttgaagcagttctttcaaaccttgcaattttttttctactcctataccagggacatgccccatttcgtgcatcatatgttgactttgagggctgtatacttgttatggaattagaacttgt

SEQ ID NO: 376636 - DNA, 538 bp, Homo sapiens
gttcacacttgtaatcccaaaatttggggaggccgaggcaggtgaatcacctgacgtcaggagtttgagaccagcctggccaamatgatgaaacctgtctctagtaaaaatacaaaaattagcaaggcgtgttggcaggcatgtgtaatctcagatactcaggaggctgaggcaggagaatcacttgaacccaggagacagaggttgcagtaagccaagatcataccactgcactatagccttggtgatggagactctgtctcaaaacaaaacaaaaaaaaaggtttgtgctttccttacataagagtacatcttctgactataaaaatcctggaaaaaacctaggaaatactcttctagatatcatatttgtcaattaatttatggctaagtcctcaaaagcaattgcaagaataacaaaaattgacaagtgtgatctaatttagctaaatagcttctgcacagcatgagaaactatcacgggattaaacagacagcataaggaatggaagaaaatattcacaaagtatggatatag

SEQ ID NO: 376637 - DNA, 538 bp, Homo sapiens
gttcacacttgtaatcccaaaatttggggaggccgaggcaggtgaatcacctgacgtcaggagtttgagaccagcctggccaaaatgatgaaacctgtctctagtaaaaatacaaaaattagcaaggcgtgttggcaggcatgtgtaatctcagatactcaggaggctgaggcaggagaatcacttgaacccaggagacagaggttgcagtaagccaagatcataccactgcactatagccttggtgatggagactctgtctcaaaacaaaacaaaaaaaaaggtttgtgctttcyttacataagagtacatcttctgactataaaaatcctggaaaaaacctaggaaatactcttctagatatcatatttgtcaattaatttatggctaagtcctcaaaagcaattgcaagaataacaaaaattgacaagtgtgatctaatttagctaaatagcttctgcacagcatgagaaactatcacgggattaaacagacagcataaggaatggaagaaaatattcacaaagtatggatatag

SEQ ID NO: 376638 - DNA, 538 bp, Homo sapiens
gttcacacttgtaatcccaaaatttggggaggccgaggcaggtgaatcacctgacgtcaggagtttgagaccagcctggccaaaatgatgaaacctgtctctagtaaaaatacaaaaattagcaaggcgtgttggcaggcatgtgtaatctcagatactcaggaggctgaggcaggagaatcacttgaacccaggagacagaggttgcagtaagccaagatcataccactgcactatagccttggtgatggagactctgtctcaaaacaaaacaaaaaaaaaggtttgtgctttccttacataagagtacatcttctgactataaaaatcctggaaaaaacctaggaaatactcttctagatatcatatttgtcarttaatttatggctaagtcctcaaaagcaattgcaagaataacaaaaattgacaagtgtgatctaatttagctaaatagcttctgcacagcatgagaaactatcacgggattaaacagacagcataaggaatggaagaaaatattcacaaagtatggatatag

SEQ ID NO: 376639 - DNA, 538 bp, Homo sapiens
gttcacacttgtaatcccaaaatttggggaggccgaggcaggtgaatcacctgacgtcaggagtttgagaccagcctggccaaaatgatgaaacctgtctctagtaaaaatacaaaaattagcaaggcgtgttggcaggcatgtgtaatctcagatactcaggaggctgaggcaggagaatcacttgaacccaggagacagaggttgcagtaagccaagatcataccactgcactatagccttggtgatggagactctgtctcaaaacaaaacaaaaaaaaaggtttgtgctttccttacataagagtacatcttctgactataaaaatcctggaaaaaacctaggaaatactcttctagatatcatatttgtcaattaatttatggctaagtcctcaaaagcaattgcaagaataacaaaaattgacaagtgtgatctaatttagctaaatagcttctgcacagcatgagaaactatcacgrgattaaacagacagcataaggaatggaagaaaatattcacaaagtatggatatag

SEQ ID NO: 376640 - DNA, 525 bp, Homo sapiens
ttaaatttttataaagggcagagttttctaagaatttcaaagcaatgcattcattgcaaaagatggctttaattacttaatcttttttttttttttttttttgtgagacagggtctcactctgtcaccaggctggagtgcagyggtgcagtcttggctcactgcaacctccacctcctggcttcaagcaattctcctgccttagtatcccaagtagctgggactacaggtgcacatcaccacgcccagctaatttttgtatttttagtagagatggggtttccccatgttggccaggatggtcacgatctcctgaccttgtgatctgcttgctttggcctccccaagtgctgggattacaggtatgagccaccatgcctggccattgtttaacctttgtactaataaaacactacctttctaaaatcatgtatatgcaatagatcaatattaactgcatttttgtcagattactctaaacagcattacacatatacatcctctgttatctaaacttaaaataagt

SEQ ID NO: 376641 - DNA, 525 bp, Homo sapiens
ttaaatttttataaagggcagagttttctaagaatttcaaagcaatgcattcattgcaaaagatggctttaattacttaatcttttttttttttttttttttgtgagacagggtctcactctgtcaccaggctggagtgcagcggtgcagtcttggctcactgcaacctccacctcctggcttcaagcaattctcctgccttagtatcccaagtagctgggactacwggtgcacatcaccacgcccagctaatttttgtatttttagtagagatggggtttccccatgttggccaggatggtcacgatctcctgaccttgtgatctgcttgctttggcctccccaagtgctgggattacaggtatgagccaccatgcctggccattgtttaacctttgtactaataaaacactacctttctaaaatcatgtatatgcaatagatcaatattaactgcatttttgtcagattactctaaacagcattacacatatacatcctctgttatctaaacttaaaataagt

SEQ ID NO: 376642 - DNA, 361 bp, Homo sapiens
gtaaatagcaaatggcattccttttcattcttgggttagtagatactacatcaatattttttcttacacacatctaatgaaagatgtgaaaacaaaaactttcacagagaagactgcacttatgcaccawaaattcatcatgttccaaagcttaaacagttcccaagaagtctgtgcatctcttcttcactggttctacactttcttaagttttgccatcctcatggaactgtcagccagcacactgaaacgattctcagaaaacaaaagcatcatcaagttctcagggtttcggtagagattgaaggccaacagacctaagactcattcagaaatacttagctgagcaataacccttcat

SEQ ID NO: 376643 - DNA, 361 bp, Homo sapiens
gtaaatagcaaatggcattccttttcattcttgggttagtagatactacatcaatattttttcttacacacatctaatgaaagatgtgaaaacaaaaactttcacagagaagactgcacttatgcaccataaattcatcatgttccaaagcttaaacagttcccaagaagtctgtgcatctcttyttcactggttctacactttcttaagttttgccatcctcatggaactgtcagccagcacactgaaacgattctcagaaaacaaaagcatcatcaagttctcagggtttcggtagagattgaaggccaacagacctaagactcattcagaaatacttagctgagcaataacccttcat

SEQ ID NO: 376644 - DNA, 361 bp, Homo sapiens
gtaaatagcaaatggcattccttttcattcttgggttagtagatactacatcaatattttttcttacacacatctaatgaaagatgtgaaaacaaaaactttcacagagaagactgcacttatgcaccataaattcatcatgttccaaagcttaaacagttcccaagaagtctgtgcatctcttcttcactggytctacactttcttaagttttgccatcctcatggaactgtcagccagcacactgaaacgattctcagaaaacaaaagcatcatcaagttctcagggtttcggtagagattgaaggccaacagacctaagactcattcagaaatacttagctgagcaataacccttcat

SEQ ID NO: 376645 - DNA, 568 bp, Homo sapiens
ttatagcttatgactgttgagaggtggaccatgccatcttcatcttgtaattccagtgctggttctagtaccttagcatgtggctgttgattacatgaatgaagactgaaaaagytctgatatttaaacacaattagaattaatgccatgtgtaaattattaaatagtaattttgtattgtaaatgtacatacatatttctcattcttattaactctgataaagttctcaagtctttagtttttaaactcactcttagttaactgaagtgttttaggtaaagaacaaaattctttatttttctttccagctgttgctgtattggacacttgctcccatctactttcttctctagaatccacgggtaagccacatctaatgaagagaatatttaaccataaagtcttaaggaaaaattctatgatgatttaaaagattataaaactttattactgggctatttacacattttaattgtttctcataaaatatataacattccaatatttactgaagtaggatatttttgtatcatatgtatgattataatttataggatattttaaatg

SEQ ID NO: 376646 - DNA, 568 bp, Homo sapiens
ttatagcttatgactgttgagaggtggaccatgccatcttcatcttgtaattccagtgctggttctagtaccttagcatgtggctgttgattacatgaatgaagactgaaaaagctctgatatttaaacacaattagaattaatgccatgtgtaaattattaaatagtaattttgtattgtaaatgtacatacatatttctcattcttattaactctgataaagttctcaagtctttagtttttaaactcactcttagttaactgaagtgttttaggtaaagaacaaaattctttatttttctttccagctgttgctgtattggacacttgctcccatctactttcttctctagaatccacgggtaagccacatctaatgaagagaatatttaaccataaagtcttaaggaaaaattctatgatgatttaaaagattataaaactttattactgggctatttacacattttaattgtttctcataaaatatataacattccaatatttactgaagtaggatatttttgtatcataygtatgattataatttataggatattttaaatg

SEQ ID NO: 376647 - DNA, 584 bp, Homo sapiens
ccttaagttttaagtggatcttgcaaatgaaaaccagtattattgagtttgacatactcaaattgcccaaatktcagctgtttaaacaaccaagtcatcattgatactttagtaaaggttagtaaatgtcatcgaaggcttatttgcattttacagtttttattacttaggagagttaaggagtacctgccaggtttgtccatgctaatgttacaattttctttttgtagttcaaccgtattttgtatggagatactttgaggctctgtaaatatctggttactcctcagaacccactagatttagcatttcatggatgacttgtgtttgaacaattattactatgatggttaccagatgattattttcttattctcttctttgttctacatggagaaataaaaccaataaataagggagaaagaaagctcatgattctgatgctccaattccccaagattaggccagtagtagacattccaagctgactttatgtctctttgatttgtctccattactctgtcggcacttttttactttctttcagaagatgttctaagctcagcttgtattttctctgcacc

SEQ ID NO: 376648 - DNA, 584 bp, Homo sapiens
ccttaagttttaagtggatcttgcaaatgaaaaccagtattattgagtttgacatactcaaattgcccaaatttcagctgtttaaacaaccaagtcatcaytgatactttagtaaaggttagtaaatgtcatcgaaggcttatttgcattttacagtttttattacttaggagagttaaggagtacctgccaggtttgtccatgctaatgttacaattttctttttgtagttcaaccgtattttgtatggagatactttgaggctctgtaaatatctggttactcctcagaacccactagatttagcatttcatggatgacttgtgtttgaacaattattactatgatggttaccagatgattattttcttattctcttctttgttctacatggagaaataaaaccaataaataagggagaaagaaagctcatgattctgatgctccaattccccaagattaggccagtagtagacattccaagctgactttatgtctctttgatttgtctccattactctgtcggcacttttttactttctttcagaagatgttctaagctcagcttgtattttctctgcacc

SEQ ID NO: 376649 - DNA, 544 bp, Homo sapiens
tattgagtttgacatactcaaattgcccaaatttcagctgtttaaacaaccaagtcatcattgatactttagtaaaggttagtaaakgtcatcgaaggcttatttgcattttacagtttttattacttaggagagttaaggagtacctgccaggtttgtccatgctaatgttacaattttctttttgtagttcaaccgtattttgtatggagatactttgaggctctgtaaatatctggttactcctcagaacccactagatttagcatttcatggatgacttgtgtttgaacaattattactatgatggttaccagatgattattttcttattctcttctttgttctacatggagaaataaaaccaataaataagggagaaagaaagctcatgattctgatgctccaattccccaagattaggccagtagtagacattccaagctgactttatgtctctttgatttgtctccattactctgtcggcacttttttactttctttcagaagatgttctaagctcagcttgtattttctctgcacc

SEQ ID NO: 376650 - DNA, 544 bp, Homo sapiens
tattgagtttgacatactcaaattgcccaaatttcagctgtttaaacaaccaagtcatcattgatactttagtaaaggttagtaaatgtcatcgaaggcttatttgcattttacagtttttattacttaggagagttaaggagtacctgccaggtttgtccatgctaatgttacaattttctttttgtagttcaacygtattttgtatggagatactttgaggctctgtaaatatctggttactcctcagaacccactagatttagcatttcatggatgacttgtgtttgaacaattattactatgatggttaccagatgattattttcttattctcttctttgttctacatggagaaataaaaccaataaataagggagaaagaaagctcatgattctgatgctccaattccccaagattaggccagtagtagacattccaagctgactttatgtctctttgatttgtctccattactctgtcggcacttttttactttctttcagaagatgttctaagctcagcttgtattttctctgcacc

SEQ ID NO: 376651 - DNA, 455 bp, Homo sapiens
tttactttctttcagaagatgttctaagctcagcttgtattttctctgcrccagctctggaatgagtcattttttttagaagcagaggtggagccactgaggaaacacaggtgagccctccccagtgtgtactcactggtccccaacagaagaaccactgccacatccactgaagtaccaagaaactagcaaagggacttctggctgtctggggagagtactcatgtggtccctggctgtctcagaggttctggattagtcttcctgtagcctctgtgttgtgtctttagatcggggctctgtgggaagggccctgagagacccaacagcacagcgtgccttatctgccaaatgtccctcccttcctcacactctgacactcaggaatagggtagatggtgtgtccaggcagtgtcaggccacctcactttctcctttgagacgggcccagaggg

SEQ ID NO: 376652 - DNA, 455 bp, Homo sapiens
tttactttctttcagaagatgttctaagctcagcttgtattttctctgcaccagctctggaatgagtcattttttttagaagcagaggtggagccactgaggaaacacaggtgagccctccccagtgtgtactcactggtccccaacagaagaaccactgccacatccactgaagtaccaagaaactagcaaagggmcttctggctgtctggggagagtactcatgtggtccctggctgtctcagaggttctggattagtcttcctgtagcctctgtgttgtgtctttagatcggggctctgtgggaagggccctgagagacccaacagcacagcgtgccttatctgccaaatgtccctcccttcctcacactctgacactcaggaatagggtagatggtgtgtccaggcagtgtcaggccacctcactttctcctttgagacgggcccagaggg

SEQ ID NO: 376653 - DNA, 586 bp, Homo sapiens
ggcatacacaatatatcacgggcctggtcagtgtggggccttagtggcttggggcctggtcagtgagggcctggtcagagggggctcagtcagctgggtactygttcatggagaattgttcagtggggggtcggttgagcagcaacctggtaaattgtggtcttgtcagtgggaaccctgtcttgtcaatggggaccaggtcagtggaaaattggtcagtggggtctggcccatgaggcctattaagtgtgggcctggttaggaagacatggtcagtggggacttgatcagtgggacttggtcaatggaggagtggtcattaggggtctcatcactcatcactgggaacctggtcaggggcagtttgtcagtacctggcctgctggccactatctgacctcaggcagggaggttgtctgtggagcctccttgcctccatctgcagggaaagtgagtcggggcaccctggagggtcgctggaaagagaaggtgagaagatgtgttgaatccaatactgcttggcagacctacaactttacaaatgacctgtgttccacctagagagtgtgccagccctctcagcatt

SEQ ID NO: 376654 - DNA, 586 bp, Homo sapiens
ggcatacacaatatatcacgggcctggtcagtgtggggccttagtggcttggggcctggtcagtgagggcctggtcagagggggctcagtcagctgggtactcgttcatggagaattgttcagtggggggtcggttgagcagcaacctggtaaattgtggtcttgtcagtgggaaccctgtcttgtcaatggggaccaggtcagtggaaaattggtcagtggggtctggcccatgaggcctattaagtgtgggcctggttaggaagacatggtcagtggggacttgatcagtgggacttggtcaatggaggagtggtcattaggggtctcatcactcatcactgggaacctggtcaggggcagtttgtcagtacctggcctgctggccactatctgacctcaggcagggrggttgtctgtggagcctccttgcctccatctgcagggaaagtgagtcggggcaccctggagggtcgctggaaagagaaggtgagaagatgtgttgaatccaatactgcttggcagacctacaactttacaaatgacctgtgttccacctagagagtgtgccagccctctcagcatt

SEQ ID NO: 376655 - DNA, 462 bp, Homo sapiens
aatgacctgtgttccacctagagagtgtgccagccctctcagcattatgcagtgcccctcctctgtctgcatccccagkaccaccatgggtggggagggcagagattggggagcacctatagaggctctaatgctctaaggtgacagtgatgaggacctgggtgcacccatgagtggagaagccaagcctgtccagagaagcaagacaaacacacacatacacacacacacacaggcacacatgcatacacaaatacattgcatacacacatgtcagttcaggggatagaggacactgactctgggccctgttgacccaagcagactcccatggtggtgggttgtgtcaccccacaatgtcactgttgctgagtccccatcgcctctgtgttgtggagcagttagagacacacagcagtgtctgtgagtagctctgcgtgaaggaccattttctagatgaga

SEQ ID NO: 376656 - DNA, 526 bp, Homo sapiens
gaccattttctagatgagaggcacatctcaacacagctcactgatcagattcaggtgagtgggacctgctcttttctcttcctyctggcttgggaaaagtcactatcaggtgggtggttttggcctctgggcagctactgagggtaatccctgaacactcaccagctgcctgttatgtgctgacagtcatctcattcatcctcgcagcaattccattctgcatcttttctgatcacctccgtgaccacacaggacaaccccatcagggccctgtcaccaggcccagtctagctccatgataaccaagacacaggtccagagacaatcgtcctacattgtgcctgcatctgaccccccttggtaggtagtgaccagcacaacatggaagaagccagggcagcatgcagccagctgctctgcagccccaaatggctcctgggccttgcaagtcattcataaagggaaagctggtcactttgaggtctctgaagggaagggtgaacgtgcatcccaacagccctggcag

SEQ ID NO: 376657 - DNA, 526 bp, Homo sapiens
gaccattttctagatgagaggcacatctcaacacagctcactgatcagattcaggtgagtgggacctgctcttttctcttcctcctggcttgggaaaagtcactatcaggtgggtggttttggcctctgggcagctactgagggtaatccctgaacactcaccagctgcctgttatgtgctgacagtcatctcattcatcctcgcagcaattccattctgcatcttttctgatcacctccgtgaccacacaggacaaccccatcagggccctgtcaccaggcccagtctagctccatgataaccaagacacaggtccagagacaatcgtcctacattgtgcctgcatctgacmccccttggtaggtagtgaccagcacaacatggaagaagccagggcagcatgcagccagctgctctgcagccccaaatggctcctgggccttgcaagtcattcataaagggaaagctggtcactttgaggtctctgaagggaagggtgaacgtgcatcccaacagccctggcag

SEQ ID NO: 376658 - DNA, 602 bp, Homo sapiens
  misc_feature (1)...(602): n = A,T,C or G
nnnnnnnnnnnnnnnaatattaatcaaactggaatatttagaaatatttaacccaaaagaagttaggaaagaatatatagaagatcaaaacacagaygaaggccagacatggtggctcatgcctgtcatccaaacactttgggaggccaaggtgggtagattgcttgagctcaggagttcaagaccagcctgtgcaacatggcaaaaccctatctctacaaaaaatataaaaattagccaggtgtgtttccatgtgcctgtagtcccagctactcagtgggctccagtgaggattggttgggcctgggaggcagaggttgcagtgagccaacattgcaccattgcactacagtctcagtgacagagcaagaccctgtcttaaaaaaaaaaaaaaaaaaacaaatagaaaataagtagaaaaatggcagacctaaatccaaccttagcaatgattagttacaatgtaactggacaaatactctacttaagacagagactgccagacctgagaggaaagcaagacccaacaatatggcatccacagagacacattttaaatacaaagacacaaagtatgagaaaaaatatgctatgcagacact

SEQ ID NO: 376659 - DNA, 602 bp, Homo sapiens
  misc_feature (1)...(602): n = A,T,C or G
nnnnnnnnnnnnnnnaatattaatcaaactggaatatttagaaatatttaacccaaaagaagttaggaaagaatatatagaagatcaaaacacagacgaaggccagacatggtggctcatgcctgtmatccaaacactttgggaggccaaggtgggtagattgcttgagctcaggagttcaagaccagcctgtgcaacatggcaaaaccctatctctacaaaaaatataaaaattagccaggtgtgtttccatgtgcctgtagtcccagctactcagtgggctccagtgaggattggttgggcctgggaggcagaggttgcagtgagccaacattgcaccattgcactacagtctcagtgacagagcaagaccctgtcttaaaaaaaaaaaaaaaaaaacaaatagaaaataagtagaaaaatggcagacctaaatccaaccttagcaatgattagttacaatgtaactggacaaatactctacttaagacagagactgccagacctgagaggaaagcaagacccaacaatatggcatccacagagacacattttaaatacaaagacacaaagtatgagaaaaaatatgctatgcagacact

SEQ ID NO: 376660 - DNA, 602 bp, Homo sapiens
  misc_feature (1)...(602): n = A,T,C or G
nnnnnnnnnnnnnnnaatattaatcaaactggaatatttagaaatatttaacccaaaagaagttaggaaagaatatatagaagatcaaaacacagacgaaggccagacatggtggctcatgcctgtcatccaaacactttgggaggccaaggtgggtagattgcttgagctcaggagttcaagaccagcctgtgcaacatggcaaaaccctatctctacaaaaaatataaaaattagccaggtgtgtttccatgygcctgtagtcccagctactcagtgggctccagtgaggattggttgggcctgggaggcagaggttgcagtgagccaacattgcaccattgcactacagtctcagtgacagagcaagaccctgtcttaaaaaaaaaaaaaaaaaaacaaatagaaaataagtagaaaaatggcagacctaaatccaaccttagcaatgattagttacaatgtaactggacaaatactctacttaagacagagactgccagacctgagaggaaagcaagacccaacaatatggcatccacagagacacattttaaatacaaagacacaaagtatgagaaaaaatatgctatgcagacact

SEQ ID NO: 376661 - DNA, 602 bp, Homo sapiens
  misc_feature (1)...(602): n = A,T,C or G
nnnnnnnnnnnnnnnaatattaatcaaactggaatatttagaaatatttaacccaaaagaagttaggaaagaatatatagaagatcaaaacacagacgaaggccagacatggtggctcatgcctgtcatccaaacactttgggaggccaaggtgggtagattgcttgagctcaggagttcaagaccagcctgtgcaacatggcaaaaccctatctctacaaaaaatataaaaattagccaggtgtgtttccatgtgcctgtagtcccagctactcagtgggctccagtgaggattggttgggcctgggaggcagaggttgcagtgagccaacattgcaccattgcactacagtctcrgtgacagagcaagaccctgtcttaaaaaaaaaaaaaaaaaaacaaatagaaaataagtagaaaaatggcagacctaaatccaaccttagcaatgattagttacaatgtaactggacaaatactctacttaagacagagactgccagacctgagaggaaagcaagacccaacaatatggcatccacagagacacattttaaatacaaagacacaaagtatgagaaaaaatatgctatgcagacact

SEQ ID NO: 376662 - DNA, 413 bp, Homo sapiens
atgacattaaaagctcaggcagtaaaagcaaaaatatatcaaacctaaaaacttctgtaccacaaaggtcacaaccaacagggtaaaaggcaaactgtaraataaaagaaaataccagttgagtgtcccttatttgaaatgcttgggatgtgtttcagattttgtaatatttgcattattcttactggttgagcatctcgaattcaaacacctgagtctgcgatgctccaataagcatttcctttgagtgtcatgttggcactcaaaaagtttcagactttggagcatttgggatttcagatttttggatcagagacattcaacctatagttgcacatcatgtatctcataagaagtgaacattcagaatacgtaaagtactcctacagagagactaccagaagcagagagga

SEQ ID NO: 376663 - DNA, 413 bp, Homo sapiens
atgacattaaaagctcaggcagtaaaagcaaaaatatatcaaacctaaaaacttctgtaccacaaaggtcacaaccaacagggtaaaaggcaaactgtagaataaaaraaaataccagttgagtgtcccttatttgaaatgcttgggatgtgtttcagattttgtaatatttgcattattcttactggttgagcatctcgaattcaaacacctgagtctgcgatgctccaataagcatttcctttgagtgtcatgttggcactcaaaaagtttcagactttggagcatttgggatttcagatttttggatcagagacattcaacctatagttgcacatcatgtatctcataagaagtgaacattcagaatacgtaaagtactcctacagagagactaccagaagcagagagga

SEQ ID NO: 376664 - DNA, 413 bp, Homo sapiens
atgacattaaaagctcaggcagtaaaagcaaaaatatatcaaacctaaaaacttctgtaccacaaaggtcacaaccaacagggtaaaaggcaaactgtagaataaaagaaaataccagttgagtgtcccttatttgaaatgcttgggatgtgtttcagattttgtaatatttgcattattcttactggttgagcatctcgaattcaaacacctgagtctgmgatgctccaataagcatttcctttgagtgtcatgttggcactcaaaaagtttcagactttggagcatttgggatttcagatttttggatcagagacattcaacctatagttgcacatcatgtatctcataagaagtgaacattcagaatacgtaaagtactcctacagagagactaccagaagcagagagga

SEQ ID NO: 376665 - DNA, 554 bp, Homo sapiens
atatctacatgcaaaataatgaagttggactcttaccttacaccacgttaaaattaattcaaagtgaattataaacccaaaagtaaaactagaactatcaaactcctagggaaaacaaatttggaaaatgctttatgatgatgaatttgtcaataatttttaggatatgacattaaaagctcaggcagtaaaagcaaaaatatatcaaacctaaaaacttctgtaccacaaaggtcacaaccaacagggtaaaaggcaaactgtagaataaaagaaaataccagttgagtgtcccttatttgaaatgcttgggatgtgtttcagattttgtaatatttgcattattcttactggttgagcatctcgaattcaaacacctgagtctgcgatgctccaataagcatttcctttgagtgtcatgttggcactcaaaaagtttcagamtttggagcatttgggatttcagatttttggatcagagacattcaacctatagttgcacatcatgtatctcataagaagtgaacattcagaatacgtaaagtactcctaca

SEQ ID NO: 376666 - DNA, 554 bp, Homo sapiens
atatctacatgcaaaataatgaagttggactcttaccttacaccacgttaaaattaattcaaagtgaattataaacccaaaagtaaaactagaactatcaaactcctagggaaaacaaatttggaaaatgctttatgatgatgaatttgtcaataatttttaggatatgacattaaaagctcaggcagtaaaagcaaaaatatatcaaacctaaaaacttctgtaccacaaaggtcacaaccaacagggtaaaaggcaaactgtagaataaaagaaaataccagttgagtgtcccttatttgaaatgcttgggatgtgtttcagattttgtaatatttgcattattcttactggttgagcatctcgaattcaaacacctgagtctgcgatgctccaataagcatttcctttgagtgtcatgttggcactcaaaaagtttcagactttggagcatttgggatttcagatktttggatcagagacattcaacctatagttgcacatcatgtatctcataagaagtgaacattcagaatacgtaaagtactcctaca

SEQ ID NO: 376667 - DNA, 525 bp, Homo sapiens
tatgatgatgaatttgtcaataatttttaggatatgacattaaaagctcaggcagtaaaagcaaaaatatatcaaacctaaaaacttctgtaccacaaaggtcacaaccaacagggtaaaaggcaaactgtagaataaaagaaaataccagttgagtgtcccttatttgaaatgcttgggatgtgtttcagattttgtaatatttgcattattcttactggttgagcatctcgaattcaaacacctgagtctgcgatgctccaataagcatttcctttgagtgtcatgttggcactcaaaaagtttcagactttggagcatttgggatttcagatttttggatcasagacattcaacctatagttgcacatcatgtatctcataagaagtgaacattcagaatacgtaaagtactcctacagagagactaccagaagcagagaggagcaaacacattttcacactagagcacctcctatctctcccggattccaattagggcagagtaagtgctagttatctgcc

SEQ ID NO: 376668 - DNA, 413 bp, Homo sapiens
atgacattaaaagctcaggcagtaaaagcaaaaatatatcaaacctaaaaacttctgtaccacaaaggtcacaaccaacagggtaaaaggcaaactgtagaataaaagaaaataccagttgagtgtcccttatttgaaatgcttgggatgtgtttcagattttgtaatatttgcattattcttactggttgagcatctcgaattcaaacacctgagtctgcgatgctccaataagcatttcctttgagtgtcatgttggcactcaaaaagtttcagactttggagcatttgggatttcagatttttggatcagagacattcaacctatagttgcacatcatgtatctcataagaagtgaacattcagaatacgtaaagwactcctacagagagactaccagaagcagagagga

SEQ ID NO: 376669 - DNA, 549 bp, Homo sapiens
attcttactggttgagcatctcgaattcaaacacctgagtctgcgatgctccaataagcatttcctttgagtgtcatgttggcactcaaaaagtttcagactttggagcatttgggatttcagatttttggatcagagacattcaacctatagttgcacatcatgtatctcataagaagtgaacattcagaatacgtaaagtactcctacagagagactaccagaagcagagaggagcaaacacattttcacactagagcacctcctatctctcccggattccaattagggcagagtaagtgctagttatctgccaacccaggattaggccctgcagctgcagtgaaaataatcacagaagaaaactaagaaataaaaaatggagaaagtgagacatcaaactaaaattactagaaacccccaggaagaaggaaaaagaaaccaagaaaacagaaaaacaattaaaccagttaattaaaccttggcatgaccagaagatcagagtttcctaaaggagtggaaatytattgatttgaagaggatttattg

SEQ ID NO: 376670 - DNA, 353 bp, Homo sapiens
gagaaaacactactacttccaatatggcagggggtgtacacgtcstatgggatactgttcctatatccatgggggaaaaggatattgggaacaatattacaaacaatatcacagggggtgtacatgtcctgagatatgaggagtaatataaccctctccccctctagatattacaaactgtatcacagaggggtgtaaacccctgcaatgtggaaagtaaaatcatcttctcccccactggatattacaaataatatcacagacggtgtacatgtgaggtgtttacgatattgggagtaatatcatatcccccagtggatattatgaacaatatcacagaggggtgtatacac

SEQ ID NO: 376671 - DNA, 353 bp, Homo sapiens
gagaaaacactactacttccaatatggcagggggtgtacacgtcctatgkgatactgttcctatatccatgggggaaaaggatattgggaacaatattacaaacaatatcacagggggtgtacatgtcctgagatatgaggagtaatataaccctctccccctctagatattacaaactgtatcacagaggggtgtaaacccctgcaatgtggaaagtaaaatcatcttctcccccactggatattacaaataatatcacagacggtgtacatgtgaggtgtttacgatattgggagtaatatcatatcccccagtggatattatgaacaatatcacagaggggtgtatacac

SEQ ID NO: 376672 - DNA, 606 bp, Homo sapiens
aatatcaccaagtgtgtacatcaccattgtgatattgttcctatatttaggggatagtggattacattactgtcaatatcacagggggtgtgcacccccccatggtattgttcctaatgtccagcaagggagaaaacactactacttccaatatggcagggggtgtacacgtcctatgggatactgytcctatatccatgggggaaaaggatattgggaacaatattacaaacaatatcacagggggtgtacatgtcctgagatatgaggagtaatataaccctctccccctctagatattacaaactgtatcacagaggggtgtaaacccctgcaatgtggaaagtaaaatcatcttctcccccactggatattacaaataatatcacagacggtgtacatgtgaggtgtttacgatattgggagtaatatcatatcccccagtggatattatgaacaatatcacagaggggtgtatacacactctgccttatagggagtaatatactcctctcccaccctggatattacaaacaatatcacagagggtgtacacacagggtgtttatggtattggaagtagtattatctcccccatggatatta

SEQ ID NO: 376673 - DNA, 353 bp, Homo sapiens
gagaaaacactactacttccaatatggcagggggtgtacacgtcctatgggatactgttcctatatccatgggggaaaakgatattgggaacaatattacaaacaatatcacagggggtgtacatgtcctgagatatgaggagtaatataaccctctccccctctagatattacaaactgtatcacagaggggtgtaaacccctgcaatgtggaaagtaaaatcatcttctcccccactggatattacaaataatatcacagacggtgtacatgtgaggtgtttacgatattgggagtaatatcatatcccccagtggatattatgaacaatatcacagaggggtgtatacac

SEQ ID NO: 376674 - DNA, 353 bp, Homo sapiens
gagaaaacactactacttccaatatggcagggggtgtacacgtcctatgggatactgttcctatatccatgggggaaaaggatattgggaacaatattacaaacaatatcacagggggtgtacatgtcctgagatatgaggagtaatataaccctctccccctctagatattacaaactgtatcacagaggggtgtaaacccctgcaatgtggaaagtaawatcatcttctcccccactggatattacaaataatatcacagacggtgtacatgtgaggtgtttacgatattgggagtaatatcatatcccccagtggatattatgaacaatatcacagaggggtgtatacac

SEQ ID NO: 376675 - DNA, 606 bp, Homo sapiens
aatatcaccaagtgtgtacatcaccattgtgatattgttcctatatttaggggatagtggattacattactgtcaatatcacagggggtgtgcacccccccatggtattgttcctaatgtccagcaagggagaaaacactactacttccaatatggcagggggtgtacacgtcctatgggatactgttcctatatccatgggggaaaaggatattgggaacaatattacaaacaatatcacagggggtgtacatgtcctgagatatgaggagtaatataaccctctccccctctagatattacaaactgtatcacagaggggtgtaaacccctgcaatgtggaaagtaaaatcatcttctcccccactggatattacaaataatatcacagacggtgtacatgtgaggtgtttacgataytgggagtaatatcatatcccccagtggatattatgaacaatatcacagaggggtgtatacacactctgccttatagggagtaatatactcctctcccaccctggatattacaaacaatatcacagagggtgtacacacagggtgtttatggtattggaagtagtattatctcccccatggatatta

SEQ ID NO: 376676 - DNA, 418 bp, Homo sapiens
gtatgttacgacgcgggaaattatcccaaagcccagtgggatgaggatgtagacttcagggtgaccaaagaatctgaataaatgctgaaataagataggatcacctccgccagccagrtagaaaaaaagtagtattaagattgcagtcagttaacaatatagtgatgccggcggctaggactcggagacaaaggagtagaagaactgctgtaattaggactaatcagatgaagaggggtgtgtgatattgggacatggctgggggttttatattaacaattgtggtaataaagttaatagcccctgaagtagaagaaacacctgtcaagtggagtgaaaagatagtgaaatctacagaggcgcctgcatgtgttaggtttactgctaagggaggagagactgttcagccggttccagt

SEQ ID NO: 376677 - DNA, 418 bp, Homo sapiens
gtatgttacgacgcgggaaattatcccaaagcccagtgggatgaggatgtagacttcagggtgaccaaagaatctgaataaatgctgaaataagataggatcacctccgccagccagatagaaaaaaagtagtattaagattgcagtcagttaacaatatagtgatgcyggcggctaggactcggagacaaaggagtagaagaactgctgtaattaggactaatcagatgaagaggggtgtgtgatattgggacatggctgggggttttatattaacaattgtggtaataaagttaatagcccctgaagtagaagaaacacctgtcaagtggagtgaaaagatagtgaaatctacagaggcgcctgcatgtgttaggtttactgctaagggaggagagactgttcagccggttccagt

SEQ ID NO: 376678 - DNA, 418 bp, Homo sapiens
gtatgttacgacgcgggaaattatcccaaagcccagtgggatgaggatgtagacttcagggtgaccaaagaatctgaataaatgctgaaataagataggatcacctccgccagccagatagaaaaaaagtagtattaagattgcagtcagttaacaatatagtgatgccggcggctaggactcggagacaaaggagtagaagaactgctgtaattaggactaatcagatgaagaggggtgtgtgatattgggacatggctgggggttttatattaacaattgtggtaataaagttaatagcccctgaagtagaagaaacacctgtcaagtggagtgaaaagatagtgaaayctacagaggcgcctgcatgtgttaggtttactgctaagggaggagagactgttcagccggttccagt

SEQ ID NO: 376679 - DNA, 418 bp, Homo sapiens
gtatgttacgacgcgggaaattatcccaaagcccagtgggatgaggatgtagacttcagggtgaccaaagaatctgaataaatgctgaaataagataggatcacctccgccagccagatagaaaaaaagtagtattaagattgcagtcagttaacaatatagtgatgccggcggctaggactcggagacaaaggagtagaagaactgctgtaattaggactaatcagatgaagaggggtgtgtgatattgggacatggctgggggttttatattaacaattgtggtaataaagttaatagcccctgaagtagaagaaacacctgtcaagtggagtgaaaagatagtgaaatctacagaggcgcctgcatgtgttaggtttmctgctaagggaggagagactgttcagccggttccagt

SEQ ID NO: 376680 - DNA, 599 bp, Homo sapiens
taatactgctctctcagtaactgacggaacaaccagataaaaatataggaaaaatacggatctaaatgacaaaatcctgacccaaatggtacttggcagtaccaagatagactgtatgttgatcaattgagaaaatgttcaagcatgacatagtatacaaagtatgttgtctgaacacctgaaattaaattagaaaccaacaacaaattgatatccagaaaarcctcaaatgtctgaaaaccaagtaataaactttgaaataccctgtgagtcaaaaaagtattcacaaggggaactggaatgtatttggaacaaacttgttataaaaatcatatttctggtagactaaaggtgacaacttctttcctgctcctctctctgtgagaaccaattccccttaaaccttgcccagactactaacttgcttggccaacagaaggtgacaaaggtggtatttggggacttcagaagccaggctgagaaaacagaacacttatccaggagaaagccagtcaccaggcaggaaatcccactcccctgagacctcatgatggaaaccacatggccagtccgtgactagctacacacattgacatccc

SEQ ID NO: 376681 - DNA, 637 bp, Homo sapiens
tgtgaatcaaaaacaacagaacaaaagcaggaaattgacaatccaaaattatagctggtgaattaatactgctctctcagtaactgacggaacaaccagataaaaatataggaaaaatacggatctaaatgacaaaatcctgacccaaatggtacttggcagtaccaagatagactgtatgttgatcaattgagaaaatgttcaagcatgacatagtatacaaagtatgttgtctgaacacctgaaattaaattagaaaccaacaacaaattgatatccagaaaagcytcaaatgtctgaaaaccaagtaataaactttgaaataccctgtgagtcaaaaaagtattcacaaggggaactggaatgtatttggaacaaacttgttataaaaatcatatttctggtagactaaaggtgacaacttctttcctgctcctctctctgtgagaaccaattccccttaaaccttgcccagactactaacttgcttggccaacagaaggtgacaaaggtggtatttggggacttcagaagccaggctgagaaaacagaacacttatccaggagaaagccagtcaccaggcaggaaatcccactcccctgagacctcatgatggaaaccacatggccagtccgt

SEQ ID NO: 376682 - DNA, 599 bp, Homo sapiens
caccttccccccttgaatcatggctggtctcagtgatgagtatgactggacagtgtggcaggatagatgctctgggacttctgagggatgatcatgagaggccttacagcttctgcctgggcctcttggacacacaccctgggagaagccagacaaacctgastaactgacactgccagactgggaggaagtccgtgctggccacaaagagagggctcggtgcctgctccatgtccccagccactagagtccttctgggtgcctgcttcatgtccccagccactagagtcctcccagatgagaccagggacatcacgaagcagccaacccacactgccctgtccagtgtcttgacccagaaaattgtgacatgtaaaaagaataaattcctggtttaagccagtaaggttactggtacattgttacattgcagataattaaaaccttgaaaaactcatgagagatcccaagtaaaaccttgatctgaaacatggcatgtggtgatttatattgagtattaggttaaaaatgcaagaatggagcatagttaatattttacgttaaagctaaaactataattgcccacttaaaattttcag

SEQ ID NO: 376683 - DNA, 620 bp, Homo sapiens
gctcggtgcctgctccatgtccccagccactagagtccttctgggtgcctgcttcatgtccccagccactagagtcctcccagatgagaccagggacatcacgaagcagccaacccacactgccctgtccagtgtcttgacccagaaaattgtgacatgtaaaaagaataaattyctggtttaagccagtaaggttactggtacattgttacattgcagataattaaaaccttgaaaaactcatgagagatcccaagtaaaaccttgatctgaaacatggcatgtggtgatttatattgagtattaggttaaaaatgcaagaatggagcatagttaatattttacgttaaagctaaaactataattgcccacttaaaattttcagttaattaggttgtcactttttgttcttaaccaagatatcaactagttttagtacataaacagttggaactgatgcacacatccgtttttccttactcattttaagcagctatctgaaataggaagcgtaatataatctttaaagaatctgaaaatatgacagaaatgtttaaactataaacatatattgtaaatgttagcatattatatacattgcatattaacataagctaaaa

SEQ ID NO: 376684 - DNA, 533 bp, Homo sapiens
ctgaaacatggcatgtggtgatttatattgagtattaggttaaaaatgcaagaatggarcatagttaatattttacgttaaagctaaaactataattgcccacttaaaattttcagttaattaggttgtcactttttgttcttaaccaagatatcaactagttttagtacataaacagttggaactgatgcacacatccgtttttccttactcattttaagcagctatctgaaataggaagcgtaatataatctttaaagaatctgaaaatatgacagaaatgtttaaactataaacatatattgtaaatgttagcatattatatacattgcatattaacataagctaaaatcattgacataaatttatataaacaaaaggtagaaaatatgacaatgttcttcttgttttttgtctttgcatatttctttattggcccttgtcaaatgtgacccactaactcctgaatgctttctctctccccatggattcctaaggatgtcaccacagtgctggccagatgcacaggtcac

SEQ ID NO: 376685 - DNA, 533 bp, Homo sapiens
ctgaaacatggcatgtggtgatttatattgagtattaggttaaaaatgcaagaatggagcatagttaatattttacgttaaagctaaaactataattgcccacttaaaattttcagttaattaggttgtcactttttgttcttaaccaagatatcaactagttttagtacataaacagttggaactgatgcacacatccgtttttccttactcattttaagcagctatctgaaataggaagcgtaatataatctttaaagaatctgaaaatatgacagmaatgtttaaactataaacatatattgtaaatgttagcatattatatacattgcatattaacataagctaaaatcattgacataaatttatataaacaaaaggtagaaaatatgacaatgttcttcttgttttttgtctttgcatatttctttattggcccttgtcaaatgtgacccactaactcctgaatgctttctctctccccatggattcctaaggatgtcaccacagtgctggccagatgcacaggtcac

SEQ ID NO: 376686 - DNA, 578 bp, Homo sapiens
aacaacaagcaggccaggcacggtggctcacgtctgtaatcccagcactttgggaggccgaggtgggcggatcacctgaggtcgggagttcgagaccaccctgatcaaaacagagaaaccccatctctactaaamatacaaaattagccgggcatggtggcacatgcctgtaataccagctactcaggagctgaggcaggagaattgcttgaacccaggaggtggaggctgcagtgagctgagatcacaccactgcgctctagcctgggcaacaagagcgaaactctgtctcaaaagaaaaaaaataaaaataaaagaacaaggaaacaaaagtaacaaggcttgacaccagatgagcctgaatctaagcaagaaaagcccagaagaaatcccattttgggtcactggctgcacggtagtaatgccatacacataagggaagagaagaggatgtggctttcacttcgaattttttgagcttaaggtaaatttggatagctacaaagaagcattcaacagagagttaaacctatgatggaaagactgaagaggtccaagctgtagagaaacaggactgc

SEQ ID NO: 376687 - DNA, 578 bp, Homo sapiens
aacaacaagcaggccaggcacggtggctcacgtctgtaatcccagcactttgggaggccgaggtgggcggatcacctgaggtcgggagttcgagaccaccctgatcaaaacagagaaaccccatctctactaaacatacaaaattagccgggcrtggtggcacatgcctgtaataccagctactcaggagctgaggcaggagaattgcttgaacccaggaggtggaggctgcagtgagctgagatcacaccactgcgctctagcctgggcaacaagagcgaaactctgtctcaaaagaaaaaaaataaaaataaaagaacaaggaaacaaaagtaacaaggcttgacaccagatgagcctgaatctaagcaagaaaagcccagaagaaatcccattttgggtcactggctgcacggtagtaatgccatacacataagggaagagaagaggatgtggctttcacttcgaattttttgagcttaaggtaaatttggatagctacaaagaagcattcaacagagagttaaacctatgatggaaagactgaagaggtccaagctgtagagaaacaggactgc

SEQ ID NO: 376688 - DNA, 578 bp, Homo sapiens
aacaacaagcaggccaggcacggtggctcacgtctgtaatcccagcactttgggaggccgaggtgggcggatcacctgaggtcgggagttcgagaccaccctgatcaaaacagagaaaccccatctctactaaacatacaaaattagccgggcatggtggcacatgcctgtaataccagctactcaggagctgaggcaggagaattgcttgaacccaggaggtggaggctgcagtgagctgagatcacaccactgcgctctagcctgggcaacaagagcgaaactctgtctcaaaagaaaaaaaataaaaataaaagaacaaggaaacaaaagyaacaaggcttgacaccagatgagcctgaatctaagcaagaaaagcccagaagaaatcccattttgggtcactggctgcacggtagtaatgccatacacataagggaagagaagaggatgtggctttcacttcgaattttttgagcttaaggtaaatttggatagctacaaagaagcattcaacagagagttaaacctatgatggaaagactgaagaggtccaagctgtagagaaacaggactgc

SEQ ID NO: 376689 - DNA, 578 bp, Homo sapiens
aacaacaagcaggccaggcacggtggctcacgtctgtaatcccagcactttgggaggccgaggtgggcggatcacctgaggtcgggagttcgagaccaccctgatcaaaacagagaaaccccatctctactaaacatacaaaattagccgggcatggtggcacatgcctgtaataccagctactcaggagctgaggcaggagaattgcttgaacccaggaggtggaggctgcagtgagctgagatcacaccactgcgctctagcctgggcaacaagagcgaaactctgtctcaaaagaaaaaaaataaaaataaaagaacaaggaaacaaaagtaacaaggcttgacaccagatgagcctgaatctaagcaagaaaagcccagaagaaatcccattttgggtcactggctgcayggtagtaatgccatacacataagggaagagaagaggatgtggctttcacttcgaattttttgagcttaaggtaaatttggatagctacaaagaagcattcaacagagagttaaacctatgatggaaagactgaagaggtccaagctgtagagaaacaggactgc

SEQ ID NO: 376690 - DNA, 550 bp, Homo sapiens
tgagtccctgtggacaaactgcaacctaacttaataggtagaaagactgaaaacctaacttaggagtatgtgcctaaaacagtagctgagtcgtggccaatcccaacagccaaacttctgccactcacacactgctgagtgttcagctgtgttcaaataaggcaaatgctgagcactgtaaccagtccagttgtttctggacctcactgctgagaactgtaatggacccagttgcttctagacctcactcctcacttcagatttttgtacatcatgttccctttattgtctataaatcttccaccatgtgtctgtgctggagtctcaccaaatctgctgtgattctgggggctgcctgaytcgtgaatcattcattgctcaattaagttcctttaaatttaattcagctgaagattttcttttaatagatggtgtcagaagtgggatctgtgggagcaggactgctagggcctctggagctatactgtggtgagcagtgttgctaaggcttctaatgacccccagagtgctgaggtacaaggaaggaacc

SEQ ID NO: 376691 - DNA, 531 bp, Homo sapiens
ctgggcactatgggcacagctacccaccgtgcatctcctctcagctgctgagagctgaacagacgttgggatgacctgcctgcagaaaggaactaccmactgcaggtctcctctgagctgtactgtggctcaataaagcacctcttcaccttgctcaccttctacttgtccacatacctcatttttcctggactcaggacaagaactcgggacctgccaactagcagggctgaaagaggtgtaacataaacagggctgaaacgcgctccttgcttgccaaattgcaggcaagaagaagagaagagagaaggagagaagagctgtgtcccttcagggaacacagacctaggagctcccccagccagggctgtgacaccttctttggggctttgcaggtcctgcatctccaagcttctgggtgccactgcattccctgatacccacagtggaagctgtttgcagtcggcctggtccagctgcagcctcacagggagctggcatctgtgcctggagctgcccaccccactgcag

SEQ ID NO: 376692 - DNA, 561 bp, Homo sapiens
ctgtttgcagtcggcctggtccagctgcagcctcacagggagctggcatctgtgcctggagctgcccaccccactgcagctggcatgcttggctgtgtgcagtggccagatcccatgctcgcttgctcacacacccctcactgctctgtacccagctcgcccttggcaggtgtgggatccagaccactagcatgagctgagtggacagaactaacccagtgggcccaagcaaaacacaggtaaaggctccacmagccagaggtttcaggcagaaaagtgacgcctcagattctgtaacacttgtgtcctttgatctctcggagcagctggggatcatggtaaattttctctcggatttcagagctccatggatttgtgttttgagctctgagtttctttgagcaaatttctgttccaaactgctatccagccatgactggctggatgttttagaagttatgacagaaaagggaccaggtccaggatcagatttgatccagtagttaactggcttgaatccagttccagttagaggcctcctacatctgactgggtcagaag

SEQ ID NO: 376693 - DNA, 561 bp, Homo sapiens
ctgtttgcagtcggcctggtccagctgcagcctcacagggagctggcatctgtgcctggagctgcccaccccactgcagctggcatgcttggctgtgtgcagtggccagatcccatgctcgcttgctcacacacccctcactgctctgtacccagctcgcccttggcaggtgtgggatccagaccactagcatgagctgagtggacagaactaacccagtgggcccaagcaaaacacaggtaaaggctccaccagccagaggtttcaggcagaaaagtgacgcctcagattctgtaacacttgtgtcctttgatctctcggagcagctggggatcatggtaaattttctctcggatttcagagctccatggatttgtgttttgagctytgagtttctttgagcaaatttctgttccaaactgctatccagccatgactggctggatgttttagaagttatgacagaaaagggaccaggtccaggatcagatttgatccagtagttaactggcttgaatccagttccagttagaggcctcctacatctgactgggtcagaag

SEQ ID NO: 376694 - DNA, 544 bp, Homo sapiens
aggtgaattcagctgagaagaacaggcaaggacctaggaaatattccttatttgaaggggcctgaaagtgtggtctggggtgcaggagtgacctgtcatacttgaaaagattgaaatactctccaaatacagtcccattccttcaaacttascttgttgtttccagtgtctgagatatattaaacctagtccatcaccaaatatagcatagattgtgaagttctattgattgcatttgatttgtaatttaagactttctccccctacataatttcgttaaaaacattgaattctattcacttaggtgtaacagttaatatttgctgtttaaggaactaattaaaccttactagcttataaaaaacaaccaccattttatttgtttgaagttctgtggatctgcattttggtgtggtgggttcagctgtgtagttgatatatttgtgttgcctggatcacaaaacaggccttagtcacctggtgccttgactgagcctggttggtttaagatagtttccttcacaatctggtggtttgtggtgac

SEQ ID NO: 376695 - DNA, 544 bp, Homo sapiens
aggtgaattcagctgagaagaacaggcaaggacctaggaaatattccttatttgaaggggcctgaaagtgtggtctggggtgcaggagtgacctgtcatacttgaaaagattgaaatactctccaaatacagtcccattccttcaaacttaccttgttgtttccagtgtctgagatatattaaacctagtccatcaccaaatwtagcatagattgtgaagttctattgattgcatttgatttgtaatttaagactttctccccctacataatttcgttaaaaacattgaattctattcacttaggtgtaacagttaatatttgctgtttaaggaactaattaaaccttactagcttataaaaaacaaccaccattttatttgtttgaagttctgtggatctgcattttggtgtggtgggttcagctgtgtagttgatatatttgtgttgcctggatcacaaaacaggccttagtcacctggtgccttgactgagcctggttggtttaagatagtttccttcacaatctggtggtttgtggtgac

SEQ ID NO: 376696 - DNA, 544 bp, Homo sapiens
aggtgaattcagctgagaagaacaggcaaggacctaggaaatattccttatttgaaggggcctgaaagtgtggtctggggtgcaggagtgacctgtcatacttgaaaagattgaaatactctccaaatacagtcccattccttcaaacttaccttgttgtttccagtgtctgagatatattaaacctagtccatcaccaaatatagcatagattgtgaagttctattgattgcatttsatttgtaatttaagactttctccccctacataatttcgttaaaaacattgaattctattcacttaggtgtaacagttaatatttgctgtttaaggaactaattaaaccttactagcttataaaaaacaaccaccattttatttgtttgaagttctgtggatctgcattttggtgtggtgggttcagctgtgtagttgatatatttgtgttgcctggatcacaaaacaggccttagtcacctggtgccttgactgagcctggttggtttaagatagtttccttcacaatctggtggtttgtggtgac

SEQ ID NO: 376697 - DNA, 544 bp, Homo sapiens
aggtgaattcagctgagaagaacaggcaaggacctaggaaatattccttatttgaaggggcctgaaagtgtggtctggggtgcaggagtgacctgtcatacttgaaaagattgaaatactctccaaatacagtcccattccttcaaacttaccttgttgtttccagtgtctgagatatattaaacctagtccatcaccaaatatagcatagattgtgaagttctattgattgcatttgatttgtaatttaagactttctccccctacataatttcgttaaaaacattgaattctattcacttaggtgtaacagttaatatttgctgtttaaggaactaattaaaccttactagcttataaaaaacaaccaccattttatttgtttgaagttctgtggatctgcattttggtgtggtgggttcagctgkgtagttgatatatttgtgttgcctggatcacaaaacaggccttagtcacctggtgccttgactgagcctggttggtttaagatagtttccttcacaatctggtggtttgtggtgac

SEQ ID NO: 376698 - DNA, 548 bp, Homo sapiens
tatgctccttgctcaaagagtgtggtcccaaacagcttttgggaggtcctccttgactcatggatgaaacccggaacatcttgaggactgagttaaccacaggtccttaaataactctccacacatttttcttagtttatctctacatgcagggtgtgcagcagcctgttcaaagtcatattttctgggaaatattttcagtgtttatttgcaatttagcccactctgtgtagtcttaacttatttcttctaaactcaccattaacctaaataatagtcaaatttagggkggctgtatttgtcttactcgagtcttctaccatagttgaaactgtcgtacccaagcgagttagagagaaatgccacactttgagacgaattcaggagtcctttattagctggtgactgagagatggctaacacaggaaatactctcggccctaaagaatgggctagattttcttttatacattggtttagagaggggaggggggattccagctgcaataaacttacagaagaaaaaacagacaaaaaacttaaaaaga

SEQ ID NO: 376699 - DNA, 548 bp, Homo sapiens
tatgctccttgctcaaagagtgtggtcccaaacagcttttgggaggtcctccttgactcatggatgaaacccggaacatcttgaggactgagttaaccacaggtccttaaataactctccacacatttttcttagtttatctctacatgcagggtgtgcagcagcctgttcaaagtcatattttctgggaaatattttcagtgtttatttgcaatttagcccactctgtgtagtcttaacttatttcttctaaactcaccattaacctaaataatagtcaaatttaggggggctgtatttgtcttactcgagtcttctaccatagttgaaactgtcgtacccaagcgagttagagagaaatgccacactttgagacgaattcaggagtcctttattagctggtgactgagagayggctaacacaggaaatactctcggccctaaagaatgggctagattttcttttatacattggtttagagaggggaggggggattccagctgcaataaacttacagaagaaaaaacagacaaaaaacttaaaaaga

SEQ ID NO: 376700 - DNA, 387 bp, Homo sapiens
  misc_feature (1)...(387): n = A,T,C or G
nnnnnnnnnnnnncaaatctaaaataagtcaagagagttggacaatatctcatctctggacaaaaaaaatgcattattttcaagagatttaagactgaatttaaaatccaactgcctattccagtgtatgtttctctagaataagrccaagccatacaaattctggatagtgtcctccaagttgtgtttaagtgataattgataaatctatggtttagatacatatggaattccacataactctagctccagcctttgcgagtaaaaattggcagtgatcatggccttaatggaggcatgtggttaattggaattttcagtaccaaaagtcttcttcttactagtttatcagggtaccctataatagtatccataactcattgccca

SEQ ID NO: 376701 - DNA, 387 bp, Homo sapiens
  misc_feature (1)...(387): n = A,T,C or G
nnnnnnnnnnnnncaaatctaaaataagtcaagagagttggacaatatctcatctctggacaaaaaaaatgcattattttcaagagatttaagactgaatttaaaatccaactgcctattccagtgtatgtttctctagaataagaccaagccmtacaaattctggatagtgtcctccaagttgtgtttaagtgataattgataaatctatggtttagatacatatggaattccacataactctagctccagcctttgcgagtaaaaattggcagtgatcatggccttaatggaggcatgtggttaattggaattttcagtaccaaaagtcttcttcttactagtttatcagggtaccctataatagtatccataactcattgccca

SEQ ID NO: 376702 - DNA, 555 bp, Homo sapiens
actcttatgactattgggataacaccaagaatttggtatatgctccttactccgggtccccataaatcaaaccacctaaaatcaaatagattaaagaatgaattagataaagagtttacttgcttaactaagtgggtttttttgttaattccctacaaccaaatctttataatacccgatgttttctccatatgccatgttagcagctgcacagatacttaagataatagtctcatgatagtagagaagtcttgatctgtgatcttgggaaaagctgttcacattaaggatgcyatcttcttctgggggggaactgtccttgttagctttaccttaagggttccaaggggtgtatggttccgagtgtggagggacccttcagagttgtaagactatgaacccaaagtttaaggttttaaagttttgctgtcatgtggatggcaagggcagtcctctgatgttctcagaagatccagtcatcatattctagattgtgaaggggttggctgtcctctgtgaaccataaaaggctttctttagctggtgaaaatacac

SEQ ID NO: 376703 - DNA, 555 bp, Homo sapiens
actcttatgactattgggataacaccaagaatttggtatatgctccttactccgggtccccataaatcaaaccacctaaaatcaaatagattaaagaatgaattagataaagagtttacttgcttaactaagtgggtttttttgttaattccctacaaccaaatctttataatacccgatgttttctccatatgccatgttagcagctgcacagatacttaagataatagtctcatgatagtagagaagtcttgatctgtgatcttgggaaaagctgttcacattaaggatgccatcttcttctgggggggaactgtccttgttagctttaccttaarggttccaaggggtgtatggttccgagtgtggagggacccttcagagttgtaagactatgaacccaaagtttaaggttttaaagttttgctgtcatgtggatggcaagggcagtcctctgatgttctcagaagatccagtcatcatattctagattgtgaaggggttggctgtcctctgtgaaccataaaaggctttctttagctggtgaaaatacac

SEQ ID NO: 376704 - DNA, 555 bp, Homo sapiens
actcttatgactattgggataacaccaagaatttggtatatgctccttactccgggtccccataaatcaaaccacctaaaatcaaatagattaaagaatgaattagataaagagtttacttgcttaactaagtgggtttttttgttaattccctacaaccaaatctttataatacccgatgttttctccatatgccatgttagcagctgcacagatacttaagataatagtctcatgatagtagagaagtcttgatctgtgatcttgggaaaagctgttcacattaaggatgccatcttcttctgggggggaactgtccttgttagctttaccttaagggttccaaggggtgtatggttccgagtgtggagggacccttcwgagttgtaagactatgaacccaaagtttaaggttttaaagttttgctgtcatgtggatggcaagggcagtcctctgatgttctcagaagatccagtcatcatattctagattgtgaaggggttggctgtcctctgtgaaccataaaaggctttctttagctggtgaaaatacac

SEQ ID NO: 376705 - DNA, 477 bp, Homo sapiens
aaatgtttaaatggcccatcaggtaaccaaatgcacctgaagttttgattgttttcctaggaatataggttcracaaaccaaacattgattataaactattttagcaatttagagatcaccacagcaatatatttaatttggatcattttctctttccatgatgagttatggaatgcagaacttttaataacaaaagttttaaggacttaagacggaaaggtggccatcctggttcttcataagtccgtgcttaattaacattagacttacatcctcttgactaccagctgtttcttcaaattaggtgcatggcactggtaactgatgagttataggtaatttggcttagaccatggagtgtatttaaattatatatctaaacaatttcaatattggtgatttagcatgcaaatctggcaaaatatttccttgatattcaatttttgttttacttgggttagcagttttataaacca

SEQ ID NO: 376706 - DNA, 609 bp, Homo sapiens
gattgttttcctaggaatataggttcgacaaaccaaacattgattataaactattwtagcaatttagagatcaccacagcaatatatttaatttggatcattttctctttccatgatgagttatggaatgcagaacttttaataacaaaagttttaaggacttaagacggaaaggtggccatcctggttcttcataagtccgtgcttaattaacattagacttacatcctcttgactaccagctgtttcttcaaattaggtgcatggcactggtaactgatgagttataggtaatttggcttagaccatggagtgtatttaaattatatatctaaacaatttcaatattggtgatttagcatgcaaatctggcaaaatatttccttgatattcaatttttgttttacttgggttagcagttttataaaccagttggtcttcttattaaactttaggatttttttttttttttttttgagacagagtctcactctgttacctaggttggagtgcagtggcacaatcttggctcactgcaacctccgcctcctgggttcaagtgattctcctgcctcagcctcccgagtagctgggattacagatgcatac

SEQ ID NO: 376707 - DNA, 613 bp, Homo sapiens
tttgctgtcatgtggatggcaagggcagtcctctgatgttctcagaagatccagtcatcatattctagattgtgaaggggttggctgtcctctgtgaaccataaaaggctttctttagctggtgaaaatacacttcagcataataatctactgttttaacatcaaccctcttgcatggaagagcttttttacaatcagaaaacatgcactgaaaatgacaactgaatgaaatccctttataaaatgtttaaatggcccatcaggtaaccaaatgcacctgaagttttgattgttttcctaggaatataggttcgacaaaccaaacattgattataaactattttagcaatttagagatcaccacagcaatatatttaatttggatcattttctctttccatgatgagttatggaatgcagaacttttaataacaaaagttttaaggacttaagacggaaaggtggccatcctggttcttcataagtcygtgcttaattaacattagacttacatcctcttgactaccagctgtttcttcaaattaggtgcatggcactggtaactgatgagttataggtaatttggcttagaccatggagtgtatttaaatta

SEQ ID NO: 376708 - DNA, 601 bp, Homo sapiens
ctatggtttagatacatatggaattccacataactctagctccagcctttgcgagtaaaaattggcagtgatcatggccttaatggaggcatgtggttaattggaattttcagtacmaaaagtcttcttcttactagtttatcagggtaccctataatagtatccataactcattgcccacttgtctgttttgatttcttttttaaaaatacaattttaaacttagaggttttgtacctcaagtcacatatgtggcacatttataaaataatcatgcctttgcatatttttcctttgatatcttagctgtatatacaagccacttatgttttttaattgccacaaatattgcactgaaatagagcactagttgcaaaaatgcctggtataacatttcttcttgttcttgaaagtaattttaataccccatgtttaagatattcctagacaactataagtaactataattatttctgctaggtagaagcatctttgtggtcaacatttgtgaagtgccttgtaaataaaaatatgcttgagtagaaatagtattttgcaaatatagccctaaatagagctactgattttaccaaaaattaag

SEQ ID NO: 376709 - DNA, 477 bp, Homo sapiens
aaatgtttaaatggcccatcaggtaaccaaatgcacctgaagttttgattgttttcctaggaatataggttcgacaaaccaaacattgattataaactattttagcaatttagagatcaccacagcaatatatttaatttggatcattttctctttccatgatgagttatggaatgcagaacttttaataacaaaagttttaaggacttaagacggaaaggtggccatcctggttcttcataagtccgtgcttaattaacrttagacttacatcctcttgactaccagctgtttcttcaaattaggtgcatggcactggtaactgatgagttataggtaatttggcttagaccatggagtgtatttaaattatatatctaaacaatttcaatattggtgatttagcatgcaaatctggcaaaatatttccttgatattcaatttttgttttacttgggttagcagttttataaacca

SEQ ID NO: 376710 - DNA, 609 bp, Homo sapiens
gattgttttcctaggaatataggttcgacaaaccaaacattgattataaactattttagcaatttagagatcaccacagcaatatatttaatttggatcattttctctttccatgatgagttatggaatgcagaacttttaataacaaaagttttaaggacttaagacggaaaggtggccatcctggttcttcataagtccgtgcttaattaacattagacttacatcctcttgamtaccagctgtttcttcaaattaggtgcatggcactggtaactgatgagttataggtaatttggcttagaccatggagtgtatttaaattatatatctaaacaatttcaatattggtgatttagcatgcaaatctggcaaaatatttccttgatattcaatttttgttttacttgggttagcagttttataaaccagttggtcttcttattaaactttaggatttttttttttttttttttgagacagagtctcactctgttacctaggttggagtgcagtggcacaatcttggctcactgcaacctccgcctcctgggttcaagtgattctcctgcctcagcctcccgagtagctgggattacagatgcatac

SEQ ID NO: 376711 - DNA, 477 bp, Homo sapiens
aaatgtttaaatggcccatcaggtaaccaaatgcacctgaagttttgattgttttcctaggaatataggttcgacaaaccaaacattgattataaactattttagcaatttagagatcaccacagcaatatatttaatttggatcattttctctttccatgatgagttatggaatgcagaacttttaataacaaaagttttaaggacttaagacggaaaggtggccatcctggttcttcataagtccgtgcttaattaacattagacttacatcctcttgactaccagctgtttcttcaaattaggtgcatggcactggtaactgatgagttataggtaatttggcttagaccatggagtktatttaaattatatatctaaacaatttcaatattggtgatttagcatgcaaatctggcaaaatatttccttgatattcaatttttgttttacttgggttagcagttttataaacca

SEQ ID NO: 376712 - DNA, 609 bp, Homo sapiens
gattgttttcctaggaatataggttcgacaaaccaaacattgattataaactattttagcaatttagagatcaccacagcaatatatttaatttggatcattttctctttccatgatgagttatggaatgcagaacttttaataacaaaagttttaaggacttaagacggaaaggtggccatcctggttcttcataagtccgtgcttaattaacattagacttacatcctcttgactaccagctgtttcttcaaattaggtgcatggcactggtaactgatgagttataggtaatttggcttagaccatggagtgtatttaaattatatatctaaacaatttcaatattggtgatttagcatgcaaatctggcaaaatatttccttgatattcaatttttgttttacttgggttagcagttttataaaccagttggtcttcttattaaamtttaggatttttttttttttttttttgagacagagtctcactctgttacctaggttggagtgcagtggcacaatcttggctcactgcaacctccgcctcctgggttcaagtgattctcctgcctcagcctcccgagtagctgggattacagatgcatac

SEQ ID NO: 376713 - DNA, 612 bp, Homo sapiens
cacagaagtcagctggtgaccacaaaacagaataaatctttaacctcggcactggtgaccagcaatataaaactgcaacatttgaaacactggcaatgatgaytcctttaacactagtttaactcagtggccattgttgttaaactgttcataatttctattcctcagtaatatgacccaatacttcatgttaccttgtgtattatgagtaaggttacataaataaaacagcaagataattctgaaaatttcttgcctcaattccaagggtaaagacaactatgagttactagagatactaagaattactagaataactaatagttactagagatagtaagaatatcttaagtttcataactggttaagatgttttaaaaattaaatataaaattatgatctattggattctaaaggtatagtctgaaaggtcatgtcatttggactatgctttgttagtaaagcaaaaaaaacctaatattaaacaagaacttaaattttcatatacctgtgattgcttcttttcacttctttcacacctttcttgctcttcctctaaagccactggtaaggtttgttctgttgacaaattcattgatttagttcaaatga

SEQ ID NO: 376714 - DNA, 612 bp, Homo sapiens
cacagaagtcagctggtgaccacaaaacagaataaatctttaacctcggcactggtgaccagcaatataaaactgcaacatttgaaacactggcaatgatgactcctttaacactagtttaactcagtggycattgttgttaaactgttcataatttctattcctcagtaatatgacccaatacttcatgttaccttgtgtattatgagtaaggttacataaataaaacagcaagataattctgaaaatttcttgcctcaattccaagggtaaagacaactatgagttactagagatactaagaattactagaataactaatagttactagagatagtaagaatatcttaagtttcataactggttaagatgttttaaaaattaaatataaaattatgatctattggattctaaaggtatagtctgaaaggtcatgtcatttggactatgctttgttagtaaagcaaaaaaaacctaatattaaacaagaacttaaattttcatatacctgtgattgcttcttttcacttctttcacacctttcttgctcttcctctaaagccactggtaaggtttgttctgttgacaaattcattgatttagttcaaatga

SEQ ID NO: 376715 - DNA, 485 bp, Homo sapiens
ggccattgttgttaaactgttcataatttctattcctcagtaatatgacccaatacttcatgttaccttgtgtattatgagtaaggttacataaataaaacagcaagataattctgaaaatttcttgcctcaattccaagggtaaagacarctatgagttactagagatactaagaattactagaataactaatagttactagagatagtaagaatatcttaagtttcataactggttaagatgttttaaaaattaaatataaaattatgatctattggattctaaaggtatagtctgaaaggtcatgtcatttggactatgctttgttagtaaagcaaaaaaaacctaatattaaacaagaacttaaattttcatatacctgtgattgcttcttttcacttctttcacacctttcttgctcttcctctaaagccactggtaaggtttgttctgttgacaaattcattgatttagttcaaatgaa

SEQ ID NO: 376716 - DNA, 574 bp, Homo sapiens
ttctattcctcagtaatatgacccaatacttcatgttaccttgtgtattatgagtaaggttacataaataaaacagcaagataattctgaaaatttcttgcctcaattccaagggtaaagacaactatgagttactagagatactaagaattactagaataactaatagttactagagatagtaagaatawcttaagtttcataactggttaagatgttttaaaaattaaatataaaattatgatctattggattctaaaggtatagtctgaaaggtcatgtcatttggactatgctttgttagtaaagcaaaaaaaacctaatattaaacaagaacttaaattttcatatacctgtgattgcttcttttcacttctttcacacctttcttgctcttcctctaaagccactggtaaggtttgttctgttgacaaattcattgatttagttcaaatgaactaagaagagttagataaagactataatctttataaaaataaatagagaataacatttctttgtattttatattttgagagtttgaatgaaacaatgtttactgaaatatttactt

SEQ ID NO: 376717 - DNA, 441 bp, Homo sapiens
tccaagggtaaagacaactatgagttactagagatactaagaattactagaataactaatagttactagagatagtaagaatatcttaagtttcataactkgttaagatgttttaaaaattaaatataaaattatgatctattggattctaaaggtatagtctgaaaggtcatgtcatttggactatgctttgttagtaaagcaaaaaaaacctaatattaaacaagaacttaaattttcatatacctgtgattgcttcttttcacttctttcacacctttcttgctcttcctctaaagccactggtaaggtttgttctgttgacaaattcattgatttagttcaaatgaactaagaagagttagataaagactataatctttataaaaataaatagagaataacatttctttgtattttatattttgagagtttgaatga

SEQ ID NO: 376718 - DNA, 485 bp, Homo sapiens
ggccattgttgttaaactgttcataatttctattcctcagtaatatgacccaatacttcatgttaccttgtgtattatgagtaaggttacataaataaaacagcaagataattctgaaaatttcttgcctcaattccaagggtaaagacaactatgagttactagagatactaagaattactagaataactaatagttactagagatagtaagaatatcttaagtttcataactggttaagatgttttaaaaattaaatataaamttatgatctattggattctaaaggtatagtctgaaaggtcatgtcatttggactatgctttgttagtaaagcaaaaaaaacctaatattaaacaagaacttaaattttcatatacctgtgattgcttcttttcacttctttcacacctttcttgctcttcctctaaagccactggtaaggtttgttctgttgacaaattcattgatttagttcaaatgaa

SEQ ID NO: 376719 - DNA, 441 bp, Homo sapiens
tccaagggtaaagacaactatgagttactagagatactaagaattactagaataactaatagttactagagatagtaagaatatcttaagtttcataactggttaagatgttttaaaaattaaatataaaattatgatctattggattctaaaggtatagtctgaaaggtsatgtcatttggactatgctttgttagtaaagcaaaaaaaacctaatattaaacaagaacttaaattttcatatacctgtgattgcttcttttcacttctttcacacctttcttgctcttcctctaaagccactggtaaggtttgttctgttgacaaattcattgatttagttcaaatgaactaagaagagttagataaagactataatctttataaaaataaatagagaataacatttctttgtattttatattttgagagtttgaatga

SEQ ID NO: 376720 - DNA, 574 bp, Homo sapiens
ttctattcctcagtaatatgacccaatacttcatgttaccttgtgtattatgagtaaggttacataaataaaacagcaagataattctgaaaatttcttgcctcaattccaagggtaaagacaactatgagttactagagatactaagaattactagaataactaatagttactagagatagtaagaatatcttaagtttcataactggttaagatgttttaaaaattaaatataaaattatgatctattggattctaaaggtatagtctgaaaggtcatgtcatttgkactatgctttgttagtaaagcaaaaaaaacctaatattaaacaagaacttaaattttcatatacctgtgattgcttcttttcacttctttcacacctttcttgctcttcctctaaagccactggtaaggtttgttctgttgacaaattcattgatttagttcaaatgaactaagaagagttagataaagactataatctttataaaaataaatagagaataacatttctttgtattttatattttgagagtttgaatgaaacaatgtttactgaaatatttactt

SEQ ID NO: 376721 - DNA, 612 bp, Homo sapiens
cacagaagtcagctggtgaccacaaaacagaataaatctttaacctcggcactggtgaccagcaatataaaactgcaacatttgaaacactggcaatgatgactcctttaacactagtttaactcagtggccattgttgttaaactgttcataatttctattcctcagtaatatgacccaatacttcatgttaccttgtgtattatgagtaaggttacataaataaaacagcaagataattctgaaaatttcttgcctcaattccaagggtaaagacaactatgagttactagagatactaagaattactagaataactaatagttactagagatagtaagaatatcttaagtttcataactggttaagatgttttaaaaattaaatataaaattatgatctattggattctaaaggtatagtctgaaaggtcatgtcatttggactrtgctttgttagtaaagcaaaaaaaacctaatattaaacaagaacttaaattttcatatacctgtgattgcttcttttcacttctttcacacctttcttgctcttcctctaaagccactggtaaggtttgttctgttgacaaattcattgatttagttcaaatga

SEQ ID NO: 376722 - DNA, 617 bp, Homo sapiens
ctcattgcccacttgtctgttttgatttcttttttaaaaatacaattttaaacttagaggttttgtacctcaagtcacatatgtggcacatwtataaaataatcatgcctttgcatatttttcctttgatatcttagctgtatatacaagccacttatgttttttaattgccacaaatattgcactgaaatagagcactagttgcaaaaatgcctggtataacatttcttcttgttcttgaaagtaattttaataccccatgtttaagatattcctagacaactataagtaactataattatttctgctaggtagaagcatctttgtggtcaacatttgtgaagtgccttgtaaataaaaatatgcttgagtagaaatagtattttgcaaatatagccctaaatagagctactgattttaccaaaaattaaggactccaaactctgtctttgtctttcaaatttggtttataggaacatctcattacaatgagcaaaaagcctatctgatcactaaagagataattttgacacttccaaatgacacagctaatttgtagtaggtttttgaagtgcaaattacatgtttctgtttaaataatgacagtaaaatatgga

SEQ ID NO: 376723 - DNA, 441 bp, Homo sapiens
tccaagggtaaagacaactatgagttactagagatactaagaattactagaataactaatagttactagagatagtaagaatatcttaagtttcataactggttaagatgttttaaaaattaaatataaaattatgatctattggattctaaaggtatagtctgaaaggtcatgtcatttggactatgctttgttagtaaagcaaaaaaaacctaatattaaacaagaacttaaattttcatatacctgtgattgcttcttttcacttctttcacacctttcttgctcttcctstaaagccactggtaaggtttgttctgttgacaaattcattgatttagttcaaatgaactaagaagagttagataaagactataatctttataaaaataaatagagaataacatttctttgtattttatattttgagagtttgaatga

SEQ ID NO: 376724 - DNA, 573 bp, Homo sapiens
aaattaaatataaaattatgatctattggattctaaaggtatagtctgaaaggtcatgtcatttggactatgctttgttagtaaagcaaaaaaaacctaatattaaacaagaacttaaattttcatatacctgtgattgcttcttttcacttctttcacacctttcttgctcttcctctaaagccactggtaaggtttgttctgttgacaaattcattgatttagttcaaatgaactaagaagagttagataaagactataatctttataaaaataaatagagaataacatttctttgtattttatatttygagagtttgaatgaaacaatgtttactgaaatatttacttctgtaagaaatacttctaattatccaaaacttcaacaaaccacttggggagacaccagatatcaccagattcaagccatgcaaaatctcagggacactcacaaattgttccacccaacataagtcaacaaaactgttggaaacaaaacagaaatttgaaatacagtcaaaatatacaatgtaatgctttactatacttcataacagtatctttttaacaaga

SEQ ID NO: 376725 - DNA, 573 bp, Homo sapiens
aaattaaatataaaattatgatctattggattctaaaggtatagtctgaaaggtcatgtcatttggactatgctttgttagtaaagcaaaaaaaacctaatattaaacaagaacttaaattttcatatacctgtgattgcttcttttcacttctttcacacctttcttgctcttcctctaaagccactggtaaggtttgttctgttgacaaattcattgatttagttcaaatgaactaagaagagttagataaagactataatctttataaaaataaatagagaataacatttctttgtattttatattttgagagtttgaatgaaacaatgtttactgaaatatttacttctgtaagaaatacttctaattatccaaaacttcaacaaaccacttggggagacaccagatatcaccagattcaagccatgcaaaatctcagggacactcacaaattgttccacccaacataaktcaacaaaactgttggaaacaaaacagaaatttgaaatacagtcaaaatatacaatgtaatgctttactatacttcataacagtatctttttaacaaga

SEQ ID NO: 376726 - DNA, 307 bp, Homo sapiens
ttgaatgaaacaatgtttactgaaatatttacttctgtaagaaatacttctaattatccaaaacttcaacaaaccacttggggagacaccagatatcaccagattcaagccatgcaaaatctcagggacactcacaaattgttccacccaacataagtcaacaaaactgttrgaaacaaaacagaaatttgaaatacagtcaaaatatacaatgtaatgctttactatacttcataacagtatctttttaacaagacactaattgagttagcagttactaataatttgcaaaattattgttgtttat

SEQ ID NO: 376727 - DNA, 484 bp, Homo sapiens
ttcacacctttcttgctcttcctctaaagccactggtaaggtttgttctgttgacaaattcattgatttagttcaaatgaactaagaagagttagataaagactataatctttataaaaataaatagagaataacatttctttgtattttatattttgagagtttgaatgaaacaatgtttactgaaatatttacttctgtaagaaatacttctaattatccaaaacttcaacaaaccacttggggagacaccagatatcaccagattcaagccatgcaaaatctcagggacactcacaaattgttccacccaacataagtcaacaaaactgttggaaacaaaacagaaatttgaaatacagtcaaaatatacaaygtaatgctttactatacttcataacagtatctttttaacaagacactaattgagttagcagttactaataatttgcaaaattattgttgtttatacctcaattagtgt

SEQ ID NO: 376728 - DNA, 601 bp, Homo sapiens
ctatggtttagatacatatggaattccacataactctagctccagcctttgcgagtaaaaattggcagtgatcatggccttaatggaggcatgtggttaattggaattttcagtaccaaaagtcttcttcttactagtttatcagggtaccctataatagtatccataactcattgcccacttgtctgttttgatttcttttttaaaaatacaattttaaacttagaggttttgtacctcaagtcacatatgtggcacatttataaaataatcatgcctttgcatatttttcctttgatatcttagctgtatatacaagccayttatgttttttaattgccacaaatattgcactgaaatagagcactagttgcaaaaatgcctggtataacatttcttcttgttcttgaaagtaattttaataccccatgtttaagatattcctagacaactataagtaactataattatttctgctaggtagaagcatctttgtggtcaacatttgtgaagtgccttgtaaataaaaatatgcttgagtagaaatagtattttgcaaatatagccctaaatagagctactgattttaccaaaaattaag

SEQ ID NO: 376729 - DNA, 584 bp, Homo sapiens
tttatatcacaaatgttttcccctgctattctgaaaaatttattttcatcttttaagactcagaaagtaggctgggcataatagctcacatctgtaatcccagcactttggaaggccaaaatgggagaatygctcaaggccaaaagtttaagaccagcctgggaaccataggtaaccttgactctacaaaaaattagacaggtatggtgatatgttcctgttgtccccgctactcaagaagcttagatgagaagatccctcgagcccagaagtctgaggtttcagtgagtctcaatcatgccattgcactccaatcctgggtgatagagtaagaacttgtctccaaaaagaggaagaaaaaaaggctcagaatgctatgtgaaatcttccttgattctagctatctttctccacacacacaggtgtctgcttcgttggggtcccttagtaccttgtcaatttttctagtgtcactttaccacctgacctgcacatcatgtctttacatgttgaccccctttgctgctagactgtagaggacaatcttttgaatcatctttgtataaacagtcttaattttgcta

SEQ ID NO: 376730 - DNA, 584 bp, Homo sapiens
tttatatcacaaatgttttcccctgctattctgaaaaatttattttcatcttttaagactcagaaagtaggctgggcataatagctcacatctgtaatcccagcactttggaaggccaaaatgggagaattgctcaaggccaaaagtttaagaccagcctgggaaccataggtaaccttgactctacaaaaaattagacasgtatggtgatatgttcctgttgtccccgctactcaagaagcttagatgagaagatccctcgagcccagaagtctgaggtttcagtgagtctcaatcatgccattgcactccaatcctgggtgatagagtaagaacttgtctccaaaaagaggaagaaaaaaaggctcagaatgctatgtgaaatcttccttgattctagctatctttctccacacacacaggtgtctgcttcgttggggtcccttagtaccttgtcaatttttctagtgtcactttaccacctgacctgcacatcatgtctttacatgttgaccccctttgctgctagactgtagaggacaatcttttgaatcatctttgtataaacagtcttaattttgcta

SEQ ID NO: 376731 - DNA, 584 bp, Homo sapiens
tttatatcacaaatgttttcccctgctattctgaaaaatttattttcatcttttaagactcagaaagtaggctgggcataatagctcacatctgtaatcccagcactttggaaggccaaaatgggagaattgctcaaggccaaaagtttaagaccagcctgggaaccataggtaaccttgactctacaaaaaattagacaggtatggtgatatgttcctgttgtccccgctactcaagaagcttagatgagaagatccctcgagcccagragtctgaggtttcagtgagtctcaatcatgccattgcactccaatcctgggtgatagagtaagaacttgtctccaaaaagaggaagaaaaaaaggctcagaatgctatgtgaaatcttccttgattctagctatctttctccacacacacaggtgtctgcttcgttggggtcccttagtaccttgtcaatttttctagtgtcactttaccacctgacctgcacatcatgtctttacatgttgaccccctttgctgctagactgtagaggacaatcttttgaatcatctttgtataaacagtcttaattttgcta

SEQ ID NO: 376732 - DNA, 404 bp, Homo sapiens
tattttcatcttttaagactcagaaagtaggctgggcataatagctcacatctgtaatcccagcactttggaaggccaaaatgggagaattgctcaaggccaaaagtttaagaccagcctgggaaccataggtaaccttgactctacaaaaaattagacaggtatggtgatatgttcctgttgtccccgctactcaagaagcttagatgagaagatccctcgagcccagaagtctgaggtttcagtgagtctcaatcatgycattgcactccaatcctgggtgatagagtaagaacttgtctccaaaaagaggaagaaaaaaaggctcagaatgctatgtgaaatcttccttgattctagctatctttctccacacacacaggtgtctgcttcgttggggtccc

SEQ ID NO: 376733 - DNA, 585 bp, Homo sapiens
gtcactttaccacctgacctgcacatcatgtctttacatgttgaccccctttgctgctagactgtagaggacaatcttttgaatcatctttgtataaacagtcttaattttgctaaataattacttattgagttcctgctaagtgttaggcactggggaataaggaaggaaaatagaagctgtcrgggatggctttcctaaagatcacccatgagctgagacttagagagtgaggttagccagattaagcgaggcagagggcaggaaagggtgagcacatgccaggcggcaacaagagaggaagagaagcctccaagagagtatgtatttctctgcagaagaggaatggtgaggggccattaccagcagctcagtaattccagagaaaaaggcagatggggaaagggatacagatggagatttgggcagaaatcagtttcctttccttttcttttttgggacaaggttatactctgtctcccagactggagggcagtggcatgatctcagctcactgcaacccggcctcccaggttcaagtaattctcctgcatcagcctcctgagtagctgagattacaggcgc

SEQ ID NO: 376734 - DNA, 585 bp, Homo sapiens
gtcactttaccacctgacctgcacatcatgtctttacatgttgaccccctttgctgctagactgtagaggacaatcttttgaatcatctttgtataaacagtcttaattttgctaaataattacttattgagttcctgctaagtgttaggcactggggaataaggaaggaaaatagaagctgtcagggatggctttcctaaagatcayccatgagctgagacttagagagtgaggttagccagattaagcgaggcagagggcaggaaagggtgagcacatgccaggcggcaacaagagaggaagagaagcctccaagagagtatgtatttctctgcagaagaggaatggtgaggggccattaccagcagctcagtaattccagagaaaaaggcagatggggaaagggatacagatggagatttgggcagaaatcagtttcctttccttttcttttttgggacaaggttatactctgtctcccagactggagggcagtggcatgatctcagctcactgcaacccggcctcccaggttcaagtaattctcctgcatcagcctcctgagtagctgagattacaggcgc

SEQ ID NO: 376735 - DNA, 585 bp, Homo sapiens
gtcactttaccacctgacctgcacatcatgtctttacatgttgaccccctttgctgctagactgtagaggacaatcttttgaatcatctttgtataaacagtcttaattttgctaaataattacttattgagttcctgctaagtgttaggcactggggaataaggaaggaaaatagaagctgtcagggatggctttcctaaagatcacccatgagctgagacttagagagtgaggttagccagattaagcgaggcagagggcaggaaagggtgagcacatgccaggcrgcaacaagagaggaagagaagcctccaagagagtatgtatttctctgcagaagaggaatggtgaggggccattaccagcagctcagtaattccagagaaaaaggcagatggggaaagggatacagatggagatttgggcagaaatcagtttcctttccttttcttttttgggacaaggttatactctgtctcccagactggagggcagtggcatgatctcagctcactgcaacccggcctcccaggttcaagtaattctcctgcatcagcctcctgagtagctgagattacaggcgc

SEQ ID NO: 376736 - DNA, 585 bp, Homo sapiens
gtcactttaccacctgacctgcacatcatgtctttacatgttgaccccctttgctgctagactgtagaggacaatcttttgaatcatctttgtataaacagtcttaattttgctaaataattacttattgagttcctgctaagtgttaggcactggggaataaggaaggaaaatagaagctgtcagggatggctttcctaaagatcacccatgagctgagacttagagagtgaggttagccagattaagcgaggcagagggcaggaaagggtgagcacatgccaggcggcaacaagagaggaagagaagcctccaagagagtatgtatttctctgcagaagaggaatggtgaggggccattaccagcagctcrgtaattccagagaaaaaggcagatggggaaagggatacagatggagatttgggcagaaatcagtttcctttccttttcttttttgggacaaggttatactctgtctcccagactggagggcagtggcatgatctcagctcactgcaacccggcctcccaggttcaagtaattctcctgcatcagcctcctgagtagctgagattacaggcgc

SEQ ID NO: 376737 - DNA, 617 bp, Homo sapiens
ctcattgcccacttgtctgttttgatttcttttttaaaaatacaattttaaacttagaggttttgtacctcaagtcacatatgtggcacatttataaaataatcatgcctttgcatatttttcctttgatatcttagctgtatatacaagccacttatgttttttaattgccacaaatattgcactgaaatagagcactagttgcaaaaatgcctggtataacatttcttcttgttcttgaaagtaattttaataccccatgtttaagatattcctagacaactataartaactataattatttctgctaggtagaagcatctttgtggtcaacatttgtgaagtgccttgtaaataaaaatatgcttgagtagaaatagtattttgcaaatatagccctaaatagagctactgattttaccaaaaattaaggactccaaactctgtctttgtctttcaaatttggtttataggaacatctcattacaatgagcaaaaagcctatctgatcactaaagagataattttgacacttccaaatgacacagctaatttgtagtaggtttttgaagtgcaaattacatgtttctgtttaaataatgacagtaaaatatgga

SEQ ID NO: 376738 - DNA, 274 bp, Homo sapiens
atcaatgaacaaagataaaatataaggcaatgttgcaaaggtgatgcaggcctgaggagatgttttcagaaatatttaggatataggtatcagtggccattataagaatgaatttctattgaataaataaatgtatatatctgggtccctgaagaaatacactctgctcattactttacaaattttatcaaatgagaagtaaaataatatacataaactctttcagttacttgtatttactttacmctttttcttttcagttttactgtgccaa

SEQ ID NO: 376739 - DNA, 617 bp, Homo sapiens
ctcattgcccacttgtctgttttgatttcttttttaaaaatacaattttaaacttagaggttttgtacctcaagtcacatatgtggcacatttataaaataatcatgcctttgcatatttttcctttgatatcttagctgtatatacaagccacttatgttttttaattgccacaaatattgcactgaaatagagcactagttgcaaaaatgcctggtataacatttcttcttgttcttgaaagtaattttaataccccatgtttaagatattcctagacaactataagtaactataattatttctgctaggtagaagcatctttgtggtcaacatttgtgaagtgccttstaaataaaaatatgcttgagtagaaatagtattttgcaaatatagccctaaatagagctactgattttaccaaaaattaaggactccaaactctgtctttgtctttcaaatttggtttataggaacatctcattacaatgagcaaaaagcctatctgatcactaaagagataattttgacacttccaaatgacacagctaatttgtagtaggtttttgaagtgcaaattacatgtttctgtttaaataatgacagtaaaatatgga

SEQ ID NO: 376740 - DNA, 426 bp, Homo sapiens
agctcatgagaaaatagagcaaacaagtcatttgcataggtaagaaactttggatttatagcttgtcctcactactttagaagattatcatcatgttttgcaaagcaaaatgttaaacacagacacaaggggaaaaagaaattaaaactataggggtgggtgaaaaaatattgcataatttattactgttgacctcatcatatgactgattaagggcactgaatttaacttggatgtgaagtagacctyatattagctgcagttaatcagtagaccaggcgtcctagcagaattaaatttgatgctcctgtgttatctttaaaagacacagcttttctgaaaacccttactcatagtgcatgattatccattaagaaaaggtgatggaatatgtgaatacagctgaggagacaccacaaggcaaat

SEQ ID NO: 376741 - DNA, 426 bp, Homo sapiens
agctcatgagaaaatagagcaaacaagtcatttgcataggtaagaaactttggatttatagcttgtcctcactactttagaagattatcatcatgttttgcaaagcaaaatgttaaacacagacacaaggggaaaaagaaattaaaactataggggtgggtgaaaaaatattgcataatttattactgttgacctcatcatatgactgattaagggcactgaatttaacttggatgtgaagtagacctcatattagctgcagttaatcagtagaccaggcgtcctagcagaattaaatttgatgctcctgtgttatctttaaawgacacagcttttctgaaaacccttactcatagtgcatgattatccattaagaaaaggtgatggaatatgtgaatacagctgaggagacaccacaaggcaaat

SEQ ID NO: 376742 - DNA, 426 bp, Homo sapiens
agctcatgagaaaatagagcaaacaagtcatttgcataggtaagaaactttggatttatagcttgtcctcactactttagaagattatcatcatgttttgcaaagcaaaatgttaaacacagacacaaggggaaaaagaaattaaaactataggggtgggtgaaaaaatattgcataatttattactgttgacctcatcatatgactgattaagggcactgaatttaacttggatgtgaagtagacctcatattagctgcagttaatcagtagaccaggcgtcctagcagaattaaatttgatgctcctgtgttatctttaaaagacacagcttttctgaaaacccttactcatagygcatgattatccattaagaaaaggtgatggaatatgtgaatacagctgaggagacaccacaaggcaaat

SEQ ID NO: 376743 - DNA, 601 bp, Homo sapiens
ctatggtttagatacatatggaattccacataactctagctccagcctttgcgagtaaaaattggcagtgatcatggccttaatggaggcatgtggttaattggaattttcagtaccaaaagtcttcttcttactagtttatcagggtaccctataatagtatccataactcattgcccacttgtctgttttgatttcttttttaaaaatacaattttaaacttagaggttttgtacctcaagtcacatatgtggcacatttataaaataatcatgcctttgcatatttttcctttgatatcttagctgtatatacaagccacttatgttttttaattgccacaaatattgcactgaaatagagcactagttgcaaaaatgcctggtataacatttcttcttgttcttgaaagtaattttaataccccatgtttaagatattcctagacaactataagtaactataattatttctgctaggtagaagcatctttgtggtcaacatttgtgaagtgccttgtaaataaaaatatgcttgagtagaaatagtattttgcaaatatagccctaaakagagctactgattttaccaaaaattaag

SEQ ID NO: 376744 - DNA, 518 bp, Homo sapiens
agacattatttaatatttggttttgggaggtatttttagtgacactgcatacagttgtacctaataattgctaaattagagacgtaaaagtaaaacaaagkcacattgtgtttgagtaggaaatctatagacatctagctggttttcccatccagccacaaaattctaaatataatcatggtacctgcactcaaatttatgttaaataccaacctcaatgaaatcactctttcttctcattctctttgttatttatatgttgctttccttaagggaagaatacaaatgccttgctaagaaccattctgtttggttgtaggctgcataaggggagtaaacacaaagtacatttgaccacaaaatgactttttaaaagtcagaactatggtagcatgaagccaaacgaggtaatctagaataaaattttctatgcttctttcccttctttgctctctttctactctaataactgcgattcacacaggtaaagaagagtgtaattccttgatagaaacaca

SEQ ID NO: 376745 - DNA, 459 bp, Homo sapiens
attgccacaaatattgcactgaaatagagcactagttgcaaaaatgcctggtataacatttcttcttgttcttgaaagtaattttaataccccatgtttaagatattcctagacaactataagtaactataattatttctgctaggtagaagcatctttgtggtcaacatttgtgaagtgccttgtaaataaaaatatgcttgagtagaaatagtattttgcaaatatagccctaaatagasctactgattttaccaaaaattaaggactccaaactctgtctttgtctttcaaatttggtttataggaacatctcattacaatgagcaaaaagcctatctgatcactaaagagataattttgacacttccaaatgacacagctaatttgtagtaggtttttgaagtgcaaattacatgtttctgtttaaataatgacagtaaaatatggacagtatct

SEQ ID NO: 376746 - DNA, 498 bp, Homo sapiens
agacattatttaatatttggttttgggaggtatttttagtgacactgcatacagttgtacctaataattgctaaattagagacgtaaaagtaaaacaaaggcacattgtgtttgagtaggaaatctatagacatctagctggttttcccatccagccrcaaaattctaaatataatcatggtacctgcactcaaatttatgttaaataccaacctcaatgaaatcactctttcttctcattctctttgttatttatatgttgctttccttaagggaagaatacaaatgccttgctaagaaccattctgtttggttgtaggctgcataaggggagtaaacacaaagtacatttgaccacaaaatgactttttaaaagtcagaactatggtagcatgaagccaaacgaggtaatctagaataaaattttctatgcttctttcccttctttgctctctttctactctaataactgcgattcacacaggtaaagaagagtgt

SEQ ID NO: 376747 - DNA, 601 bp, Homo sapiens
ttcctagacaactataagtaactataattatttctgctaggtagaagcatctttgtggtcaacatttgtgaagtgccttgtaaataaaaatatgcttgagtagaaatagtattttgcaaatatagccctaaatagagctactkattttaccaaaaattaaggactccaaactctgtctttgtctttcaaatttggtttataggaacatctcattacaatgagcaaaaagcctatctgatcactaaagagataattttgacacttccaaatgacacagctaatttgtagtaggtttttgaagtgcaaattacatgtttctgtttaaataatgacagtaaaatatggacagtatctattcacactctatatacacaactacaacttgtccctagaagaaaagtttaatttttcaggtctcatccacaaaacgaagtgttaataagctgtatctttatactcacttttaagtaatttcttcttaaccattgtataacactaccacagtttgtatggagataaaataactcatggtgagaaatccagttctttaaaaaatcattttaccttcaatcacttttaggatgtctatggttttagagta

SEQ ID NO: 376748 - DNA, 518 bp, Homo sapiens
agacattatttaatatttggttttgggaggtatttttagtgacactgcatacagttgtacctaataattgctaaattagagacgtaaaagtaaaacaaaggcacattgtgtttgagtaggaaatctatagacatctagctggttttcccatccagccacaaaattctaaatataatcatggtacctgcactcaaatttatgttaaataccaacctcaatgaaatcactctttcttctcattctctttgttatttatatgttgctttccttaagggaagaatamaaatgccttgctaagaaccattctgtttggttgtaggctgcataaggggagtaaacacaaagtacatttgaccacaaaatgactttttaaaagtcagaactatggtagcatgaagccaaacgaggtaatctagaataaaattttctatgcttctttcccttctttgctctctttctactctaataactgcgattcacacaggtaaagaagagtgtaattccttgatagaaacaca

SEQ ID NO: 376749 - DNA, 459 bp, Homo sapiens
ctataattatttctgctaggtagaagcatctttgtggtcaacatttgtgaagtgccttgtaaataaaaatatgcttgagtagaaatagtattttgcaaatatagccctaaatagagctactgattttaccaaraattaaggactccaaactctgtctttgtctttcaaatttggtttataggaacatctcattacaatgagcaaaaagcctatctgatcactaaagagataattttgacacttccaaatgacacagctaatttgtagtaggtttttgaagtgcaaattacatgtttctgtttaaataatgacagtaaaatatggacagtatctattcacactctatatacacaactacaacttgtccctagaagaaaagtttaatttttcaggtctcatccacaaaacgaagtgttaataagctgtatctttatactcacttttaagtaatttcttctt

SEQ ID NO: 376750 - DNA, 498 bp, Homo sapiens
agacattatttaatatttggttttgggaggtatttttagtgacactgcatacagttgtacctaataattgctaaattagagacgtaaaagtaaaacaaaggcacattgtgtttgagtaggaaatctatagacatctagctggttttcccatccagccacaaaattctaaatataatcatggtacctgcactcaaatttatgttaaataccaacctcaatgaaatcactctttcttctcattctctttgttatttatatgttgctttccttaagggaagaatacaaatgccttgctaagaaccattctgtttggttgtaggctgcataagrggagtaaacacaaagtacatttgaccacaaaatgactttttaaaagtcagaactatggtagcatgaagccaaacgaggtaatctagaataaaattttctatgcttctttcccttctttgctctctttctactctaataactgcgattcacacaggtaaagaagagtgt

SEQ ID NO: 376751 - DNA, 518 bp, Homo sapiens
agacattatttaatatttggttttgggaggtatttttagtgacactgcatacagttgtacctaataattgctaaattagagacgtaaaagtaaaacaaaggcacattgtgtttgagtaggaaatctatagacatctagctggttttcccatccagccacaaaattctaaatataatcatggtacctgcactcaaatttatgttaaataccaacctcaatgaaatcactctttcttctcattctctttgttatttatatgttgctttccttaagggaagaatacaaatgccttgctaagaaccattctgtttggttgtaggctgcataaggggagtaaacacaaagtacatttgaccacaaaatgactttttaaaagtcagaactatggtagcatgaagccaaacgaggtaatctagaataaaattttctatgmttctttcccttctttgctctctttctactctaataactgcgattcacacaggtaaagaagagtgtaattccttgatagaaacaca

SEQ ID NO: 376752 - DNA, 422 bp, Homo sapiens
tttctatgcttctttcccttctttgctctctttctactctaataactgcgattcacacaggtaawgaagagtgtaattccttgatagaaacacagctccaagattaatcctttctttaactatgaagttcgcgtgtccaaaatctgtggtagttgctgtctgatttttatcactgatggtgatacagatatttatcatcaactcacaacttcccaaatctttgaaaagtcttactattgatggttcaactagtagaaacatgatgtaaaatatctgaaaataaagtttttatttattagaatgtaaataataatacaaattgtaataaggtgtaaaagttctttcttcactgaagcagtaccatgttgtcctctaccccacaaatgcagtactcccccgtggtttaatgtattttaaaagtc

SEQ ID NO: 376753 - DNA, 567 bp, Homo sapiens
agcatgaagccaaacgaggtaatctagaataaaattttctatgcttctttcccttctttgctctctttctactctaataactgcgattcacacaggtaaagaagagtgtaattccttgatagaaacacagctccaagattaatcctttctttaactatgaagttcgcrtgtccaaaatctgtggtagttgctgtctgatttttatcactgatggtgatacagatatttatcatcaactcacaacttcccaaatctttgaaaagtcttactattgatggttcaactagtagaaacatgatgtaaaatatctgaaaataaagtttttatttattagaatgtaaataataatacaaattgtaataaggtgtaaaagttctttcttcactgaagcagtaccatgttgtcctctaccccacaaatgcagtactcccccgtggtttaatgtattttaaaagtcttgtaattgctattaactcagaaaagtttacttaacttgttgtaagcttttggtatttactacagtttactttcaatcactcaaccatgtctgttatatatgttgttttc

SEQ ID NO: 376754 - DNA, 613 bp, Homo sapiens
acgaggtaatctagaataaaattttctatgcttctttcccttctttgctctctttctactctaataactgcgattcacacaggtaaagaagagtgtaattccttgatagaaacacagctccaagattaatcctttctttaactatgaagttcgcgtgtccaaaatctrtggtagttgctgtctgatttttatcactgatggtgatacagatatttatcatcaactcacaacttcccaaatctttgaaaagtcttactattgatggttcaactagtagaaacatgatgtaaaatatctgaaaataaagtttttatttattagaatgtaaataataatacaaattgtaataaggtgtaaaagttctttcttcactgaagcagtaccatgttgtcctctaccccacaaatgcagtactcccccgtggtttaatgtattttaaaagtcttgtaattgctattaactcagaaaagtttacttaacttgttgtaagcttttggtatttactacagtttactttcaatcactcaaccatgtctgttatatatgttgttttccatgagaaatttgtttattagtaattaagattcttcaggtataagaaaatatttcaata

SEQ ID NO: 376755 - DNA, 613 bp, Homo sapiens
acgaggtaatctagaataaaattttctatgcttctttcccttctttgctctctttctactctaataactgcgattcacacaggtaaagaagagtgtaattccttgatagaaacacagctccaagattaatcctttctttaactatgaagttcgcgtgtccaaaatctgtggtagttgctgtctgatttttatcactgatggtgatacagatatttatcatcaactcacaacttcccaaatctttgaaaagtcttactattgatggttcaactagtagaaacatgatgtaaaatatctgaaaataaagtttttatttattagaatgtaaataataatacaaattgtaataaggtgtaaaagttctttcttcactgaagcagtaccatgttgtcctctaccccacaaatgcagtactcccccgtggttyaatgtattttaaaagtcttgtaattgctattaactcagaaaagtttacttaacttgttgtaagcttttggtatttactacagtttactttcaatcactcaaccatgtctgttatatatgttgttttccatgagaaatttgtttattagtaattaagattcttcaggtataagaaaatatttcaata

SEQ ID NO: 376756 - DNA, 567 bp, Homo sapiens
agcatgaagccaaacgaggtaatctagaataaaattttctatgcttctttcccttctttgctctctttctactctaataactgcgattcacacaggtaaagaagagtgtaattccttgatagaaacacagctccaagattaatcctttctttaactatgaagttcgcgtgtccaaaatctgtggtagttgctgtctgatttttatcactgatggtgatacagatatttatcatcaactcacaacttcccaaatctttgaaaagtcttactattgatggttcaactagtagaaacatgatgtaaaatatctgaaaataaagtttttatttattagaatgtaaataataatacaaattgtaataaggtgtaaaagttctttcttcactgaagcagtaccatgttgtcctctaccccacaaatgcagtactcccccgtggtttaatgtattttaaaagtcttgtaattgctattaactcagamaagtttacttaacttgttgtaagcttttggtatttactacagtttactttcaatcactcaaccatgtctgttatatatgttgttttc

SEQ ID NO: 376757 - DNA, 625 bp, Homo sapiens
ttgatagaaacacagctccaagattaatcctttctttaactatgaagttcgcgtgtccaaaatctgtggtagttgctgtctgatttttatcactgatggtgatacagatatttatcatcaactcacaacttcccaaatctttgaaaagtcttactattgatggttcaactagtagaaacatgatgtaaaatatctgaaaataaagtttttatttattagaatgtaaataataatacaaattgtaataaggtgtaaaagttctttcttcactgaagcagtaccatgttgtcctctaccccacaaatgcagtactcccccgtggtttaatgtattttaaaagtcttgtaattgctattaactcagaaaagtttacttaacttgttgtaagcttttggtatttactacagtttactttcaatcactcaaccatgtctgttatatatgttgttttccatgagaaatttgtttattagtaattaagattcttcaggkataagaaaatatttcaataactaagtttgtgcataaacacattaaggtcaaatacccatgacattattgtgtgtttctgtgtactagagacaaaaacttcaaaaaaaattttaatgaatatacgttaaattaa

SEQ ID NO: 376758 - DNA, 625 bp, Homo sapiens
ttgatagaaacacagctccaagattaatcctttctttaactatgaagttcgcgtgtccaaaatctgtggtagttgctgtctgatttttatcactgatggtgatacagatatttatcatcaactcacaacttcccaaatctttgaaaagtcttactattgatggttcaactagtagaaacatgatgtaaaatatctgaaaataaagtttttatttattagaatgtaaataataatacaaattgtaataaggtgtaaaagttctttcttcactgaagcagtaccatgttgtcctctaccccacaaatgcagtactcccccgtggtttaatgtattttaaaagtcttgtaattgctattaactcagaaaagtttacttaacttgttgtaagcttttggtatttactacagtttactttcaatcactcaaccatgtctgttatatatgttgttttccatgagaaatttgtttattagtaattaagattcttcaggtataagaaaatatttsaataactaagtttgtgcataaacacattaaggtcaaatacccatgacattattgtgtgtttctgtgtactagagacaaaaacttcaaaaaaaattttaatgaatatacgttaaattaa

SEQ ID NO: 376759 - DNA, 459 bp, Homo sapiens
ctataattatttctgctaggtagaagcatctttgtggtcaacatttgtgaagtgccttgtaaataaaaatatgcttgagtagaaatagtattttgcaaatatagccctaaatagagctactgattttaccaaaaattaaggactccaaactctgtctttgtctttcaaatttggtttataggaacatctcattacaatgagcaaaaagcctatctgatcaytaaagagataattttgacacttccaaatgacacagctaatttgtagtaggtttttgaagtgcaaattacatgtttctgtttaaataatgacagtaaaatatggacagtatctattcacactctatatacacaactacaacttgtccctagaagaaaagtttaatttttcaggtctcatccacaaaacgaagtgttaataagctgtatctttatactcacttttaagtaatttcttctt

SEQ ID NO: 376760 - DNA, 586 bp, Homo sapiens
aaaaaatgctttcattaaactgagataatcttccctcaatgcatgaataccttcagaattcacatagaccaaakaattgtataaagtataatagccttaaaaatcttatttgtagctggcacaatgactcccacctgtaatcccagcacattggcaagccgaggtgggcagatcacctgaggtcaggagttcaagagcagcctggccaacctggtgaaaccccatctctactaaaaatagaaaaattagcagggtatggtagcacgtgcatgtagtatcagctactcgaggggctgaggcaggagaattgcttgaacccgagaggcagaggtggtaatgagccaagactgagccactgcactccagccttggtgacagagcaagactctgtctcaaaaacacaaataaacaaacaacctaatttttcccatataagtctatgttcatacaagatctgaagagtacacaacaccgtgagacaggacagacatatattttaaaagttatattcctggtttctgtaaaaataaaatagttgaatttaagctttcaagacaagtcaacgaaaagagaatgcaaaagtgaa

SEQ ID NO: 376761 - DNA, 586 bp, Homo sapiens
aaaaaatgctttcattaaactgagataatcttccctcaatgcatgaataccttcagaattcacatagaccaaataattgtataaartataatagccttaaaaatcttatttgtagctggcacaatgactcccacctgtaatcccagcacattggcaagccgaggtgggcagatcacctgaggtcaggagttcaagagcagcctggccaacctggtgaaaccccatctctactaaaaatagaaaaattagcagggtatggtagcacgtgcatgtagtatcagctactcgaggggctgaggcaggagaattgcttgaacccgagaggcagaggtggtaatgagccaagactgagccactgcactccagccttggtgacagagcaagactctgtctcaaaaacacaaataaacaaacaacctaatttttcccatataagtctatgttcatacaagatctgaagagtacacaacaccgtgagacaggacagacatatattttaaaagttatattcctggtttctgtaaaaataaaatagttgaatttaagctttcaagacaagtcaacgaaaagagaatgcaaaagtgaa

SEQ ID NO: 376762 - DNA, 459 bp, Homo sapiens
ctataattatttctgctaggtagaagcatctttgtggtcaacatttgtgaagtgccttgtaaataaaaatatgcttgagtagaaatagtattttgcaaatatagccctaaatagagctactgattttaccaaaaattaaggactccaaactctgtctttgtctttcaaatttggtttataggaacatctcattacaatgagcaaaaagcctatctgatcactaaagagataattttgacacttycaaatgacacagctaatttgtagtaggtttttgaagtgcaaattacatgtttctgtttaaataatgacagtaaaatatggacagtatctattcacactctatatacacaactacaacttgtccctagaagaaaagtttaatttttcaggtctcatccacaaaacgaagtgttaataagctgtatctttatactcacttttaagtaatttcttctt

SEQ ID NO: 376763 - DNA, 586 bp, Homo sapiens
aaaaaatgctttcattaaactgagataatcttccctcaatgcatgaataccttcagaattcacatagaccaaataattgtataaagtataatagccttaaaaatcttatttgtagctggcacaatgactcccacctgtaatcccagcacattggcaagccgaggtgggcagatcacctgaggtcaggagttcaagagcagcctggccaacctggtgaaaccccatctctactaaaaatagaaaaattagcagggtatggtagcacgtgcatgtagtatcagctactcgaggggctgaggcaggagaattgcttgaacccgagagrcagaggtggtaatgagccaagactgagccactgcactccagccttggtgacagagcaagactctgtctcaaaaacacaaataaacaaacaacctaatttttcccatataagtctatgttcatacaagatctgaagagtacacaacaccgtgagacaggacagacatatattttaaaagttatattcctggtttctgtaaaaataaaatagttgaatttaagctttcaagacaagtcaacgaaaagagaatgcaaaagtgaa

SEQ ID NO: 376764 - DNA, 523 bp, Homo sapiens
gtatggtagcacgtgcatgtagtatcagctactcgaggggctgaggcaggagaattgcttgaacccgagaggcagaggtggtaatgagccaagactgagccactgcactccagccttggtgacagagcaagactctgyctcaaaaacacaaataaacaaacaacctaatttttcccatataagtctatgttcatacaagatctgaagagtacacaacaccgtgagacaggacagacatatattttaaaagttatattcctggtttctgtaaaaataaaatagttgaatttaagctttcaagacaagtcaacgaaaagagaatgcaaaagtgaaactcgaagggtcatttccccatcaagggctcatgatcactggacattcacaaactatactgttcaaaacattagatctgaattttgatccgagtatccctttagtagcagtttcattcaaggatgtccaagaggtaaaataagacaatatcatttgctattttcagttttcttttctgagaacagcccag

SEQ ID NO: 376765 - DNA, 523 bp, Homo sapiens
gtatggtagcacgtgcatgtagtatcagctactcgaggggctgaggcaggagaattgcttgaacccgagaggcagaggtggtaatgagccaagactgagccactgcactccagccttggtgacagagcaagactctgtctcaaaaacacaaayaaacaaacaacctaatttttcccatataagtctatgttcatacaagatctgaagagtacacaacaccgtgagacaggacagacatatattttaaaagttatattcctggtttctgtaaaaataaaatagttgaatttaagctttcaagacaagtcaacgaaaagagaatgcaaaagtgaaactcgaagggtcatttccccatcaagggctcatgatcactggacattcacaaactatactgttcaaaacattagatctgaattttgatccgagtatccctttagtagcagtttcattcaaggatgtccaagaggtaaaataagacaatatcatttgctattttcagttttcttttctgagaacagcccag

SEQ ID NO: 376766 - DNA, 523 bp, Homo sapiens
gtatggtagcacgtgcatgtagtatcagctactcgaggggctgaggcaggagaattgcttgaacccgagaggcagaggtggtaatgagccaagactgagccactgcactccagccttggtgacagagcaagactctgtctcaaaaacacaaataaacaaacaacctaatttttcccatataagtctatgttcatacaagatctgaagagtacacaacaccgtgagacaggacagacatatattttaaaagttatattcctggtttctgtaaaaataaaatagttgaatttaagctttcaagacaagtcaacgaaaagagaatgcaaaagtgaaactcgaarggtcatttccccatcaagggctcatgatcactggacattcacaaactatactgttcaaaacattagatctgaattttgatccgagtatccctttagtagcagtttcattcaaggatgtccaagaggtaaaataagacaatatcatttgctattttcagttttcttttctgagaacagcccag

SEQ ID NO: 376767 - DNA, 568 bp, Homo sapiens
gggaatacaatgaacagtgtaaaatgaattaaaccagggataatcacaccaatgtgggtacagagtggaaaatatatacataacacaccaaagaaagtggcagaaaggtatataaagtgtataaccactcacataccaytttaggacacaaaaaattctgcatattatttatgagcatcacaatgtaattaaagatttcaaaagggcattgaaatgaaaaacaaccaaacttatgatgttggtagcctctatgcaatcatgttttaaaaactttaacaccaaaaaggctcaaaatcaccattttaaaagactgtgtctaccagtcataaatgaatcattactttcgtcatttgtaatagtcaaagatgccacaagcgcacgcatacacacatctatatatacacctacacacacagtcttgctcattagaacatctgataggtttcagatcatcagtgtaataacactagcagcaagcctctgaagttaaaacagaaactgacactttaataagtaaagctttcctctaggtaaagatcagaactccaactagcacttaactcactgg

SEQ ID NO: 376768 - DNA, 620 bp, Homo sapiens
aggacacaaaaaattctgcatattatttatgagcatcacaatgtaattaaagatttcaaaagggcattgaaatgaaaaacaaccaaacttatgatgttggtagcctctatgcaatcatgttttaaaaactttaacaccaaaaakgctcaaaatcaccattttaaaagactgtgtctaccagtcataaatgaatcattactttcgtcatttgtaatagtcaaagatgccacaagcgcacgcatacacacatctatatatacacctacacacacagtcttgctcattagaacatctgataggtttcagatcatcagtgtaataacactagcagcaagcctctgaagttaaaacagaaactgacactttaataagtaaagctttcctctaggtaaagatcagaactccaactagcacttaactcactggaaatatcttaagagtctcaaaattcactgctttgaatccctgacaagtataaaaattttatactgaaaacttcatgctattcaaaacatttaaacagaaacatctgacttaaagcttacatttttaaaatcttttttatgcttctaaatttgtttttattcaaatatggataccaacaataacatttatgtcaa

SEQ ID NO: 376769 - DNA, 509 bp, Homo sapiens
ttgtaatagtcaaagatgccacaagcgcacgcatacacacatctatatatacacctacacacacagtcttgctcattagaacatctgatargtttcagatcatcagtgtaataacactagcagcaagcctctgaagttaaaacagaaactgacactttaataagtaaagctttcctctaggtaaagatcagaactccaactagcacttaactcactggaaatatcttaagagtctcaaaattcactgctttgaatccctgacaagtataaaaattttatactgaaaacttcatgctattcaaaacatttaaacagaaacatctgacttaaagcttacatttttaaaatcttttttatgcttctaaatttgtttttattcaaatatggataccaacaataacatttatgtcaatgccttctgttcaatattgaacaaatagaattaggaataagaataatatgagtacatccaatcattgaatgtactttatttccagtattccattaaa

SEQ ID NO: 376770 - DNA, 620 bp, Homo sapiens
aggacacaaaaaattctgcatattatttatgagcatcacaatgtaattaaagatttcaaaagggcattgaaatgaaaaacaaccaaacttatgatgttggtagcctctatgcaatcatgttttaaaaactttaacaccaaaaaggctcaaaatcaccattttaaaagactgtgtctaccagtcataaatgaatcattactttcgtcatttgtaatagtcaaagatgccacaagcgcacgcatacacacatctatatatacacctacacacacagtcttgctcattagaacatctgataggyttcagatcatcagtgtaataacactagcagcaagcctctgaagttaaaacagaaactgacactttaataagtaaagctttcctctaggtaaagatcagaactccaactagcacttaactcactggaaatatcttaagagtctcaaaattcactgctttgaatccctgacaagtataaaaattttatactgaaaacttcatgctattcaaaacatttaaacagaaacatctgacttaaagcttacatttttaaaatcttttttatgcttctaaatttgtttttattcaaatatggataccaacaataacatttatgtcaa

SEQ ID NO: 376771 - DNA, 568 bp, Homo sapiens
gggaatacaatgaacagtgtaaaatgaattaaaccagggataatcacaccaatgtgggtacagagtggaaaatatatacataacacaccaaagaaagtggcagaaaggtatataaagtgtataaccactcacataccattttaggacacaaaaaattctgcatattatttatgagcatcacaatgtaattaaagatttcaaaagggcattgaaatgaaaaacaaccaaacttatgatgttggtagcctctatgcaatcatgttttaaaaactttaacaccaaaaaggctcaaaatcaccattttaaaagactgtgtctaccagtcataaatgaatcattactttcgtcatttgtaatagtcaaagatgccacaagcgcacgcatacacacatctatatatacacctacacacacagtcttgctcattagaacatctgataggtttcagatcatcagtgtaataacactagcagcaagcctctgaagttaaaacagaaactracactttaataagtaaagctttcctctaggtaaagatcagaactccaactagcacttaactcactgg

SEQ ID NO: 376772 - DNA, 509 bp, Homo sapiens
ttgtaatagtcaaagatgccacaagcgcacgcatacacacatctatatatacacctacacacacagtcttgctcattagaacatctgataggtttcagatcatcagtgtaataacactagcagcaagcctctgaagttaaaacagaaactgacactttaatargtaaagctttcctctaggtaaagatcagaactccaactagcacttaactcactggaaatatcttaagagtctcaaaattcactgctttgaatccctgacaagtataaaaattttatactgaaaacttcatgctattcaaaacatttaaacagaaacatctgacttaaagcttacatttttaaaatcttttttatgcttctaaatttgtttttattcaaatatggataccaacaataacatttatgtcaatgccttctgttcaatattgaacaaatagaattaggaataagaataatatgagtacatccaatcattgaatgtactttatttccagtattccattaaa

SEQ ID NO: 376773 - DNA, 620 bp, Homo sapiens
aggacacaaaaaattctgcatattatttatgagcatcacaatgtaattaaagatttcaaaagggcattgaaatgaaaaacaaccaaacttatgatgttggtagcctctatgcaatcatgttttaaaaactttaacaccaaaaaggctcaaaatcaccattttaaaagactgtgtctaccagtcataaatgaatcattactttcgtcatttgtaatagtcaaagatgccacaagcgcacgcatacacacatctatatatacacctacacacacagtcttgctcattagaacatctgataggtttcagatcatcagtgtaataacactagcagcaagcctctgaagttaaaacagaaactgacactttaataagtaaagctttcctctaggtaaagatcagaactccaactagcacttaactcactggaaatatcttaagagtctcaaaattcactgctttgaatccctgacaagtataaaaattttatactgaaaacttcatgctattcaaaacattwaaacagaaacatctgacttaaagcttacatttttaaaatcttttttatgcttctaaatttgtttttattcaaatatggataccaacaataacatttatgtcaa

SEQ ID NO: 376774 - DNA, 509 bp, Homo sapiens
ttgtaatagtcaaagatgccacaagcgcacgcatacacacatctatatatacacctacacacacagtcttgctcattagaacatctgataggtttcagatcatcagtgtaataacactagcagcaagcctctgaagttaaaacagaaactgacactttaataagtaaagctttcctctaggtaaagatcagaactccaactagcacttaactcactggaaatatcttaagagtctcaaaattcactgctttgaatccctgacaagtataaaaattttatactgaaaacttcatgctattcaaaacatttaaacagaaacatctgacwtaaagcttacatttttaaaatcttttttatgcttctaaatttgtttttattcaaatatggataccaacaataacatttatgtcaatgccttctgttcaatattgaacaaatagaattaggaataagaataatatgagtacatccaatcattgaatgtactttatttccagtattccattaaa

SEQ ID NO: 376775 - DNA, 607 bp, Homo sapiens
taccagtcataaatgaatcattactttcgtcatttgtaatagtcaaagatgccacaagcgcacgcatacacacatctatatatacacctacacacacagtcttgctcattagaacatctgataggtttcagatcatcagtgtaataacactagcagcaagcctctgaagttaaaacagaaactgacactttaataagtaaagctttcctctaggtaaagatcagaactccaactagcacttaactcactggaaatatcttaagagtctcaaaattcactgctttgaatccctgacaagtataaaaattttatactgaaaacttcatgctattcaaaacatttaaacagaaacatctgacttaaagcttacatttttaaaatcttttttatgcttctaaatttgtttttattcaaatatggataccaacaataacatttatgtcaatgccttctgttcaatattgaacaaatagaattaggaataagaataatatgagtacatccaatcattgaatgtactttatttccagtattccattaaatgtacctgctctcaatgtctgtacawactttctttgtactgctcctttcacagcaggatcttcca

SEQ ID NO: 376776 - DNA, 567 bp, Homo sapiens
caacaataacatttatgtcaatgccttctgttcaatattgaacaaatagaattaggaataagaataatatgagtacatccaatcattgaatgtactttatttccagtattccattaaatgtacctgctctcaatgtctgtacatwctttctttgtactgctcctttcacagcaggatcttccacttcagtgctaggctgaatgggttttaaaagataacgattcataaatcatatatattttatacaacatggagttagtgattcaaaaatatacataattaattaccttcaaggaaggatgttttgcaggaggccctacaaagcaaaggggatatgtcatcaattatatgtaagtatgacaaggccaaccaaacattcatgcagtgttactgtcgagctgaattctcaggcctggctataaaaataattacttaaggttttgagggttcttcttggcttcttcttttcattgcctaggacagcaacatgacagaaacacaatgaggaaaataggaatataggattcccaaaatgcacagtttatatttcagtagtgagattatgtt

SEQ ID NO: 376777 - DNA, 567 bp, Homo sapiens
caacaataacatttatgtcaatgccttctgttcaatattgaacaaatagaattaggaataagaataatatgagtacatccaatcattgaatgtactttatttccagtattccattaaatgtacctgctctcaatgtctgtacatactttctttgtactgctcctttcacagcaggatcttccacttcagtgctaggctgaatgggttttaaaagataacgattcataaatcatatatattttatacaacatggagttagtgattcaaaaatatacataattaattacmttcaaggaaggatgttttgcaggaggccctacaaagcaaaggggatatgtcatcaattatatgtaagtatgacaaggccaaccaaacattcatgcagtgttactgtcgagctgaattctcaggcctggctataaaaataattacttaaggttttgagggttcttcttggcttcttcttttcattgcctaggacagcaacatgacagaaacacaatgaggaaaataggaatataggattcccaaaatgcacagtttatatttcagtagtgagattatgtt

SEQ ID NO: 376778 - DNA, 343 bp, Homo sapiens
gtcgagctgaattctcaggcctggctataaaaataattacttaaggttttgagggttcttcttggcttcktcttttcattgcctaggacagcaacatgacagaaacacaatgaggaaaataggaatataggattcccaaaatgcacagtttatatttcagtagtgagattatgtttcaaatgcctatacttaaaatagaaaagcattgatataaccgtgaacatgtggactgatgaggagaaaagggaccattaaacagaggggcaaatcaaacctgagagaatcaatgtcaaagctgatggtgaatgtacagagtattttaactccacacaccagaggcatt

SEQ ID NO: 376779 - DNA, 602 bp, Homo sapiens
atgttttgcaggaggccctacaaagcaaaggggatatgtcatcaattatatgtaagtatgacaaggccaaccaaacattcatgcagtgttactgtcgagctgaattctcaggcctggctataaaaataattacttaaggttttgagggttcttcttggcttcttcttttcattgcctaggacagcaacatgacagaaacacaatgaggaaaatargaatataggattcccaaaatgcacagtttatatttcagtagtgagattatgtttcaaatgcctatacttaaaatagaaaagcattgatataaccgtgaacatgtggactgatgaggagaaaagggaccattaaacagaggggcaaatcaaacctgagagaatcaatgtcaaagctgatggtgaatgtacagagtattttaactccacacaccagaggcattgctgccagcacagcacaaataaattccccttgtcttgtcactgaggaaatacgcagttgggatgacagttcaggtgaatgtgtgattcacctctcatcaaagaaagggttctacattgatcagctaggatacacacttatgaaataacagctaatcaaactactca

SEQ ID NO: 376780 - DNA, 572 bp, Homo sapiens
gtactttatttccagtattccattaaatgtacctgctctcaatgtctgtacatactttctttgtactgctcctttcacagcaggatcttccacttcagtgctaggctgaatgggttttaaaagataacgattcataaatcatatatattttatacaacatggagttagtgattcaaaaatatacataattaattaccttcaaggaaggatgttttgcaggaggccctacaaagcaaaggggatatgtcatcaattatatgtaagtatgacaaggccaaccaaacattcatgcagtgttactgtcgagctgaattctcaggcctggctataaaaataattacttaaggttttgagggttcttcttggcttcttcttttcattgcctaggacagcaacatgacagaaacacaatgaggaaaataggaatataggattcmcaaaatgcacagtttatatttcagtagtgagattatgtttcaaatgcctatacttaaaatagaaaagcattgatataaccgtgaacatgtggactgatgaggagaaaagggaccattaaacagaggggcaaatca

SEQ ID NO: 376781 - DNA, 602 bp, Homo sapiens
atgttttgcaggaggccctacaaagcaaaggggatatgtcatcaattatatgtaagtatgacaaggccaaccaaacattcatgcagtgttactgtcgagctgaattctcaggcctggctataaaaataattacttaaggttttgagggttcttcttggcttcttcttttcattgcctaggacagcaacatgacagaaacacaatgaggaaaataggaatataggattcccaaaatgcacagtttayatttcagtagtgagattatgtttcaaatgcctatacttaaaatagaaaagcattgatataaccgtgaacatgtggactgatgaggagaaaagggaccattaaacagaggggcaaatcaaacctgagagaatcaatgtcaaagctgatggtgaatgtacagagtattttaactccacacaccagaggcattgctgccagcacagcacaaataaattccccttgtcttgtcactgaggaaatacgcagttgggatgacagttcaggtgaatgtgtgattcacctctcatcaaagaaagggttctacattgatcagctaggatacacacttatgaaataacagctaatcaaactactca

SEQ ID NO: 376782 - DNA, 343 bp, Homo sapiens
gtcgagctgaattctcaggcctggctataaaaataattacttaaggttttgagggttcttcttggcttcttcttttcattgcctaggacagcaacatgacagaaacacaatgaggaaaataggaatataggattcccaaaatgcacagtttatatttcagtagtgagattatgtttcaaatgcctatacttaaaatagaaaagcattgatataaccgtgaacaygtggactgatgaggagaaaagggaccattaaacagaggggcaaatcaaacctgagagaatcaatgtcaaagctgatggtgaatgtacagagtattttaactccacacaccagaggcatt

SEQ ID NO: 376783 - DNA, 343 bp, Homo sapiens
gtcgagctgaattctcaggcctggctataaaaataattacttaaggttttgagggttcttcttggcttcttcttttcattgcctaggacagcaacatgacagaaacacaatgaggaaaataggaatataggattcccaaaatgcacagtttatatttcagtagtgagattatgtttcaaatgcctatacttaaaatagaaaagcattgatataaccgtgaacatgtggactratgaggagaaaagggaccattaaacagaggggcaaatcaaacctgagagaatcaatgtcaaagctgatggtgaatgtacagagtattttaactccacacaccagaggcatt

SEQ ID NO: 376784 - DNA, 400 bp, Homo sapiens
taagtatgacaaggccaaccaaacattcatgcagtgttactgtcgagctgaattctcaggcctggctataaaaataattacttaaggttttgagggttcttcttggcttcttcttttcattgcctaggacagcaacatgacagaaacacaatgaggaaaataggaatataggattcccaaaatgcacagtttatatttcagtagtgagattatgtttcaaatgcctatacttaaaatagaaaagcattgatataaccgtgaacatgtggactgatraggagaaaagggaccattaaacagaggggcaaatcaaacctgagagaatcaatgtcaaagctgatggtgaatgtacagagtattttaactccacacaccagaggcattgctgccagcacagcac

SEQ ID NO: 376785 - DNA, 400 bp, Homo sapiens
taagtatgacaaggccaaccaaacattcatgcagtgttactgtcgagctgaattctcaggcctggctataaaaataattacttaaggttttgagggttcttcttggcttcttcttttcattgcctaggacagcaacatgacagaaacacaatgaggaaaataggaatataggattcccaaaatgcacagtttatatttcagtagtgagattatgtttcaaatgcctatacttaaaatagaaaagcattgatataaccgtgaacatgtggactgatgaggagaaaagggaccattaaacagaggggcaaatyaaacctgagagaatcaatgtcaaagctgatggtgaatgtacagagtattttaactccacacaccagaggcattgctgccagcacagcac

SEQ ID NO: 376786 - DNA, 602 bp, Homo sapiens
atgttttgcaggaggccctacaaagcaaaggggatatgtcatcaattatatgtaagtatgacaaggccaaccaaacattcatgcagtgttactgtcgagctgaattctcaggcctggctataaaaataattacttaaggttttgagggttcttcttggcttcttcttttcattgcctaggacagcaacatgacagaaacacaatgaggaaaataggaatataggattcccaaaatgcacagtttatatttcagtagtgagattatgtttcaaatgcctatacttaaaatagaaaagcattgatataaccgtgaacatgtggactgatgaggagaaaagggaccattaaacagaggggcaaatcaaacctgagagaatcaatgtcaaagctgatggtgaatgtacagagtattttaactccacacaccagaggcattgctgscagcacagcacaaataaattccccttgtcttgtcactgaggaaatacgcagttgggatgacagttcaggtgaatgtgtgattcacctctcatcaaagaaagggttctacattgatcagctaggatacacacttatgaaataacagctaatcaaactactca

SEQ ID NO: 376787 - DNA, 569 bp, Homo sapiens
catgggctactgcagcacctacatttctcctatcccctcatttggccttgaattagagctccttgatccactcatgcaaggtggtccataaaacacatcaaataaaccatgtcgaataagcttctgatatsaaaatatttatcaaaaaagaaaacattgaatgaccacagacttgctggatattaatacatatttatatttcaaaatcagtgcagtatttattgaaaatgataattttggttttcatggaatgaattttatgattacttctaaaattaactgagtttggtatattatcttacactgtaaaggacttttataaaacagctatcatatcgaagaactggctgtctcaaaaaaatttcaccaaagcatctatatgcaacttaatcatatcttattcactcatgtcagtgaaacttctctccctgaggcctgacagttatcaagtgaaatgagctgctgtggtttaccccaactctagcactccctcctgtctccagtactctccacagcaataacctcttttgtgagactgggcatatgctgaagcaactggaagtgagttg

SEQ ID NO: 376788 - DNA, 319 bp, Homo sapiens
caaataaaccatgtcgaataagcttctgatatgaaaatatttatcaaaaaagaaaacattraatgaccacagacttgctggatattaatacatatttatatttcaaaatcagtgcagtatttattgaaaatgataattttggttttcatggaatgaattttatgattacttctaaaattaactgagtttggtatattatcttacactgtaaaggacttttataaaacagctatcatatcgaagaactggctgtctcaaaaaaatttcaccaaagcatctatatgcaacttaatcatatcttattcactcatgtcagtga

SEQ ID NO: 376789 - DNA, 569 bp, Homo sapiens
catgggctactgcagcacctacatttctcctatcccctcatttggccttgaattagagctccttgatccactcatgcaaggtggtccataaaacacatcaaataaaccatgtcgaataagcttctgatatgaaaatatttatcaaaaaagaaaacattgaatgaccacagacttgctggatattaatacatatttatatttcaaaatcagtgcagtatttattgaaaatgataattttggttttcatggaatgaattttatgattacttctaaaattaactragtttggtatattatcttacactgtaaaggacttttataaaacagctatcatatcgaagaactggctgtctcaaaaaaatttcaccaaagcatctatatgcaacttaatcatatcttattcactcatgtcagtgaaacttctctccctgaggcctgacagttatcaagtgaaatgagctgctgtggtttaccccaactctagcactccctcctgtctccagtactctccacagcaataacctcttttgtgagactgggcatatgctgaagcaactggaagtgagttg

SEQ ID NO: 376790 - DNA, 569 bp, Homo sapiens
catgggctactgcagcacctacatttctcctatcccctcatttggccttgaattagagctccttgatccactcatgcaaggtggtccataaaacacatcaaataaaccatgtcgaataagcttctgatatgaaaatatttatcaaaaaagaaaacattgaatgaccacagacttgctggatattaatacatatttatatttcaaaatcagtgcagtatttattgaaaatgataattttggttttcatggaatgaattttatgattacttctaaaattaactgagtttggtatattatcttacactgtaaaggacttttataaaacagctatcatatcraagaactggctgtctcaaaaaaatttcaccaaagcatctatatgcaacttaatcatatcttattcactcatgtcagtgaaacttctctccctgaggcctgacagttatcaagtgaaatgagctgctgtggtttaccccaactctagcactccctcctgtctccagtactctccacagcaataacctcttttgtgagactgggcatatgctgaagcaactggaagtgagttg

SEQ ID NO: 376791 - DNA, 569 bp, Homo sapiens
catgggctactgcagcacctacatttctcctatcccctcatttggccttgaattagagctccttgatccactcatgcaaggtggtccataaaacacatcaaataaaccatgtcgaataagcttctgatatgaaaatatttatcaaaaaagaaaacattgaatgaccacagacttgctggatattaatacatatttatatttcaaaatcagtgcagtatttattgaaaatgataattttggttttcatggaatgaattttatgattacttctaaaattaactgagtttggtatattatcttacactgtaaaggacttttataaaacagctatcatatcgaagaactggctgtctcaaaaaaatttcrccaaagcatctatatgcaacttaatcatatcttattcactcatgtcagtgaaacttctctccctgaggcctgacagttatcaagtgaaatgagctgctgtggtttaccccaactctagcactccctcctgtctccagtactctccacagcaataacctcttttgtgagactgggcatatgctgaagcaactggaagtgagttg

SEQ ID NO: 376792 - DNA, 395 bp, Homo sapiens
attttatgattacttctaaaattaactgagtttggtatattatcttacactgtaaaggacttttataaaacagctatcatatcgaagaactggctgtctcaaaaaaatttcaccaaagcatctatatgcaacttaatcatatcttattcactcatgtcagtgaaacttctctccctgaggcctgacagttatcaagtgaaatgagctgctgtggtttaccccaactctagcactccctcctgtctccagtactctccacagcaataacctcttttgtgagactgggcatatgctgaagcaactggaagtgagttgtctcaagttwacttggctttaactcccaagaccccagcaaatgtctttctttcctccttttgtgtcctttcaccatccct

SEQ ID NO: 376793 - DNA, 497 bp, Homo sapiens
aactggaagtgagttgtctcaagttaacttggctttaactcccaagaccccagcaaatgtctttctttcctccttttgtgtcctttcaccatccctcttcctttgaaaaaatgattatcagaactgtcatcctgatgcttcccttcctaactgctttttatggatgattgtgaccacttttttcatctgtattcagcagtagtatacacctgtaatctctcttttttcatctcattttccttcccctgtggctagaatcatgctcagaaataaaaggaaattaaagctttccctggattctgttatyttttaaattgctctccagtggttctttttccagatttctctaaaggaaggctattcccttgctattcagagctgtgtccaaggaccagcacaaacatcacctgagtgctcatgagaaatgcagactccaatacctgctgagtcagaatgtgcactttccagaagctcctcaacgtattcatgacaatttg

SEQ ID NO: 376794 - DNA, 525 bp, Homo sapiens
ttttttcatctcattttccttcccctgtggctagaatcatgctcagaaataaaaggaaattaaagctttccctggattctgttatcttttaaattgctctccagtggttctttttccagatttctctaaaggaaggctattcccttgctattcagagctgtgtccaaggaccagcacaaacatcacctgagtgctcatgagaaatgcagactccaatacctgctgagtcagaatgtgcactttccagaagctcctcaacgwattcatgacaatttgaatgccttgttctacactggtgtgcttccatattggtttaccctaattggcctttttggcctagcctcaacttctttcctattatgtccctgaatttaatactacgttataagccataatgtttctaatgaacttttaatcaggcaaagcttctctaattaatttcttcccaataaatcacccaacactattcttttcaattatgttaatatgatactatcctatgaagttacaacattttctatgaaa

SEQ ID NO: 376795 - DNA, 413 bp, Homo sapiens
gctcatgagaaatgcagactccaatacctgctgagtcagaatgtgcactttccagaagctcctcaacgtattcatgacaatttgaatgccytgttctacactggtgtgcttccatattggtttaccctaattggcctttttggcctagcctcaacttctttcctattatgtccctgaatttaatactacgttataagccataatgtttctaatgaacttttaatcaggcaaagcttctctaattaatttcttcccaataaatcacccaacactattcttttcaattatgttaatatgatactatcctatgaagttacaacattttctatgaaaacaaattacagtcatacatggctgaccatttatggtgatgttcatctatggtagataaaacacaggtctgcatggtaaag

SEQ ID NO: 376796 - DNA, 413 bp, Homo sapiens
gctcatgagaaatgcagactccaatacctgctgagtcagaatgtgcactttccagaagctcctcaacgtattcatgacaatttgaatgccttgttctacactggtgtgcttccatattggtttaccctaattggcctttttggyctagcctcaacttctttcctattatgtccctgaatttaatactacgttataagccataatgtttctaatgaacttttaatcaggcaaagcttctctaattaatttcttcccaataaatcacccaacactattcttttcaattatgttaatatgatactatcctatgaagttacaacattttctatgaaaacaaattacagtcatacatggctgaccatttatggtgatgttcatctatggtagataaaacacaggtctgcatggtaaag

SEQ ID NO: 376797 - DNA, 413 bp, Homo sapiens
gctcatgagaaatgcagactccaatacctgctgagtcagaatgtgcactttccagaagctcctcaacgtattcatgacaatttgaatgccttgttctacactggtgtgcttccatattggtttaccctaattggcctttttggcctagcctcaacttctttcctattatgtccctgaatttaatactacrttataagccataatgtttctaatgaacttttaatcaggcaaagcttctctaattaatttcttcccaataaatcacccaacactattcttttcaattatgttaatatgatactatcctatgaagttacaacattttctatgaaaacaaattacagtcatacatggctgaccatttatggtgatgttcatctatggtagataaaacacaggtctgcatggtaaag

SEQ ID NO: 376798 - DNA, 427 bp, Homo sapiens
ggaaggctattcccttgctattcagagctgtgtccaaggaccagcacaaacatcacctgagtgctcatgagaaatgcagactccaatacctgctgagtcagaatgtgcactttccagaagctcctcaacgtattcatgacaatttgaatgccttgttctacactggtgtgcttccatattggtttaccctaattggcctttttggcctagcctcaacttctttcctattatgtccctgaatttaatactacgttataagccataatgtttctaatgaacttttaatcaggcaaarcttctctaattaatttcttcccaataaatcacccaacactattcttttcaattatgttaatatgatactatcctatgaagttacaacattttctatgaaaacaaattacagtcatacatggctgaccattta

SEQ ID NO: 376799 - DNA, 427 bp, Homo sapiens
ggaaggctattcccttgctattcagagctgtgtccaaggaccagcacaaacatcacctgagtgctcatgagaaatgcagactccaatacctgctgagtcagaatgtgcactttccagaagctcctcaacgtattcatgacaatttgaatgccttgttctacactggtgtgcttccatattggtttaccctaattggcctttttggcctagcctcaacttctttcctattatgtccctgaatttaatactacgttataagccataatgtttctaatgaacttttaatcaggcaaagcttctctaattaatttcttcccaataaatcacccaacactattcttttcaattatgttaatatgatactatcctatgaagttacaacattttctatraaaacaaattacagtcatacatggctgaccattta

SEQ ID NO: 376800 - DNA, 595 bp, Homo sapiens
gttgaacagtcccaggttgtccattgggcccttcacaatgcaaagtataactactctgatacacttctggagctttagcagtttccactgtgttaaattgagtgggctgaattggccacatggacrgccagtgctgtagagaaataattgaaatgtccactcctaccaaaaaaaaaaaatagtatctaccaaacctttaaagttctttccctggatagttatttcacaggtaggatgtttatcagtaatttgatttacccaataagctgccttgccttttttatttgtgcttccaaatcctccagttcatttaatttcactttttcccattcccacatacggctcactcaggagctgtgctatgcgcactcctggctgtgctttccagggaacagaactaaatatcacaatttgaatttcctcattgtaatctgaatcaatgactccagtgtgtatttgtaccccttttaaacttaaactagaccttcctaaaagtaatcccattgtccctgctcgcaacagtccacagactcctgttgggaccttttgcgggggttccccaggcagaaggctcacagcttttgtgcagcatgga

SEQ ID NO: 376801 - DNA, 327 bp, Homo sapiens
catggacagccagtgctgtagagaaataattgaaatgtccactcctaccaaaaaaaaaaaatagtatctaccaaacctttaaagttctttccctggatagttatttcacaggtaggatgtttatcagtaatttgatttacccaataagctgccttgccttttttatttgtgcttccaaatcctccagttcatttaatttcactttttcccattcccacatacggctcactcaggagctgtgctatgcgmactcctggctgtgctttccagggaacagaactaaatatcacaatttgaatttcctcattgtaatctgaatcaatgact

SEQ ID NO: 376802 - DNA, 595 bp, Homo sapiens
gttgaacagtcccaggttgtccattgggcccttcacaatgcaaagtataactactctgatacacttctggagctttagcagtttccactgtgttaaattgagtgggctgaattggccacatggacagccagtgctgtagagaaataattgaaatgtccactcctaccaaaaaaaaaaaatagtatctaccaaacctttaaagttctttccctggatagttatttcacaggtaggatgtttatcagtaatttgatttacccaataagctgccttgccttttttatttgtgcttccaaatcctccagttcatttaatttcactttttcccattcccacatacggctcactcaggagctgtgctatgcgcactcctggctgtgctttccagggaacagaactaaatatcacaatttgaatttcctcattgtaatctgaatcaatgactccagtgtgtatttgtaccccttttaaacttaaactagaccttcctaaaagtaatcccattgtccctgctcgcaacrgtccacagactcctgttgggaccttttgcgggggttccccaggcagaaggctcacagcttttgtgcagcatgga

SEQ ID NO: 376803 - DNA, 442 bp, Homo sapiens
ccttttgcgggggttccccaggcagaaggctcacagctwttgtgcagcatggatctactgcagcactatgggctgtggtggggaaagataacgtatgggggtgagggaatggcctgagatggaaatgccctggtttagaacagggcctgggatgggcccctcagggagtttcccaaaatcgggttcccttctttatcaaacttagagtgacactgattagcccaaagttttccttttttacattttggacatatttcaggatcagcagttttgttttttcccctatctagtggcctgactcggtgattttttttttttttttacattctttttagtatgaccatgcttcccacagttaaaacaagctccaggaaatagagtatttcctttatccactctcagtcctgccatcgcctgtgccaacaaagtagctttatgtaga

SEQ ID NO: 376804 - DNA, 442 bp, Homo sapiens
ccttttgcgggggttccccaggcagaaggctcacagcttttgtgcagcatggatctactgcagcactatgggctgtggtggggaaagataacgtatgggggtgagggaatggcctgagmtggaaatgccctggtttagaacagggcctgggatgggcccctcagggagtttcccaaaatcgggttcccttctttatcaaacttagagtgacactgattagcccaaagttttccttttttacattttggacatatttcaggatcagcagttttgttttttcccctatctagtggcctgactcggtgattttttttttttttttacattctttttagtatgaccatgcttcccacagttaaaacaagctccaggaaatagagtatttcctttatccactctcagtcctgccatcgcctgtgccaacaaagtagctttatgtaga

SEQ ID NO: 376805 - DNA, 442 bp, Homo sapiens
ccttttgcgggggttccccaggcagaaggctcacagcttttgtgcagcatggatctactgcagcactatgggctgtggtggggaaagataacgtatgggggtgagggaatggcctgagatggaaatgccctggtttagaacagggcctgggatgggcccctcagggagtttcccaaaatcgggttcccttctttatcaaacttagagtgacactgattagcccaaagttttccttttttacattttggacatatttcaggatcagcagttttgttttttcccctatctrgtggcctgactcggtgattttttttttttttttacattctttttagtatgaccatgcttcccacagttaaaacaagctccaggaaatagagtatttcctttatccactctcagtcctgccatcgcctgtgccaacaaagtagctttatgtaga

SEQ ID NO: 376806 - DNA, 442 bp, Homo sapiens
ccttttgcgggggttccccaggcagaaggctcacagcttttgtgcagcatggatctactgcagcactatgggctgtggtggggaaagataacgtatgggggtgagggaatggcctgagatggaaatgccctggtttagaacagggcctgggatgggcccctcagggagtttcccaaaatcgggttcccttctttatcaaacttagagtgacactgattagcccaaagttttccttttttacattttggacatatttcaggatcagcagttttgttttttcccctatctagtggcctgactcggtgattttttttttttttttacattmtttttagtatgaccatgcttcccacagttaaaacaagctccaggaaatagagtatttcctttatccactctcagtcctgccatcgcctgtgccaacaaagtagctttatgtaga

SEQ ID NO: 376807 - DNA, 321 bp, Homo sapiens
agctttatgtagattatctctgatatcatcacaggccttgttataatcaactaaatgtgctttccctctgataggtcgcagagcagcctggcaataaggattagcattgtcaaaaccaataactgcaacactatatcctaagcagccaaatctgcaatcatcttttcaagagactcctgtaaccaagctataaaatccacatatggttctcttgktccctgttttatagcactaaaggaagggtattgttctccacatgaagtgatttattccaagctctaatgcacactcctctaagctgttctatggcatcatcctgca

SEQ ID NO: 376808 - DNA, 561 bp, Homo sapiens
ctaagctgttctatggcatcatcctgcatgaccacttgtrcatgtaaaccagcccagccaccaacccccaaaagttggtctgcagttatattaatttgaggttgggcccaggcattgcgagcagcctgaatggaagcttcatctgcctactaagttttaaattgtaagaactgagcaggagttagacaagctagagtaaaagtgtcccagtcagtaggaatcatccgactggaaacagcaacattctttaacagtcccatttcaaaaggagaacctggtccatactgatttatagcttgtttaatttttttgagtgatttaaaaggaaaaggcccaaatgtagctataatatttccctgttgatctggggggtgtattcaaacagggaactgccaagcctctaaatcccacttttgtctagcttgctgtattcctgcctgaatagaacgaagaacagtcgctcaaggcgctgctcagtcaccagggcaactacttttcacccagtgtcctccagaaaagaaagatctggagggtcgttttcttcaaaatagtaatgagggt

SEQ ID NO: 376809 - DNA, 322 bp, Homo sapiens
accacttgtacatgtaaaccagcccagccaccaacccccaaaagttggtctgcagttatattaatttgaggttgggcccaggcattgmgagcagcctgaatggaagcttcatctgcctactaagttttaaattgtaagaactgagcaggagttagacaagctagagtaaaagtgtcccagtcagtaggaatcatccgactggaaacagcaacattctttaacagtcccatttcaaaaggagaacctggtccatactgatttatagcttgtttaatttttttgagtgatttaaaaggaaaaggcccaaatgtagctataatat

SEQ ID NO: 376810 - DNA, 596 bp, Homo sapiens
gccaccaacccccaaaagttggtctgcagttatattaatttgaggttgggcccaggcattgcgagcagcctgaatggaagcttcatctgcctactaagttttaaattgtaagaamtgagcaggagttagacaagctagagtaaaagtgtcccagtcagtaggaatcatccgactggaaacagcaacattctttaacagtcccatttcaaaaggagaacctggtccatactgatttatagcttgtttaatttttttgagtgatttaaaaggaaaaggcccaaatgtagctataatatttccctgttgatctggggggtgtattcaaacagggaactgccaagcctctaaatcccacttttgtctagcttgctgtattcctgcctgaatagaacgaagaacagtcgctcaaggcgctgctcagtcaccagggcaactacttttcacccagtgtcctccagaaaagaaagatctggagggtcgttttcttcaaaatagtaatgagggtgtgcagaaggatagggatgaacctctccctccttttctgctttagctttaggtgacaaataaacctggtctgtaacctctactgttacttt

SEQ ID NO: 376811 - DNA, 576 bp, Homo sapiens
ggtctgcagttatattaatttgaggttgggcccaggcattgcgagcagcctgaatggaagcttcatctgcctactaagttttaaattgtaagaactgagcaggagttagacaagctagagtaaaagtgtcccagtcagtaggaatcatccgactggaaacagcaacattytttaacagtcccatttcaaaaggagaacctggtccatactgatttatagcttgtttaatttttttgagtgatttaaaaggaaaaggcccaaatgtagctataatatttccctgttgatctggggggtgtattcaaacagggaactgccaagcctctaaatcccacttttgtctagcttgctgtattcctgcctgaatagaacgaagaacagtcgctcaaggcgctgctcagtcaccagggcaactacttttcacccagtgtcctccagaaaagaaagatctggagggtcgttttcttcaaaatagtaatgagggtgtgcagaaggatagggatgaacctctccctccttttctgctttagctttaggtgacaaataaacctggtctgtaacctctactgttacttt

SEQ ID NO: 376812 - DNA, 576 bp, Homo sapiens
ggtctgcagttatattaatttgaggttgggcccaggcattgcgagcagcctgaatggaagcttcatctgcctactaagttttaaattgtaagaactgagcaggagttagacaagctagagtaaaagtgtcccagtcagtaggaatcatccgactggaaacagcaacattctttaacagtcccatttcaaaaggagaacctggtccatactgatttatagcttgtttaatttttttgagtgatttaaaaggaaaaggcycaaatgtagctataatatttccctgttgatctggggggtgtattcaaacagggaactgccaagcctctaaatcccacttttgtctagcttgctgtattcctgcctgaatagaacgaagaacagtcgctcaaggcgctgctcagtcaccagggcaactacttttcacccagtgtcctccagaaaagaaagatctggagggtcgttttcttcaaaatagtaatgagggtgtgcagaaggatagggatgaacctctccctccttttctgctttagctttaggtgacaaataaacctggtctgtaacctctactgttacttt

SEQ ID NO: 376813 - DNA, 596 bp, Homo sapiens
gccaccaacccccaaaagttggtctgcagttatattaatttgaggttgggcccaggcattgcgagcagcctgaatggaagcttcatctgcctactaagttttaaattgtaagaactgagcaggagttagacaagctagagtaaaagtgtcccagtcagtaggaatcatccgactggaaacagcaacattctttaacagtcccatttcaaaaggagaacctggtccatactgatttatagcttgtttaatttttttgagtgatttaaaaggaaaaggcccaaatgtagctataatatttccctgttgatctgkggggtgtattcaaacagggaactgccaagcctctaaatcccacttttgtctagcttgctgtattcctgcctgaatagaacgaagaacagtcgctcaaggcgctgctcagtcaccagggcaactacttttcacccagtgtcctccagaaaagaaagatctggagggtcgttttcttcaaaatagtaatgagggtgtgcagaaggatagggatgaacctctccctccttttctgctttagctttaggtgacaaataaacctggtctgtaacctctactgttacttt

SEQ ID NO: 376814 - DNA, 623 bp, Homo sapiens
aaggcccaaatgtagctataatatttccctgttgatctggggggtgtattcaaacagggaactgccaagcctctaaatcccacttttgtctagcttgctgtattcctgcctgaatagaacgaagaacagtcgctcaaggcgctgctcagtcaccagggcaactacttttcacccagtgtcctccagaaaagaaagatctggagggtcgttttcttcaaaatagtaatgagggtgtgcagaagratagggatgaacctctccctccttttctgctttagctttaggtgacaaataaacctggtctgtaacctctactgttactttgttatactctccttcctcctcatcatcagtgtgaaaaagttccaaggtagaacgaaccacagcccacacttgtcctattgctaccctgatgcttccgagctccccttcttactcaccacggggattgctttaagagtactcgggtgtcctccagctagttccacattctccaatcgttgctccagcgatcctttgacctgtatttgagcccccattaatgggcaccacttgctgagaccaggtcggttggagagaccctaacccagcagcactagaggaattaaagacacacacagaaa

SEQ ID NO: 376815 - DNA, 576 bp, Homo sapiens
ggtctgcagttatattaatttgaggttgggcccaggcattgcgagcagcctgaatggaagcttcatctgcctactaagttttaaattgtaagaactgagcaggagttagacaagctagagtaaaagtgtcccagtcagtaggaatcatccgactggaaacagcaacattctttaacagtcccatttcaaaaggagaacctggtccatactgatttatagcttgtttaatttttttgagtgatttaaaaggaaaaggcccaaatgtagctataatatttccctgttgatctggggggtgtattcaaacagggaactgccaagcctctaaatcccacttttgtctagcttgctgtattcctgcctgaatagaacgaagaacagtcgctcaaggcgctgctcagtcaccagggcaactacttttcacccagtgtcctccagaaaagaaagatctggagggtcgttttcttcaaaatagtaatgagggtgtgcagaaggatagggatgaacctctccctccttttctgctttagctttaggtgacaaatraacctggtctgtaacctctactgttacttt

SEQ ID NO: 376816 - DNA, 623 bp, Homo sapiens
aaggcccaaatgtagctataatatttccctgttgatctggggggtgtattcaaacagggaactgccaagcctctaaatcccacttttgtctagcttgctgtattcctgcctgaatagaacgaagaacagtcgctcaaggcgctgctcagtcaccagggcaactacttttcacccagtgtcctccagaaaagaaagatctggagggtcgttttcttcaaaatagtaatgagggtgtgcagaaggatagggatgaacctctccctccttttctgctttagctttaggtgacaaataaacctggtctgtaacctctactgttactttgttatactctccttcctcctcatcatcagtgtgaaaaagttccaaggtagaacgaaccacagcccacacttgtcctattgctaccctgatgcttccgagctccccttcttactcaccacggggattgctttaagagtactcgggtgtcctccagctagttccacattctccaatcgttgctccagcgatcctttgacctgtatttgarcccccattaatgggcaccacttgctgagaccaggtcggttggagagaccctaacccagcagcactagaggaattaaagacacacacagaaa

SEQ ID NO: 376817 - DNA, 575 bp, Homo sapiens
tctttgctaaatttagaatgacacggacttgcccagtgattgcctttcttacaccagggacgtacattgggacttttctgttgattgatggtagtagttttcgtcttttgaattcctttctacattyctttcttgtgtccaatttgcccacaattaaggcaagagcctgagaaatgaagcatattttttcttactcttaatctagccacagcctgagctaaaagaataaccttatgtaagttatctccaatgccatcgcaagccttaatatatttagttaaatgggccctctctgtctgggatctaatagcagtttgacactctgcattagcattattgtatgcaagaagctgtattacaacatcctgagctgttttgatcatttacggctttatacacagcctcttggagctgagcaataaaattaatatatggttctttaggtccttgtcagacagaactgaaataaggatacttttcccctgtaacatttatccttttctatgcatgtaagcacatgaagcacagctgaacaatggcaacatcttccattagtgcttgattctctaatcaac

SEQ ID NO: 376818 - DNA, 575 bp, Homo sapiens
tctttgctaaatttagaatgacacggacttgcccagtgattgcctttcttacaccagggacgtacattgggacttttctgttgattgatggtagtagttttcgtcttttgaattcctttctacatttctttcttgtgtccaatttgcccacaattaagkcaagagcctgagaaatgaagcatattttttcttactcttaatctagccacagcctgagctaaaagaataaccttatgtaagttatctccaatgccatcgcaagccttaatatatttagttaaatgggccctctctgtctgggatctaatagcagtttgacactctgcattagcattattgtatgcaagaagctgtattacaacatcctgagctgttttgatcatttacggctttatacacagcctcttggagctgagcaataaaattaatatatggttctttaggtccttgtcagacagaactgaaataaggatacttttcccctgtaacatttatccttttctatgcatgtaagcacatgaagcacagctgaacaatggcaacatcttccattagtgcttgattctctaatcaac

SEQ ID NO: 376819 - DNA, 575 bp, Homo sapiens
tctttgctaaatttagaatgacacggacttgcccagtgattgcctttcttacaccagggacgtacattgggacttttctgttgattgatggtagtagttttcgtcttttgaattcctttctacatttctttcttgtgtccaatttgcccacaattaaggcaagagcctgagaaatgaagcatattttttcttactcttaatctagccacagcctgagctaaaagaataaccttatgtaagttatctccaatgccatcgcaagccttaatatatttagttaaatgggccctctctgtctgggatctaatagcagtttgacactctgcattagcattattgtatgcaagaagctgtattacaacatcctgagctgttttgatcatttrcggctttatacacagcctcttggagctgagcaataaaattaatatatggttctttaggtccttgtcagacagaactgaaataaggatacttttcccctgtaacatttatccttttctatgcatgtaagcacatgaagcacagctgaacaatggcaacatcttccattagtgcttgattctctaatcaac

SEQ ID NO: 376820 - DNA, 575 bp, Homo sapiens
tctttgctaaatttagaatgacacggacttgcccagtgattgcctttcttacaccagggacgtacattgggacttttctgttgattgatggtagtagttttcgtcttttgaattcctttctacatttctttcttgtgtccaatttgcccacaattaaggcaagagcctgagaaatgaagcatattttttcttactcttaatctagccacagcctgagctaaaagaataaccttatgtaagttatctccaatgccatcgcaagccttaatatatttagttaaatgggccctctctgtctgggatctaatagcagtttgacactctgcattagcattattgtatgcaagaagctgtattacaacatcctgagctgttttgatcatttacggctttatacacagcctcttggagctgagcaataaaattaatatatggttctttaggtccttgtcagacagaactgaaataaggatacttttcccckgtaacatttatccttttctatgcatgtaagcacatgaagcacagctgaacaatggcaacatcttccattagtgcttgattctctaatcaac

SEQ ID NO: 376821 - DNA, 473 bp, Homo sapiens
atgcaagaagctgtattacaacatcctgagctgttttgatcatttacggctttatacacagcctcttggagctgagcaataaaattaatatatggttctttaggtccttgtcagacagaactgaaataaggatacttttcccctgtaacatttatccttttctatgcatgtaagcacatgaagcacagctgaacaatggcaacatcttccattagtgcttgattctctaatcaaccccagttagggccaactcacattaactgatcaaagaaaacaggcacaggtggctgcacttgtgtgttttcttttgcctgagtttgatcttcatcagcctaccaagttttaaactgcaagtactgagatggagtgaraacaggttttgtcaaagtatccttattatatggtagtaatccattatcaagagccatatttttaaataaagtttgcaaaaaaagagagttcaatccatattg

SEQ ID NO: 376822 - DNA, 496 bp, Homo sapiens
aggcatccaaataagaaatgaagtcaaattatctctcttcactgatgatatgattctacacctagaaatccctaaagactgtgccaaaaggctcctagaactgataaaaaaaagtcttcagcaaactttcaggattaaaaaaaayaacatatagaaagaagtatcatttctgtacaccaaaaatgtttaaactgagaggtaaatcaagagtgcaatcctgtttacaacagcaacccccaaaagaaaagaaaagaaaagaagaatatgtctaagcaaggaggtaaatgatatctaaaaggagaactacaaaacactgcagaaaaaaatcatagatgacaaagcaaatggaaaactattccatgctcatggattagaaagatcaatattgttaaaatggctatactgccaaaagcaatctacacattcaacactattcctatgaaacaacccatgtcgtttttcacagaattagaaaaaaatatattctaaatttcat

SEQ ID NO: 376823 - DNA, 545 bp, Homo sapiens
ggcatccaaataagaaatgaagtcaaattatctctcttcactgatgatatgattctacacctagaaatccctaaagactgtgccaaaaggctcctagaactgataaaaaaaagtcttcagcaaactttcaggattaaaaaaaacaacatatagaaagaagtatcatttctgtacaccaaaaatgtttaaactgagaggtaaatcaagagtgcaatcctgtttacaacagcaacccccaaaagaaaagaaaagaaaagaagaatatgtctaagcaaggaggtaaatgatatctaaaaggagaactacaaaacactgcagaaaaaaatcatagatgacaaagcaaatggaaaactattccatgctcatggattagaaagatcaatattgttaaaatggctatactgccaaaagcaatctacacattcaacacyattcctatgaaacaacccatgtcgtttttcacagaattagaaaaaaatatattctaaatttcatatggatttttaaagagcccagacaaccaaaggaaacctaagcaagaagaa

SEQ ID NO: 376824 - DNA, 390 bp, Homo sapiens
acagaaaaaggccctgtgctgttaggtggggacctctgatgcagcacaattccttcatccccttctccgaaaccccctcttccattccactgaagagagaatctgatggaagtgctgtgtaagcaggctcagatatatctaccactatagayagtagaggtgattcataaatccaagcctatcaaatacatcataaataagttacacgtttaattttttttttgaaattagggatcatgatataaaagttatcagaatcaaaactgtcggtaatctttaaaaagaaaagaaaaaacctgaacaaatagattcagagaaggccttgaagagagggttctcatgcttctaggcctgatacaaactgtcacaaaataccgcaaaatccacaac

SEQ ID NO: 376825 - DNA, 569 bp, Homo sapiens
gtcggtaatctttaaaaagaaaagaaaaaacctgaacaaatagattcagagaaggccttgaagagagggttctcatgcttctaggcctgatacaaactgtcacaaaataccgcaaaatccacaaccttgcacaaaggccatagcaaccttacacaaaatacacttctgtgaggacatctatccagcaaccacytgctcaaacttcaactgacatcgaccttgttgttgatctttatagtcaaagataactataacaaaacaattatataagcctgttcatttttcctttatttatttttttctactcccccataattccaggttgatcgcttttcttttaaagaccttgtcttcctttaccatttgaatctacacagtttgctttgtcatgcatattcccattgcagtgccctcctccctaagatgtgtctttttcctttagagaacctttctctgtttgttatttaggtttacaatgagaaagcgtgtaaagtaattttactgtcttcctaggaaaaaatcactgacttacaatatttatatttacttatttacattcctggggatga

SEQ ID NO: 376826 - DNA, 569 bp, Homo sapiens
gtcggtaatctttaaaaagaaaagaaaaaacctgaacaaatagattcagagaaggccttgaagagagggttctcatgcttctaggcctgatacaaactgtcacaaaataccgcaaaatccacaaccttgcacaaaggccatagcaaccttacacaaaatacacttctgtgaggacatctatccagcaaccacttgctcaaacttcaactgacatcgaccttgttgttgatctttatagtcaaagataactataacaaaacaattatataagcctsttcatttttcctttatttatttttttctactcccccataattccaggttgatcgcttttcttttaaagaccttgtcttcctttaccatttgaatctacacagtttgctttgtcatgcatattcccattgcagtgccctcctccctaagatgtgtctttttcctttagagaacctttctctgtttgttatttaggtttacaatgagaaagcgtgtaaagtaattttactgtcttcctaggaaaaaatcactgacttacaatatttatatttacttatttacattcctggggatga

SEQ ID NO: 376827 - DNA, 569 bp, Homo sapiens
gtcggtaatctttaaaaagaaaagaaaaaacctgaacaaatagattcagagaaggccttgaagagagggttctcatgcttctaggcctgatacaaactgtcacaaaataccgcaaaatccacaaccttgcacaaaggccatagcaaccttacacaaaatacacttctgtgaggacatctatccagcaaccacttgctcaaacttcaactgacatcgaccttgttgttgatctttatagtcaaagataactataacaaaacaattatataagcctgttcatttttcctttatttatttttttctactcccccataattccaggttgatcgcttttcttttaaagaccttgtcttcctttaccatttgaatctacacagtttgctttgtcatgcatattcccattgcagtgccctcctccctaagatgtgtctttttcctttagagaacctttctctgtttgttatttaggtttacaatgagaaagcgtgtaaagtaattttactgtcttcctaggaaaaaatcactgacttacaatatttatatttayttatttacattcctggggatga

SEQ ID NO: 376828 - DNA, 498 bp, Homo sapiens
gcagcggcttgatcactgttcactacagcctcaatattccaagctcaaacgaccctcctaccacagcctcccaatgtagctgggactacaggcgtgcaccaccatgcctcagataagtgtttaawtttttttttttttttttttttttttagagacagggtctcactatattgctctggctggtctcaaactcatgggctcaaacgatcctcctgcttcagccttccaaaaccaggtgtttaactggggactaacatgaaacacttagaagactacgtggaacatagtgagctacataaaatatttgctattagcataataattttattgtatatcttaacaaaattgtgtattttaggcaggtggcatgccaatggaagtactctcctatagctgcactgaatcattcttaccactgagagttgcagcaaatgggggacataatttataacttacttttctctctgtatgactcattaggcaatgactatgtatgta

SEQ ID NO: 376829 - DNA, 498 bp, Homo sapiens
gcagcggcttgatcactgttcactacagcctcaatattccaagctcaaacgaccctcctaccacagcctcccaatgtagctgggactacaggcgtgcaccaccatgcctcagataagtgtttaaatttttttttttttttttttttttttagagacagggtctcactatattgctctggctggtctcaaactcatgggctcaaacgatcctcctgcttcagccttccaaaaccaggtgtttaactggggactaacatgaaacacttagaagactacgtggaacatagtgagctacataaaatatttgctattagcataataattttattgtatatcttaacaaaattgtgtattttaggcaggtggcatgycaatggaagtactctcctatagctgcactgaatcattcttaccactgagagttgcagcaaatgggggacataatttataacttacttttctctctgtatgactcattaggcaatgactatgtatgta

SEQ ID NO: 376830 - DNA, 597 bp, Homo sapiens
tgaaactgtttttaaaatccgaaggcaggatcaagataattttctcaactctcaatttttgatgtacatgttatctcaaatttaawtatttccacagttttatagtatattttaaataaaagataaagaaaatgcctaacttttcaaatagtttgtaaattaacctaaaacatgcacttttaaaagaatagtataatggcctttctgtacaagttaacctagaatctgtgaaataaatagacacagattctgtgtccactcacaaaagtgaagaaataagacaattttctggaacattccatgaaacattcttctctgatttaatctggcctgcctcatcagagcaatacaaaaattacttaaaaatactcttttaacaggacaaaagtcagttttctatgaggaatgatatataattctcaacttttccaagggtacgtattgtaagagaaaaggtatgcaatggtttttcaaaatggtagaatgaaagtcacaatataaaaaaataagtacattatagagatagtaaagtggaaataattcattgtaatgaaaataaaaaatcaagcttctgccataattagtatcctaaaacat

SEQ ID NO: 376831 - DNA, 597 bp, Homo sapiens
tgaaactgtttttaaaatccgaaggcaggatcaagataattttctcaactctcaatttttgatgtacatgttatctcaaatttaaatatttccacagttttatagtatattttaaataaaagataaagaaaatgcctaacttttcaaatagtttgtaaattaacctaaaacatgcacttttaaaagaatagtataatggcctttctgtacaagttaacctagaatctgtgaaataaatagacacagattctgtgtccactcacaaaagtgaagaaataagacaattttctggaacattccatgaaacattcttctctgatttaatctggcctgcctcatcagagcaatacaaaaattacttaaaaatactcttttaacaggacaaaagtcagttttctatgaggaatgatrtataattctcaacttttccaagggtacgtattgtaagagaaaaggtatgcaatggtttttcaaaatggtagaatgaaagtcacaatataaaaaaataagtacattatagagatagtaaagtggaaataattcattgtaatgaaaataaaaaatcaagcttctgccataattagtatcctaaaacat

SEQ ID NO: 376832 - DNA, 550 bp, Homo sapiens
gtataatggcctttctgtacaagttaacctagaatctgtgaaataaatagacacagattctgtgtccactcacaaaagtgaagaaataagacaattttctggaacattccatgaaacattcttctctgatttaatctggcctgcctcatcagagcaatacaaaaattacttaaaaatactcttttaacaggacaaaagtcagttttctatgaggaatgatatataattctcaacttttycaagggtacgtattgtaagagaaaaggtatgcaatggtttttcaaaatggtagaatgaaagtcacaatataaaaaaataagtacattatagagatagtaaagtggaaataattcattgtaatgaaaataaaaaatcaagcttctgccataattagtatcctaaaacatgttatgtaattcaactagctacagaataacagttgacatgctaagttccatacatacttgactttccacttgaaataatttcttctttgggacctgtgtctcatccaaattaatgtgataatgtgatataccttccagtggag

SEQ ID NO: 376833 - DNA, 546 bp, Homo sapiens
ttttctggaacattccatgaaacattcttctctgatttaatctggcctgcctcatcagagcaatacaaaaattacttaaaaatactcttttaacaggacaaaagtcagttttctatgaggaatgatatataattctcaacttttccaagggtacgtattgtaagagaaaaggtatgcaatggtttttcaaaatggtagaatgaaagtcacaatataaaaaaataagtacattatagagatagtaaagtggaaataattcattgtaatgaaaataaaaaatcaagcttctgccataattmgtatcctaaaacatgttatgtaattcaactagctacagaataacagttgacatgctaagttccatacatacttgactttccacttgaaataatttcttctttgggacctgtgtctcatccaaattaatgtgataatgtgatataccttccagtggagactctaacatagttaatttttttaggctgtcagccgcttcttgttgaagttgtctcacaaccacctgagaaaatatttttgttactgatt

SEQ ID NO: 376834 - DNA, 598 bp, Homo sapiens
ctctcggaactgccttctataccagccagatgaggtatcttaaaaggtgaaaatgtagtagtgagaattaaactcccacttcacccattttcttaatcagaacatagatctcatgccatcgcctggaattcagttgctgaattttactacctagaagggcatggataattacaaaagttcttacttagcatggctaattataactgggcaaagggcaccttctcactctgttgattgtttcctttgctgtgcagaatatttttaatttgacatagtccccatttgtctatttttggttttgttgcctgtgtttttagtgtcatattcatgaaatcattgccaagaccgatgccatgaaacttttcccttaatgttttttctacaggtttcacagtttcaggtcttaacatttaagtctttaatacattttgagtttwtttttgcaaactacagaataggagaatatatttgtaaaccatatgtaataaaaggttaattctcaaaatatataaaccatatataataaaaggttaattctctttttttattttacccgactttaagtgtataatacagtattattaactataggcacaat

SEQ ID NO: 376835 - DNA, 548 bp, Homo sapiens
ggaaaatgcttaccatcattaaacattagaaaaatgcaaatcaaaaccacaataagacaccctctcacaccagtcagaatgactagtattaaaaagataaaaaataacagatgttggtgaggttacagagaaaaaggaacagttatgcgctgctggtgggaatgtaaattatttcagccactgtggaaagcagttcggagatttctcaaatgacttaaaacataactaccattcaacccaattccattactgagcatatacctaaaggaatacaaatcattctgtcataaagayacatgcatacatgtatttgtcacagccctattcacaataacaaagaagtgctatcctcataagtgcccattgatggtggactggataaagaaaatgtggtctacagacaacatggaataatatgctagcacagaaagatcaaaataatgtcctttgcagcaatataaatggattggaggccattatcctaaacaaattaagacagaaacagaaaaacaagtggacagaaagaagggaacaataaacaccacggc

SEQ ID NO: 376836 - DNA, 664 bp, Homo sapiens
aggtgggtaaaactaaagaattctgatagyacaaaataataattgttgtaacaataatgactattatactgattaataaaaaacaaatataaaatgtaacagttttgggatttaaaaattgtagatatttttgtgagaatgagagaaacaattggtaacattagactttattaagtatataagttaagagtttaatgcttaattttcttagtaatagaggtaaaatgtggaatagataaaatttgacaagttgaagattataaaaggaaaacggtgggaaaagaaagcaattaaaagtaaatattcaaataatatgatataaataataaaaatcaataaatgtaacaaacctgatttgactgaacttggtatttaaaagaattttttaataatcctagttaacataaataaagctgttatagttctaatagtttaaaaataaatatacataatcattagtaagaagaaaataccataaaataaatataacaattccaaagttttgttttatttaacatagtttcaaattcatacagagcattaattagcataattatcaggagaaattgataaatccacttttgtagattttagtatacctattttagttattgataagtagaaaaatcagtaaaaatatagatttgaacaacatggtgaacaa

SEQ ID NO: 376837 - DNA, 532 bp, Homo sapiens
tgtaggacaatatgacattgcctaccgtatgtatattttgaatctgagaaaaagaagagaaagataatatagcagaaaaaaaatgtttgaagggatgatggctgaggatttccccaaaatagtgaaatatattaaaccacacatcaaagaggatcaaacaactctaagcaggawaaataccataacacccacatatcacatacaaactacttaaaaacaaatataatgaaaatcttgaagtccaatcagaaggtaatgacacatttcaggtacaggaacaaagacaaagctgagacagatttctaatcagaaattacaaacgtagatgatgatgaagtgtgacctaaagtactgagagaaacaataatacctatcaatccagacacagataatatcaaatcatccctgaccaaagtgaaataaaactaacaatcaataactggaggaactttggaagttataaaaatacatgaaaattaaactacgtgctcctgaccattcagttaaggaaggaattaagaaggaaattgta

SEQ ID NO: 376838 - DNA, 526 bp, Homo sapiens
atggcattatacatttgttcaaattcatagaatgcacactacgaagagtaaacttgacgtaaaatgtagagtctgggtgataatgatgtgccaatgtagactakcaccactgtgctacggagtgttgataatgagggaggctatacatgtgtggaatagaaagtatatagaaaatgcctctaccttcctgtcaatttcattgttaaccaaaactcttccaaaaaataaagtctattaaaaaataagtatgcaatatctgtgactcctttgcttataaccctcatggctcatcattttactaaaagtaacagcaaacctccttatgttgccttcaaggccctacttaatttgttcttcaactcatctcttcaaccttatattggtttactgcacccttttctcaccccactgtgccatatgaccttcttacttttcctcagacatgccaagcactattctttgcatttgttcttttctctgtctgaaatgctcttcctttttccctctctttcttctgctaaacagc

SEQ ID NO: 376839 - DNA, 572 bp, Homo sapiens
attattactattatggtatatttttgtctatcatctttttagtaatttctgtttaagtatttttccatcctctttttgggtctactttaaatgaaattgattattttttatttttcctttttaatcacattattatttataggtatttaaaaattgtgtaaccctaaggtttactctttttctctctatatatagtaatatatgtatataaaaatatgtatatatttgattaatcacagtcaccttcaaattataaattgcttcatgcataagctataaatctataaaagtatactcccaaattctttttttatctgttcttattttatattatattttactttatgtaataccttgctaatatatttactatagacyatcatttttcttctagataaattagcaacaaaaatgtcttccatactttaattttcgggtaatttttatttctttgcctggattcatgtttctgtctgacattatagttattctacgtaaaaaacttcctttaccttttcttgtaatctaggttttatttgtcaatatgttgttatttcaccatttttgaaaaa

SEQ ID NO: 376840 - DNA, 572 bp, Homo sapiens
attattactattatggtatatttttgtctatcatctttttagtaatttctgtttaagtatttttccatcctctttttgggtctactttaaatgaaattgattattttttatttttcctttttaatcacattattatttataggtatttaaaaattgtgtaaccctaaggtttactctttttctctctatatatagtaatatatgtatataaaaatatgtatatatttgattaatcacagtcaccttcaaattataaattgcttcatgcataagctataaatctataaaagtatactcccaaattctttttttatctgttcttattttatattatattttactttatgtaataccttgctaatatatttactatagactatcatttttcttctagataaattagcaacaaaaatgtcttccatactttaattttcgggtaatttttatttctttgcctggattcatgtttctgtctgacattatagttattctacrtaaaaaacttcctttaccttttcttgtaatctaggttttatttgtcaatatgttgttatttcaccatttttgaaaaa

SEQ ID NO: 376841 - DNA, 487 bp, Homo sapiens
cacatgtggtatcaataaggaaaagagactggataggtaaggtcagtgaggaggctgtttcaatggccttttagaaaggctattggaaactgaattgggacagtagtaatagaaattgtaaaaaaagaatagatgtaaaaggtactgtaactgtaaaagacaaactacttaaagtgtaaacagacacgttttctatatagagggagaayaaaaatattaatatttcaagctggttgagtggagaatgatggttccattacatgaaataagaagatccaaagaggaatgcatgtgtaacaaagttatttgtaattgtggacactgagtacaaagcactaataattaaccaattgatcactgaatgatgtgtacttgagtttttggagagactttaatgttggaaataatatctttggtcaaactataaaagaggatgaactaaccaaaaatatataggcaagagtgaggatatagccttagaataatg

SEQ ID NO: 376842 - DNA, 573 bp, Homo sapiens
ggtgtgcaaactgccttttcaaaagcactatttagtaacaaatccagtttacctggtttacctgcttcagcaaccacatttttaaatgtaaatacaattgcatgtacaattgttcaaggacttttgcaaaacatctgatgaaattaattctacttagaacttacttgctaaaatataatagcaattgagaatgatttagcatgccctatggatatgctacttatgaaaattattgatcaaagtatgtgcatttttatataatgatatgtattatacttatttatataattgtcttaaataatgggtagctatagataaaatgagattgaggatttgtttccaatttctcctccttttcaaattgatgaagacctttgtctcaaccacctarttgaaatgtccccatccagattctgtcctaggtttggctttcatcaacaattctatgtaattcgtttatccttttttggttatcactattcacacttcacagaccacttaatgatatgtcatcagttattatgactacagggtactccagttctttatgtaatggctcgaagcaaattatta

SEQ ID NO: 376843 - DNA, 573 bp, Homo sapiens
ggtgtgcaaactgccttttcaaaagcactatttagtaacaaatccagtttacctggtttacctgcttcagcaaccacatttttaaatgtaaatacaattgcatgtacaattgttcaaggacttttgcaaaacatctgatgaaattaattctacttagaacttacttgctaaaatataatagcaattgagaatgatttagcatgccctatggatatgctacttatgaaaattattgatcaaagtatgtgcatttttatataatgatatgtattatacttatttatataattgtcttaaataatgggtagctatagataaaatgagattgaggatttgtttccaatttctcctccttttcaaattgatgaagacctttgtctcaaccacctagttgaaatgtccccatccagattctgtcctargtttggctttcatcaacaattctatgtaattcgtttatccttttttggttatcactattcacacttcacagaccacttaatgatatgtcatcagttattatgactacagggtactccagttctttatgtaatggctcgaagcaaattatta

SEQ ID NO: 376844 - DNA, 544 bp, Homo sapiens
tatctcttagtctccatttggagaagcagtcaaaaaggcaagtgccttaggaactgaaacactcataagctgtcaacaggagttataaacccataaaagatgcgctttaaaaacagattgtaatatgcaagaaggcattcatgcagcaaggaatagtaaaattcggagccaggaaaaattgggtcctaccctcaactctgccactactgcagttaccttaaacaagtacatgttcttttctcagcctaaattttcttatctgccattttaggggaatggatatgattttgatacaatgttwtggtgtgacattttaagaatgagaaacctgaaaagtccttctatcctatcttcttcaaccatctgcttccaaaatccttcacagtttgaacattttaaagtacaaacagttgtgtgatgatgatgaaattcaactatgacagcttccacagggttatatttcatatttacttaaatgtaaaggtaactggtagaacatgatcacatacacaagcaggtttagaaataacctaagaagaattgt

SEQ ID NO: 376845 - DNA, 545 bp, Homo sapiens
ggaggtcatctgaccccgggcttacctcctttaggaagtttgaatactgatctttatgctaattataagtttgcttagacattctatttcttcatgactcagtcctggtaggttgtatgyttgtagaaatttatttatttttttctaggttatccagcttgtcagcatataattgttcataatagtctcttgtgttcccttaatttctgtggcataaattgtaatatctcctctttcatttatgattttatttattttagtcttcttttttgtattattaaggctagctaaatatttgtctatttggtttatttttttaaaacatcttttttttctagtgtttttcagtctcatgtatttctctattatttcccttgtttggctaactttcagcttagttttgtgttctttttctaattccttgagttataatattagattttcttttcagttgagatctttattcttttgtaatttgggcaatttatatttatactacaattatatttacatttatagttacattatattacatttatattaca

SEQ ID NO: 376846 - DNA, 468 bp, Homo sapiens
attcaacaactaacaaagactaagagaagaacgctttctgccttttcaatcttgctgatacaggagctagaaaggaattatttaggcagatagtttgagtaaaagactcctcagcaaggtttcccttttaacaaaaagcagccaccaaatcatttcttttctaaaaaagagcagcctgtaaaatcgagctgcagaagtagataagcaagttggaagcttgcatgggtgaatgccagcagctgtgccartaggaaaagtctacctggggggccagttatgttcaagatggaggctccattctttccttttcttggtcaccatgcgtgcaacaagggaagaggcaacatggtgcgggccaggtagagaacacatcagcataataaaagattagggtgggatggcatgctatgtaaatggcacacctggtccaaccaatcttttgggccctatgtaaatcagacaccacct

SEQ ID NO: 376847 - DNA, 495 bp, Homo sapiens
taaactgtgagaattgaactatgccccacccaagaagttttatgaggcagatgatagttcagctagtccttcgttcattctgctgggagattagcaaacttcaggtaactattacctcctcatcctgggccacggagagactaaaatagacaggagggtgagagctgacctgaaaaggacacrtgacaggagtgaaggaaacttctttgttagtgcaagccagtgagagtttagtgttgctataccactggcagcaaaatccaataaaatcagactaatatagaaactcatacattgaagtggaatgctgccacaaaaaagaaccaacattttgcagcatcagctcaggaggtggggtgtaggcaggcaagaaaacgtgatcaagtctgtgaagacagtatcttagtgaagggtttagtaaaactgacacaaaggataacctggatgccagaaaatgttcttaatgagcctttggttctaggtgaagaggtttag

SEQ ID NO: 376848 - DNA, 603 bp, Homo sapiens
tggtaattagtaaacctgctttgcatgagcatgggaatttgcagcattgtcatataatgttatttaatgtgaagttttcaacaaaaattaagaaatgcaaagaaacaaaaattatatggcctatagccaaggggaaaaatcaatagaaattgtccaagagcaaaccttaacattagacttaaaagacaaaaattttaaactagcagtttaaatatgttcaaagagctcaagaaaaccatgtataaagaactaatggaacgcatagaacaatgcctcaaataccagtatcaataaagtaagctcagaaaatttttagggctatgtaaatactcctaataatactagaatggtaatacctttgcccagacccataaaatgtacagtaccaagtgtaaaccccaatgtaaactatggattttggtgmtaataatgtgttgatgtatgtttatctttttttttttttttttttttttttgagacagaatcttgctctgtcacccaggctggagtgttacggtacgatcttggctcactgcaacctctgcctcccaggttcaagtaattctccctgcctcagcctcctgagtagctgagattacaggt

SEQ ID NO: 376849 - DNA, 611 bp, Homo sapiens
agtcccagtagctctgcttgatttctttttaagatgtttacctcttcctttatttctctgattgctttagaactttctttgtgttgattttcaaccttgtcttggatcttgttgagtttccctgaaatccatgctttgcattctccatctgttatctctctgcctccattttggctaagaaccatggcttcactgctagagtgaaactttggtagtgtcacaacattcagattcttatgatggcagaattctttgctggtttcttctcatctggagagggctgtgtcggatagggtcttttggctttccttctgtagtcctgtggacttctgtcagcaggttttgtattgagctgggtggtctaacctraagtccattaaattgtatttgtaggtaaatgccagctgccgcacaatcaggtgtgtatggacccaatctttgtttactgtgaggtggtctcttgtttccggtgaaggattggacaatggggtggctggtgctctgagcttcctattccttgaggccactttcacaggggacacagctggaccatgctggagccctcggcttgcccatagatatttcagtgctgagcacaggtactagccctg

SEQ ID NO: 376850 - DNA, 608 bp, Homo sapiens
agtcccagtagctctgcttgatttctttttaagatgtttacctcttcctttatttctctgattgctttagaactttctttgtgttgattttcaaccttgtcttggatcttgttgagtttccctgaaatccatgctttgcattctccatctgttatctctctgcctccattttggctaagaaccatggcttcactgctagagtgaaactttggtagtgtcacaacattcagattcttatgatggcagaattctttgctggtttcttctcatctggagagggctgtgtcggatagggtcttttggctttccttctgtagtcctgtggacttctgtcagcaggttttgtattgagctgggtggtctaacctaaagtccattaaattgtatttgtaggtaaatgccagctgccgcacaatcaggtgtgtatggacccaatctttgtttactgtgaggtggtctcttgtttcmggtgaaggattggacaatggggtggctggtgctctgagcttcctattccttgaggccactttcacaggggacacagctggaccatgctggagccctcggcttgcccatagatatttcagtgctgagcacaggtactagcc

SEQ ID NO: 376851 - DNA, 598 bp, Homo sapiens
ctgtgggactggtttaaaggcgtaacctcatcactcaacctgatacacaagtgtagacctccaattataaaaatcctaaaagaaaacctaggaagtaatattttagacrtaagtcttgtcaaagaatttatgactatgtccccaaaagcaattacaacaaaaccaaatattgacaagtgggacctcattaaactaaagagcttctgcacaacataagaagctacaaacaaagtggatagcctacagaatgggggaaaatattcacaaatgcatcagacaaaggtctaatatctagaatctatatgtaagttaaaaaattcaacaagcaaaaaacaaataaccaaattaaacaatgtgcaaaaggcatgaacagaaacttctcagaagaagacctacatgtggccaacaaatatatgaaaaaatgttcagcctcactaatcattagaccgatgcaaataaaaaccacccagagggagcatgtgacaccaatcagactggatatgattaaaaagtcaaaaaaaaaaaagaaaaaacagacaatggcaaggttatgaagaaaagggaacacttatacactgttggtgggaatataaattag

SEQ ID NO: 376852 - DNA, 642 bp, Homo sapiens
ccctccttagatgagatacatgtacccagaagtcaaagccctataatttataacacaagtattagttaatagcacattataaggaccttttcaaggggcttgagggcgtgatactggagtacatggcctgactagaaactgtaaaaagattctgtaagagcatggtgatgaatttttataactttgataaaccccagcaatagatcagagacttaatttaggatttaattttgagcacgtttgtcaaagatgttaaaaggcttacaacatttgatcaaaacagaaccatgggtcattgtaaaatagtagctactcatttaactgaagtgataaytaaaaatccttaaaggcaacacagaaaattatatctatgtaaaaaccttaagcctcttaaatctcagttttttaaagcaattaaaactctaataaagacagtataggacctatcctgataaagtataaattttgtttcataacaagttaccaaggaaacaaaaaaataaaaaaaaatcgttttgcagtgtgactgcctctccttatggaaaatccatttagataaccaggaagtcaaacgtgatttaaaaagtggttgaatttaattggacacaggaagagtacgtttaaggttatgagtgaacctta

SEQ ID NO: 376853 - DNA, 464 bp, Homo sapiens
aatagtttgcttctgaaaaaagatacatattttacatattatgtagtatattataaggtacttactaagaagtcagaactaagattgtaaggactttatagaaatttactaacttaagcctcataatcagcctacatrttaaaaactatcaatttgttttcttttcatatgcatgaaattaaaacccagaaatgtttcttactttcctttggggccacagattattaatagtgtctccaaaactaatagctggtggtctttaatccagtactgtcagtgaattattagagtcatcttaaaagacctgctaccccacttataaaagatgctttgtcatatggtatttcaagtatagattttaatttaaatattgtcatctcaacctaagcagtttgtcaattatggttcaactgtcaaccatctgtattgacctcaaaaatgtcacgtttataattaatagtcac

SEQ ID NO: 376854 - DNA, 469 bp, Homo sapiens
tggggttccacagccttgggcagctccccctgtggctttgcagggtatagcgccctttctggttgctttcatgaaatggcattgagtgcctgcgggcttttccaggcacatggtgtaagctgtcagtggagctaccattctggggtctgaaggatggtgaccctcttcttacagctccactataaagtgcccttgtgaagactctgtgtgggggctccaaccccacatttcccttccatactaccctagcagaggttttccatgagtgccccatccctgcagcaaacttctgcctggacatccaggtatttccatacatcctctgcaacctaggcagaggttcctaaacctcaattcttgtcttctttgcacccacaggrccaacaccatatgggagctgccgaggcttggggcttacaccctgtgaagcaatggcccaagcctggatattgaccccttttaccatggc

SEQ ID NO: 376855 - DNA, 597 bp, Homo sapiens
tcatagttcagcatggatggggaggcctcaggaaccttacactcatggcagaagtgaaagcaaacacgcccttctttgcatggtggcaggagagagaatgagaaccaattgaagggggaagcccttcataaaatcatcagatctcaggagaactcactcactatcatgggaatagcatgggggaaaccacccccaagattcaattaccccccaccaggctcctcccacagcacgtggggattatgggaactataatttacaatgtaatttagaggtcgggcatggtggctcaygcctgtaatcccagcactttgggagactgaggagggtggatcatgaggtcacatgttcgagaccagcctggtcaacatggtgaaaccctgtctctactaagaatacaaaaattagctgggcatgatggcatgtgcctgtaatctcacctactcgggaggctgaggcagaattgcttgaacccaggaggcagaggttgtagtgagccaagactgtaccactgcattccagcctgggtgacagagtaagactccatcttgaaaaaataaaaataaaaaatgaaataaaatgtaatttaggtgagga

SEQ ID NO: 376856 - DNA, 601 bp, Homo sapiens
aacttttaaataaggcttaattgtacttttctttatcaaagactagagaaatattcatttacaragaaaaagatatttttgttctcttttagattcagagcttaggcataaagcctgctcagcctctgaaaatagctgcccaccttccactgttttgagtgtgattgaatacacactcttttcctttaatattcagaaaatgttttctattgcagaaaatgtaattaacattaaattgtagacagcttattataggaaaagacaccaagtataccttactcaaaactcatatttacagatgagaattagattgagtaattgtagcgtctcctaaataataatgatgatcatgataatgacattatcaacagccaatttactttctggatcctaacaatcttctggccaatctgataaacactttttgcatgtattcaactaatttaatccccataggtcttttgcatatcagtttgttactcccatgttagagggaggaaactgatttttatcaaggttaagtaatttttctagatcccacagtaggctagctaaagtctaaaatcatggtccaggtatttgaggaaattcaataaaattt

SEQ ID NO: 376857 - DNA, 539 bp, Homo sapiens
gattttcctgaatccagaaggcaagaaacagcagctgcagtattcattagtgctttaggcagagttggtattatgtgaagttggaagagcaatgagtggaagtaaatccagttttcctagtggggcttatggtaactgaaatagaaatcagctcaattccagataggacatgctaatgaatctgatttctaaagctcatgctgataataaatcattattttatagagatcattkcaatttacctattgttttcttatttttacctccatttagttaaaacagccaaggactcaagaaacaacgattttcataattaaccagataatttaagctagtattcctgttttgtaattaggtagacactcatcataattttcttgatgcttttacctaatacctgaatatacttaagcttacaaattagcagctttcaaggtgcttagcatatttttcatgtaacatttgatatttttaaagcatttctaataaaaaactttgaaaactgtctttgaaatgttagcacaagtattatgtatcca

SEQ ID NO: 376858 - DNA, 547 bp, Homo sapiens
tattgatatactgatttaatatagcaacatcctttattgagatatatctctgtaatgccattgggagcaatgaaccagctaagacacttgcaatattaaaatcaattaaaatttaaaaaatgttaaattgcattgttacgatggaatcaatttgaaaaactggctattgagcaattaaggaagaaaaaatacactgggatttcatgtttctcttgcctttttagcccagaatatggtttttgtgtaagtactacaaatgtcttctattaaaggctgaagtaaacttttctccaaaagtgatggcttaaccttccatacctatgtttaattatactttttaagamtttcaaattttaaattgtctaagcccctgttgctaattttatatcttagagaggcacattgacatttgagggcactagggtgcaatgtaatgcattagtacaagaggaaaggacagatgctatgctctaaattattgataaagattttaaaggtgaaagagatgcagcataatgggaagaactcctatttccttctcttttcc

SEQ ID NO: 376859 - DNA, 547 bp, Homo sapiens
tattgatatactgatttaatatagcaacatcctttattgagatatatctctgtaatgccattgggagcaatgaaccagctaagacacttgcaatattaaaatcaattaaaatttaaaaaatgttaaattgcattgttacgatggaatcaatttgaaaaactggctattgagcaattaaggaagaaaaaatacactgggatttcatgtttctcttgcctttttagcccagaatatggtttttgtgtaagtactacaaatgtcttctattaaaggctgaagtaaacttttctccaaaagtgatggcttaaccttccatacctatgtttaattatactttttaagaatttcaaattttaaattgtctaagcccctgttgctaattttatatcttagagaggcacattgacatttgagggcactagggtrcaatgtaatgcattagtacaagaggaaaggacagatgctatgctctaaattattgataaagattttaaaggtgaaagagatgcagcataatgggaagaactcctatttccttctcttttcc

SEQ ID NO: 376860 - DNA, 596 bp, Homo sapiens
aacttagcagacatgtttaaatcttacactcttacatactttttccasaaattaaaaggataatattgtttgtgttagcttacatgggatacacataaaattagatattaggttattagtgacaattaattgaattgtttaaaataaagaaacttctgatccataaatattcccattagattgctgaattttgatgtctaccctttatgaagtaaatgtatatattacccatttcctgcaggtgctctatcataattacttgcaaaatcagtttctattcattgaatttttaattccaagtcttcaaaaatgttgcaaagataactcaattattgagacatttgttccatggaatcaaacaactcagaacctacattttaagtgcttaaaatctgaatggatacagacaactgtacatataaattgatatctagtagagcgtgttagaaagagtaaataagaaatatatctaactagaaatagtttttatataagaggatactgttcaaattcatagagcttgggtgaaaagtaaacagcaagacagacattactgattgagtattttgagctaagtcacagagactataaaacat

SEQ ID NO: 376861 - DNA, 497 bp, Homo sapiens
cctgtattatacttgtaatggtataacataattaaaagtaggccttcttcaggtaaaaatctatatttcaacccctagaagttccactaaaaaaaaaaaaagaaacaatgtataactataataactatatataatagtagatggtgaaaataaaaatattctaataatacaaaagacaaagaaaagagcaaaacaaatgtaataaatagaacacraatatccatgctgagaatttcccaaagcttactagtaatttgaaaaataaatgtcctaacactgagttaaaaaacagattttcagatcggatgtaaaagcatccctcaactgtatatatgttaactaatttgatgtagtaattattttacaatgtataagtgcatcagatcattatattgtacatcttaaatatatgcaatttttatgtgttcattatatctcaataaagctggaaaaataaattttaaaactttaaaacaaaaatacatacagaggtacaa

SEQ ID NO: 376862 - DNA, 497 bp, Homo sapiens
cctgtattatacttgtaatggtataacataattaaaagtaggccttcttcaggtaaaaatctatatttcaacccctagaagttccactaaaaaaaaaaaaagaaacaatgtataactataataactatatataatagtagatggtgaaaataaaaatattctaataatacaaaagacaaagaaaagagcaaaacaaatgtaataaatagaacacgaatatccatgctgagaatttcccaaagcttactagtaatttraaaaataaatgtcctaacactgagttaaaaaacagattttcagatcggatgtaaaagcatccctcaactgtatatatgttaactaatttgatgtagtaattattttacaatgtataagtgcatcagatcattatattgtacatcttaaatatatgcaatttttatgtgttcattatatctcaataaagctggaaaaataaattttaaaactttaaaacaaaaatacatacagaggtacaa

SEQ ID NO: 376863 - DNA, 587 bp, Homo sapiens
tactttgtaaattgaaaaataaacgaagaactttattaatgtaatttagggtagctgagtagttttcaaagaggattcaatatttacatataaatattttacaatttcaaagcaaattttaatactatttttttaaacaacttatgcttttacaaactctgtgctaatatgcaatggaatgattgaggcataattgcttctctttcctatagccgtcttgtattagttcattttcacattgctgataaacatacctgagactgggtaatttataaaggaattatttttaatggagtcacagtttcatttggctggggaggcctcactatcatggcaggcaatgaaggaagagcaaaggcacattttacatggcagctggcaaagaaagaatgagaaccaagtgaaggaagttttcacttataaaatgatcagatctcataagacatattcactaycatgagaggattatgggggaaacatcccatgccccatgattcagttatctcatactgggtccctcccacaacagatgggcattatgggagctaaaattcaagatgagatttgggtggggacacagccaaatc

SEQ ID NO: 376864 - DNA, 634 bp, Homo sapiens
tacatagtaggcttaattacaagcaataattgggagtttataattataaaattactttttttgttgtcgttaatctgcatgacctcacctcactgtgccacatgtaggcaatgtttaagattctaactttggggctcatcactaatccaggcgaagcaagcttttaggccagaattacagaagctagatggattccacagatctcaatcatgtttctccaaaagactctctgaaaactgacatttaaaactagaaagtgaaagagcaccagtattatgctgcacgtttacacaagcaaataatgatcatttcacataaatgacagagcacacatggagagaagtttaactagtcctggcggtgaawttattctcttctctgctttctgttaagagtgaacagtttgatgataatttatcccttcacaatagggatttcttcccctggctattctgagttcatagaagaaatgcctgctgctacttatcactgccaaatttaatgtaacaagcagtgagcaaaacacagttagttcttacctgaagggaacttagattctcatgaggaatagaagagagtaacaaatatgcgacaaggtgagctaatatttactgaggatttacaatgtgcctga

SEQ ID NO: 376865 - DNA, 577 bp, Homo sapiens
ttttgttttggttgcaattgcttttgaagacgtagacatacattattttccaaggccaatggccagaatagtgtttcctaggatttccactaggattattacagtttgaggtgttatatttaaatctctagtccatcttgagttaaattttgtatacggtgaaatgtaggagtccagtttcactctttgcatatagctagttaactatcccagcaccattaattaaggacttctttcctgattgcttatttttgtcaactgtattgaaaatcagacacctgtaggtgtgtggctttatttctggttttctactttgttccattggtttatgtttctagctttttttgtttgtttgtttgttttaaccagtgttatgttgttttgactactatagccgaatagtgtagtttraagtcaggtaatgtgatgcttctggctttgttctttttgctgaagattgctttgacaatttgggctcctttttgcttccatataaatgtttgcatagctttttgtagttctgtgaagaaaatgacattgttgcatgatagaaagagcattgaatctatagcttgct

SEQ ID NO: 376866 - DNA, 545 bp, Homo sapiens
tgaatctggttgctcccattttgcatgcatgtatatttaggatagttaattcttcttgttgatttgaacccgttgacattatgtaatgcccatcttcatgcctttttatgttcttggtttagtcttttttatctgatacaagagtagtaatatcttatcattcttatttgctcttttttgctttccatttgcatggtggatttttattcaaccctatactttgagcctattgggcatctttacatttgaagtaggtctcttgaagacagcagacagatggcttttattttttatccaacttgccattctgtcccttctaagtggggcatttaggctggcttacattcaaggttaatattgagatttgaagttttgwtcctattgtgaggttgttaggctggtggctttatagggtctgagggctatgtacttaagcatgtttttgtggtaggaggtattgttcttttgtttacacgtttaaaacccttagggatctattgtaaagcttgtcttatggtaaccaacataagacaagttctgttagt

SEQ ID NO: 376867 - DNA, 359 bp, Homo sapiens
gaaattaaaagtagcaactaaaacttgaggttaattaatattttaatgattagttttaaataattccgagggaggaggccagcaggacttgttttccggttctgtctccatgattgaagcaggagctggtggaaataggatgcagtgaagaaaccacaccagtaggtggtgacaaaagcaacctcaatttgccctcactgctcattagmataaaggtacagtgccgtggccacttgccttatactgcacagaagttatcttatatggttatggaatttcccgccccttttccagaaagttctgaataatgcctctcaatgagcatataattaaaagcagatataaatacagctgccaac

SEQ ID NO: 376868 - DNA, 582 bp, Homo sapiens
tattaaataatgatatattaattttgttccattttatcaacagctatggttaattaaattctgatttgatacaatattgacttgtagttctatcatatgtgggtaaattattggaaaaagagtgatgctttaggatttaaaatgtatagagatattgaaatgaatatgacatggggaggggtggaaaaaaatgaatgaatgcaagcttccatacctggaaatataatatgtcagactagatacccgaaattgccctctctttcaaaggaaaaaaacctgaaattaataaaaactattytatttaagtgcacggtattatgcagatatcatataagtgatagattaaataaaaaataaatttttatagtgaaatttcaaaaaatataagcaaagaataaaaaatggccaatatattcctgagatgaaaaaaaggaagggagaagagatttcctaacaaatctgaagaatctctttgaagctgtatcaattaagagagagagatagtaaaactgaaaaagaataaagggctgagaaagatgattatgaatagatggtaatgtgatttttgataaaaattaaatt

SEQ ID NO: 376869 - DNA, 582 bp, Homo sapiens
tattaaataatgatatattaattttgttccattttatcaacagctatggttaattaaattctgatttgatacaatattgacttgtagttctatcatatgtgggtaaattattggaaaaagagtgatgctttaggatttaaaatgtatagagatattgaaatgaatatgacatggggaggggtggaaaaaaatgaatgaatgcaagcttccatacctggaaatataatatgtcagactagatacccgaaattgccctctctttcaaaggaaaaaaacctgaaattaataaaaactattctatttaagtgcacggtattatgcagatatcatataagtgatagattaaataaaaaataaatttttatagtgaaatttcaaaaaatataagcaaagaataaaaaatggccaatatattcctgagatgaaaaaaaggaagggagaagagatttcctaacaaatctgaagaatctctttgaagctgtatcaattaagagagagagatagtaaaactgaaaragaataaagggctgagaaagatgattatgaatagatggtaatgtgatttttgataaaaattaaatt

SEQ ID NO: 376870 - DNA, 607 bp, Homo sapiens
tttttgttttttgtttttaaagaatgtggagaaatgccaagtactgctgcaaggatagactgctacaactgatgctcactgggcatctgacttttggtatcatacccttctcagaaatatgctgaaaatatatgagaaaaggcataactcctgctgtcaaggaacttaaaatgtagttgaaatgttgaataaaacttataatatgcatttaatattttagctggctagattggtgttatgtaagtaaagaatgtagwtagatctgttagggcccttacagggatttaaagacattttaatgatatgtaaataatattaatgccagtttttacaaaaaaagtataaaaagatacagaactatttataaaatatataaaaatagtttctatctcttttttatgttactaaatatggattccactttgatttggggccacaagaatcattttgctaatatcacaagctaggactgctgcatgaggcaaaaatacctacaatttagcatatgaataagaaatcttaatttatgtccaattctagttctcttttaattaaatagattaattctgttctcagaatcaatgttagaaattgtgtgaacacaaga

SEQ ID NO: 376871 - DNA, 604 bp, Homo sapiens
caggcatgtgttaaaaatgtgtgcattggtagggaagaggataagaaggggacrtgccaaatatttgcacttctctgcaggaaattctctaacagtactatcaaatagtattttgcttctcatttaccttcctagtagtcatagaaattagaaaagaccatccttttctggatacactgcatcccagttaaaaaaaagtcctattacaaagaataaggttttttttaagtcatccaaaaaaattgagtaaccatcatttcaaatacactctaatatgactgaaagttgccaaatttattttcatatggacctttgagttttgcccgctgccatggtacatctcataccaaagcattgcccatgcttcttttaggtaccggctttgatacaatgatccatatccgcttgtctcctaacaccctgctattcattcattcattcattcaacatttactgtgattcaactatgtgtcaggttccaagctgaataaaatacagtctctattactacaaggagctcaaagtctactaggggaaacagacatacagacatacccagaacacacacttgtgcaaagataaacacatgaaaaaattgtttaca

SEQ ID NO: 376872 - DNA, 564 bp, Homo sapiens
cctcacaccctttttaatctccttttagtttctgtaacacactgcatcttccttaccttgagccctctatgctttccattctctctctgcctgggacattattcatctggattcatctggattctcctccatggcagaataattctttctctaactttcactttgaacctcatccctgtagacagatccctccgcaccctatacaaatcaccctcaagtcgtgcctcctgcactcacatccattcagtttgctccgtcatcatctcattaccagttatccatttaacatctgtctttcccccactagggtataagctccatgagagtggagactatgactacttcatctactttcaatagtatctggcacatagtgcttaagaaatatttatcaggaagaatattatgaatgcatgcctctcactggtctatatttgaaggtgacatttcaacagatgttctgaataaagtcactcccracacttaatgtgaagaattctgactatacctgacctatctagaactccaataaatgttttgtggataaactttggaaatgtcatc

SEQ ID NO: 376873 - DNA, 620 bp, Homo sapiens
cgacacttaatgtgaagaattctgactatacctgacctatctagaactccaayaaatgttttgtggataaactttggaaatgtcatctgagtctcagattactaaatgaaaaagatttcttatataaaataatatgcccttcaatttattttagttaacttaatgttcaaagattttattctttaacatcaatgttattaatataaaatcagtttccatctatttcaagtaccacacatagccatatttctgaatgacctaagttacagcaacaaagtaaattacttttatttttgatgttttcataattaaatgactcataaaagtggttaaattgtaagataaatggactataaccaccctcagccactttctaggtacatggcaaatatcttagactttctgtaatagtcttcatctattaaatccagaggttaggttaaatggatgttacatcctctatgagttcccctggcctcaggacctttcaatacagaaatactgtctagacatctgctgaattgttgccaatttattcagttcttccacttccaaaaaagtaaatttaaaaatgggccaccagagtacatttaaattttaatgagagttatactcctttg

SEQ ID NO: 376874 - DNA, 580 bp, Homo sapiens
ctgacgctttatttaaacacacattaaggatggccatttcttcttggagaattcacccctttatcatcatgtcatatgactttttacctattttaacttttatatttgcttggaattctgcttggtctgaaattaatatacatatgctgattttccaaaattagtgttagcatgatatatctttcctcatccatttgtttttaatctctatgcatctttatattttaagtggattttttatagacaatatatagtttggtcttattttttatctattctgacaatttttgtcttttcattggaacatctagaccattgacattcaaagtgattactcatatagctgaattatttgttactgttttattttttgcctttgttctttgtttctattttgtcttcgtttttttttaacgtttgtgattttaattaagtagtttgtataattgtattttctctcatttcttagcatacaaagtatccttttttatacattttttggtagattgctacagtttgcaatatagattcrctactaatccaagcccccttttacataacactatactgaccaatagat

SEQ ID NO: 376875 - DNA, 574 bp, Homo sapiens
ataaatgatagagtgacaaaaatagctttattgctaatgcactttgttcttccatctattattcatcagcaaacaatagttggacacctatttgaaaaggtctcctgccaaatgctaaaaagatacaatgagacatggtttgtctacaaactgctgaatatcctggaggtcagagatagctacatgttcaaagtattaggcttctctagaactgctaccctcttggacagctggtttttgaggacatgctcttcatagtgaaataaagccaaagttttttcttttctattgattagaaaacatgaatgtgtaatacaactcttccattattgggcaggtttaattatataatgtcatatatatgaaaatatttgtatagagccaaatacaggaattagaattactgggttaaaaggcactttgaatttgyacatctaagagagttagtcaaattttcctttttgataattttataaatttatattcccaatggcaaatattgccacacaaccttaataacatggtgttactggacttacatattttggtcatgtggattgataaaaaataaata

SEQ ID NO: 376876 - DNA, 460 bp, Homo sapiens
attctgtcaccaatactttatttatacaacatcactctaataaccctaggtattttctttctcagcttctctctctatatattgatctctcttttcagctctctcttaatatacaccttgactcatgttatttatacacacacacacacacacacacacacacacacaccattaatcatacattctcttaaactcttgctaccaaaactcatttcgatccataataatcctctttctmatttctcctcttcagttaagtaaataagcttgtcgttctcttatctatagatgtctctatgtgatttggctcctataccctatcatctttttaaaaacttggtaatatcaattatgcttgctttcttaatatttaacatttcttaaaaaacatattaaaattaccataaaaacatcatgctctctgatattaaattttaaaaagtctaaacttccctggacc

SEQ ID NO: 376877 - DNA, 575 bp, Homo sapiens
caacttttaaacttataccagatatgttgtgtttttttttttcctgtcagtattgaacrgtcatttccaattcaattttgtttatgtaagtcatgaccctgattgaattcaattgtattaaatggaattttgaaagattgtccttttctcagtgtgccttcttgaggtctttgttgaaaatcacttggctgtaaatacatagatttatttctcagttgtctattctgttacgttagtctatatgcctgtttttatgcaagtaacatcctgttttggttgctatagttttgtagaatattttagagtgaggtagtgtgatacctccaggtttgctattattgcacaagatttttttttaactatccattttctttttcctttccatatacattttagaatttttttctatctctgaaaaatgtaattggcattttgatggaaattgcattgcatctgtagattgttttgagtaatacagacattttcatattaatttttctaatttgtgaacaggttatctcttttcatttatttgtgtcctcttcaatttccttcattattactttatagttttc

SEQ ID NO: 376878 - DNA, 517 bp, Homo sapiens
attgtcaaaactacagaaaagtaagaatatatttagtttcacatttcacaaatagctattattatttttccaactgtgtgtatgtgttttgcgggctggggtaaggtggctatgtctgtgtatgtgaagagaaagttgagtttacttgaacagtgcttaactgtactcgcctctacgttttattgggggagatgkattgacaaatgcttcagacaattattgaagaataaaagtagattttctacacggatattagtttggcattgcagtgggcaaaaaggtgttcagtaagtcaatcaatggaagtgggaaaagtaattctaacttgtgaggaattcagatgaagctaaatgacagtgagaatccaaatgaatggaaggaatgaagtgaaggaataaaaggcagtatacaattatcaaagccataaattttctaagcttaaaaatagaaacattaaaatatttcatctatccctgtcagaccatcaagattcgttcctctaggccatataagaatt

SEQ ID NO: 376879 - DNA, 631 bp, Homo sapiens
tcattttgttgtttctcaatcatatttcatagttttactccaattatcaagttttaagtcattttctatcatttctcacttaaatattctgaaattggtatttagttgcaatttctgttgccagtcttgtactctgagtccctcattgctgcctattactggttgattaaaggacacatttaaccacattattctctcataaactacacccattgcctttaagccttcttttcctgcctttctagactcctctccattcattcctcatgtaccctgaactgtagttatcttcaatgactatagttcttggtatatgccacgtgttcccatccatatgtgcctttgcttaagctctgccttctccaccctcctttcccagccttcatatcattgcattcgctgcttgaatatatttttatttttccttaagagtcttctcaaatatcatcttttctgttaycagtttcctgatcttccaaggacatgttatatcctttcctatgtaggaacgctcactgaatacttatattgtctggattgacacttggtaatttagcatctgaaggatttcctcttttaatgtgtttcaccattgcaagagacgagccaggaatttatttccccgactctc

SEQ ID NO: 376880 - DNA, 629 bp, Homo sapiens
ttgactgagacaatgaggaaatagtattttttataccctaatctcaaagaagcaagtgtgtactctggatgggaagagcacgattaggttatttctaatgtataagcctagggtgggttctggagaacagaaaattattatggcatcagtagagacaaaacagttggccatagactggtagagcctataggcattggaataatagtatcagttattgaaaacactgattttaacatggcaagaatggaaagcgaaatgctagcccagagcgacagagcaaaaaatacaattccctaagtgatttctacagacataatgatgtcagttctctatccctcctcaacttccagttccagcaaggataattcattgcaaccacctccctctaacactgtcttttgacgtgcaaagcccaccctgcatcttctgtgaattaaggacagtcaagaattcaccagaagctctatgtcaataagaatatctttttatagtttttcagggattttggagcaatgtgttcaacagtcagtatagatttttttttcttctcaatatgagatagattaawgaaaaaggagtatacacattatgcagtcaaaaatgtttaattttctatggattagctgaag

SEQ ID NO: 376881 - DNA, 543 bp, Homo sapiens
atctgcataaaaattattggtttgcctaagtatttaataggtttgacaccttgttttcatgttataaaaaccttttagactatgtttcaatagatatctttattaataaaagaaaatataaagaaggttcatttcaattctaggaatacatcgtcacacctgtcaaataaaaatgggaaaacaagaagctttttattaaaatgaaattactgacatcagatagacatctctgcacatgttattctcattcttacaccgcctgttgagaaaaaagaaactcaagagagtccctcatggcttcagagaatggaattgagatcagagtaatgagatactggttaaaggaaactgtgttaaacaagcayttaattagctttggatgatgtcagctttctgactgtggtgaattcgaatgtgttttttgtttcattttcttgttttgttttggtttgtttctcttagaccgattttcttccagcaaaaaggaaacaatatcattgataatgccatccacatttgactctataagcttccgggtcgctg

SEQ ID NO: 376882 - DNA, 573 bp, Homo sapiens
aaccttattatgagccagacgctgaggaagagattccaggaggatcctgaggacccgctggttgcagccatgtcaaggctgacactgaggaggacccccaactgtcacaagcaacacccgtcaaacacagccacccacctggggagagatcaagaagctgtcacagatggyggaagaaaacctgatgaaagcgagacagccagtcacaatgaataatttaatggtagctatgatagcagtgatcaccattgccatgagtattccttcaataagggctgacacatggaacaattatacttattaggcatattttcaatcttggctggcaataatgcctagatgtaatcactctatgatgcagttacatatgctttctgatctcagtatttaccataataaatctgctcctataattgaggcataccaccctcaaaaacctatttgtaaacaaaattaaacctggccagaaaatatgaatgtacttatttaggaagattgcattgcagaacaggtagaggtgctgcacaatgattcctatggaatcattattaattggtcccctaaggggatgtt

SEQ ID NO: 376883 - DNA, 617 bp, Homo sapiens
catatgctttctgatctcagtatttaccataataaatctgctcctataattgaggcataccaccctcaaaaacctakttgtaaacaaaattaaacctggccagaaaatatgaatgtacttatttaggaagattgcattgcagaacaggtagaggtgctgcacaatgattcctatggaatcattattaattggtcccctaaggggatgtttagcttgaattgtacctctcagtatgcatgccacggccacactatgttcagctgatgtgaacaaaatggtcagatggtagaaatgataagaagtacagcaagagttcctattatctggaaccatggcggtatagtggtacctcaacctcaaatgatatagcccgctgtaggagctaaacattaaggatttgtggaaactattaatagctcttaataagataaaaattttggaagaataaaaaagcatctggaaggacaatctacaaacttgtctttggatattgcaaaattaaaagaacaaatatttaaagcatcccaggcacacttgaccttaatgccaggaactggagtgcttaaaggagcagcagacagattagcagctagtaatccattaaaatggataaaaac

SEQ ID NO: 376884 - DNA, 609 bp, Homo sapiens
gcaatcatgaaacagaagaaaatatttgcaaaccatatatcagataaagagttaatatctattatatataagaaacacccacaaatcaataacaaaaaaactcaaaaattactagacatttacttaaagaagataaacagtcaacaggcacataaaaagatgtgcaaaatcactaatcattataaaaatgcaaatcaaaaccaccaggagatactacctcacrttattaggatgccccctatcataaaaagggaaaaaaataaatgtggcaaagatatggagatattggaccccttgttcactgttgatgtgattgtaaaatggtgtagccacaatgcaaaaagagtatggagattccttaggagattaccatattaagagaactaccatattattcagccatcctatttctgggtatacctccaaaataatcaaatacagaatctctaagaaatatttgcatggccacattcattgcagtgttattcataatagccaaggtttagaaacaaaccaaatgtccatctaagaataaataaatgaagaaaatgtggtatatacattcaatggaatattacttagccttaaaaaaatgaaatggtgataaat

SEQ ID NO: 376885 - DNA, 593 bp, Homo sapiens
agtgattgattgaagagaaaggatgactttgcagaagatttaacatagcagttctaagactgcaatccttagaaaggcctgcctggaagttttggtccatggctggcatttggaaatgtgactgctaatcagttctctatactacgatgactttttacataaatgataagtactagaccagatcgggcacgttcagggtggtatggccgtagctggcccaccttggtcatatgccctagagccaggggataggatcagcacctctagaaccaaatgaagtgagaaacttagaagagtgtttcccaaaaggaaaataaagaaagagaaaatgataagtaccggtagcttattgtgcctaaaactgtttgtgtaaacagtatggtttatgctgaacacctgctttccttctggatatctggaatttaggtgttagttagagactgcctgtgtccccarcctacaatgaaaaccttacatactgaatctttcctcgtagtgaacactcatgtgttgtcacagttcattgcaggaagaagtaagtatgtcctgtgtgactctactaggagacaactcttgaaaatttgcacctggtt

SEQ ID NO: 376886 - DNA, 616 bp, Homo sapiens
acctgaaactggagaaataccatcatctatttcttcttgcctcccatgtcactcccattgtgacagctatctcaaaaattagatcaatgtgcaaagatattttcaccaacctcaggtcacaataacatcttttctaaaggaagagcaacagtagccaaattggaaagaactagaatcccagactgcacctgaaatactcagcwtttgctttaacaagggatgtccataactgaactccatacttttctggaggttcccattatttccttgtgacaataaacaggaagcttgaggttgtttgaaggaaatgtcttccaattctcaatcctcaaggtctaacccaatgtttccatgggacatggaagtaaagcatgtattttgccgctgatgtttctccagttgtcaaaatctcataagtgagcgcatttgactttaacagctcatgtgagtttcaggagtgccagtgggcagcagcggtcaggacagaaaagctcgtggaacattacgaatcatacaatctctcagtgggaattttagagggttggtgtatttcttaagtctgattttctattgaacaaaggatattacaaaatctgtgcttcctggagcagatttt

SEQ ID NO: 376887 - DNA, 512 bp, Homo sapiens
ctttcaatatcacttctctatcttgaccctttttctttgcccacagcaatactgtggattcttttacttcacaggcggaaaatgggtacagacagatcaattaaacttccctcgaagttgcagctaatctgtgactacatcagaaccaggaatcaggtctccctctccaggcacaaacacagcattygtctatgacctctctgcttctgaactatgctttctatcgtgaaattttatttccgaaactccaaggagatttccagatttaataattatgtgaaacacagatattattaacaatagagtaagactggcaaatgtgcaccaacttaaaacaaacttatgggtgctaggatgaaatgaatttgaaaaatagaaaagaattgattacttacatgcacaagaatgctgaccttacaaaggaggagccactgaaagtactcctaaagtgttctgtaccctgttacataattatatgttttatataattacatacacatatataaatacta

SEQ ID NO: 376888 - DNA, 512 bp, Homo sapiens
ctttcaatatcacttctctatcttgaccctttttctttgcccacagcaatactgtggattcttttacttcacaggcggaaaatgggtacagacagatcaattaaacttccctcgaagttgcagctaatctgtgactacatcagaaccaggaatcaggtctccctctccaggcacaaacacagcattcstctatgacctctctgcttctgaactatgctttctatcgtgaaattttatttccgaaactccaaggagatttccagatttaataattatgtgaaacacagatattattaacaatagagtaagactggcaaatgtgcaccaacttaaaacaaacttatgggtgctaggatgaaatgaatttgaaaaatagaaaagaattgattacttacatgcacaagaatgctgaccttacaaaggaggagccactgaaagtactcctaaagtgttctgtaccctgttacataattatatgttttatataattacatacacatatataaatacta

SEQ ID NO: 376889 - DNA, 617 bp, Homo sapiens
aactggtagaataaagtcacttgtaacatacaagatcaggtattgaaaaattgtattggactttgatattttgagcaggaatttccagtcctttcctgaatgctttttctttaaagtagaagcaaaccacgttcatcaaaaccagatgctaatgtttctctgttcagtttcagttatcaatatcaagtttgaaagatcaaaacatttttgtaaaaaattgactatgcttgtgatcaactcacattcaccaggatgacataagacaaggtccataagtacctttgaaatgaataaaacaagatcatttagaccacatttttctcttgaatttttctaagcaaaaattactttttcaagaagttttamatatatgtgcatcatacaaacttcctgatttagtccctttgaagagctactgacactgcatggatcagccctttaaactctggttggctctgttgaccacagcatgtccatatgatggagatgtgcagtcagcagtcaagagcaccaattgccattcccacagtgctgactggatggggcagagcaaaagttgcagcccccagttagggccaatgtgttggtagcaatggaaccatattgtatccttataa

SEQ ID NO: 376890 - DNA, 522 bp, Homo sapiens
cctgttcaataatcatagagcatacatacacaaatctatatggtataacctactatacacctaggctacattgtacagactattggtcccaggctacaaacctgtacagtatgttactgtactgaatactgtaggcatttgtagcataatggtaataatttctgtatctaaaacatctaaacatagaaaaaataataggttgggctatgatgttatggcagctacaatgtcactaggcaataggaatttttcagcttcattataatcttacgggaccactgccatcatatgtgcagtccaycattaaccaaaatgtagttatgtggtacatgactatatttggtcaaacattggtgtgtctgtgagggtgcttgtggatgagattaacatctgaataactcaatagataaagctgattgccctccctaatgggggtgggcatcatcccatcaactgaaggccaaaagtctaagtaactggaaactcctactgcttatctgccttcaagctgagaccttgtgt

SEQ ID NO: 376891 - DNA, 607 bp, Homo sapiens
aaaatgttgagaaccagaccaatagttataaactctttcaacttctaaagaattaaaatgattttcctgcttatggctttaattttggaaaggcaaaattgtacgttttgctctaacacgtctaatgttgttttgccaaatcagacatctttcttcatgggataagattataatgtcattgcaaagtagttctcttgaaaccttctaaaacagattatgttctttaaaaacttgattcttgactttgcatgttttagcactgcattccattaaacctgtgtttgaagttactaggatttgctaaaatatttgataatgcctaagcagataagagattatatgctttatgtatatagtgggaggatttgttccagcttggatacagggtattaattggccacctacagtgagcagtgtttaatattttgcccgtaccccscttgcctcacttctttcttactgcttttcaggcagaagatcatgtaagtattcactgaactaaatttgctaactttctggaacacatttaaacaatgtgtgctacttgtgtcatattacattaacatcacttctaatgacaagttgtatatatctgtaataaatagcc

SEQ ID NO: 376892 - DNA, 499 bp, Homo sapiens
gtgtttgatactatgttgtccaccatatcatataatgtttatgacaaarcatcaccagttttaaacagacgagcatgggcacagggaaatggtggaggttaaggaggagggagatgggcaggaatcctttcagcagtggtcatgaagttgagaataccctatttaaactgaaagaccttccctgacatgtttatttcaaatcaaagcatttttaactgatcagtataacatacagaagaaaatacaaataattttgggtagaacacagccaagttgagcaattgggtctgattatccaggacacacagggggctgtattctcacatcatgaaaaactgcctggaagactggtcctttcactaatgtgctattaaaatagcccacaatgagccttgccagacacaggcttagggactgctcagattcacctgcagacatggacatttagtatcgcaggatttaaaattttatcctttccccttccaaatttgcccagtgc

SEQ ID NO: 376893 - DNA, 537 bp, Homo sapiens
agttacactactttccctttaacccacattgcttctgtgaagaaaactttaaaaagtcaagaacaacattgttcaatgttcaaaattaacctcagggtttttccctgggttttttgataagcaaagtggtgtttttttgagtcctttggcagcccccaaattagatgtgggtaaggagawgtgttttatttttattttaggtaagaaatgaacagtcaaatagtactcttggttatttgagttctgctctcagtttattttattgggaaatttaaaatttgtcactctggagataatagtttctaaaaacaaaagatatcttagtgtcaaaatgcttgaagaatggacatgataactataaagaagaatcttccaactgacaaaccctcctataatatttttgaaaaaataggttgcccattctattcaaatagttatacctatttgctgtctaggacttattcaataatgaggtctcttttagctgctcaacacagaaaatattttatttttaaagcagcaagacaggaaatgtag

SEQ ID NO: 376894 - DNA, 434 bp, Homo sapiens
agaaatactttgtttctataagtaayatttatctcaagacacccaaagaccaatttttgttttcattaatatcagaaataaggtaaagatattcattactgccaccattaggattctttgcaggttttagtcaatagattaagatactaaacataactaagataattaatgactgaaaagggaagtagaaatcatcttaatttctcatgtaattgtctaaaagaagacaatataagcaaacggtaagcaactataactaataaaagaattatagcaaggagaggtgaacattaagaaaaatatacaaaatcggtaaataaataaccagttagaaaatacaatgccgaatatttcatttaaaaaatatataattactagaaaaccgcccccccaatgtaaaatacattaaattgttaaagtgattattagacaac

SEQ ID NO: 376895 - DNA, 581 bp, Homo sapiens
ttgttactttatggtttttttaatcttgatccatatttttggtttatttatttgttcactgctctattatttctctaccatttgaatataagctccaataagggtaggaaagtggcaggaaccatgtttttccaatgcactgtgagatctccartgaatagtgaagggcccaaaacagagcaggtactaaataaatactgagtgaacaaatcattgaattaatgccctttaagaaatcattgaagaaggtgattccttctctcattctcttcttcagcaaaagctacatgaaagattttaatccaataaagaactttctgactttatcaagatccatattcttaagccagaaagttttttgagatctctcatcatgtatgtttcataggtgtctcaaaatcaatatatctaagtgcactaattattatatcttcaaatctgtttctctatttcaactcgtggtagatggtgttgttcaaacaatgacaaagtctgaacaattcttgctcattaatatctgttgtatttgtctatttcttcttcattcccagtattccctttttactttagtttctcctaat

SEQ ID NO: 376896 - DNA, 622 bp, Homo sapiens
ataatgggctgtaggttatcaacaggtggattcacttgtcttctcgtgagatttttaagacataggctgttgacagttaaaattgcttcaatacaagatggctttgattgagggtgaccttacaactcaccatattaagtcacaaatgtaactgatataagtgaaccggccctcctccctggtgggcaagagtcacaaaatcaccatgtaatatgccccagtgtagaccgaggggctgtcctttcttgagcagcaagggggtcactgcagatgagggctttaaagattttaggcagagctttgtgtggacactggtaaagaaattgcctacattgttctgaagttaaacaaagggtaaatatagtgtgttaatctgagtgcttcctaaataaccagtttacaagatcacatactgaagtttatcaaatacacactagggagactgttcatggacacaaaagggatcaccactcagcttcaaattccttcaagaycctaacagctacctgtcccagagtcctgaggaaatcactggaacccacctcaaatatactttctttctggctagactttacttggaggtagggtaatagttatggggttgtgagggggtgtcacaatt

SEQ ID NO: 376897 - DNA, 581 bp, Homo sapiens
gtattattgccattgtttagaattgccagtgcactgtgatagtaaaaagcagactaacttctatttggttttattattgtttttaaattctgtacagactccccattgcccacactaggaacagttccaccccctgtgtgccactgggaacaggtctgtagtgacgcctgcctgatttgagttctgttcttcccccagcacccctgacaagttacaaagctgacctcaagcttttctcccttccatacctgaaaagtgagtttctgacatggaattctttggagagagaaaaagaaaaaaaaaacaaaaaacctcccaccctgcaaacaaacaaacaaacaaacaaacaaacaaaaccaaacaaaaaaaaaaaacaagtttaatctctaataaggcattctgctataagggtaacacaaatcttcacccttygtaacattcttagtctccagtgacctgacctatcagcaattgttgtctttggggtagatgtggagagaaaacttgtgcttcccagagaggccaacctttcacagattgcaggcagtgctttcagaagtgagaaacaagcactctgtgct

SEQ ID NO: 376898 - DNA, 530 bp, Homo sapiens
atgcaaaatgacttgcctaagttgacatgttttgtttactccatggcaaagttgatcctagacttctgatttctagtctattattttattctgagtagctgttgcaattggatttcagaatgcaggtgtagcattcccttccttcataggtgtttcagtagctgggatctgcttttcactttcctcccaatagacaacaagagaccctgaaaactcttataagtttcaatgagattcaaattgggacacacacacgtgtgtgtgtgtgtaagtgtgtttgtgtatgctgaagatttcagggtggagaataaagctaagggataggrtaatatttaattgacaggtaattttgttatgaatgagtatttgaggccataacatttcaataagtccttcctttttgacctggtttcttcagtccatagacttacacaccaccctggggtccctttgatcacttttggccaatgaccatatagtcttgaatgttaattttattgcttctagttggcatttttaagaacaagtgc

SEQ ID NO: 376899 - DNA, 458 bp, Homo sapiens
ccaggagttagcggtgaggttaggatactgggaagagtgcagtcaagtgttgaataggtgctgtaggggatagaaaaggaagccaaccggtaatgagcaacaagattggtaaacagtatctagctaaagatgaaaaamgtcacaaatttctcatatagctaattagtataggtataccaattttctgctgcaacattcaacagtcaaggtacagacagttgtgttgatatcactactaattcttaatttcacagacacatgttgcttgatgtccctggagtcccccaaatacttgtagtcactcttcttttattaagatctgtgatgaaggccaaaaatgtgcttttgtgtcctgaggggtggggtggaaatatttatccaagaatagacatgacgcctttttgacaagagacaaatgtttcattcaaatgctgcatttcgcatattggaaactgtaa

SEQ ID NO: 376900 - DNA, 555 bp, Homo sapiens
tctgaacttttttttttttttttttttttttttttttactaaaagtaaaatcacagtgatctgaaattgactgaggccttgaaataaraaacatttttacaaatgcaaaatgagcccccccttaatcccctgaaaacataaatagatcatggacttgcacatattctactctacatcaaggcctgtcatgtttattctggaatgttataagggtattacaaacagagctcgctcctgaagccaagtgcatttccaagaaggcacagctgtccagaacacataaccaggtgaagatgtgatcctgagagctgtgctgatgatttggtatctgcagtgtaatttctcccagctgtcaccgaacatctgttcgaatttagaatgcttcaagatctgaataggtgaaagtaggtgtctgaaaacataaatttatgatgttttaagaatagtaaattaggattcatttgtgaatggaatacatcaatacatatgtattaaatggatacaatgtgtcagtcacggtgctaggtactaagggggatgtcaaaacaaaatcag

SEQ ID NO: 376901 - DNA, 555 bp, Homo sapiens
tctgaacttttttttttttttttttttttttttttttactaaaagtaaaatcacagtgatctgaaattgactgaggccttgaaataaaaaacatttttacaaatgcaaaatgagcccccccttaatcccctgaraacataaatagatcatggacttgcacatattctactctacatcaaggcctgtcatgtttattctggaatgttataagggtattacaaacagagctcgctcctgaagccaagtgcatttccaagaaggcacagctgtccagaacacataaccaggtgaagatgtgatcctgagagctgtgctgatgatttggtatctgcagtgtaatttctcccagctgtcaccgaacatctgttcgaatttagaatgcttcaagatctgaataggtgaaagtaggtgtctgaaaacataaatttatgatgttttaagaatagtaaattaggattcatttgtgaatggaatacatcaatacatatgtattaaatggatacaatgtgtcagtcacggtgctaggtactaagggggatgtcaaaacaaaatcag

SEQ ID NO: 376902 - DNA, 623 bp, Homo sapiens
cgattcctttgtaacttagagtgcattaaaaaagcttcagtcagcaagataagttaatttttttatgacctttataaactcttttagcctgtatctcgggagcttcttaaagattaaattttaaaaaatccttttagctcargccaacacagcatctgagtcttttttgcttccaaggctacatccaaaatctataaaaaaattctgttcatgacaattattgtcaaagtaatgattagctaacatgtcatttttagtttttactgttcttgcctctatgagactaatccaataaagctcacatcttcttaatgtaaaagttgcatgaaggatgcattattcccgttgactttgcctacatttgcaaattcttgaaaaagcaaattgaattgtcactagtggcacctctttcacaggatgattgttgggtcaaagtgagagtgtaggggacaaatatcaagatttttgttaaaagaaaaaaatccctacctaagaactgtaaagctgtattaatatataattgaggccatggactttagtagaccataaggcacagctacccaaggtgatgggtataattttgcagggggaggaatgtcggaggaatgtgaagggctcttcat

SEQ ID NO: 376903 - DNA, 570 bp, Homo sapiens
tcctgctaacttaccttgtgctctaaaatggcaacttcaactccctggtctataggaccttttagcttggtttctcaaatttgagaaaaaatgtaatcatggcttttcatcctaaatatggcccctactccagtgggtatcaattcctgataaattcatcttggcggggaggggccgacagaataagtgcagtatttaggattgctcctccctgtgcaggacagataatggaaccatctagtacactagcaacatggtcattcaatttttactctgcaagattcatcatagatcctattatccatgaaaattctccacttctgttatctgaatttaacttctggagatgtgtgtgtgtgtgtgtgtgtgtgtgtatgaatatgtatcgtrtgggcacgtgtgtgtctgtgtgtgccacgtgcatgcttcaggcaatattccgcttctgttgcaatttgttctgaaaaaatatcaaatgattaaacattttagggggatataaaattagatttatattttctttttaaaagtatcattcttatacttaataagaaaggaaatatttttgta

SEQ ID NO: 376904 - DNA, 486 bp, Homo sapiens
tacatcacaaaggaacagttcttataaactgttttcctctttattgaagtttaacattcttaaggtcacacatctctttctgccaatagatacaagacatgtgtatcaagacaaatgtttcctaaaatattgtaggtttgattaaaagatggcaagctttagcagaaagaaacgtgacttgtggatcaggagacagacattgggaaaatcacctaccttaacagtttttcacttctgttataaaggacttgagccaggtgatccttaaggtaactcccctccctaaattaagggcactaattcactagtattgaattcaagagagttataatcatttgtgttttasccatacagcaatccaaggaggttgatggaaattatttagtcctattctatcactgcagaaattaagatcttaatgatccattaattcaccaaagatcttataatcagaatgagtttgaaggtcaatcccatgctttgaaa

SEQ ID NO: 376905 - DNA, 598 bp, Homo sapiens
agaataactaagttgtagaatattcatacaatgaaataattcacagcagtgaaaaagaacacactattgctccacaccacagcatgaataagatctcactgaaataatgttgagcagaaaagaagcacaatgtaaaagactatatattatattattacacttatatgaagttcaaaaacaggcaaaattaatatatggtggtaaaggacagaaaagtgcttacctctgtgaaggagtaggaggtagggggagagaggcaggaaatcttctgtgccttggtctgagtggtgattataaaagaatatgtctatgcaaagagcatgttgtcctcttgggatttgtacactttattgtttataagttatacctcaaataagaatatatacatgtgtgggtgtgtatatacatatatatatatatataaacttccagaaaactgaagtgaagattacattctattacttctttattttttgttatctgttttcagtgaattggaaacrtttccctgaatgtaaattagaaattctcaatgtatgagaaaaataatcatttgagcttccaccatagatggacgtattctttcttggacagactt

SEQ ID NO: 376906 - DNA, 536 bp, Homo sapiens
gaaatgaacacataatcacgtcaattctgcctattccattttttagtgttttctatttttagcattttattgttggaacttatgcatgccttcctaggaaacttattttactttgcgtcacagtcaaaagatgggaaattgtaaccaartgttgaaatatgataattaactccttgactaaacaaaactaacactatttctgaatagaagcaattattttaagtctgtaagaaatgcaatgtaatatatttatttgtgcaatgtacactggttgacttggccaaagctacccgtcaatggaaaaaagataacagctcatgtaaagctattttctaagtgtctaaattttgctgacttttctcactaaaaccttttttatttttttgagacagggtctcgctctgtcccccaggctggagcgtaatcctggctcactgcaacctccacctcccggattcaaacaatcctcctgcctcagcctcccaagcagctgggattacaggcacatgacaccacccccagctaacttttgtatt

SEQ ID NO: 376907 - DNA, 536 bp, Homo sapiens
gaaatgaacacataatcacgtcaattctgcctattccattttttagtgttttctatttttagcattttattgttggaacttatgcatgccttcctaggaaacttattttactttgcgtcacagtcaaaagatgggaaattgtaaccaaatgttgaaatatgataattaactccttgactaaacaaaactaacactatttctgaatagaagcaattattttaagtctgtaagaaatgcaatgtaatatatttatttgtgcaatgtacactggttgacttggccaaagctacccgtcaatggaaaaaagataacagctcatgtaaagctattttctaagtgtctaaattttgctgacttttctcactaaaaccttttttatttttttgagacagggtctcgctctgtcccccaggctggagcgyaatcctggctcactgcaacctccacctcccggattcaaacaatcctcctgcctcagcctcccaagcagctgggattacaggcacatgacaccacccccagctaacttttgtatt

SEQ ID NO: 376908 - DNA, 591 bp, Homo sapiens
tcaagaggaacattgtcacatcaggaaaccgtgctaagagctcgttaaatggcctgacttaaaatgctgtatgaacctaaacaaagaagtttttatagtgtatctttctgcttctacctgcctagatatcaaattatgttatgaagcattctctataaaggaatagatcaatgccatatctccctcataggaatgggacagatattatttgactccacttacggttgctatgaaatttaggccctctcttgctagaacttctcatttttcaagagaagccagaaataagattgttatgtaaatcttaacatttttagtgctggcaactatttaaattttttagacactgtgggggacttctgcttttcataaggatgtcagaagttcaccctagaacaagctggctaaactaggttaaaattaaaaccatccaggaattgaagcacaaagaaacctaaatraggtgataagcccttcctaggacagaagagatgcacagctactttcatccctgatgaagcagcaggagaagggagaatctaccatagacagcagtaaggaggaaccagacaaacttttaacaaactttta

SEQ ID NO: 376909 - DNA, 564 bp, Homo sapiens
tcatttttacctgaaaaggatatagagtacccaacaactggacaaccaagctcctgaagagaagacatcaaaagtagagcatacttcattaaaggtccctttcaagcagctgtcatttcatgatatatttcagtcaagtaaaggacagcccaggtgcattgtgggatgatagaacttaccttggaggagcattctggttaattggcagcacaaatagggttgtaaatgcacaaatgagataaaatctcagtaattcctaaatattagagcctgcatgtcagagtgagttttaattaatagaagtatataatggtttctcacaaacaactataaaatatttaaaaactgttatttgttcagaacattattttaaggaaaatgaatgtactgtggtcaagaataggccaaggcaaacatccagtccagcatgactcagcaggtttggagtgcatgtgcacaactccactcattatgtaaccacaccacatgakgtgcattaggtgatcacccatgtgagcttgtgcttggctgggagctgctgttgtctgtaaaatgtagaattac

SEQ ID NO: 376910 - DNA, 564 bp, Homo sapiens
tcatttttacctgaaaaggatatagagtacccaacaactggacaaccaagctcctgaagagaagacatcaaaagtagagcatacttcattaaaggtccctttcaagcagctgtcatttcatgatatatttcagtcaagtaaaggacagcccaggtgcattgtgggatgatagaacttaccttggaggagcattctggttaattggcagcacaaatagggttgtaaatgcacaaatgagataaaatctcagtaattcctaaatattagagcctgcatgtcagagtgagttttaattaatagaagtatataatggtttctcacaaacaactataaaatatttaaaaactgttatttgttcagaacattattttaaggaaaatgaatgtactgtggtcaagaataggccaaggcaaacatccagtccagcatgactcagcaggtttggagtgcatgtgcacaactccactcattatgtaaccacaccacatgaggtgcattaggtgatcasccatgtgagcttgtgcttggctgggagctgctgttgtctgtaaaatgtagaattac

SEQ ID NO: 376911 - DNA, 564 bp, Homo sapiens
tcatttttacctgaaaaggatatagagtacccaacaactggacaaccaagctcctgaagagaagacatcaaaagtagagcatacttcattaaaggtccctttcaagcagctgtcatttcatgatatatttcagtcaagtaaaggacagcccaggtgcattgtgggatgatagaacttaccttggaggagcattctggttaattggcagcacaaatagggttgtaaatgcacaaatgagataaaatctcagtaattcctaaatattagagcctgcatgtcagagtgagttttaattaatagaagtatataatggtttctcacaaacaactataaaatatttaaaaactgttatttgttcagaacattattttaaggaaaatgaatgtactgtggtcaagaataggccaaggcaaacatccagtccagcatgactcagcaggtttggagtgcatgtgcacaactccactcattatgtaaccacaccacatgaggtgcattaggtgatcacccaygtgagcttgtgcttggctgggagctgctgttgtctgtaaaatgtagaattac

SEQ ID NO: 376912 - DNA, 589 bp, Homo sapiens
gacttgcctcccacaaagcagagtcttgcatgtagacaagagtttacatataagtagttaatgtaatcccaagagtggagaacctgaaagagcagggagccaatataagagtgttattgagctgctgattgttgttaatattaaggtctaaactcctctggaaccttctgagaagctgtataaactggacagaagaatgatatatttatctacaagatcctgtcccccattgattgaaggtttcctagggggcacaactcccttgcacaaacttgaagttgctgcacctattcataccgggcgattccctgaggctttycagtggtatcgcatgctgtggcactagaaagcctaggtgggtagtcagatgagattaaacatcatcggtttacacctgcaaaatgtttgtggctgcaacgatagctgaaataaagatgggccaagatgatgggaagtgtccaatatactgtaaaaaataagttgattgctttagaaaatcgtaatagtaagtagctagtaaaatatttctaccaaattcaatgtgggcaaaataactgtaacaggttgggaaaacaattataaaaatttt

SEQ ID NO: 376913 - DNA, 453 bp, Homo sapiens
tgcccagtgaaaggcctttgtggaattggctttgaaagatcttggccattcatcaccacaatgtacagtgttgaccatgtggggtaagctgagtatcatgctaggcactttgcatccgttatcaaagttcttttgatttgtttgttccacttgcagcagcttgttgataaggctgactatagccttaggataagcagatttccctagtactccaagcaaacatctaagcgttgcctttagaatggcttcatagctggttcatagctacaactggtttcatagccttcatgcctgcctcatctttcccccattctctttcaaagagctcatacattttattggacttttcaatgaatttggggtcccattgaagggaaactaacagttcytaggctccttggagacatgccttgaaactatgaaaagatttaactcagtggttctcaaacttta

SEQ ID NO: 376914 - DNA, 587 bp, Homo sapiens
tgttactgcaatataacatagcctgtgctgaccaatacaatatgctgccgtgatttcgaaacactcagattttaatgcaatttraaggtgcatttaaaggttgcctcactgaagagtgtaaatttttaaaaacataccacttgtgggcactgttgatgaagagacattcaagtgattactttcttgtcaattcatactgggtattctgggatgttgtgagattacctattgatacctttatcagaggcagaattcactagaaggtctttgacctacagactaaaatatataattaaaatatataatgcttccctaataacacagggcatataagacagagtagaagatgtagtgaccaacctaggatttgagttgccacctggtcatggtcatttgtcctcttcttgcagtccacatattccatgaatcttactactgccactagtttgctaccttttaccattttacattatatctttaacagatagggttcagtttcttaataaatgaactcttggccctgttgataccattgtctcatcttttactccagcagctttagttgttccagctggtgaaatctcttt

SEQ ID NO: 376915 - DNA, 612 bp, Homo sapiens
ctggcactgccaggatataacagatgaaagagaataacaaagcaagcctggaaagcttggagaggaaatcctgaagacatgacaaggaacggcaagccaaagggagcctccagattacttaagtgtttcttccaacacaatagtgacctaaatctgctaaagttaatatgtattttagtagcaaaggtaagatctaactttcaaatcaactgagtttctgagtcaaactgataaataccaattccaatttgaagattgttttcctgtctttaacaaattattagacaaaaaaaaaaaaagatgcagaaagtaatggcaagatggtaarataggaagtaccagccctcatacccccacagaaacattgatttaacaaccattcacagttgaaaataaaagagctccagtatcccagggagaggttacagcacctaggtgaagcacaagaatgagaaaaaatacacatttagaaggctaagaagaatagtttcactttacccacatcacctctccacccaagccagcatggtacagtgctgagagaaatacctttgtcccacaagctctcccataggggaaggagagattgaagtggatatccaacttccccaa

SEQ ID NO: 376916 - DNA, 623 bp, Homo sapiens
aatattcaaggtttccttggaattttcgagtctgtctattaagtttccacaaaatgactgtgcattctggtcattcaagattccagcctttgaaggaatttcttacaaacatgtagcctgttttaaagaatgatcgcttgaaccactctgtgtgagtttgggaatgaagactaggctatcttggataatcttcagacatcaaaaaacaaaatcaaagcaactatatttgattatcttgtcactcaagagttctcattcagacattccctttgaaccactttctcttcatcacaaatctgagttgggatcctgcccatctatagattctgatcatccttgtcatctgatattactgattactttgctttctgtagtaattttctcccagatttcttcccatttgatgtctgcacccacccaatctttatctcctcagccacagccagatctgtgcctctgrctaccttcttattgagctttcccaattctcaaacagaatagactgggaatccacacattctgtttgaaaaaaaaagaccatagtacctgatcagatctagaaagtagtaagagttaagtatagaatcacataattctacgtccctaacagcaaaaatgtgggc

SEQ ID NO: 376917 - DNA, 562 bp, Homo sapiens
ttcaggaatttcttatcattctttatttaggaactccatagtcatttgcatatagggmaggctggcctggaagcaatattttattaacatttgagaagaactcaaatatcatgtccagaaaataataacatatttatcctagccttaatatggcttttccagtaagatccatgtgacttgtctctgtgtgccaaggcttgtatgtttatccctcaggggtttggaacaaatgttacagacttctgattgctagagtgatacagagattatgaggacacatagccataaaagtaaacagcctgagttttaagcctgtcatcatcattttactcccttaccctatgaccttagacaagtttcggaatatcgaggccttaattttctcacttataatatggaagataacagtggttctattccttaggattatcatgaggatgaaacaaaataacttgtgtgatgcacttagaaccatgcctgatacaaagtgggcattaatgaaggctagctattattggtagaagtaaggagagctgaactttcttgaaatagaccagtagac

SEQ ID NO: 376918 - DNA, 448 bp, Homo sapiens
tacttattcacgcagaatgaaatggaaaaatggatcaatgaatttcacgtgtgggaatgtttcttggagcatctctccagtgctttgcttatttttacctatcatattaaaatggtgcctcatattaagcttctattctctatgatgcttatatttatttcctctcyattgataattgtttactcctcagatcccgcttacaaggatagcacttgctttctcaatctgctttcctggagtgagatggattagtgaaaagaacgtaaatgttaaagactagcaaacctgggtctaatgtctggtcggcctacacgagctgtgtgactttgacaaataacacataataacttcttgaagtatcagtgtactcacatatgaatagaggcacttcataaatagttaacaattcataaaattgttatgggaaattagatatcatatgcatgat

SEQ ID NO: 376919 - DNA, 593 bp, Homo sapiens
  misc_feature (1)...(593): n = A,T,C or G
nnnnnnnnnntataaaacgcagccttagtttcccctaatcgtgttgcattaatagtaatacctcctagttaatttgttcttgcatccctcctgatcatactggagttagtattttcaaaagtctccccaattataatttgaggcatcaggccaatttcatayatgttcacaaacaagttgacgagcattaatggtcacacaaaatcagctgagttctctctctcttgctctgtgccctcttcctaagtcttttgaccttgaaactacttgagagtttgtactgcagccatgatagccattgcatttctcttatccactattagccatcttgcttaggtaccaaatcagggttgcttgcaactcatgtcttaaattatccgttgcagaagcagtttcttcagtttacttcttcagatgttttccatagggtatattaatgagtcataggtctaggtcaggagacaggtatgctccctcctctcctctgaaacctagactccttcctcaaccttcacctaaaaataagctcattcatacaaatgcatgaagtcacctgccccgtcagttcaccatctattctcacacatgtcaga

SEQ ID NO: 376920 - DNA, 593 bp, Homo sapiens
  misc_feature (1)...(593): n = A,T,C or G
nnnnnnnnnntataaaacgcagccttagtttcccctaatcgtgttgcattaatagtaatacctcctagttaatttgttcttgcatccctcctgatcatactggagttagtattttcaaaagtctccccaattataatttgaggcatcaggccaatttcatatatgttcacaaacaagttgacgagcattaatggtcacacaaaatcagctgagttctctctctcttgctctgtgccctcttcctaagtcttttgaccttgaaactacttgagagtttgtactgcagccatgatagccattgcatttctyttatccactattagccatcttgcttaggtaccaaatcagggttgcttgcaactcatgtcttaaattatccgttgcagaagcagtttcttcagtttacttcttcagatgttttccatagggtatattaatgagtcataggtctaggtcaggagacaggtatgctccctcctctcctctgaaacctagactccttcctcaaccttcacctaaaaataagctcattcatacaaatgcatgaagtcacctgccccgtcagttcaccatctattctcacacatgtcaga

SEQ ID NO: 376921 - DNA, 593 bp, Homo sapiens
  misc_feature (1)...(593): n = A,T,C or G
nnnnnnnnnntataaaacgcagccttagtttcccctaatcgtgttgcattaatagtaatacctcctagttaatttgttcttgcatccctcctgatcatactggagttagtattttcaaaagtctccccaattataatttgaggcatcaggccaatttcatatatgttcacaaacaagttgacgagcattaatggtcacacaaaatcagctgagttctctctctcttgctctgtgccctcttcctaagtcttttgaccttgaaactacttgagagtttgtactgcagccatgatagccattgcatttctcttatccactattagccatcttgcttaggtaccaaatcagggttgcttgcaactcatgtcttaaattatccgttgcagaagcagtttcttcagtttacttcttcagatgttttccatagggtatattaatgagtcataggtctaggtcaggagacaggtatgctccctcctctcctctgaaacctagactccttcctcaaccttyacctaaaaataagctcattcatacaaatgcatgaagtcacctgccccgtcagttcaccatctattctcacacatgtcaga

SEQ ID NO: 376922 - DNA, 599 bp, Homo sapiens
ggaatatttaagaactatcttgcccattcttctcaactccattttcctctactttttaatctatcatgcccccaaatgtgaaatttaccttcataaaatattgtttttattatattattgctgctcagtgatgtcttagtctgcttgggctgctataactaatcaccatagattgggtagcttagacaacaaatacttatttctcayaattctggaggctgggaagttcaggatcaaggtattggctgatttggttcttggtgagggccctcttcctggtttgcagatggctaccttcttgtatcctaacatggcagagagagaatgagagagagagagagtggagaagagctctcgtgtctcttataaaccatcatatctcttataaaccatcacgagggctccaccctcattacttaattgcctttcaaaggccccatctctaaataccattacattgaggattagggctttaacttgtgaatttttggaggacacattgagtccatagcagtgcaagaaatcttaattgatttttctaaacttttaaccttgcattctgtgttttctaaaattttgtccaacttatttttaagatg

SEQ ID NO: 376923 - DNA, 613 bp, Homo sapiens
ttgtgctggggaaaaaaacggtattctcatatgttgttaatggagtaacattggtttaagttttctggaggacaattttgtagtaagttaaaagaagcttataattccttacctatttagtaagcagttctatgtttagaaatctcctctgtgatgcaccccaaatctccayttataaaaaagtgctgacatattttacaagggtgttattgaagcactgtttataaatatcaaaaattgaagacaatgtaactattgaattagttaactaaatttcagcatattcatgtgagggaatactatgtagccttttaaatattattgtagaatagtcaataatgtagagaaatattcatagtaatttgctataaaaataaaatgtataaaattatatgtagagtacagaaaaaagagtatgttttatgcataaaaaacaaacccagagaggacatttaccaatatgataataatggttatctttgggtgaagagaatgggagtttgtaattttattctttgttcatttgtgattttaccttttaaaagattaggcatacatcaattttataataaaaatcaagttgttaaaatgatggttacatctaatctcaatt

SEQ ID NO: 376924 - DNA, 613 bp, Homo sapiens
ttgtgctggggaaaaaaacggtattctcatatgttgttaatggagtaacattggtttaagttttctggaggacaattttgtagtaagttaaaagaagcttataattccttacctatttagtaagcagttctatgtttagaaatctcctctgtgatgcaccccaaatctccacttataaaaaagtgctgacatattttacaagggtgttattgaagcactgtttataaatatcaaaaattgaagacaatgtaactattgaattagttaactaaatttcagcatattcatgtgagggaatactatgtagccttttaaatattaytgtagaatagtcaataatgtagagaaatattcatagtaatttgctataaaaataaaatgtataaaattatatgtagagtacagaaaaaagagtatgttttatgcataaaaaacaaacccagagaggacatttaccaatatgataataatggttatctttgggtgaagagaatgggagtttgtaattttattctttgttcatttgtgattttaccttttaaaagattaggcatacatcaattttataataaaaatcaagttgttaaaatgatggttacatctaatctcaatt

SEQ ID NO: 376925 - DNA, 607 bp, Homo sapiens
ctgatgtccttataaaaagagagaaatttaggcacagacacagaggagagagggccatgtgaagaaacaagtagagactggagggatgcatctrcaatgtaaggaacaccaaggattgccagcaaccaccagaagcaaggagagagacatggaacagagaacccctggaaggaaacaaaccagccaatgcttgggtttcagacttctagccttcagaactgtaagagaagaaattttgattcttttaaaccacttatttgggataatttgttatggcaacactaaaaagctaatataattcttatttatttaacccactgtttctcagtgggggtgagtttgttctccaggggacatttggcaatgtctggagaagttttttggttgtcacgatggaggcaatgctgctggcatctggcatctggcatcttgtgggcagagagcagggacgctgctaaggatcctacaatacacagaccccccctataaaaaagaacgacccctgtctaaaacgtcaatagtgccagcactgaaaagctctgacttaatctatcccttgtatttggagattttctttcccttttttttttctgccataaataatgcc

SEQ ID NO: 376926 - DNA, 607 bp, Homo sapiens
ctgatgtccttataaaaagagagaaatttaggcacagacacagaggagagagggccatgtgaagaaacaagtagagactggagggatgcatctacaatgtaaggaacaccaaggattgccagcaaccaccagaagcaaggagagagacatggaacagagaacccctggaaggaaacaaaccagccaatgcttgggtttcagacttctagccttcagaactgtaagagaagaaattttgattcttttaaaccacttatttgggataatttgttatggcaacactaaaaagctaatataattcttayttatttaacccactgtttctcagtgggggtgagtttgttctccaggggacatttggcaatgtctggagaagttttttggttgtcacgatggaggcaatgctgctggcatctggcatctggcatcttgtgggcagagagcagggacgctgctaaggatcctacaatacacagaccccccctataaaaaagaacgacccctgtctaaaacgtcaatagtgccagcactgaaaagctctgacttaatctatcccttgtatttggagattttctttcccttttttttttctgccataaataatgcc

SEQ ID NO: 376927 - DNA, 602 bp, Homo sapiens
gtggtgagtgaaatggggactcaaaacctctcactgttgcttctaagtcttttcatccttggacttctgagggtgggggaaactatgcccacaccctccgtcactcccggagattttcatggtcttttccttcctttttcaggaccgacgggcgagcagcagctccacaccactctcccctccctgtcagggctgggacacgtggtccaagggtcccacacagccagctggctgtggtttccaccacacaccaccagaggcttccccttccccagccaaggggctttactccatcaasagtaattaagcttttctcctggtgaaggaaccagttgcataaaataagaggttcttccccaggcatttttttttaactgttttttcttccccttatcaaccccacagcagttaacctttaaagtttttattttcctcgtagatgttttcactaggctaggtcctccagctgtcactgcttgtactctctaaagctttggttgtgaaaaaggatcttgtggggattgcattttcttctgcctgtctgtgtgtgtgtattgcttctgtctgtctgtgtgtgtattgtgtgtaatatctttaaaaag

SEQ ID NO: 376928 - DNA, 655 bp, Homo sapiens
ttgttatgttatcgtaaaccatggagataaccaaacttctctgtcaatcttgtttcttactgtaactaccctagatattttgctattcacagacaattgttgtcttgttttaatctttttcaaagctggtttataatgaactataggactttaacaggtgctctcaaatacaggcttctgataactttagagactgttaacattggaatgaagcaatatgtacaggactcacaaagagctgaaatgttcatgaatatcaagcaaaaccggagttaactaaatggactgaactcaggaagctgcagcaaaccttttttacttttgcttggtacattgctgatccttgtttggttttycagtgtcaaggaaacttattttgaactatttacagcctttaataattaagtaaggtatacactcctgtgatcaaaatttggagcatatttgtttctctctgcctgattcctctagaatttggaaactatatctgtgaatattcttatggcaatatagttgtttgtgtcactgcaataagaatccatttttcttttgcaacaggacacaattggagaaactggtaattttatcaaggctttgactggaagggtatgcttcccttaaacgagtcaatcttgatatgcagagccaataaaag

SEQ ID NO: 376929 - DNA, 655 bp, Homo sapiens
ttgttatgttatcgtaaaccatggagataaccaaacttctctgtcaatcttgtttcttactgtaactaccctagatattttgctattcacagacaattgttgtcttgttttaatctttttcaaagctggtttataatgaactataggactttaacaggtgctctcaaatacaggcttctgataactttagagactgttaacattggaatgaagcaatatgtacaggactcacaaagagctgaaatgttcatgaatatcaagcaaaaccggagttaactaaatggactgaactcaggaagctgcagcaaaccttttttacttttgcttggtacattgctgatccttgtttggttttccagtgtcaaggaaacttattttgaactatttacagcctttaataattaagtaaggtatacactcctgtgatcaaaatttggagcatatttgtttctctctgcctgattcctctagaatttggaaactatatctgtgartattcttatggcaatatagttgtttgtgtcactgcaataagaatccatttttcttttgcaacaggacacaattggagaaactggtaattttatcaaggctttgactggaagggtatgcttcccttaaacgagtcaatcttgatatgcagagccaataaaag

SEQ ID NO: 376930 - DNA, 631 bp, Homo sapiens
tctctttcctatttctattgtgtcttgatatataatctattataataccacatacatcatacaataaattctttatacatctctaaccctactagaatgtggttgcctacaagggagaaagtgtgtttgtcatcactgtatctccaatgcctagcacaatgcctggaaataatggaccctaaatgaacatgtatcgcacgtgtaccctgygaacttggaaggtatttaaggtaggatgagggaatccatgagaatagcccatatcagaaatttggattgtgtatttgagattatgagaggactctttccttgattagaggcattcttaaataacaccttgaagttactgcattaaaacctattgctgtcaattcctccctttcttcaagacaagtaggagtagctcttctaggaatgattgcagcaattctactgctttgataaggagtcttaagatgggggtctctgggcagaagttatacacacctgaagactcactggttatactgagtttctaaatatggttgtcttatcttatgtttttaaaaaaattagttgtcaatatcaaaaatctgcagatttcacataatgatcttaagctccagcttcttttaaagcaaaacaaacaaac

SEQ ID NO: 376931 - DNA, 620 bp, Homo sapiens
ttaagaataaaagggaggattgtcaactagttgcttaacctgcaatatttcacttgaatttagacacttagagtgaatcaaaaaatcaaaggatatttattgctcacttgaagttacataaaataacagcgtgacttggatatgatatcgcttgagttttcttggagatatataatttagttttatggcaaatttggtaatggaagttgtcaagtgacattgaagcagtctattaattcctattaagtttactgtgctgatctcagaagatgaggctattattatgtatgcataataatacatatttcttggagaytgttgtagaaattattatcacatcttcaagaaagttgttaccctgtctaatactgtccccaattaaatcattattaaattgaggcatattctactacccaaatccataacagcttttttgcttttaaatgttgactaataaaatagaaggtggttggccaaaagccacctaatggaacacctgagaatttgtggcaatgtctgctcttgactcatgcatacaatttaatatatttcatcatatctaaaacttcatcaattatgtcatactaatattttatgttccattaagaaataaaaagtgc

SEQ ID NO: 376932 - DNA, 538 bp, Homo sapiens
ctgctgctcattttcatgttaatttagttttttgagaatgttagaaggagccttggttcagatagctgtgcaactttatagaactccctcttctccttttgtttgtttgcttatttttatgttgtgccaagaagcatgacagcttgatttctgagatttcttgctaattttctagatcagaamcatttcttttctttgtctttttttttgtccatatcttgcttaacttttaaaaaattgtatttatttattttttaaagaaggggtcttactctgttgtctacagtagtgcagtcatagctcattgcagcctcaaaaccctgggctcaagagattctctcacttcagcccctgagtagatgggacagtaggcatgtgccactatgtctggctatttttttttcttttaatttttttagagactgggtattactatgcatctcaggctggtctcgaattcctcactttaagcaattctcctgccttagccaggattacaggcaccacccaccatgcctgacctgcttcattttgatcc

SEQ ID NO: 376933 - DNA, 538 bp, Homo sapiens
ctgctgctcattttcatgttaatttagttttttgagaatgttagaaggagccttggttcagatagctgtgcaactttatagaactccctcttctccttttgtttgtttgcttatttttatgttgtgccaagaagcatgacagcttgatttctgagatttcttgctaattttctagatcagaaacatttcttttctttgtctttttttttgtccatatcttgcttaacttttaaaaaattgtatttatttattttttaaagaagggktcttactctgttgtctacagtagtgcagtcatagctcattgcagcctcaaaaccctgggctcaagagattctctcacttcagcccctgagtagatgggacagtaggcatgtgccactatgtctggctatttttttttcttttaatttttttagagactgggtattactatgcatctcaggctggtctcgaattcctcactttaagcaattctcctgccttagccaggattacaggcaccacccaccatgcctgacctgcttcattttgatcc

SEQ ID NO: 376934 - DNA, 411 bp, Homo sapiens
tgattaactaacacattctgccttgtcatcccgtatgttggttttttcatctgagattgttatcagcaacctatctatgcttgcatctgcgttattaatgatgcgaagartctttctctctatccttgcttggagtagagggttgggaatgaatgaactctaatgttccttacagcttccagacattttgtatcatgtttgttaatatgatacaaacagacctgagtgtgaattctgattttgctgcttgaaagaaatgttggcttggaaaagcttaactttcagtgcttgcatcggaggtggttaatgaatgtacgttgaataaattaatgttctctaagcctcattccctaaaatgaagaaaataatatgcaatgtacttaatagtgctattaaagatctcatttggca

SEQ ID NO: 376935 - DNA, 561 bp, Homo sapiens
gtcagcttctaattcttgggctgccttggttctcctctactaactctatccttcttttatccagaaaaaagcaagtcttgcagtttggtgggagagagtatgcagtcaccaacatggcatgaatttaggagtgaataaacgaaagaaaagaaaaaaacctattatttagaggtaagcaggcattaaaagtccaccttaaaatcgtgttttctgtttttttttttgcttgctttttcttacatcttgtaaatcaataatactgaattgagttctgaattgtccaagctagtcccagctatagaatccctcctgcccaatggaggaatatttatatttcccaaacacatcttttttttttttcaagagatttggacacctatcattagaatggaataaacacaacacaatacaggaaagaaagtccagactaaggcaagaatgaagctgcaatcacaccacgatgacaagcgtcaaacactccaraagccttggagccttgcagcagtcatagccaaaggggagaacaccctaccaattcatcagatagatgaaggcttcctt

SEQ ID NO: 376936 - DNA, 524 bp, Homo sapiens
ggagttataatagtaatagaaaccttcttactgctcccttgtttgctacatgcatttcttcaaatgaaaaaaagcttcatcactaccttagttcaccaaagtgcttcagcacaagtgtactatatgaatcactgtcattctgtcttgcaagaagacacaggtagcaaaaatgaaagtgagaactcccactattgagtgagagtctcaaagtsgggggagtaagggaggagaccacccctcacattgtcttatacccaatttctgcctccaaagaaagaagaagtaaaaactaaaaggcagaaatgaaatccacaggcagacatcccggcgccaggccctgggcctggtaattaaagattgacccctgacctaaccggttatcttatctatagattatagacattgtatagaaaagcactgtgaaaatccctgtcctgttctgttccattgtaattaccagtgcatgcagcccccagccacataccccctgcttgctcaatcgatcatgaccctctcacgcggac

SEQ ID NO: 376937 - DNA, 524 bp, Homo sapiens
ggagttataatagtaatagaaaccttcttactgctcccttgtttgctacatgcatttcttcaaatgaaaaaaagcttcatcactaccttagttcaccaaagtgcttcagcacaagtgtactatatgaatcactgtcattctgtcttgcaagaagacacaggtagcaaaaatgaaagtgagaactcccactattgagtgagagtctcaaagtggggggagtaagggaggagaccacccctcacattgtcttatacccaatttctgcctccaaagaaagaagaagtaaaaactaaaaggcagaaatgaaatccacaggcagacatcccggcgccaggccctgggcctggtaattaaagattgacccctgacctaaccggttatcttatctatagattatagacattgtatagaaaagcactgtgaaaatccctgtcctgttctgttccattgtaattaccagtgcatgcagcccccagccacataccccctgcttgctcaatcratcatgaccctctcacgcggac

SEQ ID NO: 376938 - DNA, 553 bp, Homo sapiens
cctcccaactcagactcttatggtcagaggcatatttagtgctttcataggctgtgatctactaaggatcacaatttttttcctataagtgttcatcatcatagattctgtgttacactgcccaaggattcattgctcctagctcttggaaatttgtttgacatcactcagctagcaacccctttgggaattattttggcagaagagagtcacctttgccttatccatggtsatactccctaccaggggcagactacgtccaatgactggctaataaaaaaggcctggctcctcacctcaattcaagacaaccctgaaaggccctcctatcttcagaacttgtaacagggtcagctgacatcttcaacaatattgcattacaaatcaacttctccctctgcccaaccttggttatttctctaccccccactggagttaatcctgagtgcactccttaataaacttcctacatgcaaatatctatctgggagtctgattttcaaaaatcctaacctgctccacttatggaactttctaactgttcattagaaca

SEQ ID NO: 376939 - DNA, 562 bp, Homo sapiens
gttaggtctgatggtatacaatgataattctcaaagattagtttatatgagagttgtctgataagcatgttataagttaaaattcctaggtgttacccctagaaactaattttccaggtgggacccagagttctacatgtttttttatgtggggatgggggaaagagtcacactatgtggcccaggctggagtgcaatgacacaatctgagtgcactgcaacctctgtttcccaggttcaagcgattctcctgcctcagcctcactgagtagctggrattccagaaacgcatcatcatgcttggctaatttttgcatttttattagagatgagggttcaccacgttggccaggctggtcttgaactcctgacctcgtgatccacccacctcagcctcccaaagtgctgggattacaggcgtgagccaccgcacccgaccaagatctacatttttaaccagcaccaggtaattctaatgcaagtggtccataataaacattagtctaccagccatcttctgttctattattctatttcttgattcagccaaaactacacactc

SEQ ID NO: 376940 - DNA, 594 bp, Homo sapiens
tctagggtggaggttgagactgcaatttcaacaagttcctgggtgaccctagggctgctagtccacagaacatatttagagtagcaaagctttctttaggtttctgctgtaaaggcaggctgcttaccttgtaatcctgatgttaccacttattgaccatccaatctggggcaagttgtaccttgagccttaggtttttttaatgtgtaaaacagtatatccttcaaagggttattgtgaaatttaaagaaggaatggctgtaaaactcctagcaagtgaaaaacttctcataaatgtttatcctttttgctatatgaccacacaacttcatgtgacaccagtagcagattatgatcactgttttccaatattattcccatcctccttcctggatcrtcttccaccttgtgtctacagtcttcacagccccgaactatcttctcttattggcacaataggagaaagagaaggcaatgtgatgaaagcagaaagagagatttgaaaatactatgctgcgggctttaaagatggaggaaggggccacgagctaagaaattaagctctagaagctggaaaagacaaaaagaattctc

SEQ ID NO: 376941 - DNA, 594 bp, Homo sapiens
tctagggtggaggttgagactgcaatttcaacaagttcctgggtgaccctagggctgctagtccacagaacatatttagagtagcaaagctttctttaggtttctgctgtaaaggcaggctgcttaccttgtaatcctgatgttaccacttattgaccatccaatctggggcaagttgtaccttgagccttaggtttttttaatgtgtaaaacagtatatccttcaaagggttattgtgaaatttaaagaaggaatggctgtaaaactcctagcaagtgaaaaacttctcataaatgtttatcctttttgctatatgaccacacaacttcatgtgacaccagtagcagattatgatcactgttttccaatattattcccatcctccttcctggatcatcttccaccttktgtctacagtcttcacagccccgaactatcttctcttattggcacaataggagaaagagaaggcaatgtgatgaaagcagaaagagagatttgaaaatactatgctgcgggctttaaagatggaggaaggggccacgagctaagaaattaagctctagaagctggaaaagacaaaaagaattctc

SEQ ID NO: 376942 - DNA, 596 bp, Homo sapiens
agctaagaaattaagctctagaagctggaaaagacaaaaagaattctcccccagagtctccagagagagtgtggtcttgccaacaccttgcctttagcctagtggaaatgacatgaggtttttggactccagaattatgagagaaaaatacaggttattatttaactttgactcgtcactatattttttctatttttctatttcygggccccacctagactgcccttttttattcaccccactaaaatacaaattccataaggacaatggccctatgttattacctgctctatcttagtggctagaacagcacctggcacatagcaggtgctcaataggaagttgttgaatgaatagattagagccaccttctcatcaacccctgacttcaagagactgagtccaattctttaagctcagcattattcttgttgacccaaaactctacactagagatgcagctggattccgagagtgattacaagatcagtgaatactggcgaaaccatttctgatttgccactagcaaaacaacatgaaggaaaagtgatctcttgctcttaaaagcagcaaatcgttattggaaatgaggaaga

SEQ ID NO: 376943 - DNA, 588 bp, Homo sapiens
accatctagaagaaagggccatcaccaaatctgctggcgccttgatcttaaacttcccagccttcagaactctgagcaataattttccattgtttataagtttgtaaggtattttattataacatcccaaagagactaagacaatatactttagaacagaaaaggaaatataaaatttaaggaaacatagtatctaagagtgacacaaaatttgggattttcattaaaatactcctgcaaaataaaggtagtagagagaatatatcarataagataaacaaaatgttggcaaatgttcaagcagggtaataaacatttattacaattctttccatatttgcgtgcatttgaaattttttcataataaaaagttttgtggccaggcgtagtggctcacgcctataattccagcactttgggaggccaaggtgggcagatcacttgaggtcaggagtttgagaacaccctggccaacatggtgaaaccccatctctactataaatacaaaaatcagctgggcatggtggtgtgcacctgtagtcccagctactctggaggctgaggcggaagaatcacttgaaccaggga

SEQ ID NO: 376944 - DNA, 554 bp, Homo sapiens
accctaattattccagagaaagtcagccaggggctaagaatatttcataaaaataaccagaaatcagtttgttcttatctctgcccccacttgcctagtgggaygttggtttcctccaaagggtcctgaaagtccctgcagcagatctcaaacgtgctctccactcccctgccaaacctgcttttagcctttttcctctcatgctctgatctgctgtggagatttcttccagccctgccctgccactgcctgatggagtggttgctgtagaaggctgttatgcctgtccaaaggctgctggcactgacctcatgtgtcctgtaatgtcaccacagaacctgctgctgctaatgtccccttgatggcccagggagattataaacaaacaaagctatatttactaacttgtttactgcagctctctttctccatcatttagactccagtcttcagaggttagggaaaaatctgagagagaatcgcatcctcttctcagggtccttccccccacccctctaagcctgggcccctgtccttgaatcacacccggcccg

SEQ ID NO: 376945 - DNA, 554 bp, Homo sapiens
accctaattattccagagaaagtcagccaggggctaagaatatttcataaaaataaccagaaatcagtttgttcttatctctgcccccacttgcctagtgggacgttggtttcctccaaagggtcctgaaagtccctgcagcagatctcaaacgtgctctccactcccctgccaaacctgcttttagcctttttcctctcatgctctgatctgctgtggagatttcttccagccctgccctgccactgcctgatggagtggttgctgtagaaggctgttatgcctgtccaaaggctgctggcactgacctcrtgtgtcctgtaatgtcaccacagaacctgctgctgctaatgtccccttgatggcccagggagattataaacaaacaaagctatatttactaacttgtttactgcagctctctttctccatcatttagactccagtcttcagaggttagggaaaaatctgagagagaatcgcatcctcttctcagggtccttccccccacccctctaagcctgggcccctgtccttgaatcacacccggcccg

SEQ ID NO: 376946 - DNA, 536 bp, Homo sapiens
tttttaatgtctgaaaaccattgttttatagattttctcagttttaaatacagtagactttatttktgagaacagttttagattttcagaaaagtcgaggaggtagtataaagttcccacataccccataccattttctcttttatcaatatcttacattaggatggtacatttgtcataattaatgaatcaatattgacacattattattaagtaaagtccatagttaattttatttctttagttttcccctaatgtcccttttcttctttaggagcctatccaagatgccgcatcacatttagttgtgatgtctctctagggtcctcttggctgtggcagtgttttggactttcctaggttctgataaccttgacatttctcttcttcttcttcttctttttttaaaatatcttctttgtaggttggttgtgagcactaattgctatatttgaaacgtttaatagagaatatggcccataatgagaccttaaaataacttgaaagaagacaaagaccattttaacctataataa

SEQ ID NO: 376947 - DNA, 536 bp, Homo sapiens
tttttaatgtctgaaaaccattgttttatagattttctcagttttaaatacagtagactttatttttgagaacagttttagattttcagaaaagtcgaggaggtagtataaagttcccacataccccataccattttctcttttatcaatatcttacattaggatggtacatttgtcataattaatgaatcaatattgacacattattattaagtaaagtccatagttaattttatttctttagttttcccctaatgtcccttttcttctttaggagcctatccaagatgccgcatcacatttagttgtgatgtctctctagggtcctcttggctgtggcagtgttttggactttcctaggttctgataaccttgacatttctcttcttcttcttcttctttttttwaaatatcttctttgtaggttggttgtgagcactaattgctatatttgaaacgtttaatagagaatatggcccataatgagaccttaaaataacttgaaagaagacaaagaccattttaacctataataa

SEQ ID NO: 376948 - DNA, 631 bp, Homo sapiens
ttaacctataataatgagggagggctttatttttgtgaattcaaaggaaggacagaaaatgggatggatacctcaagtgtactttaaaatgtaaaattttggcttttaattaatatttgtcacaagcaattcattttcctagtacaaagaatgtgaggaggatattactagttgaggtgggacaaattagctagctgctgtacctttaacctgggaggtacccatcttagggttgacaggtgcagcagataaaaatacaggacaccaaatgagatttacatttcagggaaacaacaaataatctgttaagataaatatttctgaaatgttgcatgggcgtcctgtatttcatttggcaactctaatccttctttctckccttgggagattctggcaccatgtgactttctgctctggacattttaccagatgtcttgatgattgactgtgtctcccatgtccacgtcaaaagatcagtaacagttacccggattcatatatcatgacaaagaaaagcaaaaccttctaaaactaaactctggagtgtgggttatgagcctgctctgtttaatagatgaggagatactggctggagggcttttaccaggctcaaaccttgagcatcatcata

SEQ ID NO: 376949 - DNA, 617 bp, Homo sapiens
ccagttcaaaatatatacattaatcaaaacatgatgttatataccataaatagatataatctccattggtcaattagaagataagtacttcgaacacctcactgatggaagtttgcaaaagtcaataataaaaatttgcacttgtaggggtccttgcatgactccttcatgcattttatccctttgtggcttcatagcaattgctgtaatccccattgcacagatgagctaaagtgtgaggatttcctgaagataattaaacttttaggattggagtttagaccacctgactatgaaaccaggccacattctctctgatgtccctgacttagttttgtgtccactttctagggagagaagtttgtttcttcagcayttgaagaacaattttatgatctcagaagaaggtgtcattcctatttggcctgatatttaggttaaggcattatggaaatcagcagatattacaaattatctactccctgaagccagtttttaaacaactaccagcacaccattgctaacccacaaaacagggcttatctctgctctcagtctatatagttattattttctaaaagaactctttgctaaatttgcactgttcaatatgggag

SEQ ID NO: 376950 - DNA, 568 bp, Homo sapiens
atctactccctgaagccagtttttaaacaactaccagcacaccattgctaacccacaaaacagggcttatctctgctctcagtctatatagttattattttctaaaagaactctttgctaaatttgcactgttcaatatgggagcaacaggcacatacgtccattgaacacttgaaacmtggctagtccagatcgagatgtgctgtaagtgtaaaaaacacactggattttcaaagacttaatacaaaaaatgcaaaatagttcattaataatttttaaaatgttaattacacgttgaggtaatattttggatatacttaaataaaatagagtgttaaggctaagttcatggtttatttgttttttttcttactgtggcttccagaaaatgttaaattatatacatggctcacattatatagctactggataacagtggttaggctataagcttcctgatgacagaaaccatgtttcctcagtaactagcaccccatgtctgctacatagtaggtactcaataaatatgtgttgactaaatgtatggaaaggggtggaggaaagaagg

SEQ ID NO: 376951 - DNA, 568 bp, Homo sapiens
atctactccctgaagccagtttttaaacaactaccagcacaccattgctaacccacaaaacagggcttatctctgctctcagtctatatagttattattttctaaaagaactctttgctaaatttgcactgttcaatatgggagcaacaggcacatacgtccattgaacacttgaaacatggctagtccagatcgagatgtgctgtaagtgtaaaaaacacactggattttcaaagacttaatacaaaaaatgcaaaatagttcattaataatttttaaaatgttaattacacgttgaggtaatattttggatatacttaaataaaatakagtgttaaggctaagttcatggtttatttgttttttttcttactgtggcttccagaaaatgttaaattatatacatggctcacattatatagctactggataacagtggttaggctataagcttcctgatgacagaaaccatgtttcctcagtaactagcaccccatgtctgctacatagtaggtactcaataaatatgtgttgactaaatgtatggaaaggggtggaggaaagaagg

SEQ ID NO: 376952 - DNA, 586 bp, Homo sapiens
ggctctctgccactagagtcacgatacagttaattagcattattttcgctgttagatgagttctcacaacttaagctagtttgcagcccgttttgcctccactaattcactgggaaacagtagtacaattgttcctggatggtaatgtgaatacaggttgccctgattttatatcccacttawccacaatgcatgtatattgataagcataatggatgccaatatactgctttgcagtttaccaagtacttttataatcattatcttatttcatccacacaagagccctgggaagtatttattacccacattttatagatgaagagaagaattgagcctcagaaaatggaaatgtcttattaaaaatcacatggcttgtagtgaaggggctgggacacgattttaggtcttttcaattgcaaaactctgtacttactacttcactgtagtgcagtacaaggccctttgcatgttgtctctgcctttttctttctgttctttcagagccatcgaatcctctttattacacgcattgtggaacaatttgcctagttctccaaccaccattctgcttatcaaatggctg

SEQ ID NO: 376953 - DNA, 586 bp, Homo sapiens
ggctctctgccactagagtcacgatacagttaattagcattattttcgctgttagatgagttctcacaacttaagctagtttgcagcccgttttgcctccactaattcactgggaaacagtagtacaattgttcctggatggtaatgtgaatacaggttgccctgattttatatcccacttaaccacaatgcatgtatattgataagcataatggatgccaatatactgctttgcagtttaccaagtacttttataatcattatcttatttcatccacacaagagccctgggaagtatttattacccacattttatagatgaagagaagaattgagcctcagaaaatggaaatgtcttattaaaaatcacatggcttgtagtgaaggggctgggacacrattttaggtcttttcaattgcaaaactctgtacttactacttcactgtagtgcagtacaaggccctttgcatgttgtctctgcctttttctttctgttctttcagagccatcgaatcctctttattacacgcattgtggaacaatttgcctagttctccaaccaccattctgcttatcaaatggctg

SEQ ID NO: 376954 - DNA, 484 bp, Homo sapiens
cccacatgtacttctaattattaaacataattcagtttcatttgatttatgtctgtgtcattcctttctttgcactgacatgtccttgcagagggtgatctgtgtggcctctcctggtggcaaggcattccatggaagtggtttacaagaatactatgaagtatatcmtgaaggcacatttgaatttccatgtgattatcacatggagattccttttcctcagtggccaagattattgatatttattattgcttcccactcttcagttttcagtttatagctcctaatatttttttttaagaaatgtgtcttaaaatcactgaggacagcattccatttacaaccattgttacttggaaaaatttgaaaaataacttgttcttggttcaataatgctgagcaatttacaggtttctcatccctttataagaatactagaaacaattcatttttttctcagtaaaaacaagtttttcagttcagt

SEQ ID NO: 376955 - DNA, 484 bp, Homo sapiens
cccacatgtacttctaattattaaacataattcagtttcatttgatttatgtctgtgtcattcctttctttgcactgacatgtccttgcagagggtgatctgtgtggcctctcctggtggcaaggcattccatggaagtggtttacaagaatactatgaagtatatcatgaaggcacatttgaatttccatgtgattatcacatggagattccttttcctcagtggccaagattattgatatttattattgcttcccactcttcagttttcagtttatagctcctaatatttttttttaagaaatgtgtcttaaaatcactgagkacagcattccatttacaaccattgttacttggaaaaatttgaaaaataacttgttcttggttcaataatgctgagcaatttacaggtttctcatccctttataagaatactagaaacaattcatttttttctcagtaaaaacaagtttttcagttcagt

SEQ ID NO: 376956 - DNA, 484 bp, Homo sapiens
cccacatgtacttctaattattaaacataattcagtttcatttgatttatgtctgtgtcattcctttctttgcactgacatgtccttgcagagggtgatctgtgtggcctctcctggtggcaaggcattccatggaagtggtttacaagaatactatgaagtatatcatgaaggcacatttgaatttccatgtgattatcacatggagattccttttcctcagtggccaagattattgatatttattattgcttcccactcttcagttttcagtttatagctcctaatatttttttttaagaaatgtgtcttaaaatcactgaggacagcattccatttacaaccmttgttacttggaaaaatttgaaaaataacttgttcttggttcaataatgctgagcaatttacaggtttctcatccctttataagaatactagaaacaattcatttttttctcagtaaaaacaagtttttcagttcagt

SEQ ID NO: 376957 - DNA, 629 bp, Homo sapiens
aaggcacatttgaatttccatgtgattatcacatggagattccttttcctcagtggccaagattattgatatttattattgcttcccactcttcagttttcagtttatagctcctaatatttttttttaagaaatgtgtcttaaaatcactgaggacagcattccatttacaaccattgttacttggaaaaatttgaaaaataacttgttcttggttcaataatgctgagcaatttacaggtttctcatccctttataagaatactagaaacaattcatttttttctcagtaaaaacaagtttttcagttcagtcattgtgaatcccatacttgttcttctcagtgaagataatggactgagataacaccacttttcctgaatgagaataagagaatcacaggcaagttgccattggattactacagctttgatttggctagagttttcgtagctctcctcctttatatatgattataaaaaatttatgttttctcatttaaaagtgtcttttagccaactacctgctaagaatcagaatataggmgatttaaatatcatgaaacaattagtgaatgctgcagacattatgcattaccttcctttagtccttgctaataggaccacagt

SEQ ID NO: 376958 - DNA, 588 bp, Homo sapiens
atctgtaacagccacagactctaacccagggtaaggacaagtctctgtcagattatgaggtgctcctctacattctctgcttaagtatgtgccacccatttatttataaattcagcctacattcatttgcttttaatacgtgttcttttctctgccatctaggatcttctgagcattttgtttaatatttccagataacagtgagtactaggtgagcctatttctatcccagcattataatgaatactttacttttcagactgtatgactatctctttggtctaaagcagtactatctaatagaaatataatgagggtgacatgtaatttttctaaaaggagaaaaatacatgtacattacaatacaacagtaatatcttatccaatgcaatggttagagtgaaaygtaatcctaccaaacaataaagttgtgtttaatggaaaaaatattttgcattgcttcagttttaaaatgaaaattaaataaaattaaaattgtagttcctccattgcaccggccacatttcaagggctcaatagctacatgtggctactggctactgtattagataggtcagacctattctc

SEQ ID NO: 376959 - DNA, 518 bp, Homo sapiens
ttctgattaagctgcttgtatggagcatcagtttctttatgggcaccaattgtgtttatctctacagattggaggaacattctgtacasgatttgttttttaagaaatccatttaaaaccattagaaggaaagagcagagaaatgaaagggcactatctagtggttctaagagaaggaaggtgctgaaatgcttatgatgctaattttccttttagtctcagttgtctggagtagaggaatggtatctaattgttagagatgtgagagatctataaagctgtgagcatctctatctgcggaagtccatcatcaggaaaaatgcatttctttaattactggctcaatgaagatgcatttcaaagtgcatttgggaaggagaatctataaccaccctcctgtaggcctatactccagccctcaactcagtaggttccagggaagaaagcacatcacaacatgtggcattcactcagtctgttctgtttcacagagctgactttatcccagataaccgccc

SEQ ID NO: 376960 - DNA, 598 bp, Homo sapiens
tcattgtcaagtagttatgtagctttggaaatttgtcctttttggatcctgcttctcttacattaaatgtcagatatgaaagagaaatttctggaattctgactttgcatgttatgtaatctggaacatatttccactgmaaatattgaacttctaagaggaagaatagcaaatgcctggcactttgctgccaccttgcccatgatcaattccactactctaattctcttggtctaggcttaggtgtggactcagaatctttctccacacagtgcctaggaggccactaccaatcacttgaagttgaccttaaaggtggaagcttcttgctgatcctggatggtgagaattcaaggttccacactgttcatcacattgaggtttccattttcttatcagcttctaaggacaatttggttttcatggcaacagttatcttcacagactcaccaggataaactctcatattcaattttcaacatatgtcaaggaataaatatctgaatgtgaaaacaaatgaaatgaaatgcagcaaacagtaacaataaggacagaggctatatcaatattaatgaatgatgtttgtgctatgctatat

SEQ ID NO: 376961 - DNA, 598 bp, Homo sapiens
tcattgtcaagtagttatgtagctttggaaatttgtcctttttggatcctgcttctcttacattaaatgtcagatatgaaagagaaatttctggaattctgactttgcatgttatgtaatctggaacatatttccactgcaaatattgaacttctaagaggaagaatagcaaatgcctggcactttgctgccaccttgcccatgatcaattccactactctaattctcttggtctaggcttaggtgtggactcagaatctttctccacacagtgcctaggaggccactaccaatcacttgaagttgaccttaaaggtggaagcttcttgctgatcctggatggtgagaattcaaggttccacactgttcatcacattgaggtttccattttcttatcagcttctaaggacaatttggttttcatggcaacagttatcttcacagactcaccaggataaactctcatattcaattttcaacatatgtcaaggaatraatatctgaatgtgaaaacaaatgaaatgaaatgcagcaaacagtaacaataaggacagaggctatatcaatattaatgaatgatgtttgtgctatgctatat

SEQ ID NO: 376962 - DNA, 612 bp, Homo sapiens
atttggcataagacttaatgaccttacttacagcttccaagagatccttctccaagagatccttctcagtagcaatttttcaccgtgctctgatggcaaacataccagcttctgtgcagacacttctaatctcagcagcagtgccatttggacacagtcgtgctaacaattcaaatctgatatatctttcaacactcattgaatgagcgtgaatcttaaagatgtgggtccgaccctctagatcaggcaagctaaattcaatttttctrtctaatctgcctggcctcatcagtgctggatccaaattatcaggtcagttagtggccatcagcactttaatattgcctcgaggatcaaaaccatcaagctgattgatcagttccaacatcgttctctgcacttcattgtcacctctagcaccatcatcaaaccaagcccctccaatagcatcaatttcatcaaagaagataaggcaggctttttttgttctggtcatttcaaagagctcatgaaccatttgagccctctcactgacatatttctgtacagctcagatccaataactcgaatgaagcacgcatcagtctgattagcaactgcccacacacagag

SEQ ID NO: 376963 - DNA, 559 bp, Homo sapiens
gacatttattgacagtgtattatgtaccaggtactgtttgctctaagccatttgaatacatacattcattttaatactcactgtctatgaagtaggtatcattaatatccccattttgcagaatggaagctggtgcaagagtgattaagtgaactgtctgagatcacacagttgattrgtggagggaatgactcagacctggatcattcaaccacaaatccaatatgctcctctcattttttaatacttacccccttggagcctagatttctctttctgcttgtgaattccatagagggacaggagggacaattctgacaattctctcaacttagtcatggtgtcctcagtggcccaggagggtaaagtgaaattgtgaacactctgtagcaaagaaaaaggaagaaaaatgtatgtgtatttatatgactgtcctctttgttgacttatcctttttcacctcacaagaactagtagggccagactttcttgtcctgccatttctttctaaaagaacttcatattgtgataagtagtggtattgactttcagaagaaaa

SEQ ID NO: 376964 - DNA, 577 bp, Homo sapiens
ataattagtgtgttttgttgttcatgttcccaagtcaaccctagagatggagccaaggttatcacatccacatggaacattctttttcacctctagtcaggagatagcaggaggaagtttgtgtttctctctttttctgcaactrtgctacaatttgacactgaaaatactcaggctcgaggtttaatttgaatatctatggtataaaattaccagtgttcacaccccctagcattttcctgacaaattaattgccaatacaattttcagcagtgggtatgtgtggagcgaggcagggttgagagttcagcttatgggaggtaattataggtgcccttggctgggaaagagcacagatgatgctaaaggagccaatgttttgggtaagcagcacctgctcctttgccagctctgtagacccatggatctgggaaacatatataatttggaggatttagggtctacctttggtcacataatttaatctcttaatcatcgtgtgttctgtggttgccgtgagctctctgaaactgaactgtgtgtctccattacttggttcttagatcttttctccatt

SEQ ID NO: 376965 - DNA, 577 bp, Homo sapiens
ataattagtgtgttttgttgttcatgttcccaagtcaaccctagagatggagccaaggttatcacatccacatggaacattctttttcacctctagtcaggagatagcaggaggaagtttgtgtttctctctttttctgcaactatgctacaatttgacactgaaaatactcaggctcgaggtttaatttgaatatctatggtataaaattaccagtgttcacaycccctagcattttcctgacaaattaattgccaatacaattttcagcagtgggtatgtgtggagcgaggcagggttgagagttcagcttatgggaggtaattataggtgcccttggctgggaaagagcacagatgatgctaaaggagccaatgttttgggtaagcagcacctgctcctttgccagctctgtagacccatggatctgggaaacatatataatttggaggatttagggtctacctttggtcacataatttaatctcttaatcatcgtgtgttctgtggttgccgtgagctctctgaaactgaactgtgtgtctccattacttggttcttagatcttttctccatt

SEQ ID NO: 376966 - DNA, 537 bp, Homo sapiens
aaaataaagggttataacattattatgtgacaaagtaaaataacagagaagtgcacatttgattccattaagtcttgttctcaagtttttcctgtgatgtcagttgcttttaaaaatatgaaagatccagtgagaataagataatatttctggcactctagtccctgsaataatgggattggagagaaaggaatgaggatatttgctggccaaggttaatatacaagggtttcatcctgtcttcttcatgaatttgaatctcatcacccaaatatctcagctacaaggattctgctatgttttctggaaaacaagtccactttcagaactctcaccaagttaatcacagtcagaagatgccaaggttgggcaggaccatctactccaactctttcatttaacagatgaactaaggtccatagatggacaagggacttaccaaagattgtccagcaggttagtttagaataagggctagaatctaggttttctttaaagcagcaataagcaagtgctataggaataatcagttgcttc

SEQ ID NO: 376967 - DNA, 537 bp, Homo sapiens
aaaataaagggttataacattattatgtgacaaagtaaaataacagagaagtgcacatttgattccattaagtcttgttctcaagtttttcctgtgatgtcagttgcttttaaaaatatgaaagatccagtgagaataagataatatttctggcactctagtccctgcaataatgggattggagagaaaggaatgaggatatttgctggccaaggttaatatacaagggtttcatcctgtcttcttcatgaatttgaatctcatcacccaaatatctcagctacaaggmttctgctatgttttctggaaaacaagtccactttcagaactctcaccaagttaatcacagtcagaagatgccaaggttgggcaggaccatctactccaactctttcatttaacagatgaactaaggtccatagatggacaagggacttaccaaagattgtccagcaggttagtttagaataagggctagaatctaggttttctttaaagcagcaataagcaagtgctataggaataatcagttgcttc

SEQ ID NO: 376968 - DNA, 568 bp, Homo sapiens
cagttagagcattacacaaagctgtccagctgagggtcagtagtggctaaaatccagctcccactctgtaagccayagaacaccctggttggggttgcatgtgcctagaggaaagggaagtttttctaatgaggactgtgaaaataaataaaaatcgaaactgttggaactttaaattattttgagtcttagagaaatgtgattatggggcctgagtcacatgataggcagctgtaacccaggcagctttaacctttgtttctccgattatagattagccttcttccttaactatcttgttttgtaaaatgttgtgactagctacagggcaccagggcagaccccttccctctaactgttgatcttcattacagattagctttcctcttacctctcatacaaatacttcatggttatcacattgtctaagacaaaatgttaagtatacttttttattttattgaaaaggaaatacaaacaagctgtatggaaaagaaaacaaactgtcactaattcaatggttgcaactcataaaccagcctcatataagaaatgtaaccctgttaaa

SEQ ID NO: 376969 - DNA, 568 bp, Homo sapiens
cagttagagcattacacaaagctgtccagctgagggtcagtagtggctaaaatccagctcccactctgtaagccatagaacaccctggttggggwtgcatgtgcctagaggaaagggaagtttttctaatgaggactgtgaaaataaataaaaatcgaaactgttggaactttaaattattttgagtcttagagaaatgtgattatggggcctgagtcacatgataggcagctgtaacccaggcagctttaacctttgtttctccgattatagattagccttcttccttaactatcttgttttgtaaaatgttgtgactagctacagggcaccagggcagaccccttccctctaactgttgatcttcattacagattagctttcctcttacctctcatacaaatacttcatggttatcacattgtctaagacaaaatgttaagtatacttttttattttattgaaaaggaaatacaaacaagctgtatggaaaagaaaacaaactgtcactaattcaatggttgcaactcataaaccagcctcatataagaaatgtaaccctgttaaa

SEQ ID NO: 376970 - DNA, 521 bp, Homo sapiens
tgagtacttactgtagggattgacaacaggtacatttggtcattcccttattgcctgtttttaacttggtgaatgtgacatgtcctaacaacaaatgcctttgtcaataagataataatttgagttaataagtttgagttttttgtatgctaacaagtctccagctgccacataaatgtatccagttagagcattacacaaagctgtccagctgagggtcagtagtggctaaaatccagctcccactctgtaagccatagaacaccctggttggggttgcatgtgcctagaggaaagggaagtttttctaatgaggactgtgaaaataaataaaaatcgaaactgttggaactttaaattattttgagtcttagagaaatgtgattatggggcctgagtcmcatgataggcagctgtaacccaggcagctttaacctttgtttctccgattatagattagccttcttccttaactatcttgttttgtaaaatgttgtgactagctacagggcaccagggca

SEQ ID NO: 376971 - DNA, 568 bp, Homo sapiens
cagttagagcattacacaaagctgtccagctgagggtcagtagtggctaaaatccagctcccactctgtaagccatagaacaccctggttggggttgcatgtgcctagaggaaagggaagtttttctaatgaggactgtgaaaataaataaaaatcgaaactgttggaactttaaattattttgagtcttagagaaatgtgattatggggcctgagtcacatgataggcagctgtaacccaggcagctttaacctttgtttctccgattatagattagccttcttccttaactatcttgttttgtaaaatgttgtgactagctacagggcaccagggcagaccccttccctctaactgttgatcttcattacagattagctttcctcttayctctcatacaaatacttcatggttatcacattgtctaagacaaaatgttaagtatacttttttattttattgaaaaggaaatacaaacaagctgtatggaaaagaaaacaaactgtcactaattcaatggttgcaactcataaaccagcctcatataagaaatgtaaccctgttaaa

SEQ ID NO: 376972 - DNA, 502 bp, Homo sapiens
accaccattggtttaactcacaattgtatgggttagttgggtagcactgggctcatgttggatctgtggtcagctgtgggtcaggtaggaagctctacttctggagctagtctggctgctggttgaggctataggggtgactgggccatgtgtctctcattagccagcaggctagcctgggcttgttcatgttgatatagtggctggacagggttccaagaaaaggaatgcaaggtctcttcaggcgtaggcttggaactggcacaatgtcatttctgccacattctcttggccaaaataagtcatgaggccaggtcagactcaagggattagaaaatagacttttgatgggaaaaatttcaaaatcacattacaagcaggtctggaggcagggaagtgaataattggggccacttttgcaaayagtctacccaattgccctctgcttctatgagccggcagagcccatcaaattggaatgtaagtcacactttatagtttg

SEQ ID NO: 376973 - DNA, 537 bp, Homo sapiens
atgtcatagggggcacctggatttgaaccagggacctcttgatctgcagtcaaatgctctaccactgagctacacccccttgatgccaataaccttcaaaaaaccatttattccatttttatgacctgcaaaacacctcataaatacctttggtgtctaacattcctttcgaatttaaactcatccccagtttcctcctagcygtaccatcttttgtttttcccagagcatttatactcattctcttcccagcacctgaagctcaatgctgtatcctcagtctaatattccagctttaaaaaaatacaccaccagctgcccatagatctctgggcacgtcaatgaatgttttgagcattaggggctaccaacaagtattggacatggaggagatctgaagtgggaatccacaaattgacttcagatgttcatgttcaattctgaaattataggcaaatattatgtatttgcacatattgtatattgtgcatatttttatcagattttcaacagggacctcatccaggaccaactatc

SEQ ID NO: 376974 - DNA, 579 bp, Homo sapiens
catctacctggcttcagcttctgctgcactgtttcctctgcctggaattgcaaccatccctctccacaaccccacctccattccaccctccatctgtaagatattattcatctttgaaaccctsactggccatcagctcctccagacgcttaccttcacctcccctcctctgaacagatgtaatcgctgcctcttctgtgttactgcacctatcgcagctaggtacagctcatacactctattttcttattctatatgcctacaccctgaatgagggcaggggctaatgtcttattcaccactgggctcacactttgcatggttctggtacatagtaggtgcccagtgtatgttgttcagactgatctaaaaacagagcattgcctgtattgtgggtgggagttacacctgacttctggctccatgcctgggtcctgaatgaagttacccaatgtgggggtatttggctgtaggaaatgaacaggggatggaaggtaatagaaatccttaagctttaaagcagaaaaatgcagttccttaaacttcagaccagttcttgttcacctccctgaaaatgtt

SEQ ID NO: 376975 - DNA, 660 bp, Homo sapiens
cctgtacagcttgtggagctgtaagtcaattaaacctcttttctttataaattacccagtttcaggtatttatagcagtgtgagaatggactaatcacaccagattataaagctgcatgaaygtttcaatcagaaaagtctttaattcaaaaggaaaccacaggaatcactatttattgaccacttcttctcagtctcagaaagcctgataggagactagggttctgtagctggagagttttaaagttagtgctgcttccagcgtaaggtcaagagtcataaaatataccccaaaatatcggttgctaaaatatgccaattacttgatttaaaaaatacctcagcctatagaaagtctatcaaaaatatgtaattgattaatgtgcttagtaccacgttttcactttacaaaattatttaatccacaaaacaatgactcacatcaaatgactaccagtccacctttctccaagttccctctgggacagagttactgtgcttaatcctaaatcatcaaatccattgtacctaactctgtggaatgtttttttctgagttagtttatttagttgaagaattactataaggcagtgattttcaatgtgttgcttgggggtcctgagacccttcagagggcccctgagactccttcagggaatt

SEQ ID NO: 376976 - DNA, 223 bp, Homo sapiens
ataaataaataaaaacaaagttgattaagaaaggaagtataggcyaggcacagtggctcacacctgtaatccttgcattttggaaggctgaggcaggaggatcactttaggcctggtgtgttcaagaccagcctggtcaacatagtgagacactgtctctaccaaaaaaaggaaggaagggacacatatcaaactgaaacaaaattagaaatgtaattatgtt

SEQ ID NO: 376977 - DNA, 616 bp, Homo sapiens
tgacatacatgcaatctgttgttgatggaaactttgttatgtggcatgtgactgtataaacaaatatatttcaaattatttagaaactatggtaatttattatgagacaagaattgggcatctcatatttaaaaagcaacttatttttgtttttctaaacaattttttgaaagattcaaccttgaaatgaagacyaccttgtctatgcctatgaagtaaaacacagaatcattttttaaccatttttttttactttgaaaaaaagtgtttactgctctgtcttcctttctaaacctgtccatgtgattttgtgatcttttcccactataaaatcaaaatacctttattgtataaaactttaaacatacatcaaagaatataggtagaaaaaatacaatttgactggatctaaatcactgtttttattttaactgttgtcttttttatttgtagttgtgttcaggcacgtgaatgtgagtgggttgtttttgtgtgtaaatatttaacaaaaattggaatacatatgtatcaggcttatcttaagcagcatgtcaaatctttttggccttgactatttctaaggcctttggccaccaattcttccctggctgtcagt

SEQ ID NO: 376978 - DNA, 526 bp, Homo sapiens
gataaagactccagtgtcaaccaggagtttgctcctcaacatagagcttttatgccatagttggtccaacattctgtggaccactaaagagcaaggatggactgcccaaaccggcttttgtaatttcccaaaatacattcattttactagaggatcatagaagttaaagacttaaaacaaactttggcaattaaaacaggataccaagatgcaaatgcctggttggaatggatcaaatatttcatctgcacgttaaacaaaagcaattgttatgcttgtgcgcgtggcaggccagaggcccagattgtcccctttccactaaggtggtcctccagtcaaccaggcatgggctgcatagtagctcttttccaggattctacagcctggagtaataagtcgtgccaagctctctctgctatgtcccaaaatctggcaccctgtgggtcagccgctgagggccatccagcctccrtctcccaacactacgttcatttcgtgtctctcatgacagagaggaaacttagca

SEQ ID NO: 376979 - DNA, 382 bp, Homo sapiens
aaaccaataagagatgagttacccagaactagcaacagtagtaagcctcattactcagttgtgagggggaaggtagactctttccagacctttgataaaggggctgctcaaaaaagccacgaccttgggcctctgctaaaaccatggctttaagtaaggagggagcagatatataaaaawccttatccctctttctaatctcttatgtcctgtgagtgtcacccattgagtaaacccaagtggaagtcagcaggaaagtagctgggatgatgcagtctttacaggtaagccttttggaagcacagaacaatggacagaagggcaactaatagatctacaggggtgccctgaaagtgatcagcagagagacttagctattgat

SEQ ID NO: 376980 - DNA, 510 bp, Homo sapiens
caagtccagtttcttcccaccccatgctgctctttgaggtctgctgttttatagcccctgcttctctagcctgaatgtgtggtcagggtttgtggtgaatgtgaaattgagtcagaacccagttaattatggagagtacatcataatgcccttaggatgaaaaattatcattattgttgtttttaaacacaagactcacctaaaaacttcccatgaacaaaatctatagtttagttggaaatataattgtttcactgacctgtttcttaacgctcctcattataaacaacaggaaaactatatgtaataaaactttgacaaaactgtaagttgcctaaacaaaatcagttaaaaaaaaaagtaaagtttttattttatgatcgcttaaggagcctgaggatatgaaaatggtagaggtggaagaaacaagggctgggagttaaaagggggtgtttggtgaggaagaaaaaayaatgaattgcagtactttaagagccactgaaatgaagc

SEQ ID NO: 376981 - DNA, 623 bp, Homo sapiens
cttcatcatctgtgtctgacacttttgttgccattcacccaatttctgaagcccaatgcctaggagtgccccttgattctcccgttagccttaaataatgaggaccagaaaaattaagtatagagtttataggagtccaaagcttgaggatggccacatgggrgcatagattcaagttgccataaatatacaccctgattagtagcagttactagttgaagttttaaggagtaaaagaagaggcagttcctaagttgtttaccaagaatttacattaaaataacataagctaatgattggctatatattgttctttgtatcacaaaaacaggaagaaaatggatgtagcagctagtcaagaacaaaatacctttaaacaattgtcccagacatagcggagaaggtgactgaagtcccatactcatgtttctctgagcctgataaattctgcatatctcacatagctcagactgctctgagctattttccttttttccttttctcacccttctccctcacatctcatatccaatactagtatgtatttttctcgtccattcacttcttttgacttccccaaatccaccctgatccaagctacaatcatctgtttcctgggccac

SEQ ID NO: 376982 - DNA, 623 bp, Homo sapiens
cttcatcatctgtgtctgacacttttgttgccattcacccaatttctgaagcccaatgcctaggagtgccccttgattctcccgttagccttaaataatgaggaccagaaaaattaagtatagagtttataggagtccaaagcttgaggatggccacatgggggcatagattcaagttgccataaatatacaccctgattagtagcagttactagttgargttttaaggagtaaaagaagaggcagttcctaagttgtttaccaagaatttacattaaaataacataagctaatgattggctatatattgttctttgtatcacaaaaacaggaagaaaatggatgtagcagctagtcaagaacaaaatacctttaaacaattgtcccagacatagcggagaaggtgactgaagtcccatactcatgtttctctgagcctgataaattctgcatatctcacatagctcagactgctctgagctattttccttttttccttttctcacccttctccctcacatctcatatccaatactagtatgtatttttctcgtccattcacttcttttgacttccccaaatccaccctgatccaagctacaatcatctgtttcctgggccac

SEQ ID NO: 376983 - DNA, 602 bp, Homo sapiens
aaacctcaacacaaccatatgaggtactattattgtcctcatttyataggatattttttatgtcaatatcacacagatattatgtacagaaatgtgattcagccaacattaatccacttatactatgtcaaaggtaacatgcacatattcattcagccaacaaatattaattgaacacgttttgtgttctgcacagaaactttgctgtcactgtaccaggtactagaggcgactgtcataaataagacaaatagtttctattctcacagaatttaagatctatggggagatggattgataattaggcaatttcaatacaggccatgctttcatttgcaatgtctggctcttatgtttaaaggtcctgtggcaaaaatcagagctccctttttagtatgctttgatatatttagagaggctctataattgcatatcttctttattctgccaagtttggacatctgaactcagaaatctcaaagcaataaggggagccaagaaagaaaaatccagaatcttagagtctgggaattcttatggttctttcctgttgtgcttctccaaaagatttatttcccatttgaataatttctttatttctt

SEQ ID NO: 376984 - DNA, 548 bp, Homo sapiens
aaaatctttcatgcctccagtatatgacaggtaaaagaattgagacagaataatgtgtaatgacctgattaattagcactgagtccaaatcagcatgaaaatttgtgtgagtccccattatcagcacacaagaccaacttaaccttttacacttagtaaagttcttcaatctcaatggttctttatgccacaaacctcttcacaattcctattcaggccctacccaaagtggggctccagctccagtgcctgcttaccctttctcatattcttttctcatataatttaaattgtcacatggaggggaattgccagtacaatttcacatcatgcaaatacaattccatcgtagttgsatcctctattccctatgatcacaactgaattatggttcttttccatccagccatgtgttttaaagattgtgaaatctttccaatggtgtggtcttttctttatattttttttctcttctccataaagtctcaatgacttagatatgctttttccaattaattaacaacttgtttcttctaagtaaattgatt

SEQ ID NO: 376985 - DNA, 582 bp, Homo sapiens
tattttgtgtatcagctcagtcatattatagtttaattctgtcaaattatttgtcgttaaattttcgacacatggattgaataaataccaaatattttccaatttagcttatgcttcaaaacaaggactttctataatacttataaagaatgggcagtgrtgccttaaaagtaaagtggacttagtagacaactaggtaaaggtacaaccaaaagggaatagaaggaaataccatcagagagtggcagaaatccataaaattaacaaaccagatgcattctcagaggcaaacccaagatgagcaattattgaatgttgagctattgaatattgtagaagtgtcacgcagttgtcacagtgtggtaaaaagatggaaatcagaggctgagggtcaacaaacagtttaataaatggacgctgagagttggttaatgacctcaagaggagaagtttgattttagaaaataagtttttgtggttcgtagcatccatgtagtaaaaaagtaaccaatcaagtccaaacatgtaaaaaacttatttgtaacctttccccaaagatacacgattccatttccaatgaat

SEQ ID NO: 376986 - DNA, 582 bp, Homo sapiens
tattttgtgtatcagctcagtcatattatagtttaattctgtcaaattatttgtcgttaaattttcgacacatggattgaataaataccaaatattttccaatttagcttatgcttcaaaacaaggactttctataatacttataaagaatgggcagtgatgccttaaaagtaaagtggacttagtagacaactaggtaaaggtacaaccaaaagggaatagaaggaaataccatcagagagtggcagaaatccataaaattaacaaaccagatgcattctcagaggcaaacccaagaygagcaattattgaatgttgagctattgaatattgtagaagtgtcacgcagttgtcacagtgtggtaaaaagatggaaatcagaggctgagggtcaacaaacagtttaataaatggacgctgagagttggttaatgacctcaagaggagaagtttgattttagaaaataagtttttgtggttcgtagcatccatgtagtaaaaaagtaaccaatcaagtccaaacatgtaaaaaacttatttgtaacctttccccaaagatacacgattccatttccaatgaat

SEQ ID NO: 376987 - DNA, 588 bp, Homo sapiens
atattctataaatgtcaatcagatcaagttgattgatagtgccattcaagtcatctacgtgcagatttttttgctacttgacctatcaattattgatagagggacactgaggtctctaactgaaataaggaatttgaatgtttctgctgtcagttctatcagtttcaccaatgtgtattataatactatgtccttaggtgcataaacatttaggagataattaggttcaaaggaagaaattagagccttgtgctctggatctcaatctctctctccaaccccccctccttctctttccctccctccctctatcatgtgtggacacagtgagaaggtggctatctgcaaacacagaagagagctttaaccagcaatggaatgtgctggctcctagacctgtgaaaactaaaggtctgttatttaagccactyagtctggggtagtttgttatagtaacctgggcagactaatacagttggctcttatttttattaattgttgtatgtggaccattcatatttaaagtgattattgatatagttgaattaatatctaccatgtctgaaagtggtttctattcattgcatt

SEQ ID NO: 376988 - DNA, 604 bp, Homo sapiens
gcagggcaagtcagctggcaataaatttcctcaggcttttttttttttctttggtttgcctcctttacattggcagcataattgtatcggatatagaattctacagttgaaagtgttattctttcaacattttaaatatcccactccactctgattatatggttcttgcttatatggtttctgatgacaagctcaaaataattcttattcttgttcttctattgggaagagtttttctcctctggcttctttcaagattttatctttgtcttggtcttctgaagtttgataataataagcttarattgtgtgtgtgtgtgtgtgtgtgtgtgtgtgtgtgttgtttgtttttctctttggcatttgtcggcttcatgttctctgaaactcgcaaatgtgtgatttggtgtccgttactcattttgagaactttgcaaacattattacttcaattgtttctgctaccccattctctctttcttctccttctgatattcttcttacacatacatttcacctttgatattgtcccaagattcttagattttttaaaaatctttttatatcctcgaattttggtttgggaagcttctattgttttatc

SEQ ID NO: 376989 - DNA, 583 bp, Homo sapiens
ttcatcagagtttttacagttttaatttctagccttttgttttgatttttcttagactttcttctctctgcttacactacttattgttctttcatatcatctacttctcccagaacattaactatatattcttgcacatggtctactttttccttacagtatcaatgatagttattttaaatttcctgatgataattccatctgtgtaatagctaagtcattttctgatgacggttttgtctcttcagagygagcttttccttggcttttaacctgttttgtaatttttgttgaaaactggacagattgtatcaggtaattaggtaacaggaactgagataaataggcctttagtgtgagggtttgtgttagctttgctagaagttagactttgtttaactttttgatgttgctgttgttgttataggtaccagatgcttcaaattcctctaatgctgtcatctttttctctcatattgtctttaggattccctaaaaatagctcctcacagacagtctgtagcttgcagatctttcagctgtaatccagttatgatactggagccctgttggtgtggtggtg

SEQ ID NO: 376990 - DNA, 583 bp, Homo sapiens
ttcatcagagtttttacagttttaatttctagccttttgttttgatttttcttagactttcttctctctgcttacactacttattgttctttcatatcatctacttctcccagaacattaactatatattcttgcacatggtctactttttccttacagtatcaatgatagttattttaaatttcctgatgataattccatctgtgtaatagctaagtcattttctgatgacggttttgtctcttcagagtgagcttttccttggcttttaacctgttttgtaatttttgttgaaaactggacagattgtatcaggtaattaggtaacaggaactgagataaataggcctttagtgtgagggtttgtgttagctttgctagaagttagactttgtttaactttttgatgttgctgttgttgttataggtaccagatgcttcaaattcytctaatgctgtcatctttttctctcatattgtctttaggattccctaaaaatagctcctcacagacagtctgtagcttgcagatctttcagctgtaatccagttatgatactggagccctgttggtgtggtggtg

SEQ ID NO: 376991 - DNA, 583 bp, Homo sapiens
atgtaataggcacttaatgaatgttttaaaaattgagccaaagacaaaacttcatcattttgctttcctaatatgtagtataattttacaaagcataaaataatttgtactttttaatcacaaatttcctgttcttagtatgcaggataagctctataaatgatttatgggctcattaggctgattctcagaaatgcctaaaaatttgaccccaattttggttccacaatactgaggtttatacttgagaaaaatgggtttaatggacttacagttccatgtggctggggaggcctcacaatcatggyggaaggcaaaaggtacttcttaaatggctgtggcaagaaagaatgagagagaagcaaaagtgaaaaccccttataaaatcatcagatctcattagacttattcactaccacgagaacagtatgggggaaccacccctgtgattcaattatctcccaccgggtccctcccacagcaagtgggcattatgggagaacaattcaagatgagatttgggtggggacacagagccaaaccctattagtggtcatactgtcctttcaggttcagagaaagg

SEQ ID NO: 376992 - DNA, 603 bp, Homo sapiens
gctgtcatcttactgtgttctgatatcacatctatgtgcgcacagagggcgatagatcaagctttctgatgtctcttcttataagtgcacaagtttcatcaggaaagacccaccttcttgacttcatctagccctaattacttcccaatggccctttctccaaataccgtaacattggggattagagtttccacacatgagttttggacaacacaaacattcagtctataatgctctgtcactgggtgccccaaattcatatttttctaacacaaaaaatacatatattctattccaagagaccctaaattcttactttattccagcrtcaactctaatgtccaaagtctcatccacttatcatctaaatcagatattggtgagactcaaggtgtgattcattctgagacaaaattcctctccagctttgaacctgtaaaaccagacaaggtatgtgtttctaaaataccatagtggggtacaaatagatagacactcccattccaaatggaagaaatagaaaagaaagaagggatgatgggtttcaagcaatttcgaaacatagccaggcaaattctattaggtcttaaggcacaagaataa

SEQ ID NO: 376993 - DNA, 603 bp, Homo sapiens
gctgtcatcttactgtgttctgatatcacatctatgtgcgcacagagggcgatagatcaagctttctgatgtctcttcttataagtgcacaagtttcatcaggaaagacccaccttcttgacttcatctagccctaattacttcccaatggccctttctccaaataccgtaacattggggattagagtttccacacatgagttttggacaacacaaacattcagtctataatgctctgtcactgggtgccccaaattcatatttttctaacacaaaaaatacatatattctattccaagagaccctaaattcttactttattccagcgtcaactctaatgtccaaagtctcatccacttatcatctaaatcagatattggtgagactcaaggtgtgattcattctgagacaaaattcctctccagctttgaacctgtaaaaccagacaaggtatgtgtttctaaaataccatagtggggtacaaatagatagacactcccattccaaatggaagaaatagaaaagaaagaagggatgatgggtttcaagcaatttcraaacatagccaggcaaattctattaggtcttaaggcacaagaataa

SEQ ID NO: 376994 - DNA, 565 bp, Homo sapiens
attttccctataatggcacatatttttccatatgcaattatgttacttgagtatatacaggaacttcagaaagtaaataataattggaagaaaacagtkaaagtgcttcaacctatcattgaaaattatattaatgtgttttttgtaacatatctagatgacataagttatataatactctaccttactcaccaatattttatcaacatcatttaattttataagccatgctctttaaaatgtatcattggctttaaaaatgtataaaattctcttctttattaattgcctttagatattgttagatttaacaaattatgttttctaatatcaccaaactttttaaattaaaaaaattaccactaaaactttcaaattcagtttgttttcttctactaagatagagcagacacttttaggtttctgactcaatatccatcctatctccttcttcttacctaacaaaattcacagagccaccaattccccataatggcaatgggtcaggggaaatggatcccatcttagggattctatgttgtctaagctaatcataaaaattcca

SEQ ID NO: 376995 - DNA, 609 bp, Homo sapiens
tactcactttttccttctactgtcttccccgctctcaatatggttttcctatttttatttgtattttaaatctctcagtatatatttttttatagaatcaatatttccttttagttacccacttagttatcatgtttattatacagttatggcattcttcctgaatttccatgctctgtcaagcatcacatttcttttgcctcaataaattggtttcatcctttcttctttttagtttgattggctggcaagaaaatgtatttctttttcattgtctgaaattgtttttatttgcctcccattcagcctttagcaagtgatttttgttttctagcttctatcattwctttgaagaagtcaatatacagttgaatgttgcttctcttaaggtaaaattttatttattctatgttttctttgtatttgtatagttttactgtaatgtacttagtataaatttctttgtatttttcttggagtacatgatgcttcctgaatctgtagcttcatatctttcaacaataatgcaaatttttaactgtgctatttttcagcattactcctgagctgttttctctcatttggtcttattacatgtttgatctttct

SEQ ID NO: 376996 - DNA, 609 bp, Homo sapiens
tactcactttttccttctactgtcttccccgctctcaatatggttttcctatttttatttgtattttaaatctctcagtatatatttttttatagaatcaatatttccttttagttacccacttagttatcatgtttattatacagttatggcattcttcctgaatttccatgctctgtcaagcatcacatttcttttgcctcaataaattggtttcatcctttcttctttttagtttgattggctggcaagaaaatgtatttctttttcattgtctgaaattgtttttatttgcctcccattcagcctttagcaagtgatttttgttttctagcttctatcatttctttgaagaagtcaatatacagttgaatgttgcttctcttaaggtaaaattttatttattctatgttttctttgtatttgtatagttttactgtaatgtacttagtayaaatttctttgtatttttcttggagtacatgatgcttcctgaatctgtagcttcatatctttcaacaataatgcaaatttttaactgtgctatttttcagcattactcctgagctgttttctctcatttggtcttattacatgtttgatctttct

SEQ ID NO: 376997 - DNA, 395 bp, Homo sapiens
tctcttcagagcaattctattcagaatgagtgatatctaataccccttgttttgtctcagtttaatgagtttctctggaaactttgagataacaaaagaagttataattatcactcttgttacatatttgttgcctgttttaaattctctgtgaactacctagtcatagcccttaattattttcttctgctaccttttttyccctattttaaaagttggctttaggtgctttttatttaatgctaaatattttgcaaatatgtatttgtttgtcacgtatttaactttgttaacgatatatttttctataagtggatagccactttcacaatgctacattctaagtggtttaccctttcacagctatatccaatctctcttttgtcttaaactgt

SEQ ID NO: 376998 - DNA, 577 bp, Homo sapiens
tggttttctgaaatgtttgtttctccatgggttacatctttcaacagtgcttcaaaggattcctgttctgtcgatggctctctttgttttgccctcctcttattgatttttttcttttttttaataatccaatatattatttcatgctatttgtaagtgcagggatggctttgaaaccagtatttaaaaggcaaagtttatgttaagtaccagaaaatggcagggaggagcagcagagaagtgaggtatggaaacaatgcaaatatatttcttctgtgtcaagattttgaaaggcggataagcctatccactattaattttgcctttccattatcttaccttatttttagctrttttagcaaagatccttatttgatctcatccacattgcaacatttaatatcagcacagtctgtggagtcaaatatcctgattataagattactgatgaaaaacaatgtttttcaaggtgcttttatttactctgagacatgagtatgattatatctttaaaaaattaccaaaatttacagtcctccaagtctaccaaggcattctccatatcagtaagctgtaa

SEQ ID NO: 376999 - DNA, 442 bp, Homo sapiens
ccagcttcctgggaggctgaggtgggaggattgcttgagccttggaggttggggctacagtgagccaagattatgccactgcactccaccctgtgcaaaagagtgagaccttgtctcaaaataaaaaataaaaaataaaaaaacctaacccaccataattaagtaggctttattcctggaattttaagtttggttcaacataggaaaataaatgtgatgattcatcacataaacagaactaaagacaaaaaccacatgattatctcaatagakgcagaaaaggctcttgaatataattcaacaccccatttatgctaaaacctgtcaataaactaggtattgaaggaacatacctcaaaataatacaaaccatctatgacaaacccagagccaacaacatactggcaaaagctggaagcattcctcttgaaaaccagcacaa

SEQ ID NO: 377000 - DNA, 574 bp, Homo sapiens
agtggtggcccaggttcaggttcaatttttggcctagggaataagtactttttggttgaaatctgtatgatttttaccatttgttgaatctctttcttccacaaaccatcttgaaatttcctttctctgagtgcctggaaggttacctttggtaaagttcaaaagccagtattggccatttcgcatggctaaagtagggaaataagaaattttaaaaaatgttttttaaagagtgctatggttaaaagtcagcttaataaaaagcagatattcaagctctaacagcctgagactccatatggagaaaagatgtattagtccgatttcacactgctcttaggaactgcccaagactgggtaatttataaagtaaagaagtttaattcactcatagttctgcatggcagaggaggcctcaggaaactacaatcaaggtggaaggtgaagggaaaamaaggaccttcttcatgaggctgcagaagagagacagcagagagcaaagggggaagagccgtttattaaaccatcagacctcatgagaactcattcactatcacgagaacagcatgggggt

SEQ ID NO: 377001 - DNA, 625 bp, Homo sapiens
tattatgtgtcaatttaaaataataatgtttttaaatgtgacaaaatattactataaatagtgataatgtatgaatatattttagggttttattttaaaaaataatcttagatcatttaaagtttcacaaaaaaagtcttatgaggcatcatctgcagtagtgaaaacagccaatagagtataaattttaattactagtccagtggtacaataatattaataacccactgtgtggtaaaatatttaagacataatggtragaaaataagaaggctgcaatattaaatgcatactctaactcaaatgtctataataaatgcaaatacattttgtatatgtataataaaaaattagaagttagttacaatatttacaatgtttatcaccaagttaggattaagattgattaaccaaaatggggaggctctattccatactgagagtgcaaagactatggaagcagatgcacaagctttgcataccagtcctgctactttagagaagttacttaatatttccgaatattaattttttcaaatttttttaaagcacacgcacatttggtggagttttagagcatctatcaattaaaatatgtaaaagaatgcagtctaatttttatgac

SEQ ID NO: 377002 - DNA, 625 bp, Homo sapiens
tattatgtgtcaatttaaaataataatgtttttaaatgtgacaaaatattactataaatagtgataatgtatgaatatattttagggttttattttaaaaaataatcttagatcatttaaagtttcacaaaaaaagtcttatgaggcatcatctgcagtagtgaaaacagccaatagagtataaattttaattactagtccagtggtacaataatattaataacccactgtgtggtaaaatatttaagacataatggtaagaaaataagaaggctgcaatattaaatgcatactctaactcaaatgtctataataaatgcaaatacattttgtatatgtataataaaaaattagaagttagttacaatatttacaatgtttatcaccaagttaggattaagattgattaaccaaaatggggaggctstattccatactgagagtgcaaagactatggaagcagatgcacaagctttgcataccagtcctgctactttagagaagttacttaatatttccgaatattaattttttcaaatttttttaaagcacacgcacatttggtggagttttagagcatctatcaattaaaatatgtaaaagaatgcagtctaatttttatgac

SEQ ID NO: 377003 - DNA, 511 bp, Homo sapiens
tgaaaatacaagaatagtagaatagtagatataaagagaacatcaatgaaggagtatcccaccacctcacccctcaataccacagggcttgagataaagatggtaaagtttgctaaggtgcagcaccttcagaacttgctagaaattcaccttctgaaatgccaggggaagtgctctacagggaaatgttgcaacccagaacttgctgcaaaggtgttcaagggtgtgataargaaactgcttactccttgatactgatggtcagagtgagcagcagcactcaggtcctggagaagccacctgtataacaggtgcctgatgctgtggaatctacccacaattcaagagcccagtgatggatgtgtgatgcatacagtaagagcctgccacaagaagcacattggaacttctttctgctcctatctccctccagtgccgtctactgatttgctctttcatagcagctggcaaaataaaagcatttgcaaggctcacctctattatcacagag

SEQ ID NO: 377004 - DNA, 509 bp, Homo sapiens
agtttcatcttccaattcaatggaaccaatattgtgtcccatagttgaagcatgttcaccctggagactaagagttccaaatcggcagagtccaaagctgctagaacagaaagcaagaattgcaagtgtattattgartataataatgagaaaactctctctcattttcatcctttgattcccagattcatgtcttgtatatggcagaaatagcatcatataatgacctttgcttcaatatatatactttatcttgtatgtcagaacctcatcctttcaaggtattgtctctcagttggctctggaactgagtcttcagcaagccatttcatatttctatttactctgtaacttctagttgatggggtatttagaatgactggttgattccataggtatgagccattgctgtacttcctttacattgaaattagttctttgatcaaaagaaatgctatataaagtggcatgagattgggtaagtggttctctgggtttatggattatag

SEQ ID NO: 377005 - DNA, 621 bp, Homo sapiens
tctgggttgtgattcttttctttgtgcttcccagggactccatgcaggatctccacttgccacaartattttaaacaattggtttatactggacctgctagatcaggaaggacaaggggtagtgtagcccttattacagcttgaaattgctgcagagatttagggccacctctagctgaatgagaaaacacaaaatctgaaatctctagaaagtttagccatatcacttaatttggcctaatctagtgatataatccacgacattttttaatttaacacaattagatatatttctacacattttccacagatttctcccaaaatattttagtaacattttgtgattttatggcaataaactatttgtccaaggtcataatgacctgtctccttagaatacactgatattttattctagttatgaaatagcaactacaagggatggttgtaggtcttaagaagaatgagtttcctccttcaaggcatcttacccaagttatctctcacagggtttccaaattaagtaaaactgttttttcaagtaccagagtgaaaattaagtccattggaaagagtattgaaaagtgatttaggggtcaagattccctatttcatctggat

SEQ ID NO: 377006 - DNA, 524 bp, Homo sapiens
atagcaactacaagggatggttgtaggtcttaagaagaatgagtttcctccttcaaggcatcttacccaagttatctctcacagggtttccaaattaagtaaaactgttttttcaagtrccagagtgaaaattaagtccattggaaagagtattgaaaagtgatttaggggtcaagattccctatttcatctggatccaaccagatttccccactccaaccagatctcccaaccaagatccaaatccttccccatcagtgtcctagctttcacatgaaaaaacttgacaagacagtgaattcaattgttattgtaattcatcaacatgctaacatatagttaaattttgtgtttgattttcagaaataactatgactacaaaaaaatttcaaattcattttagcactttcatggaaatgctctagtgtttgaaactgttacttcagcttaaagttaagggacttaactttgttatttcatttctgtaagcactgaaggacactaaaaaggatccatgttacacc

SEQ ID NO: 377007 - DNA, 524 bp, Homo sapiens
atagcaactacaagggatggttgtaggtcttaagaagaatgagtttcctccttcaaggcatcttacccaagttatctctcacagggtttccaaattaagtaaaactgttttttcaagtaccagagtgaaaattaagtccattggaaagagtattgaaaagtgatttaggggtcaagattccctatttcatctggatccaaccagatttccccactccaaccagatctcccaaccaagatccaaatccttccccatcagtgtcctagctttcacatgaaaaaacttgacaagacagtgaattcaattgttattgtaattcatcaacatgctaacatatagttaaattttgtgtttgattttcagaaataactatgactacaaaaaaatttcaaattcattttagcactttcatgraaatgctctagtgtttgaaactgttacttcagcttaaagttaagggacttaactttgttatttcatttctgtaagcactgaaggacactaaaaaggatccatgttacacc

SEQ ID NO: 377008 - DNA, 576 bp, Homo sapiens
ggcatttgaacttatctacctaccatcacttgtttcccagcttagtggtgacaacaagtggcagcctgccttcctggtgcagattgttggtgccacagtagcaatatctatcttattttcaaagaactgtgattgtctagttttacctgtctggtggatctctaagagatcatctcagaaacccgcctttgtttcacccacctcagagttttcccagagctgaatgttactcctgggcagtgtttgttgaaagactcaaaaagcaaataaactagccacagacacctgaagcaagggatagcarttagagcaagcaatagacatatgaaaatgtatggtaagaaaaagcctggggaaagagatacaatgggaataatatcttccaaaaaatcttgcatatattattgaggaaactagaagaccatacacattcccagaacaagacatatacccagaaaagatgcaagaagacactaatctttcacctgtgactgacaataaggccccatgtaagcaggaagtgaaacctaaggcagagtgctaaacagcttgaataagcactaaaggagtgtccaa

SEQ ID NO: 377009 - DNA, 434 bp, Homo sapiens
acattcccagaacaagacatatacccagaaaagatgcaagaagacactaatctttcacctgtgactgacaataaggccccatgtaagcaggaagtgaaacctaaggcagagtgctaaacagcttgaataagcactaaaggagtgtccaacgcagagacaaacttcaaggaccaggagagatggtggtagtggttgttattgttgttgttttgactacaagcatttaaggatgttaaatttaagcctgatggtwattaaaaagaaaatatctatagaaagcacacaaaaggagatgaaggaaaatcagaatagtttactacaaaaaaaaattagttaaacacaaaagaaggcagtaatggagggggacaaaaaaagctgtaagacaaaaaacaaatggcaaagtccttttttataagtaatttgcaaaatggcaa

SEQ ID NO: 377010 - DNA, 604 bp, Homo sapiens
ccaattacgaacagacatgctaacagacacactcacagactaacatacacaacactccacccaacagtaagagaatatatattcttttcaaattcacatgaaacatttttgaggatatgtagactcatatatttgtctacaaaacaagtgtcaataaaccttagaaaattaaaatcataccaattatcctctccaaccataatgttaagaagctagaaatcaataacaaaaaaacaagaaagttcacaaatctatggaaattaaaaaaggtactttgaaacaaccaaaaagtcaaagaaaaattcacaaaggaaaatagaagtcctagagattaatgaaaatgaaaatacaatataccaaagctwtttgaatgtagtgaaggcagtgctcagagaaaaatttttagttgcaatgctttcattaaaaagaaaaatcttgggggaggctggataagatggctgactagacacagccaggtgaaaagctgccactgagggaccaagatgactggtgtactcctaacagatcttcagagggaaggcactgagagtggacagaggaaagacacagcagataggttgaaggagaaggaagctgggaactc

SEQ ID NO: 377011 - DNA, 617 bp, Homo sapiens
gatgaatacttttcttcaaatttttttccccatgactgatctacctaaaaccaaaactgatctgttccctacatgcccgatacacagtggtaaagacaaatcagatatacaatttgactgaaaattctttatttaaagcatggtgatatatatatgtatgtcagttttaatatatattttatggtaatcggttaacatttgaagcactctatttggcattgtctctgctagaactcactcccactcctgcagctatgataagcccttcaattatctttatctcaccaccaacaaaggatgtattaattaagrtaatcgactttagaaatgattattcattcgtgaaataagtgatgtttaagatatgtgcactttcgagaaatgttacacactcacctctggccttgcatgaacagggtctaagaatctagtggcctcagtagtatattccttttaatttgtttccacttcccttcagaatggcattgtaagccctggattctgtatagtcctatgtttagacatacatggtggagctcattgacttaatccaactagcagtatacagaatcctagaatatttattcatttatttctgctagaatatttatttattt

SEQ ID NO: 377012 - DNA, 550 bp, Homo sapiens
tatagactattatttctctctttttattaccaaaatcctttgcaaacgattaatatttggtgaccagtgatattttgagtttcttcactgtaattttgattttcatttatgcttcactaatttctatttcatctttccatcctcatcaccatatatgttacaactgaattaatgaaaccttgtaaactcttttttcagtaaatgttttaattctaaacagaaattgtaatgtataacacttaggtcattagaaattcccttggcatatagtattataataacaaaggcattgaaatagggttattctctttttaaactttatttgaatgatatttcacgagaataaatctagaatatgtgacatataccacccaaatggaaagtmacatcataacattttattttaaaatacttcattcttaaaatgtttttctctaataatatgtaatttaatttatagatcatttatagaaaaatttatagaatattagtgtctaataataatagaagctcttgtttagaccactaatgattactttctgtagttcga

SEQ ID NO: 377013 - DNA, 615 bp, Homo sapiens
ctatgacaaataaaagaacagatgatcctcatttaaataattttaaaaacagggaagagaatagttaagaggctcccagaagcagccagggccaacctcataggccttgacctgtgcaaccacaaatgacccctcgcttagaaaggctccatgcttgatttcatcctctcctgttaccaccttgaaattcttcattttttaatggactccatttttgtttttcagtgggcctacaaattatgcagcckgcccttcaaggagtctttgttttggggtattcttccgtcacacatgtaaaacccctaaaaagcttagagcttctttctgggtgttacaatatcaatttaccacatgcttatggaagtgagtaaattctcttaatagggagcagatatagaatttggcaacaaaaatgggcaacagaaaatggagaaataatatcaagaagaaaaccgttttaaaaagtatcttgatatttttcaaagcaatttcctccctctataaactgtcagtgcactactttttttaatttttaatttttgtgggtacatagtaggtgtatatttttacagggtatgtgagatattttgatgcaggcatgaaatgtgtagtgat

SEQ ID NO: 377014 - DNA, 394 bp, Homo sapiens
aagaactgaggtttgggaacctccacctagatttcagaagatgtatagaaacatctggatgcccaggcaaaagtttcctgcaggaccagggccgtcatggagaacttctgctagggaagtgcagaagggaaatgtggggttggagcccacagacagagtccctactggggcagcacctagtggagctgtgaggagagggccaccatcctccagacctccracaggtcaatggtagatccactgtgagcttgtaacatgtgcctggaaaagccacagacaatgtgagcctgttaaagcatccaagagggaggctataccctgcaaagccacaggggtggagctgcccaagaccatgggaatccacctcttgcatcagtgtgagacatggagtcaa

SEQ ID NO: 377015 - DNA, 582 bp, Homo sapiens
gggcttattggagggtagagggtggtgatgaaataatctgtgcaacaaacaaccatgacacaagtttacctatgtaacaaacctgcacatgtacccctacacttraaataaaagttaaaagaaaaggaaaaaaaaaaaggagactatatcaaactaaaagctgctgcacagcaaataaaacaatcaacagagtaaaaaggcagcatacagaatgagagaaaatatttgaaagtcatatatctgatgaggggttaatattcaaaatatgcaaggtacaactcaacagccaaaaaacaaataatctaattacaaactgggcgaaggacttgaatagatatttctctaaagaagacataaaaatggcaacaagtatgtgaaaaaatgctcaacatcactagtcgtcagggaaatgcaaattgaaactaccatataatagcacctaatacctgtaagaatggagattatcaaaaaacaacaacaaaaaagataacgagttttggcaagaatgcggagaaattggaagcttcatgcactcttgtaggaaaggcaactggtgcagctactatagaaaacagtatgatt

SEQ ID NO: 377016 - DNA, 525 bp, Homo sapiens
aaaggtaggagccatgggagagggattagagttgagagattacctaacttgtataatgtacagtatttgggttatggttacatgaaaagtgcagacttcaccattgttgcgggaagtcagggaccctgaatggaggaaccagctggagcygtggcagaggaacataaattgtgaagatttaatggacatttatcagttcccaaaattaatacttttataatttcttatgcctgtctttacttcaatctccgaatataaattgtgaagatttcatggacatttatcagttcccaaataatactcttataatttcttatgcctgtctttactttaatctcttaatcctgttatcttcgtcagctgagaatgtacgtcacctaaggaccactattgtacaaattgattgaagaacatgtgtgtttgaacaatatgaaatctgattgtaaaacatgggtgtttgaacaatatgaaatcagtgcaccttgaaaatgaatagaataacagtgattttagggaacaagggaa

SEQ ID NO: 377017 - DNA, 592 bp, Homo sapiens
ttgtaggttatttaatatggctcagtctatttctaaattcccgagtcttcaaaagccaggtgtaagtagtaagcaatgaagtatgtctcaagaggtaagactaacctgagactggctgctttaatgtcaagagttttggcaaataatgctttattagaaaagtaagtagcagtccaacatgaacaacaacaaaagtaatgagaaaataacgaaaaaaaattttggtagagtgcctttattttccctgaakagcttgctaaaaatctaatattttttttaaaaaatgaaaggataaaatagcccttgttattcatgaaggttatcctaattttcctgtatgaaaaaagagaagaagatttggcagattaaaaaagaaaagaaaggcaaaataattacacaattaaaaagttatcaaattttttgcttttgtttccttttaaattaagtgtaattaaaaagttttattaaatgtaattaaaaagttatcagcatgattaacattaagtcaaaagctacagattaaaaatattttaagataaaacatcaagtctaacttttaaattgagaatgccagctttttctttaagtgtgc

SEQ ID NO: 377018 - DNA, 489 bp, Homo sapiens
cagtgtagttttcttttcgtttttaatgtacttgggattagctaagcattttagcctagtgctttataagtttcatcacgtttagaaaaatttcagccattattactttacttattttttccaccctttaactttctatgcattgtttgagagattccagttacatgcatatttatctccttgaagttgcagcctggaaacttttttcaggcaataagtgaggggaatatagagcttatctccacttttcataatcttttacaattcactgttctttttgacctgaattctgatgtcttaagtgccattacttcatacattttgtctataattttgtcatttcatatggagtaaatccagtccctgttacatcatctttatcagaaacaagcctctctagaatgtctcttaatttttaatgagaaaaatgtkttggatagtttcatgagccccaaagttagttctctgtttgaaggccaatatgtgtga

SEQ ID NO: 377019 - DNA, 570 bp, Homo sapiens
ggaaataggaaacaaaggaggaaaaatatgacacttaacttgtgtatataattaggggaaacatctgattaatagtcccaactaaagaatttggaagtgatttctttttcacaatacataggtacactatcaggrtaagggacaagggacacatacaacattgtacatatatttgtatgataaaattccataaaatagtgaaaatgaatgaagcatatgtagacatataaatatggatgatcgatattttcagaaataagtctttgagtagacaaaatacacaaggcagaatcaacaagacctagaaatagtgcaatggtataaaacatttattgcaatgaggagagtgacatttcacagatcaaaatttctgacatagtagacaaataagagatgggttatgcctgtggatcctgaatttgccataactaatgatggaactagaacgaaagatttagatagtttaccaaataaagacatcttcaataaattgggggagttagatggaagtaatggcattttgagtgacataggcttattacagatgcttcagagatctatacgtttttt

SEQ ID NO: 377020 - DNA, 590 bp, Homo sapiens
atggaatgctatctgatcggaagcattaatcaaatggaaaacctattgtattgaaagaggaagatacactgggtaagttaataaatacatcagatgtatttcgttgaagggtctgcaaagttataattatgtgttctgcatgcctgaaaatgttttctatttgaataaaagtagaatttattagyggatataagagaaagatgtcttgatcagtaaaattaggagcctaaattaggaagaacaggctagagtgtgttttcccagtcttagaagaatgaggtgggctaaaagcccacctgggttttaccaaatggaagaaaatgtgcaactaagtctagactgtgcaatcaccatgcttgcacactccccaggctctcccttgaacccacttatgtttttaatttgtaaattttgacacattacctacattacttataaaatatttgttccacattccgtagccagcaccaatatttacacagtatgcactggtgctgccttactggttgtttacagctacaacctttccaattagttgctgcccatgccttacaggttattgaatattttgagtatcccctacactagtc

SEQ ID NO: 377021 - DNA, 590 bp, Homo sapiens
atggaatgctatctgatcggaagcattaatcaaatggaaaacctattgtattgaaagaggaagatacactgggtaagttaataaatacatcagatgtatttcgttgaagggtctgcaaagttataattatgtgttctgcatgcctgaaaatgttttctatttgaataaaagtagaatttattagtggatataagagaaagatgtcttgatcagtaaaattaggagcctaaattaggaagaacaggctagagtgtgttttcccagtcttagaagaatgaggtgggctaaaagcccacctgggttttaccaaatggaagaaaatgtgcaactaagtctagactgtgcaatcaccatgcttgcacactccccaggctctcccttgaacccacttatgtttttaatttgtaaattttgacacattacytacattacttataaaatatttgttccacattccgtagccagcaccaatatttacacagtatgcactggtgctgccttactggttgtttacagctacaacctttccaattagttgctgcccatgccttacaggttattgaatattttgagtatcccctacactagtc

SEQ ID NO: 377022 - DNA, 558 bp, Homo sapiens
tccagcacattacttctgcttatactgactgagttatgccagcatgttgcagttcacaatggggaacttcttcccaagtccraatcagtttcttaggtgtctagggtcccatacagttaatgttctagaaatcccatttctaatctgacttctcctggaaatagtccattctcaacagctttctgaaaacctgaggtacctattaaaaccttctatccctctaggctaccctctctgtaaatgacagctaaaactaaaagtgttcttttaaatcaatatctgttgataaatttatctgtgctcttttcagttaacttttgaaaactgccttctttgtgatgcaaagctgaaccaaaaaaaatgtcagtaatgagagcctttttcaaacctacaaaatcatgtagcagctttctactgtaacaaataaaagtaaaatgagcagcaatgggaagtttggactagggaagtggacttgggagatgatttggaggaaataacagattcacagataggacatcatgacagttgagtttagaggatgtgatagggtgatgagta

SEQ ID NO: 377023 - DNA, 558 bp, Homo sapiens
tccagcacattacttctgcttatactgactgagttatgccagcatgttgcagttcacaatggggaacttcttcccaagtccgaatcagtttcttaggtgtctagggtcccatacagttaatgttctagaaatcccatttctaatctgacttctcctggaaatagtccattctcaacagctttctgaaaacctgaggtacctattaaaaccttctatccctctaggctaccctctctgtaaatgacagctaaaactaaaagtgttcttttaaatcaatatctgttgataaatttatctgtgctcttttcagttaacttttgaaaactgccttctttgtgatgcaaagctgaaccaaaaaaaatgtcagtaatgagagcctttttcaaacctacaaaatcakgtagcagctttctactgtaacaaataaaagtaaaatgagcagcaatgggaagtttggactagggaagtggacttgggagatgatttggaggaaataacagattcacagataggacatcatgacagttgagtttagaggatgtgatagggtgatgagta

SEQ ID NO: 377024 - DNA, 593 bp, Homo sapiens
aaaacaggtgagtctgagtgttgcagcttgtcatgagargcagcccctaaggcagaagacaccagaaccattccatcattcctgctcttctttgttctctgtgacagcattggtctctgttagcagagagctccaacgtgggctataaaacaaaaaaagtagagacttgaaagggaatgtcatttatatcctaacaacaaaaacaagtgagattatctacaagatcatagatctttaatggccataagtgtgctgaagatgaaaagaagccaaatgagttaaagtctagaaagcaatgactcctcattagtggcttgagtctttggtggagaagtgggaataggagaaagtcactttagacataggtaagaagaaaatagctaaaattttaactaagttttaagcaccaacttggggatggcatgagactttagaatccccagtgggacttaaaaaaaggtgagtctgcacatctgttacctcttccacaggcctttatcaagtgttagggaagaatataaagagcagaagaagtgagaaagacccacctcactctgaagcacaggtgtgctgggcctgcagaaggttggggg

SEQ ID NO: 377025 - DNA, 580 bp, Homo sapiens
acacagagccaatttatcataggatggcatgtgtcatgttcatggtattaccagaggaacacctgtatgcactgtatttatccttttgttgtcagcatgcatggaccaagacaacacaggataaacaaactattacatttttaataatataatatatgctttaaaaatagaacwttaaatacaattgacttcaaaatgtggtgctagatcattctgcttaagactagaatttctttgtcaaatcatcatctgtcattcaggaatccatcctattgaaatgagaataacaaaacaaaagcattggaatatattccctcaaaaaaaagataacactttgctcaaaccaacgatttatttcttctatctatttcactttcacataaattctaatcatgcctaatgatgactttatcatgaatacaatacaaattcacatcatgtggcttttgtcaacaaatataaatatccaagagcctcctcattccatctttcactcactaatgtatgtatttttaacgtcctaatgatgcatctcttactgtgttttctagatcaaacataaagcaaacatatacagata

SEQ ID NO: 377026 - DNA, 615 bp, Homo sapiens
taatgattatatcaaatttcattttatttatccaccatggtaatttagccatttttcctcctaacaaccattttttcttttattacttttataaattagcctttggtaaacatgtttcaacacaatttatatagtatatcaaagaactcaaaagtgaaatttgacagaatttactgtgaagtaaattttatttatatcccaacataatgttggttcatgagttttatttgctttgttttaaatcaataattatccaagctatatctagatatagcttaaaagactactgaattgacctaactaaaagaaaaataagatttattatgtttatctttaacctggtattacaaattagatattccatttacatagttgagtaaataaaaatgtttgggggtttaggaagaagcctaggctttttaaaaaataatttcaacttttattttagattcagggggtacatgtacagctttcttacaygggtcaaattaatgcaggaacagaaaaacaaataccgtatgtcctcatgtacaagcaggagctaaccattgggtacacatggataaagatggcataggcttttaacaggtaggattttttttggttcattaaaaa

SEQ ID NO: 377027 - DNA, 564 bp, Homo sapiens
ttcatctttctcccatgctgatgcttccttggactccaagttcttcagcttttgtactcttggacttacaccagtggtttgccaggggatctcaggccttcagccacagaytgaaggctgcactgtcggcttccttacttttgaggtgttggaactcggactagattccttgctcatcagcttgcagacagcctattgtgggacttcatcttgtgattgtgtgagttgatactccttaataaactcccctttatatatacatctatcctagaaatttcatctctctagagaaagttgactaataaagcaagattatatgtgggtatatagaaataaataatacccacatattaatggcttaatagaacaaaaatttatttctagcttacattacctggtcaacagtggataagataagaatttctatcattgtagagacccaaaaatcaggctgatgaaaattatctgaacacaggtttccaggatcagcagggcagagagaacagaatgacaaatcacacacttctttttacaacgcccttgccaaagctgtactctacatgc

SEQ ID NO: 377028 - DNA, 618 bp, Homo sapiens
  misc_feature (1)...(618): n = A,T,C or G
nnnnnnnnnnnnnnnnnnnnnnnnnnnnnnnnnnnnnnnnnnngaagaattgcaaaatattggaactatggagtcaaaaagttgcaaggatggatctaggttcctagattcaaacaaatctgcaagagtttttgtggtgaattcaagggtatgctagtaaatacttaacaattggatattttatttttttwaaaaaagtcccaatttgtagtattgctgatttccttagctaaatattctcaccatggccaaattctagctaccaatgttacgtcgctgaatgaaaagttaggaaaagatgcacacaattgacttttacaatccagtgagagttggcttcaccatagcactgagtgaagagatttaaaatcttcaagtccaatacaatgtataatgtcgtctattaatataaatactgaattttaaaaaatgttttcaagggctgcaaatgaagacaataaatataagttttttagtaagacagtattttttcctgaataataatatttctttaaatcttgtctcaaatgttgcatgctttattggtttgtcctttatggaaatgattcattgcatagtattaaagtccattattgaaaaattataactagatcgtta

SEQ ID NO: 377029 - DNA, 400 bp, Homo sapiens
ttacacaagatctggagcagaagtcactggagtataagctggtaggaaacttaagtggcaattttgatgaattgagggattttgagtgtgaattaacacgcgagtcaggaaaactctgagagtttcctgggttttatttccaggaatcttactggattctcaaggtaaaaattttgaaaaaaatttcacatggctctggcaggaggaaggaatgagtaattattktgaaatatggctgaggcattctgcattaccaatacctactttcccagggaaaagactacctgagccttatcacagctggaaggaaggccatttctcccattccagccctgctagcctccctactttacctaagagtaaaaatactcttatagaaagtattatagaaatatagtag

SEQ ID NO: 377030 - DNA, 423 bp, Homo sapiens
tcatcagttagatactaagtgtagtatccaataggtagttttttgatcytctccctcttccttccttcttccctcaagcagtccctggtttctgttgttttcttctttgtgtccatgtgtacttgaagtttagctcccatttataagtgagaacatgcagtatttagttttctgttcctgcattaatttgctaggataatgacctccagccccatccatgttgctgtaaaggacataatctcattcttttttatagctgcatagtatttcatggtgtatatgtactacattttctttatctagttcaccactgatagtcatataggttgattctatgtctttgatactgtgaatagtgctgcaatgaacatccatgtgcatgtgtctttgtggtaaaataatttatattcctttgggtatata

SEQ ID NO: 377031 - DNA, 423 bp, Homo sapiens
tcatcagttagatactaagtgtagtatccaataggtagttttttgatcctctccctcttccttccttcttccctcaagcagtccctggtttctgttgttttcttctttgtgtccatgtgtacttgaagtttagctcccatttataagtgagaacatgcagtatttagttttctgttcctgcattaatttgctaggataatgacctccagccccatccatgttgctgyaaaggacataatctcattcttttttatagctgcatagtatttcatggtgtatatgtactacattttctttatctagttcaccactgatagtcatataggttgattctatgtctttgatactgtgaatagtgctgcaatgaacatccatgtgcatgtgtctttgtggtaaaataatttatattcctttgggtatata

SEQ ID NO: 377032 - DNA, 423 bp, Homo sapiens
tcatcagttagatactaagtgtagtatccaataggtagttttttgatcctctccctcttccttccttcttccctcaagcagtccctggtttctgttgttttcttctttgtgtccatgtgtacttgaagtttagctcccatttataagtgagaacatgcagtatttagttttctgttcctgcattaatttgctaggataatgacctccagccccatccatgttgctgtaaaggacataatctcattcttttttatagctgcatagtatttcatggtgtatatgtactacattttctttatctagttcaccaytgatagtcatataggttgattctatgtctttgatactgtgaatagtgctgcaatgaacatccatgtgcatgtgtctttgtggtaaaataatttatattcctttgggtatata

SEQ ID NO: 377033 - DNA, 405 bp, Homo sapiens
ccctgttacattaactgctgctagtgttgctatgacaacttttcaaagtagccttactggggaccagagtaaaaaaaaaccctacaggcacagattatgtctacaggacatgaaagagatggtcaatgcagtggagggtaaatggtcaagacagctcttaaacattatttagaaaccctccacccccaatttaaaaaattgtctgaaatgttcacttacattatcatgaaagtatacaaaagtttctttataaacyttaatatgataattacataggaccccgaaaagttgccctttctgattcctatgatcaaaatgtaatttttctttgtcccagtgcaagtgtcccacattgcaagagacttttataacccacttgatattcaagccgcatgagagaggata

SEQ ID NO: 377034 - DNA, 576 bp, Homo sapiens
ttgacagaaacctctctgaaaattttttttgcctgttctggcttgcacttgaataattctccatcaacagcacgactgattgagttggcatcacaaacccttttgtacgctatttttttcttcaagaaatattaaagtctgaataaaattgaaatagctgcctggtaatgatctcattatatataaatacagaagtgctcacaggggagataatgactccaagactcaggtatgcagygaatacctattatcttccaaggagtcagcccacattcagcactcctccacagcgccccgcaacatccctttcagtttcaggctcaagtcacagaatacgaagggctgattgaagctgggaatagacttttttccctcccccttcatgacatatgttaggagatgaaaggaacctgggctgtgtgtttactcttcatttgggagtttcacatgttctgattgatcggaaagacaaaaaggcagaaggagagacatttggtgctggctgaaaaccatatccattctcaatgtgaagtttccttgtttggtgaggataattgtgatgaggcagttctgggt

SEQ ID NO: 377035 - DNA, 561 bp, Homo sapiens
acagaaccattacctctcctgttttggactagatgtctattactgtcatctaaaattctgttagcattttgggcagccatatcacactggcttctcctgattttaaggcacacactaaaaccccgctagtttttcacgtgatttctggtaaaacataatgtagctaaaatggcattttgaacttaagtgcagggttatgtttatttttgtgatatttcatataaattgttttccgttgctccagcctagcaagaacctttgagtcatgtggaattcaaaatattaactatttctctcagatttatgccaycttaaaatttaaccagcattacttattttgtcttccaagtaattgctaagaggattgaacaataaagataggtaatattgattaattactaattttaatctggaatgaagcctctagtgctacgtcacaggactctttggttgttctgcagctttataactgatatggatggaggctaaattgatatattgaaaatgcaaatcacttcacagatggaggatgtcttctcatttgacctcttgtctcacatt

SEQ ID NO: 377036 - DNA, 499 bp, Homo sapiens
taccccacgtcatttggagtaagagcctgaatccctacartggcccacaggccgtagctgatggtctaggtgattactcctccacctatgcttcctcctccacttatgcttactgcttgtactctaaactatttccacacttactcttgtttcccacacccctctggccacatgggcctcctcgctgttcctgtagcataccaagtggcttggcccagatcactgcctcccagattatcagcatggctcattcaactagacctgtcctgatcatgctatttaaattgctacctgtcccaccttccagcattcctattcctttctagctttatttcacctcatagaacttgttccttaatacatcatgcagtttacttactcatcgtatttcttatcttgatccaatagaaagtaaatgtcacaagggcagagatttttttttcctgttttctataatcctgtattcccagctctcagtgcaatgcttgtcacataatgg

SEQ ID NO: 377037 - DNA, 515 bp, Homo sapiens
aattggagaagtgaagggagctgagagatcagattctgattcacaaggccatccttattgcaaaagtagattaattgacaagctgtcaccatgatatgccattaacctggatctaactaagaacatgtattytgatttcatgttcacaaactccacttctgattatgggttgacttctcccacgggtcagcctaagggaagaataaggtggacaatgttccattatggttcacatggcaaatctaattttcatgggaaattaatacttcgggattctgggcgtacacatcattgttattcctattctgcctctgagatggacctgggtcccgtcttggtgtaatgaagaaatgagttctgtggctcgaaggatgtgtctcctttggagacagccagttgatctttctctgaaagcaacacattcctgtgctctgaataagatggtttcttttaaaagaattttgacttttattttagattctgtgggtccatgtgcaggtttgttacctgggtat

SEQ ID NO: 377038 - DNA, 515 bp, Homo sapiens
aattggagaagtgaagggagctgagagatcagattctgattcacaaggccatccttattgcaaaagtagattaattgacaagctgtcaccatgatatgccattaacctggatctaactaagaacatgtattctgatttcatgttcacaaactccacttctgattatgggttgacttctcccacrggtcagcctaagggaagaataaggtggacaatgttccattatggttcacatggcaaatctaattttcatgggaaattaatacttcgggattctgggcgtacacatcattgttattcctattctgcctctgagatggacctgggtcccgtcttggtgtaatgaagaaatgagttctgtggctcgaaggatgtgtctcctttggagacagccagttgatctttctctgaaagcaacacattcctgtgctctgaataagatggtttcttttaaaagaattttgacttttattttagattctgtgggtccatgtgcaggtttgttacctgggtat

SEQ ID NO: 377039 - DNA, 515 bp, Homo sapiens
aattggagaagtgaagggagctgagagatcagattctgattcacaaggccatccttattgcaaaagtagattaattgacaagctgtcaccatgatatgccattaacctggatctaactaagaacatgtattctgatttcatgttcacaaactccacttctgattatgggttgacttctcccacgggtcagcctaagggaagaataaggtggacaatgttccattatggttcacatggcaaatctaattttcatgggaaattaatacttcrggattctgggcgtacacatcattgttattcctattctgcctctgagatggacctgggtcccgtcttggtgtaatgaagaaatgagttctgtggctcgaaggatgtgtctcctttggagacagccagttgatctttctctgaaagcaacacattcctgtgctctgaataagatggtttcttttaaaagaattttgacttttattttagattctgtgggtccatgtgcaggtttgttacctgggtat

SEQ ID NO: 377040 - DNA, 522 bp, Homo sapiens
cttgggcttcctgaattctgcctcaaccaagccagttcttctaatatctgtcttatacactggggctttctgtaagatgttactggggaggaaactgtcccattactaaaaatacagttagaaaacctctaggctaaacyatgagagagagaagcatgaaagaacattggatagagtgtcaaagaaatacagacttaattcattcgacaaagatttatagggcacccattgggtacctagatttgtgccagatgctggaaatacataatgaagtaggacacagtcaggctcacagtcagccaagctcacataacaagtaattataatgtcctcggaaattttgtaaaatcaaaggggctttggagaaggatgtcaggaacgtgtcctgccagaggcatctgctgaatcttaaggatagttattagtcagatggagcatgaggagactgaccttcacattgtgattttaaataagattttaatctcttaggactcaattcctccaactttaaaataggaggct

SEQ ID NO: 377041 - DNA, 555 bp, Homo sapiens
tgatacagtctcctcatctgtgaaatagcctagttggcagaggctgtcaaggcttgatatatgaagatcaaaacagctcaagatgatatagagagatcatacaaaagagtcaagaaattaagggtttggtctatatcttatggtcaaatagggcagccatctgtgaattatattgtattcagatagatggtaccaacagtaaagaaacctgggttgctctgccaataacaagctgagtgaccttgagtaagtcctctaaactctgtaagtctctctctttgttcctctgtaaagggaagaagtgtgtaaagtctatttcattcctagggtttcaggtagaagatgtcaggtcttgagaagagcaactaaaaatatgamccccttgtgatgccaagggagttacatcacccagtacttacaagaatccaaatgttgactgagatctgtaagcaaaaagaaacactgaaaagccttgtcaggcattttgtagtcatctggtaatacagtcttgaatgtgtctatcttgagaatacccagatatttataccatgtttg

SEQ ID NO: 377042 - DNA, 263 bp, Homo sapiens
ttacactgttgcttaatgtgtcaacaacctgcaggtccctacacaatagttctagaccttatgaagcagatcccatcaaacttatccttgacccaaagtgcttgtttctttgaccagaattactcarttgattaaattcagtagtgagttgctggaccacggtttagaagtctatagatccagtctttttactaacatggaaaaacaaaataggccttcccatttttgctcacatccagtgagaatagaagagtgtggggcct

SEQ ID NO: 377043 - DNA, 263 bp, Homo sapiens
ttacactgttgcttaatgtgtcaacaacctgcaggtccctacacaatagttctagaccttatgaagcagatcccatcaaacttatccttgacccaaagtgcttgtttctttgaccagaattactcagttgattaaattcagyagtgagttgctggaccacggtttagaagtctatagatccagtctttttactaacatggaaaaacaaaataggccttcccatttttgctcacatccagtgagaatagaagagtgtggggcct

SEQ ID NO: 377044 - DNA, 522 bp, Homo sapiens
ttcatgatccccctcaccttggcctctcaaagtgctgggattacaggcatgagccactttgcctggccgacacagggttatttctgactcttactacacattacacattcatcatggactgaaggactctggtctatgtcatcctcactcagaaatccaggctgctgaagctccatagatgcttctacagttccctgggctggtatctcagttacctattgttattatgtaacaaataactctaaaattcagtggcttacaaaaacaacgatttatttgcgtactattttgcaacttgggttggtctttgcagggcagttctgccgttcttgcctggagcggctcaggcacctacagtcagttggtgcattggctggggactggycaattgtcccagcaattcagattgctgggacagctgggatggatggatctctcaaaccatctggtctatcatcttcaaagatactagcctagacttgtgtacatggtagtatagtcccaagaaagagtaagaggtga

SEQ ID NO: 377045 - DNA, 576 bp, Homo sapiens
ggtaagtgtggggccaatttcctaagtgaatgtcattaactacctttcaactgatcaattattctaccaatcttttaccagaagctcttccaaatacaactgcaactgccaagagattgatggaccagagaatggcctcttcattccaggcacttctaaagtccaagtggtcaaataccagcctctttttaccaatgttcccacctgtttcattcagccaaatttcattagatgaaggtaaagctaatgattccctcattctctgtagtttgactctctcraagtggctaatgaggagaacaaatacaacttagacatcatgccacatttagggcaaaggcagctaatactaatgtacaaaagcagtactgatgttttttaagtcaatacagggggttgggtcttcattttgctttgaaaatatctttttgtggaagataggtttcactttatgtacacagatgattcgtataaataataataactgtaataatgaaaataatgtctacttagtgtaatttaatctttaatttgtcttatggagataaaaaatttacaaatggaaaaggcaagacc

SEQ ID NO: 377046 - DNA, 550 bp, Homo sapiens
cagtcgacccaagtccctggacactgcacttactttttgcttcaataaagtctgcttcaaagcaatctcaatccttcatcaaagagatttccagagcactcccaatgggttaacataaatcttactgttctcactcttttttttccttccaagttgcctttttwaaaaaaatcagtccttgtgtctctatttctttaaatcttttatcctcgggctgctaccactagctgtatggattacatatcagcagttaagaatattccacaaagtcctggcttgttctcaccctgcagtgcttacagtcaccgattgcgatgaaaggaatttgaaaggcacagccaggcaatcctgaaccggctcagcacattccctctctgcagcttatcgcgctgtggatgttcttttgaccggccatcaatcatgtttgaaagtttcccgtgattcctgagatatgaacccctttgatagaagttaacaatacagcacatgcagcacgggctaaggaaaatacttttgaattcaggttaaaaaaatgctttgttgcagctca

SEQ ID NO: 377047 - DNA, 549 bp, Homo sapiens
ccatcatttaaaagattattgtttccagtttggtcccacgtaaacaggtagctaaggatataaagcagaaccacaacaccatttcaccctcaccccctttcctcatccaaatcttccagtggacatttttcttatgtctaactcaacctaaatsggttgggaagaatgtggaaggggcagccagacactcagtgaaaggagaaagacagtacaaatacagtgtgaaggggaaatctcaccaagaagaggccaatggcttgtatcttgccccaacctaaataccaccttttctatttcaccagagtctattgcacagtgtctgcacagtgaaaggctattgaagggcatctccaggacaataatttgtcactagattcccttcacagatggtatagtgtgttaaatggtgatccccaaaaaaacatggccaggaactaatcctgagtacctgtgaacataaactcatttacaaaaattatctttgcagatgtaattaagttaaagatcttgagatgagaccaccctggattaaccaggtgggccctaaat

SEQ ID NO: 377048 - DNA, 532 bp, Homo sapiens
ataaaaatatagacaaatacgttgtctgctgagaactgaagataagaaataaaccaagttattggcaacatttcccatgggttccacttgaacaagaatgaatcattcattggatattcatggcaaccaccaccaacaaccttgcttcttttggaaactttaaaaagaaattagatttttgtggcactgcagtgagaggaaataataaaacaaattaattttgaattcacacaatgtcaaagtccttgtttagtgtggcttagattcatgcatctgtttgaggagacgcctttcttagttgtttactctgatgttttgaaccttttgcagtatactcctgcttaggcaggctggtgtcagatcttaaatttaatcaatttttttgccctaaagactgacttgattygtagggctttatacatagtagtttgtttacaatgcatttaataaagctagcactaaatttgggccatttttcccaggtcaacaggcagtatagaatagtacaatactaacagtacaagggtttcat

SEQ ID NO: 377049 - DNA, 532 bp, Homo sapiens
ataaaaatatagacaaatacgttgtctgctgagaactgaagataagaaataaaccaagttattggcaacatttcccatgggttccacttgaacaagaatgaatcattcattggatattcatggcaaccaccaccaacaaccttgcttcttttggaaactttaaaaagaaattagatttttgtggcactgcagtgagaggaaataataaaacaaattaattttgaattcacacaatgtcaaagtccttgtttagtgtggcttagattcatgcatctgtttgaggagacgcctttcttagttgtttactctgatgttttgaaccttttgcagtatactcctgcttaggcaggctggtgtcagatcttaaatttaatcaatttttttgccctaaagactgacttgatttrtagggctttatacatagtagtttgtttacaatgcatttaataaagctagcactaaatttgggccatttttcccaggtcaacaggcagtatagaatagtacaatactaacagtacaagggtttcat

SEQ ID NO: 377050 - DNA, 547 bp, Homo sapiens
tggtttgagtgctatcttcacagaaggaagctgcgtggtataaataataattgggaatcaaatgtgtttatttaaaaaaaggaaccatcacgaaactgtattatgttttgacattatttgatactctttataaacatcaatgtcattgttacatttttatgcaaattatattgtggaataattcaaattcttccttttgaagattctaacaagaattcaatagcctgtctgttgtttgaatatggtaaaattgctgcaatttgattcattttttttaacttgaaaatgttatggaaatgtttaatttggaatatttaaatgacttagttgcttccmacttactacttaatgaaacagtgcacgccccaaaaataccattccaaatcgtcctctgcttggcaggctcagcatgatataagctgaagtcttttctctaagagataaattacccactttgctactgctgcatacatcgctccctctatggttattctatttgattttcaaaagatatcttttcagagcactcaagtcattataaatactg

SEQ ID NO: 377051 - DNA, 639 bp, Homo sapiens
gaaaaatggagcagagggacaatgaacaatttatagactgtcccagaagagaatggcatgcgactgcagactgaaagggcctgttgagcatttctgcaattttgataaatacatacacacaccaaggaacaataccagaaagtttcaggaatatggacaaacaaaagcttctctacaagcttctgaaagaaataaatccgtggctcttatacaaagatcagagatcagaaggactacatatttcttgatagcaatattaagaagaagaagttaatgaaatggtcggttcaatattctccaaaaaaataatattcggtcttgtctgtcttgcccaacaagagagtccatgtacatccagcattttgttgtcayattaaaatccaagaataaacacaaaaaaagaggaaaacatgggagattggagaggccaaagatgctggtgaagaaatattacaggatgacagctctaaacaaagtttgaatcacaaacagtcccttttggaatctgtcagaaggctctgggagatttatcttatctccaacaagatgaaacccatttatcctcaggagattgatgaggaaatttaagaagttatggaagaatttgtgattcagttaaaaaaataaaagggagcacag

SEQ ID NO: 377052 - DNA, 639 bp, Homo sapiens
gaaaaatggagcagagggacaatgaacaatttatagactgtcccagaagagaatggcatgcgactgcagactgaaagggcctgttgagcatttctgcaattttgataaatacatacacacaccaaggaacaataccagaaagtttcaggaatatggacaaacaaaagcttctctacaagcttctgaaagaaataaatccgtggctcttatacaaagatcagagatcagaaggactacatatttcttgatagcaatattaagaagaagaagttaatgaaatggtcggttcaatattctccaaaaaaataatattcggtcttgtctgtcttgcccaacaagagagtccatgtacatccagcattttgttgtcatattaaaatccaagaataaacacaaaaaaagaggaaaacrtgggagattggagaggccaaagatgctggtgaagaaatattacaggatgacagctctaaacaaagtttgaatcacaaacagtcccttttggaatctgtcagaaggctctgggagatttatcttatctccaacaagatgaaacccatttatcctcaggagattgatgaggaaatttaagaagttatggaagaatttgtgattcagttaaaaaaataaaagggagcacag

SEQ ID NO: 377053 - DNA, 606 bp, Homo sapiens
tatttcacagcaaaaatacattcccaaggaataaacagatcaataaaacaataaaaacatgctttttgagtcttcaatcttaacatttagtaacattgattcgtacagcaaaaaccctcaaactgttttattttcactgtatttacaagtactgcagaaataggacatgggaatatttgttgactattgttttgttcttggttttggagtctgtgctatatctgaaacaaaagrgccccataacttgctgttattcttattatttgctgtctttgagcagagagcttatattttccccactgtgtgcataatactggagtggtacctagaaggtcctccatatatttgctgaaagaaggaataaacacttcatgcatagtgggtgtttggagccgacaagtctatagagaaggatgaccacgaggctggagaaaaatatatgctttaagactggacataaacaggaggtcaggagatcttgttagaagtctacactgtgggaaacaaacagtaatggtaactctgaagggaagaatataattgagagcatatttagaagtattgacagcatatttagaagtaagaagccatgaagaaataaaatta

SEQ ID NO: 377054 - DNA, 599 bp, Homo sapiens
ctcaagtcaactaagcctttatctaacttcaattagattcagatagcgtcaagaaagaaaatttgaactgaatacaacatagtgtgtaaaagcattcattagtacttttatgttaagcttctcatttcatttccaaccacaactaattatcctcactaactttataattctgtagaatgaaaactcttcctgtccacctcatattgcartagctaaactatttttacttgcttttcttcctattcgtttttctttatacaaatgcacccatagtgtgacctaagaaaaataaataacattcatacctagaataaattttcttataataagcaacatttttgtccttgaatcatattttgatgacatttgctttctcgttctgtagaagattaaacaactttgaaatgtttttgcttcctcactgaactcaatagcaatgtgaaatatatatatatatatatacacatatgtattttcatttaaatgactgtatttacatataggtttctcactatcattgctttctaaccataaattctaaaattgcagttttgagtacctctttaatccataagttattgggcagaattaattctaat

SEQ ID NO: 377055 - DNA, 513 bp, Homo sapiens
aaggcatatctactaagaggacacagagctaaacaaatcaaacaaccttctcagccataaaaagctcgcttccattttagtggaaagattcagacaagtacaataaataagtaacacagcagaaacaaaaccagcaaactcactgtcagcaagaagcttgatttcactgagaggatatcaacaataaccacatggaaaaagtaaaatacagagtatattgcatgtaataaatgttcagaaaacaccaaaacaggaaaatggcataggcaatgtggagagatttctattttaaattggaaagtctggggaagccttcctgaaagagtcattttgactaaagaactgaaggaaaaaagagaaagcctagttgatctctctctctctttctcatctatayagatagatggacatatttatgtgtgtgtgcatgcacacatatataatccatttatatgcacacatataattcatttatatgcattatatacatgatatacgtgtgtatacacacac

SEQ ID NO: 377056 - DNA, 620 bp, Homo sapiens
cctggtttctttgtgttgaacaccagaggattctgaaaggaatttttccttgagaaggttaaatgtatgagtcattagagtttacttgtaactgcaaagtaatacattttagtttaaaaatgatatcttgcctcaaaaatattgtttaaaagatttcatgcagattttgtaaaacatttgctataattcatgtcaatatgtaaacattaaatggcattcatttaaaaatgattcattttcaatgtcatcttataacccttaatgtaaattcacatctgtttcaatgcttccaagtgcaatgttcacttggaaaaacgtctaaagccagaaaacattgtgtactatagaacaataattctcaacatgaccacaaggtggctctcaacaccgaaatatgttattttccctctggacaagtgaatagaattttaccagaaatattagcagcaatttaccctataaatgggtcaatacttcaaaaacgtaaattcatctcaaccctctgatcacgttgtgaagcctaatttatattgttttaaacttcagacattcaaaaaaacacatsaaatggttgaaaacctttaaagaatttgaaggattttgaaaagaaatgattattt

SEQ ID NO: 377057 - DNA, 545 bp, Homo sapiens
ttaaatgtaaatagtacaaatacytcaatatgttatttagaaatgaagttaatcactattacacaagtctgttttcaggtaaatttttcatggtcactcaaacggatctgagacaaggaggttaatttcacattcaaaatgtctcctgctggtccagcaccagtaccatggctcatgcctgtaatcccaccactttgagaggctgaggcaggcagatcacctgaggtcaggagctccagaccagcttggccaacatggcaaaaacccctctctcctaaaaatataaaaattacccaggcatggtggcatacacctgtaatcttagctactcaggaggctgaggcatgagaatcgcttgaacccgggaggcagaggttgcagcgagctgtggtcacgccactgcactccagcctgggcaacaacaaaaacaacaaaaaaaaaaaaaaaaaaggaaaaaaaagaaaagtctcctgcatcctcagtctgtaattttagagtagtttattgtttccatcttttacgaattacgttaagatactttacct

SEQ ID NO: 377058 - DNA, 566 bp, Homo sapiens
atatggagtttttgggagtgttgttaaggatgactcctaagtcaaagattttggccttagcaactggagactataaatctgcttttatttgaagcgatagagcattagggagaaaaaaacagatttcagctttagatagagtaagatacatgaagttttgaattgtaaattggaacctcttagcagtaattaccttctgtatggtatttaatgtcatgggrctagataatatgcaaaaaaatgtgagtgtagtgagagaagaactaggtccattttcaggggcaaaccctcattaagacatgtgtatggtagagagagagagaagaaaaaacaatgaatgaaactgagaataaatatttcttgagctgcaggaaaacctcttagaagacaaagaaaatgtaaggagaagagaatgtgtcaaccttgtcaaaagctgctgctaagtcaagaatgaggagaggtttgaattgactgttaactttggtttccatgaggttataagtgtgcttgatgcttgtaatttcatgatgtagtgagtccagcattctttttgcagtggatttaaa

SEQ ID NO: 377059 - DNA, 545 bp, Homo sapiens
ttaaatgtaaatagtacaaatacctcaatatgttatttagaaatgaagttaatcactattacacaagtctgttttcaggtaaatttttcatggtcactcaaacggatctgagacaaggaggttaatttcacattcaaaatgtctcctgctggtccagcaccagtaccatggctcatgcctgtaatcccascactttgagaggctgaggcaggcagatcacctgaggtcaggagctccagaccagcttggccaacatggcaaaaacccctctctcctaaaaatataaaaattacccaggcatggtggcatacacctgtaatcttagctactcaggaggctgaggcatgagaatcgcttgaacccgggaggcagaggttgcagcgagctgtggtcacgccactgcactccagcctgggcaacaacaaaaacaacaaaaaaaaaaaaaaaaaaggaaaaaaaagaaaagtctcctgcatcctcagtctgtaattttagagtagtttattgtttccatcttttacgaattacgttaagatactttacct

SEQ ID NO: 377060 - DNA, 545 bp, Homo sapiens
ttaaatgtaaatagtacaaatacctcaatatgttatttagaaatgaagttaatcactattacacaagtctgttttcaggtaaatttttcatggtcactcaaacggatctgagacaaggaggttaatttcacattcaaaatgtctcctgctggtccagcaccagtaccatggctcatgcctgtaatcccaccactttgagaggctgaggcaggcrgatcacctgaggtcaggagctccagaccagcttggccaacatggcaaaaacccctctctcctaaaaatataaaaattacccaggcatggtggcatacacctgtaatcttagctactcaggaggctgaggcatgagaatcgcttgaacccgggaggcagaggttgcagcgagctgtggtcacgccactgcactccagcctgggcaacaacaaaaacaacaaaaaaaaaaaaaaaaaaggaaaaaaaagaaaagtctcctgcatcctcagtctgtaattttagagtagtttattgtttccatcttttacgaattacgttaagatactttacct

SEQ ID NO: 377061 - DNA, 566 bp, Homo sapiens
atatggagtttttgggagtgttgttaaggatgactcctaagtcaaagattttggccttagcaactggagactataaatctgcttttatttgaagcgatagagcattagggagaaaaaaacagatttcagctttagatagagtaagatacatgaagttttgaattgtaaattggaacctcttagcagtaattaccttctgtatggtatttaatgtcatgggactagataatatgcaaaaaaatgtgagtgtagtgagagaagaactaggtccattttcaggggcaaaccctcattaagacatgtgtatggtagagagagagagaagaaaaaacaatgaatgaaactgagaataaatatttcttgagctgcaggaaaacctcttagaagacaaagaaaatgtaaggagaagagaatgtgtcaaccttgtcaaaagctgctgctaagtcaagaatgaggagaggtttgaattgactgttaactttggtttccatgaggttataagtgtgcttgatgcttgtaatttcatgatgtaktgagtccagcattctttttgcagtggatttaaa

SEQ ID NO: 377062 - DNA, 434 bp, Homo sapiens
  misc_feature (1)...(434): n = A,T,C or G
nnnnnnnnnnnnnnnnnnnnnnnnnnnnnnnnnnnattacattgcataatatcttacatgcctgtgaaacttggtgcttcctttgagattttattttctctgcatrttctctaacttttcaagttgttctttctccctattcgtgtgtgtgtgtgtgtgtgtgtgtgtgtgtgtgtgtgtgtgtgtgtgcacgtgcatgatttttcttgatggctttcctcaaatgtcttgactgataattcaactagttatatatcctatgatcctaatatttttttctcagaaaattttagaaactctgtccttttcttctagtatccaatattgctgttggaaagtctagtcaaatctgattttcatttaattatggtaaaaaagagaaagactattctgagaatgtgtaaaagatcttatccttgtggttttaaaatctc

SEQ ID NO: 377063 - DNA, 434 bp, Homo sapiens
  misc_feature (1)...(434): n = A,T,C or G
nnnnnnnnnnnnnnnnnnnnnnnnnnnnnnnnnnnattacattgcataatatcttacatgcctgtgaaacttggtgcttcctttgagattttattttctctgcatattctctaacttttcaagttgttctttctccctattcrtgtgtgtgtgtgtgtgtgtgtgtgtgtgtgtgtgtgtgtgtgtgtgcacgtgcatgatttttcttgatggctttcctcaaatgtcttgactgataattcaactagttatatatcctatgatcctaatatttttttctcagaaaattttagaaactctgtccttttcttctagtatccaatattgctgttggaaagtctagtcaaatctgattttcatttaattatggtaaaaaagagaaagactattctgagaatgtgtaaaagatcttatccttgtggttttaaaatctc

SEQ ID NO: 377064 - DNA, 434 bp, Homo sapiens
  misc_feature (1)...(434): n = A,T,C or G
nnnnnnnnnnnnnnnnnnnnnnnnnnnnnnnnnnnattacattgcataatatcttacatgcctgtgaaacttggtgcttcctttgagattttattttctctgcatattctctaacttttcaagttgttctttctccctattcgtgtgtgtgtgtgtgtgtgtgtgtgtgtgtgtgtgtgtgtgtgtgtgcacgygcatgatttttcttgatggctttcctcaaatgtcttgactgataattcaactagttatatatcctatgatcctaatatttttttctcagaaaattttagaaactctgtccttttcttctagtatccaatattgctgttggaaagtctagtcaaatctgattttcatttaattatggtaaaaaagagaaagactattctgagaatgtgtaaaagatcttatccttgtggttttaaaatctc

SEQ ID NO: 377065 - DNA, 600 bp, Homo sapiens
ttttggttaaactaaccattaaatagttattgtttggatgattcttaaaaacttaatgactagagaattataagaaayagaattaaaatatttacacaatttaataaaatatttaatatagctgtattaaaaaatcagcccatttggtatgcctttcattctatatataataaagttaattgagcataatttattcttcataattctgtgatattattacacattcaattggtttctagagatgtacacaaaaagtatttctatatatattcccaattacttcaaattttttaaaccaaataaaatttaatctgaagtttttttcatatttttctttaaaaaagtacagaaagaaaacatattggaaggtattcttttcaacttgcctagacaaactcatttgatgtgcttaaagtctctaaaaaatatttgtgtgtattgtagtggtcatgtgggaggggggtggaatgatggtgaatggctttctgttagtactattagtatattctgtaactttaaacaaagatcagaatagaattattaacatcagttttttttaattacttactataatttagattatttctatcactgatacct

SEQ ID NO: 377066 - DNA, 600 bp, Homo sapiens
ttttggttaaactaaccattaaatagttattgtttggatgattcttaaaaacttaatgactagagaattataagaaacagaattaaaatatttacacaatttaataaaatatttaatatagctgtattaaaaaatcagcccatttggtatgcctttcattctatatataataaagttaattgagcataatttattcttcataattctgtgatattattacacattcaattggtttctagagatgtacacaaaaagtatttctatatatattcccaattacttcaaattttttaaaccaaataaaatttaatctgaagtttttttcatatttttctttaaaaaagtacagaaagaaaacatattggaaggtattcttttcaacttgcctagacaaactcatttgatgtgcttaaagtctctaaaaaatatttgtgtgtattgtagtggtcatgtgggagkggggtggaatgatggtgaatggctttctgttagtactattagtatattctgtaactttaaacaaagatcagaatagaattattaacatcagttttttttaattacttactataatttagattatttctatcactgatacct

SEQ ID NO: 377067 - DNA, 596 bp, Homo sapiens
atatattcccaattacttcaaattttttaaaccaaataaaatttaatctgaagtttttttcatatttttctttaaaaaagtacagaaagaaaacatattggaaggtattcttttcaacttgcctagacaaactcatttgatgtgcttaaagtctctaaaaaatatttgtgtgtattgtagtggtcatgtgggaggggggtggaatgatggtgaatggctttctgttagtactattagtatattctgtaactttaaacaaagatcagaatagaattattaacatcagttttttttaattacttactataatttagattatttctatcactgataccttccagataattttttaatttgaaattttctgggtttttttgtaatacttgtattttacttttgttgccaactaaaaaaggtgtgatttttttcyttctaccaatttaatgtccctaatttacagaatcattattatttcccattatgtaattttcaacttacatccatttcatttttagtaaaacagaaccaattgctgactgaaaaaaaactcaatacatttacatataatttcatgcttaatttcatttgtgatcctc

SEQ ID NO: 377068 - DNA, 596 bp, Homo sapiens
atatattcccaattacttcaaattttttaaaccaaataaaatttaatctgaagtttttttcatatttttctttaaaaaagtacagaaagaaaacatattggaaggtattcttttcaacttgcctagacaaactcatttgatgtgcttaaagtctctaaaaaatatttgtgtgtattgtagtggtcatgtgggaggggggtggaatgatggtgaatggctttctgttagtactattagtatattctgtaactttaaacaaagatcagaatagaattattaacatcagttttttttaattacttactataatttagattatttctatcactgataccttccagataattttttaatttgaaattttctgggtttttttgtaatacttgtattttacttttgttgccaactaaaaaaggtgtgatttttttctttctaccaatttaatgtccctaatttacagaatcattmttatttcccattatgtaattttcaacttacatccatttcatttttagtaaaacagaaccaattgctgactgaaaaaaaactcaatacatttacatataatttcatgcttaatttcatttgtgatcctc

SEQ ID NO: 377069 - DNA, 337 bp, Homo sapiens
tgttacagtaaatttactctgaacttaatttaagggtaatttgcctggcaattagctcaaagtgagccatcgttygcgaccctactgcatttttcagttcccctttccctccctgtagtaattctacaaggcatataccaacttacagtcatcccttctctcccacaattaggttaaaatgaaagaattagaacaaaagctataaagtgtctcaaaactacccacgttaagattaaatgcagattatttggaataatggaaaattaaagcaaagtaaaaccacagcataagacaaccaacagtaagatcagttcatctctaggaaatcctgaagaag

SEQ ID NO: 377070 - DNA, 613 bp, Homo sapiens
  misc_feature (1)...(613): n = A,T,C or G
tcttggtaggcccaataaatggtttgttgtttctaatttgctggatgcatataataaaatactgtgcaacagttagatgcaataatatagatgtagaagttatgacattataaatctttaatatatatattgttaagaaaaatragaaaatagaaaaaatgagaaacaatgaaactacattcatgtaaatttaaaaatacactgctaaaactatattcacaatttctgtcaccatgccatgttcaaattatacatccataatttaaaacattcctcttaaagagnnnnnnnnnnnnnnnnnnnnnnnnnnnnnnnnnnnnnnnnnnnnnnnnnnnnnnnnnnnnnnnnnnnnnnnnnnnnnnnnnnnnnnnnnnnnnnnnnnnnacagagtctaatggtgtctaaaatttaatttcactcaactactctgtttttagttttgatcaaactggaaaccaaagaaattaaatgattttcctataatcatactgatatttagagggagagcataaattcaacttgtcttatgatataccctacggaaaaaaaaatctacaagactatttgactgtattttatcttattatttcactataagccactgtaaaacttg

SEQ ID NO: 377071 - DNA, 613 bp, Homo sapiens
  misc_feature (1)...(613): n = A,T,C or G
tcttggtaggcccaataaatggtttgttgtttctaatttgctggatgcatataataaaatactgtgcaacagttagatgcaataatatagatgtagaagttatgacattataaatctttaatatatatattgttaagaaaaatgagaaaatagaaaaaatgagaaacaatgaaactacattcatgtaaatttaaaaatacactgctaaaactatattcacaatttytgtcaccatgccatgttcaaattatacatccataatttaaaacattcctcttaaagagnnnnnnnnnnnnnnnnnnnnnnnnnnnnnnnnnnnnnnnnnnnnnnnnnnnnnnnnnnnnnnnnnnnnnnnnnnnnnnnnnnnnnnnnnnnnnnnnnnnnacagagtctaatggtgtctaaaatttaatttcactcaactactctgtttttagttttgatcaaactggaaaccaaagaaattaaatgattttcctataatcatactgatatttagagggagagcataaattcaacttgtcttatgatataccctacggaaaaaaaaatctacaagactatttgactgtattttatcttattatttcactataagccactgtaaaacttg

SEQ ID NO: 377072 - DNA, 575 bp, Homo sapiens
aaacattactggtggtggcattcrtccttcttacagggtctacatggtgtgttttcagttcagtgaaggctgaataattaatctttacaaaggaatcacttctataatgaagtcaagaagatttttcctcttcataatggtagaggtcagatcctggcatggcattcttgggttccgtgctgctgatggagctgagacctctgcccctacaggggttgttaaaagtgagcaagtcccccacggccccctccaggacatttttatatcaatctgaataaatacgtttaaaacatgaattcacatcagtatttctaattgctacccaatagcacaaaagtgattctaattttcttccttttcttatttgcaactttcttctatgagagaaagaatacttgttacaatgatcctatacgtattaacttattagatcaatcctgctgcatgtaacaaatctcccatgtcttccacctctctcaggatacttcatctagtaattcctgcccaggttttgaaacctcatgctggaccctcctgtgcaaggctgccctgctcattctgctctcatctgatcc

SEQ ID NO: 377073 - DNA, 512 bp, Homo sapiens
tctggtgccacgatccatgcttttatctgtcaaaggaccttgtgagagcacttacgttaggttgattgcattttctaagaaaggaaatctcagtgcttctagaatgtaggcttatcactgtgcagtctcctattaaacatgaccttcctctggtgtcctcacaaaaacagactattatatagaagagtctttttcacagtgaccaagttttaaacacagtggcttctatgaagtgcttattttcattactttaggaataaggaagctcctgttcgtaaaaattttctgtataccaaactcccataacacacaatayacctatataacaaacctgcacatgtacccctgaacctaaaataaaagttaaaaaaagaaagaaaacaaaaaaattagcaatagaaatttgggatacatttggcctcctgatacataattctcctgtaggtttcttgatggggatgggtatattagtctcaactttgggcccttgctttatcccacatagtcccctg

SEQ ID NO: 377074 - DNA, 592 bp, Homo sapiens
aatttacaatggattcaaaggaagtttatttgacttaattttattgagagtggagctatatttttacgaaaggagaaacagttacattttaaaagtttgtattaatattatgtacaaaatttactccaaattttccaattactagggcaaatatatgggctgcctttgatctattcagataatgatattgaatttcaactttaattcttgtatttatrcatattacattaaccatagagagaattcccagtataactcaaggtagaatatttaatgtattcagcttattgattatttcattttgttacatattatgcctacctcaattattgttacagtttctgtttcccaaatttccaactggaaacaaaagcaatggtagttctttacaacatttgctcattatataccagatttcatttttagattctaaactggtaatacttgtttcttgcagcaaagaagaatcaacatgtctaatgaaacattgctttctagaaacatgtaatttatgtttattttaaaaatcagggctctgtcaaaccatttcaatatcctctcttatagtaaatcagtaaagattcctaatcaa

SEQ ID NO: 377075 - DNA, 604 bp, Homo sapiens
ctcacataaaattccttccccttatcctcatgttatcataatgcagtttaccaaatctgagaaaatgacactgttcaaagctgactgtttgttgggctatgccaagccaaggagagaggcttcagaaaaaatgagccagcagacaccttgttctcaggattctagtccctagaattgggagaaaatacatttgtgtggtttaagccacccattctgtaagactttgttgtggcagccctaacaaatgactacaggcatatacatacgctacatgttggaagtcatttcctaagaggcatcattaaaactcagtttccatcacactgcagttggtcccttagcctgtatccttcattttttctatctccggtaacacaccactgaaagcaactctcaaytcattactttgctaccatcttattggttctctttgcctttgctgattcttcttggaacacctgtcccctggatattctaatggctcccctgttctcttccttcagttgtctgctctatggggacctcctcaagagctttcattaatagcttaactgaaaatagccttatcaaaagtagtgctcacaatcacttctcctatcatccg

SEQ ID NO: 377076 - DNA, 639 bp, Homo sapiens
tatggaaaagcacctacctgtgaataaaaggctctatttttacttttttttttttttttttttgaactagtgtctagtcctaggcaccaaccagttggctgggaccctgaccacctgcttaaatgcttttgcaaactctttatctctaggtcttgaccttcttctctggtgccttttttttttccttgaatagatttgagagtcttttcaaatagacattctctggagtgttaaggcaaagatggaattagccaggcctcagtacattagatgtcccttaatcactaactatgggcagatgaaaatcaatattgtaacattttctcagggatactttttgtaaaaccttttggaaacaaatactgttgtcccagttggttttgtcaagccctacaatgatcaggtttcagtaatgtaatcttttcatagacctttccaatgatcagttttcacaattttacataattttatgattttctattttttatgattttagagaaagaaggaaggaaaaggggtaaacargactaaaaatattcaagtgaaaataccaggcagatagatttaaagtatggaagtataatatttttctaacactagcaaaatgaaacagaaaaaaataaggattattgaatgttt

SEQ ID NO: 377077 - DNA, 575 bp, Homo sapiens
caagacagttgaaagcttcaacaagagactagagcaagcaaagcagagaatctcactgcttgaaacaaatcttttaaattaatagagtcagaaaaaaagaaaaaaatgaacaaagacttcaatatgtactacatagtaatgattacacttatgaatccttggtatttccaaaagagaagaaaaagtaacaagactggaaaacctatttaaggaaatactacgttaaaatttccctagtcttgcaaaagatttacacattcaaatataagaggcccagcaaataccagaaaagtgcattgcaagacatagttcaccaagaaatatagtcatcaaactgtataaagtcaacatgtaggaaaaaatctgatgtctagttgcctataagagaaaccttatcagagtagcagtggacttctcaatgtgagacttaacaagccagaatggattgagagccttttttytgagttcttaaagagaaaaaaaaaaaaaaaagcaaactgtcaatcaggaattttatatcctggtagagtaagcttgataaatgaagtagaaataaagtctttgccacaaaagca

SEQ ID NO: 377078 - DNA, 566 bp, Homo sapiens
gtctttgtataatagattccttttttggccaaatagaattttgttatatagatataccacattttgtttatccattcatcaattgatagatatttggatagtttctaccttttgatccctttaaatactacgactatgaacatttttccatataagtttctgtgtagccatgttttcattttccttggaatatatctaggaataaaatcctgtgtcaaattttaactctatgtttaatcttttgagtaactgctagactgtttttcaaagctgctgtaccattttacatgtctcccaacagtgtatgagcttccaattactccacattttcttgaacactagttattatctatctttttctaaaaattatagctgtctggctgggtgcagtggctcacrcctgtaattccagttctttgggaggcccaggtgggcagatcacttgaagtcaggagttcaagaccagccgggccaacatggtgaaactccatctctactaaaagtacaaaaattagccgggcatgattgcaggcgcctgtaattccagctactccagaggctgaggt

SEQ ID NO: 377079 - DNA, 621 bp, Homo sapiens
ggttccacagccttttaaactactagatctcacgagaactcactcactatcaggaggatggcattaagggcttggtgctttgccatttgtgaaggatccactcccacwcctttatgattaaagctttttccacctaggccccgactctaacattagggagtgtactttcacaggagttttggaaggggcatagagaaaaaccgtattattctgtccctgaccccacaaatctcatgtccttctcacattgcaagatacagtcatgccttgccagcagtctcccaaagtcttaactcatttcagcattaactcaaagttacaaagtgcaaagtctcatctgggtcaaggctacattctcttttgcctacaagtctctgaaataaaaagcaagttcactgcgtctaaggtacaatgatggtacaggcattgtgtaagctttccatatccaaaagagagacattttccagaaagcttcttatttttatctgaggccccctcagcctggccttcactgtccatgtttttgtcagcattcttgtcacagccatttaaccagtctctaagatgatccaaaaatgttctcatctgtctgtcttctttggagccctccaaactcttcca

SEQ ID NO: 377080 - DNA, 564 bp, Homo sapiens
atggcattaagggcttggtgctttgccatttgtgaaggatccactcccacacctttatgattaaagctttttccacctaggccccgactctaacattagggagtgtactttcacakgagttttggaaggggcatagagaaaaaccgtattattctgtccctgaccccacaaatctcatgtccttctcacattgcaagatacagtcatgccttgccagcagtctcccaaagtcttaactcatttcagcattaactcaaagttacaaagtgcaaagtctcatctgggtcaaggctacattctcttttgcctacaagtctctgaaataaaaagcaagttcactgcgtctaaggtacaatgatggtacaggcattgtgtaagctttccatatccaaaagagagacattttccagaaagcttcttatttttatctgaggccccctcagcctggccttcactgtccatgtttttgtcagcattcttgtcacagccatttaaccagtctctaagatgatccaaaaatgttctcatctgtctgtcttctttggagccctccaaactcttcca

SEQ ID NO: 377081 - DNA, 621 bp, Homo sapiens
ggttccacagccttttaaactactagatctcacgagaactcactcactatcaggaggatggcattaagggcttggtgctttgccatttgtgaaggatccactcccacacctttatgattaaagctttttccacctaggccccgactctaacattagggagtgtactttcacaggagytttggaaggggcatagagaaaaaccgtattattctgtccctgaccccacaaatctcatgtccttctcacattgcaagatacagtcatgccttgccagcagtctcccaaagtcttaactcatttcagcattaactcaaagttacaaagtgcaaagtctcatctgggtcaaggctacattctcttttgcctacaagtctctgaaataaaaagcaagttcactgcgtctaaggtacaatgatggtacaggcattgtgtaagctttccatatccaaaagagagacattttccagaaagcttcttatttttatctgaggccccctcagcctggccttcactgtccatgtttttgtcagcattcttgtcacagccatttaaccagtctctaagatgatccaaaaatgttctcatctgtctgtcttctttggagccctccaaactcttcca

SEQ ID NO: 377082 - DNA, 564 bp, Homo sapiens
atggcattaagggcttggtgctttgccatttgtgaaggatccactcccacacctttatgattaaagctttttccacctaggccccgactctaacattagggagtgtactttcacaggagttttgkaaggggcatagagaaaaaccgtattattctgtccctgaccccacaaatctcatgtccttctcacattgcaagatacagtcatgccttgccagcagtctcccaaagtcttaactcatttcagcattaactcaaagttacaaagtgcaaagtctcatctgggtcaaggctacattctcttttgcctacaagtctctgaaataaaaagcaagttcactgcgtctaaggtacaatgatggtacaggcattgtgtaagctttccatatccaaaagagagacattttccagaaagcttcttatttttatctgaggccccctcagcctggccttcactgtccatgtttttgtcagcattcttgtcacagccatttaaccagtctctaagatgatccaaaaatgttctcatctgtctgtcttctttggagccctccaaactcttcca

SEQ ID NO: 377083 - DNA, 621 bp, Homo sapiens
ggttccacagccttttaaactactagatctcacgagaactcactcactatcaggaggatggcattaagggcttggtgctttgccatttgtgaaggatccactcccacacctttatgattaaagctttttccacctaggccccgactctaacattagggagtgtactttcacaggagttttggaaggggcatagagaaaaaccgtattattctgtccctgaccccacaaatctcatgtccttctcacattrcaagatacagtcatgccttgccagcagtctcccaaagtcttaactcatttcagcattaactcaaagttacaaagtgcaaagtctcatctgggtcaaggctacattctcttttgcctacaagtctctgaaataaaaagcaagttcactgcgtctaaggtacaatgatggtacaggcattgtgtaagctttccatatccaaaagagagacattttccagaaagcttcttatttttatctgaggccccctcagcctggccttcactgtccatgtttttgtcagcattcttgtcacagccatttaaccagtctctaagatgatccaaaaatgttctcatctgtctgtcttctttggagccctccaaactcttcca

SEQ ID NO: 377084 - DNA, 591 bp, Homo sapiens
ttcttatttttatctgaggccccctcagcctggccttcactgtccatgtttttgtcagcattcttgtcacagccatttaaccagtctctaagatgrtccaaaaatgttctcatctgtctgtcttctttggagccctccaaactcttccaacctctacccattacccagttccgaagttgcttccacattttcaggtatctttatagcaatgctccagtcctcatttgccatttttggtaagatttattttgaaaaagaggtttaattggctcatggttctgcagagtggacaggaagcttagtgcttctgcttctgggggggctcagaaatctttcaatcattgtgcaaggtaatgaaagagtgaattgtctcacatggcaagaggaaatcacggagagtacagagtgatatagagttttcagtggccagatctcacgagaagtcactcatgattgtgaggacagtaccaaggggatggtgctgaaccactcatgagaaatttgccttcatgattcagtcaccttataccaggatccacctccaacattaggaagcataactcaacatgagatttggtggggatacatatt

SEQ ID NO: 377085 - DNA, 564 bp, Homo sapiens
atggcattaagggcttggtgctttgccatttgtgaaggatccactcccacacctttatgattaaagctttttccacctaggccccgactctaacattagggagtgtactttcacaggagttttggaaggggcatagagaaaaaccgtattattctgtccctgaccccacaaatctcatgtccttctcacattgcaagatacagtcatgccttgccagcagtctcccaaagtcttaactcatttcagcattaactcaaagttacaaagtgcaaagtctcatctgggtcaaggctacattctcttttgcctacaagtctctgaaataaaaagcaagttcactgcgtctaaggtacaatgatggtacaggcattgtgtaagctttccatatccaaaagagagacattttccagaaagcttcttatttttatctgaggccccctcagcctggccttcactgtccatgtttttgtcagcattcttgtcacagccatttaaccagtctctaagatgatccaaaaatgttctcatctgyctgtcttctttggagccctccaaactcttcca

SEQ ID NO: 377086 - DNA, 591 bp, Homo sapiens
ttcttatttttatctgaggccccctcagcctggccttcactgtccatgtttttgtcagcattcttgtcacagccatttaaccagtctctaagatgatccaaaaatgttctcatctgtctgtcttctttggagccctccaaactcttccaacctctacycattacccagttccgaagttgcttccacattttcaggtatctttatagcaatgctccagtcctcatttgccatttttggtaagatttattttgaaaaagaggtttaattggctcatggttctgcagagtggacaggaagcttagtgcttctgcttctgggggggctcagaaatctttcaatcattgtgcaaggtaatgaaagagtgaattgtctcacatggcaagaggaaatcacggagagtacagagtgatatagagttttcagtggccagatctcacgagaagtcactcatgattgtgaggacagtaccaaggggatggtgctgaaccactcatgagaaatttgccttcatgattcagtcaccttataccaggatccacctccaacattaggaagcataactcaacatgagatttggtggggatacatatt

SEQ ID NO: 377087 - DNA, 591 bp, Homo sapiens
ttcttatttttatctgaggccccctcagcctggccttcactgtccatgtttttgtcagcattcttgtcacagccatttaaccagtctctaagatgatccaaaaatgttctcatctgtctgtcttctttggagccctccaaactcttccaacctctacccattacccagttccgaagttgcttccacattttcaggtatctttatagcaatgctccagtcctcatttgccatttttggtaagatttattttgaaaaagaggtttaattggctcatggttctgcagagtggacaggaagcttagtgcttctgcttctgggggggctcagaaatctttcaatcattgtgcaaggtaatgaaagagtgaattgtctcacatgrcaagaggaaatcacggagagtacagagtgatatagagttttcagtggccagatctcacgagaagtcactcatgattgtgaggacagtaccaaggggatggtgctgaaccactcatgagaaatttgccttcatgattcagtcaccttataccaggatccacctccaacattaggaagcataactcaacatgagatttggtggggatacatatt

SEQ ID NO: 377088 - DNA, 591 bp, Homo sapiens
ttcttatttttatctgaggccccctcagcctggccttcactgtccatgtttttgtcagcattcttgtcacagccatttaaccagtctctaagatgatccaaaaatgttctcatctgtctgtcttctttggagccctccaaactcttccaacctctacccattacccagttccgaagttgcttccacattttcaggtatctttatagcaatgctccagtcctcatttgccatttttggtaagatttattttgaaaaagaggtttaattggctcatggttctgcagagtggacaggaagcttagtgcttctgcttctgggggggctcagaaatctttcaatcattgtgcaaggtaatgaaagagtgaattgtctcacatggcaagaggaaatcacggagagtacrgagtgatatagagttttcagtggccagatctcacgagaagtcactcatgattgtgaggacagtaccaaggggatggtgctgaaccactcatgagaaatttgccttcatgattcagtcaccttataccaggatccacctccaacattaggaagcataactcaacatgagatttggtggggatacatatt

SEQ ID NO: 377089 - DNA, 493 bp, Homo sapiens
gtcactcatgattgtgaggacagtaccaaggggatggtgctgaaccactcatgagaaatttgccttcatgattcagtcaccttataccaggatccacctccaacattaggaagcataactcaacatgagatttggtggggatacatattcgaattgcctcatcagtctttgagtataaagacatccatagcaggctttayccagccagcttctttgggattctttatagggtttcaggtctataggatatccactaaaatattcctacttcaaaaggcaataaagtaagtggtattatcattcttcaaaaagttataatggtagtgtaggcattcatagtatgatttagttcatttgctactgtttctattctatcaccatattaacactttcctacacaattctatattcagctgggtttcagttgagcacaaagtcatccttgtactaccaccgatagctggcaccagctgtttgatactgttatcattct

SEQ ID NO: 377090 - DNA, 493 bp, Homo sapiens
gtcactcatgattgtgaggacagtaccaaggggatggtgctgaaccactcatgagaaatttgccttcatgattcagtcaccttataccaggatccacctccaacattaggaagcataactcaacatgagatttggtggggatacatattcgaattgcctcatcagtctttgagtataaagacatccatagcaggctttatccagccagcttctttgggattctttatagggtttcaggtctataggatatccactaaaatattcctacttcaaaaggcaataaagtaagtggtattatcattctycaaaaagttataatggtagtgtaggcattcatagtatgatttagttcatttgctactgtttctattctatcaccatattaacactttcctacacaattctatattcagctgggtttcagttgagcacaaagtcatccttgtactaccaccgatagctggcaccagctgtttgatactgttatcattct

SEQ ID NO: 377091 - DNA, 493 bp, Homo sapiens
gtcactcatgattgtgaggacagtaccaaggggatggtgctgaaccactcatgagaaatttgccttcatgattcagtcaccttataccaggatccacctccaacattaggaagcataactcaacatgagatttggtggggatacatattcgaattgcctcatcagtctttgagtataaagacatccatagcaggctttatccagccagcttctttgggattctttatagggtttcaggtctataggatatccactaaaatattcctacttcaaaaggcaataaagtaagtggtattatcattcttcaaaaagttataatggtagtgtaggcattcatagtatgatttagttcatttgctactgtttctattctatcaccatattaacactttcstacacaattctatattcagctgggtttcagttgagcacaaagtcatccttgtactaccaccgatagctggcaccagctgtttgatactgttatcattct

SEQ ID NO: 377092 - DNA, 581 bp, Homo sapiens
ttgcattccattccattccactcgggttgactccattccatgccattgcattccattgcattccattcctttctattacattccattcttttccattccattcctttscactcgagttgattccgttccattccattccattccgtaccattccattccattccaatcgggttgattccattccattcaattctattccattcctttccattccatgccactcgtgttaattctattccattccattccattgcattcccttccattccattccactcgggtgattccattccattccattccactcaggataactccattccattgcaatccattcctctcgggttgattcccttccattccattccattccattccattccattccattcctttccatttgattccattccattgaattccattccattgaattccattccattcctttccattccaatccattccactcaggttgattcctttccgttccattccattcttatggtttcatataaactttaggattttttttctatttctgtgaagtgggttattagtatttcaataaggattgcgtt

SEQ ID NO: 377093 - DNA, 581 bp, Homo sapiens
ttgcattccattccattccactcgggttgactccattccatgccattgcattccattgcattccattcctttctattacattccattcttttccattccattcctttccactcgagttgattccrttccattccattccattccgtaccattccattccattccaatcgggttgattccattccattcaattctattccattcctttccattccatgccactcgtgttaattctattccattccattccattgcattcccttccattccattccactcgggtgattccattccattccattccactcaggataactccattccattgcaatccattcctctcgggttgattcccttccattccattccattccattccattccattccattcctttccatttgattccattccattgaattccattccattgaattccattccattcctttccattccaatccattccactcaggttgattcctttccgttccattccattcttatggtttcatataaactttaggattttttttctatttctgtgaagtgggttattagtatttcaataaggattgcgtt

SEQ ID NO: 377094 - DNA, 581 bp, Homo sapiens
ttgcattccattccattccactcgggttgactccattccatgccattgcattccattgcattccattcctttctattacattccattcttttccattccattcctttccactcgagttgattccgttccattccattccattccgtaccattccattccattccaatcgggttgattccattccattcaattctattccattcctttccattccatgccactcgtgttaattctattccattccattccattgcattcccttccattccattccactcggrtgattccattccattccattccactcaggataactccattccattgcaatccattcctctcgggttgattcccttccattccattccattccattccattccattccattcctttccatttgattccattccattgaattccattccattgaattccattccattcctttccattccaatccattccactcaggttgattcctttccgttccattccattcttatggtttcatataaactttaggattttttttctatttctgtgaagtgggttattagtatttcaataaggattgcgtt

SEQ ID NO: 377095 - DNA, 480 bp, Homo sapiens
taacactagcaaagagctagtacaaggatggttttgtgctcaactgaaatccagctgaatacagaattgtataggaaacagttaatatggtgagagaatagaaacagtagcaaatgtgaactaaatcatgctatgaatgcctaaactactgctgtaacttttggaaaaatgataataccactttattgctttttgaagaatgaatatyttagtgtatatgctctagacctcaaaccctataaagattctcaaagaagttggctggataaagcctactgtggatgtctttatattcaaagattgatgatgcaatttgaatatgtgtctcctccgaatctcatgttgaattatatttcctaatgtggaaggtggatcctggcataacgtaattgaattatgaaggcaaatttctcatgaatggttcagcaccatccccttgtaccgtcctcacaataatgagtgacttctcatgaggtctgg

SEQ ID NO: 377096 - DNA, 509 bp, Homo sapiens
tcactgccctttcaccccacccccgtttcacacgcactcccacatcaaccctgagcattcaagcctgcgtttccctgttrggaacctcggtggtagccagagctctgagaaacccctaggcagaactccttgcctagtttgtggcagaaatcagggaaggaaaggcaaatttcaggtctttctcacaataaataaataaagataggtagatttgattgatggatggatggatgaaacctgggagtctacgggcaaatatttatcagacactggaagtgaaagttgtcacaaagattatggagtgcacctgtcttatgaccctgttattttatcctagtatatgcactagagcatattttctaactgtgtaaattgaaggctcacaaattagtttatgagagagaagataacagattggaagagaattaccatattcattagttgtgtttttaaaattttaaagtaaaatagagacatgatttttttcatgctttcgaatgcatctataa

SEQ ID NO: 377097 - DNA, 509 bp, Homo sapiens
tcactgccctttcaccccacccccgtttcacacgcactcccacatcaaccctgagcattcaagcctgcgtttccctgttaggaacmtcggtggtagccagagctctgagaaacccctaggcagaactccttgcctagtttgtggcagaaatcagggaaggaaaggcaaatttcaggtctttctcacaataaataaataaagataggtagatttgattgatggatggatggatgaaacctgggagtctacgggcaaatatttatcagacactggaagtgaaagttgtcacaaagattatggagtgcacctgtcttatgaccctgttattttatcctagtatatgcactagagcatattttctaactgtgtaaattgaaggctcacaaattagtttatgagagagaagataacagattggaagagaattaccatattcattagttgtgtttttaaaattttaaagtaaaatagagacatgatttttttcatgctttcgaatgcatctataa

SEQ ID NO: 377098 - DNA, 509 bp, Homo sapiens
tcactgccctttcaccccacccccgtttcacacgcactcccacatcaaccctgagcattcaagcctgcgtttccctgttaggaacctcggtggtagccagagctctgagaaacccctaggcagaactccttgcctagtttgtggcagaaatcagggaaggaaaggcaaatttcaggtctttctcacaataaataaataaagataggtagatttgattgatggatggatggatgaaacstgggagtctacgggcaaatatttatcagacactggaagtgaaagttgtcacaaagattatggagtgcacctgtcttatgaccctgttattttatcctagtatatgcactagagcatattttctaactgtgtaaattgaaggctcacaaattagtttatgagagagaagataacagattggaagagaattaccatattcattagttgtgtttttaaaattttaaagtaaaatagagacatgatttttttcatgctttcgaatgcatctataa

SEQ ID NO: 377099 - DNA, 509 bp, Homo sapiens
tcactgccctttcaccccacccccgtttcacacgcactcccacatcaaccctgagcattcaagcctgcgtttccctgttaggaacctcggtggtagccagagctctgagaaacccctaggcagaactccttgcctagtttgtggcagaaatcagggaaggaaaggcaaatttcaggtctttctcacaataaataaataaagataggtagatttgattgatggatggatggatgaaacctgggagtctacgggcaaatatttatcagacactggaagtgaaagttgtcacaaagattatggagtgcacctgtcttatgaccctgttattttatcctagtatatgcaytagagcatattttctaactgtgtaaattgaaggctcacaaattagtttatgagagagaagataacagattggaagagaattaccatattcattagttgtgtttttaaaattttaaagtaaaatagagacatgatttttttcatgctttcgaatgcatctataa

SEQ ID NO: 377100 - DNA, 542 bp, Homo sapiens
cttcacaatttctcccaaaaagggaagaaccaatggatatttgcatcacattttccattgtccattcactggacaagtcagatggaaaagcccaatttattgtcagagcataatatgagggcttggatagaaggaaargtgttattgggaaacatgagtagaatgggatactgtaggaaatacgcattatgtacattttaaaaaacgtaattgtaggccaaaattgctggtttgcaagatgcactttccatgatgttcaggtatagaaaagcaagaggtactgtcacgggaacactcatatgaagttatttgtggaatctacatattaataggaaaatagttaatacagcccagtatatttctataacatttattttagtgaacttataatgtttctttgtattaaattattagattatatctttagataatattgttactaaattagtaggtaatacatatatttattcaaaaataaattgtgcatctaatgtctaccaattaatgtacttgtctatgtatcttaacttgagcctctgctg

SEQ ID NO: 377101 - DNA, 542 bp, Homo sapiens
cttcacaatttctcccaaaaagggaagaaccaatggatatttgcatcacattttccattgtccattcactggacaagtcagatggaaaagcccaatttattgtcagagcataatatgagggcttggatagaaggaaaggtgttattgggaaacatgagtrgaatgggatactgtaggaaatacgcattatgtacattttaaaaaacgtaattgtaggccaaaattgctggtttgcaagatgcactttccatgatgttcaggtatagaaaagcaagaggtactgtcacgggaacactcatatgaagttatttgtggaatctacatattaataggaaaatagttaatacagcccagtatatttctataacatttattttagtgaacttataatgtttctttgtattaaattattagattatatctttagataatattgttactaaattagtaggtaatacatatatttattcaaaaataaattgtgcatctaatgtctaccaattaatgtacttgtctatgtatcttaacttgagcctctgctg

SEQ ID NO: 377102 - DNA, 542 bp, Homo sapiens
cttcacaatttctcccaaaaagggaagaaccaatggatatttgcatcacattttccattgtccattcactggacaagtcagatggaaaagcccaatttattgtcagagcataatatgagggcttggatagaaggaaaggtgttattgggaaacatgagtagaatggkatactgtaggaaatacgcattatgtacattttaaaaaacgtaattgtaggccaaaattgctggtttgcaagatgcactttccatgatgttcaggtatagaaaagcaagaggtactgtcacgggaacactcatatgaagttatttgtggaatctacatattaataggaaaatagttaatacagcccagtatatttctataacatttattttagtgaacttataatgtttctttgtattaaattattagattatatctttagataatattgttactaaattagtaggtaatacatatatttattcaaaaataaattgtgcatctaatgtctaccaattaatgtacttgtctatgtatcttaacttgagcctctgctg

SEQ ID NO: 377103 - DNA, 542 bp, Homo sapiens
cttcacaatttctcccaaaaagggaagaaccaatggatatttgcatcacattttccattgtccattcactggacaagtcagatggaaaagcccaatttattgtcagagcataatatgagggcttggatagaaggaaaggtgttattgggaaacatgagtagaatgggrtactgtaggaaatacgcattatgtacattttaaaaaacgtaattgtaggccaaaattgctggtttgcaagatgcactttccatgatgttcaggtatagaaaagcaagaggtactgtcacgggaacactcatatgaagttatttgtggaatctacatattaataggaaaatagttaatacagcccagtatatttctataacatttattttagtgaacttataatgtttctttgtattaaattattagattatatctttagataatattgttactaaattagtaggtaatacatatatttattcaaaaataaattgtgcatctaatgtctaccaattaatgtacttgtctatgtatcttaacttgagcctctgctg

SEQ ID NO: 377104 - DNA, 615 bp, Homo sapiens
ctttggtttttattctgtctgagatgggagatgaggaagggttctgagcagagaggtgacrcgaactgtctactgatttaaaagcatcccatggcagctgagttgagaaagattgtgggaagatttgggtagaagcagggaggccatgctgtggcaacctccaggtgggagatgatagtggttctgaccagggccctggcaatggtgagagatggttgattcttgttgaaatactaagtaattaaaaaaaaaccactactgtttttcccaattatatgaagtatgggatgctagattacagaaatcttaagtcgggccaggtgaagtggcttatgcccgtagcttcagcactttgggaggcagagatgggagaatggtttgagtccaggagtttgagaccaccctgggcaacacagcaagacctcctgtctatgcaaataaaaattaataaaatataattatcccggcatagtggtattttcctgtagaacctgttacttaggttgttgaggtgggcagatctcttgagggcgggagtttgaggccagcttgggcaacatagcaaggctcctctttctacaaaaaaaaaaaattagttgggtgttttggtgctca

SEQ ID NO: 377105 - DNA, 615 bp, Homo sapiens
ctttggtttttattctgtctgagatgggagatgaggaagggttctgagcagagaggtgacgcgaactgtctactgatttaaaagcatcccatggcagctgagttgagaaagattgtgggaagatttgggtagaagcagggaggccatgctgtggcaacctccaggtgggagatgatagtggttctgaccagggccctggcaatggtgagagatggttgattcttgttgaaatactaagtaattaaaaaaaaaccactactgtttttcccaattatatgawgtatgggatgctagattacagaaatcttaagtcgggccaggtgaagtggcttatgcccgtagcttcagcactttgggaggcagagatgggagaatggtttgagtccaggagtttgagaccaccctgggcaacacagcaagacctcctgtctatgcaaataaaaattaataaaatataattatcccggcatagtggtattttcctgtagaacctgttacttaggttgttgaggtgggcagatctcttgagggcgggagtttgaggccagcttgggcaacatagcaaggctcctctttctacaaaaaaaaaaaattagttgggtgttttggtgctca

SEQ ID NO: 377106 - DNA, 615 bp, Homo sapiens
ctttggtttttattctgtctgagatgggagatgaggaagggttctgagcagagaggtgacgcgaactgtctactgatttaaaagcatcccatggcagctgagttgagaaagattgtgggaagatttgggtagaagcagggaggccatgctgtggcaacctccaggtgggagatgatagtggttctgaccagggccctggcaatggtgagagatggttgattcttgttgaaatactaagtaattaaaaaaaaaccactactgtttttcccaattatatgaagtatgggatgctagattacagaaatcttaagtcgggccaggtgmagtggcttatgcccgtagcttcagcactttgggaggcagagatgggagaatggtttgagtccaggagtttgagaccaccctgggcaacacagcaagacctcctgtctatgcaaataaaaattaataaaatataattatcccggcatagtggtattttcctgtagaacctgttacttaggttgttgaggtgggcagatctcttgagggcgggagtttgaggccagcttgggcaacatagcaaggctcctctttctacaaaaaaaaaaaattagttgggtgttttggtgctca

SEQ ID NO: 377107 - DNA, 615 bp, Homo sapiens
ctttggtttttattctgtctgagatgggagatgaggaagggttctgagcagagaggtgacgcgaactgtctactgatttaaaagcatcccatggcagctgagttgagaaagattgtgggaagatttgggtagaagcagggaggccatgctgtggcaacctccaggtgggagatgatagtggttctgaccagggccctggcaatggtgagagatggttgattcttgttgaaatactaagtaattaaaaaaaaaccactactgtttttcccaattatatgaagtatgggatgctagattacagaaatcttaagtcgggccaggtgaagtggcttatgcccgtagcttcagcactttgggagrcagagatgggagaatggtttgagtccaggagtttgagaccaccctgggcaacacagcaagacctcctgtctatgcaaataaaaattaataaaatataattatcccggcatagtggtattttcctgtagaacctgttacttaggttgttgaggtgggcagatctcttgagggcgggagtttgaggccagcttgggcaacatagcaaggctcctctttctacaaaaaaaaaaaattagttgggtgttttggtgctca

SEQ ID NO: 377108 - DNA, 560 bp, Homo sapiens
gcaacttctgcctcccagttcagggttcaagcatttcttttgcctcagcctctgaagtagctgggactacagggatgtgtcaccatgcccagctaagctttgtattttctgtagttacggggtttcagcatgttggacaggctggtcttgaactcctgaccttgtgatccactggccttggactcctaaagtgctgggattacaggtgtgagccaccgtgcctggcctcttttttcagtctttaataaactgctgccatcatttcagaccrcttgctattttaggcacttagaaatttttcactggaattcatgtaaagaaagaccatgggtgtttgtactggatttagtattcatccttcgactgcatgactcacccctagtgccataattttactaatgaatttttcagatactactcagctggccactgaacctaaccagcaacccaccctcaaccattcagtggtcttttgttcttctctgttcctcctgaatgttgattactctcagaaggtgataaaaacttggatttcttttttttttctttctagagacaga

SEQ ID NO: 377109 - DNA, 415 bp, Homo sapiens
ctgaacctaaccagcaacccaccctcaaccattcagtggtcttttgttcttctctgttcctcctgaatgttgattactctcagaaggtgataaaaacttggatttcttttttttttctttctagagacagrgttttgttctgtcacccaggctgcagtgcggtggcatgatcatggttcactgcagcctgaaaccccagactcaaacagtcctcccacctcagcctcccaagtagctgggactacatacatttgcccctatgcccagctaacttctttattttttattgtacagatgggatcttgctgtgttgctcaggatgttgtcagactcctggcctcaagtgatcattctgcctcagcttcccaaagtgcttggattatatgtaggtgggagccacctgtgttcaatgccc

SEQ ID NO: 377110 - DNA, 415 bp, Homo sapiens
ctgaacctaaccagcaacccaccctcaaccattcagtggtcttttgttcttctctgttcctcctgaatgttgattactctcagaaggtgataaaaacttggatttcttttttttttctttctagagacagagttttgttctgtcacccaggctgcagtgcggtggcatgatcatggttcactgcagcctgaaaccccrgactcaaacagtcctcccacctcagcctcccaagtagctgggactacatacatttgcccctatgcccagctaacttctttattttttattgtacagatgggatcttgctgtgttgctcaggatgttgtcagactcctggcctcaagtgatcattctgcctcagcttcccaaagtgcttggattatatgtaggtgggagccacctgtgttcaatgccc

SEQ ID NO: 377111 - DNA, 523 bp, Homo sapiens
atccacccaccttggcctcccagtgtgctgagatcagaggcgtgagtcaccaygccatgcccagccatttttaaaataataacgttattgaaatatgattaacgtatcatgcaattcatttatcaaagtacgcaattcaggccaggtgcagtggctaattcctataacgctaagactttgggcagctgagacaggtggatcgcttgtgttcaggagtttgcgactagcctgggcaacatggcaaaacagcatctctagcaaaaatacaaaaattagctgggtgtggtggctcatgcctgtagtcccaactacttggggacatgagactggaagatcacttgagcccagaagccataggttgcagtgagaccagatggcaccactgcactacagcatgggtgacaaaaggagaccctgtctttaaataactaaagaaaaaaagaaagtatacaattgagtggtttttagaatattcaaggagctgtgcatccatcaccacagtctttcttagaagtgattaccc

SEQ ID NO: 377112 - DNA, 523 bp, Homo sapiens
atccacccaccttggcctcccagtgtgctgagatcagaggcgtgagtcaccatgccatgcccagccatttttaaaataataacgttattgaaatatgattaacgtatcatgcaattcatttatcaaagtacgcaattcaggccaggtgcagtggctaattcctataacgctaagactttgggcagctgagrcaggtggatcgcttgtgttcaggagtttgcgactagcctgggcaacatggcaaaacagcatctctagcaaaaatacaaaaattagctgggtgtggtggctcatgcctgtagtcccaactacttggggacatgagactggaagatcacttgagcccagaagccataggttgcagtgagaccagatggcaccactgcactacagcatgggtgacaaaaggagaccctgtctttaaataactaaagaaaaaaagaaagtatacaattgagtggtttttagaatattcaaggagctgtgcatccatcaccacagtctttcttagaagtgattaccc

SEQ ID NO: 377113 - DNA, 523 bp, Homo sapiens
atccacccaccttggcctcccagtgtgctgagatcagaggcgtgagtcaccatgccatgcccagccatttttaaaataataacgttattgaaatatgattaacgtatcatgcaattcatttatcaaagtacgcaattcaggccaggtgcagtggctaattcctataacgctaagactttgggcagctgagacaggtggatcgcttgtgttcaggagtttgcgactagcctgggcaacatggcaaaacagcatctctagcaaaaatacaaaaattagctgggtgtggtggctcatgcctgtagtcccaactacttggggacatgagactggaagatcacttgagcccrgaagccataggttgcagtgagaccagatggcaccactgcactacagcatgggtgacaaaaggagaccctgtctttaaataactaaagaaaaaaagaaagtatacaattgagtggtttttagaatattcaaggagctgtgcatccatcaccacagtctttcttagaagtgattaccc

SEQ ID NO: 377114 - DNA, 623 bp, Homo sapiens
ttatcaaagtacgcaattcaggccaggtgcagtggctaattcctataacgctaagactttgggcagctgagacaggtggatcgcttgtgttcaggagtttgcgactagcctgggcaacatggcaaaacagcatctctagcaaaaatacaaaaattagctgggtgtggtggctcatgcctgtagtcccaactacttggggacatgagactggaagatcacttgagcccagaagccataggttgcagtgagaccagatgrcaccactgcactacagcatgggtgacaaaaggagaccctgtctttaaataactaaagaaaaaaagaaagtatacaattgagtggtttttagaatattcaaggagctgtgcatccatcaccacagtctttcttagaagtgattacccacttgtgagttacccacttatgaatgagaaaccctcacctcttagccgctacctcctacgtaccccatgttcataggcaaccactgatttattttctgtcattgtagttttgcctaatctggaccttttatagaaatagaattgtacaatgtgtgatcttttgtaatttgctttttttttctcttagcagaatgttttcaaatttctttcatgttatag

SEQ ID NO: 377115 - DNA, 523 bp, Homo sapiens
atccacccaccttggcctcccagtgtgctgagatcagaggcgtgagtcaccatgccatgcccagccatttttaaaataataacgttattgaaatatgattaacgtatcatgcaattcatttatcaaagtacgcaattcaggccaggtgcagtggctaattcctataacgctaagactttgggcagctgagacaggtggatcgcttgtgttcaggagtttgcgactagcctgggcaacatggcaaaacagcatctctagcaaaaatacaaaaattagctgggtgtggtggctcatgcctgtagtcccaactacttggggacatgagactggaagatcacttgagcccagaagccataggttgcagtgagaccagatggcaccactgcactacagcatgggtracaaaaggagaccctgtctttaaataactaaagaaaaaaagaaagtatacaattgagtggtttttagaatattcaaggagctgtgcatccatcaccacagtctttcttagaagtgattaccc

SEQ ID NO: 377116 - DNA, 466 bp, Homo sapiens
tgagaccagatggcaccactgcactacagcatgggtgacaaaaggagaccctgtctttaaataactaaagaaaaaaagaaagtatacaattgagtggtttttagaatattcaaggagctgtgcatccatcaccacagtctttcttagaagtgattacccacttgtgagttacccacttatgartgagaaaccctcacctcttagccgctacctcctacgtaccccatgttcataggcaaccactgatttattttctgtcattgtagttttgcctaatctggaccttttatagaaatagaattgtacaatgtgtgatcttttgtaatttgctttttttttctcttagcagaatgttttcaaatttctttcatgttatagtgtgtatcaggatttctttccttttgtagctgagtaatagtttatgtttatccattcattagttgatggacatttgtgttgtttttgc

SEQ ID NO: 377117 - DNA, 466 bp, Homo sapiens
tgagaccagatggcaccactgcactacagcatgggtgacaaaaggagaccctgtctttaaataactaaagaaaaaaagaaagtatacaattgagtggtttttagaatattcaaggagctgtgcatccatcaccacagtctttcttagaagtgattacccacttgtgagttacccacttatgaatgagaaaccctcacctcttagccgctayctcctacgtaccccatgttcataggcaaccactgatttattttctgtcattgtagttttgcctaatctggaccttttatagaaatagaattgtacaatgtgtgatcttttgtaatttgctttttttttctcttagcagaatgttttcaaatttctttcatgttatagtgtgtatcaggatttctttccttttgtagctgagtaatagtttatgtttatccattcattagttgatggacatttgtgttgtttttgc

SEQ ID NO: 377118 - DNA, 466 bp, Homo sapiens
tgagaccagatggcaccactgcactacagcatgggtgacaaaaggagaccctgtctttaaataactaaagaaaaaaagaaagtatacaattgagtggtttttagaatattcaaggagctgtgcatccatcaccacagtctttcttagaagtgattacccacttgtgagttacccacttatgaatgagaaaccctcacctcttagccgctacctcctacgtaccccatgttcataggcaaccactgatttattttctgtcattgtagttttgcctaatctggamcttttatagaaatagaattgtacaatgtgtgatcttttgtaatttgctttttttttctcttagcagaatgttttcaaatttctttcatgttatagtgtgtatcaggatttctttccttttgtagctgagtaatagtttatgtttatccattcattagttgatggacatttgtgttgtttttgc

SEQ ID NO: 377119 - DNA, 539 bp, Homo sapiens
gccgctacctcctacgtaccccatgttcataggcaaccactgatttattttctgtcattgtagttttgcctaatctggaccttttatagaaatagaattgtacaatgtgtgatcttttgtaatttgctttttttttctcttagcagaatgttttcaaatttctttcatgttatagtgtgtatcaggatttctttccttttgtagctgagtaatagtttatgtttatccattcattagttgatggacatttgtgttgtttttgcgtattcaccatcatgagtcaggctgctatgaacactcgtacrtaagttttagtgtgaacatatatttttatttctcttggatttacactcaggagtgaaattgttgcattatgtgattactatacgtttagtctttgagaaactgccacgttgtttttcaaagcggttacactggtcaggcacagtggctcacacctttaatctcaggtatttgagacgctgagtttggaggattttcttagctcgggagttcaggacaaccctgggcaacatagg

SEQ ID NO: 377120 - DNA, 539 bp, Homo sapiens
gccgctacctcctacgtaccccatgttcataggcaaccactgatttattttctgtcattgtagttttgcctaatctggaccttttatagaaatagaattgtacaatgtgtgatcttttgtaatttgctttttttttctcttagcagaatgttttcaaatttctttcatgttatagtgtgtatcaggatttctttccttttgtagctgagtaatagtttatgtttatccattcattagttgatggacatttgtgttgtttttgcgtattcaccatcatgagtcaggctgctatgaacactcgtacataagttttagtgtgaacatatatttttatttctcttggatttacactcaggagtgaaattgttgcattatgtgattactatacgtttagtctttgagraactgccacgttgtttttcaaagcggttacactggtcaggcacagtggctcacacctttaatctcaggtatttgagacgctgagtttggaggattttcttagctcgggagttcaggacaaccctgggcaacatagg

SEQ ID NO: 377121 - DNA, 524 bp, Homo sapiens
caaccaacatttagcataagctacagcttatattgttaataattcttctatgtttatgtgctgatttgcaaataaatgggcctatatagtctttatctagtgttggattgggatcaaaagyttcatgaaatcattgtttttagtatacgtacagatggataatcgtataaataagtacagatgtgtataaatgtgtgagtatacatacatatattttctagctcctctaacaaaagggcctagaaacaacatcatcccagtaacaatgagaacaccattctccaattaaaggaaccaaggctccttggggacatatttgatatcaggattgggcagggaaaatacaagattagtttgaaatattttgtcatgttaggaagtaaggaaatgctcacaaaatggggaaaatgtgaaagggaaacagatccactttgaataaacttccatagccaaatttgagaaaattggggcaataaaatagataacaataataatatattacaatctacaggagaaaattttca

SEQ ID NO: 377122 - DNA, 524 bp, Homo sapiens
caaccaacatttagcataagctacagcttatattgttaataattcttctatgtttatgtgctgatttgcaaataaatgggcctatatagtctttatctagtgttggattgggatcaaaagtttcatgaaatcattgtttttagtatacgtacagatggataatygtataaataagtacagatgtgtataaatgtgtgagtatacatacatatattttctagctcctctaacaaaagggcctagaaacaacatcatcccagtaacaatgagaacaccattctccaattaaaggaaccaaggctccttggggacatatttgatatcaggattgggcagggaaaatacaagattagtttgaaatattttgtcatgttaggaagtaaggaaatgctcacaaaatggggaaaatgtgaaagggaaacagatccactttgaataaacttccatagccaaatttgagaaaattggggcaataaaatagataacaataataatatattacaatctacaggagaaaattttca

SEQ ID NO: 377123 - DNA, 524 bp, Homo sapiens
caaccaacatttagcataagctacagcttatattgttaataattcttctatgtttatgtgctgatttgcaaataaatgggcctatatagtctttatctagtgttggattgggatcaaaagtttcatgaaatcattgtttttagtatacgtacagatggataatcgtataaataagtacagatgtgtataaatgtgtgagtatacatacatatattttctagctcctctaacaaaagggcctagaaacaacatcatcccagtaacaatgagaacaccattctccaattaaaggaaccaaggctccttggggacatatttgatatcaggattgggcagggaaaatacaagattagtttgaaatattttgtcatgttaggaagtaaggaaatgctcacaaaatggggaaaatgtgaaagggaaacagatccactttgaataaacttccatagccaaatttgagaaaattggggcaataaaatagataacaatartaatatattacaatctacaggagaaaattttca

SEQ ID NO: 377124 - DNA, 428 bp, Homo sapiens
agtatcttcccacaagataattatagaatagtaacttcaaagtggagatgtcaacttagccaagtgatcaaagttaacrttactaataataagataaatgaacttcatgtaatttcttatatgatgcactgagtaggacaaaacatcaattctatggtattcttagacaaaatgtataactttagtcctaaccgtgagaaaacatcagactaactgaaattgaggagggacattctacaaaataactgccagtattcatcaaaagtattttagaaagactgaggaattctccagagacaaggaggcatgttatctaagtgcaatggagaacatgcattgtatcatgaaccagagatggacaacagtaggatatgtacaataacaccccaacatttgaacattaaacaaaatacttcagaaaaacccat

SEQ ID NO: 377125 - DNA, 428 bp, Homo sapiens
agtatcttcccacaagataattatagaatagtaacttcaaagtggagatgtcaacttagccaagtgatcaaagttaacattactaataataagataaatgaacttcatgtaayttcttatatgatgcactgagtaggacaaaacatcaattctatggtattcttagacaaaatgtataactttagtcctaaccgtgagaaaacatcagactaactgaaattgaggagggacattctacaaaataactgccagtattcatcaaaagtattttagaaagactgaggaattctccagagacaaggaggcatgttatctaagtgcaatggagaacatgcattgtatcatgaaccagagatggacaacagtaggatatgtacaataacaccccaacatttgaacattaaacaaaatacttcagaaaaacccat

SEQ ID NO: 377126 - DNA, 598 bp, Homo sapiens
ccagagatggacaacagtaggatatgtacaataacaccccaacatttgaacattaaacaaaatacttcagaaaaacccattggccaagaaaagtttcacacacacaaaaatagtttaaactgaaagaaaattttttaaaaacttaataaaatgtgggatgcagataaatcgttycttaaaggtacatttatagatgtaatatattgaaaataaaaggcttcaatcaatgacctttaggctcttttttaagaggctaaaaaataagcaaagtatatccaaattaagaagaaggaagatgataaagataaaaatgtaaaccaacaacatagcaaataacaaaaggtggagctaattaatatacccacaaattggttctttgaaaaaaatttttttaataaacaatggctagcaagatttatctcgaaaaaaattagagaagctacataatgtagataatgggaattaaatagaggatgtaactacagaacctacagacatcaatataattatgaaaactttaggccaatacatttgacaattaaaataacatgggaaattatttgtaaaactaattcttaaaactaatgcaaaatgaaat

SEQ ID NO: 377127 - DNA, 598 bp, Homo sapiens
ccagagatggacaacagtaggatatgtacaataacaccccaacatttgaacattaaacaaaatacttcagaaaaacccattggccaagaaaagtttcacacacacaaaaatagtttaaactgaaagaaaattttttaaaaacttaataaaatgtgggatgcagataaatcgttccttaaaggtacatttatagatgtaatatattgaaaataaaaggcttcaatcaatgacctttaggytcttttttaagaggctaaaaaataagcaaagtatatccaaattaagaagaaggaagatgataaagataaaaatgtaaaccaacaacatagcaaataacaaaaggtggagctaattaatatacccacaaattggttctttgaaaaaaatttttttaataaacaatggctagcaagatttatctcgaaaaaaattagagaagctacataatgtagataatgggaattaaatagaggatgtaactacagaacctacagacatcaatataattatgaaaactttaggccaatacatttgacaattaaaataacatgggaaattatttgtaaaactaattcttaaaactaatgcaaaatgaaat

SEQ ID NO: 377128 - DNA, 554 bp, Homo sapiens
ttgaaaataaaaggcttcaatcaatgacctttaggctcttttttaagaggctaaaaaatragcaaagtatatccaaattaagaagaaggaagatgataaagataaaaatgtaaaccaacaacatagcaaataacaaaaggtggagctaattaatatacccacaaattggttctttgaaaaaaatttttttaataaacaatggctagcaagatttatctcgaaaaaaattagagaagctacataatgtagataatgggaattaaatagaggatgtaactacagaacctacagacatcaatataattatgaaaactttaggccaatacatttgacaattaaaataacatgggaaattatttgtaaaactaattcttaaaactaatgcaaaatgaaatagaaaaagtaatagcttctctatgtattgaagaatttttttaatttaaaaagatttctataattacaggctacatgctttctcaggtgaattctatcaaacatttaagaaagtacagagagtcctcaacttacagtggtttgacttgtgctcttcttac

SEQ ID NO: 377129 - DNA, 554 bp, Homo sapiens
ttgaaaataaaaggcttcaatcaatgacctttaggctcttttttaagaggctaaaaaataagcaaagtatatccaaattaagaagaaggaagatgataaagataaaaatgtaaaccaacaacatagcaaataacaaaaggtggagctaattaatatacccacaaattggttmtttgaaaaaaatttttttaataaacaatggctagcaagatttatctcgaaaaaaattagagaagctacataatgtagataatgggaattaaatagaggatgtaactacagaacctacagacatcaatataattatgaaaactttaggccaatacatttgacaattaaaataacatgggaaattatttgtaaaactaattcttaaaactaatgcaaaatgaaatagaaaaagtaatagcttctctatgtattgaagaatttttttaatttaaaaagatttctataattacaggctacatgctttctcaggtgaattctatcaaacatttaagaaagtacagagagtcctcaacttacagtggtttgacttgtgctcttcttac

SEQ ID NO: 377130 - DNA, 554 bp, Homo sapiens
ttgaaaataaaaggcttcaatcaatgacctttaggctcttttttaagaggctaaaaaataagcaaagtatatccaaattaagaagaaggaagatgataaagataaaaatgtaaaccaacaacatagcaaataacaaaaggtggagctaattaatatacccacaaattggttctttgaaaaaaawttttttaataaacaatggctagcaagatttatctcgaaaaaaattagagaagctacataatgtagataatgggaattaaatagaggatgtaactacagaacctacagacatcaatataattatgaaaactttaggccaatacatttgacaattaaaataacatgggaaattatttgtaaaactaattcttaaaactaatgcaaaatgaaatagaaaaagtaatagcttctctatgtattgaagaatttttttaatttaaaaagatttctataattacaggctacatgctttctcaggtgaattctatcaaacatttaagaaagtacagagagtcctcaacttacagtggtttgacttgtgctcttcttac

SEQ ID NO: 377131 - DNA, 554 bp, Homo sapiens
ttgaaaataaaaggcttcaatcaatgacctttaggctcttttttaagaggctaaaaaataagcaaagtatatccaaattaagaagaaggaagatgataaagataaaaatgtaaaccaacaacatagcaaataacaaaaggtggagctaattaatatacccacaaattggttctttgaaaaaaatwtttttaataaacaatggctagcaagatttatctcgaaaaaaattagagaagctacataatgtagataatgggaattaaatagaggatgtaactacagaacctacagacatcaatataattatgaaaactttaggccaatacatttgacaattaaaataacatgggaaattatttgtaaaactaattcttaaaactaatgcaaaatgaaatagaaaaagtaatagcttctctatgtattgaagaatttttttaatttaaaaagatttctataattacaggctacatgctttctcaggtgaattctatcaaacatttaagaaagtacagagagtcctcaacttacagtggtttgacttgtgctcttcttac

SEQ ID NO: 377132 - DNA, 600 bp, Homo sapiens
atctcgaaaaaaattagagaagctacataatgtagataatgggaattaaatagaggatgtaactacagaacctacagacatcaatataattatgaaaactttaggccaatacatttgacaattaaaataacatgggaaattatttgtaaaactaattcttaaaactaatgcaaaatgaaatagaaaaagtaatagcttctctatgtattgaagaatttttttaatttaaaaagatttctataattacaggctacatgctttctcaggtgaattctatcaaacatttaagaaagtacagagagtcctcaacttacagtggtttgacttgtgctcttcttacttgataatggtgctttcatctgtgtrcgttaatgatgagcatcaatatgaccagtttttcactatcagtatagttttcaataaatttcatgagatactcaatattttaaaatgggccttgtggtagatgattttgcccaattgtaggataatgtaagtgttctgagcaagtttaaggtaggcgaggctaagtcatgatattcagtaggttaaatatattaaatgcgttttagacttacaatattttcaatttaggatgag

SEQ ID NO: 377133 - DNA, 600 bp, Homo sapiens
atctcgaaaaaaattagagaagctacataatgtagataatgggaattaaatagaggatgtaactacagaacctacagacatcaatataattatgaaaactttaggccaatacatttgacaattaaaataacatgggaaattatttgtaaaactaattcttaaaactaatgcaaaatgaaatagaaaaagtaatagcttctctatgtattgaagaatttttttaatttaaaaagatttctataattacaggctacatgctttctcaggtgaattctatcaaacatttaagaaagtacagagagtcctcaacttacagtggtttgacttgtgctcttcttacttgataatggtgctttcatctgtgtacgytaatgatgagcatcaatatgaccagtttttcactatcagtatagttttcaataaatttcatgagatactcaatattttaaaatgggccttgtggtagatgattttgcccaattgtaggataatgtaagtgttctgagcaagtttaaggtaggcgaggctaagtcatgatattcagtaggttaaatatattaaatgcgttttagacttacaatattttcaatttaggatgag

SEQ ID NO: 377134 - DNA, 626 bp, Homo sapiens
aattaatatacccacaaattggttctttgaaaaaaatttttttaataaacaatggctagcaagatttatctcgaaaaaaattagagaagctacataatgtagataatgggaattaaatagaggatgtaactacagaacctacagacatcaatataattatgaaaactttaggccaatacatttgacaattaaaataacatgggaaattatttgtaaaactaattcttaaaactaatgcaaaatgaaatagaaaaagtaatagcttctctatgtattgaagaatttttttaatttaaaaagatttctataattacaggctacatgctttctcaggtgaattctatcaaacatttaagaaagtacagagagtcctcaacttacagtggtttgacttgtgctcttcttacttgataatggtgctttcatctgtgtacgttaatgatgagcatcaatatgaccagtttttcactatcagtatagttttcaayaaatttcatgagatactcaatattttaaaatgggccttgtggtagatgattttgcccaattgtaggataatgtaagtgttctgagcaagtttaaggtaggcgaggctaagtcatgatattcagtaggttaaatatatt

SEQ ID NO: 377135 - DNA, 626 bp, Homo sapiens
aattaatatacccacaaattggttctttgaaaaaaatttttttaataaacaatggctagcaagatttatctcgaaaaaaattagagaagctacataatgtagataatgggaattaaatagaggatgtaactacagaacctacagacatcaatataattatgaaaactttaggccaatacatttgacaattaaaataacatgggaaattatttgtaaaactaattcttaaaactaatgcaaaatgaaatagaaaaagtaatagcttctctatgtattgaagaatttttttaatttaaaaagatttctataattacaggctacatgctttctcaggtgaattctatcaaacatttaagaaagtacagagagtcctcaacttacagtggtttgacttgtgctcttcttacttgataatggtgctttcatctgtgtacgttaatgatgagcatcaatatgaccagtttttcactatcagtatagttttcaataaatttcatgagatactcaatattttaaaatgggccttgtggtagatgattttgcccaattgtaggataatgtaagtgttctgagcaagtttaaggtaggygaggctaagtcatgatattcagtaggttaaatatatt

SEQ ID NO: 377136 - DNA, 409 bp, Homo sapiens
gctgatataacctgttttctctctgcctcttttttttcccccaagttttgtgtgcaatacattaggaaaaatataattgggctacaaagctacaaaaatggcttcctggaagttccatgcttgtttccatgtggtgcctatgttagacactgtgttctcatttgcactttcctacttgattagttaatgtatgaaggacaagcctgatctctactgtgartttttaccaaggtattctagtagaaaaatgagtatgtaatggtgctgtggaatgctaaagtgtgtaaaacattaagaatctaaaaatatgctcatttccaagttttgtcccagaacaactgtgcactctgattatatcgctactgctatttaaagttatccatttgcatgtctaaaaaatagattcata

SEQ ID NO: 377137 - DNA, 475 bp, Homo sapiens
attctagtagaaaaatgagtatgtaatggtgctrtggaatgctaaagtgtgtaaaacattaagaatctaaaaatatgctcatttccaagttttgtcccagaacaactgtgcactctgattatatcgctactgctatttaaagttatccatttgcatgtctaaaaaatagattcatactgattgtcccattttgatctcaaaaaactcctgaatatgagagtcgtgatcaagggacgcttcatgaaatgttccaaagttaaagtgtgcaatgaaaccagatttatcatagccttatttaaaataattatttctaaaattgttattgtttaattataaacggtatcctttcaggatacttggaagatccatagcagtgtttttattttcacagaacaagcataaattatttatgaaataataactcagatacagagattacttcctattggccttacatatgaatataaataaatac

SEQ ID NO: 377138 - DNA, 409 bp, Homo sapiens
gctgatataacctgttttctctctgcctcttttttttcccccaagttttgtgtgcaatacattaggaaaaatataattgggctacaaagctacaaaaatggcttcctggaagttccatgcttgtttccatgtggtgcctatgttagacactgtgttctcatttgcactttcctacttgattagttaatgtatgaaggacaagcctgatctctactgtgagtttttaccaaggtattctagtagaaaaatgagtatgtaatggtgctgtggmatgctaaagtgtgtaaaacattaagaatctaaaaatatgctcatttccaagttttgtcccagaacaactgtgcactctgattatatcgctactgctatttaaagttatccatttgcatgtctaaaaaatagattcata

SEQ ID NO: 377139 - DNA, 409 bp, Homo sapiens
gctgatataacctgttttctctctgcctcttttttttcccccaagttttgtgtgcaatacattaggaaaaatataattgggctacaaagctacaaaaatggcttcctggaagttccatgcttgtttccatgtggtgcctatgttagacactgtgttctcatttgcactttcctacttgattagttaatgtatgaaggacaagcctgatctctactgtgagtttttaccaaggtattctagtagaaaaatgagtatgtaatggtgctgtggaatgctaaagtgtgtaaaacattaagaatctaaaaatatgctsatttccaagttttgtcccagaacaactgtgcactctgattatatcgctactgctatttaaagttatccatttgcatgtctaaaaaatagattcata

SEQ ID NO: 377140 - DNA, 475 bp, Homo sapiens
attctagtagaaaaatgagtatgtaatggtgctgtggaatgctaaagtgtgtaaaacattaagaatctaaaaatatgctcatttccaagttttgtcccagaacaactgtgcactctgattatatcgctactgctatttaaagttatccatttgcatgtctaaaaaatagattcatactgattgtcccattttgatctcaaaaaactcctgaatatgagagtcgtgatcaagggacgcttcatgaaatgttccaaagttaaagtgtgcaatgaaaccagatttatcatagccttatttaaaataattatttctaaaattgttattgtttaattataaacggtatcctttcaggatacttggaagatccatagcagtgtttktattttcacagaacaagcataaattatttatgaaataataactcagatacagagattacttcctattggccttacatatgaatataaataaatac

SEQ ID NO: 377141 - DNA, 610 bp, Homo sapiens
ggcaagtggccatggtactgtctacgggtgggttcctgcgactcccacagcccaagtgggcatgtgttacagtgcactcttttagctttgccatccacagacggcttaagtgttaacctgttcagtgccctcttggtacccmgttccttgtccagcatccagaaagaattaagttgcacacagacttgaggatggtgaatgtgggggttttattgagtggtggaggtggcactcaatgggatggatgggaagctggaaaggggatggaatgggaagatgatcttccccgggagctttgccatccagaggctgatctctccaaccactgccagccaaactcctcttggcattcagatgctccttctcttctttctgccacatcattctgcaattctgctcttctgttcatctcctcatctgcttgtctgcttctggagcctggggtctggggcatatatgggtacaggacagggggtgcatggtgagctgaaagacaacttttgggtgcaaaagcaggaatgcctgttcccatttagggccatgggtttccaggcttgtgggcagggctttgccagggaaccactctcttctacccagtatttccctgtct

SEQ ID NO: 377142 - DNA, 610 bp, Homo sapiens
ggcaagtggccatggtactgtctacgggtgggttcctgcgactcccacagcccaagtgggcatgtgttacagtgcactcttttagctttgccatccacagacggcttaagtgttaacctgttcagtgccctcttggtacccagttccttgtccagcatccagaaagaattaagttgcacacagacttgaggatggtgaatgtgggggttttattgagtggtggaggtggcactyaatgggatggatgggaagctggaaaggggatggaatgggaagatgatcttccccgggagctttgccatccagaggctgatctctccaaccactgccagccaaactcctcttggcattcagatgctccttctcttctttctgccacatcattctgcaattctgctcttctgttcatctcctcatctgcttgtctgcttctggagcctggggtctggggcatatatgggtacaggacagggggtgcatggtgagctgaaagacaacttttgggtgcaaaagcaggaatgcctgttcccatttagggccatgggtttccaggcttgtgggcagggctttgccagggaaccactctcttctacccagtatttccctgtct

SEQ ID NO: 377143 - DNA, 610 bp, Homo sapiens
ggcaagtggccatggtactgtctacgggtgggttcctgcgactcccacagcccaagtgggcatgtgttacagtgcactcttttagctttgccatccacagacggcttaagtgttaacctgttcagtgccctcttggtacccagttccttgtccagcatccagaaagaattaagttgcacacagacttgaggatggtgaatgtgggggttttattgagtggtggaggtggcactcaatgggatggatgggaagctggaaaggggatggaatgggaagatgatcttccccgggagctttgccatccagaggctgatctctccaaccactgccagccaaactcstcttggcattcagatgctccttctcttctttctgccacatcattctgcaattctgctcttctgttcatctcctcatctgcttgtctgcttctggagcctggggtctggggcatatatgggtacaggacagggggtgcatggtgagctgaaagacaacttttgggtgcaaaagcaggaatgcctgttcccatttagggccatgggtttccaggcttgtgggcagggctttgccagggaaccactctcttctacccagtatttccctgtct

SEQ ID NO: 377144 - DNA, 610 bp, Homo sapiens
ggcaagtggccatggtactgtctacgggtgggttcctgcgactcccacagcccaagtgggcatgtgttacagtgcactcttttagctttgccatccacagacggcttaagtgttaacctgttcagtgccctcttggtacccagttccttgtccagcatccagaaagaattaagttgcacacagacttgaggatggtgaatgtgggggttttattgagtggtggaggtggcactcaatgggatggatgggaagctggaaaggggatggaatgggaagatgatcttccccgggagctttgccatccagaggctgatctctccaaccactgccagccaaactcctcttggcattcagatgctccttctcttctttctgccacatcattctgcaattctsctcttctgttcatctcctcatctgcttgtctgcttctggagcctggggtctggggcatatatgggtacaggacagggggtgcatggtgagctgaaagacaacttttgggtgcaaaagcaggaatgcctgttcccatttagggccatgggtttccaggcttgtgggcagggctttgccagggaaccactctcttctacccagtatttccctgtct

SEQ ID NO: 377145 - DNA, 593 bp, Homo sapiens
cactcccctgagacctcatgatggaaaccacaaggccagtccatgactagctacacgcattgacataccccactgagcctgcagcaayaccaactcccaacaactagtgagccttcagcaacatccactcccaaccactagtgagccaccctgcacaccaccccactgtgctttcacacaatccaacttggctgcaactgtgtgtgatgagctggccaccaagactctctaagccaaaaaacaagtaataatgagttgttttacttcagaatagataactggaacagaatatggcagctggaaatgagctgctctggtaatcagaagctacaatatgtgacacgactgtgaggctgacctgtaactgggcctcaaggagaccattcatgcaaccaggaagggcatcaagactcttggtcagggcctgaaggacggtgagaaaatgtcattggaaactggagaaaaggcctgagagttacgtgctgagggactgtgggaaaactacggccacaacatggaaactgaaaggacactgcaccatctcagggatctgcctaaggagacatctgggaagaacatggaaagtgctacca

SEQ ID NO: 377146 - DNA, 521 bp, Homo sapiens
ggaatgaccaactcttagacgaggcctgcagggcagcacttccctcttgcctcccaccaaagcttctaaagggaaatgtcgactgttttcacagcagtcccctcactgtggctgagtttgtgggctcagatgatagctcacaacaacctgattcagtccccactgtggctgtgtgtggggggtcagtgacaggccaccacaacttgattctgtccccactgtggctgtgtgtggggggtcagatgacaggccaccacaacttgattcagtccccactgtggctgtgtgtggggggcagatgacaggccaccaaaacctgattcagtccccactgtggctgtgtgtggggggtcagatgacaggccaccacaacttgattcattccccactgtggctgtgtgtgggggggcagatgacaggycaccacaacctgattcagtcctcactgcggctgagtgtgtgtgggtgcaggtgacaggccaccacaacctgattcaggattcagttgggctactagccag

SEQ ID NO: 377147 - DNA, 577 bp, Homo sapiens
acttctgaggggcgatcatgagaggccttacagcttctgcctgggcctcttggacacacaccctgggagaagccagacaaacctgactacctgacgctgccagactgggaggaagtccgtgctggccacgaagagaggggcttggtgcatgctccatgtccccagccactagagtccttccagatgagaccagggacatcatgaagcaaccaaccaacacmgccctgtccagtgtcttgacccagaaaattgtgacatgtaaaaagaataaattcctggtttaagccagtaaggttacgggtacattgttacatctcagataattaaaaccttgaaaaactcatgagagatcacaagtagaaccttgatctgaaacatggcatgtggcgatttatattgagtattaggttaaaaatgcaagaatggagcatagttaatattttacattaaagctaaaaccataattgcctacttaaaattttcagttaattaggttgtcactttttgttcttaaccaagtaatcaactagttttagtccataaacagttagaactgatgcacacatccgtttctcct

SEQ ID NO: 377148 - DNA, 577 bp, Homo sapiens
acttctgaggggcgatcatgagaggccttacagcttctgcctgggcctcttggacacacaccctgggagaagccagacaaacctgactacctgacgctgccagactgggaggaagtccgtgctggccacgaagagaggggcttggtgcatgctccatgtccccagccactagagtccttccagatgagaccagggacatcatgaagcaaccaaccaacaccgccctgtccagtgtcttgacccagaaaattgtgacatgtaaaaagaataaattcctggtttaagccagtaaggttacgggtacattgttayatctcagataattaaaaccttgaaaaactcatgagagatcacaagtagaaccttgatctgaaacatggcatgtggcgatttatattgagtattaggttaaaaatgcaagaatggagcatagttaatattttacattaaagctaaaaccataattgcctacttaaaattttcagttaattaggttgtcactttttgttcttaaccaagtaatcaactagttttagtccataaacagttagaactgatgcacacatccgtttctcct

SEQ ID NO: 377149 - DNA, 527 bp, Homo sapiens
cagtaaggttacgggtacattgttacatctcagataattaaaaccttgaaaaactcatgagagatcacaagtagaaccttgatctgaaacatggcatgtggcgatttatattgagtattaggttaaaaatgcaagaatggagcatagttaatattttacattaaagctaaaaccataattgcctacttaaaattttcagttaattaggttgtcactttttgttcttaaccaagtaatcaactagttttagtccataaacagttagaactgatgcacacatccgtttctccttattcattttaaacagctatctgaaataggaagtgtaatataatctttaaagaatctgaaaacatgacagaaatgtttaaactataaacatatattrtatatgttagcatattgtatacattgcatattaacataagctagaatcattgacataaatttatataaacaaaaggtgtaaaatatgacaatgttcttcttgatttttgtctttgcatatttctttattggcatttgtc

SEQ ID NO: 377150 - DNA, 527 bp, Homo sapiens
cagtaaggttacgggtacattgttacatctcagataattaaaaccttgaaaaactcatgagagatcacaagtagaaccttgatctgaaacatggcatgtggcgatttatattgagtattaggttaaaaatgcaagaatggagcatagttaatattttacattaaagctaaaaccataattgcctacttaaaattttcagttaattaggttgtcactttttgttcttaaccaagtaatcaactagttttagtccataaacagttagaactgatgcacacatccgtttctccttattcattttaaacagctatctgaaataggaagtgtaatataatctttaaagaatctgaaaacatgacagaaatgtttaaactataaacatatattatatatgttagcatattgtatacattgmatattaacataagctagaatcattgacataaatttatataaacaaaaggtgtaaaatatgacaatgttcttcttgatttttgtctttgcatatttctttattggcatttgtc

SEQ ID NO: 377151 - DNA, 527 bp, Homo sapiens
cagtaaggttacgggtacattgttacatctcagataattaaaaccttgaaaaactcatgagagatcacaagtagaaccttgatctgaaacatggcatgtggcgatttatattgagtattaggttaaaaatgcaagaatggagcatagttaatattttacattaaagctaaaaccataattgcctacttaaaattttcagttaattaggttgtcactttttgttcttaaccaagtaatcaactagttttagtccataaacagttagaactgatgcacacatccgtttctccttattcattttaaacagctatctgaaataggaagtgtaatataatctttaaagaatctgaaaacatgacagaaatgtttaaactataaacatatattatatatgttagcatattgtatacattgcatattaacataagctagaatcattgacataaatttatataaacaaaaggtgtaamatatgacaatgttcttcttgatttttgtctttgcatatttctttattggcatttgtc

SEQ ID NO: 377152 - DNA, 505 bp, Homo sapiens
aaacatatattatatatgttagcatattgtatacattgcatattaacataagctagaatcattgacataaatttatataaacaaaaggtgtaaaatatgacaatgttcttcttgatttttgtctttgcatatttctttattggcatttgtcaaatgtgacccactaactcctgaatgctttctctctccccattgattcataaggatgtcaccacagtgttggccagatgcacaggtcacaggggactgaatctcatcaccccacaaacataccattcaggttttgccaagaatgacactgtaaatgtaacaaagcttccgtgcttgttagtgaacaccaactcagctcctctcctgtattcagaaatcaggacgagatgaaaacaacaagcaggccaggcacggtggctcacgcctgtaatcccagcactttgggaggacraagcatgtggatcacctgaggtcgggagtttgagaccacgctgatcaaaacagagaaacccca

SEQ ID NO: 377153 - DNA, 505 bp, Homo sapiens
aaacatatattatatatgttagcatattgtatacattgcatattaacataagctagaatcattgacataaatttatataaacaaaaggtgtaaaatatgacaatgttcttcttgatttttgtctttgcatatttctttattggcatttgtcaaatgtgacccactaactcctgaatgctttctctctccccattgattcataaggatgtcaccacagtgttggccagatgcacaggtcacaggggactgaatctcatcaccccacaaacataccattcaggttttgccaagaatgacactgtaaatgtaacaaagcttccgtgcttgttagtgaacaccaactcagctcctctcctgtattcagaaatcaggacgagatgaaaacaacaagcaggccaggcacggtggctcacgcctgtaatcccagcactttgggaggacgaagcatgtggatcacctgaggtcgggagttygagaccacgctgatcaaaacagagaaacccca

SEQ ID NO: 377154 - DNA, 478 bp, Homo sapiens
gcctgtaataccagctactcaggagctgagacaggagaattgcttgaacccaggaggtggaggctgcagtgagccgagatcacaccactgcgctctagcctggamaacaagagtgaaactctgtctcaaaagaaaaaaaattaaaaataaaagaacaaggaaacaaaagtaacaaggcttgacaccagatgagcctgaatctaagcaagaaaagcccagaagaaatcccattttgggtcactggctgcatggtagtaataccatacacataagggaagagaggaggatgtggctttcactttgaattttttgagcttaaggtaacttttgcgtagctacaaagaagcattcaacagagagttaaacctatgatggaaagactgaaggggtccaagctgtagagaaacaggactgcaaaccacaaagggctgaatcagtcaaggagaactgcagggcgggatgaacagggactaatgga

SEQ ID NO: 377155 - DNA, 450 bp, Homo sapiens
acaaaagtaacaaggcttgacaccagatgagcctgaatctaagcaagaaaagcccagaagaaatcccattttgggtcactggctgcatggtagtaataccatacacataarggaagagaggaggatgtggctttcactttgaattttttgagcttaaggtaacttttgcgtagctacaaagaagcattcaacagagagttaaacctatgatggaaagactgaaggggtccaagctgtagagaaacaggactgcaaaccacaaagggctgaatcagtcaaggagaactgcagggcgggatgaacagggactaatggaacatttggataagctgttgagaagaaaggagaattcagagaaaaagaactgtcagtgaggtcataataggaactgttacagtgaactaaatatggcctgggaaggactctgtacttctagatttgagtccctgt

SEQ ID NO: 377156 - DNA, 450 bp, Homo sapiens
acaaaagtaacaaggcttgacaccagatgagcctgaatctaagcaagaaaagcccagaagaaatcccattttgggtcactggctgcatggtagtaataccatacacataagggaagagargaggatgtggctttcactttgaattttttgagcttaaggtaacttttgcgtagctacaaagaagcattcaacagagagttaaacctatgatggaaagactgaaggggtccaagctgtagagaaacaggactgcaaaccacaaagggctgaatcagtcaaggagaactgcagggcgggatgaacagggactaatggaacatttggataagctgttgagaagaaaggagaattcagagaaaaagaactgtcagtgaggtcataataggaactgttacagtgaactaaatatggcctgggaaggactctgtacttctagatttgagtccctgt

SEQ ID NO: 377157 - DNA, 450 bp, Homo sapiens
acaaaagtaacaaggcttgacaccagatgagcctgaatctaagcaagaaaagcccagaagaaatcccattttgggtcactggctgcatggtagtaataccatacacataagggaagagaggaggatgtggctttcactttgaattttttgagcttaaggtaamttttgcgtagctacaaagaagcattcaacagagagttaaacctatgatggaaagactgaaggggtccaagctgtagagaaacaggactgcaaaccacaaagggctgaatcagtcaaggagaactgcagggcgggatgaacagggactaatggaacatttggataagctgttgagaagaaaggagaattcagagaaaaagaactgtcagtgaggtcataataggaactgttacagtgaactaaatatggcctgggaaggactctgtacttctagatttgagtccctgt

SEQ ID NO: 377158 - DNA, 450 bp, Homo sapiens
acaaaagtaacaaggcttgacaccagatgagcctgaatctaagcaagaaaagcccagaagaaatcccattttgggtcactggctgcatggtagtaataccatacacataagggaagagaggaggatgtggctttcactttgaattttttgagcttaaggtaacttttgygtagctacaaagaagcattcaacagagagttaaacctatgatggaaagactgaaggggtccaagctgtagagaaacaggactgcaaaccacaaagggctgaatcagtcaaggagaactgcagggcgggatgaacagggactaatggaacatttggataagctgttgagaagaaaggagaattcagagaaaaagaactgtcagtgaggtcataataggaactgttacagtgaactaaatatggcctgggaaggactctgtacttctagatttgagtccctgt

SEQ ID NO: 377159 - DNA, 594 bp, Homo sapiens
cctctcagagcagctggggatcatggtaaattctctctcggatttcagagctccatggatttgtgttttgagctctgagtttctttgagcaaatttctgttccaaactgctatccagccatgactgactggatgttttagaagttatgacagaaacgggaccgggtccaggatcagatttgatacagtagttaactggcttgaatccagttccagttagagacctcctacatctgaatgggtcagaaggaaagaggtagtaaatgataattttggagggttgtaaaatttggcttttgaaaattcacarggatttttgtgttctacccctttgtttcattttcctcgcacacttaggtaggaaaaaaaaatcattggctaagtcaatcaagggaacctgggagtaaagccaatatattaggtaaaaataggatccttaatttctggaaaacttagttccttctggctaattcattaggcctgggaagcagcaaagtcttacagaaatggcaaaatcttactaaagataacttacagtggaacattccaaataaataatgccctgaagtgcatttaaaaatgagggttcccaaat

SEQ ID NO: 377160 - DNA, 571 bp, Homo sapiens
acctgtaactagtaagaagattcaaccagtaatcaaaamccccccaaaaaagaaaattccaggtccagataacttcactggagaattttaccaaacatttcaagaagaattaatgccagtcctttgcaaaatattccaaaaatgtacaaaaaccagaaggggacattccaatccattctatcaggtcaacatttatctggttccagagccagatgaacaccttttgtaataaaaacactcaaagaattagtaatatatggaaactcctcagtaaataaagattatacatgaaaagctcacagctaacatcatactgaatggtgaaaaactaaaatcttttcctctaggatcaggaataagatagcaacatctcttcctgccacttctattcaccacagtactggaatttctactcagaataattaggcaagagaaagtaataaaaagcatgcaaattggaaaggaaaaagtacaaaattttgttcacagacaacatgatgtaatgtgtaaaaatcctgaaattccacaaaatactggtagaataatgaaattcaacaaagtttcaggatac

SEQ ID NO: 377161 - DNA, 571 bp, Homo sapiens
acctgtaactagtaagaagattcaaccagtaatcaaaaaccccccaaaaaagaaaattccaggtccagataacttcactggagaattttaccaaacatttcaagaagaattaatgccagycctttgcaaaatattccaaaaatgtacaaaaaccagaaggggacattccaatccattctatcaggtcaacatttatctggttccagagccagatgaacaccttttgtaataaaaacactcaaagaattagtaatatatggaaactcctcagtaaataaagattatacatgaaaagctcacagctaacatcatactgaatggtgaaaaactaaaatcttttcctctaggatcaggaataagatagcaacatctcttcctgccacttctattcaccacagtactggaatttctactcagaataattaggcaagagaaagtaataaaaagcatgcaaattggaaaggaaaaagtacaaaattttgttcacagacaacatgatgtaatgtgtaaaaatcctgaaattccacaaaatactggtagaataatgaaattcaacaaagtttcaggatac

SEQ ID NO: 377162 - DNA, 571 bp, Homo sapiens
acctgtaactagtaagaagattcaaccagtaatcaaaaaccccccaaaaaagaaaattccaggtccagataacttcactggagaattttaccaaacatttcaagaagaattaatgccagtcctttgcaaaatattccaaaaatgtwcaaaaaccagaaggggacattccaatccattctatcaggtcaacatttatctggttccagagccagatgaacaccttttgtaataaaaacactcaaagaattagtaatatatggaaactcctcagtaaataaagattatacatgaaaagctcacagctaacatcatactgaatggtgaaaaactaaaatcttttcctctaggatcaggaataagatagcaacatctcttcctgccacttctattcaccacagtactggaatttctactcagaataattaggcaagagaaagtaataaaaagcatgcaaattggaaaggaaaaagtacaaaattttgttcacagacaacatgatgtaatgtgtaaaaatcctgaaattccacaaaatactggtagaataatgaaattcaacaaagtttcaggatac

SEQ ID NO: 377163 - DNA, 523 bp, Homo sapiens
cctaaaaccataaaaaatctagaagaaaacctaggccaccaacctcaggggaaatgacctgtagtgaaatgcatggtacaaacatgcattycctgcttccttgagtgggcaacgttgatggctagtccaaccacttcaggcacacccttgcaaacacggctggttgctttttgagccagcttggccttgcccggcatacacaagcctcaatgcaacaactgtgctaaaaatggagccacacagaggaaatgagcagcaagctcagaagcagggtgtgcactgcctttggggctccagtccatgcctcagggcttgtatgggactgcaggattcttggttgccaagaggtagaccatagaccagccgaggaggactttatgttcaagggcagaaagcagccaggtttaccacccaggggactcggccttctgtggccccggtcagacttagaatttggctcaaagcaggaccagctcactcggagtagtgtgtcagtagctggggcctgtacatgctaggcaag

SEQ ID NO: 377164 - DNA, 523 bp, Homo sapiens
cctaaaaccataaaaaatctagaagaaaacctaggccaccaacctcaggggaaatgacctgtagtgaaatgcatggtacaaacatgcattccctgcttccttgagtgggcaacgttgatggctagtccaaccacttcaggcacacccttgcaaacacggctggttgctttttgagccagcttggccttgcccggcatacacaagcctcaatgcaacaactgtgctaaaaatggagccacacagaggaaatgagcagcaagctcagaagcagggtgtgcactgcctttggggctccagtccatgcctcagggcttgtatgggactgcaggattcttggttgccaagaggtagaccatagaccagccgaggaggactttatgttcaagggcagaaagcagccaggtttaccacccaggggactcggccttctgtggccccggtcagacttagaatttggctcaaagcaggaccagctcactcggagtastgtgtcagtagctggggcctgtacatgctaggcaag

SEQ ID NO: 377165 - DNA, 270 bp, Homo sapiens
cagggatggccaggttctcacagcatgagtggccacygcctgatggctgatcaagcagaggcctgaggaaaagcagatggcagttgggccctacctctagggtagaagaactgatgtactctgaccggtagtgagtgaggttggtggtgggtccaccggctcctggcacacccttgcagaggaggctgtttgctctttaaggcagcttggccttgcctggcatgcacaagcctcactgcaacaagtgtgctacaaatggagccatataga

SEQ ID NO: 377166 - DNA, 270 bp, Homo sapiens
cagggatggccaggttctcacagcatgagtggccaccgcctgatggctgatcaagcagaggcctgaggaaaagcagatggcagttgggccctacctctagggtagaagaactgatgtactctgaccrgtagtgagtgaggttggtggtgggtccaccggctcctggcacacccttgcagaggaggctgtttgctctttaaggcagcttggccttgcctggcatgcacaagcctcactgcaacaagtgtgctacaaatggagccatataga

SEQ ID NO: 377167 - DNA, 270 bp, Homo sapiens
cagggatggccaggttctcacagcatgagtggccaccgcctgatggctgatcaagcagaggcctgaggaaaagcagatggcagttgggccctacctctagggtagaagaactgatgtactctgaccggtagtgagtgaggttggtggtgggtccaccrgctcctggcacacccttgcagaggaggctgtttgctctttaaggcagcttggccttgcctggcatgcacaagcctcactgcaacaagtgtgctacaaatggagccatataga

SEQ ID NO: 377168 - DNA, 270 bp, Homo sapiens
cagggatggccaggttctcacagcatgagtggccaccgcctgatggctgatcaagcagaggcctgaggaaaagcagatggcagttgggccctacctctagggtagaagaactgatgtactctgaccggtagtgagtgaggttggtggtgggtccaccggctcctggmacacccttgcagaggaggctgtttgctctttaaggcagcttggccttgcctggcatgcacaagcctcactgcaacaagtgtgctacaaatggagccatataga

SEQ ID NO: 377169 - DNA, 329 bp, Homo sapiens
actaataatccctgcgatatgtgtagtgacttcatacttcaccyccccggatattatggccaatatcagagtggagtgtgcaccccctgcaatatggggagtgatatcatcctctccccactggatgttatggacaatatcacaggaggtttactttctctgggttatggggaaaaatatcctcctgtccccgcctggatgttagacatattagaggggggtgtccacccccttgtgatatggggagtagtaatatcctctcctgccctggatgttatggacaatatatagggagatgtacaatcccttcgatatggggagtaatatca

SEQ ID NO: 377170 - DNA, 329 bp, Homo sapiens
actaataatccctgcgatatgtgtagtgacttcatacttcacccccccggatattatggccaatatcagagtggagtrtgcaccccctgcaatatggggagtgatatcatcctctccccactggatgttatggacaatatcacaggaggtttactttctctgggttatggggaaaaatatcctcctgtccccgcctggatgttagacatattagaggggggtgtccacccccttgtgatatggggagtagtaatatcctctcctgccctggatgttatggacaatatatagggagatgtacaatcccttcgatatggggagtaatatca

SEQ ID NO: 377171 - DNA, 499 bp, Homo sapiens
  misc_feature (1)...(499): n = A,T,C or G
tatcacaggggtgtgtacaccttctgaaacatgrgaataatattctcttcccctctggatgttattatggacaacattacagccgtgtgcaccctctatgatatgcagagtaatatcatcctctcccccccggatgtaagtgacaataccacaaacgggtttacatcccccgtgatatggggagtaatatcatcctctttcccactggatattaacaatatcacttggggtgtacaacccctgtgatattcgggataatatcttctaatccactgaaaattataaacaatatcaccagtgtacactccctgtgatattggaagtaatatcatcctctaatcccctaagaattatgaacagtatcacaggggagtgtatacttcctactatatttggagtaatatcatcctgtcgtcttctaaatattatgaacaatattacaggggacgtcccactccctgcgatatgtggagtaatatcatctctcctnnnnnnnnnn

SEQ ID NO: 377172 - DNA, 616 bp, Homo sapiens
actttttactaggagataactttgtgccatttaaggaggaacaaaaataaattatcagaaaaaataaaagtaagatgaagtacaaaagttctgtggcaaagatgatgatagtaaagaatatatttttatgactcatggtagctttaacattgttcttaaaattctgagtaatttaagsgttcacatttgaagaatctgatgcattactgataacattttattgcaagtaaatgcattttaaaatttgctatttgttttgtattagattattctcagcctacttcattatcaagctatactattttatttatgcagtttgatgatcttacggcagaggaggaagctgtatcttcaaaatgtgtcaatttggctaaagacaatcaagttatccaacaggagttattatctatgaaaaaagtacaacaagaatgtgaaaaacttgaggagaatcaaaagatgttggaagaagaaatattaaatctcaagacacatatggaaaacagtatcgtagaacttagtgagctacaagaatataaatcagagctagatgaaagggcaatgcaggcagtagaaaaatgaaaagaaatccatttacaggttacttgtttaaatcagg

SEQ ID NO: 377173 - DNA, 616 bp, Homo sapiens
actttttactaggagataactttgtgccatttaaggaggaacaaaaataaattatcagaaaaaataaaagtaagatgaagtacaaaagttctgtggcaaagatgatgatagtaaagaatatatttttatgactcatggtagctttaacattgttcttaaaattctgagtaatttaagcgttcacatttgaagaatctgatgcattactgataacattttattgcaagtaaatgcattttaaaatttgctatttgttttgtattagattattctcagcctacttcattatcaagcyatactattttatttatgcagtttgatgatcttacggcagaggaggaagctgtatcttcaaaatgtgtcaatttggctaaagacaatcaagttatccaacaggagttattatctatgaaaaaagtacaacaagaatgtgaaaaacttgaggagaatcaaaagatgttggaagaagaaatattaaatctcaagacacatatggaaaacagtatcgtagaacttagtgagctacaagaatataaatcagagctagatgaaagggcaatgcaggcagtagaaaaatgaaaagaaatccatttacaggttacttgtttaaatcagg

SEQ ID NO: 377174 - DNA, 499 bp, Homo sapiens
  misc_feature (1)...(499): n = A,T,C or G
tatcacaggggtgtgtacaccttctgaaacatgggaataatattctcttcccctctggatgttattatggacaacattacagccgtgtgcaccctctatgatatgcagagtaatatcatcctctcccccccggatgtaagtgacaataccacaaacgggtttacatcccccrtgatatggggagtaatatcatcctctttcccactggatattaacaatatcacttggggtgtacaacccctgtgatattcgggataatatcttctaatccactgaaaattataaacaatatcaccagtgtacactccctgtgatattggaagtaatatcatcctctaatcccctaagaattatgaacagtatcacaggggagtgtatacttcctactatatttggagtaatatcatcctgtcgtcttctaaatattatgaacaatattacaggggacgtcccactccctgcgatatgtggagtaatatcatctctcctnnnnnnnnnn

SEQ ID NO: 377175 - DNA, 499 bp, Homo sapiens
  misc_feature (1)...(499): n = A,T,C or G
tatcacaggggtgtgtacaccttctgaaacatgggaataatattctcttcccctctggatgttattatggacaacattacagccgtgtgcaccctctatgatatgcagagtaatatcatcctctcccccccggatgtaagtgacaataccacaaacgggtttacatcccccgtgatatggggagtaatatcatcctctttcccactggatattaacaatatcacttggggtgtacaacccctgtgatattcgggataataycttctaatccactgaaaattataaacaatatcaccagtgtacactccctgtgatattggaagtaatatcatcctctaatcccctaagaattatgaacagtatcacaggggagtgtatacttcctactatatttggagtaatatcatcctgtcgtcttctaaatattatgaacaatattacaggggacgtcccactccctgcgatatgtggagtaatatcatctctcctnnnnnnnnnn

SEQ ID NO: 377176 - DNA, 499 bp, Homo sapiens
  misc_feature (1)...(499): n = A,T,C or G
tatcacaggggtgtgtacaccttctgaaacatgggaataatattctcttcccctctggatgttattatggacaacattacagccgtgtgcaccctctatgatatgcagagtaatatcatcctctcccccccggatgtaagtgacaataccacaaacgggtttacatcccccgtgatatggggagtaatatcatcctctttcccactggatattaacaatatcacttggggtgtacaacccctgtgatattcgggataatatcttctaatccactgaaaattataaacaatatcaccagtgtacactccctgtgatattggaagtaatatcatcctctaatcccctaagaattatgaacagtatmacaggggagtgtatacttcctactatatttggagtaatatcatcctgtcgtcttctaaatattatgaacaatattacaggggacgtcccactccctgcgatatgtggagtaatatcatctctcctnnnnnnnnnn

SEQ ID NO: 377177 - DNA, 632 bp, Homo sapiens
ttgcgatgagccaagatcatgccattgcactctagcttgggcaagaagaatgaaactctgtctgaaaaataaagaaaagaaagtaaaaggagagttaggcttaggcttaatggaatgttttttgctttttttcatcttctatctagaccaattaaactttcttcataacagcagcaagattrtttagctttttatcattcatgtgttcactggagcagtactttaaatttctttccagaacacttcgtttgcattcacaacttggctaagtgtttgttgcatgaggtctagctactggcctgtcttgcttacagcatgccttcctcactaagcttaattatttcttccttttggtttaaagtgacagacatgaaactcttctttcatgaacatatagaggctattgtagggttattaattggccacattttaatattaataaaaagaagcctgagaaaaagagaaagagaaatggcccgttggttgggcagtcagaacaaacgcatatgtcaattgtttgctgtcttatcctggtgtgatttgtggttcccaaaacaatgacaacagtagcattaaagatcactgattacagatcaccacaacagattcaataataagaatcttaaaatact

SEQ ID NO: 377178 - DNA, 632 bp, Homo sapiens
ttgcgatgagccaagatcatgccattgcactctagcttgggcaagaagaatgaaactctgtctgaaaaataaagaaaagaaagtaaaaggagagttaggcttaggcttaatggaatgttttttgctttttttcatcttctatctagaccaattaaactttcttcataacagcagcaagattatttagctttttatcattcatgtgttcactggagcagtactttaaatttctttccagaacacttcgtttgcattcacaacttggctaagtgtttgttgcatgaggtctagctactggcctgtcttgcttacagcatgccttcctcactaagcttaattatttcttccttttggtttaaagtgacagacatgmaactcttctttcatgaacatatagaggctattgtagggttattaattggccacattttaatattaataaaaagaagcctgagaaaaagagaaagagaaatggcccgttggttgggcagtcagaacaaacgcatatgtcaattgtttgctgtcttatcctggtgtgatttgtggttcccaaaacaatgacaacagtagcattaaagatcactgattacagatcaccacaacagattcaataataagaatcttaaaatact

SEQ ID NO: 377179 - DNA, 512 bp, Homo sapiens
tgaaaaaatgtagattctttgaaagatcaagcctttcactatattgactgagcaaaagatggaagactaattattaaaataataaatgaaagcagagccattactaccaactttacagaaatacaaaaggattacaggagtatactgtgaacaactgtctarcaacaaattaggtgccctggatgaaatggatgaatcgctagaaagacacaaactaccaaagtgactcaagaagaaagagaaaatctgaatagacctataacctaggagattgaattagtaatcgaaagcgattaacaaagaaacatttatgaccaaatagctgcattaactggtgagtcaacctaacatttaaagaagaattaataccatttcttctcaaactcttctgacaaaatatatgaagaaggaatacttgctaattcattttttgataacagcattatccttataccaaagacaaagagagcacaaaagagagaaatacagcactatatcccctatgaatatat

SEQ ID NO: 377180 - DNA, 512 bp, Homo sapiens
tgaaaaaatgtagattctttgaaagatcaagcctttcactatattgactgagcaaaagatggaagactaattattaaaataataaatgaaagcagagccattactaccaactttacagaaatacaaaaggattacaggagtatactgtgaacaactgtctagcaacaaattagstgccctggatgaaatggatgaatcgctagaaagacacaaactaccaaagtgactcaagaagaaagagaaaatctgaatagacctataacctaggagattgaattagtaatcgaaagcgattaacaaagaaacatttatgaccaaatagctgcattaactggtgagtcaacctaacatttaaagaagaattaataccatttcttctcaaactcttctgacaaaatatatgaagaaggaatacttgctaattcattttttgataacagcattatccttataccaaagacaaagagagcacaaaagagagaaatacagcactatatcccctatgaatatat

SEQ ID NO: 377181 - DNA, 512 bp, Homo sapiens
tgaaaaaatgtagattctttgaaagatcaagcctttcactatattgactgagcaaaagatggaagactaattattaaaataataaatgaaagcagagccattactaccaactttacagaaatacaaaaggattacaggagtatactgtgaacaactgtctagcaacaaattaggtgccctggatgaaatggaygaatcgctagaaagacacaaactaccaaagtgactcaagaagaaagagaaaatctgaatagacctataacctaggagattgaattagtaatcgaaagcgattaacaaagaaacatttatgaccaaatagctgcattaactggtgagtcaacctaacatttaaagaagaattaataccatttcttctcaaactcttctgacaaaatatatgaagaaggaatacttgctaattcattttttgataacagcattatccttataccaaagacaaagagagcacaaaagagagaaatacagcactatatcccctatgaatatat

SEQ ID NO: 377182 - DNA, 512 bp, Homo sapiens
tgaaaaaatgtagattctttgaaagatcaagcctttcactatattgactgagcaaaagatggaagactaattattaaaataataaatgaaagcagagccattactaccaactttacagaaatacaaaaggattacaggagtatactgtgaacaactgtctagcaacaaattaggtgccctggatgaaatggatgaatcgctagaaagacacaaactaccaaagtgrctcaagaagaaagagaaaatctgaatagacctataacctaggagattgaattagtaatcgaaagcgattaacaaagaaacatttatgaccaaatagctgcattaactggtgagtcaacctaacatttaaagaagaattaataccatttcttctcaaactcttctgacaaaatatatgaagaaggaatacttgctaattcattttttgataacagcattatccttataccaaagacaaagagagcacaaaagagagaaatacagcactatatcccctatgaatatat

SEQ ID NO: 377183 - DNA, 357 bp, Homo sapiens
tgggtgccatgtgcatttgttttgggagtgataattgatctaacttatggaaataatactagatagttagcggatggattctgtatctgatgagagtttagggcaaaacgaattcctagtttctgagtcttatttttcccctgattcaagaaaactgtgaattatccagccagtaaaaaactctcacagctccggatgtgagtttaggacactggatttctaccactcattttcttactacttttcttgtgcaaggatcatggcacaagttgcagtttccaccctgcccattgaagatgagragtctgttgaagatgaggagtccttggagagcaggatggtggtgacattcccgtc

SEQ ID NO: 377184 - DNA, 492 bp, Homo sapiens
cctgacactccctggagttagtgcagaccccgcaggatgggagctcagtcccaggagtcyaccctcactccacatgcaaattgcaagtcttgggttgttacatgtagttttgaccaaccagttagaaaacagagtttcatgacccccattggtgggtggaatcatttgcttggacagcttgcagaactcagaaaaacagattgttttcttttttttctgagatacagggtctcagtctgttgccaggctggaatgcagtggtgtgatcaaagctcactgtagcatgggactcctgggctcaagtgatcctcccacctcagcctcccaaatagctgagattataggcttgtaccagcatatctggctatgttcttttactttttgtagagatggggtcttgttatgttgcccaggctggtctcaaatttctgggctcacatgatcctcccacctcaacttcacaaaatgctgggattatgggcatgaaccact

SEQ ID NO: 377185 - DNA, 492 bp, Homo sapiens
cctgacactccctggagttagtgcagaccccgcaggatgggagctcagtcccaggagtccaccctcactccacatgcmaattgcaagtcttgggttgttacatgtagttttgaccaaccagttagaaaacagagtttcatgacccccattggtgggtggaatcatttgcttggacagcttgcagaactcagaaaaacagattgttttcttttttttctgagatacagggtctcagtctgttgccaggctggaatgcagtggtgtgatcaaagctcactgtagcatgggactcctgggctcaagtgatcctcccacctcagcctcccaaatagctgagattataggcttgtaccagcatatctggctatgttcttttactttttgtagagatggggtcttgttatgttgcccaggctggtctcaaatttctgggctcacatgatcctcccacctcaacttcacaaaatgctgggattatgggcatgaaccact

SEQ ID NO: 377186 - DNA, 463 bp, Homo sapiens
tagcatgggactcctgggctcaagtgatcctcccacctcagcctcccaaatagctgagattataggcytgtaccagcatatctggctatgttcttttactttttgtagagatggggtcttgttatgttgcccaggctggtctcaaatttctgggctcacatgatcctcccacctcaacttcacaaaatgctgggattatgggcatgaaccactgcatctcaccaatttactttcttttactggttcattttaaaggctaaatctcagaaacagacagtgaaagagatgtacatgctgggcacagtggctcatgcctgtaatttcagcactttgggagactgaggcgggagcatcgcttaagtgctcaggagattaagaccagcctgggtaacaaggtgaaaatgcatctctacaaaaagatttttctaaaaattagccaggcacagttatctatagttctagc

SEQ ID NO: 377187 - DNA, 492 bp, Homo sapiens
cctgacactccctggagttagtgcagaccccgcaggatgggagctcagtcccaggagtccaccctcactccacatgcaaattgcaagtcttgggttgttacatgtagttttgaccaaccagttagaaaacagagtttcatgacccccattggtgggtggaatcatttgcttggacagcttgcagaactcagaaaaacagattgttttcttttttttctgagatacagggtctcagtctgttgccaggctggaatgcagtggtgtgatcaaagctcactgtagcatgggactcctgggctcaagtgatcctcccacctcagcctcccaaatagctgagattataggcttgtaccagcatatctggctatgktcttttactttttgtagagatggggtcttgttatgttgcccaggctggtctcaaatttctgggctcacatgatcctcccacctcaacttcacaaaatgctgggattatgggcatgaaccact

SEQ ID NO: 377188 - DNA, 463 bp, Homo sapiens
tagcatgggactcctgggctcaagtgatcctcccacctcagcctcccaaatagctgagattataggcttgtaccagcatatctggctatgttctyttactttttgtagagatggggtcttgttatgttgcccaggctggtctcaaatttctgggctcacatgatcctcccacctcaacttcacaaaatgctgggattatgggcatgaaccactgcatctcaccaatttactttcttttactggttcattttaaaggctaaatctcagaaacagacagtgaaagagatgtacatgctgggcacagtggctcatgcctgtaatttcagcactttgggagactgaggcgggagcatcgcttaagtgctcaggagattaagaccagcctgggtaacaaggtgaaaatgcatctctacaaaaagatttttctaaaaattagccaggcacagttatctatagttctagc

SEQ ID NO: 377189 - DNA, 463 bp, Homo sapiens
tagcatgggactcctgggctcaagtgatcctcccacctcagcctcccaaatagctgagattataggcttgtaccagcatatctggctatgttcttttactttttgtagagatggggtcttgttatgttgcccaggctggtctcaaatttctgggctcacatgatcctcccacctcaacttcacaaaatgctgggattatgggcatgaaccactgcatctcaccaatttactttcttttactggttcattttaaaggctaaatctcagaaacagmcagtgaaagagatgtacatgctgggcacagtggctcatgcctgtaatttcagcactttgggagactgaggcgggagcatcgcttaagtgctcaggagattaagaccagcctgggtaacaaggtgaaaatgcatctctacaaaaagatttttctaaaaattagccaggcacagttatctatagttctagc

SEQ ID NO: 377190 - DNA, 548 bp, Homo sapiens
gtctcaaaaaaaaaaaaaaaaamcacacagggcaaggtatgtcgagaggggtacagaacttccatgtcctctattgtgcatgttaccttcctggtatctcccttgtgttcagcaacccagacattctccaactccagttgttgagggcgcttatgaacgcttcattatgcaggcatgattgatgaagtcattgaccattggtaattaagtcagtcttcggccactatttcttcctggagcccagggggtgaggctgacagttccaagcctctaatcacatggtttgttcttctgacaacaaccacccctttttctgaagctgtctaggagctttcagtcacccagtcatctcagtaacatcaccaaatgcattcttactatggtgatcccaaaggtcttagaggctcttgtgttagaaacctgggactaagaccaaatattgaaacagaagatgccccatcactttcatcaccaaggcctttataagagcttgagaagctctgtgccaggatgaggggcagaaaccaaatgtgtatttcttttctttt

SEQ ID NO: 377191 - DNA, 548 bp, Homo sapiens
gtctcaaaaaaaaaaaaaaaaaccacacagggcaaggtatgtcragaggggtacagaacttccatgtcctctattgtgcatgttaccttcctggtatctcccttgtgttcagcaacccagacattctccaactccagttgttgagggcgcttatgaacgcttcattatgcaggcatgattgatgaagtcattgaccattggtaattaagtcagtcttcggccactatttcttcctggagcccagggggtgaggctgacagttccaagcctctaatcacatggtttgttcttctgacaacaaccacccctttttctgaagctgtctaggagctttcagtcacccagtcatctcagtaacatcaccaaatgcattcttactatggtgatcccaaaggtcttagaggctcttgtgttagaaacctgggactaagaccaaatattgaaacagaagatgccccatcactttcatcaccaaggcctttataagagcttgagaagctctgtgccaggatgaggggcagaaaccaaatgtgtatttcttttctttt

SEQ ID NO: 377192 - DNA, 548 bp, Homo sapiens
gtctcaaaaaaaaaaaaaaaaaccacacagggcaaggtatgtcgagaggggtacagaacttccatgtcctctattgtgmatgttaccttcctggtatctcccttgtgttcagcaacccagacattctccaactccagttgttgagggcgcttatgaacgcttcattatgcaggcatgattgatgaagtcattgaccattggtaattaagtcagtcttcggccactatttcttcctggagcccagggggtgaggctgacagttccaagcctctaatcacatggtttgttcttctgacaacaaccacccctttttctgaagctgtctaggagctttcagtcacccagtcatctcagtaacatcaccaaatgcattcttactatggtgatcccaaaggtcttagaggctcttgtgttagaaacctgggactaagaccaaatattgaaacagaagatgccccatcactttcatcaccaaggcctttataagagcttgagaagctctgtgccaggatgaggggcagaaaccaaatgtgtatttcttttctttt

SEQ ID NO: 377193 - DNA, 548 bp, Homo sapiens
gtctcaaaaaaaaaaaaaaaaaccacacagggcaaggtatgtcgagaggggtacagaacttccatgtcctctattgtgcatgttaccttcctggtatcwcccttgtgttcagcaacccagacattctccaactccagttgttgagggcgcttatgaacgcttcattatgcaggcatgattgatgaagtcattgaccattggtaattaagtcagtcttcggccactatttcttcctggagcccagggggtgaggctgacagttccaagcctctaatcacatggtttgttcttctgacaacaaccacccctttttctgaagctgtctaggagctttcagtcacccagtcatctcagtaacatcaccaaatgcattcttactatggtgatcccaaaggtcttagaggctcttgtgttagaaacctgggactaagaccaaatattgaaacagaagatgccccatcactttcatcaccaaggcctttataagagcttgagaagctctgtgccaggatgaggggcagaaaccaaatgtgtatttcttttctttt

SEQ ID NO: 377194 - DNA, 394 bp, Homo sapiens
cgagaggggtacagaacttccatgtcctctattgtgcatgttaccttcctggtatctcccttgtgttcagcaacccagacattctccaactccagttgttragggcgcttatgaacgcttcattatgcaggcatgattgatgaagtcattgaccattggtaattaagtcagtcttcggccactatttcttcctggagcccagggggtgaggctgacagttccaagcctctaatcacatggtttgttcttctgacaacaaccacccctttttctgaagctgtctaggagctttcagtcacccagtcatctcagtaacatcaccaaatgcattcttactatggtgatcccaaaggtcttagaggctcttgtgttagaaacctgggactaagaccaa

SEQ ID NO: 377195 - DNA, 364 bp, Homo sapiens
ggctcttgtgttagaaacctgggactaagaccaaatattgaaacagaagatgccccatcactttcatcaccaaggcctttataagagcttgagaagctctktgccaggatgaggggcagaaaccaaatgtgtatttcttttctttttcttttgaacacagagtctgtttcacccaatctggagtgcagtgatggtgttgtagctaactgcagcctcaaccacctgtgctcaagcaattctcccacctcagccttccaagcatctgggactacaggtgcacaccatccatgcccagctaatttttgtattttttttttttgtagagatgggatcttgttatattgccgaggctggtcttgaactc

SEQ ID NO: 377196 - DNA, 364 bp, Homo sapiens
ggctcttgtgttagaaacctgggactaagaccaaatattgaaacagaagatgccccatcactttcatcaccaaggcctttataagagcttgagaagctctgtgccaggatgaggggcagaaaccaaatgtgtatttcttttctttttcttttgaacacagagtctgtttcacccaatctggagtgcagtgatggtgttgtagctaactgcagcctcaaccacctgtgctcaagcaattctcccacctcagccttccaagcatctgggactacaggtgcacaccatcyatgcccagctaatttttgtattttttttttttgtagagatgggatcttgttatattgccgaggctggtcttgaactc

SEQ ID NO: 377197 - DNA, 260 bp, Homo sapiens
aaaacgtggccagactcttgtttaagtcagtcccygaccacatttctaatcagcaggtgaagcctttcaaccagggtctccagctgccttcactgctgttctctggccgacagaggtttcaggcctccctgagtcagagctcccagggggaggaccagactgttgtctttgctgttggggcaactcagccatttcagcattagggcttcagagtgtctgaggcaaccaggagtggaagtgaacacccagcatagcacagc

SEQ ID NO: 377198 - DNA, 471 bp, Homo sapiens
agtgcctgtttttgttcctcctgactagataagacttctcaacttgtctccagtcacatcttataggtgtgttcatactggcaacaagttcgtacctcagtggcacagagctcccagaggaaggggcaggctatcatcttccctggaaaatacaaggcaattagggactggaggggacccccagcataccacagcagcctgacagaaaagtggccagacagtctacttgatgggcaggtcctactgacctgggtctccagccagtycaccatcagagctatccagccagtagcaactcagcaattccctggacagagcttccaggagcaaacgaaattctccctgccattgcctctgcagtgaaactgccctttctaccctcagaatatcaagggagcaaagaccctaagtgccatattgacacctccaataagctgcggttgacccaatgaacaagccagtccatctccc

SEQ ID NO: 377199 - DNA, 471 bp, Homo sapiens
agtgcctgtttttgttcctcctgactagataagacttctcaacttgtctccagtcacatcttataggtgtgttcatactggcaacaagttcgtacctcagtggcacagagctcccagaggaaggggcaggctatcatcttccctggaaaatacaaggcaattagggactggaggggacccccagcataccacagcagcctgacagaaaagtggccagacagtctacttgatgggcaggtcctactgacctgggtctccagccagttcaccatcagagctatccagccagtagcaactcagcaattccctggacagagcttccaggagcaaacgaaattctcyctgccattgcctctgcagtgaaactgccctttctaccctcagaatatcaagggagcaaagaccctaagtgccatattgacacctccaataagctgcggttgacccaatgaacaagccagtccatctccc

SEQ ID NO: 377200 - DNA, 471 bp, Homo sapiens
agtgcctgtttttgttcctcctgactagataagacttctcaacttgtctccagtcacatcttataggtgtgttcatactggcaacaagttcgtacctcagtggcacagagctcccagaggaaggggcaggctatcatcttccctggaaaatacaaggcaattagggactggaggggacccccagcataccacagcagcctgacagaaaagtggccagacagtctacttgatgggcaggtcctactgacctgggtctccagccagttcaccatcagagctatccagccagtagcaactcagcaattccctggacagagcttccaggagcaaacgaaattctccctkccattgcctctgcagtgaaactgccctttctaccctcagaatatcaagggagcaaagaccctaagtgccatattgacacctccaataagctgcggttgacccaatgaacaagccagtccatctccc

SEQ ID NO: 377201 - DNA, 219 bp, Homo sapiens
cctttctaccctcagaatatcaagggagcaaagaccctaagtgccatattgacacctccaataagctgcggttgacccaatgaacaagccagtccatctcccacgggtaccacacaccccccactgctcatcaccagagagggaacactggcttggcctcasaaaacagaccctccatcctgggctgattacgctaagtgattgctaactcacatctct

SEQ ID NO: 377202 - DNA, 219 bp, Homo sapiens
cctttctaccctcagaatatcaagggagcaaagaccctaagtgccatattgacacctccaataagctgcggttgacccaatgaacaagccagtccatctcccacgggtaccacacaccccccactgctcatcaccagagagggaacactggcttggcctcagaamacagaccctccatcctgggctgattacgctaagtgattgctaactcacatctct

SEQ ID NO: 377203 - DNA, 599 bp, Homo sapiens
gtaccacgttaatttagaatacaaactagaaaaaaaagagaaaagtttactataaatagagaacagaaatttctttttmagataaaatttattgaagtaaaaaatgggttaaactttcataaagggcagagttttctaagaatttcaaagcaatccattcattgcaaaagatggctttaattacttaattttttttttttgagacagggtctcactctgtcaccaggctggagtgcagtggtgcagtcttggctcactgcaacctccacctcctggcttcaagcaattctcctgccttagtatcccaagtagctgggactacaggtgcgcatcaccacgcccagctaatttttgtatttttagtagagatggggtttccccatgttggccaggatggtcacgatctcctgacttgtgatctgcctgctttggcctccccaagtgctgggattacaagtatgagccaccatgcctggccattgtttaacctttgtactaataaaacactacctttctaaaatcatgtatatgcaatagatcaatattaactgcatttttgtcagattactctaaacaacattacacatatacatcctctg

SEQ ID NO: 377204 - DNA, 599 bp, Homo sapiens
gtaccacgttaatttagaatacaaactagaaaaaaaagagaaaagtttactataaatagagaacagaaatttctttttaagataaaatttattgaagtaaaaaatgggttaaactttyataaagggcagagttttctaagaatttcaaagcaatccattcattgcaaaagatggctttaattacttaattttttttttttgagacagggtctcactctgtcaccaggctggagtgcagtggtgcagtcttggctcactgcaacctccacctcctggcttcaagcaattctcctgccttagtatcccaagtagctgggactacaggtgcgcatcaccacgcccagctaatttttgtatttttagtagagatggggtttccccatgttggccaggatggtcacgatctcctgacttgtgatctgcctgctttggcctccccaagtgctgggattacaagtatgagccaccatgcctggccattgtttaacctttgtactaataaaacactacctttctaaaatcatgtatatgcaatagatcaatattaactgcatttttgtcagattactctaaacaacattacacatatacatcctctg

SEQ ID NO: 377205 - DNA, 599 bp, Homo sapiens
gtaccacgttaatttagaatacaaactagaaaaaaaagagaaaagtttactataaatagagaacagaaatttctttttaagataaaatttattgaagtaaaaaatgggttaaactttcataaagggcagagttttctaagaatttcaaagcaatccattcattgcaaaagatggctttaattacttaattttttttttttgagacagggtctcactctgtcaccaggctggagtgcagtggtgcagtcttggctcactgcaacctccacctcctggcttcaagcaattctcctgccttagtatcccaagtagctgggactacaggtgcgcatcaccacgcccagctaatttttgtatttttagtagagatggggtttccccatgttggccaggatggtcacgatctcctgacttgtgatctgcctgctttggcctccccaagtgctgggattacargtatgagccaccatgcctggccattgtttaacctttgtactaataaaacactacctttctaaaatcatgtatatgcaatagatcaatattaactgcatttttgtcagattactctaaacaacattacacatatacatcctctg

SEQ ID NO: 377206 - DNA, 675 bp, Homo sapiens
agaatggtattatttttaatatcacagagggtgcacaccccccttgtgatactgctcctaacatccaaggggtagaggatgaaattactcccaatatcacagtgggtatamaccccccgtggtattgttcctaatatccagggggtataggatgatagtactataaatatcgcaaggggtgtacaccccttctgatattgttactaatatccgtggggggagtcgatgatattacttccaatatcacagggcatgtacaccccccttgtgatattgttcctaatatcctgggaggagactacgatattactggcaatatcgcagggtgtgtgcattcccgtgatattgttcctaatgtccagcaagggagaaaatattactcccaatatggtgggggtgtacacttcccatgcgatatcgttcctaatatccatgggggaaaaggatgatattactctaaatgtcgcaggaggtgtaaaccgcccctgtgatattgttctcaatatccatggggggagagaatgatattactcccaatatcacaggtggtgtaaacccctcctgttatattattcctaatatccaggttgggagagaataatattacaggtaaaatagcagggggtgtacactccgcctgtgatattgttcctaatatctcggggaagagtggac

SEQ ID NO: 377207 - DNA, 523 bp, Homo sapiens
ttttaaacgcactcttagtcaactgaagtgttttargtaaagaacataattctttatttttctttccagctgctgctgtgttggacacttgctcccatctactttcttctctagaatccacgggtaagccacatctaacgaagagaatatttaaccataatgtcttaaagaaaaattgtatgatttaaaagattataaaactttattactgggctatttacacattttagttgtttctcataaaatgtataacattacaatatttactgaagtaggatatttttgtatgatatatatgatgataatttatagggtattttaaatgatgttttttagcctccttaagttttaagtggatcttgcaaatgaaaaccagtattattgagcttgacatactcaaattgcccaaatgtcagctgtttaaacaaccaagtcatcattgatactttagtaaaggttagtaaaggtcatcgaaggcttatttgcattttacagtttttattacttaggagagttaaggagt

SEQ ID NO: 377208 - DNA, 523 bp, Homo sapiens
ttttaaacgcactcttagtcaactgaagtgttttaagtaaagaacataattctttatttttctttccagctgctgctgtgttggacacttgctcccatctactttcttctctagaatccacgggtaagccacatctaacgaagagaatatttaaccataatgtcttaaagaaaaattgtatgatttaaaagattataaaactttattactgggctatttacacattttagttgtttctcataaaatgtataacattacaatatttactgaagtaggatatttttgtatgatatatatgatgataatttatagggtattttaaatgatgttttttarcctccttaagttttaagtggatcttgcaaatgaaaaccagtattattgagcttgacatactcaaattgcccaaatgtcagctgtttaaacaaccaagtcatcattgatactttagtaaaggttagtaaaggtcatcgaaggcttatttgcattttacagtttttattacttaggagagttaaggagt
